United States Patent Application Publication US 2006/0257851 A1 - sequence listing, part 7

SEQ ID NO: 208806 - RNA, 32 nt, Homo Sapiens
ggaccuggaugacacccgccucacuguggcag

SEQ ID NO: 208807 - RNA, 32 nt, Homo Sapiens
cgcuuggcggugagggcgggcucccgaguggc

SEQ ID NO: 208808 - RNA, 32 nt, Homo Sapiens
caccacccaggccuccaccuccccagggaguc

SEQ ID NO: 208809 - RNA, 32 nt, Homo Sapiens
guucugugguuucaguuaagcauuccaauaac

SEQ ID NO: 208810 - RNA, 32 nt, Homo Sapiens
guggaaaacauuuuaaagugaauuugucaaaa

SEQ ID NO: 208811 - RNA, 32 nt, Homo Sapiens
cugugguuucccgaggcuuccuugcuucccgc

SEQ ID NO: 208812 - RNA, 32 nt, Homo Sapiens
agcccagagauguccaccugggcuggacugcc

SEQ ID NO: 208813 - RNA, 32 nt, Homo Sapiens
ccucugccaguucgugugugggacgccggcca

SEQ ID NO: 208814 - RNA, 32 nt, Homo Sapiens
uacugaaaauuccauucuagauauucuuguuu

SEQ ID NO: 208815 - RNA, 32 nt, Homo Sapiens
aauaugggcuggcacugcugcagggcaagaac

SEQ ID NO: 208816 - RNA, 32 nt, Homo Sapiens
cccggacuggacccuccuccucuucuucuucc

SEQ ID NO: 208817 - RNA, 32 nt, Homo Sapiens
uugugauucuugauuuccuucauggguuaauu

SEQ ID NO: 208818 - RNA, 32 nt, Homo Sapiens
cacagucucccucucucuacggggccugaugg

SEQ ID NO: 208819 - RNA, 32 nt, Homo Sapiens
agcagcaggaccagcauggccucugcugccuc

SEQ ID NO: 208820 - RNA, 32 nt, Homo Sapiens
ccuuggcgcuaggcugcgcacucccuuucccc

SEQ ID NO: 208821 - RNA, 29 nt, Homo Sapiens
auauacauauguauguaugaugcuuuuca

SEQ ID NO: 208822 - RNA, 32 nt, Homo Sapiens
gacaccgacgccauuagcuacgcaccccugua

SEQ ID NO: 208823 - RNA, 32 nt, Homo Sapiens
cauuguacuccagccugggugacagagcaaga

SEQ ID NO: 208824 - RNA, 32 nt, Homo Sapiens
cucggcagguaguguacacugauaaagguagg

SEQ ID NO: 208825 - RNA, 32 nt, Homo Sapiens
uucccuccgccuuuggggcaggcgaucgagcg

SEQ ID NO: 208826 - RNA, 32 nt, Homo Sapiens
aagaaguauauuuaugaaucagcaaauguggu

SEQ ID NO: 208827 - RNA, 32 nt, Homo Sapiens
ucccccuaguuugugagaaacaucucaauaaa

SEQ ID NO: 208828 - RNA, 32 nt, Homo Sapiens
gacccgccuuccccggucccagccccucccag

SEQ ID NO: 208829 - RNA, 32 nt, Homo Sapiens
aucagugugaauggcaaauaaacaguuugaca

SEQ ID NO: 208830 - RNA, 32 nt, Homo Sapiens
uaaauaaaaaaguuuacagaucaaaugugaaa

SEQ ID NO: 208831 - RNA, 32 nt, Homo Sapiens
cuuuauguucuuccugccaucauuccuccuuu

SEQ ID NO: 208832 - RNA, 32 nt, Homo Sapiens
ugcgaagcgcucucggggucuuuccucagccu

SEQ ID NO: 208833 - RNA, 32 nt, Homo Sapiens
aaagacacauucaaucuugcauccuaauacaa

SEQ ID NO: 208834 - RNA, 32 nt, Homo Sapiens
gaaauaaauguguauugaaccuuuuacugcaa

SEQ ID NO: 208835 - RNA, 32 nt, Homo Sapiens
cauugcacuccagucugggugacagagcaaga

SEQ ID NO: 208836 - RNA, 32 nt, Homo Sapiens
aaaauaaaucugccuguaaauuaucuugaagu

SEQ ID NO: 208837 - RNA, 32 nt, Homo Sapiens
ucaccuggagcgaguagcgcgcggcguggaac

SEQ ID NO: 208838 - RNA, 32 nt, Homo Sapiens
cugcacuuugggaugccugaggucaggaguuc

SEQ ID NO: 208839 - RNA, 32 nt, Homo Sapiens
gacccaccuggagacuccacgggcucccggca

SEQ ID NO: 208840 - RNA, 32 nt, Homo Sapiens
cacaucgcgcccucgggcccugccaugucccu

SEQ ID NO: 208841 - RNA, 32 nt, Homo Sapiens
ccccgccgcagucgcgggccucucccggagaa

SEQ ID NO: 208842 - RNA, 29 nt, Homo Sapiens
uaucauuuaguugcuucuauaaaagacau

SEQ ID NO: 208843 - RNA, 32 nt, Homo Sapiens
ucgccaaggggcugcgcgaguacaccaagagu

SEQ ID NO: 208844 - RNA, 32 nt, Homo Sapiens
cccggguuccagcccgagccucgccgggucgc

SEQ ID NO: 208845 - RNA, 32 nt, Homo Sapiens
caacgggcgggugaaccugcgaccaguggugc

SEQ ID NO: 208846 - RNA, 32 nt, Homo Sapiens
uagaguccauggagcccggcccuggguuggcg

SEQ ID NO: 208847 - RNA, 32 nt, Homo Sapiens
guucacaaauaaugcuuaaaagacauaugcaa

SEQ ID NO: 208848 - RNA, 32 nt, Homo Sapiens
auuuaugcaaauaaaaucuuuaaauggguggc

SEQ ID NO: 208849 - RNA, 32 nt, Homo Sapiens
aaggccugacuucugcuggcaucaagaggugg

SEQ ID NO: 208850 - RNA, 32 nt, Homo Sapiens
uaguaauauggacaauaaaauccaggcuaagg

SEQ ID NO: 208851 - RNA, 32 nt, Homo Sapiens
aaacaagaggcacagcagcacuagcaacagca

SEQ ID NO: 208852 - RNA, 32 nt, Homo Sapiens
gaggggggcuccugggugccgggcaacccugu

SEQ ID NO: 208853 - RNA, 32 nt, Homo Sapiens
aucaaagccaucuguggguguugccuuccauc

SEQ ID NO: 208854 - RNA, 32 nt, Homo Sapiens
uguggccccucccccuccuucucacccuuaag

SEQ ID NO: 208855 - RNA, 32 nt, Homo Sapiens
aaguguggugcaaagauugaggugggaccaac

SEQ ID NO: 208856 - RNA, 32 nt, Homo Sapiens
cuaaagagauauacauucuggauacuugggag

SEQ ID NO: 208857 - RNA, 32 nt, Homo Sapiens
guaaccaggagccaguacggacuuuauucauc

SEQ ID NO: 208858 - RNA, 32 nt, Homo Sapiens
cgucacgggcgcccggcccguuaaaacgcugc

SEQ ID NO: 208859 - RNA, 32 nt, Homo Sapiens
uggcccagccacaacuagcugacaaagcuucc

SEQ ID NO: 208860 - RNA, 32 nt, Homo Sapiens
auagccacauucuccauuuuuguucuuguuuu

SEQ ID NO: 208861 - RNA, 32 nt, Homo Sapiens
guuaacuaauuuucuuuuuuccuuuuaguaau

SEQ ID NO: 208862 - RNA, 32 nt, Homo Sapiens
aagggugauauuaugacacugauacugcuauu

SEQ ID NO: 208863 - RNA, 32 nt, Homo Sapiens
gauugccugccagaggacugaccacagccugg

SEQ ID NO: 208864 - RNA, 32 nt, Homo Sapiens
uuuacguguagaucuuuuuuuuuuuuuucaaa

SEQ ID NO: 208865 - RNA, 32 nt, Homo Sapiens
uugugagcucccggcuguguggcaccgaggau

SEQ ID NO: 208866 - RNA, 32 nt, Homo Sapiens
ucugagaauguccuucuugguuugucagucau

SEQ ID NO: 208867 - RNA, 32 nt, Homo Sapiens
uuuuagcaggacuuaauuuuccuaaauuuauu

SEQ ID NO: 208868 - RNA, 32 nt, Homo Sapiens
ccagugacccagaucccagggaccucagucgg

SEQ ID NO: 208869 - RNA, 32 nt, Homo Sapiens
agcacagugucgggcacgcagaagggccccuu

SEQ ID NO: 208870 - RNA, 32 nt, Homo Sapiens
guuaacuagguccgcuuucaugugcaucagac

SEQ ID NO: 208871 - RNA, 30 nt, Homo Sapiens
uuucaauccaggagccuugagucuguguug

SEQ ID NO: 208872 - RNA, 32 nt, Homo Sapiens
caggugugaugcauuacaaaucucaggacuuu

SEQ ID NO: 208873 - RNA, 32 nt, Homo Sapiens
gguauacauucaaagaugauaauuacgacaug

SEQ ID NO: 208874 - RNA, 32 nt, Homo Sapiens
cuuuuauauauauaauuuuucuuauuauaaca

SEQ ID NO: 208875 - RNA, 32 nt, Homo Sapiens
guaaaaccuacuccccaaaaauguguggcuuu

SEQ ID NO: 208876 - RNA, 32 nt, Homo Sapiens
ucugcuccuaacuccugcccgccccguccguc

SEQ ID NO: 208877 - RNA, 30 nt, Homo Sapiens
uauuauuccuuucuuuggcaaagguuccaa

SEQ ID NO: 208878 - RNA, 32 nt, Homo Sapiens
uuguuaaaaauauuuucugaauuauuaugucu

SEQ ID NO: 208879 - RNA, 32 nt, Homo Sapiens
cugccucccacuuucuugggacuuggagggag

SEQ ID NO: 208880 - RNA, 32 nt, Homo Sapiens
guuagcuuuugucagauuucgucguuuccgca

SEQ ID NO: 208881 - RNA, 32 nt, Homo Sapiens
uuauauauaauuaaauacaacagugaucugaa

SEQ ID NO: 208882 - RNA, 32 nt, Homo Sapiens
ugagaucggcccgcgguucguggcccugcggg

SEQ ID NO: 208883 - RNA, 32 nt, Homo Sapiens
ccacuuuuacacaucagggaacguaugaacac

SEQ ID NO: 208884 - RNA, 32 nt, Homo Sapiens
gaugucccaagccaggcugcccuuccucauuu

SEQ ID NO: 208885 - RNA, 32 nt, Homo Sapiens
gaguaacgcagaccccaccguuuccuuccauu

SEQ ID NO: 208886 - RNA, 32 nt, Homo Sapiens
uuuauauaauuuccaauuuacagaaaaguuuc

SEQ ID NO: 208887 - RNA, 32 nt, Homo Sapiens
cugcccaggugugggugguucuggccaggaag

SEQ ID NO: 208888 - RNA, 32 nt, Homo Sapiens
uaaggauuuuaaaaaccuguuaaucuuuuuau

SEQ ID NO: 208889 - RNA, 32 nt, Homo Sapiens
cucaagacagaaacuaagugcuaacauuuccc

SEQ ID NO: 208890 - RNA, 32 nt, Homo Sapiens
gcaggcugccagcagcaacucccagccccaau

SEQ ID NO: 208891 - RNA, 32 nt, Homo Sapiens
cuaauucagaucucucccagagaacuacugga

SEQ ID NO: 208892 - RNA, 32 nt, Homo Sapiens
cuuaauaauaguuuuuaacguggacaucucuu

SEQ ID NO: 208893 - RNA, 32 nt, Homo Sapiens
auugcuguauguuauuucuugcucuguuaucu

SEQ ID NO: 208894 - RNA, 32 nt, Homo Sapiens
aaauacaucgacgaggaggaugaggacgauga

SEQ ID NO: 208895 - RNA, 32 nt, Homo Sapiens
acuugcauuccuauguaagauaggaggggcug

SEQ ID NO: 208896 - RNA, 32 nt, Homo Sapiens
gugccuuaauccugugacccagccccuuacac

SEQ ID NO: 208897 - RNA, 32 nt, Homo Sapiens
uaauuucacauuuuuguuaguuuaauauauac

SEQ ID NO: 208898 - RNA, 32 nt, Homo Sapiens
gccuggaggagcagucucggggccuauuauug

SEQ ID NO: 208899 - RNA, 32 nt, Homo Sapiens
aggucagcaccaucccuggccuccucacauag

SEQ ID NO: 208900 - RNA, 32 nt, Homo Sapiens
auguagaauaacaugaaaaauuggaggugcug

SEQ ID NO: 208901 - RNA, 32 nt, Homo Sapiens
ucaugaucuguuauauaucauuguuuucuguc

SEQ ID NO: 208902 - RNA, 32 nt, Homo Sapiens
aguacuguuaaguacuguuaaucuuuuacaua

SEQ ID NO: 208903 - RNA, 32 nt, Homo Sapiens
acucugggccuggccucaggccccuggugcuu

SEQ ID NO: 208904 - RNA, 32 nt, Homo Sapiens
cuugaucguauugguugauacacgaaucuaca

SEQ ID NO: 208905 - RNA, 32 nt, Homo Sapiens
aggcgucucccggaagacgaacuccgcagagc

SEQ ID NO: 208906 - RNA, 32 nt, Homo Sapiens
aacaggguuucucuggggcacauggacaugac

SEQ ID NO: 208907 - RNA, 31 nt, Homo Sapiens
ucugugcagaagguuuuuaucugaugcaguc

SEQ ID NO: 208908 - RNA, 32 nt, Homo Sapiens
uucacugacugacuuugaagcugcaucugcca

SEQ ID NO: 208909 - RNA, 32 nt, Homo Sapiens
ugcaccacuuuaaaauguguaauucaaugcau

SEQ ID NO: 208910 - RNA, 32 nt, Homo Sapiens
gccgcgcuccagcagcugcugccgcccagccc

SEQ ID NO: 208911 - RNA, 32 nt, Homo Sapiens
ucgagugucuccaagcaagauggcggaggagc

SEQ ID NO: 208912 - RNA, 32 nt, Homo Sapiens
uuuuaauuuucauuagccaaaaugcuaaugaa

SEQ ID NO: 208913 - RNA, 32 nt, Homo Sapiens
aaagaagaaguagaugaugaggcagauagcag

SEQ ID NO: 208914 - RNA, 32 nt, Homo Sapiens
uuugggggcauuagguuaauagacuuaauugc

SEQ ID NO: 208915 - RNA, 32 nt, Homo Sapiens
agauuuccuuuucuuuguuuucuuuugacuuu

SEQ ID NO: 208916 - RNA, 32 nt, Homo Sapiens
uuguguucccacaggcuucucuaggcuggggg

SEQ ID NO: 208917 - RNA, 32 nt, Homo Sapiens
cguggggcagcggcgagcggaaagggaagccg

SEQ ID NO: 208918 - RNA, 32 nt, Homo Sapiens
gagagccugcaagucccacgggccuacugggg

SEQ ID NO: 208919 - RNA, 32 nt, Homo Sapiens
aaaaaaucaaaauaaaaauuaaaugugagcaa

SEQ ID NO: 208920 - RNA, 32 nt, Homo Sapiens
ccuuaagcuuugugccccuggaugcgcuaaca

SEQ ID NO: 208921 - RNA, 32 nt, Homo Sapiens
aggggaaggaccaaggaugugcucuauagguc

SEQ ID NO: 208922 - RNA, 32 nt, Homo Sapiens
gacauuccucaaugaccucucccaaaccuccc

SEQ ID NO: 208923 - RNA, 32 nt, Homo Sapiens
uucgaaacaaaguaauauggaaaauauuuaaa

SEQ ID NO: 208924 - RNA, 32 nt, Homo Sapiens
auugguuguuaacuguugcugcugccuggugu

SEQ ID NO: 208925 - RNA, 32 nt, Homo Sapiens
uucugcccuuccacgaacuccuccuccauuuc

SEQ ID NO: 208926 - RNA, 32 nt, Homo Sapiens
uguucagcucuuauucaacaccagagaauuca

SEQ ID NO: 208927 - RNA, 32 nt, Homo Sapiens
ccccgccucuccccggcccccgccgcccuaug

SEQ ID NO: 208928 - RNA, 32 nt, Homo Sapiens
auauuuguuucauuuguuuuuauuccuaccuu

SEQ ID NO: 208929 - RNA, 32 nt, Homo Sapiens
gacccuaagaucuggggaaaggagguccugag

SEQ ID NO: 208930 - RNA, 32 nt, Homo Sapiens
gcaguaggggagagagcagagaaguacagguc

SEQ ID NO: 208931 - RNA, 32 nt, Homo Sapiens
auggcuucucguacacugacauccucucucua

SEQ ID NO: 208932 - RNA, 32 nt, Homo Sapiens
gaggcugggagcuucucuugggccugcugggu

SEQ ID NO: 208933 - RNA, 32 nt, Homo Sapiens
ccuacccccacuucucucaguuccuggcauga

SEQ ID NO: 208934 - RNA, 32 nt, Homo Sapiens
augccuagcuaauuuuuuguauuuuuaguaga

SEQ ID NO: 208935 - RNA, 32 nt, Homo Sapiens
accaugacuaccuucaccuggaacaucaacca

SEQ ID NO: 208936 - RNA, 32 nt, Homo Sapiens
ccucugugacuucaggaggcggcagcugggaa

SEQ ID NO: 208937 - RNA, 32 nt, Homo Sapiens
uuggacccuacugugacacaccuaccaugcgg

SEQ ID NO: 208938 - RNA, 32 nt, Homo Sapiens
gaaacgaucauccuggacaggaagugagaugg

SEQ ID NO: 208939 - RNA, 32 nt, Homo Sapiens
agccugcccagcugaaucuuggcuucuggacc

SEQ ID NO: 208940 - RNA, 32 nt, Homo Sapiens
ugacugcccucccuggguuacccucuuugcaa

SEQ ID NO: 208941 - RNA, 32 nt, Homo Sapiens
acuggucucuacagggcacaguucagcuccuc

SEQ ID NO: 208942 - RNA, 32 nt, Homo Sapiens
gugcuaaugcuucauccuguugcuggcagugg

SEQ ID NO: 208943 - RNA, 32 nt, Homo Sapiens
guuaaaucuaaaacuuguuugcuggucucaaa

SEQ ID NO: 208944 - RNA, 32 nt, Homo Sapiens
ugccgggcggggguugucgggugucaugggcg

SEQ ID NO: 208945 - RNA, 30 nt, Homo Sapiens
cuccuccacugccacuacagggaagugcau

SEQ ID NO: 208946 - RNA, 32 nt, Homo Sapiens
ucuucaagagacuugcauaaaagcagagguuu

SEQ ID NO: 208947 - RNA, 32 nt, Homo Sapiens
aaauaaagcgauugguuuuucuuaagguaaaa

SEQ ID NO: 208948 - RNA, 32 nt, Homo Sapiens
aguaacuuuuuuuuuuugccugugaauugagu

SEQ ID NO: 208949 - RNA, 32 nt, Homo Sapiens
aaaugccagaucugguggagggaagagagaag

SEQ ID NO: 208950 - RNA, 32 nt, Homo Sapiens
gagacagggucucacuguguugccuaggccgg

SEQ ID NO: 208951 - RNA, 32 nt, Homo Sapiens
acauucagcuguuugguuuuucguuuuucauu

SEQ ID NO: 208952 - RNA, 32 nt, Homo Sapiens
ugacuuacgcaggauucucagcccuugccugg

SEQ ID NO: 208953 - RNA, 32 nt, Homo Sapiens
ggccaccgagaggcuggggcuggggcugacca

SEQ ID NO: 208954 - RNA, 32 nt, Homo Sapiens
uuagacgccccgaaacugagcugcacguuucu

SEQ ID NO: 208955 - RNA, 30 nt, Homo Sapiens
ggauugugggauaagaucgcccuggugacg

SEQ ID NO: 208956 - RNA, 32 nt, Homo Sapiens
uauuggcucauaaaauuggacucuguaaaaca

SEQ ID NO: 208957 - RNA, 32 nt, Homo Sapiens
cucccaggugcaggcaugagccaggugcuggg

SEQ ID NO: 208958 - RNA, 32 nt, Homo Sapiens
gauaacaguauuuggaacugaagaccugaugg

SEQ ID NO: 208959 - RNA, 32 nt, Homo Sapiens
gcccgcaggagagaggcgcgggccagggcucu

SEQ ID NO: 208960 - RNA, 32 nt, Homo Sapiens
ggcggugcuugcagguggcagccaagagccuc

SEQ ID NO: 208961 - RNA, 32 nt, Homo Sapiens
guguccgcggggcccagcacuccccgcucugg

SEQ ID NO: 208962 - RNA, 31 nt, Homo Sapiens
ugcaggaugucucgccgcaagcaagcgaaac

SEQ ID NO: 208963 - RNA, 32 nt, Homo Sapiens
cuucuccuccaggagguccauaaggccacucu

SEQ ID NO: 208964 - RNA, 32 nt, Homo Sapiens
caccuuccacuugcucucuggaucaggcagau

SEQ ID NO: 208965 - RNA, 32 nt, Homo Sapiens
ccgucguucuuacugagucugcagcgggggag

SEQ ID NO: 208966 - RNA, 32 nt, Homo Sapiens
gccaagcucgguagagacguggcgccccaccc

SEQ ID NO: 208967 - RNA, 32 nt, Homo Sapiens
ccgguuucugucuacaagugugaugucuccau

SEQ ID NO: 208968 - RNA, 32 nt, Homo Sapiens
accucucugcugugggaagacugugcaauggc

SEQ ID NO: 208969 - RNA, 32 nt, Homo Sapiens
auccgugcugacaacagugucuuuggccugua

SEQ ID NO: 208970 - RNA, 32 nt, Homo Sapiens
uccccacaaccugcaaucugucgggcacucuu

SEQ ID NO: 208971 - RNA, 32 nt, Homo Sapiens
cacggugcucagugggugccagcccucagugu

SEQ ID NO: 208972 - RNA, 32 nt, Homo Sapiens
ggaaaaauguuggaaugggagucugaaauggg

SEQ ID NO: 208973 - RNA, 32 nt, Homo Sapiens
cagaaauccaaauuuguaugguagaccaaaaa

SEQ ID NO: 208974 - RNA, 32 nt, Homo Sapiens
cuggguaggugauucuaaucaucugcaguucu

SEQ ID NO: 208975 - RNA, 32 nt, Homo Sapiens
cugaguuuguuuuucaaagaucacuaaauuuu

SEQ ID NO: 208976 - RNA, 32 nt, Homo Sapiens
cagcgauuucaucuccguuuccccucaucacc

SEQ ID NO: 208977 - RNA, 32 nt, Homo Sapiens
uuguuucagggugucucagggucccucuguac

SEQ ID NO: 208978 - RNA, 32 nt, Homo Sapiens
agugguacgacccuuccagccggcuagccugc

SEQ ID NO: 208979 - RNA, 32 nt, Homo Sapiens
gcggggcucccgggccugagccaggucuguuc

SEQ ID NO: 208980 - RNA, 32 nt, Homo Sapiens
ggaggccucccggccccagccuccugccugcc

SEQ ID NO: 208981 - RNA, 29 nt, Homo Sapiens
ugaagcaugugguacagaggcaagagcag

SEQ ID NO: 208982 - RNA, 32 nt, Homo Sapiens
ggguggucguggccaugacagcggcuccagac

SEQ ID NO: 208983 - RNA, 32 nt, Homo Sapiens
ugggaccuugagcuggcugcugcaacacucug

SEQ ID NO: 208984 - RNA, 32 nt, Homo Sapiens
cgccugcucgcccuggcuccagcccucaccug

SEQ ID NO: 208985 - RNA, 32 nt, Homo Sapiens
uugaacugaaagaucuauauguuaagcuaaca

SEQ ID NO: 208986 - RNA, 32 nt, Homo Sapiens
gugaagacccugcugugucaucuguuagugag

SEQ ID NO: 208987 - RNA, 32 nt, Homo Sapiens
uucuaugauauuaaaaaauguacaguguuagg

SEQ ID NO: 208988 - RNA, 32 nt, Homo Sapiens
uuugcuaaugccaaaaugcucuggcuuuguau

SEQ ID NO: 208989 - RNA, 32 nt, Homo Sapiens
agcacuugauaaaagcacuauucccaaaauua

SEQ ID NO: 208990 - RNA, 32 nt, Homo Sapiens
acgucgccgcgguccugguucuaaaguccucg

SEQ ID NO: 208991 - RNA, 32 nt, Homo Sapiens
uugggaugucugggucuuccuggcuucaccug

SEQ ID NO: 208992 - RNA, 32 nt, Homo Sapiens
agcugagaccucaggggaggggcgcgcgguag

SEQ ID NO: 208993 - RNA, 32 nt, Homo Sapiens
acuuugccucuucuccugccucauucccugac

SEQ ID NO: 208994 - RNA, 30 nt, Homo Sapiens
ccuggagggaaggaggaugaguccugggag

SEQ ID NO: 208995 - RNA, 32 nt, Homo Sapiens
agggacucaggucuuccccaccccuucccaag

SEQ ID NO: 208996 - RNA, 32 nt, Homo Sapiens
gacccuggcucugagcucuccucccaucuguc

SEQ ID NO: 208997 - RNA, 32 nt, Homo Sapiens
uauuguacugucacuuuguucuugagguagua

SEQ ID NO: 208998 - RNA, 32 nt, Homo Sapiens
ggcaccuuuaaucgucuuugauauuucugaag

SEQ ID NO: 208999 - RNA, 32 nt, Homo Sapiens
cuccucaggacacaugugggccaaguagagag

SEQ ID NO: 209000 - RNA, 32 nt, Homo Sapiens
ccgcggcggggccagcuugccugccgguuuuc

SEQ ID NO: 209001 - RNA, 32 nt, Homo Sapiens
cucaaaguaaaauaaauggaaauaucaaaaaa

SEQ ID NO: 209002 - RNA, 32 nt, Homo Sapiens
aaauccugggucucuuggccuguccuguagcu

SEQ ID NO: 209003 - RNA, 32 nt, Homo Sapiens
cccucccgucuucuccucgccuuucacagucc

SEQ ID NO: 209004 - RNA, 32 nt, Homo Sapiens
uggcuccaauucaaauugaggauuuauguauu

SEQ ID NO: 209005 - RNA, 32 nt, Homo Sapiens
auguuguugcuuauaauagaaguuuuagauaa

SEQ ID NO: 209006 - RNA, 32 nt, Homo Sapiens
aauggauuuuaaaaaauaauucuuuaauggga

SEQ ID NO: 209007 - RNA, 32 nt, Homo Sapiens
cuguuccacuuguacugccccauccuugaauc

SEQ ID NO: 209008 - RNA, 32 nt, Homo Sapiens
uauuucagauauauuuucuccuuucaucuccu

SEQ ID NO: 209009 - RNA, 32 nt, Homo Sapiens
auccucucaggccuccucucccccgacaaaaa

SEQ ID NO: 209010 - RNA, 32 nt, Homo Sapiens
gagcuccgggugacgcggcugcgguagcugcg

SEQ ID NO: 209011 - RNA, 32 nt, Homo Sapiens
gcuuuucacaaaggcugaugucuuaacuguca

SEQ ID NO: 209012 - RNA, 29 nt, Homo Sapiens
ugaauuuuguucuucagaggccaacuuga

SEQ ID NO: 209013 - RNA, 29 nt, Homo Sapiens
aggcaugucacacggugaaagcaggagca

SEQ ID NO: 209014 - RNA, 30 nt, Homo Sapiens
auuccugcaggcaggaccuauaggcaccug

SEQ ID NO: 209015 - RNA, 32 nt, Homo Sapiens
cuggcgacugcacucucaggagcccaaaauca

SEQ ID NO: 209016 - RNA, 32 nt, Homo Sapiens
gucugugagcccggcgcgcgccgucggagccc

SEQ ID NO: 209017 - RNA, 32 nt, Homo Sapiens
gcaaaccuuuuggacaucauuuuauuuuaaua

SEQ ID NO: 209018 - RNA, 30 nt, Homo Sapiens
gacuuuaacguuccugccuaacggcucuaa

SEQ ID NO: 209019 - RNA, 32 nt, Homo Sapiens
uaaaauggauauggugauacacaccucgugga

SEQ ID NO: 209020 - RNA, 32 nt, Homo Sapiens
gacguugggcgacaggggcccagggucucagg

SEQ ID NO: 209021 - RNA, 32 nt, Homo Sapiens
aggguccccuccccgggccucugcuccucuau

SEQ ID NO: 209022 - RNA, 32 nt, Homo Sapiens
aucaccaugggagagggcaggacaggggcugg

SEQ ID NO: 209023 - RNA, 32 nt, Homo Sapiens
cugccaagaaacaaaguuuuggaugagcuuuu

SEQ ID NO: 209024 - RNA, 32 nt, Homo Sapiens
gaucucaaaauggcggccccgugcggaaacag

SEQ ID NO: 209025 - RNA, 32 nt, Homo Sapiens
uggcucugccaccucccugcucccggaccaca

SEQ ID NO: 209026 - RNA, 32 nt, Homo Sapiens
cugggaaacagauacgguccccugcccgguga

SEQ ID NO: 209027 - RNA, 32 nt, Homo Sapiens
cucaaggcggcugagaggguggucuuugagau

SEQ ID NO: 209028 - RNA, 32 nt, Homo Sapiens
aaaaucagaggaaacagaagauacgcucaagu

SEQ ID NO: 209029 - RNA, 32 nt, Homo Sapiens
cgcuccuggguccccggcaccccggccccgca

SEQ ID NO: 209030 - RNA, 32 nt, Homo Sapiens
cccuaaauauaaaaguccacacuucguuugug

SEQ ID NO: 209031 - RNA, 32 nt, Homo Sapiens
ggggccgcggguggaggucggggaugaggcag

SEQ ID NO: 209032 - RNA, 32 nt, Homo Sapiens
aucuggccugccuggaggagaaggaggaaccc

SEQ ID NO: 209033 - RNA, 32 nt, Homo Sapiens
cuuggcccgcgcggcccggcaugaagcggcgu

SEQ ID NO: 209034 - RNA, 32 nt, Homo Sapiens
ccuggggcgacuggaggaagccaggcgagugg

SEQ ID NO: 209035 - RNA, 32 nt, Homo Sapiens
ccaucugcgcccaggccacgugucccgaucug

SEQ ID NO: 209036 - RNA, 32 nt, Homo Sapiens
aaacauccaauuucucuguuuccucaggaagu

SEQ ID NO: 209037 - RNA, 32 nt, Homo Sapiens
aaauguaaguagauuguagauacuguuuuaua

SEQ ID NO: 209038 - RNA, 32 nt, Homo Sapiens
ucacacacauaguauugaucagaaaucuuaug

SEQ ID NO: 209039 - RNA, 32 nt, Homo Sapiens
uaaauccuuuuaccuuuuuuuuuucuugguaa

SEQ ID NO: 209040 - RNA, 32 nt, Homo Sapiens
uuggguuuucuuuugauaccaauuuauagcau

SEQ ID NO: 209041 - RNA, 32 nt, Homo Sapiens
gaugagaacaagcagcguacacgauucuguug

SEQ ID NO: 209042 - RNA, 32 nt, Homo Sapiens
guccugacaccaccuccccauccaccaccaaa

SEQ ID NO: 209043 - RNA, 32 nt, Homo Sapiens
uucugagcuaagucuggcauggaggggcaagg

SEQ ID NO: 209044 - RNA, 32 nt, Homo Sapiens
ggaacgcccuccccgacccucucccggccccu

SEQ ID NO: 209045 - RNA, 32 nt, Homo Sapiens
uucaguggacauuuguucuggguuaacaguaa

SEQ ID NO: 209046 - RNA, 32 nt, Homo Sapiens
auccugcgcgcccuccggcagcgcugcuccga

SEQ ID NO: 209047 - RNA, 32 nt, Homo Sapiens
gaaaauaacugugccccaagaagugcuccaga

SEQ ID NO: 209048 - RNA, 32 nt, Homo Sapiens
uaaagauacuaaaccagcauacccuuacucug

SEQ ID NO: 209049 - RNA, 32 nt, Homo Sapiens
auuucgagggcccgggggcgcgcgacgccaug

SEQ ID NO: 209050 - RNA, 32 nt, Homo Sapiens
gaagagaaggcacgacucuggugcaccgagca

SEQ ID NO: 209051 - RNA, 32 nt, Homo Sapiens
cggcacuccuucaucaccaucauccagggcca

SEQ ID NO: 209052 - RNA, 32 nt, Homo Sapiens
ccugccgccccucccccaggcauggcacaggg

SEQ ID NO: 209053 - RNA, 32 nt, Homo Sapiens
acacuucaggugguuugugcuucaaagucauu

SEQ ID NO: 209054 - RNA, 32 nt, Homo Sapiens
aagggccgcgucccccgcgcgcgaggccagag

SEQ ID NO: 209055 - RNA, 32 nt, Homo Sapiens
guggggcggaccgcgugcgcucggcggcugcg

SEQ ID NO: 209056 - RNA, 32 nt, Homo Sapiens
ggaugagaaauauuuuaaaaauguguaucacu

SEQ ID NO: 209057 - RNA, 32 nt, Homo Sapiens
uugccguuaggguaaaguucaaacaacucagc

SEQ ID NO: 209058 - RNA, 32 nt, Homo Sapiens
ccuuugaacucccugcuucucaucuuugauau

SEQ ID NO: 209059 - RNA, 31 nt, Homo Sapiens
aguggguacuagaaaaaacgagauugcacag

SEQ ID NO: 209060 - RNA, 32 nt, Homo Sapiens
acgcugaugaaacguaaaagguucuuugucag

SEQ ID NO: 209061 - RNA, 32 nt, Homo Sapiens
uaauagaggagcugcuuguuguuuguugacag

SEQ ID NO: 209062 - RNA, 32 nt, Homo Sapiens
acauucuucacugucuguuguuuaccuaccgu

SEQ ID NO: 209063 - RNA, 32 nt, Homo Sapiens
gccccuugcuccccggcagccgccgccgcccu

SEQ ID NO: 209064 - RNA, 32 nt, Homo Sapiens
auucaguagaaucuuuugugcuucaguaacuu

SEQ ID NO: 209065 - RNA, 32 nt, Homo Sapiens
agcuuucgucaguggcaaccacucuuaggcag

SEQ ID NO: 209066 - RNA, 32 nt, Homo Sapiens
cuggggcccucuggccuuuugcagcugaucca

SEQ ID NO: 209067 - RNA, 32 nt, Homo Sapiens
uuaccaggcaccaaaagaaguaaaagcaaaaa

SEQ ID NO: 209068 - RNA, 32 nt, Homo Sapiens
ugugauuaggauuuaaacuaauucagagaauu

SEQ ID NO: 209069 - RNA, 32 nt, Homo Sapiens
cuggcucagggugcguggguuccucaaggugg

SEQ ID NO: 209070 - RNA, 32 nt, Homo Sapiens
aaggggcucggaaaagcaguuuuuacaaagua

SEQ ID NO: 209071 - RNA, 32 nt, Homo Sapiens
cagugaaaagggaaugauaagauguauuuuga

SEQ ID NO: 209072 - RNA, 32 nt, Homo Sapiens
cagagagguuucgcagacucgguaacggccag

SEQ ID NO: 209073 - RNA, 32 nt, Homo Sapiens
ucauacuguaaaaagaguaugugaauaguagc

SEQ ID NO: 209074 - RNA, 32 nt, Homo Sapiens
ccaaaacaaccuccaguauauaccaaagcuuu

SEQ ID NO: 209075 - RNA, 32 nt, Homo Sapiens
uggccgcugaccaggaagcuuaugcaaagugg

SEQ ID NO: 209076 - RNA, 32 nt, Homo Sapiens
cacagaauugcucuggucccagccccacucgg

SEQ ID NO: 209077 - RNA, 32 nt, Homo Sapiens
cccagaucccaucacaguuuggcgauugugga

SEQ ID NO: 209078 - RNA, 32 nt, Homo Sapiens
caccagauauuuuguucuuaauuguguuccag

SEQ ID NO: 209079 - RNA, 32 nt, Homo Sapiens
auguuuuuuauaugcauagaaggaaagauuug

SEQ ID NO: 209080 - RNA, 32 nt, Homo Sapiens
cagaccugccagcagaugcugugugaggguga

SEQ ID NO: 209081 - RNA, 32 nt, Homo Sapiens
uguuggaucugaggaggcuuugguaaaacagu

SEQ ID NO: 209082 - RNA, 32 nt, Homo Sapiens
acucuugacuuuagaacaaacaugaggagccu

SEQ ID NO: 209083 - RNA, 32 nt, Homo Sapiens
uguggaggccccaauagugguuuggcgacccc

SEQ ID NO: 209084 - RNA, 32 nt, Homo Sapiens
gguccauaauucuauuugauauuuuaaaauuc

SEQ ID NO: 209085 - RNA, 32 nt, Homo Sapiens
caaaacaagucuuuuggcuuucuuuuuuguag

SEQ ID NO: 209086 - RNA, 29 nt, Homo Sapiens
ugggcugaauguaugucagugcuauaaau

SEQ ID NO: 209087 - RNA, 32 nt, Homo Sapiens
cccgcccucggcgcccccgccccuccagaaag

SEQ ID NO: 209088 - RNA, 32 nt, Homo Sapiens
aacaaagaaguaccuggaguggagagaguauu

SEQ ID NO: 209089 - RNA, 32 nt, Homo Sapiens
ccagacucaagauauggucugggcgcugucuu

SEQ ID NO: 209090 - RNA, 30 nt, Homo Sapiens
gcuaacggacucggcggcggcggcggcggc

SEQ ID NO: 209091 - RNA, 32 nt, Homo Sapiens
cccgggcccucccugucccaaagcccccuugg

SEQ ID NO: 209092 - RNA, 32 nt, Homo Sapiens
caagaaugagagaacccuccaggggacaagau

SEQ ID NO: 209093 - RNA, 32 nt, Homo Sapiens
ccgggcggucggagccgccgggagcuguaguu

SEQ ID NO: 209094 - RNA, 32 nt, Homo Sapiens
cauccagcugucuuguagcugcuuuccuccca

SEQ ID NO: 209095 - RNA, 32 nt, Homo Sapiens
aggcugccgagagggggcgcuuggagggccac

SEQ ID NO: 209096 - RNA, 32 nt, Homo Sapiens
uuaucuaaauuaaagccuuuaguaucaguguu

SEQ ID NO: 209097 - RNA, 32 nt, Homo Sapiens
gccuguaauccuagcaccuugggaggcugagg

SEQ ID NO: 209098 - RNA, 32 nt, Homo Sapiens
auguucaagaacuccuucuggacuguggauac

SEQ ID NO: 209099 - RNA, 32 nt, Homo Sapiens
ccucguucauuuccaaagcaguuaaggaaugg

SEQ ID NO: 209100 - RNA, 32 nt, Homo Sapiens
ugguucucaacucccggucccugaauagucac

SEQ ID NO: 209101 - RNA, 32 nt, Homo Sapiens
uauuauugcauaauuuugcugcuucucaauau

SEQ ID NO: 209102 - RNA, 32 nt, Homo Sapiens
uaaaauuguucaacauucaaacaguuauuuca

SEQ ID NO: 209103 - RNA, 32 nt, Homo Sapiens
cuaugcccaucucauugagcuuucucagucau

SEQ ID NO: 209104 - RNA, 32 nt, Homo Sapiens
ggacaaggugaccccucagcacuugaguuuac

SEQ ID NO: 209105 - RNA, 32 nt, Homo Sapiens
gacuuucaaauggagaaagauagcucucaaca

SEQ ID NO: 209106 - RNA, 32 nt, Homo Sapiens
gaggaacaaaggaccgugaaagcugcucugua

SEQ ID NO: 209107 - RNA, 32 nt, Homo Sapiens
ucacuucagggcaucgggacuggcuggcgccc

SEQ ID NO: 209108 - RNA, 32 nt, Homo Sapiens
ggccgccauggcggacagcugcaccgcgaggg

SEQ ID NO: 209109 - RNA, 32 nt, Homo Sapiens
accuuuucgccuggcauccgggcccgcuacuc

SEQ ID NO: 209110 - RNA, 32 nt, Homo Sapiens
uaugaaggcagcccaaggucucccagaggcuc

SEQ ID NO: 209111 - RNA, 32 nt, Homo Sapiens
uggcggccgugggcuccuggggagccacuggg

SEQ ID NO: 209112 - RNA, 32 nt, Homo Sapiens
cuaccaucacuuccucaucaugaaaacuggga

SEQ ID NO: 209113 - RNA, 32 nt, Homo Sapiens
gaguggccaaccccagcagguccuaaggugga

SEQ ID NO: 209114 - RNA, 30 nt, Homo Sapiens
ccugcugucuguguccucggagccccgccc

SEQ ID NO: 209115 - RNA, 32 nt, Homo Sapiens
aaggaaacauuuaaaugcuaucuuucaaagau

SEQ ID NO: 209116 - RNA, 32 nt, Homo Sapiens
uuagaaguauguuuuaagcaagcaaaaacaaa

SEQ ID NO: 209117 - RNA, 32 nt, Homo Sapiens
ucugauuuaguuagcauccacauaucauugag

SEQ ID NO: 209118 - RNA, 32 nt, Homo Sapiens
agaaucaauaauauuucuuucuuuaaauauau

SEQ ID NO: 209119 - RNA, 31 nt, Homo Sapiens
gccucugcaagguucggggguggcuucguuu

SEQ ID NO: 209120 - RNA, 32 nt, Homo Sapiens
cuuuuauuuauuuuuauuuuuaucccaugacu

SEQ ID NO: 209121 - RNA, 32 nt, Homo Sapiens
gugagcggcuccgucccggggccccggaagcu

SEQ ID NO: 209122 - RNA, 32 nt, Homo Sapiens
ucccggacggcucucggccccggagcccgguc

SEQ ID NO: 209123 - RNA, 32 nt, Homo Sapiens
ugccccugugaaaauacaccugcucucguggc

SEQ ID NO: 209124 - RNA, 32 nt, Homo Sapiens
gacuuucggcuucaggauccgcagcgugcacc

SEQ ID NO: 209125 - RNA, 32 nt, Homo Sapiens
ucuuaagccaauggaacccuugauuuccuacc

SEQ ID NO: 209126 - RNA, 32 nt, Homo Sapiens
aaaaccuugacaaugggucuucuuccauuaca

SEQ ID NO: 209127 - RNA, 32 nt, Homo Sapiens
gccuuugcuugcaccuccagcuggagaugggu

SEQ ID NO: 209128 - RNA, 32 nt, Homo Sapiens
gcagucugggacucaagggugggucuuuggag

SEQ ID NO: 209129 - RNA, 32 nt, Homo Sapiens
acuuaagacuucugccugagaagccuccuccc

SEQ ID NO: 209130 - RNA, 32 nt, Homo Sapiens
aggggccuggaggaggagggggaccagccagg

SEQ ID NO: 209131 - RNA, 32 nt, Homo Sapiens
acaguccuucugcuucuggggucuacccuggg

SEQ ID NO: 209132 - RNA, 32 nt, Homo Sapiens
auuucuuuaaucuuaaugcuuuaaacuaagcc

SEQ ID NO: 209133 - RNA, 32 nt, Homo Sapiens
cggccuuauucaucuuuuuuuaaauacauuau

SEQ ID NO: 209134 - RNA, 32 nt, Homo Sapiens
uaggugcuuuuagagaugcuggucugugugcu

SEQ ID NO: 209135 - RNA, 32 nt, Homo Sapiens
cccauuugacccccaggccuuugcccacgccg

SEQ ID NO: 209136 - RNA, 32 nt, Homo Sapiens
ucacggggaggggccagcgcggcggccugggc

SEQ ID NO: 209137 - RNA, 32 nt, Homo Sapiens
ccauaaugcaucccuuuaucucauggaaaugg

SEQ ID NO: 209138 - RNA, 31 nt, Homo Sapiens
ccggagaugagugccgaugaccacguuuuaa

SEQ ID NO: 209139 - RNA, 32 nt, Homo Sapiens
ggccccgccacgcgcgcacacgccccucgaug

SEQ ID NO: 209140 - RNA, 32 nt, Homo Sapiens
uauaauuuucuuuguguaauaaaaaugaaauc

SEQ ID NO: 209141 - RNA, 32 nt, Homo Sapiens
uaauuuuaaacgacugaagaaaacauuaggag

SEQ ID NO: 209142 - RNA, 32 nt, Homo Sapiens
ugagcuguuggcacccugcugcggccgucggu

SEQ ID NO: 209143 - RNA, 32 nt, Homo Sapiens
agacgcagccccaccaugguccuucggccuca

SEQ ID NO: 209144 - RNA, 32 nt, Homo Sapiens
gcuuccuccccgcucguccuccccgggcccag

SEQ ID NO: 209145 - RNA, 32 nt, Homo Sapiens
acaguuugcaaacagcuuuuaccuguuucacc

SEQ ID NO: 209146 - RNA, 32 nt, Homo Sapiens
gcggccgggguaggguggcggcuggcccagcc

SEQ ID NO: 209147 - RNA, 32 nt, Homo Sapiens
ccuucgcguugcuggggugcagugagacugcc

SEQ ID NO: 209148 - RNA, 32 nt, Homo Sapiens
ccaccagagaccacugcccccaacacucggac

SEQ ID NO: 209149 - RNA, 32 nt, Homo Sapiens
ggccggccagcauggcagagagguccugcaug

SEQ ID NO: 209150 - RNA, 32 nt, Homo Sapiens
ccccggcagcaggcgcgucgggacgccccgag

SEQ ID NO: 209151 - RNA, 32 nt, Homo Sapiens
ggggagaccccacucugacagugggcacacgg

SEQ ID NO: 209152 - RNA, 32 nt, Homo Sapiens
ccuuggacggagaggagagaguuguguuccug

SEQ ID NO: 209153 - RNA, 32 nt, Homo Sapiens
uguugggggugacaccaggacacaggaauagg

SEQ ID NO: 209154 - RNA, 32 nt, Homo Sapiens
uucauaauguauaaaauccucuaaguuggcaa

SEQ ID NO: 209155 - RNA, 32 nt, Homo Sapiens
cucuggcugccucccagcugggcuuguucucu

SEQ ID NO: 209156 - RNA, 32 nt, Homo Sapiens
gcuucuccaucccacuguggccucugugguau

SEQ ID NO: 209157 - RNA, 32 nt, Homo Sapiens
acugccuuccgcgcugccccagcuugccccau

SEQ ID NO: 209158 - RNA, 30 nt, Homo Sapiens
uaaggagagaagcuguuuuggugagauugg

SEQ ID NO: 209159 - RNA, 32 nt, Homo Sapiens
ggaagagaaauacugaccaacaacaaguugug

SEQ ID NO: 209160 - RNA, 32 nt, Homo Sapiens
gcugcccgcgagcugagccgccggaggaggag

SEQ ID NO: 209161 - RNA, 30 nt, Homo Sapiens
cuacaaaauaucccugggguauuuuagagu

SEQ ID NO: 209162 - RNA, 32 nt, Homo Sapiens
ggaauggaaauauggauagcagcauaaaguac

SEQ ID NO: 209163 - RNA, 32 nt, Homo Sapiens
caggaggacgcggaaggcccugggggugcagu

SEQ ID NO: 209164 - RNA, 32 nt, Homo Sapiens
gacuguugcuggacacgacgucuguguggagc

SEQ ID NO: 209165 - RNA, 32 nt, Homo Sapiens
cuccauuccuuccuuccuccagcccccagcaa

SEQ ID NO: 209166 - RNA, 32 nt, Homo Sapiens
cagauccuuuuccaucccacuccacuauguug

SEQ ID NO: 209167 - RNA, 32 nt, Homo Sapiens
cuggacuugggguuugggugguggugggacaa

SEQ ID NO: 209168 - RNA, 32 nt, Homo Sapiens
ggauuuucccauccaucacucccuuuguaggg

SEQ ID NO: 209169 - RNA, 32 nt, Homo Sapiens
uggguuuggagcugggaacagcacccacacca

SEQ ID NO: 209170 - RNA, 31 nt, Homo Sapiens
ucagcugcaagguacucuggugagucaccac

SEQ ID NO: 209171 - RNA, 32 nt, Homo Sapiens
gcacggaugcacggacuaaggcaccgaugaga

SEQ ID NO: 209172 - RNA, 32 nt, Homo Sapiens
uuuuggggaagagucauaauucuuuugaaaau

SEQ ID NO: 209173 - RNA, 32 nt, Homo Sapiens
cuucaguguguacagcaaauucuauagugcuu

SEQ ID NO: 209174 - RNA, 32 nt, Homo Sapiens
aucagaaacgagcuuugguuuuuacagauuca

SEQ ID NO: 209175 - RNA, 32 nt, Homo Sapiens
ugcaacaauggcaauggcuguccucauacugu

SEQ ID NO: 209176 - RNA, 32 nt, Homo Sapiens
ugcaaaaauauuccuggucauccacccauuaa

SEQ ID NO: 209177 - RNA, 31 nt, Homo Sapiens
ggagaggaccgcgaugaguccacuucagguc

SEQ ID NO: 209178 - RNA, 32 nt, Homo Sapiens
gagcacagacucccccuccccccggccccuca

SEQ ID NO: 209179 - RNA, 32 nt, Homo Sapiens
gcccaugcacugugugugcagacgcauggcgc

SEQ ID NO: 209180 - RNA, 32 nt, Homo Sapiens
auggaauauacagauguacuaagauagaaaga

SEQ ID NO: 209181 - RNA, 32 nt, Homo Sapiens
augcugcuccuguaauuuuguaagaauucaca

SEQ ID NO: 209182 - RNA, 32 nt, Homo Sapiens
agccgugagcagcagcuggcccgggcugcccg

SEQ ID NO: 209183 - RNA, 32 nt, Homo Sapiens
uuggggccaaaauauuaagcugaaaauaaugc

SEQ ID NO: 209184 - RNA, 32 nt, Homo Sapiens
ccugggccgcccgucguuccccggccccgagg

SEQ ID NO: 209185 - RNA, 32 nt, Homo Sapiens
cugaagguaaacucaagucuccggagacucaa

SEQ ID NO: 209186 - RNA, 32 nt, Homo Sapiens
acuggcauucucuuauccaaagagggaaagug

SEQ ID NO: 209187 - RNA, 32 nt, Homo Sapiens
gcuagccugcggucaggggcaaggcuuuugga

SEQ ID NO: 209188 - RNA, 32 nt, Homo Sapiens
aaaaagggucacgccucccacccccgcccccu

SEQ ID NO: 209189 - RNA, 32 nt, Homo Sapiens
gcucagugaccccacaggaagcuuacacauuu

SEQ ID NO: 209190 - RNA, 32 nt, Homo Sapiens
auauaguccauauggcacauuugauucuucca

SEQ ID NO: 209191 - RNA, 32 nt, Homo Sapiens
auccacuaaaagaaaaagagaaacaagaauuu

SEQ ID NO: 209192 - RNA, 32 nt, Homo Sapiens
gaucccacuagcugugacagccaggcccagaa

SEQ ID NO: 209193 - RNA, 32 nt, Homo Sapiens
ccaaggaugccaaccggccuuacugccugcuu

SEQ ID NO: 209194 - RNA, 32 nt, Homo Sapiens
uggggugguucaaauggaugacugaucuccug

SEQ ID NO: 209195 - RNA, 32 nt, Homo Sapiens
gcccuugcccccauccccacccgccccucucc

SEQ ID NO: 209196 - RNA, 32 nt, Homo Sapiens
ggguuuguuucuguuuucuuggguggggagca

SEQ ID NO: 209197 - RNA, 32 nt, Homo Sapiens
uugaucuauuggugauuaaucuuuuuguaauc

SEQ ID NO: 209198 - RNA, 31 nt, Homo Sapiens
agauuggaauaaaaauauaucuccuugacuc

SEQ ID NO: 209199 - RNA, 32 nt, Homo Sapiens
gacgcaaaugacuuuggauuuuugcauagagu

SEQ ID NO: 209200 - RNA, 32 nt, Homo Sapiens
gaggaagaaauuauucacuccagaugcaugcc

SEQ ID NO: 209201 - RNA, 32 nt, Homo Sapiens
gagcggcggacucggggcgcggggagucgagg

SEQ ID NO: 209202 - RNA, 32 nt, Homo Sapiens
cugccagcgaucucgcagcacuguguuuacag

SEQ ID NO: 209203 - RNA, 32 nt, Homo Sapiens
uuacaugacuaggcugauaaucuuauuuuuua

SEQ ID NO: 209204 - RNA, 32 nt, Homo Sapiens
cggaugggcuggcggcagcucuggugaauugu

SEQ ID NO: 209205 - RNA, 32 nt, Homo Sapiens
uugcuguuucuuuggcagcuaaguggggucuu

SEQ ID NO: 209206 - RNA, 32 nt, Homo Sapiens
ucauccuuuuuucucuucuguccaucagugca

SEQ ID NO: 209207 - RNA, 32 nt, Homo Sapiens
gccgcuucccgggaaccuggcgccgccggaac

SEQ ID NO: 209208 - RNA, 32 nt, Homo Sapiens
uucugaauguuuuucccacaccuaggauucca

SEQ ID NO: 209209 - RNA, 32 nt, Homo Sapiens
ccaugguucuuugcucuccccggguagugaug

SEQ ID NO: 209210 - RNA, 32 nt, Homo Sapiens
gccugggcucagcuccucccccugccguuggu

SEQ ID NO: 209211 - RNA, 32 nt, Homo Sapiens
gucgucgcgggccgggccccagcaaucccgcc

SEQ ID NO: 209212 - RNA, 32 nt, Homo Sapiens
gcgucagcgagccgugagaugcgugguccacc

SEQ ID NO: 209213 - RNA, 32 nt, Homo Sapiens
cgugcugaaugcuaugaaccuaccuccugaca

SEQ ID NO: 209214 - RNA, 32 nt, Homo Sapiens
ccguuggcgaggugacgugaccucuuucaucc

SEQ ID NO: 209215 - RNA, 32 nt, Homo Sapiens
uguggggcagagaggcagcugccugcuggaac

SEQ ID NO: 209216 - RNA, 32 nt, Homo Sapiens
ugagcagcccucgcgaccgggauaagggugug

SEQ ID NO: 209217 - RNA, 32 nt, Homo Sapiens
uuccccgcaccucgcccugccacugccuccca

SEQ ID NO: 209218 - RNA, 32 nt, Homo Sapiens
gaguuggccaggcgcaguggcucacaccugua

SEQ ID NO: 209219 - RNA, 32 nt, Homo Sapiens
aaaugcuucuaaaaugugauuaucgaccaugg

SEQ ID NO: 209220 - RNA, 32 nt, Homo Sapiens
gaaaacuuggagucggaggccguguucgaggc

SEQ ID NO: 209221 - RNA, 32 nt, Homo Sapiens
ccuuauuuuuuuucuuuuuguaaguuacuauu

SEQ ID NO: 209222 - RNA, 32 nt, Homo Sapiens
cugaaaggacaaaugugcuugguuuuacuauu

SEQ ID NO: 209223 - RNA, 30 nt, Homo Sapiens
gggaauaugcggcgcgcguggauccugcuc

SEQ ID NO: 209224 - RNA, 30 nt, Homo Sapiens
ucaagcuccuaucucuugauguuuucuugu

SEQ ID NO: 209225 - RNA, 32 nt, Homo Sapiens
caagcagucaguacuugcccacugacagucaa

SEQ ID NO: 209226 - RNA, 32 nt, Homo Sapiens
cucucccucccucuccacgugggcagggcagg

SEQ ID NO: 209227 - RNA, 32 nt, Homo Sapiens
caauucagcuacaaaacaaaauacuggaccca

SEQ ID NO: 209228 - RNA, 30 nt, Homo Sapiens
aucaaagacauucaacagagugaggcaggu

SEQ ID NO: 209229 - RNA, 32 nt, Homo Sapiens
auuuuauauuuuuuaaagucaguuuagguaau

SEQ ID NO: 209230 - RNA, 32 nt, Homo Sapiens
gacugaaucccaagugaauccaaauucugaac

SEQ ID NO: 209231 - RNA, 32 nt, Homo Sapiens
agcaagagagccccuuucugcugcugcauccc

SEQ ID NO: 209232 - RNA, 32 nt, Homo Sapiens
gcugggucuauggucgcuccgcggccgcuccg

SEQ ID NO: 209233 - RNA, 32 nt, Homo Sapiens
cuuagugucuuuaccuuucucauauuaacuca

SEQ ID NO: 209234 - RNA, 32 nt, Homo Sapiens
cuucaaaguauauugccuaauaugagucaugu

SEQ ID NO: 209235 - RNA, 32 nt, Homo Sapiens
ggccuccacuugguggccccagccccgauccc

SEQ ID NO: 209236 - RNA, 30 nt, Homo Sapiens
caggcagagaagccaggggugugaggaagc

SEQ ID NO: 209237 - RNA, 32 nt, Homo Sapiens
gggauccccucgccugggccguugugugggcg

SEQ ID NO: 209238 - RNA, 32 nt, Homo Sapiens
uuuuuaucauucuccuuguccuucucuuuuga

SEQ ID NO: 209239 - RNA, 32 nt, Homo Sapiens
cucacuaccugggugacaggaucauccgugcc

SEQ ID NO: 209240 - RNA, 32 nt, Homo Sapiens
uuuucuucagcacucccuguccaguguuguca

SEQ ID NO: 209241 - RNA, 32 nt, Homo Sapiens
guaugaguggaauggaauaaaauacauggaaa

SEQ ID NO: 209242 - RNA, 29 nt, Homo Sapiens
aucucccugggacagagcaccuggggaaa

SEQ ID NO: 209243 - RNA, 32 nt, Homo Sapiens
guccucaggggcccucccggucacgauccuca

SEQ ID NO: 209244 - RNA, 32 nt, Homo Sapiens
agggauagcauuaggagaaauaccugauguag

SEQ ID NO: 209245 - RNA, 32 nt, Homo Sapiens
aacagggaccagcucuccgcuuugcccccacg

SEQ ID NO: 209246 - RNA, 32 nt, Homo Sapiens
gccccuucauuucccuuacaaaagaauguuag

SEQ ID NO: 209247 - RNA, 32 nt, Homo Sapiens
gcugugaauggaccuucagcccugcccacccu

SEQ ID NO: 209248 - RNA, 32 nt, Homo Sapiens
uuccguguugggggcggcauggagcgggagcc

SEQ ID NO: 209249 - RNA, 32 nt, Homo Sapiens
cuuccagagaagccaugguuuuuuguauuggu

SEQ ID NO: 209250 - RNA, 30 nt, Homo Sapiens
acacagcauguguagcaccaguugauaauu

SEQ ID NO: 209251 - RNA, 32 nt, Homo Sapiens
ggacaggcugacccuccuccccgggguggcgu

SEQ ID NO: 209252 - RNA, 32 nt, Homo Sapiens
auauuuauauaacgugauacauuuggauaaac

SEQ ID NO: 209253 - RNA, 32 nt, Homo Sapiens
cuuccuuccaugaaugaacagucacagaagac

SEQ ID NO: 209254 - RNA, 32 nt, Homo Sapiens
ggcggugcgcggggcguugggucagcgggucu

SEQ ID NO: 209255 - RNA, 32 nt, Homo Sapiens
cacucugcccccgccuaccccggagccgugca

SEQ ID NO: 209256 - RNA, 32 nt, Homo Sapiens
cagaagaacaggauucuuaaucauucaacuuc

SEQ ID NO: 209257 - RNA, 32 nt, Homo Sapiens
ugcaacuccccaagagugcuuauuuaaguguu

SEQ ID NO: 209258 - RNA, 32 nt, Homo Sapiens
aggggcaacucuucuuuuuagcauucucauca

SEQ ID NO: 209259 - RNA, 32 nt, Homo Sapiens
gugugccuuucuguccaaauguugcauaguua

SEQ ID NO: 209260 - RNA, 32 nt, Homo Sapiens
uggagacugggucuugcucuguuacccaggcu

SEQ ID NO: 209261 - RNA, 32 nt, Homo Sapiens
guguucaguauaauuuuauuuuucucaaccuu

SEQ ID NO: 209262 - RNA, 32 nt, Homo Sapiens
uuucaggucccucgugggagggggcauaaggu

SEQ ID NO: 209263 - RNA, 32 nt, Homo Sapiens
gagagcugagccaugcacacaggugcagacac

SEQ ID NO: 209264 - RNA, 32 nt, Homo Sapiens
auuguuggacauuuggguugguucaaagucuu

SEQ ID NO: 209265 - RNA, 32 nt, Homo Sapiens
caaauaauauuuuuuaauugucuacuuuggau

SEQ ID NO: 209266 - RNA, 32 nt, Homo Sapiens
cgccggcccccggcccguacgccugucugguc

SEQ ID NO: 209267 - RNA, 31 nt, Homo Sapiens
ugaacaaccgggccggccccccgcgcccaac

SEQ ID NO: 209268 - RNA, 32 nt, Homo Sapiens
uccaaauuguauacuguaaauuuacauacguu

SEQ ID NO: 209269 - RNA, 32 nt, Homo Sapiens
cauaaucuuacucugugaaauagaggaauucg

SEQ ID NO: 209270 - RNA, 32 nt, Homo Sapiens
cuaaagcugugaaauuugaauuuugcuuuaaa

SEQ ID NO: 209271 - RNA, 32 nt, Homo Sapiens
caauaauccaacaaacgcuuccacuaacuagc

SEQ ID NO: 209272 - RNA, 32 nt, Homo Sapiens
cuccggauagugcugaagugaccuccaucgug

SEQ ID NO: 209273 - RNA, 32 nt, Homo Sapiens
cucuaacauauaauugugauauuuucaccugu

SEQ ID NO: 209274 - RNA, 32 nt, Homo Sapiens
ccuuuaaaaaaauuaucauaaaagagaaacuc

SEQ ID NO: 209275 - RNA, 32 nt, Homo Sapiens
agccuaaacaauugcaguugguguguuucauu

SEQ ID NO: 209276 - RNA, 32 nt, Homo Sapiens
uuuuuguaaaauguaauagcuagaaaauguua

SEQ ID NO: 209277 - RNA, 31 nt, Homo Sapiens
ccccaagcgcucugccugcccguccacucau

SEQ ID NO: 209278 - RNA, 32 nt, Homo Sapiens
ucccuggaggguggagauggagcaccugcccc

SEQ ID NO: 209279 - RNA, 32 nt, Homo Sapiens
uguuauuuaaaauuauuaaaaauaaauguaua

SEQ ID NO: 209280 - RNA, 32 nt, Homo Sapiens
cccuccauuaaaccaaaugcuggggaagaauc

SEQ ID NO: 209281 - RNA, 32 nt, Homo Sapiens
caguuggacagucugggaauguccagaaauaa

SEQ ID NO: 209282 - RNA, 32 nt, Homo Sapiens
ugcacgagcugugucuuccuucucuccgccgc

SEQ ID NO: 209283 - RNA, 32 nt, Homo Sapiens
guuuucccuagagauucuaucuucuuaaaacu

SEQ ID NO: 209284 - RNA, 32 nt, Homo Sapiens
ggccuggcugaggcgccgcggccgggucccuc

SEQ ID NO: 209285 - RNA, 32 nt, Homo Sapiens
ggcacaaaaucguuucaaaaacacauauuuuu

SEQ ID NO: 209286 - RNA, 32 nt, Homo Sapiens
aagguauaucguaaggguaguguuuguuuuug

SEQ ID NO: 209287 - RNA, 32 nt, Homo Sapiens
gacugaggagcaaggguggccuugaagaggcc

SEQ ID NO: 209288 - RNA, 32 nt, Homo Sapiens
gagcuggucuuugauauguuuccuuucaauuu

SEQ ID NO: 209289 - RNA, 32 nt, Homo Sapiens
caaccagaggguauaggucagagggauauaag

SEQ ID NO: 209290 - RNA, 32 nt, Homo Sapiens
caaagccuuucugaaacgcaguguacaaugaa

SEQ ID NO: 209291 - RNA, 32 nt, Homo Sapiens
uguugaaccauaaaguuugcaaaguaaagguu

SEQ ID NO: 209292 - RNA, 32 nt, Homo Sapiens
uccagggaagcuggccgaggguccuggcuccu

SEQ ID NO: 209293 - RNA, 32 nt, Homo Sapiens
uaagcccaucccucgcccccagccugagguga

SEQ ID NO: 209294 - RNA, 32 nt, Homo Sapiens
cagacauuaagaagagcagagcuggcacccug

SEQ ID NO: 209295 - RNA, 32 nt, Homo Sapiens
cuucaugccuacguaaggucuuugaaauagga

SEQ ID NO: 209296 - RNA, 32 nt, Homo Sapiens
agauuucuaucacuuccccgucuucuccagaa

SEQ ID NO: 209297 - RNA, 32 nt, Homo Sapiens
ugcgcucggagcggcgucccuuccaacccgcc

SEQ ID NO: 209298 - RNA, 32 nt, Homo Sapiens
ggaggcagugggagggcggagggcgggggccu

SEQ ID NO: 209299 - RNA, 32 nt, Homo Sapiens
cacuuugggagaccgaggcaggcggaucauga

SEQ ID NO: 209300 - RNA, 32 nt, Homo Sapiens
acacgucucuuugcccuuguuuacauaucuac

SEQ ID NO: 209301 - RNA, 32 nt, Homo Sapiens
agggccgcggccuggucuucugugcuucacca

SEQ ID NO: 209302 - RNA, 32 nt, Homo Sapiens
auuguaugcuccaucuacugagauagggaaaa

SEQ ID NO: 209303 - RNA, 32 nt, Homo Sapiens
ugcuucccgaaguggucuugcuuucuguuucg

SEQ ID NO: 209304 - RNA, 32 nt, Homo Sapiens
ugcugacaaggugaauaacagccccaagacca

SEQ ID NO: 209305 - RNA, 32 nt, Homo Sapiens
acccgcuguagccagagcugcuucacauaucu

SEQ ID NO: 209306 - RNA, 32 nt, Homo Sapiens
uggaagcaggagacagaacagugucugucccg

SEQ ID NO: 209307 - RNA, 32 nt, Homo Sapiens
uuaacaauauuuuuguucugaucuucuucccc

SEQ ID NO: 209308 - RNA, 32 nt, Homo Sapiens
cccucgcugcccagcccugccuguccccagcc

SEQ ID NO: 209309 - RNA, 32 nt, Homo Sapiens
cucauuauauuguagaaauuucaucagugagu

SEQ ID NO: 209310 - RNA, 32 nt, Homo Sapiens
acaucuuagaaucaaugaaauaccauauuuug

SEQ ID NO: 209311 - RNA, 32 nt, Homo Sapiens
gcaauuaaugaaaauaaaucaaauaauucaaa

SEQ ID NO: 209312 - RNA, 32 nt, Homo Sapiens
agccauugccuggccucccccugcauuccugu

SEQ ID NO: 209313 - RNA, 32 nt, Homo Sapiens
acauaguguucccucucauccccaggguucgu

SEQ ID NO: 209314 - RNA, 32 nt, Homo Sapiens
uuucauaguugcuguaucauuguacauucuca

SEQ ID NO: 209315 - RNA, 32 nt, Homo Sapiens
caugugcacuguauuugccugcucagauaagc

SEQ ID NO: 209316 - RNA, 32 nt, Homo Sapiens
ggacccuuuccacagacgcaggccccggaacc

SEQ ID NO: 209317 - RNA, 32 nt, Homo Sapiens
accuaaacagcccaccaaugaccuaguuuaca

SEQ ID NO: 209318 - RNA, 32 nt, Homo Sapiens
ggcgggacguaccugcgaccgggaccaugagg

SEQ ID NO: 209319 - RNA, 32 nt, Homo Sapiens
agacuacagggucgcugccugcucuccugggg

SEQ ID NO: 209320 - RNA, 32 nt, Homo Sapiens
cuuucgggaccggcaggagcugcuacagcacu

SEQ ID NO: 209321 - RNA, 32 nt, Homo Sapiens
auuuucuguauauguaguagcuggcaauugca

SEQ ID NO: 209322 - RNA, 32 nt, Homo Sapiens
accuuuuuaauuuccagaacugcacaaugacc

SEQ ID NO: 209323 - RNA, 32 nt, Homo Sapiens
uuuauuauuauaauccaguuuuacaaaugugg

SEQ ID NO: 209324 - RNA, 32 nt, Homo Sapiens
gccagcugggaugggaacccaaggcuguccac

SEQ ID NO: 209325 - RNA, 32 nt, Homo Sapiens
ggggcccugaggggcgagggugcccgggcuuc

SEQ ID NO: 209326 - RNA, 32 nt, Homo Sapiens
uggggugggggagagggaaaggauuugggauc

SEQ ID NO: 209327 - RNA, 32 nt, Homo Sapiens
gguccauguccuucccucccccaccccgccuc

SEQ ID NO: 209328 - RNA, 32 nt, Homo Sapiens
cuguuccauuuucuuuggauucccuauucaca

SEQ ID NO: 209329 - RNA, 32 nt, Homo Sapiens
ccagcccuagaacucagcguugccaggugugc

SEQ ID NO: 209330 - RNA, 32 nt, Homo Sapiens
ggaacaucucaaaggaguucgucugcaaauuc

SEQ ID NO: 209331 - RNA, 32 nt, Homo Sapiens
cauccccugccagcaugguggggugacacgag

SEQ ID NO: 209332 - RNA, 32 nt, Homo Sapiens
uuugauuauuuuuucauuguuaaauaggcaac

SEQ ID NO: 209333 - RNA, 32 nt, Homo Sapiens
ucuuacagaaacaaacagucguugcugucaaa

SEQ ID NO: 209334 - RNA, 32 nt, Homo Sapiens
gucucugaucagagccgacaccagacgugauu

SEQ ID NO: 209335 - RNA, 32 nt, Homo Sapiens
agaguacauuagcaguaauuagacauuaugag

SEQ ID NO: 209336 - RNA, 32 nt, Homo Sapiens
augaccccauccccgccugcuuccucacuccu

SEQ ID NO: 209337 - RNA, 32 nt, Homo Sapiens
uuuuuggaagugaauaaaacuuguuuuagaag

SEQ ID NO: 209338 - RNA, 32 nt, Homo Sapiens
acugcccugcuggaauucagacuugcaugggu

SEQ ID NO: 209339 - RNA, 32 nt, Homo Sapiens
gugggcgagcgcguggugcuggagguggagua

SEQ ID NO: 209340 - RNA, 32 nt, Homo Sapiens
accaugaauucucccuggacaagcugcugccu

SEQ ID NO: 209341 - RNA, 32 nt, Homo Sapiens
cuuugcacguacucagucauuggugucuuugg

SEQ ID NO: 209342 - RNA, 32 nt, Homo Sapiens
cacacacacacacacgcacacacacacacauc

SEQ ID NO: 209343 - RNA, 32 nt, Homo Sapiens
agggaggcagguggacgcugcagaccccaggu

SEQ ID NO: 209344 - RNA, 32 nt, Homo Sapiens
cgccuuccccuacacgcggcggguauauucug

SEQ ID NO: 209345 - RNA, 32 nt, Homo Sapiens
uuccaaagacaaugcaaaaaacuucagcacug

SEQ ID NO: 209346 - RNA, 32 nt, Homo Sapiens
aaagggaacaccuggcauucugugguguuucg

SEQ ID NO: 209347 - RNA, 32 nt, Homo Sapiens
agccucccagccugggcccccggcggcgccgu

SEQ ID NO: 209348 - RNA, 32 nt, Homo Sapiens
uucaugccccugugccgcauagccucaccucu

SEQ ID NO: 209349 - RNA, 32 nt, Homo Sapiens
agaacccucccacagcacauccuacccggaag

SEQ ID NO: 209350 - RNA, 32 nt, Homo Sapiens
cuucccguuccuccccgcagugguuuugaaau

SEQ ID NO: 209351 - RNA, 32 nt, Homo Sapiens
caauccucaccuaacaguuacuuuacaauuaa

SEQ ID NO: 209352 - RNA, 32 nt, Homo Sapiens
ggguccaggggaggccuuccagggacgaagaa

SEQ ID NO: 209353 - RNA, 32 nt, Homo Sapiens
ugcccuuccuucccucccuguaccaccugaaa

SEQ ID NO: 209354 - RNA, 32 nt, Homo Sapiens
cucauagagauuaaaugaucacuaugguccuu

SEQ ID NO: 209355 - RNA, 32 nt, Homo Sapiens
uacuggccgugcggcccggaaccgccacucuc

SEQ ID NO: 209356 - RNA, 32 nt, Homo Sapiens
gauugcacccuggcgagcuuaccaagggccug

SEQ ID NO: 209357 - RNA, 32 nt, Homo Sapiens
agaaagucaaggaagaaaagaacggccuugcc

SEQ ID NO: 209358 - RNA, 32 nt, Homo Sapiens
ucuuuucauaauuaaaaagagccuuacuuucu

SEQ ID NO: 209359 - RNA, 32 nt, Homo Sapiens
caguucuugccuaucaucugaguauauggacu

SEQ ID NO: 209360 - RNA, 32 nt, Homo Sapiens
ccaccgcucucguuuuucuguaucgcuuuuau

SEQ ID NO: 209361 - RNA, 32 nt, Homo Sapiens
cauagaagcuauuuaaugauuaaagucauuug

SEQ ID NO: 209362 - RNA, 32 nt, Homo Sapiens
cuguacuuuaugacuuguuucccuaugguggu

SEQ ID NO: 209363 - RNA, 32 nt, Homo Sapiens
cgaacggggaucugguggaaucgagggugaaa

SEQ ID NO: 209364 - RNA, 32 nt, Homo Sapiens
uagagacaggguuuuaccauguuggucaggcu

SEQ ID NO: 209365 - RNA, 32 nt, Homo Sapiens
ugcugagacagagauggaagccaggacaaggg

SEQ ID NO: 209366 - RNA, 32 nt, Homo Sapiens
ucagugggccauggaagaaaccucauauauca

SEQ ID NO: 209367 - RNA, 29 nt, Homo Sapiens
ggcauuauaaguuuauauuuauuaacucu

SEQ ID NO: 209368 - RNA, 32 nt, Homo Sapiens
aauccggcggguggggggcagaaguugcagug

SEQ ID NO: 209369 - RNA, 32 nt, Homo Sapiens
ccuuuuucuauauuuuuauauucauguguaaa

SEQ ID NO: 209370 - RNA, 32 nt, Homo Sapiens
guccucugcgcaccacccugaguuggauccuc

SEQ ID NO: 209371 - RNA, 32 nt, Homo Sapiens
aguuuacaaaguuagcacuuugaaguaaaacu

SEQ ID NO: 209372 - RNA, 32 nt, Homo Sapiens
uuugugaaccucucauccccacagcagaauca

SEQ ID NO: 209373 - RNA, 32 nt, Homo Sapiens
auuuaugcuggucaaaugugauuuaaauugga

SEQ ID NO: 209374 - RNA, 32 nt, Homo Sapiens
ggaaccaugagcucaguggucuuggaacagcu

SEQ ID NO: 209375 - RNA, 32 nt, Homo Sapiens
gaggugaaaggcacuucuuacauggcagcaag

SEQ ID NO: 209376 - RNA, 32 nt, Homo Sapiens
ugccggaaucagagccgcgggugagaucccca

SEQ ID NO: 209377 - RNA, 32 nt, Homo Sapiens
ccucaagugauccgcccuccccagccucccaa

SEQ ID NO: 209378 - RNA, 32 nt, Homo Sapiens
ugguuuuauaaacugaguuucuuagcauucgu

SEQ ID NO: 209379 - RNA, 32 nt, Homo Sapiens
gucaucuuauuuugauuuuaaaaauuaggaug

SEQ ID NO: 209380 - RNA, 32 nt, Homo Sapiens
ggccaggugcgguggcucaugucuguaauccc

SEQ ID NO: 209381 - RNA, 32 nt, Homo Sapiens
gccgggggcuugugggggcucaggaagauggg

SEQ ID NO: 209382 - RNA, 32 nt, Homo Sapiens
agguugucucuuccuccugucaguguggguug

SEQ ID NO: 209383 - RNA, 32 nt, Homo Sapiens
cagggaucuaccuggcuucucaguucuuuggu

SEQ ID NO: 209384 - RNA, 32 nt, Homo Sapiens
caaccgggcccgaucacccgccgcccggugcc

SEQ ID NO: 209385 - RNA, 32 nt, Homo Sapiens
uuccguccucgggggcucugggugcugcggag

SEQ ID NO: 209386 - RNA, 32 nt, Homo Sapiens
gguucgccaucugagcuaacaaacacgugugu

SEQ ID NO: 209387 - RNA, 32 nt, Homo Sapiens
aaaugaaaaugaaauaacaggaugauagugau

SEQ ID NO: 209388 - RNA, 32 nt, Homo Sapiens
gccgggccguccucggcggcagugucaggagc

SEQ ID NO: 209389 - RNA, 32 nt, Homo Sapiens
uauuuccauauguuagccauuuccugucuggu

SEQ ID NO: 209390 - RNA, 32 nt, Homo Sapiens
cugcagcgagccugguucgggcugggggcgga

SEQ ID NO: 209391 - RNA, 32 nt, Homo Sapiens
cauauacucauuuaacaugacauaucuauaau

SEQ ID NO: 209392 - RNA, 32 nt, Homo Sapiens
gagugcugugaaggcagugaaaagcaguugaa

SEQ ID NO: 209393 - RNA, 32 nt, Homo Sapiens
ccugagcgcggcggcagcggcggccuggcccu

SEQ ID NO: 209394 - RNA, 32 nt, Homo Sapiens
gagugugguugagguuugagguccuggucgag

SEQ ID NO: 209395 - RNA, 32 nt, Homo Sapiens
uacuauuuuaaacaucuaaaguaaauuauuug

SEQ ID NO: 209396 - RNA, 32 nt, Homo Sapiens
gcaguuauuuuuguuuguauuucgacaguauc

SEQ ID NO: 209397 - RNA, 32 nt, Homo Sapiens
cuccugaauuguauccuuuauaauaaacuggu

SEQ ID NO: 209398 - RNA, 32 nt, Homo Sapiens
gccucagcuucccagguggugcgcgccuguag

SEQ ID NO: 209399 - RNA, 32 nt, Homo Sapiens
gcgggucuagcggcggcccccggcgaaguuca

SEQ ID NO: 209400 - RNA, 32 nt, Homo Sapiens
uugaaaaauauguuuucuuugaccucuguacu

SEQ ID NO: 209401 - RNA, 27 nt, Homo Sapiens
uuaaugggcuucuucacuucuucuaau

SEQ ID NO: 209402 - RNA, 30 nt, Homo Sapiens
ggcccggugccagcuccgccggcgaccggu

SEQ ID NO: 209403 - RNA, 32 nt, Homo Sapiens
uugugucaaauuauaguuacagugaguuguuu

SEQ ID NO: 209404 - RNA, 32 nt, Homo Sapiens
cuucugcccucccuggagccuccacugccucu

SEQ ID NO: 209405 - RNA, 32 nt, Homo Sapiens
cugggaacgcucuuguugcuuggugcaacaga

SEQ ID NO: 209406 - RNA, 32 nt, Homo Sapiens
ucccggcccuggcggggugcuggacacuggcc

SEQ ID NO: 209407 - RNA, 32 nt, Homo Sapiens
guacuacagcuauauuugauuauguauggaua

SEQ ID NO: 209408 - RNA, 32 nt, Homo Sapiens
caugaggggaaagagggaaaaagagccuguuu

SEQ ID NO: 209409 - RNA, 32 nt, Homo Sapiens
gugggcaggacacguggugggggccacugaaa

SEQ ID NO: 209410 - RNA, 32 nt, Homo Sapiens
guguucuucaggguaguugggaucucaaaaga

SEQ ID NO: 209411 - RNA, 32 nt, Homo Sapiens
gcaccccccacagcuggagacggaggcucucc

SEQ ID NO: 209412 - RNA, 32 nt, Homo Sapiens
cggccugccugccugccugccugccucuccac

SEQ ID NO: 209413 - RNA, 31 nt, Homo Sapiens
cacucccaagccaccaaugcaguuaauaugc

SEQ ID NO: 209414 - RNA, 32 nt, Homo Sapiens
guaagaaccuaggagggaaaggaagauugagc

SEQ ID NO: 209415 - RNA, 32 nt, Homo Sapiens
ggucugagggucagcagcuguuagucuccuuc

SEQ ID NO: 209416 - RNA, 32 nt, Homo Sapiens
cagugggaagcagugggguaacgugcacagga

SEQ ID NO: 209417 - RNA, 29 nt, Homo Sapiens
uuugauuucauccaauauuccuucgaaag

SEQ ID NO: 209418 - RNA, 32 nt, Homo Sapiens
guuccuggggaauucacuucucuuccucccuc

SEQ ID NO: 209419 - RNA, 32 nt, Homo Sapiens
ccgggaucuuccaggaggaaagcgaaguugcg

SEQ ID NO: 209420 - RNA, 32 nt, Homo Sapiens
gacgcccaccgccaucggagacagcauccuca

SEQ ID NO: 209421 - RNA, 32 nt, Homo Sapiens
ccgacacccacgggcggagaucaccugcugcc

SEQ ID NO: 209422 - RNA, 32 nt, Homo Sapiens
ugacuguuucucauguuugaaugugugacuag

SEQ ID NO: 209423 - RNA, 32 nt, Homo Sapiens
aaggagguaggaugaauugaucauuauaaaga

SEQ ID NO: 209424 - RNA, 32 nt, Homo Sapiens
gccacgagcucgcgucucggcuggggcugcgg

SEQ ID NO: 209425 - RNA, 32 nt, Homo Sapiens
cgcagcaaaccuucccagcagcccuugagcca

SEQ ID NO: 209426 - RNA, 32 nt, Homo Sapiens
uccagguguggaccggccgcagcccccacuga

SEQ ID NO: 209427 - RNA, 32 nt, Homo Sapiens
uugcggccgagccggggcgcgccgggaaaggc

SEQ ID NO: 209428 - RNA, 32 nt, Homo Sapiens
gcaaaaauauaaaauaguuguccauauuuuca

SEQ ID NO: 209429 - RNA, 32 nt, Homo Sapiens
uggcacuauaaagaacaaaauaaaauaauaau

SEQ ID NO: 209430 - RNA, 32 nt, Homo Sapiens
agucaaggagaugagcguccuaaggcauguug

SEQ ID NO: 209431 - RNA, 32 nt, Homo Sapiens
uaaaaacaaaaauuauugauugcuuuuuugua

SEQ ID NO: 209432 - RNA, 32 nt, Homo Sapiens
auugauaaaaguauagcagcauccucuacuga

SEQ ID NO: 209433 - RNA, 32 nt, Homo Sapiens
uuguuuuaaaauagaaaaaauaaaaugcuucu

SEQ ID NO: 209434 - RNA, 32 nt, Homo Sapiens
gcgguggggcucgggggcgcguccacguggcc

SEQ ID NO: 209435 - RNA, 29 nt, Homo Sapiens
cauugaauagugaucauuuauuaaaugau

SEQ ID NO: 209436 - RNA, 30 nt, Homo Sapiens
aaaacuuucugugcucucaaagcuugagcc

SEQ ID NO: 209437 - RNA, 32 nt, Homo Sapiens
cgcgggcacucucggcggcagccucgggggcu

SEQ ID NO: 209438 - RNA, 32 nt, Homo Sapiens
cgcccaccacgugcacugugcugcugcuggca

SEQ ID NO: 209439 - RNA, 32 nt, Homo Sapiens
gagacgcacugacucugccagaggcccagccc

SEQ ID NO: 209440 - RNA, 32 nt, Homo Sapiens
cgugccggagaggagaaagggcccgacugccc

SEQ ID NO: 209441 - RNA, 30 nt, Homo Sapiens
agauauagugacaguaccaagaguaccagg

SEQ ID NO: 209442 - RNA, 32 nt, Homo Sapiens
cccgggcuugcaccaccagucuucaccuccac

SEQ ID NO: 209443 - RNA, 32 nt, Homo Sapiens
uaguugauagucuguauucaguucagacuucu

SEQ ID NO: 209444 - RNA, 32 nt, Homo Sapiens
ccucuguucccucccucagccauccaauucuu

SEQ ID NO: 209445 - RNA, 32 nt, Homo Sapiens
uuugcagcugcccuucccuccccguuuuucau

SEQ ID NO: 209446 - RNA, 32 nt, Homo Sapiens
uucuuuuggcccuccgcccccgcaggcuucug

SEQ ID NO: 209447 - RNA, 32 nt, Homo Sapiens
ugagugauaauccagcuagugugcagucauuu

SEQ ID NO: 209448 - RNA, 32 nt, Homo Sapiens
ggcugcuucagcggcgggcgggcgccagaaag

SEQ ID NO: 209449 - RNA, 27 nt, Homo Sapiens
acaguauccuucuucccuccuccccug

SEQ ID NO: 209450 - RNA, 32 nt, Homo Sapiens
agggaaaugcccaagauguccugaucugacua

SEQ ID NO: 209451 - RNA, 32 nt, Homo Sapiens
cggggucggcgccccucuccguguggagccca

SEQ ID NO: 209452 - RNA, 32 nt, Homo Sapiens
gggaauuuggcagggaagacaccuggguuuuu

SEQ ID NO: 209453 - RNA, 32 nt, Homo Sapiens
agcaaaaacaaaugggaaaaugucuuaaaaaa

SEQ ID NO: 209454 - RNA, 32 nt, Homo Sapiens
uuugcauauaaugugauuuaauuuauugcugu

SEQ ID NO: 209455 - RNA, 32 nt, Homo Sapiens
agaagaugagagauuauucguuauagaauuga

SEQ ID NO: 209456 - RNA, 32 nt, Homo Sapiens
ugacccguugcccuguaaccacuuucuuuccu

SEQ ID NO: 209457 - RNA, 32 nt, Homo Sapiens
ucccugcaguugcaaauuccugggcucaagug

SEQ ID NO: 209458 - RNA, 32 nt, Homo Sapiens
agccugcggccacugcaauucguuaaucccuu

SEQ ID NO: 209459 - RNA, 32 nt, Homo Sapiens
uggccucuggggaucugcugggcagauguccc

SEQ ID NO: 209460 - RNA, 32 nt, Homo Sapiens
uguauguuuacuauguugccagagaggaugcu

SEQ ID NO: 209461 - RNA, 30 nt, Homo Sapiens
uaagaugggagaacuggaccaugaaccgua

SEQ ID NO: 209462 - RNA, 32 nt, Homo Sapiens
ugcuuuuggggauauacaaauagcugcauaug

SEQ ID NO: 209463 - RNA, 27 nt, Homo Sapiens
uuguuguugcuuacuguuaccuuuaug

SEQ ID NO: 209464 - RNA, 32 nt, Homo Sapiens
cugagcgaggagccugcagaccaagaaucaga

SEQ ID NO: 209465 - RNA, 32 nt, Homo Sapiens
gaaaggcuggggcuugcccuuagacgucacau

SEQ ID NO: 209466 - RNA, 32 nt, Homo Sapiens
guaggaaacacuucaauguaguauaagagucu

SEQ ID NO: 209467 - RNA, 32 nt, Homo Sapiens
ggggaguuggccccugcccaccccguguugua

SEQ ID NO: 209468 - RNA, 32 nt, Homo Sapiens
uccccccaccuggccugcucacggggccuugg

SEQ ID NO: 209469 - RNA, 32 nt, Homo Sapiens
gcccucucgcucccccacccagcccacccauu

SEQ ID NO: 209470 - RNA, 32 nt, Homo Sapiens
auugggcauuauaaguuuauauuuauuaacuc

SEQ ID NO: 209471 - RNA, 32 nt, Homo Sapiens
guggauucucccugggccucagugugcccauc

SEQ ID NO: 209472 - RNA, 32 nt, Homo Sapiens
uuaaggaacaaaugaaaacucugggcugggug

SEQ ID NO: 209473 - RNA, 32 nt, Homo Sapiens
cuuggagcauuggguaucugaugucugcacca

SEQ ID NO: 209474 - RNA, 32 nt, Homo Sapiens
caaccccaaaacuuggauggaggcuaaauaac

SEQ ID NO: 209475 - RNA, 32 nt, Homo Sapiens
aucuaaauauauugcuguuuggguuagcacaa

SEQ ID NO: 209476 - RNA, 32 nt, Homo Sapiens
ccccagacaaaggcuuggccggcggccccggc

SEQ ID NO: 209477 - RNA, 32 nt, Homo Sapiens
gcggcgggaacauggaggagcugcugaggcgc

SEQ ID NO: 209478 - RNA, 32 nt, Homo Sapiens
ggguggagcgcggaagccacgccgcaggucca

SEQ ID NO: 209479 - RNA, 32 nt, Homo Sapiens
ugcuggagggcagaaggcagaagugagcaugu

SEQ ID NO: 209480 - RNA, 32 nt, Homo Sapiens
acugggcagggugggggcaacccagaggaccc

SEQ ID NO: 209481 - RNA, 32 nt, Homo Sapiens
gcgagccgcccggcacucccgcaguccagccg

SEQ ID NO: 209482 - RNA, 32 nt, Homo Sapiens
ucccaaagucauaagagcuuccuacuguuugu

SEQ ID NO: 209483 - RNA, 32 nt, Homo Sapiens
gugccugccugccuauggaauggagcuggguu

SEQ ID NO: 209484 - RNA, 32 nt, Homo Sapiens
uccacauggaaaacaucagggagugacaaucc

SEQ ID NO: 209485 - RNA, 32 nt, Homo Sapiens
aacucaaccuacugccaaccaagaccugacug

SEQ ID NO: 209486 - RNA, 32 nt, Homo Sapiens
aaccaguuauauccauugccacagcaauacug

SEQ ID NO: 209487 - RNA, 32 nt, Homo Sapiens
agccagugcgcgugcgcggcggcggccuccgc

SEQ ID NO: 209488 - RNA, 32 nt, Homo Sapiens
auuuuugccaggaagaugaaaaucacauagua

SEQ ID NO: 209489 - RNA, 32 nt, Homo Sapiens
aacuguuccaacaugacuauuuugaauuccca

SEQ ID NO: 209490 - RNA, 32 nt, Homo Sapiens
uucagucccagccccagugcgcuuccucuguu

SEQ ID NO: 209491 - RNA, 32 nt, Homo Sapiens
cagccacccaccccguggccagagcagggugg

SEQ ID NO: 209492 - RNA, 32 nt, Homo Sapiens
gggggacacagugucacuaugucacccagucc

SEQ ID NO: 209493 - RNA, 32 nt, Homo Sapiens
ucuucagcacccaauuaugcaagcauugcagu

SEQ ID NO: 209494 - RNA, 32 nt, Homo Sapiens
gggcugcuuccacuccuccacuccaguaguau

SEQ ID NO: 209495 - RNA, 32 nt, Homo Sapiens
uuuuuuggaaaaccuuuuucacuccauacuca

SEQ ID NO: 209496 - RNA, 32 nt, Homo Sapiens
ucugguuuaaugucuuuuuuuucuuaugugcu

SEQ ID NO: 209497 - RNA, 30 nt, Homo Sapiens
ggggaagucugugcuggcaucuccucauug

SEQ ID NO: 209498 - RNA, 32 nt, Homo Sapiens
accuccugccccaccccucccugcaucuggau

SEQ ID NO: 209499 - RNA, 32 nt, Homo Sapiens
uaccucacuccagcccacuuccuagaacaaug

SEQ ID NO: 209500 - RNA, 32 nt, Homo Sapiens
gucgcguuuccccugugcaggcucaagagcug

SEQ ID NO: 209501 - RNA, 32 nt, Homo Sapiens
agcaggagccuggaucaggcacuuccugccuc

SEQ ID NO: 209502 - RNA, 32 nt, Homo Sapiens
gcuuagcagaacuauucagauugucaguagua

SEQ ID NO: 209503 - RNA, 32 nt, Homo Sapiens
aaaucucgcucuuguugcccaggcuggagugc

SEQ ID NO: 209504 - RNA, 32 nt, Homo Sapiens
cgucgucccugcccuccgggaguuuguggucu

SEQ ID NO: 209505 - RNA, 32 nt, Homo Sapiens
guccccuguucuccccgcucaggugcggcgcu

SEQ ID NO: 209506 - RNA, 32 nt, Homo Sapiens
gcccgcggcgcgcgccucucccggacccugca

SEQ ID NO: 209507 - RNA, 32 nt, Homo Sapiens
augauaggaaaugggagaacucggauuguuaa

SEQ ID NO: 209508 - RNA, 32 nt, Homo Sapiens
uuuucuauuucugaauuacgaaugaaauccga

SEQ ID NO: 209509 - RNA, 32 nt, Homo Sapiens
ucauugaauauuaagaucugcugguuucagga

SEQ ID NO: 209510 - RNA, 32 nt, Homo Sapiens
acgucaauguccuaugcaguauuguuagacau

SEQ ID NO: 209511 - RNA, 30 nt, Homo Sapiens
gcccaauagaagcuuaaugaugcuucuguu

SEQ ID NO: 209512 - RNA, 32 nt, Homo Sapiens
ggggguggggacgaggagaugccaaguggggc

SEQ ID NO: 209513 - RNA, 32 nt, Homo Sapiens
auaaaugagucguuauacuaugaaaaaaaaaa

SEQ ID NO: 209514 - RNA, 32 nt, Homo Sapiens
uacuuugccuuaguuuuccccaagagggaagg

SEQ ID NO: 209515 - RNA, 32 nt, Homo Sapiens
gaauguuccaacaaauucaaaacuucauuuuc

SEQ ID NO: 209516 - RNA, 32 nt, Homo Sapiens
aggccuugggcagugccuccuccugggccugg

SEQ ID NO: 209517 - RNA, 32 nt, Homo Sapiens
cccucccggacggggcggcuggccaggcaggg

SEQ ID NO: 209518 - RNA, 32 nt, Homo Sapiens
cgggguggcggcaggcaggggaggcuuggacg

SEQ ID NO: 209519 - RNA, 32 nt, Homo Sapiens
agcccgggcggcgggcuagggcgcucgcaggg

SEQ ID NO: 209520 - RNA, 32 nt, Homo Sapiens
acccugcgcgggagcaggcagcuccugugcug

SEQ ID NO: 209521 - RNA, 32 nt, Homo Sapiens
guguauguaugggacagggucucacucuguca

SEQ ID NO: 209522 - RNA, 32 nt, Homo Sapiens
caauggggacuuugaggccuacacgaagauuu

SEQ ID NO: 209523 - RNA, 32 nt, Homo Sapiens
accaucaugggccacuguucucuuugagggga

SEQ ID NO: 209524 - RNA, 32 nt, Homo Sapiens
agcagcgggucggagaucgaaggaacgggcca

SEQ ID NO: 209525 - RNA, 32 nt, Homo Sapiens
ggagggaggacacgcgggaaggaauaaacugg

SEQ ID NO: 209526 - RNA, 32 nt, Homo Sapiens
aggcuuccuuggggcggggggagggcacccca

SEQ ID NO: 209527 - RNA, 32 nt, Homo Sapiens
gccgacggacgucgccccggcguccggauuua

SEQ ID NO: 209528 - RNA, 32 nt, Homo Sapiens
aauacugguuugcaguuuuguuuucuggacua

SEQ ID NO: 209529 - RNA, 32 nt, Homo Sapiens
agcaaaagaaacaaaaucuugccacguggcuc

SEQ ID NO: 209530 - RNA, 32 nt, Homo Sapiens
ucuaagccccagcacgucugccucuggcuuca

SEQ ID NO: 209531 - RNA, 32 nt, Homo Sapiens
cuauggcccuccccaucuacucuuuaaacuuu

SEQ ID NO: 209532 - RNA, 29 nt, Homo Sapiens
cgauuacugacuuuccuugaguaguuuuu

SEQ ID NO: 209533 - RNA, 32 nt, Homo Sapiens
ucuauuuguagaagcaaauuauaggcagauua

SEQ ID NO: 209534 - RNA, 32 nt, Homo Sapiens
aacuaauuuaaauguuagcugaagauaugugg

SEQ ID NO: 209535 - RNA, 32 nt, Homo Sapiens
ugaggaggcgcgaaucaaguuagcggggggaa

SEQ ID NO: 209536 - RNA, 32 nt, Homo Sapiens
ggcugugcgggagcugugacggugccuucccc

SEQ ID NO: 209537 - RNA, 32 nt, Homo Sapiens
gguaggauguagggagggugcgugccuccuuu

SEQ ID NO: 209538 - RNA, 32 nt, Homo Sapiens
uuuggcaagaaaccacacugacugaugagggg

SEQ ID NO: 209539 - RNA, 32 nt, Homo Sapiens
gagcccucccuccccacccccacccuguaacu

SEQ ID NO: 209540 - RNA, 32 nt, Homo Sapiens
gugaccucccuuccuccuccaggaagcccucc

SEQ ID NO: 209541 - RNA, 32 nt, Homo Sapiens
gcgcguggcugcugagguuggcggcggugccg

SEQ ID NO: 209542 - RNA, 32 nt, Homo Sapiens
ucuggccaacuggacaguugaggcuugugguu

SEQ ID NO: 209543 - RNA, 31 nt, Homo Sapiens
agucgcggccacugccugugugcggauguga

SEQ ID NO: 209544 - RNA, 32 nt, Homo Sapiens
cuggucccuguuuucccacgaggaaucugugg

SEQ ID NO: 209545 - RNA, 32 nt, Homo Sapiens
agcacgugguuuuaugaagguaucuuaggugg

SEQ ID NO: 209546 - RNA, 32 nt, Homo Sapiens
ugauguugccauggcauuuguaaacugugaug

SEQ ID NO: 209547 - RNA, 32 nt, Homo Sapiens
auagcauuauccuugggaaugauuucauauug

SEQ ID NO: 209548 - RNA, 32 nt, Homo Sapiens
ugcucaaagucaaacaaaaauauuuuaguuaa

SEQ ID NO: 209549 - RNA, 32 nt, Homo Sapiens
aacaccuggcuaccauuuuguuuucuccugcc

SEQ ID NO: 209550 - RNA, 32 nt, Homo Sapiens
ccuuuugugucauguaaauuguaacucagggg

SEQ ID NO: 209551 - RNA, 27 nt, Homo Sapiens
auuuuccuguucugcagccccccaaau

SEQ ID NO: 209552 - RNA, 32 nt, Homo Sapiens
uuugaggaaguuccaaauuuguagccaguucc

SEQ ID NO: 209553 - RNA, 32 nt, Homo Sapiens
gggcccugcaccacagcucuccaggacauaag

SEQ ID NO: 209554 - RNA, 32 nt, Homo Sapiens
cuaggacaagcacggcuucuccuuucgguucc

SEQ ID NO: 209555 - RNA, 32 nt, Homo Sapiens
ccucccaggcgcuccuggagccagggugcucg

SEQ ID NO: 209556 - RNA, 32 nt, Homo Sapiens
ccagcucccuccccuugaccccagauagcucc

SEQ ID NO: 209557 - RNA, 32 nt, Homo Sapiens
ggcacggagcccaggcuguccuuuuugaccca

SEQ ID NO: 209558 - RNA, 32 nt, Homo Sapiens
gggacagagggagagcuugugacugggacagu

SEQ ID NO: 209559 - RNA, 32 nt, Homo Sapiens
uauggugcacugagaaggcaucuggaagccug

SEQ ID NO: 209560 - RNA, 32 nt, Homo Sapiens
cugccagcccucgugggugugcaucuucugcu

SEQ ID NO: 209561 - RNA, 32 nt, Homo Sapiens
gugaugguugcacaacucuguaaauauauuac

SEQ ID NO: 209562 - RNA, 32 nt, Homo Sapiens
cguuucucaggacuuuauagcuuauucuacuu

SEQ ID NO: 209563 - RNA, 32 nt, Homo Sapiens
uaguaccuaacagauaguucuuuaauccaugc

SEQ ID NO: 209564 - RNA, 32 nt, Homo Sapiens
ccauucucuucgcgcccacccccguuauucuu

SEQ ID NO: 209565 - RNA, 32 nt, Homo Sapiens
uggcuuuguaaauuuaaauauguaagugcuau

SEQ ID NO: 209566 - RNA, 32 nt, Homo Sapiens
ggccggggggcuggcggggggaggaaggaagc

SEQ ID NO: 209567 - RNA, 32 nt, Homo Sapiens
ccuucaguuucccggcuggcugucccacagcc

SEQ ID NO: 209568 - RNA, 32 nt, Homo Sapiens
aauaugauccaagucaggucagauuugggguc

SEQ ID NO: 209569 - RNA, 32 nt, Homo Sapiens
gggaugaggguggugagccccugggcguggcc

SEQ ID NO: 209570 - RNA, 32 nt, Homo Sapiens
acaucugguuccuggggaggagucaugacacu

SEQ ID NO: 209571 - RNA, 32 nt, Homo Sapiens
caccggggcuccggcccgggacccaggaccag

SEQ ID NO: 209572 - RNA, 32 nt, Homo Sapiens
auuucauagaaaggcagauugaagcucagcag

SEQ ID NO: 209573 - RNA, 32 nt, Homo Sapiens
uucuguggccucgggggcucaaggcacagagc

SEQ ID NO: 209574 - RNA, 32 nt, Homo Sapiens
ggggaagggacgugggggcggccacggcagga

SEQ ID NO: 209575 - RNA, 31 nt, Homo Sapiens
gaagaaucgccgugccugccugcccugccua

SEQ ID NO: 209576 - RNA, 32 nt, Homo Sapiens
ugucccccauccccaccgccacugcuuggcuu

SEQ ID NO: 209577 - RNA, 32 nt, Homo Sapiens
ucucuaaagagcaucugauucuuguugcugua

SEQ ID NO: 209578 - RNA, 32 nt, Homo Sapiens
cagucauauaaaagcuauggugagaugcagcu

SEQ ID NO: 209579 - RNA, 32 nt, Homo Sapiens
cacuucgaacauggguaacucauucgacugug

SEQ ID NO: 209580 - RNA, 32 nt, Homo Sapiens
gauucagcauaccagcaguaaauggaucucug

SEQ ID NO: 209581 - RNA, 32 nt, Homo Sapiens
acuagccuggggcggggcgcggggccagaggg

SEQ ID NO: 209582 - RNA, 32 nt, Homo Sapiens
cacaauccucuggccuggcugggccacugccc

SEQ ID NO: 209583 - RNA, 32 nt, Homo Sapiens
gguuuauggagggucgccgucuugcccacccc

SEQ ID NO: 209584 - RNA, 32 nt, Homo Sapiens
acccagugggacucacucaucgucugggguca

SEQ ID NO: 209585 - RNA, 32 nt, Homo Sapiens
agggaaaacauaaaacagauaguaaaacuccu

SEQ ID NO: 209586 - RNA, 32 nt, Homo Sapiens
aaucgauccgcggagugagacggcucguacca

SEQ ID NO: 209587 - RNA, 32 nt, Homo Sapiens
cucuggagccgcccggcccggacauggcgacc

SEQ ID NO: 209588 - RNA, 32 nt, Homo Sapiens
gucagcacuuugagcccuccucgguuuaugga

SEQ ID NO: 209589 - RNA, 32 nt, Homo Sapiens
gagaggaacaguuuauacuuacagauuacaug

SEQ ID NO: 209590 - RNA, 32 nt, Homo Sapiens
auaauuuacccagauagccccagcaaggucaa

SEQ ID NO: 209591 - RNA, 32 nt, Homo Sapiens
auaaccacaaggaaacaaaaaaauauauaaaa

SEQ ID NO: 209592 - RNA, 32 nt, Homo Sapiens
aaccuguaaaagaccaacagugaagauuagug

SEQ ID NO: 209593 - RNA, 32 nt, Homo Sapiens
auaccuuuacuuuuuuguaauauuuucauaau

SEQ ID NO: 209594 - RNA, 32 nt, Homo Sapiens
guacaagcuauuaaaaauuagauggaaaaguu

SEQ ID NO: 209595 - RNA, 32 nt, Homo Sapiens
ggcauaugaucuuuccaguuccacuucagaua

SEQ ID NO: 209596 - RNA, 32 nt, Homo Sapiens
ucucucucucucucuuuuuuuuuuuuuuugag

SEQ ID NO: 209597 - RNA, 32 nt, Homo Sapiens
uuuucaaauauuuggaugcagauuuucaaguc

SEQ ID NO: 209598 - RNA, 32 nt, Homo Sapiens
uccugggugugaggggugcgccagggucgccc

SEQ ID NO: 209599 - RNA, 32 nt, Homo Sapiens
acgccaggccucagucggcauucuacaacuuc

SEQ ID NO: 209600 - RNA, 32 nt, Homo Sapiens
acacuuuugugauuuauaauguuagugauugg

SEQ ID NO: 209601 - RNA, 32 nt, Homo Sapiens
gaucaucagaucuuuagccuagacagaguguc

SEQ ID NO: 209602 - RNA, 32 nt, Homo Sapiens
guuggaacgggacaagcagagaaggcuaaagu

SEQ ID NO: 209603 - RNA, 32 nt, Homo Sapiens
gcuagagccagacugucugggcccaaucccca

SEQ ID NO: 209604 - RNA, 32 nt, Homo Sapiens
uuuaugcuauauuacuaucugugguuacagug

SEQ ID NO: 209605 - RNA, 32 nt, Homo Sapiens
gucccuuaaauuauauugacuguugugauucc

SEQ ID NO: 209606 - RNA, 32 nt, Homo Sapiens
cgagcuguggcuggccaggcggugcggcuggg

SEQ ID NO: 209607 - RNA, 30 nt, Homo Sapiens
cgggcgggcgggcagaaugagucugcaggu

SEQ ID NO: 209608 - RNA, 32 nt, Homo Sapiens
gcugagccgggcgauggacgacagcggcgagc

SEQ ID NO: 209609 - RNA, 32 nt, Homo Sapiens
auggaugggggaaccgggcggcgagacggcgg

SEQ ID NO: 209610 - RNA, 32 nt, Homo Sapiens
aggguucaaggcugggucuagcgaggaugcug

SEQ ID NO: 209611 - RNA, 31 nt, Homo Sapiens
cgggcaucaguggcuaguccaaauaaaauau

SEQ ID NO: 209612 - RNA, 32 nt, Homo Sapiens
uggagccugggcccuccuuccccagcccagac

SEQ ID NO: 209613 - RNA, 32 nt, Homo Sapiens
agaugccgccccaccuucuacuuggguagcug

SEQ ID NO: 209614 - RNA, 32 nt, Homo Sapiens
cgggugcugcugggggugacagacacagugga

SEQ ID NO: 209615 - RNA, 32 nt, Homo Sapiens
cccuugaggugccuccucuccucugcccaggg

SEQ ID NO: 209616 - RNA, 32 nt, Homo Sapiens
cccuaauccucgcuccucacggaggcucuuug

SEQ ID NO: 209617 - RNA, 32 nt, Homo Sapiens
gcucgaaccaccggccggggccucggggcagc

SEQ ID NO: 209618 - RNA, 32 nt, Homo Sapiens
uauaucagucagugauggcaaggucuauuguu

SEQ ID NO: 209619 - RNA, 32 nt, Homo Sapiens
aagaucaucauucuugacagacccauaaauau

SEQ ID NO: 209620 - RNA, 32 nt, Homo Sapiens
cgggaccuuccugcaccuguuuccaagcgaaa

SEQ ID NO: 209621 - RNA, 32 nt, Homo Sapiens
gauucuaaauacuuugcuuaucuugaagagag

SEQ ID NO: 209622 - RNA, 32 nt, Homo Sapiens
cauauugugucuuuuuuauguugcauguugcu

SEQ ID NO: 209623 - RNA, 32 nt, Homo Sapiens
ugauaaaagcuguggaucaucuccuaggaaaa

SEQ ID NO: 209624 - RNA, 32 nt, Homo Sapiens
gaagugucuuaaggacacgucuccaugauauu

SEQ ID NO: 209625 - RNA, 32 nt, Homo Sapiens
cagaucuccgcacaggggauguguguguuccu

SEQ ID NO: 209626 - RNA, 32 nt, Homo Sapiens
cuuacuacugaaucucuaaucaauguucauca

SEQ ID NO: 209627 - RNA, 31 nt, Homo Sapiens
caaaacacgcacacccugccccuggugcccu

SEQ ID NO: 209628 - RNA, 32 nt, Homo Sapiens
cugugucagagguugcuacgucauggauacag

SEQ ID NO: 209629 - RNA, 32 nt, Homo Sapiens
uacuguagucagcugggaauggggaaggugca

SEQ ID NO: 209630 - RNA, 32 nt, Homo Sapiens
uucuuucauguuauuucuucuagugaaaauuu

SEQ ID NO: 209631 - RNA, 32 nt, Homo Sapiens
gacuguucaacuuguagauacaucaacuuuga

SEQ ID NO: 209632 - RNA, 32 nt, Homo Sapiens
caagcgcuguggugugcagcucuuauugucua

SEQ ID NO: 209633 - RNA, 32 nt, Homo Sapiens
uugcgcgccgcaagccgccugccuccacccug

SEQ ID NO: 209634 - RNA, 32 nt, Homo Sapiens
auugagcaggucugcugcuguuggccucugga

SEQ ID NO: 209635 - RNA, 32 nt, Homo Sapiens
guucugguggcuagagagaaaaguagaaaacc

SEQ ID NO: 209636 - RNA, 32 nt, Homo Sapiens
cggcgggccccaaccggccggaccucagcaau

SEQ ID NO: 209637 - RNA, 32 nt, Homo Sapiens
ggagcucgggaagauagcagcacacgcugugg

SEQ ID NO: 209638 - RNA, 32 nt, Homo Sapiens
gccacaugaaggcagcacucagggccagggga

SEQ ID NO: 209639 - RNA, 32 nt, Homo Sapiens
ucaaaaauucuagagaggcauccagauugaaa

SEQ ID NO: 209640 - RNA, 32 nt, Homo Sapiens
ugcaggauuacauccguuuauuaucaagggca

SEQ ID NO: 209641 - RNA, 32 nt, Homo Sapiens
ccugccccccgcgccagcccagccccagccug

SEQ ID NO: 209642 - RNA, 32 nt, Homo Sapiens
caaugacaugguuaaucuggaacuuacguucu

SEQ ID NO: 209643 - RNA, 32 nt, Homo Sapiens
aguuuuugaguacuuugugucuugcugaagac

SEQ ID NO: 209644 - RNA, 32 nt, Homo Sapiens
caaugcucuauuccuuagaaauuagugccaca

SEQ ID NO: 209645 - RNA, 31 nt, Homo Sapiens
gaaggcgcuccucuccugccccgccgacgcc

SEQ ID NO: 209646 - RNA, 32 nt, Homo Sapiens
ugaaacaauguguuuuaaaauugaugaaauuc

SEQ ID NO: 209647 - RNA, 32 nt, Homo Sapiens
aauguaucaugcuuguugccgaaacuguuuau

SEQ ID NO: 209648 - RNA, 32 nt, Homo Sapiens
agggcgcccaggggcgggcggggguacgaggg

SEQ ID NO: 209649 - RNA, 29 nt, Homo Sapiens
ucacuacccuguuucagaugcauuuggaa

SEQ ID NO: 209650 - RNA, 32 nt, Homo Sapiens
agcuuggcgacccagcuguuaagcagaacaaa

SEQ ID NO: 209651 - RNA, 32 nt, Homo Sapiens
gcggcggaggucggcgcggcuccgggguucau

SEQ ID NO: 209652 - RNA, 32 nt, Homo Sapiens
acauuacagugguuggaauaaaaauugggaug

SEQ ID NO: 209653 - RNA, 32 nt, Homo Sapiens
agcuggugcccccagacagcugcucagagcca

SEQ ID NO: 209654 - RNA, 32 nt, Homo Sapiens
caugugauaaccucucuaggugugaugaccag

SEQ ID NO: 209655 - RNA, 32 nt, Homo Sapiens
gcgcagcugcgacuucggcugucugccucugg

SEQ ID NO: 209656 - RNA, 32 nt, Homo Sapiens
guuuugucugcggcucacccugcuacauuucu

SEQ ID NO: 209657 - RNA, 32 nt, Homo Sapiens
cugacccaggacaccuagcacaauggcacucg

SEQ ID NO: 209658 - RNA, 32 nt, Homo Sapiens
ggugcuugcuuucccuucgucuucugccauga

SEQ ID NO: 209659 - RNA, 32 nt, Homo Sapiens
cccucccccuccccaacucagauccggccccg

SEQ ID NO: 209660 - RNA, 32 nt, Homo Sapiens
cuaaugcgcauagagaaauuguucucauugua

SEQ ID NO: 209661 - RNA, 32 nt, Homo Sapiens
ugcccgggauggcaaugagguggagccugaug

SEQ ID NO: 209662 - RNA, 32 nt, Homo Sapiens
uuccagagcucuugcccuagguccuggggcag

SEQ ID NO: 209663 - RNA, 32 nt, Homo Sapiens
gcauacaggggaggggcgcaccccacagcugg

SEQ ID NO: 209664 - RNA, 32 nt, Homo Sapiens
cggcagccgggccccagggccguccagagccu

SEQ ID NO: 209665 - RNA, 30 nt, Homo Sapiens
gguacccgggcuauggcgccggcgcagcgc

SEQ ID NO: 209666 - RNA, 32 nt, Homo Sapiens
ggggcccaucccccuguccacccaguguccac

SEQ ID NO: 209667 - RNA, 32 nt, Homo Sapiens
aacccacaaaaauuuguaaaauguaauuaaua

SEQ ID NO: 209668 - RNA, 31 nt, Homo Sapiens
guuuaggaugguucccagccccgcgcuggcg

SEQ ID NO: 209669 - RNA, 32 nt, Homo Sapiens
ggugcuccugcccacaccagccacuuugguga

SEQ ID NO: 209670 - RNA, 32 nt, Homo Sapiens
caacugagggcucaaaacuccuggacaaguug

SEQ ID NO: 209671 - RNA, 32 nt, Homo Sapiens
guaacuucucacuagucaggcuaguggagaga

SEQ ID NO: 209672 - RNA, 32 nt, Homo Sapiens
auccguaggagcggcgucccggccgccccucc

SEQ ID NO: 209673 - RNA, 32 nt, Homo Sapiens
ccaggguguuuucauucaugcggauacuagua

SEQ ID NO: 209674 - RNA, 32 nt, Homo Sapiens
uuuagcuucuauuuucugaagggcuuucuuug

SEQ ID NO: 209675 - RNA, 32 nt, Homo Sapiens
ucuguucaguuagcauggauuuauugagugcc

SEQ ID NO: 209676 - RNA, 28 nt, Homo Sapiens
uuuugggaaagauaacauuuacugcgug

SEQ ID NO: 209677 - RNA, 32 nt, Homo Sapiens
agaguaaacuuauugcauauuuucauaaucag

SEQ ID NO: 209678 - RNA, 32 nt, Homo Sapiens
accgcauccugcgccuucguuagggugagcag

SEQ ID NO: 209679 - RNA, 32 nt, Homo Sapiens
aggaucuuuccacaaaaucccugagagucaac

SEQ ID NO: 209680 - RNA, 32 nt, Homo Sapiens
cccagagcaaaauaauucaguguaauacaucu

SEQ ID NO: 209681 - RNA, 32 nt, Homo Sapiens
auaacugcugcuaaaucaagaacuguugcagc

SEQ ID NO: 209682 - RNA, 32 nt, Homo Sapiens
caggggaugugggaaguggggaggcggggagg

SEQ ID NO: 209683 - RNA, 32 nt, Homo Sapiens
ccguuccggccacgccggugaagugcuuccgg

SEQ ID NO: 209684 - RNA, 32 nt, Homo Sapiens
ggagccggaggcugggagccgcggcggccugg

SEQ ID NO: 209685 - RNA, 32 nt, Homo Sapiens
acccacuccucggcgagcgcaggaacucgcuc

SEQ ID NO: 209686 - RNA, 32 nt, Homo Sapiens
cagagaaaauacacacaggcuucuauucaaau

SEQ ID NO: 209687 - RNA, 32 nt, Homo Sapiens
uucccacgcuucuccuuccaccuuccaugauc

SEQ ID NO: 209688 - RNA, 32 nt, Homo Sapiens
uuagauuuaaugagagaguacuauuuuuaagg

SEQ ID NO: 209689 - RNA, 32 nt, Homo Sapiens
caguaucagcauagugacuaaacuacauuaua

SEQ ID NO: 209690 - RNA, 32 nt, Homo Sapiens
cugugugguacuauagcagcucuacucugugc

SEQ ID NO: 209691 - RNA, 32 nt, Homo Sapiens
aacaugccugcgacucccuuucuggauggaac

SEQ ID NO: 209692 - RNA, 32 nt, Homo Sapiens
cccgcccgguaccgcgcgagccagugccccug

SEQ ID NO: 209693 - RNA, 32 nt, Homo Sapiens
uugucauggugauucacuacucaguuuaucag

SEQ ID NO: 209694 - RNA, 29 nt, Homo Sapiens
ucuuguauauguauguauauuggguccuc

SEQ ID NO: 209695 - RNA, 32 nt, Homo Sapiens
gaucauguuucaaauauguugauucaaacuug

SEQ ID NO: 209696 - RNA, 32 nt, Homo Sapiens
cagugguucgucugcugcuggaagcaggugcu

SEQ ID NO: 209697 - RNA, 32 nt, Homo Sapiens
ccccagagcuagagccgcucccugcccugccc

SEQ ID NO: 209698 - RNA, 32 nt, Homo Sapiens
ccagcuugcccccagcccucccaccugccacu

SEQ ID NO: 209699 - RNA, 32 nt, Homo Sapiens
uucaggaccuugaggacacgugaccccacccg

SEQ ID NO: 209700 - RNA, 32 nt, Homo Sapiens
gcguagaccgagcuacccaguuuacuggucga

SEQ ID NO: 209701 - RNA, 32 nt, Homo Sapiens
aaugagugcucuucuucaggauccaaugauag

SEQ ID NO: 209702 - RNA, 32 nt, Homo Sapiens
gccaggugcauggcuaagcaguucuuuccuuc

SEQ ID NO: 209703 - RNA, 32 nt, Homo Sapiens
cagauacagcaaacagucaggauuaauccaca

SEQ ID NO: 209704 - RNA, 32 nt, Homo Sapiens
cuuguuggggguaaaacuuguugcuuuuaugu

SEQ ID NO: 209705 - RNA, 32 nt, Homo Sapiens
gggcgccgagaccugggugucugggaaguggg

SEQ ID NO: 209706 - RNA, 32 nt, Homo Sapiens
uugaaaucuguguucucugaccucaaggaaca

SEQ ID NO: 209707 - RNA, 32 nt, Homo Sapiens
ccuguucuugguacuguuuccuccucuguucc

SEQ ID NO: 209708 - RNA, 32 nt, Homo Sapiens
caaagagagcucaucaucagucuuaauauuca

SEQ ID NO: 209709 - RNA, 32 nt, Homo Sapiens
aggccggccccggccggacacccuuaccccuc

SEQ ID NO: 209710 - RNA, 32 nt, Homo Sapiens
uuauggccaucuaaguuuuuuuaauuuuggaa

SEQ ID NO: 209711 - RNA, 32 nt, Homo Sapiens
aguacugaaagugcaguaucuaaccaacuaga

SEQ ID NO: 209712 - RNA, 32 nt, Homo Sapiens
cucgugugauaugaggcccauuccugccucuu

SEQ ID NO: 209713 - RNA, 32 nt, Homo Sapiens
cgcuguaaaaaggacagaggcuguucccuaug

SEQ ID NO: 209714 - RNA, 32 nt, Homo Sapiens
gaggcggaggcgucgccgcgggccaggccucg

SEQ ID NO: 209715 - RNA, 32 nt, Homo Sapiens
caaguaaaaaucaauacccuuugaauuggaca

SEQ ID NO: 209716 - RNA, 32 nt, Homo Sapiens
uagcuuuauaggcuaacauuauuguuaauugu

SEQ ID NO: 209717 - RNA, 32 nt, Homo Sapiens
cggcgggagacggcggcuugcgagcuggcugc

SEQ ID NO: 209718 - RNA, 32 nt, Homo Sapiens
caaugccuuguacaugauauagaggcaucaag

SEQ ID NO: 209719 - RNA, 32 nt, Homo Sapiens
cagucacucuugcacuauuccuucuccaagcc

SEQ ID NO: 209720 - RNA, 32 nt, Homo Sapiens
gaaaacuccgggcagcacuuucauuuggaccc

SEQ ID NO: 209721 - RNA, 32 nt, Homo Sapiens
auguuccaaguaaguuuguauucacaugaucu

SEQ ID NO: 209722 - RNA, 32 nt, Homo Sapiens
aagccaaagcuacuugaucaugcaaaaugcac

SEQ ID NO: 209723 - RNA, 32 nt, Homo Sapiens
ugacggcuugaguagcgcuagggagaaucccu

SEQ ID NO: 209724 - RNA, 32 nt, Homo Sapiens
ugcagguucucuaggaggcauuccagaauaga

SEQ ID NO: 209725 - RNA, 32 nt, Homo Sapiens
uaaaaaaaaagcuguaauauguuaucuggggg

SEQ ID NO: 209726 - RNA, 32 nt, Homo Sapiens
gacagagcagaggaaggcaggggauuuaggau

SEQ ID NO: 209727 - RNA, 32 nt, Homo Sapiens
auuuucuuuuaacuggaaauuuuuaugugagu

SEQ ID NO: 209728 - RNA, 32 nt, Homo Sapiens
auccccaucagggguucugugcucauuuacuu

SEQ ID NO: 209729 - RNA, 32 nt, Homo Sapiens
cuuguuccuaguuugucucuaucagcacccag

SEQ ID NO: 209730 - RNA, 32 nt, Homo Sapiens
guccgggagggugcggcugugcagccuguccu

SEQ ID NO: 209731 - RNA, 32 nt, Homo Sapiens
caaauaguuuuggccacaucuugcuugcugau

SEQ ID NO: 209732 - RNA, 32 nt, Homo Sapiens
ugaaauuugacaaaggcauagaaucuuuuucu

SEQ ID NO: 209733 - RNA, 30 nt, Homo Sapiens
caagcaguaccuggcaugcaggagcacuca

SEQ ID NO: 209734 - RNA, 32 nt, Homo Sapiens
ccacccuugggguuccugcuccagaccccacu

SEQ ID NO: 209735 - RNA, 32 nt, Homo Sapiens
cgggcccuggggagggucgugagugcagcccc

SEQ ID NO: 209736 - RNA, 32 nt, Homo Sapiens
ggaaggcgucuuucuuucuccccucaacucug

SEQ ID NO: 209737 - RNA, 32 nt, Homo Sapiens
agaaaaugaaguucuaaugaacuguuucuccc

SEQ ID NO: 209738 - RNA, 32 nt, Homo Sapiens
aauacagcacuauauuugaguguauacugagu

SEQ ID NO: 209739 - RNA, 32 nt, Homo Sapiens
guugaaaaauggauucauaaacuuuuuauuag

SEQ ID NO: 209740 - RNA, 31 nt, Homo Sapiens
agaaucccccacgcacugccccgcccgccuu

SEQ ID NO: 209741 - RNA, 32 nt, Homo Sapiens
cuucaaugccagcagaaggucccccagguaga

SEQ ID NO: 209742 - RNA, 32 nt, Homo Sapiens
uucuuaaguggaaggaaaagagugcugagaaa

SEQ ID NO: 209743 - RNA, 32 nt, Homo Sapiens
gcugccuucuauuauuuauuuauuuauuuuag

SEQ ID NO: 209744 - RNA, 32 nt, Homo Sapiens
gcugcccgugcagugggaccagauuccagguc

SEQ ID NO: 209745 - RNA, 32 nt, Homo Sapiens
ucuauacuugguuuuucaauuaagcuuaaugg

SEQ ID NO: 209746 - RNA, 32 nt, Homo Sapiens
guugucuagcauguccaguaugagugguggau

SEQ ID NO: 209747 - RNA, 32 nt, Homo Sapiens
cuuguugaacuggcaggcgggugggugggggc

SEQ ID NO: 209748 - RNA, 32 nt, Homo Sapiens
aaugacaucccauuaauuauauuguuaaucaa

SEQ ID NO: 209749 - RNA, 31 nt, Homo Sapiens
cagcccccacccucugucugcucgagcccag

SEQ ID NO: 209750 - RNA, 32 nt, Homo Sapiens
gaagaucugcuucccuggggccccauuugcca

SEQ ID NO: 209751 - RNA, 32 nt, Homo Sapiens
gguuugagggugggguaagggauuucuuaggg

SEQ ID NO: 209752 - RNA, 32 nt, Homo Sapiens
caagcaaauggguccauugaucaacagaugca

SEQ ID NO: 209753 - RNA, 32 nt, Homo Sapiens
ccagcgcaguuacaacuucacuaucagcggaa

SEQ ID NO: 209754 - RNA, 32 nt, Homo Sapiens
uagaagcucugagaaaucaugggccgugcggu

SEQ ID NO: 209755 - RNA, 32 nt, Homo Sapiens
guacaacggaucaaaaaaccacagggcuuuug

SEQ ID NO: 209756 - RNA, 32 nt, Homo Sapiens
gaauuguagagcuggagaguaccuucaguuuu

SEQ ID NO: 209757 - RNA, 32 nt, Homo Sapiens
uacacuuuguacuuacacugugggcauguggu

SEQ ID NO: 209758 - RNA, 32 nt, Homo Sapiens
ugagauccauaguuuuacagcauaugaagagc

SEQ ID NO: 209759 - RNA, 32 nt, Homo Sapiens
uuuucuuuucaagauuuuuucuuaaaaagaug

SEQ ID NO: 209760 - RNA, 32 nt, Homo Sapiens
uggcauccuuuggccugguggggaaacagagg

SEQ ID NO: 209761 - RNA, 32 nt, Homo Sapiens
cggcggcuccuuccagcaggggcuugcgcuuc

SEQ ID NO: 209762 - RNA, 32 nt, Homo Sapiens
cuccccaagccaggcacaccugcacaaaccca

SEQ ID NO: 209763 - RNA, 32 nt, Homo Sapiens
gaagagauaagcacagaagagaaggugcucac

SEQ ID NO: 209764 - RNA, 32 nt, Homo Sapiens
ugguuuuucuauuuggaaaagacuuuauaaau

SEQ ID NO: 209765 - RNA, 32 nt, Homo Sapiens
gccaggaucgaauggaaggggggaauuggggu

SEQ ID NO: 209766 - RNA, 32 nt, Homo Sapiens
gauacagguaguuucgaguauggugccaguga

SEQ ID NO: 209767 - RNA, 32 nt, Homo Sapiens
gaugucccaucccaagccaucacacuccacaa

SEQ ID NO: 209768 - RNA, 32 nt, Homo Sapiens
ggcucauagaacccuuuuuuuuuuccuuuaag

SEQ ID NO: 209769 - RNA, 32 nt, Homo Sapiens
uggcccugcugugccuucaguacccagccagg

SEQ ID NO: 209770 - RNA, 32 nt, Homo Sapiens
gagcacguccagccgccucuggcucaaguucg

SEQ ID NO: 209771 - RNA, 32 nt, Homo Sapiens
cgaccccaagugcggggaccuccggcgaauaa

SEQ ID NO: 209772 - RNA, 32 nt, Homo Sapiens
aagguuuuauagaugucuuugccuucccuucu

SEQ ID NO: 209773 - RNA, 32 nt, Homo Sapiens
gcagggugguggcuggggcgaugguggacgcc

SEQ ID NO: 209774 - RNA, 32 nt, Homo Sapiens
gcagcugccuucccucuccucccccaguccac

SEQ ID NO: 209775 - RNA, 32 nt, Homo Sapiens
auuagagauugacuucagaaacuuuuucuaaa

SEQ ID NO: 209776 - RNA, 32 nt, Homo Sapiens
ccccagcccuucaucaccaacccgcucccgca

SEQ ID NO: 209777 - RNA, 32 nt, Homo Sapiens
aagggaacgcgcgcucaccgugcgcgcucgcg

SEQ ID NO: 209778 - RNA, 32 nt, Homo Sapiens
ggacagcagggaccgggcgcagcccucccccc

SEQ ID NO: 209779 - RNA, 32 nt, Homo Sapiens
agucugcuaaauguggcaagguuucucagucu

SEQ ID NO: 209780 - RNA, 32 nt, Homo Sapiens
cucccuccggugcagcccugccuggccggggg

SEQ ID NO: 209781 - RNA, 32 nt, Homo Sapiens
ugauaaaggauacaaccugcacagggggaagu

SEQ ID NO: 209782 - RNA, 32 nt, Homo Sapiens
ggcuuuaaaccgcggcgccgcggcgcccgggu

SEQ ID NO: 209783 - RNA, 32 nt, Homo Sapiens
gguuguguuuaugaaauacaaacuguggcaua

SEQ ID NO: 209784 - RNA, 32 nt, Homo Sapiens
uaccgugacugggaugcaagagaauuaggacu

SEQ ID NO: 209785 - RNA, 32 nt, Homo Sapiens
aaaaccagccgccugcgccgcgccugcggaga

SEQ ID NO: 209786 - RNA, 32 nt, Homo Sapiens
aaagaugauauauaauaagugaaaauacaauu

SEQ ID NO: 209787 - RNA, 32 nt, Homo Sapiens
aaucuaaaaugaauuuaauaauuggguagaau

SEQ ID NO: 209788 - RNA, 30 nt, Homo Sapiens
gaggaagagaagcaugucugaguuggaugg

SEQ ID NO: 209789 - RNA, 32 nt, Homo Sapiens
ggguguugugacucacuccaccucugugcccu

SEQ ID NO: 209790 - RNA, 32 nt, Homo Sapiens
gccugcugccaucaaaaauaaggauuaauuua

SEQ ID NO: 209791 - RNA, 32 nt, Homo Sapiens
agcaaaaggugauugucaauugauaguuuaau

SEQ ID NO: 209792 - RNA, 32 nt, Homo Sapiens
ugucgggcucagccagcggcgcggcgggccgc

SEQ ID NO: 209793 - RNA, 32 nt, Homo Sapiens
aggccgcgucuccgccuucucugcucgcgccu

SEQ ID NO: 209794 - RNA, 32 nt, Homo Sapiens
cacccgggaccgagcuggggucuuggaggaag

SEQ ID NO: 209795 - RNA, 32 nt, Homo Sapiens
uccugaugcaacggagggggcgcuaggggcau

SEQ ID NO: 209796 - RNA, 32 nt, Homo Sapiens
gcgccucgccgcccucgcaaccgcgggcuccg

SEQ ID NO: 209797 - RNA, 32 nt, Homo Sapiens
ugcaauuagaaaaauuuuauaugggcugggca

SEQ ID NO: 209798 - RNA, 32 nt, Homo Sapiens
cgggcgaguaggagggggcgccgggcuauaua

SEQ ID NO: 209799 - RNA, 32 nt, Homo Sapiens
ucuuggcagggcgggggaggggggauaggagg

SEQ ID NO: 209800 - RNA, 32 nt, Homo Sapiens
cuuaaugcauuuggauacuuuggggugugugc

SEQ ID NO: 209801 - RNA, 32 nt, Homo Sapiens
agcccgcagggauugcgggggcccguugucua

SEQ ID NO: 209802 - RNA, 32 nt, Homo Sapiens
cugcaacccuuauucauagugagaugaggguc

SEQ ID NO: 209803 - RNA, 32 nt, Homo Sapiens
ugcagcacugguuuuguuuccuuaauaaauuu

SEQ ID NO: 209804 - RNA, 32 nt, Homo Sapiens
cauaugaaagacugaauaaguuuuauacauuu

SEQ ID NO: 209805 - RNA, 32 nt, Homo Sapiens
agagaccuuacagaucaucuaguucuccagcc

SEQ ID NO: 209806 - RNA, 32 nt, Homo Sapiens
gagaagaacaaggccaugggucggccccugcu

SEQ ID NO: 209807 - RNA, 32 nt, Homo Sapiens
acucgggugccuuacaucuuuucuaaucauag

SEQ ID NO: 209808 - RNA, 32 nt, Homo Sapiens
ucaugacuuaggagugaguguuacuuccaugu

SEQ ID NO: 209809 - RNA, 32 nt, Homo Sapiens
ggacggccgggcgcggagccccagcugcggag

SEQ ID NO: 209810 - RNA, 32 nt, Homo Sapiens
agagcaagggcagacaugugcugaacucaucu

SEQ ID NO: 209811 - RNA, 32 nt, Homo Sapiens
ccacgagcugcccacguccucuccaggaaggg

SEQ ID NO: 209812 - RNA, 32 nt, Homo Sapiens
cauugcauauguuuaagugguauaaagaagcc

SEQ ID NO: 209813 - RNA, 32 nt, Homo Sapiens
cagcaucugcaggggccagaaacuacaugcac

SEQ ID NO: 209814 - RNA, 32 nt, Homo Sapiens
uuagcuaaauaacuuuuuuuuaaguauuucuu

SEQ ID NO: 209815 - RNA, 32 nt, Homo Sapiens
acuguuggggaagggugacuguagccacaugg

SEQ ID NO: 209816 - RNA, 32 nt, Homo Sapiens
uuacuguaggaauccuauuuauauuauuuuuc

SEQ ID NO: 209817 - RNA, 32 nt, Homo Sapiens
ugcgcucaggguggcuugcagucccuggcccu

SEQ ID NO: 209818 - RNA, 32 nt, Homo Sapiens
uuugucuuuccgaagguuuaaaauccucaaga

SEQ ID NO: 209819 - RNA, 32 nt, Homo Sapiens
gcagcccaguuuucuucagaaaccauagaguu

SEQ ID NO: 209820 - RNA, 30 nt, Homo Sapiens
gcgagcagaggcggcggcggguguacugua

SEQ ID NO: 209821 - RNA, 32 nt, Homo Sapiens
gcuagugcugguggccgccgcugcugccccag

SEQ ID NO: 209822 - RNA, 32 nt, Homo Sapiens
uggauaugaacaugauuuuucuuuauguacaa

SEQ ID NO: 209823 - RNA, 32 nt, Homo Sapiens
ggagagggugcuccggcccaggcgggggaguc

SEQ ID NO: 209824 - RNA, 32 nt, Homo Sapiens
cccacuugccuacccucuguccugccuuguua

SEQ ID NO: 209825 - RNA, 32 nt, Homo Sapiens
uucuccgagggaugagggugggggguguggga

SEQ ID NO: 209826 - RNA, 32 nt, Homo Sapiens
cccagcccgcugcaccuccgggccccccuuac

SEQ ID NO: 209827 - RNA, 32 nt, Homo Sapiens
gaaaaccuuuaaagggggaaaaggaaagcaua

SEQ ID NO: 209828 - RNA, 32 nt, Homo Sapiens
aucuucgucaagucagugcagcgcugcauggc

SEQ ID NO: 209829 - RNA, 32 nt, Homo Sapiens
aacugggcgucuguuccggcgccggaccccua

SEQ ID NO: 209830 - RNA, 32 nt, Homo Sapiens
caaaaccuuuuacagaaaucucuucuuuauau

SEQ ID NO: 209831 - RNA, 32 nt, Homo Sapiens
ggcgcgaggggagggguccucccgcugaacag

SEQ ID NO: 209832 - RNA, 32 nt, Homo Sapiens
cccuugcccucccuucuccaugcucauuaaaa

SEQ ID NO: 209833 - RNA, 32 nt, Homo Sapiens
gaaagaaugcaaaccaggagugaauuucaaau

SEQ ID NO: 209834 - RNA, 32 nt, Homo Sapiens
guaaagaaauuauuaaaccuagcugaugcuug

SEQ ID NO: 209835 - RNA, 32 nt, Homo Sapiens
uuuguuuuauuuucuguaaauuuuguagguaa

SEQ ID NO: 209836 - RNA, 32 nt, Homo Sapiens
agguauaagagauauuuuuacuggccaaaaug

SEQ ID NO: 209837 - RNA, 32 nt, Homo Sapiens
aggcgguggcuguggcggacgcagcagcaccc

SEQ ID NO: 209838 - RNA, 32 nt, Homo Sapiens
acuucaccccacuugcagggcauuugugcaga

SEQ ID NO: 209839 - RNA, 32 nt, Homo Sapiens
ggugcgaucccgguccacugcaaccuccacuu

SEQ ID NO: 209840 - RNA, 32 nt, Homo Sapiens
gccuccaccaagcucacgugcgagggcgcggu

SEQ ID NO: 209841 - RNA, 31 nt, Homo Sapiens
agaaauuaucggagaaaucacucugggccaa

SEQ ID NO: 209842 - RNA, 32 nt, Homo Sapiens
ggcagaggaaugccugugcuggggccaggggu

SEQ ID NO: 209843 - RNA, 32 nt, Homo Sapiens
acugcugccagaucucuuuuuaacaucaugug

SEQ ID NO: 209844 - RNA, 32 nt, Homo Sapiens
agaagguacccaaagggaaaaagggaaaagcu

SEQ ID NO: 209845 - RNA, 32 nt, Homo Sapiens
accuugggaaagccucuuggggucucggggca

SEQ ID NO: 209846 - RNA, 32 nt, Homo Sapiens
uuuagcucaguguuuuccuguuuucuucauuu

SEQ ID NO: 209847 - RNA, 32 nt, Homo Sapiens
uuccugcugcacuaaagcuauuacaaauauaa

SEQ ID NO: 209848 - RNA, 32 nt, Homo Sapiens
ccaagccccauuuuuucuugucuuuaucuaau

SEQ ID NO: 209849 - RNA, 32 nt, Homo Sapiens
ugcagaagccuuuagugcugcacgggagcucg

SEQ ID NO: 209850 - RNA, 32 nt, Homo Sapiens
caugguuguacuucuuuuuuggauauaaagau

SEQ ID NO: 209851 - RNA, 29 nt, Homo Sapiens
uauauaauggugaugucauaauaaaguug

SEQ ID NO: 209852 - RNA, 32 nt, Homo Sapiens
gaguuaaacugcgccuucuggaccgggucuga

SEQ ID NO: 209853 - RNA, 32 nt, Homo Sapiens
ugggagaagcaggcggcuccgcgcucgcacuc

SEQ ID NO: 209854 - RNA, 30 nt, Homo Sapiens
cccaagggcaggcgggucccccagucccgc

SEQ ID NO: 209855 - RNA, 32 nt, Homo Sapiens
gauagaaugaacuuaaugggggacggaagggg

SEQ ID NO: 209856 - RNA, 32 nt, Homo Sapiens
uccagugaaaauaauugaaagagguuaaacau

SEQ ID NO: 209857 - RNA, 32 nt, Homo Sapiens
cugugccgugcagugcagguucuggccuuuuc

SEQ ID NO: 209858 - RNA, 32 nt, Homo Sapiens
cuuacagcucuuccggagucuagagccuguug

SEQ ID NO: 209859 - RNA, 32 nt, Homo Sapiens
ggcagcauucaguuaagaggguacuuuaaaaa

SEQ ID NO: 209860 - RNA, 32 nt, Homo Sapiens
gggcggcucgcaccccagcgcgcacccaggca

SEQ ID NO: 209861 - RNA, 32 nt, Homo Sapiens
uucuuuuugccuucuuuuuucuuuuuaaauaa

SEQ ID NO: 209862 - RNA, 32 nt, Homo Sapiens
cagcacuggcccagcuggagaaguugcugaaa

SEQ ID NO: 209863 - RNA, 32 nt, Homo Sapiens
auuccucucuacaacuaaaaaagggaucuuga

SEQ ID NO: 209864 - RNA, 32 nt, Homo Sapiens
uuucauaauuguaggucauuagcaugcauauu

SEQ ID NO: 209865 - RNA, 32 nt, Homo Sapiens
uuggguuggggauggugggagcagaagagcag

SEQ ID NO: 209866 - RNA, 32 nt, Homo Sapiens
gcgugcaggaggacaagacgggcggcaacgug

SEQ ID NO: 209867 - RNA, 32 nt, Homo Sapiens
uuggaucccccauuuucccccugcacaaucuc

SEQ ID NO: 209868 - RNA, 32 nt, Homo Sapiens
agcuguuaacuccuugugagcugcuucucuuu

SEQ ID NO: 209869 - RNA, 32 nt, Homo Sapiens
uuuuaaaaaauauuuucucuguacuuuucauu

SEQ ID NO: 209870 - RNA, 28 nt, Homo Sapiens
ccaauaaauuccuaaguuuccugacucc

SEQ ID NO: 209871 - RNA, 32 nt, Homo Sapiens
uuuuggcguggcacuauuguaauggaaauaaa

SEQ ID NO: 209872 - RNA, 32 nt, Homo Sapiens
ugggaggaaggggaaagggcugggccucaccg

SEQ ID NO: 209873 - RNA, 32 nt, Homo Sapiens
aaaaaaaaaacaaaacaaaaccagcaucuguu

SEQ ID NO: 209874 - RNA, 32 nt, Homo Sapiens
agucccagaggcguggugggucgggcagaguc

SEQ ID NO: 209875 - RNA, 32 nt, Homo Sapiens
gcacugagcugugaucacaccacugcacucca

SEQ ID NO: 209876 - RNA, 27 nt, Homo Sapiens
gccgggguccuccacagcccccagcuu

SEQ ID NO: 209877 - RNA, 32 nt, Homo Sapiens
gugcagggaaaagaaagagagaucagacuguu

SEQ ID NO: 209878 - RNA, 32 nt, Homo Sapiens
uucugaagccccauuaggaaaaaauuuaaaug

SEQ ID NO: 209879 - RNA, 31 nt, Homo Sapiens
gcccggccaaccggccugccccgcugcagug

SEQ ID NO: 209880 - RNA, 32 nt, Homo Sapiens
cucccugauucaaagaaauauuucucauguuu

SEQ ID NO: 209881 - RNA, 32 nt, Homo Sapiens
ccccuccagccccacaccugggccucccccug

SEQ ID NO: 209882 - RNA, 32 nt, Homo Sapiens
uuuugguaggcucauugagagauacagaagaa

SEQ ID NO: 209883 - RNA, 32 nt, Homo Sapiens
gcgugacuucagacucucuccucucucucccu

SEQ ID NO: 209884 - RNA, 32 nt, Homo Sapiens
ggcucuggagagaggggggugaggguggagcc

SEQ ID NO: 209885 - RNA, 30 nt, Homo Sapiens
auggccgugcggcagcaccugcucacuaac

SEQ ID NO: 209886 - RNA, 32 nt, Homo Sapiens
gcuuuaacuccagcaccugguuaugcauuuga

SEQ ID NO: 209887 - RNA, 32 nt, Homo Sapiens
ugugcacauuuggaagcuaaaauguacaucgu

SEQ ID NO: 209888 - RNA, 30 nt, Homo Sapiens
cgcggagaggggaagggggaaacugaccaa

SEQ ID NO: 209889 - RNA, 32 nt, Homo Sapiens
caagugcuccucuuccuuccaagccccuccuc

SEQ ID NO: 209890 - RNA, 32 nt, Homo Sapiens
cugccagcuggguuucaaauguguauguucca

SEQ ID NO: 209891 - RNA, 32 nt, Homo Sapiens
gucucuggggacacgaggaugcccuaaugaug

SEQ ID NO: 209892 - RNA, 32 nt, Homo Sapiens
gcucaggucagcugcuuggggcucccaggcug

SEQ ID NO: 209893 - RNA, 32 nt, Homo Sapiens
uggaaggaaugguuuucuuaucuucuccgagc

SEQ ID NO: 209894 - RNA, 32 nt, Homo Sapiens
acaccugucaucccagcuacucagguaguuga

SEQ ID NO: 209895 - RNA, 32 nt, Homo Sapiens
ccuuagauacuaguugucugaauugaguuacu

SEQ ID NO: 209896 - RNA, 32 nt, Homo Sapiens
guuuagggagccauccagcagcuccucauccc

SEQ ID NO: 209897 - RNA, 32 nt, Homo Sapiens
gaagcuacuaaacuuauacauaaagagggccc

SEQ ID NO: 209898 - RNA, 32 nt, Homo Sapiens
uucuuuaaaaauacaugugcauacuacacaca

SEQ ID NO: 209899 - RNA, 32 nt, Homo Sapiens
uuuauuuggcucaguccacagcugcguuggag

SEQ ID NO: 209900 - RNA, 32 nt, Homo Sapiens
ucuccgaaaaggauuaagcaucacuagggcuc

SEQ ID NO: 209901 - RNA, 32 nt, Homo Sapiens
ccaagugacuuuccuucauguauuccaucaua

SEQ ID NO: 209902 - RNA, 32 nt, Homo Sapiens
caagccacuuaugcugaauccaagaacaaaca

SEQ ID NO: 209903 - RNA, 32 nt, Homo Sapiens
agaauaagacuaccauucuaaauaucaccuac

SEQ ID NO: 209904 - RNA, 32 nt, Homo Sapiens
uaacugccauuaaauacuaaggaguucuguag

SEQ ID NO: 209905 - RNA, 32 nt, Homo Sapiens
gacagacccacccccaagcagggcuccucucc

SEQ ID NO: 209906 - RNA, 32 nt, Homo Sapiens
ccaccuuaucccaggacguguuccuuacccuc

SEQ ID NO: 209907 - RNA, 32 nt, Homo Sapiens
gcacgagcaaagauggcggcagggaccagcag

SEQ ID NO: 209908 - RNA, 32 nt, Homo Sapiens
ggucuaaaauuugaauggaaauucaagcacaa

SEQ ID NO: 209909 - RNA, 32 nt, Homo Sapiens
guggccgcugaguugccggcgccggcugagcc

SEQ ID NO: 209910 - RNA, 32 nt, Homo Sapiens
ugcagagaugacugggcuggggaagcagaugc

SEQ ID NO: 209911 - RNA, 32 nt, Homo Sapiens
ggcuaaugaggacgccuggcgaaacgcaguaa

SEQ ID NO: 209912 - RNA, 32 nt, Homo Sapiens
ugcuaacauuuuauuggcaguauguauuucua

SEQ ID NO: 209913 - RNA, 32 nt, Homo Sapiens
cuggcccaugccuguucaguccgucauggcgu

SEQ ID NO: 209914 - RNA, 32 nt, Homo Sapiens
aggcuuuugacugggcaugguggcucacgccu

SEQ ID NO: 209915 - RNA, 32 nt, Homo Sapiens
acacuuccaaagauuaaucaaacauaaauauu

SEQ ID NO: 209916 - RNA, 30 nt, Homo Sapiens
cccuggcccgcucgcccgccggcaccauga

SEQ ID NO: 209917 - RNA, 32 nt, Homo Sapiens
gauacauauuccaggaucaaaaagaccugggu

SEQ ID NO: 209918 - RNA, 32 nt, Homo Sapiens
ucuugaaaucuggcgcugggaauggccaugug

SEQ ID NO: 209919 - RNA, 32 nt, Homo Sapiens
ugguacuacuacuacugguauuuagucagcag

SEQ ID NO: 209920 - RNA, 32 nt, Homo Sapiens
cagaggcccucccgagagacccagucacacgu

SEQ ID NO: 209921 - RNA, 32 nt, Homo Sapiens
uagugugggucaucauaaaaucugccaacuuu

SEQ ID NO: 209922 - RNA, 32 nt, Homo Sapiens
cgaagccgagacccgggcuggccccucugcug

SEQ ID NO: 209923 - RNA, 32 nt, Homo Sapiens
caccuaaagggagaggugaaagcaaagacugc

SEQ ID NO: 209924 - RNA, 32 nt, Homo Sapiens
gcuggugccugagcccggcgucccucgccccc

SEQ ID NO: 209925 - RNA, 32 nt, Homo Sapiens
ucggugagcgcggcccgggccggacauggcgg

SEQ ID NO: 209926 - RNA, 32 nt, Homo Sapiens
agccccaccaaagagaaguaacaaagauccuc

SEQ ID NO: 209927 - RNA, 32 nt, Homo Sapiens
ccugccggguucaagcaguucuccugccucag

SEQ ID NO: 209928 - RNA, 32 nt, Homo Sapiens
gagggauuuuaaaaacaaaaauguagauugua

SEQ ID NO: 209929 - RNA, 32 nt, Homo Sapiens
caucucagaaaagaagcagaaagccuccaaga

SEQ ID NO: 209930 - RNA, 32 nt, Homo Sapiens
acacgaccuuggaggacuugcaggucauggua

SEQ ID NO: 209931 - RNA, 32 nt, Homo Sapiens
uggaguccagugaagaggaagaagaggaggau

SEQ ID NO: 209932 - RNA, 32 nt, Homo Sapiens
ggcggcuccuucggccacccaggcagcagcca

SEQ ID NO: 209933 - RNA, 29 nt, Homo Sapiens
uccuuuauagugaugcuacaggacgaaga

SEQ ID NO: 209934 - RNA, 32 nt, Homo Sapiens
caggcagucacuaaaaacaaucaauaagcaaa

SEQ ID NO: 209935 - RNA, 28 nt, Homo Sapiens
uuucaucaagauuaauuaaaauuuggga

SEQ ID NO: 209936 - RNA, 32 nt, Homo Sapiens
aagcuuuagaaaauauucaugcaugcaauuuu

SEQ ID NO: 209937 - RNA, 32 nt, Homo Sapiens
uggguucuuucuucuuuuucuacaaucgaguu

SEQ ID NO: 209938 - RNA, 32 nt, Homo Sapiens
ugucuauuuuuggcggcugcacaugacaucaa

SEQ ID NO: 209939 - RNA, 32 nt, Homo Sapiens
uagaaguggcgguucggccggagguuccaucg

SEQ ID NO: 209940 - RNA, 32 nt, Homo Sapiens
cuuggccacuaucaggguucgucaucuauugu

SEQ ID NO: 209941 - RNA, 32 nt, Homo Sapiens
guuauuuugggccugaugugacacaacaguug

SEQ ID NO: 209942 - RNA, 32 nt, Homo Sapiens
ccaagauaauguaauuacauuugguuuuguaa

SEQ ID NO: 209943 - RNA, 32 nt, Homo Sapiens
ccacguucacagauccuucucuugaccggaaa

SEQ ID NO: 209944 - RNA, 32 nt, Homo Sapiens
ggagacgcugggcugugcggugcggaggguga

SEQ ID NO: 209945 - RNA, 32 nt, Homo Sapiens
ggagucucugggaagaaaucuacuuccaacuu

SEQ ID NO: 209946 - RNA, 32 nt, Homo Sapiens
ugcuccccucgcgacccuugcaugccuuucau

SEQ ID NO: 209947 - RNA, 32 nt, Homo Sapiens
uuaacuuguuuaauaaauaacuuuuuaaguug

SEQ ID NO: 209948 - RNA, 32 nt, Homo Sapiens
gugagggccucagggcugggccccaagacuca

SEQ ID NO: 209949 - RNA, 32 nt, Homo Sapiens
aguuucucaagugacuaaaguaguuauuaaaa

SEQ ID NO: 209950 - RNA, 32 nt, Homo Sapiens
aucauccaccauuuaguaaaauguagcuggcc

SEQ ID NO: 209951 - RNA, 32 nt, Homo Sapiens
uagcagcgucccgcgcgcggcgggcagcggcc

SEQ ID NO: 209952 - RNA, 32 nt, Homo Sapiens
gccgcuuccuucccggccccgcugcaccuccc

SEQ ID NO: 209953 - RNA, 32 nt, Homo Sapiens
ucccaggcuaagaaacaaaacaaaagcuugug

SEQ ID NO: 209954 - RNA, 32 nt, Homo Sapiens
cugggcugcccccagugcuccagaccuucccc

SEQ ID NO: 209955 - RNA, 30 nt, Homo Sapiens
agcucuggagguggcgaguaggccagugug

SEQ ID NO: 209956 - RNA, 32 nt, Homo Sapiens
ugauaccuugagagauggcuggaccaauucuc

SEQ ID NO: 209957 - RNA, 32 nt, Homo Sapiens
gcaggaggcagcggccagggcugggccagggc

SEQ ID NO: 209958 - RNA, 32 nt, Homo Sapiens
agggggagucucuggagguaaagcuggucugu

SEQ ID NO: 209959 - RNA, 32 nt, Homo Sapiens
uguguccggcgccguguuccagcuccgcguug

SEQ ID NO: 209960 - RNA, 32 nt, Homo Sapiens
guggcugucggcgagggcgcgcgucucgcggu

SEQ ID NO: 209961 - RNA, 32 nt, Homo Sapiens
aguucauuugaaacagaagagaauuucauucu

SEQ ID NO: 209962 - RNA, 32 nt, Homo Sapiens
cucugggcauacgguagauauuaucugaugaa

SEQ ID NO: 209963 - RNA, 32 nt, Homo Sapiens
ugucuuuuguuuuauuugcauuuuacagauuu

SEQ ID NO: 209964 - RNA, 30 nt, Homo Sapiens
cucagcaucagcggcggcggcggcggcggc

SEQ ID NO: 209965 - RNA, 32 nt, Homo Sapiens
cuuaauugcuuugcugcuagacuugcaacuaa

SEQ ID NO: 209966 - RNA, 32 nt, Homo Sapiens
uugcagauguuuucagaaaaucaagucacagu

SEQ ID NO: 209967 - RNA, 32 nt, Homo Sapiens
gcuggugaguagauccuguuuccuuugggaaa

SEQ ID NO: 209968 - RNA, 31 nt, Homo Sapiens
ugaaaauaagcucuuuuuaaugaugucacug

SEQ ID NO: 209969 - RNA, 32 nt, Homo Sapiens
gccaggccugcccugcccugcuggcuuccuga

SEQ ID NO: 209970 - RNA, 32 nt, Homo Sapiens
caggauguucaaaggaaaggguaaaaaguguu

SEQ ID NO: 209971 - RNA, 28 nt, Homo Sapiens
gcuccagaggguuccccgaggugggacu

SEQ ID NO: 209972 - RNA, 32 nt, Homo Sapiens
ccuucugggaggaggaggucacacgcugaugg

SEQ ID NO: 209973 - RNA, 32 nt, Homo Sapiens
cuggccuugaguuuuuacugacacgucccugu

SEQ ID NO: 209974 - RNA, 32 nt, Homo Sapiens
aaggacugcagccuaaauuccaaauaccagag

SEQ ID NO: 209975 - RNA, 32 nt, Homo Sapiens
aucauucagagguggguauaagugaaugggag

SEQ ID NO: 209976 - RNA, 32 nt, Homo Sapiens
ugggaagcauggaacccagaaacaagugccag

SEQ ID NO: 209977 - RNA, 32 nt, Homo Sapiens
uauuuauguuguagcaaaguuggcucuacaua

SEQ ID NO: 209978 - RNA, 32 nt, Homo Sapiens
gacugaucugucugcuggccucucagcuacca

SEQ ID NO: 209979 - RNA, 32 nt, Homo Sapiens
aggcgggucccggccccggcgaaccccagucc

SEQ ID NO: 209980 - RNA, 32 nt, Homo Sapiens
aaagcucaugucacaaacagguccuggagacu

SEQ ID NO: 209981 - RNA, 32 nt, Homo Sapiens
ucagcuggccccagcccagaagugacccccag

SEQ ID NO: 209982 - RNA, 32 nt, Homo Sapiens
ccccauuccuuccugucagccccagucugucu

SEQ ID NO: 209983 - RNA, 32 nt, Homo Sapiens
gcggggacgacggcggccaugagcucgcggaa

SEQ ID NO: 209984 - RNA, 32 nt, Homo Sapiens
acccucaggugcuacacaguauaguucuaggg

SEQ ID NO: 209985 - RNA, 32 nt, Homo Sapiens
acugcugacauuuugcagaaaauacauuuuau

SEQ ID NO: 209986 - RNA, 32 nt, Homo Sapiens
cgccuccgccgggaggggucggucuggggauc

SEQ ID NO: 209987 - RNA, 32 nt, Homo Sapiens
augcuuucaugcacccuuuacugcacuuucug

SEQ ID NO: 209988 - RNA, 32 nt, Homo Sapiens
uacuaauaaaaauaaggcuguguaauuuucuc

SEQ ID NO: 209989 - RNA, 32 nt, Homo Sapiens
caaagcacaccucggccgaggccugcgcccug

SEQ ID NO: 209990 - RNA, 32 nt, Homo Sapiens
auccggugcuugaacaaggagcuccgcucuac

SEQ ID NO: 209991 - RNA, 32 nt, Homo Sapiens
aguucagcugucuguaaaguggagccauuagu

SEQ ID NO: 209992 - RNA, 32 nt, Homo Sapiens
aaccugggcccuuugucuuuuucaccaugcuu

SEQ ID NO: 209993 - RNA, 30 nt, Homo Sapiens
cagcucuggggaggcauccgugugccggcc

SEQ ID NO: 209994 - RNA, 32 nt, Homo Sapiens
agaucuggaguagacccagaaauacacaguuu

SEQ ID NO: 209995 - RNA, 32 nt, Homo Sapiens
guucccagaaaaguggcucaugccggcuagga

SEQ ID NO: 209996 - RNA, 32 nt, Homo Sapiens
guugggggccuuuuggccggugacggagacug

SEQ ID NO: 209997 - RNA, 32 nt, Homo Sapiens
uauuugaaaaguguuuucgauguaucauuggg

SEQ ID NO: 209998 - RNA, 32 nt, Homo Sapiens
caugcagcagaaaaauauguauauuauuguaa

SEQ ID NO: 209999 - RNA, 32 nt, Homo Sapiens
uggcauggugcuagugcauguacccuguggua

SEQ ID NO: 210000 - RNA, 32 nt, Homo Sapiens
ggggaagugcgaucuuggcaugugucagaaga

SEQ ID NO: 210001 - RNA, 32 nt, Homo Sapiens
gucuucccugaacgugucuccacucugugaag

SEQ ID NO: 210002 - RNA, 32 nt, Homo Sapiens
cccccuugccccagcccccuucugccuguuuu

SEQ ID NO: 210003 - RNA, 32 nt, Homo Sapiens
ucacacagaaaaguaccucgaaggaagcaauu

SEQ ID NO: 210004 - RNA, 32 nt, Homo Sapiens
ugaggcccaggaaccaccgcggcggccggcac

SEQ ID NO: 210005 - RNA, 32 nt, Homo Sapiens
caggauuuaaaguugaauaaacugggucccug

SEQ ID NO: 210006 - RNA, 32 nt, Homo Sapiens
cuuucuucuauucuuucuuaauuuagacagua

SEQ ID NO: 210007 - RNA, 32 nt, Homo Sapiens
aaacuauucaacauggaguuauuucaguuuug

SEQ ID NO: 210008 - RNA, 32 nt, Homo Sapiens
gauggagucuuguucugucacccaggcugggg

SEQ ID NO: 210009 - RNA, 32 nt, Homo Sapiens
cuuuguagcguggucaggucugcuguaacauu

SEQ ID NO: 210010 - RNA, 32 nt, Homo Sapiens
auuguaaaaauaaaaauaguaaaagaaacuga

SEQ ID NO: 210011 - RNA, 32 nt, Homo Sapiens
gaugauucaaaauuauauagauauuuaaagcu

SEQ ID NO: 210012 - RNA, 32 nt, Homo Sapiens
uuacucaaguuuucaguuuguaccgccuggua

SEQ ID NO: 210013 - RNA, 32 nt, Homo Sapiens
cucagggggaccagcuuuggcuucaucuuucu

SEQ ID NO: 210014 - RNA, 32 nt, Homo Sapiens
agcaagugaaacaaaguuaaugugacaagcuu

SEQ ID NO: 210015 - RNA, 32 nt, Homo Sapiens
uuuaauuucuucaaaauguauauauuuagugc

SEQ ID NO: 210016 - RNA, 32 nt, Homo Sapiens
agggccaggcgagaaccugggacagcgguggc

SEQ ID NO: 210017 - RNA, 32 nt, Homo Sapiens
ugguucaguaaaagccaggaaacacaacuuug

SEQ ID NO: 210018 - RNA, 32 nt, Homo Sapiens
gccccggggagaggagugccaggcacacagac

SEQ ID NO: 210019 - RNA, 32 nt, Homo Sapiens
uaguaauaauaauacuaacaaacaguugggga

SEQ ID NO: 210020 - RNA, 32 nt, Homo Sapiens
auaaauaauuuucaguggcuucauaauauuuc

SEQ ID NO: 210021 - RNA, 32 nt, Homo Sapiens
gugauagagcaagaccugagacuuuauaagua

SEQ ID NO: 210022 - RNA, 32 nt, Homo Sapiens
gcccggcgaggguggggagggcaggcgcaggu

SEQ ID NO: 210023 - RNA, 32 nt, Homo Sapiens
uugugucuucuggguccuuucauugcugacag

SEQ ID NO: 210024 - RNA, 32 nt, Homo Sapiens
aaccugcauauuuaucacuggugcauuuucau

SEQ ID NO: 210025 - RNA, 32 nt, Homo Sapiens
gaguuuuaaaagaucaaguuaggaugcugacu

SEQ ID NO: 210026 - RNA, 32 nt, Homo Sapiens
uaccagaccacccuuaaaugacuuucaucugg

SEQ ID NO: 210027 - RNA, 32 nt, Homo Sapiens
auaggaguggaagagggccuaggacagagucu

SEQ ID NO: 210028 - RNA, 32 nt, Homo Sapiens
ugcucucaauccugcucucaccaugagccucc

SEQ ID NO: 210029 - RNA, 32 nt, Homo Sapiens
ggucaggaggaugugcaccaucuugccuuugc

SEQ ID NO: 210030 - RNA, 32 nt, Homo Sapiens
ugaguuaaauauauuuauauguacauacauau

SEQ ID NO: 210031 - RNA, 32 nt, Homo Sapiens
aauuucuacgagguuauaugugauuguuaaca

SEQ ID NO: 210032 - RNA, 32 nt, Homo Sapiens
augcgugugggaagggguugcuaggggguggg

SEQ ID NO: 210033 - RNA, 32 nt, Homo Sapiens
uugccaagcgucccuuuuuuuuuuuuuucuaa

SEQ ID NO: 210034 - RNA, 32 nt, Homo Sapiens
ccacucagcuggaggcucaagagggcuugaug

SEQ ID NO: 210035 - RNA, 32 nt, Homo Sapiens
ggacuuuuagaauguagcaaccacugacacgc

SEQ ID NO: 210036 - RNA, 32 nt, Homo Sapiens
aggaaggaugacuguagccuguggauuguacu

SEQ ID NO: 210037 - RNA, 32 nt, Homo Sapiens
uuggguucuggugauggcuggcucugguucau

SEQ ID NO: 210038 - RNA, 32 nt, Homo Sapiens
aaauaccuuguaccuguucauggauuauuuua

SEQ ID NO: 210039 - RNA, 32 nt, Homo Sapiens
gcgacgagggcuucuuccccuuugugcuggag

SEQ ID NO: 210040 - RNA, 31 nt, Homo Sapiens
auucauggauucagccaaccauggcuggaaa

SEQ ID NO: 210041 - RNA, 31 nt, Homo Sapiens
ggaguucuccggagaaaccgcuuccggcgcu

SEQ ID NO: 210042 - RNA, 32 nt, Homo Sapiens
aaaaguuacuuguaucugcuuaucauaagacg

SEQ ID NO: 210043 - RNA, 32 nt, Homo Sapiens
ccuccucccgcggccgggaagaggaaagucgc

SEQ ID NO: 210044 - RNA, 32 nt, Homo Sapiens
ucauugaggagcuccuugagcgggcugaccgu

SEQ ID NO: 210045 - RNA, 29 nt, Homo Sapiens
gggaggggacgucuuauuaacaaacgggg

SEQ ID NO: 210046 - RNA, 32 nt, Homo Sapiens
uuguacacauuuccaucagagaagauuuuuua

SEQ ID NO: 210047 - RNA, 32 nt, Homo Sapiens
caaaacugcaacucuacaaaaauacaaaaauu

SEQ ID NO: 210048 - RNA, 32 nt, Homo Sapiens
aguagcagugauuguuaugccuugcuauuuua

SEQ ID NO: 210049 - RNA, 32 nt, Homo Sapiens
cgcccccucucugcccucggcggcgagcaggg

SEQ ID NO: 210050 - RNA, 32 nt, Homo Sapiens
augugaaauuacauuucuuuaauuuaaaguaa

SEQ ID NO: 210051 - RNA, 32 nt, Homo Sapiens
uuuuaaguaaaauuauuuguguauugauaaaa

SEQ ID NO: 210052 - RNA, 32 nt, Homo Sapiens
uuccccucccaccuucucuccccuccucucug

SEQ ID NO: 210053 - RNA, 32 nt, Homo Sapiens
aguaaaaauauuaaucgguuagcuggguggaa

SEQ ID NO: 210054 - RNA, 32 nt, Homo Sapiens
uacagcugacuaauucauucuuagaaaugugu

SEQ ID NO: 210055 - RNA, 32 nt, Homo Sapiens
ucuuggacaguuuuggggggaggguuuuuuaa

SEQ ID NO: 210056 - RNA, 31 nt, Homo Sapiens
uuugggggugcaggggcaggaguuggaaauu

SEQ ID NO: 210057 - RNA, 32 nt, Homo Sapiens
cugccaggugcuucaugggcucgccggcaucc

SEQ ID NO: 210058 - RNA, 32 nt, Homo Sapiens
guugggaauuguaguucuggcgucggucggug

SEQ ID NO: 210059 - RNA, 32 nt, Homo Sapiens
gaugucuaaaagauucuuuaaacuacugaacu

SEQ ID NO: 210060 - RNA, 32 nt, Homo Sapiens
cgagucagucccucacuuggucagugaguggg

SEQ ID NO: 210061 - RNA, 32 nt, Homo Sapiens
aauucuuuguuguuuagcacuuaaauuuccca

SEQ ID NO: 210062 - RNA, 32 nt, Homo Sapiens
aguacggacugggccuggccuggggcgucccc

SEQ ID NO: 210063 - RNA, 32 nt, Homo Sapiens
gaagaauguggcaaagauuucuauugauucuc

SEQ ID NO: 210064 - RNA, 32 nt, Homo Sapiens
cauaggugaugggggaaauuguuaacuaccuu

SEQ ID NO: 210065 - RNA, 32 nt, Homo Sapiens
caaggaaaaaauauacuucuguuuacuuacuc

SEQ ID NO: 210066 - RNA, 32 nt, Homo Sapiens
cacagacugaggcuugacaccggagcaucugu

SEQ ID NO: 210067 - RNA, 32 nt, Homo Sapiens
uggcuccgcgccgagcgcggccggcgacuugu

SEQ ID NO: 210068 - RNA, 32 nt, Homo Sapiens
aggaggggggaagagggagaaggaucauucaa

SEQ ID NO: 210069 - RNA, 32 nt, Homo Sapiens
caugaccguaauuucuuaucaauucuacuuuu

SEQ ID NO: 210070 - RNA, 32 nt, Homo Sapiens
caguccguucacaucgcuguguuuccuuguua

SEQ ID NO: 210071 - RNA, 32 nt, Homo Sapiens
aaggaaaagaaacuaucucggucacgugagcg

SEQ ID NO: 210072 - RNA, 32 nt, Homo Sapiens
ggguccaggaccagaccucucuacaaaaaauu

SEQ ID NO: 210073 - RNA, 32 nt, Homo Sapiens
cuguguagcugggauuauagauuggagccacc

SEQ ID NO: 210074 - RNA, 32 nt, Homo Sapiens
caaggaacauccccuguuggcaucaugugaga

SEQ ID NO: 210075 - RNA, 32 nt, Homo Sapiens
ccuccuacagcuugaccgugaggccagagaca

SEQ ID NO: 210076 - RNA, 32 nt, Homo Sapiens
agaggugggggucggcgccuucuaccugcagg

SEQ ID NO: 210077 - RNA, 32 nt, Homo Sapiens
ugggagauagggaacagaagaggguagugggu

SEQ ID NO: 210078 - RNA, 31 nt, Homo Sapiens
augucuguuagguccgcuugguccagagcug

SEQ ID NO: 210079 - RNA, 32 nt, Homo Sapiens
agccucaggcagggauuuggggugcuggaggc

SEQ ID NO: 210080 - RNA, 32 nt, Homo Sapiens
ggucaggcacgguggcucacgcuuguaauccc

SEQ ID NO: 210081 - RNA, 32 nt, Homo Sapiens
cacucagggugggauuagggugaggcaaguga

SEQ ID NO: 210082 - RNA, 32 nt, Homo Sapiens
ggcauagcggcuugguucaccuggaggcuggu

SEQ ID NO: 210083 - RNA, 32 nt, Homo Sapiens
gaggaagaaaauaccggaguugcaggguauag

SEQ ID NO: 210084 - RNA, 32 nt, Homo Sapiens
ugaggggaggagaggacuuggcgcguuccccu

SEQ ID NO: 210085 - RNA, 32 nt, Homo Sapiens
aguuggaagaggcgaguccggucucaaaaugg

SEQ ID NO: 210086 - RNA, 32 nt, Homo Sapiens
uaaggaaacugaacugaauuccaggucuucuc

SEQ ID NO: 210087 - RNA, 32 nt, Homo Sapiens
uuugguuccuagagggcguggggccgggucug

SEQ ID NO: 210088 - RNA, 32 nt, Homo Sapiens
gcugucagagggcuuuccccuuucucaguugu

SEQ ID NO: 210089 - RNA, 32 nt, Homo Sapiens
ucuauucauaaucaggguaaagaauaugaaaa

SEQ ID NO: 210090 - RNA, 32 nt, Homo Sapiens
gcucaagccagaagcugacuuuggccgccaug

SEQ ID NO: 210091 - RNA, 28 nt, Homo Sapiens
ggaauauguuggcuuauguguuugaacu

SEQ ID NO: 210092 - RNA, 32 nt, Homo Sapiens
uguuggucguuuccaaacacuaauggaauguu

SEQ ID NO: 210093 - RNA, 32 nt, Homo Sapiens
ucauaauggcucucuugaaauuuugcacuuuc

SEQ ID NO: 210094 - RNA, 32 nt, Homo Sapiens
cccaaucccaaacuuaggaucccucccagccc

SEQ ID NO: 210095 - RNA, 32 nt, Homo Sapiens
gccaucugggucuggaucaaaaacgcagaaaa

SEQ ID NO: 210096 - RNA, 32 nt, Homo Sapiens
gcaugggaggggcuacuagaugcaccugggag

SEQ ID NO: 210097 - RNA, 32 nt, Homo Sapiens
ccuuugucugccucagccccaggaagggcaag

SEQ ID NO: 210098 - RNA, 32 nt, Homo Sapiens
uuaugaaaauacugagcagagcagaugaggau

SEQ ID NO: 210099 - RNA, 32 nt, Homo Sapiens
agcaaaaauaaaaaugaucaaaaaagaaacgg

SEQ ID NO: 210100 - RNA, 32 nt, Homo Sapiens
guaggccugguccgccauucagugacaaauaa

SEQ ID NO: 210101 - RNA, 32 nt, Homo Sapiens
cacgacuugaguuuugaaccccgauuaauguc

SEQ ID NO: 210102 - RNA, 32 nt, Homo Sapiens
auuguuucuucugaauaaucuaacaaaggaaa

SEQ ID NO: 210103 - RNA, 32 nt, Homo Sapiens
gugguggacuucaugggugcugaguggcccgu

SEQ ID NO: 210104 - RNA, 32 nt, Homo Sapiens
aauuucugucuccuugguccauuccuucucuc

SEQ ID NO: 210105 - RNA, 32 nt, Homo Sapiens
acaucgugaacagucugcagugggcuaugguu

SEQ ID NO: 210106 - RNA, 32 nt, Homo Sapiens
gccuucgccucccgaagugcugggauuacaga

SEQ ID NO: 210107 - RNA, 32 nt, Homo Sapiens
uaggaucugcaaacaaugaagaauuauguaau

SEQ ID NO: 210108 - RNA, 32 nt, Homo Sapiens
ggaucuuucuguaggaaccacccaucagcagu

SEQ ID NO: 210109 - RNA, 32 nt, Homo Sapiens
ccuuccguucccucccugucagggcguaauug

SEQ ID NO: 210110 - RNA, 32 nt, Homo Sapiens
auguuaucaaccaacugcacaaucaguuuauc

SEQ ID NO: 210111 - RNA, 32 nt, Homo Sapiens
gaaaaaguuuuuccuacauuugacuagaaaau

SEQ ID NO: 210112 - RNA, 32 nt, Homo Sapiens
ggcugaauucuuuugcagaacuacuguguguc

SEQ ID NO: 210113 - RNA, 31 nt, Homo Sapiens
cugcuugguugucccagcagcagcaggagcc

SEQ ID NO: 210114 - RNA, 32 nt, Homo Sapiens
gcgccagcugcucguccccgccggcgucugug

SEQ ID NO: 210115 - RNA, 32 nt, Homo Sapiens
ggugacuguaguuaacaaugaaguauugugua

SEQ ID NO: 210116 - RNA, 32 nt, Homo Sapiens
ucaggccuggacuuaaaagauuuuuuaaaacc

SEQ ID NO: 210117 - RNA, 32 nt, Homo Sapiens
aaagacaugaacucauccuuuuuuauggcugc

SEQ ID NO: 210118 - RNA, 32 nt, Homo Sapiens
cagaaacgguggauguggaacacacaggacca

SEQ ID NO: 210119 - RNA, 32 nt, Homo Sapiens
aaauuagcugggugucguggugcgugccuaua

SEQ ID NO: 210120 - RNA, 32 nt, Homo Sapiens
uguaggggauagaggaggaggguguggguguc

SEQ ID NO: 210121 - RNA, 32 nt, Homo Sapiens
aauccuguuggaaauuugauuggaauugcauu

SEQ ID NO: 210122 - RNA, 32 nt, Homo Sapiens
guggccgcccccagccccugcugccccagccu

SEQ ID NO: 210123 - RNA, 32 nt, Homo Sapiens
accuuuguacuucuuuauugaguguacuggcu

SEQ ID NO: 210124 - RNA, 27 nt, Homo Sapiens
gaccaauaaaguuauuuuaugauugcc

SEQ ID NO: 210125 - RNA, 32 nt, Homo Sapiens
uccuuccuuucccagcagcagugcccugcaga

SEQ ID NO: 210126 - RNA, 32 nt, Homo Sapiens
gauggucaccugcccuggccccuccucugggc

SEQ ID NO: 210127 - RNA, 32 nt, Homo Sapiens
guucuccuggcgcuccuccccuaaguuauugc

SEQ ID NO: 210128 - RNA, 32 nt, Homo Sapiens
cuggguuuccugcccuggcccuggcccugcga

SEQ ID NO: 210129 - RNA, 32 nt, Homo Sapiens
gguccuccugccucagcuuccaaaggcacagg

SEQ ID NO: 210130 - RNA, 32 nt, Homo Sapiens
aaacuuaguucauaugcuuuuacuugggcaag

SEQ ID NO: 210131 - RNA, 32 nt, Homo Sapiens
uuucccccgcaggccucccuccccugugacuc

SEQ ID NO: 210132 - RNA, 32 nt, Homo Sapiens
cauccuucaggauugugagcuggauuuuccuc

SEQ ID NO: 210133 - RNA, 32 nt, Homo Sapiens
uauugcaaguucagccagacuccaugacucau

SEQ ID NO: 210134 - RNA, 32 nt, Homo Sapiens
gucagccagggagcugguuuuguucuccuguu

SEQ ID NO: 210135 - RNA, 32 nt, Homo Sapiens
ucgaaaucuauuucuuacaauucuagagauug

SEQ ID NO: 210136 - RNA, 32 nt, Homo Sapiens
accccugaaaauauuuggauggagaucgggaa

SEQ ID NO: 210137 - RNA, 32 nt, Homo Sapiens
gugggcacagagcaccaccaggaccgggugag

SEQ ID NO: 210138 - RNA, 32 nt, Homo Sapiens
aacaagucgcagccuucccccuccagacacgg

SEQ ID NO: 210139 - RNA, 32 nt, Homo Sapiens
ucacagagcugggauuguuaauaugauucagg

SEQ ID NO: 210140 - RNA, 32 nt, Homo Sapiens
gacugcacuccagccuggguggcaaagcaaga

SEQ ID NO: 210141 - RNA, 30 nt, Homo Sapiens
aagaaaucagucaauuacaagaguaauugu

SEQ ID NO: 210142 - RNA, 32 nt, Homo Sapiens
uauaaagcucgggucucggaccuacuggaacu

SEQ ID NO: 210143 - RNA, 32 nt, Homo Sapiens
uugagagaacagaggccuagggaccuccagac

SEQ ID NO: 210144 - RNA, 32 nt, Homo Sapiens
aaguuaauuaagaaagaacaaaaacuauucau

SEQ ID NO: 210145 - RNA, 30 nt, Homo Sapiens
uugcccgcgccugcgcaccagucgcugccu

SEQ ID NO: 210146 - RNA, 32 nt, Homo Sapiens
ucaaaacuccagcuugcccaauaaggauuuag

SEQ ID NO: 210147 - RNA, 32 nt, Homo Sapiens
gagccuuuuaauucagaaauggggccaguuua

SEQ ID NO: 210148 - RNA, 32 nt, Homo Sapiens
ggucucaaacuccugaccucagguaauccacc

SEQ ID NO: 210149 - RNA, 32 nt, Homo Sapiens
cuucagcauaguccugugccagggcccugucc

SEQ ID NO: 210150 - RNA, 32 nt, Homo Sapiens
ucgaguccccccaccccuccccacccaccacc

SEQ ID NO: 210151 - RNA, 32 nt, Homo Sapiens
cucucugcuccuccuguucgacagucagccgc

SEQ ID NO: 210152 - RNA, 32 nt, Homo Sapiens
ucuauccugucuuuccuuuccuccucucagug

SEQ ID NO: 210153 - RNA, 32 nt, Homo Sapiens
uucuuuauacuucuaagcaggcucuuaucuuu

SEQ ID NO: 210154 - RNA, 32 nt, Homo Sapiens
uggugauuacaaggugcugaauguguugguaa

SEQ ID NO: 210155 - RNA, 32 nt, Homo Sapiens
ucugcccauuuauuuccaaccccaacagacac

SEQ ID NO: 210156 - RNA, 32 nt, Homo Sapiens
agcgagcuuccccuccucccugcucucccagg

SEQ ID NO: 210157 - RNA, 32 nt, Homo Sapiens
uuuauuaacaauuuauauuucauucucuaaac

SEQ ID NO: 210158 - RNA, 32 nt, Homo Sapiens
cucuccgcgcggggcgggcuccgcgccacgug

SEQ ID NO: 210159 - RNA, 32 nt, Homo Sapiens
cauaacuagagaaucaauguuagugcucaaac

SEQ ID NO: 210160 - RNA, 32 nt, Homo Sapiens
cgcuuaggucuggauuggccccgcccccugac

SEQ ID NO: 210161 - RNA, 32 nt, Homo Sapiens
uggacuuguucuauugccugaccugaugaacu

SEQ ID NO: 210162 - RNA, 31 nt, Homo Sapiens
ucccuuuaacccucaguaucaagcacaaaaa

SEQ ID NO: 210163 - RNA, 32 nt, Homo Sapiens
ugcuggacccacugacacagcauuacauuucu

SEQ ID NO: 210164 - RNA, 32 nt, Homo Sapiens
uccaccuuccccgugcaggggcggcccggcca

SEQ ID NO: 210165 - RNA, 32 nt, Homo Sapiens
ggagcagucuggcaugggagugaggccccguc

SEQ ID NO: 210166 - RNA, 32 nt, Homo Sapiens
auuaaucaaaaauauuuggaaaacaaaaaggg

SEQ ID NO: 210167 - RNA, 32 nt, Homo Sapiens
ccgucuuccuccuccuggucuucuacaccauc

SEQ ID NO: 210168 - RNA, 32 nt, Homo Sapiens
uauguuuauucaaaauauuuuaucuuuuagcu

SEQ ID NO: 210169 - RNA, 32 nt, Homo Sapiens
cccaguuuuaguuuuuuguuucguuucguuuu

SEQ ID NO: 210170 - RNA, 32 nt, Homo Sapiens
uaugcuuuguaauuuauugaguaucuuucauu

SEQ ID NO: 210171 - RNA, 32 nt, Homo Sapiens
ccauguagaacaaagaagagaauaagaaaaua

SEQ ID NO: 210172 - RNA, 32 nt, Homo Sapiens
uuccuugcuucucaacuuacagaugggacuuc

SEQ ID NO: 210173 - RNA, 32 nt, Homo Sapiens
ugagaaugugaaacacaaaaccaaggaguaca

SEQ ID NO: 210174 - RNA, 32 nt, Homo Sapiens
caggccugaauguggcggcugccucugcgaau

SEQ ID NO: 210175 - RNA, 32 nt, Homo Sapiens
cuaaauuuucugcaaucuauguuucucccauu

SEQ ID NO: 210176 - RNA, 32 nt, Homo Sapiens
gugucugaaggcccggggcgcuucggggcuug

SEQ ID NO: 210177 - RNA, 32 nt, Homo Sapiens
uaauauuaaauuauuucuuaugacugugaguc

SEQ ID NO: 210178 - RNA, 32 nt, Homo Sapiens
agcaauaggcagaggaaaauagcuuuucuaug

SEQ ID NO: 210179 - RNA, 32 nt, Homo Sapiens
uuguugauaauauggcggcuggagcugccugg

SEQ ID NO: 210180 - RNA, 32 nt, Homo Sapiens
uccuagcucaucuuccuucucccgaggccuua

SEQ ID NO: 210181 - RNA, 32 nt, Homo Sapiens
gucuuacuauaaaauuguccccucuauucuaa

SEQ ID NO: 210182 - RNA, 32 nt, Homo Sapiens
gaggauaccugggagcgggcggcggccgggcu

SEQ ID NO: 210183 - RNA, 32 nt, Homo Sapiens
ccugccacauuucucucuucucccucacgcca

SEQ ID NO: 210184 - RNA, 32 nt, Homo Sapiens
augauuuuacucaagacagaaacuaagugcua

SEQ ID NO: 210185 - RNA, 32 nt, Homo Sapiens
caauuuaaauuugaacaucaacaaaagauugg

SEQ ID NO: 210186 - RNA, 31 nt, Homo Sapiens
guccugccaaagaaaggagauuuuuaaaaag

SEQ ID NO: 210187 - RNA, 32 nt, Homo Sapiens
agagcuggguucuauuuucccuccucaaacug

SEQ ID NO: 210188 - RNA, 32 nt, Homo Sapiens
ucuaggcaccauguguguggcuuuuguguauc

SEQ ID NO: 210189 - RNA, 32 nt, Homo Sapiens
aaacaaaaacaaaaacaucaaugaguaggcau

SEQ ID NO: 210190 - RNA, 32 nt, Homo Sapiens
agcagagugguggacaggaccaugcccuccuc

SEQ ID NO: 210191 - RNA, 32 nt, Homo Sapiens
aaauaacagaagcuguguacgaugcauuaggg

SEQ ID NO: 210192 - RNA, 32 nt, Homo Sapiens
ccggagcacuaacgugagauggggcugccucg

SEQ ID NO: 210193 - RNA, 32 nt, Homo Sapiens
acgacgccugaaaggccgcggggcccgcauuu

SEQ ID NO: 210194 - RNA, 32 nt, Homo Sapiens
aagucacuuuugugaaauuugacaaaggcaua

SEQ ID NO: 210195 - RNA, 32 nt, Homo Sapiens
acuuccaggaggaccccaacccggcccggaga

SEQ ID NO: 210196 - RNA, 32 nt, Homo Sapiens
uccagagcucugcgcugcagcugagagacugg

SEQ ID NO: 210197 - RNA, 32 nt, Homo Sapiens
gcugaaauaaucauaucuuucugaugucuauu

SEQ ID NO: 210198 - RNA, 32 nt, Homo Sapiens
caucaccaggacagcaggucgagaaaaugucu

SEQ ID NO: 210199 - RNA, 32 nt, Homo Sapiens
ggggcacccggacacccgccccggccucaguc

SEQ ID NO: 210200 - RNA, 32 nt, Homo Sapiens
augagcugugugaauuuuuagccagccuuugg

SEQ ID NO: 210201 - RNA, 32 nt, Homo Sapiens
uguugcguuuuuccuuguagcauuuggaaaug

SEQ ID NO: 210202 - RNA, 32 nt, Homo Sapiens
aagugggugugggugauuuccuggcgggggga

SEQ ID NO: 210203 - RNA, 32 nt, Homo Sapiens
gaaauaaacagugucacuaaagggcaugcccu

SEQ ID NO: 210204 - RNA, 32 nt, Homo Sapiens
gcccaggcacaaucuuuuccagcuuugccugu

SEQ ID NO: 210205 - RNA, 32 nt, Homo Sapiens
gugauagcggcuuccuggcgggugggaggccc

SEQ ID NO: 210206 - RNA, 32 nt, Homo Sapiens
ggcggacuuuugggccggggccgggcggcggg

SEQ ID NO: 210207 - RNA, 32 nt, Homo Sapiens
uaaaauggaugacaauaagagcuuaaagacua

SEQ ID NO: 210208 - RNA, 32 nt, Homo Sapiens
ugcugaguaacaagaauuaaaauacauguuug

SEQ ID NO: 210209 - RNA, 32 nt, Homo Sapiens
ugcuccuccuuccaugagacaaugggcuccuu

SEQ ID NO: 210210 - RNA, 32 nt, Homo Sapiens
uuuuuucuucugaaggaugcuaucauuugccc

SEQ ID NO: 210211 - RNA, 32 nt, Homo Sapiens
uauuuccccuauauuuuaguccuuccauuccu

SEQ ID NO: 210212 - RNA, 32 nt, Homo Sapiens
gcuuugccugguuuugucuuuuaugcagauag

SEQ ID NO: 210213 - RNA, 32 nt, Homo Sapiens
cacgccagccaugccccuccccaggacuccca

SEQ ID NO: 210214 - RNA, 32 nt, Homo Sapiens
ccagggccgggcgggaccgcggggaccauggc

SEQ ID NO: 210215 - RNA, 32 nt, Homo Sapiens
cugagaucaggaguuugagaccauccugagua

SEQ ID NO: 210216 - RNA, 32 nt, Homo Sapiens
acaagacaaggugcaccgguuucauagacgca

SEQ ID NO: 210217 - RNA, 32 nt, Homo Sapiens
gauccuuuugaaaaaguuaagacuauaugaag

SEQ ID NO: 210218 - RNA, 32 nt, Homo Sapiens
uauaccauauagcaacgauauuuuaacagauu

SEQ ID NO: 210219 - RNA, 32 nt, Homo Sapiens
cccugagccccaccuccuccagggagcccucc

SEQ ID NO: 210220 - RNA, 29 nt, Homo Sapiens
uaaauugugacuuauacugccugauagcu

SEQ ID NO: 210221 - RNA, 32 nt, Homo Sapiens
uugucucaguuauagggaguuuuguacauggu

SEQ ID NO: 210222 - RNA, 32 nt, Homo Sapiens
cuaugauguaaauuuuuaguauuaacuaccuu

SEQ ID NO: 210223 - RNA, 32 nt, Homo Sapiens
caagcagcagugcgcuuccaccucggggccuu

SEQ ID NO: 210224 - RNA, 32 nt, Homo Sapiens
guuacacuccugcacuaaaggcacguacugca

SEQ ID NO: 210225 - RNA, 32 nt, Homo Sapiens
uguacagaaauauuuuguaauguguugauuuu

SEQ ID NO: 210226 - RNA, 32 nt, Homo Sapiens
ccaugcaggacaaacauccucucaagcaguca

SEQ ID NO: 210227 - RNA, 32 nt, Homo Sapiens
gccagcaccccuccccaucagagugugguggc

SEQ ID NO: 210228 - RNA, 32 nt, Homo Sapiens
uucaaggccuucaguuuauuuccacuauuuuc

SEQ ID NO: 210229 - RNA, 29 nt, Homo Sapiens
augagaauuaaaaagcacucugcaaaacc

SEQ ID NO: 210230 - RNA, 32 nt, Homo Sapiens
aaacaggccgggacaguggugcaugccaguca

SEQ ID NO: 210231 - RNA, 32 nt, Homo Sapiens
uccugugcccaaucccuuugccucagugcaga

SEQ ID NO: 210232 - RNA, 32 nt, Homo Sapiens
caacucaguuucucagccauggaccaaggugc

SEQ ID NO: 210233 - RNA, 32 nt, Homo Sapiens
uauuuuuccuucccuuugcuaccuuggcccuu

SEQ ID NO: 210234 - RNA, 31 nt, Homo Sapiens
ggacgcggaaacacucccuggagguucugac

SEQ ID NO: 210235 - RNA, 32 nt, Homo Sapiens
aguaucauuuggauuuggagaaguguugauua

SEQ ID NO: 210236 - RNA, 32 nt, Homo Sapiens
auauaacauguguauguaaaucuucaugguga

SEQ ID NO: 210237 - RNA, 32 nt, Homo Sapiens
aaagcgagccgguggauccauaaagaacccag

SEQ ID NO: 210238 - RNA, 32 nt, Homo Sapiens
gucugugguuuuuuuuuuuuuaaccaaagugu

SEQ ID NO: 210239 - RNA, 32 nt, Homo Sapiens
uaaaauauuuuuuaaucuaaauguagagaagu

SEQ ID NO: 210240 - RNA, 32 nt, Homo Sapiens
ccccggcacggcaaguacauggccugcugccu

SEQ ID NO: 210241 - RNA, 32 nt, Homo Sapiens
agacaacaaaucccuuuuuuuuucucaauuga

SEQ ID NO: 210242 - RNA, 32 nt, Homo Sapiens
cugcccauuucccaccuucccuucucccacca

SEQ ID NO: 210243 - RNA, 32 nt, Homo Sapiens
cagugcccuaaaacuccaaacucaaaugcagu

SEQ ID NO: 210244 - RNA, 32 nt, Homo Sapiens
uggggagcuggcggcggcggcugcugggccuc

SEQ ID NO: 210245 - RNA, 32 nt, Homo Sapiens
cccuugacaggaacuggggaccaagagccucc

SEQ ID NO: 210246 - RNA, 32 nt, Homo Sapiens
uugauguaucccauucgcuccauguuaacauc

SEQ ID NO: 210247 - RNA, 32 nt, Homo Sapiens
ggagucuuuacuacaaccagcuccaucuucaa

SEQ ID NO: 210248 - RNA, 30 nt, Homo Sapiens
cuccuguccacugugggggaagcuuggcag

SEQ ID NO: 210249 - RNA, 32 nt, Homo Sapiens
ugccagcagaacugguuuuguucugaauagua

SEQ ID NO: 210250 - RNA, 32 nt, Homo Sapiens
uugaggagaugcugaagcucuccaucauugac

SEQ ID NO: 210251 - RNA, 32 nt, Homo Sapiens
cgccccacuccagauuugcccccgccuuguuu

SEQ ID NO: 210252 - RNA, 32 nt, Homo Sapiens
uaaaauuugguauggauucacuuuuuacuuau

SEQ ID NO: 210253 - RNA, 32 nt, Homo Sapiens
guaaaaugcuaaaauaagcuaccuguaauaag

SEQ ID NO: 210254 - RNA, 32 nt, Homo Sapiens
ccaacagaucuccccuaacagugucgugcacc

SEQ ID NO: 210255 - RNA, 32 nt, Homo Sapiens
aguggaguguuuuguucauggagacuuauugu

SEQ ID NO: 210256 - RNA, 32 nt, Homo Sapiens
aauuuuugauucaguauuugaauuucuucuuc

SEQ ID NO: 210257 - RNA, 30 nt, Homo Sapiens
ggacucuuuaugcgcugcggcaggauacgc

SEQ ID NO: 210258 - RNA, 32 nt, Homo Sapiens
uucgaguuuuuuagugaauauuuacaauuucc

SEQ ID NO: 210259 - RNA, 32 nt, Homo Sapiens
ggugagcugggagguguucagaauagaagagc

SEQ ID NO: 210260 - RNA, 32 nt, Homo Sapiens
ccaggugcugccgcccggggcuacggcagggc

SEQ ID NO: 210261 - RNA, 32 nt, Homo Sapiens
guggcagucuguagagcagcucccagaggcug

SEQ ID NO: 210262 - RNA, 32 nt, Homo Sapiens
gaccuucagggagagcugggcagacagguggg

SEQ ID NO: 210263 - RNA, 32 nt, Homo Sapiens
cuggggcggggcccaggagaccacggggagca

SEQ ID NO: 210264 - RNA, 32 nt, Homo Sapiens
cgagggcccgggggcgcgcgacgccaugggcc

SEQ ID NO: 210265 - RNA, 29 nt, Homo Sapiens
ggccaugccggcguuggcgcgcgacgcgg

SEQ ID NO: 210266 - RNA, 32 nt, Homo Sapiens
agccugguggugucggguguugguggguagag

SEQ ID NO: 210267 - RNA, 32 nt, Homo Sapiens
uggacccacccuccccguaugcacucucaggg

SEQ ID NO: 210268 - RNA, 32 nt, Homo Sapiens
cucuuugccuucuccuuaccacugucacuaug

SEQ ID NO: 210269 - RNA, 32 nt, Homo Sapiens
uucuuuuauaaugaugaucauuuuacaggaaa

SEQ ID NO: 210270 - RNA, 32 nt, Homo Sapiens
uagaauuucugccucugaacuacuucauugaa

SEQ ID NO: 210271 - RNA, 32 nt, Homo Sapiens
cgagaguggaggaggaggcggcggcugcggga

SEQ ID NO: 210272 - RNA, 32 nt, Homo Sapiens
agugugaauauuaauuaguuuauauuacucuc

SEQ ID NO: 210273 - RNA, 32 nt, Homo Sapiens
auccucaucucucuccuugacuggaauugcug

SEQ ID NO: 210274 - RNA, 32 nt, Homo Sapiens
cgaugagguauuaaaggaaaccacuggucuug

SEQ ID NO: 210275 - RNA, 32 nt, Homo Sapiens
cccagguggggagcuagccugaaagagacagc

SEQ ID NO: 210276 - RNA, 32 nt, Homo Sapiens
gcgcucuccuucccccgcccucagagcgcucc

SEQ ID NO: 210277 - RNA, 32 nt, Homo Sapiens
cccuccuccacagguccaggugccgcucccuc

SEQ ID NO: 210278 - RNA, 32 nt, Homo Sapiens
ggagguagaagagaugcagagaaauguggaau

SEQ ID NO: 210279 - RNA, 32 nt, Homo Sapiens
ugcuccccauuugcaccuagcuggaucaaguu

SEQ ID NO: 210280 - RNA, 32 nt, Homo Sapiens
ccacaauguauuucaacaaagaucaucaaugc

SEQ ID NO: 210281 - RNA, 32 nt, Homo Sapiens
ggggugggcucuaggaguuagcccuuaucccc

SEQ ID NO: 210282 - RNA, 32 nt, Homo Sapiens
ucaaguuaacugagcuuuuucuuaauuucauu

SEQ ID NO: 210283 - RNA, 32 nt, Homo Sapiens
cuauguuuccccccuuuucagaauaaacuauu

SEQ ID NO: 210284 - RNA, 32 nt, Homo Sapiens
cagccucuccucugucucuccucggucucagc

SEQ ID NO: 210285 - RNA, 32 nt, Homo Sapiens
acauuuuuccuuuccuucucaaugagaaaaua

SEQ ID NO: 210286 - RNA, 32 nt, Homo Sapiens
aucuuuuuuccacagcaguguuccauuauguu

SEQ ID NO: 210287 - RNA, 32 nt, Homo Sapiens
uuuaauuucagaguuugugucugguagaccuc

SEQ ID NO: 210288 - RNA, 30 nt, Homo Sapiens
caaggcugccugcgcgcgguucgcuccggg

SEQ ID NO: 210289 - RNA, 32 nt, Homo Sapiens
uuuuaguauuuugaaucagagaauacuuggcc

SEQ ID NO: 210290 - RNA, 32 nt, Homo Sapiens
ucaguauuuuggauguugcugcauuuuacaau

SEQ ID NO: 210291 - RNA, 32 nt, Homo Sapiens
ggccagugagcucagccuccaaggcuuuaaag

SEQ ID NO: 210292 - RNA, 32 nt, Homo Sapiens
ucccaagcgagagcgucgcauucacccgcgug

SEQ ID NO: 210293 - RNA, 32 nt, Homo Sapiens
uccaaguagagcugauacagagaucugugaau

SEQ ID NO: 210294 - RNA, 32 nt, Homo Sapiens
ccacaccugccgggcaguaggugcuggacauc

SEQ ID NO: 210295 - RNA, 32 nt, Homo Sapiens
uuuuuaaaugucaguugaaaauuauggcugua

SEQ ID NO: 210296 - RNA, 30 nt, Homo Sapiens
gcgccauggaccgaggccaggugcuggagc

SEQ ID NO: 210297 - RNA, 32 nt, Homo Sapiens
gcuuccagggcucuuuguguucugugacagca

SEQ ID NO: 210298 - RNA, 32 nt, Homo Sapiens
aacagcggaagaccuaagauuaucgggagggc

SEQ ID NO: 210299 - RNA, 32 nt, Homo Sapiens
gaacauguguagaagggauuguaacccacaac

SEQ ID NO: 210300 - RNA, 32 nt, Homo Sapiens
ugacuuguucagaacacauuguuuuuaacaga

SEQ ID NO: 210301 - RNA, 28 nt, Homo Sapiens
caagauggcggccgcggcggugaacggg

SEQ ID NO: 210302 - RNA, 32 nt, Homo Sapiens
gaggagguagagggggcgggggucgcacuagg

SEQ ID NO: 210303 - RNA, 32 nt, Homo Sapiens
cuugccucacacccacccacaucacaggaugg

SEQ ID NO: 210304 - RNA, 32 nt, Homo Sapiens
cuacacagaaaagugacaagggcagagaugau

SEQ ID NO: 210305 - RNA, 32 nt, Homo Sapiens
ggggagaaccccggaccccuggcaugcaugcu

SEQ ID NO: 210306 - RNA, 32 nt, Homo Sapiens
gccucugguccgagccgccucgguucugaagc

SEQ ID NO: 210307 - RNA, 30 nt, Homo Sapiens
uuggcuguacuugccauuucuuaccacuua

SEQ ID NO: 210308 - RNA, 32 nt, Homo Sapiens
gcaaguuagcuguagugccauuucagaaacug

SEQ ID NO: 210309 - RNA, 32 nt, Homo Sapiens
cccagcucaagcccccuuccuugcucuggacc

SEQ ID NO: 210310 - RNA, 32 nt, Homo Sapiens
ggggccggcagagugucgugugggccucacag

SEQ ID NO: 210311 - RNA, 32 nt, Homo Sapiens
ccuucccagguggggacuggggcuugcuuuau

SEQ ID NO: 210312 - RNA, 32 nt, Homo Sapiens
agcuagugucuccacagccugucuccaaggcc

SEQ ID NO: 210313 - RNA, 32 nt, Homo Sapiens
ggaaaaaauggcaauugagguggguggucaaa

SEQ ID NO: 210314 - RNA, 32 nt, Homo Sapiens
auuuuuaaaaauuacacuuauaagaguauaau

SEQ ID NO: 210315 - RNA, 32 nt, Homo Sapiens
aggagaccagcaugugcugaaccucuccgugc

SEQ ID NO: 210316 - RNA, 32 nt, Homo Sapiens
gccgggcaugggugggggcgccgggccgucac

SEQ ID NO: 210317 - RNA, 32 nt, Homo Sapiens
aggcgugagugaccaugccuagcucacuucca

SEQ ID NO: 210318 - RNA, 32 nt, Homo Sapiens
auguacuuuccacaguuaaauuuacauuaaug

SEQ ID NO: 210319 - RNA, 32 nt, Homo Sapiens
auaccaucaucccugcggaugcaccgccguac

SEQ ID NO: 210320 - RNA, 32 nt, Homo Sapiens
acaugcuuuuucuuucaaaauugggauccuuc

SEQ ID NO: 210321 - RNA, 32 nt, Homo Sapiens
cauauccacagaacucuuucuagaggaauuuu

SEQ ID NO: 210322 - RNA, 32 nt, Homo Sapiens
ugugaauugaauauauuuuucaagguauuaua

SEQ ID NO: 210323 - RNA, 32 nt, Homo Sapiens
gccaaucuaaagauuaugaccaucacagagaa

SEQ ID NO: 210324 - RNA, 32 nt, Homo Sapiens
cuggauauuuuuguauuccucuagguauuccu

SEQ ID NO: 210325 - RNA, 32 nt, Homo Sapiens
uaggagcuuaggaaacaagaaacccuggauug

SEQ ID NO: 210326 - RNA, 32 nt, Homo Sapiens
ggaucuaauuaaucuaaagagcuuuugcacaa

SEQ ID NO: 210327 - RNA, 30 nt, Homo Sapiens
uugcucuaucaccaggugggagugcagugg

SEQ ID NO: 210328 - RNA, 32 nt, Homo Sapiens
uucaggagagagugagcagagacucaauguuc

SEQ ID NO: 210329 - RNA, 32 nt, Homo Sapiens
aaauauccauggauacccuugugacacauaga

SEQ ID NO: 210330 - RNA, 32 nt, Homo Sapiens
caggaauauguaucaugguagaauagagguua

SEQ ID NO: 210331 - RNA, 32 nt, Homo Sapiens
gcuuggaagggaacagggcagaugaggcccuu

SEQ ID NO: 210332 - RNA, 32 nt, Homo Sapiens
uaauuuggguuuuguggaauccaaagaagaga

SEQ ID NO: 210333 - RNA, 32 nt, Homo Sapiens
ugcugaaccagccagcccugggacgccccagc

SEQ ID NO: 210334 - RNA, 32 nt, Homo Sapiens
ugaaaugccaaguuuucuguauaaguguuuuu

SEQ ID NO: 210335 - RNA, 32 nt, Homo Sapiens
aaaagguggaggcauuguaaaaaggaaauagu

SEQ ID NO: 210336 - RNA, 32 nt, Homo Sapiens
cgcccgggccgcggggcgaugugagccccagg

SEQ ID NO: 210337 - RNA, 32 nt, Homo Sapiens
guauacauaauuaccaaacacuaugugaccug

SEQ ID NO: 210338 - RNA, 32 nt, Homo Sapiens
gugggaggggaauaaaguucuguuauauuucc

SEQ ID NO: 210339 - RNA, 32 nt, Homo Sapiens
gcccuucaucgacaggacagccaggcaggggg

SEQ ID NO: 210340 - RNA, 32 nt, Homo Sapiens
guucccacucaugauuuuccguuacaaacagg

SEQ ID NO: 210341 - RNA, 32 nt, Homo Sapiens
gauuccccuaaaacuuaugauuaccaggaugg

SEQ ID NO: 210342 - RNA, 32 nt, Homo Sapiens
uucagaaggaguucucacucgaagauaaagaa

SEQ ID NO: 210343 - RNA, 32 nt, Homo Sapiens
aaaauguucuaauuauuuuaaauguuuaaaga

SEQ ID NO: 210344 - RNA, 32 nt, Homo Sapiens
gcccagaauaaaaugaaaaagagauggguuuu

SEQ ID NO: 210345 - RNA, 32 nt, Homo Sapiens
uugcggaggugaagaggacccugaguccccac

SEQ ID NO: 210346 - RNA, 32 nt, Homo Sapiens
ugagaaguggggaucuugggggugggcgggcu

SEQ ID NO: 210347 - RNA, 32 nt, Homo Sapiens
agcugucuggggauggcccggagcccccaagg

SEQ ID NO: 210348 - RNA, 32 nt, Homo Sapiens
uggcuggcuggguagucagcugagccuguugc

SEQ ID NO: 210349 - RNA, 32 nt, Homo Sapiens
aggugggaggaucaccugaggucaggaguuca

SEQ ID NO: 210350 - RNA, 32 nt, Homo Sapiens
ccagaaaggugauuccaggaggaguuagccaa

SEQ ID NO: 210351 - RNA, 32 nt, Homo Sapiens
cgccagcugaccucaccguccaggcggacacu

SEQ ID NO: 210352 - RNA, 32 nt, Homo Sapiens
ccuagagacaagagugaaacuccaucucaaaa

SEQ ID NO: 210353 - RNA, 32 nt, Homo Sapiens
ccacauauggaaauaacgugcaacccuggaaa

SEQ ID NO: 210354 - RNA, 32 nt, Homo Sapiens
gagauccugcucugcuggccugagccccaggc

SEQ ID NO: 210355 - RNA, 32 nt, Homo Sapiens
cugaggcaggggucucugggggcgaggagggc

SEQ ID NO: 210356 - RNA, 32 nt, Homo Sapiens
cacaaaucauuuuuacguuuuauuuuuaauaa

SEQ ID NO: 210357 - RNA, 32 nt, Homo Sapiens
aggaacuuguuuaauaaauggacguguaagga

SEQ ID NO: 210358 - RNA, 32 nt, Homo Sapiens
agggacugccuucuccuuccugcuucauccgg

SEQ ID NO: 210359 - RNA, 32 nt, Homo Sapiens
caaauuuuaucuccagauggaaugggguccua

SEQ ID NO: 210360 - RNA, 32 nt, Homo Sapiens
caguuuucuuaggggacggacccuguuacuuu

SEQ ID NO: 210361 - RNA, 32 nt, Homo Sapiens
ugaaaauuuccucuccuuuuucuaccauaucu

SEQ ID NO: 210362 - RNA, 32 nt, Homo Sapiens
uuucacucagaauagcacaguuaagaaauucc

SEQ ID NO: 210363 - RNA, 32 nt, Homo Sapiens
caguuggcaacgcugcccauucaauugaauca

SEQ ID NO: 210364 - RNA, 32 nt, Homo Sapiens
cuugaggaaaauugaccaguucuagcaguucu

SEQ ID NO: 210365 - RNA, 32 nt, Homo Sapiens
aggugggaggaucaccugaggucgggaguucg

SEQ ID NO: 210366 - RNA, 32 nt, Homo Sapiens
cuggcaccugucauguccuccacaccacaccc

SEQ ID NO: 210367 - RNA, 32 nt, Homo Sapiens
cccccagugggcauagucagugucguuuauau

SEQ ID NO: 210368 - RNA, 32 nt, Homo Sapiens
gcucaggugaucugcccgccucggacucccaa

SEQ ID NO: 210369 - RNA, 30 nt, Homo Sapiens
aagggacugcagcaggaugagucagugccc

SEQ ID NO: 210370 - RNA, 32 nt, Homo Sapiens
cccggcuaauguuuuucuguauuuuuaguaga

SEQ ID NO: 210371 - RNA, 32 nt, Homo Sapiens
gaucagcguggccuuguucugucaccaaugua

SEQ ID NO: 210372 - RNA, 32 nt, Homo Sapiens
ccuggucugccuuguggguccuggacggagcc

SEQ ID NO: 210373 - RNA, 32 nt, Homo Sapiens
acauguuccuuccgaguuuucuuucgcuggaa

SEQ ID NO: 210374 - RNA, 32 nt, Homo Sapiens
uucaaacauuuuacaugauuugcgaugguuac

SEQ ID NO: 210375 - RNA, 32 nt, Homo Sapiens
uaaaccaacuuaaugauucuuauguaagguac

SEQ ID NO: 210376 - RNA, 29 nt, Homo Sapiens
cugaugucguguuuacagagcaaggcuuc

SEQ ID NO: 210377 - RNA, 32 nt, Homo Sapiens
uuauacauugaccaggcuuaagaauaucucuu

SEQ ID NO: 210378 - RNA, 32 nt, Homo Sapiens
ucucuuccgcaucuucuguucccugggaugcc

SEQ ID NO: 210379 - RNA, 32 nt, Homo Sapiens
aaagaagacauuuaugcggccaaaaaacauau

SEQ ID NO: 210380 - RNA, 32 nt, Homo Sapiens
ucccacgccggcccgcgcgugccucugccuac

SEQ ID NO: 210381 - RNA, 31 nt, Homo Sapiens
acugugaagccccagggaauggcugcacuuc

SEQ ID NO: 210382 - RNA, 32 nt, Homo Sapiens
uauauaauucaaacagagcaucuuguaacuga

SEQ ID NO: 210383 - RNA, 32 nt, Homo Sapiens
aagucccauucgguucuacauuauuaacuuuu

SEQ ID NO: 210384 - RNA, 27 nt, Homo Sapiens
guaggcuuccucuucagcaugcccccc

SEQ ID NO: 210385 - RNA, 30 nt, Homo Sapiens
guggcaggcaggcaggcuggccccggggac

SEQ ID NO: 210386 - RNA, 32 nt, Homo Sapiens
uuugaaauacuaaauuuuauagaugcagcacc

SEQ ID NO: 210387 - RNA, 32 nt, Homo Sapiens
cagcuucugaccacaguuacgagcugcgcaau

SEQ ID NO: 210388 - RNA, 32 nt, Homo Sapiens
agugacgcgcgcgaauggauagacgcuauucc

SEQ ID NO: 210389 - RNA, 32 nt, Homo Sapiens
auuauuaauauuugguauguacauccuuauau

SEQ ID NO: 210390 - RNA, 32 nt, Homo Sapiens
gcgucuugcauggccuggcaccggguggggug

SEQ ID NO: 210391 - RNA, 32 nt, Homo Sapiens
uagcuuucaguuccuuugguagugugggcauu

SEQ ID NO: 210392 - RNA, 31 nt, Homo Sapiens
gcgcggaggacacgccugcccugccugccau

SEQ ID NO: 210393 - RNA, 32 nt, Homo Sapiens
accuccaggguuuccagcuccuccuccuucac

SEQ ID NO: 210394 - RNA, 32 nt, Homo Sapiens
cccuuuaaaaauuauuuuuaccugaagcuugu

SEQ ID NO: 210395 - RNA, 32 nt, Homo Sapiens
auggugaaacccuguuucuacuaaaaauacaa

SEQ ID NO: 210396 - RNA, 32 nt, Homo Sapiens
gugcuggcccucgcacccaaagaccaucaagg

SEQ ID NO: 210397 - RNA, 32 nt, Homo Sapiens
guugcuuaaugauacagcaggauccuggcuuc

SEQ ID NO: 210398 - RNA, 32 nt, Homo Sapiens
gcuaaaucccagugaaaugaaaacagauauug

SEQ ID NO: 210399 - RNA, 32 nt, Homo Sapiens
gcaggagcacccccuuccuuccucggaagcgu

SEQ ID NO: 210400 - RNA, 32 nt, Homo Sapiens
ucuccagggagacugccagcccucgugggugu

SEQ ID NO: 210401 - RNA, 32 nt, Homo Sapiens
gagcagcuccuggaagaccuccgcaacgauuc

SEQ ID NO: 210402 - RNA, 32 nt, Homo Sapiens
gugccgccuuucugccaguaguucugguucuu

SEQ ID NO: 210403 - RNA, 32 nt, Homo Sapiens
caagucugggggcagcagcaggguccuugaga

SEQ ID NO: 210404 - RNA, 32 nt, Homo Sapiens
uucuuuuuuuuuuuuuuuuuuagagauggggu

SEQ ID NO: 210405 - RNA, 32 nt, Homo Sapiens
cuacuguucugccugccuggggcugggguggu

SEQ ID NO: 210406 - RNA, 32 nt, Homo Sapiens
uuugaugucagcaguugcugguaaaaugaaga

SEQ ID NO: 210407 - RNA, 32 nt, Homo Sapiens
cucauccauuugcguuccaugaugcugggauu

SEQ ID NO: 210408 - RNA, 32 nt, Homo Sapiens
aggguuaccugggcucaagugauccuucugcc

SEQ ID NO: 210409 - RNA, 32 nt, Homo Sapiens
cacugcacaucuagagaaaaacaaaaauagaa

SEQ ID NO: 210410 - RNA, 32 nt, Homo Sapiens
aggccucccucaaccccaccacuucuuuuaua

SEQ ID NO: 210411 - RNA, 32 nt, Homo Sapiens
acacaacacauacacacacacacacacacaca

SEQ ID NO: 210412 - RNA, 32 nt, Homo Sapiens
cuuuucccuuucaaccucuccuccgcugucau

SEQ ID NO: 210413 - RNA, 32 nt, Homo Sapiens
cauccugugaaacaucguuuaaggaaacguuu

SEQ ID NO: 210414 - RNA, 32 nt, Homo Sapiens
aaauggguacugaaaauagauucaacuaggcu

SEQ ID NO: 210415 - RNA, 32 nt, Homo Sapiens
ucuuauagcaccagcucuguguccucagaguc

SEQ ID NO: 210416 - RNA, 32 nt, Homo Sapiens
cggccugggacgcaggcggagccccgcgcagg

SEQ ID NO: 210417 - RNA, 32 nt, Homo Sapiens
gccggggagcagccccuguuccccugaacugc

SEQ ID NO: 210418 - RNA, 32 nt, Homo Sapiens
uuacauagauuaauauaaaacauauccucauu

SEQ ID NO: 210419 - RNA, 32 nt, Homo Sapiens
aggcguggcuuccagacuccccggccggaagu

SEQ ID NO: 210420 - RNA, 32 nt, Homo Sapiens
aauuaucauaaagauagcauuacaaaugcagu

SEQ ID NO: 210421 - RNA, 32 nt, Homo Sapiens
cauuguuacaugaaagugauagauagcaacaa

SEQ ID NO: 210422 - RNA, 32 nt, Homo Sapiens
aggcgugugcggggcggggacggggggucucc

SEQ ID NO: 210423 - RNA, 32 nt, Homo Sapiens
ggcugcauggccgggcggggcggugucuccuu

SEQ ID NO: 210424 - RNA, 32 nt, Homo Sapiens
uugaaaagggaagagaugggugugggguggca

SEQ ID NO: 210425 - RNA, 32 nt, Homo Sapiens
gaauuccggaaaugacccugcccgggggccca

SEQ ID NO: 210426 - RNA, 32 nt, Homo Sapiens
ccugggcgacagagcgagacuccgugggcuug

SEQ ID NO: 210427 - RNA, 32 nt, Homo Sapiens
cugcugcccacccaccugccaguguuauuuau

SEQ ID NO: 210428 - RNA, 32 nt, Homo Sapiens
aguacuuuaacaugaauagauaccuuguaaac

SEQ ID NO: 210429 - RNA, 32 nt, Homo Sapiens
ucacaaaccuagacauggaaaaacagauuacu

SEQ ID NO: 210430 - RNA, 32 nt, Homo Sapiens
gcagcaaugcuguuaacugcauuuguugugau

SEQ ID NO: 210431 - RNA, 31 nt, Homo Sapiens
ggccagaugggcagcaccauggagcccccug

SEQ ID NO: 210432 - RNA, 32 nt, Homo Sapiens
uuuuauuuucuuuuucuuucuucauaaagaug

SEQ ID NO: 210433 - RNA, 27 nt, Homo Sapiens
uucugguccuucuuggcuccucaugug

SEQ ID NO: 210434 - RNA, 32 nt, Homo Sapiens
uguuuccuguguuugggcagaagugcaaagua

SEQ ID NO: 210435 - RNA, 32 nt, Homo Sapiens
uaaauagcucuuucuugcuguuuuaauguggu

SEQ ID NO: 210436 - RNA, 32 nt, Homo Sapiens
uacauggagagagacagaacucucucagcuga

SEQ ID NO: 210437 - RNA, 32 nt, Homo Sapiens
gcauuuauuuaguacagauguaaugacaaagg

SEQ ID NO: 210438 - RNA, 32 nt, Homo Sapiens
ucugagcggcccggguccugccgggcugacca

SEQ ID NO: 210439 - RNA, 32 nt, Homo Sapiens
ucaaggcccuuaaaacugugggcucaguaucc

SEQ ID NO: 210440 - RNA, 32 nt, Homo Sapiens
guguguucgcacauccugugugugcacagcug

SEQ ID NO: 210441 - RNA, 31 nt, Homo Sapiens
uuuucuaggcacugcguucagugcugcuuca

SEQ ID NO: 210442 - RNA, 32 nt, Homo Sapiens
ucgaggcagcaggauuuaccguccacauuccu

SEQ ID NO: 210443 - RNA, 32 nt, Homo Sapiens
ggcuggcagcgggagcuucuucugccgggcug

SEQ ID NO: 210444 - RNA, 32 nt, Homo Sapiens
cccgacuauuuucucauagucccuauuccaau

SEQ ID NO: 210445 - RNA, 32 nt, Homo Sapiens
aguacuuuuuaaaauuuuugcaucaucaucuu

SEQ ID NO: 210446 - RNA, 32 nt, Homo Sapiens
cuccgaagcuccccggcuguggcgcuucugug

SEQ ID NO: 210447 - RNA, 32 nt, Homo Sapiens
gucaccaggugucaagaugcugcaaguacaua

SEQ ID NO: 210448 - RNA, 28 nt, Homo Sapiens
caaguuagaggucaacauuugaaaagcc

SEQ ID NO: 210449 - RNA, 32 nt, Homo Sapiens
gcugucacaaggaaaagcagccggcuggcacc

SEQ ID NO: 210450 - RNA, 32 nt, Homo Sapiens
cugcugucguuguuguggaagcauguagacug

SEQ ID NO: 210451 - RNA, 32 nt, Homo Sapiens
gccaugaauuuauggacaguuagaugcuuacc

SEQ ID NO: 210452 - RNA, 32 nt, Homo Sapiens
aaccucuuuuauaagugugauuuuaaaaaugu

SEQ ID NO: 210453 - RNA, 32 nt, Homo Sapiens
ccaucccgcuggcgcuccccgcucgcugaacc

SEQ ID NO: 210454 - RNA, 32 nt, Homo Sapiens
cggcuucaaggcgcugcugcugcucggggucc

SEQ ID NO: 210455 - RNA, 32 nt, Homo Sapiens
ugucuggcugucagccucugggcaggcuugcu

SEQ ID NO: 210456 - RNA, 32 nt, Homo Sapiens
aaugcuuaaugggaaauagaauauguauaugu

SEQ ID NO: 210457 - RNA, 32 nt, Homo Sapiens
cggguaggagagagaggccuaagaggcucacu

SEQ ID NO: 210458 - RNA, 31 nt, Homo Sapiens
uugauuuuguacucccugccccugcagcuug

SEQ ID NO: 210459 - RNA, 32 nt, Homo Sapiens
cagguugccugggcaagaacugcuucaauucc

SEQ ID NO: 210460 - RNA, 32 nt, Homo Sapiens
uuuuacugcaacuagagucuuauuuaaauguu

SEQ ID NO: 210461 - RNA, 32 nt, Homo Sapiens
ggucuuuuucuuuuauuauaaaagugauucau

SEQ ID NO: 210462 - RNA, 32 nt, Homo Sapiens
uauaugcuagauguucaauaaauauuuguuga

SEQ ID NO: 210463 - RNA, 32 nt, Homo Sapiens
gccgcccacagccgguggcccgcgucgccgcu

SEQ ID NO: 210464 - RNA, 32 nt, Homo Sapiens
aauguuguuucaugaauuuugaagcuauucag

SEQ ID NO: 210465 - RNA, 32 nt, Homo Sapiens
gcauggggcgcuucgagccgggacugcgugcg

SEQ ID NO: 210466 - RNA, 32 nt, Homo Sapiens
cacgaguguccgcacuaugacaaaagaaaagc

SEQ ID NO: 210467 - RNA, 32 nt, Homo Sapiens
aaaaaccaagaugccuccacauuuugucauaa

SEQ ID NO: 210468 - RNA, 30 nt, Homo Sapiens
ccuccgucgcguggcggcgggaacuguugg

SEQ ID NO: 210469 - RNA, 32 nt, Homo Sapiens
ugcaccugcacgguuuggagacaggcuucuuu

SEQ ID NO: 210470 - RNA, 32 nt, Homo Sapiens
auaacauugaaacagaaggaaaugcuguggac

SEQ ID NO: 210471 - RNA, 32 nt, Homo Sapiens
gauugcagacucaugaaagaccugaaacucua

SEQ ID NO: 210472 - RNA, 32 nt, Homo Sapiens
ucccugggggguggagcaggguccagguuuca

SEQ ID NO: 210473 - RNA, 32 nt, Homo Sapiens
cauugaguauaaaugccuggauguuaaggauu

SEQ ID NO: 210474 - RNA, 32 nt, Homo Sapiens
ccuuaugaaaauauuuauggaguucaauaaaa

SEQ ID NO: 210475 - RNA, 32 nt, Homo Sapiens
uggagagagcuauguugcugcuuauuucggag

SEQ ID NO: 210476 - RNA, 32 nt, Homo Sapiens
gcuugugauugugaagcucaaauggauuaugu

SEQ ID NO: 210477 - RNA, 32 nt, Homo Sapiens
gacaucagagucaaaucagcauugaccugagu

SEQ ID NO: 210478 - RNA, 32 nt, Homo Sapiens
uuaaaaauucaaauuuuagacauaucaguuua

SEQ ID NO: 210479 - RNA, 27 nt, Homo Sapiens
gaauggggccgcccggcuccccauggc

SEQ ID NO: 210480 - RNA, 32 nt, Homo Sapiens
acagauaugcuguccggacacacacacgcacg

SEQ ID NO: 210481 - RNA, 29 nt, Homo Sapiens
guaaacacauaccugugaaagcugucaga

SEQ ID NO: 210482 - RNA, 32 nt, Homo Sapiens
uacagagccuagagacaucaguuugauuuucu

SEQ ID NO: 210483 - RNA, 32 nt, Homo Sapiens
cucaugcccugccaagcagcagauggggaggg

SEQ ID NO: 210484 - RNA, 31 nt, Homo Sapiens
uguuugaaauaaaauaacagaauguucaagu

SEQ ID NO: 210485 - RNA, 32 nt, Homo Sapiens
ugguucaucuucuguacucugucaguuuucug

SEQ ID NO: 210486 - RNA, 32 nt, Homo Sapiens
ucuuuuucuucagauuuucuaaaaaucagauu

SEQ ID NO: 210487 - RNA, 32 nt, Homo Sapiens
ugccuucaguggguagaaugggcccagggccc

SEQ ID NO: 210488 - RNA, 32 nt, Homo Sapiens
cccaagaggcggagguugaguaagcugagaac

SEQ ID NO: 210489 - RNA, 32 nt, Homo Sapiens
ccauccauauugaguucuuugguaccgccucc

SEQ ID NO: 210490 - RNA, 32 nt, Homo Sapiens
gcaggagaggaugacacuuucgaugucagagc

SEQ ID NO: 210491 - RNA, 32 nt, Homo Sapiens
gccuguggggcugguucucaccuuugacagcu

SEQ ID NO: 210492 - RNA, 32 nt, Homo Sapiens
aggcauauucuuucaugguuucugcaaugaga

SEQ ID NO: 210493 - RNA, 32 nt, Homo Sapiens
uauaacagaauuaaaguagauuuuaaaagaua

SEQ ID NO: 210494 - RNA, 32 nt, Homo Sapiens
agccaaaaugacuuugaacugaaacuuuucua

SEQ ID NO: 210495 - RNA, 32 nt, Homo Sapiens
cacacacacacacacacacacacacacaccau

SEQ ID NO: 210496 - RNA, 32 nt, Homo Sapiens
caaacuuaaaaacaaccugaucucuucccucu

SEQ ID NO: 210497 - RNA, 32 nt, Homo Sapiens
agggaggccccggcagggagcugggccccgca

SEQ ID NO: 210498 - RNA, 32 nt, Homo Sapiens
agauguuggaggcuagggaggcuaguaaauau

SEQ ID NO: 210499 - RNA, 32 nt, Homo Sapiens
aguuucaccagguuggucaggcuggucucaaa

SEQ ID NO: 210500 - RNA, 32 nt, Homo Sapiens
ucaaauucaugaaaggacacaaacacacauaa

SEQ ID NO: 210501 - RNA, 32 nt, Homo Sapiens
aggagcgaugcuggaauuccaguguuuuauua

SEQ ID NO: 210502 - RNA, 31 nt, Homo Sapiens
agaugaaugaauaaacaaaaauauggacucu

SEQ ID NO: 210503 - RNA, 32 nt, Homo Sapiens
uucacaggcuccgcggccuccggccuccucgg

SEQ ID NO: 210504 - RNA, 32 nt, Homo Sapiens
gccagucccgcaggcagggcccggggaagccc

SEQ ID NO: 210505 - RNA, 32 nt, Homo Sapiens
cucaucuuuuuuucuuuuuuuugagacagagu

SEQ ID NO: 210506 - RNA, 32 nt, Homo Sapiens
acugugguuguagacaaaugugaaaguaacuu

SEQ ID NO: 210507 - RNA, 32 nt, Homo Sapiens
uuucacucacuuugcaccuuucccugucgcuc

SEQ ID NO: 210508 - RNA, 32 nt, Homo Sapiens
gugagcagaugggacaaguuagucuuuucucc

SEQ ID NO: 210509 - RNA, 32 nt, Homo Sapiens
ucggccacuucagaagccccagccucgaccua

SEQ ID NO: 210510 - RNA, 32 nt, Homo Sapiens
cauaaagcauuuggauacuaagccauuauuug

SEQ ID NO: 210511 - RNA, 32 nt, Homo Sapiens
aaaggagggauguacuuucagaucauguaacc

SEQ ID NO: 210512 - RNA, 32 nt, Homo Sapiens
cccaggagaccuggaccagaccacgaugugga

SEQ ID NO: 210513 - RNA, 31 nt, Homo Sapiens
uccccagcgcacugauguccccgcgcagagc

SEQ ID NO: 210514 - RNA, 32 nt, Homo Sapiens
gaggcauaaaagacaaaauguggcuuauuuua

SEQ ID NO: 210515 - RNA, 32 nt, Homo Sapiens
aaacaucagguuaggcaguauaaagaauagga

SEQ ID NO: 210516 - RNA, 32 nt, Homo Sapiens
ugucuggacuccugggggcgcuauuuaauguu

SEQ ID NO: 210517 - RNA, 32 nt, Homo Sapiens
accucugccucccagguucaugccauucuccu

SEQ ID NO: 210518 - RNA, 32 nt, Homo Sapiens
uuaguuauuuugaguucuuuucaacuuauaac

SEQ ID NO: 210519 - RNA, 32 nt, Homo Sapiens
auaugugguguucuuuuuuuuacacaagcauu

SEQ ID NO: 210520 - RNA, 32 nt, Homo Sapiens
ugccagcaacauuccugcuagcauacaggagu

SEQ ID NO: 210521 - RNA, 32 nt, Homo Sapiens
ugagauuugguucagaaaucccagaaauacaa

SEQ ID NO: 210522 - RNA, 32 nt, Homo Sapiens
gaguuuauuccuucugguggguucguggucuc

SEQ ID NO: 210523 - RNA, 32 nt, Homo Sapiens
cugaaagguaaauuauguccucauggauaccg

SEQ ID NO: 210524 - RNA, 32 nt, Homo Sapiens
uggaaucacuuuuuaaacuuuucaaguuaccu

SEQ ID NO: 210525 - RNA, 32 nt, Homo Sapiens
uuuuugaaguauaaaaaggacuucuaccuggg

SEQ ID NO: 210526 - RNA, 32 nt, Homo Sapiens
cccaucccuuagccccgcggcggccguguggg

SEQ ID NO: 210527 - RNA, 32 nt, Homo Sapiens
ggugccaggccacagccaaaaugcucaggcag

SEQ ID NO: 210528 - RNA, 32 nt, Homo Sapiens
ggcgccgcgggccaagggccgcccgagacggu

SEQ ID NO: 210529 - RNA, 32 nt, Homo Sapiens
cuauaggccaggcuacugccuccugauaaugg

SEQ ID NO: 210530 - RNA, 32 nt, Homo Sapiens
ugcuaucccuccccuugcccccaaccucccaa

SEQ ID NO: 210531 - RNA, 32 nt, Homo Sapiens
aucauucccagaaacauuucccagaaaauguu

SEQ ID NO: 210532 - RNA, 32 nt, Homo Sapiens
gugaggcagugacaccgagcuguuugaccaca

SEQ ID NO: 210533 - RNA, 32 nt, Homo Sapiens
ccuuaaaggcuuuuaauuuuguuuuguuugca

SEQ ID NO: 210534 - RNA, 32 nt, Homo Sapiens
ggcagccgggcgggugggaggggccggagcaa

SEQ ID NO: 210535 - RNA, 32 nt, Homo Sapiens
gcgguggcggggguuggcgacggagcgcguug

SEQ ID NO: 210536 - RNA, 32 nt, Homo Sapiens
guuuucuaaagauggccuggaaguagucuuug

SEQ ID NO: 210537 - RNA, 32 nt, Homo Sapiens
uuacuguaaaaauaaauuggacuuugcaaaag

SEQ ID NO: 210538 - RNA, 32 nt, Homo Sapiens
cccagcacccuguuguuauuaaggacucauuu

SEQ ID NO: 210539 - RNA, 30 nt, Homo Sapiens
ccuucuuccgguaggccgcguagaggcaug

SEQ ID NO: 210540 - RNA, 32 nt, Homo Sapiens
gccguuaccaaugacuccaugcaccgagagau

SEQ ID NO: 210541 - RNA, 32 nt, Homo Sapiens
gcucaugaaguucaaauugagauuguugccac

SEQ ID NO: 210542 - RNA, 30 nt, Homo Sapiens
acgggguuucaccauguuagccaggcuggu

SEQ ID NO: 210543 - RNA, 32 nt, Homo Sapiens
uuucacccauccaucagcugcuccaucaccug

SEQ ID NO: 210544 - RNA, 32 nt, Homo Sapiens
cuguuuaucacuuucacucaccagcuccugcu

SEQ ID NO: 210545 - RNA, 32 nt, Homo Sapiens
aguuugaugauaaguaaacgucccuuaacaaa

SEQ ID NO: 210546 - RNA, 32 nt, Homo Sapiens
uuccucggccccaaagccgucugccgggcuaa

SEQ ID NO: 210547 - RNA, 32 nt, Homo Sapiens
ccuacaugguagaacuuuuucuucuuacaacu

SEQ ID NO: 210548 - RNA, 32 nt, Homo Sapiens
uuaggacucuguggaaagcaaaucacagugcu

SEQ ID NO: 210549 - RNA, 32 nt, Homo Sapiens
ucucuaaugaaaacacuuuaaaacagauuggg

SEQ ID NO: 210550 - RNA, 32 nt, Homo Sapiens
auaagaaaugccugcaccuucccuccuuccua

SEQ ID NO: 210551 - RNA, 31 nt, Homo Sapiens
aucccuguguauaugaaagugcauaauaaau

SEQ ID NO: 210552 - RNA, 32 nt, Homo Sapiens
auugaucugugaaacccaaacucucaauacuc

SEQ ID NO: 210553 - RNA, 32 nt, Homo Sapiens
aaaucucuguaaauguggauagaaagcucagu

SEQ ID NO: 210554 - RNA, 32 nt, Homo Sapiens
cacugguuaaacauauuuuauucaccauuaag

SEQ ID NO: 210555 - RNA, 32 nt, Homo Sapiens
augaaaugugaaaauggugcugaugaaaacug

SEQ ID NO: 210556 - RNA, 32 nt, Homo Sapiens
gucuauaauacaaaaugcauaaaccauguccc

SEQ ID NO: 210557 - RNA, 32 nt, Homo Sapiens
caggcaugaagaugucugugccuuccaaccca

SEQ ID NO: 210558 - RNA, 32 nt, Homo Sapiens
aagagccauucggggcacguguguguacacac

SEQ ID NO: 210559 - RNA, 32 nt, Homo Sapiens
accacagucuuaggggcuugguaguuuggaaa

SEQ ID NO: 210560 - RNA, 30 nt, Homo Sapiens
aagaagguacuugcuaaagaagcuccucca

SEQ ID NO: 210561 - RNA, 32 nt, Homo Sapiens
uaguuuaauuuucuucaaaaugaaaauacugc

SEQ ID NO: 210562 - RNA, 32 nt, Homo Sapiens
cauccaccucgaggggacccuggcaccccggg

SEQ ID NO: 210563 - RNA, 32 nt, Homo Sapiens
agggagcucugccuguuggagcucccuguccu

SEQ ID NO: 210564 - RNA, 32 nt, Homo Sapiens
agaugccucacaguccugcgcagacagagaga

SEQ ID NO: 210565 - RNA, 32 nt, Homo Sapiens
cugcucccaggccccaggccuguggcucccuu

SEQ ID NO: 210566 - RNA, 32 nt, Homo Sapiens
guuggcagaaaggaauaaaaaugaaacuggag

SEQ ID NO: 210567 - RNA, 32 nt, Homo Sapiens
guuauuuuucuuuccauaaaaaugguauuaaa

SEQ ID NO: 210568 - RNA, 32 nt, Homo Sapiens
agaacacucagagggacggucaacaucagagc

SEQ ID NO: 210569 - RNA, 32 nt, Homo Sapiens
auguaaucgacuuuauaucuuagucacggagu

SEQ ID NO: 210570 - RNA, 32 nt, Homo Sapiens
augcugcggucucuccuccccuuucccuccag

SEQ ID NO: 210571 - RNA, 32 nt, Homo Sapiens
ccaaaccugccagcaccuggcccuuggacuuc

SEQ ID NO: 210572 - RNA, 32 nt, Homo Sapiens
uuuguacaaagucuugcuuuuauaagguuuca

SEQ ID NO: 210573 - RNA, 32 nt, Homo Sapiens
gaggucaucgacggcuucgccaucgccagcuu

SEQ ID NO: 210574 - RNA, 32 nt, Homo Sapiens
gagaagcuacauucuuuuuuuuucuuuucuuu

SEQ ID NO: 210575 - RNA, 32 nt, Homo Sapiens
gaggcuuaaguucaaaaagacaaagauacaga

SEQ ID NO: 210576 - RNA, 32 nt, Homo Sapiens
cugcugaauuuauguuguaaacguuacuuaac

SEQ ID NO: 210577 - RNA, 32 nt, Homo Sapiens
uucucuucgcaucggcggcggcuuccgucacc

SEQ ID NO: 210578 - RNA, 32 nt, Homo Sapiens
aauccuccugccucugcccccugagcagcugg

SEQ ID NO: 210579 - RNA, 32 nt, Homo Sapiens
uucuugcuauuaaccacccccacuuaugugga

SEQ ID NO: 210580 - RNA, 28 nt, Homo Sapiens
ccuggagggaguaccccgaggugcuccg

SEQ ID NO: 210581 - RNA, 32 nt, Homo Sapiens
agaagcuggaagggcuguugucuucccagguc

SEQ ID NO: 210582 - RNA, 32 nt, Homo Sapiens
gucugacccuccccugcucgccucccucaccc

SEQ ID NO: 210583 - RNA, 32 nt, Homo Sapiens
aagagcuuuuaaaacuuuguauuuuuguacaa

SEQ ID NO: 210584 - RNA, 32 nt, Homo Sapiens
guccaggcccccagccccuccucccucagacc

SEQ ID NO: 210585 - RNA, 32 nt, Homo Sapiens
uuggaucaaucagaaaggaaacacgaaagaaa

SEQ ID NO: 210586 - RNA, 32 nt, Homo Sapiens
uuaauaaaggagaauugaaaauacucauuucu

SEQ ID NO: 210587 - RNA, 32 nt, Homo Sapiens
uugaauuuucaacacagacucccugcuucuca

SEQ ID NO: 210588 - RNA, 32 nt, Homo Sapiens
gucugugacuauuuucuauaauaauuaguacu

SEQ ID NO: 210589 - RNA, 32 nt, Homo Sapiens
gucaagugauuccggccuccucgagacagcgg

SEQ ID NO: 210590 - RNA, 32 nt, Homo Sapiens
ucuugcacaggguggggcgcgcaguaggaacc

SEQ ID NO: 210591 - RNA, 32 nt, Homo Sapiens
ggaggaauacaaucaaggguuuuguauucaga

SEQ ID NO: 210592 - RNA, 32 nt, Homo Sapiens
gaaggggccugagauuucugcacuuuaaacaa

SEQ ID NO: 210593 - RNA, 32 nt, Homo Sapiens
ccccucagccccuuccuccccagggagcaaag

SEQ ID NO: 210594 - RNA, 32 nt, Homo Sapiens
uucuuuaucuaaaugucuaacauauuaugcac

SEQ ID NO: 210595 - RNA, 32 nt, Homo Sapiens
gguacccauagccgacagaccggagcgacagg

SEQ ID NO: 210596 - RNA, 32 nt, Homo Sapiens
ggggcaugcgugggcagcagggggcgugggca

SEQ ID NO: 210597 - RNA, 32 nt, Homo Sapiens
cucacugcaaccuccgccucccagguucaauu

SEQ ID NO: 210598 - RNA, 32 nt, Homo Sapiens
ugcucuuuggauuuauaacucuguuuagacua

SEQ ID NO: 210599 - RNA, 32 nt, Homo Sapiens
ccaggaccucauuuccaggagcucugagaggu

SEQ ID NO: 210600 - RNA, 32 nt, Homo Sapiens
ggcugggugugguggcucacgccuguaaucgc

SEQ ID NO: 210601 - RNA, 32 nt, Homo Sapiens
gcagucuccaucugcggcccugucccauggcu

SEQ ID NO: 210602 - RNA, 32 nt, Homo Sapiens
ccugacuuaguggaugugaaagcuguuuguga

SEQ ID NO: 210603 - RNA, 30 nt, Homo Sapiens
ugggaacuggcaaugggggagacauauuac

SEQ ID NO: 210604 - RNA, 32 nt, Homo Sapiens
ggaggagaugagaaggaaguggggaagaacuu

SEQ ID NO: 210605 - RNA, 32 nt, Homo Sapiens
ucugguagcugagacugcaugcccagcuccaa

SEQ ID NO: 210606 - RNA, 32 nt, Homo Sapiens
augacauguucaauguuguauuucauucuacu

SEQ ID NO: 210607 - RNA, 32 nt, Homo Sapiens
cccagagcugucuggacagccuuuccugugac

SEQ ID NO: 210608 - RNA, 32 nt, Homo Sapiens
uaggcuuucuaugcaccuaucaagaaucaaga

SEQ ID NO: 210609 - RNA, 32 nt, Homo Sapiens
aggcaugcgcucacugcuugcuugucagaaac

SEQ ID NO: 210610 - RNA, 32 nt, Homo Sapiens
ggguggugguggcacauggaugaaugaguauu

SEQ ID NO: 210611 - RNA, 32 nt, Homo Sapiens
ggcuucaggaggaggcugugaggcuggaggga

SEQ ID NO: 210612 - RNA, 32 nt, Homo Sapiens
auuaagagguauccuugauuuauuuuccagua

SEQ ID NO: 210613 - RNA, 31 nt, Homo Sapiens
ggauggugaaacaccugaagaucucauaucg

SEQ ID NO: 210614 - RNA, 32 nt, Homo Sapiens
ucuuucagcucccccauccccaucgcaggccg

SEQ ID NO: 210615 - RNA, 32 nt, Homo Sapiens
augcccucagaauuggggcaugggaggggggc

SEQ ID NO: 210616 - RNA, 32 nt, Homo Sapiens
gagcguacucaucucugagcugcugggcccag

SEQ ID NO: 210617 - RNA, 32 nt, Homo Sapiens
aaagguguccgcagccacacgcaaaaaagaag

SEQ ID NO: 210618 - RNA, 32 nt, Homo Sapiens
aggggaaaaaacaaaaucauguuaaugcguuu

SEQ ID NO: 210619 - RNA, 32 nt, Homo Sapiens
gacagauucuugcucugucacccaggcuggag

SEQ ID NO: 210620 - RNA, 32 nt, Homo Sapiens
acugguuugauuuugaaaaaugucuuuuccag

SEQ ID NO: 210621 - RNA, 32 nt, Homo Sapiens
uuacauauaaagacagaaaauaaaguauaaau

SEQ ID NO: 210622 - RNA, 32 nt, Homo Sapiens
ugcaagcaguagacauccuucuccauggacuc

SEQ ID NO: 210623 - RNA, 32 nt, Homo Sapiens
gauaauauguggcaucacuugcacacuuauuu

SEQ ID NO: 210624 - RNA, 32 nt, Homo Sapiens
ucccagcuguuaugccugucuugcuuguuguu

SEQ ID NO: 210625 - RNA, 32 nt, Homo Sapiens
aaccccgcgggccccuagcacgcgccccagcc

SEQ ID NO: 210626 - RNA, 32 nt, Homo Sapiens
auguaaaaagagaaaucauaguuuuauauuuu

SEQ ID NO: 210627 - RNA, 32 nt, Homo Sapiens
caaaacacaaaacuagugcuugugaaaacaca

SEQ ID NO: 210628 - RNA, 32 nt, Homo Sapiens
gcggugcuggcugugauucagagccagaagga

SEQ ID NO: 210629 - RNA, 32 nt, Homo Sapiens
cucauccucuucugcacccugcugugccucgu

SEQ ID NO: 210630 - RNA, 32 nt, Homo Sapiens
guguuauugguagugucuagccuuuuccucca

SEQ ID NO: 210631 - RNA, 32 nt, Homo Sapiens
aaauacaugagauaaaucaugaaggccacuau

SEQ ID NO: 210632 - RNA, 32 nt, Homo Sapiens
aguuagccgggcgugguggcaggcgucuguaa

SEQ ID NO: 210633 - RNA, 32 nt, Homo Sapiens
cuuucuuaaaaguuucuaauguuauuuuccuu

SEQ ID NO: 210634 - RNA, 32 nt, Homo Sapiens
uguucacugcuguacugguuugcaaauuucuu

SEQ ID NO: 210635 - RNA, 32 nt, Homo Sapiens
uacacuguuuuaauugcuguaaauuuuaauau

SEQ ID NO: 210636 - RNA, 32 nt, Homo Sapiens
aggcccucggcgggcggcggcugcccgcuuag

SEQ ID NO: 210637 - RNA, 32 nt, Homo Sapiens
gagacuggagcccuguuugcacguucuaguug

SEQ ID NO: 210638 - RNA, 32 nt, Homo Sapiens
cuaugggcccgagcucaucgaccugagggggc

SEQ ID NO: 210639 - RNA, 32 nt, Homo Sapiens
uuuccccaacgcccggcccuccgggacgauac

SEQ ID NO: 210640 - RNA, 29 nt, Homo Sapiens
accacauuguguuuccugcugaaucaagu

SEQ ID NO: 210641 - RNA, 32 nt, Homo Sapiens
uuuuaagggcuuuauuauagaagaaguauuaa

SEQ ID NO: 210642 - RNA, 32 nt, Homo Sapiens
caccaauaguaacaaagugcuggaugcaccuu

SEQ ID NO: 210643 - RNA, 32 nt, Homo Sapiens
uuacggaagaacccucaggucacaagagucug

SEQ ID NO: 210644 - RNA, 32 nt, Homo Sapiens
cagcaccaaaauaaaucaucuuuauuaaguag

SEQ ID NO: 210645 - RNA, 32 nt, Homo Sapiens
uucuuucuuuaaaacaaacaaacaaaaaaaac

SEQ ID NO: 210646 - RNA, 32 nt, Homo Sapiens
ucaguuucagcaugcuaaaaagacuccacuua

SEQ ID NO: 210647 - RNA, 32 nt, Homo Sapiens
uggucaucucaguuucuuuucucaccuugacu

SEQ ID NO: 210648 - RNA, 32 nt, Homo Sapiens
uuuaccugcccccauuuuaugauagagccugg

SEQ ID NO: 210649 - RNA, 32 nt, Homo Sapiens
agugggacaaaaucuuuuuuuuuuuuaagacu

SEQ ID NO: 210650 - RNA, 32 nt, Homo Sapiens
ucaggacagucuaucuuaaauuucauaugaga

SEQ ID NO: 210651 - RNA, 32 nt, Homo Sapiens
gguccaugucucuggguuuuuaccagccaggg

SEQ ID NO: 210652 - RNA, 32 nt, Homo Sapiens
aucuccaccucgcccugcugggcccgccccuc

SEQ ID NO: 210653 - RNA, 31 nt, Homo Sapiens
aucugcccacccucacccagucgcacccugg

SEQ ID NO: 210654 - RNA, 32 nt, Homo Sapiens
gcacuucuacuugguuuuuugaucaguguagc

SEQ ID NO: 210655 - RNA, 32 nt, Homo Sapiens
uucauauguugaaguccuaaggugauguuauu

SEQ ID NO: 210656 - RNA, 32 nt, Homo Sapiens
gacaguaaagauuagcugggaguagucuuuga

SEQ ID NO: 210657 - RNA, 32 nt, Homo Sapiens
ucccaagccagcguugcgcagaugcacggcca

SEQ ID NO: 210658 - RNA, 32 nt, Homo Sapiens
cccaucauauaaauaaaaaucuuaccuagcuu

SEQ ID NO: 210659 - RNA, 32 nt, Homo Sapiens
ggguuggagaaucuugcuuuaugauuuuacuc

SEQ ID NO: 210660 - RNA, 32 nt, Homo Sapiens
agauauaguccacugcauucuuauaaguucua

SEQ ID NO: 210661 - RNA, 27 nt, Homo Sapiens
cugagccuguaauucugcuguaauaau

SEQ ID NO: 210662 - RNA, 32 nt, Homo Sapiens
auaagaaccagaaagcacuugaaacugauguu

SEQ ID NO: 210663 - RNA, 32 nt, Homo Sapiens
agugagguuaucuugcugcacucuguagcaaa

SEQ ID NO: 210664 - RNA, 32 nt, Homo Sapiens
cuggggagcugcacccaccucccuuccaggga

SEQ ID NO: 210665 - RNA, 32 nt, Homo Sapiens
acaucccuggggauucugaaggcuuaauuuug

SEQ ID NO: 210666 - RNA, 32 nt, Homo Sapiens
gcugccuuuaggaugcugaccccugcacuacc

SEQ ID NO: 210667 - RNA, 32 nt, Homo Sapiens
ggaaucugguuuucucagcggcagcuugacau

SEQ ID NO: 210668 - RNA, 32 nt, Homo Sapiens
cguaagcucgcagcggggagggggcggccgga

SEQ ID NO: 210669 - RNA, 32 nt, Homo Sapiens
cugucacaucucuccuucuucucuuucaccac

SEQ ID NO: 210670 - RNA, 32 nt, Homo Sapiens
gcgcggccagagaggggcaggugcugggcggc

SEQ ID NO: 210671 - RNA, 32 nt, Homo Sapiens
cuuugcagaccucagcugggcaucuccagacu

SEQ ID NO: 210672 - RNA, 32 nt, Homo Sapiens
uucaaauggcaaagagguauauguaaaguugc

SEQ ID NO: 210673 - RNA, 32 nt, Homo Sapiens
gcgacccauccugugggagugccucgugggcu

SEQ ID NO: 210674 - RNA, 32 nt, Homo Sapiens
acugugaaaauggucuaauuuugcugguuuuc

SEQ ID NO: 210675 - RNA, 31 nt, Homo Sapiens
gggaccacaaagagggaaaaaaggauguuuc

SEQ ID NO: 210676 - RNA, 32 nt, Homo Sapiens
uuuguggauuguuugauuuuuaccaagaaaga

SEQ ID NO: 210677 - RNA, 32 nt, Homo Sapiens
aaaugccacaugauggacaaacgcuuggggga

SEQ ID NO: 210678 - RNA, 32 nt, Homo Sapiens
ggguuguuguguaguugcauuggaagagagaa

SEQ ID NO: 210679 - RNA, 32 nt, Homo Sapiens
gagggcgggugggcgccggccggccuggaaga

SEQ ID NO: 210680 - RNA, 32 nt, Homo Sapiens
cugcugggacaguccugcagcugcugggucac

SEQ ID NO: 210681 - RNA, 32 nt, Homo Sapiens
auuggucacuguaaagcaguugaaagaauuua

SEQ ID NO: 210682 - RNA, 32 nt, Homo Sapiens
uuuaguagcacuaucucuaaaugcugucuagc

SEQ ID NO: 210683 - RNA, 32 nt, Homo Sapiens
uuuacuuagaguggaaggacugauugagaaug

SEQ ID NO: 210684 - RNA, 32 nt, Homo Sapiens
auugucuugugugcuuccugagggaguaggga

SEQ ID NO: 210685 - RNA, 32 nt, Homo Sapiens
gcagcacagucaaugguaagguuauuccuuuc

SEQ ID NO: 210686 - RNA, 32 nt, Homo Sapiens
caguuaauuuuuccaacuacuaauagaauaaa

SEQ ID NO: 210687 - RNA, 32 nt, Homo Sapiens
gaaucaggggcccgggaugugauucaggacac

SEQ ID NO: 210688 - RNA, 32 nt, Homo Sapiens
ucccccaccgaggcggccuguccccaagggac

SEQ ID NO: 210689 - RNA, 32 nt, Homo Sapiens
gccccaguucccuccucccucgguuauaaaga

SEQ ID NO: 210690 - RNA, 32 nt, Homo Sapiens
caggaauccugugaagcagcuccagcuaugug

SEQ ID NO: 210691 - RNA, 32 nt, Homo Sapiens
acuaccugaugggcacauggacaggcugcaga

SEQ ID NO: 210692 - RNA, 32 nt, Homo Sapiens
uuguaacaaaaaugacuaaauaaaaaauauau

SEQ ID NO: 210693 - RNA, 32 nt, Homo Sapiens
gccaggcguggugacgcguaccugugauccca

SEQ ID NO: 210694 - RNA, 32 nt, Homo Sapiens
augccuguccucguggugcccgaggguggugg

SEQ ID NO: 210695 - RNA, 32 nt, Homo Sapiens
uuacucugugcccuggccuccccucucuucac

SEQ ID NO: 210696 - RNA, 32 nt, Homo Sapiens
cccagagcaugccugauagaaacucauuucua

SEQ ID NO: 210697 - RNA, 32 nt, Homo Sapiens
agaccagcaugggaaacguggcgaaaccccau

SEQ ID NO: 210698 - RNA, 26 nt, Homo Sapiens
ugaccuuacugauagaauauuuuugg

SEQ ID NO: 210699 - RNA, 32 nt, Homo Sapiens
acggcgggaacauggcgcgcggaaccggcgcg

SEQ ID NO: 210700 - RNA, 32 nt, Homo Sapiens
uaaagucaaaacaaaaaaaugcuucuuccuca

SEQ ID NO: 210701 - RNA, 32 nt, Homo Sapiens
aagagcgaaacuccaucucaaaaaauaauaau

SEQ ID NO: 210702 - RNA, 26 nt, Homo Sapiens
caugccgcgccggggccugguggcug

SEQ ID NO: 210703 - RNA, 32 nt, Homo Sapiens
uagguaaccuuguugcuccaaauaauggcaug

SEQ ID NO: 210704 - RNA, 32 nt, Homo Sapiens
cggucuccuugcuccaggaucugcacaagcag

SEQ ID NO: 210705 - RNA, 32 nt, Homo Sapiens
acugaccaaagagcuuccauucccugagcaug

SEQ ID NO: 210706 - RNA, 32 nt, Homo Sapiens
gagcacagggcaaggaggagcugcaggggggc

SEQ ID NO: 210707 - RNA, 32 nt, Homo Sapiens
uagugcuaaaagacauguucccauaacuuuua

SEQ ID NO: 210708 - RNA, 32 nt, Homo Sapiens
ucuacccgggaugccucccaagacagggucuc

SEQ ID NO: 210709 - RNA, 32 nt, Homo Sapiens
guuuaaaauguguuauucucuucuuugggaau

SEQ ID NO: 210710 - RNA, 32 nt, Homo Sapiens
ccgagugugggguggggggacauucagacggg

SEQ ID NO: 210711 - RNA, 32 nt, Homo Sapiens
caaagcuuccaggccaagacaagcaucccaag

SEQ ID NO: 210712 - RNA, 32 nt, Homo Sapiens
gacacgcgugacucaaauccuacaguauggag

SEQ ID NO: 210713 - RNA, 32 nt, Homo Sapiens
gagccacccuccccgcacagcccugcaccccg

SEQ ID NO: 210714 - RNA, 32 nt, Homo Sapiens
cccaauaaaaacgcuacauuguguguauuuuu

SEQ ID NO: 210715 - RNA, 32 nt, Homo Sapiens
aauuauauauugcaaggugugauggucuggcu

SEQ ID NO: 210716 - RNA, 31 nt, Homo Sapiens
aaugauuguuguccauggaaaggcaaauaaa

SEQ ID NO: 210717 - RNA, 32 nt, Homo Sapiens
cauaggugcacaccaccacaccuagcuaauuu

SEQ ID NO: 210718 - RNA, 32 nt, Homo Sapiens
ugucucucauuuucguuguucaucucuuuuuu

SEQ ID NO: 210719 - RNA, 32 nt, Homo Sapiens
ucgcccucgcagcggcggccaacaucaccgcc

SEQ ID NO: 210720 - RNA, 32 nt, Homo Sapiens
uaacugccagccaggaggcucucugccccuca

SEQ ID NO: 210721 - RNA, 32 nt, Homo Sapiens
cucacucaguuauugcgaguguugcuguccgc

SEQ ID NO: 210722 - RNA, 32 nt, Homo Sapiens
uacccaaaacaaagaaugggaagcacuuguga

SEQ ID NO: 210723 - RNA, 32 nt, Homo Sapiens
gaugacuuuuuucuugucaucuuuuaaaacua

SEQ ID NO: 210724 - RNA, 32 nt, Homo Sapiens
gccucagcuauggccugggcuccagcuuuggc

SEQ ID NO: 210725 - RNA, 32 nt, Homo Sapiens
ccgagguugggcggggcgcaggaggugggcuc

SEQ ID NO: 210726 - RNA, 32 nt, Homo Sapiens
gggccaagcgauccuccugccucagccuucug

SEQ ID NO: 210727 - RNA, 32 nt, Homo Sapiens
auuaaaaguauacaauccuuagcacguuaucu

SEQ ID NO: 210728 - RNA, 32 nt, Homo Sapiens
uuaggaacuaaggaaaauaaauuuaaaagaau

SEQ ID NO: 210729 - RNA, 32 nt, Homo Sapiens
ucccagcuacucuggaggcugaggcggaggca

SEQ ID NO: 210730 - RNA, 29 nt, Homo Sapiens
ccuuuggguguauucagaggcagugauga

SEQ ID NO: 210731 - RNA, 32 nt, Homo Sapiens
uuuagggagcagcugcucguuuggaguccugg

SEQ ID NO: 210732 - RNA, 32 nt, Homo Sapiens
cucuccuucuaaaaacuucucaacuguuuuca

SEQ ID NO: 210733 - RNA, 32 nt, Homo Sapiens
gugcucugggcuugggggcggcugaggugccc

SEQ ID NO: 210734 - RNA, 32 nt, Homo Sapiens
agaaaaggcagacacugguugggaccaaaguc

SEQ ID NO: 210735 - RNA, 32 nt, Homo Sapiens
gggaccaagcccucaggagacacacacguggg

SEQ ID NO: 210736 - RNA, 32 nt, Homo Sapiens
cuagucucaaggaaaauauauuaauacacaca

SEQ ID NO: 210737 - RNA, 32 nt, Homo Sapiens
uuccgcaucacucuccuuccucgggcugccgg

SEQ ID NO: 210738 - RNA, 32 nt, Homo Sapiens
gggaccgcuccagcugcacugcagccaggggg

SEQ ID NO: 210739 - RNA, 32 nt, Homo Sapiens
uuucuacccagguuuugcuagagcagugugag

SEQ ID NO: 210740 - RNA, 28 nt, Homo Sapiens
gucccgaaagauugcaacuuuggcugcu

SEQ ID NO: 210741 - RNA, 31 nt, Homo Sapiens
uccaaagucuccacugccugaguuuuguuuc

SEQ ID NO: 210742 - RNA, 32 nt, Homo Sapiens
uaaugcccgcggcgcccgcgcgaccaugcaau

SEQ ID NO: 210743 - RNA, 32 nt, Homo Sapiens
cgcacuccgcuuccggccgcucucgcugcggc

SEQ ID NO: 210744 - RNA, 32 nt, Homo Sapiens
gcacugcagcgccagcguccgagcgggcggcc

SEQ ID NO: 210745 - RNA, 32 nt, Homo Sapiens
aagacagagucuugcucugucgcccaggcugg

SEQ ID NO: 210746 - RNA, 32 nt, Homo Sapiens
aggaucugcugcgccuuuccagucaggugggu

SEQ ID NO: 210747 - RNA, 32 nt, Homo Sapiens
gcuaguaaaaauacccuagagaaagcuagcag

SEQ ID NO: 210748 - RNA, 32 nt, Homo Sapiens
uaaucaaaauaauuucaucaacuuuuagaaua

SEQ ID NO: 210749 - RNA, 32 nt, Homo Sapiens
aaccaccugccuauauuuuuuguuaaaugauu

SEQ ID NO: 210750 - RNA, 32 nt, Homo Sapiens
ggccugcccuccccggugggggccaggaugcu

SEQ ID NO: 210751 - RNA, 32 nt, Homo Sapiens
gcggaggggcccggcgucuguggcgggcacag

SEQ ID NO: 210752 - RNA, 32 nt, Homo Sapiens
gccaccucucuggcugcccccuagagccugcc

SEQ ID NO: 210753 - RNA, 32 nt, Homo Sapiens
acagucccgcgugcaaaggaaaggggcaaaau

SEQ ID NO: 210754 - RNA, 32 nt, Homo Sapiens
acacuuucuggaacccgagacuuggccauaaa

SEQ ID NO: 210755 - RNA, 32 nt, Homo Sapiens
ugccccaccccucccugcaucuggauucuuuu

SEQ ID NO: 210756 - RNA, 32 nt, Homo Sapiens
aaagaccagaacuuaaauuuucacuuuagaca

SEQ ID NO: 210757 - RNA, 32 nt, Homo Sapiens
ugggagagauggauauuuaaaccucuauuauu

SEQ ID NO: 210758 - RNA, 32 nt, Homo Sapiens
acugaugagcauagagcaccccugccuuccuc

SEQ ID NO: 210759 - RNA, 30 nt, Homo Sapiens
agcugccuguacuuuggggaaacagaugga

SEQ ID NO: 210760 - RNA, 32 nt, Homo Sapiens
aagaauuugacaaaagagauagcaggugucuc

SEQ ID NO: 210761 - RNA, 32 nt, Homo Sapiens
uugccccccuccccccaccuacugccauccca

SEQ ID NO: 210762 - RNA, 32 nt, Homo Sapiens
gggcaggagaggaaacagcuggugacaaucug

SEQ ID NO: 210763 - RNA, 32 nt, Homo Sapiens
ugccacugacuucaaacugagagcacuuggga

SEQ ID NO: 210764 - RNA, 32 nt, Homo Sapiens
uugguguuaacauuuuaaucuuagaagacccu

SEQ ID NO: 210765 - RNA, 32 nt, Homo Sapiens
guggaccaagaucucaggauccaaguuuaaaa

SEQ ID NO: 210766 - RNA, 32 nt, Homo Sapiens
cuguauuaacuccaugagguaaacacucuugu

SEQ ID NO: 210767 - RNA, 32 nt, Homo Sapiens
uggccuuucuucaugugugcgugcauaucagc

SEQ ID NO: 210768 - RNA, 32 nt, Homo Sapiens
gcaaccuccgccucccggguucaggggauucu

SEQ ID NO: 210769 - RNA, 32 nt, Homo Sapiens
cguggggagagccggagcuccgggucagggga

SEQ ID NO: 210770 - RNA, 32 nt, Homo Sapiens
uuugacaccaaaagaaaacuacaugaguucau

SEQ ID NO: 210771 - RNA, 32 nt, Homo Sapiens
aagacaucugagaaacaaaacaagcaaauuug

SEQ ID NO: 210772 - RNA, 32 nt, Homo Sapiens
agguaccugaacauucugauaauuaucucagc

SEQ ID NO: 210773 - RNA, 32 nt, Homo Sapiens
cuaccgagcugucagcaagacgguguaugggg

SEQ ID NO: 210774 - RNA, 30 nt, Homo Sapiens
cauuugaauauccauguuaauaucuauauu

SEQ ID NO: 210775 - RNA, 32 nt, Homo Sapiens
guuuauucacaauaaacuguaaguuucugauu

SEQ ID NO: 210776 - RNA, 32 nt, Homo Sapiens
aacuauaguacacaacucugccguugauagug

SEQ ID NO: 210777 - RNA, 32 nt, Homo Sapiens
cuggaaacucucugccuguacuccauggccug

SEQ ID NO: 210778 - RNA, 32 nt, Homo Sapiens
ccccugagccccaccaggaaaucuccgguugg

SEQ ID NO: 210779 - RNA, 32 nt, Homo Sapiens
gaggcgguccccugggucugugccuggggguc

SEQ ID NO: 210780 - RNA, 32 nt, Homo Sapiens
gcugggccuccgcacccgcccucauggaggcc

SEQ ID NO: 210781 - RNA, 32 nt, Homo Sapiens
gaacauaauuuucuuccuuugaauaaaccugu

SEQ ID NO: 210782 - RNA, 32 nt, Homo Sapiens
gaaaaucauauguuuaaguaaauguuagguac

SEQ ID NO: 210783 - RNA, 32 nt, Homo Sapiens
cccagggugggguggggcagggcgggcggaag

SEQ ID NO: 210784 - RNA, 32 nt, Homo Sapiens
gaagucacuuccucccgaagacgcuguuuccu

SEQ ID NO: 210785 - RNA, 32 nt, Homo Sapiens
ugaaagaaaaagaguuaaggaaacuugaucuu

SEQ ID NO: 210786 - RNA, 32 nt, Homo Sapiens
cgcagagccacgguuugcuccaggcgcgucgg

SEQ ID NO: 210787 - RNA, 32 nt, Homo Sapiens
gucaugucuuuuguagcaacauggaugcugcu

SEQ ID NO: 210788 - RNA, 32 nt, Homo Sapiens
ugccaggccugcugcuccugccgagaagcugg

SEQ ID NO: 210789 - RNA, 32 nt, Homo Sapiens
agcgagcucugaaaggagaaauccauucacug

SEQ ID NO: 210790 - RNA, 32 nt, Homo Sapiens
gcacgcgcacugggguguccgccgggcaucgc

SEQ ID NO: 210791 - RNA, 32 nt, Homo Sapiens
caccacugucaaguuucauguaguacaaagcc

SEQ ID NO: 210792 - RNA, 32 nt, Homo Sapiens
cuucugaagaauaaaccuaaguuuuugugauu

SEQ ID NO: 210793 - RNA, 29 nt, Homo Sapiens
ucaggaacuuacaaucauggcagaagggg

SEQ ID NO: 210794 - RNA, 32 nt, Homo Sapiens
agacuucuuuuuuauaaagcaauaaauccauu

SEQ ID NO: 210795 - RNA, 32 nt, Homo Sapiens
uaccauuugacaaagucagaauucuauaauga

SEQ ID NO: 210796 - RNA, 32 nt, Homo Sapiens
gggcucgcucugagaggacgcggcggcagcgg

SEQ ID NO: 210797 - RNA, 32 nt, Homo Sapiens
ggcaguccucacagcccucacucgcucgcuca

SEQ ID NO: 210798 - RNA, 32 nt, Homo Sapiens
gccacggaaggaagaaauagcggggagaaaag

SEQ ID NO: 210799 - RNA, 32 nt, Homo Sapiens
gggcacgcucuggccccaggcuugugccccac

SEQ ID NO: 210800 - RNA, 32 nt, Homo Sapiens
ccaaaucccccucccuaccggagccgggaccc

SEQ ID NO: 210801 - RNA, 32 nt, Homo Sapiens
agagccugugcccuucccacuacaccaccagg

SEQ ID NO: 210802 - RNA, 32 nt, Homo Sapiens
caggccaaguaccaagggcaaaaacuagaaac

SEQ ID NO: 210803 - RNA, 32 nt, Homo Sapiens
cuaccugaaaaauggaaaagagcagaagcacu

SEQ ID NO: 210804 - RNA, 30 nt, Homo Sapiens
acccggggcaggcgggcagcugugcccggg

SEQ ID NO: 210805 - RNA, 32 nt, Homo Sapiens
cugaucucuggccuagcagccauuccacucca

SEQ ID NO: 210806 - RNA, 32 nt, Homo Sapiens
uaaaugagugcuuuaacuuaaaacaggcguuu

SEQ ID NO: 210807 - RNA, 32 nt, Homo Sapiens
auggaaccaaaauagauccuguauagccaaga

SEQ ID NO: 210808 - RNA, 32 nt, Homo Sapiens
caccauugcuuuuuauucucauuacuucucuu

SEQ ID NO: 210809 - RNA, 32 nt, Homo Sapiens
uagugauuucuguggaugcuguugccaaacac

SEQ ID NO: 210810 - RNA, 32 nt, Homo Sapiens
uuuuaaaugacaguucugugaacugguccaag

SEQ ID NO: 210811 - RNA, 32 nt, Homo Sapiens
cuuugaaucuucagucugauuuuuaauguaag

SEQ ID NO: 210812 - RNA, 32 nt, Homo Sapiens
aggaggccaagagcuggauccuucugcccagg

SEQ ID NO: 210813 - RNA, 32 nt, Homo Sapiens
ccacuccgcaugcugcuggaauauuucuggcu

SEQ ID NO: 210814 - RNA, 32 nt, Homo Sapiens
aggcguuaacgcgcacgcgcuuagggauccgg

SEQ ID NO: 210815 - RNA, 32 nt, Homo Sapiens
gcucggcgcggggcuccccggugcuggcgaug

SEQ ID NO: 210816 - RNA, 32 nt, Homo Sapiens
cacacccaaggggcccgaggggcugcgugugg

SEQ ID NO: 210817 - RNA, 29 nt, Homo Sapiens
uuuguauaacguuuauauuuuucuagaau

SEQ ID NO: 210818 - RNA, 32 nt, Homo Sapiens
aacuuauauaaaauauguuuuaaaaugccuga

SEQ ID NO: 210819 - RNA, 32 nt, Homo Sapiens
gcuuccucuucccaccugaggacugggugcac

SEQ ID NO: 210820 - RNA, 32 nt, Homo Sapiens
cgcaucuaccacagcagcuggugcugcccgcc

SEQ ID NO: 210821 - RNA, 32 nt, Homo Sapiens
gauuuguaaaaagcaggcugaaacuauggaca

SEQ ID NO: 210822 - RNA, 32 nt, Homo Sapiens
cucauuuucuccucaauaaccuuuaaaaagua

SEQ ID NO: 210823 - RNA, 32 nt, Homo Sapiens
aaucuugggggccaggcacugugcuaggcacc

SEQ ID NO: 210824 - RNA, 29 nt, Homo Sapiens
uagccaaugaagauuccagcgggauggcc

SEQ ID NO: 210825 - RNA, 32 nt, Homo Sapiens
auuuuaaagaauucgguugaaaaaauagaucc

SEQ ID NO: 210826 - RNA, 32 nt, Homo Sapiens
uagcguuuuagucguuuuauguuucuuugcaa

SEQ ID NO: 210827 - RNA, 32 nt, Homo Sapiens
gacaggcgggcucauggcacugucguuggccc

SEQ ID NO: 210828 - RNA, 32 nt, Homo Sapiens
uuuauuuuacuuuuuuuuuuuaagcuacguug

SEQ ID NO: 210829 - RNA, 32 nt, Homo Sapiens
cgucaaaguauuuaaacuuacaguucagggcc

SEQ ID NO: 210830 - RNA, 32 nt, Homo Sapiens
gggucugucuucugcaaggagcuccuacucgc

SEQ ID NO: 210831 - RNA, 32 nt, Homo Sapiens
gaaaccagcaacccaugugaggauuccauggc

SEQ ID NO: 210832 - RNA, 32 nt, Homo Sapiens
ccaugcuacccuccccgccucccuccacagug

SEQ ID NO: 210833 - RNA, 32 nt, Homo Sapiens
gcuuuugggaaaugugcucagaggaagaacuc

SEQ ID NO: 210834 - RNA, 32 nt, Homo Sapiens
caguuuagacauugggggaggcuggaucucuc

SEQ ID NO: 210835 - RNA, 32 nt, Homo Sapiens
agaccaagaguaccuucauuuaauuuagcuug

SEQ ID NO: 210836 - RNA, 32 nt, Homo Sapiens
aauucuguuuuucguuugcauugucuuuaaua

SEQ ID NO: 210837 - RNA, 32 nt, Homo Sapiens
gccgcccugccgcgcgcacauguaggcguucc

SEQ ID NO: 210838 - RNA, 32 nt, Homo Sapiens
aggagauaaagggcaagaagaucucacaagcu

SEQ ID NO: 210839 - RNA, 32 nt, Homo Sapiens
caccuuucaaccaggcaccucaaagcgguuua

SEQ ID NO: 210840 - RNA, 32 nt, Homo Sapiens
caccacuugcuguuuugaaugacucuacuagu

SEQ ID NO: 210841 - RNA, 32 nt, Homo Sapiens
gugaauguaaaaauaaauaucgcuuagaaugc

SEQ ID NO: 210842 - RNA, 32 nt, Homo Sapiens
agcccggaccucuggagugcccccagcccaga

SEQ ID NO: 210843 - RNA, 32 nt, Homo Sapiens
ucuguguucuuguaagccugagguggaaucca

SEQ ID NO: 210844 - RNA, 32 nt, Homo Sapiens
ccaggcucccaguagauuuacuccauccagga

SEQ ID NO: 210845 - RNA, 32 nt, Homo Sapiens
uuuauaaucucaaccucuagaggaagccauug

SEQ ID NO: 210846 - RNA, 32 nt, Homo Sapiens
ugaauguggggauauaguguauaagacuuauu

SEQ ID NO: 210847 - RNA, 32 nt, Homo Sapiens
aucgccaggggcgcgccgcagccacccacccu

SEQ ID NO: 210848 - RNA, 32 nt, Homo Sapiens
caugcagccccacggccuccccgacccagggc

SEQ ID NO: 210849 - RNA, 32 nt, Homo Sapiens
guugggagaagcuucaaggggacagcaccugg

SEQ ID NO: 210850 - RNA, 32 nt, Homo Sapiens
ugguuuugauuugucuuauauucguuauuucu

SEQ ID NO: 210851 - RNA, 32 nt, Homo Sapiens
aggcaaaagaauggcuacuuuuuucuaugcug

SEQ ID NO: 210852 - RNA, 32 nt, Homo Sapiens
uugcaauacuaaaauauuuuuuauagacuuua

SEQ ID NO: 210853 - RNA, 32 nt, Homo Sapiens
ccugugcuuguguuugcugcuaauguccagcu

SEQ ID NO: 210854 - RNA, 32 nt, Homo Sapiens
uugauuuuggacuuuuuuguuuucucaagaau

SEQ ID NO: 210855 - RNA, 32 nt, Homo Sapiens
caggaagcagcucuccuuccccugccuucagc

SEQ ID NO: 210856 - RNA, 32 nt, Homo Sapiens
auaagaugugccugcuucuccuucgccuucua

SEQ ID NO: 210857 - RNA, 32 nt, Homo Sapiens
uagagugugggaauagggaucuaaauuuuaaa

SEQ ID NO: 210858 - RNA, 32 nt, Homo Sapiens
ucacuccccacuucucuggaaccucaggaccc

SEQ ID NO: 210859 - RNA, 32 nt, Homo Sapiens
uuccagcauuguacuuugauaagucuguacau

SEQ ID NO: 210860 - RNA, 32 nt, Homo Sapiens
cuguugcauggcuggcuguggagguccugcag

SEQ ID NO: 210861 - RNA, 32 nt, Homo Sapiens
gccgggccgagcgggcggagcgagccgagugg

SEQ ID NO: 210862 - RNA, 32 nt, Homo Sapiens
ccuuaagucagcuuaaugcuuuuacaucucga

SEQ ID NO: 210863 - RNA, 32 nt, Homo Sapiens
gucaggaacacuuucaggacaauguggguggc

SEQ ID NO: 210864 - RNA, 32 nt, Homo Sapiens
gggggcgcuggugggcaccccuggaucuggcg

SEQ ID NO: 210865 - RNA, 32 nt, Homo Sapiens
ugguauaaaagccuugugguauggaaaaacaa

SEQ ID NO: 210866 - RNA, 32 nt, Homo Sapiens
ggucccugucugccccaggcccggggcaucgc

SEQ ID NO: 210867 - RNA, 32 nt, Homo Sapiens
uggggaaaauugaaaccuuccaaugacuagaa

SEQ ID NO: 210868 - RNA, 32 nt, Homo Sapiens
aggacacaaaaauuacuucagugagaccaaau

SEQ ID NO: 210869 - RNA, 32 nt, Homo Sapiens
cagcuuugcaggugcuggcacuaacuucauug

SEQ ID NO: 210870 - RNA, 32 nt, Homo Sapiens
uuaaaaaauaaauuauuuaagaacaaaaaaaa

SEQ ID NO: 210871 - RNA, 32 nt, Homo Sapiens
uaggcugcggcggcauggcccgcgcgcccggc

SEQ ID NO: 210872 - RNA, 30 nt, Homo Sapiens
accgacacgcugcuguggggucccggugag

SEQ ID NO: 210873 - RNA, 32 nt, Homo Sapiens
agcgcgguagcacgcuguguuggcggcggcuc

SEQ ID NO: 210874 - RNA, 29 nt, Homo Sapiens
cggacucggggaccggcggaggacgccgg

SEQ ID NO: 210875 - RNA, 32 nt, Homo Sapiens
uuacuagaaaugggaaucauggccucuugaag

SEQ ID NO: 210876 - RNA, 32 nt, Homo Sapiens
ggacuuuguuguuuuucuuuuugaucagaaca

SEQ ID NO: 210877 - RNA, 32 nt, Homo Sapiens
acauagugagaccccgucuaugcaaaaaauac

SEQ ID NO: 210878 - RNA, 32 nt, Homo Sapiens
gguuuccuucucuuuuucaacuucauguugag

SEQ ID NO: 210879 - RNA, 32 nt, Homo Sapiens
uuguuuucggcaccauuauguacgaugaagac

SEQ ID NO: 210880 - RNA, 32 nt, Homo Sapiens
cgcgaggccccggccucgguccccggacuagg

SEQ ID NO: 210881 - RNA, 32 nt, Homo Sapiens
uugcauuaaaauuuauguuugagguuaccuca

SEQ ID NO: 210882 - RNA, 32 nt, Homo Sapiens
ucaacccaucagguucagaccaguaggaacca

SEQ ID NO: 210883 - RNA, 32 nt, Homo Sapiens
uggaagaaaaagaauguuaagaaauaacaaaa

SEQ ID NO: 210884 - RNA, 32 nt, Homo Sapiens
uucuucaaaagcaugaauaaaaaugacaugaa

SEQ ID NO: 210885 - RNA, 32 nt, Homo Sapiens
gcccgcgcccuuccccccggcgcgccccgccc

SEQ ID NO: 210886 - RNA, 32 nt, Homo Sapiens
ugggacagcggcccggcccacgcagagccccg

SEQ ID NO: 210887 - RNA, 32 nt, Homo Sapiens
agagggcaggcaagcuggcccuuggugggccu

SEQ ID NO: 210888 - RNA, 32 nt, Homo Sapiens
gacugugaugacugggagagcgggcugaaugc

SEQ ID NO: 210889 - RNA, 32 nt, Homo Sapiens
ggcucuagggcugcucgcugcugcuguggccu

SEQ ID NO: 210890 - RNA, 32 nt, Homo Sapiens
gggacccucagaaggcagcagugaugcggacc

SEQ ID NO: 210891 - RNA, 32 nt, Homo Sapiens
cagcgagagggagaggcgagaguaaggcgccc

SEQ ID NO: 210892 - RNA, 32 nt, Homo Sapiens
uuuucaacuuguuuuacuuaaucuugccuagu

SEQ ID NO: 210893 - RNA, 32 nt, Homo Sapiens
auuugucuguuucuuggaugaaauauaaagca

SEQ ID NO: 210894 - RNA, 32 nt, Homo Sapiens
gagcacagacaggcuccuagggugcugaguga

SEQ ID NO: 210895 - RNA, 32 nt, Homo Sapiens
gggggagguucgguagagaaaaauaguaagcu

SEQ ID NO: 210896 - RNA, 31 nt, Homo Sapiens
ccgggcugcgagcgccugccccaugcgccgc

SEQ ID NO: 210897 - RNA, 32 nt, Homo Sapiens
acucgaccgccgcccccagccaggcgccaugc

SEQ ID NO: 210898 - RNA, 32 nt, Homo Sapiens
aauggaaaguauuuuuaacuaaucuguuauua

SEQ ID NO: 210899 - RNA, 32 nt, Homo Sapiens
aaggcgagggguggaggaggccccagcacagc

SEQ ID NO: 210900 - RNA, 32 nt, Homo Sapiens
ccucuuuucaugaucuuuuucuuuccuuccca

SEQ ID NO: 210901 - RNA, 32 nt, Homo Sapiens
gggagggaccugcggcugggcggcggggggag

SEQ ID NO: 210902 - RNA, 32 nt, Homo Sapiens
ggcccuggggcgggggcggguccuggggacug

SEQ ID NO: 210903 - RNA, 32 nt, Homo Sapiens
ugacuucuggaaucuuugagaccaaguuccag

SEQ ID NO: 210904 - RNA, 32 nt, Homo Sapiens
caccugaccccucgggauuccaccccugucau

SEQ ID NO: 210905 - RNA, 32 nt, Homo Sapiens
uccaccccgcggcagcuccucgccucagcucc

SEQ ID NO: 210906 - RNA, 32 nt, Homo Sapiens
cucaggcccccgcucgggcccgacccgcucgg

SEQ ID NO: 210907 - RNA, 32 nt, Homo Sapiens
acguucuaccgagagcacuuuggaauguacau

SEQ ID NO: 210908 - RNA, 32 nt, Homo Sapiens
gcaggaggauaaccuggaugaccuucugaggu

SEQ ID NO: 210909 - RNA, 32 nt, Homo Sapiens
cggcacacgggcggcucacccuggacacugug

SEQ ID NO: 210910 - RNA, 32 nt, Homo Sapiens
gcaggcggguugggugggaggaggaagaaagg

SEQ ID NO: 210911 - RNA, 32 nt, Homo Sapiens
aacagucaggugguuuaccuuccagaggcugg

SEQ ID NO: 210912 - RNA, 32 nt, Homo Sapiens
gaaugugaagaauauuugaaaacucaaugaaa

SEQ ID NO: 210913 - RNA, 32 nt, Homo Sapiens
cuggugcucaucugcuggcaccgggcauccac

SEQ ID NO: 210914 - RNA, 32 nt, Homo Sapiens
ccccaaucuaguuuagccccccgccccacccu

SEQ ID NO: 210915 - RNA, 32 nt, Homo Sapiens
uaggaaaugaacuagcugaaaauucgggaaug

SEQ ID NO: 210916 - RNA, 31 nt, Homo Sapiens
ugaguguaccacugccuucccuucuagccca

SEQ ID NO: 210917 - RNA, 32 nt, Homo Sapiens
uuagaaagcauaauuccuaaaugauuuugaag

SEQ ID NO: 210918 - RNA, 32 nt, Homo Sapiens
gggugcccucuuucggccccauggaguccuca

SEQ ID NO: 210919 - RNA, 32 nt, Homo Sapiens
gagcaacgucaccgugaacuacaacaucaccg

SEQ ID NO: 210920 - RNA, 32 nt, Homo Sapiens
ggcuccaguauuaaugaaauagguuccaguga

SEQ ID NO: 210921 - RNA, 32 nt, Homo Sapiens
ccacacuugucaauagccucuuccucacugau

SEQ ID NO: 210922 - RNA, 32 nt, Homo Sapiens
caaauccuaagccccacaacggacugaacaga

SEQ ID NO: 210923 - RNA, 32 nt, Homo Sapiens
gcuucugugaauaaauaaaaguuuaucauucc

SEQ ID NO: 210924 - RNA, 31 nt, Homo Sapiens
cuuuucuggcaugcuccucagaauucuucca

SEQ ID NO: 210925 - RNA, 32 nt, Homo Sapiens
guggaugcauugacgcugcagacgccagcaag

SEQ ID NO: 210926 - RNA, 32 nt, Homo Sapiens
accugugccccggcgggacccccauguccucc

SEQ ID NO: 210927 - RNA, 32 nt, Homo Sapiens
gagcagcagcuagccaggcaaagggggcaaug

SEQ ID NO: 210928 - RNA, 32 nt, Homo Sapiens
uuuuacaccacaucacagugaacacacugggg

SEQ ID NO: 210929 - RNA, 32 nt, Homo Sapiens
gcgccucgcggugugcguggacacagccaucc

SEQ ID NO: 210930 - RNA, 31 nt, Homo Sapiens
uuuuugaaauaaaggaaaggaaauucaaaaa

SEQ ID NO: 210931 - RNA, 32 nt, Homo Sapiens
gagcggccaucggcagcaugucaaccauuugc

SEQ ID NO: 210932 - RNA, 32 nt, Homo Sapiens
caaauaaaugauuaaucuucauugguuucuca

SEQ ID NO: 210933 - RNA, 32 nt, Homo Sapiens
uaguagguauucagucagucuuucucaaagag

SEQ ID NO: 210934 - RNA, 32 nt, Homo Sapiens
ugccuauuuuuccuggaaacucaauuuuaaau

SEQ ID NO: 210935 - RNA, 32 nt, Homo Sapiens
ucauccccaaagucccaaaagagggugcugau

SEQ ID NO: 210936 - RNA, 32 nt, Homo Sapiens
uggugggauagaugcugcaacaacaacuucau

SEQ ID NO: 210937 - RNA, 32 nt, Homo Sapiens
ucucccucuccuuguuagucuguuuuauaacu

SEQ ID NO: 210938 - RNA, 27 nt, Homo Sapiens
augucuuucuucuucauccaagcaccc

SEQ ID NO: 210939 - RNA, 32 nt, Homo Sapiens
agucagaugaaguuucaagaaaaggaaauugg

SEQ ID NO: 210940 - RNA, 32 nt, Homo Sapiens
uuaggaggccaccagcagagggacuugguccu

SEQ ID NO: 210941 - RNA, 32 nt, Homo Sapiens
acaauuauccuuauaucuuagagcacagcacc

SEQ ID NO: 210942 - RNA, 32 nt, Homo Sapiens
cugagcggcauuagcccacggcuuggcccgga

SEQ ID NO: 210943 - RNA, 32 nt, Homo Sapiens
gguauugcugagacaugaugcagagaguuaag

SEQ ID NO: 210944 - RNA, 32 nt, Homo Sapiens
gauuucuaauuucaaugaagagaacacagaac

SEQ ID NO: 210945 - RNA, 32 nt, Homo Sapiens
gagaaaaggaggagggaaggagccggucaccc

SEQ ID NO: 210946 - RNA, 32 nt, Homo Sapiens
cagaccauccauccgauccuccccuuccccug

SEQ ID NO: 210947 - RNA, 32 nt, Homo Sapiens
gaaagcuccaggaaacaaaauacagagcucag

SEQ ID NO: 210948 - RNA, 32 nt, Homo Sapiens
guaccuguguacauaacucuguaaaaacacug

SEQ ID NO: 210949 - RNA, 32 nt, Homo Sapiens
agcgcgggaggcggcggcggcgcggagcccag

SEQ ID NO: 210950 - RNA, 32 nt, Homo Sapiens
ucaagucuguaaccuuuuguguuuccuuauua

SEQ ID NO: 210951 - RNA, 32 nt, Homo Sapiens
caaucacugcacugcaugcaaacaagaaacgu

SEQ ID NO: 210952 - RNA, 32 nt, Homo Sapiens
uucuuucccuuuaguuuguuugcugucuggau

SEQ ID NO: 210953 - RNA, 32 nt, Homo Sapiens
gcgccucugcucugcggguucguggcgaggaa

SEQ ID NO: 210954 - RNA, 32 nt, Homo Sapiens
cgccuguaaucccagcacuuugggagggcgag

SEQ ID NO: 210955 - RNA, 32 nt, Homo Sapiens
cuaauuuauagucacuguucuagacagaccaa

SEQ ID NO: 210956 - RNA, 32 nt, Homo Sapiens
auacuuacaaagaggagaagggcauuugcaaa

SEQ ID NO: 210957 - RNA, 32 nt, Homo Sapiens
augcauuagcaaaaaucauacaauauacagau

SEQ ID NO: 210958 - RNA, 32 nt, Homo Sapiens
aggcuccgagggucggcuggccggagcuauuu

SEQ ID NO: 210959 - RNA, 32 nt, Homo Sapiens
gugccuuuuccucuccugcucugagccagggu

SEQ ID NO: 210960 - RNA, 32 nt, Homo Sapiens
uucuaguuccgacgaguaccaggccgcccgag

SEQ ID NO: 210961 - RNA, 32 nt, Homo Sapiens
ucuuacucacuuuuucaaguuaucuauuuugu

SEQ ID NO: 210962 - RNA, 32 nt, Homo Sapiens
uugacauuguggaaaugaaaguaauuggguau

SEQ ID NO: 210963 - RNA, 32 nt, Homo Sapiens
cuacaucuguugucagagccacugagugcugu

SEQ ID NO: 210964 - RNA, 32 nt, Homo Sapiens
ggcacgaggguggggcagagguugggaagaug

SEQ ID NO: 210965 - RNA, 32 nt, Homo Sapiens
uaucuugcauguaucuguguauucaaauucaa

SEQ ID NO: 210966 - RNA, 32 nt, Homo Sapiens
guuuuugggaaaagcauuacaugaugaagaag

SEQ ID NO: 210967 - RNA, 32 nt, Homo Sapiens
cuguacuccuaaacagacuauauccauguauu

SEQ ID NO: 210968 - RNA, 32 nt, Homo Sapiens
guaucuggaucuuuuaccagcuaaauuuggag

SEQ ID NO: 210969 - RNA, 29 nt, Homo Sapiens
aaugcaaagggugagaauuuucuauauug

SEQ ID NO: 210970 - RNA, 32 nt, Homo Sapiens
ucaugccgugcuucugcagauuuuggugggga

SEQ ID NO: 210971 - RNA, 32 nt, Homo Sapiens
ugacccaggaccauccuggagggcuuucuggg

SEQ ID NO: 210972 - RNA, 32 nt, Homo Sapiens
gcuuugagucuugcccuacauuuugggcauga

SEQ ID NO: 210973 - RNA, 32 nt, Homo Sapiens
gaacagauauucuggaggagcagaucacugcu

SEQ ID NO: 210974 - RNA, 32 nt, Homo Sapiens
aggacccaggcaccaaggugcugcuggucucc

SEQ ID NO: 210975 - RNA, 32 nt, Homo Sapiens
gggaaacuucuugguucauugaaagcagagga

SEQ ID NO: 210976 - RNA, 32 nt, Homo Sapiens
aaugcaagauaaggccauggggccuggggcac

SEQ ID NO: 210977 - RNA, 32 nt, Homo Sapiens
agugcggggagcaggcugcugcugcugacucu

SEQ ID NO: 210978 - RNA, 32 nt, Homo Sapiens
uguguauauuucauugcgauuuccuguuaaga

SEQ ID NO: 210979 - RNA, 32 nt, Homo Sapiens
guuccgcucccugggaucagcggcgagaagcg

SEQ ID NO: 210980 - RNA, 32 nt, Homo Sapiens
uugagaucacuacucagugcauagcgaagacc

SEQ ID NO: 210981 - RNA, 32 nt, Homo Sapiens
uuggagcuggcacugaagaucuccagggacuu

SEQ ID NO: 210982 - RNA, 32 nt, Homo Sapiens
uggagcccaagcccuguguuccuggggaagcu

SEQ ID NO: 210983 - RNA, 32 nt, Homo Sapiens
ugcuccuuggggcuugccacccacuccuuugc

SEQ ID NO: 210984 - RNA, 32 nt, Homo Sapiens
uucauuccaaauaguuuugugccauugaaaaa

SEQ ID NO: 210985 - RNA, 32 nt, Homo Sapiens
gacuuaauaggacuugccuucucccugggcag

SEQ ID NO: 210986 - RNA, 32 nt, Homo Sapiens
cacugaaaugcuuaaauguaucugaaagcaca

SEQ ID NO: 210987 - RNA, 32 nt, Homo Sapiens
ggcaaggaccucucauggacacuggccucuag

SEQ ID NO: 210988 - RNA, 32 nt, Homo Sapiens
uaagagaugcaacaguggaagcaagagguugg

SEQ ID NO: 210989 - RNA, 32 nt, Homo Sapiens
cagcuccuccagcucagucuccagcuccaccu

SEQ ID NO: 210990 - RNA, 32 nt, Homo Sapiens
acaaaaaacaaaaaacaggggccaauaaauuc

SEQ ID NO: 210991 - RNA, 32 nt, Homo Sapiens
uaaaccucguggugguuauugaaacagauuua

SEQ ID NO: 210992 - RNA, 31 nt, Homo Sapiens
agagaaaaauaaaaaugaacauguauauaca

SEQ ID NO: 210993 - RNA, 32 nt, Homo Sapiens
auuuuuaaaaauuuauugagcacagggucugg

SEQ ID NO: 210994 - RNA, 32 nt, Homo Sapiens
gcuuggcagagccgcuggaggaccccaggcgg

SEQ ID NO: 210995 - RNA, 32 nt, Homo Sapiens
ucuggaagggaagguggaaaggggaaucuaug

SEQ ID NO: 210996 - RNA, 32 nt, Homo Sapiens
uuccaugaugucugcccuccaccucucuggca

SEQ ID NO: 210997 - RNA, 32 nt, Homo Sapiens
uccaaauccaguggagacuucugcgaugggaa

SEQ ID NO: 210998 - RNA, 32 nt, Homo Sapiens
auacaaaauugccaaaaaauagucucaaucuu

SEQ ID NO: 210999 - RNA, 32 nt, Homo Sapiens
ggagaugugaccgcgggcccggccggccugcc

SEQ ID NO: 211000 - RNA, 32 nt, Homo Sapiens
ccaggaggaggauuccuggggcuggugucuuc

SEQ ID NO: 211001 - RNA, 32 nt, Homo Sapiens
agggggagagagaggaggacaggcugcgaccc

SEQ ID NO: 211002 - RNA, 32 nt, Homo Sapiens
gcuggagguuuuaaauagauuuagacaaaugu

SEQ ID NO: 211003 - RNA, 30 nt, Homo Sapiens
cucaccauuugaguugcccaucuuguuuca

SEQ ID NO: 211004 - RNA, 32 nt, Homo Sapiens
aauuccaguugucuuuuucccagccgcauccu

SEQ ID NO: 211005 - RNA, 32 nt, Homo Sapiens
cccacugccccccaaguuccaggcucagucuu

SEQ ID NO: 211006 - RNA, 32 nt, Homo Sapiens
gucauugauguccugaugugaaacaacccuug

SEQ ID NO: 211007 - RNA, 32 nt, Homo Sapiens
ugcugcgucccccgcugcuugccgccccccac

SEQ ID NO: 211008 - RNA, 32 nt, Homo Sapiens
uuucaggaggcuggaggaagggggguugcagu

SEQ ID NO: 211009 - RNA, 32 nt, Homo Sapiens
ugguucuccccaccaccccaccaccgagacuu

SEQ ID NO: 211010 - RNA, 32 nt, Homo Sapiens
gagaacaugaaaacagaaaacgguuaaaacug

SEQ ID NO: 211011 - RNA, 32 nt, Homo Sapiens
aaaaaaauuguagcauauuuaagggaggcaau

SEQ ID NO: 211012 - RNA, 32 nt, Homo Sapiens
ggcagcgacggauccuccuccucccuuauucc

SEQ ID NO: 211013 - RNA, 32 nt, Homo Sapiens
cuccuuuccuucccacagaggccuccguuccc

SEQ ID NO: 211014 - RNA, 32 nt, Homo Sapiens
gcgacgcggcaggggucuccgcgcccaggcuc

SEQ ID NO: 211015 - RNA, 32 nt, Homo Sapiens
guaacaacauucguuagcacaaauauuucaga

SEQ ID NO: 211016 - RNA, 31 nt, Homo Sapiens
auugagaaauaaacauuuguguacaaaaugc

SEQ ID NO: 211017 - RNA, 32 nt, Homo Sapiens
agccagcccaaguucgcucucugcacaccucg

SEQ ID NO: 211018 - RNA, 32 nt, Homo Sapiens
aggacugcccaggcugcccaccuggacacuuc

SEQ ID NO: 211019 - RNA, 28 nt, Homo Sapiens
aaauucagugcuaccaguaaggcuuaau

SEQ ID NO: 211020 - RNA, 32 nt, Homo Sapiens
caggaggaggggaaagagcugcuggcggucgg

SEQ ID NO: 211021 - RNA, 31 nt, Homo Sapiens
gcaggggcgggccccagcagcagggauacau

SEQ ID NO: 211022 - RNA, 32 nt, Homo Sapiens
ccagauccaaggucccucacccugccugcccc

SEQ ID NO: 211023 - RNA, 32 nt, Homo Sapiens
augccugacagcacgcaucucccugaccccug

SEQ ID NO: 211024 - RNA, 32 nt, Homo Sapiens
uccacacucuguaucuggcuacucuggugggg

SEQ ID NO: 211025 - RNA, 32 nt, Homo Sapiens
uugccugccucgcgcuagcagcaagcugcucu

SEQ ID NO: 211026 - RNA, 32 nt, Homo Sapiens
uguaguuugccuuuuugguuguuguacccugc

SEQ ID NO: 211027 - RNA, 32 nt, Homo Sapiens
aucaauaaaaucaaacucuuaauauaccgagu

SEQ ID NO: 211028 - RNA, 32 nt, Homo Sapiens
caucagccuccccauuuuagcugacuuuccca

SEQ ID NO: 211029 - RNA, 32 nt, Homo Sapiens
ccccgacggacggugcaggcgaagagccgaac

SEQ ID NO: 211030 - RNA, 32 nt, Homo Sapiens
uuccauuaaagucuucuauuuuaaaauuuaga

SEQ ID NO: 211031 - RNA, 32 nt, Homo Sapiens
auuagagggaggugcugccaucucuuccuccu

SEQ ID NO: 211032 - RNA, 32 nt, Homo Sapiens
uuguugcccugauaauggaauuuuaaaacuac

SEQ ID NO: 211033 - RNA, 32 nt, Homo Sapiens
gguaacaauacacuauuugguaaaagaaugca

SEQ ID NO: 211034 - RNA, 32 nt, Homo Sapiens
cuggaaccaaaaugcaagugugagagaacuga

SEQ ID NO: 211035 - RNA, 32 nt, Homo Sapiens
uuaaagcacacuuuuccccgaccguauacuua

SEQ ID NO: 211036 - RNA, 32 nt, Homo Sapiens
uguguccuuucuggaaauuaagaaggugugcu

SEQ ID NO: 211037 - RNA, 32 nt, Homo Sapiens
cuuaaguaaacugguuuaauucuuaaucugua

SEQ ID NO: 211038 - RNA, 32 nt, Homo Sapiens
gaucucgggugacugcaaccacugccucccag

SEQ ID NO: 211039 - RNA, 32 nt, Homo Sapiens
gcuuaagaacaaacagaagacaaauauugcua

SEQ ID NO: 211040 - RNA, 32 nt, Homo Sapiens
ggaaggcucuucaggaccucuuaggagccaga

SEQ ID NO: 211041 - RNA, 32 nt, Homo Sapiens
gagcugugcuccugggugcugaagccucgcuc

SEQ ID NO: 211042 - RNA, 32 nt, Homo Sapiens
aagcuggcugagccccaagaccccgggggcca

SEQ ID NO: 211043 - RNA, 32 nt, Homo Sapiens
agaggccacagcugcuggcuuccugggcuucu

SEQ ID NO: 211044 - RNA, 32 nt, Homo Sapiens
uuggagccccaucuuugcuugcagcuuagcuu

SEQ ID NO: 211045 - RNA, 32 nt, Homo Sapiens
agugagucggccggucagggcccgcagccucg

SEQ ID NO: 211046 - RNA, 32 nt, Homo Sapiens
gacuggcauggacaucagcaucacgacaggcu

SEQ ID NO: 211047 - RNA, 32 nt, Homo Sapiens
auuaugaacaaaugaaaguuugcugugugauu

SEQ ID NO: 211048 - RNA, 32 nt, Homo Sapiens
ugcugaggaaauuuauuugguagauugaaggu

SEQ ID NO: 211049 - RNA, 32 nt, Homo Sapiens
aagaugcugugaauaucauuuugaacuugugu

SEQ ID NO: 211050 - RNA, 32 nt, Homo Sapiens
uggauguugguguggagacaagaagaggaggu

SEQ ID NO: 211051 - RNA, 32 nt, Homo Sapiens
uucccaggccuggugauucugcucuccaggga

SEQ ID NO: 211052 - RNA, 32 nt, Homo Sapiens
ccgacccccugcaccauggaccccgcucgccc

SEQ ID NO: 211053 - RNA, 32 nt, Homo Sapiens
ucuacuauugauuuuacagugcacugacaguu

SEQ ID NO: 211054 - RNA, 32 nt, Homo Sapiens
guguggucccuggggauggggcggcgguagca

SEQ ID NO: 211055 - RNA, 32 nt, Homo Sapiens
gccgggccuucgcgggccaccggcgccauggg

SEQ ID NO: 211056 - RNA, 32 nt, Homo Sapiens
cuccugccucaggcuccuggguggcugggacu

SEQ ID NO: 211057 - RNA, 32 nt, Homo Sapiens
aauguuuaauaaauaucugagcauguaucuau

SEQ ID NO: 211058 - RNA, 32 nt, Homo Sapiens
agcuguguugagaggcagcugcuucgcacaga

SEQ ID NO: 211059 - RNA, 32 nt, Homo Sapiens
uagcuggccuugggcuaggaggaugcgaaauc

SEQ ID NO: 211060 - RNA, 32 nt, Homo Sapiens
cacucacaccuuccuuggcuuuccuuccaccc

SEQ ID NO: 211061 - RNA, 32 nt, Homo Sapiens
cgggucagcuccgagaaagugccuucuguguc

SEQ ID NO: 211062 - RNA, 32 nt, Homo Sapiens
cgguguguugccacgauuugacccucaacuuc

SEQ ID NO: 211063 - RNA, 32 nt, Homo Sapiens
cuccucgccaacccacccacacgcucgucuca

SEQ ID NO: 211064 - RNA, 32 nt, Homo Sapiens
ccuucagucuuuggagacccagcugccuuugu

SEQ ID NO: 211065 - RNA, 32 nt, Homo Sapiens
gacgcagccccggcuguuuuugaagcggggcc

SEQ ID NO: 211066 - RNA, 32 nt, Homo Sapiens
cugcuguucacagccagggggacccucagagc

SEQ ID NO: 211067 - RNA, 32 nt, Homo Sapiens
acaucuuugcagcaggauaggcugguaauuug

SEQ ID NO: 211068 - RNA, 32 nt, Homo Sapiens
aguccacucugggggagcucuggcggggacca

SEQ ID NO: 211069 - RNA, 32 nt, Homo Sapiens
cgguggugcuuaaagaaaggaucaucagcaac

SEQ ID NO: 211070 - RNA, 31 nt, Homo Sapiens
uuaaaaacaaagaauagguaacauauugugc

SEQ ID NO: 211071 - RNA, 32 nt, Homo Sapiens
uuacugcccaaguuaaaauccugugacugugu

SEQ ID NO: 211072 - RNA, 32 nt, Homo Sapiens
uggagagaggggcuagggcuugaaacugaggg

SEQ ID NO: 211073 - RNA, 29 nt, Homo Sapiens
gaugcucuaacgaauuaccacaaaccugg

SEQ ID NO: 211074 - RNA, 31 nt, Homo Sapiens
agacacccacccucgcuucagccacaguuuc

SEQ ID NO: 211075 - RNA, 32 nt, Homo Sapiens
auggacugaaauguuaaaugugaauguacauu

SEQ ID NO: 211076 - RNA, 28 nt, Homo Sapiens
ucggcgguggcucccaggaugccggcgg

SEQ ID NO: 211077 - RNA, 32 nt, Homo Sapiens
gucccgcgcgcucccaggccgccccgaggcuu

SEQ ID NO: 211078 - RNA, 32 nt, Homo Sapiens
ugcagggaccucugcccaggaaagccaggcuu

SEQ ID NO: 211079 - RNA, 32 nt, Homo Sapiens
agcuaauuuuuguauuuuuaguaguaguggga

SEQ ID NO: 211080 - RNA, 32 nt, Homo Sapiens
cauaguugauaaauugauguuaucguaaagcc

SEQ ID NO: 211081 - RNA, 32 nt, Homo Sapiens
gugaacuggccuuggcgagggcuggucugugc

SEQ ID NO: 211082 - RNA, 32 nt, Homo Sapiens
ugcagucuccagcagagcaggcagucaggccc

SEQ ID NO: 211083 - RNA, 32 nt, Homo Sapiens
accugcaauguguggaucaaucuuacacaacg

SEQ ID NO: 211084 - RNA, 32 nt, Homo Sapiens
uggguuugauucaaagcccuuacuuuccuaau

SEQ ID NO: 211085 - RNA, 32 nt, Homo Sapiens
uugaggucaggaguuugagaucagccuggaca

SEQ ID NO: 211086 - RNA, 32 nt, Homo Sapiens
gagcgggcgggggagcucgcgccgaggacugg

SEQ ID NO: 211087 - RNA, 32 nt, Homo Sapiens
cagccgaagugccacaaaaugaacuaaaaucu

SEQ ID NO: 211088 - RNA, 28 nt, Homo Sapiens
gucaugcucccuccuccucgauacagaa

SEQ ID NO: 211089 - RNA, 32 nt, Homo Sapiens
aauuucagauauauuuuaguaacacauuccca

SEQ ID NO: 211090 - RNA, 32 nt, Homo Sapiens
ucaucccaguggcccugagacuauuuauccug

SEQ ID NO: 211091 - RNA, 32 nt, Homo Sapiens
gggccugcggcccucccugcaccggcggacgc

SEQ ID NO: 211092 - RNA, 32 nt, Homo Sapiens
cagguggaggccccaugccggagggagagcgg

SEQ ID NO: 211093 - RNA, 32 nt, Homo Sapiens
aaugugaauagauuucuggccuugaggacgau

SEQ ID NO: 211094 - RNA, 30 nt, Homo Sapiens
agaagaugauggccacuccgaaccagaccg

SEQ ID NO: 211095 - RNA, 30 nt, Homo Sapiens
gcggcauguugaccacaccagacuggguuu

SEQ ID NO: 211096 - RNA, 32 nt, Homo Sapiens
uugucuguagcgucuguauaauuauaauguug

SEQ ID NO: 211097 - RNA, 32 nt, Homo Sapiens
uucuaggacaauuggaauauaaauauugucca

SEQ ID NO: 211098 - RNA, 32 nt, Homo Sapiens
agguguaggcccggcgcggggcgcggacuccg

SEQ ID NO: 211099 - RNA, 32 nt, Homo Sapiens
cacuuccagcuugugcagacaccacccugcca

SEQ ID NO: 211100 - RNA, 32 nt, Homo Sapiens
caccaaaaaagauccccuuaagaucaacucua

SEQ ID NO: 211101 - RNA, 32 nt, Homo Sapiens
gagcacaaggaugugaugugggcaggacccac

SEQ ID NO: 211102 - RNA, 32 nt, Homo Sapiens
cuguaaagguauuuuuccucugccccacuccc

SEQ ID NO: 211103 - RNA, 32 nt, Homo Sapiens
ccaagaaaguauccuuuguaaaaacuugcuug

SEQ ID NO: 211104 - RNA, 32 nt, Homo Sapiens
caggcggagguaggccgcgggaggcgggagcc

SEQ ID NO: 211105 - RNA, 32 nt, Homo Sapiens
caaugucuaaaauagcucuauggcucugcgga

SEQ ID NO: 211106 - RNA, 32 nt, Homo Sapiens
uccaaguuugaaaacaauaugaauguuuaaaa

SEQ ID NO: 211107 - RNA, 32 nt, Homo Sapiens
augauuuucuugaaaaggaccuuguagaaccu

SEQ ID NO: 211108 - RNA, 32 nt, Homo Sapiens
acccuguaaucccagcacuuugggaggcugag

SEQ ID NO: 211109 - RNA, 32 nt, Homo Sapiens
ucuaucagauugucuucugcuaauuccucugg

SEQ ID NO: 211110 - RNA, 32 nt, Homo Sapiens
ggaguuaacauuuaagcauuuucagaauguug

SEQ ID NO: 211111 - RNA, 32 nt, Homo Sapiens
aagcugguuuguguuaagcaguauaguauugg

SEQ ID NO: 211112 - RNA, 32 nt, Homo Sapiens
auaccugagccacacaucucccugcccuucug

SEQ ID NO: 211113 - RNA, 32 nt, Homo Sapiens
gcaacaacuucucgcaauuacuucgauaauuc

SEQ ID NO: 211114 - RNA, 32 nt, Homo Sapiens
uagcugggacuacaggcgcgcgccaccacgac

SEQ ID NO: 211115 - RNA, 32 nt, Homo Sapiens
uauuuuguauaaagaacaaauagguccugcau

SEQ ID NO: 211116 - RNA, 31 nt, Homo Sapiens
cugggggagccccaacggccacaggacucca

SEQ ID NO: 211117 - RNA, 32 nt, Homo Sapiens
agguuuuuuguguauuugauuuuuaguuuuua

SEQ ID NO: 211118 - RNA, 32 nt, Homo Sapiens
agccucaaacuccuggguucaaguaacccucc

SEQ ID NO: 211119 - RNA, 32 nt, Homo Sapiens
ccuagagggaaagggcugcugcucugggaguc

SEQ ID NO: 211120 - RNA, 32 nt, Homo Sapiens
ccacuguccacagcaucuuccuuuaaaccaau

SEQ ID NO: 211121 - RNA, 32 nt, Homo Sapiens
uaauugcauaaggaguuuuagagagcuaugcu

SEQ ID NO: 211122 - RNA, 32 nt, Homo Sapiens
ucugaggcgccccaacccguggaggcugcucg

SEQ ID NO: 211123 - RNA, 32 nt, Homo Sapiens
gcagugaggguggagggagacagugggcggca

SEQ ID NO: 211124 - RNA, 32 nt, Homo Sapiens
ccccgggccacagccuggccuccggagccacc

SEQ ID NO: 211125 - RNA, 32 nt, Homo Sapiens
auagaaacuuuaauaaugauaguuuuuaacuu

SEQ ID NO: 211126 - RNA, 32 nt, Homo Sapiens
cugagcugacgcacaucuccagugcagcugca

SEQ ID NO: 211127 - RNA, 32 nt, Homo Sapiens
cuucccagccccugagcccagccccuucccaa

SEQ ID NO: 211128 - RNA, 32 nt, Homo Sapiens
uuaaaaaguauuucacaagaauggaacaaauc

SEQ ID NO: 211129 - RNA, 32 nt, Homo Sapiens
auguuccacacaaacuuaaauuacuguuggca

SEQ ID NO: 211130 - RNA, 32 nt, Homo Sapiens
cccggucccaccuggugacacugggcuuccuc

SEQ ID NO: 211131 - RNA, 32 nt, Homo Sapiens
gcccgcgguggcggggguuggcgacggagcgc

SEQ ID NO: 211132 - RNA, 32 nt, Homo Sapiens
auuugcuacaaaguauagagaaguauaaaaua

SEQ ID NO: 211133 - RNA, 32 nt, Homo Sapiens
ggcuccccaagccccacagcuuuccuuuccac

SEQ ID NO: 211134 - RNA, 32 nt, Homo Sapiens
ggccacccccgacguuccucgccccgcccgac

SEQ ID NO: 211135 - RNA, 32 nt, Homo Sapiens
cucugccacaaccgcgcguccucagagccagc

SEQ ID NO: 211136 - RNA, 32 nt, Homo Sapiens
auacuugaaauuuauuuuuuuauuauuuugau

SEQ ID NO: 211137 - RNA, 32 nt, Homo Sapiens
aacauuauuucuggauugaaaaucuuauaaaa

SEQ ID NO: 211138 - RNA, 30 nt, Homo Sapiens
gagcaaauaaagagauaguuugugaaagau

SEQ ID NO: 211139 - RNA, 32 nt, Homo Sapiens
agauuuuuaacaaaaaacggggagaaauaaug

SEQ ID NO: 211140 - RNA, 32 nt, Homo Sapiens
ccccgcgaugggagcugcucuccgcgggcuga

SEQ ID NO: 211141 - RNA, 32 nt, Homo Sapiens
caggugugcacguggacgcccgggugagcgug

SEQ ID NO: 211142 - RNA, 32 nt, Homo Sapiens
gggccccggcugcccgccaccauugcccccgg

SEQ ID NO: 211143 - RNA, 32 nt, Homo Sapiens
aggggaugggggugggggcccgguucucgagg

SEQ ID NO: 211144 - RNA, 32 nt, Homo Sapiens
caggcgguguauaaaaacuaaugugaguuuaa

SEQ ID NO: 211145 - RNA, 32 nt, Homo Sapiens
accuuugcacgcugugcgggcugagugguugg

SEQ ID NO: 211146 - RNA, 32 nt, Homo Sapiens
auuggcuaaaagacaugcauuuuuaaaacuag

SEQ ID NO: 211147 - RNA, 32 nt, Homo Sapiens
uuuauuuaauuguuuucuuauguuuugggugu

SEQ ID NO: 211148 - RNA, 32 nt, Homo Sapiens
gaaguucaagaucaaaaaggcuuauaaaacag

SEQ ID NO: 211149 - RNA, 32 nt, Homo Sapiens
uccuggaggaagcucaugaauggaaccaaaaa

SEQ ID NO: 211150 - RNA, 32 nt, Homo Sapiens
gggugagaugaccauucugggucuaagacugu

SEQ ID NO: 211151 - RNA, 32 nt, Homo Sapiens
uuuugcugccccuuuuaccaguggcugaaucu

SEQ ID NO: 211152 - RNA, 32 nt, Homo Sapiens
cacgugucccucccggccccggggccaccuca

SEQ ID NO: 211153 - RNA, 32 nt, Homo Sapiens
cuccgcgcgaccccggcccucucccugcggcc

SEQ ID NO: 211154 - RNA, 32 nt, Homo Sapiens
auuuaauuuacgaucuuaauagauaagauagg

SEQ ID NO: 211155 - RNA, 32 nt, Homo Sapiens
uguugagauguuugguaaaugccagguugaua

SEQ ID NO: 211156 - RNA, 32 nt, Homo Sapiens
ucagcugacacuaaguuuuuccuguucugggu

SEQ ID NO: 211157 - RNA, 32 nt, Homo Sapiens
uaaaucuuaaucuuguggcaucagggaaauau

SEQ ID NO: 211158 - RNA, 32 nt, Homo Sapiens
aggcagaaauaguugucugugcuuccuugguu

SEQ ID NO: 211159 - RNA, 32 nt, Homo Sapiens
ucaccuaauuaauuucaguaagaucaagcucc

SEQ ID NO: 211160 - RNA, 32 nt, Homo Sapiens
guggaggggcuuugaccacgaccuuugaagag

SEQ ID NO: 211161 - RNA, 32 nt, Homo Sapiens
gggacaaaauuuguacuauuagcaagaaucau

SEQ ID NO: 211162 - RNA, 32 nt, Homo Sapiens
uaguuucuuuuguaggugucaugauucccuga

SEQ ID NO: 211163 - RNA, 32 nt, Homo Sapiens
agccgcgacccggcuucucuccguccgagucc

SEQ ID NO: 211164 - RNA, 32 nt, Homo Sapiens
agcgguaggggaggggguagauucggcagcac

SEQ ID NO: 211165 - RNA, 32 nt, Homo Sapiens
cucguuuuacuuuuuguuaaacuuaugaaaau

SEQ ID NO: 211166 - RNA, 32 nt, Homo Sapiens
agaaacacucacagaagcgucugugcuuggag

SEQ ID NO: 211167 - RNA, 32 nt, Homo Sapiens
cucucugcuuggcaucaauagaugcauaaggg

SEQ ID NO: 211168 - RNA, 32 nt, Homo Sapiens
gcuagaccgaucuccggggagccccggaguag

SEQ ID NO: 211169 - RNA, 32 nt, Homo Sapiens
ggaccuaggcccagccccucagccucaucugg

SEQ ID NO: 211170 - RNA, 32 nt, Homo Sapiens
ucauuuacaauucaauauauaauuacgcaaau

SEQ ID NO: 211171 - RNA, 32 nt, Homo Sapiens
ggacauagauaaagaagauauuucuucgguua

SEQ ID NO: 211172 - RNA, 30 nt, Homo Sapiens
aaggugcgcaggcgcgcucggggcuggugg

SEQ ID NO: 211173 - RNA, 32 nt, Homo Sapiens
ugccucucccgcccccuuacccgccccggagc

SEQ ID NO: 211174 - RNA, 30 nt, Homo Sapiens
gcggguguauugagcggggaaacuugggau

SEQ ID NO: 211175 - RNA, 30 nt, Homo Sapiens
ccuuuaggcagccugccgccgucucugucc

SEQ ID NO: 211176 - RNA, 32 nt, Homo Sapiens
aacaaaaaugccaaguuguccugagcccuucu

SEQ ID NO: 211177 - RNA, 32 nt, Homo Sapiens
aguguagaagauaauuuaagauacauuuucuu

SEQ ID NO: 211178 - RNA, 32 nt, Homo Sapiens
cgccgcuucuuccgcuuucucgucaggcuccu

SEQ ID NO: 211179 - RNA, 32 nt, Homo Sapiens
ccugaaaaaugaauugauauucugagugaaaa

SEQ ID NO: 211180 - RNA, 32 nt, Homo Sapiens
uaugguuguaaauucauacacuuaucacauga

SEQ ID NO: 211181 - RNA, 32 nt, Homo Sapiens
gcgggagggcuuucucuacgugcuguugucuc

SEQ ID NO: 211182 - RNA, 32 nt, Homo Sapiens
aacauccuggacuuaaaaagccagggcaggcc

SEQ ID NO: 211183 - RNA, 31 nt, Homo Sapiens
uuagaggaacgaggauuauacagaaauuuga

SEQ ID NO: 211184 - RNA, 26 nt, Homo Sapiens
gauggcgacuucuggcgcggccucgg

SEQ ID NO: 211185 - RNA, 32 nt, Homo Sapiens
aacuacaaagacauuauuuucuuacuguucua

SEQ ID NO: 211186 - RNA, 32 nt, Homo Sapiens
gccugcagccacuggcuugauugggcccugga

SEQ ID NO: 211187 - RNA, 32 nt, Homo Sapiens
auuuuugauauucauauaauuaauagaaguug

SEQ ID NO: 211188 - RNA, 32 nt, Homo Sapiens
cucacccaccucagcacuuggaagaagaggug

SEQ ID NO: 211189 - RNA, 32 nt, Homo Sapiens
ugguuuccaucccaccacuccaaggacugaga

SEQ ID NO: 211190 - RNA, 27 nt, Homo Sapiens
uagauuuccuucuuauugccccuacug

SEQ ID NO: 211191 - RNA, 32 nt, Homo Sapiens
aauucccuccgccgcggucgcugagcgagugc

SEQ ID NO: 211192 - RNA, 32 nt, Homo Sapiens
agaccugcacaucaaaaccgcaaaacauugcu

SEQ ID NO: 211193 - RNA, 32 nt, Homo Sapiens
cgcgcuccccagucgccuccccgcaccgcugu

SEQ ID NO: 211194 - RNA, 32 nt, Homo Sapiens
gugguuccaaaauaauuuuuuuaaauauuaau

SEQ ID NO: 211195 - RNA, 32 nt, Homo Sapiens
uauaauuacauacugaauuauuucaugcauag

SEQ ID NO: 211196 - RNA, 32 nt, Homo Sapiens
uauauggcaggagcuacugagaacauaaaauc

SEQ ID NO: 211197 - RNA, 32 nt, Homo Sapiens
cagugaacuacauacugagauagggguuccug

SEQ ID NO: 211198 - RNA, 32 nt, Homo Sapiens
cugugagggcagauguccccuugucagcagcc

SEQ ID NO: 211199 - RNA, 32 nt, Homo Sapiens
gcaggccucccggucagggagccucugcugug

SEQ ID NO: 211200 - RNA, 32 nt, Homo Sapiens
agaacccuggcugaccacuuugaaggaggaug

SEQ ID NO: 211201 - RNA, 32 nt, Homo Sapiens
cugccccaggggcugagcugccaccagagguc

SEQ ID NO: 211202 - RNA, 32 nt, Homo Sapiens
aacccccgccgcccucgucgcgcgcggggccu

SEQ ID NO: 211203 - RNA, 32 nt, Homo Sapiens
uuggccugggccgggggcggggccgggacugg

SEQ ID NO: 211204 - RNA, 32 nt, Homo Sapiens
gcaaggggcucacgcgcacgcugcucaccuuc

SEQ ID NO: 211205 - RNA, 32 nt, Homo Sapiens
ugcuuaaugcuguuaugucauauugcccuaau

SEQ ID NO: 211206 - RNA, 32 nt, Homo Sapiens
auguguucugggggguuuggggugggagggaa

SEQ ID NO: 211207 - RNA, 32 nt, Homo Sapiens
ucuccucucucuucuuuucuacugugcuaucc

SEQ ID NO: 211208 - RNA, 32 nt, Homo Sapiens
gccuggcccacccaugguugcaggacgccuac

SEQ ID NO: 211209 - RNA, 32 nt, Homo Sapiens
cucugcgguuucugucccacuuaacugaccuc

SEQ ID NO: 211210 - RNA, 32 nt, Homo Sapiens
gccgcccgccucggcccggaacauggcugcgc

SEQ ID NO: 211211 - RNA, 32 nt, Homo Sapiens
uuuuacauuucccuaaugaucuugcuaauaaa

SEQ ID NO: 211212 - RNA, 32 nt, Homo Sapiens
cauauacacuuggggagauuugccacaucuua

SEQ ID NO: 211213 - RNA, 32 nt, Homo Sapiens
guugacacugaaaucuaaaauguuuaauuguu

SEQ ID NO: 211214 - RNA, 32 nt, Homo Sapiens
auacgcacagcuuuuggaugaccucagcuuga

SEQ ID NO: 211215 - RNA, 32 nt, Homo Sapiens
ccuaggacaaagcucaaaaguaccucugggac

SEQ ID NO: 211216 - RNA, 32 nt, Homo Sapiens
aguguccguuuucucugguuuugugaagacug

SEQ ID NO: 211217 - RNA, 32 nt, Homo Sapiens
ugguguggguuuuaucucugguuuguguucuc

SEQ ID NO: 211218 - RNA, 32 nt, Homo Sapiens
aaugugaaaagaagaaagcggcugguggaggc

SEQ ID NO: 211219 - RNA, 32 nt, Homo Sapiens
ugaaaaagcccauuuuagaaccuguuuaauaa

SEQ ID NO: 211220 - RNA, 32 nt, Homo Sapiens
auauguauguaucuuuguuugcuggaggauaa

SEQ ID NO: 211221 - RNA, 30 nt, Homo Sapiens
aagcaggucggcggcggcggcaggagagcg

SEQ ID NO: 211222 - RNA, 32 nt, Homo Sapiens
ugugugaggguggacgugaugaguguaucugg

SEQ ID NO: 211223 - RNA, 32 nt, Homo Sapiens
uaaaacaauuugcaguucaucgaccaccagac

SEQ ID NO: 211224 - RNA, 32 nt, Homo Sapiens
uuaaagaguccuccuucccagcucuacauucu

SEQ ID NO: 211225 - RNA, 32 nt, Homo Sapiens
gggcgaccgggcggacgagguggagccagagu

SEQ ID NO: 211226 - RNA, 32 nt, Homo Sapiens
gcaugggcgggugguggggacggcagugguga

SEQ ID NO: 211227 - RNA, 32 nt, Homo Sapiens
ccaguccugccguggaguuugcugggggagac

SEQ ID NO: 211228 - RNA, 32 nt, Homo Sapiens
gacuccuggccccgucccgcccccugucugag

SEQ ID NO: 211229 - RNA, 32 nt, Homo Sapiens
cucagcgcgggaagggggaaaugggaaacccg

SEQ ID NO: 211230 - RNA, 32 nt, Homo Sapiens
agcuggaaggcaaauuagaacaauaaaguuaa

SEQ ID NO: 211231 - RNA, 32 nt, Homo Sapiens
cgcgccuucuccggcguccgggucgagcgcag

SEQ ID NO: 211232 - RNA, 32 nt, Homo Sapiens
gaaagugagauuuguuauguucuggcuuuuaa

SEQ ID NO: 211233 - RNA, 32 nt, Homo Sapiens
ugaccccaccgccuaccucucuacaucuaaag

SEQ ID NO: 211234 - RNA, 32 nt, Homo Sapiens
uccagauauuuuacugcaaaaguucagaugga

SEQ ID NO: 211235 - RNA, 32 nt, Homo Sapiens
cgugagauucauuuuucuuaaauuuuggacuu

SEQ ID NO: 211236 - RNA, 32 nt, Homo Sapiens
gacgggcgcggaccaccuccaggggcuaagug

SEQ ID NO: 211237 - RNA, 32 nt, Homo Sapiens
agagauacaccuuuguaagaaaacauuaagaa

SEQ ID NO: 211238 - RNA, 32 nt, Homo Sapiens
ggugcccggguggugaucauuguccguggcau

SEQ ID NO: 211239 - RNA, 32 nt, Homo Sapiens
cuaggggagcacgggguuggacaggacaguga

SEQ ID NO: 211240 - RNA, 32 nt, Homo Sapiens
cgacccggcggacgcggcgucuggugugcggg

SEQ ID NO: 211241 - RNA, 32 nt, Homo Sapiens
auggagggagacggggaugucacgccgucccg

SEQ ID NO: 211242 - RNA, 32 nt, Homo Sapiens
auggggcauaaugugacuguaaaggggccugc

SEQ ID NO: 211243 - RNA, 32 nt, Homo Sapiens
guuuagccgcgccggaccgugucaagcaucua

SEQ ID NO: 211244 - RNA, 32 nt, Homo Sapiens
ugggggagggugggggcagggcuggcuggggg

SEQ ID NO: 211245 - RNA, 32 nt, Homo Sapiens
gccccccgccccucccucccagcccaccagcg

SEQ ID NO: 211246 - RNA, 32 nt, Homo Sapiens
ucuggcuguguuuggaucgcuuucaugcucgc

SEQ ID NO: 211247 - RNA, 32 nt, Homo Sapiens
aaucaguggcaccgaggcgccugcagccgcac

SEQ ID NO: 211248 - RNA, 32 nt, Homo Sapiens
cccgaaggucuaggaaauacguuaagggcaga

SEQ ID NO: 211249 - RNA, 32 nt, Homo Sapiens
cauacacggcuuugggguacaagcugugauca

SEQ ID NO: 211250 - RNA, 32 nt, Homo Sapiens
cggucaccuaccuauuugauuauauguugauu

SEQ ID NO: 211251 - RNA, 32 nt, Homo Sapiens
gggucaggacugaauuuugaggucuugaggca

SEQ ID NO: 211252 - RNA, 32 nt, Homo Sapiens
acaggacugaugccgaaaugucaccagguccu

SEQ ID NO: 211253 - RNA, 32 nt, Homo Sapiens
cugaagucaggccucccuccccagcacuggua

SEQ ID NO: 211254 - RNA, 28 nt, Homo Sapiens
augcaucgccuggugcuauccuggagca

SEQ ID NO: 211255 - RNA, 32 nt, Homo Sapiens
uucauucauacuucuguagagaacggaaaacu

SEQ ID NO: 211256 - RNA, 32 nt, Homo Sapiens
gcccggccugcgccgcggagucccgaggagcc

SEQ ID NO: 211257 - RNA, 32 nt, Homo Sapiens
guucguuugggguuguuccacuuaccccuuac

SEQ ID NO: 211258 - RNA, 32 nt, Homo Sapiens
uuauuucaguguaugagacauuacuguuuuaa

SEQ ID NO: 211259 - RNA, 32 nt, Homo Sapiens
ccaaaagacagcaugaaggaaaaaauaauaau

SEQ ID NO: 211260 - RNA, 32 nt, Homo Sapiens
cuggcuguguggggcgcaggcgggcaucggcg

SEQ ID NO: 211261 - RNA, 32 nt, Homo Sapiens
cuggugaccuauuugcacagaccgucgucuuc

SEQ ID NO: 211262 - RNA, 32 nt, Homo Sapiens
gggcgggggagcgccggaccgaaucggcucuc

SEQ ID NO: 211263 - RNA, 32 nt, Homo Sapiens
ucucuaguauguuguuucuuuauauuauuaaa

SEQ ID NO: 211264 - RNA, 32 nt, Homo Sapiens
cuacacaccguccguucacccccgucucuucc

SEQ ID NO: 211265 - RNA, 32 nt, Homo Sapiens
ccauugcccccuccuccacuggguucagaggg

SEQ ID NO: 211266 - RNA, 32 nt, Homo Sapiens
uggcaguguguacuuuguuuuugugagucaug

SEQ ID NO: 211267 - RNA, 29 nt, Homo Sapiens
uuaucuucauaugaagaaagcuaugagaa

SEQ ID NO: 211268 - RNA, 32 nt, Homo Sapiens
accuuuuaauaaauuuuauaauuaucuuguga

SEQ ID NO: 211269 - RNA, 32 nt, Homo Sapiens
agacauacugucagucucacuucugcuguccc

SEQ ID NO: 211270 - RNA, 32 nt, Homo Sapiens
uauggauggaucacuuguaaggacagugccug

SEQ ID NO: 211271 - RNA, 32 nt, Homo Sapiens
ucaaaaugugguuucaauauugaaauaaaugc

SEQ ID NO: 211272 - RNA, 32 nt, Homo Sapiens
uugauaacagcuuugucugaaaaaccccagag

SEQ ID NO: 211273 - RNA, 32 nt, Homo Sapiens
cuuaacucuauuucuccaguuuuuuaguccuu

SEQ ID NO: 211274 - RNA, 32 nt, Homo Sapiens
cucuuuguucgccacugggcggugaccucagg

SEQ ID NO: 211275 - RNA, 32 nt, Homo Sapiens
uccaguuaccaagcugugcacccaggggggug

SEQ ID NO: 211276 - RNA, 32 nt, Homo Sapiens
auuuguugauuaaaaaucauuugucuugcaga

SEQ ID NO: 211277 - RNA, 32 nt, Homo Sapiens
agggaggacuggucuguaauuucugaauguau

SEQ ID NO: 211278 - RNA, 32 nt, Homo Sapiens
uuccuaggaugucaugucugcuugucaaaaga

SEQ ID NO: 211279 - RNA, 32 nt, Homo Sapiens
ucuccaagggaaggaggaggaaacuguggugu

SEQ ID NO: 211280 - RNA, 30 nt, Homo Sapiens
ggguugcggacccugacgccggcgcggggc

SEQ ID NO: 211281 - RNA, 32 nt, Homo Sapiens
cguggaaggcggcucccggcgcuggcaggcgg

SEQ ID NO: 211282 - RNA, 32 nt, Homo Sapiens
agcaccagcgacagcucugcaguccuccuaug

SEQ ID NO: 211283 - RNA, 32 nt, Homo Sapiens
uuugccagcaggcuaugggaacuccauccuca

SEQ ID NO: 211284 - RNA, 32 nt, Homo Sapiens
agggacaauguucuacuaucccaacgugcuuc

SEQ ID NO: 211285 - RNA, 32 nt, Homo Sapiens
aucgacaaccucaaugagauggagcguuccaa

SEQ ID NO: 211286 - RNA, 32 nt, Homo Sapiens
aaugagagccugggcuuggugucgagggagcu

SEQ ID NO: 211287 - RNA, 32 nt, Homo Sapiens
acacuuccacuacucucuagaccuccugccua

SEQ ID NO: 211288 - RNA, 32 nt, Homo Sapiens
gugcaggugugggugcugagccgcccgccgcc

SEQ ID NO: 211289 - RNA, 32 nt, Homo Sapiens
gcguuucgcuucucagccauggagcggugcag

SEQ ID NO: 211290 - RNA, 32 nt, Homo Sapiens
uguuggaaaaauuuuggugaguucugcacauu

SEQ ID NO: 211291 - RNA, 32 nt, Homo Sapiens
cuauuuuuucuuuuaaaaagccacguaaugaa

SEQ ID NO: 211292 - RNA, 32 nt, Homo Sapiens
cugguccccucuauauauacaucauacuuaac

SEQ ID NO: 211293 - RNA, 32 nt, Homo Sapiens
ggaccauccuggcuaacacgcgguaaaacauc

SEQ ID NO: 211294 - RNA, 28 nt, Homo Sapiens
uccaauuugaagauucauuugaaggugg

SEQ ID NO: 211295 - RNA, 32 nt, Homo Sapiens
uuccaccaccgccugccuccucuaacuugggu

SEQ ID NO: 211296 - RNA, 32 nt, Homo Sapiens
ugaggauacuuaugaggauacuuaaacuuuua

SEQ ID NO: 211297 - RNA, 32 nt, Homo Sapiens
uggacuggguugggaagaaauacauuuccuaa

SEQ ID NO: 211298 - RNA, 32 nt, Homo Sapiens
gcgcccagucccggcccggggcugaguugggg

SEQ ID NO: 211299 - RNA, 32 nt, Homo Sapiens
uagaucuguuccaacaguucuguguaaaccaa

SEQ ID NO: 211300 - RNA, 32 nt, Homo Sapiens
aauccagagagauacuucuuauagaaaaacaa

SEQ ID NO: 211301 - RNA, 32 nt, Homo Sapiens
uccaggaagccggagagggcgcggcggccagg

SEQ ID NO: 211302 - RNA, 32 nt, Homo Sapiens
aauuccgguuggauaaaauggcuuuuccacau

SEQ ID NO: 211303 - RNA, 32 nt, Homo Sapiens
auuagcugggcaugguggcgcgugccuguaau

SEQ ID NO: 211304 - RNA, 32 nt, Homo Sapiens
guuagguccagaagaaaaccucucuggagccc

SEQ ID NO: 211305 - RNA, 32 nt, Homo Sapiens
ucuguacgauaguuuugauaauuuauaguacu

SEQ ID NO: 211306 - RNA, 32 nt, Homo Sapiens
cuucagacaaaguggaacuaagccugcuccag

SEQ ID NO: 211307 - RNA, 32 nt, Homo Sapiens
cccuggcuugcacucccuguccugcugcccug

SEQ ID NO: 211308 - RNA, 32 nt, Homo Sapiens
gcuccauucuccucccuauuaauaaaauuaua

SEQ ID NO: 211309 - RNA, 32 nt, Homo Sapiens
aucaccacucccuaaucucaaguacccaggga

SEQ ID NO: 211310 - RNA, 32 nt, Homo Sapiens
aaggcucccucccccacccucuuacuuuggag

SEQ ID NO: 211311 - RNA, 32 nt, Homo Sapiens
ucuaugaagaacccaacggaaguuuguggcac

SEQ ID NO: 211312 - RNA, 32 nt, Homo Sapiens
cgguagcaaaaauagagaaaggguagaaaaaa

SEQ ID NO: 211313 - RNA, 32 nt, Homo Sapiens
uagaggaaggaaauagcugaaaaacuaaauuu

SEQ ID NO: 211314 - RNA, 32 nt, Homo Sapiens
gaacaucaguugcagaugugaccccucugaga

SEQ ID NO: 211315 - RNA, 32 nt, Homo Sapiens
aagaaauagaacuugauuuuuauuuguuacag

SEQ ID NO: 211316 - RNA, 32 nt, Homo Sapiens
aagggaaaguagugacuucauguaucuguguc

SEQ ID NO: 211317 - RNA, 32 nt, Homo Sapiens
gaauuuagaauauuuagagcuaagcuucugga

SEQ ID NO: 211318 - RNA, 32 nt, Homo Sapiens
guccccuccgugccaguucccaggcgcacucu

SEQ ID NO: 211319 - RNA, 32 nt, Homo Sapiens
cgcgaaccucgcgggccggcguggccuuggcc

SEQ ID NO: 211320 - RNA, 32 nt, Homo Sapiens
aggcagcaguugcagugagcugagauugcgcc

SEQ ID NO: 211321 - RNA, 32 nt, Homo Sapiens
uccuucugcgucugcaaccuggcuuguuccca

SEQ ID NO: 211322 - RNA, 32 nt, Homo Sapiens
cuacggaggaggaggccacuacgaggaguacc

SEQ ID NO: 211323 - RNA, 32 nt, Homo Sapiens
gcagcacugcacccucacuagccagaguguug

SEQ ID NO: 211324 - RNA, 32 nt, Homo Sapiens
acagugggcgugucuguaaauauugugacagu

SEQ ID NO: 211325 - RNA, 32 nt, Homo Sapiens
acuucaucagaauaaacuauugaucuugugcu

SEQ ID NO: 211326 - RNA, 32 nt, Homo Sapiens
uuaagagguagaaaauaaaaaucugaagacca

SEQ ID NO: 211327 - RNA, 32 nt, Homo Sapiens
agcgugugcaggggagcgaggcugccaaguuu

SEQ ID NO: 211328 - RNA, 32 nt, Homo Sapiens
uagagaaauggcagggaaccucuuauccgggg

SEQ ID NO: 211329 - RNA, 32 nt, Homo Sapiens
gccaaaugccaacaaaaccaacccuugaagac

SEQ ID NO: 211330 - RNA, 32 nt, Homo Sapiens
auugcgggcggcggcguucggagucgccggga

SEQ ID NO: 211331 - RNA, 32 nt, Homo Sapiens
aggcagggacccugggguccagcgcugccccc

SEQ ID NO: 211332 - RNA, 32 nt, Homo Sapiens
agccuucccccuccagacacggaagcauguca

SEQ ID NO: 211333 - RNA, 32 nt, Homo Sapiens
augccgauacaggcccuugguguuuuaccaca

SEQ ID NO: 211334 - RNA, 32 nt, Homo Sapiens
agagaaaaacaaaaauaaaucauaccucaaag

SEQ ID NO: 211335 - RNA, 32 nt, Homo Sapiens
accgcccgccuuuccaggccccgccccgccua

SEQ ID NO: 211336 - RNA, 30 nt, Homo Sapiens
acaacagucugugcugcagauugguuggau

SEQ ID NO: 211337 - RNA, 32 nt, Homo Sapiens
cacuguggauuuuggaaaccagcagaaagagg

SEQ ID NO: 211338 - RNA, 32 nt, Homo Sapiens
uuaaacaguaccaaagugcauucuucaaugua

SEQ ID NO: 211339 - RNA, 28 nt, Homo Sapiens
uagccggcugcaggaccagugggggccu

SEQ ID NO: 211340 - RNA, 32 nt, Homo Sapiens
gaacuuccugcagguaaacaguucuugugugg

SEQ ID NO: 211341 - RNA, 32 nt, Homo Sapiens
accaacuugggaacugcuugucucacguugcu

SEQ ID NO: 211342 - RNA, 32 nt, Homo Sapiens
gauacaagaagggagaggugucugcuaccuuu

SEQ ID NO: 211343 - RNA, 32 nt, Homo Sapiens
cacugcuagagcuuccuguuaagcaaguguga

SEQ ID NO: 211344 - RNA, 32 nt, Homo Sapiens
cuucucuccgggucucccgcuccagcuccagc

SEQ ID NO: 211345 - RNA, 32 nt, Homo Sapiens
accugacaaaaauucaguuugagaauaauuuc

SEQ ID NO: 211346 - RNA, 32 nt, Homo Sapiens
agguaauauuggcaucaccaguggauugcaaa

SEQ ID NO: 211347 - RNA, 32 nt, Homo Sapiens
cuuuuuugaugagggcucacuccagcuucaua

SEQ ID NO: 211348 - RNA, 32 nt, Homo Sapiens
gcccagggcgcccccacccccagcucugccug

SEQ ID NO: 211349 - RNA, 32 nt, Homo Sapiens
cccggcugccagcaccauguccgcagggggag

SEQ ID NO: 211350 - RNA, 32 nt, Homo Sapiens
aauaggagcaacuuucaaaucuaguagaaacc

SEQ ID NO: 211351 - RNA, 32 nt, Homo Sapiens
gggaucguauuuuuauaucauauucacauauu

SEQ ID NO: 211352 - RNA, 32 nt, Homo Sapiens
aacuagggaugggaaauucugcaucuuggggg

SEQ ID NO: 211353 - RNA, 32 nt, Homo Sapiens
uagccccagcuggaagugacuuccgcaggaau

SEQ ID NO: 211354 - RNA, 32 nt, Homo Sapiens
aauucaguuuaaaagaacauuuguuuuuacau

SEQ ID NO: 211355 - RNA, 32 nt, Homo Sapiens
gguaggcagacaggcagagagaaggucauggc

SEQ ID NO: 211356 - RNA, 32 nt, Homo Sapiens
uuguauauaaauguauuuauggaauauugugc

SEQ ID NO: 211357 - RNA, 32 nt, Homo Sapiens
uugcuagauugugucuauuucauuuucuugau

SEQ ID NO: 211358 - RNA, 32 nt, Homo Sapiens
ccgccgagccgcggcccuguccgccuggcgcu

SEQ ID NO: 211359 - RNA, 32 nt, Homo Sapiens
ucgucgccgcgggggugccgggacuccggccg

SEQ ID NO: 211360 - RNA, 32 nt, Homo Sapiens
ggaauucgagaccggccuggccaauaugguga

SEQ ID NO: 211361 - RNA, 32 nt, Homo Sapiens
cuccugccucagccucucugguagcugggauu

SEQ ID NO: 211362 - RNA, 32 nt, Homo Sapiens
cucuuugagucaagucaaauauguagauugcc

SEQ ID NO: 211363 - RNA, 32 nt, Homo Sapiens
auguugggagcacagcucuauucugccugcuc

SEQ ID NO: 211364 - RNA, 29 nt, Homo Sapiens
cugugauaaacuuuauauugaagcuguau

SEQ ID NO: 211365 - RNA, 32 nt, Homo Sapiens
aucaaggugguguucucugugcuuucucucgu

SEQ ID NO: 211366 - RNA, 32 nt, Homo Sapiens
agaacgcauuuuggauguuauuauuaagaacc

SEQ ID NO: 211367 - RNA, 32 nt, Homo Sapiens
acuccuggaagacagccuggccuugcccaccu

SEQ ID NO: 211368 - RNA, 31 nt, Homo Sapiens
acuccuucagucaguuauccaaauaaaagca

SEQ ID NO: 211369 - RNA, 32 nt, Homo Sapiens
uugugaugcccccagacacugucauccuaggc

SEQ ID NO: 211370 - RNA, 32 nt, Homo Sapiens
gucagugguuuguggggcuggaugccagaagg

SEQ ID NO: 211371 - RNA, 32 nt, Homo Sapiens
ccuccccaccgccuuuucucacucagaugggg

SEQ ID NO: 211372 - RNA, 32 nt, Homo Sapiens
uaaguuacucaggugaauaaaggugaaaaaag

SEQ ID NO: 211373 - RNA, 32 nt, Homo Sapiens
guaagaggcacuuaucucugggaaauuugccu

SEQ ID NO: 211374 - RNA, 32 nt, Homo Sapiens
auggugaacaccguccccccgccccgcgccgc

SEQ ID NO: 211375 - RNA, 32 nt, Homo Sapiens
ccacgucgcuucugcacacgugucugagagcg

SEQ ID NO: 211376 - RNA, 32 nt, Homo Sapiens
agcuuucucguguggcggcgcuucucggaaag

SEQ ID NO: 211377 - RNA, 32 nt, Homo Sapiens
gcggggaacggccgcgaucggggccgcagcca

SEQ ID NO: 211378 - RNA, 32 nt, Homo Sapiens
ugagcagcaguggaagaccucgggccaugcgg

SEQ ID NO: 211379 - RNA, 32 nt, Homo Sapiens
ggcccaggagcuaccacuggcuacucagagga

SEQ ID NO: 211380 - RNA, 32 nt, Homo Sapiens
cuuuuguuccaaugucaaugugaacguccaca

SEQ ID NO: 211381 - RNA, 32 nt, Homo Sapiens
ggaccaggggguagcugugccagaugugcccc

SEQ ID NO: 211382 - RNA, 32 nt, Homo Sapiens
ccgcgggaaaccaaaauggcgaggggcuguau

SEQ ID NO: 211383 - RNA, 32 nt, Homo Sapiens
gugacagagccacggagcuggugucccuggga

SEQ ID NO: 211384 - RNA, 32 nt, Homo Sapiens
aggaggcuggugauggccccaguucuaccacu

SEQ ID NO: 211385 - RNA, 32 nt, Homo Sapiens
uaaauucuccacauuuuguaaccuguuuuauu

SEQ ID NO: 211386 - RNA, 32 nt, Homo Sapiens
uucuguaaggaauaauaaaauaauuguaauua

SEQ ID NO: 211387 - RNA, 32 nt, Homo Sapiens
ucuggugauccaaacaaaauggcuucaguggu

SEQ ID NO: 211388 - RNA, 32 nt, Homo Sapiens
gaggagucggauggggggcaaccaucagcaac

SEQ ID NO: 211389 - RNA, 32 nt, Homo Sapiens
cgccgaggucgcggcuucgcagaaacucgggc

SEQ ID NO: 211390 - RNA, 32 nt, Homo Sapiens
ucccagacugucagggccaggccugggucuag

SEQ ID NO: 211391 - RNA, 32 nt, Homo Sapiens
acauucucaaaacguaaauagguaucuagaga

SEQ ID NO: 211392 - RNA, 32 nt, Homo Sapiens
ggacuuuauagcacuuuuucaacuuuuugcuu

SEQ ID NO: 211393 - RNA, 32 nt, Homo Sapiens
ugugguggugggauggaauuauagacauccau

SEQ ID NO: 211394 - RNA, 32 nt, Homo Sapiens
cuuguaaucacuuuucauguuaaaauaaucag

SEQ ID NO: 211395 - RNA, 32 nt, Homo Sapiens
cgcgaggacaccggaggccaccccccgggggu

SEQ ID NO: 211396 - RNA, 32 nt, Homo Sapiens
auuuaaaaaaacuacaguaugaaccauguuau

SEQ ID NO: 211397 - RNA, 32 nt, Homo Sapiens
gucgcaauaaacaguuuuugguaaaucucaaa

SEQ ID NO: 211398 - RNA, 30 nt, Homo Sapiens
cggcuguuggcgggugagggucccgauguc

SEQ ID NO: 211399 - RNA, 32 nt, Homo Sapiens
ccagaugacccauuuuacccuauucacugcag

SEQ ID NO: 211400 - RNA, 32 nt, Homo Sapiens
guggccaggaucucguggcccgccgagacggu

SEQ ID NO: 211401 - RNA, 32 nt, Homo Sapiens
ggucgccucccggcuguggcagcggcggcggc

SEQ ID NO: 211402 - RNA, 32 nt, Homo Sapiens
ccgccucguagucacugccgcggcgccuugag

SEQ ID NO: 211403 - RNA, 32 nt, Homo Sapiens
uuuugaauacauggaaacuagaucugaaugca

SEQ ID NO: 211404 - RNA, 32 nt, Homo Sapiens
uuuugaucaagauaagcugccuuaaguucucu

SEQ ID NO: 211405 - RNA, 32 nt, Homo Sapiens
ugcggaggugguggaaaggcugaacucagcag

SEQ ID NO: 211406 - RNA, 32 nt, Homo Sapiens
guagagacaggguuggccaggcuggucucgag

SEQ ID NO: 211407 - RNA, 32 nt, Homo Sapiens
gagaucgugggcuggcuguguccacgugggag

SEQ ID NO: 211408 - RNA, 32 nt, Homo Sapiens
uggcgcugccagccuggcugcuacugcccacc

SEQ ID NO: 211409 - RNA, 32 nt, Homo Sapiens
auguuuuugauguuuaacuucuuuuuacauaa

SEQ ID NO: 211410 - RNA, 32 nt, Homo Sapiens
gcacccuuucccuaccuuuuccuucuuuaauc

SEQ ID NO: 211411 - RNA, 32 nt, Homo Sapiens
agccgcggcaccccugaggcccgggaggggcu

SEQ ID NO: 211412 - RNA, 32 nt, Homo Sapiens
agacgucagucuuuuuccugugguucccucuc

SEQ ID NO: 211413 - RNA, 32 nt, Homo Sapiens
caaaauuugacuguccuuuagcagaugucauu

SEQ ID NO: 211414 - RNA, 32 nt, Homo Sapiens
gucuggcugcgggcaacccuugaguuuucgcc

SEQ ID NO: 211415 - RNA, 32 nt, Homo Sapiens
aagggacuaggaugaacuaaauaagaacucag

SEQ ID NO: 211416 - RNA, 32 nt, Homo Sapiens
cgggcuccguggaagcguggccggcagcgucc

SEQ ID NO: 211417 - RNA, 32 nt, Homo Sapiens
guccagauuucugcuucuuuuuaaacaucaga

SEQ ID NO: 211418 - RNA, 32 nt, Homo Sapiens
ucgggaaagccccggggccgcggccaccuccu

SEQ ID NO: 211419 - RNA, 32 nt, Homo Sapiens
cguauaaauggcacugcuccauccucccccua

SEQ ID NO: 211420 - RNA, 32 nt, Homo Sapiens
auggcuucucaguuguuaaaaguauacccugg

SEQ ID NO: 211421 - RNA, 32 nt, Homo Sapiens
uccagacgagccccaucaaacuaguugggaag

SEQ ID NO: 211422 - RNA, 32 nt, Homo Sapiens
aacugcuuugggagauuaucaguagaaagagu

SEQ ID NO: 211423 - RNA, 32 nt, Homo Sapiens
ccccuugcccagagagcaccagacuuggugau

SEQ ID NO: 211424 - RNA, 32 nt, Homo Sapiens
ccuggagucaacaagcuuaggcagcauugauu

SEQ ID NO: 211425 - RNA, 32 nt, Homo Sapiens
aagaguuaauaaauuugugauuucugcugaaa

SEQ ID NO: 211426 - RNA, 32 nt, Homo Sapiens
acacagcuggaacaaucgcagcggcggcggca

SEQ ID NO: 211427 - RNA, 32 nt, Homo Sapiens
agauuugacacuaaguuuuuguucgagauugg

SEQ ID NO: 211428 - RNA, 32 nt, Homo Sapiens
ggcugcugcggcugcugccgggacgcguugac

SEQ ID NO: 211429 - RNA, 32 nt, Homo Sapiens
aaugaccucuuccucugaaacaucaguguuac

SEQ ID NO: 211430 - RNA, 32 nt, Homo Sapiens
accucuauuuccccuagcccuguccuuccacu

SEQ ID NO: 211431 - RNA, 32 nt, Homo Sapiens
ugauuggggccagcaacuuugcucucccugcc

SEQ ID NO: 211432 - RNA, 32 nt, Homo Sapiens
ugaucugccaggaggaggagcucaggcgguaa

SEQ ID NO: 211433 - RNA, 32 nt, Homo Sapiens
auguacuaaauugcuuauaaucaaauaaucaa

SEQ ID NO: 211434 - RNA, 32 nt, Homo Sapiens
cucagccaagucucccaccucucugcucgguu

SEQ ID NO: 211435 - RNA, 32 nt, Homo Sapiens
aaggaacuauaaacauugcacugaaaacuugc

SEQ ID NO: 211436 - RNA, 32 nt, Homo Sapiens
gacagagucucagucugucacccaggcuggag

SEQ ID NO: 211437 - RNA, 32 nt, Homo Sapiens
uuaauuuugacaaauaaguuacccucaacuca

SEQ ID NO: 211438 - RNA, 32 nt, Homo Sapiens
ugucaccuccaaguccuuucuccgcuaguuuu

SEQ ID NO: 211439 - RNA, 32 nt, Homo Sapiens
uacuuuauuggaaaauauaacuguguaagaag

SEQ ID NO: 211440 - RNA, 32 nt, Homo Sapiens
guacacagggucucuuuuuuuuguuucucaga

SEQ ID NO: 211441 - RNA, 32 nt, Homo Sapiens
cgcccugggggaggagggcgaagcgacgcggc

SEQ ID NO: 211442 - RNA, 32 nt, Homo Sapiens
uuuuaaaaaauauuuucaugcuuuauugucca

SEQ ID NO: 211443 - RNA, 32 nt, Homo Sapiens
aacuggauuggaaaaggucauuguagguugau

SEQ ID NO: 211444 - RNA, 32 nt, Homo Sapiens
aagggguuagaugaaacaucaguuggugaagc

SEQ ID NO: 211445 - RNA, 32 nt, Homo Sapiens
ugagcugugggaacccagaacacacacguuuu

SEQ ID NO: 211446 - RNA, 32 nt, Homo Sapiens
ggguguuucuugaggagggguggcucucucug

SEQ ID NO: 211447 - RNA, 32 nt, Homo Sapiens
aagcaccucccucccccugaggugcauaagua

SEQ ID NO: 211448 - RNA, 32 nt, Homo Sapiens
guguuuugcauguauuucucauuucauuuuag

SEQ ID NO: 211449 - RNA, 32 nt, Homo Sapiens
uagagcucccaccugcugaacuggugcagagg

SEQ ID NO: 211450 - RNA, 32 nt, Homo Sapiens
gcuuugauggacgguuuggaggaggcaagacu

SEQ ID NO: 211451 - RNA, 32 nt, Homo Sapiens
caaaacuggguugccagcuccaauguaccagc

SEQ ID NO: 211452 - RNA, 29 nt, Homo Sapiens
gcugugggacgucagcuuuaacccuagcc

SEQ ID NO: 211453 - RNA, 29 nt, Homo Sapiens
ugccaauaaaguucauuuucaauaauguc

SEQ ID NO: 211454 - RNA, 32 nt, Homo Sapiens
uucagucccagggcuuagccggaggaagcaca

SEQ ID NO: 211455 - RNA, 32 nt, Homo Sapiens
gacggagucucggucugucacccaggcuggag

SEQ ID NO: 211456 - RNA, 32 nt, Homo Sapiens
auaguuuccacauaguuuuucaugacuuagaa

SEQ ID NO: 211457 - RNA, 32 nt, Homo Sapiens
cagucaaggcugcccagcagcugcugguggac

SEQ ID NO: 211458 - RNA, 32 nt, Homo Sapiens
aauagagauuuauaucaagaaaaggaaucuag

SEQ ID NO: 211459 - RNA, 32 nt, Homo Sapiens
guuaguccaaccccaggccagcugccuuugcu

SEQ ID NO: 211460 - RNA, 32 nt, Homo Sapiens
accuucuuuucugcaucucuggagcucaucag

SEQ ID NO: 211461 - RNA, 32 nt, Homo Sapiens
cugccuggcagagcuguguuaccgucuuggcc

SEQ ID NO: 211462 - RNA, 32 nt, Homo Sapiens
ccuccccucacagugucacuuccggccucucu

SEQ ID NO: 211463 - RNA, 32 nt, Homo Sapiens
ugaacagacguuuaucuaucccauuuggcgac

SEQ ID NO: 211464 - RNA, 32 nt, Homo Sapiens
gaagcccuccucuugugaugacuacaguucac

SEQ ID NO: 211465 - RNA, 32 nt, Homo Sapiens
cccucuacccucaauccccacuggagauuccu

SEQ ID NO: 211466 - RNA, 32 nt, Homo Sapiens
ugucaugggugucuguggguuauuuaaaagaa

SEQ ID NO: 211467 - RNA, 32 nt, Homo Sapiens
agggugggacaaagccuggggcugggcggggg

SEQ ID NO: 211468 - RNA, 32 nt, Homo Sapiens
ggagcccccuccccgacucccacuuccagaag

SEQ ID NO: 211469 - RNA, 32 nt, Homo Sapiens
ccucaugccucccagaauaugaggucuaauua

SEQ ID NO: 211470 - RNA, 32 nt, Homo Sapiens
uuuuuauuuuguacauaguuaacuguguaucu

SEQ ID NO: 211471 - RNA, 32 nt, Homo Sapiens
aaauucaugaaguaaaaaagucucaugaaaau

SEQ ID NO: 211472 - RNA, 32 nt, Homo Sapiens
aggcagaggcuggagcaguucuuuuucaguuc

SEQ ID NO: 211473 - RNA, 32 nt, Homo Sapiens
uggaggccaccaagcugcucuccuucacucug

SEQ ID NO: 211474 - RNA, 32 nt, Homo Sapiens
ggugaagcugucuagcaagggauuguagcaca

SEQ ID NO: 211475 - RNA, 32 nt, Homo Sapiens
cggccucucccucucagugugaggcuucaccc

SEQ ID NO: 211476 - RNA, 32 nt, Homo Sapiens
uaacguaucacuuuuucuuauuuuguauuuau

SEQ ID NO: 211477 - RNA, 32 nt, Homo Sapiens
uuauauugauucauggguaacagguccauaau

SEQ ID NO: 211478 - RNA, 32 nt, Homo Sapiens
acucucuuuuucuucagacaauaggcaggagc

SEQ ID NO: 211479 - RNA, 32 nt, Homo Sapiens
gggcaggcggguggggggaugggaagggggug

SEQ ID NO: 211480 - RNA, 32 nt, Homo Sapiens
uaagacuuuaucauuucagcuacacauaaaag

SEQ ID NO: 211481 - RNA, 32 nt, Homo Sapiens
gccuccuuuaggaugccugcucugugcucucc

SEQ ID NO: 211482 - RNA, 32 nt, Homo Sapiens
agccaggagcagcgucccggcuccuccccugc

SEQ ID NO: 211483 - RNA, 32 nt, Homo Sapiens
uaaaagaacuacagaaaauguacagcaagaca

SEQ ID NO: 211484 - RNA, 32 nt, Homo Sapiens
cacaucuaaugcuuguaauaacguuuacuggu

SEQ ID NO: 211485 - RNA, 32 nt, Homo Sapiens
uaaaauuuagaaaaggccuguuuucuggagca

SEQ ID NO: 211486 - RNA, 31 nt, Homo Sapiens
cugccugccgccugccugccugccacugagg

SEQ ID NO: 211487 - RNA, 32 nt, Homo Sapiens
auuucuuuaaacacaacuugauuaagaagcaa

SEQ ID NO: 211488 - RNA, 32 nt, Homo Sapiens
aauuuuaagcaauugaaagauugcccuucaua

SEQ ID NO: 211489 - RNA, 32 nt, Homo Sapiens
gcuggcgaccagggaaauuccaaacugcugga

SEQ ID NO: 211490 - RNA, 32 nt, Homo Sapiens
uccccagccuacugccucuccagcacuucucu

SEQ ID NO: 211491 - RNA, 32 nt, Homo Sapiens
guuggccuuucugacucuggaaugaccacugu

SEQ ID NO: 211492 - RNA, 32 nt, Homo Sapiens
accacugcugcuacuguuuuuauuuguuuguu

SEQ ID NO: 211493 - RNA, 32 nt, Homo Sapiens
gggucggggaguauuuggguccggggucucag

SEQ ID NO: 211494 - RNA, 32 nt, Homo Sapiens
auugaaccucaucggaugcugcuguggcuggg

SEQ ID NO: 211495 - RNA, 32 nt, Homo Sapiens
accuggagccccacccaggagcuggccgcggc

SEQ ID NO: 211496 - RNA, 32 nt, Homo Sapiens
cagaaaagacaaagguuacuaauuguaugaua

SEQ ID NO: 211497 - RNA, 32 nt, Homo Sapiens
guccaguuggccagaucacuuuccaagggagc

SEQ ID NO: 211498 - RNA, 32 nt, Homo Sapiens
guacagauggagucgucccgcggccgccggcg

SEQ ID NO: 211499 - RNA, 32 nt, Homo Sapiens
ggggcagcucacgguggcucuggaguacguuu

SEQ ID NO: 211500 - RNA, 32 nt, Homo Sapiens
auaaauuuucagcaccugcuuuucucagcuug

SEQ ID NO: 211501 - RNA, 32 nt, Homo Sapiens
acccaaacugaaauucauguaagcucucagau

SEQ ID NO: 211502 - RNA, 32 nt, Homo Sapiens
gccacgcccagcuuccuccccccgacuccccc

SEQ ID NO: 211503 - RNA, 32 nt, Homo Sapiens
aagagggaaugggaaggcaaaugacaaauggc

SEQ ID NO: 211504 - RNA, 32 nt, Homo Sapiens
ccugugcauugcccauuuucucauggaguuuc

SEQ ID NO: 211505 - RNA, 32 nt, Homo Sapiens
caguuuaauguuuauuuuucucauuauuucau

SEQ ID NO: 211506 - RNA, 32 nt, Homo Sapiens
ggguacccugcgccccuccgcgggaaggugga

SEQ ID NO: 211507 - RNA, 32 nt, Homo Sapiens
acuuggcccccuucaggagccuggccaggcag

SEQ ID NO: 211508 - RNA, 32 nt, Homo Sapiens
gagacaacagaaaaagacaaacagcgauggag

SEQ ID NO: 211509 - RNA, 32 nt, Homo Sapiens
cauuuuguacauaagaaaauuauuuucagguu

SEQ ID NO: 211510 - RNA, 32 nt, Homo Sapiens
caaaagagaucgguaguguuguguguaggcca

SEQ ID NO: 211511 - RNA, 32 nt, Homo Sapiens
cauaccacccucaaaaaccuauuuguaaacaa

SEQ ID NO: 211512 - RNA, 32 nt, Homo Sapiens
ccucgggaaagcugcgcguucuccggccgcuu

SEQ ID NO: 211513 - RNA, 32 nt, Homo Sapiens
uggcucuguggcccuccucagagcugggaggc

SEQ ID NO: 211514 - RNA, 32 nt, Homo Sapiens
aguuauaggaaaggaagcagauaccuugcaaa

SEQ ID NO: 211515 - RNA, 30 nt, Homo Sapiens
aaggacaccccucgcccccaucuucaugga

SEQ ID NO: 211516 - RNA, 32 nt, Homo Sapiens
agcccaggccagggcucuguucuugccacacc

SEQ ID NO: 211517 - RNA, 32 nt, Homo Sapiens
agcuguggacgccggugagcccggggggaucg

SEQ ID NO: 211518 - RNA, 31 nt, Homo Sapiens
gagugccagcgcagucugcugggacaugcac

SEQ ID NO: 211519 - RNA, 32 nt, Homo Sapiens
ucacuugcaauuuuaauauuuucauuuggauu

SEQ ID NO: 211520 - RNA, 32 nt, Homo Sapiens
gccgccggccccacccauccgggucgaggagg

SEQ ID NO: 211521 - RNA, 27 nt, Homo Sapiens
cugguuuucuucuucauccugagaaag

SEQ ID NO: 211522 - RNA, 32 nt, Homo Sapiens
agaauucugauugauuugauugggaugaaugc

SEQ ID NO: 211523 - RNA, 32 nt, Homo Sapiens
gcucccacccccaccccggccucugggaggcu

SEQ ID NO: 211524 - RNA, 32 nt, Homo Sapiens
ccucugcccugccugccuggccucggaggacc

SEQ ID NO: 211525 - RNA, 32 nt, Homo Sapiens
aaaaaagagccaacagaaguaacuaauccggg

SEQ ID NO: 211526 - RNA, 32 nt, Homo Sapiens
cccuggccgaugacuggccccgagggcccaac

SEQ ID NO: 211527 - RNA, 32 nt, Homo Sapiens
uuguauauuuaguagaaacaggguuucaccau

SEQ ID NO: 211528 - RNA, 32 nt, Homo Sapiens
cuucuccuguuguccuucucaguuucucccca

SEQ ID NO: 211529 - RNA, 31 nt, Homo Sapiens
ccugguccucuggaugcuccaaggcucccag

SEQ ID NO: 211530 - RNA, 32 nt, Homo Sapiens
ccacccgggacuugggcagcggcgccggcagc

SEQ ID NO: 211531 - RNA, 32 nt, Homo Sapiens
cauggccacgaccacauccucuccacuggccu

SEQ ID NO: 211532 - RNA, 32 nt, Homo Sapiens
uacuacagaauccguccuuucauuucaacuua

SEQ ID NO: 211533 - RNA, 32 nt, Homo Sapiens
acuccaguaggagagcaggagaagauaucugg

SEQ ID NO: 211534 - RNA, 32 nt, Homo Sapiens
accagccucuucugccccuguguuccccuugg

SEQ ID NO: 211535 - RNA, 32 nt, Homo Sapiens
aaaucauuauccucuuuuuuguuuuauuuuuu

SEQ ID NO: 211536 - RNA, 32 nt, Homo Sapiens
auggagauuuucuccuacauuuucuuuuaaaa

SEQ ID NO: 211537 - RNA, 32 nt, Homo Sapiens
cuaauuauaacucaucucugaaugcauugugc

SEQ ID NO: 211538 - RNA, 32 nt, Homo Sapiens
accgaggggagcggcguccgcucggcccugcu

SEQ ID NO: 211539 - RNA, 32 nt, Homo Sapiens
guuucauuauucaguuuccucuguaaagggau

SEQ ID NO: 211540 - RNA, 32 nt, Homo Sapiens
uuaaauguagacuuuuaaaauaaacuguuuuc

SEQ ID NO: 211541 - RNA, 32 nt, Homo Sapiens
agagacccugggugagaccccugugagcaugg

SEQ ID NO: 211542 - RNA, 32 nt, Homo Sapiens
gaugugcaucuucccuuucuugguuuuagaug

SEQ ID NO: 211543 - RNA, 32 nt, Homo Sapiens
ggggccgcgccugccaggccgacgggucuggc

SEQ ID NO: 211544 - RNA, 32 nt, Homo Sapiens
uucugucccucccacaccucucaccucacagg

SEQ ID NO: 211545 - RNA, 32 nt, Homo Sapiens
gaaggaugcuggggauaagcccuuagcaccag

SEQ ID NO: 211546 - RNA, 32 nt, Homo Sapiens
uuuaugcuauacauucuauguaugaggugcua

SEQ ID NO: 211547 - RNA, 32 nt, Homo Sapiens
ggugggugagaagagggaaaauugcagggacc

SEQ ID NO: 211548 - RNA, 32 nt, Homo Sapiens
agacaguguuuuugaaaauauguauuucuccc

SEQ ID NO: 211549 - RNA, 32 nt, Homo Sapiens
gccuucuuauuguccuccuccuccuggcucgg

SEQ ID NO: 211550 - RNA, 32 nt, Homo Sapiens
gcagggcugcggaggggcgcgcuggggcuucg

SEQ ID NO: 211551 - RNA, 32 nt, Homo Sapiens
gagccuacgcuugguccagaacaucaaacucc

SEQ ID NO: 211552 - RNA, 32 nt, Homo Sapiens
cgcaugcuccagccagggucuuuggggacuca

SEQ ID NO: 211553 - RNA, 32 nt, Homo Sapiens
cucuccacuuauucuuuuuuaugauucugcac

SEQ ID NO: 211554 - RNA, 32 nt, Homo Sapiens
auguuuaagaccugaccccagccccaaucuga

SEQ ID NO: 211555 - RNA, 32 nt, Homo Sapiens
accucuacgcaccauaagacucugccagaacu

SEQ ID NO: 211556 - RNA, 30 nt, Homo Sapiens
aucucaugguuaaugggguacauggacaug

SEQ ID NO: 211557 - RNA, 32 nt, Homo Sapiens
uuuccuuuuuuuuuuuuuuuuacaaaaacuuu

SEQ ID NO: 211558 - RNA, 32 nt, Homo Sapiens
ccacaauucccagcauccuccuccuccuccuc

SEQ ID NO: 211559 - RNA, 32 nt, Homo Sapiens
aucccagggcuuugugcagucucuaauucccu

SEQ ID NO: 211560 - RNA, 32 nt, Homo Sapiens
ucaggucaguaauccaaauccaaauauguaua

SEQ ID NO: 211561 - RNA, 32 nt, Homo Sapiens
uggaaaacacaaggcuccugcuguggggcugg

SEQ ID NO: 211562 - RNA, 32 nt, Homo Sapiens
ucaggauggugggaugugauuuagacagugca

SEQ ID NO: 211563 - RNA, 31 nt, Homo Sapiens
aaguggagauaaaaacugcuaaauauuaaga

SEQ ID NO: 211564 - RNA, 32 nt, Homo Sapiens
ccauuuuggaauuuugaguuccaauuguugua

SEQ ID NO: 211565 - RNA, 32 nt, Homo Sapiens
uuuuccauccccacccaacagacuuugcuucc

SEQ ID NO: 211566 - RNA, 32 nt, Homo Sapiens
aaaccuauuuuauaggauuuuaaacuuaaacu

SEQ ID NO: 211567 - RNA, 32 nt, Homo Sapiens
uguuuagccaucuagucugugguuuucuguug

SEQ ID NO: 211568 - RNA, 32 nt, Homo Sapiens
agauacuauccuguuggugugcccuggggugc

SEQ ID NO: 211569 - RNA, 32 nt, Homo Sapiens
cacugcuccuggcuugaauuuucuuauaaucc

SEQ ID NO: 211570 - RNA, 32 nt, Homo Sapiens
gcuggguuaccugggcccuguggccuugggcc

SEQ ID NO: 211571 - RNA, 28 nt, Homo Sapiens
gaguccgaguggaucaggaugaugauca

SEQ ID NO: 211572 - RNA, 32 nt, Homo Sapiens
gcugcagccccuccccaugcacgcugggagac

SEQ ID NO: 211573 - RNA, 32 nt, Homo Sapiens
acaaauguaaaauuauauccuauauuuaagua

SEQ ID NO: 211574 - RNA, 32 nt, Homo Sapiens
cccuuaacucugguauacaccaaaaagaaauc

SEQ ID NO: 211575 - RNA, 32 nt, Homo Sapiens
uaguguaugcuuugaauguaaaaauuggucac

SEQ ID NO: 211576 - RNA, 32 nt, Homo Sapiens
aaaaaguagagacaaaaguaaugucaauguaa

SEQ ID NO: 211577 - RNA, 31 nt, Homo Sapiens
uauagcuuagugcuaaaaucaguguaacuua

SEQ ID NO: 211578 - RNA, 32 nt, Homo Sapiens
ugcccgcuguaauuauuuucuauuuuuguaaa

SEQ ID NO: 211579 - RNA, 32 nt, Homo Sapiens
aaauauaagaaaagguuaucuuaaauagaucu

SEQ ID NO: 211580 - RNA, 32 nt, Homo Sapiens
gucugcugggugcuaacaaagcucucaucacu

SEQ ID NO: 211581 - RNA, 32 nt, Homo Sapiens
ccgccaguggcgggcuccguucucccucgaag

SEQ ID NO: 211582 - RNA, 32 nt, Homo Sapiens
acaggugagggagagcaggcuggcuuagaggg

SEQ ID NO: 211583 - RNA, 32 nt, Homo Sapiens
uagcuugugcccagaaaacaaacagugacacu

SEQ ID NO: 211584 - RNA, 32 nt, Homo Sapiens
gcuuggcucccucugcugaucucagaguuucc

SEQ ID NO: 211585 - RNA, 32 nt, Homo Sapiens
uaagggcuucacuuccuucuccggaggccugc

SEQ ID NO: 211586 - RNA, 32 nt, Homo Sapiens
acacagaucuucuguucauuuguucucugucu

SEQ ID NO: 211587 - RNA, 32 nt, Homo Sapiens
ucuccacuaaaaguacaaaaaauuagcugggc

SEQ ID NO: 211588 - RNA, 32 nt, Homo Sapiens
caguggccggaacacacgggcucuuuagcuga

SEQ ID NO: 211589 - RNA, 32 nt, Homo Sapiens
uucaguagacauugcaguuaguuagcaagaac

SEQ ID NO: 211590 - RNA, 32 nt, Homo Sapiens
ugcaagccccgcccggcccuacccagggcggc

SEQ ID NO: 211591 - RNA, 32 nt, Homo Sapiens
gcuauguucuguuucaaaauaauuaccugguu

SEQ ID NO: 211592 - RNA, 32 nt, Homo Sapiens
cugucuguauauaucugcauuuuuuagugauu

SEQ ID NO: 211593 - RNA, 32 nt, Homo Sapiens
aaaguggaauaauuccacugauugugauaaug

SEQ ID NO: 211594 - RNA, 32 nt, Homo Sapiens
cagaaagacagagugauaaaucugucaaauua

SEQ ID NO: 211595 - RNA, 32 nt, Homo Sapiens
cacgaggcuuugcaguggaugcccuuggcagg

SEQ ID NO: 211596 - RNA, 32 nt, Homo Sapiens
ccugggcucucgccuggcaguuguuugcuuau

SEQ ID NO: 211597 - RNA, 32 nt, Homo Sapiens
ucaauaaaagauauuucuuuucaucugcaaaa

SEQ ID NO: 211598 - RNA, 32 nt, Homo Sapiens
gugauccuggaacacacacagaagccucuggg

SEQ ID NO: 211599 - RNA, 32 nt, Homo Sapiens
gucggagccagcaaauucauagcgcacacucc

SEQ ID NO: 211600 - RNA, 29 nt, Homo Sapiens
aaaaaugugacuuucuuguuuugucucaa

SEQ ID NO: 211601 - RNA, 32 nt, Homo Sapiens
ucuacuaggaggagccagggacuggggcgggg

SEQ ID NO: 211602 - RNA, 32 nt, Homo Sapiens
cugaaaaagggaggaggcagaccacucggaga

SEQ ID NO: 211603 - RNA, 31 nt, Homo Sapiens
cugggggcugcucugcugccccggcccaggu

SEQ ID NO: 211604 - RNA, 32 nt, Homo Sapiens
uggcuuugccacuugugagcugcgugaccuug

SEQ ID NO: 211605 - RNA, 32 nt, Homo Sapiens
uguccacaagauaacucuuucuggaacaaacu

SEQ ID NO: 211606 - RNA, 30 nt, Homo Sapiens
gcagcaugggggagaagucagagaacugug

SEQ ID NO: 211607 - RNA, 32 nt, Homo Sapiens
ccggagccgacggcgcuggggcccaaggggcc

SEQ ID NO: 211608 - RNA, 32 nt, Homo Sapiens
uugauuugacauuuucaaagcagauguaaguu

SEQ ID NO: 211609 - RNA, 32 nt, Homo Sapiens
ucacuuacaaccaaaaagguccaaaugugcua

SEQ ID NO: 211610 - RNA, 32 nt, Homo Sapiens
cuaugcucccuggcugcagauuaacaagcgga

SEQ ID NO: 211611 - RNA, 32 nt, Homo Sapiens
uugcuuaguuuauuucuuauuuuugguauaca

SEQ ID NO: 211612 - RNA, 32 nt, Homo Sapiens
aaagcccgcgcgccgcugcauccugcgcccag

SEQ ID NO: 211613 - RNA, 32 nt, Homo Sapiens
cauauauguuuuacaaucagugucucaauuuc

SEQ ID NO: 211614 - RNA, 32 nt, Homo Sapiens
cgccagcccgucuugcuugcucgccgccugcu

SEQ ID NO: 211615 - RNA, 32 nt, Homo Sapiens
guguuaccuuggagccuacaaugagagguauu

SEQ ID NO: 211616 - RNA, 32 nt, Homo Sapiens
cguuuccagagguaauuaugagcgccuaccag

SEQ ID NO: 211617 - RNA, 32 nt, Homo Sapiens
uucuuccuuuuggaauaguaauauccauccua

SEQ ID NO: 211618 - RNA, 32 nt, Homo Sapiens
guacuggcuguuaaauaaaaauauucugaaug

SEQ ID NO: 211619 - RNA, 32 nt, Homo Sapiens
uguggcauuuuucuauaauaaacauggauuac

SEQ ID NO: 211620 - RNA, 32 nt, Homo Sapiens
cgggggcuggggaggaagcuggagagccacgg

SEQ ID NO: 211621 - RNA, 32 nt, Homo Sapiens
auucccagacauuugcuaaaaagcagcauccu

SEQ ID NO: 211622 - RNA, 32 nt, Homo Sapiens
aguuucuggacaggaagaaaaauacaguuaca

SEQ ID NO: 211623 - RNA, 31 nt, Homo Sapiens
gacaauuuguuccagaaccagucugaugcaa

SEQ ID NO: 211624 - RNA, 32 nt, Homo Sapiens
auuuucaaacagcaaaguacuuugaaaaccau

SEQ ID NO: 211625 - RNA, 32 nt, Homo Sapiens
cccuucgaggccccaggggucuccaccccagc

SEQ ID NO: 211626 - RNA, 32 nt, Homo Sapiens
cuuuuuauuuguuuucacccauuugaaaaaug

SEQ ID NO: 211627 - RNA, 32 nt, Homo Sapiens
uuuuaaaaugauuuagaccgauuuucagauuu

SEQ ID NO: 211628 - RNA, 32 nt, Homo Sapiens
caucccgcccgcucgccugccgagggcugcgc

SEQ ID NO: 211629 - RNA, 32 nt, Homo Sapiens
ucaugagaugcuuuuucuuaaugugauuuugu

SEQ ID NO: 211630 - RNA, 29 nt, Homo Sapiens
uugucacaguauuaaaguucccucgugcc

SEQ ID NO: 211631 - RNA, 32 nt, Homo Sapiens
caaaccuccuucccucugcccaaagcuguccu

SEQ ID NO: 211632 - RNA, 32 nt, Homo Sapiens
ucugagaggugccugcugcugcuguauacacu

SEQ ID NO: 211633 - RNA, 32 nt, Homo Sapiens
aggaaaaagaacaauuuucaauuuucagaaau

SEQ ID NO: 211634 - RNA, 32 nt, Homo Sapiens
ccuggcucauugauccauuuugagggcauuug

SEQ ID NO: 211635 - RNA, 32 nt, Homo Sapiens
gccacgggugcgccugcguaccggagcuacug

SEQ ID NO: 211636 - RNA, 32 nt, Homo Sapiens
uuugcccucccaauccugggguugcuucaggg

SEQ ID NO: 211637 - RNA, 32 nt, Homo Sapiens
uucaugaaaugaaacuuuguaacuuauuguag

SEQ ID NO: 211638 - RNA, 32 nt, Homo Sapiens
caaggugccuguaucucaaaacucuuaucagu

SEQ ID NO: 211639 - RNA, 32 nt, Homo Sapiens
ucuaagguagaaggaauuuuggucaauugugc

SEQ ID NO: 211640 - RNA, 32 nt, Homo Sapiens
gcuucucggcucgaggccccagucucgaccgc

SEQ ID NO: 211641 - RNA, 32 nt, Homo Sapiens
agcaugaccuuggcgucuguucugggagcaca

SEQ ID NO: 211642 - RNA, 32 nt, Homo Sapiens
cuucucugucucauguguacucuucuucuuuc

SEQ ID NO: 211643 - RNA, 32 nt, Homo Sapiens
uuaauguuuuaagcacuagaaacuagauauuu

SEQ ID NO: 211644 - RNA, 32 nt, Homo Sapiens
aacuuuugcucauuuuaauaguaaaaacacau

SEQ ID NO: 211645 - RNA, 32 nt, Homo Sapiens
guugguucuaaagaguggugagucagaagaga

SEQ ID NO: 211646 - RNA, 32 nt, Homo Sapiens
ugcugaaagauuuggaacagaagaugauggcc

SEQ ID NO: 211647 - RNA, 27 nt, Homo Sapiens
aaauggccauuuucaagauugcagcuc

SEQ ID NO: 211648 - RNA, 32 nt, Homo Sapiens
auagccuacacuaaaugguaacuauuaccuau

SEQ ID NO: 211649 - RNA, 30 nt, Homo Sapiens
auguucugugacugcauuugcaucucggau

SEQ ID NO: 211650 - RNA, 32 nt, Homo Sapiens
ccccccccaaaauaauucuguucacuuuuguu

SEQ ID NO: 211651 - RNA, 32 nt, Homo Sapiens
ccucuggccccgggcccccagggugcacacag

SEQ ID NO: 211652 - RNA, 32 nt, Homo Sapiens
uguagccaaaaauuacaaauggaauaaaguuu

SEQ ID NO: 211653 - RNA, 29 nt, Homo Sapiens
gccaagucauauggggauagcaggagcaa

SEQ ID NO: 211654 - RNA, 32 nt, Homo Sapiens
ggucccuuuuucugaugaagucuuaauucccu

SEQ ID NO: 211655 - RNA, 32 nt, Homo Sapiens
gaaugggugccaagugccagggggcggagucc

SEQ ID NO: 211656 - RNA, 31 nt, Homo Sapiens
acugaccaaacauagaaccaggcuggguuuu

SEQ ID NO: 211657 - RNA, 32 nt, Homo Sapiens
ggccaacuguggcuguuacaguucuuucauuc

SEQ ID NO: 211658 - RNA, 32 nt, Homo Sapiens
gcacgaugaacuauuggagcauacaguacugc

SEQ ID NO: 211659 - RNA, 32 nt, Homo Sapiens
ucaaauauuuaaaacaaauuuaaagggucugu

SEQ ID NO: 211660 - RNA, 32 nt, Homo Sapiens
gacuagaggcggggugggaggggggcgggugg

SEQ ID NO: 211661 - RNA, 32 nt, Homo Sapiens
gucuccccauucuccagguccccugaacugca

SEQ ID NO: 211662 - RNA, 28 nt, Homo Sapiens
aggauggagcggggcgcaggagccaagc

SEQ ID NO: 211663 - RNA, 32 nt, Homo Sapiens
aaggcuggggcugcgggugcugccaggggccg

SEQ ID NO: 211664 - RNA, 32 nt, Homo Sapiens
uuuccaagccucaauuuuugacuuccaugcac

SEQ ID NO: 211665 - RNA, 32 nt, Homo Sapiens
cccuucucccuucucucccagcagaacggugg

SEQ ID NO: 211666 - RNA, 32 nt, Homo Sapiens
uugcagcuuuucugcaguguggcuugcugauc

SEQ ID NO: 211667 - RNA, 32 nt, Homo Sapiens
auucagguuuugaauuuuauuuagucaccuau

SEQ ID NO: 211668 - RNA, 32 nt, Homo Sapiens
uucaggaccaucuuugaauccuccucggcucu

SEQ ID NO: 211669 - RNA, 32 nt, Homo Sapiens
aacacggugaaaccccauuuccacuaaaaaua

SEQ ID NO: 211670 - RNA, 32 nt, Homo Sapiens
gaucauacaaauaaucuaagauuauacagucu

SEQ ID NO: 211671 - RNA, 32 nt, Homo Sapiens
uugaggucagggguuugagaccagccuggcuu

SEQ ID NO: 211672 - RNA, 32 nt, Homo Sapiens
guauuggaugugaacacacuuuucgacugaaa

SEQ ID NO: 211673 - RNA, 32 nt, Homo Sapiens
ucucucuuaaugcaugauacagaauaauaaua

SEQ ID NO: 211674 - RNA, 32 nt, Homo Sapiens
gaaaugguaaauaaaucuggugcauuaaaaau

SEQ ID NO: 211675 - RNA, 32 nt, Homo Sapiens
uuccccaaacuggaaugugucuuugcagacgc

SEQ ID NO: 211676 - RNA, 32 nt, Homo Sapiens
ugaggaggggguaaggaugcaggggccaugca

SEQ ID NO: 211677 - RNA, 32 nt, Homo Sapiens
gauaaacaauuucagagauguuucagaauaca

SEQ ID NO: 211678 - RNA, 32 nt, Homo Sapiens
aucuuacuuaugguugugaacugcuuggaguc

SEQ ID NO: 211679 - RNA, 32 nt, Homo Sapiens
cugacuugcccccagugaguuucugaacccaa

SEQ ID NO: 211680 - RNA, 32 nt, Homo Sapiens
ugcaggugcaggagggaggcggcucugggcuc

SEQ ID NO: 211681 - RNA, 32 nt, Homo Sapiens
ucucauucuuaaaagacuuuggacuuaaaucc

SEQ ID NO: 211682 - RNA, 32 nt, Homo Sapiens
uaggucagaaggaaacauaccacucucauggu

SEQ ID NO: 211683 - RNA, 32 nt, Homo Sapiens
agaaaucccgcacgcgcgccugccuccucucc

SEQ ID NO: 211684 - RNA, 32 nt, Homo Sapiens
uccagccuauuauaauaacugaguuauauuca

SEQ ID NO: 211685 - RNA, 32 nt, Homo Sapiens
gguggccuugcccugcucccccggggaccccc

SEQ ID NO: 211686 - RNA, 32 nt, Homo Sapiens
agggcgcuccucucugcacaccuacuagucac

SEQ ID NO: 211687 - RNA, 32 nt, Homo Sapiens
uuuuucaaucuggcuuuuuggaagauuguauu

SEQ ID NO: 211688 - RNA, 32 nt, Homo Sapiens
cauaacucaaggaaguugaaugaggugaacau

SEQ ID NO: 211689 - RNA, 32 nt, Homo Sapiens
cagggauuuuuagggcggcaagcucaggugga

SEQ ID NO: 211690 - RNA, 32 nt, Homo Sapiens
aucagcgagguuucuuuuuuuuuuuuuuuuuc

SEQ ID NO: 211691 - RNA, 32 nt, Homo Sapiens
ucuuccacauucagauuagauucggacaugaa

SEQ ID NO: 211692 - RNA, 31 nt, Homo Sapiens
uuuuuuacuguaguaaaauguacuauaacgu

SEQ ID NO: 211693 - RNA, 32 nt, Homo Sapiens
agagagggugacauccuggggcuugugacauu

SEQ ID NO: 211694 - RNA, 32 nt, Homo Sapiens
auugugauauuguugugagucuaggucaaugu

SEQ ID NO: 211695 - RNA, 32 nt, Homo Sapiens
uccuaucagcacuaucacuaagggcaggcgac

SEQ ID NO: 211696 - RNA, 32 nt, Homo Sapiens
uccggacuuaggaaccagugaccuuggcugcc

SEQ ID NO: 211697 - RNA, 32 nt, Homo Sapiens
aaucgguuuuugcuguuuacccucuuggaugc

SEQ ID NO: 211698 - RNA, 32 nt, Homo Sapiens
agugagaaggcaccguaucucugaagcagaga

SEQ ID NO: 211699 - RNA, 32 nt, Homo Sapiens
uuaaaacauuuuacugccauauggggacuggc

SEQ ID NO: 211700 - RNA, 32 nt, Homo Sapiens
gggugagccgcggcggccgucucucccacccg

SEQ ID NO: 211701 - RNA, 32 nt, Homo Sapiens
gauuuuagacaugaacccuacuauuuaguuau

SEQ ID NO: 211702 - RNA, 32 nt, Homo Sapiens
aggacgcugcagcucucuccagcccuguuggc

SEQ ID NO: 211703 - RNA, 32 nt, Homo Sapiens
caccagcccagcuuccuucucuggaaaagccu

SEQ ID NO: 211704 - RNA, 32 nt, Homo Sapiens
ucauuguuuucuuuccuucucaaagguugaaa

SEQ ID NO: 211705 - RNA, 32 nt, Homo Sapiens
aguauauaucccuuggugggggacauagugug

SEQ ID NO: 211706 - RNA, 31 nt, Homo Sapiens
ggcuuucuugguaauuuagaugugaaaccuc

SEQ ID NO: 211707 - RNA, 32 nt, Homo Sapiens
ccuugccaacauuaaccuuuugccucagggug

SEQ ID NO: 211708 - RNA, 32 nt, Homo Sapiens
cugcuauuaguuauuguuuguuuucuggguua

SEQ ID NO: 211709 - RNA, 32 nt, Homo Sapiens
uugaugagaaaauuauauucaaauaaagcaaa

SEQ ID NO: 211710 - RNA, 32 nt, Homo Sapiens
uccagaggugaagagggagacggcucuuagcu

SEQ ID NO: 211711 - RNA, 32 nt, Homo Sapiens
ucuuggugcagcacccaccgcgugccugugug

SEQ ID NO: 211712 - RNA, 32 nt, Homo Sapiens
aacagguaauauaaaaagcuuccaucgaucua

SEQ ID NO: 211713 - RNA, 31 nt, Homo Sapiens
cagcaguggcuuagaaaguccaauuccaaag

SEQ ID NO: 211714 - RNA, 32 nt, Homo Sapiens
cugaguugggcuuuaaagaugaucuccucuaa

SEQ ID NO: 211715 - RNA, 32 nt, Homo Sapiens
gccuuugccgggguucuggggcagggcgcucc

SEQ ID NO: 211716 - RNA, 32 nt, Homo Sapiens
caaaaauggugauggauguaacaaguugcaug

SEQ ID NO: 211717 - RNA, 32 nt, Homo Sapiens
cuguccaggugugcggccgccugagcccgagc

SEQ ID NO: 211718 - RNA, 32 nt, Homo Sapiens
gccacgggcgcccuuguucccgccggccaggu

SEQ ID NO: 211719 - RNA, 32 nt, Homo Sapiens
gaccaguuucaguaucucuggcaacagaaaca

SEQ ID NO: 211720 - RNA, 26 nt, Homo Sapiens
cauggccgcugccgcccucccgcccc

SEQ ID NO: 211721 - RNA, 32 nt, Homo Sapiens
cacuucuggccauauaacauuuacacagggaa

SEQ ID NO: 211722 - RNA, 32 nt, Homo Sapiens
ucccccagagcgggugggcggggggugaauau

SEQ ID NO: 211723 - RNA, 32 nt, Homo Sapiens
ccagcgacuucagugggcgcucugccacacag

SEQ ID NO: 211724 - RNA, 32 nt, Homo Sapiens
gaucgggugaauguccuggggcuuuggcucga

SEQ ID NO: 211725 - RNA, 32 nt, Homo Sapiens
aagcugcggcggggcguggccccgcgccagcc

SEQ ID NO: 211726 - RNA, 32 nt, Homo Sapiens
guggggccgaggaggaggauggcauauaccgg

SEQ ID NO: 211727 - RNA, 32 nt, Homo Sapiens
accugggcgcugacucacucccugccccaucu

SEQ ID NO: 211728 - RNA, 28 nt, Homo Sapiens
gacauggcgcauccugcaccccacggag

SEQ ID NO: 211729 - RNA, 32 nt, Homo Sapiens
ucuugaaaaguaauauuuuuuauauuuuaaca

SEQ ID NO: 211730 - RNA, 32 nt, Homo Sapiens
gcaaaaagaagcucuuuuuuuuuuuaaucaca

SEQ ID NO: 211731 - RNA, 32 nt, Homo Sapiens
gcaaacucugcacaagauggcggcgguagcgg

SEQ ID NO: 211732 - RNA, 32 nt, Homo Sapiens
ccuccuggccuggcccccaccggugcauccgc

SEQ ID NO: 211733 - RNA, 32 nt, Homo Sapiens
guggcccgggaggcgccgaggccagguaggug

SEQ ID NO: 211734 - RNA, 32 nt, Homo Sapiens
caucuccgcucgcugcaaccaccaucuccugg

SEQ ID NO: 211735 - RNA, 32 nt, Homo Sapiens
cgugggcuuuggcugcucuggaucucaagucu

SEQ ID NO: 211736 - RNA, 32 nt, Homo Sapiens
cauuuuugaaguuuucuuauggaagauagaaa

SEQ ID NO: 211737 - RNA, 32 nt, Homo Sapiens
aggaucucuugaggccagcaguucaagaccaa

SEQ ID NO: 211738 - RNA, 32 nt, Homo Sapiens
aacauggaaucaugcuaacuuauuuucaaagg

SEQ ID NO: 211739 - RNA, 32 nt, Homo Sapiens
gacaauacuucuugguggacuccagcugcccc

SEQ ID NO: 211740 - RNA, 32 nt, Homo Sapiens
acggcugcaagcgcaacuuggugcuggcgcgg

SEQ ID NO: 211741 - RNA, 32 nt, Homo Sapiens
gcccuccagcgccuccucccaggguggcuggg

SEQ ID NO: 211742 - RNA, 32 nt, Homo Sapiens
uugaaaucaguucaaaguuuauuuauagauau

SEQ ID NO: 211743 - RNA, 32 nt, Homo Sapiens
uuccugcccuucccucauccugcucccagaug

SEQ ID NO: 211744 - RNA, 32 nt, Homo Sapiens
auauauaugcuguuuauuuacuuauuuaagag

SEQ ID NO: 211745 - RNA, 32 nt, Homo Sapiens
agaaaggaaaauuuaauaaauauugguuuuuc

SEQ ID NO: 211746 - RNA, 32 nt, Homo Sapiens
uauauauauuccaggugguuuuuagucuuuac

SEQ ID NO: 211747 - RNA, 32 nt, Homo Sapiens
cagcaccaacugagcaaaccccugugguccgg

SEQ ID NO: 211748 - RNA, 32 nt, Homo Sapiens
ggaggaaccuggaagcgaaagcugaggcuguc

SEQ ID NO: 211749 - RNA, 32 nt, Homo Sapiens
auggggcagggccggugauggugccucccccu

SEQ ID NO: 211750 - RNA, 32 nt, Homo Sapiens
cgcgguuccuccccgagccgcccccagugccc

SEQ ID NO: 211751 - RNA, 32 nt, Homo Sapiens
auuucacaagaaaucaguugcauauuauccau

SEQ ID NO: 211752 - RNA, 32 nt, Homo Sapiens
ugggagauguaagugauuuaauucauggguac

SEQ ID NO: 211753 - RNA, 32 nt, Homo Sapiens
ucugugcucccauucgguccacauagcuuucu

SEQ ID NO: 211754 - RNA, 32 nt, Homo Sapiens
gacacccuugggcgcccggccccugggacgcc

SEQ ID NO: 211755 - RNA, 32 nt, Homo Sapiens
cccgaggcucccagagcagccucugucaccgc

SEQ ID NO: 211756 - RNA, 32 nt, Homo Sapiens
aaaaccuccauaagguauauagcaaucuuuga

SEQ ID NO: 211757 - RNA, 32 nt, Homo Sapiens
aaccacaucuucgucccagccccggaggcucc

SEQ ID NO: 211758 - RNA, 32 nt, Homo Sapiens
aguugucccugugauguggcuaccuccuuucu

SEQ ID NO: 211759 - RNA, 32 nt, Homo Sapiens
ccucuuccugguuuccuagccguuccccuucu

SEQ ID NO: 211760 - RNA, 32 nt, Homo Sapiens
cccucgucacccgcaucuccaacgaccucgag

SEQ ID NO: 211761 - RNA, 32 nt, Homo Sapiens
ucaacacuggggaaaggaaggaggcgggcccu

SEQ ID NO: 211762 - RNA, 32 nt, Homo Sapiens
gaccuucuaggcucaagcaguccuucgucuaa

SEQ ID NO: 211763 - RNA, 32 nt, Homo Sapiens
cacuucuuuucucuagacuuggaagcugagau

SEQ ID NO: 211764 - RNA, 30 nt, Homo Sapiens
acuuugggagguggaggcgugcggaucauc

SEQ ID NO: 211765 - RNA, 32 nt, Homo Sapiens
guucauaaauuaaagcuguauauauuuugaau

SEQ ID NO: 211766 - RNA, 32 nt, Homo Sapiens
cacauaauauaaaaauuacucaaugugacugu

SEQ ID NO: 211767 - RNA, 32 nt, Homo Sapiens
cccccaggaugaagggcggcgagggggacgcg

SEQ ID NO: 211768 - RNA, 32 nt, Homo Sapiens
aucuuuacauguauaaucucauuucuuucaug

SEQ ID NO: 211769 - RNA, 32 nt, Homo Sapiens
ggcugaggcugcagccagcugcacucugcugc

SEQ ID NO: 211770 - RNA, 32 nt, Homo Sapiens
uauucuuguaaaaggugucuguguauuuuuaa

SEQ ID NO: 211771 - RNA, 32 nt, Homo Sapiens
uaacaucagauuuuggggggaugcccucucuc

SEQ ID NO: 211772 - RNA, 31 nt, Homo Sapiens
ucuauguagcgcagcaguucgcagcgauugc

SEQ ID NO: 211773 - RNA, 32 nt, Homo Sapiens
ggccgucaccgccguccaucuccauaggcuuc

SEQ ID NO: 211774 - RNA, 32 nt, Homo Sapiens
caacaaaaauacauuucuuuggugauugaaau

SEQ ID NO: 211775 - RNA, 32 nt, Homo Sapiens
uuuuuuuuucccuuaaaacaaacaaucuagaa

SEQ ID NO: 211776 - RNA, 32 nt, Homo Sapiens
uagagguccuaccuauauuccaaauacuuuca

SEQ ID NO: 211777 - RNA, 32 nt, Homo Sapiens
ggggugcccagccccaggcaccuugagcccca

SEQ ID NO: 211778 - RNA, 32 nt, Homo Sapiens
aauucaagaggccuuucuuuuaaaauagacuu

SEQ ID NO: 211779 - RNA, 32 nt, Homo Sapiens
agggccgggaggcacagcggucccugcuugcu

SEQ ID NO: 211780 - RNA, 32 nt, Homo Sapiens
gaacccaugucagucucucaccaccuccagcu

SEQ ID NO: 211781 - RNA, 32 nt, Homo Sapiens
gcaggugugugcccuccggccccugaagcaug

SEQ ID NO: 211782 - RNA, 32 nt, Homo Sapiens
auaaauuguuuuucccaaaguaugucacuguu

SEQ ID NO: 211783 - RNA, 32 nt, Homo Sapiens
uugaacccaggagaguggaagagagauuggga

SEQ ID NO: 211784 - RNA, 32 nt, Homo Sapiens
aaaguucucauuacauuggacauuaaauguuu

SEQ ID NO: 211785 - RNA, 32 nt, Homo Sapiens
gaauaucaaggauuguggucgguggagagcuc

SEQ ID NO: 211786 - RNA, 32 nt, Homo Sapiens
gaaugagauaauguauuuuacguugucuauaa

SEQ ID NO: 211787 - RNA, 32 nt, Homo Sapiens
cagauuucucccucgucaccugcauccacagu

SEQ ID NO: 211788 - RNA, 32 nt, Homo Sapiens
cucuuuggucauugagggaccaaaaaaggacg

SEQ ID NO: 211789 - RNA, 32 nt, Homo Sapiens
gcuggacaaaaauccuacaaguuugaggaaug

SEQ ID NO: 211790 - RNA, 32 nt, Homo Sapiens
gcuugagcucaggaguucgagagcagccuggg

SEQ ID NO: 211791 - RNA, 32 nt, Homo Sapiens
cggaggggacgggaggcccagcggcuccgggc

SEQ ID NO: 211792 - RNA, 32 nt, Homo Sapiens
uguaucccauaaauauaugcaaguauuauuug

SEQ ID NO: 211793 - RNA, 32 nt, Homo Sapiens
cgggcggcgcuugguuagcagguggacaggcg

SEQ ID NO: 211794 - RNA, 32 nt, Homo Sapiens
uucagggacaguauguugcugcugauguggau

SEQ ID NO: 211795 - RNA, 32 nt, Homo Sapiens
ucaccccugugccaccuccacagugggagcca

SEQ ID NO: 211796 - RNA, 32 nt, Homo Sapiens
cucagcugcuccacuguggaaaaggaaagccc

SEQ ID NO: 211797 - RNA, 32 nt, Homo Sapiens
cuguguccggugcucacgccgcggcgagguga

SEQ ID NO: 211798 - RNA, 32 nt, Homo Sapiens
uaaugugaaggcauuccacuucccuucuccug

SEQ ID NO: 211799 - RNA, 32 nt, Homo Sapiens
aacaggaaguaaacagaagcaaauauuuaccg

SEQ ID NO: 211800 - RNA, 32 nt, Homo Sapiens
acauacacccuccaccuccccauccccuguuc

SEQ ID NO: 211801 - RNA, 32 nt, Homo Sapiens
aaaacucuuucuggggaauccaauuauaguug

SEQ ID NO: 211802 - RNA, 32 nt, Homo Sapiens
ggucccagacugccuccuugcccaugccucuc

SEQ ID NO: 211803 - RNA, 32 nt, Homo Sapiens
ggacuccuggauaggcagcuggaccaacggac

SEQ ID NO: 211804 - RNA, 32 nt, Homo Sapiens
aaguaccauuuucauugggggcagggagaagg

SEQ ID NO: 211805 - RNA, 32 nt, Homo Sapiens
gaucuuaacaaauuccugaacaauggcuccaa

SEQ ID NO: 211806 - RNA, 32 nt, Homo Sapiens
ccauacucagaaugaaaaacuggauauuacgu

SEQ ID NO: 211807 - RNA, 32 nt, Homo Sapiens
cguuggcagggaguuggcugugagauuguagg

SEQ ID NO: 211808 - RNA, 32 nt, Homo Sapiens
ccaggcuggagugcaauggcacguucucagcu

SEQ ID NO: 211809 - RNA, 32 nt, Homo Sapiens
cuguaucauuuuacuguauuuuugcaugguuc

SEQ ID NO: 211810 - RNA, 32 nt, Homo Sapiens
uauuagaggagauaggcagagaagucuugcuu

SEQ ID NO: 211811 - RNA, 32 nt, Homo Sapiens
uggagugagagaaagauggaaaaaagacaugg

SEQ ID NO: 211812 - RNA, 32 nt, Homo Sapiens
uuuaacacauggaauaauaaacagaggaaggc

SEQ ID NO: 211813 - RNA, 32 nt, Homo Sapiens
cauguuauauauauguaguuggcauuugguuc

SEQ ID NO: 211814 - RNA, 32 nt, Homo Sapiens
gugucaauguaaagccaaaaccaucuucugug

SEQ ID NO: 211815 - RNA, 32 nt, Homo Sapiens
uaucccucgccggccuggcgcccggcgccauc

SEQ ID NO: 211816 - RNA, 32 nt, Homo Sapiens
ggucucguuuugucgcccaggcugguuuugaa

SEQ ID NO: 211817 - RNA, 32 nt, Homo Sapiens
cauggcuggcuccuugucaucauucagcucca

SEQ ID NO: 211818 - RNA, 31 nt, Homo Sapiens
ugggugcugccggucaccuugagcuguggug

SEQ ID NO: 211819 - RNA, 32 nt, Homo Sapiens
ucuccuuccuuccuuuccaucucaugcugugu

SEQ ID NO: 211820 - RNA, 32 nt, Homo Sapiens
aggccuucaccauccaucugccccacgcucca

SEQ ID NO: 211821 - RNA, 32 nt, Homo Sapiens
ggcucuuugggucuuucccggguacacuagau

SEQ ID NO: 211822 - RNA, 32 nt, Homo Sapiens
agguuuguuuauguuacauuuauuucaccaga

SEQ ID NO: 211823 - RNA, 32 nt, Homo Sapiens
cggggggagucgugcgugucagauuuaggcca

SEQ ID NO: 211824 - RNA, 32 nt, Homo Sapiens
gucguguaauuggcccaagucauuguuuuucu

SEQ ID NO: 211825 - RNA, 32 nt, Homo Sapiens
cagaaaaagaaagaagccaaagagaaagguac

SEQ ID NO: 211826 - RNA, 32 nt, Homo Sapiens
acuuugucaguaccccaaacuguccccgcaug

SEQ ID NO: 211827 - RNA, 27 nt, Homo Sapiens
auuuucgcaugguucugguauauugac

SEQ ID NO: 211828 - RNA, 32 nt, Homo Sapiens
uuguauaaaaauuuaaauugaauuaaaagaag

SEQ ID NO: 211829 - RNA, 32 nt, Homo Sapiens
gcugagcccaccccgcuggcucccagaucagg

SEQ ID NO: 211830 - RNA, 32 nt, Homo Sapiens
auaaacucaugacugcacuuuggagacugaag

SEQ ID NO: 211831 - RNA, 32 nt, Homo Sapiens
augaacccaggccacuagucucuuccccuguu

SEQ ID NO: 211832 - RNA, 32 nt, Homo Sapiens
gacccuacugucagcuagaugucuuaucuuca

SEQ ID NO: 211833 - RNA, 32 nt, Homo Sapiens
uccauauggugcggcccgggagcaggggcuga

SEQ ID NO: 211834 - RNA, 32 nt, Homo Sapiens
gucugaaaagguccuuuuauaauuagaaaguu

SEQ ID NO: 211835 - RNA, 32 nt, Homo Sapiens
aucccuuucugcuguucaccaccacccaugau

SEQ ID NO: 211836 - RNA, 32 nt, Homo Sapiens
aaacgagggaacggaggcucuagaacugacuu

SEQ ID NO: 211837 - RNA, 32 nt, Homo Sapiens
ugggugugguggcucacgccucuaaucgcagc

SEQ ID NO: 211838 - RNA, 32 nt, Homo Sapiens
gcuuccuuucucgcuccccccauccugggcug

SEQ ID NO: 211839 - RNA, 32 nt, Homo Sapiens
cuggaggacuuccagaaaauuaccacuguugg

SEQ ID NO: 211840 - RNA, 32 nt, Homo Sapiens
cacaggugguggcaggcaguagaggcgcccca

SEQ ID NO: 211841 - RNA, 32 nt, Homo Sapiens
ccuuaaaauugccuucacaaagggcagccaag

SEQ ID NO: 211842 - RNA, 32 nt, Homo Sapiens
ggugaugccuaccucuuuggagcugcugccuc

SEQ ID NO: 211843 - RNA, 32 nt, Homo Sapiens
ugaagcagaaggcuuaaaauuaggcucuaagu

SEQ ID NO: 211844 - RNA, 32 nt, Homo Sapiens
ucugugccuucuucuuuguuuugugauaaaca

SEQ ID NO: 211845 - RNA, 32 nt, Homo Sapiens
aucccucccgcaccagugcugucccugcacac

SEQ ID NO: 211846 - RNA, 32 nt, Homo Sapiens
caggccacaggcccuccaccucaccuccagcu

SEQ ID NO: 211847 - RNA, 32 nt, Homo Sapiens
ugaaguuaucauugaauguuaagauuuuuucu

SEQ ID NO: 211848 - RNA, 32 nt, Homo Sapiens
cugccuugaaaauggacucacuauagcaaaua

SEQ ID NO: 211849 - RNA, 32 nt, Homo Sapiens
uggggccgaucccacacuggcuaccuacucgg

SEQ ID NO: 211850 - RNA, 32 nt, Homo Sapiens
cagccgccgccgugccgcuccucccuugcccu

SEQ ID NO: 211851 - RNA, 32 nt, Homo Sapiens
gugcuaacauguaggcugguguguguaggcau

SEQ ID NO: 211852 - RNA, 32 nt, Homo Sapiens
ccaccuuccagcuggagcucccggugaaguau

SEQ ID NO: 211853 - RNA, 32 nt, Homo Sapiens
cuuuucuacaaaaaauacaaaaauuagcuggg

SEQ ID NO: 211854 - RNA, 32 nt, Homo Sapiens
ggguguggguugaagguguuuaacucagaaaa

SEQ ID NO: 211855 - RNA, 32 nt, Homo Sapiens
cacucucagaggauuccagacacacaccacuc

SEQ ID NO: 211856 - RNA, 32 nt, Homo Sapiens
caagaagugccucuggucccacuacaccugcg

SEQ ID NO: 211857 - RNA, 32 nt, Homo Sapiens
cauuguuugugauauuucguguacugcaaagu

SEQ ID NO: 211858 - RNA, 29 nt, Homo Sapiens
aggaggaggaggaggaggacgcgggccug

SEQ ID NO: 211859 - RNA, 32 nt, Homo Sapiens
cggagcaggaggaggccggccggaggcggcau

SEQ ID NO: 211860 - RNA, 32 nt, Homo Sapiens
uggcagcgugacuacacaccugcguccuagag

SEQ ID NO: 211861 - RNA, 32 nt, Homo Sapiens
uuuuaucuagaaugaucuugaauuagucucug

SEQ ID NO: 211862 - RNA, 32 nt, Homo Sapiens
augacuuuuauccccuuguccucuaauuuauu

SEQ ID NO: 211863 - RNA, 32 nt, Homo Sapiens
gcuguaucaggagccauccuccuggugguacc

SEQ ID NO: 211864 - RNA, 32 nt, Homo Sapiens
cguauucagaguuccagcuguuuucaaugugc

SEQ ID NO: 211865 - RNA, 32 nt, Homo Sapiens
guauuaucuuuguaggaaagacauaauuucca

SEQ ID NO: 211866 - RNA, 32 nt, Homo Sapiens
acuugucaauuaggcaaauauuugaguuccuu

SEQ ID NO: 211867 - RNA, 32 nt, Homo Sapiens
ccucaggugaucuacccgccucagccucccaa

SEQ ID NO: 211868 - RNA, 32 nt, Homo Sapiens
aacaugagauauaauaaaaugguuguuguuuu

SEQ ID NO: 211869 - RNA, 32 nt, Homo Sapiens
ggcuuaggaaaacaauccaacucccuagccca

SEQ ID NO: 211870 - RNA, 28 nt, Homo Sapiens
aggaugagcggugcuccgacggccgggg

SEQ ID NO: 211871 - RNA, 32 nt, Homo Sapiens
accugcccucuuaucuaggagcuguuuguaag

SEQ ID NO: 211872 - RNA, 32 nt, Homo Sapiens
agagacgugucaacagaugcauucauuucucu

SEQ ID NO: 211873 - RNA, 30 nt, Homo Sapiens
ccauggggcgugccuggugagucugccugu

SEQ ID NO: 211874 - RNA, 32 nt, Homo Sapiens
uauaguacacggcuaucugugcuggccccugg

SEQ ID NO: 211875 - RNA, 32 nt, Homo Sapiens
acuucugcuaggucugagacgcgccggccucc

SEQ ID NO: 211876 - RNA, 32 nt, Homo Sapiens
ugucacccacuguuccacggauccaaaacaac

SEQ ID NO: 211877 - RNA, 32 nt, Homo Sapiens
ggcuccuggcguggacaaggggucugugaagg

SEQ ID NO: 211878 - RNA, 32 nt, Homo Sapiens
cccucgcccccuccuccccacaaaaucaggga

SEQ ID NO: 211879 - RNA, 32 nt, Homo Sapiens
cccuggaaaugugcuaaaguuggaaagucccc

SEQ ID NO: 211880 - RNA, 32 nt, Homo Sapiens
guggagccucagcucuguuucuuucucugggu

SEQ ID NO: 211881 - RNA, 32 nt, Homo Sapiens
caucgaaaaacgcacugugagaaaccuuauga

SEQ ID NO: 211882 - RNA, 32 nt, Homo Sapiens
gcggcgucuccauggcacgacccuggccuccg

SEQ ID NO: 211883 - RNA, 32 nt, Homo Sapiens
gcuacugcacuccagccugggcgacaguacca

SEQ ID NO: 211884 - RNA, 32 nt, Homo Sapiens
ugggcaggggcugcuggugcugcuuggguuuu

SEQ ID NO: 211885 - RNA, 32 nt, Homo Sapiens
ucucugaauuucaugcucuccucuuugaugug

SEQ ID NO: 211886 - RNA, 32 nt, Homo Sapiens
uccuccuagagcagagucugcugcugucuguu

SEQ ID NO: 211887 - RNA, 32 nt, Homo Sapiens
gcauguacuagauuguccuauauuuuauguuu

SEQ ID NO: 211888 - RNA, 32 nt, Homo Sapiens
cagagccagaauguucaggaugcugaacagca

SEQ ID NO: 211889 - RNA, 32 nt, Homo Sapiens
ccgcggccauuggcccgaggcacguguccagg

SEQ ID NO: 211890 - RNA, 32 nt, Homo Sapiens
ugaaauauauagauuauauuuguauguaaauu

SEQ ID NO: 211891 - RNA, 32 nt, Homo Sapiens
uaguuuuucuauuugaaaaaaaaaaaucauuu

SEQ ID NO: 211892 - RNA, 32 nt, Homo Sapiens
agaaaccauggacaucaccucccucuuugaga

SEQ ID NO: 211893 - RNA, 32 nt, Homo Sapiens
auuuaaacuguaauuguauugccguacugugg

SEQ ID NO: 211894 - RNA, 30 nt, Homo Sapiens
auggcccgggcgcgcgcggucgugugggag

SEQ ID NO: 211895 - RNA, 28 nt, Homo Sapiens
guauuagagucaugaccaagcaacccuu

SEQ ID NO: 211896 - RNA, 32 nt, Homo Sapiens
guuuaaaaggauuuuuaucuuucgugauaaac

SEQ ID NO: 211897 - RNA, 32 nt, Homo Sapiens
uuuaaaaucaccuuuagggucuuuauccuuaa

SEQ ID NO: 211898 - RNA, 32 nt, Homo Sapiens
ugaaguuaaggguuaucacaucccaacuccaa

SEQ ID NO: 211899 - RNA, 32 nt, Homo Sapiens
cuucagucuguggccaaaggcccgagagcccc

SEQ ID NO: 211900 - RNA, 32 nt, Homo Sapiens
acugauguucacucuggcauacuuucgcaauu

SEQ ID NO: 211901 - RNA, 32 nt, Homo Sapiens
ccucgucccccgcucccccguccuccgaggug

SEQ ID NO: 211902 - RNA, 32 nt, Homo Sapiens
ugggggaucugggggagggaucacuguucuuc

SEQ ID NO: 211903 - RNA, 32 nt, Homo Sapiens
guagcuguuguaaugaagaaguccgaaacaua

SEQ ID NO: 211904 - RNA, 32 nt, Homo Sapiens
uuaauucuuagaacaaguagaaugggaaagga

SEQ ID NO: 211905 - RNA, 32 nt, Homo Sapiens
cuaaaggcuguaaaaacaaggcuguggaucau

SEQ ID NO: 211906 - RNA, 32 nt, Homo Sapiens
ccacugcuccucucuuuccccaccaggcuguu

SEQ ID NO: 211907 - RNA, 32 nt, Homo Sapiens
cugcaaacagacagcacggagaaggaugagug

SEQ ID NO: 211908 - RNA, 32 nt, Homo Sapiens
uucuuagaguuuuuaucuuuuacuuucagucu

SEQ ID NO: 211909 - RNA, 32 nt, Homo Sapiens
uccggcacccgcccggcccggcugcucccugg

SEQ ID NO: 211910 - RNA, 32 nt, Homo Sapiens
gggggucugagaaguagucaccgccaugaagu

SEQ ID NO: 211911 - RNA, 32 nt, Homo Sapiens
agcuccgccucccggauucaagugauuccccu

SEQ ID NO: 211912 - RNA, 32 nt, Homo Sapiens
cuggacgcccggcuccuccgcacccccucccc

SEQ ID NO: 211913 - RNA, 32 nt, Homo Sapiens
ugccaaaaugauguuucuuaucaguguuaagu

SEQ ID NO: 211914 - RNA, 32 nt, Homo Sapiens
gggauuuccuuccccugcuccaucagccagac

SEQ ID NO: 211915 - RNA, 32 nt, Homo Sapiens
cugcugggcuggucccucucauuuuuaccagu

SEQ ID NO: 211916 - RNA, 32 nt, Homo Sapiens
ccuucuaggcaucuccucuccccaacccuucc

SEQ ID NO: 211917 - RNA, 28 nt, Homo Sapiens
uuguuaaaacauuggcauuugaagagga

SEQ ID NO: 211918 - RNA, 32 nt, Homo Sapiens
ucucagugucuuauauuaagauuaacauguug

SEQ ID NO: 211919 - RNA, 32 nt, Homo Sapiens
gaugaaaaaaauuuuauacguugauaaaacuu

SEQ ID NO: 211920 - RNA, 32 nt, Homo Sapiens
uccuuuuaucuccuuccacgggccaggcgagc

SEQ ID NO: 211921 - RNA, 32 nt, Homo Sapiens
uuauaacuaauagauaacaguuuuuuacauau

SEQ ID NO: 211922 - RNA, 32 nt, Homo Sapiens
ucgugggcgggggaggggguucuuggugcuac

SEQ ID NO: 211923 - RNA, 32 nt, Homo Sapiens
uuuuuccuuugucgccuccccagcaccugccc

SEQ ID NO: 211924 - RNA, 32 nt, Homo Sapiens
ugagugaaaaagagacugaaggucuagaaauu

SEQ ID NO: 211925 - RNA, 32 nt, Homo Sapiens
ggcuuuucgucugcgugagcuggagaagagcc

SEQ ID NO: 211926 - RNA, 32 nt, Homo Sapiens
ggccucgugcuuggauugucccgggggcuccu

SEQ ID NO: 211927 - RNA, 32 nt, Homo Sapiens
uagaauugcugcgcuugccucggcuuggccgg

SEQ ID NO: 211928 - RNA, 32 nt, Homo Sapiens
gugggcggcggcgggcgggcggugaguuccug

SEQ ID NO: 211929 - RNA, 32 nt, Homo Sapiens
ccgagcgccccgcuccgccucaccugccacca

SEQ ID NO: 211930 - RNA, 32 nt, Homo Sapiens
acaccacacacacacauacacacacacacaca

SEQ ID NO: 211931 - RNA, 31 nt, Homo Sapiens
gacagggagccccauaggccaucaucauccu

SEQ ID NO: 211932 - RNA, 32 nt, Homo Sapiens
aguauuuguuuuucagaaaugaccacugaaga

SEQ ID NO: 211933 - RNA, 32 nt, Homo Sapiens
aucuucguguggccgcgccguccgccgcgccc

SEQ ID NO: 211934 - RNA, 32 nt, Homo Sapiens
auuguaauaauggcaucaauauacauaauaca

SEQ ID NO: 211935 - RNA, 29 nt, Homo Sapiens
uuaaaucauaagaguuauuuucuaucuga

SEQ ID NO: 211936 - RNA, 32 nt, Homo Sapiens
cuagugauguacgagcugcgcguccugccucu

SEQ ID NO: 211937 - RNA, 32 nt, Homo Sapiens
gcagcuggguggcaggacaauccaggcaucca

SEQ ID NO: 211938 - RNA, 32 nt, Homo Sapiens
caguuggugaauuugaucucugauugagcucu

SEQ ID NO: 211939 - RNA, 32 nt, Homo Sapiens
acuuacauuuguacuuuagaguauuuuuguau

SEQ ID NO: 211940 - RNA, 32 nt, Homo Sapiens
ggcauauuaaauaaaauacuguaauuuaggaa

SEQ ID NO: 211941 - RNA, 32 nt, Homo Sapiens
ccuuuacuagaggagauaaauauuuugcauau

SEQ ID NO: 211942 - RNA, 32 nt, Homo Sapiens
gagaaucagguuaaugagguaaaggcuuucug

SEQ ID NO: 211943 - RNA, 32 nt, Homo Sapiens
auucucuuacauccaaacaccuugcuuuucca

SEQ ID NO: 211944 - RNA, 32 nt, Homo Sapiens
auguacccaaaauaaacauuuugaguucaucc

SEQ ID NO: 211945 - RNA, 32 nt, Homo Sapiens
uccaugcugugagcuuccuaccucagcccauc

SEQ ID NO: 211946 - RNA, 32 nt, Homo Sapiens
gaauuuccaaauaaaucugaacacuugucuuu

SEQ ID NO: 211947 - RNA, 32 nt, Homo Sapiens
gcccccgccgccgccauggaggcgcugggacc

SEQ ID NO: 211948 - RNA, 32 nt, Homo Sapiens
cucugccggcgcccuccucacgucaggagcaa

SEQ ID NO: 211949 - RNA, 32 nt, Homo Sapiens
ucuuugagcgaaaccagccuucugccuggcug

SEQ ID NO: 211950 - RNA, 32 nt, Homo Sapiens
gcacgcagccccgguucccgcccgugccucuc

SEQ ID NO: 211951 - RNA, 32 nt, Homo Sapiens
gucgucgccugccuguggucaggcauuccuca

SEQ ID NO: 211952 - RNA, 32 nt, Homo Sapiens
cacgggcacggcaccucuggacagagccaagg

SEQ ID NO: 211953 - RNA, 32 nt, Homo Sapiens
aaggcacagugaaaauggaaauguucuuggag

SEQ ID NO: 211954 - RNA, 32 nt, Homo Sapiens
ggcaucgcaagcgaccccgagcggagccccgg

SEQ ID NO: 211955 - RNA, 32 nt, Homo Sapiens
guuggagggaauagagugggggugggacucug

SEQ ID NO: 211956 - RNA, 32 nt, Homo Sapiens
aggauugugcucagcagcuguuugaguuaaca

SEQ ID NO: 211957 - RNA, 32 nt, Homo Sapiens
cacccagcaggauccuaaggccuuuguagucc

SEQ ID NO: 211958 - RNA, 32 nt, Homo Sapiens
uuguuagcauauaacguaaguucaaagauuga

SEQ ID NO: 211959 - RNA, 32 nt, Homo Sapiens
uucugagugcaaacaaaugggggcuucuuaaa

SEQ ID NO: 211960 - RNA, 32 nt, Homo Sapiens
ucaucuccauucucaguuucuuccccacaaaa

SEQ ID NO: 211961 - RNA, 32 nt, Homo Sapiens
cuaaaaugugauuauuuuccaagcucaguugg

SEQ ID NO: 211962 - RNA, 29 nt, Homo Sapiens
aaguuuucuaguccauaccacagugccuu

SEQ ID NO: 211963 - RNA, 32 nt, Homo Sapiens
guuggacauacugucuuaaucuauagugaaaa

SEQ ID NO: 211964 - RNA, 32 nt, Homo Sapiens
gugaacgccucugcagcugcagcccucguucu

SEQ ID NO: 211965 - RNA, 32 nt, Homo Sapiens
ugccgggagacggagccaggcuguguagaggg

SEQ ID NO: 211966 - RNA, 32 nt, Homo Sapiens
agaacugaacaccugacccaagggcagcaagc

SEQ ID NO: 211967 - RNA, 30 nt, Homo Sapiens
gccagaggcaggcaguggugccugcauaug

SEQ ID NO: 211968 - RNA, 32 nt, Homo Sapiens
uccuuaauauaaaaucgagucucaugaaacuu

SEQ ID NO: 211969 - RNA, 32 nt, Homo Sapiens
acaaccuccgccuccuggguucaagggauucu

SEQ ID NO: 211970 - RNA, 32 nt, Homo Sapiens
cugggcgcugacucacucccugccccaucucc

SEQ ID NO: 211971 - RNA, 32 nt, Homo Sapiens
caguuugucacauucaucaagcuuacacuucu

SEQ ID NO: 211972 - RNA, 32 nt, Homo Sapiens
cauuauugcauaucaguaaucucuuggacuuu

SEQ ID NO: 211973 - RNA, 32 nt, Homo Sapiens
augucugugacagggagggaaggcucugcccu

SEQ ID NO: 211974 - RNA, 32 nt, Homo Sapiens
aagaaggugucuauacuuuagauuuucaguuu

SEQ ID NO: 211975 - RNA, 32 nt, Homo Sapiens
gugcagacauggcaaggcucaaggcugugcag

SEQ ID NO: 211976 - RNA, 32 nt, Homo Sapiens
ugggauucaaaauaaaggcauugcagaccgca

SEQ ID NO: 211977 - RNA, 32 nt, Homo Sapiens
ugagaacucggcagauaauaaaacagacaaaa

SEQ ID NO: 211978 - RNA, 32 nt, Homo Sapiens
uuaagauaauacuuaaauuuguuaaucaccag

SEQ ID NO: 211979 - RNA, 32 nt, Homo Sapiens
ugccuucaaaccccggcccccuccaggggaca

SEQ ID NO: 211980 - RNA, 30 nt, Homo Sapiens
agcggcggagguggcuucugggcugcgcga

SEQ ID NO: 211981 - RNA, 32 nt, Homo Sapiens
ucccucucacagccacacuaucuccuaucucc

SEQ ID NO: 211982 - RNA, 32 nt, Homo Sapiens
gcacuguuugcggcgaggagaaaggaaggaga

SEQ ID NO: 211983 - RNA, 32 nt, Homo Sapiens
cuuugggaaaacuucagaaacugauguaucaa

SEQ ID NO: 211984 - RNA, 32 nt, Homo Sapiens
augaaaauauuuauuuuaaaaauugaaauguu

SEQ ID NO: 211985 - RNA, 32 nt, Homo Sapiens
agacuugaccauucaccuccaguaccugauag

SEQ ID NO: 211986 - RNA, 32 nt, Homo Sapiens
ugucccucugccgggcaccccuggcaggaagc

SEQ ID NO: 211987 - RNA, 32 nt, Homo Sapiens
ggcuaacuuuuguauuuuuaguagagaugggg

SEQ ID NO: 211988 - RNA, 32 nt, Homo Sapiens
gagugcgggccgggcgggagugcggcgagccg

SEQ ID NO: 211989 - RNA, 32 nt, Homo Sapiens
ucugugcccucuggaggcucauugucucagag

SEQ ID NO: 211990 - RNA, 32 nt, Homo Sapiens
uuucuaguaaacuuaaacuacuuuuuaaacau

SEQ ID NO: 211991 - RNA, 32 nt, Homo Sapiens
acgcagcugccgcgccauguccugcuuggccg

SEQ ID NO: 211992 - RNA, 32 nt, Homo Sapiens
ccuugagaugacuguagcccuggcugacaacu

SEQ ID NO: 211993 - RNA, 32 nt, Homo Sapiens
uuuuaucaauaccaccugccugcuucccguaa

SEQ ID NO: 211994 - RNA, 32 nt, Homo Sapiens
uguuuauauuuuucuuuuuauguauguguaag

SEQ ID NO: 211995 - RNA, 32 nt, Homo Sapiens
uuuuuuccuccauguauuuacuccauuuuucu

SEQ ID NO: 211996 - RNA, 32 nt, Homo Sapiens
ggagcggcggcgggcaggcgugcggaggacac

SEQ ID NO: 211997 - RNA, 32 nt, Homo Sapiens
gcuugaaguggaagaaaaaugaaguuguuuau

SEQ ID NO: 211998 - RNA, 32 nt, Homo Sapiens
cccgcugcccgcccgcaguucccggccccgcu

SEQ ID NO: 211999 - RNA, 32 nt, Homo Sapiens
aaaugagucaaaaucauuuagaauacaccaug

SEQ ID NO: 212000 - RNA, 32 nt, Homo Sapiens
gcugcugaggacgcgccgccugcgccuuccuc

SEQ ID NO: 212001 - RNA, 30 nt, Homo Sapiens
ggcugggucugugcucaauuaacuccugug

SEQ ID NO: 212002 - RNA, 32 nt, Homo Sapiens
cgcccugaccgcccggccccgcuccgcacugc

SEQ ID NO: 212003 - RNA, 32 nt, Homo Sapiens
uaagguaguaaauauaauugacuuauucugaa

SEQ ID NO: 212004 - RNA, 32 nt, Homo Sapiens
cuagauaacaugguaacagagaauugauuuuc

SEQ ID NO: 212005 - RNA, 32 nt, Homo Sapiens
agagaagguucaauacauauucuucuaauuca

SEQ ID NO: 212006 - RNA, 32 nt, Homo Sapiens
gugcgaucccgcagccgcucccuccggggcuc

SEQ ID NO: 212007 - RNA, 32 nt, Homo Sapiens
ccaguagacuaauggucguuuuuccuguuuaa

SEQ ID NO: 212008 - RNA, 32 nt, Homo Sapiens
uaaauuucagaagauaaauaaauaucauugca

SEQ ID NO: 212009 - RNA, 32 nt, Homo Sapiens
gacgccggggcgccugggaguuugaagcaaac

SEQ ID NO: 212010 - RNA, 32 nt, Homo Sapiens
aagccugugaggaaagaaauucuuaaaagaga

SEQ ID NO: 212011 - RNA, 32 nt, Homo Sapiens
uguuuuuuguuuucuuuuuuuucuuuccaucg

SEQ ID NO: 212012 - RNA, 32 nt, Homo Sapiens
uauacugaauggaauguauuuuuaagagaaua

SEQ ID NO: 212013 - RNA, 31 nt, Homo Sapiens
gugguggcugccgucgcuccagacaaucgga

SEQ ID NO: 212014 - RNA, 32 nt, Homo Sapiens
aaggaauguggaggagucuucauccacagcuc

SEQ ID NO: 212015 - RNA, 32 nt, Homo Sapiens
acgacaaaaguaccuuugaauaaaacaauuua

SEQ ID NO: 212016 - RNA, 32 nt, Homo Sapiens
gcugccuggccuccuuucuccuccaggaagag

SEQ ID NO: 212017 - RNA, 31 nt, Homo Sapiens
uauaugaacauauaacuggagucgucaaaaa

SEQ ID NO: 212018 - RNA, 32 nt, Homo Sapiens
auccgguguugcauccuuggagagagcugaga

SEQ ID NO: 212019 - RNA, 32 nt, Homo Sapiens
acacuuucaaaguggcaguagugccauaagaa

SEQ ID NO: 212020 - RNA, 32 nt, Homo Sapiens
uuuauuuuauauauuucauguguuuuuuauaa

SEQ ID NO: 212021 - RNA, 32 nt, Homo Sapiens
gauaaggauguuucuggucacagugaaaagcc

SEQ ID NO: 212022 - RNA, 32 nt, Homo Sapiens
ccggcuugcugcgcuuggagcguaggguaaug

SEQ ID NO: 212023 - RNA, 32 nt, Homo Sapiens
acccgggcggagcgggcggggacccgggcuac

SEQ ID NO: 212024 - RNA, 27 nt, Homo Sapiens
ucucuuaaguaauucugauguguacca

SEQ ID NO: 212025 - RNA, 32 nt, Homo Sapiens
guaccuuuggaguagguuuaccagagagagca

SEQ ID NO: 212026 - RNA, 32 nt, Homo Sapiens
ggcacauugccagcugggugcugagcauugag

SEQ ID NO: 212027 - RNA, 32 nt, Homo Sapiens
gauggaccuccuagugccuccuggaccuaagg

SEQ ID NO: 212028 - RNA, 32 nt, Homo Sapiens
ucccugcgccgccuccucccacccugagcaga

SEQ ID NO: 212029 - RNA, 32 nt, Homo Sapiens
gaucuaauucuauuguauuguugaugauaagu

SEQ ID NO: 212030 - RNA, 32 nt, Homo Sapiens
aaaauccuauuaucaaauuuggguuuccuggc

SEQ ID NO: 212031 - RNA, 32 nt, Homo Sapiens
uuuacuugauaguggauacauuggugucagag

SEQ ID NO: 212032 - RNA, 32 nt, Homo Sapiens
gggggagauaccuuuaccaugaacuuacagaa

SEQ ID NO: 212033 - RNA, 32 nt, Homo Sapiens
cugacuuuauucaaaucuaguuauguauuggc

SEQ ID NO: 212034 - RNA, 32 nt, Homo Sapiens
cauauagacggaaaaugaaaugcuagaacugc

SEQ ID NO: 212035 - RNA, 32 nt, Homo Sapiens
caacuaaucaggaauuaaauggucauuuauuu

SEQ ID NO: 212036 - RNA, 32 nt, Homo Sapiens
uuacaagcauggccgcugcacccggcgaauac

SEQ ID NO: 212037 - RNA, 32 nt, Homo Sapiens
ccccuuuggcccacgccggccgcccccauucu

SEQ ID NO: 212038 - RNA, 32 nt, Homo Sapiens
uucuuaggagugucucuuggggguaauauuuu

SEQ ID NO: 212039 - RNA, 32 nt, Homo Sapiens
uguucuaguguuuugugaaagguagaacuuga

SEQ ID NO: 212040 - RNA, 31 nt, Homo Sapiens
cauuucccagccugccugccccucugcccac

SEQ ID NO: 212041 - RNA, 32 nt, Homo Sapiens
ugcuucaaaaggaagaguuguaggaccuuuga

SEQ ID NO: 212042 - RNA, 32 nt, Homo Sapiens
ccaugccccagcaagcagggggcuugcugagg

SEQ ID NO: 212043 - RNA, 32 nt, Homo Sapiens
gaaaguuaacugugugcacuuuuagauauuaa

SEQ ID NO: 212044 - RNA, 32 nt, Homo Sapiens
agggugcucccuccucagucuuugggggauuc

SEQ ID NO: 212045 - RNA, 32 nt, Homo Sapiens
caggucaggcccuccccuccccuccccucccc

SEQ ID NO: 212046 - RNA, 32 nt, Homo Sapiens
cagugcccgaggcgcccugcagauggggcggg

SEQ ID NO: 212047 - RNA, 32 nt, Homo Sapiens
ccacuuuaaaaggaaaucagcauaaaaguucg

SEQ ID NO: 212048 - RNA, 32 nt, Homo Sapiens
cauuugugaauauaccacacaugauggugucu

SEQ ID NO: 212049 - RNA, 32 nt, Homo Sapiens
acgaaccgacagacagacggcugggcgcccgc

SEQ ID NO: 212050 - RNA, 32 nt, Homo Sapiens
aguauaauuacauaagaauuuguuauauaugu

SEQ ID NO: 212051 - RNA, 32 nt, Homo Sapiens
aagcccggccuggcggcggcgguggcgguagc

SEQ ID NO: 212052 - RNA, 32 nt, Homo Sapiens
cucccaccgcccaguccccggcggcgaugaga

SEQ ID NO: 212053 - RNA, 32 nt, Homo Sapiens
uuauauugauucauaagagucaucuucagucc

SEQ ID NO: 212054 - RNA, 32 nt, Homo Sapiens
uacuagaaaugggaaucauggccucuugaaga

SEQ ID NO: 212055 - RNA, 32 nt, Homo Sapiens
cugcuccuggaagccggcggcgcggagccccg

SEQ ID NO: 212056 - RNA, 32 nt, Homo Sapiens
acccuaggcucgcggcccgaggcgggagggcu

SEQ ID NO: 212057 - RNA, 32 nt, Homo Sapiens
ugccuuuuaaauuuauacuucagccaggcaua

SEQ ID NO: 212058 - RNA, 32 nt, Homo Sapiens
cggcaggaaccgggaccgccagcgcaggaggu

SEQ ID NO: 212059 - RNA, 32 nt, Homo Sapiens
cuacuuacauucaaguuaaaaaggcugauaug

SEQ ID NO: 212060 - RNA, 32 nt, Homo Sapiens
uggcccaccccgagacggaggcgcagacacca

SEQ ID NO: 212061 - RNA, 32 nt, Homo Sapiens
gggaaaacccgucccugggccggggugggugu

SEQ ID NO: 212062 - RNA, 32 nt, Homo Sapiens
uggauggaauggggugccaggcugacugugca

SEQ ID NO: 212063 - RNA, 32 nt, Homo Sapiens
guuaauuaucugauacuuuugaaacagauaug

SEQ ID NO: 212064 - RNA, 32 nt, Homo Sapiens
gaggcccaacccaucccccacccagcucccgg

SEQ ID NO: 212065 - RNA, 32 nt, Homo Sapiens
cucggccccgggcugccgcgccagcccgucuc

SEQ ID NO: 212066 - RNA, 32 nt, Homo Sapiens
gaaucgcgggcaaagauggcggcggccaggug

SEQ ID NO: 212067 - RNA, 32 nt, Homo Sapiens
caccaaggcuguggggacccauggcgaggagc

SEQ ID NO: 212068 - RNA, 28 nt, Homo Sapiens
ugcaaucauuaaacucuuucucugcugc

SEQ ID NO: 212069 - RNA, 32 nt, Homo Sapiens
cgagauccuggccacuaugccaguucugaccu

SEQ ID NO: 212070 - RNA, 32 nt, Homo Sapiens
uuuugagacagagucgcacucugucauccagg

SEQ ID NO: 212071 - RNA, 32 nt, Homo Sapiens
auuuccugcuacuuaaauuugaaucugaguga

SEQ ID NO: 212072 - RNA, 32 nt, Homo Sapiens
gccaauuuaauucagaggggucuuaaagcagg

SEQ ID NO: 212073 - RNA, 32 nt, Homo Sapiens
uauugugguaucguggaguuuaaaagaucaag

SEQ ID NO: 212074 - RNA, 32 nt, Homo Sapiens
cccaagcccgaacucacguuuccccggacgcg

SEQ ID NO: 212075 - RNA, 32 nt, Homo Sapiens
cuccgugucagaaugggaaugucuaucuaugu

SEQ ID NO: 212076 - RNA, 32 nt, Homo Sapiens
gggacgagccccacagcccccuccucaaaaac

SEQ ID NO: 212077 - RNA, 32 nt, Homo Sapiens
gacuuggauacgcuuuugaguggucccagucg

SEQ ID NO: 212078 - RNA, 32 nt, Homo Sapiens
uaauaauaaaaauuaaaacaacuagcaaguau

SEQ ID NO: 212079 - RNA, 32 nt, Homo Sapiens
agggacagggaaugcugaggccucgaggggcc

SEQ ID NO: 212080 - RNA, 32 nt, Homo Sapiens
cagaccuuuccacucccaccgucuguggccug

SEQ ID NO: 212081 - RNA, 32 nt, Homo Sapiens
caacauuauucauaguuuaagucuuuuaucau

SEQ ID NO: 212082 - RNA, 32 nt, Homo Sapiens
cagcacccgcggccgccaucgccgucgcuugg

SEQ ID NO: 212083 - RNA, 32 nt, Homo Sapiens
agggccugccuggccccucgccuguggagcuc

SEQ ID NO: 212084 - RNA, 32 nt, Homo Sapiens
cugagggugccugcgcagcugcgacggcugcu

SEQ ID NO: 212085 - RNA, 32 nt, Homo Sapiens
ccaaagauuaggucguuuuccaaagagccgcg

SEQ ID NO: 212086 - RNA, 32 nt, Homo Sapiens
ggagugccuuggcgcgaucucggcucacugca

SEQ ID NO: 212087 - RNA, 32 nt, Homo Sapiens
auagaaaguaacaaaauuugcugucaccuuaa

SEQ ID NO: 212088 - RNA, 32 nt, Homo Sapiens
gguggggguggauguagcugcagaaagcaugc

SEQ ID NO: 212089 - RNA, 32 nt, Homo Sapiens
uaauuucgccuggcaacuggacugaggggagu

SEQ ID NO: 212090 - RNA, 32 nt, Homo Sapiens
cccgcugccuucugaggagggggaggaguugc

SEQ ID NO: 212091 - RNA, 32 nt, Homo Sapiens
agaaaaguagaauucgaaaacuuuuuaaaaau

SEQ ID NO: 212092 - RNA, 32 nt, Homo Sapiens
ugcagucacaccuggacaccaggguccuccuc

SEQ ID NO: 212093 - RNA, 32 nt, Homo Sapiens
aagccacccuucccugccuccagcugucagcc

SEQ ID NO: 212094 - RNA, 32 nt, Homo Sapiens
ccccgcgcugcagcagcagcucggccacccgc

SEQ ID NO: 212095 - RNA, 32 nt, Homo Sapiens
gggagagacagagacagagaugacagagacag

SEQ ID NO: 212096 - RNA, 32 nt, Homo Sapiens
cacccacccuccccgccccagcaacugcauau

SEQ ID NO: 212097 - RNA, 32 nt, Homo Sapiens
ugccuguuauuguucugcccaacuguuaagau

SEQ ID NO: 212098 - RNA, 32 nt, Homo Sapiens
cacuguaauugucuacacaauuuucucucaaa

SEQ ID NO: 212099 - RNA, 32 nt, Homo Sapiens
ugccaguccgccuccgcgugguccggccgcug

SEQ ID NO: 212100 - RNA, 32 nt, Homo Sapiens
gggcaaugucuccuuccacuuuagagaggggg

SEQ ID NO: 212101 - RNA, 32 nt, Homo Sapiens
gggaccccgagcuuccucgguagcagaggccc

SEQ ID NO: 212102 - RNA, 32 nt, Homo Sapiens
uagcacccaugccagcagcugcagaggaugug

SEQ ID NO: 212103 - RNA, 32 nt, Homo Sapiens
ugucuccauuuaauuauggagagacgugcaga

SEQ ID NO: 212104 - RNA, 32 nt, Homo Sapiens
cagaacgagacgccaucaauaaauaaauaaau

SEQ ID NO: 212105 - RNA, 32 nt, Homo Sapiens
cgcugccggcagggcuugggggcgccuuagag

SEQ ID NO: 212106 - RNA, 32 nt, Homo Sapiens
uuaguguugugucaccaauucagggaaggagc

SEQ ID NO: 212107 - RNA, 32 nt, Homo Sapiens
caggcaguguucugccgagaccccaagaacuc

SEQ ID NO: 212108 - RNA, 32 nt, Homo Sapiens
auucucaccaaaaaaggcauuacaaaaaauug

SEQ ID NO: 212109 - RNA, 32 nt, Homo Sapiens
uggggcugugucaucaaucaaaguccucauau

SEQ ID NO: 212110 - RNA, 32 nt, Homo Sapiens
gcuggagccgcgagacgggcgcucagggcgcg

SEQ ID NO: 212111 - RNA, 32 nt, Homo Sapiens
ucugugagcugucucggcacccacuugcaguc

SEQ ID NO: 212112 - RNA, 32 nt, Homo Sapiens
aaucaaaauuuauuugcaagcugacuugauaa

SEQ ID NO: 212113 - RNA, 32 nt, Homo Sapiens
agaggggccugacuucugcugggacagcugga

SEQ ID NO: 212114 - RNA, 32 nt, Homo Sapiens
cgacgcucgccaccccacccacucccgcugga

SEQ ID NO: 212115 - RNA, 32 nt, Homo Sapiens
cagggcugacguaauuccaucuuaauaucagu

SEQ ID NO: 212116 - RNA, 32 nt, Homo Sapiens
ugcgccuuggcucuguuccuucugggagcugu

SEQ ID NO: 212117 - RNA, 32 nt, Homo Sapiens
cuaugauaaaauuuaguuuacagauuagacac

SEQ ID NO: 212118 - RNA, 32 nt, Homo Sapiens
acggggagcugagacccagaagaaaggagggc

SEQ ID NO: 212119 - RNA, 32 nt, Homo Sapiens
gaucaaagggaagacaagaaaaauccugggag

SEQ ID NO: 212120 - RNA, 32 nt, Homo Sapiens
acgccuucuggcccuccuuucccgguggggcu

SEQ ID NO: 212121 - RNA, 32 nt, Homo Sapiens
guaauacauuuuaaccaugauuuauguuugug

SEQ ID NO: 212122 - RNA, 32 nt, Homo Sapiens
gccccuccucuucugcagacaccuagcugccc

SEQ ID NO: 212123 - RNA, 32 nt, Homo Sapiens
ucccccuuuuucuguguauuggggaugggagu

SEQ ID NO: 212124 - RNA, 32 nt, Homo Sapiens
cgugcgccgcggugccuagugugggauguaag

SEQ ID NO: 212125 - RNA, 31 nt, Homo Sapiens
uuuucaagcauauacccaggaguccagcaau

SEQ ID NO: 212126 - RNA, 32 nt, Homo Sapiens
aacaacuugacaaaauaaaauccaugucgucg

SEQ ID NO: 212127 - RNA, 31 nt, Homo Sapiens
aaaaucaggaagaaaaaacuauuaaaauaaa

SEQ ID NO: 212128 - RNA, 32 nt, Homo Sapiens
acuuucggcccggcucgggguucucggagucc

SEQ ID NO: 212129 - RNA, 32 nt, Homo Sapiens
aguuccucuguguaucucugguccagauuccg

SEQ ID NO: 212130 - RNA, 32 nt, Homo Sapiens
gagaggcucuguucccacccaggcugcacgga

SEQ ID NO: 212131 - RNA, 32 nt, Homo Sapiens
uuggcucugaagagcuuagaggcaaguuacac

SEQ ID NO: 212132 - RNA, 31 nt, Homo Sapiens
gauuaucgccagauaaaguccauucucagag

SEQ ID NO: 212133 - RNA, 32 nt, Homo Sapiens
agcacgcacagcacgguuccucucuccacugc

SEQ ID NO: 212134 - RNA, 32 nt, Homo Sapiens
cauauaugaugauguaacugaucuaaucagug

SEQ ID NO: 212135 - RNA, 32 nt, Homo Sapiens
augcuggggccacuuuccuucugucugcuggu

SEQ ID NO: 212136 - RNA, 32 nt, Homo Sapiens
cuuugagcuaagauagagucccugccccacug

SEQ ID NO: 212137 - RNA, 32 nt, Homo Sapiens
ugggaacaacugagucaacugcagcggcccug

SEQ ID NO: 212138 - RNA, 32 nt, Homo Sapiens
aauucaccccacaagaggccuauucucaccuc

SEQ ID NO: 212139 - RNA, 32 nt, Homo Sapiens
agaaccagugaaacagaaaaguuaaucugcuu

SEQ ID NO: 212140 - RNA, 32 nt, Homo Sapiens
accugcauguugaguucuguauugcuggggcu

SEQ ID NO: 212141 - RNA, 32 nt, Homo Sapiens
uacugcauguguauauuguaaaaugauuagca

SEQ ID NO: 212142 - RNA, 32 nt, Homo Sapiens
acgucggcugcagcugagauggcugcuccccg

SEQ ID NO: 212143 - RNA, 32 nt, Homo Sapiens
guaugcccugaaugaaugggugucacccuccg

SEQ ID NO: 212144 - RNA, 32 nt, Homo Sapiens
acucaccagggggccucgaggccccggcaucu

SEQ ID NO: 212145 - RNA, 32 nt, Homo Sapiens
acccaccaugguuacccggcccuugcccucuu

SEQ ID NO: 212146 - RNA, 32 nt, Homo Sapiens
cguucaaaggucgggaaggggcgcugggagaa

SEQ ID NO: 212147 - RNA, 32 nt, Homo Sapiens
ggaacguugccacaccaaucagagagccuaga

SEQ ID NO: 212148 - RNA, 32 nt, Homo Sapiens
aggaguggaggcccuggugcccggcccuuggu

SEQ ID NO: 212149 - RNA, 32 nt, Homo Sapiens
ugccucuccagaugcugaggugccuguaucau

SEQ ID NO: 212150 - RNA, 32 nt, Homo Sapiens
augcuaggagauucuuuuuucuuuuuguucua

SEQ ID NO: 212151 - RNA, 32 nt, Homo Sapiens
guuggcuggggagcccacgcugccuggcgacu

SEQ ID NO: 212152 - RNA, 32 nt, Homo Sapiens
ucacgaguacccauaacuacccaucguuuaga

SEQ ID NO: 212153 - RNA, 32 nt, Homo Sapiens
agauggcgcggagcgggaggcggcccuggagc

SEQ ID NO: 212154 - RNA, 32 nt, Homo Sapiens
aggaucagacugccuuaguucaacuuuuggcc

SEQ ID NO: 212155 - RNA, 30 nt, Homo Sapiens
ccuuaagcauauauuaauaauaccuauauc

SEQ ID NO: 212156 - RNA, 32 nt, Homo Sapiens
cgcgccgagauguugcugcugcugcuacuggc

SEQ ID NO: 212157 - RNA, 32 nt, Homo Sapiens
ucuuccauucagugacauccacagauuaugca

SEQ ID NO: 212158 - RNA, 32 nt, Homo Sapiens
gucccuucucccugugaucaguuaccaacuac

SEQ ID NO: 212159 - RNA, 32 nt, Homo Sapiens
cagugcggcgccccggccccacacucgccucc

SEQ ID NO: 212160 - RNA, 32 nt, Homo Sapiens
cuaagucuuuuggaagcuacaacaacaacguc

SEQ ID NO: 212161 - RNA, 32 nt, Homo Sapiens
gguggggaaggggucgugguguuuuaaaagca

SEQ ID NO: 212162 - RNA, 32 nt, Homo Sapiens
gugccuggagaauggguggggacuggaggggc

SEQ ID NO: 212163 - RNA, 32 nt, Homo Sapiens
gucaugaggguggagaucaugaaugggguuag

SEQ ID NO: 212164 - RNA, 30 nt, Homo Sapiens
agucaaugaaaauuauuaaagagaaugcug

SEQ ID NO: 212165 - RNA, 32 nt, Homo Sapiens
uucugggcuuugcaugggucaaagguaaucca

SEQ ID NO: 212166 - RNA, 32 nt, Homo Sapiens
gauaagaaucacagaagcugggaugguuuuua

SEQ ID NO: 212167 - RNA, 32 nt, Homo Sapiens
cgagagggucugacucugggcaccccucucac

SEQ ID NO: 212168 - RNA, 32 nt, Homo Sapiens
cgagcacgcgggucugucaucaugucgcguua

SEQ ID NO: 212169 - RNA, 32 nt, Homo Sapiens
aggaacaaaagaaucagcuauuucaugcagug

SEQ ID NO: 212170 - RNA, 32 nt, Homo Sapiens
gugauuugcaaauauuuugauuguguggguug

SEQ ID NO: 212171 - RNA, 32 nt, Homo Sapiens
auacaagucaacacugggagaggcacauguaa

SEQ ID NO: 212172 - RNA, 32 nt, Homo Sapiens
ucucaguucaacacaagaaauguugacugaac

SEQ ID NO: 212173 - RNA, 32 nt, Homo Sapiens
cugaaaauaacacuaaguauuuuugaguuccu

SEQ ID NO: 212174 - RNA, 32 nt, Homo Sapiens
gguucucgccugggcagucuugacgaggagca

SEQ ID NO: 212175 - RNA, 32 nt, Homo Sapiens
ggccgaauaccgugagccggaauccugcacgg

SEQ ID NO: 212176 - RNA, 32 nt, Homo Sapiens
ccaaguagcugggauuacaggaguuagaaaug

SEQ ID NO: 212177 - RNA, 32 nt, Homo Sapiens
accuagaagaggaaaaggaaugucaggcucug

SEQ ID NO: 212178 - RNA, 32 nt, Homo Sapiens
caagucggcugacuaugucaaccuggcucuga

SEQ ID NO: 212179 - RNA, 32 nt, Homo Sapiens
ccacgguucacaggucucggucuucggagccu

SEQ ID NO: 212180 - RNA, 32 nt, Homo Sapiens
caaccucuuccccccaccccgccccgccuuuu

SEQ ID NO: 212181 - RNA, 32 nt, Homo Sapiens
ucagccaugggguugaguuggccauuaaaaga

SEQ ID NO: 212182 - RNA, 32 nt, Homo Sapiens
ccaaaggaauaaaauucuuuuauauaaauagg

SEQ ID NO: 212183 - RNA, 32 nt, Homo Sapiens
auugaaaggugaugaaaaucaaauaaagaauc

SEQ ID NO: 212184 - RNA, 32 nt, Homo Sapiens
ccagcgaaaccagcuucaucucccagagaaug

SEQ ID NO: 212185 - RNA, 32 nt, Homo Sapiens
ugcacucaacguuguuacuaagauucaucuac

SEQ ID NO: 212186 - RNA, 32 nt, Homo Sapiens
aauguguaaaagacguuuaaaagugaauaaau

SEQ ID NO: 212187 - RNA, 32 nt, Homo Sapiens
cuuacauacuuauauggguaucuguauagaua

SEQ ID NO: 212188 - RNA, 32 nt, Homo Sapiens
agccuucagagcucagccacgaacagagauuu

SEQ ID NO: 212189 - RNA, 32 nt, Homo Sapiens
gcaacugcaauaacuaaacaggguaaugcuua

SEQ ID NO: 212190 - RNA, 32 nt, Homo Sapiens
aagcaggggacuccgcagcgggccccugccuu

SEQ ID NO: 212191 - RNA, 32 nt, Homo Sapiens
uaauuauaucuaucuuuuuugccguuuauauu

SEQ ID NO: 212192 - RNA, 32 nt, Homo Sapiens
ugcuuaaaguggggucacuuugauaccuuugc

SEQ ID NO: 212193 - RNA, 32 nt, Homo Sapiens
uuuguuucgacgccggaccgcguaagagacga

SEQ ID NO: 212194 - RNA, 32 nt, Homo Sapiens
ccagauguauuaaaaauauauaaaagugaauu

SEQ ID NO: 212195 - RNA, 32 nt, Homo Sapiens
caggcagaugaccuggugaagaugcucuucag

SEQ ID NO: 212196 - RNA, 32 nt, Homo Sapiens
gcauuccccgguucccccuccaccccacgcgg

SEQ ID NO: 212197 - RNA, 32 nt, Homo Sapiens
augcccccacccagggggccagcgggagcagg

SEQ ID NO: 212198 - RNA, 32 nt, Homo Sapiens
aguggucuccagccugggacuaugaagauacg

SEQ ID NO: 212199 - RNA, 32 nt, Homo Sapiens
aaauugcgguuguguuugcaguauugucacuu

SEQ ID NO: 212200 - RNA, 32 nt, Homo Sapiens
uucaaaaccugagagcacuuuuucuuuguuua

SEQ ID NO: 212201 - RNA, 32 nt, Homo Sapiens
aaauuauuguaucucacaguguggggaaaagg

SEQ ID NO: 212202 - RNA, 32 nt, Homo Sapiens
cucugggaagguggccggcuaugucccagaaa

SEQ ID NO: 212203 - RNA, 32 nt, Homo Sapiens
ugaccucccaggaagaaaauagcuucuccuac

SEQ ID NO: 212204 - RNA, 32 nt, Homo Sapiens
guggcgacucccucgcucgcccucacugccgg

SEQ ID NO: 212205 - RNA, 32 nt, Homo Sapiens
gccaccucccccuccgcccagucccuggcaau

SEQ ID NO: 212206 - RNA, 32 nt, Homo Sapiens
cacgcgcggcccggcuucuguccucgcggcgc

SEQ ID NO: 212207 - RNA, 32 nt, Homo Sapiens
ggcguuuacugaugcuuccugguccgguggcc

SEQ ID NO: 212208 - RNA, 32 nt, Homo Sapiens
gagcuacacagaccccuaaggaccccgugagc

SEQ ID NO: 212209 - RNA, 32 nt, Homo Sapiens
cuccucguuuucaggcgccgccggcggcgcug

SEQ ID NO: 212210 - RNA, 32 nt, Homo Sapiens
uaucacaaacuuaacauggaagauauuccuuu

SEQ ID NO: 212211 - RNA, 32 nt, Homo Sapiens
gcuccccgcccggcacagccugggccuguugc

SEQ ID NO: 212212 - RNA, 32 nt, Homo Sapiens
cagcucaucauucuguagaaaugugcaguuug

SEQ ID NO: 212213 - RNA, 32 nt, Homo Sapiens
cccgcuccagacgcgccaccugggcgcuccaa

SEQ ID NO: 212214 - RNA, 32 nt, Homo Sapiens
ucaccuccuugacguaggauguguacauggcu

SEQ ID NO: 212215 - RNA, 32 nt, Homo Sapiens
gcccagaugauucuaaauuacucuguaguacu

SEQ ID NO: 212216 - RNA, 32 nt, Homo Sapiens
uuggccgggggagcgcgggcaccgggcgagca

SEQ ID NO: 212217 - RNA, 32 nt, Homo Sapiens
aguuauacagaaaauagaauaaaguuaauacc

SEQ ID NO: 212218 - RNA, 32 nt, Homo Sapiens
caaggaaggggcucagggggccccauggccuc

SEQ ID NO: 212219 - RNA, 32 nt, Homo Sapiens
ccuggacgugaaggcccggcuggagggugaga

SEQ ID NO: 212220 - RNA, 32 nt, Homo Sapiens
ucacagaccccucuccccugcaguggguguua

SEQ ID NO: 212221 - RNA, 32 nt, Homo Sapiens
acucuggaucuugguucugcucuucuugccuc

SEQ ID NO: 212222 - RNA, 32 nt, Homo Sapiens
acccuugaucucaucacccugccggccuccug

SEQ ID NO: 212223 - RNA, 32 nt, Homo Sapiens
ccagcggguccugugaaggcgagcagacgcgg

SEQ ID NO: 212224 - RNA, 32 nt, Homo Sapiens
uguggccggcccccgagaccccggcccccacc

SEQ ID NO: 212225 - RNA, 32 nt, Homo Sapiens
ggccgggcacggugacucacgccuguaauccc

SEQ ID NO: 212226 - RNA, 32 nt, Homo Sapiens
gcgaggcccuccccucugcaccagcucauugc

SEQ ID NO: 212227 - RNA, 32 nt, Homo Sapiens
uccagggaaggcugcauagacagcuaugaaag

SEQ ID NO: 212228 - RNA, 32 nt, Homo Sapiens
uguuuugcaauaauuagaauaaagauuuauuu

SEQ ID NO: 212229 - RNA, 32 nt, Homo Sapiens
acaucauaaaaauuaguaauucaacuuuuaag

SEQ ID NO: 212230 - RNA, 32 nt, Homo Sapiens
aagaaugcuuacaacgugaaaauuauauauuu

SEQ ID NO: 212231 - RNA, 32 nt, Homo Sapiens
agcugggcgcggugacucaugccuguaauccc

SEQ ID NO: 212232 - RNA, 32 nt, Homo Sapiens
ggccgggcgcggugacucacgccuauaauccc

SEQ ID NO: 212233 - RNA, 32 nt, Homo Sapiens
caagccggguggcugagccaggcugugcacgg

SEQ ID NO: 212234 - RNA, 32 nt, Homo Sapiens
cagguugcaguggacauugggauuguugcuug

SEQ ID NO: 212235 - RNA, 32 nt, Homo Sapiens
ggcacgagggagcagcuccucuuccaucucca

SEQ ID NO: 212236 - RNA, 32 nt, Homo Sapiens
uauuggaucugugccuguaauaucaggauacu

SEQ ID NO: 212237 - RNA, 32 nt, Homo Sapiens
ggcgcacgccgggaggcuccgcaagaccgugg

SEQ ID NO: 212238 - RNA, 32 nt, Homo Sapiens
ccuucagagucuuuuuggccugaugaugacuc

SEQ ID NO: 212239 - RNA, 32 nt, Homo Sapiens
augucugugucugaugaguguagaaucucugg

SEQ ID NO: 212240 - RNA, 32 nt, Homo Sapiens
ccggccauaauuuagcacuuuaaaaaauaaua

SEQ ID NO: 212241 - RNA, 32 nt, Homo Sapiens
cacacacacacacacacacacacacacaauua

SEQ ID NO: 212242 - RNA, 32 nt, Homo Sapiens
ccacagacagagcuguauuaaguaaccuguuu

SEQ ID NO: 212243 - RNA, 32 nt, Homo Sapiens
aucuuuucuuagucuuuugauucaaauucaaa

SEQ ID NO: 212244 - RNA, 32 nt, Homo Sapiens
cagcuuugugccuuuuaacccuaugccaacuc

SEQ ID NO: 212245 - RNA, 32 nt, Homo Sapiens
agagcucugcacccagccugcccgcccacacc

SEQ ID NO: 212246 - RNA, 32 nt, Homo Sapiens
ccucagcccucccagcccacuucugccuguuu

SEQ ID NO: 212247 - RNA, 32 nt, Homo Sapiens
aaauagucaaaauaaaaacaucucaauuucua

SEQ ID NO: 212248 - RNA, 32 nt, Homo Sapiens
agugcaacaaaaucaauuuuuugcuaaacgac

SEQ ID NO: 212249 - RNA, 32 nt, Homo Sapiens
cuccccagcagcccugggccacggccagcccc

SEQ ID NO: 212250 - RNA, 32 nt, Homo Sapiens
cccuggacgagcucuucgguagccucagaccg

SEQ ID NO: 212251 - RNA, 32 nt, Homo Sapiens
cguccuugggagaaaaaacuaaaguuuaagug

SEQ ID NO: 212252 - RNA, 32 nt, Homo Sapiens
gguuuuucccccucuuuggcugguggaggaua

SEQ ID NO: 212253 - RNA, 32 nt, Homo Sapiens
ucugaccccgguuaccuugacagcccugccug

SEQ ID NO: 212254 - RNA, 29 nt, Homo Sapiens
gcuagugguaggguuuauuuucugggagg

SEQ ID NO: 212255 - RNA, 32 nt, Homo Sapiens
aggcccacucacggcgcaggccccacaggagc

SEQ ID NO: 212256 - RNA, 32 nt, Homo Sapiens
uuaguugggcaugguaaugugccgguagcccc

SEQ ID NO: 212257 - RNA, 32 nt, Homo Sapiens
caagucuaagcacuuuacuuguauuaauuuau

SEQ ID NO: 212258 - RNA, 30 nt, Homo Sapiens
ccucccccacuugccaccaucccccaucac

SEQ ID NO: 212259 - RNA, 32 nt, Homo Sapiens
ugccuccaucccuccuucugccuccccaguuc

SEQ ID NO: 212260 - RNA, 32 nt, Homo Sapiens
aacaaaacgaacuauggcacuaaccaaaaacu

SEQ ID NO: 212261 - RNA, 32 nt, Homo Sapiens
aacagaacaccgugggcaugcgcagagcaugc

SEQ ID NO: 212262 - RNA, 32 nt, Homo Sapiens
ggcggucgggucacgaggucaggagaucgaga

SEQ ID NO: 212263 - RNA, 32 nt, Homo Sapiens
uaacuaccucugauccucuuugaccuuccauu

SEQ ID NO: 212264 - RNA, 32 nt, Homo Sapiens
acuggaaagagguuuuacaaaagaaaaacuuu

SEQ ID NO: 212265 - RNA, 27 nt, Homo Sapiens
aggguguccuucugcacccugggguga

SEQ ID NO: 212266 - RNA, 32 nt, Homo Sapiens
ccgugccccacacuuuccuccuccccacugca

SEQ ID NO: 212267 - RNA, 32 nt, Homo Sapiens
ucccucuuugaccugcagacaucauccuacca

SEQ ID NO: 212268 - RNA, 28 nt, Homo Sapiens
accauggacuuccagcaucgccccgggg

SEQ ID NO: 212269 - RNA, 31 nt, Homo Sapiens
ccaaaauccagcaccaccuugguuaagcacc

SEQ ID NO: 212270 - RNA, 32 nt, Homo Sapiens
uucaaauuccuccggucagcaauuucuugccu

SEQ ID NO: 212271 - RNA, 32 nt, Homo Sapiens
gcauuugagagaagguaggguguguauauaua

SEQ ID NO: 212272 - RNA, 32 nt, Homo Sapiens
acacaucacaucaccagugccaaaauggcugu

SEQ ID NO: 212273 - RNA, 32 nt, Homo Sapiens
guauaaaccaugcuucucagcuuucaaauuuc

SEQ ID NO: 212274 - RNA, 32 nt, Homo Sapiens
cagacaauuuaaaaguucaagucuguacuguu

SEQ ID NO: 212275 - RNA, 32 nt, Homo Sapiens
ggagagcuggcugcuucagcugcgagccugac

SEQ ID NO: 212276 - RNA, 32 nt, Homo Sapiens
ccuuuguagagcauuaaauuuuaugcuauauu

SEQ ID NO: 212277 - RNA, 32 nt, Homo Sapiens
uugcaaauuuaaauaaagauacauaauguuug

SEQ ID NO: 212278 - RNA, 32 nt, Homo Sapiens
aagagacaaucuccagccacccgccccacgcu

SEQ ID NO: 212279 - RNA, 32 nt, Homo Sapiens
uuuugguucuauucuuuuuuuuucuuuuuucu

SEQ ID NO: 212280 - RNA, 32 nt, Homo Sapiens
ucaguccauggugcuuuguaacuuuuacguug

SEQ ID NO: 212281 - RNA, 32 nt, Homo Sapiens
auguguguauauauaaauacauauaugacugc

SEQ ID NO: 212282 - RNA, 32 nt, Homo Sapiens
acaguagcaucacagcagcagucaauaaugcc

SEQ ID NO: 212283 - RNA, 29 nt, Homo Sapiens
aguguuuagggucuuuauuuucuguugac

SEQ ID NO: 212284 - RNA, 32 nt, Homo Sapiens
ccacuacaccagcagcaguuccuccuggggaa

SEQ ID NO: 212285 - RNA, 32 nt, Homo Sapiens
gcucuucuauauauuuuguaaaguaagaaaua

SEQ ID NO: 212286 - RNA, 32 nt, Homo Sapiens
cacuguacuccagccugggugacgagcgaaac

SEQ ID NO: 212287 - RNA, 32 nt, Homo Sapiens
aagguguuucugcucucgcgccauaugcaguu

SEQ ID NO: 212288 - RNA, 30 nt, Homo Sapiens
aguaucacuauuaaaugaaauucuaggaug

SEQ ID NO: 212289 - RNA, 32 nt, Homo Sapiens
agaugauggcaaugaaguggcucccaaugggc

SEQ ID NO: 212290 - RNA, 32 nt, Homo Sapiens
auugaaauauucaugauuuaagagcaguuuug

SEQ ID NO: 212291 - RNA, 32 nt, Homo Sapiens
uggagcauuuugcuucuggggugucuuccuua

SEQ ID NO: 212292 - RNA, 32 nt, Homo Sapiens
ggaaaccugugcuauuuaaauuggagcccagu

SEQ ID NO: 212293 - RNA, 32 nt, Homo Sapiens
aagccaaagagauaaaacuuuaugcccagauu

SEQ ID NO: 212294 - RNA, 28 nt, Homo Sapiens
uguucauguggagucauuauaaauucua

SEQ ID NO: 212295 - RNA, 32 nt, Homo Sapiens
agagaggacagaaccucuaaccaggaagaggc

SEQ ID NO: 212296 - RNA, 32 nt, Homo Sapiens
caaaaugccagcaaguuuuuguuuguauagag

SEQ ID NO: 212297 - RNA, 32 nt, Homo Sapiens
aaaaaucugaauccauaagcguuuagaacaac

SEQ ID NO: 212298 - RNA, 32 nt, Homo Sapiens
ucagaacuaggaccaaacgaugccaucaaaua

SEQ ID NO: 212299 - RNA, 32 nt, Homo Sapiens
gucuuuuucauuuugcagaaggaaaugaugga

SEQ ID NO: 212300 - RNA, 32 nt, Homo Sapiens
caccccacccucagaagcugcuugcucugccc

SEQ ID NO: 212301 - RNA, 32 nt, Homo Sapiens
aaaagggugauggccaguggcuggcagcuggg

SEQ ID NO: 212302 - RNA, 32 nt, Homo Sapiens
ggaugaguugaggugauauuuuuaugugcagc

SEQ ID NO: 212303 - RNA, 32 nt, Homo Sapiens
uauaaugauagauaaucgauagauagguagau

SEQ ID NO: 212304 - RNA, 32 nt, Homo Sapiens
uaaacaagucauuuuucuugaucguuguggaa

SEQ ID NO: 212305 - RNA, 32 nt, Homo Sapiens
uggacagcgccccggacgccccggccccuuug

SEQ ID NO: 212306 - RNA, 31 nt, Homo Sapiens
cgcggcgcgggccccgcggggguuagagguc

SEQ ID NO: 212307 - RNA, 32 nt, Homo Sapiens
cgcgugggugcagcugcaucuguuugagugcu

SEQ ID NO: 212308 - RNA, 32 nt, Homo Sapiens
cuguuguguugcacuuuauccuguguuuaugu

SEQ ID NO: 212309 - RNA, 32 nt, Homo Sapiens
uuggccaucaaguaugcagucgucaguaugug

SEQ ID NO: 212310 - RNA, 32 nt, Homo Sapiens
accucaagguagcuccucccucccuccagcau

SEQ ID NO: 212311 - RNA, 32 nt, Homo Sapiens
uuuaaauugcaaaauuuuuacucagauuuuuu

SEQ ID NO: 212312 - RNA, 32 nt, Homo Sapiens
cugugaggaccgagaggagaaaugagaagaag

SEQ ID NO: 212313 - RNA, 32 nt, Homo Sapiens
ugccugacccucacuccaguuggcggaggagg

SEQ ID NO: 212314 - RNA, 32 nt, Homo Sapiens
guuuuccuugggauuccgaccucccccucaga

SEQ ID NO: 212315 - RNA, 32 nt, Homo Sapiens
auccccggccccgcccgcggccccaccaaccu

SEQ ID NO: 212316 - RNA, 32 nt, Homo Sapiens
ugaggguauuugaguagcggcggugugucagg

SEQ ID NO: 212317 - RNA, 32 nt, Homo Sapiens
auuuuaugaaagauuauuguaauaaacuuuga

SEQ ID NO: 212318 - RNA, 32 nt, Homo Sapiens
cagcugcuuagcccggcgggcgcggagcagcc

SEQ ID NO: 212319 - RNA, 32 nt, Homo Sapiens
agcccugucccuccccagugcagcauggcacu

SEQ ID NO: 212320 - RNA, 32 nt, Homo Sapiens
agcucccaagauauagagaggagaggagugaa

SEQ ID NO: 212321 - RNA, 32 nt, Homo Sapiens
uaagcagaaggugcuggaaggcugguuagucu

SEQ ID NO: 212322 - RNA, 32 nt, Homo Sapiens
ggcucauaaaaugaguuugggaauuguguaua

SEQ ID NO: 212323 - RNA, 32 nt, Homo Sapiens
uacgagaaacugccucccugcuucgggucaga

SEQ ID NO: 212324 - RNA, 32 nt, Homo Sapiens
ggaacugcguggcuuguuucuaccugaacauu

SEQ ID NO: 212325 - RNA, 32 nt, Homo Sapiens
cuggcucccggcuucagcacuccgggcugcag

SEQ ID NO: 212326 - RNA, 32 nt, Homo Sapiens
uccugagaaguaccuuuguuacagcuacuaua

SEQ ID NO: 212327 - RNA, 32 nt, Homo Sapiens
augcugagcggagcggcuggggcugcgcggcg

SEQ ID NO: 212328 - RNA, 32 nt, Homo Sapiens
ugaauacugugcccucuugcuuuggggguaac

SEQ ID NO: 212329 - RNA, 32 nt, Homo Sapiens
ccggccuucccgcgcugcggccccacugagga

SEQ ID NO: 212330 - RNA, 32 nt, Homo Sapiens
uaugccacccucuuccuucucuuugaccccug

SEQ ID NO: 212331 - RNA, 32 nt, Homo Sapiens
ggcggggccgacgggcgcucaggucugggcca

SEQ ID NO: 212332 - RNA, 32 nt, Homo Sapiens
ccaguuuugccgcagauaauuaauggacaacu

SEQ ID NO: 212333 - RNA, 32 nt, Homo Sapiens
cuggguucaaggauucuccugccucagccucc

SEQ ID NO: 212334 - RNA, 32 nt, Homo Sapiens
ccuccuguggggccacuauagcagccaccaga

SEQ ID NO: 212335 - RNA, 32 nt, Homo Sapiens
cagccuggaaaacauauuaaucccagugcuuu

SEQ ID NO: 212336 - RNA, 32 nt, Homo Sapiens
cagcagcccccuccccccggccgcucugggcg

SEQ ID NO: 212337 - RNA, 32 nt, Homo Sapiens
aauauuuauuuuucuccaaccccugcuccauu

SEQ ID NO: 212338 - RNA, 32 nt, Homo Sapiens
guauuucggaugucuuuuuuuuuucuaagccu

SEQ ID NO: 212339 - RNA, 32 nt, Homo Sapiens
uuguguauauugcuauagauuuuucuuuaaca

SEQ ID NO: 212340 - RNA, 32 nt, Homo Sapiens
aggcugcgaccccgggcuggggacgccagggc

SEQ ID NO: 212341 - RNA, 32 nt, Homo Sapiens
auaggaauacugaguuuuuuccagggacagau

SEQ ID NO: 212342 - RNA, 32 nt, Homo Sapiens
ugggcacacugccuauggguagcccugcucca

SEQ ID NO: 212343 - RNA, 32 nt, Homo Sapiens
agcacugccaaugugacgcgggcccacggccg

SEQ ID NO: 212344 - RNA, 32 nt, Homo Sapiens
uuucuguuuugcaaaucaggagguugggcuag

SEQ ID NO: 212345 - RNA, 32 nt, Homo Sapiens
ccacggaguuugggggccacagcaccugggca

SEQ ID NO: 212346 - RNA, 32 nt, Homo Sapiens
gccugcaggaggaggggacagccgacggcgcg

SEQ ID NO: 212347 - RNA, 32 nt, Homo Sapiens
uuucauggcaacacuggauaauggcuuuguga

SEQ ID NO: 212348 - RNA, 32 nt, Homo Sapiens
uaaguucaguuauuagucugugaagugcuuua

SEQ ID NO: 212349 - RNA, 32 nt, Homo Sapiens
gagucccccaggccuuccuucacccgacuucc

SEQ ID NO: 212350 - RNA, 32 nt, Homo Sapiens
cucuggaaggucugaaaauugaacaagaugga

SEQ ID NO: 212351 - RNA, 32 nt, Homo Sapiens
ccuccuccagcaccuucguuguuuccugggua

SEQ ID NO: 212352 - RNA, 32 nt, Homo Sapiens
cuaugaucugcaccccccuccucccucuaccu

SEQ ID NO: 212353 - RNA, 32 nt, Homo Sapiens
uguaguuacuuaaagguuauuccucuuuguaa

SEQ ID NO: 212354 - RNA, 32 nt, Homo Sapiens
cucggagugggccggagauggcggcggccgac

SEQ ID NO: 212355 - RNA, 32 nt, Homo Sapiens
uucaagauauguaucuuauauaaaccucaagu

SEQ ID NO: 212356 - RNA, 32 nt, Homo Sapiens
gggugggcguccauggugcugcugcgcugaca

SEQ ID NO: 212357 - RNA, 32 nt, Homo Sapiens
aacaaaucuauuuuguuuuguuuuguuuuuug

SEQ ID NO: 212358 - RNA, 32 nt, Homo Sapiens
caggccuucauccuccuccccagcucuucucu

SEQ ID NO: 212359 - RNA, 32 nt, Homo Sapiens
ucuguaggacacugaggcucuuguuugacaug

SEQ ID NO: 212360 - RNA, 32 nt, Homo Sapiens
accagccuggucaacauaguggaccccagacu

SEQ ID NO: 212361 - RNA, 32 nt, Homo Sapiens
cccuacuggugcccccuccuccccggccaagg

SEQ ID NO: 212362 - RNA, 32 nt, Homo Sapiens
aaagggaucgccggggagggggaccagagagc

SEQ ID NO: 212363 - RNA, 32 nt, Homo Sapiens
ccaccuggugugcacagcugccuggguccauu

SEQ ID NO: 212364 - RNA, 32 nt, Homo Sapiens
agugcuauuuaguucucagcucuucugacuua

SEQ ID NO: 212365 - RNA, 32 nt, Homo Sapiens
ucuaucuacaucugccuguguacacacacaac

SEQ ID NO: 212366 - RNA, 32 nt, Homo Sapiens
acuucccuggggaagccaaacacauauucaua

SEQ ID NO: 212367 - RNA, 32 nt, Homo Sapiens
gcccagaacuuuuccuucucauuuuggguuuu

SEQ ID NO: 212368 - RNA, 32 nt, Homo Sapiens
aaauggcauauguuuuugaugauaugucaaca

SEQ ID NO: 212369 - RNA, 32 nt, Homo Sapiens
cagugucccuccccuccccccacuccucucag

SEQ ID NO: 212370 - RNA, 32 nt, Homo Sapiens
auagcacaaaaauuaaaauuggaacgaaguaa

SEQ ID NO: 212371 - RNA, 32 nt, Homo Sapiens
auagauuuuuaaaaggaccuggauuugaagag

SEQ ID NO: 212372 - RNA, 32 nt, Homo Sapiens
gcccaaccccuacgaugaagagggcguccgcu

SEQ ID NO: 212373 - RNA, 32 nt, Homo Sapiens
ggagccaguuauuauacaaccaaauacaacuu

SEQ ID NO: 212374 - RNA, 32 nt, Homo Sapiens
acuguccaaaaauagccauguguaagagucuu

SEQ ID NO: 212375 - RNA, 32 nt, Homo Sapiens
ucugccucaauccuucaaaugcaugcugggac

SEQ ID NO: 212376 - RNA, 32 nt, Homo Sapiens
agaaucuggucuguuuccuguuuggcucuucu

SEQ ID NO: 212377 - RNA, 32 nt, Homo Sapiens
ggccgccgauaucuucgccaucgccagcaucg

SEQ ID NO: 212378 - RNA, 32 nt, Homo Sapiens
gacacaauguuuagagauaaaauguacauuau

SEQ ID NO: 212379 - RNA, 27 nt, Homo Sapiens
aauaaacucuguaucagcccccaacau

SEQ ID NO: 212380 - RNA, 32 nt, Homo Sapiens
cagagccacaaacuuuugccgacucccgcggc

SEQ ID NO: 212381 - RNA, 32 nt, Homo Sapiens
cuaugaaugucaacaaaucucuacuuucucca

SEQ ID NO: 212382 - RNA, 32 nt, Homo Sapiens
acaggugcggugccgccuccagggccggccga

SEQ ID NO: 212383 - RNA, 32 nt, Homo Sapiens
gggacauggugacacgcgccuguaguccuagc

SEQ ID NO: 212384 - RNA, 32 nt, Homo Sapiens
ucuggauacggauacuuucuaggugaucugga

SEQ ID NO: 212385 - RNA, 32 nt, Homo Sapiens
ucuguggccuaugaggcccaucucagguuugg

SEQ ID NO: 212386 - RNA, 32 nt, Homo Sapiens
ucuuuccaauccagaggaacaagcaugucucu

SEQ ID NO: 212387 - RNA, 32 nt, Homo Sapiens
agcuaaagaacuuuucaaaucuaguaauuuga

SEQ ID NO: 212388 - RNA, 32 nt, Homo Sapiens
cucagccccugggcugccccucagaggcggug

SEQ ID NO: 212389 - RNA, 32 nt, Homo Sapiens
aggacaaaucaucaggguaccacuaugggguc

SEQ ID NO: 212390 - RNA, 32 nt, Homo Sapiens
agccauugccuuccauguuguuuaccuaauca

SEQ ID NO: 212391 - RNA, 32 nt, Homo Sapiens
acugcugcauauauuuguuuuuaaauuuugua

SEQ ID NO: 212392 - RNA, 31 nt, Homo Sapiens
gaaaaaucggccucaagugugagacgcaugu

SEQ ID NO: 212393 - RNA, 32 nt, Homo Sapiens
ugucgguggccgcgcugguuuccccggaguag

SEQ ID NO: 212394 - RNA, 32 nt, Homo Sapiens
gacuguggugguggagauagcguggggagccu

SEQ ID NO: 212395 - RNA, 32 nt, Homo Sapiens
uagggaggacccccaguccugcagugucugug

SEQ ID NO: 212396 - RNA, 32 nt, Homo Sapiens
cggucacuauacauuuuaugauuuuucuguca

SEQ ID NO: 212397 - RNA, 32 nt, Homo Sapiens
gagagccagcccucccuguccuccucggauca

SEQ ID NO: 212398 - RNA, 32 nt, Homo Sapiens
uauauuuuuuaagaaaacaaucaaaacaagca

SEQ ID NO: 212399 - RNA, 32 nt, Homo Sapiens
caggagcaggcagccaaaacuguccuagcuga

SEQ ID NO: 212400 - RNA, 32 nt, Homo Sapiens
uuuccccuagauuuuuuuuuuaacuaguucug

SEQ ID NO: 212401 - RNA, 28 nt, Homo Sapiens
aaaaacuggccacacauuauaaggccua

SEQ ID NO: 212402 - RNA, 32 nt, Homo Sapiens
gaacacagggaggggaacaacacacaccgggg

SEQ ID NO: 212403 - RNA, 32 nt, Homo Sapiens
gcagaaggcuucuugccuccuccgugugagcc

SEQ ID NO: 212404 - RNA, 32 nt, Homo Sapiens
ucucugacucaagcuuccaugugacagccuga

SEQ ID NO: 212405 - RNA, 32 nt, Homo Sapiens
caaaacuagcaucgauugggguuguuuugaac

SEQ ID NO: 212406 - RNA, 32 nt, Homo Sapiens
aagacaaugcuguacaguuuuauuccucuuca

SEQ ID NO: 212407 - RNA, 32 nt, Homo Sapiens
ccucagggcccggccuggcagccggggagggc

SEQ ID NO: 212408 - RNA, 32 nt, Homo Sapiens
ucuccaucuucagcuucuucaucuucaccaga

SEQ ID NO: 212409 - RNA, 32 nt, Homo Sapiens
gaaagggggcccguggggggagccgcacugca

SEQ ID NO: 212410 - RNA, 32 nt, Homo Sapiens
gaagcccugccagguccaguggccuggggucc

SEQ ID NO: 212411 - RNA, 32 nt, Homo Sapiens
ggccggaugcuggcccgccgggaccugggacu

SEQ ID NO: 212412 - RNA, 32 nt, Homo Sapiens
ccaaagcccuuaagaccucagggggcgggugc

SEQ ID NO: 212413 - RNA, 32 nt, Homo Sapiens
gaccaccaaccuggacagacagccaaagcuuc

SEQ ID NO: 212414 - RNA, 32 nt, Homo Sapiens
uuccauguuuuaaucugagccuugcagacuuu

SEQ ID NO: 212415 - RNA, 32 nt, Homo Sapiens
cuacagaaucauauuucauaugcuguguaguu

SEQ ID NO: 212416 - RNA, 31 nt, Homo Sapiens
agccuccaagucaccaccuaguaacuggcug

SEQ ID NO: 212417 - RNA, 32 nt, Homo Sapiens
cccggcgcggagcggcuuuaaaaggcggcacu

SEQ ID NO: 212418 - RNA, 32 nt, Homo Sapiens
aaaacauaaaaagaagcaggugaaaauguuaa

SEQ ID NO: 212419 - RNA, 30 nt, Homo Sapiens
gcgcgaugacggcuccuugcucccagccgg

SEQ ID NO: 212420 - RNA, 32 nt, Homo Sapiens
cccgccagcacgccagccccgacucagcuccu

SEQ ID NO: 212421 - RNA, 32 nt, Homo Sapiens
aaaaaucaguuucaaaaaggguguuggaggcc

SEQ ID NO: 212422 - RNA, 32 nt, Homo Sapiens
cuccuuccuccucugggcccaggccccaggag

SEQ ID NO: 212423 - RNA, 32 nt, Homo Sapiens
cguggucuuuggcagaaaauagaguuaauuuu

SEQ ID NO: 212424 - RNA, 32 nt, Homo Sapiens
guaguaaaaguaacugaaaaugauagccuggc

SEQ ID NO: 212425 - RNA, 32 nt, Homo Sapiens
ucgccgcgcuccuggaccggggccgggcggac

SEQ ID NO: 212426 - RNA, 32 nt, Homo Sapiens
gagccucugcuguguaccaggcguggugcuca

SEQ ID NO: 212427 - RNA, 32 nt, Homo Sapiens
auagaggcuauuucuauaauuuucuuauauau

SEQ ID NO: 212428 - RNA, 32 nt, Homo Sapiens
ggcuacugugcagcuuuugaugccagaaaagg

SEQ ID NO: 212429 - RNA, 32 nt, Homo Sapiens
gggguggcuacuuggcuaugggauagggagga

SEQ ID NO: 212430 - RNA, 32 nt, Homo Sapiens
ggggagguuucuagaugauacuaaaagccugu

SEQ ID NO: 212431 - RNA, 32 nt, Homo Sapiens
aguaugcuuauggauuugauaaaucuuauacu

SEQ ID NO: 212432 - RNA, 32 nt, Homo Sapiens
ccaccaggagcauccaugagcggggaaggggu

SEQ ID NO: 212433 - RNA, 32 nt, Homo Sapiens
cgcuccucgccagccgccacgacccaccucug

SEQ ID NO: 212434 - RNA, 32 nt, Homo Sapiens
gguuuacaccuucauguaauucuuuuacuuua

SEQ ID NO: 212435 - RNA, 32 nt, Homo Sapiens
cagugucugccuguuacagcaaaagaaacaaa

SEQ ID NO: 212436 - RNA, 32 nt, Homo Sapiens
agguggacuuuuuugguggagacguuucugcc

SEQ ID NO: 212437 - RNA, 32 nt, Homo Sapiens
cuagaaugaugcuaaaaauccacacauucugg

SEQ ID NO: 212438 - RNA, 32 nt, Homo Sapiens
cauuugagaggcacuuccugugucagucuugu

SEQ ID NO: 212439 - RNA, 28 nt, Homo Sapiens
gaaugagacaaaauacauuugaaugcau

SEQ ID NO: 212440 - RNA, 30 nt, Homo Sapiens
agcgcagccgggcgcgcgccaccgcccacu

SEQ ID NO: 212441 - RNA, 32 nt, Homo Sapiens
uguaugugugugcgcgcacguguguguaggug

SEQ ID NO: 212442 - RNA, 32 nt, Homo Sapiens
cccuucacccccuccgcagagcucuggggcau

SEQ ID NO: 212443 - RNA, 32 nt, Homo Sapiens
uaaagaaaaugauaaauuuucuguugugcauu

SEQ ID NO: 212444 - RNA, 32 nt, Homo Sapiens
gggucaggugggugugagagguccuggggagg

SEQ ID NO: 212445 - RNA, 32 nt, Homo Sapiens
cuggagugcggaucuccacaccuuaccaugac

SEQ ID NO: 212446 - RNA, 32 nt, Homo Sapiens
acuuugcauuuucuuuugucauggcaaugguu

SEQ ID NO: 212447 - RNA, 32 nt, Homo Sapiens
gcucuaaacaacaacagugugcgaaggcccag

SEQ ID NO: 212448 - RNA, 32 nt, Homo Sapiens
cgagacgcggguggcggcagggcgucccaggg

SEQ ID NO: 212449 - RNA, 32 nt, Homo Sapiens
gagugcaagcaaagcagaacucucaugcguga

SEQ ID NO: 212450 - RNA, 32 nt, Homo Sapiens
gcugaggcggguggaucaucuggguggaucac

SEQ ID NO: 212451 - RNA, 32 nt, Homo Sapiens
ggcgggggaggagaggggaaagagacauucgc

SEQ ID NO: 212452 - RNA, 32 nt, Homo Sapiens
acuaaagagaagaaaaguuuuuaucguauuca

SEQ ID NO: 212453 - RNA, 32 nt, Homo Sapiens
ccagcaacagggagaaccccccugccucccga

SEQ ID NO: 212454 - RNA, 32 nt, Homo Sapiens
uucuuuuauauaaaugugauuucucagaaauu

SEQ ID NO: 212455 - RNA, 32 nt, Homo Sapiens
agggcuuucucucccuuuucagcccucucugu

SEQ ID NO: 212456 - RNA, 32 nt, Homo Sapiens
agaagcagcuuaaauuuaaagacaagccuuaa

SEQ ID NO: 212457 - RNA, 32 nt, Homo Sapiens
uuucaaauccuaauggccguauaucuccuuug

SEQ ID NO: 212458 - RNA, 32 nt, Homo Sapiens
caagcuuaauacugaguccuacuuccugauaa

SEQ ID NO: 212459 - RNA, 32 nt, Homo Sapiens
gccacagugaccgccugcccccgccccucccc

SEQ ID NO: 212460 - RNA, 31 nt, Homo Sapiens
cugagacgcgcugcugccccccgcgcgggcg

SEQ ID NO: 212461 - RNA, 32 nt, Homo Sapiens
gaguccacaucccaccucaucaugucccgaag

SEQ ID NO: 212462 - RNA, 32 nt, Homo Sapiens
auugcuguaaaaauaggauggcgaguuugugu

SEQ ID NO: 212463 - RNA, 32 nt, Homo Sapiens
aguuaaaguccucuacuuaugugccaccuaca

SEQ ID NO: 212464 - RNA, 32 nt, Homo Sapiens
aguuguagacauuugcagggaagggagauguc

SEQ ID NO: 212465 - RNA, 32 nt, Homo Sapiens
uugccucacagcauguaaauaauuaaaacaau

SEQ ID NO: 212466 - RNA, 32 nt, Homo Sapiens
gagaucugcccuccaguggaucugucugaaac

SEQ ID NO: 212467 - RNA, 32 nt, Homo Sapiens
gcaggaccgugcaggcagcuccccucuguggg

SEQ ID NO: 212468 - RNA, 32 nt, Homo Sapiens
aaggccauaaaacagguaauauaaaaagcuuc

SEQ ID NO: 212469 - RNA, 32 nt, Homo Sapiens
cuugguggccccagccccgaucccagcgccgc

SEQ ID NO: 212470 - RNA, 31 nt, Homo Sapiens
aauaaucuuuuguaguuuucaguguacaggu

SEQ ID NO: 212471 - RNA, 32 nt, Homo Sapiens
cugcaggcuuucuuggacuccguacuguuggu

SEQ ID NO: 212472 - RNA, 32 nt, Homo Sapiens
agcaugcggcuucucugccauuagcagcccug

SEQ ID NO: 212473 - RNA, 32 nt, Homo Sapiens
uccugaguucuuccucaauccaagcuguccug

SEQ ID NO: 212474 - RNA, 32 nt, Homo Sapiens
guuacauacucaauuuugauaaaaaguuuuag

SEQ ID NO: 212475 - RNA, 32 nt, Homo Sapiens
uccggguggguggucagaaugccgugcuccag

SEQ ID NO: 212476 - RNA, 29 nt, Homo Sapiens
ccggaugauggcggccggcgcggcccuag

SEQ ID NO: 212477 - RNA, 31 nt, Homo Sapiens
acucaccauaaaaaggaauccacucccaggc

SEQ ID NO: 212478 - RNA, 32 nt, Homo Sapiens
ugaaggugaagcugcuggagcugcaagaguug

SEQ ID NO: 212479 - RNA, 31 nt, Homo Sapiens
uaaaugaaagccaccuuuuguuaaaaauuug

SEQ ID NO: 212480 - RNA, 32 nt, Homo Sapiens
agggguggacccucagaaggcgucacaagaac

SEQ ID NO: 212481 - RNA, 32 nt, Homo Sapiens
cucaggagccagcagggcagaguucugccugu

SEQ ID NO: 212482 - RNA, 32 nt, Homo Sapiens
gcgccgucugcgggcgcuuccgggccaccagu

SEQ ID NO: 212483 - RNA, 32 nt, Homo Sapiens
gcugggccgcggcucccgggugucccaggccc

SEQ ID NO: 212484 - RNA, 32 nt, Homo Sapiens
gaggagcuuuugcugcggaugcacagggaaag

SEQ ID NO: 212485 - RNA, 30 nt, Homo Sapiens
gaaaaaauaaaaaugggggaagcuacagau

SEQ ID NO: 212486 - RNA, 32 nt, Homo Sapiens
cggcacugcagcugcguggccgcccuggaggg

SEQ ID NO: 212487 - RNA, 32 nt, Homo Sapiens
gugauugggugguggauagaagagguaaccua

SEQ ID NO: 212488 - RNA, 32 nt, Homo Sapiens
ggacccucgaagaggagaccgagggucccaga

SEQ ID NO: 212489 - RNA, 32 nt, Homo Sapiens
uucaguaccuggaggaggagcaggggcgugga

SEQ ID NO: 212490 - RNA, 32 nt, Homo Sapiens
caaucugucuuacugccauuagaaugcaaccu

SEQ ID NO: 212491 - RNA, 32 nt, Homo Sapiens
uuuuuguauuccuauauuaaccaucuaaacca

SEQ ID NO: 212492 - RNA, 30 nt, Homo Sapiens
uauuuaccauuugccacccacaaaggucag

SEQ ID NO: 212493 - RNA, 32 nt, Homo Sapiens
ugauuucugaaauaaacucuaaguagugaacg

SEQ ID NO: 212494 - RNA, 32 nt, Homo Sapiens
uucuuuugauguagucaugaguuuuucuuugu

SEQ ID NO: 212495 - RNA, 32 nt, Homo Sapiens
cugaggagaaaacuaacucuuuucauccacca

SEQ ID NO: 212496 - RNA, 32 nt, Homo Sapiens
cgcugcccccgccgcugcucagaccuccagga

SEQ ID NO: 212497 - RNA, 32 nt, Homo Sapiens
cuguguuuauuacuacauuaaaacaaagucuc

SEQ ID NO: 212498 - RNA, 32 nt, Homo Sapiens
ggccauuaggggccggugcggcggcggcgcgg

SEQ ID NO: 212499 - RNA, 32 nt, Homo Sapiens
uucuccuggaagagaggugcugauuggcccca

SEQ ID NO: 212500 - RNA, 32 nt, Homo Sapiens
cugccugugggauguugugagaggaacaugag

SEQ ID NO: 212501 - RNA, 32 nt, Homo Sapiens
aaaaacguggugugugcuggaguugucugaac

SEQ ID NO: 212502 - RNA, 32 nt, Homo Sapiens
cuugaaaaccuagaagaaacuaccacagaagc

SEQ ID NO: 212503 - RNA, 32 nt, Homo Sapiens
auuauuuuaaagauuagauuuagucaaauaag

SEQ ID NO: 212504 - RNA, 32 nt, Homo Sapiens
aaagaaauuugaaaaaacuuucucuuugccau

SEQ ID NO: 212505 - RNA, 32 nt, Homo Sapiens
aucuaccccccucccaaccucgggggaccuag

SEQ ID NO: 212506 - RNA, 31 nt, Homo Sapiens
aggaugugagggcccgcaggagccgagucag

SEQ ID NO: 212507 - RNA, 32 nt, Homo Sapiens
ucucggacgccgaggggcuggcgcucccgcag

SEQ ID NO: 212508 - RNA, 32 nt, Homo Sapiens
aggugaguggcggggcggggcagaggugaggg

SEQ ID NO: 212509 - RNA, 32 nt, Homo Sapiens
uuucuguacuaaaauguuacuuuguaucaaaa

SEQ ID NO: 212510 - RNA, 32 nt, Homo Sapiens
cuccgaggcugcgucccggggaguccggcuuc

SEQ ID NO: 212511 - RNA, 32 nt, Homo Sapiens
ccggggccugguguugucaguccuccugaaca

SEQ ID NO: 212512 - RNA, 32 nt, Homo Sapiens
caugcaacgcgugcagggaguucaggugccgg

SEQ ID NO: 212513 - RNA, 32 nt, Homo Sapiens
uuggaggagcaacagcagcagccuuggccgac

SEQ ID NO: 212514 - RNA, 32 nt, Homo Sapiens
aaaccagagugcugggucucuucccuggaguu

SEQ ID NO: 212515 - RNA, 32 nt, Homo Sapiens
cugcugacuauauuuuaaaaacaaaaugaaau

SEQ ID NO: 212516 - RNA, 32 nt, Homo Sapiens
gcacuuccagcaugguauguguagcgaugugg

SEQ ID NO: 212517 - RNA, 32 nt, Homo Sapiens
agaguuuaaaaauacauuaggagagagaaacc

SEQ ID NO: 212518 - RNA, 32 nt, Homo Sapiens
acaagaugaaauuuaaagucaaccggagaacc

SEQ ID NO: 212519 - RNA, 32 nt, Homo Sapiens
ugagucugaaauuccagggaaugccgugaggg

SEQ ID NO: 212520 - RNA, 32 nt, Homo Sapiens
aauaauuuugaaaauuuguagugaauuuguuc

SEQ ID NO: 212521 - RNA, 32 nt, Homo Sapiens
ccaaccccaucccaaagccuacaguccucugc

SEQ ID NO: 212522 - RNA, 32 nt, Homo Sapiens
uuuuguacaauaauauuaagcaugcuucauuc

SEQ ID NO: 212523 - RNA, 32 nt, Homo Sapiens
aggcugguggaguuccgaugacaacuuggaca

SEQ ID NO: 212524 - RNA, 32 nt, Homo Sapiens
ugccuuaauuaacuuucuuuuauaaugaugau

SEQ ID NO: 212525 - RNA, 31 nt, Homo Sapiens
ccgggcccucaccucaccugagguccggccg

SEQ ID NO: 212526 - RNA, 31 nt, Homo Sapiens
ccagccugggcaacgagcgaaacuacaucuc

SEQ ID NO: 212527 - RNA, 32 nt, Homo Sapiens
ggagcauuggguaucugaugucugcaccagaa

SEQ ID NO: 212528 - RNA, 32 nt, Homo Sapiens
cugcgggcugccccgcuuugcggacgggcugu

SEQ ID NO: 212529 - RNA, 32 nt, Homo Sapiens
uuguuucugcucuuugucagcuuucaggggag

SEQ ID NO: 212530 - RNA, 32 nt, Homo Sapiens
aaugggguuuaaaagaacugucucuuucaguc

SEQ ID NO: 212531 - RNA, 32 nt, Homo Sapiens
accagccuggccaacauagugaaaccccgucu

SEQ ID NO: 212532 - RNA, 32 nt, Homo Sapiens
uucuggccuguugagcccgcucccucacugcc

SEQ ID NO: 212533 - RNA, 31 nt, Homo Sapiens
uuccaaaacuuuaaugaacuaacugacagcu

SEQ ID NO: 212534 - RNA, 29 nt, Homo Sapiens
cauauaugaaguuuauuuugagaagucua

SEQ ID NO: 212535 - RNA, 32 nt, Homo Sapiens
cuuuucaaguauuuggggaguuuaucuugcca

SEQ ID NO: 212536 - RNA, 32 nt, Homo Sapiens
cagucgccuggccucuucuccccucucuuccc

SEQ ID NO: 212537 - RNA, 32 nt, Homo Sapiens
ucuucuccuuguuacauaguaacagagcuuga

SEQ ID NO: 212538 - RNA, 32 nt, Homo Sapiens
cuaauccugggugucucugagacccaucuccu

SEQ ID NO: 212539 - RNA, 32 nt, Homo Sapiens
cccaauacccccagccccaccccuggccuccc

SEQ ID NO: 212540 - RNA, 32 nt, Homo Sapiens
aaaagcagaaccagccuucugguggucacaaa

SEQ ID NO: 212541 - RNA, 32 nt, Homo Sapiens
cuuucauuaacucaguuuuucuaaacaacaaa

SEQ ID NO: 212542 - RNA, 32 nt, Homo Sapiens
gaaaggccuuccucgaaccagccacaccaaac

SEQ ID NO: 212543 - RNA, 32 nt, Homo Sapiens
guuaacuacaccuaucugcauaggaggcuccc

SEQ ID NO: 212544 - RNA, 32 nt, Homo Sapiens
ucacacuguaggacucacauacgacuccaacg

SEQ ID NO: 212545 - RNA, 32 nt, Homo Sapiens
guucaugugucuuaauucuugauucagaaaag

SEQ ID NO: 212546 - RNA, 32 nt, Homo Sapiens
cagugaacaaacugcauggccuuggagagaga

SEQ ID NO: 212547 - RNA, 32 nt, Homo Sapiens
gcggcuccaacauggcuccgcggcugugcagc

SEQ ID NO: 212548 - RNA, 32 nt, Homo Sapiens
cccaaugcaagaaucucagacacacaugacgc

SEQ ID NO: 212549 - RNA, 32 nt, Homo Sapiens
gaggagaaggacuuauauuuagugucugaaaa

SEQ ID NO: 212550 - RNA, 32 nt, Homo Sapiens
cgagggcaagcacugaucccucacaggacggg

SEQ ID NO: 212551 - RNA, 32 nt, Homo Sapiens
aagaauugcaucgugcucaucgacagcacacc

SEQ ID NO: 212552 - RNA, 32 nt, Homo Sapiens
ucaaaccuugaacaucaucauagaguucauau

SEQ ID NO: 212553 - RNA, 32 nt, Homo Sapiens
ccaggggugagcggcagcgauggcgucccaug

SEQ ID NO: 212554 - RNA, 32 nt, Homo Sapiens
gguuauacaauaacccaguuacuuuuuuacac

SEQ ID NO: 212555 - RNA, 30 nt, Homo Sapiens
uucuuaccacuugauuuguuuuccaagcaa

SEQ ID NO: 212556 - RNA, 32 nt, Homo Sapiens
gaagaugcccccugccuucucugcuccccauc

SEQ ID NO: 212557 - RNA, 32 nt, Homo Sapiens
gagcuuuugauuuuuguuaagcauuacagaua

SEQ ID NO: 212558 - RNA, 32 nt, Homo Sapiens
caauugcaagcucauuccucuaccucauacuu

SEQ ID NO: 212559 - RNA, 32 nt, Homo Sapiens
agacagccaaggaaacaaggauaauggcucau

SEQ ID NO: 212560 - RNA, 32 nt, Homo Sapiens
aauuauaauguuacugguuuuaucuacuuguu

SEQ ID NO: 212561 - RNA, 25 nt, Homo Sapiens
uuugacugguuugacuaccauggcc

SEQ ID NO: 212562 - RNA, 32 nt, Homo Sapiens
gaggaaggaaagcuucaagcuggccauggggg

SEQ ID NO: 212563 - RNA, 32 nt, Homo Sapiens
uuucauaauuuaauauuuuuuguauuugcucu

SEQ ID NO: 212564 - RNA, 32 nt, Homo Sapiens
acucacaugccccaccccgaggaggucccugu

SEQ ID NO: 212565 - RNA, 32 nt, Homo Sapiens
gucccaaugaauugaauuucaaauaugaauca

SEQ ID NO: 212566 - RNA, 32 nt, Homo Sapiens
caucccugaccugguccucaugcugccgaggc

SEQ ID NO: 212567 - RNA, 32 nt, Homo Sapiens
uuucuccaauuuacccucuuuggauggugcca

SEQ ID NO: 212568 - RNA, 32 nt, Homo Sapiens
guuuuauaaaaaguggagacagacugaugugu

SEQ ID NO: 212569 - RNA, 32 nt, Homo Sapiens
guuuuauguaacaugcauccuugggcagguug

SEQ ID NO: 212570 - RNA, 32 nt, Homo Sapiens
cucauuacuguaauaaaaccagcagagacaca

SEQ ID NO: 212571 - RNA, 30 nt, Homo Sapiens
gcuggauggcuuugagcagaagcugcaagg

SEQ ID NO: 212572 - RNA, 32 nt, Homo Sapiens
cccuuaaaggucccaucuccaaaaacagucac

SEQ ID NO: 212573 - RNA, 32 nt, Homo Sapiens
caggagcggggccgagguacggcggcacggcu

SEQ ID NO: 212574 - RNA, 32 nt, Homo Sapiens
gucauuuguaaaagugauacaugacuguuaaa

SEQ ID NO: 212575 - RNA, 32 nt, Homo Sapiens
cucacucggcuuccaggacaccccgcucaggu

SEQ ID NO: 212576 - RNA, 32 nt, Homo Sapiens
guuccaagucuaaauguuaaccucaagcuacu

SEQ ID NO: 212577 - RNA, 32 nt, Homo Sapiens
uggguugguguuuaucuccucccagccuugag

SEQ ID NO: 212578 - RNA, 32 nt, Homo Sapiens
ggauaauaauauggggucuuguccuucaccuu

SEQ ID NO: 212579 - RNA, 32 nt, Homo Sapiens
aaaaauaaauguuuuggggguguucuguuuuc

SEQ ID NO: 212580 - RNA, 32 nt, Homo Sapiens
ggcccugacgggcgucucgccaugcugcuccu

SEQ ID NO: 212581 - RNA, 32 nt, Homo Sapiens
cgugcggcgggccagcugggcugcccgguucc

SEQ ID NO: 212582 - RNA, 32 nt, Homo Sapiens
cuaaaauguuuuuauguuagcacugauaguug

SEQ ID NO: 212583 - RNA, 32 nt, Homo Sapiens
cugugguugugggcgccggacaaguccaaggc

SEQ ID NO: 212584 - RNA, 32 nt, Homo Sapiens
accacuuuuugcagcuuucucuaguucaaguu

SEQ ID NO: 212585 - RNA, 32 nt, Homo Sapiens
uguaucuaaacacaauuugcuacacaagucac

SEQ ID NO: 212586 - RNA, 27 nt, Homo Sapiens
uagaaccaugaauucuggucacauucc

SEQ ID NO: 212587 - RNA, 32 nt, Homo Sapiens
agcugcccaucccagucccucgccgucccucc

SEQ ID NO: 212588 - RNA, 32 nt, Homo Sapiens
guggcugagagggguccugggguguuucagac

SEQ ID NO: 212589 - RNA, 30 nt, Homo Sapiens
ugcgugcacgcccugccgccgccccgcaga

SEQ ID NO: 212590 - RNA, 32 nt, Homo Sapiens
aaagccuagaaauggacgacuugaaauaugga

SEQ ID NO: 212591 - RNA, 32 nt, Homo Sapiens
uggaauauugacaauauuagauaauauuaaga

SEQ ID NO: 212592 - RNA, 32 nt, Homo Sapiens
uaaccucucugcagcauuuuacacuuacuggg

SEQ ID NO: 212593 - RNA, 32 nt, Homo Sapiens
gcacaccccggugucugugcccgggaaagaug

SEQ ID NO: 212594 - RNA, 32 nt, Homo Sapiens
aaaaccuccagauuauaguguggcagugcaga

SEQ ID NO: 212595 - RNA, 32 nt, Homo Sapiens
uaucucuggggguggggacaggggcgggggca

SEQ ID NO: 212596 - RNA, 30 nt, Homo Sapiens
uuggcuucagggaggaccuagcagacguug

SEQ ID NO: 212597 - RNA, 32 nt, Homo Sapiens
gugaaccagaucugggccuuugaggguggguc

SEQ ID NO: 212598 - RNA, 32 nt, Homo Sapiens
ccauccagccccagcguguggcguucuggcuc

SEQ ID NO: 212599 - RNA, 32 nt, Homo Sapiens
gcggugguggcccagggcugccuccuucccug

SEQ ID NO: 212600 - RNA, 32 nt, Homo Sapiens
ucccagcccucuccuccuguuccuccuguagc

SEQ ID NO: 212601 - RNA, 32 nt, Homo Sapiens
gacuucaguccccugagcaaaaucacaauaau

SEQ ID NO: 212602 - RNA, 32 nt, Homo Sapiens
aaacauuuugauaaaauuuuuuccuguuaaaa

SEQ ID NO: 212603 - RNA, 32 nt, Homo Sapiens
cucaagcccggaggagcucccaggcgcacagg

SEQ ID NO: 212604 - RNA, 32 nt, Homo Sapiens
caaauaagggaagggaaaaaugcuuuucuauu

SEQ ID NO: 212605 - RNA, 32 nt, Homo Sapiens
gcgcccucgcugcgcuccucccggcccgagcc

SEQ ID NO: 212606 - RNA, 32 nt, Homo Sapiens
acuguguuauauuuuuaaauccuuuaaauaaa

SEQ ID NO: 212607 - RNA, 32 nt, Homo Sapiens
ugccugguugggcuuccuggggccaguguugc

SEQ ID NO: 212608 - RNA, 30 nt, Homo Sapiens
gcgcggaggaagcgcuggggucccggaggg

SEQ ID NO: 212609 - RNA, 32 nt, Homo Sapiens
ugcacaucgaagguggggugggaccaggcugc

SEQ ID NO: 212610 - RNA, 32 nt, Homo Sapiens
uugccucccccaaaagaauuucauauuauuug

SEQ ID NO: 212611 - RNA, 32 nt, Homo Sapiens
acucgccuccgcagcgcuggccugcagggauu

SEQ ID NO: 212612 - RNA, 32 nt, Homo Sapiens
cuauaacugaggugggggcugugcugguccag

SEQ ID NO: 212613 - RNA, 32 nt, Homo Sapiens
aaauggccaucauaugcuuuuaaucuuuguuu

SEQ ID NO: 212614 - RNA, 32 nt, Homo Sapiens
ucaagacuaauagccaagguuaagaacgugca

SEQ ID NO: 212615 - RNA, 32 nt, Homo Sapiens
gcugugguauugcauagccuugcuuucuugaa

SEQ ID NO: 212616 - RNA, 32 nt, Homo Sapiens
ccagcugucuacuggcagacauuggugagaaa

SEQ ID NO: 212617 - RNA, 32 nt, Homo Sapiens
cuguuuccuccucccccgccucuuccaguuca

SEQ ID NO: 212618 - RNA, 32 nt, Homo Sapiens
gcaggggcuccggccgccuccucggucagguc

SEQ ID NO: 212619 - RNA, 32 nt, Homo Sapiens
caacccccggcaggagcuuucaggcucugguc

SEQ ID NO: 212620 - RNA, 32 nt, Homo Sapiens
agauucccgcggggcgccgggcugcuauucuu

SEQ ID NO: 212621 - RNA, 32 nt, Homo Sapiens
aaaagaagcugauuuugaaacugcuuaauggu

SEQ ID NO: 212622 - RNA, 32 nt, Homo Sapiens
cagcaccuuugauaaccucucuccauccuggg

SEQ ID NO: 212623 - RNA, 32 nt, Homo Sapiens
ugccuauaaucccagcacuuugagaggccaag

SEQ ID NO: 212624 - RNA, 32 nt, Homo Sapiens
acuuagaaaaauaugucauguauuuuacauuu

SEQ ID NO: 212625 - RNA, 32 nt, Homo Sapiens
cuaguaugcccuguaauuuuucugggaagucc

SEQ ID NO: 212626 - RNA, 32 nt, Homo Sapiens
uggccggcgggggucacgaggcuucguagugg

SEQ ID NO: 212627 - RNA, 32 nt, Homo Sapiens
augguaggaacccuguucuacugcaaaacacu

SEQ ID NO: 212628 - RNA, 32 nt, Homo Sapiens
aaaaauaaaagugaaaaaccuccaucaaccag

SEQ ID NO: 212629 - RNA, 32 nt, Homo Sapiens
ucaguuccuggcgaagccucucuucuagguuu

SEQ ID NO: 212630 - RNA, 30 nt, Homo Sapiens
guggccugagucccucggccggcgcgcagg

SEQ ID NO: 212631 - RNA, 32 nt, Homo Sapiens
gucaaacuuuaaaauuuauauuaauuugcaaa

SEQ ID NO: 212632 - RNA, 32 nt, Homo Sapiens
gucuuuugcaaacauuuuuguaccuuguuauu

SEQ ID NO: 212633 - RNA, 32 nt, Homo Sapiens
gugucucaaaaucaaaaacaaacaaacaaaaa

SEQ ID NO: 212634 - RNA, 32 nt, Homo Sapiens
cugcuuccacgugagucagggauggucggcug

SEQ ID NO: 212635 - RNA, 32 nt, Homo Sapiens
aguggcgagcccagcugcccagcccugccccc

SEQ ID NO: 212636 - RNA, 32 nt, Homo Sapiens
gcugggcuguuaccgggccacccccucugaag

SEQ ID NO: 212637 - RNA, 32 nt, Homo Sapiens
uaucacagaaacaaaauaaucaauauagguaa

SEQ ID NO: 212638 - RNA, 32 nt, Homo Sapiens
acugcauguuuguguccccccccaaaguuuau

SEQ ID NO: 212639 - RNA, 32 nt, Homo Sapiens
ucaacucugaaauuauuuccuguuguuucuuc

SEQ ID NO: 212640 - RNA, 32 nt, Homo Sapiens
uccgccguccccagcccugccucucccugggc

SEQ ID NO: 212641 - RNA, 32 nt, Homo Sapiens
augaaggcuagcuggcgaugcugcuggugacg

SEQ ID NO: 212642 - RNA, 32 nt, Homo Sapiens
uuccugcccaccgcauacccuggcgccucacu

SEQ ID NO: 212643 - RNA, 32 nt, Homo Sapiens
ggcaucuggaauugacacaccauuacauucug

SEQ ID NO: 212644 - RNA, 32 nt, Homo Sapiens
ccucaaaggccccuccccccagccuuccaagu

SEQ ID NO: 212645 - RNA, 32 nt, Homo Sapiens
gaagaauggaacccuccuccuacaggaggagc

SEQ ID NO: 212646 - RNA, 32 nt, Homo Sapiens
auauauacaguuucucuaauaagggacuuaua

SEQ ID NO: 212647 - RNA, 32 nt, Homo Sapiens
aauuguuuaaauauugcuuaucuugaggccag

SEQ ID NO: 212648 - RNA, 32 nt, Homo Sapiens
guccucucggcugaagacuggaggaagugaac

SEQ ID NO: 212649 - RNA, 32 nt, Homo Sapiens
aucacuaaucaucagggaaauacauaucaaaa

SEQ ID NO: 212650 - RNA, 27 nt, Homo Sapiens
cgaucugccugcuucagccucccagag

SEQ ID NO: 212651 - RNA, 32 nt, Homo Sapiens
uuagguucgccugcggacucggugcaguggaa

SEQ ID NO: 212652 - RNA, 32 nt, Homo Sapiens
ugaccucuguuguccuccccuugggcggcuga

SEQ ID NO: 212653 - RNA, 32 nt, Homo Sapiens
ucccugcucagccccagcagugcgguggaggc

SEQ ID NO: 212654 - RNA, 32 nt, Homo Sapiens
uuggauuagugaacuaaguuauuguuaauuau

SEQ ID NO: 212655 - RNA, 32 nt, Homo Sapiens
aagugaucaauggaaucuguucaccaaaccaa

SEQ ID NO: 212656 - RNA, 32 nt, Homo Sapiens
ccccgccgagaccccacagggaccucagucac

SEQ ID NO: 212657 - RNA, 32 nt, Homo Sapiens
ggaagagcuauacuacaaaauuccuggacaga

SEQ ID NO: 212658 - RNA, 32 nt, Homo Sapiens
aaauaugaauuaacacccauguugcaugcauu

SEQ ID NO: 212659 - RNA, 32 nt, Homo Sapiens
uugcugagggggaugaagaaaaggggaccugc

SEQ ID NO: 212660 - RNA, 32 nt, Homo Sapiens
gaugagaguacacgguuguuaugaacaaauga

SEQ ID NO: 212661 - RNA, 32 nt, Homo Sapiens
gcucuguugcugugugaauccauuagauuuac

SEQ ID NO: 212662 - RNA, 32 nt, Homo Sapiens
uugugcgucuuauguuuguauaguguguuguc

SEQ ID NO: 212663 - RNA, 32 nt, Homo Sapiens
gugcauucauauauucuuguaaaaggugucug

SEQ ID NO: 212664 - RNA, 32 nt, Homo Sapiens
ccucuccucggagccgaccccuggguagcaag

SEQ ID NO: 212665 - RNA, 32 nt, Homo Sapiens
guaccugaauggagaaacguagucuuaccucg

SEQ ID NO: 212666 - RNA, 32 nt, Homo Sapiens
ggagagaagaucugcgacccuucggcaaaccc

SEQ ID NO: 212667 - RNA, 32 nt, Homo Sapiens
agaauuuccagaaggucuuuaaugagcugcug

SEQ ID NO: 212668 - RNA, 32 nt, Homo Sapiens
caaggaggaagaaggagaaguugugcuguugg

SEQ ID NO: 212669 - RNA, 32 nt, Homo Sapiens
gccgugcaacggcgagggcgccggcggggcau

SEQ ID NO: 212670 - RNA, 32 nt, Homo Sapiens
uccaguguugaggcagaagagggugccugugu

SEQ ID NO: 212671 - RNA, 32 nt, Homo Sapiens
uaauacacaugaacacauuaggaaggaguaug

SEQ ID NO: 212672 - RNA, 32 nt, Homo Sapiens
aacagcagcagcagcuccucauuggacuccau

SEQ ID NO: 212673 - RNA, 31 nt, Homo Sapiens
gcggccaugggggcguccgcgcggcugcugc

SEQ ID NO: 212674 - RNA, 32 nt, Homo Sapiens
guuuuuccuuaugguacuacuuucucaggugc

SEQ ID NO: 212675 - RNA, 32 nt, Homo Sapiens
cuggcucuugucaccacaaaaggcauagacca

SEQ ID NO: 212676 - RNA, 31 nt, Homo Sapiens
ucuuccuauugaguuugcuuggaaugcugac

SEQ ID NO: 212677 - RNA, 32 nt, Homo Sapiens
gcagaggggaaggcggccggcuggggaugggc

SEQ ID NO: 212678 - RNA, 32 nt, Homo Sapiens
ucggaggaagcuuggaggaaacucagauuacu

SEQ ID NO: 212679 - RNA, 32 nt, Homo Sapiens
gcguguaccugacuucagcuguggcaccaccc

SEQ ID NO: 212680 - RNA, 32 nt, Homo Sapiens
aauugaugcuaaauauaucuuacauuugaauu

SEQ ID NO: 212681 - RNA, 32 nt, Homo Sapiens
ccguugcccucccaggccacuagguuuugacu

SEQ ID NO: 212682 - RNA, 32 nt, Homo Sapiens
ugccuacaggccagcucugugccaagggcaac

SEQ ID NO: 212683 - RNA, 32 nt, Homo Sapiens
ccuccucaccccaccccaggcccuuggugucc

SEQ ID NO: 212684 - RNA, 32 nt, Homo Sapiens
guugucuugauccaugaaccagaaccacaggg

SEQ ID NO: 212685 - RNA, 32 nt, Homo Sapiens
cuguggacacgcccgcgucccacagccaugac

SEQ ID NO: 212686 - RNA, 32 nt, Homo Sapiens
acaaaauguaugggccgauuuauuuucccauu

SEQ ID NO: 212687 - RNA, 32 nt, Homo Sapiens
aguguaauuuugguuuaugacucuuaaccccc

SEQ ID NO: 212688 - RNA, 32 nt, Homo Sapiens
gaguggcuccguuugccuccccgcuuugguga

SEQ ID NO: 212689 - RNA, 32 nt, Homo Sapiens
aaagcgggaagagcuucuuauucauguuauca

SEQ ID NO: 212690 - RNA, 32 nt, Homo Sapiens
guauuauacucuacuuugaguuuggacaucac

SEQ ID NO: 212691 - RNA, 32 nt, Homo Sapiens
ugcaaacuaggaugcuacauaggauucuggua

SEQ ID NO: 212692 - RNA, 32 nt, Homo Sapiens
aaugcauagacuuauacccagcccugcacugu

SEQ ID NO: 212693 - RNA, 32 nt, Homo Sapiens
aauugagaucuaaauuauuaaacgaguuuuug

SEQ ID NO: 212694 - RNA, 32 nt, Homo Sapiens
acaaauugaauauuccaagccaaaaaaggaag

SEQ ID NO: 212695 - RNA, 32 nt, Homo Sapiens
cuuguguuuuguuugacauauuaguaaguugc

SEQ ID NO: 212696 - RNA, 32 nt, Homo Sapiens
uggccacuucccuuucucaacuuuuaccuacu

SEQ ID NO: 212697 - RNA, 32 nt, Homo Sapiens
aaaguggccuagauugaggugauucagauagg

SEQ ID NO: 212698 - RNA, 32 nt, Homo Sapiens
auagaucacagcagaauguuucaaauucucca

SEQ ID NO: 212699 - RNA, 32 nt, Homo Sapiens
gcucacaugauuauggaggcugccaaguccca

SEQ ID NO: 212700 - RNA, 32 nt, Homo Sapiens
gacguucuuuuuagaagcaguucuuccagcuc

SEQ ID NO: 212701 - RNA, 32 nt, Homo Sapiens
uaucagaagaggagaagacacacacacaggga

SEQ ID NO: 212702 - RNA, 32 nt, Homo Sapiens
uuuugagacucgcuuugucacccaggcuggag

SEQ ID NO: 212703 - RNA, 31 nt, Homo Sapiens
cccugguagccagcucuccagaauuacuugu

SEQ ID NO: 212704 - RNA, 32 nt, Homo Sapiens
gccaggcucacgggacagcugcaccucucagc

SEQ ID NO: 212705 - RNA, 32 nt, Homo Sapiens
gggacaacaaaguuauaugauuaaccaccugc

SEQ ID NO: 212706 - RNA, 32 nt, Homo Sapiens
uccuggcggauugucaguggcuucgccccgag

SEQ ID NO: 212707 - RNA, 32 nt, Homo Sapiens
ccaagaaugagaaaaauaaugaauucuuagcu

SEQ ID NO: 212708 - RNA, 32 nt, Homo Sapiens
agccacugcccagccgcacuccaggcaagggc

SEQ ID NO: 212709 - RNA, 32 nt, Homo Sapiens
auggaucauggccgugacugcaugucaaggag

SEQ ID NO: 212710 - RNA, 32 nt, Homo Sapiens
ucccccaacccccacacccaugcagaacuccc

SEQ ID NO: 212711 - RNA, 32 nt, Homo Sapiens
augagcccuuucccuuauguccaguuuaagau

SEQ ID NO: 212712 - RNA, 32 nt, Homo Sapiens
uagccaaaguggguguucaauaaagaaccauu

SEQ ID NO: 212713 - RNA, 32 nt, Homo Sapiens
uguggagcagugcccaucccagcccauuucug

SEQ ID NO: 212714 - RNA, 32 nt, Homo Sapiens
cugagaccaugcuucagugcugucccacaucu

SEQ ID NO: 212715 - RNA, 31 nt, Homo Sapiens
ggagcugagcacugccuagccugggccagag

SEQ ID NO: 212716 - RNA, 32 nt, Homo Sapiens
gacucggcgccugacugcugggaccaggcgga

SEQ ID NO: 212717 - RNA, 32 nt, Homo Sapiens
gucuauggcaacacugcucuccauaugcuguc

SEQ ID NO: 212718 - RNA, 28 nt, Homo Sapiens
aucuauuuguggugaauguguuuuuuaa

SEQ ID NO: 212719 - RNA, 32 nt, Homo Sapiens
ugucuucaguggucuuccuguguggcucaagg

SEQ ID NO: 212720 - RNA, 31 nt, Homo Sapiens
acggugucugcagcgaggcuaacugauggga

SEQ ID NO: 212721 - RNA, 32 nt, Homo Sapiens
uuuuuuccaaguccuuuuuuuuauuguuaaaa

SEQ ID NO: 212722 - RNA, 32 nt, Homo Sapiens
gaaacaucuucaguccacuuuacaacaaagag

SEQ ID NO: 212723 - RNA, 32 nt, Homo Sapiens
guucucccaagccaucaucuugguagaaaaug

SEQ ID NO: 212724 - RNA, 32 nt, Homo Sapiens
aguuauguaugauaaaauuuuccuuggaugca

SEQ ID NO: 212725 - RNA, 32 nt, Homo Sapiens
ucugugagcucugacacaucugaaaaaguaau

SEQ ID NO: 212726 - RNA, 30 nt, Homo Sapiens
acucuggacuccggauggcugccgcacgcc

SEQ ID NO: 212727 - RNA, 32 nt, Homo Sapiens
cuuugcccaagccuagucccguuucaucaucc

SEQ ID NO: 212728 - RNA, 32 nt, Homo Sapiens
ugcucccugccagcaccuccggccagccccgc

SEQ ID NO: 212729 - RNA, 32 nt, Homo Sapiens
ugccauugaaaauuauuaaucagaagaaaauu

SEQ ID NO: 212730 - RNA, 32 nt, Homo Sapiens
gccgggcuugggggcggggagcaggcggugca

SEQ ID NO: 212731 - RNA, 32 nt, Homo Sapiens
caccugccggccccggccgccccuccucguga

SEQ ID NO: 212732 - RNA, 32 nt, Homo Sapiens
ggguuggagcagcuggagcuccuuggaggcag

SEQ ID NO: 212733 - RNA, 32 nt, Homo Sapiens
gggagcagcacaugcgcgugcuguggcaggag

SEQ ID NO: 212734 - RNA, 32 nt, Homo Sapiens
gggauagaggggcugcagggccacuggaagga

SEQ ID NO: 212735 - RNA, 32 nt, Homo Sapiens
caaugcagaaaagaagggguaggguccaccau

SEQ ID NO: 212736 - RNA, 32 nt, Homo Sapiens
acagccagugauuguaguuucauguuaauaug

SEQ ID NO: 212737 - RNA, 32 nt, Homo Sapiens
ugagcggccccagucgcggcgccgggggcgcu

SEQ ID NO: 212738 - RNA, 32 nt, Homo Sapiens
gaagaaacuaaauguaugucaguauggaagua

SEQ ID NO: 212739 - RNA, 32 nt, Homo Sapiens
cacccuagcccucucccucuaggcucugccuu

SEQ ID NO: 212740 - RNA, 32 nt, Homo Sapiens
aggggagggcacggcgccgcuugcuuggccug

SEQ ID NO: 212741 - RNA, 32 nt, Homo Sapiens
gcugcuaagaauccaaccaacagccucacuua

SEQ ID NO: 212742 - RNA, 32 nt, Homo Sapiens
ccuugugccaccugggccagcaaagaggaggg

SEQ ID NO: 212743 - RNA, 31 nt, Homo Sapiens
agaugugcaaggucuucugucuuccagcuug

SEQ ID NO: 212744 - RNA, 32 nt, Homo Sapiens
guccuuguacaagccaucaaggaggcaaagga

SEQ ID NO: 212745 - RNA, 32 nt, Homo Sapiens
gggaagacuugggugcacagccaggcgagaag

SEQ ID NO: 212746 - RNA, 32 nt, Homo Sapiens
ccuccgcgcucgccugccagcucccucgccgc

SEQ ID NO: 212747 - RNA, 32 nt, Homo Sapiens
cuggcggcucguggggguguugggguccgcag

SEQ ID NO: 212748 - RNA, 29 nt, Homo Sapiens
uccuaugugacuuuagugcaggaagaacu

SEQ ID NO: 212749 - RNA, 32 nt, Homo Sapiens
aaguggggagaauguuuggggaugugucuggg

SEQ ID NO: 212750 - RNA, 32 nt, Homo Sapiens
uccauauuuuaaaaacuguauucauaaaaaga

SEQ ID NO: 212751 - RNA, 32 nt, Homo Sapiens
uaaauguaaaaauauuuguaaaaugaaaugcc

SEQ ID NO: 212752 - RNA, 32 nt, Homo Sapiens
ucuaaggauggggggcugguugccaggggagc

SEQ ID NO: 212753 - RNA, 32 nt, Homo Sapiens
acuccaccggcuggcguccgcggcgcuuggcg

SEQ ID NO: 212754 - RNA, 32 nt, Homo Sapiens
accuggguggagcccacagaccagcccccacc

SEQ ID NO: 212755 - RNA, 32 nt, Homo Sapiens
ccgagcccgccuucccugcaccaugcucauag

SEQ ID NO: 212756 - RNA, 32 nt, Homo Sapiens
agggaaagucuacuguaucugaacaagcugau

SEQ ID NO: 212757 - RNA, 32 nt, Homo Sapiens
ccuaucaugcuucaugugucauuccaagguuu

SEQ ID NO: 212758 - RNA, 32 nt, Homo Sapiens
ccagcugcugcuagccucugugguuguacauc

SEQ ID NO: 212759 - RNA, 32 nt, Homo Sapiens
gcgaggugccuggccugccauguaggggcucg

SEQ ID NO: 212760 - RNA, 32 nt, Homo Sapiens
uucaacuugaguuuacaaaaggauguguauuc

SEQ ID NO: 212761 - RNA, 32 nt, Homo Sapiens
aggcuaagacacacuccccacuucacuuucuu

SEQ ID NO: 212762 - RNA, 31 nt, Homo Sapiens
guccucugcgcaccacccugaguuggauccu

SEQ ID NO: 212763 - RNA, 32 nt, Homo Sapiens
gccugcagcuccgccauggcuccuaaaggcag

SEQ ID NO: 212764 - RNA, 32 nt, Homo Sapiens
augcaccaugucaucaugugucucuagccagc

SEQ ID NO: 212765 - RNA, 32 nt, Homo Sapiens
aagauuuuuuauguauaaaacccauuaaaaau

SEQ ID NO: 212766 - RNA, 32 nt, Homo Sapiens
cuugauaugcuucagagaauuuaggcaaacac

SEQ ID NO: 212767 - RNA, 32 nt, Homo Sapiens
gacacaauuucauguuuuugcacuaaaaaccu

SEQ ID NO: 212768 - RNA, 32 nt, Homo Sapiens
aucucuauuccccacccuccccuucccagggc

SEQ ID NO: 212769 - RNA, 31 nt, Homo Sapiens
ucuccagcaaacugccugccccuauuguaag

SEQ ID NO: 212770 - RNA, 32 nt, Homo Sapiens
auagagagcuauuuaauggccggcuggaaaug

SEQ ID NO: 212771 - RNA, 32 nt, Homo Sapiens
auuuuccgucacuuaaauuuguucuuuguuua

SEQ ID NO: 212772 - RNA, 32 nt, Homo Sapiens
cccaugguguuaauaaaguugccaaagaagau

SEQ ID NO: 212773 - RNA, 32 nt, Homo Sapiens
uauuaggaaaauuuagauugaaccuuuccucu

SEQ ID NO: 212774 - RNA, 32 nt, Homo Sapiens
uuuucaaauuuaauguauauguguauauaagg

SEQ ID NO: 212775 - RNA, 32 nt, Homo Sapiens
ugcgcggccccggcccgggagcugccgaaccc

SEQ ID NO: 212776 - RNA, 31 nt, Homo Sapiens
uauccacgucuggcugugccaaauggucugg

SEQ ID NO: 212777 - RNA, 32 nt, Homo Sapiens
cuuuaugcacaaaacuaaaugccauugaucau

SEQ ID NO: 212778 - RNA, 32 nt, Homo Sapiens
accccagcgucccccgccccagccagcugauu

SEQ ID NO: 212779 - RNA, 32 nt, Homo Sapiens
acgggggccugccuggccuggaggauggggac

SEQ ID NO: 212780 - RNA, 32 nt, Homo Sapiens
uccccggagcagcuccuccagcucagucucca

SEQ ID NO: 212781 - RNA, 32 nt, Homo Sapiens
ggcucgccuccagccuccugcgcuccgguacc

SEQ ID NO: 212782 - RNA, 31 nt, Homo Sapiens
agaccugagccccagagcaggccuccuuccc

SEQ ID NO: 212783 - RNA, 32 nt, Homo Sapiens
acuuccucaaaaugaagugcuauuuucuuauu

SEQ ID NO: 212784 - RNA, 30 nt, Homo Sapiens
gcacuugucugugcuuggggagcagcuggc

SEQ ID NO: 212785 - RNA, 32 nt, Homo Sapiens
gcugugcucccugucucuucucuucucuaaag

SEQ ID NO: 212786 - RNA, 32 nt, Homo Sapiens
auagggucugggcucuggauuuuuuagguccu

SEQ ID NO: 212787 - RNA, 32 nt, Homo Sapiens
caccacgcccagcccauaauuuauugauuuuu

SEQ ID NO: 212788 - RNA, 32 nt, Homo Sapiens
uguuaccccuccccauuccccaggcccugggc

SEQ ID NO: 212789 - RNA, 32 nt, Homo Sapiens
agaagaacauugugaaacucccugcccuguuc

SEQ ID NO: 212790 - RNA, 32 nt, Homo Sapiens
gacccgccgcggcugcugccaccgccgccacc

SEQ ID NO: 212791 - RNA, 32 nt, Homo Sapiens
agacaauauaaaagccuugguagaauuaaaaa

SEQ ID NO: 212792 - RNA, 32 nt, Homo Sapiens
uuacucuguaucucuuuguacucuguaucuau

SEQ ID NO: 212793 - RNA, 32 nt, Homo Sapiens
ggccgcgccuggcugggugccucgguacuuga

SEQ ID NO: 212794 - RNA, 32 nt, Homo Sapiens
ccaacuuucuuacuacauccaucuuuucugug

SEQ ID NO: 212795 - RNA, 32 nt, Homo Sapiens
ugcauuuuauuaccauuucaaacuauuuuuua

SEQ ID NO: 212796 - RNA, 32 nt, Homo Sapiens
agcugccuggcacaggucccagccccucugca

SEQ ID NO: 212797 - RNA, 32 nt, Homo Sapiens
uccguccuccuccaggccgccgccccuucuga

SEQ ID NO: 212798 - RNA, 32 nt, Homo Sapiens
aauacauuguaagauuugacuugagguuuuug

SEQ ID NO: 212799 - RNA, 32 nt, Homo Sapiens
acugugaacucugugauucagaaucagaagca

SEQ ID NO: 212800 - RNA, 32 nt, Homo Sapiens
uugcuacugucaaccaaauaugcugcaagucu

SEQ ID NO: 212801 - RNA, 32 nt, Homo Sapiens
guuaauuuuccucaauuuuucuucuucuuccu

SEQ ID NO: 212802 - RNA, 32 nt, Homo Sapiens
cggcgccucccuccccgccgcccguggacucu

SEQ ID NO: 212803 - RNA, 32 nt, Homo Sapiens
gaaguaugacauaauauuucccauuggggaaa

SEQ ID NO: 212804 - RNA, 32 nt, Homo Sapiens
aaaauacuguucacacuuuauuaccaagcauc

SEQ ID NO: 212805 - RNA, 28 nt, Homo Sapiens
caugguuuugguaucaggaugaugcugg

SEQ ID NO: 212806 - RNA, 32 nt, Homo Sapiens
ggugguguggcaucacaggcccggggcaggga

SEQ ID NO: 212807 - RNA, 32 nt, Homo Sapiens
gacugguuagaggauuucuuucaaccuucaca

SEQ ID NO: 212808 - RNA, 32 nt, Homo Sapiens
gaggugucggcggcgaggcaaaggaaguuuca

SEQ ID NO: 212809 - RNA, 32 nt, Homo Sapiens
uagcauggccaucauuugaaugcuuguaaaug

SEQ ID NO: 212810 - RNA, 32 nt, Homo Sapiens
acuagaacaaaguuuuaguaagcugucugcua

SEQ ID NO: 212811 - RNA, 32 nt, Homo Sapiens
uuaccaccugaaacugcugcuucaaguucaga

SEQ ID NO: 212812 - RNA, 32 nt, Homo Sapiens
gaaaggagcuaccugcccuuuccugggcaugc

SEQ ID NO: 212813 - RNA, 32 nt, Homo Sapiens
augugccacaccuggcuaauuuuugugguuuu

SEQ ID NO: 212814 - RNA, 32 nt, Homo Sapiens
acacgaucucauuucuuccuuaccacaucccu

SEQ ID NO: 212815 - RNA, 32 nt, Homo Sapiens
cugccucucaacaaccucuuuggacucagugc

SEQ ID NO: 212816 - RNA, 28 nt, Homo Sapiens
uaacaguugucuaauaacguuucuuuaa

SEQ ID NO: 212817 - RNA, 32 nt, Homo Sapiens
cuuauugcacugauuuuuuuuaucaagucgua

SEQ ID NO: 212818 - RNA, 32 nt, Homo Sapiens
cugugaccaaaaugaagcuuguaacgacccau

SEQ ID NO: 212819 - RNA, 32 nt, Homo Sapiens
uuugcauuguuaaaaaugaugugugaaauaga

SEQ ID NO: 212820 - RNA, 32 nt, Homo Sapiens
ggcuggcacucacuucugcuucuggccaggcc

SEQ ID NO: 212821 - RNA, 32 nt, Homo Sapiens
ggucgcaacgacccgaugaucgaugauccaag

SEQ ID NO: 212822 - RNA, 32 nt, Homo Sapiens
gucuugggaaagggaugcaaucccugaaacca

SEQ ID NO: 212823 - RNA, 32 nt, Homo Sapiens
uggcuagcucucaucauuuuggcacuuccgac

SEQ ID NO: 212824 - RNA, 32 nt, Homo Sapiens
uguuuuauaugccgcugcuuugaaagagaacc

SEQ ID NO: 212825 - RNA, 32 nt, Homo Sapiens
gguaauuuauagaacaaauauuugauaagcuc

SEQ ID NO: 212826 - RNA, 32 nt, Homo Sapiens
gggcaaacaaaguggcaguggggaccagggug

SEQ ID NO: 212827 - RNA, 32 nt, Homo Sapiens
cgccggugagguaggggcgggaggcgggggga

SEQ ID NO: 212828 - RNA, 32 nt, Homo Sapiens
ccggagagagccguaggcaggaccccgggaca

SEQ ID NO: 212829 - RNA, 32 nt, Homo Sapiens
agaaaugcugguuuuucaguuuucaggagugg

SEQ ID NO: 212830 - RNA, 32 nt, Homo Sapiens
acuguccuaccuucuugcugaauugaucucuu

SEQ ID NO: 212831 - RNA, 32 nt, Homo Sapiens
cauaauucaaucacuuauaguuuccagaaacg

SEQ ID NO: 212832 - RNA, 32 nt, Homo Sapiens
cuccggaugugccugcccacauugggggacag

SEQ ID NO: 212833 - RNA, 32 nt, Homo Sapiens
cagaggugaccuccuccuccaggaauggaggu

SEQ ID NO: 212834 - RNA, 32 nt, Homo Sapiens
ggcacgggccccagacccaucuccugcaccac

SEQ ID NO: 212835 - RNA, 32 nt, Homo Sapiens
auauaaaaagaggaaauugagacacagagaca

SEQ ID NO: 212836 - RNA, 32 nt, Homo Sapiens
uuuuaaaaaaauuuuuauaaauuacuaucugu

SEQ ID NO: 212837 - RNA, 32 nt, Homo Sapiens
ggaaauacccucaaaacuaacuuguuuacaac

SEQ ID NO: 212838 - RNA, 32 nt, Homo Sapiens
agcgccagcgggaccggcuggaggaagagcag

SEQ ID NO: 212839 - RNA, 32 nt, Homo Sapiens
acgcaaagaaauuggaaaacaugaugaaaauu

SEQ ID NO: 212840 - RNA, 32 nt, Homo Sapiens
ccugucauuucccugcugggcucucacaucua

SEQ ID NO: 212841 - RNA, 32 nt, Homo Sapiens
cauaugaaaauaaccauaguacaggaugauuu

SEQ ID NO: 212842 - RNA, 32 nt, Homo Sapiens
uuuggacaaggugcugaagugcccgauggaua

SEQ ID NO: 212843 - RNA, 32 nt, Homo Sapiens
acuaacucaagccccagccucuuuccacacuc

SEQ ID NO: 212844 - RNA, 32 nt, Homo Sapiens
gaaugagaccccaucucaaaaaaaaaaaaaaa

SEQ ID NO: 212845 - RNA, 32 nt, Homo Sapiens
gcggaaagacucccaaaaugugccaagaauuu

SEQ ID NO: 212846 - RNA, 32 nt, Homo Sapiens
uccccuucuguccagggcccccugccugcucu

SEQ ID NO: 212847 - RNA, 32 nt, Homo Sapiens
acacggagcacaggucucugcugcugaugaag

SEQ ID NO: 212848 - RNA, 32 nt, Homo Sapiens
gccccagaaaucacuguguuuucagcucagcg

SEQ ID NO: 212849 - RNA, 32 nt, Homo Sapiens
aaaucccuccaagugauucuuuuacaucccag

SEQ ID NO: 212850 - RNA, 32 nt, Homo Sapiens
ccccucgcaaugcuccucucucugucccaccc

SEQ ID NO: 212851 - RNA, 31 nt, Homo Sapiens
uugcucuucaaugauuaauugaggggauguu

SEQ ID NO: 212852 - RNA, 32 nt, Homo Sapiens
ccaggcugccucucaucuccacccacugacug

SEQ ID NO: 212853 - RNA, 32 nt, Homo Sapiens
ucuacgaaucuaagauccauggagcuagaauu

SEQ ID NO: 212854 - RNA, 32 nt, Homo Sapiens
cgcccggggccgggaugcagggcgcgcggaca

SEQ ID NO: 212855 - RNA, 32 nt, Homo Sapiens
gaagaacugcugccagguggguccuacagcag

SEQ ID NO: 212856 - RNA, 32 nt, Homo Sapiens
uguguuuacaguguuagauagguuaucuaacu

SEQ ID NO: 212857 - RNA, 32 nt, Homo Sapiens
agcccaaacaggaaaaaacaaacaaacaaaca

SEQ ID NO: 212858 - RNA, 32 nt, Homo Sapiens
gcugugcccaaguuguggugcugacaaagcuu

SEQ ID NO: 212859 - RNA, 32 nt, Homo Sapiens
agacuugggaaaauguuucuggagaggcuuuc

SEQ ID NO: 212860 - RNA, 32 nt, Homo Sapiens
auuauggagggugagaaguuccacaacauccc

SEQ ID NO: 212861 - RNA, 32 nt, Homo Sapiens
gccuccgaguagcugggaccacaggggcccgg

SEQ ID NO: 212862 - RNA, 32 nt, Homo Sapiens
aguggagcgaucucggcucauugcaaccuccg

SEQ ID NO: 212863 - RNA, 32 nt, Homo Sapiens
auccugcugggagcacgauuccggguguuucu

SEQ ID NO: 212864 - RNA, 32 nt, Homo Sapiens
gcaguaccucauuguuuacuuagcuuuuguac

SEQ ID NO: 212865 - RNA, 32 nt, Homo Sapiens
aagagaaaccugagggccacguaugcgccacg

SEQ ID NO: 212866 - RNA, 31 nt, Homo Sapiens
guuuugaaauaaaacuuauauagcaauuguu

SEQ ID NO: 212867 - RNA, 32 nt, Homo Sapiens
cuuugugugguaguucuaaauuuuaauugcac

SEQ ID NO: 212868 - RNA, 32 nt, Homo Sapiens
uccccgaccuugcugacuaggcacaugggacg

SEQ ID NO: 212869 - RNA, 32 nt, Homo Sapiens
augucagcucacguggccuuuaaaaaccuacu

SEQ ID NO: 212870 - RNA, 32 nt, Homo Sapiens
uuauaaaucauccuucaccauuuuauaucagu

SEQ ID NO: 212871 - RNA, 32 nt, Homo Sapiens
uugccauauaauuuauauuuaagaacuuuuua

SEQ ID NO: 212872 - RNA, 32 nt, Homo Sapiens
uccuuucaagacagaaagagacaggagacaug

SEQ ID NO: 212873 - RNA, 32 nt, Homo Sapiens
uagucgggcaaaccucuuguugaucauagucu

SEQ ID NO: 212874 - RNA, 30 nt, Homo Sapiens
gagcuugggcccgugcugaccagcccccaa

SEQ ID NO: 212875 - RNA, 32 nt, Homo Sapiens
ccaguagcugggacuacggggucgccacugca

SEQ ID NO: 212876 - RNA, 32 nt, Homo Sapiens
aggaaagacauguuuuucucuuuuaaaucucu

SEQ ID NO: 212877 - RNA, 32 nt, Homo Sapiens
uaaaagaacaacugcuuuuuuacaaugccccc

SEQ ID NO: 212878 - RNA, 32 nt, Homo Sapiens
auauuugaaaaccagguauccacacauagcac

SEQ ID NO: 212879 - RNA, 32 nt, Homo Sapiens
uucugcuucugaaugauucaauguugggagca

SEQ ID NO: 212880 - RNA, 32 nt, Homo Sapiens
ucccgcgugccgccaccuccccgcggacgcac

SEQ ID NO: 212881 - RNA, 32 nt, Homo Sapiens
aaaacaauauaaaguuguccagaauguauguc

SEQ ID NO: 212882 - RNA, 32 nt, Homo Sapiens
uaauuaagaacaaaaauugccaaaaauuucua

SEQ ID NO: 212883 - RNA, 32 nt, Homo Sapiens
gaaaaggcaaugaaaguaaccacaaaagugau

SEQ ID NO: 212884 - RNA, 32 nt, Homo Sapiens
agacauauauuuaaaaaguaacuaugcacagc

SEQ ID NO: 212885 - RNA, 32 nt, Homo Sapiens
agaguucaaggaagaagcaaaauaucacaucu

SEQ ID NO: 212886 - RNA, 32 nt, Homo Sapiens
gaggcugagugggcuucuggcuccuagaacaa

SEQ ID NO: 212887 - RNA, 32 nt, Homo Sapiens
ccagagguagcuuucucagagccccuuggugg

SEQ ID NO: 212888 - RNA, 32 nt, Homo Sapiens
gugauggcacggcccacacuggguuugaaggg

SEQ ID NO: 212889 - RNA, 32 nt, Homo Sapiens
ggccagcugaagcccuaaaggcacagaugagu

SEQ ID NO: 212890 - RNA, 32 nt, Homo Sapiens
agcaaagaauauuuuuaauguggauaucuaau

SEQ ID NO: 212891 - RNA, 32 nt, Homo Sapiens
gagaaggggcuuugugaccagaaagcuucauc

SEQ ID NO: 212892 - RNA, 31 nt, Homo Sapiens
auuucuaaugaaauaaaauguauuuaugacc

SEQ ID NO: 212893 - RNA, 32 nt, Homo Sapiens
cauuuccugucuacauucuccucccuagugca

SEQ ID NO: 212894 - RNA, 32 nt, Homo Sapiens
ucucuuuaaaggaaaggaaagagggagccaaa

SEQ ID NO: 212895 - RNA, 32 nt, Homo Sapiens
ggcuuuauauccucugggccuggguuuccuga

SEQ ID NO: 212896 - RNA, 32 nt, Homo Sapiens
ugggucaaggaccuggugguuuuacagagaag

SEQ ID NO: 212897 - RNA, 32 nt, Homo Sapiens
guaaaaagucuguuaaugcacauccuguggga

SEQ ID NO: 212898 - RNA, 32 nt, Homo Sapiens
ucuacuaaaaauacaaaaauugcccaggcaug

SEQ ID NO: 212899 - RNA, 32 nt, Homo Sapiens
ggcagcguuucccagacaccccucugcuaggc

SEQ ID NO: 212900 - RNA, 32 nt, Homo Sapiens
gacagaccccuuggcuuuugcuuggcagagag

SEQ ID NO: 212901 - RNA, 32 nt, Homo Sapiens
cgacuggcgggugggaguggaggcaccggcug

SEQ ID NO: 212902 - RNA, 32 nt, Homo Sapiens
aaaucaacugucagaauuaccucaggaaauag

SEQ ID NO: 212903 - RNA, 29 nt, Homo Sapiens
gguaauggcaggcguucggucacugaggu

SEQ ID NO: 212904 - RNA, 30 nt, Homo Sapiens
aguggagauggcggcggcggcggcucaggg

SEQ ID NO: 212905 - RNA, 32 nt, Homo Sapiens
agugguauaugaugaagauucaccuuaucaaa

SEQ ID NO: 212906 - RNA, 32 nt, Homo Sapiens
ugaacuauaaugguucucauuugcugauaaau

SEQ ID NO: 212907 - RNA, 32 nt, Homo Sapiens
uagggcggacgaagcaggagccgcggggcugg

SEQ ID NO: 212908 - RNA, 32 nt, Homo Sapiens
cugccccgccccauuaaaacaguucuuuuguu

SEQ ID NO: 212909 - RNA, 32 nt, Homo Sapiens
aacuaaucuuaacccugugcugucagauaccc

SEQ ID NO: 212910 - RNA, 32 nt, Homo Sapiens
acaccagcuccaagugggcguuccucggcguc

SEQ ID NO: 212911 - RNA, 32 nt, Homo Sapiens
gagauuuagaaaccaguguguggugccagcuc

SEQ ID NO: 212912 - RNA, 32 nt, Homo Sapiens
cugacaggccgcggcugucuguguguccuucu

SEQ ID NO: 212913 - RNA, 32 nt, Homo Sapiens
cuugucuggcaaacaggagaugcuggauuuca

SEQ ID NO: 212914 - RNA, 32 nt, Homo Sapiens
aucucccgacagagcuggaaaugcauugcacu

SEQ ID NO: 212915 - RNA, 32 nt, Homo Sapiens
cuccugugaacaguuuuucacuuuugaugaaa

SEQ ID NO: 212916 - RNA, 32 nt, Homo Sapiens
ugcacacugucuuuuugccaacaccucagccc

SEQ ID NO: 212917 - RNA, 32 nt, Homo Sapiens
gguccucucccgcucccucugcuccaccagga

SEQ ID NO: 212918 - RNA, 32 nt, Homo Sapiens
uugaagagaaugccgcgugcuuucuccugacu

SEQ ID NO: 212919 - RNA, 32 nt, Homo Sapiens
guguguucuguauggguccagcugcguuucca

SEQ ID NO: 212920 - RNA, 32 nt, Homo Sapiens
uccccacccccaccccagcagugcucucuggc

SEQ ID NO: 212921 - RNA, 32 nt, Homo Sapiens
cagggacaugccucgucaggguuuggcaagaa

SEQ ID NO: 212922 - RNA, 32 nt, Homo Sapiens
gugauggugggauucuaacaucaacagagcaa

SEQ ID NO: 212923 - RNA, 32 nt, Homo Sapiens
auugaaacagacccagacaaacagacagacac

SEQ ID NO: 212924 - RNA, 29 nt, Homo Sapiens
uggcgcgugguuggcagaggcagagacau

SEQ ID NO: 212925 - RNA, 32 nt, Homo Sapiens
caauggcuuuguacuugugaugagagauaacc

SEQ ID NO: 212926 - RNA, 32 nt, Homo Sapiens
uuugccaucacugguguugucaccucccuguu

SEQ ID NO: 212927 - RNA, 30 nt, Homo Sapiens
acuuaaggcaggcagcccagccccuggcag

SEQ ID NO: 212928 - RNA, 32 nt, Homo Sapiens
acagcuguuuucauucacaucuccaaaggucc

SEQ ID NO: 212929 - RNA, 32 nt, Homo Sapiens
uaacaaaauguuuuauuuucauuuuagcaaaa

SEQ ID NO: 212930 - RNA, 32 nt, Homo Sapiens
aaagggaaauaucauuuauuuuuuacauuauu

SEQ ID NO: 212931 - RNA, 32 nt, Homo Sapiens
ucuugguucuacguggaugauuucuacgugga

SEQ ID NO: 212932 - RNA, 32 nt, Homo Sapiens
gugauguauugucuuccaguugcaauaaaaau

SEQ ID NO: 212933 - RNA, 32 nt, Homo Sapiens
acaguuaaucccauaacaaucauaugagagag

SEQ ID NO: 212934 - RNA, 32 nt, Homo Sapiens
gagggguguccagagccaggcagcaaggacca

SEQ ID NO: 212935 - RNA, 32 nt, Homo Sapiens
cgcagcccucagcugcgccgggcgguuccggc

SEQ ID NO: 212936 - RNA, 32 nt, Homo Sapiens
aaggauuaaaagacaaagaagacagugacuca

SEQ ID NO: 212937 - RNA, 32 nt, Homo Sapiens
gauaugguccauuuguuuuucuuccugcaaug

SEQ ID NO: 212938 - RNA, 32 nt, Homo Sapiens
cccuucucuuccuguuuggaacugggaggaag

SEQ ID NO: 212939 - RNA, 32 nt, Homo Sapiens
ucugcgcccuccgagaucccugccgcuucgcc

SEQ ID NO: 212940 - RNA, 32 nt, Homo Sapiens
accagcugcccccagcucucccugcccccucc

SEQ ID NO: 212941 - RNA, 32 nt, Homo Sapiens
auaaugagaggccugggcaacccagagagaag

SEQ ID NO: 212942 - RNA, 32 nt, Homo Sapiens
cguucccuggggauccgacgggccccagagga

SEQ ID NO: 212943 - RNA, 31 nt, Homo Sapiens
cuguucugcaggcagcuucagaauugagguc

SEQ ID NO: 212944 - RNA, 32 nt, Homo Sapiens
cugccauauauucgugcagauguuuucuucuu

SEQ ID NO: 212945 - RNA, 32 nt, Homo Sapiens
gguccuuuaaaaugucuguguauuaaaaauuu

SEQ ID NO: 212946 - RNA, 32 nt, Homo Sapiens
uagugauacuaaacauauguuacuacauccca

SEQ ID NO: 212947 - RNA, 32 nt, Homo Sapiens
uggugggcggcaccuccuggcuccaggccauc

SEQ ID NO: 212948 - RNA, 27 nt, Homo Sapiens
agaugccacacaugcauagaggacugg

SEQ ID NO: 212949 - RNA, 32 nt, Homo Sapiens
gaaaugcgaugguugcugggaauaccugaaac

SEQ ID NO: 212950 - RNA, 32 nt, Homo Sapiens
ccagccgcgggccgcagggcauggaccuucag

SEQ ID NO: 212951 - RNA, 32 nt, Homo Sapiens
ggcuuccagcacugucccggugagcgcugcug

SEQ ID NO: 212952 - RNA, 32 nt, Homo Sapiens
uuucaccaagauguucuagaaacuucugagcc

SEQ ID NO: 212953 - RNA, 32 nt, Homo Sapiens
uauaaaaaucugauggcaaaagcaaaacaaaa

SEQ ID NO: 212954 - RNA, 32 nt, Homo Sapiens
gccugaacccgcgaggcggagacugcagugag

SEQ ID NO: 212955 - RNA, 32 nt, Homo Sapiens
uugucucuagaucuguuuuucuuaaacacuaa

SEQ ID NO: 212956 - RNA, 32 nt, Homo Sapiens
ugauaaauucuauuuaguagcaugcaggauac

SEQ ID NO: 212957 - RNA, 32 nt, Homo Sapiens
agauuucuucuguaguggauaauuacagccuc

SEQ ID NO: 212958 - RNA, 32 nt, Homo Sapiens
gccuuccccccggcccgacuccgcuggucagc

SEQ ID NO: 212959 - RNA, 32 nt, Homo Sapiens
ccuuauuguaaaaaauguuauguuugaaauua

SEQ ID NO: 212960 - RNA, 32 nt, Homo Sapiens
aaacaugccuacccaugaaggcguguuugauu

SEQ ID NO: 212961 - RNA, 32 nt, Homo Sapiens
auauaauauguguaucucuguaauaauagagc

SEQ ID NO: 212962 - RNA, 32 nt, Homo Sapiens
cccccucccgugggcuggcccaggaccgcagg

SEQ ID NO: 212963 - RNA, 32 nt, Homo Sapiens
ugcugugaagaugucuuccucucggacccucu

SEQ ID NO: 212964 - RNA, 32 nt, Homo Sapiens
cauuuuaaguauuuuuaaauagaugaaaauuc

SEQ ID NO: 212965 - RNA, 32 nt, Homo Sapiens
agagaaauugaauaauauaguucuauuucaac

SEQ ID NO: 212966 - RNA, 32 nt, Homo Sapiens
ugaguagaaaucuggugaccuaaggcucagug

SEQ ID NO: 212967 - RNA, 32 nt, Homo Sapiens
gcuauucugaugaugauucaaguauggaagac

SEQ ID NO: 212968 - RNA, 32 nt, Homo Sapiens
agcucagguucccacaccucacuuuucacagc

SEQ ID NO: 212969 - RNA, 32 nt, Homo Sapiens
uagagggcaggaacacccuugguuuuauuuac

SEQ ID NO: 212970 - RNA, 32 nt, Homo Sapiens
uauguuuauuuuuuaaucucaguuuaaauuac

SEQ ID NO: 212971 - RNA, 32 nt, Homo Sapiens
aucccaugcccaguuccccccauccuacuccu

SEQ ID NO: 212972 - RNA, 32 nt, Homo Sapiens
ggccuuggacugcuugcauuuccccggagaaa

SEQ ID NO: 212973 - RNA, 32 nt, Homo Sapiens
uuugcuuguauuuuaauucaaugauuaaauaa

SEQ ID NO: 212974 - RNA, 32 nt, Homo Sapiens
uaggguccgggcccggccgggccauggauuca

SEQ ID NO: 212975 - RNA, 32 nt, Homo Sapiens
uccauagguauuuuauuuuguggcauuuccau

SEQ ID NO: 212976 - RNA, 32 nt, Homo Sapiens
cgagcccgcgggguugugcggcugguagggau

SEQ ID NO: 212977 - RNA, 32 nt, Homo Sapiens
uccuugggaaaggacauuugggcucugacauc

SEQ ID NO: 212978 - RNA, 32 nt, Homo Sapiens
auuuugugugcgucuguaaguucuuaaagaac

SEQ ID NO: 212979 - RNA, 32 nt, Homo Sapiens
cagccgggacgcgcggccgccgccgcugcaga

SEQ ID NO: 212980 - RNA, 32 nt, Homo Sapiens
accugugccagcagcagcugcccgccacaggg

SEQ ID NO: 212981 - RNA, 32 nt, Homo Sapiens
accucuugauaaaaaaugcacaaaaaaucacu

SEQ ID NO: 212982 - RNA, 32 nt, Homo Sapiens
ugaaaucuagaauuauuucacgcagaauuguc

SEQ ID NO: 212983 - RNA, 32 nt, Homo Sapiens
ccuuacaccuuagccuuuggcuccuuugacca

SEQ ID NO: 212984 - RNA, 31 nt, Homo Sapiens
cuucugaaauaaaaguucucuauccucccuc

SEQ ID NO: 212985 - RNA, 31 nt, Homo Sapiens
ucacgcuguaaguguaguucaguguagguga

SEQ ID NO: 212986 - RNA, 32 nt, Homo Sapiens
gaagguaccuagaggagcccaagccccagcuc

SEQ ID NO: 212987 - RNA, 32 nt, Homo Sapiens
guuucuccuugguuaaaauuauacuugaaggc

SEQ ID NO: 212988 - RNA, 32 nt, Homo Sapiens
uuccuauggaagacauaauucagaacagaaaa

SEQ ID NO: 212989 - RNA, 32 nt, Homo Sapiens
uuucagaagugcugaaaaugcugcaaaguugg

SEQ ID NO: 212990 - RNA, 32 nt, Homo Sapiens
aaaacuacccuaaaauguggagauuuacuccu

SEQ ID NO: 212991 - RNA, 32 nt, Homo Sapiens
uucuaugaugacuggauuuugaauuuugugga

SEQ ID NO: 212992 - RNA, 32 nt, Homo Sapiens
gauggcugacuucugaaagucacuuuccuuug

SEQ ID NO: 212993 - RNA, 32 nt, Homo Sapiens
gcccucugcccccuugcugcuucuccacauug

SEQ ID NO: 212994 - RNA, 32 nt, Homo Sapiens
gggguuaaaguucagcucauggagcggcaaua

SEQ ID NO: 212995 - RNA, 32 nt, Homo Sapiens
uauucaaaauuccaaauuuuuucuuaggagca

SEQ ID NO: 212996 - RNA, 32 nt, Homo Sapiens
uuucaggaaauauuuaaugaauuuucucccua

SEQ ID NO: 212997 - RNA, 32 nt, Homo Sapiens
uuuuucauuuuucuauugaguagauauuuuua

SEQ ID NO: 212998 - RNA, 25 nt, Homo Sapiens
augguggacagcguguaccggaccc

SEQ ID NO: 212999 - RNA, 32 nt, Homo Sapiens
uacuccccauucucucguggcuuuccaucuca

SEQ ID NO: 213000 - RNA, 32 nt, Homo Sapiens
aucguagagcagugaggcaggcugggagcaug

SEQ ID NO: 213001 - RNA, 32 nt, Homo Sapiens
uuccucaggaccaguuuguuuuccaaguguca

SEQ ID NO: 213002 - RNA, 32 nt, Homo Sapiens
gaacucacccucacuguguguuaaagaauucu

SEQ ID NO: 213003 - RNA, 32 nt, Homo Sapiens
uucuaaguuaguagagacuguuuuuguaguuu

SEQ ID NO: 213004 - RNA, 32 nt, Homo Sapiens
acaucugugaacuauggcuuaagggacaggau

SEQ ID NO: 213005 - RNA, 32 nt, Homo Sapiens
guggugagcugguggcucucuggugagcuagu

SEQ ID NO: 213006 - RNA, 32 nt, Homo Sapiens
uuccaaauguaaaauucaagaucuguuuuuau

SEQ ID NO: 213007 - RNA, 32 nt, Homo Sapiens
ugucacuaaacgguuuuguguuagaaccacca

SEQ ID NO: 213008 - RNA, 32 nt, Homo Sapiens
ugcuuugcuuucaaauuuuguuuauggugcuu

SEQ ID NO: 213009 - RNA, 32 nt, Homo Sapiens
agcagccuccucccuuucacugcagcagcccu

SEQ ID NO: 213010 - RNA, 32 nt, Homo Sapiens
gcuuuugccuucccuucccuucccauccgcca

SEQ ID NO: 213011 - RNA, 30 nt, Homo Sapiens
ccacaugucuguggauuggagaggggcagg

SEQ ID NO: 213012 - RNA, 32 nt, Homo Sapiens
uucacuuccccgcucuugaaaugacucauuuc

SEQ ID NO: 213013 - RNA, 32 nt, Homo Sapiens
ccuuccugguaguuuuuuauuuuguuguuguu

SEQ ID NO: 213014 - RNA, 32 nt, Homo Sapiens
uggaagcgggagaggaggagcacuuacucaug

SEQ ID NO: 213015 - RNA, 32 nt, Homo Sapiens
cggcuaauuuuuugaauuuuuaguggagacgg

SEQ ID NO: 213016 - RNA, 32 nt, Homo Sapiens
acauuccccacuuuugcuaugcuagccuuuau

SEQ ID NO: 213017 - RNA, 32 nt, Homo Sapiens
uucuuucugugccucugaauugccaauacugu

SEQ ID NO: 213018 - RNA, 32 nt, Homo Sapiens
cagcuagcugaauugcugauuaacuuuuaaaa

SEQ ID NO: 213019 - RNA, 32 nt, Homo Sapiens
uucagagaaggcagaggaagauacauugccuu

SEQ ID NO: 213020 - RNA, 32 nt, Homo Sapiens
aguaggaaauuggcagaaguguuggguugugg

SEQ ID NO: 213021 - RNA, 32 nt, Homo Sapiens
aauccucuuacagauuugagaaaguugauucu

SEQ ID NO: 213022 - RNA, 32 nt, Homo Sapiens
ucuccacaggccgagauccugccuguuguagg

SEQ ID NO: 213023 - RNA, 32 nt, Homo Sapiens
cccguccacuuucccaucuccucgguauaaau

SEQ ID NO: 213024 - RNA, 32 nt, Homo Sapiens
ggguuggccaccugggucacuggaggaccaac

SEQ ID NO: 213025 - RNA, 32 nt, Homo Sapiens
uagggaggggagaguaugaggagggugacugg

SEQ ID NO: 213026 - RNA, 32 nt, Homo Sapiens
guccggccucucacucgcuccccucucguccg

SEQ ID NO: 213027 - RNA, 32 nt, Homo Sapiens
guaauaguuggaugcuuuugguccuguguugc

SEQ ID NO: 213028 - RNA, 32 nt, Homo Sapiens
aauucaguggcguuugcccugauucccggggc

SEQ ID NO: 213029 - RNA, 32 nt, Homo Sapiens
cuuaccucaauccucaagguugcucacugcaa

SEQ ID NO: 213030 - RNA, 32 nt, Homo Sapiens
ggcagaggugguuguccccaccccuucugcag

SEQ ID NO: 213031 - RNA, 32 nt, Homo Sapiens
acaccuguggcuuccucugugcucuaccuuuu

SEQ ID NO: 213032 - RNA, 32 nt, Homo Sapiens
uaggugaagggggcuuccugaccgagacaugg

SEQ ID NO: 213033 - RNA, 32 nt, Homo Sapiens
uccacacgcccccuacacugcccgccaccauu

SEQ ID NO: 213034 - RNA, 32 nt, Homo Sapiens
caugccaaccccacacaggucccggccuuuua

SEQ ID NO: 213035 - RNA, 32 nt, Homo Sapiens
cauaaacccacccagggaaaagaggggaagcc

SEQ ID NO: 213036 - RNA, 32 nt, Homo Sapiens
ggaccugcucagcccacccccacccauccuca

SEQ ID NO: 213037 - RNA, 32 nt, Homo Sapiens
ucccugaacuuauauucuaugcuugaaacuca

SEQ ID NO: 213038 - RNA, 32 nt, Homo Sapiens
guuccaccaaaauauggaacuugauuuuggac

SEQ ID NO: 213039 - RNA, 31 nt, Homo Sapiens
caauuaaggaggacucgguccacuccguuac

SEQ ID NO: 213040 - RNA, 32 nt, Homo Sapiens
auuuuaugucauuguuccauuaccuugaaugu

SEQ ID NO: 213041 - RNA, 32 nt, Homo Sapiens
gugacaggaggugggacgagggggcggagcug

SEQ ID NO: 213042 - RNA, 32 nt, Homo Sapiens
aguaaacugaguugauuugacuuuaucucagu

SEQ ID NO: 213043 - RNA, 32 nt, Homo Sapiens
cacagaggggagaggggccagggaaguggaug

SEQ ID NO: 213044 - RNA, 32 nt, Homo Sapiens
cuguccgggagcggcuggagcggcagcggcgg

SEQ ID NO: 213045 - RNA, 32 nt, Homo Sapiens
cuuaucugacagugguuucaguguguaccuua

SEQ ID NO: 213046 - RNA, 32 nt, Homo Sapiens
uguauccauuauccuuaugaccucaucacccu

SEQ ID NO: 213047 - RNA, 32 nt, Homo Sapiens
ugcugcuuagcuugcaccuugucacauagagu

SEQ ID NO: 213048 - RNA, 28 nt, Homo Sapiens
gaagcagagcauuaacauuuggaaaauu

SEQ ID NO: 213049 - RNA, 32 nt, Homo Sapiens
gcuuuuuccuucccggcguccacaggcagcaa

SEQ ID NO: 213050 - RNA, 32 nt, Homo Sapiens
guggcccuucugaugccugggaugccucauga

SEQ ID NO: 213051 - RNA, 32 nt, Homo Sapiens
auuuuaauucuauaacuugagaucuuuccggg

SEQ ID NO: 213052 - RNA, 30 nt, Homo Sapiens
acccaagcauguggcaugcuauauagaugg

SEQ ID NO: 213053 - RNA, 32 nt, Homo Sapiens
gguggggcgggggcccggugcuggccgagagu

SEQ ID NO: 213054 - RNA, 32 nt, Homo Sapiens
ucauuaagcugauuugcagcuacuuauucuca

SEQ ID NO: 213055 - RNA, 30 nt, Homo Sapiens
aaauaagauaaaagguggcuuugcauuuuc

SEQ ID NO: 213056 - RNA, 30 nt, Homo Sapiens
guacugccgcuacugcugccggcgcgucug

SEQ ID NO: 213057 - RNA, 32 nt, Homo Sapiens
gagaaagagacgccucuggccuugggggcucg

SEQ ID NO: 213058 - RNA, 32 nt, Homo Sapiens
acuauagugucugcuccuaccccugggacaag

SEQ ID NO: 213059 - RNA, 32 nt, Homo Sapiens
gggcuuuuucuucuccucccccuacccgguuu

SEQ ID NO: 213060 - RNA, 28 nt, Homo Sapiens
aaauucaguuaucucauguguuucuuuc

SEQ ID NO: 213061 - RNA, 32 nt, Homo Sapiens
gcucagcccagcugacugugccuguucugagu

SEQ ID NO: 213062 - RNA, 32 nt, Homo Sapiens
ugguuuacauguuccaauaugacuccacccau

SEQ ID NO: 213063 - RNA, 32 nt, Homo Sapiens
gaucccucuccaugggaugaagccaugggguc

SEQ ID NO: 213064 - RNA, 32 nt, Homo Sapiens
gacccuaguuuaauaaagauucaccaaguuuc

SEQ ID NO: 213065 - RNA, 32 nt, Homo Sapiens
auuuuucuuuugauuuaaaggauuagagaaau

SEQ ID NO: 213066 - RNA, 32 nt, Homo Sapiens
guuauagaauacuuuuuucuaguuucaguaaa

SEQ ID NO: 213067 - RNA, 32 nt, Homo Sapiens
ccagcucggucccucccuguggaguguucuuu

SEQ ID NO: 213068 - RNA, 32 nt, Homo Sapiens
gcccgccauggcggcccgggcggugcuggacg

SEQ ID NO: 213069 - RNA, 32 nt, Homo Sapiens
ccacccagcuguuggagccaucugucugauca

SEQ ID NO: 213070 - RNA, 32 nt, Homo Sapiens
uucuguucuuucccuuuaagucaccuguauuu

SEQ ID NO: 213071 - RNA, 32 nt, Homo Sapiens
guugauuuugaccuguucaugauucagaagaa

SEQ ID NO: 213072 - RNA, 25 nt, Homo Sapiens
uaaaauauauguauguguacaugaa

SEQ ID NO: 213073 - RNA, 32 nt, Homo Sapiens
ucugaaauauuuagaagugcuaauuucuggcc

SEQ ID NO: 213074 - RNA, 32 nt, Homo Sapiens
ugcaaggcccuccccuuugugcuguguucaug

SEQ ID NO: 213075 - RNA, 32 nt, Homo Sapiens
gccugcuacccgacugauguccguugagggcu

SEQ ID NO: 213076 - RNA, 32 nt, Homo Sapiens
accuugauggaggacuuuuuuauucuuaugga

SEQ ID NO: 213077 - RNA, 32 nt, Homo Sapiens
uugugggucuucaucacacauuuuucuguaua

SEQ ID NO: 213078 - RNA, 32 nt, Homo Sapiens
aaauuuaaugaaacuuuucuuuuuccuucgac

SEQ ID NO: 213079 - RNA, 32 nt, Homo Sapiens
cuggaaacauucaaauugcaaauggaaacuug

SEQ ID NO: 213080 - RNA, 32 nt, Homo Sapiens
guuagauccuagagucucugguacauuguccg

SEQ ID NO: 213081 - RNA, 32 nt, Homo Sapiens
gaagccaugugggacaguugggcuuuguucau

SEQ ID NO: 213082 - RNA, 32 nt, Homo Sapiens
ucuucuugauaaaaugguuagaauuugcuuag

SEQ ID NO: 213083 - RNA, 29 nt, Homo Sapiens
gugaagaguguguuuuauuuucugaggag

SEQ ID NO: 213084 - RNA, 30 nt, Homo Sapiens
uuaucacaggugccugccuaauucucccuu

SEQ ID NO: 213085 - RNA, 32 nt, Homo Sapiens
ugguacccaagccccugcauuuaucucuuugu

SEQ ID NO: 213086 - RNA, 32 nt, Homo Sapiens
gggcgugugugucaagugggccacgcgugcag

SEQ ID NO: 213087 - RNA, 32 nt, Homo Sapiens
ggagacgccuuuuaucucuggaugccacagac

SEQ ID NO: 213088 - RNA, 32 nt, Homo Sapiens
aggacgaguggcagugccugcugccgauggcg

SEQ ID NO: 213089 - RNA, 32 nt, Homo Sapiens
uuuuaaagguguuuauacugauuugauugugc

SEQ ID NO: 213090 - RNA, 32 nt, Homo Sapiens
gcuguuuccagaaguguucuuuuguaccuuau

SEQ ID NO: 213091 - RNA, 32 nt, Homo Sapiens
gucaguuguaaauuagaaugcaacaugaggcu

SEQ ID NO: 213092 - RNA, 32 nt, Homo Sapiens
gggagcgcacugggcgcgggaccgggaggcgc

SEQ ID NO: 213093 - RNA, 32 nt, Homo Sapiens
ccucccacccaugagauggguguccuaagagc

SEQ ID NO: 213094 - RNA, 32 nt, Homo Sapiens
cagaggcagcccagccccggccucccagcuua

SEQ ID NO: 213095 - RNA, 32 nt, Homo Sapiens
uguugcuguuuacgguucuuccuugcccuugc

SEQ ID NO: 213096 - RNA, 32 nt, Homo Sapiens
uucuuuuuguauucuaucccagaucacaggaa

SEQ ID NO: 213097 - RNA, 32 nt, Homo Sapiens
cuuccggaccucuggguucagggcgggggcgg

SEQ ID NO: 213098 - RNA, 32 nt, Homo Sapiens
aaauuagcugggugugguugcacacgccugua

SEQ ID NO: 213099 - RNA, 32 nt, Homo Sapiens
uuuucuuaugaaaaauacauauuugcauguaa

SEQ ID NO: 213100 - RNA, 32 nt, Homo Sapiens
guugucccggcgggagcugcaucucugccggc

SEQ ID NO: 213101 - RNA, 32 nt, Homo Sapiens
ucucuccugccuuccuuccccagaguggagga

SEQ ID NO: 213102 - RNA, 32 nt, Homo Sapiens
aaacauuuuucuuuuguuucucucucccccuu

SEQ ID NO: 213103 - RNA, 32 nt, Homo Sapiens
ucuacuaaaaauacaaaaauuauccaggcgug

SEQ ID NO: 213104 - RNA, 32 nt, Homo Sapiens
cgccucugcacugcgggacgccagcgcucggc

SEQ ID NO: 213105 - RNA, 32 nt, Homo Sapiens
aauuuuuggcauaaguuuauuuucuuucaguu

SEQ ID NO: 213106 - RNA, 32 nt, Homo Sapiens
uuuucccuuugcuucuaauauuacaguuuugu

SEQ ID NO: 213107 - RNA, 32 nt, Homo Sapiens
gccgucuccgcgggagcauggagugcgcccug

SEQ ID NO: 213108 - RNA, 32 nt, Homo Sapiens
ugucacucacaacacaggcuaguuagaguuug

SEQ ID NO: 213109 - RNA, 32 nt, Homo Sapiens
gcuuauuuauuuuauauuuuuaaaagaagaca

SEQ ID NO: 213110 - RNA, 32 nt, Homo Sapiens
agaccuuaagcuguuuuagcaagcauuaaagc

SEQ ID NO: 213111 - RNA, 32 nt, Homo Sapiens
aggcccagcuggugcuggcugccugcgaaagc

SEQ ID NO: 213112 - RNA, 32 nt, Homo Sapiens
uuaugggagccccagccaguucugggagcagg

SEQ ID NO: 213113 - RNA, 32 nt, Homo Sapiens
uguaaaauuaaaaauauguguauguuuuugcu

SEQ ID NO: 213114 - RNA, 32 nt, Homo Sapiens
uggccacuuuaagagagaaaucugaaaacccc

SEQ ID NO: 213115 - RNA, 32 nt, Homo Sapiens
cuuggcgccuggccgccgcgggcaggauacac

SEQ ID NO: 213116 - RNA, 32 nt, Homo Sapiens
auucccuagggucugcuuuagagaagggggau

SEQ ID NO: 213117 - RNA, 32 nt, Homo Sapiens
aauuugaaaaagauaaaaauuucuagcaagcc

SEQ ID NO: 213118 - RNA, 32 nt, Homo Sapiens
ggaaugaguguggguagccguaaguccccaag

SEQ ID NO: 213119 - RNA, 32 nt, Homo Sapiens
gucgggagugcggucuccauggcagugcuggg

SEQ ID NO: 213120 - RNA, 32 nt, Homo Sapiens
uguugucucugucucucacgucucucuucugc

SEQ ID NO: 213121 - RNA, 32 nt, Homo Sapiens
agcuucugcugcgcugguuugcggcuuuggga

SEQ ID NO: 213122 - RNA, 32 nt, Homo Sapiens
guaggcuuuucucguuguggguggucuuuuuu

SEQ ID NO: 213123 - RNA, 32 nt, Homo Sapiens
ggaggcuccacucuccuuagguucauagucuc

SEQ ID NO: 213124 - RNA, 32 nt, Homo Sapiens
ugaggaucucaaagagcuuugcuuauauuuug

SEQ ID NO: 213125 - RNA, 32 nt, Homo Sapiens
uagacggggucucaccugucgcuggagugcag

SEQ ID NO: 213126 - RNA, 32 nt, Homo Sapiens
gcaggacccaggacgccccuccccuccucauu

SEQ ID NO: 213127 - RNA, 32 nt, Homo Sapiens
agaugacaaccugaguuucuguauguuaaagu

SEQ ID NO: 213128 - RNA, 32 nt, Homo Sapiens
cgaggcauggaggcgcugcugcugggcgcggg

SEQ ID NO: 213129 - RNA, 32 nt, Homo Sapiens
uugguggaaaggaaacugaagguaauugaaua

SEQ ID NO: 213130 - RNA, 29 nt, Homo Sapiens
uauuguaaaguuauauauuuugucuacga

SEQ ID NO: 213131 - RNA, 32 nt, Homo Sapiens
caaggcaccaaguccaccuggccucagaagag

SEQ ID NO: 213132 - RNA, 32 nt, Homo Sapiens
ggucuagagugacaucuccuccccuccccuga

SEQ ID NO: 213133 - RNA, 32 nt, Homo Sapiens
gaaagaacgagccagcagcagcuggugcuggg

SEQ ID NO: 213134 - RNA, 32 nt, Homo Sapiens
ucaccagcuccacuucccuucuggcuuccagu

SEQ ID NO: 213135 - RNA, 32 nt, Homo Sapiens
cagagcugaggaagccggcgccaguucgcggg

SEQ ID NO: 213136 - RNA, 32 nt, Homo Sapiens
agaucaacccucaauguaggcaggcacuaucc

SEQ ID NO: 213137 - RNA, 32 nt, Homo Sapiens
auauggaagaucuacauguagguacuacuggg

SEQ ID NO: 213138 - RNA, 32 nt, Homo Sapiens
ucuugcuacugaaaacaaaaacaaugaaaaua

SEQ ID NO: 213139 - RNA, 32 nt, Homo Sapiens
aauuuuaaauuaaugaucaauaaaucacaaag

SEQ ID NO: 213140 - RNA, 32 nt, Homo Sapiens
uuccuccucugugucuucccaaggcucugugg

SEQ ID NO: 213141 - RNA, 32 nt, Homo Sapiens
gacggguccucaccagccccagcagaccacag

SEQ ID NO: 213142 - RNA, 32 nt, Homo Sapiens
ccugcuguuuccuuccucucuuggacugagug

SEQ ID NO: 213143 - RNA, 32 nt, Homo Sapiens
aauuguuuuugguuggauuggagaaguaaucc

SEQ ID NO: 213144 - RNA, 32 nt, Homo Sapiens
uccagagccaaggaggaaggguuguccgggua

SEQ ID NO: 213145 - RNA, 32 nt, Homo Sapiens
cucccauuuaucccaguggcucaacaacuuuu

SEQ ID NO: 213146 - RNA, 32 nt, Homo Sapiens
cccacacacggcgcaggcugcccgccuccugg

SEQ ID NO: 213147 - RNA, 32 nt, Homo Sapiens
cuucccuuucccuuucuuccugacuagcccca

SEQ ID NO: 213148 - RNA, 32 nt, Homo Sapiens
gaugaugaacacacuuugugauaauaaaauua

SEQ ID NO: 213149 - RNA, 32 nt, Homo Sapiens
cugaugauguaccccacagcugcauucaaacu

SEQ ID NO: 213150 - RNA, 32 nt, Homo Sapiens
uucagcaauuuaagagacuauuaagcugucgu

SEQ ID NO: 213151 - RNA, 32 nt, Homo Sapiens
gaccaggaccauagaugauacaugucagugcu

SEQ ID NO: 213152 - RNA, 32 nt, Homo Sapiens
cuagagugcagggagauccccuggcuuuucug

SEQ ID NO: 213153 - RNA, 32 nt, Homo Sapiens
aagggcuucuccacaagaagcauuuccguuag

SEQ ID NO: 213154 - RNA, 32 nt, Homo Sapiens
uugacauugugcaguguagaguugccuuaaag

SEQ ID NO: 213155 - RNA, 32 nt, Homo Sapiens
cggggucugcagacgcccuucuccagccggag

SEQ ID NO: 213156 - RNA, 32 nt, Homo Sapiens
aguuccagcccuuguuauucuuguccuuaguc

SEQ ID NO: 213157 - RNA, 32 nt, Homo Sapiens
ucuguucuuacaaaugugaaacggaagcucau

SEQ ID NO: 213158 - RNA, 32 nt, Homo Sapiens
auccucaaagauugguuuguuuguuuuuaacu

SEQ ID NO: 213159 - RNA, 32 nt, Homo Sapiens
cguggcuuuuucuucucucacguggguuggcu

SEQ ID NO: 213160 - RNA, 32 nt, Homo Sapiens
ggucuggcccucacugcaggacagguucagcu

SEQ ID NO: 213161 - RNA, 32 nt, Homo Sapiens
gccagccguuugcuguccugccgcccggcuca

SEQ ID NO: 213162 - RNA, 32 nt, Homo Sapiens
gaaagaaaacgucagucugccuguaaauuuca

SEQ ID NO: 213163 - RNA, 32 nt, Homo Sapiens
uguaaacguacuuuuuaaaagauggauuauuu

SEQ ID NO: 213164 - RNA, 32 nt, Homo Sapiens
cacacacacacgcaugcacacacacacauaug

SEQ ID NO: 213165 - RNA, 31 nt, Homo Sapiens
ucccacacuucccacccccaggcaaggcuga

SEQ ID NO: 213166 - RNA, 32 nt, Homo Sapiens
uuacccucauuucuccugagccuuaggggugu

SEQ ID NO: 213167 - RNA, 32 nt, Homo Sapiens
cacguacacacacacacacacacacacacaca

SEQ ID NO: 213168 - RNA, 32 nt, Homo Sapiens
agcauuugaguguuuguuuucuuuuucuuuuu

SEQ ID NO: 213169 - RNA, 32 nt, Homo Sapiens
aucacagcaauacuuguaugcauguucauugc

SEQ ID NO: 213170 - RNA, 32 nt, Homo Sapiens
gaauaagucaguacuuggguuguguaaucugc

SEQ ID NO: 213171 - RNA, 32 nt, Homo Sapiens
gugagugcauaaggauuuuucuuaaccuugga

SEQ ID NO: 213172 - RNA, 32 nt, Homo Sapiens
uggaagcugacucaucggagagggaaauacca

SEQ ID NO: 213173 - RNA, 32 nt, Homo Sapiens
ggcagcuccucuucuucugacucagagcccug

SEQ ID NO: 213174 - RNA, 32 nt, Homo Sapiens
ucggacagaaaacacgaggcuccuugugucaa

SEQ ID NO: 213175 - RNA, 32 nt, Homo Sapiens
ccuugguucucuaaugcagcuaccacaagagg

SEQ ID NO: 213176 - RNA, 32 nt, Homo Sapiens
ucagagcugugauuuuugcaaaguauuuuacc

SEQ ID NO: 213177 - RNA, 32 nt, Homo Sapiens
aaaaaucuauuuccagaggaauguuuugcuau

SEQ ID NO: 213178 - RNA, 32 nt, Homo Sapiens
uuauagaacuccuucauuauaacuaaauuguu

SEQ ID NO: 213179 - RNA, 32 nt, Homo Sapiens
gcccccaugcuucagagugcuccggccuguac

SEQ ID NO: 213180 - RNA, 32 nt, Homo Sapiens
caggagcaggagacgcugagggaaacagcugg

SEQ ID NO: 213181 - RNA, 32 nt, Homo Sapiens
agcauagagaacaaaaccuuauggaaacagga

SEQ ID NO: 213182 - RNA, 32 nt, Homo Sapiens
ucagaccacccgcucccucagcucuuucacag

SEQ ID NO: 213183 - RNA, 32 nt, Homo Sapiens
ggcgggaggcggaggaggcggcggcggcgaug

SEQ ID NO: 213184 - RNA, 32 nt, Homo Sapiens
cauacauguucccuuauaaaucugcgagguag

SEQ ID NO: 213185 - RNA, 32 nt, Homo Sapiens
gccugugacgaggccuggccaggggugcagga

SEQ ID NO: 213186 - RNA, 32 nt, Homo Sapiens
aauaguuugacgggaaggaugguuacagaaca

SEQ ID NO: 213187 - RNA, 32 nt, Homo Sapiens
gugcugggcagagggaaaggguggucagggug

SEQ ID NO: 213188 - RNA, 32 nt, Homo Sapiens
cccucaucaccauuccuucucaaggaaaggcc

SEQ ID NO: 213189 - RNA, 32 nt, Homo Sapiens
ucuaaaauucuauuauacuacaauaauauauu

SEQ ID NO: 213190 - RNA, 32 nt, Homo Sapiens
cccagcucucuuccuggcuauuuuuuccaugc

SEQ ID NO: 213191 - RNA, 32 nt, Homo Sapiens
agacgccaggcagucgccuagcaacagcggga

SEQ ID NO: 213192 - RNA, 32 nt, Homo Sapiens
cccccucaggcaccuuuccuccccuggacacc

SEQ ID NO: 213193 - RNA, 32 nt, Homo Sapiens
aggagccuccgggaccccggggaguaacaggu

SEQ ID NO: 213194 - RNA, 32 nt, Homo Sapiens
gugcaggcugcaguggcuccccugcccagccu

SEQ ID NO: 213195 - RNA, 32 nt, Homo Sapiens
uuugaugcagacauaaaaauagcaaucauuuu

SEQ ID NO: 213196 - RNA, 32 nt, Homo Sapiens
ugcucuuccuuccccagcugcuggggauuuuc

SEQ ID NO: 213197 - RNA, 32 nt, Homo Sapiens
gcacgcuuguugcaccgucccgcggccugcgg

SEQ ID NO: 213198 - RNA, 32 nt, Homo Sapiens
uguuuuaaggccugaaagcaauuuauaacaua

SEQ ID NO: 213199 - RNA, 32 nt, Homo Sapiens
ccagcgugcagggcuguuuuucuggaacaucc

SEQ ID NO: 213200 - RNA, 32 nt, Homo Sapiens
ugcaaaugaccugcuuuuuuucugaucccgag

SEQ ID NO: 213201 - RNA, 32 nt, Homo Sapiens
cucacugugccaacacuccauccacacaggaa

SEQ ID NO: 213202 - RNA, 32 nt, Homo Sapiens
ccgagucugcgcgcugacguccgacgcuccag

SEQ ID NO: 213203 - RNA, 32 nt, Homo Sapiens
guaagaucuguaaugcgugaggucuuccuucu

SEQ ID NO: 213204 - RNA, 32 nt, Homo Sapiens
aauccgaccucauagcagcauuacauucuuug

SEQ ID NO: 213205 - RNA, 32 nt, Homo Sapiens
gcggcuucagugcucggggaggaggcagugac

SEQ ID NO: 213206 - RNA, 32 nt, Homo Sapiens
ugugaguccuugugcuccugcuccucagcucu

SEQ ID NO: 213207 - RNA, 32 nt, Homo Sapiens
agucagcccucccguccucggggccccugcag

SEQ ID NO: 213208 - RNA, 32 nt, Homo Sapiens
aaccgucauaucuaauaaauacuuaucaucca

SEQ ID NO: 213209 - RNA, 32 nt, Homo Sapiens
uguggggcucugggaaggcugaggcuggagaa

SEQ ID NO: 213210 - RNA, 32 nt, Homo Sapiens
acaagugaacaguggaguuuuacagaagcuau

SEQ ID NO: 213211 - RNA, 32 nt, Homo Sapiens
aggcuccggggcccgcagccucccacgcuguc

SEQ ID NO: 213212 - RNA, 32 nt, Homo Sapiens
ucuaccaaaaauacaaaaaacuagcugggcgu

SEQ ID NO: 213213 - RNA, 32 nt, Homo Sapiens
uauauaaauuuuugguuuuuuauuuugagcac

SEQ ID NO: 213214 - RNA, 32 nt, Homo Sapiens
ugaaaugcauauucuuaccuuaaaagaaaaau

SEQ ID NO: 213215 - RNA, 32 nt, Homo Sapiens
cauuuuuguauauaauagucuuccaagauaga

SEQ ID NO: 213216 - RNA, 32 nt, Homo Sapiens
uauguuucauggaaguuguuuauaaaauucaa

SEQ ID NO: 213217 - RNA, 32 nt, Homo Sapiens
auaguggucccuccccaucagcacugugggac

SEQ ID NO: 213218 - RNA, 31 nt, Homo Sapiens
ucuaacagauuuacacucagagccuggucgc

SEQ ID NO: 213219 - RNA, 32 nt, Homo Sapiens
gucgguacuaaauugaauaacgaguaaauaau

SEQ ID NO: 213220 - RNA, 32 nt, Homo Sapiens
uaggggacagagcugcuggggccuuuccuugc

SEQ ID NO: 213221 - RNA, 31 nt, Homo Sapiens
ggggggaaauaaacaaguauucaugagggug

SEQ ID NO: 213222 - RNA, 32 nt, Homo Sapiens
uuaauacuaggauacagaaaugcaaaagauac

SEQ ID NO: 213223 - RNA, 32 nt, Homo Sapiens
gcacugccugaaggcgagugugggcauagcau

SEQ ID NO: 213224 - RNA, 32 nt, Homo Sapiens
cgcgggcucuggaggccacgggcaugaugcuu

SEQ ID NO: 213225 - RNA, 32 nt, Homo Sapiens
uccggagcaacgcagccguuguccuugaggcc

SEQ ID NO: 213226 - RNA, 32 nt, Homo Sapiens
aaauaguguguaaauaaaauaacaucagugug

SEQ ID NO: 213227 - RNA, 32 nt, Homo Sapiens
ugaaucaucuauuaagcacuuaccaaaacaua

SEQ ID NO: 213228 - RNA, 29 nt, Homo Sapiens
augugauaauaugagugucugcuaugggc

SEQ ID NO: 213229 - RNA, 32 nt, Homo Sapiens
auaguaggugguuuaagaacuguuuuaacgua

SEQ ID NO: 213230 - RNA, 32 nt, Homo Sapiens
uagacugugucugaaucaugucuguaucccca

SEQ ID NO: 213231 - RNA, 32 nt, Homo Sapiens
cggggacugcggacuguggggaggcuggccgg

SEQ ID NO: 213232 - RNA, 32 nt, Homo Sapiens
cuccuuuuuuaaaaacacuguaaaaguaacca

SEQ ID NO: 213233 - RNA, 31 nt, Homo Sapiens
caacggagaccggugucgcgccgccuccacg

SEQ ID NO: 213234 - RNA, 32 nt, Homo Sapiens
ugccugccagcguccucggcccggcccugagg

SEQ ID NO: 213235 - RNA, 32 nt, Homo Sapiens
gcuacagaugaccguugcccugcucaaccagg

SEQ ID NO: 213236 - RNA, 32 nt, Homo Sapiens
caagugguaauuuuuguacauuacacuaaauu

SEQ ID NO: 213237 - RNA, 32 nt, Homo Sapiens
ucuacaccuuggauuuggacugauucuccauu

SEQ ID NO: 213238 - RNA, 32 nt, Homo Sapiens
gccauuagaaaccccaaguccuggagauggau

SEQ ID NO: 213239 - RNA, 32 nt, Homo Sapiens
aagcaauaaaaaggggaauggggugugcuagu

SEQ ID NO: 213240 - RNA, 32 nt, Homo Sapiens
cagugugucauucuaauguuuuaauugcuuca

SEQ ID NO: 213241 - RNA, 32 nt, Homo Sapiens
uacgccgccgccgccgccgccggagccugucg

SEQ ID NO: 213242 - RNA, 32 nt, Homo Sapiens
uuuuucugacuucuagcugucugugaauaucc

SEQ ID NO: 213243 - RNA, 32 nt, Homo Sapiens
uucuucuucuauucaugcuuuuauccauucuu

SEQ ID NO: 213244 - RNA, 32 nt, Homo Sapiens
caacugauaaaaccuuaugauucuuuucuccc

SEQ ID NO: 213245 - RNA, 32 nt, Homo Sapiens
auaaugauaagaaaaauugacuguagcuauua

SEQ ID NO: 213246 - RNA, 32 nt, Homo Sapiens
caucccaaccagugccaaggaccuccucuucc

SEQ ID NO: 213247 - RNA, 32 nt, Homo Sapiens
agcaauuacuuggcuaaauuagaguacugcaa

SEQ ID NO: 213248 - RNA, 32 nt, Homo Sapiens
cauuccggcgccuuccucucccagucacccag

SEQ ID NO: 213249 - RNA, 30 nt, Homo Sapiens
guccccggcaggcgugcgccgggcagcaga

SEQ ID NO: 213250 - RNA, 32 nt, Homo Sapiens
gaauuugcugcuauuuuaguuuugucuuugcu

SEQ ID NO: 213251 - RNA, 32 nt, Homo Sapiens
cuuuuccuguuguuguacacacacaacagaac

SEQ ID NO: 213252 - RNA, 29 nt, Homo Sapiens
ucuuggagcguucucaguuucucaacaga

SEQ ID NO: 213253 - RNA, 32 nt, Homo Sapiens
ccagauuuuuaaaagcaucuaaaauggucuuc

SEQ ID NO: 213254 - RNA, 31 nt, Homo Sapiens
gcucacuccuccaggaaccaggccaagggcu

SEQ ID NO: 213255 - RNA, 32 nt, Homo Sapiens
gaggaccggucccagcuuuuggauauuuuggg

SEQ ID NO: 213256 - RNA, 32 nt, Homo Sapiens
ggcugcaaacaccucccugugcuccaccugcc

SEQ ID NO: 213257 - RNA, 32 nt, Homo Sapiens
uggaaggggacaccccacaccgcucaagcuug

SEQ ID NO: 213258 - RNA, 32 nt, Homo Sapiens
gccccagugaggaggauggggcaggacaggac

SEQ ID NO: 213259 - RNA, 32 nt, Homo Sapiens
gccgcaagaggguggcgggcgcggccgucgga

SEQ ID NO: 213260 - RNA, 32 nt, Homo Sapiens
ggugguguuguuauauauuauugucuuuaagg

SEQ ID NO: 213261 - RNA, 32 nt, Homo Sapiens
gaaggauauuccaagacucaguauaaacaagu

SEQ ID NO: 213262 - RNA, 32 nt, Homo Sapiens
ccaguggccucuuucagcccagcccagcccag

SEQ ID NO: 213263 - RNA, 32 nt, Homo Sapiens
gcaucacggaagcugcacacgaugacacccug

SEQ ID NO: 213264 - RNA, 32 nt, Homo Sapiens
gucugucacagcacaguggggccacgaggcug

SEQ ID NO: 213265 - RNA, 32 nt, Homo Sapiens
ugaggucucugccuggaaugugaggcauggau

SEQ ID NO: 213266 - RNA, 32 nt, Homo Sapiens
cuuuguuaucacuaagugauaauuaauuuuua

SEQ ID NO: 213267 - RNA, 32 nt, Homo Sapiens
aaucaaucuguugugccaacccuuucugagau

SEQ ID NO: 213268 - RNA, 32 nt, Homo Sapiens
cuauggucuuagccuguagacaugcugcuagu

SEQ ID NO: 213269 - RNA, 32 nt, Homo Sapiens
augcucagggucacucagcagguccuggagga

SEQ ID NO: 213270 - RNA, 32 nt, Homo Sapiens
ugcaguggugucaucucagaucacugcaaccu

SEQ ID NO: 213271 - RNA, 32 nt, Homo Sapiens
cuagagacaggagaagcagaaauaaguugacc

SEQ ID NO: 213272 - RNA, 32 nt, Homo Sapiens
uaaacuccuggccaucaucucuuauccaauac

SEQ ID NO: 213273 - RNA, 32 nt, Homo Sapiens
guaaaaauacguuuuuuguaaaggcaauugua

SEQ ID NO: 213274 - RNA, 32 nt, Homo Sapiens
ucucgcuuuguacccucuaucauucccuucca

SEQ ID NO: 213275 - RNA, 32 nt, Homo Sapiens
ccacuaggcagagggaauccucuaucaccucc

SEQ ID NO: 213276 - RNA, 32 nt, Homo Sapiens
gcagaccccccucauggaguauggggcgcugg

SEQ ID NO: 213277 - RNA, 32 nt, Homo Sapiens
cgcagugcacggggcgucacagucggcaggca

SEQ ID NO: 213278 - RNA, 32 nt, Homo Sapiens
uccccaccaugcagcugaagugccagggugcu

SEQ ID NO: 213279 - RNA, 32 nt, Homo Sapiens
cagucuugcugucuguuguuguuugaaaucug

SEQ ID NO: 213280 - RNA, 32 nt, Homo Sapiens
ucaagaggcaugaguggaccgagagcacaucc

SEQ ID NO: 213281 - RNA, 32 nt, Homo Sapiens
cuacaccucuauauauuauauuacuauauagc

SEQ ID NO: 213282 - RNA, 32 nt, Homo Sapiens
gugcagagccaggguccugggguuuugugcug

SEQ ID NO: 213283 - RNA, 32 nt, Homo Sapiens
gguggcggcugggacgguuggggggugggagg

SEQ ID NO: 213284 - RNA, 32 nt, Homo Sapiens
caucugcauucaccccacucguuuuauuuuug

SEQ ID NO: 213285 - RNA, 32 nt, Homo Sapiens
uucaugaaaggacacaaacacacauaagaaua

SEQ ID NO: 213286 - RNA, 32 nt, Homo Sapiens
aggucuggcagacagguugccugacccugcaa

SEQ ID NO: 213287 - RNA, 32 nt, Homo Sapiens
ggaccggaaccucggcggacccggccccaccc

SEQ ID NO: 213288 - RNA, 32 nt, Homo Sapiens
gcgcagggccccacaagagaaauuucaaugaa

SEQ ID NO: 213289 - RNA, 32 nt, Homo Sapiens
agaagguccaugaacuccugcugcugauaucu

SEQ ID NO: 213290 - RNA, 32 nt, Homo Sapiens
agcgauuucuauguggaaauaaaugugaaaaa

SEQ ID NO: 213291 - RNA, 28 nt, Homo Sapiens
auacuguugucuaguaagugugcaauag

SEQ ID NO: 213292 - RNA, 32 nt, Homo Sapiens
cgagugauagggauccuggugggaggagagag

SEQ ID NO: 213293 - RNA, 32 nt, Homo Sapiens
ucacuauguaccaggcacugugucucauguug

SEQ ID NO: 213294 - RNA, 32 nt, Homo Sapiens
cugcagcucgggugacucagacgcccugccaa

SEQ ID NO: 213295 - RNA, 32 nt, Homo Sapiens
cccucgucccauccccacguccccucaucccg

SEQ ID NO: 213296 - RNA, 32 nt, Homo Sapiens
gcgggugcggcagcugcaggcugggagcgugu

SEQ ID NO: 213297 - RNA, 32 nt, Homo Sapiens
cuaccucagccaacacugaguaccucacaacg

SEQ ID NO: 213298 - RNA, 32 nt, Homo Sapiens
uaccugaugauaaagucagaagauguauauau

SEQ ID NO: 213299 - RNA, 32 nt, Homo Sapiens
auuguuugcuguaucucccuucccucugagcu

SEQ ID NO: 213300 - RNA, 32 nt, Homo Sapiens
ccugcagugucugcucacugcugccaucuucg

SEQ ID NO: 213301 - RNA, 32 nt, Homo Sapiens
uccucuucuucugccccuucaacugcaggcug

SEQ ID NO: 213302 - RNA, 32 nt, Homo Sapiens
cguccugggccgccggacacccccgcuggggc

SEQ ID NO: 213303 - RNA, 32 nt, Homo Sapiens
acauucuuuagaaacuaacaaagccacauuua

SEQ ID NO: 213304 - RNA, 28 nt, Homo Sapiens
uggcuaguggcuacuguauuggagugca

SEQ ID NO: 213305 - RNA, 32 nt, Homo Sapiens
aaccaucacagcaacaugccugcuaaauuuua

SEQ ID NO: 213306 - RNA, 32 nt, Homo Sapiens
cguccccgccccagcuuuucucggaaccauga

SEQ ID NO: 213307 - RNA, 32 nt, Homo Sapiens
uuccucugguuucuguguguccguuugagugu

SEQ ID NO: 213308 - RNA, 31 nt, Homo Sapiens
gugucaugggcgguggcgacggcaccgcccc

SEQ ID NO: 213309 - RNA, 32 nt, Homo Sapiens
cuccggcccuccccugcccaggcagcuggugg

SEQ ID NO: 213310 - RNA, 32 nt, Homo Sapiens
acuccucccccaagagcgguggcaccgaggga

SEQ ID NO: 213311 - RNA, 32 nt, Homo Sapiens
uuaauauuuggaugcaugcaaugccacaugga

SEQ ID NO: 213312 - RNA, 32 nt, Homo Sapiens
gggcugauagaguagaaaggaauauggcuaga

SEQ ID NO: 213313 - RNA, 32 nt, Homo Sapiens
ccgagugagcggagccgaguuugaggcagcgc

SEQ ID NO: 213314 - RNA, 32 nt, Homo Sapiens
ucuccccagcuggguccgccccggccucagag

SEQ ID NO: 213315 - RNA, 32 nt, Homo Sapiens
ccaguggugugucuccucucccucccucccuc

SEQ ID NO: 213316 - RNA, 32 nt, Homo Sapiens
ugacuagagaaaaagaaaucagcuuaaaugag

SEQ ID NO: 213317 - RNA, 32 nt, Homo Sapiens
cugcagccuucauaagcacacacguccauucc

SEQ ID NO: 213318 - RNA, 32 nt, Homo Sapiens
gccccacaacccacacacaccaccaucucacu

SEQ ID NO: 213319 - RNA, 32 nt, Homo Sapiens
gcuggaugaagaugagcuguacuggugaaaac

SEQ ID NO: 213320 - RNA, 32 nt, Homo Sapiens
ucccgccgccgggccgcagcauggggcgcuuc

SEQ ID NO: 213321 - RNA, 32 nt, Homo Sapiens
ucuguuuuguuguuugauucagcaaaaaucuc

SEQ ID NO: 213322 - RNA, 32 nt, Homo Sapiens
uccgcgcccccgggccgcucuguaaugguagg

SEQ ID NO: 213323 - RNA, 32 nt, Homo Sapiens
aagagcucauuuuggaggaauaauggaugaac

SEQ ID NO: 213324 - RNA, 32 nt, Homo Sapiens
uguucuccaguauagacuuccuaggcacuaaa

SEQ ID NO: 213325 - RNA, 32 nt, Homo Sapiens
aagagagcagcguaaguuauauucacauaguu

SEQ ID NO: 213326 - RNA, 32 nt, Homo Sapiens
gaugaugaaaguaacaugaaaacuggugauga

SEQ ID NO: 213327 - RNA, 32 nt, Homo Sapiens
guauucuauuugaguucacucuauucguaauu

SEQ ID NO: 213328 - RNA, 32 nt, Homo Sapiens
gcuccacugcccucacaccucuaggccucugu

SEQ ID NO: 213329 - RNA, 32 nt, Homo Sapiens
agacaauggaaaaccauuaacuuuacuucauu

SEQ ID NO: 213330 - RNA, 32 nt, Homo Sapiens
cuuuuugggaaggagcgugucuggccagguuc

SEQ ID NO: 213331 - RNA, 32 nt, Homo Sapiens
uuaguuugugaaaauaaagaacucuguagcuc

SEQ ID NO: 213332 - RNA, 32 nt, Homo Sapiens
gcagcggcgcggucuucggcagucuagucauc

SEQ ID NO: 213333 - RNA, 32 nt, Homo Sapiens
uauggaagaagauaauauaugguccuguccuu

SEQ ID NO: 213334 - RNA, 32 nt, Homo Sapiens
gccauguaagcuucuuuuuuuucuaugcaaga

SEQ ID NO: 213335 - RNA, 32 nt, Homo Sapiens
ucccaaaaagcuuuaucuauuaccaaaaguca

SEQ ID NO: 213336 - RNA, 32 nt, Homo Sapiens
auggguauuucugugacgcaccaauggagaga

SEQ ID NO: 213337 - RNA, 32 nt, Homo Sapiens
gguggcccaagagcagucuggguggauggaag

SEQ ID NO: 213338 - RNA, 32 nt, Homo Sapiens
ugaaauuuuacuacaauugcuuguuaaaauau

SEQ ID NO: 213339 - RNA, 32 nt, Homo Sapiens
cggcuguggaagcucccgcggcgccgcgaugg

SEQ ID NO: 213340 - RNA, 32 nt, Homo Sapiens
uuuaaacaaaaauuuaaauuuuggaauccucu

SEQ ID NO: 213341 - RNA, 32 nt, Homo Sapiens
gucaagggaaauguaaucagauuugggccaga

SEQ ID NO: 213342 - RNA, 32 nt, Homo Sapiens
auccugcucagcugcgucaugggccccccaug

SEQ ID NO: 213343 - RNA, 32 nt, Homo Sapiens
aaacacuguuaaauucaugccauuaaaaacag

SEQ ID NO: 213344 - RNA, 32 nt, Homo Sapiens
ggaccuggugggcucaaccacacacaccuguc

SEQ ID NO: 213345 - RNA, 32 nt, Homo Sapiens
gaaggaaaaaaguuuuccauuuuuauuacauu

SEQ ID NO: 213346 - RNA, 32 nt, Homo Sapiens
aggagagaggaggagguaggcuuuaaguugua

SEQ ID NO: 213347 - RNA, 32 nt, Homo Sapiens
auaugcccacccccacuggggcgaagguggac

SEQ ID NO: 213348 - RNA, 32 nt, Homo Sapiens
ccccuccgccccucggguccuggcgccucaga

SEQ ID NO: 213349 - RNA, 32 nt, Homo Sapiens
agccuaaauggcaucugaauauuuacucaccu

SEQ ID NO: 213350 - RNA, 32 nt, Homo Sapiens
cucuguuuuuauucauauuuuuucuacaaaac

SEQ ID NO: 213351 - RNA, 32 nt, Homo Sapiens
agggacauuucccuucauuucucugcuugcca

SEQ ID NO: 213352 - RNA, 32 nt, Homo Sapiens
cuccuguuaucuccuuguuugaauuucagguc

SEQ ID NO: 213353 - RNA, 32 nt, Homo Sapiens
uuuucauuccaagaaguaguucugcauuuauc

SEQ ID NO: 213354 - RNA, 32 nt, Homo Sapiens
caauaagaauaaaacugaguagaacaaaauaa

SEQ ID NO: 213355 - RNA, 32 nt, Homo Sapiens
uggcacccuaaaacaggcucuuugaggcugcc

SEQ ID NO: 213356 - RNA, 32 nt, Homo Sapiens
cacagugguccugucggugcugcuguggcugg

SEQ ID NO: 213357 - RNA, 32 nt, Homo Sapiens
caccagccuggaccuccaccuccccuggaaau

SEQ ID NO: 213358 - RNA, 32 nt, Homo Sapiens
ugucccauuuuuauccgcuacucuuuauuuca

SEQ ID NO: 213359 - RNA, 32 nt, Homo Sapiens
uugggcccacugacagugacugacugggggag

SEQ ID NO: 213360 - RNA, 32 nt, Homo Sapiens
uaguuagugaccagcuccucggcguucugcag

SEQ ID NO: 213361 - RNA, 32 nt, Homo Sapiens
guacgcuuuuccugccucccaaggcugggaga

SEQ ID NO: 213362 - RNA, 32 nt, Homo Sapiens
aggcuucgcccggcuuugcagcggggacuucg

SEQ ID NO: 213363 - RNA, 32 nt, Homo Sapiens
acuguguuaauugguaaugacuauuuaucguc

SEQ ID NO: 213364 - RNA, 32 nt, Homo Sapiens
ucuauuuacugauaguuuggcugcacugugga

SEQ ID NO: 213365 - RNA, 32 nt, Homo Sapiens
ccucaguuuccuccuauauaaaagggggguca

SEQ ID NO: 213366 - RNA, 32 nt, Homo Sapiens
cuccuuuuauuuugauuuuuaaaaaccugucu

SEQ ID NO: 213367 - RNA, 32 nt, Homo Sapiens
ugauggaaagacuuaagaagaucaaggucuca

SEQ ID NO: 213368 - RNA, 32 nt, Homo Sapiens
gggucaucuaaauauaauuaaaguggcuuuca

SEQ ID NO: 213369 - RNA, 32 nt, Homo Sapiens
caguggaggcuggguagugcuggccaucccaa

SEQ ID NO: 213370 - RNA, 32 nt, Homo Sapiens
uuuaaaagaacuaaugagaauauuuugacuug

SEQ ID NO: 213371 - RNA, 32 nt, Homo Sapiens
auuccuucuaacugaaggugcaguugaauuca

SEQ ID NO: 213372 - RNA, 32 nt, Homo Sapiens
uccccagauguguccacaaaccuguccaggag

SEQ ID NO: 213373 - RNA, 32 nt, Homo Sapiens
cccaggucuguuagugcaacacugcugcacuu

SEQ ID NO: 213374 - RNA, 32 nt, Homo Sapiens
aguuugcuccagcuaccaguuucuuuaggcag

SEQ ID NO: 213375 - RNA, 32 nt, Homo Sapiens
aaugaaaugaggugugugggcuugucaacaca

SEQ ID NO: 213376 - RNA, 32 nt, Homo Sapiens
ggaugaaaacaaagaaucagaagauaagugug

SEQ ID NO: 213377 - RNA, 32 nt, Homo Sapiens
cugguuucuccucuuggcccugcccuacagau

SEQ ID NO: 213378 - RNA, 32 nt, Homo Sapiens
caugagggcugcagcaccccccugccaggugg

SEQ ID NO: 213379 - RNA, 32 nt, Homo Sapiens
acuggaaugaacuggcugggcuugucaggggg

SEQ ID NO: 213380 - RNA, 32 nt, Homo Sapiens
ccaugcaauuuaacacuucaguuaaagaaaua

SEQ ID NO: 213381 - RNA, 32 nt, Homo Sapiens
ggacuuccuuccaucuucuccugcucauagcu

SEQ ID NO: 213382 - RNA, 32 nt, Homo Sapiens
aggaagaucugccugcacugcaagugucccca

SEQ ID NO: 213383 - RNA, 32 nt, Homo Sapiens
ugaauagaaggcaggcagcaucacacuggggu

SEQ ID NO: 213384 - RNA, 32 nt, Homo Sapiens
ggauucugugacucuugccaaauaauuuugac

SEQ ID NO: 213385 - RNA, 32 nt, Homo Sapiens
uuaucauagaaucuugugcuuguaucaaacuc

SEQ ID NO: 213386 - RNA, 32 nt, Homo Sapiens
acauaaaauuaacuauuuuaaagugagaaguu

SEQ ID NO: 213387 - RNA, 32 nt, Homo Sapiens
cccccaccgggcugcaggugcugcugaugcgc

SEQ ID NO: 213388 - RNA, 32 nt, Homo Sapiens
ggggggccgcaucacccuugguuccaggcagc

SEQ ID NO: 213389 - RNA, 32 nt, Homo Sapiens
cucugagaugcaucuccugggguguguccucg

SEQ ID NO: 213390 - RNA, 32 nt, Homo Sapiens
ccgagccaccgcgggggcguguccggcggagc

SEQ ID NO: 213391 - RNA, 32 nt, Homo Sapiens
uuccaagaugucccauugauaauucgagcaaa

SEQ ID NO: 213392 - RNA, 32 nt, Homo Sapiens
accuuauuuugaacaaguuucccuuuauugag

SEQ ID NO: 213393 - RNA, 32 nt, Homo Sapiens
ugaaaauugcacaaagcaggccaggcacggug

SEQ ID NO: 213394 - RNA, 32 nt, Homo Sapiens
cuagucccaagcaaacgggcuaggaggaaaga

SEQ ID NO: 213395 - RNA, 32 nt, Homo Sapiens
auaaaaaccuucacuauaagaacagaaaacca

SEQ ID NO: 213396 - RNA, 32 nt, Homo Sapiens
cccggguacuggaagaugaaagagacuauaca

SEQ ID NO: 213397 - RNA, 32 nt, Homo Sapiens
cuuuagccccacugcuggcacugaugucccuc

SEQ ID NO: 213398 - RNA, 32 nt, Homo Sapiens
aacaagagauuaauaucuccaugcauaguuuu

SEQ ID NO: 213399 - RNA, 32 nt, Homo Sapiens
ucaaguuuuaggaugucugaacuuucagcuuu

SEQ ID NO: 213400 - RNA, 32 nt, Homo Sapiens
agcauggcaucacuuuuuuuuauaacucauua

SEQ ID NO: 213401 - RNA, 32 nt, Homo Sapiens
uccgcccugcugcgcagacgccgccugacucc

SEQ ID NO: 213402 - RNA, 32 nt, Homo Sapiens
gaggcggagcccagcccuccagcgucugccuc

SEQ ID NO: 213403 - RNA, 32 nt, Homo Sapiens
guucuauuucauucucuucacucuuuuuacug

SEQ ID NO: 213404 - RNA, 32 nt, Homo Sapiens
cugcuuucugagguugguuucuuaauaaugag

SEQ ID NO: 213405 - RNA, 32 nt, Homo Sapiens
uguaggaagaucuguugaaauuccaggugcug

SEQ ID NO: 213406 - RNA, 32 nt, Homo Sapiens
ccccagggaaaaagaaagaaaugggaaacagc

SEQ ID NO: 213407 - RNA, 32 nt, Homo Sapiens
uauauaaucaguaaugggauugcuggguugaa

SEQ ID NO: 213408 - RNA, 32 nt, Homo Sapiens
ucagggagccuggccagaguuccgaggcucgu

SEQ ID NO: 213409 - RNA, 32 nt, Homo Sapiens
ccgcgagucucugggaggccaagccuaggggc

SEQ ID NO: 213410 - RNA, 32 nt, Homo Sapiens
agcccagauauuuggaggaacagaaacaccag

SEQ ID NO: 213411 - RNA, 32 nt, Homo Sapiens
uaacucuuuuucugcagacagaagcuucgucg

SEQ ID NO: 213412 - RNA, 32 nt, Homo Sapiens
aggcccuggaccagcucucuccacaccgcaug

SEQ ID NO: 213413 - RNA, 32 nt, Homo Sapiens
uccaccgcgcaugcgcacacgccccagaccca

SEQ ID NO: 213414 - RNA, 32 nt, Homo Sapiens
gcccaggcaccggugggccccggagcgagccu

SEQ ID NO: 213415 - RNA, 32 nt, Homo Sapiens
gcauuagugaauuguguuauugcuaaaaguga

SEQ ID NO: 213416 - RNA, 29 nt, Homo Sapiens
gaagaugcucuugucaugggguggagggg

SEQ ID NO: 213417 - RNA, 32 nt, Homo Sapiens
agaucuccuggcuccuggggccccaccugagc

SEQ ID NO: 213418 - RNA, 32 nt, Homo Sapiens
gccacuugcccccaagcacuucacaauagacc

SEQ ID NO: 213419 - RNA, 32 nt, Homo Sapiens
ccuggcugagaaugccuuggggcagguguccu

SEQ ID NO: 213420 - RNA, 32 nt, Homo Sapiens
caagcagcuggauuucgaugaccuccacugua

SEQ ID NO: 213421 - RNA, 32 nt, Homo Sapiens
uuuggagacaaaauucagauacauuaaaaaac

SEQ ID NO: 213422 - RNA, 32 nt, Homo Sapiens
ccccaagggcuuugggcagggaccuaaagggg

SEQ ID NO: 213423 - RNA, 32 nt, Homo Sapiens
cacugcccuagccccagacugcucaccuccuc

SEQ ID NO: 213424 - RNA, 32 nt, Homo Sapiens
cauacagauaaaaauuucgaagacugcuuuaa

SEQ ID NO: 213425 - RNA, 32 nt, Homo Sapiens
cgccaagcgcgcccccaccucuccugugguac

SEQ ID NO: 213426 - RNA, 32 nt, Homo Sapiens
uguuuguuuucuuuuucuuuuuuuuuuuuuuu

SEQ ID NO: 213427 - RNA, 32 nt, Homo Sapiens
gagguccccaaccccaggacugcggacugcca

SEQ ID NO: 213428 - RNA, 32 nt, Homo Sapiens
uacguugcgcgaagcccgccggcagcggcuua

SEQ ID NO: 213429 - RNA, 32 nt, Homo Sapiens
acggcuccucccguccuccccgaagccccgcc

SEQ ID NO: 213430 - RNA, 32 nt, Homo Sapiens
gcccuuuucuauuuggagcugaaucuuuucuu

SEQ ID NO: 213431 - RNA, 32 nt, Homo Sapiens
gaggagauggcucagcggggcugcaccaaggg

SEQ ID NO: 213432 - RNA, 32 nt, Homo Sapiens
ccccuccgccgccccuuccccagcccugcccc

SEQ ID NO: 213433 - RNA, 32 nt, Homo Sapiens
ggccagcaggcagcgccuguccccucacagac

SEQ ID NO: 213434 - RNA, 32 nt, Homo Sapiens
acucugccugacgaggaacgcuggcuccgaag

SEQ ID NO: 213435 - RNA, 32 nt, Homo Sapiens
guugugucaccauucuuguugcuuuuuaaaaa

SEQ ID NO: 213436 - RNA, 32 nt, Homo Sapiens
ucuagaucauaucuauuuucaaaucucuagga

SEQ ID NO: 213437 - RNA, 32 nt, Homo Sapiens
aguggccaggugccggcacagugccucuccca

SEQ ID NO: 213438 - RNA, 32 nt, Homo Sapiens
ggagcaaaaaccagagacauugccagagcaaa

SEQ ID NO: 213439 - RNA, 32 nt, Homo Sapiens
ggcaggaagaaccucagagagggcagagguga

SEQ ID NO: 213440 - RNA, 32 nt, Homo Sapiens
aaagcaaguaagauuaugucaacuacgaagac

SEQ ID NO: 213441 - RNA, 32 nt, Homo Sapiens
cacugaugcgagggaaaggccaguggcuggag

SEQ ID NO: 213442 - RNA, 32 nt, Homo Sapiens
cagggguugucauggacuggcugccuuacaaa

SEQ ID NO: 213443 - RNA, 32 nt, Homo Sapiens
uuucuuuacuuuucuuuuuuuuuuuuuuuuuu

SEQ ID NO: 213444 - RNA, 32 nt, Homo Sapiens
augauguuucccaaaggcuaauuaaaauuuua

SEQ ID NO: 213445 - RNA, 32 nt, Homo Sapiens
ucaaaacagcggggacccugcgccaugucgcg

SEQ ID NO: 213446 - RNA, 32 nt, Homo Sapiens
aaccugaacaggcuauggaacuucuggacugu

SEQ ID NO: 213447 - RNA, 32 nt, Homo Sapiens
ggacacuggcagccaauggggaggcggccucu

SEQ ID NO: 213448 - RNA, 31 nt, Homo Sapiens
auuguagugcaaaagcagccauagacaacac

SEQ ID NO: 213449 - RNA, 32 nt, Homo Sapiens
cuccccuccuccccggcggccgcacucaccca

SEQ ID NO: 213450 - RNA, 32 nt, Homo Sapiens
aacccuuaaaaauggaagaggaugcaggaguc

SEQ ID NO: 213451 - RNA, 32 nt, Homo Sapiens
gcccuccugggagcucaguggcugggaugcug

SEQ ID NO: 213452 - RNA, 32 nt, Homo Sapiens
cgugagccugcgccuggcuguaauuacuauac

SEQ ID NO: 213453 - RNA, 32 nt, Homo Sapiens
ugggguugccagcaggacuccgggccugucac

SEQ ID NO: 213454 - RNA, 32 nt, Homo Sapiens
agaggugucacacguggaacugacaggagacc

SEQ ID NO: 213455 - RNA, 32 nt, Homo Sapiens
aacagcucaagccccagggguggcaaucuuug

SEQ ID NO: 213456 - RNA, 32 nt, Homo Sapiens
uuugguuuaaguggugcuucuuacccaagcuu

SEQ ID NO: 213457 - RNA, 32 nt, Homo Sapiens
acauuuuagcuuucccagguaaaagugguuuu

SEQ ID NO: 213458 - RNA, 32 nt, Homo Sapiens
ugcgcaggaacaaacagcuguugagugagcug

SEQ ID NO: 213459 - RNA, 32 nt, Homo Sapiens
aauaauugaaaacacaucuucagcugggacuu

SEQ ID NO: 213460 - RNA, 32 nt, Homo Sapiens
uuggagaugucauccaccuggaacuccacuac

SEQ ID NO: 213461 - RNA, 30 nt, Homo Sapiens
guuggccaugcucgucuccaacuccugacc

SEQ ID NO: 213462 - RNA, 32 nt, Homo Sapiens
auauaggguagcuuauaaaugaucuccaacuc

SEQ ID NO: 213463 - RNA, 32 nt, Homo Sapiens
gcucaaagugaacacugcuucucuuaguuucc

SEQ ID NO: 213464 - RNA, 32 nt, Homo Sapiens
aauguagacuuugacuuuuuuauuaaaaaccu

SEQ ID NO: 213465 - RNA, 32 nt, Homo Sapiens
caaguaaagcacacuuuuuuuuucuccuaaaa

SEQ ID NO: 213466 - RNA, 32 nt, Homo Sapiens
ucccacggguggcccuggagcuggugagcuuu

SEQ ID NO: 213467 - RNA, 32 nt, Homo Sapiens
guuagaggugucuacaguccagauguucuucg

SEQ ID NO: 213468 - RNA, 32 nt, Homo Sapiens
ccaaaggauugcaugugguaagaaauugugau

SEQ ID NO: 213469 - RNA, 32 nt, Homo Sapiens
uccuguacuuuuucaaauaaugauguuuaaaa

SEQ ID NO: 213470 - RNA, 32 nt, Homo Sapiens
caacuuuaacugugccaccgcacccaggagca

SEQ ID NO: 213471 - RNA, 32 nt, Homo Sapiens
gugggccucgcccuuccucucccuccagguuu

SEQ ID NO: 213472 - RNA, 30 nt, Homo Sapiens
cuuggugagcccggggagccggcgcaucuu

SEQ ID NO: 213473 - RNA, 32 nt, Homo Sapiens
ugcaaccuccgucuuccggguucaagccauuc

SEQ ID NO: 213474 - RNA, 32 nt, Homo Sapiens
aaaaaguuauuuauaauugccuugucauaauu

SEQ ID NO: 213475 - RNA, 32 nt, Homo Sapiens
caggcucuaaucuccucuacaaucauccuccc

SEQ ID NO: 213476 - RNA, 32 nt, Homo Sapiens
uaguuggcaagucucacauauucaucagcagg

SEQ ID NO: 213477 - RNA, 32 nt, Homo Sapiens
aggacagagauugaacucagcuaugcaaagca

SEQ ID NO: 213478 - RNA, 32 nt, Homo Sapiens
aaccagaguccuccucgccugauuuccagcuc

SEQ ID NO: 213479 - RNA, 32 nt, Homo Sapiens
cgcccuauggcuugaagagccuggccacccag

SEQ ID NO: 213480 - RNA, 32 nt, Homo Sapiens
cacauagacaugcagauacacacacacacaca

SEQ ID NO: 213481 - RNA, 32 nt, Homo Sapiens
gagucccuggccaauagcacagccuuccaugc

SEQ ID NO: 213482 - RNA, 32 nt, Homo Sapiens
ucuccccagguccgccagcagccgguucagcc

SEQ ID NO: 213483 - RNA, 32 nt, Homo Sapiens
gagacuaaggcacaaaauuuuguuuaaaacuc

SEQ ID NO: 213484 - RNA, 32 nt, Homo Sapiens
aguuauaagauauguagaagaaaacauccauc

SEQ ID NO: 213485 - RNA, 32 nt, Homo Sapiens
agauacaaugugaagacauugaagauaugugg

SEQ ID NO: 213486 - RNA, 32 nt, Homo Sapiens
acacccucauuuauaccaauuaccugcccagu

SEQ ID NO: 213487 - RNA, 32 nt, Homo Sapiens
agcuucauuuuucguuugaauguucuaggguc

SEQ ID NO: 213488 - RNA, 32 nt, Homo Sapiens
gcuuuggguuuccugacccaucccgcauaggu

SEQ ID NO: 213489 - RNA, 32 nt, Homo Sapiens
ccuccugagugaagagaagugauucucccuug

SEQ ID NO: 213490 - RNA, 32 nt, Homo Sapiens
guccauuaaccagaauaauuuuucagaaaacu

SEQ ID NO: 213491 - RNA, 32 nt, Homo Sapiens
gcagcgucccggcuccuccccugcucauuuua

SEQ ID NO: 213492 - RNA, 32 nt, Homo Sapiens
guuguuacaauuuucugugauacuugcaauuu

SEQ ID NO: 213493 - RNA, 32 nt, Homo Sapiens
cuguuuuuaaacagcuaaaaacaguaguauuu

SEQ ID NO: 213494 - RNA, 32 nt, Homo Sapiens
gaacaucgccaauaaugggacacacagacauc

SEQ ID NO: 213495 - RNA, 32 nt, Homo Sapiens
uugcaacuguugaucucccuggauccagaacc

SEQ ID NO: 213496 - RNA, 32 nt, Homo Sapiens
aggaaugcccuccugucugugucguucucugu

SEQ ID NO: 213497 - RNA, 30 nt, Homo Sapiens
cagaaggaagagcuugaugaugucauagca

SEQ ID NO: 213498 - RNA, 32 nt, Homo Sapiens
auuauaaugugguaaauuauuuccugaauccu

SEQ ID NO: 213499 - RNA, 32 nt, Homo Sapiens
aauguauacagcuucugauacuucugaaaacc

SEQ ID NO: 213500 - RNA, 32 nt, Homo Sapiens
auuugggaaugggcaagugacccaguucuaac

SEQ ID NO: 213501 - RNA, 32 nt, Homo Sapiens
gaaguaacaaauauaaugauaauuggcuuuuu

SEQ ID NO: 213502 - RNA, 32 nt, Homo Sapiens
gggguguggcugggagguggggugcugaagcu

SEQ ID NO: 213503 - RNA, 32 nt, Homo Sapiens
agccaggcauggugacucaggccuguaauccc

SEQ ID NO: 213504 - RNA, 30 nt, Homo Sapiens
aggaggggagguggcuugagggggcugacg

SEQ ID NO: 213505 - RNA, 32 nt, Homo Sapiens
aggagagaacuuccgaaggcaggggugcgccc

SEQ ID NO: 213506 - RNA, 32 nt, Homo Sapiens
caccacgccagccccagcccggcuccagcgac

SEQ ID NO: 213507 - RNA, 32 nt, Homo Sapiens
aagcaccuuggcauagagcacccaggcaucga

SEQ ID NO: 213508 - RNA, 32 nt, Homo Sapiens
uugaggggaggaguuccacagauuguuucuau

SEQ ID NO: 213509 - RNA, 32 nt, Homo Sapiens
uuucauucucugaauuucuccucucaaggaaa

SEQ ID NO: 213510 - RNA, 32 nt, Homo Sapiens
aaugaauguauuaaaucuuaugaguaggaaga

SEQ ID NO: 213511 - RNA, 32 nt, Homo Sapiens
gcagccugcggccagcagcguccucgcaagcc

SEQ ID NO: 213512 - RNA, 28 nt, Homo Sapiens
ugguuguuuaaaaauaugugacaccucc

SEQ ID NO: 213513 - RNA, 32 nt, Homo Sapiens
cccuucccagggucugcaggugucacaugauc

SEQ ID NO: 213514 - RNA, 32 nt, Homo Sapiens
ucauuuuaggcacaacuccuucauucuuugug

SEQ ID NO: 213515 - RNA, 32 nt, Homo Sapiens
uuuuaccuuuaacagacuuguuuaaucuucuc

SEQ ID NO: 213516 - RNA, 32 nt, Homo Sapiens
ugcauuaaaaaauuuuucaagcugggcguagu

SEQ ID NO: 213517 - RNA, 32 nt, Homo Sapiens
ccugggggaaagagugaaacuccaucucaaaa

SEQ ID NO: 213518 - RNA, 32 nt, Homo Sapiens
auuugcugcuauauuucuuuugagagauaaag

SEQ ID NO: 213519 - RNA, 32 nt, Homo Sapiens
cauccucccacccgcccuccccguccugccuc

SEQ ID NO: 213520 - RNA, 32 nt, Homo Sapiens
ugaagcacaaggaaaaaaauaacuaguuugaa

SEQ ID NO: 213521 - RNA, 32 nt, Homo Sapiens
gccucgcgcccggccccuccaccgcgcaccuc

SEQ ID NO: 213522 - RNA, 32 nt, Homo Sapiens
gaagacucggugccggcagucaggaggcccug

SEQ ID NO: 213523 - RNA, 32 nt, Homo Sapiens
uuccuucaaugagaucaagagcuaauacuuuu

SEQ ID NO: 213524 - RNA, 32 nt, Homo Sapiens
ggagaaauccgaagaggcagcuagggagagug

SEQ ID NO: 213525 - RNA, 32 nt, Homo Sapiens
aaaacuguucacggucguaaccguagaagugu

SEQ ID NO: 213526 - RNA, 32 nt, Homo Sapiens
ggugaccacagugaacuaggcaagcagaagag

SEQ ID NO: 213527 - RNA, 32 nt, Homo Sapiens
uaccucauggugcaauaacacacacacgcuua

SEQ ID NO: 213528 - RNA, 32 nt, Homo Sapiens
ggaggcccuggcccuuuccccuuccccucccc

SEQ ID NO: 213529 - RNA, 32 nt, Homo Sapiens
cuuuauuaguguaagaauuucuuaagugagga

SEQ ID NO: 213530 - RNA, 32 nt, Homo Sapiens
acccuaucucuucccacccccagcuucccuuu

SEQ ID NO: 213531 - RNA, 32 nt, Homo Sapiens
gagccacugcgcccggcccaagagaauagggg

SEQ ID NO: 213532 - RNA, 32 nt, Homo Sapiens
ccaccagcccucacuaucuacugcuugaccau

SEQ ID NO: 213533 - RNA, 32 nt, Homo Sapiens
acagguagccagcagaggcauucuuggggcua

SEQ ID NO: 213534 - RNA, 32 nt, Homo Sapiens
gucccuuggucuguacaaauaauagcaaugua

SEQ ID NO: 213535 - RNA, 32 nt, Homo Sapiens
cuucauguauuauauugauaguuuuuaaaaaa

SEQ ID NO: 213536 - RNA, 32 nt, Homo Sapiens
accacugcacuacagccugggcgacagaacga

SEQ ID NO: 213537 - RNA, 32 nt, Homo Sapiens
aauuagccgggcgugguggugggcacugguaa

SEQ ID NO: 213538 - RNA, 32 nt, Homo Sapiens
cugccuuaaaggaaauuguagccuaguagguc

SEQ ID NO: 213539 - RNA, 32 nt, Homo Sapiens
uaggaauuagguuaaaagaaauuaagaaccau

SEQ ID NO: 213540 - RNA, 32 nt, Homo Sapiens
gauuugccacuuucccaccaaauugugagugc

SEQ ID NO: 213541 - RNA, 32 nt, Homo Sapiens
ccucagacauggaguccaggauguggccugcg

SEQ ID NO: 213542 - RNA, 32 nt, Homo Sapiens
cccugaugacccacccgccccauccaggcucc

SEQ ID NO: 213543 - RNA, 32 nt, Homo Sapiens
uacccuggaaaacaaucucgauuuuugacuuu

SEQ ID NO: 213544 - RNA, 32 nt, Homo Sapiens
ugugaagacaccugcagccuuuggucuccugg

SEQ ID NO: 213545 - RNA, 32 nt, Homo Sapiens
uccguccucugcuuuccgggcagcucucacca

SEQ ID NO: 213546 - RNA, 32 nt, Homo Sapiens
ccauuagacccagaggcuuccuggacaagccu

SEQ ID NO: 213547 - RNA, 32 nt, Homo Sapiens
guuuuuauuuuuguuuacuucagauacguaau

SEQ ID NO: 213548 - RNA, 32 nt, Homo Sapiens
cacccuaggcaggaagaccccugcugagggcc

SEQ ID NO: 213549 - RNA, 32 nt, Homo Sapiens
agggaguuaaucuauaaugaagaucaacagug

SEQ ID NO: 213550 - RNA, 32 nt, Homo Sapiens
cuuccccugugacuccucccuuccccacucug

SEQ ID NO: 213551 - RNA, 32 nt, Homo Sapiens
gcucccucacaggccacacacacacacacaca

SEQ ID NO: 213552 - RNA, 32 nt, Homo Sapiens
aaauugcuggagaaacaaaauaaugauggaac

SEQ ID NO: 213553 - RNA, 32 nt, Homo Sapiens
guggugguggugguggugcggaggcgggcaga

SEQ ID NO: 213554 - RNA, 29 nt, Homo Sapiens
ugcaauguauguauguuucaagguuauuu

SEQ ID NO: 213555 - RNA, 32 nt, Homo Sapiens
agacaguucuuuguuagcugguuucuaguugg

SEQ ID NO: 213556 - RNA, 32 nt, Homo Sapiens
caucuuuuguaucuaugauagcuaaggauaca

SEQ ID NO: 213557 - RNA, 32 nt, Homo Sapiens
cagauaacuauuuggaggaagagucugagcag

SEQ ID NO: 213558 - RNA, 32 nt, Homo Sapiens
ugggugucuuccuggggaccuguccucugaug

SEQ ID NO: 213559 - RNA, 32 nt, Homo Sapiens
uaaguacaaucuuuuuauuugcauuuuauuga

SEQ ID NO: 213560 - RNA, 32 nt, Homo Sapiens
acacaagaauaguucagccuucugccaugcca

SEQ ID NO: 213561 - RNA, 32 nt, Homo Sapiens
caggagcacugacugcaguugagagagaccca

SEQ ID NO: 213562 - RNA, 32 nt, Homo Sapiens
gcagauaugagagauagcacagauggaccaaa

SEQ ID NO: 213563 - RNA, 32 nt, Homo Sapiens
gaggccugagcagagugugcgaggggagaaga

SEQ ID NO: 213564 - RNA, 32 nt, Homo Sapiens
gguugcagugagccgagauaaugccacugcac

SEQ ID NO: 213565 - RNA, 32 nt, Homo Sapiens
cggcugcuuaagauuauaucacgauaguacca

SEQ ID NO: 213566 - RNA, 32 nt, Homo Sapiens
ucccucagcauauuuuacgauagagaagaucu

SEQ ID NO: 213567 - RNA, 32 nt, Homo Sapiens
ucuuaaucuaacugaguuuuguuaccaaugac

SEQ ID NO: 213568 - RNA, 32 nt, Homo Sapiens
acaaaaauuaucuauuuguauauauacauaac

SEQ ID NO: 213569 - RNA, 32 nt, Homo Sapiens
gcuccagcuccaggucgggcuccagcuccagc

SEQ ID NO: 213570 - RNA, 32 nt, Homo Sapiens
aauugagcgguuccccaccuccuaccccuacu

SEQ ID NO: 213571 - RNA, 31 nt, Homo Sapiens
ggguaaagauggguuuuuaaugauacuaaga

SEQ ID NO: 213572 - RNA, 32 nt, Homo Sapiens
cuuugucugcuggccugcugggugcuggucua

SEQ ID NO: 213573 - RNA, 32 nt, Homo Sapiens
uuaagguacaauuguaccauaaagggaacaau

SEQ ID NO: 213574 - RNA, 32 nt, Homo Sapiens
gagugaaugggagaaacauaguaucgggugag

SEQ ID NO: 213575 - RNA, 32 nt, Homo Sapiens
ccccaccccuuccaaugagcuccuuguuuuug

SEQ ID NO: 213576 - RNA, 32 nt, Homo Sapiens
uucucuugccuuaagagcugcuuguacauaug

SEQ ID NO: 213577 - RNA, 32 nt, Homo Sapiens
gcguucgcaccucgcugcuccagcaucuaggg

SEQ ID NO: 213578 - RNA, 32 nt, Homo Sapiens
cuggaaccugcacaccucccccucagcuccgu

SEQ ID NO: 213579 - RNA, 32 nt, Homo Sapiens
uggcugcccucugcucuuuucaucucuucucu

SEQ ID NO: 213580 - RNA, 32 nt, Homo Sapiens
aaaaagagauaaaauuaauaauaguucacuug

SEQ ID NO: 213581 - RNA, 32 nt, Homo Sapiens
auuacggaccagguaaauaauuucauagaagu

SEQ ID NO: 213582 - RNA, 32 nt, Homo Sapiens
ccggguccggagcccugguauaucugcggccc

SEQ ID NO: 213583 - RNA, 32 nt, Homo Sapiens
gcuaacucauuucuuaaugacaagaauuaagc

SEQ ID NO: 213584 - RNA, 32 nt, Homo Sapiens
cacuuagagcuuuggggccacaagacuucccc

SEQ ID NO: 213585 - RNA, 32 nt, Homo Sapiens
aaauuuauaugauucaaaaccauuucuucagg

SEQ ID NO: 213586 - RNA, 32 nt, Homo Sapiens
cugcucgcguccugggugccgccucugaguag

SEQ ID NO: 213587 - RNA, 32 nt, Homo Sapiens
ccacacacccucaggguuuacugagacauccu

SEQ ID NO: 213588 - RNA, 31 nt, Homo Sapiens
cuucucauugguaauuaaaauuuuagaaaug

SEQ ID NO: 213589 - RNA, 32 nt, Homo Sapiens
uuagugggugcagcgcaccagcacggcacaug

SEQ ID NO: 213590 - RNA, 32 nt, Homo Sapiens
agguugggaaacugaggcccagaaacaggaag

SEQ ID NO: 213591 - RNA, 32 nt, Homo Sapiens
uuagaaagauuaaaugguuuaauuguuaugcc

SEQ ID NO: 213592 - RNA, 32 nt, Homo Sapiens
caugcaucccuaaacaauauauuguuuagucu

SEQ ID NO: 213593 - RNA, 32 nt, Homo Sapiens
auucaagagcguucuuuuuuugguuuuaaagg

SEQ ID NO: 213594 - RNA, 32 nt, Homo Sapiens
cggcuggagcugggagugaggcggcggaggag

SEQ ID NO: 213595 - RNA, 32 nt, Homo Sapiens
cgcccaccaagccccaaaggacuagccccaca

SEQ ID NO: 213596 - RNA, 32 nt, Homo Sapiens
gacauaagugaccugcuuuguaaagccauaga

SEQ ID NO: 213597 - RNA, 32 nt, Homo Sapiens
ugccaucgcccggcccggccgcgcccgcggaa

SEQ ID NO: 213598 - RNA, 32 nt, Homo Sapiens
agcagcggcacuuuucucccuggaaggcuaaa

SEQ ID NO: 213599 - RNA, 32 nt, Homo Sapiens
aggaagaggcugcaggcucaagggcagggauu

SEQ ID NO: 213600 - RNA, 32 nt, Homo Sapiens
ugccgucucuggcuauagauaaguagaucuaa

SEQ ID NO: 213601 - RNA, 32 nt, Homo Sapiens
gguucuugcuccaucacccaagccagagugca

SEQ ID NO: 213602 - RNA, 32 nt, Homo Sapiens
agcccagauugugccacugcacuccagccugg

SEQ ID NO: 213603 - RNA, 32 nt, Homo Sapiens
cagcaaggggccgggggugcugcagaaccucu

SEQ ID NO: 213604 - RNA, 32 nt, Homo Sapiens
uaauagauauuugaguguacaaacccauggcu

SEQ ID NO: 213605 - RNA, 29 nt, Homo Sapiens
ugucacgugacuuuccccggauuuccauu

SEQ ID NO: 213606 - RNA, 32 nt, Homo Sapiens
cugagucauggccgggugggcggcacagccuu

SEQ ID NO: 213607 - RNA, 32 nt, Homo Sapiens
ccaauuauaauagcuuuuuuucuuuauuuuca

SEQ ID NO: 213608 - RNA, 32 nt, Homo Sapiens
ggcauuugcuaaaugacaguuacuacaucaau

SEQ ID NO: 213609 - RNA, 32 nt, Homo Sapiens
aggggucgucuucggaaucugugccacccggc

SEQ ID NO: 213610 - RNA, 32 nt, Homo Sapiens
cauucuguuucauucaguuauauuccaaaauu

SEQ ID NO: 213611 - RNA, 31 nt, Homo Sapiens
ccuuuaugguugucauggcaaauucagguga

SEQ ID NO: 213612 - RNA, 32 nt, Homo Sapiens
ucuuugcugcugugcugggcaccacccacccc

SEQ ID NO: 213613 - RNA, 32 nt, Homo Sapiens
gagguuacaggcaccaugagccaggacaccga

SEQ ID NO: 213614 - RNA, 32 nt, Homo Sapiens
accuuugcacugucucaguggcgacaaaggaa

SEQ ID NO: 213615 - RNA, 32 nt, Homo Sapiens
cauccugugaauucaugcgcugcgaguggcgg

SEQ ID NO: 213616 - RNA, 32 nt, Homo Sapiens
uguggcugugaguggggacagcuccucgggac

SEQ ID NO: 213617 - RNA, 32 nt, Homo Sapiens
guauucgugggggaagaaaugaccauuucccu

SEQ ID NO: 213618 - RNA, 32 nt, Homo Sapiens
aguuuugcaccaacucugccaagccacuggau

SEQ ID NO: 213619 - RNA, 32 nt, Homo Sapiens
uuccagacgcagaaugaguggcucugugugac

SEQ ID NO: 213620 - RNA, 31 nt, Homo Sapiens
gagaaaauuauauucaaauaaagcaaaauuu

SEQ ID NO: 213621 - RNA, 32 nt, Homo Sapiens
uucauaacugauauauuauaaacuaacacaug

SEQ ID NO: 213622 - RNA, 32 nt, Homo Sapiens
ggcugaacccucagauaugguagaaaauguaa

SEQ ID NO: 213623 - RNA, 32 nt, Homo Sapiens
gcggcggccggcaccaccuggacccagcucca

SEQ ID NO: 213624 - RNA, 32 nt, Homo Sapiens
uuccacuucauggcuccuuuggaccaggguau

SEQ ID NO: 213625 - RNA, 32 nt, Homo Sapiens
aaguucgccuuggcccugccuccagcucaggu

SEQ ID NO: 213626 - RNA, 32 nt, Homo Sapiens
guaaccaagaacugcauagaaagaacuuuacg

SEQ ID NO: 213627 - RNA, 32 nt, Homo Sapiens
aguauguggcccugcgcagcggccccugcuuc

SEQ ID NO: 213628 - RNA, 32 nt, Homo Sapiens
ucucagaugccauccuucucuucuccagcauu

SEQ ID NO: 213629 - RNA, 32 nt, Homo Sapiens
cuugggcuuuuuucuucguuguucccaaguca

SEQ ID NO: 213630 - RNA, 32 nt, Homo Sapiens
guaaaguaaaauuuauauauaauauauguaau

SEQ ID NO: 213631 - RNA, 32 nt, Homo Sapiens
aggugaagguaccaccucauggagacccccgc

SEQ ID NO: 213632 - RNA, 32 nt, Homo Sapiens
uaaucaaauaaucaaguagcauuucuuuuauu

SEQ ID NO: 213633 - RNA, 32 nt, Homo Sapiens
uucaguccugcagcugggcugagcggggaguc

SEQ ID NO: 213634 - RNA, 32 nt, Homo Sapiens
ugcacagcgagaagguggcaucuggagccucc

SEQ ID NO: 213635 - RNA, 32 nt, Homo Sapiens
caugcggguuguucgugagccgcgagugagau

SEQ ID NO: 213636 - RNA, 32 nt, Homo Sapiens
auuugcuguaucauuugaaccaaaaaguaugc

SEQ ID NO: 213637 - RNA, 32 nt, Homo Sapiens
aacugagaugaaacuuuuagacuucagcacgu

SEQ ID NO: 213638 - RNA, 29 nt, Homo Sapiens
aacaaugacaagagaaaauguagcccaca

SEQ ID NO: 213639 - RNA, 30 nt, Homo Sapiens
gaagaaguuucagacuacaagguaucauug

SEQ ID NO: 213640 - RNA, 32 nt, Homo Sapiens
caaaaauuuggauugcaaucacagcaaacuuu

SEQ ID NO: 213641 - RNA, 32 nt, Homo Sapiens
gaugaaucugucagugauauguguguauuaua

SEQ ID NO: 213642 - RNA, 32 nt, Homo Sapiens
gccugugaccugcagaaauugagagauccaca

SEQ ID NO: 213643 - RNA, 32 nt, Homo Sapiens
acucggucccagcuugccaguuccugguucug

SEQ ID NO: 213644 - RNA, 32 nt, Homo Sapiens
agcucuggggguggcgggggcccccacacgcu

SEQ ID NO: 213645 - RNA, 32 nt, Homo Sapiens
uaugcuuuguuugggguaucuuuugucuuaaa

SEQ ID NO: 213646 - RNA, 32 nt, Homo Sapiens
ccuggucagccuuuuccaggugaauagcccca

SEQ ID NO: 213647 - RNA, 32 nt, Homo Sapiens
ccacccaguggccgagccugcugcugcuccug

SEQ ID NO: 213648 - RNA, 32 nt, Homo Sapiens
ggcucugcgggcggcggcggcgcggggagccg

SEQ ID NO: 213649 - RNA, 32 nt, Homo Sapiens
ucugugggugggggcggggggcauagcucuaa

SEQ ID NO: 213650 - RNA, 32 nt, Homo Sapiens
ggggaaaaaagagagucuauuuuugucuaaua

SEQ ID NO: 213651 - RNA, 32 nt, Homo Sapiens
gugggagggguagucgaagagcucugguggca

SEQ ID NO: 213652 - RNA, 32 nt, Homo Sapiens
ccacccacugcuucggcggaugagaugaccgu

SEQ ID NO: 213653 - RNA, 32 nt, Homo Sapiens
agucucauucuauaagucuugcuagguaguuu

SEQ ID NO: 213654 - RNA, 30 nt, Homo Sapiens
agccgggccuucccugccugaacuuugaag

SEQ ID NO: 213655 - RNA, 32 nt, Homo Sapiens
gugaucucguuguuuacaaguguguggcaucu

SEQ ID NO: 213656 - RNA, 32 nt, Homo Sapiens
ugaaaaauauauuaaacgugcauauuaccauu

SEQ ID NO: 213657 - RNA, 32 nt, Homo Sapiens
cggggggaaagcuggcuugagcuccucuggaa

SEQ ID NO: 213658 - RNA, 30 nt, Homo Sapiens
uaccuucccgcgcggacgccggcgcugcca

SEQ ID NO: 213659 - RNA, 32 nt, Homo Sapiens
gugacagucaucuuugcccacccaguguaaug

SEQ ID NO: 213660 - RNA, 32 nt, Homo Sapiens
cugcauuugcaaacaaggauuaguaggguaug

SEQ ID NO: 213661 - RNA, 32 nt, Homo Sapiens
ucggaguaucugaaaggaauuguuuuuauaaa

SEQ ID NO: 213662 - RNA, 32 nt, Homo Sapiens
aguaagacuuagaggcaguauaaagaacacca

SEQ ID NO: 213663 - RNA, 32 nt, Homo Sapiens
gaaaagcagagggagggagggagggggucuuc

SEQ ID NO: 213664 - RNA, 32 nt, Homo Sapiens
gggggagccaggcuucggaaucacugagagag

SEQ ID NO: 213665 - RNA, 32 nt, Homo Sapiens
cgagggcgcagauuuuaacugccacguauuuu

SEQ ID NO: 213666 - RNA, 30 nt, Homo Sapiens
aaaaaauggcagcgcuggaggaagaauuca

SEQ ID NO: 213667 - RNA, 32 nt, Homo Sapiens
ugcauaaaucauaaauguauguccucucugua

SEQ ID NO: 213668 - RNA, 32 nt, Homo Sapiens
uuuaaccucuggaugucucgucugugguugag

SEQ ID NO: 213669 - RNA, 32 nt, Homo Sapiens
cagcuuggggagagagggguggccuuccucuu

SEQ ID NO: 213670 - RNA, 31 nt, Homo Sapiens
ccaaccucacggagacuuuguaauuugcuuc

SEQ ID NO: 213671 - RNA, 32 nt, Homo Sapiens
gaucuaugaggaggcacagaccagugucugga

SEQ ID NO: 213672 - RNA, 32 nt, Homo Sapiens
gauuaugcuuaaaaaacaaaaggaguggggga

SEQ ID NO: 213673 - RNA, 32 nt, Homo Sapiens
cuccaugcuuugcucucaaggcuuggagaggu

SEQ ID NO: 213674 - RNA, 32 nt, Homo Sapiens
gaccaguuugaugagaagcuuuuauuuaaaac

SEQ ID NO: 213675 - RNA, 32 nt, Homo Sapiens
aagaguuuauuuucuauugugcaauaucuuaa

SEQ ID NO: 213676 - RNA, 32 nt, Homo Sapiens
aauuagccaggcgugguggugcaugccuguaa

SEQ ID NO: 213677 - RNA, 32 nt, Homo Sapiens
aguaagaaucaucuagguuaugcugaaguaug

SEQ ID NO: 213678 - RNA, 32 nt, Homo Sapiens
ugggccuguauccaugguugaauguuagcccu

SEQ ID NO: 213679 - RNA, 32 nt, Homo Sapiens
cccccacucccacacacacacacacacacaca

SEQ ID NO: 213680 - RNA, 32 nt, Homo Sapiens
gagcccaccguuccuaucaucaucuagcaccu

SEQ ID NO: 213681 - RNA, 32 nt, Homo Sapiens
ggugggcagcgggggccuguccagcccucucc

SEQ ID NO: 213682 - RNA, 32 nt, Homo Sapiens
caaaacuuccccuuuuuaaaaugauuucuguu

SEQ ID NO: 213683 - RNA, 32 nt, Homo Sapiens
acaacaaagacaauuacuuaguaggaccuaaa

SEQ ID NO: 213684 - RNA, 32 nt, Homo Sapiens
ccucuaccugcccucuccccagcccucaucuc

SEQ ID NO: 213685 - RNA, 32 nt, Homo Sapiens
ucaaucccaaaguuugaaucugcagauaccuu

SEQ ID NO: 213686 - RNA, 31 nt, Homo Sapiens
gggagcccacggagaacgcuccaggagggcc

SEQ ID NO: 213687 - RNA, 29 nt, Homo Sapiens
ugauauguuuguaaucaugguaauuuaga

SEQ ID NO: 213688 - RNA, 32 nt, Homo Sapiens
acagaguggcugcaggccuuugaaaaguggag

SEQ ID NO: 213689 - RNA, 32 nt, Homo Sapiens
ccuucuuaguaguuucauuucuccggaagcug

SEQ ID NO: 213690 - RNA, 32 nt, Homo Sapiens
cacgucagguaucgaugggagaaggaccucaa

SEQ ID NO: 213691 - RNA, 32 nt, Homo Sapiens
gagauaaaagauucaguuuuacgaaugaaacu

SEQ ID NO: 213692 - RNA, 32 nt, Homo Sapiens
aaucucagcccacaaguccucuccacccuagg

SEQ ID NO: 213693 - RNA, 32 nt, Homo Sapiens
ccagugauuacccuagaggaaacaucugucau

SEQ ID NO: 213694 - RNA, 30 nt, Homo Sapiens
gcacauggcaggcggucaugucccuugggc

SEQ ID NO: 213695 - RNA, 32 nt, Homo Sapiens
acagaaauuguuucuguaaacauauccgaccu

SEQ ID NO: 213696 - RNA, 32 nt, Homo Sapiens
caucugggcuccugaucagcugauggagcucc

SEQ ID NO: 213697 - RNA, 32 nt, Homo Sapiens
agucuguugaacuucaggaucgugucuuagaa

SEQ ID NO: 213698 - RNA, 32 nt, Homo Sapiens
gccagguguggcggcauaccccuguggucacg

SEQ ID NO: 213699 - RNA, 32 nt, Homo Sapiens
auauauacauacaaauguguuuauuguuuaaa

SEQ ID NO: 213700 - RNA, 32 nt, Homo Sapiens
gccaaagaggacuggacucuggaccuggagcc

SEQ ID NO: 213701 - RNA, 32 nt, Homo Sapiens
caucgugccacuuuuuguaacucagcuuagua

SEQ ID NO: 213702 - RNA, 32 nt, Homo Sapiens
aagaaacugaagaaacaaaaacuuauggcacg

SEQ ID NO: 213703 - RNA, 31 nt, Homo Sapiens
uagcgcgcccucgcccagccccgcgccccag

SEQ ID NO: 213704 - RNA, 32 nt, Homo Sapiens
gccaaucgccccacccguuccuaccuggugcc

SEQ ID NO: 213705 - RNA, 32 nt, Homo Sapiens
ucaccgaugcccucugcgaagcugggguagaa

SEQ ID NO: 213706 - RNA, 32 nt, Homo Sapiens
gcuccugugguaguccucccaagcugugcugg

SEQ ID NO: 213707 - RNA, 32 nt, Homo Sapiens
gugaggggaauggacauuauuaaaagaacagg

SEQ ID NO: 213708 - RNA, 32 nt, Homo Sapiens
ccaguguuggcacaggcccaccccuggcucca

SEQ ID NO: 213709 - RNA, 32 nt, Homo Sapiens
auauaaucuauuuuauuaugguuucccuugua

SEQ ID NO: 213710 - RNA, 32 nt, Homo Sapiens
auuuaaccuguaaaaugucaauagcaaaugaa

SEQ ID NO: 213711 - RNA, 32 nt, Homo Sapiens
uuagggguccucuuaguccacaagguccggau

SEQ ID NO: 213712 - RNA, 32 nt, Homo Sapiens
auggaguuguagggcuccgucauggccaugga

SEQ ID NO: 213713 - RNA, 32 nt, Homo Sapiens
gugauuucuugugaacaaaauaaaauacaaau

SEQ ID NO: 213714 - RNA, 32 nt, Homo Sapiens
cgccggcggugaaggggaggcggugggcgucu

SEQ ID NO: 213715 - RNA, 32 nt, Homo Sapiens
ggcgcggacgcggaacccggcgcggcggcggc

SEQ ID NO: 213716 - RNA, 32 nt, Homo Sapiens
cagacccaccaaagaaaagcggucgcugcggg

SEQ ID NO: 213717 - RNA, 32 nt, Homo Sapiens
ggugacacagagaagacagucuuguauauauu

SEQ ID NO: 213718 - RNA, 32 nt, Homo Sapiens
augcucaauuccuggugagugcagcugagggg

SEQ ID NO: 213719 - RNA, 32 nt, Homo Sapiens
cuuggccaccucaugcccaucccggccaucua

SEQ ID NO: 213720 - RNA, 32 nt, Homo Sapiens
uggcucacaccuguaaucccagcacuuuggua

SEQ ID NO: 213721 - RNA, 31 nt, Homo Sapiens
aaugaaacaaagaaagagauguuaagcaagu

SEQ ID NO: 213722 - RNA, 32 nt, Homo Sapiens
gaaauugcuucauauugugauccuaaauuuua

SEQ ID NO: 213723 - RNA, 32 nt, Homo Sapiens
uccucauauacucgaauauuauaacuucuuau

SEQ ID NO: 213724 - RNA, 30 nt, Homo Sapiens
agaacagucugugcccugggacuccuauca

SEQ ID NO: 213725 - RNA, 32 nt, Homo Sapiens
agucagaucuaaaccauuaaauucauauguuc

SEQ ID NO: 213726 - RNA, 32 nt, Homo Sapiens
ucgcagcuccgggccgcagagcgcugggcgag

SEQ ID NO: 213727 - RNA, 32 nt, Homo Sapiens
cuguccaucccgccgcgccggggcagucuagg

SEQ ID NO: 213728 - RNA, 32 nt, Homo Sapiens
ggccgcggaccccucccaccccugccuugccg

SEQ ID NO: 213729 - RNA, 32 nt, Homo Sapiens
ggcgucccggcggagcgugguacuacgaccag

SEQ ID NO: 213730 - RNA, 32 nt, Homo Sapiens
cacaccuuuucccccgucuuuucugaaaaauu

SEQ ID NO: 213731 - RNA, 32 nt, Homo Sapiens
uugaucaugaucagcucugaggugcaacuucu

SEQ ID NO: 213732 - RNA, 32 nt, Homo Sapiens
gguuuuccaacccccagccucuugacugguga

SEQ ID NO: 213733 - RNA, 32 nt, Homo Sapiens
caauaauucugacucauuaacuucuaccuacu

SEQ ID NO: 213734 - RNA, 32 nt, Homo Sapiens
gaauuuggaaauaaauucuagucucuccuuag

SEQ ID NO: 213735 - RNA, 32 nt, Homo Sapiens
gaggucaggacccagugggaacccucaagagc

SEQ ID NO: 213736 - RNA, 32 nt, Homo Sapiens
ugcagcaaaguaccauggcacauguauaccug

SEQ ID NO: 213737 - RNA, 32 nt, Homo Sapiens
gcgucguugugccccugcaggaccucagaguc

SEQ ID NO: 213738 - RNA, 32 nt, Homo Sapiens
cccaucugcucagaucuucaugucagaacacg

SEQ ID NO: 213739 - RNA, 32 nt, Homo Sapiens
acgaggcaauacuuacuauccaucauguaaca

SEQ ID NO: 213740 - RNA, 32 nt, Homo Sapiens
acaagaaagugauguuauuaaugcuauccuua

SEQ ID NO: 213741 - RNA, 32 nt, Homo Sapiens
gggcuucagccugucccgggguugccugaggc

SEQ ID NO: 213742 - RNA, 32 nt, Homo Sapiens
agaauauaagaauaaugacuaugauauugguc

SEQ ID NO: 213743 - RNA, 32 nt, Homo Sapiens
uccuauuguucugcacuggaugcauucagcug

SEQ ID NO: 213744 - RNA, 32 nt, Homo Sapiens
cauaauacagcacagcgguuaagcccaccccc

SEQ ID NO: 213745 - RNA, 32 nt, Homo Sapiens
ugagccaacaaaugcagguguuuuuagaaggu

SEQ ID NO: 213746 - RNA, 32 nt, Homo Sapiens
auuuuacccuuguuuucccuuguuauggcucu

SEQ ID NO: 213747 - RNA, 32 nt, Homo Sapiens
ucagucccuaagauguuauuuauuuuuacuca

SEQ ID NO: 213748 - RNA, 32 nt, Homo Sapiens
aaaauuccaaacaaaaugaucccugcauuucc

SEQ ID NO: 213749 - RNA, 32 nt, Homo Sapiens
auuuugcacuguauauucugugaauuaaaagu

SEQ ID NO: 213750 - RNA, 32 nt, Homo Sapiens
ugcagaaaauuugauacuguucaagcaucuga

SEQ ID NO: 213751 - RNA, 32 nt, Homo Sapiens
cauuggcagcgggagccguccggaggaccugg

SEQ ID NO: 213752 - RNA, 32 nt, Homo Sapiens
caaucauccaacaguuuuugauagcacaucua

SEQ ID NO: 213753 - RNA, 32 nt, Homo Sapiens
ggugcguugcagaauggugccuguggcaugau

SEQ ID NO: 213754 - RNA, 31 nt, Homo Sapiens
cuucuaaacagcacauccucgagccagccca

SEQ ID NO: 213755 - RNA, 32 nt, Homo Sapiens
ugggcugcccccagccagcucccagcagcuuc

SEQ ID NO: 213756 - RNA, 32 nt, Homo Sapiens
auuacucuggccaggugccacgucuaacuaga

SEQ ID NO: 213757 - RNA, 32 nt, Homo Sapiens
ggccaacucugcaguggugagcugggauguuc

SEQ ID NO: 213758 - RNA, 32 nt, Homo Sapiens
aauguacacucccaggugucauaaagaacagc

SEQ ID NO: 213759 - RNA, 32 nt, Homo Sapiens
cacuguacuccagccugggugauaggaugaga

SEQ ID NO: 213760 - RNA, 32 nt, Homo Sapiens
ggagugcauuggcgagaucacagcucacugca

SEQ ID NO: 213761 - RNA, 32 nt, Homo Sapiens
gaguguaaugaaagggggauuaauuucaguag

SEQ ID NO: 213762 - RNA, 32 nt, Homo Sapiens
cuuucauguacaaaauauuuccuuuauagucu

SEQ ID NO: 213763 - RNA, 30 nt, Homo Sapiens
acuaauaaauaaaagcucuauuaguaagaa

SEQ ID NO: 213764 - RNA, 32 nt, Homo Sapiens
cuggggcugcugucgccuccccgaaggguggc

SEQ ID NO: 213765 - RNA, 32 nt, Homo Sapiens
guuugauauaaaauuaaaaugaccaaaacccu

SEQ ID NO: 213766 - RNA, 32 nt, Homo Sapiens
cggccucuaguuccccgcaggugggagguggg

SEQ ID NO: 213767 - RNA, 32 nt, Homo Sapiens
cccauugaaaauaguacuuucuucguuucaca

SEQ ID NO: 213768 - RNA, 32 nt, Homo Sapiens
augcaguguuuuucuuuuuuucucugcauaaa

SEQ ID NO: 213769 - RNA, 32 nt, Homo Sapiens
agucgcccaagcccaggaguccuagcugaggc

SEQ ID NO: 213770 - RNA, 32 nt, Homo Sapiens
accggugcuuauaaaaaguuauaaauaucgag

SEQ ID NO: 213771 - RNA, 32 nt, Homo Sapiens
aagaugcuccuccaagguucucuucuguuccc

SEQ ID NO: 213772 - RNA, 32 nt, Homo Sapiens
gugagcccagcgcgaccgcgggcguccgccga

SEQ ID NO: 213773 - RNA, 32 nt, Homo Sapiens
ucucugcucccauccugggucuccaugcugcg

SEQ ID NO: 213774 - RNA, 32 nt, Homo Sapiens
aaagaagaaaagcuagagagcgaaggcaaagc

SEQ ID NO: 213775 - RNA, 32 nt, Homo Sapiens
ucucuuucaaggaaacuuccccuacugaaagg

SEQ ID NO: 213776 - RNA, 31 nt, Homo Sapiens
aaccucaugaccagaaaagagaaggacuggg

SEQ ID NO: 213777 - RNA, 32 nt, Homo Sapiens
gucccuguacagcaugagcgccggcgacgggc

SEQ ID NO: 213778 - RNA, 32 nt, Homo Sapiens
aaaauacaaaaauuagccugguguggugacgu

SEQ ID NO: 213779 - RNA, 32 nt, Homo Sapiens
uacccuuuucuuugcccagccagauaagcagg

SEQ ID NO: 213780 - RNA, 32 nt, Homo Sapiens
ccgccgccgccucuggaucuggacggacccag

SEQ ID NO: 213781 - RNA, 32 nt, Homo Sapiens
cgcugcugcccuccccgccgagguucuacugc

SEQ ID NO: 213782 - RNA, 32 nt, Homo Sapiens
aaucaagaccauuguuucauguuaaugcagcu

SEQ ID NO: 213783 - RNA, 32 nt, Homo Sapiens
gucaccgccccugcacgcguggcacccaacuu

SEQ ID NO: 213784 - RNA, 32 nt, Homo Sapiens
aaaacuacagcuucacgagacugaccagccug

SEQ ID NO: 213785 - RNA, 32 nt, Homo Sapiens
gauuauuuguucauuacuguuuccauuuugua

SEQ ID NO: 213786 - RNA, 32 nt, Homo Sapiens
caucuccgcgccugugggugcaugucgcgugc

SEQ ID NO: 213787 - RNA, 32 nt, Homo Sapiens
aucuggugaacgcuacgcuuacauauauuguc

SEQ ID NO: 213788 - RNA, 32 nt, Homo Sapiens
cggagggaggcuggagcggggaggcgaggagg

SEQ ID NO: 213789 - RNA, 32 nt, Homo Sapiens
gucugggucaacauuucagggaggagucugcc

SEQ ID NO: 213790 - RNA, 32 nt, Homo Sapiens
cguccggcggcgagcucuggcuuugcaagggc

SEQ ID NO: 213791 - RNA, 32 nt, Homo Sapiens
uucuacuuugaagagaaggggauaggaaugua

SEQ ID NO: 213792 - RNA, 32 nt, Homo Sapiens
acuguugucuuacuuuaagaaacugccacagu

SEQ ID NO: 213793 - RNA, 32 nt, Homo Sapiens
gcagagaugaauuuauacugccaucuuacgac

SEQ ID NO: 213794 - RNA, 32 nt, Homo Sapiens
uggaucuuguagugggugcacacgcgugcacu

SEQ ID NO: 213795 - RNA, 32 nt, Homo Sapiens
uauauauugacaaaacuuuguucucuaaaacu

SEQ ID NO: 213796 - RNA, 32 nt, Homo Sapiens
ugcuguccccgccuaccuccacuuccuuuccc

SEQ ID NO: 213797 - RNA, 32 nt, Homo Sapiens
ccuccgugggaggucccgaggcagcuucgccu

SEQ ID NO: 213798 - RNA, 32 nt, Homo Sapiens
uuuucagcuuuuuaugggaaaagcagguuauu

SEQ ID NO: 213799 - RNA, 29 nt, Homo Sapiens
cccucgcugggacagagggccccgcagcc

SEQ ID NO: 213800 - RNA, 32 nt, Homo Sapiens
accaagccacccugaagaaguauuucacuugc

SEQ ID NO: 213801 - RNA, 32 nt, Homo Sapiens
cuuuuaaaacgaauucuuuuggaagccgguuu

SEQ ID NO: 213802 - RNA, 32 nt, Homo Sapiens
uugcgaugauauauuuaaaaaauaacucccag

SEQ ID NO: 213803 - RNA, 32 nt, Homo Sapiens
auuccaguugguuaauuuuuggauugcaauaa

SEQ ID NO: 213804 - RNA, 32 nt, Homo Sapiens
gaagugaaagaggggcuggugauucagcacgc

SEQ ID NO: 213805 - RNA, 32 nt, Homo Sapiens
gcaaccuccgccucccggguucgcggguucuc

SEQ ID NO: 213806 - RNA, 32 nt, Homo Sapiens
caggugcaccccgaggugccccccuggaccac

SEQ ID NO: 213807 - RNA, 32 nt, Homo Sapiens
gcucugccuuggagauucucagugcugcggau

SEQ ID NO: 213808 - RNA, 32 nt, Homo Sapiens
gcccugacuccagcugccuggucaguggcaua

SEQ ID NO: 213809 - RNA, 32 nt, Homo Sapiens
uguggcugcugauuaaaucuccaggucucaca

SEQ ID NO: 213810 - RNA, 32 nt, Homo Sapiens
gacucucugaagaucauccuuggaucuugggu

SEQ ID NO: 213811 - RNA, 32 nt, Homo Sapiens
uuaauuucaauauuuccaaccagugaauacug

SEQ ID NO: 213812 - RNA, 32 nt, Homo Sapiens
uauggaagccaagagcucucggcucaugauac

SEQ ID NO: 213813 - RNA, 30 nt, Homo Sapiens
ucacggcuccgcgcgccgccggacagccgg

SEQ ID NO: 213814 - RNA, 32 nt, Homo Sapiens
aagcuaauauaaaauaguuauguaacugugau

SEQ ID NO: 213815 - RNA, 32 nt, Homo Sapiens
auucuugauggaaccagaucccugcccugacu

SEQ ID NO: 213816 - RNA, 32 nt, Homo Sapiens
gaccaugcaguucggcggccgcggcugggccc

SEQ ID NO: 213817 - RNA, 32 nt, Homo Sapiens
cagccauguauuacagcuacuacaugcuaccg

SEQ ID NO: 213818 - RNA, 32 nt, Homo Sapiens
agaaagcagugaaaauguugauuguccagaga

SEQ ID NO: 213819 - RNA, 32 nt, Homo Sapiens
aggcugcgcuggccccaccugccuugugcccu

SEQ ID NO: 213820 - RNA, 32 nt, Homo Sapiens
gcccuugaaagucaccugaggaaguuucccca

SEQ ID NO: 213821 - RNA, 31 nt, Homo Sapiens
cccccugccuggggcucuccaaggagccuuc

SEQ ID NO: 213822 - RNA, 32 nt, Homo Sapiens
uuuuuaucaucuacacgucaaauaucccaaga

SEQ ID NO: 213823 - RNA, 32 nt, Homo Sapiens
gauuuuacaaauaaaaaauguguuguguuuuu

SEQ ID NO: 213824 - RNA, 32 nt, Homo Sapiens
augucucagaucugccauugucugcgaaaaga

SEQ ID NO: 213825 - RNA, 32 nt, Homo Sapiens
cagggccauggccgacaggggcccguggaggg

SEQ ID NO: 213826 - RNA, 32 nt, Homo Sapiens
cccaccccgccagccgcgauacggcgcaguuc

SEQ ID NO: 213827 - RNA, 32 nt, Homo Sapiens
gucagcuggugcuggcgucaggcgcugggcgg

SEQ ID NO: 213828 - RNA, 31 nt, Homo Sapiens
uucuccgagccccaggcagcggugauucagc

SEQ ID NO: 213829 - RNA, 32 nt, Homo Sapiens
acuuuuuauuuuuccucagucuucaaugacga

SEQ ID NO: 213830 - RNA, 32 nt, Homo Sapiens
agaaggcaaaauuuaccugcugacaauuuccc

SEQ ID NO: 213831 - RNA, 32 nt, Homo Sapiens
agugggcagcaggagcuccugacuugggacca

SEQ ID NO: 213832 - RNA, 32 nt, Homo Sapiens
uuucuuuuucaauuucaugauuguaggucauu

SEQ ID NO: 213833 - RNA, 32 nt, Homo Sapiens
auuuguauucccuuuuauuuccaaaauaaaau

SEQ ID NO: 213834 - RNA, 32 nt, Homo Sapiens
cuuuaguuauagucauggcagcuccucaaccc

SEQ ID NO: 213835 - RNA, 32 nt, Homo Sapiens
gauucccaauauauauuuguuaggucagugau

SEQ ID NO: 213836 - RNA, 32 nt, Homo Sapiens
gccaaaugauucggauacuaagaugcaucguu

SEQ ID NO: 213837 - RNA, 32 nt, Homo Sapiens
uggagacaaacugaaguacugaauguacuucu

SEQ ID NO: 213838 - RNA, 32 nt, Homo Sapiens
auuccccaucccaaaaaugccaaaagaaaccu

SEQ ID NO: 213839 - RNA, 32 nt, Homo Sapiens
cuuagucccacuuuaucucuucuuucucuucc

SEQ ID NO: 213840 - RNA, 32 nt, Homo Sapiens
agcgggccugggggcagcuaggcgcugaggcc

SEQ ID NO: 213841 - RNA, 31 nt, Homo Sapiens
aacucugcagggucugcuccaagaggcagag

SEQ ID NO: 213842 - RNA, 27 nt, Homo Sapiens
ccaugcugcuccugggccugcugcugc

SEQ ID NO: 213843 - RNA, 32 nt, Homo Sapiens
ucuuugggguggcugagaaauaaacagucuua

SEQ ID NO: 213844 - RNA, 32 nt, Homo Sapiens
cuagugaaaugacauagugaagaucaaaucca

SEQ ID NO: 213845 - RNA, 32 nt, Homo Sapiens
gcagcaggaacucuggaccccugggccucauc

SEQ ID NO: 213846 - RNA, 32 nt, Homo Sapiens
ucagaccuagugcucccuuccuccucaaaccg

SEQ ID NO: 213847 - RNA, 32 nt, Homo Sapiens
auugaaggugauaagggaaaagauaaagacca

SEQ ID NO: 213848 - RNA, 32 nt, Homo Sapiens
cuagcggccccuccccguguggggccacgugg

SEQ ID NO: 213849 - RNA, 32 nt, Homo Sapiens
ggagaagaggaaacuuuuaagagaaagggcuc

SEQ ID NO: 213850 - RNA, 32 nt, Homo Sapiens
ggugguggagucucaccuggggccuagagugg

SEQ ID NO: 213851 - RNA, 32 nt, Homo Sapiens
gcaauacucugauaauuuggauaaagcaacuu

SEQ ID NO: 213852 - RNA, 32 nt, Homo Sapiens
aggccccucacagacugcagacccccggcucg

SEQ ID NO: 213853 - RNA, 31 nt, Homo Sapiens
cuccaagccuuccuggcccaggcaaaugcca

SEQ ID NO: 213854 - RNA, 32 nt, Homo Sapiens
gacucacucucuaggcccccagccccacacug

SEQ ID NO: 213855 - RNA, 32 nt, Homo Sapiens
aagcggcuccuacuccaggcucaaaccucccu

SEQ ID NO: 213856 - RNA, 32 nt, Homo Sapiens
uccagcuccugcggcuccuccuccuuauucug

SEQ ID NO: 213857 - RNA, 32 nt, Homo Sapiens
uuuuguaagagcuuuaaaauauuuucacagau

SEQ ID NO: 213858 - RNA, 32 nt, Homo Sapiens
cccuccuccccucccccaauacaagguuuuug

SEQ ID NO: 213859 - RNA, 32 nt, Homo Sapiens
ggcagcgagcccggcgucccaaggagccuugc

SEQ ID NO: 213860 - RNA, 32 nt, Homo Sapiens
agccaacgccaccguggaaguggaugugcagg

SEQ ID NO: 213861 - RNA, 32 nt, Homo Sapiens
ccugauauugaaacucgggaaaugaaacugcg

SEQ ID NO: 213862 - RNA, 32 nt, Homo Sapiens
guggagucaaaggagaucauuuuggagcuuua

SEQ ID NO: 213863 - RNA, 32 nt, Homo Sapiens
ccuauuuuguuaaggguggaaauauuuaguga

SEQ ID NO: 213864 - RNA, 32 nt, Homo Sapiens
uccagauagaugucguggacuccagcucuacg

SEQ ID NO: 213865 - RNA, 32 nt, Homo Sapiens
cuacccccaaggaugccaggaagacguccacc

SEQ ID NO: 213866 - RNA, 32 nt, Homo Sapiens
uggcgcaacacucagcuggcugcgaccgcaac

SEQ ID NO: 213867 - RNA, 32 nt, Homo Sapiens
ucuucuaguuaccacggcaaccccugcagcuc

SEQ ID NO: 213868 - RNA, 32 nt, Homo Sapiens
guucgggugggcaucgggcggcuggaagagcu

SEQ ID NO: 213869 - RNA, 32 nt, Homo Sapiens
uaguccaagguuucucaaucugcacaauugac

SEQ ID NO: 213870 - RNA, 32 nt, Homo Sapiens
ugggaaaugacaguaaugcuaaauuuuccuaa

SEQ ID NO: 213871 - RNA, 32 nt, Homo Sapiens
augaaguuuacagauugguaaauaucaccugc

SEQ ID NO: 213872 - RNA, 32 nt, Homo Sapiens
gaagagauaaacgaccaaacucaguucgacca

SEQ ID NO: 213873 - RNA, 32 nt, Homo Sapiens
guuucuacucugccggccgcuccaccugggaa

SEQ ID NO: 213874 - RNA, 32 nt, Homo Sapiens
gaauguuucuuauaaaucucuuucauuuuuau

SEQ ID NO: 213875 - RNA, 32 nt, Homo Sapiens
aaaauuccuaaagcaguucuuaaaggaguuag

SEQ ID NO: 213876 - RNA, 32 nt, Homo Sapiens
cggcuccgcccggcugccgccuaggaugaaua

SEQ ID NO: 213877 - RNA, 32 nt, Homo Sapiens
uacggcgcugucuauagcaaguuggccagucu

SEQ ID NO: 213878 - RNA, 32 nt, Homo Sapiens
uccugaggcagacauccaguaggcauggggga

SEQ ID NO: 213879 - RNA, 32 nt, Homo Sapiens
ggggccaccucuugccagcaguagcagggcug

SEQ ID NO: 213880 - RNA, 32 nt, Homo Sapiens
uggggaaucugaccacggcgugcaaacuggga

SEQ ID NO: 213881 - RNA, 32 nt, Homo Sapiens
uccucacacauccuguauuauggacacaguag

SEQ ID NO: 213882 - RNA, 32 nt, Homo Sapiens
aagagauguagauaagauauugccaaagaacu

SEQ ID NO: 213883 - RNA, 32 nt, Homo Sapiens
cuaccggcguccccugccuccagaacgcgggc

SEQ ID NO: 213884 - RNA, 32 nt, Homo Sapiens
caguggacucgcgagagggugccgcgggcgag

SEQ ID NO: 213885 - RNA, 32 nt, Homo Sapiens
ggcccugcccagcagaguggagccaucucgca

SEQ ID NO: 213886 - RNA, 32 nt, Homo Sapiens
agcuucucggguguacaacagcagcugcagca

SEQ ID NO: 213887 - RNA, 32 nt, Homo Sapiens
ugcuuaauucaguggauauuuugcuagaaguu

SEQ ID NO: 213888 - RNA, 32 nt, Homo Sapiens
cagcccuagugaccgaacgcccugcggcgaga

SEQ ID NO: 213889 - RNA, 32 nt, Homo Sapiens
ugggcggcuuugagacuggggugucugucccc

SEQ ID NO: 213890 - RNA, 29 nt, Homo Sapiens
caggauggcagaggagcaggaguucaccc

SEQ ID NO: 213891 - RNA, 32 nt, Homo Sapiens
cuuuauuuuucccuuuucagaaaguccuuagu

SEQ ID NO: 213892 - RNA, 32 nt, Homo Sapiens
ugggcgcaugcgccgcguaaggggcccggccg

SEQ ID NO: 213893 - RNA, 32 nt, Homo Sapiens
ggcaagcccagacauggccuucugccuggaga

SEQ ID NO: 213894 - RNA, 32 nt, Homo Sapiens
auucuuagcugagacaccaagaggugguuaaa

SEQ ID NO: 213895 - RNA, 32 nt, Homo Sapiens
caggcgcagagcgggccaggcgcggagcuggc

SEQ ID NO: 213896 - RNA, 32 nt, Homo Sapiens
aauguguuuuacuauuuucagauuagauuuuu

SEQ ID NO: 213897 - RNA, 32 nt, Homo Sapiens
uccuugugaaugguaaaccaauccaaauaaua

SEQ ID NO: 213898 - RNA, 32 nt, Homo Sapiens
ccagauccugaauguucuauguucaccugccc

SEQ ID NO: 213899 - RNA, 32 nt, Homo Sapiens
ugggcgcggagcgggcggccgccaccgagcgu

SEQ ID NO: 213900 - RNA, 32 nt, Homo Sapiens
uugauaaaggauuaaauaaaaauuaucuagua

SEQ ID NO: 213901 - RNA, 32 nt, Homo Sapiens
aacugggaaagccccagguaaccccggacugg

SEQ ID NO: 213902 - RNA, 32 nt, Homo Sapiens
uuaauuccuuuaaaauacacagccuucugccu

SEQ ID NO: 213903 - RNA, 27 nt, Homo Sapiens
gacacuugcuucuucaguucuuugcuc

SEQ ID NO: 213904 - RNA, 32 nt, Homo Sapiens
gcucgugcccuguuguggggcccccauuugcc

SEQ ID NO: 213905 - RNA, 32 nt, Homo Sapiens
auuaaauggaaauaugcuuuucugguuuauaa

SEQ ID NO: 213906 - RNA, 32 nt, Homo Sapiens
auucaaaaaugaaauucaauaauggggaaaua

SEQ ID NO: 213907 - RNA, 32 nt, Homo Sapiens
cuagaccucucacuaugaccgcggccgccgcc

SEQ ID NO: 213908 - RNA, 32 nt, Homo Sapiens
cgcacucuccagcagaaugucugcuugugucu

SEQ ID NO: 213909 - RNA, 32 nt, Homo Sapiens
ugaugaaguuguuuuagcaaauccauuuuuaa

SEQ ID NO: 213910 - RNA, 32 nt, Homo Sapiens
ccuucuccuugcaucacccgaagucucccuac

SEQ ID NO: 213911 - RNA, 32 nt, Homo Sapiens
ucuacccgcccggcccgcggcgcgcaccguug

SEQ ID NO: 213912 - RNA, 32 nt, Homo Sapiens
gcaucagucaacaguguaugucaugcaguaca

SEQ ID NO: 213913 - RNA, 32 nt, Homo Sapiens
gguucagcaagagcuuugugggcuguuuuguc

SEQ ID NO: 213914 - RNA, 32 nt, Homo Sapiens
auucacugugauguggcauucuguaaauaaga

SEQ ID NO: 213915 - RNA, 32 nt, Homo Sapiens
gcuuugucagaucggauagccccagggcugaa

SEQ ID NO: 213916 - RNA, 32 nt, Homo Sapiens
uccgccgcuccaggacucggcgcggagggaau

SEQ ID NO: 213917 - RNA, 32 nt, Homo Sapiens
ccaucuguggagguacggagucuugcauguag

SEQ ID NO: 213918 - RNA, 32 nt, Homo Sapiens
gcgugggccaagccuggcaaccuuguaguaga

SEQ ID NO: 213919 - RNA, 32 nt, Homo Sapiens
gcuguuuccacaucagaacucccuucaaacac

SEQ ID NO: 213920 - RNA, 32 nt, Homo Sapiens
gaaggcagggccgcaucccagacuuccaccaa

SEQ ID NO: 213921 - RNA, 32 nt, Homo Sapiens
agaaaaccaaaaugauacuuacugaacugugu

SEQ ID NO: 213922 - RNA, 32 nt, Homo Sapiens
caaugauccaacaaccuguuaagucuuuccca

SEQ ID NO: 213923 - RNA, 32 nt, Homo Sapiens
uacuuauauuggucuguaaaucccuggaagua

SEQ ID NO: 213924 - RNA, 32 nt, Homo Sapiens
aggggugcauucacucuuuguuuaccauucaa

SEQ ID NO: 213925 - RNA, 32 nt, Homo Sapiens
acccugcugccucagcuggacccagggcuuug

SEQ ID NO: 213926 - RNA, 32 nt, Homo Sapiens
cuuugaaguagcucuuuuuuuuuuuuuuuuuu

SEQ ID NO: 213927 - RNA, 32 nt, Homo Sapiens
aagagaaaaugcgguuauaaaaaaugguucag

SEQ ID NO: 213928 - RNA, 32 nt, Homo Sapiens
cccgccuuaggacucccgaugcgcuccuggaa

SEQ ID NO: 213929 - RNA, 32 nt, Homo Sapiens
gacauagaauacucaaaacuauauguauuuug

SEQ ID NO: 213930 - RNA, 32 nt, Homo Sapiens
aagccuuuccuacuuuuuuaucccuuuaagag

SEQ ID NO: 213931 - RNA, 32 nt, Homo Sapiens
aaaagugagagaagaugaccuaagugugacug

SEQ ID NO: 213932 - RNA, 32 nt, Homo Sapiens
ccgcccggguccguguggccaggccucacgug

SEQ ID NO: 213933 - RNA, 32 nt, Homo Sapiens
ucaggagcucauuuuccagcugcucuucagag

SEQ ID NO: 213934 - RNA, 32 nt, Homo Sapiens
aaguguuuugguuuuuuuuuuuccagaaaaaa

SEQ ID NO: 213935 - RNA, 32 nt, Homo Sapiens
ugaucauaaaaauuaaaaugugaaugucaaca

SEQ ID NO: 213936 - RNA, 32 nt, Homo Sapiens
agcuggcuggaagaagacagggaccagacuga

SEQ ID NO: 213937 - RNA, 32 nt, Homo Sapiens
gcuacuucggggugggggaggggcccucccgc

SEQ ID NO: 213938 - RNA, 32 nt, Homo Sapiens
gggccagggaggaggagaaaggaauugagcug

SEQ ID NO: 213939 - RNA, 32 nt, Homo Sapiens
uggggcuggguuggaacaggugugugccccca

SEQ ID NO: 213940 - RNA, 32 nt, Homo Sapiens
cugagaccccaaauuucucaccaauguuuugg

SEQ ID NO: 213941 - RNA, 28 nt, Homo Sapiens
agcgcguuguaacucauguguuuacaug

SEQ ID NO: 213942 - RNA, 32 nt, Homo Sapiens
gcagacacaggccuccuggucagggccggaac

SEQ ID NO: 213943 - RNA, 32 nt, Homo Sapiens
gauuacuuuucacaaaauaggcacauuauauc

SEQ ID NO: 213944 - RNA, 32 nt, Homo Sapiens
uugguagagaaagaagcagugccugggauaaa

SEQ ID NO: 213945 - RNA, 32 nt, Homo Sapiens
ggccacaucuagaaacaaaaguuccaaaaugu

SEQ ID NO: 213946 - RNA, 32 nt, Homo Sapiens
uuccugcagcggugcccggcagccuuggugaa

SEQ ID NO: 213947 - RNA, 32 nt, Homo Sapiens
cgucggugcugcugcuccugcagcugccuuuu

SEQ ID NO: 213948 - RNA, 32 nt, Homo Sapiens
uggcgccgcccgggagagcccgcgcgaggacg

SEQ ID NO: 213949 - RNA, 32 nt, Homo Sapiens
uggaugcucgauuuccucugccucucucuuug

SEQ ID NO: 213950 - RNA, 32 nt, Homo Sapiens
uugagcaugacuacuaaauauuauguaauaaa

SEQ ID NO: 213951 - RNA, 32 nt, Homo Sapiens
uguguuuucccaaagcacuuuuaaaaaaauuu

SEQ ID NO: 213952 - RNA, 32 nt, Homo Sapiens
gagacaggcacaugggcagcucuguucccuuc

SEQ ID NO: 213953 - RNA, 32 nt, Homo Sapiens
caucaaauucuuugaucuucucuuccaccucu

SEQ ID NO: 213954 - RNA, 32 nt, Homo Sapiens
ggaggaaaguuacugcugaggacccacccaau

SEQ ID NO: 213955 - RNA, 32 nt, Homo Sapiens
uggcuuccuugacgcgagaggcucugaggguc

SEQ ID NO: 213956 - RNA, 32 nt, Homo Sapiens
uuaaaaacugcuauuuaaaggcacauuauuaa

SEQ ID NO: 213957 - RNA, 32 nt, Homo Sapiens
auagcacagcugucaucucauuuuggacacug

SEQ ID NO: 213958 - RNA, 32 nt, Homo Sapiens
uacccuuuuccgcuccacggugaccuccgugc

SEQ ID NO: 213959 - RNA, 32 nt, Homo Sapiens
cuugggaugauuauaacggguggucuccuuag

SEQ ID NO: 213960 - RNA, 32 nt, Homo Sapiens
ucacagaggagcugcuuuagugcagcauugca

SEQ ID NO: 213961 - RNA, 32 nt, Homo Sapiens
ccuuuguccuguccuuucccuaggaggcacag

SEQ ID NO: 213962 - RNA, 32 nt, Homo Sapiens
uggcaggacugggaggcgacagaugggccccu

SEQ ID NO: 213963 - RNA, 32 nt, Homo Sapiens
agaaagaaacaacacugauauuucaaacaacu

SEQ ID NO: 213964 - RNA, 31 nt, Homo Sapiens
cccuccagagccaccaguguuagagcggagc

SEQ ID NO: 213965 - RNA, 32 nt, Homo Sapiens
ccucaagacaccuuccgagcgucugcucuauc

SEQ ID NO: 213966 - RNA, 32 nt, Homo Sapiens
augccagcauuucaugggggcugaggcagaac

SEQ ID NO: 213967 - RNA, 32 nt, Homo Sapiens
ccgaacauacuggagacucaccacggccccuc

SEQ ID NO: 213968 - RNA, 32 nt, Homo Sapiens
ucauguguaggaagaggccgcugcaggguggc

SEQ ID NO: 213969 - RNA, 32 nt, Homo Sapiens
uaucgggcucggcgcaggcccgcggggagcgc

SEQ ID NO: 213970 - RNA, 32 nt, Homo Sapiens
ucucaccucccuccccaccucaguguuuuguc

SEQ ID NO: 213971 - RNA, 32 nt, Homo Sapiens
cggguugcagggcugggcgcgcgccccgcguc

SEQ ID NO: 213972 - RNA, 32 nt, Homo Sapiens
cuccauaaaauggcagcuauguuaugacaugu

SEQ ID NO: 213973 - RNA, 32 nt, Homo Sapiens
auggaggggucuuucugcuucuuucuugucau

SEQ ID NO: 213974 - RNA, 32 nt, Homo Sapiens
ccgggaggacugcagggcccgcggccgagggc

SEQ ID NO: 213975 - RNA, 32 nt, Homo Sapiens
uucauacuuuugugaaaguauacauguuggcc

SEQ ID NO: 213976 - RNA, 32 nt, Homo Sapiens
accugcagcccucaucuccgccggcgaguagg

SEQ ID NO: 213977 - RNA, 32 nt, Homo Sapiens
caguuguaaauaaaguuugaaaaugcucaaaa

SEQ ID NO: 213978 - RNA, 32 nt, Homo Sapiens
aggugcaagacuguccguguggacccugacuc

SEQ ID NO: 213979 - RNA, 32 nt, Homo Sapiens
gauucagauugaauuaauuugaggaugggauu

SEQ ID NO: 213980 - RNA, 32 nt, Homo Sapiens
cuugguucacccuccacccccucccccgcucc

SEQ ID NO: 213981 - RNA, 32 nt, Homo Sapiens
agcggaccuggcggccgggcagcauggcgggg

SEQ ID NO: 213982 - RNA, 32 nt, Homo Sapiens
ccccuguccucgcugggacaagagggagacaa

SEQ ID NO: 213983 - RNA, 32 nt, Homo Sapiens
guguggcuggcucuccagcaucaggaguacug

SEQ ID NO: 213984 - RNA, 32 nt, Homo Sapiens
agcccuagacucccaagccccagcagcaacag

SEQ ID NO: 213985 - RNA, 32 nt, Homo Sapiens
gaggagugagguggcucuggccucccauguca

SEQ ID NO: 213986 - RNA, 32 nt, Homo Sapiens
gcucuggggcuucuguggccaagccccacccu

SEQ ID NO: 213987 - RNA, 32 nt, Homo Sapiens
aggggauauggacaaguaaguaacacgcaucg

SEQ ID NO: 213988 - RNA, 32 nt, Homo Sapiens
aagggcuaaaaguuuauaaucaucccuuaaac

SEQ ID NO: 213989 - RNA, 32 nt, Homo Sapiens
uaaugcaaggaaggauucccuaucuuggaccu

SEQ ID NO: 213990 - RNA, 32 nt, Homo Sapiens
cccucuguggcuuuucugcuggcucgaagauc

SEQ ID NO: 213991 - RNA, 32 nt, Homo Sapiens
gcccagugcugcccagccuccccgcccgcucc

SEQ ID NO: 213992 - RNA, 32 nt, Homo Sapiens
auggggaggacuaggagagcgagggggccccc

SEQ ID NO: 213993 - RNA, 32 nt, Homo Sapiens
cgugagaagcuacucccuccgcagcaccaagc

SEQ ID NO: 213994 - RNA, 32 nt, Homo Sapiens
guuuuucuaugauaauuuaaaauacauaggua

SEQ ID NO: 213995 - RNA, 32 nt, Homo Sapiens
uaauucuaaaauuccaaaaaugucuuuuuuaa

SEQ ID NO: 213996 - RNA, 32 nt, Homo Sapiens
gguugggauguggaguuguugcuggacucuca

SEQ ID NO: 213997 - RNA, 32 nt, Homo Sapiens
cgugaacgcgcgcggagcugcucgcgccccgc

SEQ ID NO: 213998 - RNA, 31 nt, Homo Sapiens
cccugauucugcugcaugccaagggccuguu

SEQ ID NO: 213999 - RNA, 32 nt, Homo Sapiens
gcucaaggccuucaccugcucuaggccagccc

SEQ ID NO: 214000 - RNA, 32 nt, Homo Sapiens
aagagaccgccgggaaggcuagagcuuggaau

SEQ ID NO: 214001 - RNA, 32 nt, Homo Sapiens
acuguuuucuaaaaguuuuauaauuuugcuuu

SEQ ID NO: 214002 - RNA, 32 nt, Homo Sapiens
uaugaaugacuaggauuaaucugguguguuua

SEQ ID NO: 214003 - RNA, 32 nt, Homo Sapiens
augggcauguggcccugaaggcugggugagag

SEQ ID NO: 214004 - RNA, 32 nt, Homo Sapiens
cuuagaggcaguuuuaauauaaaucauuucaa

SEQ ID NO: 214005 - RNA, 32 nt, Homo Sapiens
ucccuggcaacgccacgcuuccgccuucugga

SEQ ID NO: 214006 - RNA, 32 nt, Homo Sapiens
uuucuagaaacacuaaaguuauuguuuucuaa

SEQ ID NO: 214007 - RNA, 32 nt, Homo Sapiens
cuuuuuuaagggacuuccuucaucucugugcc

SEQ ID NO: 214008 - RNA, 32 nt, Homo Sapiens
auuagguguacuucuauuuuaaaacauuucag

SEQ ID NO: 214009 - RNA, 32 nt, Homo Sapiens
cccucacccccuccuucauaugaaaggugcca

SEQ ID NO: 214010 - RNA, 32 nt, Homo Sapiens
uuaaucucaacagcauuaaacagucaauaaca

SEQ ID NO: 214011 - RNA, 32 nt, Homo Sapiens
aggcagcugaaauucaccaagaacagcgggua

SEQ ID NO: 214012 - RNA, 32 nt, Homo Sapiens
ugugaugguauuuggaggcccugucucuggug

SEQ ID NO: 214013 - RNA, 32 nt, Homo Sapiens
cacauuuauaccucuguucaauaaaaaucugc

SEQ ID NO: 214014 - RNA, 32 nt, Homo Sapiens
gagaaggggccguugggugucuauguacaugg

SEQ ID NO: 214015 - RNA, 32 nt, Homo Sapiens
gcagggacugggggcgggcgggagggagccgg

SEQ ID NO: 214016 - RNA, 32 nt, Homo Sapiens
cuggagucugcacgggaccuauuagaguauuu

SEQ ID NO: 214017 - RNA, 32 nt, Homo Sapiens
aucuguugcuguuuuuguguugucuuccccug

SEQ ID NO: 214018 - RNA, 32 nt, Homo Sapiens
ucggcgcucgcagguccgcuccccucccaaac

SEQ ID NO: 214019 - RNA, 32 nt, Homo Sapiens
agauaugagauuuuuuuuuuuauuaggugggc

SEQ ID NO: 214020 - RNA, 32 nt, Homo Sapiens
gucagagucaccuccauaauggucaguacaga

SEQ ID NO: 214021 - RNA, 32 nt, Homo Sapiens
cucccugcuuugcccagaugccagaauaacug

SEQ ID NO: 214022 - RNA, 32 nt, Homo Sapiens
aggaggcggcggcgguggcggaggaagaggag

SEQ ID NO: 214023 - RNA, 32 nt, Homo Sapiens
cgcgcagugcccauggaggcgcugcugccacc

SEQ ID NO: 214024 - RNA, 32 nt, Homo Sapiens
gcuauucaucaaggcagcauucacuaagcauu

SEQ ID NO: 214025 - RNA, 32 nt, Homo Sapiens
ucgaguagcacuuuaaaaugauuugugcuuga

SEQ ID NO: 214026 - RNA, 32 nt, Homo Sapiens
ggggagcucggcugucagaacuccauggauau

SEQ ID NO: 214027 - RNA, 32 nt, Homo Sapiens
gacucgaagugauccgcccaccuuggccuccc

SEQ ID NO: 214028 - RNA, 32 nt, Homo Sapiens
ugcgaagcggcuucuucagagcacgggcugga

SEQ ID NO: 214029 - RNA, 32 nt, Homo Sapiens
ucguguuuugucaucagcaucuuuucuauuaa

SEQ ID NO: 214030 - RNA, 32 nt, Homo Sapiens
ggcacgaggccgagucucacccucccaggcag

SEQ ID NO: 214031 - RNA, 32 nt, Homo Sapiens
auuugucaccauuuuuaaaacucuguaugcua

SEQ ID NO: 214032 - RNA, 32 nt, Homo Sapiens
ggcugcuucucuaucacuggcuuugcacagaa

SEQ ID NO: 214033 - RNA, 29 nt, Homo Sapiens
ggcugacccuguuucagaagcaggauagu

SEQ ID NO: 214034 - RNA, 32 nt, Homo Sapiens
gagguccccacuuucugcuuuccuugcccaug

SEQ ID NO: 214035 - RNA, 32 nt, Homo Sapiens
ggaggagguucagggucccaguggcuggaugu

SEQ ID NO: 214036 - RNA, 32 nt, Homo Sapiens
ucugcuacuguacagcuuuaggauuugucauc

SEQ ID NO: 214037 - RNA, 32 nt, Homo Sapiens
uggguuccaaauauuaaaauucuuguccuauu

SEQ ID NO: 214038 - RNA, 32 nt, Homo Sapiens
agcggagucauggcggacggcagcggcuggca

SEQ ID NO: 214039 - RNA, 32 nt, Homo Sapiens
gggagaaggaggaggagcagcaggccuccggg

SEQ ID NO: 214040 - RNA, 32 nt, Homo Sapiens
ggggucccuggagcccugguguggagcggcga

SEQ ID NO: 214041 - RNA, 32 nt, Homo Sapiens
ugcugagaacagagaggcccugcccucugucc

SEQ ID NO: 214042 - RNA, 32 nt, Homo Sapiens
ggggaagggugggcccggggucacacggggua

SEQ ID NO: 214043 - RNA, 32 nt, Homo Sapiens
ggauuucggggaugaaggcggcagcagcaaga

SEQ ID NO: 214044 - RNA, 32 nt, Homo Sapiens
gcggugccgcgcgcccgacgggccggugguug

SEQ ID NO: 214045 - RNA, 32 nt, Homo Sapiens
agggcuccauccccggccugggagguucaugc

SEQ ID NO: 214046 - RNA, 31 nt, Homo Sapiens
ccccuaaaauaaaaauaguggucaacuuuag

SEQ ID NO: 214047 - RNA, 32 nt, Homo Sapiens
ucuuaauggaaauguuaaaauucauaucugau

SEQ ID NO: 214048 - RNA, 32 nt, Homo Sapiens
gcacuggaugcccuuggaugacagcauccuca

SEQ ID NO: 214049 - RNA, 32 nt, Homo Sapiens
gagaggagggcuugcucaucugaacaggggug

SEQ ID NO: 214050 - RNA, 32 nt, Homo Sapiens
uuccugguuuccuugacuuuggccuccuccuc

SEQ ID NO: 214051 - RNA, 32 nt, Homo Sapiens
gggccagcagagggggcgcccggucgcugccu

SEQ ID NO: 214052 - RNA, 32 nt, Homo Sapiens
gugccaauaggucaguugcugauaaagaggcc

SEQ ID NO: 214053 - RNA, 32 nt, Homo Sapiens
acgugucaggacuuaggacugcgggguuuagg

SEQ ID NO: 214054 - RNA, 32 nt, Homo Sapiens
agacuaauuggcuauaauuauauccuaucaaa

SEQ ID NO: 214055 - RNA, 32 nt, Homo Sapiens
aaaagcuacuuuacuaugauauuguuguuauu

SEQ ID NO: 214056 - RNA, 30 nt, Homo Sapiens
ugaaggcuguggcgcgcggcuguccccauu

SEQ ID NO: 214057 - RNA, 32 nt, Homo Sapiens
cuacgagcgggugaugagccccccgcaagccc

SEQ ID NO: 214058 - RNA, 32 nt, Homo Sapiens
uaaggagaacuaauaacuuuuuccauguauca

SEQ ID NO: 214059 - RNA, 32 nt, Homo Sapiens
cccacugcuuugcuagacgugcuuucugccau

SEQ ID NO: 214060 - RNA, 32 nt, Homo Sapiens
acgcgccggcuugacuuaacugcuucccugaa

SEQ ID NO: 214061 - RNA, 32 nt, Homo Sapiens
gaagaccgcucccaagcuggagagugaugcua

SEQ ID NO: 214062 - RNA, 32 nt, Homo Sapiens
ucauacucauuuggaucuauuuagacaacguu

SEQ ID NO: 214063 - RNA, 32 nt, Homo Sapiens
guggggagaggaggcgcaaggcugguuccugu

SEQ ID NO: 214064 - RNA, 32 nt, Homo Sapiens
guagaucaaaaauuauuuauuacuaagaggau

SEQ ID NO: 214065 - RNA, 32 nt, Homo Sapiens
cuccuaggucccuccgcccgacaguugugcuu

SEQ ID NO: 214066 - RNA, 32 nt, Homo Sapiens
aaauguaaauacugauuugacuggucuuuaag

SEQ ID NO: 214067 - RNA, 32 nt, Homo Sapiens
guuccgcgggaggcgggcgggaggcggacgcg

SEQ ID NO: 214068 - RNA, 32 nt, Homo Sapiens
aggaagugacuggccugacucggggcucauag

SEQ ID NO: 214069 - RNA, 32 nt, Homo Sapiens
gacuccauccugaguaaucucccuuuauuuuu

SEQ ID NO: 214070 - RNA, 32 nt, Homo Sapiens
aagcuacaccaucccggcccuccgccuccugg

SEQ ID NO: 214071 - RNA, 32 nt, Homo Sapiens
auccugaggacacguggcccagcagagccucu

SEQ ID NO: 214072 - RNA, 32 nt, Homo Sapiens
auaccucguguuagcaccuuuaugaagagaug

SEQ ID NO: 214073 - RNA, 32 nt, Homo Sapiens
gggaaaugcuaaggagcugagggugcccacca

SEQ ID NO: 214074 - RNA, 32 nt, Homo Sapiens
gugcuauaaaauugccuauuaagguaaaagaa

SEQ ID NO: 214075 - RNA, 32 nt, Homo Sapiens
cccuugaccuaacagaccuauagugaagauga

SEQ ID NO: 214076 - RNA, 32 nt, Homo Sapiens
ugggacacugucagaguuuggccacagccugu

SEQ ID NO: 214077 - RNA, 32 nt, Homo Sapiens
guagagaaagagauaaaaauaaaaguaucuca

SEQ ID NO: 214078 - RNA, 32 nt, Homo Sapiens
guccucugcugaaaugacguggccuugguuuu

SEQ ID NO: 214079 - RNA, 32 nt, Homo Sapiens
cuagauuaggagaggaagccaggggcccugca

SEQ ID NO: 214080 - RNA, 32 nt, Homo Sapiens
gcuagcggccuggcgcugcggcgaccgaccgg

SEQ ID NO: 214081 - RNA, 32 nt, Homo Sapiens
aagaaaaggugaaaauggaauguuuucuuuuu

SEQ ID NO: 214082 - RNA, 32 nt, Homo Sapiens
uuuuucccaacaaccucacuggggagaaagug

SEQ ID NO: 214083 - RNA, 32 nt, Homo Sapiens
gucucagaauacugauuccguggaagagcagg

SEQ ID NO: 214084 - RNA, 32 nt, Homo Sapiens
uguaauuuaagaucuuggugugauguuugucc

SEQ ID NO: 214085 - RNA, 32 nt, Homo Sapiens
uauuuuuaaaauuuaugucaggguauucuuuc

SEQ ID NO: 214086 - RNA, 32 nt, Homo Sapiens
gagaauguggucaauuguauagauagcguguu

SEQ ID NO: 214087 - RNA, 32 nt, Homo Sapiens
gacucucccccuccaacccccagccguccaga

SEQ ID NO: 214088 - RNA, 32 nt, Homo Sapiens
cagcuugccccgcuccuccaccaucuaggccc

SEQ ID NO: 214089 - RNA, 32 nt, Homo Sapiens
caaaaguagagcugucaagaugggcuaguuuu

SEQ ID NO: 214090 - RNA, 32 nt, Homo Sapiens
uucaaaaugcaaacaaacugcuuaacaacuga

SEQ ID NO: 214091 - RNA, 32 nt, Homo Sapiens
cuuugcacuuccauccucucccacuuccaucu

SEQ ID NO: 214092 - RNA, 32 nt, Homo Sapiens
uuauuauccgccagguaagagugguuacccau

SEQ ID NO: 214093 - RNA, 32 nt, Homo Sapiens
gaggagcagaucugcugccucagggccugaca

SEQ ID NO: 214094 - RNA, 32 nt, Homo Sapiens
gaacucaagugauccgcccaccucagccuccc

SEQ ID NO: 214095 - RNA, 32 nt, Homo Sapiens
agugugcguacccaguucaccuggacaugagu

SEQ ID NO: 214096 - RNA, 32 nt, Homo Sapiens
uauuuuaaauguuuuuauauucucuuguugua

SEQ ID NO: 214097 - RNA, 30 nt, Homo Sapiens
uggccaccacuugcuccucgcccaggaguc

SEQ ID NO: 214098 - RNA, 28 nt, Homo Sapiens
ccccaggguggauccaggauggaucucu

SEQ ID NO: 214099 - RNA, 32 nt, Homo Sapiens
ugcucucucccucucuucagaugccaacgagg

SEQ ID NO: 214100 - RNA, 32 nt, Homo Sapiens
cccgggccgcggcucucuggagggcucgcgcc

SEQ ID NO: 214101 - RNA, 32 nt, Homo Sapiens
cccgcgcguggcggcgccggcucccuagccac

SEQ ID NO: 214102 - RNA, 32 nt, Homo Sapiens
cuaacaaggugauuugugaaagggugagacuu

SEQ ID NO: 214103 - RNA, 32 nt, Homo Sapiens
gguauguaucauauuuuuauguuucuggugug

SEQ ID NO: 214104 - RNA, 32 nt, Homo Sapiens
cagcugccucuagcccuuaaaauacaaaacuu

SEQ ID NO: 214105 - RNA, 32 nt, Homo Sapiens
agaggggcagaaaaaggagaucaagagaacca

SEQ ID NO: 214106 - RNA, 32 nt, Homo Sapiens
auagguauuuacugaacaucuaacuuaugccc

SEQ ID NO: 214107 - RNA, 32 nt, Homo Sapiens
guguagauaaaacugcuuaguauuauacagaa

SEQ ID NO: 214108 - RNA, 32 nt, Homo Sapiens
aauuguacgugcauuugaccuauauugcuaug

SEQ ID NO: 214109 - RNA, 32 nt, Homo Sapiens
gccaggaggucuguagcuggggaccaguaagg

SEQ ID NO: 214110 - RNA, 32 nt, Homo Sapiens
uuaccuugaaaaaauaaaaauguuaacuggaa

SEQ ID NO: 214111 - RNA, 32 nt, Homo Sapiens
ucauucaaggauauuggaaccacaggacuauu

SEQ ID NO: 214112 - RNA, 32 nt, Homo Sapiens
ccgaggccgcgugucccaaaggccagucaucc

SEQ ID NO: 214113 - RNA, 32 nt, Homo Sapiens
ccugcucccaccucaggcccaggccaaccgug

SEQ ID NO: 214114 - RNA, 32 nt, Homo Sapiens
gcccagcccaccucccucccccggccccuggu

SEQ ID NO: 214115 - RNA, 32 nt, Homo Sapiens
acacagucaccaugaagcugggcuguguccuc

SEQ ID NO: 214116 - RNA, 32 nt, Homo Sapiens
guccucccauccccucaucuucuccacuacua

SEQ ID NO: 214117 - RNA, 32 nt, Homo Sapiens
acaucaccgggcagggaggggugcugguggug

SEQ ID NO: 214118 - RNA, 32 nt, Homo Sapiens
ggcgcgcgagcaagggggaggggguguuuugg

SEQ ID NO: 214119 - RNA, 32 nt, Homo Sapiens
auggaguuucgcucuugucacccaggcaggag

SEQ ID NO: 214120 - RNA, 32 nt, Homo Sapiens
cagcugcccucccaugcucccuaccugucccc

SEQ ID NO: 214121 - RNA, 32 nt, Homo Sapiens
gugauugcuucaucuguaaaucaguuguaaac

SEQ ID NO: 214122 - RNA, 32 nt, Homo Sapiens
aguuucaccauguugguuaggcuggucucgaa

SEQ ID NO: 214123 - RNA, 32 nt, Homo Sapiens
cauuuuuucauuucucuucucauuuuucagga

SEQ ID NO: 214124 - RNA, 32 nt, Homo Sapiens
ccuggaccuguccaccugagaggccccugggg

SEQ ID NO: 214125 - RNA, 32 nt, Homo Sapiens
auaucuacaaggaaaguuaccaacuuauguag

SEQ ID NO: 214126 - RNA, 32 nt, Homo Sapiens
cauguucuguuguguugcacuuuauccugugu

SEQ ID NO: 214127 - RNA, 32 nt, Homo Sapiens
ugggcacagccugcacgugcccggcccugcuc

SEQ ID NO: 214128 - RNA, 32 nt, Homo Sapiens
ucaacauacagcauuguacauuacaaugaaaa

SEQ ID NO: 214129 - RNA, 32 nt, Homo Sapiens
cggcagagagaggaaggcagggaggugcuguc

SEQ ID NO: 214130 - RNA, 32 nt, Homo Sapiens
ucuuuguggggaagaggggcuggggcaaugca

SEQ ID NO: 214131 - RNA, 32 nt, Homo Sapiens
ggagaagggcuuugggcagugccagucuccug

SEQ ID NO: 214132 - RNA, 32 nt, Homo Sapiens
gguuuaguucugucuuuuuucuccuuuuuucu

SEQ ID NO: 214133 - RNA, 32 nt, Homo Sapiens
acggaugcuuugcgugugggauggaaaaugga

SEQ ID NO: 214134 - RNA, 32 nt, Homo Sapiens
gagcagacucacaggugcuggugcuuggauuu

SEQ ID NO: 214135 - RNA, 32 nt, Homo Sapiens
cucccccaucgugcugcaugaccuccacgcac

SEQ ID NO: 214136 - RNA, 30 nt, Homo Sapiens
ccgccggcgcccgugcggcugcggaagaac

SEQ ID NO: 214137 - RNA, 32 nt, Homo Sapiens
uuuggaaagcuauauuuuguauuuaggaaaug

SEQ ID NO: 214138 - RNA, 32 nt, Homo Sapiens
cgacccuccccggcggcgccgcgcuccgaacc

SEQ ID NO: 214139 - RNA, 32 nt, Homo Sapiens
acuucccagggcuaccggcaguccucuguagu

SEQ ID NO: 214140 - RNA, 32 nt, Homo Sapiens
agagcccgccgcgaccccgcgccgccccgccc

SEQ ID NO: 214141 - RNA, 32 nt, Homo Sapiens
auagauuugucuuuuuuacuucuccugaagga

SEQ ID NO: 214142 - RNA, 32 nt, Homo Sapiens
uaaaagacguauauucaacauaaaaucagcua

SEQ ID NO: 214143 - RNA, 32 nt, Homo Sapiens
ggagccggcgguuaucugggcggcggagcgcu

SEQ ID NO: 214144 - RNA, 32 nt, Homo Sapiens
gaugcccagacaccucucuucagggaagauga

SEQ ID NO: 214145 - RNA, 32 nt, Homo Sapiens
cagacuccuggguguuuuucuuucucauucga

SEQ ID NO: 214146 - RNA, 32 nt, Homo Sapiens
uccccucccucauuuaauuugcugcuuuuaau

SEQ ID NO: 214147 - RNA, 32 nt, Homo Sapiens
aguuacuaaaauuauguuacuguauuuuucag

SEQ ID NO: 214148 - RNA, 27 nt, Homo Sapiens
ugagaccauuaaucuaauauaauacuu

SEQ ID NO: 214149 - RNA, 32 nt, Homo Sapiens
agguaaaggagcaaagggaaugggggccccca

SEQ ID NO: 214150 - RNA, 32 nt, Homo Sapiens
ucacugaagaucugagcaugacccgggacgag

SEQ ID NO: 214151 - RNA, 32 nt, Homo Sapiens
cggccccgcgucuguugccugagucacuguau

SEQ ID NO: 214152 - RNA, 32 nt, Homo Sapiens
agguaccauaucuuacuucucuucccauuauc

SEQ ID NO: 214153 - RNA, 32 nt, Homo Sapiens
gacccugaagaauauuugaugugaugauucac

SEQ ID NO: 214154 - RNA, 32 nt, Homo Sapiens
aguagcugggauuacagguguccgccaccacg

SEQ ID NO: 214155 - RNA, 32 nt, Homo Sapiens
uaugcuuggauagauuugauaaugugucuuac

SEQ ID NO: 214156 - RNA, 32 nt, Homo Sapiens
cagugcagcagcccaggcugcccggccgagca

SEQ ID NO: 214157 - RNA, 32 nt, Homo Sapiens
guggcuggguggggcgggugcacggguggagc

SEQ ID NO: 214158 - RNA, 32 nt, Homo Sapiens
aaccuucuugucauugaaauuuggcaaagcug

SEQ ID NO: 214159 - RNA, 32 nt, Homo Sapiens
uucaccacuuagccucuuucuggcaagucauu

SEQ ID NO: 214160 - RNA, 31 nt, Homo Sapiens
ugcaagaugccccugaagcugcgggggaaga

SEQ ID NO: 214161 - RNA, 32 nt, Homo Sapiens
cuagcaccagugccagcuccaugccauugcac

SEQ ID NO: 214162 - RNA, 32 nt, Homo Sapiens
uauagaguuaguggaaggcaaguuaagagcca

SEQ ID NO: 214163 - RNA, 32 nt, Homo Sapiens
auuuauugcauucugguucuggccgcgccgcg

SEQ ID NO: 214164 - RNA, 32 nt, Homo Sapiens
ccccucccccauggagagagccagacccgagc

SEQ ID NO: 214165 - RNA, 32 nt, Homo Sapiens
aaguggacuugauuuuuauuaaggcuguuugu

SEQ ID NO: 214166 - RNA, 32 nt, Homo Sapiens
cuccguggguccguuugccagucagcccgugc

SEQ ID NO: 214167 - RNA, 32 nt, Homo Sapiens
caugccaauuuaaaguguaauuaacucaggcc

SEQ ID NO: 214168 - RNA, 32 nt, Homo Sapiens
gcacaaggcaagguguugccugcgagucuggu

SEQ ID NO: 214169 - RNA, 32 nt, Homo Sapiens
aaguccuggugucaaggggaucaagagaugac

SEQ ID NO: 214170 - RNA, 32 nt, Homo Sapiens
ccagaccugcucuugcugcugcucagguagaa

SEQ ID NO: 214171 - RNA, 32 nt, Homo Sapiens
uucuccuuggccucugggggcuccaggugcuc

SEQ ID NO: 214172 - RNA, 32 nt, Homo Sapiens
guucuaaaaauauaggagggaaauuuugaugu

SEQ ID NO: 214173 - RNA, 32 nt, Homo Sapiens
agagauaguggaggcagcaggggguacagacu

SEQ ID NO: 214174 - RNA, 32 nt, Homo Sapiens
acaaauguuuuaugguuuuuuauccucugaua

SEQ ID NO: 214175 - RNA, 32 nt, Homo Sapiens
gaguccuuugcgcggcaccuggcgacaaaaug

SEQ ID NO: 214176 - RNA, 32 nt, Homo Sapiens
ccacuugcaggccagcuuaaccucugaaacac

SEQ ID NO: 214177 - RNA, 32 nt, Homo Sapiens
ucagacauccauguuuguaaaacuacacaucc

SEQ ID NO: 214178 - RNA, 32 nt, Homo Sapiens
gcccuccccagcccggccccuuagccuccccu

SEQ ID NO: 214179 - RNA, 32 nt, Homo Sapiens
gcucucugcccaguaacaggcaucgaacggug

SEQ ID NO: 214180 - RNA, 32 nt, Homo Sapiens
gaagcagaugccgccaugagcgagaugacggg

SEQ ID NO: 214181 - RNA, 32 nt, Homo Sapiens
uggcuagaaucuaguggacaagggcagcacau

SEQ ID NO: 214182 - RNA, 32 nt, Homo Sapiens
cauauaucucaaaucuggcuacugcaaaacca

SEQ ID NO: 214183 - RNA, 32 nt, Homo Sapiens
uccgcgcgcgcccucccccgagugcggagcgg

SEQ ID NO: 214184 - RNA, 32 nt, Homo Sapiens
uuaugcuguucuucucuuuuaauuguaaguuc

SEQ ID NO: 214185 - RNA, 32 nt, Homo Sapiens
uggucaguuguaagagcaggugcaggacagug

SEQ ID NO: 214186 - RNA, 32 nt, Homo Sapiens
aaaucugcugugauucugggggcugccugauu

SEQ ID NO: 214187 - RNA, 32 nt, Homo Sapiens
aucauaguaucauuaaaguaaagauuuaaguc

SEQ ID NO: 214188 - RNA, 32 nt, Homo Sapiens
aauauguguaaguauacuuuugaaaaugagcu

SEQ ID NO: 214189 - RNA, 32 nt, Homo Sapiens
ucucaccugccacuuccccuacuauccauugu

SEQ ID NO: 214190 - RNA, 32 nt, Homo Sapiens
gggacgccgcggagucaccuccccuccuaggg

SEQ ID NO: 214191 - RNA, 32 nt, Homo Sapiens
aggucugcgcggggcggccauuggcggcggag

SEQ ID NO: 214192 - RNA, 32 nt, Homo Sapiens
agaacuggcaugggcucugaguuuugccauuc

SEQ ID NO: 214193 - RNA, 32 nt, Homo Sapiens
gaacuggauggcuggcuggcccggggcugccc

SEQ ID NO: 214194 - RNA, 32 nt, Homo Sapiens
ucuuggccccaagguugccccgggccagcagc

SEQ ID NO: 214195 - RNA, 32 nt, Homo Sapiens
cauuuucucugagacuccagcagaguuggggc

SEQ ID NO: 214196 - RNA, 32 nt, Homo Sapiens
acagagccccccggaaacucacaggggcccuc

SEQ ID NO: 214197 - RNA, 29 nt, Homo Sapiens
uuuccuaucaguuuauauuucucuaugau

SEQ ID NO: 214198 - RNA, 32 nt, Homo Sapiens
acggccugaggacauuuccaguuuucucugua

SEQ ID NO: 214199 - RNA, 32 nt, Homo Sapiens
aagcucaauuuaauggucucauaauuuccuuu

SEQ ID NO: 214200 - RNA, 32 nt, Homo Sapiens
ucaggaggggguacccugcugacgccugugac

SEQ ID NO: 214201 - RNA, 32 nt, Homo Sapiens
gucuuuaauuuaauuuuuguuuuuugccuaaa

SEQ ID NO: 214202 - RNA, 32 nt, Homo Sapiens
cggugcgggaacggggcgggguggccgcaacu

SEQ ID NO: 214203 - RNA, 32 nt, Homo Sapiens
uccccccaaccucaagcugaggaccaaggcgu

SEQ ID NO: 214204 - RNA, 32 nt, Homo Sapiens
ugaguaggaaaugaaauacuagauuagacuag

SEQ ID NO: 214205 - RNA, 32 nt, Homo Sapiens
aaauacuacagggauagcacuauaguauugua

SEQ ID NO: 214206 - RNA, 31 nt, Homo Sapiens
caagggaacauucucuccagagccuccagaa

SEQ ID NO: 214207 - RNA, 32 nt, Homo Sapiens
augacccccuccccucccauccuucaccuccu

SEQ ID NO: 214208 - RNA, 32 nt, Homo Sapiens
cugcugaggggaggggagcauggacuuggccu

SEQ ID NO: 214209 - RNA, 32 nt, Homo Sapiens
guugccacagaccuuaaauauuacaauccccc

SEQ ID NO: 214210 - RNA, 32 nt, Homo Sapiens
cugagggucuggcuguuuguguccuugggcgc

SEQ ID NO: 214211 - RNA, 32 nt, Homo Sapiens
uacuuacagaaccaccaagucaaaaugugaag

SEQ ID NO: 214212 - RNA, 32 nt, Homo Sapiens
gcaagggcccggggcggggagggcggcaggug

SEQ ID NO: 214213 - RNA, 27 nt, Homo Sapiens
uuauuuccccccuucagccccuacuaa

SEQ ID NO: 214214 - RNA, 32 nt, Homo Sapiens
ccacucuuaucaccucuccccagcaagugcug

SEQ ID NO: 214215 - RNA, 31 nt, Homo Sapiens
aagugcuauuacgaaguucaagaucaaaaag

SEQ ID NO: 214216 - RNA, 32 nt, Homo Sapiens
uccgucucaaaaaacaaacaaacaaauaaaac

SEQ ID NO: 214217 - RNA, 32 nt, Homo Sapiens
ccaguuuuuuaaaauuuuggucaaauuaugag

SEQ ID NO: 214218 - RNA, 32 nt, Homo Sapiens
ucagcuugugcuagucaucauucugauuugcu

SEQ ID NO: 214219 - RNA, 32 nt, Homo Sapiens
cucuucguagaagauuugacuaaggguguccu

SEQ ID NO: 214220 - RNA, 32 nt, Homo Sapiens
aggcuggaggaggcgugugucuggccgggccc

SEQ ID NO: 214221 - RNA, 32 nt, Homo Sapiens
ggcuaguguaacucgcaucccauugcagugcc

SEQ ID NO: 214222 - RNA, 32 nt, Homo Sapiens
gguccccagcuccccaggacucacccucauac

SEQ ID NO: 214223 - RNA, 30 nt, Homo Sapiens
acacuucucugugcucagugggagccagga

SEQ ID NO: 214224 - RNA, 32 nt, Homo Sapiens
uuaauauuguuuuauauugucauuccauuuuu

SEQ ID NO: 214225 - RNA, 31 nt, Homo Sapiens
agcuauuuaaggggagcaggagugcagaaca

SEQ ID NO: 214226 - RNA, 32 nt, Homo Sapiens
agagcagcguucugagagacgcacaggagacc

SEQ ID NO: 214227 - RNA, 32 nt, Homo Sapiens
agccugaccaacaugacaaaaccccgucucua

SEQ ID NO: 214228 - RNA, 32 nt, Homo Sapiens
ucaucuucuuaccaugaucaaaggcgaaggaa

SEQ ID NO: 214229 - RNA, 32 nt, Homo Sapiens
aacccagaugcaugugacuagaacuaucuuuu

SEQ ID NO: 214230 - RNA, 32 nt, Homo Sapiens
gcugcacuccccgccacccauccaacuggccu

SEQ ID NO: 214231 - RNA, 32 nt, Homo Sapiens
gguuggugacuugucugccuccugcuuuggga

SEQ ID NO: 214232 - RNA, 32 nt, Homo Sapiens
cuggccaggcccagagagugugucucaggaga

SEQ ID NO: 214233 - RNA, 32 nt, Homo Sapiens
uagacuucaaggacaaagacaaacaccaaucg

SEQ ID NO: 214234 - RNA, 32 nt, Homo Sapiens
ucaacagaaauccaccauauaaaccauaaucc

SEQ ID NO: 214235 - RNA, 32 nt, Homo Sapiens
ggggagaagcuaaggaaagagaaggcugcaga

SEQ ID NO: 214236 - RNA, 32 nt, Homo Sapiens
ccaaaaugaagaugugcaaaagagaugccacu

SEQ ID NO: 214237 - RNA, 32 nt, Homo Sapiens
aguggcgcacgcugggcaguggccugggcaac

SEQ ID NO: 214238 - RNA, 32 nt, Homo Sapiens
ccaccgagcccacuacgagacggagggcagcc

SEQ ID NO: 214239 - RNA, 32 nt, Homo Sapiens
gugccaugcuuccucugcagccugcagaacug

SEQ ID NO: 214240 - RNA, 32 nt, Homo Sapiens
cuuuaauuugaaacuuaagaaaaugaauuuau

SEQ ID NO: 214241 - RNA, 32 nt, Homo Sapiens
cagccauaggccgguguguuccgcguuugugc

SEQ ID NO: 214242 - RNA, 32 nt, Homo Sapiens
cuuucauuuuugguagcugcuuaaacagguug

SEQ ID NO: 214243 - RNA, 32 nt, Homo Sapiens
gguuuucuuaccccuacuucugucaucuucuc

SEQ ID NO: 214244 - RNA, 31 nt, Homo Sapiens
ggcauggagcaaaaacagguagacaaccaca

SEQ ID NO: 214245 - RNA, 32 nt, Homo Sapiens
gucuaaagaaaauuauuugcugaguccucaua

SEQ ID NO: 214246 - RNA, 32 nt, Homo Sapiens
augucuuaauaaacauguggcagcuuuuguuu

SEQ ID NO: 214247 - RNA, 32 nt, Homo Sapiens
cccggcccgagccugcccuacccggcgguggc

SEQ ID NO: 214248 - RNA, 32 nt, Homo Sapiens
ucuguguguuucaagaaauucaccaugucagc

SEQ ID NO: 214249 - RNA, 32 nt, Homo Sapiens
gucccaaagaauaccguuugcaggacuacaca

SEQ ID NO: 214250 - RNA, 32 nt, Homo Sapiens
ugaggauccugaggaaaacuaaguauauacug

SEQ ID NO: 214251 - RNA, 32 nt, Homo Sapiens
uccugagguaaacaaauugaaaaaaugagcga

SEQ ID NO: 214252 - RNA, 32 nt, Homo Sapiens
ucgguggagcuggagggcaucaucaugagucu

SEQ ID NO: 214253 - RNA, 32 nt, Homo Sapiens
uacccuccaagguugcaccugucuaacuauga

SEQ ID NO: 214254 - RNA, 32 nt, Homo Sapiens
aacagcuccagcuggcagcaucacuucccgcc

SEQ ID NO: 214255 - RNA, 32 nt, Homo Sapiens
gucucccccuucccuccccaccggcccggggg

SEQ ID NO: 214256 - RNA, 32 nt, Homo Sapiens
uuccuuucagaguuuuacuaagaucacacaaa

SEQ ID NO: 214257 - RNA, 32 nt, Homo Sapiens
ccagcuggcagugccgcccaccacgugcacug

SEQ ID NO: 214258 - RNA, 32 nt, Homo Sapiens
caggccgcggcugucuguguguccuucugagu

SEQ ID NO: 214259 - RNA, 32 nt, Homo Sapiens
gugagccucuccauaauuagugccaaccauua

SEQ ID NO: 214260 - RNA, 32 nt, Homo Sapiens
cccuaaguugucacucaguuuaauuucuuuua

SEQ ID NO: 214261 - RNA, 32 nt, Homo Sapiens
gguuucaccauguuggucgggcuggucuggaa

SEQ ID NO: 214262 - RNA, 32 nt, Homo Sapiens
gggcugaaaacugcuuguuucguggaaaagca

SEQ ID NO: 214263 - RNA, 32 nt, Homo Sapiens
cccggcuccguacuccggccccggccugcgcc

SEQ ID NO: 214264 - RNA, 32 nt, Homo Sapiens
gcgcaucggccaucaccgcgcggccgcgcagc

SEQ ID NO: 214265 - RNA, 32 nt, Homo Sapiens
cuuccuucccucccuuucugauacagugacug

SEQ ID NO: 214266 - RNA, 32 nt, Homo Sapiens
auguuuacaucaucagaugauccacagaauuc

SEQ ID NO: 214267 - RNA, 32 nt, Homo Sapiens
aaccuugccuuucucgauuuuaucuuucgcac

SEQ ID NO: 214268 - RNA, 32 nt, Homo Sapiens
acuuggggaaaggguuaucagagccuagaggg

SEQ ID NO: 214269 - RNA, 32 nt, Homo Sapiens
aguugaaaauacauucuuaaacuaguugucug

SEQ ID NO: 214270 - RNA, 32 nt, Homo Sapiens
acccaugaaaaacaagucagagagugaaggcu

SEQ ID NO: 214271 - RNA, 32 nt, Homo Sapiens
cgccguccggacucccagcucccggcccggca

SEQ ID NO: 214272 - RNA, 32 nt, Homo Sapiens
acauaucauguacaguuuuauuuuauaacgug

SEQ ID NO: 214273 - RNA, 32 nt, Homo Sapiens
uuuuuccuugguuuuguugccuguuagggcug

SEQ ID NO: 214274 - RNA, 32 nt, Homo Sapiens
aaccuaagaacaaauguaaaaguaaagaugca

SEQ ID NO: 214275 - RNA, 32 nt, Homo Sapiens
uuuccgcgcggcaggcgcggccauggcgcagc

SEQ ID NO: 214276 - RNA, 32 nt, Homo Sapiens
gccuuggggaccagcugaguuuccagcuggca

SEQ ID NO: 214277 - RNA, 32 nt, Homo Sapiens
cuggagcccagauuucaaguuuugaguaaaau

SEQ ID NO: 214278 - RNA, 32 nt, Homo Sapiens
uaauuuuacuucuuucuuucugauuuggaugg

SEQ ID NO: 214279 - RNA, 32 nt, Homo Sapiens
uccaauggcaaacugcccuuucuggaauguuc

SEQ ID NO: 214280 - RNA, 32 nt, Homo Sapiens
auggguguuccacuucaucuuauuuuuucuac

SEQ ID NO: 214281 - RNA, 32 nt, Homo Sapiens
auugguuagcaacauuuggagagaugaaauug

SEQ ID NO: 214282 - RNA, 32 nt, Homo Sapiens
gccauccuuguacaguguuaagaggguaacau

SEQ ID NO: 214283 - RNA, 32 nt, Homo Sapiens
cucccuucuguccucagcaaggcucgguccug

SEQ ID NO: 214284 - RNA, 32 nt, Homo Sapiens
cauuggcuucucccugcaccagcccuguccuc

SEQ ID NO: 214285 - RNA, 31 nt, Homo Sapiens
aacuguaugggcacucucagcccugguuuuu

SEQ ID NO: 214286 - RNA, 32 nt, Homo Sapiens
gaagagggcgucugcuggagguuccaggcccc

SEQ ID NO: 214287 - RNA, 32 nt, Homo Sapiens
gccgagccgagcugggggcgcagagcgcggga

SEQ ID NO: 214288 - RNA, 32 nt, Homo Sapiens
cacacacacccccacacacacacacacgacag

SEQ ID NO: 214289 - RNA, 32 nt, Homo Sapiens
uagagggaaaccgagcuggccuggccagagcc

SEQ ID NO: 214290 - RNA, 32 nt, Homo Sapiens
augcagcugguaaaguuggaagaauaaaguua

SEQ ID NO: 214291 - RNA, 32 nt, Homo Sapiens
cagaacgcccuucuuucccccacacgacccuc

SEQ ID NO: 214292 - RNA, 32 nt, Homo Sapiens
gcuugacaagucaggauugugccuccagucag

SEQ ID NO: 214293 - RNA, 32 nt, Homo Sapiens
uacauuguucuucauguaaauucagcuuaacc

SEQ ID NO: 214294 - RNA, 32 nt, Homo Sapiens
gacgguccugacgguggggacaucaggcugcc

SEQ ID NO: 214295 - RNA, 32 nt, Homo Sapiens
aaggccagagaauggcaggggaacagaaaccc

SEQ ID NO: 214296 - RNA, 32 nt, Homo Sapiens
acagagacaaaguggaauggaggccugggggc

SEQ ID NO: 214297 - RNA, 32 nt, Homo Sapiens
uggcugggcccuggagaguccuguuugcacag

SEQ ID NO: 214298 - RNA, 32 nt, Homo Sapiens
gagccuuuggacuucucuccaagccccugugg

SEQ ID NO: 214299 - RNA, 32 nt, Homo Sapiens
guucaagauaaaacuguuuuaagauauacgug

SEQ ID NO: 214300 - RNA, 32 nt, Homo Sapiens
aaaaugcuuuugauucugaaaauugggggaaa

SEQ ID NO: 214301 - RNA, 32 nt, Homo Sapiens
gggcuguugcuuagggucuucuggguggacac

SEQ ID NO: 214302 - RNA, 32 nt, Homo Sapiens
caaucuuguuuguccaucuacaugguuugucg

SEQ ID NO: 214303 - RNA, 32 nt, Homo Sapiens
cuaaagcaggccccuccaccugggcgccuucg

SEQ ID NO: 214304 - RNA, 32 nt, Homo Sapiens
cguccacccacagaccccggggagcgcaggga

SEQ ID NO: 214305 - RNA, 32 nt, Homo Sapiens
gaacgagcacaauaugaaaaacaauuagagca

SEQ ID NO: 214306 - RNA, 32 nt, Homo Sapiens
gcuguguaaagaaaugggaaaagggaaaagga

SEQ ID NO: 214307 - RNA, 32 nt, Homo Sapiens
gaaaguuugcugucacaucuccauuaugacaa

SEQ ID NO: 214308 - RNA, 32 nt, Homo Sapiens
caacagauguccaugaaagaaugacccuggug

SEQ ID NO: 214309 - RNA, 32 nt, Homo Sapiens
uuucaagaacaguuuuagauuuacagaaauac

SEQ ID NO: 214310 - RNA, 32 nt, Homo Sapiens
uuguaaauaauuuauuugauuggugcaguucu

SEQ ID NO: 214311 - RNA, 32 nt, Homo Sapiens
ccguguaaagucauugaaguugugaaagucua

SEQ ID NO: 214312 - RNA, 32 nt, Homo Sapiens
agcaugucuuauuuaaaacuguaauuuauggg

SEQ ID NO: 214313 - RNA, 32 nt, Homo Sapiens
uccauauaaaaugguauuugaaagugagaguu

SEQ ID NO: 214314 - RNA, 32 nt, Homo Sapiens
ucuggaagguaaccagaggucuuuccccuuuc

SEQ ID NO: 214315 - RNA, 32 nt, Homo Sapiens
gaaacauccuuuaguuuacaaaacaguuauuc

SEQ ID NO: 214316 - RNA, 32 nt, Homo Sapiens
gaaucugguguuggggaaaccuucaucugaaa

SEQ ID NO: 214317 - RNA, 32 nt, Homo Sapiens
cugaucuuuuccaaguucccaaggccuacagc

SEQ ID NO: 214318 - RNA, 32 nt, Homo Sapiens
uaggagaccuggggcaaggcccccuguggacg

SEQ ID NO: 214319 - RNA, 32 nt, Homo Sapiens
gagcgcgggcggcgcggacggcagcgguuggc

SEQ ID NO: 214320 - RNA, 32 nt, Homo Sapiens
uuccuuuuaauuuuauuaacugaucuuuggaa

SEQ ID NO: 214321 - RNA, 32 nt, Homo Sapiens
gucugggcccuucucaggauccucaucuccau

SEQ ID NO: 214322 - RNA, 32 nt, Homo Sapiens
cccaccugccagcgggcucggcccuguccucc

SEQ ID NO: 214323 - RNA, 32 nt, Homo Sapiens
cuaugggucuuugcuuccccagccagccucuc

SEQ ID NO: 214324 - RNA, 32 nt, Homo Sapiens
cccaaccauggcguccuccgcggccggcugcg

SEQ ID NO: 214325 - RNA, 32 nt, Homo Sapiens
accacucgacuguuugccuguuucuugaaaac

SEQ ID NO: 214326 - RNA, 32 nt, Homo Sapiens
uuggcucaaggauguggauacaggaagccuac

SEQ ID NO: 214327 - RNA, 32 nt, Homo Sapiens
gugcguagucccugcaaggugcucucugaaua

SEQ ID NO: 214328 - RNA, 32 nt, Homo Sapiens
caagaccccccucucuuccccacuggguucug

SEQ ID NO: 214329 - RNA, 32 nt, Homo Sapiens
ccuuauuucacugguuacaucuaccuuggcua

SEQ ID NO: 214330 - RNA, 32 nt, Homo Sapiens
cgaauccacaguguuaucuguguaaauagcuu

SEQ ID NO: 214331 - RNA, 32 nt, Homo Sapiens
gcggcuucuucaugcuuuuucuucucaccauu

SEQ ID NO: 214332 - RNA, 32 nt, Homo Sapiens
uuacguaccacacuuuuuuuuaucuguauuua

SEQ ID NO: 214333 - RNA, 32 nt, Homo Sapiens
ucagcugccugaacuuuuuuuuucccuuguag

SEQ ID NO: 214334 - RNA, 32 nt, Homo Sapiens
acaauucucaauugaaaauaaaacaucuuacc

SEQ ID NO: 214335 - RNA, 26 nt, Homo Sapiens
cauggccgccacugccucuccgcagc

SEQ ID NO: 214336 - RNA, 32 nt, Homo Sapiens
guuaaaagucaagccgcaccccucuggugauc

SEQ ID NO: 214337 - RNA, 32 nt, Homo Sapiens
acagauucgggugccggcaccuccccugaguc

SEQ ID NO: 214338 - RNA, 30 nt, Homo Sapiens
aguaaagagaagcucuucucaguuuguuug

SEQ ID NO: 214339 - RNA, 32 nt, Homo Sapiens
acuggaugggccgccgcaccgcgagccugguc

SEQ ID NO: 214340 - RNA, 32 nt, Homo Sapiens
gguaucaguuuaauguugaagaauugaccuca

SEQ ID NO: 214341 - RNA, 32 nt, Homo Sapiens
ccuggaggcagucggccugcagugccagacuc

SEQ ID NO: 214342 - RNA, 32 nt, Homo Sapiens
cggccccucccucucccugcugguuuuaguug

SEQ ID NO: 214343 - RNA, 32 nt, Homo Sapiens
cuggggguccccgcaugaggggugcuguguag

SEQ ID NO: 214344 - RNA, 32 nt, Homo Sapiens
cuagcagcuggccuccauggccccacagccuc

SEQ ID NO: 214345 - RNA, 32 nt, Homo Sapiens
cucuagggaccccucgccccagccucauuccc

SEQ ID NO: 214346 - RNA, 32 nt, Homo Sapiens
uguuauaguagccuaaagagacuaagagagca

SEQ ID NO: 214347 - RNA, 32 nt, Homo Sapiens
cggcuccgccgcucgcagagagauucggagga

SEQ ID NO: 214348 - RNA, 32 nt, Homo Sapiens
uucaaaaguaguugugaaauuugagaauuugu

SEQ ID NO: 214349 - RNA, 32 nt, Homo Sapiens
ucacagcuaaacuuacuaauucugauuuuagu

SEQ ID NO: 214350 - RNA, 32 nt, Homo Sapiens
agccgacgccuauguucucacagcuuuaugau

SEQ ID NO: 214351 - RNA, 32 nt, Homo Sapiens
ugugucugugaaagugccaagaaccccucccc

SEQ ID NO: 214352 - RNA, 32 nt, Homo Sapiens
cacuccuccccgcucaugucccacaccugcca

SEQ ID NO: 214353 - RNA, 32 nt, Homo Sapiens
uagaaaauauauuaggugacuauuuuagagcu

SEQ ID NO: 214354 - RNA, 32 nt, Homo Sapiens
aacuuaaaaaauaucacugugaacaacuuaca

SEQ ID NO: 214355 - RNA, 32 nt, Homo Sapiens
gaaauauguaaagugauggauuaggguucucc

SEQ ID NO: 214356 - RNA, 29 nt, Homo Sapiens
uguaauguacaguuauauuugucuauaaa

SEQ ID NO: 214357 - RNA, 32 nt, Homo Sapiens
uuguuaaaacaaagaaagcauuguaccucuca

SEQ ID NO: 214358 - RNA, 32 nt, Homo Sapiens
aaguucacagaaacagaaaggagaauaguggu

SEQ ID NO: 214359 - RNA, 32 nt, Homo Sapiens
ugcuccacccucgagggcagccagacagcguc

SEQ ID NO: 214360 - RNA, 32 nt, Homo Sapiens
aaaaugagaaaguuaauauguggccuccuuuu

SEQ ID NO: 214361 - RNA, 32 nt, Homo Sapiens
uacagagccauaucaagcuccuuuuuccggcu

SEQ ID NO: 214362 - RNA, 32 nt, Homo Sapiens
acugcgacaauuuugggggaccaugugugcag

SEQ ID NO: 214363 - RNA, 32 nt, Homo Sapiens
cucuggcucuccccggagcagggcuugccgcu

SEQ ID NO: 214364 - RNA, 32 nt, Homo Sapiens
caauauugaaaaauuccacauaaaaucaggaa

SEQ ID NO: 214365 - RNA, 32 nt, Homo Sapiens
acauaguaaucuuuuccaguuaugucugauua

SEQ ID NO: 214366 - RNA, 32 nt, Homo Sapiens
uuacuguucucuggcuuuuggucccagccgga

SEQ ID NO: 214367 - RNA, 32 nt, Homo Sapiens
uccaccugugaucaccucccccugcuuccugc

SEQ ID NO: 214368 - RNA, 28 nt, Homo Sapiens
aggaugcugccugggcggcugugcuggg

SEQ ID NO: 214369 - RNA, 32 nt, Homo Sapiens
ccuauagauuuuuguauuuuuaucuucugucu

SEQ ID NO: 214370 - RNA, 32 nt, Homo Sapiens
cgcccaggagggguggggaggggggcgaggag

SEQ ID NO: 214371 - RNA, 32 nt, Homo Sapiens
cccuaguuuuauucugauucuccucauucccu

SEQ ID NO: 214372 - RNA, 32 nt, Homo Sapiens
acaggccuuccuuaccguguccugcuuagggg

SEQ ID NO: 214373 - RNA, 32 nt, Homo Sapiens
uuggccccaguuuuccucuggggcucuucccu

SEQ ID NO: 214374 - RNA, 32 nt, Homo Sapiens
cccugucgucccaaagcccccggggcucagcc

SEQ ID NO: 214375 - RNA, 32 nt, Homo Sapiens
acuaaaagguaacauuuuccacucucaaguuu

SEQ ID NO: 214376 - RNA, 32 nt, Homo Sapiens
cacaguggcuccugcagugugaucagcaggag

SEQ ID NO: 214377 - RNA, 32 nt, Homo Sapiens
ugguccuugcuggccugcccaggaggcaugga

SEQ ID NO: 214378 - RNA, 32 nt, Homo Sapiens
aauaauuuuaauaagcucuuauacuaaaaagc

SEQ ID NO: 214379 - RNA, 32 nt, Homo Sapiens
cagggaaagggaggggggcaugugagggaugg

SEQ ID NO: 214380 - RNA, 32 nt, Homo Sapiens
cccccaaaaugcugucuccagcucacacagca

SEQ ID NO: 214381 - RNA, 32 nt, Homo Sapiens
gauagagucuucccuggcauugcaggagagaa

SEQ ID NO: 214382 - RNA, 32 nt, Homo Sapiens
ucagcccucacagcucucuccuccccgaggga

SEQ ID NO: 214383 - RNA, 32 nt, Homo Sapiens
auacaauuuccauuuuauaguuaagaaccauc

SEQ ID NO: 214384 - RNA, 32 nt, Homo Sapiens
cuucgcuccguccaagccgcagcgccgcaaga

SEQ ID NO: 214385 - RNA, 32 nt, Homo Sapiens
ucacuucccuccccaggccccaaagcacccca

SEQ ID NO: 214386 - RNA, 32 nt, Homo Sapiens
agggucuucccgguaccggcaggccgcggcgg

SEQ ID NO: 214387 - RNA, 32 nt, Homo Sapiens
ggagcaguggggaaccgucggaugcuucaacu

SEQ ID NO: 214388 - RNA, 32 nt, Homo Sapiens
uacaaaaauaccauaaaaauacauaaaaucug

SEQ ID NO: 214389 - RNA, 32 nt, Homo Sapiens
agaccaggcggcuggaggacaagcggcucuaa

SEQ ID NO: 214390 - RNA, 32 nt, Homo Sapiens
ccaaagagcugggauuacaggugugagcuacc

SEQ ID NO: 214391 - RNA, 32 nt, Homo Sapiens
cguccgggaugagcucagccgcggccgaccac

SEQ ID NO: 214392 - RNA, 32 nt, Homo Sapiens
ggucugcccgccccaaaccuuacaauccuccu

SEQ ID NO: 214393 - RNA, 32 nt, Homo Sapiens
cugggggagcggggcgcgggcgcgcaggguca

SEQ ID NO: 214394 - RNA, 32 nt, Homo Sapiens
cuuccuaauguaaaauaaaauaaaacacaucu

SEQ ID NO: 214395 - RNA, 32 nt, Homo Sapiens
auuuuaaggguuugaggguacagucccuuaac

SEQ ID NO: 214396 - RNA, 32 nt, Homo Sapiens
agugaacucccucuguccccagggccucccuu

SEQ ID NO: 214397 - RNA, 32 nt, Homo Sapiens
uuaucuugacuucugguaauuuauguucacua

SEQ ID NO: 214398 - RNA, 32 nt, Homo Sapiens
cugugggccugaagcaguuccacacugagcgc

SEQ ID NO: 214399 - RNA, 32 nt, Homo Sapiens
uggucccugccagacugguggugccucucuac

SEQ ID NO: 214400 - RNA, 32 nt, Homo Sapiens
cacucagaauccagccacuguguacuggaauc

SEQ ID NO: 214401 - RNA, 32 nt, Homo Sapiens
uaguaucuagaauggcagguggugcauaaaag

SEQ ID NO: 214402 - RNA, 32 nt, Homo Sapiens
gaaugcccccauugagguucacuuccuggauc

SEQ ID NO: 214403 - RNA, 32 nt, Homo Sapiens
ucuuucagaaaauauaagcuuuuuuagugaag

SEQ ID NO: 214404 - RNA, 32 nt, Homo Sapiens
gggggaaaauuuagaaauauaauugacaggau

SEQ ID NO: 214405 - RNA, 32 nt, Homo Sapiens
uugagauaguuuaauguaaaucugacaggagc

SEQ ID NO: 214406 - RNA, 32 nt, Homo Sapiens
gucuuccugucauuguauuuggcacaugaaua

SEQ ID NO: 214407 - RNA, 32 nt, Homo Sapiens
gggcgcaggaggcccacucccccgacuggguc

SEQ ID NO: 214408 - RNA, 32 nt, Homo Sapiens
gagcuucagauaccgcgccgcugcacggcucu

SEQ ID NO: 214409 - RNA, 32 nt, Homo Sapiens
cgggagaacgucugcgcgaagccccggugcag

SEQ ID NO: 214410 - RNA, 32 nt, Homo Sapiens
aagguagagauuaauacauaacacgguauaac

SEQ ID NO: 214411 - RNA, 32 nt, Homo Sapiens
gagccccgcugcacugcucugcagacccauug

SEQ ID NO: 214412 - RNA, 32 nt, Homo Sapiens
gaaccccacagcuggauaaggcccguauauau

SEQ ID NO: 214413 - RNA, 32 nt, Homo Sapiens
aguuugguuugcauuguauaucaauaauuaau

SEQ ID NO: 214414 - RNA, 32 nt, Homo Sapiens
aucaggagaauuaaaaucauagaauguuguac

SEQ ID NO: 214415 - RNA, 30 nt, Homo Sapiens
ggcucguggggcgccuggagugaggguucu

SEQ ID NO: 214416 - RNA, 29 nt, Homo Sapiens
agccaugguggcggcgacgguggcagcgg

SEQ ID NO: 214417 - RNA, 32 nt, Homo Sapiens
gucaggccgcacuggccugccccagcucucag

SEQ ID NO: 214418 - RNA, 32 nt, Homo Sapiens
auggucaugaggcgauuuaaauuugugccaca

SEQ ID NO: 214419 - RNA, 32 nt, Homo Sapiens
uaaggaccuuggaaugacguccccauuucugc

SEQ ID NO: 214420 - RNA, 32 nt, Homo Sapiens
ggggguuuuauauuaaagaaauuaagacuaca

SEQ ID NO: 214421 - RNA, 32 nt, Homo Sapiens
aauuuugcauauucucuauuuuacuuuucugc

SEQ ID NO: 214422 - RNA, 32 nt, Homo Sapiens
uggugccaggagccuuccugugcuccccauug

SEQ ID NO: 214423 - RNA, 31 nt, Homo Sapiens
uucugcacaaagaauaaaauuaaggauuuua

SEQ ID NO: 214424 - RNA, 32 nt, Homo Sapiens
acaauuccaauggauuuugugcucuuuuugaa

SEQ ID NO: 214425 - RNA, 32 nt, Homo Sapiens
ggagaggaacuaaaaggaucucugugucuaug

SEQ ID NO: 214426 - RNA, 32 nt, Homo Sapiens
ucccugagacacaacaguauugaaauugggcc

SEQ ID NO: 214427 - RNA, 32 nt, Homo Sapiens
aaaggaagcauccacaccccaacucccggaca

SEQ ID NO: 214428 - RNA, 32 nt, Homo Sapiens
acaaggacuaagagucagaauguugacacuuu

SEQ ID NO: 214429 - RNA, 32 nt, Homo Sapiens
aagcaagagauuacacagaacaaaucuuucuu

SEQ ID NO: 214430 - RNA, 32 nt, Homo Sapiens
agcaccccacgcuugcugcccgagggccucuu

SEQ ID NO: 214431 - RNA, 31 nt, Homo Sapiens
uggcgucucuggagaaaguuuuucagaagaa

SEQ ID NO: 214432 - RNA, 32 nt, Homo Sapiens
gccacggcucugcacggcagcggggagccgaa

SEQ ID NO: 214433 - RNA, 32 nt, Homo Sapiens
gcacagguggccuggguugcuugcacuugggg

SEQ ID NO: 214434 - RNA, 32 nt, Homo Sapiens
ggcgugacuucacuacuuuuaagcaaaagagu

SEQ ID NO: 214435 - RNA, 32 nt, Homo Sapiens
cagacacugacaagcacgcacacacacgcaaa

SEQ ID NO: 214436 - RNA, 32 nt, Homo Sapiens
gucucagaaugggacugccaacuggcucauug

SEQ ID NO: 214437 - RNA, 32 nt, Homo Sapiens
gaccuccaggugccgguugcugggcucacauc

SEQ ID NO: 214438 - RNA, 32 nt, Homo Sapiens
ugaagauugcuuguggcuuaucaguggucccu

SEQ ID NO: 214439 - RNA, 32 nt, Homo Sapiens
auggacauggucuccccguaccucugacucca

SEQ ID NO: 214440 - RNA, 32 nt, Homo Sapiens
gcgaaaguggauuuaauacagucacugagaaa

SEQ ID NO: 214441 - RNA, 32 nt, Homo Sapiens
aucauugauguguucaaacuguuuacaaggag

SEQ ID NO: 214442 - RNA, 32 nt, Homo Sapiens
uuuaaaaucaauuuuguugauuguaguaauuu

SEQ ID NO: 214443 - RNA, 32 nt, Homo Sapiens
cuggccaaaaccuggccgucucuucuauucac

SEQ ID NO: 214444 - RNA, 32 nt, Homo Sapiens
aggcuccucacaggcgcugugaauuuuuguac

SEQ ID NO: 214445 - RNA, 32 nt, Homo Sapiens
ucagaagguucuuuuaugucaaaaaaccugcu

SEQ ID NO: 214446 - RNA, 32 nt, Homo Sapiens
uaugugcauuugguaucaugggccguggaaca

SEQ ID NO: 214447 - RNA, 32 nt, Homo Sapiens
ggggcgugccagccuggcaggagugggaagca

SEQ ID NO: 214448 - RNA, 32 nt, Homo Sapiens
uccaccugccccagccccugccucugcccaag

SEQ ID NO: 214449 - RNA, 32 nt, Homo Sapiens
guucacugcagccucugccuucugggcucacg

SEQ ID NO: 214450 - RNA, 32 nt, Homo Sapiens
aaauggaagggagagcugggcauggcgguuca

SEQ ID NO: 214451 - RNA, 32 nt, Homo Sapiens
aaauaaaguauuuauuuuaugccucaguauau

SEQ ID NO: 214452 - RNA, 32 nt, Homo Sapiens
ccucaacaccggggaaaguuuuguaacuggau

SEQ ID NO: 214453 - RNA, 32 nt, Homo Sapiens
gggcgagaaggggaagagcaggcugcgccagg

SEQ ID NO: 214454 - RNA, 32 nt, Homo Sapiens
accaugccuggcuaaugaccucuucuuuugua

SEQ ID NO: 214455 - RNA, 32 nt, Homo Sapiens
ccacccucggaacccagacgcaugcccacaug

SEQ ID NO: 214456 - RNA, 32 nt, Homo Sapiens
cucuguguuaaacauauauacaugaucgauuu

SEQ ID NO: 214457 - RNA, 32 nt, Homo Sapiens
ucugcgggccugcacaggaaaaacagagccaa

SEQ ID NO: 214458 - RNA, 32 nt, Homo Sapiens
caguuccuuagcuccccuccccaguccacaga

SEQ ID NO: 214459 - RNA, 32 nt, Homo Sapiens
ugaauguaacaagcuucaauuucucauuugug

SEQ ID NO: 214460 - RNA, 32 nt, Homo Sapiens
gcauacuucuaagucagagccucuauuuuggu

SEQ ID NO: 214461 - RNA, 32 nt, Homo Sapiens
gaguucggugcuaaccucccucacgcggcggu

SEQ ID NO: 214462 - RNA, 32 nt, Homo Sapiens
gucuaguaagugggguaauuguuacuuuuauu

SEQ ID NO: 214463 - RNA, 32 nt, Homo Sapiens
uaacccuccuagaagcucuaugugugcaguuc

SEQ ID NO: 214464 - RNA, 30 nt, Homo Sapiens
acucuuggcugugcuggccaggugacuccu

SEQ ID NO: 214465 - RNA, 32 nt, Homo Sapiens
aaaaacugccccccuccuuuccaaauaagugc

SEQ ID NO: 214466 - RNA, 32 nt, Homo Sapiens
aaacauuagcccggcgugguggcgugugccug

SEQ ID NO: 214467 - RNA, 32 nt, Homo Sapiens
gacgcucguccgcaaccucugcuguccuccgc

SEQ ID NO: 214468 - RNA, 32 nt, Homo Sapiens
ccugcuauuucuggauuuaugaggcaauggua

SEQ ID NO: 214469 - RNA, 32 nt, Homo Sapiens
agagugggucaggggagaaggaaaagagguca

SEQ ID NO: 214470 - RNA, 32 nt, Homo Sapiens
uggaguucucaaccaaaaaagcacuaauuuca

SEQ ID NO: 214471 - RNA, 32 nt, Homo Sapiens
accagggcggcacgcuggccggggaccucugc

SEQ ID NO: 214472 - RNA, 32 nt, Homo Sapiens
uagcugggaccacacgcaugcgccaccacgcc

SEQ ID NO: 214473 - RNA, 32 nt, Homo Sapiens
ggagugugaggguccugcagccugcaggaccu

SEQ ID NO: 214474 - RNA, 32 nt, Homo Sapiens
ugugcagcaaaguggcuaauuacucauuaaau

SEQ ID NO: 214475 - RNA, 32 nt, Homo Sapiens
cacuguggcugcauuuuaauucuuauuuuuua

SEQ ID NO: 214476 - RNA, 32 nt, Homo Sapiens
cccagagggccuaggagaagugcuguauagag

SEQ ID NO: 214477 - RNA, 32 nt, Homo Sapiens
cuggauccuccaacagugucaggguuagaugc

SEQ ID NO: 214478 - RNA, 32 nt, Homo Sapiens
auggaaaacaauuuaaccuauuuugaagucau

SEQ ID NO: 214479 - RNA, 32 nt, Homo Sapiens
auuuaugcuauuuaauuuugugaaacuuaauc

SEQ ID NO: 214480 - RNA, 32 nt, Homo Sapiens
gagggaaacaacacacacuggggccuaugaga

SEQ ID NO: 214481 - RNA, 32 nt, Homo Sapiens
acuuugaauuaugccaguacuacauuguaaaa

SEQ ID NO: 214482 - RNA, 32 nt, Homo Sapiens
cgcgccgacgggcagggaggcugcuggauggg

SEQ ID NO: 214483 - RNA, 32 nt, Homo Sapiens
ggaagucagaggugggggcguuagugagcuau

SEQ ID NO: 214484 - RNA, 32 nt, Homo Sapiens
uggauuuguaaaauaagugugugugagacacu

SEQ ID NO: 214485 - RNA, 32 nt, Homo Sapiens
accuguggaucucccuucgagaucauccaaag

SEQ ID NO: 214486 - RNA, 32 nt, Homo Sapiens
cuggagcuuccuccgcggggcccccaggcccg

SEQ ID NO: 214487 - RNA, 32 nt, Homo Sapiens
uucauaagcuuucuuuuucccauuuuuaugug

SEQ ID NO: 214488 - RNA, 32 nt, Homo Sapiens
cucaagaaaaggaaagggaggcugagcagugg

SEQ ID NO: 214489 - RNA, 32 nt, Homo Sapiens
cugcaaaaugggcaugauaagagccuuugaca

SEQ ID NO: 214490 - RNA, 32 nt, Homo Sapiens
ccagggcagggccauucuccaccuuacugaca

SEQ ID NO: 214491 - RNA, 32 nt, Homo Sapiens
aguugcugagcugggcuuggcuccuuucugga

SEQ ID NO: 214492 - RNA, 32 nt, Homo Sapiens
agaccccgacagaggacgcuugagccagaauc

SEQ ID NO: 214493 - RNA, 32 nt, Homo Sapiens
gggaggcaagaggacgccaagcaaggaguggu

SEQ ID NO: 214494 - RNA, 32 nt, Homo Sapiens
caagugucaccgugagcuggccugugugagcc

SEQ ID NO: 214495 - RNA, 32 nt, Homo Sapiens
uuggugacguucuuccuagcaguguuaauaca

SEQ ID NO: 214496 - RNA, 32 nt, Homo Sapiens
ggcaaggacaaguacauguguacuuacagagg

SEQ ID NO: 214497 - RNA, 32 nt, Homo Sapiens
ugauacaaaugaauuauuugaauccacagaag

SEQ ID NO: 214498 - RNA, 32 nt, Homo Sapiens
caguacaucgacgggcagggucggccucgcac

SEQ ID NO: 214499 - RNA, 31 nt, Homo Sapiens
cccacgcagccccagaagaggacacaccagc

SEQ ID NO: 214500 - RNA, 32 nt, Homo Sapiens
ggucuccauggcgacgccuccaaacagcagau

SEQ ID NO: 214501 - RNA, 32 nt, Homo Sapiens
uagaucauaguagauacugguuuucuauuaac

SEQ ID NO: 214502 - RNA, 32 nt, Homo Sapiens
guggcgaauggcagcacagcgcgguggcuggg

SEQ ID NO: 214503 - RNA, 32 nt, Homo Sapiens
gcucgccagcccagacucggcccuggcagugg

SEQ ID NO: 214504 - RNA, 32 nt, Homo Sapiens
cagcccccuuucccuuccuccuccuccagaug

SEQ ID NO: 214505 - RNA, 32 nt, Homo Sapiens
auaguaccaggcaaagauuuucuucaacuaua

SEQ ID NO: 214506 - RNA, 31 nt, Homo Sapiens
aggagaaaacacugacaaagagccuggugua

SEQ ID NO: 214507 - RNA, 32 nt, Homo Sapiens
uucccggccccggccccccacccauccccgug

SEQ ID NO: 214508 - RNA, 32 nt, Homo Sapiens
aauuuauuacaagcauaacauggagcucuugu

SEQ ID NO: 214509 - RNA, 32 nt, Homo Sapiens
agaugccagggaagaggauaucauacuugaag

SEQ ID NO: 214510 - RNA, 32 nt, Homo Sapiens
guggcuggaauugcaggcacccgccaccacgc

SEQ ID NO: 214511 - RNA, 32 nt, Homo Sapiens
ccauccccauccccaggauucccaccuccuag

SEQ ID NO: 214512 - RNA, 32 nt, Homo Sapiens
gguuggucucgaacucuugaccucaagugauc

SEQ ID NO: 214513 - RNA, 29 nt, Homo Sapiens
cuaagcuggggacagggcaggcccggacc

SEQ ID NO: 214514 - RNA, 32 nt, Homo Sapiens
uucuguugauagcucuuaauuuuguuauacag

SEQ ID NO: 214515 - RNA, 32 nt, Homo Sapiens
uagucccucccuucccucuccuugagugcauu

SEQ ID NO: 214516 - RNA, 32 nt, Homo Sapiens
gauugugguuuaggauguuacaguacuaauac

SEQ ID NO: 214517 - RNA, 32 nt, Homo Sapiens
gcgccuucguccucgaguggacuuagagccag

SEQ ID NO: 214518 - RNA, 32 nt, Homo Sapiens
ucccucagccaggcaggguugcagcugagggc

SEQ ID NO: 214519 - RNA, 32 nt, Homo Sapiens
aaggcgccaucgggggugcaggugcugaugag

SEQ ID NO: 214520 - RNA, 32 nt, Homo Sapiens
cucaugaucucccacuuucucuagcugcagcc

SEQ ID NO: 214521 - RNA, 32 nt, Homo Sapiens
gcuagcucuuuccuaaugagcuuuacagcaga

SEQ ID NO: 214522 - RNA, 32 nt, Homo Sapiens
uuuugccaacuuuccaauuaaagguugacauu

SEQ ID NO: 214523 - RNA, 32 nt, Homo Sapiens
caaaagggagaaugggguggggaggggguucu

SEQ ID NO: 214524 - RNA, 32 nt, Homo Sapiens
ugaaaucacaugccuuuguaaggaaagugcua

SEQ ID NO: 214525 - RNA, 32 nt, Homo Sapiens
uuuguuuuuaucauauugguuuuucauuacuu

SEQ ID NO: 214526 - RNA, 32 nt, Homo Sapiens
cugaaggagccaucucauccacagcucuuccu

SEQ ID NO: 214527 - RNA, 32 nt, Homo Sapiens
ugauaaauauauuauuugcucaugucauucuu

SEQ ID NO: 214528 - RNA, 32 nt, Homo Sapiens
caagaaugaaagauuauuauacaaaaaauugu

SEQ ID NO: 214529 - RNA, 32 nt, Homo Sapiens
gagccccauagucccgccugcagccuguaacc

SEQ ID NO: 214530 - RNA, 32 nt, Homo Sapiens
gacauggaaauauuuauauaauuuuauagaaa

SEQ ID NO: 214531 - RNA, 32 nt, Homo Sapiens
augguuaacgcaggcagaacuccuuauugugg

SEQ ID NO: 214532 - RNA, 32 nt, Homo Sapiens
uggauucuuaggaaaaggaagagcuaagucag

SEQ ID NO: 214533 - RNA, 32 nt, Homo Sapiens
cauggccgcugcacccggcgaauaccacauuu

SEQ ID NO: 214534 - RNA, 32 nt, Homo Sapiens
uccaauaguuuauuuugcaguuaacagagggg

SEQ ID NO: 214535 - RNA, 32 nt, Homo Sapiens
auguuuuguauauaguugagaauuuuacgaca

SEQ ID NO: 214536 - RNA, 32 nt, Homo Sapiens
auggacacaaaaccagagcacuugaugaacuc

SEQ ID NO: 214537 - RNA, 32 nt, Homo Sapiens
uguuaaggcaaacuauugauauuucauuaauu

SEQ ID NO: 214538 - RNA, 32 nt, Homo Sapiens
cacuguaccugagaauaaucgaggggagagac

SEQ ID NO: 214539 - RNA, 32 nt, Homo Sapiens
uccagaccagcuuggcuagcauugucugugua

SEQ ID NO: 214540 - RNA, 32 nt, Homo Sapiens
agcucauccucuguggaaucacugccgguuag

SEQ ID NO: 214541 - RNA, 32 nt, Homo Sapiens
ccuggaucgcaguggacugcaugaaugaaaac

SEQ ID NO: 214542 - RNA, 32 nt, Homo Sapiens
caggacacugucaucugcauuuaaucaagacu

SEQ ID NO: 214543 - RNA, 32 nt, Homo Sapiens
agaggucuggaaaauuaggaaaaacuaccaua

SEQ ID NO: 214544 - RNA, 32 nt, Homo Sapiens
gucgcucuguugugccccacagcacuuuguua

SEQ ID NO: 214545 - RNA, 32 nt, Homo Sapiens
acugccugcgucccgcgccccagccgccgcgc

SEQ ID NO: 214546 - RNA, 32 nt, Homo Sapiens
aucccgggaggcugugccgccggccugagccc

SEQ ID NO: 214547 - RNA, 32 nt, Homo Sapiens
auauucacacacauucaggaaccuguuuugau

SEQ ID NO: 214548 - RNA, 32 nt, Homo Sapiens
ugaaggaggagcuucggguguuggcugggcug

SEQ ID NO: 214549 - RNA, 32 nt, Homo Sapiens
uucuggaaauuaaccucaauauuaggucagca

SEQ ID NO: 214550 - RNA, 32 nt, Homo Sapiens
uuagccaggccugcguggcccaugguggcccu

SEQ ID NO: 214551 - RNA, 32 nt, Homo Sapiens
caaaguguucugguagcaucuaccauauuuca

SEQ ID NO: 214552 - RNA, 32 nt, Homo Sapiens
gguuucacuguguaggccaggcuggucucgaa

SEQ ID NO: 214553 - RNA, 32 nt, Homo Sapiens
acccuucacgguugcuacccaggcggccaagc

SEQ ID NO: 214554 - RNA, 32 nt, Homo Sapiens
ugcuaauuucuuuuauacacaaauguuuggcu

SEQ ID NO: 214555 - RNA, 32 nt, Homo Sapiens
uacuuacagucaaaagugcagauuuauacucc

SEQ ID NO: 214556 - RNA, 32 nt, Homo Sapiens
gugaccuucuggaugccuuuaacuucauggcu

SEQ ID NO: 214557 - RNA, 32 nt, Homo Sapiens
ggugguccuccuccuccucacucuucuugccc

SEQ ID NO: 214558 - RNA, 32 nt, Homo Sapiens
ugacaucaaagaccugcugacaauggaggcca

SEQ ID NO: 214559 - RNA, 32 nt, Homo Sapiens
ggccccuccccuccccuccccccucccaccug

SEQ ID NO: 214560 - RNA, 32 nt, Homo Sapiens
uuuaagcauguucaguggcagcuccccuccag

SEQ ID NO: 214561 - RNA, 32 nt, Homo Sapiens
aggcccggggcagcggcugggauccucagcgg

SEQ ID NO: 214562 - RNA, 32 nt, Homo Sapiens
uaggaacuugaaaaauacauaugccacacucu

SEQ ID NO: 214563 - RNA, 32 nt, Homo Sapiens
agccuacacagacacacacacacacacagaca

SEQ ID NO: 214564 - RNA, 32 nt, Homo Sapiens
agcaguuugugguuucuaugcccgcaaguuuc

SEQ ID NO: 214565 - RNA, 32 nt, Homo Sapiens
uaauuuauuuuccaauaggauuuaaauagaaa

SEQ ID NO: 214566 - RNA, 32 nt, Homo Sapiens
aaaacuacaguuuuaaagauuuaugauaccaa

SEQ ID NO: 214567 - RNA, 32 nt, Homo Sapiens
uagaauauuuucaugccuggaaauaggaaaau

SEQ ID NO: 214568 - RNA, 32 nt, Homo Sapiens
ggaaaacccacuuuccaaaagcccaagcuaca

SEQ ID NO: 214569 - RNA, 32 nt, Homo Sapiens
gcuccucccucccccaacacucccuaccaacc

SEQ ID NO: 214570 - RNA, 32 nt, Homo Sapiens
uucugggugcgguggcucaugccuguaauccc

SEQ ID NO: 214571 - RNA, 32 nt, Homo Sapiens
ugaucccaaaagaagaacccaggcugccggcg

SEQ ID NO: 214572 - RNA, 32 nt, Homo Sapiens
uggguggggguccggggcgcggcuguccacag

SEQ ID NO: 214573 - RNA, 32 nt, Homo Sapiens
cuguaguaagagguccguauuuuuguaacagc

SEQ ID NO: 214574 - RNA, 32 nt, Homo Sapiens
uucauguacacuguuucuuuuucaauacuuuc

SEQ ID NO: 214575 - RNA, 32 nt, Homo Sapiens
guggagaugaagauccuggcucugugcugugc

SEQ ID NO: 214576 - RNA, 32 nt, Homo Sapiens
ucuuugguguuuuuaaaugauuguuucuucuu

SEQ ID NO: 214577 - RNA, 32 nt, Homo Sapiens
gggaagugaucuuuuguucccauccucuucuu

SEQ ID NO: 214578 - RNA, 32 nt, Homo Sapiens
ucaccccaaggucaucugauaauuucacagau

SEQ ID NO: 214579 - RNA, 32 nt, Homo Sapiens
uucaccgauacucaauccuuaguacacauaag

SEQ ID NO: 214580 - RNA, 32 nt, Homo Sapiens
ugacacagacugccugccuugaagcugagaag

SEQ ID NO: 214581 - RNA, 32 nt, Homo Sapiens
aggagagugggccccuggcugcugcucggggu

SEQ ID NO: 214582 - RNA, 32 nt, Homo Sapiens
ucaguaguugguucuuuuuauugcugcauauu

SEQ ID NO: 214583 - RNA, 32 nt, Homo Sapiens
ccuuccugccaccuccucccaucaccuccugc

SEQ ID NO: 214584 - RNA, 32 nt, Homo Sapiens
aguuuuccugcuccccgcgcucggguggcggg

SEQ ID NO: 214585 - RNA, 30 nt, Homo Sapiens
cauccuccccuggcugcagaugcuuagcug

SEQ ID NO: 214586 - RNA, 32 nt, Homo Sapiens
agccgagcccccuccgcccaaggcgcccuccc

SEQ ID NO: 214587 - RNA, 32 nt, Homo Sapiens
uugguauucaucuauuuuaacucugugucuuu

SEQ ID NO: 214588 - RNA, 32 nt, Homo Sapiens
ggauuuucaccaaaauaaugcuuuugaaaaaa

SEQ ID NO: 214589 - RNA, 32 nt, Homo Sapiens
auugaaauaaacgacaagucacauugaaaaaa

SEQ ID NO: 214590 - RNA, 32 nt, Homo Sapiens
ugaugccccuucuccccuuccuggacacacuc

SEQ ID NO: 214591 - RNA, 32 nt, Homo Sapiens
cgggcgcacugaccgccugaccgacgcacgcc

SEQ ID NO: 214592 - RNA, 32 nt, Homo Sapiens
ugccgggcgcggugguucacgccuggaauccc

SEQ ID NO: 214593 - RNA, 32 nt, Homo Sapiens
aguauauuuuuuaaauuucagauuauauguga

SEQ ID NO: 214594 - RNA, 32 nt, Homo Sapiens
gccuuggcuggucccaggaugagcgacgaguu

SEQ ID NO: 214595 - RNA, 32 nt, Homo Sapiens
gcagugacuugccugaugucgcacagcccucu

SEQ ID NO: 214596 - RNA, 32 nt, Homo Sapiens
cgaggcagcgggaggagcgagccccgauuccc

SEQ ID NO: 214597 - RNA, 32 nt, Homo Sapiens
gagugugggcugcccuuguugccugcacccuu

SEQ ID NO: 214598 - RNA, 32 nt, Homo Sapiens
gagcuggaguuauggcggcuacggagccgauc

SEQ ID NO: 214599 - RNA, 32 nt, Homo Sapiens
gguuacucccuauacugcccugaaacaaaauu

SEQ ID NO: 214600 - RNA, 32 nt, Homo Sapiens
uacaaaaaagaaaaaaugaaaauaaaggaaua

SEQ ID NO: 214601 - RNA, 32 nt, Homo Sapiens
ccugaugggaaccucucugugcacccuccgug

SEQ ID NO: 214602 - RNA, 32 nt, Homo Sapiens
uuuuaagacaacaacuaaaaaaaugcaaggaa

SEQ ID NO: 214603 - RNA, 32 nt, Homo Sapiens
gugugacacaccuggggugacaggcgaugaga

SEQ ID NO: 214604 - RNA, 32 nt, Homo Sapiens
uuacuuuucaauaaaaagaauaucauggucaa

SEQ ID NO: 214605 - RNA, 30 nt, Homo Sapiens
gccugcuuacaaagcagggaaaccgagggc

SEQ ID NO: 214606 - RNA, 32 nt, Homo Sapiens
gacuccccggugcccauggcuggcaguccuuc

SEQ ID NO: 214607 - RNA, 32 nt, Homo Sapiens
uaugccagaauaaaaaauaucuauguuuguau

SEQ ID NO: 214608 - RNA, 32 nt, Homo Sapiens
accucugcccugugagcccauccauaaggcuc

SEQ ID NO: 214609 - RNA, 32 nt, Homo Sapiens
ccacccggacgccgcugugcagugcguggccu

SEQ ID NO: 214610 - RNA, 32 nt, Homo Sapiens
uguaaucaaucccagcacuuugggaggccaag

SEQ ID NO: 214611 - RNA, 32 nt, Homo Sapiens
ugcuugauuggaaauuguuguuucuaaaucua

SEQ ID NO: 214612 - RNA, 32 nt, Homo Sapiens
ucuucugcccaccguugugacuaagaaugcac

SEQ ID NO: 214613 - RNA, 32 nt, Homo Sapiens
ccuuugccaauucauuucucuauccuguguau

SEQ ID NO: 214614 - RNA, 32 nt, Homo Sapiens
ccuggaucugccacucaaccccgggaguggug

SEQ ID NO: 214615 - RNA, 32 nt, Homo Sapiens
cuccccgggguggcguggggcuggggcacccu

SEQ ID NO: 214616 - RNA, 32 nt, Homo Sapiens
cucaucuccccccacaccuccuagccaggccu

SEQ ID NO: 214617 - RNA, 32 nt, Homo Sapiens
ggggccgagcgcccggccucgcaagcccacgg

SEQ ID NO: 214618 - RNA, 32 nt, Homo Sapiens
guggucucuugucucuuuuuggaccaauaucc

SEQ ID NO: 214619 - RNA, 32 nt, Homo Sapiens
uaaaggagcaacagcaaaguucuuuacaugua

SEQ ID NO: 214620 - RNA, 32 nt, Homo Sapiens
acucugaagaacccgcagacggaaugccugag

SEQ ID NO: 214621 - RNA, 32 nt, Homo Sapiens
uaaauugguaauauacaaaacaauuaaucauu

SEQ ID NO: 214622 - RNA, 32 nt, Homo Sapiens
cccauccccccuccgcggucagcaugugguga

SEQ ID NO: 214623 - RNA, 32 nt, Homo Sapiens
cgaaugggcaugcacagccugugucaggcccc

SEQ ID NO: 214624 - RNA, 29 nt, Homo Sapiens
cgccauggagccccgggcgguugcagaag

SEQ ID NO: 214625 - RNA, 32 nt, Homo Sapiens
agaugcaggaaguacauugugcucuuucaaaa

SEQ ID NO: 214626 - RNA, 32 nt, Homo Sapiens
caaaugcccguaagaauuccuacuucaaaccc

SEQ ID NO: 214627 - RNA, 32 nt, Homo Sapiens
guguguucugccaagagcugcuucugucagaa

SEQ ID NO: 214628 - RNA, 32 nt, Homo Sapiens
cucaucaggaccagucugacugcaccugcauc

SEQ ID NO: 214629 - RNA, 32 nt, Homo Sapiens
cuccugccucaggcuccugaguagcugggauu

SEQ ID NO: 214630 - RNA, 32 nt, Homo Sapiens
gagcaagcuuacacaagaagugagggaaggau

SEQ ID NO: 214631 - RNA, 32 nt, Homo Sapiens
cuguacagcacuaguuacauuaugacaggaag

SEQ ID NO: 214632 - RNA, 32 nt, Homo Sapiens
cauuaccugggaaagcucuccucccuccugaa

SEQ ID NO: 214633 - RNA, 32 nt, Homo Sapiens
agugaacaagauaaaaaugagaaaaagggauc

SEQ ID NO: 214634 - RNA, 32 nt, Homo Sapiens
ucauggugcauccguuucaguauuauuuccua

SEQ ID NO: 214635 - RNA, 32 nt, Homo Sapiens
cccugcccaagccccagccugccccaguccuu

SEQ ID NO: 214636 - RNA, 32 nt, Homo Sapiens
cggcuauugcugccccagcugcaguauugcug

SEQ ID NO: 214637 - RNA, 32 nt, Homo Sapiens
agcuggagggcgcccccuccccggaguuuccu

SEQ ID NO: 214638 - RNA, 32 nt, Homo Sapiens
uaaauugcuaauaaugaugacauggcauuaug

SEQ ID NO: 214639 - RNA, 32 nt, Homo Sapiens
ggcgcaucccagccugggcgggacgcucggcc

SEQ ID NO: 214640 - RNA, 32 nt, Homo Sapiens
cuggccgcccccagcccccuccuggugccacc

SEQ ID NO: 214641 - RNA, 32 nt, Homo Sapiens
ccccuugcuuuccauccuggaugucagcucca

SEQ ID NO: 214642 - RNA, 32 nt, Homo Sapiens
aagcggcgguaccggugcuggcggcggcagcu

SEQ ID NO: 214643 - RNA, 32 nt, Homo Sapiens
acaauaaaaacaaccugagguguggcaaaggc

SEQ ID NO: 214644 - RNA, 32 nt, Homo Sapiens
ucacaucugaggcccugggaggucuugugagg

SEQ ID NO: 214645 - RNA, 32 nt, Homo Sapiens
aacccccagaaagugggaugggccuguggugu

SEQ ID NO: 214646 - RNA, 32 nt, Homo Sapiens
guuuaaaauaaucacuguuggaauugucaucu

SEQ ID NO: 214647 - RNA, 32 nt, Homo Sapiens
cuugaagucaacauuuacaucaguauuuauuu

SEQ ID NO: 214648 - RNA, 32 nt, Homo Sapiens
gugugugugugugugcgcacacaugcuucugu

SEQ ID NO: 214649 - RNA, 32 nt, Homo Sapiens
agaccagccugggaaauauagcaagaccuuau

SEQ ID NO: 214650 - RNA, 32 nt, Homo Sapiens
accucucugccuccccgcucucaaggaggguc

SEQ ID NO: 214651 - RNA, 32 nt, Homo Sapiens
aauggggagaggguggggcagaugaguagaga

SEQ ID NO: 214652 - RNA, 32 nt, Homo Sapiens
cugcauauuuagugaccaaggcaucaaggaca

SEQ ID NO: 214653 - RNA, 32 nt, Homo Sapiens
cgucccaccccgcuccucugucgcuggagaac

SEQ ID NO: 214654 - RNA, 32 nt, Homo Sapiens
uucucaugauagugaauaagugucacaagauc

SEQ ID NO: 214655 - RNA, 32 nt, Homo Sapiens
gcauuuuagugauuauuaagcacuucugucag

SEQ ID NO: 214656 - RNA, 32 nt, Homo Sapiens
guggagggcgaggcccgggucccgcgcucccc

SEQ ID NO: 214657 - RNA, 32 nt, Homo Sapiens
auuaacuuuguauaucucuggaaagaggugaa

SEQ ID NO: 214658 - RNA, 32 nt, Homo Sapiens
ugugcggugacauggcaccucccuuccgaccg

SEQ ID NO: 214659 - RNA, 32 nt, Homo Sapiens
uguuugcuuucgucuuuuuuugugcguaauaa

SEQ ID NO: 214660 - RNA, 32 nt, Homo Sapiens
acacaugccuucccuccccagccacaccgugc

SEQ ID NO: 214661 - RNA, 32 nt, Homo Sapiens
cucucgcauaaggauggcgcagggcuggaagc

SEQ ID NO: 214662 - RNA, 32 nt, Homo Sapiens
acucacccgugccccaggugagagguuccugc

SEQ ID NO: 214663 - RNA, 32 nt, Homo Sapiens
ggaaagaugucaccuuugauaauuucagauuu

SEQ ID NO: 214664 - RNA, 32 nt, Homo Sapiens
ggcuuuuuccaccagcaucaucacugcuauca

SEQ ID NO: 214665 - RNA, 32 nt, Homo Sapiens
acauaagagaauuuauacuaaagagaaaccau

SEQ ID NO: 214666 - RNA, 32 nt, Homo Sapiens
cagcccgccugcgccgcuugggacgccucugc

SEQ ID NO: 214667 - RNA, 32 nt, Homo Sapiens
uacuauaacucuagcauccccaucccauuuga

SEQ ID NO: 214668 - RNA, 32 nt, Homo Sapiens
cuggagaagauaaggaggcugagcuccgacag

SEQ ID NO: 214669 - RNA, 32 nt, Homo Sapiens
caugcaagccccauaaaacaguuccuagcaug

SEQ ID NO: 214670 - RNA, 32 nt, Homo Sapiens
cacccaccaguuccucuaagcacauacucugc

SEQ ID NO: 214671 - RNA, 32 nt, Homo Sapiens
gggagggaaacaguuuugugggaaauauucau

SEQ ID NO: 214672 - RNA, 32 nt, Homo Sapiens
gguggugcaaagugguauaacugugugcaaau

SEQ ID NO: 214673 - RNA, 32 nt, Homo Sapiens
agagaugauuuccaucuacucucauuuugauu

SEQ ID NO: 214674 - RNA, 32 nt, Homo Sapiens
cauuaggcauuuggggugaucauggaaaauua

SEQ ID NO: 214675 - RNA, 32 nt, Homo Sapiens
ccuaucuuucccucagucucccaaguuccucu

SEQ ID NO: 214676 - RNA, 32 nt, Homo Sapiens
caugucauaagauucuuacuuaaacuuggucu

SEQ ID NO: 214677 - RNA, 32 nt, Homo Sapiens
ugucuugagaaagaaaucacagaagcauuucu

SEQ ID NO: 214678 - RNA, 31 nt, Homo Sapiens
cccugccacccugcacugccccggcuccccc

SEQ ID NO: 214679 - RNA, 32 nt, Homo Sapiens
gcaugcaauguggugugugaucagugugugug

SEQ ID NO: 214680 - RNA, 32 nt, Homo Sapiens
ugggcgcugccaggcgggugcuucucgacgca

SEQ ID NO: 214681 - RNA, 32 nt, Homo Sapiens
caucccauugguuuacaaaaacgacuauguau

SEQ ID NO: 214682 - RNA, 32 nt, Homo Sapiens
agacucuucauuuauucauucugcaaacuccc

SEQ ID NO: 214683 - RNA, 32 nt, Homo Sapiens
uucaaagccuggaugugagacaucgaguuaaa

SEQ ID NO: 214684 - RNA, 32 nt, Homo Sapiens
gcuugacugcccgugucugcgcggcucccagg

SEQ ID NO: 214685 - RNA, 32 nt, Homo Sapiens
caguugguugugucuuuuuuuuccccccuuuu

SEQ ID NO: 214686 - RNA, 32 nt, Homo Sapiens
gaauauguuuuaucucuacugucaguuuuauu

SEQ ID NO: 214687 - RNA, 30 nt, Homo Sapiens
uuuuaugagagccucuuugagucuguguau

SEQ ID NO: 214688 - RNA, 32 nt, Homo Sapiens
agucaagaggggcagcucaggaugcuaccagg

SEQ ID NO: 214689 - RNA, 32 nt, Homo Sapiens
cuguaggaaggggaggccauuuuccguuucug

SEQ ID NO: 214690 - RNA, 32 nt, Homo Sapiens
agaagucaugggaugcagcaguucuucaacga

SEQ ID NO: 214691 - RNA, 32 nt, Homo Sapiens
gggucuguggcguaugcccagcccuuaguuuc

SEQ ID NO: 214692 - RNA, 32 nt, Homo Sapiens
gacacugcucccugaauuaagguaaugguugc

SEQ ID NO: 214693 - RNA, 31 nt, Homo Sapiens
gcagcugcuaugcacacuggaguccaccaua

SEQ ID NO: 214694 - RNA, 32 nt, Homo Sapiens
gggggcagcuggcgcugaggcugugcagaugu

SEQ ID NO: 214695 - RNA, 32 nt, Homo Sapiens
ggacuugcgccuccgcacgccccucccuuucu

SEQ ID NO: 214696 - RNA, 32 nt, Homo Sapiens
acauugucaaucuggucauauugagagugaaa

SEQ ID NO: 214697 - RNA, 32 nt, Homo Sapiens
uugcucacuccauucggguccacagcugaggu

SEQ ID NO: 214698 - RNA, 32 nt, Homo Sapiens
ugugcguucucuuccagacccuuagcuuauau

SEQ ID NO: 214699 - RNA, 32 nt, Homo Sapiens
cucacuccucugcgccuccccccacugcugug

SEQ ID NO: 214700 - RNA, 32 nt, Homo Sapiens
augcugucuccaugacgucuguggcaggaguc

SEQ ID NO: 214701 - RNA, 32 nt, Homo Sapiens
aguacauuucuaaucuauuauuccuaaccuau

SEQ ID NO: 214702 - RNA, 32 nt, Homo Sapiens
aucaauacaaccagauuugaaguaaaauaauu

SEQ ID NO: 214703 - RNA, 32 nt, Homo Sapiens
caggagccgggaacugccuucuguggaucaca

SEQ ID NO: 214704 - RNA, 32 nt, Homo Sapiens
agcaugggagacgucgcuuuccuaccgggcga

SEQ ID NO: 214705 - RNA, 32 nt, Homo Sapiens
ccccagccucaccuuguuccaccugcccuguc

SEQ ID NO: 214706 - RNA, 32 nt, Homo Sapiens
ugugcaucagacaguacaccuauagcaagcac

SEQ ID NO: 214707 - RNA, 32 nt, Homo Sapiens
gucuguauugcaacuauaguacacaacucugc

SEQ ID NO: 214708 - RNA, 32 nt, Homo Sapiens
uaucaauaauuucuauuucuaccaagcuuaau

SEQ ID NO: 214709 - RNA, 32 nt, Homo Sapiens
gacuuucuuaugcacaaauauauaugguauuc

SEQ ID NO: 214710 - RNA, 32 nt, Homo Sapiens
ccccugugccagcucccgcgggcccuccucgu

SEQ ID NO: 214711 - RNA, 32 nt, Homo Sapiens
cuggugaggaggaggcaucuccccucaugccc

SEQ ID NO: 214712 - RNA, 32 nt, Homo Sapiens
ugcuuuguggagcugauuaggcugggauuuga

SEQ ID NO: 214713 - RNA, 32 nt, Homo Sapiens
gggcaucugugccuucucuauggccuugcuac

SEQ ID NO: 214714 - RNA, 32 nt, Homo Sapiens
ccacuggcccugcggcauccuaccaccugccc

SEQ ID NO: 214715 - RNA, 32 nt, Homo Sapiens
cuguagaggcaggggcggcggaggcggaacug

SEQ ID NO: 214716 - RNA, 32 nt, Homo Sapiens
gcccuuggcaacacuggagugcacacgccgcc

SEQ ID NO: 214717 - RNA, 32 nt, Homo Sapiens
ggacuaggacccauaugggaauuauuaccucu

SEQ ID NO: 214718 - RNA, 32 nt, Homo Sapiens
aacuuuuguuuuaugauaaaggaaguguguga

SEQ ID NO: 214719 - RNA, 32 nt, Homo Sapiens
cagcugaugcuguuuugauauuacagagaguu

SEQ ID NO: 214720 - RNA, 32 nt, Homo Sapiens
ggcugugaggccugggucggcucgggccgcac

SEQ ID NO: 214721 - RNA, 32 nt, Homo Sapiens
aauggaguugccuuaaauuggcaggugguacc

SEQ ID NO: 214722 - RNA, 29 nt, Homo Sapiens
auauaauaaaguugaaaucucuguguggu

SEQ ID NO: 214723 - RNA, 32 nt, Homo Sapiens
gccuuguuugcuuaguuuaucuggaauucugu

SEQ ID NO: 214724 - RNA, 32 nt, Homo Sapiens
cacaccucugaugucuucuuugcaauaggcag

SEQ ID NO: 214725 - RNA, 32 nt, Homo Sapiens
ugcaaguuuuuuauguuuguguuccagaagga

SEQ ID NO: 214726 - RNA, 32 nt, Homo Sapiens
uuguuuccugucauugacauuuaguauaacag

SEQ ID NO: 214727 - RNA, 32 nt, Homo Sapiens
uaaucuauaugauaugcagccgcuguaggaac

SEQ ID NO: 214728 - RNA, 32 nt, Homo Sapiens
cuugugcuuuuuuagcuucucucuugaaucag

SEQ ID NO: 214729 - RNA, 32 nt, Homo Sapiens
guccccgcgacggcgcugccugcccgaggcgg

SEQ ID NO: 214730 - RNA, 32 nt, Homo Sapiens
uguccagagcaacuuccagcaaggcuggucug

SEQ ID NO: 214731 - RNA, 32 nt, Homo Sapiens
accaccucgggugagcugcgccaggcccggga

SEQ ID NO: 214732 - RNA, 32 nt, Homo Sapiens
accuccacuuuucucucacucugcccagcugc

SEQ ID NO: 214733 - RNA, 31 nt, Homo Sapiens
agcgggcugccggccuccaaguuccuccgac

SEQ ID NO: 214734 - RNA, 30 nt, Homo Sapiens
agcuaagaggugcuugaugaucaauaguug

SEQ ID NO: 214735 - RNA, 32 nt, Homo Sapiens
cuaaauguucucaagugacugauucaggacac

SEQ ID NO: 214736 - RNA, 32 nt, Homo Sapiens
gcagaaggucuggguuugcagaugggugcccu

SEQ ID NO: 214737 - RNA, 32 nt, Homo Sapiens
cucuuacuguaacaugucaucuccugcgucgu

SEQ ID NO: 214738 - RNA, 32 nt, Homo Sapiens
cagagucugcagcagcagcagccggcgaggag

SEQ ID NO: 214739 - RNA, 32 nt, Homo Sapiens
cuuaauuugugauaucauguucuagaaauacc

SEQ ID NO: 214740 - RNA, 32 nt, Homo Sapiens
acuccugucauucagcuauguugcuaaagcac

SEQ ID NO: 214741 - RNA, 32 nt, Homo Sapiens
ccugugccgucuccuacugcagcaaggggcug

SEQ ID NO: 214742 - RNA, 32 nt, Homo Sapiens
gggagggaaggggcuguugguacaaggaugau

SEQ ID NO: 214743 - RNA, 32 nt, Homo Sapiens
ugggagaggugacaccucacuaaggggccgac

SEQ ID NO: 214744 - RNA, 32 nt, Homo Sapiens
gaauuaguaggaugaaaauauuguagagacau

SEQ ID NO: 214745 - RNA, 32 nt, Homo Sapiens
uuuauaggaaaggaggaaaaauaauggaaaca

SEQ ID NO: 214746 - RNA, 32 nt, Homo Sapiens
acauaugggaggagggggcagauuccuggccc

SEQ ID NO: 214747 - RNA, 32 nt, Homo Sapiens
gucaaggacuuccuuacaauuucuccugaguu

SEQ ID NO: 214748 - RNA, 32 nt, Homo Sapiens
uuggcauauacaugaaguaaacaaagacaaua

SEQ ID NO: 214749 - RNA, 32 nt, Homo Sapiens
ugagaggugggacuuuaauuauuguuauuauu

SEQ ID NO: 214750 - RNA, 32 nt, Homo Sapiens
gagcccacuacuaucaaacaaacaaacaaaaa

SEQ ID NO: 214751 - RNA, 32 nt, Homo Sapiens
uuggcgcauacccacccgccgccacggccaca

SEQ ID NO: 214752 - RNA, 32 nt, Homo Sapiens
ggugucugaguccaugagccaagccugagggg

SEQ ID NO: 214753 - RNA, 32 nt, Homo Sapiens
caucggcuaccagaugcugaugaagaugggcu

SEQ ID NO: 214754 - RNA, 32 nt, Homo Sapiens
gacagaagguggauagacaaaucuccaccuuc

SEQ ID NO: 214755 - RNA, 32 nt, Homo Sapiens
accagcaucuucuugcagauuccaccccugcu

SEQ ID NO: 214756 - RNA, 32 nt, Homo Sapiens
ggaugugaugucaggcuugauugugggcauau

SEQ ID NO: 214757 - RNA, 32 nt, Homo Sapiens
agggaugugcagccuuucguuuuaccaaauuc

SEQ ID NO: 214758 - RNA, 32 nt, Homo Sapiens
aguuaugucucacaauuuuguagaaucuuaca

SEQ ID NO: 214759 - RNA, 32 nt, Homo Sapiens
gggagccgggugagacccccacaguucucaau

SEQ ID NO: 214760 - RNA, 32 nt, Homo Sapiens
gugaccugcagagcugcagauuggagcaagug

SEQ ID NO: 214761 - RNA, 32 nt, Homo Sapiens
ccccccaggauaggaaagaagaaggacgcucg

SEQ ID NO: 214762 - RNA, 32 nt, Homo Sapiens
cguaggccuguuucccaucugauuccauaggg

SEQ ID NO: 214763 - RNA, 32 nt, Homo Sapiens
gcggggcagcagcacagcgugggguccuggca

SEQ ID NO: 214764 - RNA, 32 nt, Homo Sapiens
ccgggagcugcgcuaggcgaacggcugcggcg

SEQ ID NO: 214765 - RNA, 32 nt, Homo Sapiens
acuggcgcacccuggugcugcugcuacuggug

SEQ ID NO: 214766 - RNA, 32 nt, Homo Sapiens
cuauccuacguuuaaauaucuuugaaaguuug

SEQ ID NO: 214767 - RNA, 32 nt, Homo Sapiens
aaagggaaacgcuguugaaccuugugccucua

SEQ ID NO: 214768 - RNA, 32 nt, Homo Sapiens
ugugucgaaucugcgagugaagagggacgagg

SEQ ID NO: 214769 - RNA, 32 nt, Homo Sapiens
ccccugccugucaucgcgcuaccgggugugga

SEQ ID NO: 214770 - RNA, 32 nt, Homo Sapiens
cuccauucugaagagggagguuuugguguccc

SEQ ID NO: 214771 - RNA, 32 nt, Homo Sapiens
gcagcuggggagaggugggcucugcuuuucag

SEQ ID NO: 214772 - RNA, 32 nt, Homo Sapiens
guuuuuuguuuuuucuucuggggagggucuag

SEQ ID NO: 214773 - RNA, 32 nt, Homo Sapiens
auaagcagauuagaagaguuugaaagguugaa

SEQ ID NO: 214774 - RNA, 32 nt, Homo Sapiens
accuggcccucucagcccacgaccgcacccac

SEQ ID NO: 214775 - RNA, 32 nt, Homo Sapiens
cagcuagcaggagcuacugugcucaucuaaag

SEQ ID NO: 214776 - RNA, 32 nt, Homo Sapiens
ugucaaaggcugaaaaugugcauauuccucac

SEQ ID NO: 214777 - RNA, 32 nt, Homo Sapiens
cacccguacguccaaagacaagaguggagccu

SEQ ID NO: 214778 - RNA, 32 nt, Homo Sapiens
ccagcuccagcuaccagguuuuguaccgugcc

SEQ ID NO: 214779 - RNA, 32 nt, Homo Sapiens
gagcucagucccagcucugccucugacucgcu

SEQ ID NO: 214780 - RNA, 32 nt, Homo Sapiens
aucauauuuuauucauuuucucccuuuagcaa

SEQ ID NO: 214781 - RNA, 32 nt, Homo Sapiens
gcccuggcggagaggcaggcgcuggggcuccu

SEQ ID NO: 214782 - RNA, 32 nt, Homo Sapiens
ugcgucccgcggcuggcgccccugacuccguc

SEQ ID NO: 214783 - RNA, 32 nt, Homo Sapiens
ugucuccggcgccgcccgucgcggacucgucc

SEQ ID NO: 214784 - RNA, 32 nt, Homo Sapiens
ccuguacaaggcggcgggcggcggcggcccgc

SEQ ID NO: 214785 - RNA, 32 nt, Homo Sapiens
cgguaagagaauaaacacuuguacugggauca

SEQ ID NO: 214786 - RNA, 32 nt, Homo Sapiens
caugaaacauauauauacuguguauaguugca

SEQ ID NO: 214787 - RNA, 32 nt, Homo Sapiens
ggcgggcaggcgggcgccauggagcugcucuc

SEQ ID NO: 214788 - RNA, 32 nt, Homo Sapiens
ggacccgcgcccgcgccgccgccgcgcuucag

SEQ ID NO: 214789 - RNA, 32 nt, Homo Sapiens
uuggaauagggaaaaagguaagagacuaacgu

SEQ ID NO: 214790 - RNA, 32 nt, Homo Sapiens
ccgaaucuuccccaugagagcggccagagcuu

SEQ ID NO: 214791 - RNA, 32 nt, Homo Sapiens
uucuggagggcaauuugguaaaaugcaucaaa

SEQ ID NO: 214792 - RNA, 32 nt, Homo Sapiens
gggagcggggucggcucaguggcccugagacc

SEQ ID NO: 214793 - RNA, 32 nt, Homo Sapiens
cacaaccuaaaucuuuugauaacuauuaccaa

SEQ ID NO: 214794 - RNA, 32 nt, Homo Sapiens
aguucaaggaagaauaaaguugaaauuuuaaa

SEQ ID NO: 214795 - RNA, 32 nt, Homo Sapiens
gaguucagauguguucuaagccugcuggagug

SEQ ID NO: 214796 - RNA, 32 nt, Homo Sapiens
ccuagacuuccacucggaucuauuuagugcuu

SEQ ID NO: 214797 - RNA, 32 nt, Homo Sapiens
cgccucccuugggaacccgcggcccacaguga

SEQ ID NO: 214798 - RNA, 32 nt, Homo Sapiens
gccuaaaaucaucaaauuagauuuccauuugu

SEQ ID NO: 214799 - RNA, 32 nt, Homo Sapiens
gcuggcugcccccauuccugcugcugcugcug

SEQ ID NO: 214800 - RNA, 32 nt, Homo Sapiens
gggucuggggccuggggguuuugugucgugac

SEQ ID NO: 214801 - RNA, 32 nt, Homo Sapiens
gcgcccuguggcggccaccuccaucgccuugc

SEQ ID NO: 214802 - RNA, 31 nt, Homo Sapiens
gaauugauuacuccuugcagagccuguggcu

SEQ ID NO: 214803 - RNA, 32 nt, Homo Sapiens
ccugccugccugccugccugcccgcccagagc

SEQ ID NO: 214804 - RNA, 32 nt, Homo Sapiens
cccugaaugagucauuccauggcugcuguuuu

SEQ ID NO: 214805 - RNA, 32 nt, Homo Sapiens
aaggcaaaaguagcuuucgaucuuucauauuu

SEQ ID NO: 214806 - RNA, 32 nt, Homo Sapiens
aaugugggguggaaaaauugucugcauuuuuu

SEQ ID NO: 214807 - RNA, 32 nt, Homo Sapiens
aaagucuaguugggauuuuuuaccaaagcagc

SEQ ID NO: 214808 - RNA, 32 nt, Homo Sapiens
aaggcucuuguuaauauguuacacuuaauauu

SEQ ID NO: 214809 - RNA, 32 nt, Homo Sapiens
ucaaugucuauuucaguaucuacuucacuguc

SEQ ID NO: 214810 - RNA, 32 nt, Homo Sapiens
gauccagcugucuggucaugguuugguuuauu

SEQ ID NO: 214811 - RNA, 32 nt, Homo Sapiens
uagaugaaaaaauuaaugaaaugaaaucacac

SEQ ID NO: 214812 - RNA, 32 nt, Homo Sapiens
gcaccgcuucguguggcuccaccuggauguuc

SEQ ID NO: 214813 - RNA, 32 nt, Homo Sapiens
uucauuuugauuuuuuuuuuuagccaaccacc

SEQ ID NO: 214814 - RNA, 32 nt, Homo Sapiens
uuucuucaaaagacaacuauaaucauucaaaa

SEQ ID NO: 214815 - RNA, 32 nt, Homo Sapiens
cuugagucaaacugguuuucaaggcugugcuc

SEQ ID NO: 214816 - RNA, 32 nt, Homo Sapiens
cgagagagcggggccgggcgcugcuccggccu

SEQ ID NO: 214817 - RNA, 32 nt, Homo Sapiens
aagcaaaaaccuggcagugaccaucugccuga

SEQ ID NO: 214818 - RNA, 32 nt, Homo Sapiens
uuuguacagaucgauuugauaaaauuaaacaa

SEQ ID NO: 214819 - RNA, 32 nt, Homo Sapiens
ccuccagcucuccgugccuuaagggaaaagcg

SEQ ID NO: 214820 - RNA, 30 nt, Homo Sapiens
caccgcuugccuucaacccaucugccgguu

SEQ ID NO: 214821 - RNA, 32 nt, Homo Sapiens
gccagcgccuacuccaggaucccguagccaga

SEQ ID NO: 214822 - RNA, 32 nt, Homo Sapiens
gccugccauuuucuuuuugcuuagguuuuuca

SEQ ID NO: 214823 - RNA, 32 nt, Homo Sapiens
gucaguagaaaaguaauaaacaucucaauuuu

SEQ ID NO: 214824 - RNA, 32 nt, Homo Sapiens
ccagugagaggguuccugggggaaguauggug

SEQ ID NO: 214825 - RNA, 32 nt, Homo Sapiens
ggcuguauuuguuuugaguucuaggagcacag

SEQ ID NO: 214826 - RNA, 32 nt, Homo Sapiens
cugaacgcacuugcagcguccgagggccaccg

SEQ ID NO: 214827 - RNA, 32 nt, Homo Sapiens
gugacagagccaggaugagaacaaagauucca

SEQ ID NO: 214828 - RNA, 32 nt, Homo Sapiens
gguuucugcuuggcguguggguucuaagugcg

SEQ ID NO: 214829 - RNA, 32 nt, Homo Sapiens
cugcccgggacuuuuccagcucuccagcccca

SEQ ID NO: 214830 - RNA, 32 nt, Homo Sapiens
cagugaccucccucagcccccaggggaguagg

SEQ ID NO: 214831 - RNA, 32 nt, Homo Sapiens
acagaaggaguggugaucccccugccccuucg

SEQ ID NO: 214832 - RNA, 32 nt, Homo Sapiens
ggccaaacgcguaccagcgucagccugacggg

SEQ ID NO: 214833 - RNA, 32 nt, Homo Sapiens
cuccgggagagggggagugcgcggcggccgca

SEQ ID NO: 214834 - RNA, 32 nt, Homo Sapiens
gaguagcauuucauucuucucuagcugguggu

SEQ ID NO: 214835 - RNA, 32 nt, Homo Sapiens
caccaggaauccaugcagcgugcaugccccac

SEQ ID NO: 214836 - RNA, 32 nt, Homo Sapiens
gcccaagcugcugacgcaaacaacaacaaaug

SEQ ID NO: 214837 - RNA, 32 nt, Homo Sapiens
uguauuagaaaagaagaaagauuggacuugau

SEQ ID NO: 214838 - RNA, 32 nt, Homo Sapiens
ugagucagccccaccgagagccaggcagcuuu

SEQ ID NO: 214839 - RNA, 29 nt, Homo Sapiens
gggcugcggggggagaggacgccccugcc

SEQ ID NO: 214840 - RNA, 32 nt, Homo Sapiens
gaauggagggucagggcuaggcggcgggaggg

SEQ ID NO: 214841 - RNA, 32 nt, Homo Sapiens
agugugcucuccccggcaggccugagaaugag

SEQ ID NO: 214842 - RNA, 32 nt, Homo Sapiens
caugggaggagcucuagggaggcugguggaag

SEQ ID NO: 214843 - RNA, 32 nt, Homo Sapiens
accauugcacuccagcugggagacacagcaag

SEQ ID NO: 214844 - RNA, 32 nt, Homo Sapiens
uaucaguacugggauuuaugaggacaaugugg

SEQ ID NO: 214845 - RNA, 32 nt, Homo Sapiens
uuaaaauguguuuaauaaaugauccuuuguaa

SEQ ID NO: 214846 - RNA, 32 nt, Homo Sapiens
uccaucucaagcauauuuuaaaauaaugagag

SEQ ID NO: 214847 - RNA, 32 nt, Homo Sapiens
aaggcugucggcgcgccgcggcccgcaggcac

SEQ ID NO: 214848 - RNA, 32 nt, Homo Sapiens
gucccugaggccugggugucccgccuggaggg

SEQ ID NO: 214849 - RNA, 32 nt, Homo Sapiens
ccaaccccacugagcaucuccuucccgcccug

SEQ ID NO: 214850 - RNA, 32 nt, Homo Sapiens
uaaugagggggaggagaaucuuuaucagaaac

SEQ ID NO: 214851 - RNA, 32 nt, Homo Sapiens
gaaguguuuacuaugugcaaggguauugaagu

SEQ ID NO: 214852 - RNA, 32 nt, Homo Sapiens
aucauauacuugguauauaauacucuaauaaa

SEQ ID NO: 214853 - RNA, 32 nt, Homo Sapiens
cgccccagcuccgauccccguuccgcgucccc

SEQ ID NO: 214854 - RNA, 32 nt, Homo Sapiens
aaaaaaaccuccugggacuguugcaaggauga

SEQ ID NO: 214855 - RNA, 32 nt, Homo Sapiens
agccuuucagugcaggcuccagcccuccaccc

SEQ ID NO: 214856 - RNA, 32 nt, Homo Sapiens
uuccaucuuuaaacugguuguaccuauaaccc

SEQ ID NO: 214857 - RNA, 32 nt, Homo Sapiens
auggggcgcuuauaauguuuauaauauuguaa

SEQ ID NO: 214858 - RNA, 30 nt, Homo Sapiens
uuauggccgcuaauggaaaccggacuagug

SEQ ID NO: 214859 - RNA, 32 nt, Homo Sapiens
aagggcauuuuucccucucauuuggaauccug

SEQ ID NO: 214860 - RNA, 32 nt, Homo Sapiens
uggugccggccgcgcugcugggccugcgcuac

SEQ ID NO: 214861 - RNA, 31 nt, Homo Sapiens
gaccuugugaucugccugccucggccucuca

SEQ ID NO: 214862 - RNA, 32 nt, Homo Sapiens
ccggggcugcuggccuggcccuugaguggggc

SEQ ID NO: 214863 - RNA, 32 nt, Homo Sapiens
ccuucauucuguugcaauuaaguuuuaguacu

SEQ ID NO: 214864 - RNA, 32 nt, Homo Sapiens
gcaccaggcugaccccaccgccucuuccccga

SEQ ID NO: 214865 - RNA, 32 nt, Homo Sapiens
aagcaucauaacuugagcauuuauugaaauaa

SEQ ID NO: 214866 - RNA, 32 nt, Homo Sapiens
gguauucaagcaccaccuccacccagccccuc

SEQ ID NO: 214867 - RNA, 32 nt, Homo Sapiens
ugggucggguggcaguugacuugguggcuggc

SEQ ID NO: 214868 - RNA, 32 nt, Homo Sapiens
acauagaaaaagauuauuauguucugagaaag

SEQ ID NO: 214869 - RNA, 32 nt, Homo Sapiens
ccggaacccccgccgccucccggagccccucg

SEQ ID NO: 214870 - RNA, 32 nt, Homo Sapiens
caccugagccccagcuccuaccucugacccca

SEQ ID NO: 214871 - RNA, 32 nt, Homo Sapiens
ggagagacugaauuguuaguaggucuaaacau

SEQ ID NO: 214872 - RNA, 32 nt, Homo Sapiens
caacuucugaauauuggacauuuuaaacacuu

SEQ ID NO: 214873 - RNA, 32 nt, Homo Sapiens
uaaaugcauaauguuucauuaauuuuuugcug

SEQ ID NO: 214874 - RNA, 32 nt, Homo Sapiens
auuugcagcuggaacugcagcccacggcgccc

SEQ ID NO: 214875 - RNA, 32 nt, Homo Sapiens
cgcggcggcguuuuggacccgcgcucccaucc

SEQ ID NO: 214876 - RNA, 32 nt, Homo Sapiens
aacagggaaaaggagcacaggaugcagcuacu

SEQ ID NO: 214877 - RNA, 32 nt, Homo Sapiens
auuauauuauuaaaauguucaauuguaauggu

SEQ ID NO: 214878 - RNA, 32 nt, Homo Sapiens
caaggcccauggacugucacagcccuccccac

SEQ ID NO: 214879 - RNA, 32 nt, Homo Sapiens
uuccaaucucuguucuguuuggcacuuguauu

SEQ ID NO: 214880 - RNA, 32 nt, Homo Sapiens
gacucgcuuuccgugcggugcggcgagugagg

SEQ ID NO: 214881 - RNA, 32 nt, Homo Sapiens
ugcuggucuugucccucugccccucccaccug

SEQ ID NO: 214882 - RNA, 32 nt, Homo Sapiens
agguuaggggagaggugacccugagggacagc

SEQ ID NO: 214883 - RNA, 32 nt, Homo Sapiens
agggcaaaguuaucuuuuuuuuugcaaaauuc

SEQ ID NO: 214884 - RNA, 32 nt, Homo Sapiens
cuucacguagccuuguugggaauauggaaaag

SEQ ID NO: 214885 - RNA, 32 nt, Homo Sapiens
agaccaagcccggcccggccaguccccgcaaa

SEQ ID NO: 214886 - RNA, 32 nt, Homo Sapiens
uucuuuugacauuugaaaauuuaguacauugu

SEQ ID NO: 214887 - RNA, 32 nt, Homo Sapiens
ucucaaaauaucuauuuauuuuauuuuaauau

SEQ ID NO: 214888 - RNA, 32 nt, Homo Sapiens
guauuuuaguuucaaaauuacauuacauuuua

SEQ ID NO: 214889 - RNA, 32 nt, Homo Sapiens
aaucucugcagugcuuauaaaauacauuguug

SEQ ID NO: 214890 - RNA, 32 nt, Homo Sapiens
cagggagauccuguuuccucaucaggggagcu

SEQ ID NO: 214891 - RNA, 30 nt, Homo Sapiens
cgaccauguccgcauccgcccagcagcugg

SEQ ID NO: 214892 - RNA, 32 nt, Homo Sapiens
cuacaaaaaauauuuaaaaaauuagccaggug

SEQ ID NO: 214893 - RNA, 32 nt, Homo Sapiens
auuuaugaagagaucagcgacccugaggaaga

SEQ ID NO: 214894 - RNA, 32 nt, Homo Sapiens
ugaaugcuauuuucuuuuuucuuuuucuuuuc

SEQ ID NO: 214895 - RNA, 32 nt, Homo Sapiens
uggggcccgggcugcgccccagcaccaugcuc

SEQ ID NO: 214896 - RNA, 32 nt, Homo Sapiens
cccccggaggcgucugggugugcggagcgcgc

SEQ ID NO: 214897 - RNA, 30 nt, Homo Sapiens
cgccgcuccgcuccgaucgcuguggggcuu

SEQ ID NO: 214898 - RNA, 32 nt, Homo Sapiens
uucacuugaccccuggcccaccucuccaaccu

SEQ ID NO: 214899 - RNA, 32 nt, Homo Sapiens
caauagauaacucagcguagauaguauugcaa

SEQ ID NO: 214900 - RNA, 30 nt, Homo Sapiens
gagcuguggggcgaucuuucuuagucccac

SEQ ID NO: 214901 - RNA, 32 nt, Homo Sapiens
gugggagguaauuaaaucaugggggcgguuac

SEQ ID NO: 214902 - RNA, 32 nt, Homo Sapiens
uuguguuccccucaagcaucauauuuuacauu

SEQ ID NO: 214903 - RNA, 32 nt, Homo Sapiens
uuuuucuugaauguggcuaccuaauguggaac

SEQ ID NO: 214904 - RNA, 32 nt, Homo Sapiens
gcagauaaggcacgcugugcuguugggucucu

SEQ ID NO: 214905 - RNA, 32 nt, Homo Sapiens
ggccuaauuuguuauacauauuagccaacaug

SEQ ID NO: 214906 - RNA, 32 nt, Homo Sapiens
uacugcacuccagccuaggugacagagugaga

SEQ ID NO: 214907 - RNA, 32 nt, Homo Sapiens
agacccucaccaucuacaaaauggagauuaau

SEQ ID NO: 214908 - RNA, 32 nt, Homo Sapiens
ccacccacccuccccgccccagcaacugcaua

SEQ ID NO: 214909 - RNA, 32 nt, Homo Sapiens
aagagccucaaaagcaggacuacuucaugagc

SEQ ID NO: 214910 - RNA, 32 nt, Homo Sapiens
gcugaaaagagaaccgugugggacucacaggu

SEQ ID NO: 214911 - RNA, 32 nt, Homo Sapiens
auaccuugccauauuucuuuucaacuggcuau

SEQ ID NO: 214912 - RNA, 32 nt, Homo Sapiens
uaaggguuacauuuuuguguauauggcuuuca

SEQ ID NO: 214913 - RNA, 32 nt, Homo Sapiens
uuucacagccccagcccucagagcaaccucag

SEQ ID NO: 214914 - RNA, 32 nt, Homo Sapiens
cugccucuugugcagagcucagcgccccaaga

SEQ ID NO: 214915 - RNA, 32 nt, Homo Sapiens
aauggcugcugucuccaguuucugggguuaag

SEQ ID NO: 214916 - RNA, 32 nt, Homo Sapiens
cccugcuguuuggcuuaacacaucucaacccc

SEQ ID NO: 214917 - RNA, 32 nt, Homo Sapiens
cugucagaauaaaaaugugguuuguacauauc

SEQ ID NO: 214918 - RNA, 32 nt, Homo Sapiens
gugaguuugucaagcaacuaucgacuugauca

SEQ ID NO: 214919 - RNA, 31 nt, Homo Sapiens
aguggcccaggcugccugcagccauugcugg

SEQ ID NO: 214920 - RNA, 32 nt, Homo Sapiens
uuaagugugaauguaacaacauacugugaauu

SEQ ID NO: 214921 - RNA, 32 nt, Homo Sapiens
acaguauguauuauauuaaccauaucacacuu

SEQ ID NO: 214922 - RNA, 32 nt, Homo Sapiens
gcccgagccgccgcacccggccugcagguguu

SEQ ID NO: 214923 - RNA, 32 nt, Homo Sapiens
acugugagcugggagcaguucucucagcugga

SEQ ID NO: 214924 - RNA, 32 nt, Homo Sapiens
auacauguguuguuaaaguacaugcauucuua

SEQ ID NO: 214925 - RNA, 32 nt, Homo Sapiens
cgugcucgacgccuucuacgacgcaguguuuc

SEQ ID NO: 214926 - RNA, 32 nt, Homo Sapiens
cugugaaaacugugcuuuaaauuauauuuuca

SEQ ID NO: 214927 - RNA, 32 nt, Homo Sapiens
cggaacugcguuuguuuccggcguggguccgg

SEQ ID NO: 214928 - RNA, 32 nt, Homo Sapiens
cugcagggguuuccucuucagccugccugggg

SEQ ID NO: 214929 - RNA, 32 nt, Homo Sapiens
uaaaaaauguugaguuaucaccaccuuucaau

SEQ ID NO: 214930 - RNA, 32 nt, Homo Sapiens
cuucccgucucauccaucuggaugcuugacac

SEQ ID NO: 214931 - RNA, 32 nt, Homo Sapiens
cgcgagcgcugcccgcgcggggaccacaaccc

SEQ ID NO: 214932 - RNA, 32 nt, Homo Sapiens
gcaaaggaggaugucuuggcaaguuuaagcua

SEQ ID NO: 214933 - RNA, 32 nt, Homo Sapiens
agaaaugauggcaacuuugaaugcuaggugaa

SEQ ID NO: 214934 - RNA, 32 nt, Homo Sapiens
ccucugacccaccggcagcgagugcgcaggug

SEQ ID NO: 214935 - RNA, 30 nt, Homo Sapiens
ggucaggccggugaaggcggcaggaagcug

SEQ ID NO: 214936 - RNA, 32 nt, Homo Sapiens
aauuaaaaauuugaacauuuguuugugaagaa

SEQ ID NO: 214937 - RNA, 32 nt, Homo Sapiens
gacuuugaaaauaaagcuuaaauaguuguuuc

SEQ ID NO: 214938 - RNA, 32 nt, Homo Sapiens
uucgccagugcuuuccaugugccucguagagu

SEQ ID NO: 214939 - RNA, 32 nt, Homo Sapiens
ggccgcccccgcagcugcgcagccugcccuuc

SEQ ID NO: 214940 - RNA, 32 nt, Homo Sapiens
ucuugcaauuuaaugccaaaaguuugccaugu

SEQ ID NO: 214941 - RNA, 32 nt, Homo Sapiens
auauaauggaagaugcagaugauaaaacuaau

SEQ ID NO: 214942 - RNA, 32 nt, Homo Sapiens
acuuguuaaugucaaggguccgucacgguggu

SEQ ID NO: 214943 - RNA, 32 nt, Homo Sapiens
uauaggacagcuuuuguuaggaagugauauuc

SEQ ID NO: 214944 - RNA, 32 nt, Homo Sapiens
cuaggcugggcguggcggcucacgccuguaau

SEQ ID NO: 214945 - RNA, 32 nt, Homo Sapiens
acucgccccccgccuguagcucggucggcguu

SEQ ID NO: 214946 - RNA, 31 nt, Homo Sapiens
cagcugcaucacugccugugccuucguuucu

SEQ ID NO: 214947 - RNA, 32 nt, Homo Sapiens
aauguacacauuauagcagcucgccauugugu

SEQ ID NO: 214948 - RNA, 32 nt, Homo Sapiens
gagggauuuucuuuuucccagcaugagggacu

SEQ ID NO: 214949 - RNA, 32 nt, Homo Sapiens
auguaauuaguucuauuaaacauauuaauugu

SEQ ID NO: 214950 - RNA, 32 nt, Homo Sapiens
agauuucuaaagaagauuuugugcaguuuaca

SEQ ID NO: 214951 - RNA, 32 nt, Homo Sapiens
guguccauaaaauaauguauauaaaauagaca

SEQ ID NO: 214952 - RNA, 32 nt, Homo Sapiens
cacuaaaacacuucauugagagaguuuagguu

SEQ ID NO: 214953 - RNA, 32 nt, Homo Sapiens
uucuucaugcugguauuuuuucaauaguaaug

SEQ ID NO: 214954 - RNA, 32 nt, Homo Sapiens
ucggggcgcgcccucgcgcugucgccgccaca

SEQ ID NO: 214955 - RNA, 32 nt, Homo Sapiens
uuuguuauaaauauaacuuaugagaaaaaaau

SEQ ID NO: 214956 - RNA, 31 nt, Homo Sapiens
cugcggguggacuaccucagagcuacagcgg

SEQ ID NO: 214957 - RNA, 32 nt, Homo Sapiens
auaacagccaaggggaaaacauggcucuucug

SEQ ID NO: 214958 - RNA, 29 nt, Homo Sapiens
augaugugaaaauuuuauuuucugggaaa

SEQ ID NO: 214959 - RNA, 32 nt, Homo Sapiens
uauguaucaauauauauacuccucacugugua

SEQ ID NO: 214960 - RNA, 32 nt, Homo Sapiens
gcugcagggagcugggcagagccgggccuggc

SEQ ID NO: 214961 - RNA, 32 nt, Homo Sapiens
cgagagaaaacuggccacaggauuggcagcug

SEQ ID NO: 214962 - RNA, 32 nt, Homo Sapiens
uuauagggacagugucaccacuuuacagaaga

SEQ ID NO: 214963 - RNA, 32 nt, Homo Sapiens
aauuuagcuaauaguaguuuacagacaauucu

SEQ ID NO: 214964 - RNA, 32 nt, Homo Sapiens
ugagggggaauguggaggaaggugagaaauac

SEQ ID NO: 214965 - RNA, 32 nt, Homo Sapiens
gcuguaaauaacaggauacagaauuaacaaga

SEQ ID NO: 214966 - RNA, 32 nt, Homo Sapiens
gaugcagaucugcguggcuggugcgugcgcgc

SEQ ID NO: 214967 - RNA, 32 nt, Homo Sapiens
ggggggcauggaggccaggucucaguccgcgc

SEQ ID NO: 214968 - RNA, 32 nt, Homo Sapiens
gauagaaugaauagguuguaggucccuguaaa

SEQ ID NO: 214969 - RNA, 32 nt, Homo Sapiens
ggcgggagguucggcuucgccccucgcccucc

SEQ ID NO: 214970 - RNA, 32 nt, Homo Sapiens
caauuccugaugcacagugguuauggguugaa

SEQ ID NO: 214971 - RNA, 32 nt, Homo Sapiens
cagcggcuacuucuggugcugcugcugggugg

SEQ ID NO: 214972 - RNA, 32 nt, Homo Sapiens
uuuccuucuucacacaccccacaucucugggc

SEQ ID NO: 214973 - RNA, 32 nt, Homo Sapiens
acuccuucguggaggcuggcuacauuuucaca

SEQ ID NO: 214974 - RNA, 32 nt, Homo Sapiens
acaacccaacuggccaggcgggggaggcgcag

SEQ ID NO: 214975 - RNA, 32 nt, Homo Sapiens
uaugauuuauagaaauaccuuuccuguagcuu

SEQ ID NO: 214976 - RNA, 32 nt, Homo Sapiens
cucggcuuacugcaagcuccgccucccagguu

SEQ ID NO: 214977 - RNA, 32 nt, Homo Sapiens
ccaauucucucaauccccaugaccaucuccau

SEQ ID NO: 214978 - RNA, 32 nt, Homo Sapiens
uugauggacaaaguggcacauccaguggagcg

SEQ ID NO: 214979 - RNA, 32 nt, Homo Sapiens
cuccccagcucuucucuuccuagaucugcagg

SEQ ID NO: 214980 - RNA, 32 nt, Homo Sapiens
caaaaagaaaaaugaauuuuauaggguuuguc

SEQ ID NO: 214981 - RNA, 32 nt, Homo Sapiens
uuacaggugugagccaccgcacccggccaaaa

SEQ ID NO: 214982 - RNA, 32 nt, Homo Sapiens
ucaucugcuuggugucccacagaacuugcaca

SEQ ID NO: 214983 - RNA, 32 nt, Homo Sapiens
gaguuggcaacucagcugcugcugcuuccaug

SEQ ID NO: 214984 - RNA, 32 nt, Homo Sapiens
uuguuaggaaauggaauggucucuuugauuua

SEQ ID NO: 214985 - RNA, 32 nt, Homo Sapiens
cccucacggacggggcagcuggccgggcagag

SEQ ID NO: 214986 - RNA, 32 nt, Homo Sapiens
acacagguuggagcagagaaagaggaaacaua

SEQ ID NO: 214987 - RNA, 32 nt, Homo Sapiens
acagccgcacugacaucuuucaggaccacauc

SEQ ID NO: 214988 - RNA, 32 nt, Homo Sapiens
ggcuacgucacccaaaguagauguuagaaaac

SEQ ID NO: 214989 - RNA, 32 nt, Homo Sapiens
agaugaagggugggaccugaaggaagaagcug

SEQ ID NO: 214990 - RNA, 32 nt, Homo Sapiens
cugggaacuccuuagagagggccuugcagcuu

SEQ ID NO: 214991 - RNA, 27 nt, Homo Sapiens
cuucauuuuguuuucugguauaaaagu

SEQ ID NO: 214992 - RNA, 32 nt, Homo Sapiens
gcacuuugggaggccaaggcgaguggaucacc

SEQ ID NO: 214993 - RNA, 32 nt, Homo Sapiens
uucucccaucuaguggaaaugagcgaaaucau

SEQ ID NO: 214994 - RNA, 32 nt, Homo Sapiens
guagcugagauuacagguacgcaccaccaugc

SEQ ID NO: 214995 - RNA, 32 nt, Homo Sapiens
ugccuuucuuucccauugcaacguaugccuuc

SEQ ID NO: 214996 - RNA, 32 nt, Homo Sapiens
acuuuaaggcuuuuuaauuuuguuugagaaug

SEQ ID NO: 214997 - RNA, 32 nt, Homo Sapiens
uaggcuuuagggaaacaaauccucuuuuccua

SEQ ID NO: 214998 - RNA, 32 nt, Homo Sapiens
ucucccacccagggagcagcucuguccaacca

SEQ ID NO: 214999 - RNA, 32 nt, Homo Sapiens
cauuccuccgcggaucagaccaugcuccuucc

SEQ ID NO: 215000 - RNA, 28 nt, Homo Sapiens
agaauggcaacgcugauuaccaguacua

SEQ ID NO: 215001 - RNA, 32 nt, Homo Sapiens
accaccaaacaucugggaaacuucugggugcu

SEQ ID NO: 215002 - RNA, 32 nt, Homo Sapiens
ugaaaauuauugccgucauuauuuacauacuu

SEQ ID NO: 215003 - RNA, 32 nt, Homo Sapiens
aaugaugguaccaaauauuacaaaauuaucag

SEQ ID NO: 215004 - RNA, 32 nt, Homo Sapiens
accccgcagacaccuuggacauccuccuccca

SEQ ID NO: 215005 - RNA, 32 nt, Homo Sapiens
caagcgcaaccgucggugggucggggaucggu

SEQ ID NO: 215006 - RNA, 32 nt, Homo Sapiens
guuuccagcucggguuuccgggcucagaauuu

SEQ ID NO: 215007 - RNA, 32 nt, Homo Sapiens
ccaacaauuauguucauuuuaagcaaaauuuu

SEQ ID NO: 215008 - RNA, 29 nt, Homo Sapiens
uccacugugacuuuucuuuuaaacugggc

SEQ ID NO: 215009 - RNA, 32 nt, Homo Sapiens
caggggagcagguaccccuucuccuaaagaug

SEQ ID NO: 215010 - RNA, 32 nt, Homo Sapiens
ggccuuccgcggcugcuucuugugcgcccuca

SEQ ID NO: 215011 - RNA, 32 nt, Homo Sapiens
ugaccugcgcgacugugucaccuaccagacug

SEQ ID NO: 215012 - RNA, 32 nt, Homo Sapiens
ccgggaggcagaccuugcagugagccaagauc

SEQ ID NO: 215013 - RNA, 32 nt, Homo Sapiens
uaaacaugggcagcuuccuucaggaugaucac

SEQ ID NO: 215014 - RNA, 32 nt, Homo Sapiens
cacaucggcacccggggcuggcaggcggccgc

SEQ ID NO: 215015 - RNA, 28 nt, Homo Sapiens
aauuccuauuucaauauguguuuccuug

SEQ ID NO: 215016 - RNA, 32 nt, Homo Sapiens
aggagaggggagaagccgggggcugcagcugg

SEQ ID NO: 215017 - RNA, 32 nt, Homo Sapiens
ucaaaagcgaagaaagucuuugaaaagguuuc

SEQ ID NO: 215018 - RNA, 32 nt, Homo Sapiens
ccggcuggacugcggcagccgcgcggcucacc

SEQ ID NO: 215019 - RNA, 32 nt, Homo Sapiens
cugcugggguucccccuccacccaguggccac

SEQ ID NO: 215020 - RNA, 30 nt, Homo Sapiens
gcuguggauaaaaggaagguuaugauuccu

SEQ ID NO: 215021 - RNA, 32 nt, Homo Sapiens
cuaacuucuuugauacuucacaggauuaggaa

SEQ ID NO: 215022 - RNA, 32 nt, Homo Sapiens
ucuccaauacucagguuaaugcugaaaaauca

SEQ ID NO: 215023 - RNA, 32 nt, Homo Sapiens
acguugugucccuccgccucccccauggcgca

SEQ ID NO: 215024 - RNA, 32 nt, Homo Sapiens
ccgauagccccaggaaacgaauccacagagga

SEQ ID NO: 215025 - RNA, 32 nt, Homo Sapiens
aaaagguuugguuaaccaccccccucuuacuu

SEQ ID NO: 215026 - RNA, 32 nt, Homo Sapiens
aagggaagauggagacaauacuggagcagcag

SEQ ID NO: 215027 - RNA, 32 nt, Homo Sapiens
ugacaauggccacacacacacacacacacaca

SEQ ID NO: 215028 - RNA, 32 nt, Homo Sapiens
cuugccuuaaucccucaccagcugaauaccuc

SEQ ID NO: 215029 - RNA, 32 nt, Homo Sapiens
aaguacccugggucuuucauccguauuccuga

SEQ ID NO: 215030 - RNA, 32 nt, Homo Sapiens
uggucagguucaauuguacuuuauuauaguug

SEQ ID NO: 215031 - RNA, 32 nt, Homo Sapiens
gcuggagcuaaggggaccugaccugagagaag

SEQ ID NO: 215032 - RNA, 32 nt, Homo Sapiens
ggccuccugaauuggcagcuguuggccucgau

SEQ ID NO: 215033 - RNA, 32 nt, Homo Sapiens
ggcuuugcuaaacagaaaagauauaaaacaaa

SEQ ID NO: 215034 - RNA, 32 nt, Homo Sapiens
ggccuaaaccaucaggguacuaaaggagaaga

SEQ ID NO: 215035 - RNA, 32 nt, Homo Sapiens
uuuguuuuguuuacagaugaggucuugcugug

SEQ ID NO: 215036 - RNA, 32 nt, Homo Sapiens
auuggguggcccuggaauguguagaaggggug

SEQ ID NO: 215037 - RNA, 32 nt, Homo Sapiens
cagcuacaaaagauccaucaagugcugacugc

SEQ ID NO: 215038 - RNA, 32 nt, Homo Sapiens
uuaaugaaauuccauguuuguugaaucauuaa

SEQ ID NO: 215039 - RNA, 31 nt, Homo Sapiens
gacaaacauuucuauuugccaaguggccugu

SEQ ID NO: 215040 - RNA, 32 nt, Homo Sapiens
cugccgcccucucugccacgcgggacccucug

SEQ ID NO: 215041 - RNA, 32 nt, Homo Sapiens
uucagcccuggauauuuaaaucuccuccucuu

SEQ ID NO: 215042 - RNA, 32 nt, Homo Sapiens
guguccacugagccuuccccagccagucuugu

SEQ ID NO: 215043 - RNA, 32 nt, Homo Sapiens
uacacuauccuccagcuaucagaauuauauug

SEQ ID NO: 215044 - RNA, 32 nt, Homo Sapiens
cugcccgccucagccucccaaaaugcugggau

SEQ ID NO: 215045 - RNA, 32 nt, Homo Sapiens
uuucuauaaaauggguaggcaggagaaaagca

SEQ ID NO: 215046 - RNA, 32 nt, Homo Sapiens
ggcaggcucugcgugcgcccccucgagugccg

SEQ ID NO: 215047 - RNA, 32 nt, Homo Sapiens
uauuguacgccgcccggcaggccugccgccua

SEQ ID NO: 215048 - RNA, 32 nt, Homo Sapiens
gcccaugguguauucuaggccacagcccagca

SEQ ID NO: 215049 - RNA, 32 nt, Homo Sapiens
uacaguggagaaugggggugaccacaaaagag

SEQ ID NO: 215050 - RNA, 32 nt, Homo Sapiens
auauugguauagucaauucuuauuugaauauu

SEQ ID NO: 215051 - RNA, 32 nt, Homo Sapiens
ggugcaauauguuuuuugaaccagcuauaaaa

SEQ ID NO: 215052 - RNA, 32 nt, Homo Sapiens
ucuugacaucaagucuaacaaagaaaaaguuu

SEQ ID NO: 215053 - RNA, 32 nt, Homo Sapiens
gggcccggcgcgcgcgggaagucucuguaggg

SEQ ID NO: 215054 - RNA, 32 nt, Homo Sapiens
guaaagugaagauuguucuacugcaugugaag

SEQ ID NO: 215055 - RNA, 32 nt, Homo Sapiens
uauguaaauaauucuuuuuuauuaaucacugu

SEQ ID NO: 215056 - RNA, 32 nt, Homo Sapiens
uugggucucucagggcccuucccacagagccc

SEQ ID NO: 215057 - RNA, 32 nt, Homo Sapiens
gcaaaauuauauuguaacuuccccucacccca

SEQ ID NO: 215058 - RNA, 32 nt, Homo Sapiens
guuuugauucucuuauucucuugucuuuucua

SEQ ID NO: 215059 - RNA, 32 nt, Homo Sapiens
gugagcggccggcgacccugggacgccccgcc

SEQ ID NO: 215060 - RNA, 32 nt, Homo Sapiens
uaauaaauugaauacuagguguuguaaggaag

SEQ ID NO: 215061 - RNA, 32 nt, Homo Sapiens
cgguguucagugguuucccugcccgaggucgc

SEQ ID NO: 215062 - RNA, 30 nt, Homo Sapiens
ccaaaugucugugcagugucagggcugcac

SEQ ID NO: 215063 - RNA, 32 nt, Homo Sapiens
ccuugauaguucaccacgucugauggaucccu

SEQ ID NO: 215064 - RNA, 32 nt, Homo Sapiens
cagcccccggcggcuuugugggcgcagcacgc

SEQ ID NO: 215065 - RNA, 32 nt, Homo Sapiens
caaacaugcgugccauuaagucauguccaaug

SEQ ID NO: 215066 - RNA, 32 nt, Homo Sapiens
uggccuuggccacagcauaccuagccuagugc

SEQ ID NO: 215067 - RNA, 32 nt, Homo Sapiens
cucaggagccgcggcggcgacugcgccucgga

SEQ ID NO: 215068 - RNA, 32 nt, Homo Sapiens
ccaggaggguggcaggggcccugccuucaaac

SEQ ID NO: 215069 - RNA, 32 nt, Homo Sapiens
cccagauagauauaugcauagauaaaagugau

SEQ ID NO: 215070 - RNA, 31 nt, Homo Sapiens
ugccccucugccugccugccccacugugcug

SEQ ID NO: 215071 - RNA, 32 nt, Homo Sapiens
guaaguaagugacaaugcuuauggaaagccag

SEQ ID NO: 215072 - RNA, 32 nt, Homo Sapiens
gaguaucugccauuuaaugcugaaacaacacu

SEQ ID NO: 215073 - RNA, 32 nt, Homo Sapiens
cuguauuuaauaauuuaauauacucuagaaag

SEQ ID NO: 215074 - RNA, 32 nt, Homo Sapiens
cuguuuuauuuuuuaaaguguuuaauguuucu

SEQ ID NO: 215075 - RNA, 32 nt, Homo Sapiens
uaccaguagaguggguugcugcuguaaauacc

SEQ ID NO: 215076 - RNA, 32 nt, Homo Sapiens
ggggucucggggccggccggucgacuccgccc

SEQ ID NO: 215077 - RNA, 32 nt, Homo Sapiens
caggggcccagagcuucuuccuuuggcuacgc

SEQ ID NO: 215078 - RNA, 32 nt, Homo Sapiens
ugggaauguggcaguggggauguggcagugag

SEQ ID NO: 215079 - RNA, 32 nt, Homo Sapiens
ucagaagaaaauaaacaaaugcauuauguaag

SEQ ID NO: 215080 - RNA, 32 nt, Homo Sapiens
cauuucccacuccccucuuccacaagugugau

SEQ ID NO: 215081 - RNA, 32 nt, Homo Sapiens
cuaagcacuuuaaaauacagccuccuucuguu

SEQ ID NO: 215082 - RNA, 32 nt, Homo Sapiens
gcauguuugaggaccucuuugaguggcuuucc

SEQ ID NO: 215083 - RNA, 32 nt, Homo Sapiens
gugguuauaucaaacuuuuacgacuuuuacau

SEQ ID NO: 215084 - RNA, 32 nt, Homo Sapiens
cgcggcguccacgucccucccccgcugcaccc

SEQ ID NO: 215085 - RNA, 32 nt, Homo Sapiens
uccaguuagucauacaagucaagaugcuaccc

SEQ ID NO: 215086 - RNA, 28 nt, Homo Sapiens
aauguucugggauaacauuuggaggaag

SEQ ID NO: 215087 - RNA, 32 nt, Homo Sapiens
aucaaaauuuguacuggugugaaacagaauau

SEQ ID NO: 215088 - RNA, 32 nt, Homo Sapiens
ugcccagcaucacccuccccgagugcagcccg

SEQ ID NO: 215089 - RNA, 32 nt, Homo Sapiens
ggcagaguuuuacuguaauauuugcaaguauc

SEQ ID NO: 215090 - RNA, 32 nt, Homo Sapiens
ugguaaaaugagaaaguccugugcaguccuga

SEQ ID NO: 215091 - RNA, 32 nt, Homo Sapiens
guguggaaaugaauauaaaaugcaucuaaaca

SEQ ID NO: 215092 - RNA, 32 nt, Homo Sapiens
uuaccugaauguugucugaggacugaacugug

SEQ ID NO: 215093 - RNA, 32 nt, Homo Sapiens
aaacacagcuggacacagagcuugguggaaga

SEQ ID NO: 215094 - RNA, 32 nt, Homo Sapiens
acaggaagaguguguagaaguggaaauacgua

SEQ ID NO: 215095 - RNA, 32 nt, Homo Sapiens
uuuacaugacuaggcugauaaucuuauuuuuu

SEQ ID NO: 215096 - RNA, 32 nt, Homo Sapiens
aagacacucccaccaggcucuuucucccuuuu

SEQ ID NO: 215097 - RNA, 32 nt, Homo Sapiens
agcaugguacugguaccaaaacagagauauag

SEQ ID NO: 215098 - RNA, 32 nt, Homo Sapiens
accaccagaaacaaaaacaugccuuuuucuau

SEQ ID NO: 215099 - RNA, 32 nt, Homo Sapiens
aauagaucuuugucauuaaagcugaacuuuua

SEQ ID NO: 215100 - RNA, 32 nt, Homo Sapiens
cguaaucguuugcggugucaucuuggaauuau

SEQ ID NO: 215101 - RNA, 31 nt, Homo Sapiens
cagagcuggcucuggaaccaggcugcuccag

SEQ ID NO: 215102 - RNA, 32 nt, Homo Sapiens
aaaugugcgcagaguccgcccgggucgugccc

SEQ ID NO: 215103 - RNA, 32 nt, Homo Sapiens
gcagggaugcuagauuaaugucaggacccauu

SEQ ID NO: 215104 - RNA, 32 nt, Homo Sapiens
guaaacgccgaccuccgccgccgcccgcgccg

SEQ ID NO: 215105 - RNA, 32 nt, Homo Sapiens
gugguugauauccgcuguauccauccccgaga

SEQ ID NO: 215106 - RNA, 32 nt, Homo Sapiens
cauggucggcgcccacagcccgcgacggccug

SEQ ID NO: 215107 - RNA, 32 nt, Homo Sapiens
gugagagccguccccaccgcggcggcccuucu

SEQ ID NO: 215108 - RNA, 32 nt, Homo Sapiens
gccaccuuucccgcugcgggaccaagccggga

SEQ ID NO: 215109 - RNA, 32 nt, Homo Sapiens
gcccuuuggagcuuccuaaguugcuuuggcug

SEQ ID NO: 215110 - RNA, 32 nt, Homo Sapiens
uggcugcgggcuccagcggccgugugcuccag

SEQ ID NO: 215111 - RNA, 32 nt, Homo Sapiens
agccgcugcccuggguccugccugcaguauua

SEQ ID NO: 215112 - RNA, 32 nt, Homo Sapiens
aucaaaugacuagucccuguaggguauggugg

SEQ ID NO: 215113 - RNA, 32 nt, Homo Sapiens
caguggugccccugcuggccggagcuguagcu

SEQ ID NO: 215114 - RNA, 32 nt, Homo Sapiens
uugaaccugggaggugggaggcggaggaggag

SEQ ID NO: 215115 - RNA, 32 nt, Homo Sapiens
gugaguguuuaaaaagauuauuuuccagaaag

SEQ ID NO: 215116 - RNA, 32 nt, Homo Sapiens
ugaagaaagggaggagccagauuaguuggcag

SEQ ID NO: 215117 - RNA, 32 nt, Homo Sapiens
ggacgccgggcuaggggcgcgucauguggccg

SEQ ID NO: 215118 - RNA, 32 nt, Homo Sapiens
uggccaugggaagaggagaagagacgcaggug

SEQ ID NO: 215119 - RNA, 32 nt, Homo Sapiens
ccucucaagggucuuuccagcucuaggucggc

SEQ ID NO: 215120 - RNA, 32 nt, Homo Sapiens
ccuaggcagcauagccaaacccugucugcaca

SEQ ID NO: 215121 - RNA, 32 nt, Homo Sapiens
gccgaaggggaagaggcggcggcggaggggcu

SEQ ID NO: 215122 - RNA, 32 nt, Homo Sapiens
gaacauccccggacacucagugucacaggggg

SEQ ID NO: 215123 - RNA, 32 nt, Homo Sapiens
cuccugcguugaccucccaaagugcugggauu

SEQ ID NO: 215124 - RNA, 32 nt, Homo Sapiens
gcuuguggcaucaguuggggcgacagguggau

SEQ ID NO: 215125 - RNA, 32 nt, Homo Sapiens
uuuuguuuucuuuuaaauuaaaaaugaugcua

SEQ ID NO: 215126 - RNA, 32 nt, Homo Sapiens
uacuugaggguggaggaugggaagagggagag

SEQ ID NO: 215127 - RNA, 32 nt, Homo Sapiens
aaggcugauuuuucuuuuugguuaugauuucu

SEQ ID NO: 215128 - RNA, 32 nt, Homo Sapiens
ucccuccccucuccacccaccccacagcaggc

SEQ ID NO: 215129 - RNA, 32 nt, Homo Sapiens
agcagucuguuguugcagaugucagcagcaac

SEQ ID NO: 215130 - RNA, 32 nt, Homo Sapiens
ccccggcuucucuugcuggggugucgauucgg

SEQ ID NO: 215131 - RNA, 32 nt, Homo Sapiens
aagugcugugaagugucuguaugugagaguuu

SEQ ID NO: 215132 - RNA, 32 nt, Homo Sapiens
cucaaucuaaucuugcguucagugaauuaaac

SEQ ID NO: 215133 - RNA, 32 nt, Homo Sapiens
cuuaauaauaccaagacuaagcaccauaacca

SEQ ID NO: 215134 - RNA, 32 nt, Homo Sapiens
aagcgccucaucuccacuccaccugccaccca

SEQ ID NO: 215135 - RNA, 32 nt, Homo Sapiens
cuacagcaacaucaguaaggaucgcagguaug

SEQ ID NO: 215136 - RNA, 32 nt, Homo Sapiens
aggcccuaaaagguuuuaauucuuuuucuaag

SEQ ID NO: 215137 - RNA, 32 nt, Homo Sapiens
gaaugcucacuagcucacuagcaagaauuuuu

SEQ ID NO: 215138 - RNA, 32 nt, Homo Sapiens
aagggcgaaggacauugaagcuaaggaauaga

SEQ ID NO: 215139 - RNA, 32 nt, Homo Sapiens
cccaucagccuggucaucaccggcgucacccc

SEQ ID NO: 215140 - RNA, 31 nt, Homo Sapiens
uauuauuguccuuugauuccaaauaauaugu

SEQ ID NO: 215141 - RNA, 32 nt, Homo Sapiens
aaaauuucuucagaaucuaguuccucauagau

SEQ ID NO: 215142 - RNA, 32 nt, Homo Sapiens
uaagggaugauuaugucauaggccagagcccu

SEQ ID NO: 215143 - RNA, 32 nt, Homo Sapiens
gcaucugcgguuaacauagcaucccuauggcc

SEQ ID NO: 215144 - RNA, 32 nt, Homo Sapiens
agcuaacccacccaagacuuauacccaggaug

SEQ ID NO: 215145 - RNA, 32 nt, Homo Sapiens
gauugcccgagcucagggguuugagaccagcc

SEQ ID NO: 215146 - RNA, 32 nt, Homo Sapiens
uuagguggguucgugcgccuucuaccucgcug

SEQ ID NO: 215147 - RNA, 32 nt, Homo Sapiens
aaucuaaauauuaacaguaaaauauuugcaua

SEQ ID NO: 215148 - RNA, 32 nt, Homo Sapiens
auuauuuuucucaaaaaacaaacaaacaaaaa

SEQ ID NO: 215149 - RNA, 32 nt, Homo Sapiens
gagaacuggcuucucagcauucgucccagcag

SEQ ID NO: 215150 - RNA, 32 nt, Homo Sapiens
gcguucaguauaagagaaugguucauguuacu

SEQ ID NO: 215151 - RNA, 27 nt, Homo Sapiens
ugaugugccugcuucagccucccacag

SEQ ID NO: 215152 - RNA, 32 nt, Homo Sapiens
uugcucccaagccccugacccgcucggacuua

SEQ ID NO: 215153 - RNA, 32 nt, Homo Sapiens
accaacagcugguggguggccgggccaggaug

SEQ ID NO: 215154 - RNA, 32 nt, Homo Sapiens
ccacucaugaacccucacauccgcgugggccc

SEQ ID NO: 215155 - RNA, 32 nt, Homo Sapiens
cagucauuuuauuugaucuauuagcucuguua

SEQ ID NO: 215156 - RNA, 32 nt, Homo Sapiens
cgggccagacacuuaagugaaagcagaagugu

SEQ ID NO: 215157 - RNA, 32 nt, Homo Sapiens
auuuuugugaaugggaaggaaaugaagagcaa

SEQ ID NO: 215158 - RNA, 32 nt, Homo Sapiens
uugaaaucuaauuuauacaaucauucuauacu

SEQ ID NO: 215159 - RNA, 32 nt, Homo Sapiens
cguccuuaacugugcucucccuccuuuccucu

SEQ ID NO: 215160 - RNA, 32 nt, Homo Sapiens
caaguugcccucccuggcauggugaguuggcu

SEQ ID NO: 215161 - RNA, 32 nt, Homo Sapiens
aggcucauuccucuccuccaccuuccccuauc

SEQ ID NO: 215162 - RNA, 32 nt, Homo Sapiens
cuccccuccagauggaggcucacgaaguaggg

SEQ ID NO: 215163 - RNA, 32 nt, Homo Sapiens
caccacccauucuccucaucccucugcucucu

SEQ ID NO: 215164 - RNA, 32 nt, Homo Sapiens
ggucugugguggccccgaaauggggggccugc

SEQ ID NO: 215165 - RNA, 32 nt, Homo Sapiens
ucugguccauccgaugagacggaugcucugau

SEQ ID NO: 215166 - RNA, 32 nt, Homo Sapiens
ucucccacaaaaccccuuuaugaguucacgcu

SEQ ID NO: 215167 - RNA, 32 nt, Homo Sapiens
gcaguuguuuccauuccuauuuuuaauaaauc

SEQ ID NO: 215168 - RNA, 32 nt, Homo Sapiens
uggagauguacaaggagaugaauacuguuuuc

SEQ ID NO: 215169 - RNA, 32 nt, Homo Sapiens
ccauucuguucuuuuuacugucaucacuucua

SEQ ID NO: 215170 - RNA, 32 nt, Homo Sapiens
gacccugguuggaaauuaaacuuguuuuaugc

SEQ ID NO: 215171 - RNA, 32 nt, Homo Sapiens
ucccagagaucaggggguguugccaggugugg

SEQ ID NO: 215172 - RNA, 32 nt, Homo Sapiens
gaaacgugaacauaugugcugccugcccucca

SEQ ID NO: 215173 - RNA, 32 nt, Homo Sapiens
agauuugagaucaauuuagggauugugaaauu

SEQ ID NO: 215174 - RNA, 32 nt, Homo Sapiens
cuccgugcgcgggcugcagaugucugaccugc

SEQ ID NO: 215175 - RNA, 32 nt, Homo Sapiens
uuuugcuaaaaauaugucuaaaacuuguuuaa

SEQ ID NO: 215176 - RNA, 32 nt, Homo Sapiens
cagcagcucccugggccucuugguccaucccu

SEQ ID NO: 215177 - RNA, 32 nt, Homo Sapiens
ucaggucgcucccgggcgcggacacggaaccc

SEQ ID NO: 215178 - RNA, 32 nt, Homo Sapiens
ugcagagagccacccagacguccccaccgagc

SEQ ID NO: 215179 - RNA, 32 nt, Homo Sapiens
ucccccgcugccugcuggccaguggccgaacc

SEQ ID NO: 215180 - RNA, 32 nt, Homo Sapiens
guaacuaugaaaaagaauacuuugaaagacaa

SEQ ID NO: 215181 - RNA, 32 nt, Homo Sapiens
uccagccgggcuccuccaccgggccuugcagg

SEQ ID NO: 215182 - RNA, 32 nt, Homo Sapiens
cuccccuucgaggauugcacccgcccguccua

SEQ ID NO: 215183 - RNA, 32 nt, Homo Sapiens
aagcagggcagaacucugaacaacaauaaguc

SEQ ID NO: 215184 - RNA, 32 nt, Homo Sapiens
auuacugucuauugucagcaucauuuucaucu

SEQ ID NO: 215185 - RNA, 32 nt, Homo Sapiens
uuaagugaagauauuucuucagcucuggggaa

SEQ ID NO: 215186 - RNA, 32 nt, Homo Sapiens
gaucacagagccagcauguuacaggauccuga

SEQ ID NO: 215187 - RNA, 32 nt, Homo Sapiens
uccuuuuuaccuuguuuuccuuuggggcauga

SEQ ID NO: 215188 - RNA, 32 nt, Homo Sapiens
gcuggaauuugcuuuguacuagugauuugaaa

SEQ ID NO: 215189 - RNA, 32 nt, Homo Sapiens
cacuccacccucagaacucugccauguugccu

SEQ ID NO: 215190 - RNA, 32 nt, Homo Sapiens
cccguuugcuggugcuggagggggcgcaccug

SEQ ID NO: 215191 - RNA, 32 nt, Homo Sapiens
ggaacaacgcgguaggcaaggcgggcugcugg

SEQ ID NO: 215192 - RNA, 32 nt, Homo Sapiens
gcccuuccaagcccggcuuugggccaggaaag

SEQ ID NO: 215193 - RNA, 32 nt, Homo Sapiens
guguguuccggggcuucugggcagcugggccu

SEQ ID NO: 215194 - RNA, 32 nt, Homo Sapiens
uugucagaacagaaacucauucaaaccagcuc

SEQ ID NO: 215195 - RNA, 32 nt, Homo Sapiens
ccaacucuguaaagccaaguccagucacccau

SEQ ID NO: 215196 - RNA, 32 nt, Homo Sapiens
gggagccgcccgucucgccgcgcacgccucgg

SEQ ID NO: 215197 - RNA, 32 nt, Homo Sapiens
ucccuuuggggauagucuggaaaguugggauu

SEQ ID NO: 215198 - RNA, 32 nt, Homo Sapiens
gagagcugcccugccuaggagcacccaagcca

SEQ ID NO: 215199 - RNA, 32 nt, Homo Sapiens
aauguuaaagaaaauguuaugaaaauaucaaa

SEQ ID NO: 215200 - RNA, 32 nt, Homo Sapiens
cugccauucuucuggugcuacuccaugcaggg

SEQ ID NO: 215201 - RNA, 32 nt, Homo Sapiens
ccuucccccagagcuucuaggagagcccccca

SEQ ID NO: 215202 - RNA, 32 nt, Homo Sapiens
gcucagucaguuccuuucacucccaauuguug

SEQ ID NO: 215203 - RNA, 32 nt, Homo Sapiens
cccugccccgucccuaagugggagccugaagg

SEQ ID NO: 215204 - RNA, 32 nt, Homo Sapiens
acucuccaguguuuuuucuguuggaccacacc

SEQ ID NO: 215205 - RNA, 32 nt, Homo Sapiens
gauaagagugaccuuuuuggccugcucucccc

SEQ ID NO: 215206 - RNA, 32 nt, Homo Sapiens
cacaccgcaccaaguauccccaagguggccuu

SEQ ID NO: 215207 - RNA, 32 nt, Homo Sapiens
aguguguccggaauugguggguucuuggucuc

SEQ ID NO: 215208 - RNA, 32 nt, Homo Sapiens
cuugaaaggcccaggcucguugccaggcacca

SEQ ID NO: 215209 - RNA, 32 nt, Homo Sapiens
guggaggccaggcagggcugcugcugaacauc

SEQ ID NO: 215210 - RNA, 32 nt, Homo Sapiens
uuugaaugacuucagguagcgaggagugugug

SEQ ID NO: 215211 - RNA, 32 nt, Homo Sapiens
auucucuuagggcagaguuagcucuuuuguuc

SEQ ID NO: 215212 - RNA, 32 nt, Homo Sapiens
gcugccuauguuucuuuuuaaagcucgcauuc

SEQ ID NO: 215213 - RNA, 32 nt, Homo Sapiens
cgccucgcgccgagacuagaagcgcugcggga

SEQ ID NO: 215214 - RNA, 32 nt, Homo Sapiens
uugugaauguuuacauccugcugcugauaggu

SEQ ID NO: 215215 - RNA, 32 nt, Homo Sapiens
aaugauugauucauggcucgguucaaguauac

SEQ ID NO: 215216 - RNA, 32 nt, Homo Sapiens
gagaacaggaggaaugagagggcagaggucuc

SEQ ID NO: 215217 - RNA, 32 nt, Homo Sapiens
aggacuggggaagggaggggagacuaugugug

SEQ ID NO: 215218 - RNA, 32 nt, Homo Sapiens
gaaauucggucccugggccuccucccgggcgc

SEQ ID NO: 215219 - RNA, 32 nt, Homo Sapiens
uuugaucuggcacuggacccaggucgucugac

SEQ ID NO: 215220 - RNA, 32 nt, Homo Sapiens
uuccgcuuuuauucugcugucuggcuucaugc

SEQ ID NO: 215221 - RNA, 32 nt, Homo Sapiens
accugacaaccacggauuaucuuagaguuuua

SEQ ID NO: 215222 - RNA, 32 nt, Homo Sapiens
cauggcggguggggaccuggggugcucaggag

SEQ ID NO: 215223 - RNA, 32 nt, Homo Sapiens
uugcacguguauuauuaaauauuagguagaaa

SEQ ID NO: 215224 - RNA, 32 nt, Homo Sapiens
uagcauguuccucuguguucugcaucuccugu

SEQ ID NO: 215225 - RNA, 32 nt, Homo Sapiens
auucugugggacagaagaaucucuugaguccu

SEQ ID NO: 215226 - RNA, 32 nt, Homo Sapiens
ugccagcccuggggcccggcacaggccugggc

SEQ ID NO: 215227 - RNA, 32 nt, Homo Sapiens
guauuucccccuccuaaugacagaggaaaccg

SEQ ID NO: 215228 - RNA, 32 nt, Homo Sapiens
acaaauggguggugggggugggaaggguaaua

SEQ ID NO: 215229 - RNA, 32 nt, Homo Sapiens
gccuggcuccucuucugucucuagguauuuau

SEQ ID NO: 215230 - RNA, 32 nt, Homo Sapiens
aaaaaaucuaauguaugaaugugacucaccaa

SEQ ID NO: 215231 - RNA, 32 nt, Homo Sapiens
caggggucuguguaccucugaauucaugagag

SEQ ID NO: 215232 - RNA, 32 nt, Homo Sapiens
ggauauaggggcggggcgcagggcguggacgg

SEQ ID NO: 215233 - RNA, 32 nt, Homo Sapiens
gcugagaugagccccacguggagcucgggacg

SEQ ID NO: 215234 - RNA, 32 nt, Homo Sapiens
aagcggucuccuccucucuauauaaaguugcu

SEQ ID NO: 215235 - RNA, 32 nt, Homo Sapiens
ccugccuguucggacaccccccgggccggccg

SEQ ID NO: 215236 - RNA, 32 nt, Homo Sapiens
uccuugucaggagaauuuguagaucauucuca

SEQ ID NO: 215237 - RNA, 32 nt, Homo Sapiens
uaaaaagccacguaaugaaaccacuaaugaaa

SEQ ID NO: 215238 - RNA, 32 nt, Homo Sapiens
uugugugaagucuaggaggaaauguccauuuu

SEQ ID NO: 215239 - RNA, 32 nt, Homo Sapiens
ugaagugaguugaaaagagaucaauaguggaa

SEQ ID NO: 215240 - RNA, 32 nt, Homo Sapiens
cacguggcugcgugccccugcugcugucaccu

SEQ ID NO: 215241 - RNA, 32 nt, Homo Sapiens
guucuacugugcguguggugugcucgugguga

SEQ ID NO: 215242 - RNA, 32 nt, Homo Sapiens
cgccggggaauauucaugugggaaauggaggc

SEQ ID NO: 215243 - RNA, 32 nt, Homo Sapiens
uccaccuuguuaaauaaauuggauguauggaa

SEQ ID NO: 215244 - RNA, 32 nt, Homo Sapiens
gucuuuaacauuauuucagcaguuuuauuaca

SEQ ID NO: 215245 - RNA, 32 nt, Homo Sapiens
cuggucgguuucccauuugucuggccagucuc

SEQ ID NO: 215246 - RNA, 32 nt, Homo Sapiens
cuuauaguaaaccaaaagauuagcaauaauac

SEQ ID NO: 215247 - RNA, 32 nt, Homo Sapiens
cgaagggcacccccgccuccagcacgcgcccu

SEQ ID NO: 215248 - RNA, 32 nt, Homo Sapiens
aacacuaaguuccaggcacugggcuaggcacu

SEQ ID NO: 215249 - RNA, 32 nt, Homo Sapiens
aacauccccuauugagacccacugcuuuagcg

SEQ ID NO: 215250 - RNA, 32 nt, Homo Sapiens
aauauaauuuuucaggcagccuguggacuucu

SEQ ID NO: 215251 - RNA, 32 nt, Homo Sapiens
aaaacaagccccagccuuacucccggcccccc

SEQ ID NO: 215252 - RNA, 32 nt, Homo Sapiens
cccucagacagcauggcccagcccuggccaga

SEQ ID NO: 215253 - RNA, 32 nt, Homo Sapiens
caugccugcuuccaagcuuccaucaagucagg

SEQ ID NO: 215254 - RNA, 32 nt, Homo Sapiens
gugcuguagaaagugcaccagguguuaauuuu

SEQ ID NO: 215255 - RNA, 31 nt, Homo Sapiens
uaauguucaagguccagccuugguccagggc

SEQ ID NO: 215256 - RNA, 32 nt, Homo Sapiens
agucccaacuuugaauaaaacagaugaugucc

SEQ ID NO: 215257 - RNA, 32 nt, Homo Sapiens
agguggccuggggacuggagggaccaggaugc

SEQ ID NO: 215258 - RNA, 32 nt, Homo Sapiens
cuggcuugaucacuuugugucaucuugaaaca

SEQ ID NO: 215259 - RNA, 32 nt, Homo Sapiens
aaacauguuuaauguuguauauuaucuaacug

SEQ ID NO: 215260 - RNA, 32 nt, Homo Sapiens
gcaguagagggaggagcagagaaaggaggcca

SEQ ID NO: 215261 - RNA, 32 nt, Homo Sapiens
auuuauggguggcagagcuagagcuaggcccu

SEQ ID NO: 215262 - RNA, 32 nt, Homo Sapiens
gcaggacauuucagcaagcuuccacugagcuu

SEQ ID NO: 215263 - RNA, 32 nt, Homo Sapiens
aaucaaaguccucuucuaggauuuuuucaaau

SEQ ID NO: 215264 - RNA, 32 nt, Homo Sapiens
uccacaacggucucaagaucugcgagaaguuu

SEQ ID NO: 215265 - RNA, 32 nt, Homo Sapiens
ggccuccugcgcuccugccgccgggacccucg

SEQ ID NO: 215266 - RNA, 32 nt, Homo Sapiens
ggccacagacuccgacuccauucuucagaggc

SEQ ID NO: 215267 - RNA, 29 nt, Homo Sapiens
gcagcuuaaaguuuacaugcuacaaaaaa

SEQ ID NO: 215268 - RNA, 32 nt, Homo Sapiens
gggaaagcuggucacuuugaggucucugaagg

SEQ ID NO: 215269 - RNA, 32 nt, Homo Sapiens
auauuaaugaauugcccacaugcaaauaugug

SEQ ID NO: 215270 - RNA, 32 nt, Homo Sapiens
ugcugcgcgggaggccauggccggcaagggca

SEQ ID NO: 215271 - RNA, 32 nt, Homo Sapiens
gucuuagugucuuguucauguuguaggguaau

SEQ ID NO: 215272 - RNA, 32 nt, Homo Sapiens
aagagcucccuagagcaccacccaggcccuug

SEQ ID NO: 215273 - RNA, 32 nt, Homo Sapiens
gccccucuuuugcuucugaccacggaggcuuu

SEQ ID NO: 215274 - RNA, 32 nt, Homo Sapiens
guuuuggggcaucuuuccugcccucugccaac

SEQ ID NO: 215275 - RNA, 32 nt, Homo Sapiens
aaucccggagggggaaaggcgagcagcuggca

SEQ ID NO: 215276 - RNA, 32 nt, Homo Sapiens
uuggccacccucagccucugaauguuuauuaa

SEQ ID NO: 215277 - RNA, 32 nt, Homo Sapiens
auuccuuagugucgagugggcucugggcuggg

SEQ ID NO: 215278 - RNA, 32 nt, Homo Sapiens
ucugcaggucauuuguauguaggaccaggagu

SEQ ID NO: 215279 - RNA, 32 nt, Homo Sapiens
ccgcggggaggacauggccgcgcacaggccgg

SEQ ID NO: 215280 - RNA, 32 nt, Homo Sapiens
gaagguaaaaccauucuuaacuauaguaagga

SEQ ID NO: 215281 - RNA, 32 nt, Homo Sapiens
gugcgcccgucuguggccaagcagccagcagc

SEQ ID NO: 215282 - RNA, 32 nt, Homo Sapiens
gcaaagaaugucuggaacauggacuuggcggu

SEQ ID NO: 215283 - RNA, 32 nt, Homo Sapiens
uccacggucuuaggauauagacccaggccgac

SEQ ID NO: 215284 - RNA, 27 nt, Homo Sapiens
uaucugcuguucuucaguccuuugucu

SEQ ID NO: 215285 - RNA, 32 nt, Homo Sapiens
cacuacucuucggcggccccaaagccucuggg

SEQ ID NO: 215286 - RNA, 32 nt, Homo Sapiens
agcuacaggggaggcugagacgcaaggaucac

SEQ ID NO: 215287 - RNA, 32 nt, Homo Sapiens
uaagcaaccaagagacccucccuucauggcuu

SEQ ID NO: 215288 - RNA, 32 nt, Homo Sapiens
ggauggcauuaggacgguucuggggcuaaacu

SEQ ID NO: 215289 - RNA, 32 nt, Homo Sapiens
gggcgggggcggggggcggggacguagggcua

SEQ ID NO: 215290 - RNA, 32 nt, Homo Sapiens
gagagaccaacccaggauugauucucagcacu

SEQ ID NO: 215291 - RNA, 32 nt, Homo Sapiens
agcuugucuccauggugggcugcuaugauacc

SEQ ID NO: 215292 - RNA, 32 nt, Homo Sapiens
acuagaucuauuaauacauucaucacugccug

SEQ ID NO: 215293 - RNA, 32 nt, Homo Sapiens
ugccugcaucugcauucccuccuuccaguguu

SEQ ID NO: 215294 - RNA, 32 nt, Homo Sapiens
aacauuuuuacuaccauugggaagacgcugag

SEQ ID NO: 215295 - RNA, 32 nt, Homo Sapiens
acuguuaacugagacucuguugagauucacug

SEQ ID NO: 215296 - RNA, 32 nt, Homo Sapiens
ugugccuuuaaccaguuaaaagaacagugccu

SEQ ID NO: 215297 - RNA, 32 nt, Homo Sapiens
aggacuucauugauuuuuucagagaguagaaa

SEQ ID NO: 215298 - RNA, 32 nt, Homo Sapiens
agccgaacagaacugcagaucuacacaaggcu

SEQ ID NO: 215299 - RNA, 32 nt, Homo Sapiens
accaccagcaccauccucuccucccagcagcc

SEQ ID NO: 215300 - RNA, 32 nt, Homo Sapiens
gacauuuugugauauuugaauguuauuaaguu

SEQ ID NO: 215301 - RNA, 32 nt, Homo Sapiens
ucauucauuucugauuguccaguuaagugauc

SEQ ID NO: 215302 - RNA, 32 nt, Homo Sapiens
cucaagcaguccucccaccucagccuccuaaa

SEQ ID NO: 215303 - RNA, 32 nt, Homo Sapiens
guguacuuuaaucugccagcagauaccaucua

SEQ ID NO: 215304 - RNA, 32 nt, Homo Sapiens
gcccuccugguucggccuccccgcgcacuaga

SEQ ID NO: 215305 - RNA, 32 nt, Homo Sapiens
uugguccccagcgcagugagguggugagccuc

SEQ ID NO: 215306 - RNA, 32 nt, Homo Sapiens
uauuuuuguuauuguuguuacaaaacaugguc

SEQ ID NO: 215307 - RNA, 32 nt, Homo Sapiens
ggugggcggggagaagauagggaacacucauc

SEQ ID NO: 215308 - RNA, 32 nt, Homo Sapiens
gaugugcgccucauguucuggaacugugcuaa

SEQ ID NO: 215309 - RNA, 31 nt, Homo Sapiens
cggcggagggcggaggagacucgcuugcacc

SEQ ID NO: 215310 - RNA, 32 nt, Homo Sapiens
guauaagggaacucaagggaaaaggaaacaca

SEQ ID NO: 215311 - RNA, 32 nt, Homo Sapiens
gaaaguguguguauuccuuucuuaauaaagug

SEQ ID NO: 215312 - RNA, 32 nt, Homo Sapiens
cccaagcaaccacugaggugcuuuuguccuuu

SEQ ID NO: 215313 - RNA, 32 nt, Homo Sapiens
ucagcuuagaguguucaacugauccuucccca

SEQ ID NO: 215314 - RNA, 32 nt, Homo Sapiens
gagcugacucagugaccuuugaggauguggcu

SEQ ID NO: 215315 - RNA, 32 nt, Homo Sapiens
caaugauagaaagugccuaaacaucccuacug

SEQ ID NO: 215316 - RNA, 32 nt, Homo Sapiens
gcccgugccugccccagggcuggugccauaca

SEQ ID NO: 215317 - RNA, 32 nt, Homo Sapiens
ugcugagucugugggauuaaggggauuaggga

SEQ ID NO: 215318 - RNA, 32 nt, Homo Sapiens
cucacagcaaccuccgccucccggguucaaga

SEQ ID NO: 215319 - RNA, 32 nt, Homo Sapiens
cuguuaauuacauuucuauuguuaaaaauaac

SEQ ID NO: 215320 - RNA, 32 nt, Homo Sapiens
cucuggaagaugagauuguaggugauauuuau

SEQ ID NO: 215321 - RNA, 32 nt, Homo Sapiens
uucagcaguuccuacaguuuuacuucaguuua

SEQ ID NO: 215322 - RNA, 32 nt, Homo Sapiens
aacucugagaaccacauccucaaguauguggu

SEQ ID NO: 215323 - RNA, 32 nt, Homo Sapiens
acaauugcuuugcuuuuuaaaccuuggcaauu

SEQ ID NO: 215324 - RNA, 32 nt, Homo Sapiens
auuauuacuauuuuuauuauuguuuguccuuu

SEQ ID NO: 215325 - RNA, 32 nt, Homo Sapiens
ugggacuaggcaugcuuccagcccuucccgug

SEQ ID NO: 215326 - RNA, 32 nt, Homo Sapiens
uuaugaaacagagggaagacuuuauuguuguu

SEQ ID NO: 215327 - RNA, 32 nt, Homo Sapiens
uaauguauaaugggaaauguuuggccaugcuu

SEQ ID NO: 215328 - RNA, 32 nt, Homo Sapiens
augauccaauacuguugcccuuuuccuugacu

SEQ ID NO: 215329 - RNA, 32 nt, Homo Sapiens
auacagcucugcaacgcguuugcccugauacc

SEQ ID NO: 215330 - RNA, 32 nt, Homo Sapiens
gugacagacaccuuuguauguuccuuguaugu

SEQ ID NO: 215331 - RNA, 32 nt, Homo Sapiens
agacguggcuccuggggcuauuucucccuaau

SEQ ID NO: 215332 - RNA, 32 nt, Homo Sapiens
uauguuaauauaauuuaucauauuacuaggug

SEQ ID NO: 215333 - RNA, 32 nt, Homo Sapiens
gaccucuguggccucccugcccuggauuccaa

SEQ ID NO: 215334 - RNA, 32 nt, Homo Sapiens
gagagcacgguggggcggggcgggagaaagug

SEQ ID NO: 215335 - RNA, 32 nt, Homo Sapiens
guugucuucuuggagcuguaggucuugaagca

SEQ ID NO: 215336 - RNA, 32 nt, Homo Sapiens
cucucuagcuaaugugugguuucuccuucccu

SEQ ID NO: 215337 - RNA, 32 nt, Homo Sapiens
ugcagucuuuugcugugcuguacauuacugua

SEQ ID NO: 215338 - RNA, 32 nt, Homo Sapiens
uauccuuguucaaugugacuacuuuaguugcc

SEQ ID NO: 215339 - RNA, 32 nt, Homo Sapiens
ucauucugguucccugcugcgcugcuuggugu

SEQ ID NO: 215340 - RNA, 32 nt, Homo Sapiens
cacugcacuccagccugccuggaugacagagc

SEQ ID NO: 215341 - RNA, 27 nt, Homo Sapiens
ggaugcucgcccgcgcccugcugcugu

SEQ ID NO: 215342 - RNA, 32 nt, Homo Sapiens
uuacauaaugguuuuucccaaucugaaucagu

SEQ ID NO: 215343 - RNA, 32 nt, Homo Sapiens
gguguuuuguaagcacugcuggcgauuucuca

SEQ ID NO: 215344 - RNA, 32 nt, Homo Sapiens
aggagccugcacccucuuucuguuggcuccac

SEQ ID NO: 215345 - RNA, 32 nt, Homo Sapiens
uuagagugaaaugaguccuauggucagacagg

SEQ ID NO: 215346 - RNA, 32 nt, Homo Sapiens
gacugcucccggggagagagccccggccccca

SEQ ID NO: 215347 - RNA, 32 nt, Homo Sapiens
gagcccggccccagugccccagcugccgcugu

SEQ ID NO: 215348 - RNA, 32 nt, Homo Sapiens
uuguggagggcuuguacauugugagagcauca

SEQ ID NO: 215349 - RNA, 32 nt, Homo Sapiens
ggacaacuuacauucggucaaccgggaccuca

SEQ ID NO: 215350 - RNA, 32 nt, Homo Sapiens
accagaggggaagagggagaguggcauagcuc

SEQ ID NO: 215351 - RNA, 32 nt, Homo Sapiens
gaggagucggaggagccgcgggggccgugccc

SEQ ID NO: 215352 - RNA, 32 nt, Homo Sapiens
uuuauuuuuuaaaguguuuaauguuucugucc

SEQ ID NO: 215353 - RNA, 32 nt, Homo Sapiens
ccuggcuucuauuucuuaaaauguuaugauca

SEQ ID NO: 215354 - RNA, 32 nt, Homo Sapiens
acuaugcaagaauuucucugguaaauuucacu

SEQ ID NO: 215355 - RNA, 32 nt, Homo Sapiens
agagcaaguauuuuuccaugcauucucagggg

SEQ ID NO: 215356 - RNA, 32 nt, Homo Sapiens
ggagaguuugugaguugaaaguaucucugcug

SEQ ID NO: 215357 - RNA, 32 nt, Homo Sapiens
ggagugugggucacggauccgagggauacaca

SEQ ID NO: 215358 - RNA, 32 nt, Homo Sapiens
gaggacagaugaugcagcuguuguguggcgag

SEQ ID NO: 215359 - RNA, 32 nt, Homo Sapiens
ucuagauaaucugaguuguugaaaauacgaag

SEQ ID NO: 215360 - RNA, 32 nt, Homo Sapiens
ccagauguccuccucagacuccugagaucgcc

SEQ ID NO: 215361 - RNA, 32 nt, Homo Sapiens
gauuacuugagcccgagagguggaggcuggag

SEQ ID NO: 215362 - RNA, 32 nt, Homo Sapiens
gugaaggcugaaggcagugcugaguccuuucu

SEQ ID NO: 215363 - RNA, 32 nt, Homo Sapiens
uauuauauuuauguuugcacaaugaaaauuuu

SEQ ID NO: 215364 - RNA, 32 nt, Homo Sapiens
ggcacgagggucagcucugguucggagaagca

SEQ ID NO: 215365 - RNA, 32 nt, Homo Sapiens
ccuacaacccaccuugaagguauacuggaucc

SEQ ID NO: 215366 - RNA, 32 nt, Homo Sapiens
ugaacuggaaugccuuggggcguggaagggca

SEQ ID NO: 215367 - RNA, 32 nt, Homo Sapiens
ugggaggccagacggcacgaggucuccaaggc

SEQ ID NO: 215368 - RNA, 32 nt, Homo Sapiens
ugccgguucauggauuacuucucuauaaaaaa

SEQ ID NO: 215369 - RNA, 32 nt, Homo Sapiens
cugagggugggcugggacucggggcccgcguc

SEQ ID NO: 215370 - RNA, 32 nt, Homo Sapiens
gguuuucuuucugcucuuuauugaagacaaac

SEQ ID NO: 215371 - RNA, 32 nt, Homo Sapiens
cugagaaugaauuugguuaguugcagaagaua

SEQ ID NO: 215372 - RNA, 32 nt, Homo Sapiens
caccaccccccgcccagccccugcccccagcc

SEQ ID NO: 215373 - RNA, 32 nt, Homo Sapiens
uuucaguuaauaaucuuauuuucagguuaugu

SEQ ID NO: 215374 - RNA, 32 nt, Homo Sapiens
gugcaagcccccgaugggcgacggacaccagg

SEQ ID NO: 215375 - RNA, 32 nt, Homo Sapiens
aggcgcccucccuccguccgcgcacaggcgcc

SEQ ID NO: 215376 - RNA, 32 nt, Homo Sapiens
ugggugggggcaggauaacauggcuucucuuu

SEQ ID NO: 215377 - RNA, 32 nt, Homo Sapiens
gucgccgcccagguuucuugcggccgccgcuc

SEQ ID NO: 215378 - RNA, 32 nt, Homo Sapiens
guugcccuggaaagccugcugcucagcccaug

SEQ ID NO: 215379 - RNA, 32 nt, Homo Sapiens
guugcauucagaaauacugaugaccuucauau

SEQ ID NO: 215380 - RNA, 32 nt, Homo Sapiens
acaugucuguucuacauagaugcuuagucccu

SEQ ID NO: 215381 - RNA, 32 nt, Homo Sapiens
ucacuccugcuucccccacaaauacacuucuu

SEQ ID NO: 215382 - RNA, 32 nt, Homo Sapiens
ucucccggcgcccacaccugucugagcggcgc

SEQ ID NO: 215383 - RNA, 32 nt, Homo Sapiens
ggggccaggaggaggugauggcgucagaggag

SEQ ID NO: 215384 - RNA, 32 nt, Homo Sapiens
cuacaucuucaggaagcugugcagccucugcc

SEQ ID NO: 215385 - RNA, 32 nt, Homo Sapiens
ugaaacuucuuugaucuuuuaaaaccagauuc

SEQ ID NO: 215386 - RNA, 32 nt, Homo Sapiens
ccugccuggucugacccuccccugcucgccuc

SEQ ID NO: 215387 - RNA, 32 nt, Homo Sapiens
uuacaggugugagccaccgcacucagcugauu

SEQ ID NO: 215388 - RNA, 32 nt, Homo Sapiens
guggaaauuauauauaaugccugguauuuuac

SEQ ID NO: 215389 - RNA, 32 nt, Homo Sapiens
cagacucugcaauuucucccaaggcucuuugc

SEQ ID NO: 215390 - RNA, 32 nt, Homo Sapiens
cacgggcccucccccaaccucucucugaucca

SEQ ID NO: 215391 - RNA, 32 nt, Homo Sapiens
uguuguaucuuguaaacaaaagaaagauugcc

SEQ ID NO: 215392 - RNA, 32 nt, Homo Sapiens
cgggggagaggauggcagagacuuuauuaaaa

SEQ ID NO: 215393 - RNA, 32 nt, Homo Sapiens
caccucuccugucuucagcacaaaacaccuuc

SEQ ID NO: 215394 - RNA, 32 nt, Homo Sapiens
cauucacuaccuugacauuccgggcuuugauu

SEQ ID NO: 215395 - RNA, 32 nt, Homo Sapiens
gagaccuggcugcugugucccgcggcuugcgc

SEQ ID NO: 215396 - RNA, 32 nt, Homo Sapiens
ccuuguuuucccuuguuauggcucuucuaauu

SEQ ID NO: 215397 - RNA, 32 nt, Homo Sapiens
gcgcggcgccgcggccauuggcccgaggcacg

SEQ ID NO: 215398 - RNA, 32 nt, Homo Sapiens
guaaaauagggagaagaaaaacaacauagagu

SEQ ID NO: 215399 - RNA, 32 nt, Homo Sapiens
cgccuuucacgccuuccaccuccugcgugucc

SEQ ID NO: 215400 - RNA, 30 nt, Homo Sapiens
gcggugggcggcggcggcgaaaggggacgg

SEQ ID NO: 215401 - RNA, 32 nt, Homo Sapiens
gcuuaaaauauuaagauuuuuaugaaauaugu

SEQ ID NO: 215402 - RNA, 32 nt, Homo Sapiens
caccagccaagagccuucccuugaagucccca

SEQ ID NO: 215403 - RNA, 32 nt, Homo Sapiens
aagaugggguacuaacaccacccccaccgccc

SEQ ID NO: 215404 - RNA, 32 nt, Homo Sapiens
ccuggcccuuacuugcuucucuagcucucuag

SEQ ID NO: 215405 - RNA, 32 nt, Homo Sapiens
aaagggcugcugcucugggagucaaccugagu

SEQ ID NO: 215406 - RNA, 32 nt, Homo Sapiens
cacaaaaguggaaaacaguuaaugaccagcca

SEQ ID NO: 215407 - RNA, 32 nt, Homo Sapiens
gcccacugacuucauugaucucuaaucuuuuu

SEQ ID NO: 215408 - RNA, 32 nt, Homo Sapiens
auggcuagcaauguaauuuauucagacuguau

SEQ ID NO: 215409 - RNA, 32 nt, Homo Sapiens
aucuuuuuuuuuuuuucuuuuuuuggauggac

SEQ ID NO: 215410 - RNA, 32 nt, Homo Sapiens
cacuccauggcugcagcaaggagaggcggcgg

SEQ ID NO: 215411 - RNA, 32 nt, Homo Sapiens
uuggaucugcagcauucauguauugcagccau

SEQ ID NO: 215412 - RNA, 32 nt, Homo Sapiens
uuuagcauuuugaccuagggccuuuggcuuuc

SEQ ID NO: 215413 - RNA, 32 nt, Homo Sapiens
ucucuccccucuuuccucucacauacaugcuc

SEQ ID NO: 215414 - RNA, 32 nt, Homo Sapiens
acacccgccccggccucagucucccaucccag

SEQ ID NO: 215415 - RNA, 32 nt, Homo Sapiens
agcaggauagagaaaauauuacagagaaaauc

SEQ ID NO: 215416 - RNA, 32 nt, Homo Sapiens
aaaagcucuuaccgaagcaacaaaauucagca

SEQ ID NO: 215417 - RNA, 32 nt, Homo Sapiens
uaguucugcuccagacagggaauuaggccccc

SEQ ID NO: 215418 - RNA, 32 nt, Homo Sapiens
agacugggcuugccuggcaagguauggguggc

SEQ ID NO: 215419 - RNA, 32 nt, Homo Sapiens
gccgccucugagcuccucccacccuccuccag

SEQ ID NO: 215420 - RNA, 31 nt, Homo Sapiens
cuugccgcggacugccugggcuuagccagcg

SEQ ID NO: 215421 - RNA, 32 nt, Homo Sapiens
gaaaggaagauaaacguggauguuacuccaaa

SEQ ID NO: 215422 - RNA, 32 nt, Homo Sapiens
uacugcugagagggcugcugaccauuugguca

SEQ ID NO: 215423 - RNA, 32 nt, Homo Sapiens
uuauaaacaagaaugaagguuuuuguaaagau

SEQ ID NO: 215424 - RNA, 32 nt, Homo Sapiens
cguccugcgaggcuuucaggcugcugagccug

SEQ ID NO: 215425 - RNA, 32 nt, Homo Sapiens
gaucagcgaaacaaacucggcgucugcacugg

SEQ ID NO: 215426 - RNA, 32 nt, Homo Sapiens
gucccuccuccagccgcccccggagcaccgcg

SEQ ID NO: 215427 - RNA, 32 nt, Homo Sapiens
cugcugcugcugcugcugcugcuggggggauc

SEQ ID NO: 215428 - RNA, 32 nt, Homo Sapiens
ucaauccaacucucagacaaaaagcuuuguca

SEQ ID NO: 215429 - RNA, 32 nt, Homo Sapiens
uugauaauauaaauucagaaacauguaaaaug

SEQ ID NO: 215430 - RNA, 32 nt, Homo Sapiens
guguuuuguucuauccaggcuuucagaugauu

SEQ ID NO: 215431 - RNA, 31 nt, Homo Sapiens
cuugggugccacagggcugugcuguugccaa

SEQ ID NO: 215432 - RNA, 32 nt, Homo Sapiens
ggauucccacccagggacucaagccagccacc

SEQ ID NO: 215433 - RNA, 32 nt, Homo Sapiens
ggccugugguauauggaaaaguagcagggugg

SEQ ID NO: 215434 - RNA, 32 nt, Homo Sapiens
uccuucaugcuucuccucccuauuauuucugg

SEQ ID NO: 215435 - RNA, 32 nt, Homo Sapiens
caagggugcguguacacauacacacacacaca

SEQ ID NO: 215436 - RNA, 32 nt, Homo Sapiens
gguaaguuaacuaugaaagcuuucuuauuuuu

SEQ ID NO: 215437 - RNA, 32 nt, Homo Sapiens
uauuucuguuauaguaacaaaauagaguuaug

SEQ ID NO: 215438 - RNA, 32 nt, Homo Sapiens
uuuaagccggggacaagccggaaggcugacua

SEQ ID NO: 215439 - RNA, 32 nt, Homo Sapiens
ugauucugcccagauaaucgugucuccugccu

SEQ ID NO: 215440 - RNA, 32 nt, Homo Sapiens
aggcagccaggcuucccugggguucugcucau

SEQ ID NO: 215441 - RNA, 32 nt, Homo Sapiens
caaauacaugcuuauuccuuaagggauguguu

SEQ ID NO: 215442 - RNA, 32 nt, Homo Sapiens
gggggguacuuuggaagugucuaauaaggugu

SEQ ID NO: 215443 - RNA, 32 nt, Homo Sapiens
gggagaauuaaaccacuuaagcuuggaguggg

SEQ ID NO: 215444 - RNA, 32 nt, Homo Sapiens
ccagcagggggcugagcagagcccauccagga

SEQ ID NO: 215445 - RNA, 32 nt, Homo Sapiens
cugaggucaggcguuugagaccagccuggcca

SEQ ID NO: 215446 - RNA, 32 nt, Homo Sapiens
cggaucugccgggugagccgccgggacauggg

SEQ ID NO: 215447 - RNA, 32 nt, Homo Sapiens
cuggguuguugagacucuugugaagauggcuu

SEQ ID NO: 215448 - RNA, 29 nt, Homo Sapiens
guguguauauguauuauaggaggagcucu

SEQ ID NO: 215449 - RNA, 28 nt, Homo Sapiens
cagacggggcggcuggcugggcagaggg

SEQ ID NO: 215450 - RNA, 32 nt, Homo Sapiens
gucauuuauauuccuuuucccaggaaagaagc

SEQ ID NO: 215451 - RNA, 32 nt, Homo Sapiens
cuagacaucuucucccucccuugccucagauu

SEQ ID NO: 215452 - RNA, 32 nt, Homo Sapiens
aaauuguuacauuauuuuuucuuauguaauac

SEQ ID NO: 215453 - RNA, 32 nt, Homo Sapiens
gugugcuugggccagcucuccugccugugucu

SEQ ID NO: 215454 - RNA, 32 nt, Homo Sapiens
acaaaaugugccugaggccuagucuagcaaga

SEQ ID NO: 215455 - RNA, 32 nt, Homo Sapiens
cugcauuuacacacacacgcacacaaaccaca

SEQ ID NO: 215456 - RNA, 32 nt, Homo Sapiens
cuaaugggaguugugaauguaacugguuaaug

SEQ ID NO: 215457 - RNA, 32 nt, Homo Sapiens
acaggccccgcagcagacggccaggcauggcu

SEQ ID NO: 215458 - RNA, 32 nt, Homo Sapiens
gggcugggcaggugcugcuugggauucauggg

SEQ ID NO: 215459 - RNA, 31 nt, Homo Sapiens
ggguggcugccggacggaggggcuccucacu

SEQ ID NO: 215460 - RNA, 32 nt, Homo Sapiens
uuccucuuaaaugaggaugaugaugaccaacc

SEQ ID NO: 215461 - RNA, 32 nt, Homo Sapiens
gggagcggaggagccggcacccgcccgucggg

SEQ ID NO: 215462 - RNA, 32 nt, Homo Sapiens
agggccugaggacugcucccccugcauggagg

SEQ ID NO: 215463 - RNA, 32 nt, Homo Sapiens
ugcacuccacagcaggaagaagggcaguguga

SEQ ID NO: 215464 - RNA, 30 nt, Homo Sapiens
gaaguucuggacugcaguugaguggaaaug

SEQ ID NO: 215465 - RNA, 32 nt, Homo Sapiens
auauccagcugcacuguggguguccacccaca

SEQ ID NO: 215466 - RNA, 32 nt, Homo Sapiens
uccgcaugauguuucccucuccuuccaacaaa

SEQ ID NO: 215467 - RNA, 32 nt, Homo Sapiens
cauauggcaguccugguccuuccacugugcac

SEQ ID NO: 215468 - RNA, 32 nt, Homo Sapiens
acuuucugggauguucucugugccuuggaagu

SEQ ID NO: 215469 - RNA, 32 nt, Homo Sapiens
uacaggcaugagcuaccgugccuggcccccuu

SEQ ID NO: 215470 - RNA, 32 nt, Homo Sapiens
accaugcagccugaccugugaacucuccagua

SEQ ID NO: 215471 - RNA, 32 nt, Homo Sapiens
acgagggccgagggcgggagcugaggcgcggg

SEQ ID NO: 215472 - RNA, 32 nt, Homo Sapiens
ugagccguguuuccccucucccucccucucca

SEQ ID NO: 215473 - RNA, 32 nt, Homo Sapiens
uauccauguaaugguuuuuucuuguagugacc

SEQ ID NO: 215474 - RNA, 32 nt, Homo Sapiens
ggcacggagacggcggcagcgcuggacuaggu

SEQ ID NO: 215475 - RNA, 32 nt, Homo Sapiens
uauuuuaaauguuaagguguaacauauguuaa

SEQ ID NO: 215476 - RNA, 32 nt, Homo Sapiens
auucagagguaacagcgccugcguuuucucca

SEQ ID NO: 215477 - RNA, 32 nt, Homo Sapiens
uucuggcaugauaaaaucauggaauuaaauca

SEQ ID NO: 215478 - RNA, 32 nt, Homo Sapiens
ugcuuucuucauuuuuauaauuuuauauuacu

SEQ ID NO: 215479 - RNA, 32 nt, Homo Sapiens
ccugugcagcgcggcccccggcgggggucacc

SEQ ID NO: 215480 - RNA, 32 nt, Homo Sapiens
auguuuucaagccuauggagugaaauuauuuu

SEQ ID NO: 215481 - RNA, 32 nt, Homo Sapiens
uugaagguuauuguuuucaaugccagugggcc

SEQ ID NO: 215482 - RNA, 32 nt, Homo Sapiens
uuguacuguaaaaauaugugguucaugucuaa

SEQ ID NO: 215483 - RNA, 32 nt, Homo Sapiens
cgaccacaaacaggacagagccaggcuguugu

SEQ ID NO: 215484 - RNA, 30 nt, Homo Sapiens
uagcggcgcgcgcagcccgcgcccuucccc

SEQ ID NO: 215485 - RNA, 32 nt, Homo Sapiens
ugccauuuuuaaaaguaugcuauaaacuaugc

SEQ ID NO: 215486 - RNA, 32 nt, Homo Sapiens
cucuccagauggauaaugauuuuuguaacuug

SEQ ID NO: 215487 - RNA, 32 nt, Homo Sapiens
cauauuuguaaaauuauauuuaauggaauucu

SEQ ID NO: 215488 - RNA, 32 nt, Homo Sapiens
uccugaccagcauuuguaacacugcucuaacu

SEQ ID NO: 215489 - RNA, 32 nt, Homo Sapiens
ccuccuccuccucgccccggcgccggcgguga

SEQ ID NO: 215490 - RNA, 32 nt, Homo Sapiens
ugagacuagccugggcaacuugguaaaacccc

SEQ ID NO: 215491 - RNA, 32 nt, Homo Sapiens
ucaauagcuaugccugacagcauucaaguaga

SEQ ID NO: 215492 - RNA, 32 nt, Homo Sapiens
cuucaagaucacacuugugggaaaucuggggg

SEQ ID NO: 215493 - RNA, 32 nt, Homo Sapiens
aagaggggaucuccugcaggguccuggggaca

SEQ ID NO: 215494 - RNA, 32 nt, Homo Sapiens
caagccgcgaugcccaggggccccgcacagcc

SEQ ID NO: 215495 - RNA, 32 nt, Homo Sapiens
cagcagcagcccgugcccgggagcggcggcgc

SEQ ID NO: 215496 - RNA, 32 nt, Homo Sapiens
ccccccguguggcuuacaaauucuacagcaua

SEQ ID NO: 215497 - RNA, 32 nt, Homo Sapiens
acugugagucucacuauuuuugaugggcgagc

SEQ ID NO: 215498 - RNA, 32 nt, Homo Sapiens
aauuguaaaaacaaacauacuuguggggucug

SEQ ID NO: 215499 - RNA, 32 nt, Homo Sapiens
aagcuggggaggaggaucuacugcuguacagc

SEQ ID NO: 215500 - RNA, 32 nt, Homo Sapiens
ccagaugcagagggucgcgcggcuguguguga

SEQ ID NO: 215501 - RNA, 32 nt, Homo Sapiens
gcgggagcuggaagaggccgcccugcagagcg

SEQ ID NO: 215502 - RNA, 31 nt, Homo Sapiens
ggguccucacggagaagaacaccaggaaaga

SEQ ID NO: 215503 - RNA, 32 nt, Homo Sapiens
aggugaaucugauguugcgaguucugauagga

SEQ ID NO: 215504 - RNA, 32 nt, Homo Sapiens
uuucugugguuugaauccagagagauacuucu

SEQ ID NO: 215505 - RNA, 32 nt, Homo Sapiens
uaccucuuugcugauaaauuugcaguaauuac

SEQ ID NO: 215506 - RNA, 32 nt, Homo Sapiens
acaagaaaucauauauguauggauauauuuua

SEQ ID NO: 215507 - RNA, 32 nt, Homo Sapiens
cugcuccgccucuccccuccccacuggcucug

SEQ ID NO: 215508 - RNA, 32 nt, Homo Sapiens
uggcagauccucccccaccucuccgcaggagu

SEQ ID NO: 215509 - RNA, 32 nt, Homo Sapiens
ucuguauaaguguuuuuguaauuaaacuuuca

SEQ ID NO: 215510 - RNA, 32 nt, Homo Sapiens
gaaagagaggaaugcaggaugauuccaguguu

SEQ ID NO: 215511 - RNA, 32 nt, Homo Sapiens
gcagguugugcagcuggaggcagagcaguccu

SEQ ID NO: 215512 - RNA, 32 nt, Homo Sapiens
uuuuauugugauaaauguauguaaccaucuau

SEQ ID NO: 215513 - RNA, 32 nt, Homo Sapiens
cacagagugcagagaccccggcaagccuacug

SEQ ID NO: 215514 - RNA, 32 nt, Homo Sapiens
ugucauucugccuggcggccaggccuccagcu

SEQ ID NO: 215515 - RNA, 28 nt, Homo Sapiens
ccgccucaggcugccaggauggcggugu

SEQ ID NO: 215516 - RNA, 32 nt, Homo Sapiens
cagaaaccuccagcagucuuugaaacaucuca

SEQ ID NO: 215517 - RNA, 32 nt, Homo Sapiens
ugggaaaauagaaaauaagauuucaaauauua

SEQ ID NO: 215518 - RNA, 32 nt, Homo Sapiens
cugugcccuggccccagguauuauucugaggc

SEQ ID NO: 215519 - RNA, 32 nt, Homo Sapiens
uccacuugccccuccuucucuuucgggcucca

SEQ ID NO: 215520 - RNA, 32 nt, Homo Sapiens
ggaagagcugucagcuucauuacgggcccugc

SEQ ID NO: 215521 - RNA, 32 nt, Homo Sapiens
gccacuguacuccagccugggcgacagagggg

SEQ ID NO: 215522 - RNA, 32 nt, Homo Sapiens
auuggugaugaugacuguaacuucuggcuucu

SEQ ID NO: 215523 - RNA, 32 nt, Homo Sapiens
acccgagggggaggauggaaacaccugccgcg

SEQ ID NO: 215524 - RNA, 32 nt, Homo Sapiens
gucgucacagcaugcaugcugggagcugccaa

SEQ ID NO: 215525 - RNA, 32 nt, Homo Sapiens
cuuccuuccuuccugggcccgcaggagggggc

SEQ ID NO: 215526 - RNA, 32 nt, Homo Sapiens
gugacagaggacaagcagcaugcgugugucag

SEQ ID NO: 215527 - RNA, 32 nt, Homo Sapiens
cuuaaaaaucuuaugcagaaauuugcauuuug

SEQ ID NO: 215528 - RNA, 32 nt, Homo Sapiens
ucagggauugccgucugccccccgccccccuu

SEQ ID NO: 215529 - RNA, 32 nt, Homo Sapiens
auuucaaaaaauacugccguuacugucuuuua

SEQ ID NO: 215530 - RNA, 32 nt, Homo Sapiens
cuccaucccucggggcugcugcugugucuugc

SEQ ID NO: 215531 - RNA, 32 nt, Homo Sapiens
aguuugggcagagggaaccaggcacguuaaag

SEQ ID NO: 215532 - RNA, 32 nt, Homo Sapiens
uuaauaaaaaucacaagcuuuaauaacagaca

SEQ ID NO: 215533 - RNA, 32 nt, Homo Sapiens
uggcuagagagacuaucuccugucaucacgau

SEQ ID NO: 215534 - RNA, 32 nt, Homo Sapiens
cugaggucaaggaacacaagaugguuuuggaa

SEQ ID NO: 215535 - RNA, 32 nt, Homo Sapiens
caccuucucgccacucuucucaagggcugccc

SEQ ID NO: 215536 - RNA, 32 nt, Homo Sapiens
gauucuccuccgccaggccacccagaggagaa

SEQ ID NO: 215537 - RNA, 32 nt, Homo Sapiens
ugacucugcagggacauuauucccucccagcc

SEQ ID NO: 215538 - RNA, 32 nt, Homo Sapiens
uccagugacagcaggugucaugggucaagcau

SEQ ID NO: 215539 - RNA, 32 nt, Homo Sapiens
cauuagccuuaccugcccugcccugauuguga

SEQ ID NO: 215540 - RNA, 32 nt, Homo Sapiens
cgauuuacagaaaacagaaucaaaggccgugc

SEQ ID NO: 215541 - RNA, 32 nt, Homo Sapiens
aauagauccgcaaagugcuuuguuccuggaaa

SEQ ID NO: 215542 - RNA, 32 nt, Homo Sapiens
gagaaaguucacuuuauuuacauaacuuauac

SEQ ID NO: 215543 - RNA, 32 nt, Homo Sapiens
agggcgggggagagcgcgccgcugcucccgga

SEQ ID NO: 215544 - RNA, 32 nt, Homo Sapiens
ccuccgccagccgccuccacccgccccacacc

SEQ ID NO: 215545 - RNA, 32 nt, Homo Sapiens
cuugauuccaccuggugggguggguggacccu

SEQ ID NO: 215546 - RNA, 32 nt, Homo Sapiens
agaaguguccuucccacuucagcccuccggag

SEQ ID NO: 215547 - RNA, 32 nt, Homo Sapiens
uuuuugccuguuagugauuguuucacaugugu

SEQ ID NO: 215548 - RNA, 32 nt, Homo Sapiens
cugaggauguggcuuauuaaacacggaagugc

SEQ ID NO: 215549 - RNA, 32 nt, Homo Sapiens
gcuauaauauaaaaugacaauagucucuugag

SEQ ID NO: 215550 - RNA, 32 nt, Homo Sapiens
cagggaacgugggcggcgugguuccaagcaca

SEQ ID NO: 215551 - RNA, 32 nt, Homo Sapiens
augcaauauguaauuauauauaggguggccac

SEQ ID NO: 215552 - RNA, 32 nt, Homo Sapiens
cggcaacguaaaggauguggcuccauguccau

SEQ ID NO: 215553 - RNA, 32 nt, Homo Sapiens
aagucaaaauauaauuucaaagguucagcugu

SEQ ID NO: 215554 - RNA, 32 nt, Homo Sapiens
uugggucaccggcuggaccugcugcagccugc

SEQ ID NO: 215555 - RNA, 32 nt, Homo Sapiens
cugcaggaacagguggcugugcucaccagaca

SEQ ID NO: 215556 - RNA, 32 nt, Homo Sapiens
cgccugggagggugggcgcccaggcgucccug

SEQ ID NO: 215557 - RNA, 32 nt, Homo Sapiens
auauuuuuuaugcuuuugucuuucuuaccuga

SEQ ID NO: 215558 - RNA, 32 nt, Homo Sapiens
uccaggccggccuugcggcgucgggacugagg

SEQ ID NO: 215559 - RNA, 32 nt, Homo Sapiens
cauugguagagcaaagaguuucagggcacugg

SEQ ID NO: 215560 - RNA, 32 nt, Homo Sapiens
guggaacuauacaugucuguaaucaccccagc

SEQ ID NO: 215561 - RNA, 32 nt, Homo Sapiens
ccuuguaucuuccacaguguguagaaauuugu

SEQ ID NO: 215562 - RNA, 32 nt, Homo Sapiens
cagaaagaucauagacaacauuuaugaaugug

SEQ ID NO: 215563 - RNA, 32 nt, Homo Sapiens
uuaaaaauuuaaguuuuguaagagcuuuaaaa

SEQ ID NO: 215564 - RNA, 32 nt, Homo Sapiens
cuuaguugcuuuccaccuaagaagcuaaucaa

SEQ ID NO: 215565 - RNA, 32 nt, Homo Sapiens
aguuaguguaaaauauuuucuagaaauaaaau

SEQ ID NO: 215566 - RNA, 32 nt, Homo Sapiens
aaaaauggauaacuuaaaauggcuggccaagc

SEQ ID NO: 215567 - RNA, 32 nt, Homo Sapiens
augaggagaacaugcagacaguuauaaaaaau

SEQ ID NO: 215568 - RNA, 32 nt, Homo Sapiens
gagacagagauuaaaauggcuuccagaggaaa

SEQ ID NO: 215569 - RNA, 30 nt, Homo Sapiens
acacuccuugacugcauccuucagucuugg

SEQ ID NO: 215570 - RNA, 32 nt, Homo Sapiens
acccagcagguggcacugcagcuccccgcucc

SEQ ID NO: 215571 - RNA, 32 nt, Homo Sapiens
aguacaaucauauugggacuguacugcaagau

SEQ ID NO: 215572 - RNA, 32 nt, Homo Sapiens
uccccccgucuguauauagacauauauccucu

SEQ ID NO: 215573 - RNA, 32 nt, Homo Sapiens
uaccccaggggaggaggagaugggcaggauuu

SEQ ID NO: 215574 - RNA, 32 nt, Homo Sapiens
gaaggauuuugcucaacaauuguuacuggccc

SEQ ID NO: 215575 - RNA, 32 nt, Homo Sapiens
ccuccuuccccucccggagccgcgcgugagga

SEQ ID NO: 215576 - RNA, 32 nt, Homo Sapiens
uggaauuagaggccugacccccugcuccuggc

SEQ ID NO: 215577 - RNA, 32 nt, Homo Sapiens
cuccgcccggcgccacccagguccccaggcgg

SEQ ID NO: 215578 - RNA, 32 nt, Homo Sapiens
uaccucccacuuugacuucaaggcuuugggaa

SEQ ID NO: 215579 - RNA, 32 nt, Homo Sapiens
uccccggcgggggauggugcggugaccggcug

SEQ ID NO: 215580 - RNA, 32 nt, Homo Sapiens
gccuucugaucuguuuaccaugucagcaagca

SEQ ID NO: 215581 - RNA, 32 nt, Homo Sapiens
cugaggcccgcggcgcugagccugcggcgccc

SEQ ID NO: 215582 - RNA, 32 nt, Homo Sapiens
aauucuguaaaaauguaucuuauuuuuauaca

SEQ ID NO: 215583 - RNA, 31 nt, Homo Sapiens
ugcccaggaaucaccaccugguaccagaagc

SEQ ID NO: 215584 - RNA, 32 nt, Homo Sapiens
uguuucucaucuguggcuucugaaacacuuag

SEQ ID NO: 215585 - RNA, 32 nt, Homo Sapiens
ucuguagcuaaagaaaaauuauuuuacaaaaa

SEQ ID NO: 215586 - RNA, 32 nt, Homo Sapiens
ggagacgccagucccagcgcuccggagguggu

SEQ ID NO: 215587 - RNA, 32 nt, Homo Sapiens
gccaaauguccagaugugaucaauagaaucag

SEQ ID NO: 215588 - RNA, 32 nt, Homo Sapiens
uaauaaaggcuuugauuuaaucuugauauaaa

SEQ ID NO: 215589 - RNA, 32 nt, Homo Sapiens
uacauaguacuuugaauaauguauauuuuaaa

SEQ ID NO: 215590 - RNA, 32 nt, Homo Sapiens
uugccucaggauauuucuuuuaaaauaagcug

SEQ ID NO: 215591 - RNA, 32 nt, Homo Sapiens
aauguauuugguuuuuugcaguucacagggua

SEQ ID NO: 215592 - RNA, 32 nt, Homo Sapiens
uuuauuccagcauggaggguuuuaaauggagg

SEQ ID NO: 215593 - RNA, 32 nt, Homo Sapiens
uagcaauaucuaggaaauuugcauugagacca

SEQ ID NO: 215594 - RNA, 32 nt, Homo Sapiens
cagaaggguugagacacgccccugcccucucu

SEQ ID NO: 215595 - RNA, 32 nt, Homo Sapiens
gcccggggacacaucuccugagggaucccaga

SEQ ID NO: 215596 - RNA, 32 nt, Homo Sapiens
cagaauaauguucuauugugggacuuauuaca

SEQ ID NO: 215597 - RNA, 32 nt, Homo Sapiens
ucuagagguucagaauauuagcuucaggauca

SEQ ID NO: 215598 - RNA, 32 nt, Homo Sapiens
gagcaacucggaguuuugggggugugcuuuga

SEQ ID NO: 215599 - RNA, 32 nt, Homo Sapiens
ugccuuuggagguggagaugguggagguggug

SEQ ID NO: 215600 - RNA, 32 nt, Homo Sapiens
gcgguuuugggcccgggcggcuguagaggcgg

SEQ ID NO: 215601 - RNA, 32 nt, Homo Sapiens
auugauuuuccacaguucugcaggcuggaaau

SEQ ID NO: 215602 - RNA, 32 nt, Homo Sapiens
uuuacuguguuacuuuuuuagacucccgucug

SEQ ID NO: 215603 - RNA, 32 nt, Homo Sapiens
aaguuuugaaagauuuuuuuagguaucuaauu

SEQ ID NO: 215604 - RNA, 32 nt, Homo Sapiens
ggaagcgcagugcacacccccauggcccgggc

SEQ ID NO: 215605 - RNA, 32 nt, Homo Sapiens
agagaugcaauuuuuuaaaaagaaaauuaauu

SEQ ID NO: 215606 - RNA, 32 nt, Homo Sapiens
gcugggagccccagccccacugcaggccccac

SEQ ID NO: 215607 - RNA, 32 nt, Homo Sapiens
aaccacagauacagaaucuuuauuguucuuac

SEQ ID NO: 215608 - RNA, 32 nt, Homo Sapiens
acuucucaguguucuuaucuguagaaugggga

SEQ ID NO: 215609 - RNA, 32 nt, Homo Sapiens
uacgguuuuuaaaagaaacauaaaaauuaacc

SEQ ID NO: 215610 - RNA, 32 nt, Homo Sapiens
aucaucagcaaccuggggcugugcaccuuccu

SEQ ID NO: 215611 - RNA, 31 nt, Homo Sapiens
cuaaagaauggauugaaaggauauguauaua

SEQ ID NO: 215612 - RNA, 32 nt, Homo Sapiens
gagaauaaaaacaaucuaaauccagaaaaugg

SEQ ID NO: 215613 - RNA, 32 nt, Homo Sapiens
guucuagaaaauuuaaaaaucauuuuaguaga

SEQ ID NO: 215614 - RNA, 32 nt, Homo Sapiens
ucucucagacuugaccuguccaaacugcuugc

SEQ ID NO: 215615 - RNA, 32 nt, Homo Sapiens
auuuagaauuagugcuguuguggagugcgucu

SEQ ID NO: 215616 - RNA, 32 nt, Homo Sapiens
aaagggccugcccagacaagauuuuuuaauug

SEQ ID NO: 215617 - RNA, 32 nt, Homo Sapiens
agcagccguuccccgacuccucaccccugagc

SEQ ID NO: 215618 - RNA, 30 nt, Homo Sapiens
gcuuggggagguggcagcauuucauggccu

SEQ ID NO: 215619 - RNA, 32 nt, Homo Sapiens
aaacggcuaagcucuggcaucaucaucccaga

SEQ ID NO: 215620 - RNA, 32 nt, Homo Sapiens
guggagugggcaugugcuggcaggugggauau

SEQ ID NO: 215621 - RNA, 32 nt, Homo Sapiens
augcuuuacaagacauagcuaaugagguugcu

SEQ ID NO: 215622 - RNA, 32 nt, Homo Sapiens
gcugaagggcuuucucaccccagcucuggcua

SEQ ID NO: 215623 - RNA, 32 nt, Homo Sapiens
cauuguaaccugugcuuguacgcaaaagaauu

SEQ ID NO: 215624 - RNA, 32 nt, Homo Sapiens
acccuggccgugguuugaaguuuccggcaccu

SEQ ID NO: 215625 - RNA, 32 nt, Homo Sapiens
aaggcacuugaguaugguugcauguccaaaua

SEQ ID NO: 215626 - RNA, 32 nt, Homo Sapiens
ugaagaagaugcucuugaugaacucuugcagu

SEQ ID NO: 215627 - RNA, 32 nt, Homo Sapiens
uucgcugguaaaaauaagcccaugugaugucc

SEQ ID NO: 215628 - RNA, 32 nt, Homo Sapiens
cuaaccuaacuguaaugaccuuuucuacaaca

SEQ ID NO: 215629 - RNA, 28 nt, Homo Sapiens
cuugaaauuguuuuaauguguuuuguca

SEQ ID NO: 215630 - RNA, 32 nt, Homo Sapiens
agaugagagacagaggcagagaaguuaaauaa

SEQ ID NO: 215631 - RNA, 32 nt, Homo Sapiens
ccagacaggacacgcugggccccuggcaucca

SEQ ID NO: 215632 - RNA, 32 nt, Homo Sapiens
acggggcggcugccgccuccgccuccgcgccu

SEQ ID NO: 215633 - RNA, 32 nt, Homo Sapiens
uaauuacugaauauuucuuagacguuuuggga

SEQ ID NO: 215634 - RNA, 32 nt, Homo Sapiens
uuugcgucuauuucuucuauugugcuucuuug

SEQ ID NO: 215635 - RNA, 32 nt, Homo Sapiens
cuuuugcuuguacagaaucuguagugauuuug

SEQ ID NO: 215636 - RNA, 32 nt, Homo Sapiens
aauguagacagauauuucaaacaucagcugaa

SEQ ID NO: 215637 - RNA, 31 nt, Homo Sapiens
cagacuugaagcaggaagauaugauaguucc

SEQ ID NO: 215638 - RNA, 32 nt, Homo Sapiens
cguuauuucuguuggcagaaggcggccugagc

SEQ ID NO: 215639 - RNA, 32 nt, Homo Sapiens
uuuguuucaggagaggugagaaugagcagauu

SEQ ID NO: 215640 - RNA, 32 nt, Homo Sapiens
uguuugcauuucugacaagugaaacaggaucu

SEQ ID NO: 215641 - RNA, 29 nt, Homo Sapiens
gggcccgucggggagaggacgcagcucgu

SEQ ID NO: 215642 - RNA, 32 nt, Homo Sapiens
acccgaggucccggggcuggggugucgcagag

SEQ ID NO: 215643 - RNA, 32 nt, Homo Sapiens
aggagcugcuuggagaugcugcuguggccacu

SEQ ID NO: 215644 - RNA, 32 nt, Homo Sapiens
cagugauagauguugugagaccucuuguaccc

SEQ ID NO: 215645 - RNA, 32 nt, Homo Sapiens
gagcaaguauauacucauuauagaaucaauuu

SEQ ID NO: 215646 - RNA, 32 nt, Homo Sapiens
acuucgauaucauauucuaguuuacagaacac

SEQ ID NO: 215647 - RNA, 32 nt, Homo Sapiens
aucacugccaguugcuggccagcuugcccuuc

SEQ ID NO: 215648 - RNA, 32 nt, Homo Sapiens
agaaagucccuaggcgcucagagggggugaga

SEQ ID NO: 215649 - RNA, 32 nt, Homo Sapiens
cucagacccgacggcccggagcggagcgcgcc

SEQ ID NO: 215650 - RNA, 32 nt, Homo Sapiens
guuugugcccuucugcuucccccauucccuuc

SEQ ID NO: 215651 - RNA, 32 nt, Homo Sapiens
agccaggaccagcgacaagacucaugagagga

SEQ ID NO: 215652 - RNA, 32 nt, Homo Sapiens
uuacugucaggagugggggcagauucugcugc

SEQ ID NO: 215653 - RNA, 32 nt, Homo Sapiens
cuuuagaaucgcuuuccuuccuccccuuuugc

SEQ ID NO: 215654 - RNA, 32 nt, Homo Sapiens
ccacugcccuccccagccccagcucccugucc

SEQ ID NO: 215655 - RNA, 32 nt, Homo Sapiens
uauauauuuaaauuuuugauaaaguuuuucuu

SEQ ID NO: 215656 - RNA, 32 nt, Homo Sapiens
cuuucauuuuauucucuucuaguuuugacauu

SEQ ID NO: 215657 - RNA, 32 nt, Homo Sapiens
uuaugauauauucaccucuagagcagucacug

SEQ ID NO: 215658 - RNA, 32 nt, Homo Sapiens
gcccccucuuucccuuuccccacucugcaagc

SEQ ID NO: 215659 - RNA, 32 nt, Homo Sapiens
ccuuggcucccuccguggaccugggcuucgug

SEQ ID NO: 215660 - RNA, 32 nt, Homo Sapiens
uauaaauuuagauuguaauauucucugaguau

SEQ ID NO: 215661 - RNA, 32 nt, Homo Sapiens
gaggcuuugucauuaguauuccugcuucuacc

SEQ ID NO: 215662 - RNA, 32 nt, Homo Sapiens
aacacuaguauggccagcagacaggcuggagu

SEQ ID NO: 215663 - RNA, 32 nt, Homo Sapiens
cccgccagacugccuggguccuggcgccuggc

SEQ ID NO: 215664 - RNA, 32 nt, Homo Sapiens
gcuuucuuccuccuuucucuguauauugggcu

SEQ ID NO: 215665 - RNA, 32 nt, Homo Sapiens
caggacgccccgagauggccuugggcagggaa

SEQ ID NO: 215666 - RNA, 32 nt, Homo Sapiens
acuggccaggccucgaaccugggaccccuccu

SEQ ID NO: 215667 - RNA, 32 nt, Homo Sapiens
cacugaguggccacaauuuucacugggaacaa

SEQ ID NO: 215668 - RNA, 32 nt, Homo Sapiens
cugagcaccucccagguuccaagcccugggcc

SEQ ID NO: 215669 - RNA, 32 nt, Homo Sapiens
acugcgaggcgaaggugaccggggaccgagca

SEQ ID NO: 215670 - RNA, 32 nt, Homo Sapiens
aaagccugucccgcuagccuguguguucacac

SEQ ID NO: 215671 - RNA, 32 nt, Homo Sapiens
aacuccuuucuuuuuaaauaaauguuuauugg

SEQ ID NO: 215672 - RNA, 32 nt, Homo Sapiens
agaaacccucuggcagagggacccagcagaug

SEQ ID NO: 215673 - RNA, 32 nt, Homo Sapiens
aagcaugaauaaaaauacaucuacuguaguau

SEQ ID NO: 215674 - RNA, 32 nt, Homo Sapiens
uguguuaaggaauucuucuccuccuccuugcg

SEQ ID NO: 215675 - RNA, 32 nt, Homo Sapiens
uuuagucugaagauggcggccucagcagcgcg

SEQ ID NO: 215676 - RNA, 32 nt, Homo Sapiens
uguagugcagccucccucuccuccugaugacu

SEQ ID NO: 215677 - RNA, 32 nt, Homo Sapiens
ggguugcgcgggagacuauggcguccuccucg

SEQ ID NO: 215678 - RNA, 32 nt, Homo Sapiens
ccggggaggaggaggcgcaggagugagcugcc

SEQ ID NO: 215679 - RNA, 32 nt, Homo Sapiens
augcucagcuugaagaauauuccuguuuugga

SEQ ID NO: 215680 - RNA, 32 nt, Homo Sapiens
aguugcguuguaauaaaccugaggcugggaag

SEQ ID NO: 215681 - RNA, 32 nt, Homo Sapiens
auccggugcccauuagauuucuuuaguacaga

SEQ ID NO: 215682 - RNA, 32 nt, Homo Sapiens
caggcucaggccugcggcuuucuggcugcugu

SEQ ID NO: 215683 - RNA, 32 nt, Homo Sapiens
cugaguauuguuaacagugccuuuucgaugga

SEQ ID NO: 215684 - RNA, 32 nt, Homo Sapiens
gaugaaauuugcuuuuuauccaaauauuuugu

SEQ ID NO: 215685 - RNA, 32 nt, Homo Sapiens
augugagcaauuuacacacuugucucagaaag

SEQ ID NO: 215686 - RNA, 32 nt, Homo Sapiens
uaaaacauugucuacagcuccagauguuucuc

SEQ ID NO: 215687 - RNA, 32 nt, Homo Sapiens
uccccgcaccccuuccucucccgggggccgag

SEQ ID NO: 215688 - RNA, 32 nt, Homo Sapiens
ugaagguuuuguuucuugaauuuuacuuuugc

SEQ ID NO: 215689 - RNA, 32 nt, Homo Sapiens
ggguagccucuacuccagccaacauuuuaaaa

SEQ ID NO: 215690 - RNA, 32 nt, Homo Sapiens
gugcauugugcagaagcgggacacggagaaga

SEQ ID NO: 215691 - RNA, 32 nt, Homo Sapiens
ugcuuccugccaggacguggccucuuccgauc

SEQ ID NO: 215692 - RNA, 32 nt, Homo Sapiens
ugcucugugaaauggaaggaaugugcuugccu

SEQ ID NO: 215693 - RNA, 32 nt, Homo Sapiens
cuguucaguggccugugaacugucuuccuugu

SEQ ID NO: 215694 - RNA, 32 nt, Homo Sapiens
accuggaauaguuuaaauaugguguucaaggc

SEQ ID NO: 215695 - RNA, 32 nt, Homo Sapiens
ccugcccgcaguacuccugcuuuuacagggag

SEQ ID NO: 215696 - RNA, 32 nt, Homo Sapiens
uaaccauguauuauuuucaguauuuauugaau

SEQ ID NO: 215697 - RNA, 32 nt, Homo Sapiens
ggcuccauuuuccauguugaguagauuauaac

SEQ ID NO: 215698 - RNA, 32 nt, Homo Sapiens
gcugaagguucuggacaugaacaagggucagg

SEQ ID NO: 215699 - RNA, 32 nt, Homo Sapiens
acuccacugugccgagguugaacucuuuuuug

SEQ ID NO: 215700 - RNA, 32 nt, Homo Sapiens
caucaaaucugaagaaaaucuacacaguacag

SEQ ID NO: 215701 - RNA, 32 nt, Homo Sapiens
agcaguuucccuauauuauuuggagucaauuc

SEQ ID NO: 215702 - RNA, 32 nt, Homo Sapiens
aauaccuagagacuuuuaaaaauaggcuuucu

SEQ ID NO: 215703 - RNA, 32 nt, Homo Sapiens
acacuccuccuggaggcccacucucccccugc

SEQ ID NO: 215704 - RNA, 32 nt, Homo Sapiens
uucgcggccgccccgcgccgccgcaucuccuc

SEQ ID NO: 215705 - RNA, 32 nt, Homo Sapiens
ugcuauaaacacagacccccuugucuuugccu

SEQ ID NO: 215706 - RNA, 32 nt, Homo Sapiens
cuccuuacuuuuuaauauaaagagugauguug

SEQ ID NO: 215707 - RNA, 32 nt, Homo Sapiens
ggugcgggggcuugggaagcagaccaggguug

SEQ ID NO: 215708 - RNA, 32 nt, Homo Sapiens
ggggagaaggggagacaaaaccacugcagacc

SEQ ID NO: 215709 - RNA, 32 nt, Homo Sapiens
cggcgggcggaagaggcgaccgcuccgggagc

SEQ ID NO: 215710 - RNA, 32 nt, Homo Sapiens
gcgcccugguggcggggguggugcuggcucag

SEQ ID NO: 215711 - RNA, 32 nt, Homo Sapiens
uuauuaauuuucuuacaggugcacuuucuagu

SEQ ID NO: 215712 - RNA, 32 nt, Homo Sapiens
caucagcuauugcucuuuggagguugcaacuu

SEQ ID NO: 215713 - RNA, 32 nt, Homo Sapiens
gggacaaaugguaaagaugauuuuaaaaucug

SEQ ID NO: 215714 - RNA, 32 nt, Homo Sapiens
gcuauaauaaaaagucaaaaaauaacaugccg

SEQ ID NO: 215715 - RNA, 32 nt, Homo Sapiens
caccugcuggggcucagggauguuagggacga

SEQ ID NO: 215716 - RNA, 32 nt, Homo Sapiens
acagggucccccuugccccagcccccuucugc

SEQ ID NO: 215717 - RNA, 32 nt, Homo Sapiens
ccuccagaacagaugccaucuuccugaauguu

SEQ ID NO: 215718 - RNA, 32 nt, Homo Sapiens
aggccgggcuggaggagaagauggcggccaag

SEQ ID NO: 215719 - RNA, 32 nt, Homo Sapiens
uccaaucagguggaauguuucacaggcacaug

SEQ ID NO: 215720 - RNA, 32 nt, Homo Sapiens
cugaguuccaugaaggagaacaaaguggccau

SEQ ID NO: 215721 - RNA, 32 nt, Homo Sapiens
gcggcggcguacccggcccgagacgggaggag

SEQ ID NO: 215722 - RNA, 32 nt, Homo Sapiens
aggcccgcagcacuaacagaucacaucugcaa

SEQ ID NO: 215723 - RNA, 32 nt, Homo Sapiens
cacugcacuccagccuaggugacagagggaga

SEQ ID NO: 215724 - RNA, 32 nt, Homo Sapiens
accuuuuuagcuacuguuuguuuucauucaac

SEQ ID NO: 215725 - RNA, 29 nt, Homo Sapiens
guuuugucauauguaaaagucauaacacc

SEQ ID NO: 215726 - RNA, 32 nt, Homo Sapiens
ucaacuuccuuccguuuccagaaagagcugug

SEQ ID NO: 215727 - RNA, 32 nt, Homo Sapiens
gguccgucguccccaacacucgugcucgcuca

SEQ ID NO: 215728 - RNA, 32 nt, Homo Sapiens
uucugggaacuaaaaccaguuuuauuugcccc

SEQ ID NO: 215729 - RNA, 32 nt, Homo Sapiens
ugagcuguucaauaaugacggacgcauugguu

SEQ ID NO: 215730 - RNA, 32 nt, Homo Sapiens
cugauggcgggaccgcgcugcccgagaaaggg

SEQ ID NO: 215731 - RNA, 32 nt, Homo Sapiens
uagaaaauauauaucuuuuacauauguaugua

SEQ ID NO: 215732 - RNA, 32 nt, Homo Sapiens
cagugcuuccccagccccugggccuggucacu

SEQ ID NO: 215733 - RNA, 32 nt, Homo Sapiens
aaugucuguauauaguauauauacuacauaaa

SEQ ID NO: 215734 - RNA, 32 nt, Homo Sapiens
ccaaucagaucaaccauauuaauagcaauuaa

SEQ ID NO: 215735 - RNA, 32 nt, Homo Sapiens
gcauggcacugacuauagagaugucuuguaga

SEQ ID NO: 215736 - RNA, 32 nt, Homo Sapiens
cugcacccacuccagcugccagagcacggagg

SEQ ID NO: 215737 - RNA, 32 nt, Homo Sapiens
ugccgccgcgccgccgccacccucccagagag

SEQ ID NO: 215738 - RNA, 32 nt, Homo Sapiens
guacuguauuuauauguagucaauugaaaucc

SEQ ID NO: 215739 - RNA, 32 nt, Homo Sapiens
uugacuuuauggaaacaauguacaguaggucc

SEQ ID NO: 215740 - RNA, 32 nt, Homo Sapiens
ggagcugcuaucggagagucuugcauucuggg

SEQ ID NO: 215741 - RNA, 32 nt, Homo Sapiens
agucuacucuaggauuuucaacuuuuuaguuu

SEQ ID NO: 215742 - RNA, 29 nt, Homo Sapiens
uaauauggcgaagaccuacgauuaccugu

SEQ ID NO: 215743 - RNA, 32 nt, Homo Sapiens
gcugagauaagacauccauuuuucucaaaaug

SEQ ID NO: 215744 - RNA, 32 nt, Homo Sapiens
gacuguaaauguuaagacgacuaguguucuua

SEQ ID NO: 215745 - RNA, 32 nt, Homo Sapiens
gaaccccucguuagccuuccucugauuuacau

SEQ ID NO: 215746 - RNA, 32 nt, Homo Sapiens
uuuuacuuuguccuuugcuaucuguguuauga

SEQ ID NO: 215747 - RNA, 32 nt, Homo Sapiens
ucaaaugccuuuaggaggaaacuugggugaga

SEQ ID NO: 215748 - RNA, 32 nt, Homo Sapiens
ugaagcaguuugguuuauauucuuauguuauc

SEQ ID NO: 215749 - RNA, 32 nt, Homo Sapiens
gcugaaguguaacaguacaucuucagguaaag

SEQ ID NO: 215750 - RNA, 31 nt, Homo Sapiens
auccgggcgggccccgcaggaauuuuauccc

SEQ ID NO: 215751 - RNA, 32 nt, Homo Sapiens
acuaccucagaaaaaucucaaagaauagucca

SEQ ID NO: 215752 - RNA, 30 nt, Homo Sapiens
aucugugaugagaugggggaagugggcuca

SEQ ID NO: 215753 - RNA, 32 nt, Homo Sapiens
auaucuuuagcaccccacuauucuuaauguca

SEQ ID NO: 215754 - RNA, 32 nt, Homo Sapiens
aaccccggccccagcgcaccuuggaaggcgca

SEQ ID NO: 215755 - RNA, 32 nt, Homo Sapiens
cuucuauggaaagaaaacuuuugaugaugaaa

SEQ ID NO: 215756 - RNA, 31 nt, Homo Sapiens
uuuacccggcuuugccugccaccucugccca

SEQ ID NO: 215757 - RNA, 32 nt, Homo Sapiens
uaauuuuuuuuccuauggaauggcauucuaua

SEQ ID NO: 215758 - RNA, 32 nt, Homo Sapiens
aguggcgccgaucggcggcggagccucuggca

SEQ ID NO: 215759 - RNA, 32 nt, Homo Sapiens
ggaaaaggaaagguaaauccaccuguccuuca

SEQ ID NO: 215760 - RNA, 32 nt, Homo Sapiens
gcugauagacaagcauccacgcuucagcuggc

SEQ ID NO: 215761 - RNA, 32 nt, Homo Sapiens
ucugccgccccuccaucuucuaccucugaaug

SEQ ID NO: 215762 - RNA, 32 nt, Homo Sapiens
uucccugauccucccauccgcuccccugaccc

SEQ ID NO: 215763 - RNA, 32 nt, Homo Sapiens
ccauccgcccucgggagaccaugcugcagaug

SEQ ID NO: 215764 - RNA, 32 nt, Homo Sapiens
auccuuguuuuguccccaacccuagggcuucu

SEQ ID NO: 215765 - RNA, 32 nt, Homo Sapiens
uuagagugcuuugaauacaacaggacucauca

SEQ ID NO: 215766 - RNA, 32 nt, Homo Sapiens
auuauaauucuuagauuccuggauaaaaugac

SEQ ID NO: 215767 - RNA, 32 nt, Homo Sapiens
ggaugauuagacuuggcaaucuguaagcagga

SEQ ID NO: 215768 - RNA, 29 nt, Homo Sapiens
uuuagaaaauaaaaacuuuagauuaacuc

SEQ ID NO: 215769 - RNA, 32 nt, Homo Sapiens
agcauaucgugggcaucuccccuuaugauuac

SEQ ID NO: 215770 - RNA, 32 nt, Homo Sapiens
uucaaacucugcauccuucucuaacaacguga

SEQ ID NO: 215771 - RNA, 32 nt, Homo Sapiens
uggagcggcgccgaccuucgcccggucagcgg

SEQ ID NO: 215772 - RNA, 32 nt, Homo Sapiens
aaaaagugcuuugugccaaaaauaucauaccu

SEQ ID NO: 215773 - RNA, 32 nt, Homo Sapiens
uauguuuuguuuucuuuuuuacaggauaaguu

SEQ ID NO: 215774 - RNA, 32 nt, Homo Sapiens
gccgcugcgggcccgcuccgacgcggaagauc

SEQ ID NO: 215775 - RNA, 32 nt, Homo Sapiens
guugaagaaguaccugucguaggagauuuggg

SEQ ID NO: 215776 - RNA, 32 nt, Homo Sapiens
ggguaccgcacggcugccgcggcggccuuacc

SEQ ID NO: 215777 - RNA, 32 nt, Homo Sapiens
acaaccccgggcucgucgcuuucuccaucccg

SEQ ID NO: 215778 - RNA, 32 nt, Homo Sapiens
auuucaacuaaguucucuuuuacggacauaca

SEQ ID NO: 215779 - RNA, 32 nt, Homo Sapiens
ccaggcugcccgacugcagaccacgugcucuu

SEQ ID NO: 215780 - RNA, 32 nt, Homo Sapiens
guuggccuggacgcucgucaguucuuagaucu

SEQ ID NO: 215781 - RNA, 32 nt, Homo Sapiens
agagcuggauuugaacccaggcagggcagcug

SEQ ID NO: 215782 - RNA, 28 nt, Homo Sapiens
uuuuagaaagauugaaggaugcaauggc

SEQ ID NO: 215783 - RNA, 32 nt, Homo Sapiens
ccagguggacuuccaccuccagccucuggucc

SEQ ID NO: 215784 - RNA, 32 nt, Homo Sapiens
uaaugcuguagcuaucauagcuuugcucuuac

SEQ ID NO: 215785 - RNA, 32 nt, Homo Sapiens
ucggcugccuuccuggggucccgugcaccagc

SEQ ID NO: 215786 - RNA, 32 nt, Homo Sapiens
gguaaaggccgcgcuugggugucccugggugg

SEQ ID NO: 215787 - RNA, 32 nt, Homo Sapiens
agaaggaaaaggaaaguagacaaguuugaugg

SEQ ID NO: 215788 - RNA, 32 nt, Homo Sapiens
aauaaaagauuugaacaguaagaaaaaucugc

SEQ ID NO: 215789 - RNA, 32 nt, Homo Sapiens
agaaaacccucaauucuuaauagauauaagau

SEQ ID NO: 215790 - RNA, 32 nt, Homo Sapiens
gauggaauugguuagguuagaucucucacugu

SEQ ID NO: 215791 - RNA, 32 nt, Homo Sapiens
aagguucucagguguugccaaauauguccugg

SEQ ID NO: 215792 - RNA, 32 nt, Homo Sapiens
aggagucacugccagggcugccguucuccuga

SEQ ID NO: 215793 - RNA, 32 nt, Homo Sapiens
gagagcaggcagccaccauggcgaaggaggaa

SEQ ID NO: 215794 - RNA, 30 nt, Homo Sapiens
aguuccuuuuguuauugccaucuuagcuuu

SEQ ID NO: 215795 - RNA, 32 nt, Homo Sapiens
cagacgcgcgugcgcgcgcacacacacagaca

SEQ ID NO: 215796 - RNA, 32 nt, Homo Sapiens
cgcaugugugcaugugcugugugagugagcac

SEQ ID NO: 215797 - RNA, 32 nt, Homo Sapiens
cgaaaaguucccucaugccaacugcagugauc

SEQ ID NO: 215798 - RNA, 32 nt, Homo Sapiens
uguaauccagaccaggcacaguggcucaugcc

SEQ ID NO: 215799 - RNA, 32 nt, Homo Sapiens
aggaauucaauuuggcaaaacaaaauguaaug

SEQ ID NO: 215800 - RNA, 32 nt, Homo Sapiens
cuuccuggguuuugggauuugugcaguguggc

SEQ ID NO: 215801 - RNA, 31 nt, Homo Sapiens
gaggagcagcgcauccuccagcagucagugg

SEQ ID NO: 215802 - RNA, 32 nt, Homo Sapiens
ugaagcagauggaauuuuaauaguuacacuau

SEQ ID NO: 215803 - RNA, 32 nt, Homo Sapiens
cuaauaagauaaacuuuuuugucuuugcuuua

SEQ ID NO: 215804 - RNA, 32 nt, Homo Sapiens
uauggacauucaucagaaagacacuaaucuga

SEQ ID NO: 215805 - RNA, 32 nt, Homo Sapiens
uaauaagauaaacuuuuuugucuuugcuuuau

SEQ ID NO: 215806 - RNA, 32 nt, Homo Sapiens
cagauaagaaaaccauaugucagccaaagauu

SEQ ID NO: 215807 - RNA, 32 nt, Homo Sapiens
gcaaccgaggcgggcucugaaccuggccgguc

SEQ ID NO: 215808 - RNA, 32 nt, Homo Sapiens
ccuuagcgggcucacguucuugccgggauggc

SEQ ID NO: 215809 - RNA, 32 nt, Homo Sapiens
auuuauuucuaugacuucuuuggauuuuauua

SEQ ID NO: 215810 - RNA, 32 nt, Homo Sapiens
uugaguuuucuuuuagcucuuucaaaagauua

SEQ ID NO: 215811 - RNA, 31 nt, Homo Sapiens
ccgagacgacggagaaggcacucuuauuuac

SEQ ID NO: 215812 - RNA, 32 nt, Homo Sapiens
ucuaccuccacacauucacagccuccccuacc

SEQ ID NO: 215813 - RNA, 32 nt, Homo Sapiens
agugcacuuguacaugcuguaaaauggucauu

SEQ ID NO: 215814 - RNA, 32 nt, Homo Sapiens
cuggggcuacccucgacuuuggagcgcgcucu

SEQ ID NO: 215815 - RNA, 32 nt, Homo Sapiens
uuauuuuuuggccuuagaaucugcagaaauua

SEQ ID NO: 215816 - RNA, 32 nt, Homo Sapiens
cuccaagguucucuucuguucccauggauccu

SEQ ID NO: 215817 - RNA, 32 nt, Homo Sapiens
agcuuucuuuuggaagugauaaaaauauucua

SEQ ID NO: 215818 - RNA, 32 nt, Homo Sapiens
cagcuccaaaucugagccuccaccacauagac

SEQ ID NO: 215819 - RNA, 32 nt, Homo Sapiens
uuggaucuucccggcgugugugugccuuacac

SEQ ID NO: 215820 - RNA, 32 nt, Homo Sapiens
gcuaccugacuucaaauuauauuacaaggcua

SEQ ID NO: 215821 - RNA, 32 nt, Homo Sapiens
ggccuccgcuucccuccugaggucucauuagg

SEQ ID NO: 215822 - RNA, 32 nt, Homo Sapiens
agcuuuguaaauauuucuuuaagauucagccu

SEQ ID NO: 215823 - RNA, 32 nt, Homo Sapiens
aggaggaguuagcccaacaacaacaaaaacaa

SEQ ID NO: 215824 - RNA, 32 nt, Homo Sapiens
gggggaggguuguggcaagauugucuuuucaa

SEQ ID NO: 215825 - RNA, 32 nt, Homo Sapiens
ucagcuucacgggcccggacuggcuuacccaa

SEQ ID NO: 215826 - RNA, 32 nt, Homo Sapiens
uggggucuaaggacaagcaguccuuacuuugg

SEQ ID NO: 215827 - RNA, 32 nt, Homo Sapiens
cugaccaacgcgacauuccuccccucacgccu

SEQ ID NO: 215828 - RNA, 32 nt, Homo Sapiens
ugcauuuucucuccuuucccuucccaaccugc

SEQ ID NO: 215829 - RNA, 32 nt, Homo Sapiens
cgggggcgucgcugcgcggcuggccggugagg

SEQ ID NO: 215830 - RNA, 32 nt, Homo Sapiens
uauuugagagcuucuuuuucuuuuuugugguu

SEQ ID NO: 215831 - RNA, 32 nt, Homo Sapiens
uggaggguugcauggcggcugggcaaaggugc

SEQ ID NO: 215832 - RNA, 32 nt, Homo Sapiens
agggugccugcgcugacgugagagaaaggaau

SEQ ID NO: 215833 - RNA, 32 nt, Homo Sapiens
aacccuggugucaucaucucccaggauccaug

SEQ ID NO: 215834 - RNA, 32 nt, Homo Sapiens
uuuguucagcuuaauuuacuguucaaaggcau

SEQ ID NO: 215835 - RNA, 32 nt, Homo Sapiens
gauaagguaauguuuucauauuuggcuaucuu

SEQ ID NO: 215836 - RNA, 32 nt, Homo Sapiens
gacuggcggcaccagcaccuucgcuuugcauc

SEQ ID NO: 215837 - RNA, 32 nt, Homo Sapiens
ccgcccuccagcgggacccuggcgccgagccc

SEQ ID NO: 215838 - RNA, 32 nt, Homo Sapiens
ccucuucggcggcggcggcggcggcggcccau

SEQ ID NO: 215839 - RNA, 32 nt, Homo Sapiens
cguguggagcccacccuucuugcuccuccaca

SEQ ID NO: 215840 - RNA, 32 nt, Homo Sapiens
ccacucauuuccccaguugguguuuccaacaa

SEQ ID NO: 215841 - RNA, 32 nt, Homo Sapiens
agaggugugaaguuagacucuaugaugaaaca

SEQ ID NO: 215842 - RNA, 32 nt, Homo Sapiens
aaugaaauuguaaaaccugucaaugauacagu

SEQ ID NO: 215843 - RNA, 32 nt, Homo Sapiens
agccgccccacccaccccaaggcuggagccgc

SEQ ID NO: 215844 - RNA, 32 nt, Homo Sapiens
gaggagcuggaaccauggugggggcugccuag

SEQ ID NO: 215845 - RNA, 32 nt, Homo Sapiens
uugugccaagguauugaugacaaaugggguga

SEQ ID NO: 215846 - RNA, 32 nt, Homo Sapiens
ucuuaaauaaugcuucagauauuauugcuuua

SEQ ID NO: 215847 - RNA, 32 nt, Homo Sapiens
ucaugaaaaauugauguaaaucagaagaauac

SEQ ID NO: 215848 - RNA, 32 nt, Homo Sapiens
ggggguacuagaagcugaucugauugguccaa

SEQ ID NO: 215849 - RNA, 32 nt, Homo Sapiens
ccucuuacuauuuaguuuaucugggcagaacc

SEQ ID NO: 215850 - RNA, 32 nt, Homo Sapiens
augcaagaguugcagcggcugcuccaacucac

SEQ ID NO: 215851 - RNA, 32 nt, Homo Sapiens
ccauggacagccugcacaggaccgccucccug

SEQ ID NO: 215852 - RNA, 32 nt, Homo Sapiens
uuugaagagagaauacauuuuauauaaacagg

SEQ ID NO: 215853 - RNA, 32 nt, Homo Sapiens
ggagagucaaagggcuugcuugccccagcaga

SEQ ID NO: 215854 - RNA, 32 nt, Homo Sapiens
cgcgucgccccagcugccccggucgcuggacu

SEQ ID NO: 215855 - RNA, 32 nt, Homo Sapiens
ccucuaugcucaggggcuggaacuggggaaug

SEQ ID NO: 215856 - RNA, 32 nt, Homo Sapiens
cagugccuucagauauuaagcauuccacaaca

SEQ ID NO: 215857 - RNA, 32 nt, Homo Sapiens
acagaggaugacucuagggugcucucccacuu

SEQ ID NO: 215858 - RNA, 32 nt, Homo Sapiens
uaaccuguggcauuuagauacuuuuuacuguu

SEQ ID NO: 215859 - RNA, 32 nt, Homo Sapiens
gcuccauuccuuccggcgcccggagcugcugg

SEQ ID NO: 215860 - RNA, 32 nt, Homo Sapiens
gucgaccuuggggcucuccacccccucuggcc

SEQ ID NO: 215861 - RNA, 32 nt, Homo Sapiens
uggggaggggaaggagcggcacaugggguuga

SEQ ID NO: 215862 - RNA, 32 nt, Homo Sapiens
agaucacgaugaugaagaugaugaugaugacu

SEQ ID NO: 215863 - RNA, 32 nt, Homo Sapiens
auccugugaacaugugccgaagugguugggcu

SEQ ID NO: 215864 - RNA, 32 nt, Homo Sapiens
uuauguuaggauuuuuucaacccauagucaga

SEQ ID NO: 215865 - RNA, 32 nt, Homo Sapiens
aaauuugacaguugauuggcauaauuucuugu

SEQ ID NO: 215866 - RNA, 32 nt, Homo Sapiens
cagguccaggaggcucccucccugcccagcga

SEQ ID NO: 215867 - RNA, 32 nt, Homo Sapiens
uauuuucugcacccucugcuuguucccucaua

SEQ ID NO: 215868 - RNA, 32 nt, Homo Sapiens
uggcucagugauuacugcuauuacuauauuua

SEQ ID NO: 215869 - RNA, 32 nt, Homo Sapiens
ugagagagggcuuccugagagugauggugaaa

SEQ ID NO: 215870 - RNA, 32 nt, Homo Sapiens
uggggucagucaguguuggagagcccacauau

SEQ ID NO: 215871 - RNA, 32 nt, Homo Sapiens
uugugcccuucacuucccccauucccuuccac

SEQ ID NO: 215872 - RNA, 32 nt, Homo Sapiens
gagaauuccaauuucuguccacuuccucacca

SEQ ID NO: 215873 - RNA, 32 nt, Homo Sapiens
aguuuuaaaaggaaaaguugcugucaucaaaa

SEQ ID NO: 215874 - RNA, 32 nt, Homo Sapiens
aacaugcuggccaaccacaauuccuagaguua

SEQ ID NO: 215875 - RNA, 32 nt, Homo Sapiens
gucacacccugccugcucaguccugggguccg

SEQ ID NO: 215876 - RNA, 32 nt, Homo Sapiens
acucgaggaaguugucgccgcggccauuuccc

SEQ ID NO: 215877 - RNA, 32 nt, Homo Sapiens
ucccucccgcccacccacucucaccccaaaca

SEQ ID NO: 215878 - RNA, 32 nt, Homo Sapiens
uuccuuccucucucuuuuuuuaguuaaguaga

SEQ ID NO: 215879 - RNA, 32 nt, Homo Sapiens
agcccguaccaugcacugaggaccucccaggu

SEQ ID NO: 215880 - RNA, 32 nt, Homo Sapiens
uguccgaggagaacugcuggcccuggugaagg

SEQ ID NO: 215881 - RNA, 32 nt, Homo Sapiens
uaguuuggugaugccuaacuuuuccagcaaag

SEQ ID NO: 215882 - RNA, 32 nt, Homo Sapiens
uagggucagguggguauaguaguacuuuacca

SEQ ID NO: 215883 - RNA, 32 nt, Homo Sapiens
ccuuuaaaacuuauuccagauguaguuccuuc

SEQ ID NO: 215884 - RNA, 32 nt, Homo Sapiens
ggcaaauggguugggugcaauggcucacgccu

SEQ ID NO: 215885 - RNA, 32 nt, Homo Sapiens
gaggcugaagucugggucuuccgcgccccgcg

SEQ ID NO: 215886 - RNA, 32 nt, Homo Sapiens
cccagauugagguggugccuucugccuccgcc

SEQ ID NO: 215887 - RNA, 32 nt, Homo Sapiens
gaagaagcuggggucuccaggcaggguaguaa

SEQ ID NO: 215888 - RNA, 32 nt, Homo Sapiens
ggggucuucaggcuuuuccacuggcucaccuu

SEQ ID NO: 215889 - RNA, 32 nt, Homo Sapiens
uuaucaaaacuagcauaacauaagcaaaauag

SEQ ID NO: 215890 - RNA, 32 nt, Homo Sapiens
agccccagugaguagcugcauuccuagaaauu

SEQ ID NO: 215891 - RNA, 32 nt, Homo Sapiens
cuccucauuugggccuuuuagaccccugaccu

SEQ ID NO: 215892 - RNA, 32 nt, Homo Sapiens
uuaacaguuuguuguccuggagggauuuucuu

SEQ ID NO: 215893 - RNA, 27 nt, Homo Sapiens
uaugccuucuucuucauuuaucccagu

SEQ ID NO: 215894 - RNA, 32 nt, Homo Sapiens
cgcucccgccccagcacuuuuggcucuguugc

SEQ ID NO: 215895 - RNA, 32 nt, Homo Sapiens
cccggccucgcucccgggucccagaugaccac

SEQ ID NO: 215896 - RNA, 32 nt, Homo Sapiens
gcguucucaguccgccaaaauccgggcuggcg

SEQ ID NO: 215897 - RNA, 32 nt, Homo Sapiens
cguuuaguuccuaucaucuguggcaugugaag

SEQ ID NO: 215898 - RNA, 32 nt, Homo Sapiens
aacuuagauaaaaucuuagaguacuuucauac

SEQ ID NO: 215899 - RNA, 32 nt, Homo Sapiens
acagggcugcgcagguuuccccuuucugcgaa

SEQ ID NO: 215900 - RNA, 32 nt, Homo Sapiens
ccccguacaggcagagcgcccgcccaccucua

SEQ ID NO: 215901 - RNA, 32 nt, Homo Sapiens
aaauuuugaggggagggaaagaaacaauaccu

SEQ ID NO: 215902 - RNA, 32 nt, Homo Sapiens
uuaauacacauuaaaacaucgcacaaaaacga

SEQ ID NO: 215903 - RNA, 32 nt, Homo Sapiens
cauacuccugccagcuugggggaguguuccuu

SEQ ID NO: 215904 - RNA, 32 nt, Homo Sapiens
auucggcacgaggcgaggcgaccgcugaggcc

SEQ ID NO: 215905 - RNA, 32 nt, Homo Sapiens
cgggcgucugccuggguuugcggagagccgcu

SEQ ID NO: 215906 - RNA, 32 nt, Homo Sapiens
cuuccucccuggaccccacgggccccuguccc

SEQ ID NO: 215907 - RNA, 32 nt, Homo Sapiens
acugaugaaaauuuauuuagaaaaaucuaaaa

SEQ ID NO: 215908 - RNA, 30 nt, Homo Sapiens
ccauuauuucaauugggggaaaauauuaac

SEQ ID NO: 215909 - RNA, 32 nt, Homo Sapiens
uggaggaggagcugcggaggcuucagagcgag

SEQ ID NO: 215910 - RNA, 32 nt, Homo Sapiens
ggucuuagggagcuuccccagcccuaaaggca

SEQ ID NO: 215911 - RNA, 32 nt, Homo Sapiens
ccccugccucccccuaccccagcccaugagag

SEQ ID NO: 215912 - RNA, 32 nt, Homo Sapiens
uggcuagagaacucacagcucugggaaaaaga

SEQ ID NO: 215913 - RNA, 32 nt, Homo Sapiens
caccugccaaagcuuggcacaaacaaucugga

SEQ ID NO: 215914 - RNA, 32 nt, Homo Sapiens
agguccuggugccucgagcuccuccuaguucu

SEQ ID NO: 215915 - RNA, 32 nt, Homo Sapiens
agauucacugguuuacuuaaaaacuucucagg

SEQ ID NO: 215916 - RNA, 32 nt, Homo Sapiens
ggaguaacugccaguuaggaagaacaguaaac

SEQ ID NO: 215917 - RNA, 32 nt, Homo Sapiens
gcgguccgcgcagcugcaguaagggggcgacc

SEQ ID NO: 215918 - RNA, 30 nt, Homo Sapiens
gaccgaacucuugcugcagaguuucgagcg

SEQ ID NO: 215919 - RNA, 31 nt, Homo Sapiens
aaagcugcucagugccugccccguggaggcu

SEQ ID NO: 215920 - RNA, 32 nt, Homo Sapiens
uuuaagcaguaguauaucuuauuuucaaggca

SEQ ID NO: 215921 - RNA, 32 nt, Homo Sapiens
gccuugcaaugcuuuguggcauuuucaaugga

SEQ ID NO: 215922 - RNA, 31 nt, Homo Sapiens
auaauuuucaaugauuagccguguaacuccu

SEQ ID NO: 215923 - RNA, 32 nt, Homo Sapiens
aaauugucuccaugggaaacuugacccagugg

SEQ ID NO: 215924 - RNA, 32 nt, Homo Sapiens
uguggcuucacuuguaauccccccuguacuua

SEQ ID NO: 215925 - RNA, 32 nt, Homo Sapiens
cacacacccguccauaccagcucccugcccau

SEQ ID NO: 215926 - RNA, 32 nt, Homo Sapiens
gugagcauauauauuuauuuugucugacauaa

SEQ ID NO: 215927 - RNA, 32 nt, Homo Sapiens
augugcugugucaagagcagcggcggugacgc

SEQ ID NO: 215928 - RNA, 30 nt, Homo Sapiens
aauagcauuaugucugcucaguauauaugc

SEQ ID NO: 215929 - RNA, 32 nt, Homo Sapiens
ugcccuaggggcaguccugcuuccucauuuua

SEQ ID NO: 215930 - RNA, 32 nt, Homo Sapiens
guacuuuaauuucaaaugcuuuuuuauaucua

SEQ ID NO: 215931 - RNA, 32 nt, Homo Sapiens
gacggcgcgggccgccugcaccugcacaagga

SEQ ID NO: 215932 - RNA, 32 nt, Homo Sapiens
uguaccuccuuuucuuuuucuuuguugaugag

SEQ ID NO: 215933 - RNA, 32 nt, Homo Sapiens
agguugaggcugcagugagcugugauugcacc

SEQ ID NO: 215934 - RNA, 32 nt, Homo Sapiens
ugucaucuggcuuugcggagaagguuccaccu

SEQ ID NO: 215935 - RNA, 32 nt, Homo Sapiens
gccaggaaaaggaaacuguugagaaaccgaaa

SEQ ID NO: 215936 - RNA, 29 nt, Homo Sapiens
ugcauugaauaaaaauaauauacaauuag

SEQ ID NO: 215937 - RNA, 32 nt, Homo Sapiens
agucuguguggccagcagccucugaucugugc

SEQ ID NO: 215938 - RNA, 32 nt, Homo Sapiens
aaugugaagcggucguguugugaguuuaguaa

SEQ ID NO: 215939 - RNA, 32 nt, Homo Sapiens
uaaaaaugaugaugauauuauggauccaauaa

SEQ ID NO: 215940 - RNA, 32 nt, Homo Sapiens
ugcugaaggccgcgagggcggcggcgauggcg

SEQ ID NO: 215941 - RNA, 32 nt, Homo Sapiens
gacgcccgccccacucagccuccuccugcguc

SEQ ID NO: 215942 - RNA, 32 nt, Homo Sapiens
accucccccccauuuuaauuaguauugaucau

SEQ ID NO: 215943 - RNA, 32 nt, Homo Sapiens
agggcaggcagagcagucuauacucucccaag

SEQ ID NO: 215944 - RNA, 32 nt, Homo Sapiens
cagggaagauuucccaggaaaagagacaucua

SEQ ID NO: 215945 - RNA, 32 nt, Homo Sapiens
caugaaaagguuauguaauaaaauauuuuaaa

SEQ ID NO: 215946 - RNA, 32 nt, Homo Sapiens
augaauauaacaaauugaucugcuuauuuauu

SEQ ID NO: 215947 - RNA, 32 nt, Homo Sapiens
ccugcucagaugacagaguucuccucgccuuc

SEQ ID NO: 215948 - RNA, 32 nt, Homo Sapiens
ugauggaggaagacccugcuguguugagauga

SEQ ID NO: 215949 - RNA, 32 nt, Homo Sapiens
uaauuuacccucaaaauauauguauaugggug

SEQ ID NO: 215950 - RNA, 32 nt, Homo Sapiens
agguaguuaggcauaauuuguauauuacagaa

SEQ ID NO: 215951 - RNA, 32 nt, Homo Sapiens
ucagcaaaucaucaucaauaguauuacauuag

SEQ ID NO: 215952 - RNA, 32 nt, Homo Sapiens
uucaaacuucuagaaagacaauuuaacauuug

SEQ ID NO: 215953 - RNA, 32 nt, Homo Sapiens
cuccagaggggauuaauccuucugcuucaaag

SEQ ID NO: 215954 - RNA, 32 nt, Homo Sapiens
aaagauguuguaauauuauaccuauacuuaaa

SEQ ID NO: 215955 - RNA, 32 nt, Homo Sapiens
aacaagauacaguggaauggcccauacaguau

SEQ ID NO: 215956 - RNA, 32 nt, Homo Sapiens
ggcccuuucuucaugaaaagugucugcaaaac

SEQ ID NO: 215957 - RNA, 32 nt, Homo Sapiens
cuggggcucaggugaguccucacaggcgugcu

SEQ ID NO: 215958 - RNA, 32 nt, Homo Sapiens
uuuuuggagucuuuuugguaccauaagcauau

SEQ ID NO: 215959 - RNA, 32 nt, Homo Sapiens
guuccaacuagagaugugcuccuccuucagga

SEQ ID NO: 215960 - RNA, 32 nt, Homo Sapiens
gaaaaccaaaaaccaaaacaaacaaacaaaaa

SEQ ID NO: 215961 - RNA, 32 nt, Homo Sapiens
augcagaggggaggaucucaggccugaagggu

SEQ ID NO: 215962 - RNA, 32 nt, Homo Sapiens
agagagacauugccuccaccucuccuuggaaa

SEQ ID NO: 215963 - RNA, 32 nt, Homo Sapiens
ugguugugcagggacugguagcuuggaugaca

SEQ ID NO: 215964 - RNA, 32 nt, Homo Sapiens
uuuuuaucuuauuuuuacucguccguugaaaa

SEQ ID NO: 215965 - RNA, 27 nt, Homo Sapiens
cucacuguccccuucagccuccuaucu

SEQ ID NO: 215966 - RNA, 32 nt, Homo Sapiens
gugauuuguaauguuucuuaaucauuggacau

SEQ ID NO: 215967 - RNA, 32 nt, Homo Sapiens
cuaguggggagcuucacugugcagcuucuggg

SEQ ID NO: 215968 - RNA, 32 nt, Homo Sapiens
aacaaggugacauuuuucugcugcccauuugu

SEQ ID NO: 215969 - RNA, 32 nt, Homo Sapiens
ugaggaauauuuuggagacaaaaguaucagaa

SEQ ID NO: 215970 - RNA, 32 nt, Homo Sapiens
gcucaguagccacuugucaucuauuuucugau

SEQ ID NO: 215971 - RNA, 32 nt, Homo Sapiens
augaagaaacuuaugagaccuuugauccuccu

SEQ ID NO: 215972 - RNA, 30 nt, Homo Sapiens
cuuaagacccagggccagggucccguugau

SEQ ID NO: 215973 - RNA, 32 nt, Homo Sapiens
ugcggccggggcugcgcgguggugaugcgagc

SEQ ID NO: 215974 - RNA, 32 nt, Homo Sapiens
ucuccccuucccuaucaccccucccccaaggu

SEQ ID NO: 215975 - RNA, 32 nt, Homo Sapiens
uaaugacaccacacuuguuuucuuuguuucuu

SEQ ID NO: 215976 - RNA, 32 nt, Homo Sapiens
uggccaccagacagcaaagacagucucugguu

SEQ ID NO: 215977 - RNA, 32 nt, Homo Sapiens
ugguggcuguugcugcaaacaaccacccaaaa

SEQ ID NO: 215978 - RNA, 32 nt, Homo Sapiens
aagaauuuggagaagaaaaugcaguacucaac

SEQ ID NO: 215979 - RNA, 32 nt, Homo Sapiens
ugaugcugaguaaaacaugacucacaggaagg

SEQ ID NO: 215980 - RNA, 32 nt, Homo Sapiens
uaacuuuuucuuuaaaaaauguagauacaguu

SEQ ID NO: 215981 - RNA, 32 nt, Homo Sapiens
gaaguugagagacaacucuccaugcaggucca

SEQ ID NO: 215982 - RNA, 32 nt, Homo Sapiens
uagguagcaaauggggugauauuuuuauagaa

SEQ ID NO: 215983 - RNA, 32 nt, Homo Sapiens
ccuuucucaucccacgcacuccaugagcaccc

SEQ ID NO: 215984 - RNA, 32 nt, Homo Sapiens
aaugucacauucagauuuucaggaagaaaauc

SEQ ID NO: 215985 - RNA, 32 nt, Homo Sapiens
uucugggcugucuauucuagucuauuuguuga

SEQ ID NO: 215986 - RNA, 32 nt, Homo Sapiens
ucuggauacggauacuuucuaguugaucugga

SEQ ID NO: 215987 - RNA, 32 nt, Homo Sapiens
ugggagggcgugcuuccaucccgggcuggccc

SEQ ID NO: 215988 - RNA, 30 nt, Homo Sapiens
ccagcgggagguggggagcauaccgccugg

SEQ ID NO: 215989 - RNA, 32 nt, Homo Sapiens
ugugcuggggaugggcagcugcgccugccugc

SEQ ID NO: 215990 - RNA, 32 nt, Homo Sapiens
gcugucagaaacauaaagauugaaggggcaug

SEQ ID NO: 215991 - RNA, 32 nt, Homo Sapiens
aggugugucucacccuacuaagaauuggcaga

SEQ ID NO: 215992 - RNA, 32 nt, Homo Sapiens
uuguagugcaaaaagacuuuugugaaaagcug

SEQ ID NO: 215993 - RNA, 32 nt, Homo Sapiens
uuguagccucucacugaauccaacauauccac

SEQ ID NO: 215994 - RNA, 32 nt, Homo Sapiens
gauaaaaguuuacaacucugaugcugagcagg

SEQ ID NO: 215995 - RNA, 32 nt, Homo Sapiens
aaccaccacagauaggaauuccuuauucuuuu

SEQ ID NO: 215996 - RNA, 32 nt, Homo Sapiens
cauucuccccacuuuauuaguuaauuuaaauu

SEQ ID NO: 215997 - RNA, 31 nt, Homo Sapiens
uaaacacaccaucuggugccaaaugaagauu

SEQ ID NO: 215998 - RNA, 32 nt, Homo Sapiens
agauguuaauagaacaagcugcacaaccugga

SEQ ID NO: 215999 - RNA, 32 nt, Homo Sapiens
ugcauauuuccauucuggucuuucugggccag

SEQ ID NO: 216000 - RNA, 30 nt, Homo Sapiens
gggcggggagggcgcgcggcgaucggacac

SEQ ID NO: 216001 - RNA, 32 nt, Homo Sapiens
auuacccaauuguugaauaaaacuauaaauau

SEQ ID NO: 216002 - RNA, 32 nt, Homo Sapiens
uauacacacgcacacacgcacacacacacaca

SEQ ID NO: 216003 - RNA, 32 nt, Homo Sapiens
acuggagccagccuugccuucuccucuccuga

SEQ ID NO: 216004 - RNA, 32 nt, Homo Sapiens
cacacacacacacacauauacacacacacaca

SEQ ID NO: 216005 - RNA, 32 nt, Homo Sapiens
uauacacacacacacacacacacacacacaca

SEQ ID NO: 216006 - RNA, 32 nt, Homo Sapiens
ugcacacacguacacaaugcacacaugcacac

SEQ ID NO: 216007 - RNA, 32 nt, Homo Sapiens
ugcagcuugacaagugugacccaguucccagu

SEQ ID NO: 216008 - RNA, 32 nt, Homo Sapiens
ugaaguuauuuuugcuuuuucuuagauaggau

SEQ ID NO: 216009 - RNA, 32 nt, Homo Sapiens
cgagugcggagcgggaggaggcggcggcggcc

SEQ ID NO: 216010 - RNA, 32 nt, Homo Sapiens
agcaaauaucuuccuugcugguuguguggaag

SEQ ID NO: 216011 - RNA, 32 nt, Homo Sapiens
uucaguguuucuuuucuauauugucaaugaaa

SEQ ID NO: 216012 - RNA, 32 nt, Homo Sapiens
uaaaggaacaaaugacaaaguuugaauggaag

SEQ ID NO: 216013 - RNA, 32 nt, Homo Sapiens
uggguuuuugguuuuuguuuuaguuuuugguu

SEQ ID NO: 216014 - RNA, 32 nt, Homo Sapiens
cggggcuuuucugcaauaaagucacgagcguu

SEQ ID NO: 216015 - RNA, 32 nt, Homo Sapiens
cacacaccaaaauauauaagagcugugcaugg

SEQ ID NO: 216016 - RNA, 32 nt, Homo Sapiens
acugauuauggacuuuaaucacaucuacaaaa

SEQ ID NO: 216017 - RNA, 32 nt, Homo Sapiens
uugccgagucugguuuucuugguuucagauga

SEQ ID NO: 216018 - RNA, 32 nt, Homo Sapiens
uaugagcuccuggugcugcccgaggccuucac

SEQ ID NO: 216019 - RNA, 32 nt, Homo Sapiens
aggcgaggacaccucccgcaucagggaaacac

SEQ ID NO: 216020 - RNA, 32 nt, Homo Sapiens
cauuuuacuuugcauuugcuuggaagugaguu

SEQ ID NO: 216021 - RNA, 32 nt, Homo Sapiens
aggacucaucuugcauggcaccaccggccaga

SEQ ID NO: 216022 - RNA, 32 nt, Homo Sapiens
gcgagcuggcugcgaaggcagcugcugccucu

SEQ ID NO: 216023 - RNA, 32 nt, Homo Sapiens
gucagcuggggagaggcccauguggcaggaac

SEQ ID NO: 216024 - RNA, 32 nt, Homo Sapiens
guuugcgcuggacccgaccccgagggcgggcg

SEQ ID NO: 216025 - RNA, 32 nt, Homo Sapiens
cuuagggcggcuggcguccgcgugcagccaca

SEQ ID NO: 216026 - RNA, 32 nt, Homo Sapiens
gccgcagugacagcccggacccggcccuccgc

SEQ ID NO: 216027 - RNA, 32 nt, Homo Sapiens
auccgggcacucugcuggucgcggcgggagug

SEQ ID NO: 216028 - RNA, 32 nt, Homo Sapiens
augcucaccagccccagagucagagcuggcca

SEQ ID NO: 216029 - RNA, 32 nt, Homo Sapiens
ucaaaugucuucauugacuucgguauuucaua

SEQ ID NO: 216030 - RNA, 32 nt, Homo Sapiens
agugggcuggaccggacgccagagacaaaggc

SEQ ID NO: 216031 - RNA, 32 nt, Homo Sapiens
cgacggccuggacgaccgcggcuggggcugcg

SEQ ID NO: 216032 - RNA, 32 nt, Homo Sapiens
ucgaaaucgcaguccuccggcgaccccgaacu

SEQ ID NO: 216033 - RNA, 32 nt, Homo Sapiens
aauuuaguccuauuguaauaugugccugucac

SEQ ID NO: 216034 - RNA, 28 nt, Homo Sapiens
ucaaaauagagcauucauuuugaaaggc

SEQ ID NO: 216035 - RNA, 32 nt, Homo Sapiens
gagacagagucuugcuccauugcccaggcugg

SEQ ID NO: 216036 - RNA, 32 nt, Homo Sapiens
cucaaaguugggaaacaagcugauuucuugcc

SEQ ID NO: 216037 - RNA, 32 nt, Homo Sapiens
ggccagagagaggagaugggggugggagggac

SEQ ID NO: 216038 - RNA, 32 nt, Homo Sapiens
uauaaagcuaauacuuuguaaccaucaugcag

SEQ ID NO: 216039 - RNA, 32 nt, Homo Sapiens
uuuccuaaguuguguauuacugagucuuggag

SEQ ID NO: 216040 - RNA, 32 nt, Homo Sapiens
agaagauuaugucaucuacaaacaaauauaau

SEQ ID NO: 216041 - RNA, 32 nt, Homo Sapiens
ugcuucaagagaaaaugcgguuauaaaaaaug

SEQ ID NO: 216042 - RNA, 32 nt, Homo Sapiens
ccuguccugugcuggcuuuucuggaacgccag

SEQ ID NO: 216043 - RNA, 32 nt, Homo Sapiens
guuuccucaaccggaacacacccaugaagaug

SEQ ID NO: 216044 - RNA, 32 nt, Homo Sapiens
acccugacagccuggugaccgaaacugccuca

SEQ ID NO: 216045 - RNA, 29 nt, Homo Sapiens
uuauaaugaaaauaaaucuugagucguug

SEQ ID NO: 216046 - RNA, 32 nt, Homo Sapiens
aagccagcccgugcaacggaagccaggccaac

SEQ ID NO: 216047 - RNA, 32 nt, Homo Sapiens
ugcugggcccccgcggacccaggugcucuggg

SEQ ID NO: 216048 - RNA, 32 nt, Homo Sapiens
augaccucacugacaguucuuuuucucugaau

SEQ ID NO: 216049 - RNA, 32 nt, Homo Sapiens
cucccuccagcaucccucgggaaccucacucu

SEQ ID NO: 216050 - RNA, 32 nt, Homo Sapiens
ucuggugcucccagcccuuccuccugcagagc

SEQ ID NO: 216051 - RNA, 32 nt, Homo Sapiens
uuuguaaugugaugaagugaugaugucuuaac

SEQ ID NO: 216052 - RNA, 32 nt, Homo Sapiens
uuauacauuuuuaugaaaaauuucauugucag

SEQ ID NO: 216053 - RNA, 32 nt, Homo Sapiens
guccagagcaccucaaacaauuucaguguugu

SEQ ID NO: 216054 - RNA, 32 nt, Homo Sapiens
ggaacaguccuggcugccccugacagugggga

SEQ ID NO: 216055 - RNA, 32 nt, Homo Sapiens
aaggaaacuaaaaaauauacauacuaguacca

SEQ ID NO: 216056 - RNA, 32 nt, Homo Sapiens
ucuccuguuuguuuuuuuuuuauuauuuuaau

SEQ ID NO: 216057 - RNA, 32 nt, Homo Sapiens
acugagauaauaccuggaagcaucauaguggu

SEQ ID NO: 216058 - RNA, 32 nt, Homo Sapiens
ucaagaaauuaguccugaaugaucaagggggg

SEQ ID NO: 216059 - RNA, 32 nt, Homo Sapiens
ucaaacuaaggauaagcaagcuuuuguccuuc

SEQ ID NO: 216060 - RNA, 32 nt, Homo Sapiens
cccauuuuaaacaacacaggccuucaguauca

SEQ ID NO: 216061 - RNA, 32 nt, Homo Sapiens
gaaugggcucaguaagaagagcuuggaaaaug

SEQ ID NO: 216062 - RNA, 32 nt, Homo Sapiens
ugaguucuuccgccuccuuucccugugucaua

SEQ ID NO: 216063 - RNA, 32 nt, Homo Sapiens
acuugauaauuucuucccauucuugugcaaua

SEQ ID NO: 216064 - RNA, 32 nt, Homo Sapiens
agagggcuagcuugcuguuucuccuccaggug

SEQ ID NO: 216065 - RNA, 32 nt, Homo Sapiens
gugggggcuauuucuaugcaaauagaaaucag

SEQ ID NO: 216066 - RNA, 32 nt, Homo Sapiens
uguuacaauuuaauauuccauccugcccaacc

SEQ ID NO: 216067 - RNA, 32 nt, Homo Sapiens
aauuacccaagcauaguggugggugccugugg

SEQ ID NO: 216068 - RNA, 32 nt, Homo Sapiens
aauggguuucugaaugccuccucuguaguccu

SEQ ID NO: 216069 - RNA, 32 nt, Homo Sapiens
cccucggccugcagccagaguagccaggccgc

SEQ ID NO: 216070 - RNA, 32 nt, Homo Sapiens
cgcacaaaaugaauuuugaacagauuuuggau

SEQ ID NO: 216071 - RNA, 32 nt, Homo Sapiens
caaggguaccggaagagaagggugucugcccc

SEQ ID NO: 216072 - RNA, 32 nt, Homo Sapiens
ggggauguggcagugggaauguggcagugggg

SEQ ID NO: 216073 - RNA, 32 nt, Homo Sapiens
ccagcuccggugccgcaccccguaaagggcug

SEQ ID NO: 216074 - RNA, 32 nt, Homo Sapiens
cccaggugcgcacgcuccuguuacccuuucuc

SEQ ID NO: 216075 - RNA, 32 nt, Homo Sapiens
cuguauggguaagaacaaaaccccagaaacag

SEQ ID NO: 216076 - RNA, 32 nt, Homo Sapiens
aguaguguuguccauggguaaacaggagacgg

SEQ ID NO: 216077 - RNA, 32 nt, Homo Sapiens
ggaagcuggugcccgagcugcgggaguacugc

SEQ ID NO: 216078 - RNA, 32 nt, Homo Sapiens
uagcggggguaggaugguugggaccagauuga

SEQ ID NO: 216079 - RNA, 32 nt, Homo Sapiens
guggagcuucccuggggugcccgggcaagucu

SEQ ID NO: 216080 - RNA, 32 nt, Homo Sapiens
cagcauggucugaccuuauuacuuagauuuug

SEQ ID NO: 216081 - RNA, 32 nt, Homo Sapiens
uguuuaaacuaaugaacuuggcugcuuuucaa

SEQ ID NO: 216082 - RNA, 32 nt, Homo Sapiens
caccccugccccagcuccaggaccugccccug

SEQ ID NO: 216083 - RNA, 32 nt, Homo Sapiens
ugcaugcucccucucuccagaccagccuucug

SEQ ID NO: 216084 - RNA, 32 nt, Homo Sapiens
cccggagggggcggggagguggcccacagaac

SEQ ID NO: 216085 - RNA, 32 nt, Homo Sapiens
ucauaaugucuucaaaucccuguuccuauccu

SEQ ID NO: 216086 - RNA, 32 nt, Homo Sapiens
uccaugguggccugggccacgcaggcuguacc

SEQ ID NO: 216087 - RNA, 32 nt, Homo Sapiens
gaauuuacuuggauuuaaagagguuaauaaaa

SEQ ID NO: 216088 - RNA, 32 nt, Homo Sapiens
ugaauagaggggcaucugccugaaccucacuu

SEQ ID NO: 216089 - RNA, 32 nt, Homo Sapiens
auguuccaggacuccagugccuguuggugugg

SEQ ID NO: 216090 - RNA, 32 nt, Homo Sapiens
auuuaucuuucugaaucaguuaucaaagauaa

SEQ ID NO: 216091 - RNA, 32 nt, Homo Sapiens
uaguggcaagggcaggaugaggcugcaccgcu

SEQ ID NO: 216092 - RNA, 32 nt, Homo Sapiens
cgggcgugguggcacaugcauguaauccccgc

SEQ ID NO: 216093 - RNA, 32 nt, Homo Sapiens
gggugguguggagauuguuaaucuuguauaaa

SEQ ID NO: 216094 - RNA, 32 nt, Homo Sapiens
acaaaggaacaaagacaguccacucagacacu

SEQ ID NO: 216095 - RNA, 32 nt, Homo Sapiens
gcauaaaucauauauagcauuuucaggcaugu

SEQ ID NO: 216096 - RNA, 32 nt, Homo Sapiens
aaaccugaagccacaggaggagggauuccaga

SEQ ID NO: 216097 - RNA, 32 nt, Homo Sapiens
aacaaccaccagugaaauguguguguauacaa

SEQ ID NO: 216098 - RNA, 32 nt, Homo Sapiens
gugaguaagggggcccuugcugauguucauca

SEQ ID NO: 216099 - RNA, 32 nt, Homo Sapiens
cacaaacaaaacaaaauguuaugauaaucuuu

SEQ ID NO: 216100 - RNA, 32 nt, Homo Sapiens
cugccgcccgcaccaccuuccgcugccucuca

SEQ ID NO: 216101 - RNA, 32 nt, Homo Sapiens
gcacugucccugccuguccccaucccacagag

SEQ ID NO: 216102 - RNA, 32 nt, Homo Sapiens
ugggagugcagggugagcccggcgcaggggau

SEQ ID NO: 216103 - RNA, 32 nt, Homo Sapiens
aagcgccuguguuugucuugccucugcuucag

SEQ ID NO: 216104 - RNA, 32 nt, Homo Sapiens
aagcagcagucucuggucccagcccaccccau

SEQ ID NO: 216105 - RNA, 32 nt, Homo Sapiens
ucuggacguuuggggcgcgcccaguccgagcc

SEQ ID NO: 216106 - RNA, 32 nt, Homo Sapiens
gcccaggccuuaaucacccccauuccgugcgg

SEQ ID NO: 216107 - RNA, 32 nt, Homo Sapiens
caucugcagucggccuuuuggaccacacagga

SEQ ID NO: 216108 - RNA, 32 nt, Homo Sapiens
gugccacucuucuuccuuuccaucccaaaagu

SEQ ID NO: 216109 - RNA, 32 nt, Homo Sapiens
auaaauuagauccuaaucuacugcaagauaac

SEQ ID NO: 216110 - RNA, 31 nt, Homo Sapiens
cuuugcauggaugauugucuguccucuguug

SEQ ID NO: 216111 - RNA, 32 nt, Homo Sapiens
uuaucaccuguuugucaaagcuuguuuaaauu

SEQ ID NO: 216112 - RNA, 32 nt, Homo Sapiens
cgagcuacuguaguaggcauugccgacuguuu

SEQ ID NO: 216113 - RNA, 32 nt, Homo Sapiens
uguucaggcagagggaacagccugugcaaaag

SEQ ID NO: 216114 - RNA, 32 nt, Homo Sapiens
aacuaaaauaguauuaggaacaauuaaaaaca

SEQ ID NO: 216115 - RNA, 32 nt, Homo Sapiens
uauaucugugacuucugaaacuauuuggcugc

SEQ ID NO: 216116 - RNA, 32 nt, Homo Sapiens
acaagugcccacagcuggccccagguugccag

SEQ ID NO: 216117 - RNA, 32 nt, Homo Sapiens
cccagggcccagccuuccccuucucccccggg

SEQ ID NO: 216118 - RNA, 32 nt, Homo Sapiens
ugauggacaugugaaaaguaaguauaaaugga

SEQ ID NO: 216119 - RNA, 32 nt, Homo Sapiens
uggucaaauagacugagaagugauaguggggg

SEQ ID NO: 216120 - RNA, 32 nt, Homo Sapiens
gaggcuuggaggggguugagggauaaaagacu

SEQ ID NO: 216121 - RNA, 32 nt, Homo Sapiens
uggcaaccugagggaggaaagaaggacaccuc

SEQ ID NO: 216122 - RNA, 32 nt, Homo Sapiens
agaugauguaauggaaaggguguuggcauugg

SEQ ID NO: 216123 - RNA, 32 nt, Homo Sapiens
auuuuuuagaaaguugcauugagggcuaggua

SEQ ID NO: 216124 - RNA, 32 nt, Homo Sapiens
ucucaauaaaugaaacaaacacugggcagcug

SEQ ID NO: 216125 - RNA, 32 nt, Homo Sapiens
ucuccauguccaggaaacuuguaaccacccuu

SEQ ID NO: 216126 - RNA, 32 nt, Homo Sapiens
ugcuuucugaaucuauaauggaggucagugaa

SEQ ID NO: 216127 - RNA, 32 nt, Homo Sapiens
aggcuccgagggccccggggccuccucuccuc

SEQ ID NO: 216128 - RNA, 32 nt, Homo Sapiens
ucuggccucacggagcucccaguccaugucac

SEQ ID NO: 216129 - RNA, 32 nt, Homo Sapiens
aggagugggggcagauucugcugcuggggaag

SEQ ID NO: 216130 - RNA, 32 nt, Homo Sapiens
ggaagaagaugauguuacucccaauacagacg

SEQ ID NO: 216131 - RNA, 32 nt, Homo Sapiens
ccuugggguuugguagugauuguacaacuuaa

SEQ ID NO: 216132 - RNA, 32 nt, Homo Sapiens
caaagcaucucccccaucugcauacccagcaa

SEQ ID NO: 216133 - RNA, 32 nt, Homo Sapiens
aggaacaggaggguggcuucccucacaugaag

SEQ ID NO: 216134 - RNA, 32 nt, Homo Sapiens
cagcuggcagcagacuccagggucugaguggg

SEQ ID NO: 216135 - RNA, 32 nt, Homo Sapiens
cagacucgcuguccacggaccuguggcugcug

SEQ ID NO: 216136 - RNA, 32 nt, Homo Sapiens
aagauuucguugaauuugaaagucaaagauuc

SEQ ID NO: 216137 - RNA, 32 nt, Homo Sapiens
ggcuaugaaguguuuuaaaaauccauucuucg

SEQ ID NO: 216138 - RNA, 30 nt, Homo Sapiens
gguguuugagcuguggcagaagcaccuggg

SEQ ID NO: 216139 - RNA, 32 nt, Homo Sapiens
cuagucuggucucugauucaguacagagacaa

SEQ ID NO: 216140 - RNA, 32 nt, Homo Sapiens
acuuuuucaaaauuauuuuuuucuguaaagua

SEQ ID NO: 216141 - RNA, 32 nt, Homo Sapiens
acgggguccccgcuccaggagacgcucgaguc

SEQ ID NO: 216142 - RNA, 32 nt, Homo Sapiens
gcagggaucugccugcauccugacggggugcc

SEQ ID NO: 216143 - RNA, 32 nt, Homo Sapiens
ccccauaaugcuacugucaaguguuacaacug

SEQ ID NO: 216144 - RNA, 32 nt, Homo Sapiens
aaaaaauguuuccagacuuuguccaacauuua

SEQ ID NO: 216145 - RNA, 30 nt, Homo Sapiens
cccaucugcaaaaugggggugacgauaucu

SEQ ID NO: 216146 - RNA, 32 nt, Homo Sapiens
guuccagaaagauuacuuuuuuccucuuauuu

SEQ ID NO: 216147 - RNA, 32 nt, Homo Sapiens
ucuauccggcacuaggaacagccccgggggcg

SEQ ID NO: 216148 - RNA, 32 nt, Homo Sapiens
uuucuguccaaauaucuacuugacuugggggu

SEQ ID NO: 216149 - RNA, 32 nt, Homo Sapiens
uauaaagacauuauuucuaguauuccuuggcc

SEQ ID NO: 216150 - RNA, 32 nt, Homo Sapiens
acauagucuccauggaugucccugcccuguag

SEQ ID NO: 216151 - RNA, 32 nt, Homo Sapiens
auuuugcuguucucuuuuuuguuauuguuaug

SEQ ID NO: 216152 - RNA, 32 nt, Homo Sapiens
aacaccauuuuucccgaaauaagacaauaaga

SEQ ID NO: 216153 - RNA, 32 nt, Homo Sapiens
gugccaucaggcugagucugaacucuuguuac

SEQ ID NO: 216154 - RNA, 32 nt, Homo Sapiens
cgccuccucagagcggggcccgggcccagccg

SEQ ID NO: 216155 - RNA, 32 nt, Homo Sapiens
gcgcagaccccauagugugucuugugcugcag

SEQ ID NO: 216156 - RNA, 32 nt, Homo Sapiens
gagaccaucccaggaaguugugggguugggga

SEQ ID NO: 216157 - RNA, 32 nt, Homo Sapiens
cuuugacaaaacaaacaaaaacauaaagugga

SEQ ID NO: 216158 - RNA, 32 nt, Homo Sapiens
gauaaugcagauauuucugugggaaauaaaau

SEQ ID NO: 216159 - RNA, 30 nt, Homo Sapiens
gucugugucugugagggauugguuccagga

SEQ ID NO: 216160 - RNA, 32 nt, Homo Sapiens
ccccggacacugacuccaacuaccuccguggc

SEQ ID NO: 216161 - RNA, 32 nt, Homo Sapiens
gcgaggcucaccguccccggcgugcaggaucc

SEQ ID NO: 216162 - RNA, 32 nt, Homo Sapiens
cagaguaauguaaaagacuaaauaucauuccu

SEQ ID NO: 216163 - RNA, 29 nt, Homo Sapiens
uuuggauaaaguucucauuuuucucauga

SEQ ID NO: 216164 - RNA, 32 nt, Homo Sapiens
uguauaucagaauugaaguuagaauuaaguga

SEQ ID NO: 216165 - RNA, 32 nt, Homo Sapiens
augcuuuccuacgcccugaggcacaugaaguc

SEQ ID NO: 216166 - RNA, 32 nt, Homo Sapiens
agaggauaaauuuuagaaaacacccaauaccu

SEQ ID NO: 216167 - RNA, 32 nt, Homo Sapiens
aaaaaacgggucugaaagauuccuccucuuca

SEQ ID NO: 216168 - RNA, 32 nt, Homo Sapiens
uucggcgcccgcagcccucagggggucggccc

SEQ ID NO: 216169 - RNA, 32 nt, Homo Sapiens
agcugccugaaccugcccuucagggagaaggg

SEQ ID NO: 216170 - RNA, 32 nt, Homo Sapiens
aauuaugauaaaacagaagugaagaguuucag

SEQ ID NO: 216171 - RNA, 32 nt, Homo Sapiens
aacacccucccucuuucugggguuugggucuc

SEQ ID NO: 216172 - RNA, 32 nt, Homo Sapiens
gggagcugagagaucaccgcauggagaucaca

SEQ ID NO: 216173 - RNA, 32 nt, Homo Sapiens
uacucucauuggccucuuggugcccaguaucu

SEQ ID NO: 216174 - RNA, 28 nt, Homo Sapiens
guagagguuacagggagccaagaucgcg

SEQ ID NO: 216175 - RNA, 32 nt, Homo Sapiens
augucauggguuuugaggaggccacagagcca

SEQ ID NO: 216176 - RNA, 32 nt, Homo Sapiens
agcagcuggaggaggagcagggaggcaaguca

SEQ ID NO: 216177 - RNA, 32 nt, Homo Sapiens
ucgcagcuggagccuugccuagcuggugauca

SEQ ID NO: 216178 - RNA, 32 nt, Homo Sapiens
aaaacacgcgggucauccccaagccccagaga

SEQ ID NO: 216179 - RNA, 32 nt, Homo Sapiens
uggugaggggcaggaaagcggcugggcucuug

SEQ ID NO: 216180 - RNA, 32 nt, Homo Sapiens
gacaccuuuacuaacucugguuuaauuucaug

SEQ ID NO: 216181 - RNA, 32 nt, Homo Sapiens
gggucccacaaggcccagggcagugccugcuc

SEQ ID NO: 216182 - RNA, 32 nt, Homo Sapiens
gcaagccccucgcagccagagacccgcaggcc

SEQ ID NO: 216183 - RNA, 32 nt, Homo Sapiens
uugcucccgaacuaggaaagagccuaggaggg

SEQ ID NO: 216184 - RNA, 32 nt, Homo Sapiens
gguaaaaugagcucagggggcagugaggugcc

SEQ ID NO: 216185 - RNA, 32 nt, Homo Sapiens
gaacaggcuuggcaaagaaguaaguuuaucca

SEQ ID NO: 216186 - RNA, 32 nt, Homo Sapiens
ggcuguguccggugcucacgccgcggcgaggu

SEQ ID NO: 216187 - RNA, 32 nt, Homo Sapiens
ccaguccaaauugucugucugcucuuauuuuu

SEQ ID NO: 216188 - RNA, 32 nt, Homo Sapiens
gcucacggccgcggucugcgucuucguucuug

SEQ ID NO: 216189 - RNA, 32 nt, Homo Sapiens
gagccucucagcagcccuccuuggguugaacu

SEQ ID NO: 216190 - RNA, 32 nt, Homo Sapiens
ccuuagaagggagagggaaggagggaggcagg

SEQ ID NO: 216191 - RNA, 32 nt, Homo Sapiens
agguccaccagggagggagacacacaagccuu

SEQ ID NO: 216192 - RNA, 32 nt, Homo Sapiens
ugacuuagcauggcacauuaggugggcauuag

SEQ ID NO: 216193 - RNA, 32 nt, Homo Sapiens
aggcggggcccagcgcucuccuggacgccccc

SEQ ID NO: 216194 - RNA, 32 nt, Homo Sapiens
cagccccggccgcuguggugacuccgccgcgc

SEQ ID NO: 216195 - RNA, 32 nt, Homo Sapiens
gggugacuaaaauggacaaaaagucuggaaac

SEQ ID NO: 216196 - RNA, 32 nt, Homo Sapiens
cacagccagcuacuccacccugccugccuggg

SEQ ID NO: 216197 - RNA, 32 nt, Homo Sapiens
agcacccucacagaaacacccagaauaauguu

SEQ ID NO: 216198 - RNA, 32 nt, Homo Sapiens
cucacaagccgcagcggcuggugcccgggcua

SEQ ID NO: 216199 - RNA, 32 nt, Homo Sapiens
guggggcggggcggggcagggcagggaaggga

SEQ ID NO: 216200 - RNA, 32 nt, Homo Sapiens
gcacgcucgcgcacccggaucccggcuccugc

SEQ ID NO: 216201 - RNA, 32 nt, Homo Sapiens
cccuccugccaggaagaccagggccugggaag

SEQ ID NO: 216202 - RNA, 32 nt, Homo Sapiens
uucuacuauuugagugcaaaguguucuucuuu

SEQ ID NO: 216203 - RNA, 32 nt, Homo Sapiens
uguacagguuccugccgacuagugugggggaa

SEQ ID NO: 216204 - RNA, 32 nt, Homo Sapiens
uggugcuuacaauuauuuuguuaggaaaucuu

SEQ ID NO: 216205 - RNA, 32 nt, Homo Sapiens
agccuugccgcccccugcccccggccuccgac

SEQ ID NO: 216206 - RNA, 32 nt, Homo Sapiens
uuucuuccagcuuuuccacacucucuuuaugc

SEQ ID NO: 216207 - RNA, 32 nt, Homo Sapiens
cucccauugcccuagauguacugagugaggcu

SEQ ID NO: 216208 - RNA, 32 nt, Homo Sapiens
ugcuggugggccgcgucgaagacauggaccag

SEQ ID NO: 216209 - RNA, 32 nt, Homo Sapiens
caaggcagccaccugcccuugcucucccuuag

SEQ ID NO: 216210 - RNA, 32 nt, Homo Sapiens
uggcguuucgaggcugagcggcaccgggguug

SEQ ID NO: 216211 - RNA, 32 nt, Homo Sapiens
cugagauuaugaacguuacagaaauggaacag

SEQ ID NO: 216212 - RNA, 32 nt, Homo Sapiens
acacugagggcgcggcgggcgcggggccuggg

SEQ ID NO: 216213 - RNA, 32 nt, Homo Sapiens
gcagccugcccggcucagcccggcccggccac

SEQ ID NO: 216214 - RNA, 32 nt, Homo Sapiens
uucaguguauguuuguuuuauacuguuugaua

SEQ ID NO: 216215 - RNA, 32 nt, Homo Sapiens
uuguuugucaguguuauuuugucaauguugaa

SEQ ID NO: 216216 - RNA, 32 nt, Homo Sapiens
aaagucagaagagacagaauauguaggaaaug

SEQ ID NO: 216217 - RNA, 32 nt, Homo Sapiens
gagaacuccagcauagagccuuauagcaacug

SEQ ID NO: 216218 - RNA, 32 nt, Homo Sapiens
cauugaggaauguuauauaauuauuaaacuca

SEQ ID NO: 216219 - RNA, 32 nt, Homo Sapiens
gggaguuccuuccagccccaggaccgcagcag

SEQ ID NO: 216220 - RNA, 32 nt, Homo Sapiens
aaugcagccucugcuggagugaaacaggaugc

SEQ ID NO: 216221 - RNA, 32 nt, Homo Sapiens
aaacgcucugggcgcgcacuccuggagacgcg

SEQ ID NO: 216222 - RNA, 32 nt, Homo Sapiens
aaggacucagagacauaagguauaaaacuauc

SEQ ID NO: 216223 - RNA, 32 nt, Homo Sapiens
uggccuucccccugcacgcucugcggggagaa

SEQ ID NO: 216224 - RNA, 32 nt, Homo Sapiens
uccuccgacgcccggggcugcggcgcuccggg

SEQ ID NO: 216225 - RNA, 30 nt, Homo Sapiens
acccauggcaggcggagggucccagagggg

SEQ ID NO: 216226 - RNA, 32 nt, Homo Sapiens
aaacagaaacaucaaauucugaaaguaaacaa

SEQ ID NO: 216227 - RNA, 32 nt, Homo Sapiens
guccagcgucccgcuggcucggcaguguggcu

SEQ ID NO: 216228 - RNA, 32 nt, Homo Sapiens
cccccgccggcgcgcgcacgacuugagaccug

SEQ ID NO: 216229 - RNA, 32 nt, Homo Sapiens
ccgcgccccgcuccccuucucucucuuacucg

SEQ ID NO: 216230 - RNA, 32 nt, Homo Sapiens
acuucccucccucuguccuugagguuguaaua

SEQ ID NO: 216231 - RNA, 32 nt, Homo Sapiens
aguuacaugagcauguuguggauaaauguaaa

SEQ ID NO: 216232 - RNA, 32 nt, Homo Sapiens
cagagcccauucucccuugccuccccuuuuga

SEQ ID NO: 216233 - RNA, 32 nt, Homo Sapiens
ccuuggcccaccgccuggccaagcccacgccu

SEQ ID NO: 216234 - RNA, 32 nt, Homo Sapiens
uucucucauuauaaaaggcauacaucguucuu

SEQ ID NO: 216235 - RNA, 32 nt, Homo Sapiens
gaggguuccuuccagcuucaccaagcccgugc

SEQ ID NO: 216236 - RNA, 32 nt, Homo Sapiens
gauuauaguaaucugcagauacauguugugug

SEQ ID NO: 216237 - RNA, 32 nt, Homo Sapiens
agaauugaccuuuugacuuaaagcagagggac

SEQ ID NO: 216238 - RNA, 32 nt, Homo Sapiens
aucauagcacaccacagccugaaaauccuggc

SEQ ID NO: 216239 - RNA, 32 nt, Homo Sapiens
ggagacucuuggaaaaaacugaauauauucag

SEQ ID NO: 216240 - RNA, 32 nt, Homo Sapiens
agugaugugggaaaccaagggagcuggaggca

SEQ ID NO: 216241 - RNA, 32 nt, Homo Sapiens
aaauaaugaugauuauggaaugaauuuuaaug

SEQ ID NO: 216242 - RNA, 32 nt, Homo Sapiens
cgauaauuucugaugcugaaucuguauaucuc

SEQ ID NO: 216243 - RNA, 29 nt, Homo Sapiens
cugaaugucccccgccugccgaguggcug

SEQ ID NO: 216244 - RNA, 32 nt, Homo Sapiens
gcugucacuucccagggcccaggccucagccc

SEQ ID NO: 216245 - RNA, 32 nt, Homo Sapiens
ggaagaaagcuacuuucuuuuacucuucaaau

SEQ ID NO: 216246 - RNA, 32 nt, Homo Sapiens
auggugcccccuccucugaauaggggagaugu

SEQ ID NO: 216247 - RNA, 32 nt, Homo Sapiens
ccugggccaagcccggagccgccgcucgccgg

SEQ ID NO: 216248 - RNA, 32 nt, Homo Sapiens
gaugaagcauauagaaucuuggaugugggcuu

SEQ ID NO: 216249 - RNA, 32 nt, Homo Sapiens
aggacauaauauuguucuuuuacauggcugug

SEQ ID NO: 216250 - RNA, 32 nt, Homo Sapiens
ucugccugcccagcugccccggggccacgagu

SEQ ID NO: 216251 - RNA, 32 nt, Homo Sapiens
aauauauggggggagugagcucucucagaccc

SEQ ID NO: 216252 - RNA, 27 nt, Homo Sapiens
caccuuuccuucuuucagccaacugcu

SEQ ID NO: 216253 - RNA, 32 nt, Homo Sapiens
cagcauuugggaugccagggaacagagaguga

SEQ ID NO: 216254 - RNA, 32 nt, Homo Sapiens
uauccgucgcaguguaaagggucugauccgca

SEQ ID NO: 216255 - RNA, 32 nt, Homo Sapiens
ccaauuugacuucuguaggggccauggcaccu

SEQ ID NO: 216256 - RNA, 32 nt, Homo Sapiens
ggcacggagggagagacagcaagugccuuucc

SEQ ID NO: 216257 - RNA, 32 nt, Homo Sapiens
aacaauaaagauacaugauugaaaccaaguug

SEQ ID NO: 216258 - RNA, 32 nt, Homo Sapiens
ugccaccagaacacagguguugugaaaacuac

SEQ ID NO: 216259 - RNA, 32 nt, Homo Sapiens
gggacagcgggcgaggggcagcugccggagcc

SEQ ID NO: 216260 - RNA, 32 nt, Homo Sapiens
uaaauaaccaaaacagagcauacuacauaaua

SEQ ID NO: 216261 - RNA, 32 nt, Homo Sapiens
cacuaaccuugauagugauacguuagaggguu

SEQ ID NO: 216262 - RNA, 32 nt, Homo Sapiens
gagccucucucuaucaacaccagcuucucucu

SEQ ID NO: 216263 - RNA, 32 nt, Homo Sapiens
gaugcuugggggucagaccacccccuagagga

SEQ ID NO: 216264 - RNA, 32 nt, Homo Sapiens
caugggaaauaaaggcaguucuacacagacug

SEQ ID NO: 216265 - RNA, 32 nt, Homo Sapiens
gcugccagucuucgcucuaacucccucgguag

SEQ ID NO: 216266 - RNA, 30 nt, Homo Sapiens
caugcugucugugugaggcucccucccucc

SEQ ID NO: 216267 - RNA, 30 nt, Homo Sapiens
gcggaggagggcggcaugcagcuccgcguu

SEQ ID NO: 216268 - RNA, 32 nt, Homo Sapiens
aagacaagcacuuauuuuuauuuucagaagac

SEQ ID NO: 216269 - RNA, 32 nt, Homo Sapiens
uauuaaaaugacuuuuugucaguuguuuugca

SEQ ID NO: 216270 - RNA, 32 nt, Homo Sapiens
gccuagggucugugaacgaggccugucucuuc

SEQ ID NO: 216271 - RNA, 32 nt, Homo Sapiens
ggcuccgggaccgcggggccgcuacggcaccg

SEQ ID NO: 216272 - RNA, 32 nt, Homo Sapiens
aacugagggcuuuaaaccuggaggcucuuccu

SEQ ID NO: 216273 - RNA, 32 nt, Homo Sapiens
uuauucuugugauuuuauuuuuacuuuaggaa

SEQ ID NO: 216274 - RNA, 30 nt, Homo Sapiens
augcuuaaauaaaaauuauguccaaaagcc

SEQ ID NO: 216275 - RNA, 32 nt, Homo Sapiens
cuuuuugcuuccucaguuuuuaucaggcuuuc

SEQ ID NO: 216276 - RNA, 32 nt, Homo Sapiens
gaggccacacacccgagagcugcgagaucugu

SEQ ID NO: 216277 - RNA, 32 nt, Homo Sapiens
cugcccucccuugguuccagucucucuucucu

SEQ ID NO: 216278 - RNA, 32 nt, Homo Sapiens
acugggaaauguuuuucuuccucuuuaucuaa

SEQ ID NO: 216279 - RNA, 32 nt, Homo Sapiens
acaagugaguagcucacgcagcaacguuuuua

SEQ ID NO: 216280 - RNA, 32 nt, Homo Sapiens
uaguauacaacacugcuguugccuuauuaguu

SEQ ID NO: 216281 - RNA, 32 nt, Homo Sapiens
cguggaaugcuguuugugaggugucuacaggg

SEQ ID NO: 216282 - RNA, 32 nt, Homo Sapiens
gcaaaggcuggguaucggcugugcucagcaaa

SEQ ID NO: 216283 - RNA, 32 nt, Homo Sapiens
cggaggccgggcgaggccggugaggacgcggc

SEQ ID NO: 216284 - RNA, 32 nt, Homo Sapiens
accagccuggccaacauagugaaacccugucc

SEQ ID NO: 216285 - RNA, 32 nt, Homo Sapiens
guagagaguggaaggaaugaaggggugggcga

SEQ ID NO: 216286 - RNA, 32 nt, Homo Sapiens
uaaacaagcuccuggaggcugaugugcuuuug

SEQ ID NO: 216287 - RNA, 32 nt, Homo Sapiens
cccuggccuggcaucccugcaaugcagagggg

SEQ ID NO: 216288 - RNA, 27 nt, Homo Sapiens
uaaaacuccuucuugaauuuucuuccc

SEQ ID NO: 216289 - RNA, 32 nt, Homo Sapiens
aaggaggcucaucuggccuccuauguggacaa

SEQ ID NO: 216290 - RNA, 32 nt, Homo Sapiens
ucugaagauaaaugucuggcuacagggaauau

SEQ ID NO: 216291 - RNA, 32 nt, Homo Sapiens
uaaaauauagcacuucucccuggagcaguagu

SEQ ID NO: 216292 - RNA, 32 nt, Homo Sapiens
agaugagcaaagacuuuacaaagaccuuaggc

SEQ ID NO: 216293 - RNA, 32 nt, Homo Sapiens
ucuaccauuaugugcccugguacaacaccaag

SEQ ID NO: 216294 - RNA, 32 nt, Homo Sapiens
guuaagaugguacauuuuauguuauguguauu

SEQ ID NO: 216295 - RNA, 32 nt, Homo Sapiens
ugguuuuuauauauuuuuuaauaagaugcacu

SEQ ID NO: 216296 - RNA, 32 nt, Homo Sapiens
ucucucucagaucccaggauuggcaugugaug

SEQ ID NO: 216297 - RNA, 32 nt, Homo Sapiens
aaccuagguucagagcaugggugcucugaggg

SEQ ID NO: 216298 - RNA, 32 nt, Homo Sapiens
ggaagcgccccggcuuagcggaggcucgcacg

SEQ ID NO: 216299 - RNA, 32 nt, Homo Sapiens
aucuuauauucuguuuuaaaguuucuucacag

SEQ ID NO: 216300 - RNA, 31 nt, Homo Sapiens
acaccaugagcuuccugccccgcuggcgagg

SEQ ID NO: 216301 - RNA, 32 nt, Homo Sapiens
uuucuucauguuggccaggcuggucucaaacu

SEQ ID NO: 216302 - RNA, 32 nt, Homo Sapiens
ucuacuaaaaauacaaaaauuauccagucgug

SEQ ID NO: 216303 - RNA, 32 nt, Homo Sapiens
ggucgcaggagacuaccaaaaccuggugcauc

SEQ ID NO: 216304 - RNA, 32 nt, Homo Sapiens
gcccaaaucuucauuugccuuuucaacuccuu

SEQ ID NO: 216305 - RNA, 32 nt, Homo Sapiens
guaauguaaaagacuaaauaucauuccuucug

SEQ ID NO: 216306 - RNA, 32 nt, Homo Sapiens
gacccgccucugcgcgcccccgggcacgaccc

SEQ ID NO: 216307 - RNA, 32 nt, Homo Sapiens
ggcgcggcucuggcccgggcgcacgcgcacac

SEQ ID NO: 216308 - RNA, 32 nt, Homo Sapiens
cccagugcuuggccuggcaguggcuucagaga

SEQ ID NO: 216309 - RNA, 32 nt, Homo Sapiens
aaucuccagaaagugguauuccauaaaccuac

SEQ ID NO: 216310 - RNA, 32 nt, Homo Sapiens
agaaauagcucuuuauugauguuuuaaaagca

SEQ ID NO: 216311 - RNA, 32 nt, Homo Sapiens
aggcauaugacuuuauacuuaacaucagaucu

SEQ ID NO: 216312 - RNA, 32 nt, Homo Sapiens
agaccccgccccauccccgacugccugaaccg

SEQ ID NO: 216313 - RNA, 32 nt, Homo Sapiens
gucugaauaaaccgucugugucauggcaaaaa

SEQ ID NO: 216314 - RNA, 32 nt, Homo Sapiens
uguuuuuucuaccuguugacgugucaagcacu

SEQ ID NO: 216315 - RNA, 32 nt, Homo Sapiens
acuggacgcccgggcccucccugucccaaagc

SEQ ID NO: 216316 - RNA, 32 nt, Homo Sapiens
ggaccacaggccucgacuuugcuggcacaggg

SEQ ID NO: 216317 - RNA, 32 nt, Homo Sapiens
agaaaauaaaaauuaaauuaaaaaaaaagaag

SEQ ID NO: 216318 - RNA, 32 nt, Homo Sapiens
caccuucaggugagacuauccauagacacaug

SEQ ID NO: 216319 - RNA, 32 nt, Homo Sapiens
aacauauauauuccauauauauguucaacucu

SEQ ID NO: 216320 - RNA, 32 nt, Homo Sapiens
caacaaccaaagguugggacucugucuuacau

SEQ ID NO: 216321 - RNA, 32 nt, Homo Sapiens
cuuauaaggcuagcuacuuaauaaucacucuu

SEQ ID NO: 216322 - RNA, 32 nt, Homo Sapiens
caugacuuugaaugauauauuuuuguacaucu

SEQ ID NO: 216323 - RNA, 32 nt, Homo Sapiens
aguugucaaucacaaacauuuauuuuuauucu

SEQ ID NO: 216324 - RNA, 32 nt, Homo Sapiens
aauccaaguccucacaccccugucaucccagg

SEQ ID NO: 216325 - RNA, 32 nt, Homo Sapiens
augauuuauuaaguggaaaauacaguuuacaa

SEQ ID NO: 216326 - RNA, 32 nt, Homo Sapiens
gagagacggggacguugggugcguaggagucu

SEQ ID NO: 216327 - RNA, 32 nt, Homo Sapiens
ugguaauuaaggcaucuuucugcuccugauca

SEQ ID NO: 216328 - RNA, 32 nt, Homo Sapiens
uuguuuugcauugucuguuggcaaauuuguga

SEQ ID NO: 216329 - RNA, 32 nt, Homo Sapiens
cccgcggcauccccggcuccccgcccuccucu

SEQ ID NO: 216330 - RNA, 32 nt, Homo Sapiens
ucccagcuccccacccuccuugccuuugggug

SEQ ID NO: 216331 - RNA, 32 nt, Homo Sapiens
agcaaagugaacugugagaucuccaggacaga

SEQ ID NO: 216332 - RNA, 32 nt, Homo Sapiens
guccuggccgcucugacagccgcggccucccc

SEQ ID NO: 216333 - RNA, 32 nt, Homo Sapiens
aaauuuuagcuuauauaugacgguauauuuac

SEQ ID NO: 216334 - RNA, 32 nt, Homo Sapiens
gccagcccgccuucgcugcccggaggcgccgc

SEQ ID NO: 216335 - RNA, 32 nt, Homo Sapiens
uggaucuggggcgcuggcuugcgagcugggcc

SEQ ID NO: 216336 - RNA, 32 nt, Homo Sapiens
uaugcaugugcucaugugaacacacacgugcg

SEQ ID NO: 216337 - RNA, 32 nt, Homo Sapiens
ugagaagccaagacugagccggcggccgcggc

SEQ ID NO: 216338 - RNA, 32 nt, Homo Sapiens
cgcgguggcagggccagguauaaggaaggaaa

SEQ ID NO: 216339 - RNA, 32 nt, Homo Sapiens
ugcuucuccuggcaaguaaaccccaaggagga

SEQ ID NO: 216340 - RNA, 32 nt, Homo Sapiens
ggcagauauuggaaaaauauuuugugaaaagc

SEQ ID NO: 216341 - RNA, 32 nt, Homo Sapiens
agggaaagaaaaggaaaauaguagcaagagcu

SEQ ID NO: 216342 - RNA, 32 nt, Homo Sapiens
uacaaccccauggauuaggcugaaacauauga

SEQ ID NO: 216343 - RNA, 32 nt, Homo Sapiens
ugucagcugcuggggaaacgcugcuguugacc

SEQ ID NO: 216344 - RNA, 32 nt, Homo Sapiens
uaaucuuaaaauuuauauagaaucacaaaaga

SEQ ID NO: 216345 - RNA, 32 nt, Homo Sapiens
uucacagcacacccacccccagaucacugcug

SEQ ID NO: 216346 - RNA, 32 nt, Homo Sapiens
uagacagcugcauuuuaauaguaagcuauuau

SEQ ID NO: 216347 - RNA, 32 nt, Homo Sapiens
gauuggcuucccuaugcccacccugguguccc

SEQ ID NO: 216348 - RNA, 32 nt, Homo Sapiens
gcuguaaagggagaauggcgcaugcgcauauu

SEQ ID NO: 216349 - RNA, 32 nt, Homo Sapiens
agcaucgcgcgccgcagccgcggccccgcagc

SEQ ID NO: 216350 - RNA, 32 nt, Homo Sapiens
uuaagggaaaggaaaagaacacuagcuaagga

SEQ ID NO: 216351 - RNA, 32 nt, Homo Sapiens
auuuacaggcuggagcagcagcugcauccugc

SEQ ID NO: 216352 - RNA, 32 nt, Homo Sapiens
acagggguucccuccccauggccacagcugag

SEQ ID NO: 216353 - RNA, 32 nt, Homo Sapiens
acgguaagacccggcguccgcgucuggaucuc

SEQ ID NO: 216354 - RNA, 32 nt, Homo Sapiens
augagacaaugcauguaaauccaugcucaugu

SEQ ID NO: 216355 - RNA, 32 nt, Homo Sapiens
caagacacagaaaggugugagcucuggaacua

SEQ ID NO: 216356 - RNA, 32 nt, Homo Sapiens
uaagaaguccucaacucuuacugcacauaaga

SEQ ID NO: 216357 - RNA, 31 nt, Homo Sapiens
guaaaaguggauuccucaggauaugugaaac

SEQ ID NO: 216358 - RNA, 32 nt, Homo Sapiens
acugugguuguaagaauaucugaguaaaauaa

SEQ ID NO: 216359 - RNA, 32 nt, Homo Sapiens
cgcgaaggcucucggcgcgccgcggcccgcag

SEQ ID NO: 216360 - RNA, 32 nt, Homo Sapiens
accuuacuguagugaccugauuuuaaauacca

SEQ ID NO: 216361 - RNA, 32 nt, Homo Sapiens
accucucucagggcucccccagccauuccuuc

SEQ ID NO: 216362 - RNA, 32 nt, Homo Sapiens
agaccagccugggcaacauagcaagacucugu

SEQ ID NO: 216363 - RNA, 32 nt, Homo Sapiens
uauuauagguaacucauagauauugauugaau

SEQ ID NO: 216364 - RNA, 32 nt, Homo Sapiens
agugagccagaccaugcuggucucaagcggca

SEQ ID NO: 216365 - RNA, 32 nt, Homo Sapiens
uguacggaauauauuuuuaaaaauuuuuguuu

SEQ ID NO: 216366 - RNA, 32 nt, Homo Sapiens
cauuuuaagaaaagggaccaaaaguuauuuua

SEQ ID NO: 216367 - RNA, 32 nt, Homo Sapiens
auacccccauccccgccaccgccgaccucccg

SEQ ID NO: 216368 - RNA, 32 nt, Homo Sapiens
cugggccaacuggugggugaucucugcugcau

SEQ ID NO: 216369 - RNA, 32 nt, Homo Sapiens
gcuuuaaagcugcuuuuaacaaugaagauuga

SEQ ID NO: 216370 - RNA, 32 nt, Homo Sapiens
uaguccccacguggcccacucccggcccaggc

SEQ ID NO: 216371 - RNA, 32 nt, Homo Sapiens
caucgagggugugguugauccuugaagcugcu

SEQ ID NO: 216372 - RNA, 32 nt, Homo Sapiens
cuagccaggguuacaagggcacaaucaugacc

SEQ ID NO: 216373 - RNA, 32 nt, Homo Sapiens
accuuucuaaaaugcagacaggaccaggagcc

SEQ ID NO: 216374 - RNA, 32 nt, Homo Sapiens
aggcuuugaauuaacuguuuuauuuaauuuuc

SEQ ID NO: 216375 - RNA, 32 nt, Homo Sapiens
uuauccacauccaaaaauuaggaaaagcagga

SEQ ID NO: 216376 - RNA, 32 nt, Homo Sapiens
aauguggugaugccgaagauguuuacuacaaa

SEQ ID NO: 216377 - RNA, 32 nt, Homo Sapiens
ggcagaauauuuauacaugaaaaaauaauuuu

SEQ ID NO: 216378 - RNA, 32 nt, Homo Sapiens
uccccuugagggccaucacacccagacccaac

SEQ ID NO: 216379 - RNA, 32 nt, Homo Sapiens
ccuacagguaaucaugaauauuuucaaggacu

SEQ ID NO: 216380 - RNA, 32 nt, Homo Sapiens
uucucugaaguccagguaccugcacaagcagg

SEQ ID NO: 216381 - RNA, 32 nt, Homo Sapiens
cccuugcagucugacuguguacacuugguuca

SEQ ID NO: 216382 - RNA, 32 nt, Homo Sapiens
gccauauuuuuagaaaguagucuacugauggg

SEQ ID NO: 216383 - RNA, 32 nt, Homo Sapiens
cuaggugaagcuaagcagucuucuuucaaaga

SEQ ID NO: 216384 - RNA, 32 nt, Homo Sapiens
caaaaaucuauuaugugguuguagugcauguc

SEQ ID NO: 216385 - RNA, 32 nt, Homo Sapiens
ggcuccuauaccuuguccuuccugcuugccua

SEQ ID NO: 216386 - RNA, 32 nt, Homo Sapiens
aacuaaggggguagaaguaguuuuaauucaac

SEQ ID NO: 216387 - RNA, 32 nt, Homo Sapiens
gggagcauugcaccuggcaugaggagugggug

SEQ ID NO: 216388 - RNA, 32 nt, Homo Sapiens
cggggcugaugcagaugcugcugcugaaggug

SEQ ID NO: 216389 - RNA, 32 nt, Homo Sapiens
cccgggcccugggccgccgccggccaggaaga

SEQ ID NO: 216390 - RNA, 32 nt, Homo Sapiens
gcgacucaccgcggaggcgcccggacgcguca

SEQ ID NO: 216391 - RNA, 27 nt, Homo Sapiens
cuuuuguuugauuucagcccauguucu

SEQ ID NO: 216392 - RNA, 32 nt, Homo Sapiens
gcugaucugguuccugcucucuaggcuguaga

SEQ ID NO: 216393 - RNA, 32 nt, Homo Sapiens
uucucccaaacuaaugugcagaugagcagcau

SEQ ID NO: 216394 - RNA, 32 nt, Homo Sapiens
ugccacaucccuauccuguggccuuuuggaaa

SEQ ID NO: 216395 - RNA, 32 nt, Homo Sapiens
guaaaaaagcuacuccaaaguaucuugcauaa

SEQ ID NO: 216396 - RNA, 32 nt, Homo Sapiens
agucagcauuuggauuacaacacacauuauug

SEQ ID NO: 216397 - RNA, 32 nt, Homo Sapiens
cacacucacagagcuuccuguuuuuguccucu

SEQ ID NO: 216398 - RNA, 32 nt, Homo Sapiens
gccguugccaccgaggaggcggcggccccgag

SEQ ID NO: 216399 - RNA, 32 nt, Homo Sapiens
aaagcacggcgccccccgcgcgggucucgucg

SEQ ID NO: 216400 - RNA, 32 nt, Homo Sapiens
ugcaagcccguggccuggccugcuacaugccc

SEQ ID NO: 216401 - RNA, 32 nt, Homo Sapiens
caggcagcugugaccgcagaagggcaggauga

SEQ ID NO: 216402 - RNA, 32 nt, Homo Sapiens
gagggggugcaaacaugacugggaccuaagag

SEQ ID NO: 216403 - RNA, 32 nt, Homo Sapiens
uaauugggcgugguggugggcgccuguaaucc

SEQ ID NO: 216404 - RNA, 32 nt, Homo Sapiens
agguuuucgacaccacagccaagauaguaauc

SEQ ID NO: 216405 - RNA, 32 nt, Homo Sapiens
ugccccacccugcccccuccacuuccugcccu

SEQ ID NO: 216406 - RNA, 32 nt, Homo Sapiens
gcguucagcacugacuuuugcugcugcuucug

SEQ ID NO: 216407 - RNA, 32 nt, Homo Sapiens
uuaaagacccccucaauauccuccucagauuu

SEQ ID NO: 216408 - RNA, 32 nt, Homo Sapiens
ccaauggccaacuggcugaguguucgaagaaa

SEQ ID NO: 216409 - RNA, 32 nt, Homo Sapiens
agccucugcugccucccaggcugcugggacug

SEQ ID NO: 216410 - RNA, 32 nt, Homo Sapiens
ucuccaucuauuuuguuuaagauuucuaugau

SEQ ID NO: 216411 - RNA, 32 nt, Homo Sapiens
uaauuuuguuauaauguacaauuuagaaguuu

SEQ ID NO: 216412 - RNA, 31 nt, Homo Sapiens
cucgacgcgggcccccaggauucucccggcg

SEQ ID NO: 216413 - RNA, 32 nt, Homo Sapiens
ccgcgugccuccagcccugccccgccgccugc

SEQ ID NO: 216414 - RNA, 32 nt, Homo Sapiens
ccucagccccuggccuggcugaguuuggcagg

SEQ ID NO: 216415 - RNA, 32 nt, Homo Sapiens
uggggcucaccuguccucuuaagggaagcauc

SEQ ID NO: 216416 - RNA, 32 nt, Homo Sapiens
acacaaauuaugcuaagaauuuuuuauuuuuu

SEQ ID NO: 216417 - RNA, 32 nt, Homo Sapiens
uuggaugggcacauaauuuaccaagagcauuc

SEQ ID NO: 216418 - RNA, 32 nt, Homo Sapiens
uuuuaaaauauuaagccugaagacuucuaaaa

SEQ ID NO: 216419 - RNA, 32 nt, Homo Sapiens
gauuugaacucauucauguugagaggguguca

SEQ ID NO: 216420 - RNA, 32 nt, Homo Sapiens
agcgcgauucggcuccaaacuccggcgcugca

SEQ ID NO: 216421 - RNA, 32 nt, Homo Sapiens
uguucuuucuuacuuguagaagauuccaagca

SEQ ID NO: 216422 - RNA, 32 nt, Homo Sapiens
uuauauuuuuaaagccaguuguugcuuaucuu

SEQ ID NO: 216423 - RNA, 32 nt, Homo Sapiens
gagauaagucauauacaccuaguuuguauucu

SEQ ID NO: 216424 - RNA, 32 nt, Homo Sapiens
aauaauaaaaggaaguguuuguaaucccagca

SEQ ID NO: 216425 - RNA, 32 nt, Homo Sapiens
ugccucaugagggcccggggcugcugguuggg

SEQ ID NO: 216426 - RNA, 32 nt, Homo Sapiens
caccaacuagagaggggucagggggugcggga

SEQ ID NO: 216427 - RNA, 32 nt, Homo Sapiens
cuaguuuuacuuugaacuuucacgcugaaaca

SEQ ID NO: 216428 - RNA, 32 nt, Homo Sapiens
cuagggguucugccccucccccucucuggggc

SEQ ID NO: 216429 - RNA, 32 nt, Homo Sapiens
ggaugccuugaaaaaaugucaugaaguagaaa

SEQ ID NO: 216430 - RNA, 32 nt, Homo Sapiens
aguggcucgaccucgcugcugccugucgcggg

SEQ ID NO: 216431 - RNA, 32 nt, Homo Sapiens
uggagcccugcccacaccuugauugcagacuu

SEQ ID NO: 216432 - RNA, 31 nt, Homo Sapiens
ccacagcggcccuucgcuccacgcagaaaac

SEQ ID NO: 216433 - RNA, 32 nt, Homo Sapiens
agugaguucaggagggcagugagagucacuca

SEQ ID NO: 216434 - RNA, 32 nt, Homo Sapiens
ggcuggggcuccaggcggcugcggcagcucug

SEQ ID NO: 216435 - RNA, 32 nt, Homo Sapiens
acagagcccauaaacuaugaccucugagguuu

SEQ ID NO: 216436 - RNA, 32 nt, Homo Sapiens
cccgcggcugcccagcagcaugagguggugcu

SEQ ID NO: 216437 - RNA, 32 nt, Homo Sapiens
cucugccucccucugccucacucucuugcuau

SEQ ID NO: 216438 - RNA, 32 nt, Homo Sapiens
ccuggagcugaggcugugggcggcugucccag

SEQ ID NO: 216439 - RNA, 32 nt, Homo Sapiens
gcagcaggauccccugaauccaggaguucgaa

SEQ ID NO: 216440 - RNA, 32 nt, Homo Sapiens
agggcccucacccaccucggagaggcgucccc

SEQ ID NO: 216441 - RNA, 32 nt, Homo Sapiens
ccggcugugacccuccucgccggcgccgcuug

SEQ ID NO: 216442 - RNA, 32 nt, Homo Sapiens
uuagguggugagagguggaugaggaaacaggc

SEQ ID NO: 216443 - RNA, 32 nt, Homo Sapiens
gcagggccugcgcccguggucucauagagccu

SEQ ID NO: 216444 - RNA, 32 nt, Homo Sapiens
ccaggccggagcugcgcugggucagcgagguc

SEQ ID NO: 216445 - RNA, 32 nt, Homo Sapiens
ucauuauugcccugaucacaaacaaaagccug

SEQ ID NO: 216446 - RNA, 27 nt, Homo Sapiens
auaagguccuucuugcccacucccucg

SEQ ID NO: 216447 - RNA, 32 nt, Homo Sapiens
gacccgaaagcagaaguauacugggaacccuu

SEQ ID NO: 216448 - RNA, 32 nt, Homo Sapiens
gcauauacugucaucaucuuggaaagaaaagg

SEQ ID NO: 216449 - RNA, 32 nt, Homo Sapiens
aacgccaucgcgggauggugcagacgcggcgg

SEQ ID NO: 216450 - RNA, 32 nt, Homo Sapiens
gggaucuagacgaggaccuauuaaacuuggaa

SEQ ID NO: 216451 - RNA, 32 nt, Homo Sapiens
gcgagcgccgacgcacggguuccugcucggcc

SEQ ID NO: 216452 - RNA, 30 nt, Homo Sapiens
cuucuuuugucaggugcagaagcacaaaaa

SEQ ID NO: 216453 - RNA, 32 nt, Homo Sapiens
ccuagcugccagcaaugcuguccucacagagg

SEQ ID NO: 216454 - RNA, 32 nt, Homo Sapiens
auauuauuuuauuugcaaaacccagaagcuaa

SEQ ID NO: 216455 - RNA, 27 nt, Homo Sapiens
agggugucuuccuucagcccaugccca

SEQ ID NO: 216456 - RNA, 32 nt, Homo Sapiens
gggagccugccagcugcgaggaccucuguggu

SEQ ID NO: 216457 - RNA, 32 nt, Homo Sapiens
gaccucaaaagguuaaauuaaauacuagcaac

SEQ ID NO: 216458 - RNA, 32 nt, Homo Sapiens
cucacggcaaccuccgccucccggguucaaau

SEQ ID NO: 216459 - RNA, 32 nt, Homo Sapiens
gacuaauauaaaaugguuuauaagacugaugu

SEQ ID NO: 216460 - RNA, 32 nt, Homo Sapiens
gaccuucaggccccgcaggugcucuccugggg

SEQ ID NO: 216461 - RNA, 32 nt, Homo Sapiens
cgccgucccgggaccccugugcucugcgcgaa

SEQ ID NO: 216462 - RNA, 32 nt, Homo Sapiens
uuacccuucaauguuaaaucuacaaacuuuua

SEQ ID NO: 216463 - RNA, 31 nt, Homo Sapiens
guuuuacauagagaaaaacgaucuuuuaagg

SEQ ID NO: 216464 - RNA, 32 nt, Homo Sapiens
ugccucacucccuaccugagccagccgagggg

SEQ ID NO: 216465 - RNA, 32 nt, Homo Sapiens
uaucugucagcaugaguauugguuuccuagaa

SEQ ID NO: 216466 - RNA, 32 nt, Homo Sapiens
uaacuugcauuacauguuguaagcaugguccg

SEQ ID NO: 216467 - RNA, 32 nt, Homo Sapiens
auguuacaugaaacuuaaaaacaaacaaauau

SEQ ID NO: 216468 - RNA, 32 nt, Homo Sapiens
guggaggccccggagcggcauccucagcgccc

SEQ ID NO: 216469 - RNA, 32 nt, Homo Sapiens
aucuuauaauuucaguucaucuaaauugugug

SEQ ID NO: 216470 - RNA, 32 nt, Homo Sapiens
gagaagaugauuagaccccagaugaccugcag

SEQ ID NO: 216471 - RNA, 30 nt, Homo Sapiens
auuuucccuguaauggggguagagcuggua

SEQ ID NO: 216472 - RNA, 32 nt, Homo Sapiens
cguggugggaggggcggcaggccgcggguccu

SEQ ID NO: 216473 - RNA, 32 nt, Homo Sapiens
cucuuuacccucacuaacaaaacugggcaaag

SEQ ID NO: 216474 - RNA, 32 nt, Homo Sapiens
cuguuagccaaggcaauccagucaauucacuu

SEQ ID NO: 216475 - RNA, 32 nt, Homo Sapiens
ccagagugggguccuguuggcuuuugcagacc

SEQ ID NO: 216476 - RNA, 32 nt, Homo Sapiens
gcagcccauccacaaccugcucaugggugaca

SEQ ID NO: 216477 - RNA, 32 nt, Homo Sapiens
aagcgagcaaaguggagccgacucgaacucca

SEQ ID NO: 216478 - RNA, 32 nt, Homo Sapiens
caugccaggacuagcucuccuuucucaucucc

SEQ ID NO: 216479 - RNA, 32 nt, Homo Sapiens
ugauggacuccacccuuuacuaccuugaacuu

SEQ ID NO: 216480 - RNA, 32 nt, Homo Sapiens
gucuggauccugacaggugugugauaauuacu

SEQ ID NO: 216481 - RNA, 32 nt, Homo Sapiens
uuuauuucuuugaccucccagagggcugaacu

SEQ ID NO: 216482 - RNA, 32 nt, Homo Sapiens
uuuauagggcaaugaaaaucuacauaccugag

SEQ ID NO: 216483 - RNA, 32 nt, Homo Sapiens
ccucuagcggcuuugcucgaggcccaccuucu

SEQ ID NO: 216484 - RNA, 32 nt, Homo Sapiens
uuuaccaaauauauuucuccucacugcauaag

SEQ ID NO: 216485 - RNA, 32 nt, Homo Sapiens
ugccuccuccugccugucugcacuauuccuuu

SEQ ID NO: 216486 - RNA, 32 nt, Homo Sapiens
aguuaguuagacauucugugugcugugugguc

SEQ ID NO: 216487 - RNA, 32 nt, Homo Sapiens
cuucauaguuuauuuucauuacaaguaauucu

SEQ ID NO: 216488 - RNA, 32 nt, Homo Sapiens
cacagaggagcauauacugaaaagaaggcagu

SEQ ID NO: 216489 - RNA, 32 nt, Homo Sapiens
cuuuccuccagaucgggaaggagacacauauc

SEQ ID NO: 216490 - RNA, 32 nt, Homo Sapiens
accuacauugcaaaaccugcucugccgggaac

SEQ ID NO: 216491 - RNA, 32 nt, Homo Sapiens
aaucucaaaaauuuaguuaccaaaguagaaaa

SEQ ID NO: 216492 - RNA, 32 nt, Homo Sapiens
gcugugaagaacuaagguggggagcaguacua

SEQ ID NO: 216493 - RNA, 32 nt, Homo Sapiens
gcucaaguggcugaacaaauggccaguggaaa

SEQ ID NO: 216494 - RNA, 32 nt, Homo Sapiens
uauaaagaaaauaauuacuuagaaacuccauu

SEQ ID NO: 216495 - RNA, 32 nt, Homo Sapiens
gcuguaaaauuuauacuaaaauguggacuauu

SEQ ID NO: 216496 - RNA, 32 nt, Homo Sapiens
uacuuuugggucgggcccuccgggaagauggc

SEQ ID NO: 216497 - RNA, 32 nt, Homo Sapiens
uguggucugaguuuuuagagaaggaaaaaugc

SEQ ID NO: 216498 - RNA, 32 nt, Homo Sapiens
gcccugaacucaccgccuccccugccugggca

SEQ ID NO: 216499 - RNA, 32 nt, Homo Sapiens
gccccaucucucggggacugaggggguggaga

SEQ ID NO: 216500 - RNA, 32 nt, Homo Sapiens
agguggggcgcgggccggcgcgagcugaccga

SEQ ID NO: 216501 - RNA, 29 nt, Homo Sapiens
gaacugaaaugugucagaggcaacuaagc

SEQ ID NO: 216502 - RNA, 32 nt, Homo Sapiens
acaagaaggguagcaucagagaagugggcauu

SEQ ID NO: 216503 - RNA, 32 nt, Homo Sapiens
aggcaggugugggacaggcacuggccucagac

SEQ ID NO: 216504 - RNA, 32 nt, Homo Sapiens
ccaaaucaauacuguggcacuuucucaguuau

SEQ ID NO: 216505 - RNA, 32 nt, Homo Sapiens
uguaagccuuaaaggaguuaauacuaaucuug

SEQ ID NO: 216506 - RNA, 32 nt, Homo Sapiens
gucuccaguaauccauucuuugaaagaauacc

SEQ ID NO: 216507 - RNA, 32 nt, Homo Sapiens
gcuuuagugucuacaugaguaucuugugaagu

SEQ ID NO: 216508 - RNA, 32 nt, Homo Sapiens
gacauuuucaguuguuacaaucaggggugcua

SEQ ID NO: 216509 - RNA, 31 nt, Homo Sapiens
gccauuccuagcuuuggaaaguuucuaucug

SEQ ID NO: 216510 - RNA, 32 nt, Homo Sapiens
aaacaagaaacaaaacaaaaaaaauuaagggg

SEQ ID NO: 216511 - RNA, 32 nt, Homo Sapiens
caaccuuagggcacgugggcauuauuaaaggu

SEQ ID NO: 216512 - RNA, 32 nt, Homo Sapiens
agaaucauuuaaaaguaaagugacuucuaaga

SEQ ID NO: 216513 - RNA, 32 nt, Homo Sapiens
guuuuacaagaaaaaacauuaaaaacuggaaa

SEQ ID NO: 216514 - RNA, 32 nt, Homo Sapiens
ccgaauuuuguuagaggcuguaucauaggaaa

SEQ ID NO: 216515 - RNA, 32 nt, Homo Sapiens
cuugaccaaaagacaguacaaaaacacuggca

SEQ ID NO: 216516 - RNA, 32 nt, Homo Sapiens
ugucccuucagagaguauauuuuucuagcuug

SEQ ID NO: 216517 - RNA, 32 nt, Homo Sapiens
ccgugguggcagcuggggcuguggaugggagg

SEQ ID NO: 216518 - RNA, 32 nt, Homo Sapiens
agcaaaaggcgugguagcugcggcgguggaau

SEQ ID NO: 216519 - RNA, 32 nt, Homo Sapiens
uggaggggagugggggacugggaccagccagg

SEQ ID NO: 216520 - RNA, 32 nt, Homo Sapiens
gccuguguugaauaccaguccuguucuaggac

SEQ ID NO: 216521 - RNA, 32 nt, Homo Sapiens
ugcucauuuggaaaaauaaaccagugaacaau

SEQ ID NO: 216522 - RNA, 32 nt, Homo Sapiens
uuucagucuuucuaccuauuaagugagguugc

SEQ ID NO: 216523 - RNA, 32 nt, Homo Sapiens
gugugcacccacccacccaccacacuggacuu

SEQ ID NO: 216524 - RNA, 32 nt, Homo Sapiens
aggggcaaucugguuugcauuuaagauccuuc

SEQ ID NO: 216525 - RNA, 32 nt, Homo Sapiens
gggaggagucaguaccccugguaaaccaagcc

SEQ ID NO: 216526 - RNA, 32 nt, Homo Sapiens
gcccugccugacgccccggagccuccugccug

SEQ ID NO: 216527 - RNA, 32 nt, Homo Sapiens
ucagguaaaaucuguguguuccaauuacaguu

SEQ ID NO: 216528 - RNA, 32 nt, Homo Sapiens
guuccuuguaaauccaaauguuucuauauugu

SEQ ID NO: 216529 - RNA, 32 nt, Homo Sapiens
uuguccagaaaagaagucuuaagauauuucaa

SEQ ID NO: 216530 - RNA, 32 nt, Homo Sapiens
gugacacuugagugaacugaaugugcaaaguc

SEQ ID NO: 216531 - RNA, 32 nt, Homo Sapiens
uuggucuucaaucccagaacaggaccugugag

SEQ ID NO: 216532 - RNA, 29 nt, Homo Sapiens
caacguuggacacugaggacgcccgacag

SEQ ID NO: 216533 - RNA, 32 nt, Homo Sapiens
uguccccaagaacaggagagccauggccggcc

SEQ ID NO: 216534 - RNA, 32 nt, Homo Sapiens
ugugccgcaugucgaggccgauugugugccag

SEQ ID NO: 216535 - RNA, 32 nt, Homo Sapiens
ccaucucuguuucucuccuccgcuuaaccaag

SEQ ID NO: 216536 - RNA, 32 nt, Homo Sapiens
acacaacgaaaagaaaucaugcagaauccaaa

SEQ ID NO: 216537 - RNA, 32 nt, Homo Sapiens
agggguuuggagggcacacgaugugugcuccc

SEQ ID NO: 216538 - RNA, 32 nt, Homo Sapiens
uagcugggauuacaggcaugcgccaccacgcc

SEQ ID NO: 216539 - RNA, 32 nt, Homo Sapiens
uagcugggauuacgggcaugcgccaccacacc

SEQ ID NO: 216540 - RNA, 32 nt, Homo Sapiens
ugaugcccacccaagaaguucaggagcugccg

SEQ ID NO: 216541 - RNA, 32 nt, Homo Sapiens
gauuucuucuugauuucacuucugauggaugc

SEQ ID NO: 216542 - RNA, 32 nt, Homo Sapiens
acuccuaguacuggagugacucuauaugagag

SEQ ID NO: 216543 - RNA, 32 nt, Homo Sapiens
accggagccgccugggucuguucuggaaccgu

SEQ ID NO: 216544 - RNA, 32 nt, Homo Sapiens
acagaaagccccacaggguuugaacuguaauu

SEQ ID NO: 216545 - RNA, 32 nt, Homo Sapiens
cccugcucaggauuccuguugaggagaugccu

SEQ ID NO: 216546 - RNA, 32 nt, Homo Sapiens
aagcaggggaagucuugugucuggagaauagu

SEQ ID NO: 216547 - RNA, 32 nt, Homo Sapiens
ccagacacugaaagagcagaauggcuaaauaa

SEQ ID NO: 216548 - RNA, 32 nt, Homo Sapiens
aauaaccaguguuucuggaugagauuucaaau

SEQ ID NO: 216549 - RNA, 32 nt, Homo Sapiens
ugcagggagguacaaaaggggcugggaagaag

SEQ ID NO: 216550 - RNA, 32 nt, Homo Sapiens
aaggacaagaagaggagugcggagcccuucag

SEQ ID NO: 216551 - RNA, 32 nt, Homo Sapiens
gcccaagccuggaagccuuggcaggugggaaa

SEQ ID NO: 216552 - RNA, 32 nt, Homo Sapiens
cucgggauucuaggaaccucucagucagguca

SEQ ID NO: 216553 - RNA, 32 nt, Homo Sapiens
ccacccugccagccagcagcuggcccuccacc

SEQ ID NO: 216554 - RNA, 30 nt, Homo Sapiens
cacgggcgcgcgcaguguugacgcgcuucu

SEQ ID NO: 216555 - RNA, 32 nt, Homo Sapiens
gggaaagggucucuggccuugcaaggauuugg

SEQ ID NO: 216556 - RNA, 32 nt, Homo Sapiens
ccccuaccaccucgguaaugagcuccauuaca

SEQ ID NO: 216557 - RNA, 32 nt, Homo Sapiens
augcugaacccuuucaucuacagccugagaaa

SEQ ID NO: 216558 - RNA, 32 nt, Homo Sapiens
guuuccaauaauuuuuuuuucuuuuuuuccuu

SEQ ID NO: 216559 - RNA, 32 nt, Homo Sapiens
ggguccaguguauaaagugacauggaauccau

SEQ ID NO: 216560 - RNA, 32 nt, Homo Sapiens
aauucugcagguuuuaugggcuugucacaacg

SEQ ID NO: 216561 - RNA, 32 nt, Homo Sapiens
cuuccugaccuccaggcuuccacccagcugug

SEQ ID NO: 216562 - RNA, 32 nt, Homo Sapiens
ugucucaggucaagcaguggcagacgcaaggc

SEQ ID NO: 216563 - RNA, 32 nt, Homo Sapiens
gcccaagggggagaggaaucgcgccggccccu

SEQ ID NO: 216564 - RNA, 32 nt, Homo Sapiens
aauuccuguuuuagcugagacuugugggaugg

SEQ ID NO: 216565 - RNA, 32 nt, Homo Sapiens
ggccccacacccgcucuuccucuucuuugccg

SEQ ID NO: 216566 - RNA, 30 nt, Homo Sapiens
cauaaaagggcagccgcgccggcgccccac

SEQ ID NO: 216567 - RNA, 32 nt, Homo Sapiens
guugcugccucccaaacggcaguuucuggggu

SEQ ID NO: 216568 - RNA, 32 nt, Homo Sapiens
cuggcaccgggcggggccggcggcagcgacca

SEQ ID NO: 216569 - RNA, 32 nt, Homo Sapiens
gcccaguccuccccggggacccugagccugga

SEQ ID NO: 216570 - RNA, 32 nt, Homo Sapiens
uggcuaggcagacaguggggacugugcauauu

SEQ ID NO: 216571 - RNA, 32 nt, Homo Sapiens
ggaccgagagacgcggcuguucggcgguccuc

SEQ ID NO: 216572 - RNA, 31 nt, Homo Sapiens
cugccccaacgccugcccugaguuaguuccu

SEQ ID NO: 216573 - RNA, 32 nt, Homo Sapiens
uuuuaaguaagaagggaacuguaaaagagaaa

SEQ ID NO: 216574 - RNA, 29 nt, Homo Sapiens
aacacuuuaugaggcugaaagcugugucg

SEQ ID NO: 216575 - RNA, 32 nt, Homo Sapiens
aagggacaggaaaccucccaggcaguuauuuu

SEQ ID NO: 216576 - RNA, 32 nt, Homo Sapiens
acagagccuauuacaagucucauaaauuucag

SEQ ID NO: 216577 - RNA, 32 nt, Homo Sapiens
ugauuccugcgcaguggagaaguaaaagaagc

SEQ ID NO: 216578 - RNA, 32 nt, Homo Sapiens
cacuugguuuggggguucaggcucuaggaucg

SEQ ID NO: 216579 - RNA, 32 nt, Homo Sapiens
cauuuagauaauguaacaggauuuuagagagc

SEQ ID NO: 216580 - RNA, 32 nt, Homo Sapiens
aagacaaaacaaaacaggacaauguuacaaga

SEQ ID NO: 216581 - RNA, 32 nt, Homo Sapiens
uccaggauccagaaugauuaaucucaaagaua

SEQ ID NO: 216582 - RNA, 32 nt, Homo Sapiens
gaaagcauccucaaaacugugggucagugagu

SEQ ID NO: 216583 - RNA, 32 nt, Homo Sapiens
gggcccgugacugggcgcgaggcggccggcgg

SEQ ID NO: 216584 - RNA, 32 nt, Homo Sapiens
caguauuuucuuuuccuccuagugcuaucauu

SEQ ID NO: 216585 - RNA, 32 nt, Homo Sapiens
ggucugcccuuucauugggguguauacauauc

SEQ ID NO: 216586 - RNA, 30 nt, Homo Sapiens
uguugauggcuaaccacccaugcuugucuu

SEQ ID NO: 216587 - RNA, 32 nt, Homo Sapiens
gaccuguucccaccccaguucaucaucaucuc

SEQ ID NO: 216588 - RNA, 32 nt, Homo Sapiens
ccccgccugcggucugaggcaccggcugaacc

SEQ ID NO: 216589 - RNA, 32 nt, Homo Sapiens
agacacacaggaccccuggcccugcccuucuc

SEQ ID NO: 216590 - RNA, 32 nt, Homo Sapiens
acugcaaggcuuugcaaacuuuccuuccaaag

SEQ ID NO: 216591 - RNA, 32 nt, Homo Sapiens
ggcagagauggggugguggcugagagagaugc

SEQ ID NO: 216592 - RNA, 32 nt, Homo Sapiens
cccccguccgcgcgcgucccccggugaccucg

SEQ ID NO: 216593 - RNA, 32 nt, Homo Sapiens
uggacauagucuuuuuggcaacuaugauagau

SEQ ID NO: 216594 - RNA, 32 nt, Homo Sapiens
agcaggacacagucuagagucuaguaaacugg

SEQ ID NO: 216595 - RNA, 31 nt, Homo Sapiens
gggcagcaucacugccuucccgggggcuuca

SEQ ID NO: 216596 - RNA, 32 nt, Homo Sapiens
cuucucccaagcccacgucaggccuggccuca

SEQ ID NO: 216597 - RNA, 32 nt, Homo Sapiens
cggaagcggcgguagcugcagcuggcgaaguu

SEQ ID NO: 216598 - RNA, 32 nt, Homo Sapiens
caaagauauuccaucaugcauuagagucaguu

SEQ ID NO: 216599 - RNA, 32 nt, Homo Sapiens
aggaagggauaguggaaaacuguucuuauauc

SEQ ID NO: 216600 - RNA, 32 nt, Homo Sapiens
ugggggccguugcagguguacugggcugucag

SEQ ID NO: 216601 - RNA, 32 nt, Homo Sapiens
gccagcagccuuaaacaguauuucauuaaaac

SEQ ID NO: 216602 - RNA, 32 nt, Homo Sapiens
cuaaacuagcaaauugcucaugcugaaauuuc

SEQ ID NO: 216603 - RNA, 32 nt, Homo Sapiens
ggggggacgaaccgacagacagacggcugggc

SEQ ID NO: 216604 - RNA, 32 nt, Homo Sapiens
agcggcagccuggauccaggggcccccggaag

SEQ ID NO: 216605 - RNA, 32 nt, Homo Sapiens
uugguccccgucuguguuccgaggcuugguga

SEQ ID NO: 216606 - RNA, 32 nt, Homo Sapiens
aucccuuuaagagaaccaaugauucuuuagga

SEQ ID NO: 216607 - RNA, 32 nt, Homo Sapiens
aauuauaaugaaguuuugaaauacuaaguuaa

SEQ ID NO: 216608 - RNA, 32 nt, Homo Sapiens
ggaaagccugcacuucugcacauuuugaaaag

SEQ ID NO: 216609 - RNA, 32 nt, Homo Sapiens
uggcuuuucuucauugaaaucaagucuguaaa

SEQ ID NO: 216610 - RNA, 32 nt, Homo Sapiens
cagccuguucuucuucagucaguccggccuca

SEQ ID NO: 216611 - RNA, 32 nt, Homo Sapiens
ggcacgaggggcgcggaggaugaggccgcugc

SEQ ID NO: 216612 - RNA, 32 nt, Homo Sapiens
ggcggggggcgcacagagccagaggggcuugc

SEQ ID NO: 216613 - RNA, 32 nt, Homo Sapiens
cccaugugcccugagagcugccucucaauccc

SEQ ID NO: 216614 - RNA, 27 nt, Homo Sapiens
ucauguuuucccuuuguuaccuaccga

SEQ ID NO: 216615 - RNA, 32 nt, Homo Sapiens
ucuugccacugccauguaagaagugccuuuca

SEQ ID NO: 216616 - RNA, 32 nt, Homo Sapiens
aagacagggucucauucuaucggccaggcugg

SEQ ID NO: 216617 - RNA, 32 nt, Homo Sapiens
guggacuucuucugccccuccuccuuuucugu

SEQ ID NO: 216618 - RNA, 32 nt, Homo Sapiens
acaacuacggucaaaaguuugagccauucucu

SEQ ID NO: 216619 - RNA, 32 nt, Homo Sapiens
guuugagccaagguugccaccugucucuuaac

SEQ ID NO: 216620 - RNA, 32 nt, Homo Sapiens
cugacaaagaggaggagcuggaggaagcaugc

SEQ ID NO: 216621 - RNA, 31 nt, Homo Sapiens
ugagccccauacagggcaucgagccaccaag

SEQ ID NO: 216622 - RNA, 32 nt, Homo Sapiens
cuucagcucccuccucuuccuccaugggcggu

SEQ ID NO: 216623 - RNA, 30 nt, Homo Sapiens
cgcggcugcaagccagcggguccugugagg

SEQ ID NO: 216624 - RNA, 32 nt, Homo Sapiens
ggcaguuguaaaauauugguauuccuaacaau

SEQ ID NO: 216625 - RNA, 32 nt, Homo Sapiens
ucacggcaccucaugggaagguuaagacugga

SEQ ID NO: 216626 - RNA, 32 nt, Homo Sapiens
aauuuaaauuaauuuuuaauucuuuuggcaag

SEQ ID NO: 216627 - RNA, 32 nt, Homo Sapiens
aaauauugcuacucauuaacaaugcaccuggu

SEQ ID NO: 216628 - RNA, 32 nt, Homo Sapiens
gucugaucgaucaugcagauacaauguuggua

SEQ ID NO: 216629 - RNA, 32 nt, Homo Sapiens
cugcccuccccucccgaucccggagccaugug

SEQ ID NO: 216630 - RNA, 32 nt, Homo Sapiens
aggccuccuggugggggccccuggacacaggg

SEQ ID NO: 216631 - RNA, 32 nt, Homo Sapiens
agacagaaaugaauauaacaaauugaucugcu

SEQ ID NO: 216632 - RNA, 32 nt, Homo Sapiens
ggcagcagcuuuuguguccggucaccaguucu

SEQ ID NO: 216633 - RNA, 28 nt, Homo Sapiens
ugucaggaggauuaacaugaccacagaa

SEQ ID NO: 216634 - RNA, 32 nt, Homo Sapiens
cgcaggaggcuguggcagcuguggcauccacu

SEQ ID NO: 216635 - RNA, 32 nt, Homo Sapiens
uguuacugaucaugaauguuaguuagaaaaug

SEQ ID NO: 216636 - RNA, 32 nt, Homo Sapiens
cgcucuugacuugaccagaaauccagcaccuc

SEQ ID NO: 216637 - RNA, 32 nt, Homo Sapiens
aauaaugaauuuacucaaaauaaaacauaggu

SEQ ID NO: 216638 - RNA, 32 nt, Homo Sapiens
acacaguuuuuccgacuuuucaaaaauuugau

SEQ ID NO: 216639 - RNA, 32 nt, Homo Sapiens
ucugcucuuuuccuccacggacuccaaaggcg

SEQ ID NO: 216640 - RNA, 32 nt, Homo Sapiens
aaagcagcacaagggaaaaaagagagaaauau

SEQ ID NO: 216641 - RNA, 32 nt, Homo Sapiens
agcuggaccagcugccugagcagccgcucuuc

SEQ ID NO: 216642 - RNA, 32 nt, Homo Sapiens
guccuacuagauacacugcaaacuacaguggg

SEQ ID NO: 216643 - RNA, 32 nt, Homo Sapiens
guuaaucccaauaaacacccauccucuuccau

SEQ ID NO: 216644 - RNA, 32 nt, Homo Sapiens
accccuuuccccagccucuccuccuugggcag

SEQ ID NO: 216645 - RNA, 32 nt, Homo Sapiens
cuagcccagacacccccauuucuacuuauaau

SEQ ID NO: 216646 - RNA, 32 nt, Homo Sapiens
agguuugucagacaauaggauagauguuagga

SEQ ID NO: 216647 - RNA, 32 nt, Homo Sapiens
gucacucuccgcugggacccagggcgucagca

SEQ ID NO: 216648 - RNA, 32 nt, Homo Sapiens
cugcacccagcaugcuccgacacagcagggaa

SEQ ID NO: 216649 - RNA, 32 nt, Homo Sapiens
uucagucaagacaaugcuuauucagauacuca

SEQ ID NO: 216650 - RNA, 32 nt, Homo Sapiens
cacccccggcacacucugcagagaacccuugc

SEQ ID NO: 216651 - RNA, 32 nt, Homo Sapiens
uauauguuauuuaacgcuaguaguugguuaca

SEQ ID NO: 216652 - RNA, 32 nt, Homo Sapiens
guuuaugagcauaaaaaguuauccauugggga

SEQ ID NO: 216653 - RNA, 32 nt, Homo Sapiens
augacuaacaaggauagcuggccaugcccagg

SEQ ID NO: 216654 - RNA, 32 nt, Homo Sapiens
aagccaccgaauccaaucaugguaaaaaugug

SEQ ID NO: 216655 - RNA, 32 nt, Homo Sapiens
uauuuggugauguuggacaguggaaaaguauc

SEQ ID NO: 216656 - RNA, 32 nt, Homo Sapiens
aacaaaucuaguucuauacaguuucuugggau

SEQ ID NO: 216657 - RNA, 32 nt, Homo Sapiens
ggcgggcgcggaguugggagcggcgcucgagc

SEQ ID NO: 216658 - RNA, 32 nt, Homo Sapiens
aagggcagccccugccgacuccagguccuaca

SEQ ID NO: 216659 - RNA, 32 nt, Homo Sapiens
gacccugucggccccggcacccccccgccgca

SEQ ID NO: 216660 - RNA, 32 nt, Homo Sapiens
uuauucugaauuugaaacaacauauuuuuaua

SEQ ID NO: 216661 - RNA, 32 nt, Homo Sapiens
auaaauuacuuugauuccauuuuaaguggaga

SEQ ID NO: 216662 - RNA, 32 nt, Homo Sapiens
cuuugucaugcaugcauauuaauugaggaugg

SEQ ID NO: 216663 - RNA, 32 nt, Homo Sapiens
ggcuccucgcgaucuuguuccuuuccccuccg

SEQ ID NO: 216664 - RNA, 32 nt, Homo Sapiens
gcguggacugguugguuuugccauuuuguugu

SEQ ID NO: 216665 - RNA, 32 nt, Homo Sapiens
gaagagucagauuuauagcauuuucaaccaaa

SEQ ID NO: 216666 - RNA, 32 nt, Homo Sapiens
uccugccugagccucccaaguaccugggauua

SEQ ID NO: 216667 - RNA, 32 nt, Homo Sapiens
gucucuacaaaacauacaaaaauuagcugagc

SEQ ID NO: 216668 - RNA, 32 nt, Homo Sapiens
ugccauuauuuuuguauucuuuuucuuagugu

SEQ ID NO: 216669 - RNA, 32 nt, Homo Sapiens
uuaaaucacaugcauguuaggaaacuccaauu

SEQ ID NO: 216670 - RNA, 32 nt, Homo Sapiens
acccaacagacaagauggaagaaggaccuugc

SEQ ID NO: 216671 - RNA, 32 nt, Homo Sapiens
auugaugcauuacauuuaagaauucucuuuaa

SEQ ID NO: 216672 - RNA, 32 nt, Homo Sapiens
cgggacuggaagugaggccuguguugacccuu

SEQ ID NO: 216673 - RNA, 32 nt, Homo Sapiens
aaagauaauuaaaaagaaaaccacagaucaug

SEQ ID NO: 216674 - RNA, 32 nt, Homo Sapiens
cauauggugaccacgccugugcucaguuuggc

SEQ ID NO: 216675 - RNA, 32 nt, Homo Sapiens
aucaugcaguagauagaggggaggcagggaga

SEQ ID NO: 216676 - RNA, 32 nt, Homo Sapiens
gggaaaggggacaagaggcuuuucgugcccag

SEQ ID NO: 216677 - RNA, 32 nt, Homo Sapiens
cuaggaaagcauuuauacuugagauaaauuau

SEQ ID NO: 216678 - RNA, 32 nt, Homo Sapiens
aguguacuauaaacagguuuuuaguuaucccu

SEQ ID NO: 216679 - RNA, 32 nt, Homo Sapiens
acuuucagcuggaacuugaagggaccccaacc

SEQ ID NO: 216680 - RNA, 32 nt, Homo Sapiens
aagaaaaugcaaauggcuaauaauauaaaaua

SEQ ID NO: 216681 - RNA, 32 nt, Homo Sapiens
ggaggcagagggcaagggaggggugguauuaa

SEQ ID NO: 216682 - RNA, 32 nt, Homo Sapiens
agggacuggggcggggggcgggggcgagggag

SEQ ID NO: 216683 - RNA, 32 nt, Homo Sapiens
auguguccccagaauccacaugcugaaacccu

SEQ ID NO: 216684 - RNA, 32 nt, Homo Sapiens
gcuucuuuuugaccuuucccaaggagaagcgc

SEQ ID NO: 216685 - RNA, 32 nt, Homo Sapiens
ccugcacuaugaagugcugcuggcugggcuug

SEQ ID NO: 216686 - RNA, 32 nt, Homo Sapiens
uuuuuuauauauguaggcacaaacaauaagua

SEQ ID NO: 216687 - RNA, 32 nt, Homo Sapiens
cauagcaugcuuccuuucucuccuggcucggg

SEQ ID NO: 216688 - RNA, 32 nt, Homo Sapiens
gacccgccuuggagcuccacgagccggugcug

SEQ ID NO: 216689 - RNA, 32 nt, Homo Sapiens
acccucaagacaaaugcccccaucccaugggg

SEQ ID NO: 216690 - RNA, 32 nt, Homo Sapiens
gccggcgcuggcggccagcgccauggcuuacc

SEQ ID NO: 216691 - RNA, 32 nt, Homo Sapiens
cccaaagccaucuggugaggucauugugggga

SEQ ID NO: 216692 - RNA, 32 nt, Homo Sapiens
ugcagcugucuccucggccauccuguggggcc

SEQ ID NO: 216693 - RNA, 32 nt, Homo Sapiens
auauauuaaaccaaucuauaaaacagauagcu

SEQ ID NO: 216694 - RNA, 32 nt, Homo Sapiens
cccauguuaggaaaucacuaccagucaggugg

SEQ ID NO: 216695 - RNA, 32 nt, Homo Sapiens
gcaguggccuguggucggcgucguccggccac

SEQ ID NO: 216696 - RNA, 32 nt, Homo Sapiens
ugucucaaccaauugacacuuaacaagggaaa

SEQ ID NO: 216697 - RNA, 32 nt, Homo Sapiens
uaccaaauaaauuuauaauaauaaauuacuaa

SEQ ID NO: 216698 - RNA, 32 nt, Homo Sapiens
gucacgaggaauguguugcugcugccaccccu

SEQ ID NO: 216699 - RNA, 32 nt, Homo Sapiens
ucugugauauauuauauuuaaaguguugcauu

SEQ ID NO: 216700 - RNA, 32 nt, Homo Sapiens
ugcaaagaaaaguuucaccuguauugaaucag

SEQ ID NO: 216701 - RNA, 32 nt, Homo Sapiens
cggccacucggcaggccgcgggcauccggcug

SEQ ID NO: 216702 - RNA, 32 nt, Homo Sapiens
caucaggguuggcaucaucugauggcaugucc

SEQ ID NO: 216703 - RNA, 32 nt, Homo Sapiens
ucaggucuggagguggucuauaagcacaguug

SEQ ID NO: 216704 - RNA, 32 nt, Homo Sapiens
agaaagcacacagaagcagccagggccaacau

SEQ ID NO: 216705 - RNA, 32 nt, Homo Sapiens
uacagugaacauucuuuuuuacuuuuguuacu

SEQ ID NO: 216706 - RNA, 32 nt, Homo Sapiens
aacuuaaacagaggguaaaaauuuaagagcag

SEQ ID NO: 216707 - RNA, 32 nt, Homo Sapiens
uuauaaguauauaaaaagcauuagguucaaaa

SEQ ID NO: 216708 - RNA, 32 nt, Homo Sapiens
ccccgcaucuuauguggcgccacccuccccau

SEQ ID NO: 216709 - RNA, 32 nt, Homo Sapiens
gacacuguuucucauauauuucuggauccuug

SEQ ID NO: 216710 - RNA, 32 nt, Homo Sapiens
ccacaaccucugccuacuggguuccagugauu

SEQ ID NO: 216711 - RNA, 30 nt, Homo Sapiens
ucaucgaugccugugccgccccaggcaaua

SEQ ID NO: 216712 - RNA, 32 nt, Homo Sapiens
gagauccaccuucagaauggacauguucaggg

SEQ ID NO: 216713 - RNA, 32 nt, Homo Sapiens
agccagugaacaggauuucccagccagggaca

SEQ ID NO: 216714 - RNA, 32 nt, Homo Sapiens
cuuccucguuuucucuugcugcugccaugcaa

SEQ ID NO: 216715 - RNA, 32 nt, Homo Sapiens
caggcuuaucuacaauauuagcaccauauguu

SEQ ID NO: 216716 - RNA, 32 nt, Homo Sapiens
cgccccacuggugucuauuacaggccacuuug

SEQ ID NO: 216717 - RNA, 32 nt, Homo Sapiens
cauauuucuuaaaaauaguuuauucagccacu

SEQ ID NO: 216718 - RNA, 32 nt, Homo Sapiens
gugguaagaauauacauaacauaaaauuuacu

SEQ ID NO: 216719 - RNA, 32 nt, Homo Sapiens
ccccacccugcucugagcugccccuuguugug

SEQ ID NO: 216720 - RNA, 32 nt, Homo Sapiens
cccgaggcacgcacuggggcgccggcugaccc

SEQ ID NO: 216721 - RNA, 32 nt, Homo Sapiens
cucauugaaaauuuaaagucaucauaauuugu

SEQ ID NO: 216722 - RNA, 32 nt, Homo Sapiens
cggcggaaccgcggggaccuaggacggaggcg

SEQ ID NO: 216723 - RNA, 32 nt, Homo Sapiens
gagggcggggcccugauguggaguagacagug

SEQ ID NO: 216724 - RNA, 32 nt, Homo Sapiens
uccuucugugccccuuuccccaagcccaagac

SEQ ID NO: 216725 - RNA, 28 nt, Homo Sapiens
cccgaggggcggcggcgcgguuuuuuau

SEQ ID NO: 216726 - RNA, 32 nt, Homo Sapiens
cacccaugagacccuccugaccacguggaaga

SEQ ID NO: 216727 - RNA, 32 nt, Homo Sapiens
gcauuuuguaaaaaugaaaaugugacucacau

SEQ ID NO: 216728 - RNA, 32 nt, Homo Sapiens
uggcucuaccccaggaaccucccggccugggc

SEQ ID NO: 216729 - RNA, 32 nt, Homo Sapiens
gaaguagaggggacgugagagaagggccaggc

SEQ ID NO: 216730 - RNA, 32 nt, Homo Sapiens
gccgcgcgucccgcagccauggagcaggauga

SEQ ID NO: 216731 - RNA, 32 nt, Homo Sapiens
uggaagcagugggguaggcugcugcccugcug

SEQ ID NO: 216732 - RNA, 32 nt, Homo Sapiens
gaaagugagagccagcagcaaaaacuacauuu

SEQ ID NO: 216733 - RNA, 32 nt, Homo Sapiens
ucugugagggugggcuggcaggaggccuaggc

SEQ ID NO: 216734 - RNA, 32 nt, Homo Sapiens
gucucucauuuucucuuguggaccaguuaguu

SEQ ID NO: 216735 - RNA, 30 nt, Homo Sapiens
cugagucugggcgggcgggaaaccugggcu

SEQ ID NO: 216736 - RNA, 32 nt, Homo Sapiens
ucucauugucugauuucucauugucucugaug

SEQ ID NO: 216737 - RNA, 32 nt, Homo Sapiens
gaacggggcggggaggcgacaguccccggcuc

SEQ ID NO: 216738 - RNA, 32 nt, Homo Sapiens
ucuuguaaucccaaaacuuuaggaggccaagg

SEQ ID NO: 216739 - RNA, 32 nt, Homo Sapiens
aacccucgccccacagggaccuggacacgccc

SEQ ID NO: 216740 - RNA, 32 nt, Homo Sapiens
cucaacccgaggucccggggcuggggugucgc

SEQ ID NO: 216741 - RNA, 32 nt, Homo Sapiens
ucuggggccuuuggagcgugggauaagcagua

SEQ ID NO: 216742 - RNA, 32 nt, Homo Sapiens
cgcagccgacgcccgcuacgaagcagccugca

SEQ ID NO: 216743 - RNA, 32 nt, Homo Sapiens
cuacaaaaucaucuuuuauaucaacagaagaa

SEQ ID NO: 216744 - RNA, 32 nt, Homo Sapiens
aggcagcgccuggcaccagggcuuugacucaa

SEQ ID NO: 216745 - RNA, 32 nt, Homo Sapiens
ccucgccaugaaagcccuuaugcugcucaccc

SEQ ID NO: 216746 - RNA, 32 nt, Homo Sapiens
ugaauccguuuuuauccuuuguacuggaugac

SEQ ID NO: 216747 - RNA, 32 nt, Homo Sapiens
aagacgaggauaccuucaguuugaaucugcau

SEQ ID NO: 216748 - RNA, 32 nt, Homo Sapiens
cgccccucagcugcccggcccggagcccgaga

SEQ ID NO: 216749 - RNA, 32 nt, Homo Sapiens
uuaaaugacuuuucaguguuuuucauaguuua

SEQ ID NO: 216750 - RNA, 32 nt, Homo Sapiens
cagagccccgacagaggggucccuggccacag

SEQ ID NO: 216751 - RNA, 32 nt, Homo Sapiens
cuggcuuggccaugccuuucugugccuuuaau

SEQ ID NO: 216752 - RNA, 32 nt, Homo Sapiens
uagggaucugucagggcccgcggccgggucca

SEQ ID NO: 216753 - RNA, 32 nt, Homo Sapiens
ccccugggaagaaaagaaaugcaaguucacaa

SEQ ID NO: 216754 - RNA, 32 nt, Homo Sapiens
uuggauuaauaaauaaagaaauauuuuccuac

SEQ ID NO: 216755 - RNA, 32 nt, Homo Sapiens
ggagacauaaaccuguaaugaaugaggcuggg

SEQ ID NO: 216756 - RNA, 32 nt, Homo Sapiens
aaucaguggaauguguuuaugauaaaaucauc

SEQ ID NO: 216757 - RNA, 32 nt, Homo Sapiens
uauuuacaaugucaaaugcugaagauuguuug

SEQ ID NO: 216758 - RNA, 32 nt, Homo Sapiens
uaugggcuucagaugucuuugccccauuuguc

SEQ ID NO: 216759 - RNA, 32 nt, Homo Sapiens
gaacuggacagaggaggaaaacagagcaucag

SEQ ID NO: 216760 - RNA, 32 nt, Homo Sapiens
gcugaggcggguggauugcuugagaccaugaa

SEQ ID NO: 216761 - RNA, 32 nt, Homo Sapiens
agaaauacaacgcacaguacuuuugaagcuuc

SEQ ID NO: 216762 - RNA, 32 nt, Homo Sapiens
acguucuucagcguaccguguugucagaugau

SEQ ID NO: 216763 - RNA, 32 nt, Homo Sapiens
aaagguccaagcaugaggaggaccaguuccuc

SEQ ID NO: 216764 - RNA, 32 nt, Homo Sapiens
uguaacacaaaacauguugugaaagaguguag

SEQ ID NO: 216765 - RNA, 28 nt, Homo Sapiens
uuucaucguguuaccaggauggucucgg

SEQ ID NO: 216766 - RNA, 32 nt, Homo Sapiens
aaugcacggauucuggcuacuuugaagggcau

SEQ ID NO: 216767 - RNA, 32 nt, Homo Sapiens
ccgggguugacuccgggggcgcggcgaggaga

SEQ ID NO: 216768 - RNA, 32 nt, Homo Sapiens
gauucauuauuucucuaauguuuaccuacgaa

SEQ ID NO: 216769 - RNA, 32 nt, Homo Sapiens
gggcugggggagagaaacaugcugcccucuuu

SEQ ID NO: 216770 - RNA, 32 nt, Homo Sapiens
gagagagaaaucuggaaccuucuucuggguag

SEQ ID NO: 216771 - RNA, 32 nt, Homo Sapiens
gcucucagcaugugcgccccaggugguagguc

SEQ ID NO: 216772 - RNA, 32 nt, Homo Sapiens
auuuggguuagaugaucuaaccaggaggccau

SEQ ID NO: 216773 - RNA, 32 nt, Homo Sapiens
cgccuguaaucccagcacuuugggaggcucag

SEQ ID NO: 216774 - RNA, 32 nt, Homo Sapiens
cgccucuaaucccagcacuuugggaggcugag

SEQ ID NO: 216775 - RNA, 32 nt, Homo Sapiens
cuuucccucacagaaagaaacgaaagaaagca

SEQ ID NO: 216776 - RNA, 32 nt, Homo Sapiens
cuccucgcgcggcccuuaccccggugccguug

SEQ ID NO: 216777 - RNA, 32 nt, Homo Sapiens
aagagcggggacucggcgacccugcccucccg

SEQ ID NO: 216778 - RNA, 32 nt, Homo Sapiens
uaaaaugggaucaugcccauuuagauuuuccu

SEQ ID NO: 216779 - RNA, 32 nt, Homo Sapiens
gacaauggccgccugcccccucugagggcuac

SEQ ID NO: 216780 - RNA, 32 nt, Homo Sapiens
auuugguugccugcauaaucccuguucuguuu

SEQ ID NO: 216781 - RNA, 31 nt, Homo Sapiens
uucuagggggcggugcuggccgcaguggacu

SEQ ID NO: 216782 - RNA, 32 nt, Homo Sapiens
cacacacacacacacacacacacacacaauuu

SEQ ID NO: 216783 - RNA, 32 nt, Homo Sapiens
uuuuuaaaaaauuuauuaaacauuauuaaacu

SEQ ID NO: 216784 - RNA, 32 nt, Homo Sapiens
gccccguucccuccccggaccccccggacccg

SEQ ID NO: 216785 - RNA, 32 nt, Homo Sapiens
uaccugcugagcccccucccccugaccucagc

SEQ ID NO: 216786 - RNA, 32 nt, Homo Sapiens
gguuccgacgcgccggagaucgcgcgacgaau

SEQ ID NO: 216787 - RNA, 32 nt, Homo Sapiens
ugucucuuccggcagugucuccaguguucaca

SEQ ID NO: 216788 - RNA, 32 nt, Homo Sapiens
aggaugucgcuaaagaaaaguugaagagcccu

SEQ ID NO: 216789 - RNA, 32 nt, Homo Sapiens
gaaaugccguauauauuuuucaacaaauauua

SEQ ID NO: 216790 - RNA, 32 nt, Homo Sapiens
cauccccacagcaacuccauggggcggauccu

SEQ ID NO: 216791 - RNA, 32 nt, Homo Sapiens
uuggcaguuucaaugucugucucuguugcuuc

SEQ ID NO: 216792 - RNA, 31 nt, Homo Sapiens
auccgugagugccuccaaccauaaacccaga

SEQ ID NO: 216793 - RNA, 32 nt, Homo Sapiens
uaauucuguauauauauguacauuuaucccau

SEQ ID NO: 216794 - RNA, 32 nt, Homo Sapiens
gguggcuccagaugcugugugucaaggagaag

SEQ ID NO: 216795 - RNA, 32 nt, Homo Sapiens
agggguccucucguccuccccuccagcaacuu

SEQ ID NO: 216796 - RNA, 32 nt, Homo Sapiens
ugaugaucaaggagugaaguaauugacaggga

SEQ ID NO: 216797 - RNA, 32 nt, Homo Sapiens
ugcucuuagaaccugaagaugaccauguguag

SEQ ID NO: 216798 - RNA, 32 nt, Homo Sapiens
gacucagacuggcuuccuugcuccucagcuug

SEQ ID NO: 216799 - RNA, 32 nt, Homo Sapiens
gggucugugcuaagguggauuaguaaaagagg

SEQ ID NO: 216800 - RNA, 32 nt, Homo Sapiens
caggauugucuacauggaugaucucacuuuuc

SEQ ID NO: 216801 - RNA, 32 nt, Homo Sapiens
guggugcuuggaagagccggccuugggugggc

SEQ ID NO: 216802 - RNA, 32 nt, Homo Sapiens
gcagaagucccucucugccaggagguccuccu

SEQ ID NO: 216803 - RNA, 32 nt, Homo Sapiens
caaaucauuauaggucucaauucaugacauac

SEQ ID NO: 216804 - RNA, 32 nt, Homo Sapiens
cuuacguuuucuucuuuuuucuucaccaaaac

SEQ ID NO: 216805 - RNA, 32 nt, Homo Sapiens
aaaccauagcauugaaggagugaggcaugucu

SEQ ID NO: 216806 - RNA, 32 nt, Homo Sapiens
aauucuauuucauagcacaucacaauacugcu

SEQ ID NO: 216807 - RNA, 32 nt, Homo Sapiens
gggccaggccccagcgggaggggcugagcugg

SEQ ID NO: 216808 - RNA, 32 nt, Homo Sapiens
ucccuuuaaaacccuaccuauccugaaugguc

SEQ ID NO: 216809 - RNA, 32 nt, Homo Sapiens
cuagugacaaugaagggacacauggcuaugua

SEQ ID NO: 216810 - RNA, 32 nt, Homo Sapiens
uuuuauagugaaaucuaagguuaauuauaauc

SEQ ID NO: 216811 - RNA, 32 nt, Homo Sapiens
ugcgugagucuccucagcucugcuuaccggug

SEQ ID NO: 216812 - RNA, 32 nt, Homo Sapiens
aacggagucucaacaggcaggugcguagcuuu

SEQ ID NO: 216813 - RNA, 32 nt, Homo Sapiens
gagaccgcggcgucuccagccucgguaccaug

SEQ ID NO: 216814 - RNA, 32 nt, Homo Sapiens
gccacccaggcagauccuggcucccagacacg

SEQ ID NO: 216815 - RNA, 32 nt, Homo Sapiens
ggaggcuggguugggccggcgcaagugcugug

SEQ ID NO: 216816 - RNA, 32 nt, Homo Sapiens
gagauaccaguugccaucagugcuaacugacu

SEQ ID NO: 216817 - RNA, 32 nt, Homo Sapiens
gcugucugugauccgccucugccgcccugccu

SEQ ID NO: 216818 - RNA, 32 nt, Homo Sapiens
cgcccacgcuaggcccugagcccaccucuacg

SEQ ID NO: 216819 - RNA, 32 nt, Homo Sapiens
ucguucuccuucccuuucagacuggaagggga

SEQ ID NO: 216820 - RNA, 32 nt, Homo Sapiens
ccggaugugaauggcaugcugaaacucgaagu

SEQ ID NO: 216821 - RNA, 32 nt, Homo Sapiens
gcgcggcccggugagggcgcgcgcgggcgggc

SEQ ID NO: 216822 - RNA, 32 nt, Homo Sapiens
gagccccucccucuccauugcucugcaccccu

SEQ ID NO: 216823 - RNA, 32 nt, Homo Sapiens
ucuccaaaacaaaaacaaaaacauuuuacucu

SEQ ID NO: 216824 - RNA, 32 nt, Homo Sapiens
gcgggcagcauggcggggcugcgggccagggg

SEQ ID NO: 216825 - RNA, 32 nt, Homo Sapiens
cccaccuuccacccccaacucccuuccagggu

SEQ ID NO: 216826 - RNA, 32 nt, Homo Sapiens
gcaaacacaucuaacuaacaugaacaauuuaa

SEQ ID NO: 216827 - RNA, 32 nt, Homo Sapiens
aaaacaagggaagagcaaagguucagguccgu

SEQ ID NO: 216828 - RNA, 32 nt, Homo Sapiens
gagacgaucgcgaugaacacggugcugucgcg

SEQ ID NO: 216829 - RNA, 32 nt, Homo Sapiens
uacucgcaguugcugcugcucaggaagagaga

SEQ ID NO: 216830 - RNA, 32 nt, Homo Sapiens
cugccgccccccagcccugccgcaccaagcug

SEQ ID NO: 216831 - RNA, 32 nt, Homo Sapiens
ucaucuuuauuauaccaaaucugugugaagca

SEQ ID NO: 216832 - RNA, 32 nt, Homo Sapiens
uaggcuacaaacaaugagugcauauuucugua

SEQ ID NO: 216833 - RNA, 32 nt, Homo Sapiens
gcaucaauuuaaaucauauauccuaaacuaaa

SEQ ID NO: 216834 - RNA, 32 nt, Homo Sapiens
ccccucuccccuugguucugcacuguugccaa

SEQ ID NO: 216835 - RNA, 32 nt, Homo Sapiens
uuaucuauauauuauuuaauguuacuguucug

SEQ ID NO: 216836 - RNA, 32 nt, Homo Sapiens
auauuggaacugagaacacaggaaugguggaa

SEQ ID NO: 216837 - RNA, 32 nt, Homo Sapiens
cuccuugcacuacuccacgcuguccugcucuc

SEQ ID NO: 216838 - RNA, 32 nt, Homo Sapiens
cgccccuucccacuucccgcggggccggcgcc

SEQ ID NO: 216839 - RNA, 32 nt, Homo Sapiens
uuagagguggggccggcugggaggcgacugga

SEQ ID NO: 216840 - RNA, 32 nt, Homo Sapiens
cuccgcggcccgggcaaaaggcugggacuuua

SEQ ID NO: 216841 - RNA, 32 nt, Homo Sapiens
agguguacagguuuuuacaaagggcagcauau

SEQ ID NO: 216842 - RNA, 32 nt, Homo Sapiens
aguagaauggauucuuuuuuuucuguuugauu

SEQ ID NO: 216843 - RNA, 32 nt, Homo Sapiens
gaacacugggcgaugccuggggacauuguggu

SEQ ID NO: 216844 - RNA, 32 nt, Homo Sapiens
aguacuacuuaacugucuguccugcuuggcug

SEQ ID NO: 216845 - RNA, 32 nt, Homo Sapiens
cagcuugcagagagagcaagaacagagccagc

SEQ ID NO: 216846 - RNA, 32 nt, Homo Sapiens
uugugaaguuacuuugugaguuuuccaggaug

SEQ ID NO: 216847 - RNA, 32 nt, Homo Sapiens
gcaacucucagaauaccuuauuugagcauacc

SEQ ID NO: 216848 - RNA, 32 nt, Homo Sapiens
ggcgccaggccgagccgaggugggacggaccg

SEQ ID NO: 216849 - RNA, 32 nt, Homo Sapiens
ggacagggcuucucagaccccagccagcagcc

SEQ ID NO: 216850 - RNA, 32 nt, Homo Sapiens
ccugccccauucuggucccgccccucucccgc

SEQ ID NO: 216851 - RNA, 32 nt, Homo Sapiens
cugccucuauuauggcacuucaauuuugcacu

SEQ ID NO: 216852 - RNA, 32 nt, Homo Sapiens
auccuggucccugcuacguuucuggggccaug

SEQ ID NO: 216853 - RNA, 32 nt, Homo Sapiens
agagccaggcccggcccucccgcccccgaccu

SEQ ID NO: 216854 - RNA, 32 nt, Homo Sapiens
caccucacuuacaaaaaucaccaccgacguuu

SEQ ID NO: 216855 - RNA, 32 nt, Homo Sapiens
gcacaauguuuaaaagaaaaacaaugaauuag

SEQ ID NO: 216856 - RNA, 32 nt, Homo Sapiens
uaguagcaaguaaaaugugucuugcugucauu

SEQ ID NO: 216857 - RNA, 32 nt, Homo Sapiens
caaggaggacugaguucucaggggagaacugg

SEQ ID NO: 216858 - RNA, 32 nt, Homo Sapiens
gcacgagguagagaagcaggggauagacucau

SEQ ID NO: 216859 - RNA, 32 nt, Homo Sapiens
augagcacauguaauguauuaaaggcuacuua

SEQ ID NO: 216860 - RNA, 32 nt, Homo Sapiens
gacaaaauaucugauaaucauguuguuuaagg

SEQ ID NO: 216861 - RNA, 32 nt, Homo Sapiens
ugccuuacugaauguauuuaccagcaaacaug

SEQ ID NO: 216862 - RNA, 32 nt, Homo Sapiens
gaugagauacagagacaacaccccccuuguuc

SEQ ID NO: 216863 - RNA, 32 nt, Homo Sapiens
cggcccugacgccaggccccagugggcgccuc

SEQ ID NO: 216864 - RNA, 32 nt, Homo Sapiens
uuugagaugguaccuuagaaaaaguuacacgc

SEQ ID NO: 216865 - RNA, 32 nt, Homo Sapiens
ccaaauagaaaagaagcaaauggaggaaauag

SEQ ID NO: 216866 - RNA, 32 nt, Homo Sapiens
ugcccaaggaccgcggagucggacgcaggcag

SEQ ID NO: 216867 - RNA, 32 nt, Homo Sapiens
uucaccucaggauuuaacuucuccgcugcuca

SEQ ID NO: 216868 - RNA, 32 nt, Homo Sapiens
guuccuucugcuugcuuuauuaacucaaaagu

SEQ ID NO: 216869 - RNA, 32 nt, Homo Sapiens
agggugccugcacuuugcuguggcaggcagau

SEQ ID NO: 216870 - RNA, 32 nt, Homo Sapiens
gccaucauguuccccuguuuuaucucacugga

SEQ ID NO: 216871 - RNA, 32 nt, Homo Sapiens
cauucauuuuuccaacauuaaggaauaaacuu

SEQ ID NO: 216872 - RNA, 32 nt, Homo Sapiens
uaccugaggcagcgaggcgcagcgagccuagc

SEQ ID NO: 216873 - RNA, 32 nt, Homo Sapiens
ccgagguucgcauugcucucggacagaguucu

SEQ ID NO: 216874 - RNA, 29 nt, Homo Sapiens
uucgauaaggauuuauauuuaguaacuac

SEQ ID NO: 216875 - RNA, 32 nt, Homo Sapiens
aaaaguaauccacuuucuuguuuaauauacca

SEQ ID NO: 216876 - RNA, 32 nt, Homo Sapiens
cugagccuggggcuggcuccccgggguccccg

SEQ ID NO: 216877 - RNA, 32 nt, Homo Sapiens
uagaugugcuaaaauauauagaucuaucauau

SEQ ID NO: 216878 - RNA, 32 nt, Homo Sapiens
acgaggucaggaguucaaaaccagccugacca

SEQ ID NO: 216879 - RNA, 32 nt, Homo Sapiens
ucaaaauuguacaacuaauuuaagagugggaa

SEQ ID NO: 216880 - RNA, 32 nt, Homo Sapiens
aggcuacuuccugucauagugaaauuaaacac

SEQ ID NO: 216881 - RNA, 32 nt, Homo Sapiens
acauuuuuaagugcugcauuuaaaagauacag

SEQ ID NO: 216882 - RNA, 32 nt, Homo Sapiens
caaggaggagugaguucucggucacaggaggu

SEQ ID NO: 216883 - RNA, 32 nt, Homo Sapiens
gagccggaccugccuccccgggcgugcuccgc

SEQ ID NO: 216884 - RNA, 32 nt, Homo Sapiens
cgaaugaaaaauacccuuagaagguuugacua

SEQ ID NO: 216885 - RNA, 32 nt, Homo Sapiens
ggcgcuaaccaccuccacgggcauuuuaaaua

SEQ ID NO: 216886 - RNA, 32 nt, Homo Sapiens
augcgcggcagcccgcgccggggccggcacca

SEQ ID NO: 216887 - RNA, 32 nt, Homo Sapiens
ucugccccaagccucaguuccuccugccaggg

SEQ ID NO: 216888 - RNA, 32 nt, Homo Sapiens
aaaguauguguuuuaaaaauguaaccagaaug

SEQ ID NO: 216889 - RNA, 32 nt, Homo Sapiens
cugugcagccuggaaccuccagucacugugcc

SEQ ID NO: 216890 - RNA, 32 nt, Homo Sapiens
ggcgaggcugcagccagagggcugggaaggga

SEQ ID NO: 216891 - RNA, 32 nt, Homo Sapiens
aaaacagaacagaacacugaaugccuuuaaca

SEQ ID NO: 216892 - RNA, 32 nt, Homo Sapiens
guugcuuucaaaagagcuuucaggcacuuauu

SEQ ID NO: 216893 - RNA, 32 nt, Homo Sapiens
uucuuucccaagaaguuuuuuaaugauaugcc

SEQ ID NO: 216894 - RNA, 32 nt, Homo Sapiens
aaggucacgcaccaguuugggccugagauaaa

SEQ ID NO: 216895 - RNA, 32 nt, Homo Sapiens
uaugcuguucuuugguaauggaauaaauugac

SEQ ID NO: 216896 - RNA, 32 nt, Homo Sapiens
cagccucuuaugucuuugucuuuaauacauua

SEQ ID NO: 216897 - RNA, 32 nt, Homo Sapiens
aucuuagcccccagccugugccuuccccccag

SEQ ID NO: 216898 - RNA, 32 nt, Homo Sapiens
uuccagaucagggccagaacugugcccaggcc

SEQ ID NO: 216899 - RNA, 32 nt, Homo Sapiens
guuuuggauaaggagcacuuuaaaacaaacug

SEQ ID NO: 216900 - RNA, 32 nt, Homo Sapiens
uuuagggacugggauuggguuugacugaaaua

SEQ ID NO: 216901 - RNA, 32 nt, Homo Sapiens
uuuaaagaaauauuuuucucaagcuccaaaaa

SEQ ID NO: 216902 - RNA, 32 nt, Homo Sapiens
acggcgagcgcgggcggcggcggugacggagg

SEQ ID NO: 216903 - RNA, 28 nt, Homo Sapiens
ggcugucuguggucuccgaggugcugua

SEQ ID NO: 216904 - RNA, 32 nt, Homo Sapiens
ggauauacaaauagcugcauauuuuuuagaaa

SEQ ID NO: 216905 - RNA, 32 nt, Homo Sapiens
uauuagaggaccgaagcagagggugcuguuuc

SEQ ID NO: 216906 - RNA, 31 nt, Homo Sapiens
guuguccaagccaccgucuugggcccagggc

SEQ ID NO: 216907 - RNA, 32 nt, Homo Sapiens
uauuuuuugcugcccccuccccgcccacuguc

SEQ ID NO: 216908 - RNA, 32 nt, Homo Sapiens
ccuccgcuccgcccggcccccuagcuguauau

SEQ ID NO: 216909 - RNA, 32 nt, Homo Sapiens
agggauucucaccccuuccccagcugggagga

SEQ ID NO: 216910 - RNA, 32 nt, Homo Sapiens
auuauagaauaaaagguacaacaaaaauuuca

SEQ ID NO: 216911 - RNA, 32 nt, Homo Sapiens
ccaccuccuaacaaagagaauuccuauuccuu

SEQ ID NO: 216912 - RNA, 32 nt, Homo Sapiens
caauccaugguauagggaaacuuuacaaaugu

SEQ ID NO: 216913 - RNA, 32 nt, Homo Sapiens
ccggcaccccgccucccuccccaauguccucg

SEQ ID NO: 216914 - RNA, 32 nt, Homo Sapiens
ccgcugccccgacgagucggaacuauaccgag

SEQ ID NO: 216915 - RNA, 32 nt, Homo Sapiens
aaagcuuucagccauaccccagccuucauuca

SEQ ID NO: 216916 - RNA, 32 nt, Homo Sapiens
cccaagcccuguguuccuggggaagcugggga

SEQ ID NO: 216917 - RNA, 32 nt, Homo Sapiens
caagucaagccuagccugauaauccuauuaca

SEQ ID NO: 216918 - RNA, 32 nt, Homo Sapiens
gguacuggucccugugcgccgccgucaacaga

SEQ ID NO: 216919 - RNA, 32 nt, Homo Sapiens
ugaagcaaugaaagagcaaaaacagauauuua

SEQ ID NO: 216920 - RNA, 32 nt, Homo Sapiens
agagugagaaacuuaugggauguucguuagag

SEQ ID NO: 216921 - RNA, 32 nt, Homo Sapiens
gggagggggcaaaggggacuuuuuacagugau

SEQ ID NO: 216922 - RNA, 32 nt, Homo Sapiens
agaacagguauauaagcuaauauugauacaau

SEQ ID NO: 216923 - RNA, 32 nt, Homo Sapiens
cauacaugaaauaaauacaucaauauaaaaau

SEQ ID NO: 216924 - RNA, 32 nt, Homo Sapiens
aggggcagguggcaaggccuggcugggccuuc

SEQ ID NO: 216925 - RNA, 32 nt, Homo Sapiens
acuccucccucugcugccuccuccccccacca

SEQ ID NO: 216926 - RNA, 32 nt, Homo Sapiens
gggagggggagggggaagugucugccuuuaug

SEQ ID NO: 216927 - RNA, 32 nt, Homo Sapiens
ugaaaaaaaaauuuuauuuauuuuaaauugug

SEQ ID NO: 216928 - RNA, 29 nt, Homo Sapiens
aaaauaauuccaauaaagcauuuuaaagu

SEQ ID NO: 216929 - RNA, 32 nt, Homo Sapiens
ccuuuaucaccagaaugugccccauagaagca

SEQ ID NO: 216930 - RNA, 32 nt, Homo Sapiens
uggcaagcagucaacacuuauucaccaucagg

SEQ ID NO: 216931 - RNA, 30 nt, Homo Sapiens
cgccgcggcccucaggucgcccuggccaca

SEQ ID NO: 216932 - RNA, 32 nt, Homo Sapiens
ugaaccauuccucccuucuccucagcugcagu

SEQ ID NO: 216933 - RNA, 32 nt, Homo Sapiens
augaauccauuguccuuguaguuucuucccuc

SEQ ID NO: 216934 - RNA, 32 nt, Homo Sapiens
aaaggacaagaauuuuucaaaaaacaggaaaa

SEQ ID NO: 216935 - RNA, 32 nt, Homo Sapiens
agaacaccgauucagaaucuuuucucccucuu

SEQ ID NO: 216936 - RNA, 32 nt, Homo Sapiens
gcagcgccuuaugaccccggaaccgagccagc

SEQ ID NO: 216937 - RNA, 32 nt, Homo Sapiens
uggggucucaggagucaggcagggccagcaca

SEQ ID NO: 216938 - RNA, 32 nt, Homo Sapiens
cgcugcaggcugagcaggccggugagcagcac

SEQ ID NO: 216939 - RNA, 29 nt, Homo Sapiens
uuaucucuagaguuauauuuucuauuaga

SEQ ID NO: 216940 - RNA, 31 nt, Homo Sapiens
aggucccaagccauaucuguggguuaauaau

SEQ ID NO: 216941 - RNA, 31 nt, Homo Sapiens
cagacagagaaggcugcaggaguccuuuguu

SEQ ID NO: 216942 - RNA, 32 nt, Homo Sapiens
gccaucaaacuccaaccagucacccaaccaga

SEQ ID NO: 216943 - RNA, 32 nt, Homo Sapiens
gugaauggggauuugcugauuauuaaacaauu

SEQ ID NO: 216944 - RNA, 32 nt, Homo Sapiens
ggcuguggacauuuuugucugcuguggacacu

SEQ ID NO: 216945 - RNA, 32 nt, Homo Sapiens
guggauucaaccaaccaaggacggaaaaugcu

SEQ ID NO: 216946 - RNA, 32 nt, Homo Sapiens
aggcugcagagccccaggagggggccaguguc

SEQ ID NO: 216947 - RNA, 32 nt, Homo Sapiens
ccuuggaguggcugaagaccaccacccuccac

SEQ ID NO: 216948 - RNA, 32 nt, Homo Sapiens
uuucagagaaaguuacguggagcgugggcguu

SEQ ID NO: 216949 - RNA, 32 nt, Homo Sapiens
agggccgcagcuagagucggcgccacgagggg

SEQ ID NO: 216950 - RNA, 32 nt, Homo Sapiens
uguauugcaugcucuuuguccuguaaugugug

SEQ ID NO: 216951 - RNA, 32 nt, Homo Sapiens
uugcaaugaggaugaagucacuauccuagagg

SEQ ID NO: 216952 - RNA, 32 nt, Homo Sapiens
cucucgguggucuguccgcccagcgcacguca

SEQ ID NO: 216953 - RNA, 32 nt, Homo Sapiens
gagggcggggcucgcugcccccugcugccgac

SEQ ID NO: 216954 - RNA, 32 nt, Homo Sapiens
gaaccaagaugggaccugaggacacaaagaug

SEQ ID NO: 216955 - RNA, 32 nt, Homo Sapiens
cugggaccugccaugcugaggacccauucuca

SEQ ID NO: 216956 - RNA, 32 nt, Homo Sapiens
ccaaaacgcggcugaggauggaacucagaaug

SEQ ID NO: 216957 - RNA, 31 nt, Homo Sapiens
gaccucgugaucugccugccucggccuccca

SEQ ID NO: 216958 - RNA, 32 nt, Homo Sapiens
aaauucaaauuugaacggcugcagaggccgag

SEQ ID NO: 216959 - RNA, 32 nt, Homo Sapiens
gcucucugcgcggcguuuugcaaaggacuuca

SEQ ID NO: 216960 - RNA, 32 nt, Homo Sapiens
caguccccgggcuugcgcggcgcggagaggga

SEQ ID NO: 216961 - RNA, 32 nt, Homo Sapiens
cauguaccuccucccuuucucauuuccaauga

SEQ ID NO: 216962 - RNA, 32 nt, Homo Sapiens
accauaguauauacuuuuucuuucucucucuu

SEQ ID NO: 216963 - RNA, 32 nt, Homo Sapiens
agaugaaauuuuuauuguucuaauggauuuca

SEQ ID NO: 216964 - RNA, 32 nt, Homo Sapiens
agaacccuuguacacuguugguuggaauguaa

SEQ ID NO: 216965 - RNA, 32 nt, Homo Sapiens
cgugcgccuguaccgcgccgaggggcuucccg

SEQ ID NO: 216966 - RNA, 32 nt, Homo Sapiens
aacaccaggaaacacauuucuguggccuuagu

SEQ ID NO: 216967 - RNA, 32 nt, Homo Sapiens
uuuuaucauaugcagucacuucuuuguaaaug

SEQ ID NO: 216968 - RNA, 32 nt, Homo Sapiens
ggacagagacaccugcaccuccccccacugca

SEQ ID NO: 216969 - RNA, 32 nt, Homo Sapiens
gagaaaagagauaaguuuuuuuuaauuaagca

SEQ ID NO: 216970 - RNA, 32 nt, Homo Sapiens
cgccccucgccuccccgcggagugcggacucg

SEQ ID NO: 216971 - RNA, 32 nt, Homo Sapiens
cuggguucaaccacuuuagccagaauuugauc

SEQ ID NO: 216972 - RNA, 32 nt, Homo Sapiens
uucaagccauucucgugcaucagccuccugag

SEQ ID NO: 216973 - RNA, 32 nt, Homo Sapiens
cucagagggaacccaggcuggaugcugcagag

SEQ ID NO: 216974 - RNA, 32 nt, Homo Sapiens
cccuuggaccucugggagggagcugacccuug

SEQ ID NO: 216975 - RNA, 32 nt, Homo Sapiens
uccuggcagcccagccccaucggcagguggcc

SEQ ID NO: 216976 - RNA, 32 nt, Homo Sapiens
ccugcuagcuacauuuacauuauguaaaaaua

SEQ ID NO: 216977 - RNA, 32 nt, Homo Sapiens
uuguguacaaauauaagguauguaucugaaua

SEQ ID NO: 216978 - RNA, 32 nt, Homo Sapiens
guggauauuuuuccgcuuggcaauuuccuuuc

SEQ ID NO: 216979 - RNA, 32 nt, Homo Sapiens
gagccauccccgccaacagccagccaggacac

SEQ ID NO: 216980 - RNA, 32 nt, Homo Sapiens
gauuguaaauuaaguuuggcauuauugucaga

SEQ ID NO: 216981 - RNA, 32 nt, Homo Sapiens
uuugcgcccugcucacucuccucagcccccag

SEQ ID NO: 216982 - RNA, 32 nt, Homo Sapiens
agagcgcgcgcccaguugcccgggcaccaaau

SEQ ID NO: 216983 - RNA, 32 nt, Homo Sapiens
ccgcccucagggcagagcccccugcccaggcu

SEQ ID NO: 216984 - RNA, 32 nt, Homo Sapiens
ucuaucaggauaaauugacccuugcuucccau

SEQ ID NO: 216985 - RNA, 32 nt, Homo Sapiens
gccacacacaaaaagguacugaagauuuaccc

SEQ ID NO: 216986 - RNA, 32 nt, Homo Sapiens
aagacagggucucacucucauugcccaggcug

SEQ ID NO: 216987 - RNA, 32 nt, Homo Sapiens
gaggcucggaagcaugagcggaagcuucgagg

SEQ ID NO: 216988 - RNA, 32 nt, Homo Sapiens
aauuguuccaaaugcaaugaguagagcaaacc

SEQ ID NO: 216989 - RNA, 32 nt, Homo Sapiens
ccucccauugaucgcuuucugcaaccauucag

SEQ ID NO: 216990 - RNA, 32 nt, Homo Sapiens
gaauguacugcagucaguaaacauuauugacu

SEQ ID NO: 216991 - RNA, 32 nt, Homo Sapiens
cucuguucaaguuaaacuuauguaagcuuucc

SEQ ID NO: 216992 - RNA, 32 nt, Homo Sapiens
uaguggcuauaaugacguggaaauguaaucug

SEQ ID NO: 216993 - RNA, 32 nt, Homo Sapiens
agagaggcuguucgcagagcugcggaagauga

SEQ ID NO: 216994 - RNA, 32 nt, Homo Sapiens
uggucaauccgaaguaugagggaaaaugagua

SEQ ID NO: 216995 - RNA, 32 nt, Homo Sapiens
cagacuggagacugaggcagggccugugagug

SEQ ID NO: 216996 - RNA, 32 nt, Homo Sapiens
accuggcucagggaaaaggacuaguuggaugg

SEQ ID NO: 216997 - RNA, 32 nt, Homo Sapiens
agugccuguguaauugaugacucuuacauagu

SEQ ID NO: 216998 - RNA, 32 nt, Homo Sapiens
gcugucgccccaggcccucccugacucccugu

SEQ ID NO: 216999 - RNA, 32 nt, Homo Sapiens
uggagucccuuuucauucuccuccuccucccu

SEQ ID NO: 217000 - RNA, 32 nt, Homo Sapiens
uaguccuccguccccguccgcgcggacuccgu

SEQ ID NO: 217001 - RNA, 32 nt, Homo Sapiens
auuucuuguguguucuuuucuauuuguaaaau

SEQ ID NO: 217002 - RNA, 32 nt, Homo Sapiens
aaacccuaacagcggugauaucauuagacugu

SEQ ID NO: 217003 - RNA, 32 nt, Homo Sapiens
gguucucccggagcuuccugcucaggccucuu

SEQ ID NO: 217004 - RNA, 32 nt, Homo Sapiens
ucuagugagcagaggugagggaugcugcuaaa

SEQ ID NO: 217005 - RNA, 32 nt, Homo Sapiens
uccucaaaauuaccaaacaaagcaaaaaauac

SEQ ID NO: 217006 - RNA, 32 nt, Homo Sapiens
gagggagggagugucccaccacguucucaggg

SEQ ID NO: 217007 - RNA, 32 nt, Homo Sapiens
ugagugccggcgcgcgggagggcgggugaguc

SEQ ID NO: 217008 - RNA, 32 nt, Homo Sapiens
uugcacugucucccuccucauuucuaaaugaa

SEQ ID NO: 217009 - RNA, 32 nt, Homo Sapiens
gggagcugcaugggggagcgccggcagcgcuu

SEQ ID NO: 217010 - RNA, 32 nt, Homo Sapiens
acuuaaaaaguaaaaauaacuauguuuugaga

SEQ ID NO: 217011 - RNA, 32 nt, Homo Sapiens
gaaggugaacucucuuuccuugagcugggaca

SEQ ID NO: 217012 - RNA, 32 nt, Homo Sapiens
gagguccgcuucccggcccccagauucuggca

SEQ ID NO: 217013 - RNA, 32 nt, Homo Sapiens
uaaaugaaaugaggugugugggcuugucaaca

SEQ ID NO: 217014 - RNA, 32 nt, Homo Sapiens
ccggaccucaccccgcgccggcccccacccag

SEQ ID NO: 217015 - RNA, 32 nt, Homo Sapiens
aggaauguuccuccucaccccugccacucugu

SEQ ID NO: 217016 - RNA, 32 nt, Homo Sapiens
acuuuuaaaaucuauuucauuucuuaguuaug

SEQ ID NO: 217017 - RNA, 32 nt, Homo Sapiens
gcauuuaccugccugucuguaagguggaaauu

SEQ ID NO: 217018 - RNA, 32 nt, Homo Sapiens
uguugggcggggggaggguuguggcaagauug

SEQ ID NO: 217019 - RNA, 32 nt, Homo Sapiens
uaaaucuucacagauaugaauacuaaauuaua

SEQ ID NO: 217020 - RNA, 32 nt, Homo Sapiens
uuugauaguuuauaagauaaugcaaagaacuu

SEQ ID NO: 217021 - RNA, 32 nt, Homo Sapiens
aagcaucgaugauggacagucucacacuauuu

SEQ ID NO: 217022 - RNA, 31 nt, Homo Sapiens
uuaugcaaauggagaaaggcgcccucccugg

SEQ ID NO: 217023 - RNA, 32 nt, Homo Sapiens
cagccagaauacugggaucuucaguggcagga

SEQ ID NO: 217024 - RNA, 32 nt, Homo Sapiens
uuucucaaucuuguuggcccuccggcgaucuc

SEQ ID NO: 217025 - RNA, 31 nt, Homo Sapiens
acacuccugccgguaguuuagggccgagacg

SEQ ID NO: 217026 - RNA, 32 nt, Homo Sapiens
cuccucucaccauucucugccauccuccaucu

SEQ ID NO: 217027 - RNA, 32 nt, Homo Sapiens
augcuggauagguugucuuuuguuuuuauguc

SEQ ID NO: 217028 - RNA, 32 nt, Homo Sapiens
ucugauucaggaugacguggaccuccgugaca

SEQ ID NO: 217029 - RNA, 32 nt, Homo Sapiens
cugucuuagaucuuuuuguuucugccuagucu

SEQ ID NO: 217030 - RNA, 32 nt, Homo Sapiens
augguguacuuugcaagaaauaagcacucuaa

SEQ ID NO: 217031 - RNA, 32 nt, Homo Sapiens
guuguuaaucaugcagccuuugaaaaguuuuu

SEQ ID NO: 217032 - RNA, 32 nt, Homo Sapiens
ugcugagaaaccgaguucagaccgagcagguu

SEQ ID NO: 217033 - RNA, 32 nt, Homo Sapiens
agcagcuuuuuuuuuuuuuucuuaaaaagaaa

SEQ ID NO: 217034 - RNA, 32 nt, Homo Sapiens
auauaucuuugaugauuauacauauugguuuc

SEQ ID NO: 217035 - RNA, 32 nt, Homo Sapiens
ugguaaagcccggcccguguacuccaccugcc

SEQ ID NO: 217036 - RNA, 32 nt, Homo Sapiens
ggagucuggaauaaaugcuguuugucacauca

SEQ ID NO: 217037 - RNA, 32 nt, Homo Sapiens
gguuaggaaggacggagaaggggcguucgcuc

SEQ ID NO: 217038 - RNA, 32 nt, Homo Sapiens
uaucuauauaauguaauuucaauaccuugggg

SEQ ID NO: 217039 - RNA, 32 nt, Homo Sapiens
ucuuccucccggcugcaucuccaggccggacu

SEQ ID NO: 217040 - RNA, 32 nt, Homo Sapiens
gaauagaaucgagaaagcaaccaagagagcag

SEQ ID NO: 217041 - RNA, 29 nt, Homo Sapiens
auuucauauaaaaggaaucgcaaaauacg

SEQ ID NO: 217042 - RNA, 32 nt, Homo Sapiens
auuucuggauacucugauuuugguuuugauuc

SEQ ID NO: 217043 - RNA, 32 nt, Homo Sapiens
ucuguguuugacucacagccacuuucccccau

SEQ ID NO: 217044 - RNA, 32 nt, Homo Sapiens
auaaaucaauuucaguagaaugacaucuuuac

SEQ ID NO: 217045 - RNA, 32 nt, Homo Sapiens
uggucugacacuacgcgcagugcucgguuguu

SEQ ID NO: 217046 - RNA, 32 nt, Homo Sapiens
gccauuggagucgacgccuccucagugcgucc

SEQ ID NO: 217047 - RNA, 32 nt, Homo Sapiens
acgggaaugcuguucaggaaauucuucaggca

SEQ ID NO: 217048 - RNA, 32 nt, Homo Sapiens
ccuucuagcuaaugguuucaauuuagacuuca

SEQ ID NO: 217049 - RNA, 32 nt, Homo Sapiens
ggacuucgaagauaagagugagcggcugccuc

SEQ ID NO: 217050 - RNA, 32 nt, Homo Sapiens
acagcuuggcugagcucugucucugcagguua

SEQ ID NO: 217051 - RNA, 32 nt, Homo Sapiens
cuugguugucuuccagucuccucggcucgccc

SEQ ID NO: 217052 - RNA, 32 nt, Homo Sapiens
gggggaugcggccaaucuccaagcucccuggg

SEQ ID NO: 217053 - RNA, 32 nt, Homo Sapiens
agaaagcucgugaauuucuacugcugaggagg

SEQ ID NO: 217054 - RNA, 32 nt, Homo Sapiens
uccuagcucagcaaauugcuucuuagaaucuu

SEQ ID NO: 217055 - RNA, 32 nt, Homo Sapiens
ucccagucaccaugugcagcugagucacaacc

SEQ ID NO: 217056 - RNA, 32 nt, Homo Sapiens
caaugagagucuuuuuuuuucuuuuuauacaa

SEQ ID NO: 217057 - RNA, 32 nt, Homo Sapiens
aagacagcgaugguaacuuugcugggacuaug

SEQ ID NO: 217058 - RNA, 32 nt, Homo Sapiens
caucuguaaaaugggcauguuaacauugccua

SEQ ID NO: 217059 - RNA, 32 nt, Homo Sapiens
uccuucugcuggaauguuuguuuucuaucuag

SEQ ID NO: 217060 - RNA, 32 nt, Homo Sapiens
cucccccugugccagcagcaccacucccucag

SEQ ID NO: 217061 - RNA, 32 nt, Homo Sapiens
augcauuagggugacuggcuugcuccuuuuac

SEQ ID NO: 217062 - RNA, 32 nt, Homo Sapiens
ccccaaaaugcuuugaggauucaucagaacca

SEQ ID NO: 217063 - RNA, 32 nt, Homo Sapiens
aucacagucgacugaagcuggcugcgcaggac

SEQ ID NO: 217064 - RNA, 32 nt, Homo Sapiens
uccagugcaggcucuccaccgaaggcuggcuc

SEQ ID NO: 217065 - RNA, 32 nt, Homo Sapiens
cucuguuugcuaaccacuauuaugacacucuc

SEQ ID NO: 217066 - RNA, 32 nt, Homo Sapiens
ccaguccccuggauucgcuggacugcaaaaag

SEQ ID NO: 217067 - RNA, 32 nt, Homo Sapiens
gacccgucugcaccuugcucugucccaccugc

SEQ ID NO: 217068 - RNA, 32 nt, Homo Sapiens
aggaggagacggaggagaacugagcagagcag

SEQ ID NO: 217069 - RNA, 32 nt, Homo Sapiens
uacgaggcccgguuuaaaugcaggaggaaucu

SEQ ID NO: 217070 - RNA, 32 nt, Homo Sapiens
gggcuggcuggacucggagcgcggucgaggcu

SEQ ID NO: 217071 - RNA, 32 nt, Homo Sapiens
auguguuuacuuuauguuacuacaugcacuug

SEQ ID NO: 217072 - RNA, 32 nt, Homo Sapiens
ggccuccgcgagagccgagcgggccgcaccgc

SEQ ID NO: 217073 - RNA, 32 nt, Homo Sapiens
ccucggucacuacaauauuuuugcacauauaa

SEQ ID NO: 217074 - RNA, 32 nt, Homo Sapiens
ggagagaugggccccaggaucccuggggagcc

SEQ ID NO: 217075 - RNA, 32 nt, Homo Sapiens
augcaugagggaacuacaaacugcacacuuuc

SEQ ID NO: 217076 - RNA, 32 nt, Homo Sapiens
acccuccugccaggugacagccgccaagaugg

SEQ ID NO: 217077 - RNA, 32 nt, Homo Sapiens
ccucccaggaggagagcaaggaccuggcaggg

SEQ ID NO: 217078 - RNA, 32 nt, Homo Sapiens
guaaguugaaggauauuggacaggaggacagu

SEQ ID NO: 217079 - RNA, 32 nt, Homo Sapiens
ccuggaaaacagugaagugaaauguucaugag

SEQ ID NO: 217080 - RNA, 32 nt, Homo Sapiens
agacugaagauaauguuugaacagccacauac

SEQ ID NO: 217081 - RNA, 32 nt, Homo Sapiens
ugaaacagagucucacucuguuguguccggaa

SEQ ID NO: 217082 - RNA, 31 nt, Homo Sapiens
aggccuuugugcugaguagcaauguauacac

SEQ ID NO: 217083 - RNA, 32 nt, Homo Sapiens
cuggcgguggccgcggccgccgagucggucug

SEQ ID NO: 217084 - RNA, 32 nt, Homo Sapiens
aagaggccggagaaaggaaaagacauuaucag

SEQ ID NO: 217085 - RNA, 32 nt, Homo Sapiens
aauguccuuuuggaagaauacauuugggcaug

SEQ ID NO: 217086 - RNA, 32 nt, Homo Sapiens
guagaggcagacccaugugcugcuguugcaaa

SEQ ID NO: 217087 - RNA, 32 nt, Homo Sapiens
ucuucccagcgaagguacagaggcggaugaac

SEQ ID NO: 217088 - RNA, 32 nt, Homo Sapiens
acacagggcuucuuggccccagauggcaccuc

SEQ ID NO: 217089 - RNA, 32 nt, Homo Sapiens
acugaauggugcaggugauuguaacacaaugg

SEQ ID NO: 217090 - RNA, 32 nt, Homo Sapiens
gcaaagaaucaucaauaguuuauauugcuuua

SEQ ID NO: 217091 - RNA, 32 nt, Homo Sapiens
agcauuuucacaugaaaggaaacuacaggccu

SEQ ID NO: 217092 - RNA, 32 nt, Homo Sapiens
agccguuuacuuugagcuuugaacacugaaac

SEQ ID NO: 217093 - RNA, 31 nt, Homo Sapiens
acuccucuuuggaguccacucugugcagggg

SEQ ID NO: 217094 - RNA, 32 nt, Homo Sapiens
cagaaagggaaugguauaucaacagggugaag

SEQ ID NO: 217095 - RNA, 32 nt, Homo Sapiens
agauacagagggugggucaccagcagaagaag

SEQ ID NO: 217096 - RNA, 32 nt, Homo Sapiens
uggaugcuugaagcuguacaaaagcugcagua

SEQ ID NO: 217097 - RNA, 29 nt, Homo Sapiens
agaaucuguaaccaauaccaugaaguuca

SEQ ID NO: 217098 - RNA, 32 nt, Homo Sapiens
aggagccuggccucuguccacccgucagcagu

SEQ ID NO: 217099 - RNA, 29 nt, Homo Sapiens
guauaccuguguauguaaauauaaggcau

SEQ ID NO: 217100 - RNA, 32 nt, Homo Sapiens
ccccuggccccagcccucuccugccuggccug

SEQ ID NO: 217101 - RNA, 32 nt, Homo Sapiens
aaugucaaccagauucuagaaacugcggucau

SEQ ID NO: 217102 - RNA, 32 nt, Homo Sapiens
auuguuucaucuccguggcccgcgguggucgu

SEQ ID NO: 217103 - RNA, 32 nt, Homo Sapiens
acugaaugugaccucaggggaauacuagagaa

SEQ ID NO: 217104 - RNA, 32 nt, Homo Sapiens
cguucuccagagaaacagaaccaagaggauau

SEQ ID NO: 217105 - RNA, 32 nt, Homo Sapiens
aggguuucacccuguuucccagguuggaguau

SEQ ID NO: 217106 - RNA, 29 nt, Homo Sapiens
cuggaguuagacauagauuuucuauuuug

SEQ ID NO: 217107 - RNA, 32 nt, Homo Sapiens
cgagcgagagaggagcggagcggcacagccuc

SEQ ID NO: 217108 - RNA, 31 nt, Homo Sapiens
gggcugcugcacugcccuccgcccuucccug

SEQ ID NO: 217109 - RNA, 32 nt, Homo Sapiens
uagacaauuuaaaagggguguaugagggccug

SEQ ID NO: 217110 - RNA, 32 nt, Homo Sapiens
acuuuuugucauuguuccucuuuccucuugca

SEQ ID NO: 217111 - RNA, 32 nt, Homo Sapiens
uauaacaugauaggugcugaauugugauucac

SEQ ID NO: 217112 - RNA, 32 nt, Homo Sapiens
cuagucaggaccagcuucagccacuucuuuuc

SEQ ID NO: 217113 - RNA, 32 nt, Homo Sapiens
guuuaaauauuaccaugauguaguugaaauau

SEQ ID NO: 217114 - RNA, 32 nt, Homo Sapiens
aaaagaacgagggaucggagagugcucccgca

SEQ ID NO: 217115 - RNA, 32 nt, Homo Sapiens
aauccauaaccucagaaggcaauauuauugau

SEQ ID NO: 217116 - RNA, 30 nt, Homo Sapiens
gggguuuuggcggcggcgccggcgggcuag

SEQ ID NO: 217117 - RNA, 32 nt, Homo Sapiens
auuuuucuuucuuuuucuuuguuuuugaguuu

SEQ ID NO: 217118 - RNA, 32 nt, Homo Sapiens
caugggcccggcacugccacguuuuccaagga

SEQ ID NO: 217119 - RNA, 32 nt, Homo Sapiens
uagaugguaauuacauauccuuauauuuacuu

SEQ ID NO: 217120 - RNA, 32 nt, Homo Sapiens
cggugcccaaacuccgcccacccucuagggag

SEQ ID NO: 217121 - RNA, 32 nt, Homo Sapiens
ggggaacaagacccuccccaugacggauuucc

SEQ ID NO: 217122 - RNA, 32 nt, Homo Sapiens
aaugugaauuucagauaaaauaauaacuuuga

SEQ ID NO: 217123 - RNA, 32 nt, Homo Sapiens
cuccaaacccgcgcugcggagugagugaccaa

SEQ ID NO: 217124 - RNA, 32 nt, Homo Sapiens
aguauuugcccuuuuuugugacuggcuuauuu

SEQ ID NO: 217125 - RNA, 32 nt, Homo Sapiens
ggacacugccagccccagggcuccagcccagc

SEQ ID NO: 217126 - RNA, 32 nt, Homo Sapiens
cucuuuggcuguucuuuuuuuggagcccuucu

SEQ ID NO: 217127 - RNA, 32 nt, Homo Sapiens
ccugcccccagcguggggguggccacuccugg

SEQ ID NO: 217128 - RNA, 32 nt, Homo Sapiens
gccagucccuccccagcccagcagucccucca

SEQ ID NO: 217129 - RNA, 32 nt, Homo Sapiens
uaguagcauguuucuguuucugauguaccuuu

SEQ ID NO: 217130 - RNA, 32 nt, Homo Sapiens
uguaauaggguaguucuggagagaugguaugc

SEQ ID NO: 217131 - RNA, 32 nt, Homo Sapiens
uguggaugugcgagggccucccccgcuugcga

SEQ ID NO: 217132 - RNA, 32 nt, Homo Sapiens
ugggaaguauuugucaaaauggucauccuggg

SEQ ID NO: 217133 - RNA, 32 nt, Homo Sapiens
aaaagaacaaagugaaacuguaucacugucca

SEQ ID NO: 217134 - RNA, 29 nt, Homo Sapiens
ugagagggugagacagugggggugccugg

SEQ ID NO: 217135 - RNA, 32 nt, Homo Sapiens
uuagauaauccccuccucccucugcuuuuuuc

SEQ ID NO: 217136 - RNA, 32 nt, Homo Sapiens
aaacucccuggccucugccaucugcaaaguuc

SEQ ID NO: 217137 - RNA, 30 nt, Homo Sapiens
uaggagcuaaggcucuaugagucuagaugu

SEQ ID NO: 217138 - RNA, 32 nt, Homo Sapiens
aauucuccuagaucucuugaaucaugcaaauu

SEQ ID NO: 217139 - RNA, 32 nt, Homo Sapiens
aaucccugaucuuaaaaaauaauuauacuuca

SEQ ID NO: 217140 - RNA, 32 nt, Homo Sapiens
agccuaucagggugcuggcuuugugcauaauc

SEQ ID NO: 217141 - RNA, 32 nt, Homo Sapiens
agucgagccaaguuaagaauguucuuauguug

SEQ ID NO: 217142 - RNA, 32 nt, Homo Sapiens
guguguguucuucaagccagcucuaggcuuca

SEQ ID NO: 217143 - RNA, 32 nt, Homo Sapiens
gaauauggaaaggccagaggcagagugaaaua

SEQ ID NO: 217144 - RNA, 32 nt, Homo Sapiens
cgugcuuucgcggcugcccggugcgacacuuu

SEQ ID NO: 217145 - RNA, 32 nt, Homo Sapiens
aauuaaggaucuuugaagcucugaaauaggug

SEQ ID NO: 217146 - RNA, 32 nt, Homo Sapiens
caccugaacauuccuggagaaaacagugaugu

SEQ ID NO: 217147 - RNA, 32 nt, Homo Sapiens
uuuuaaauauaaaacauucccaaguuuggauc

SEQ ID NO: 217148 - RNA, 32 nt, Homo Sapiens
acggaguuucucucuuguuacccaggcuggag

SEQ ID NO: 217149 - RNA, 32 nt, Homo Sapiens
cauuuagugauuccuaauauuuuguacucaca

SEQ ID NO: 217150 - RNA, 32 nt, Homo Sapiens
cgggguccgggagagcgggaugcuggccggcc

SEQ ID NO: 217151 - RNA, 32 nt, Homo Sapiens
cucagcucacugaagccucgaccuccagaacu

SEQ ID NO: 217152 - RNA, 31 nt, Homo Sapiens
gucagcccacccuggagcaagcgcagcaggu

SEQ ID NO: 217153 - RNA, 32 nt, Homo Sapiens
gaaugcugaaaauuauucuuggagaauaucaa

SEQ ID NO: 217154 - RNA, 32 nt, Homo Sapiens
ggacccgaggguggaacccacccccugggcuc

SEQ ID NO: 217155 - RNA, 32 nt, Homo Sapiens
uaauuccaucagcuccuucuggccggcagcag

SEQ ID NO: 217156 - RNA, 31 nt, Homo Sapiens
cgagguuccucacagaaccagggagcgccag

SEQ ID NO: 217157 - RNA, 32 nt, Homo Sapiens
aaauagaaaaaauuaccuuaaauauauaaaua

SEQ ID NO: 217158 - RNA, 32 nt, Homo Sapiens
agugcuggccguucuuccccagccuccccacu

SEQ ID NO: 217159 - RNA, 32 nt, Homo Sapiens
agaucuggcuuuuguuaacauuuuggggcuuu

SEQ ID NO: 217160 - RNA, 32 nt, Homo Sapiens
acccggucuggaccuuccugucagugagacca

SEQ ID NO: 217161 - RNA, 32 nt, Homo Sapiens
augccuauaauuacauaaauuguaugagacuu

SEQ ID NO: 217162 - RNA, 32 nt, Homo Sapiens
uuacuguagaaaguacuaaggcacuaacaguu

SEQ ID NO: 217163 - RNA, 32 nt, Homo Sapiens
uccaguguagacggagcccuggcaugucaaca

SEQ ID NO: 217164 - RNA, 32 nt, Homo Sapiens
gcugcgcagaguuuguccccgaccgcguggag

SEQ ID NO: 217165 - RNA, 32 nt, Homo Sapiens
auaugguugucuccagagaaauuaacuuacau

SEQ ID NO: 217166 - RNA, 32 nt, Homo Sapiens
ugauuuugggaagagcauuuuguccuuugguu

SEQ ID NO: 217167 - RNA, 32 nt, Homo Sapiens
aacaggaguugucaaggcagcagaaaggaguc

SEQ ID NO: 217168 - RNA, 32 nt, Homo Sapiens
agaaaugcacaugguaauaaaaaguauaaauu

SEQ ID NO: 217169 - RNA, 32 nt, Homo Sapiens
acuuacaugagaugguaaauguuuaacaaugg

SEQ ID NO: 217170 - RNA, 32 nt, Homo Sapiens
cucagguccacccauuucccucauggggaucc

SEQ ID NO: 217171 - RNA, 32 nt, Homo Sapiens
gaugagaauuguacaguuuuugccucauaagc

SEQ ID NO: 217172 - RNA, 32 nt, Homo Sapiens
guuugucauuggcagguuuacuuguggccagc

SEQ ID NO: 217173 - RNA, 32 nt, Homo Sapiens
aaacaauaagguaucucuguauguacugauau

SEQ ID NO: 217174 - RNA, 32 nt, Homo Sapiens
caggcccccguccuaucaguacaccccccugu

SEQ ID NO: 217175 - RNA, 32 nt, Homo Sapiens
gcccgagaggaugaaggcgggauuaccuggag

SEQ ID NO: 217176 - RNA, 32 nt, Homo Sapiens
ucccccugcgccccgcacgacugcgggagcca

SEQ ID NO: 217177 - RNA, 32 nt, Homo Sapiens
gagaggaggcucuggaggcacacaggaugcag

SEQ ID NO: 217178 - RNA, 32 nt, Homo Sapiens
agggagccaagcggcccgggcccugagcgcgu

SEQ ID NO: 217179 - RNA, 32 nt, Homo Sapiens
ugggaaaaaacaugucuguguuggaauacgcg

SEQ ID NO: 217180 - RNA, 32 nt, Homo Sapiens
ucugcuaugucugugaugucaguagugccugu

SEQ ID NO: 217181 - RNA, 32 nt, Homo Sapiens
aacuggucaaaaaacuaauugugauuucuagu

SEQ ID NO: 217182 - RNA, 32 nt, Homo Sapiens
gaacaggccaaggaaaaugaaaacggagagcu

SEQ ID NO: 217183 - RNA, 31 nt, Homo Sapiens
gccgggcagcacugccggcgcuucgccucgc

SEQ ID NO: 217184 - RNA, 32 nt, Homo Sapiens
uggauuccaagcaucccaaaggccagacccca

SEQ ID NO: 217185 - RNA, 32 nt, Homo Sapiens
uaucuucugucuaaugagcuuauuuaaucauu

SEQ ID NO: 217186 - RNA, 32 nt, Homo Sapiens
guggaggacaaaggagggccucacuguguggg

SEQ ID NO: 217187 - RNA, 32 nt, Homo Sapiens
ugcaucuuaugcauuacaaugucuaguuugcc

SEQ ID NO: 217188 - RNA, 32 nt, Homo Sapiens
aaaauuguauauauuuuuacagaaagucuauu

SEQ ID NO: 217189 - RNA, 32 nt, Homo Sapiens
aauaccaagaauuguuacuuuacaauguuccc

SEQ ID NO: 217190 - RNA, 32 nt, Homo Sapiens
guucuaacaaaauaauaaggcugaauuuuuaa

SEQ ID NO: 217191 - RNA, 32 nt, Homo Sapiens
acugaaagaacaaauauaagaaugauaacacu

SEQ ID NO: 217192 - RNA, 32 nt, Homo Sapiens
gugccccugaugaugugggagaggaacauggg

SEQ ID NO: 217193 - RNA, 32 nt, Homo Sapiens
ucuuuguguacacugcagacacugguucugag

SEQ ID NO: 217194 - RNA, 32 nt, Homo Sapiens
cuguauucugccauugccuuugaaagaucuau

SEQ ID NO: 217195 - RNA, 32 nt, Homo Sapiens
uuugucuguaaaugagcugaaugugugugcgu

SEQ ID NO: 217196 - RNA, 32 nt, Homo Sapiens
ggacaaguggccgcugugcgggccccucgcuu

SEQ ID NO: 217197 - RNA, 32 nt, Homo Sapiens
ggucggacuacagagggaagagggacuucccu

SEQ ID NO: 217198 - RNA, 32 nt, Homo Sapiens
aaagggagccgauuuaggggcuggggucacag

SEQ ID NO: 217199 - RNA, 32 nt, Homo Sapiens
cuaagaagggaagagaaagccgggaggcaagu

SEQ ID NO: 217200 - RNA, 32 nt, Homo Sapiens
ugaagaccaagcccggcccggccaguccccgc

SEQ ID NO: 217201 - RNA, 31 nt, Homo Sapiens
aggaaggugcuacuggccucgagccaggugu

SEQ ID NO: 217202 - RNA, 32 nt, Homo Sapiens
cccagcagcagcacaguucagcauuguguggc

SEQ ID NO: 217203 - RNA, 32 nt, Homo Sapiens
aaguccuuugagccucuuucaaauuaaucuuu

SEQ ID NO: 217204 - RNA, 32 nt, Homo Sapiens
uccuuuugcccauucaucccucuucuuuucaa

SEQ ID NO: 217205 - RNA, 32 nt, Homo Sapiens
cgggaaagaaggaaacgacgacuccgggggcg

SEQ ID NO: 217206 - RNA, 32 nt, Homo Sapiens
ugagauaaguaaucuuugaugaagauugaaau

SEQ ID NO: 217207 - RNA, 32 nt, Homo Sapiens
ggccacgucuccuuggaaccaauaccaaacga

SEQ ID NO: 217208 - RNA, 32 nt, Homo Sapiens
uuucauaauuggaauauacuuuucuuaaaaaa

SEQ ID NO: 217209 - RNA, 32 nt, Homo Sapiens
ggggcucuguggugaauggguggccuaugaug

SEQ ID NO: 217210 - RNA, 32 nt, Homo Sapiens
uucuggccauaauggucuucucugcuguuccu

SEQ ID NO: 217211 - RNA, 32 nt, Homo Sapiens
ugcuugucauuucuuaauauaacucaacaaga

SEQ ID NO: 217212 - RNA, 32 nt, Homo Sapiens
agguuuuggcaacacauagaucauaugucuga

SEQ ID NO: 217213 - RNA, 32 nt, Homo Sapiens
gauaccuaaaauguauguucagaaaagcauuu

SEQ ID NO: 217214 - RNA, 32 nt, Homo Sapiens
augucugacuguuaauucuuaagcaagaaacu

SEQ ID NO: 217215 - RNA, 32 nt, Homo Sapiens
uugagcuuuggucacauguccuccccuuaaau

SEQ ID NO: 217216 - RNA, 32 nt, Homo Sapiens
acguuggaguuugggcuggagcuccucccucc

SEQ ID NO: 217217 - RNA, 32 nt, Homo Sapiens
uuuggacgggauuuuagguuucccucccuucc

SEQ ID NO: 217218 - RNA, 32 nt, Homo Sapiens
gucgaaggccccagggccccgcugucacuugc

SEQ ID NO: 217219 - RNA, 32 nt, Homo Sapiens
gugagguugaaagguuuugguuaugcugaauu

SEQ ID NO: 217220 - RNA, 32 nt, Homo Sapiens
uuacuucugcacuuaaauuuuuuuaaauaaca

SEQ ID NO: 217221 - RNA, 32 nt, Homo Sapiens
uuuucugcccuggguucuuccacagcacaaac

SEQ ID NO: 217222 - RNA, 32 nt, Homo Sapiens
uacauuuguuaacuucucccccuaacauauca

SEQ ID NO: 217223 - RNA, 32 nt, Homo Sapiens
aucuccccaaaauacaauuuaaugcauuggga

SEQ ID NO: 217224 - RNA, 32 nt, Homo Sapiens
ugaccaucuaguggcugcuaauccauuugaug

SEQ ID NO: 217225 - RNA, 32 nt, Homo Sapiens
gucuccuuuuauucuacuuucuauucuuagcu

SEQ ID NO: 217226 - RNA, 32 nt, Homo Sapiens
uugcuuaguguuuccuuguugcuggguccuac

SEQ ID NO: 217227 - RNA, 32 nt, Homo Sapiens
gggauggggcagucucugcccaaacauaaaga

SEQ ID NO: 217228 - RNA, 32 nt, Homo Sapiens
caagcaacacugacaaaaauauucuuguaggg

SEQ ID NO: 217229 - RNA, 32 nt, Homo Sapiens
uccugaccucgugugaucccccugcuucagcc

SEQ ID NO: 217230 - RNA, 31 nt, Homo Sapiens
gcuuaauugacucacaguucaguguggcugg

SEQ ID NO: 217231 - RNA, 32 nt, Homo Sapiens
ugggacugccuugucuggaggcuuuguucauc

SEQ ID NO: 217232 - RNA, 32 nt, Homo Sapiens
cccucgccgggcguaagugucaggaggcggcg

SEQ ID NO: 217233 - RNA, 32 nt, Homo Sapiens
agccuaauuagcgcaugaauacguguugaacu

SEQ ID NO: 217234 - RNA, 32 nt, Homo Sapiens
aaaagcaccggugcuccucucuaggcagcggg

SEQ ID NO: 217235 - RNA, 32 nt, Homo Sapiens
cgcacaagccccauaaagagguuucacgcagg

SEQ ID NO: 217236 - RNA, 32 nt, Homo Sapiens
acucugggucuggccagggcuuccucaaauac

SEQ ID NO: 217237 - RNA, 32 nt, Homo Sapiens
acagucaguugcaucucucaccaacagguggg

SEQ ID NO: 217238 - RNA, 32 nt, Homo Sapiens
ccagccccgccccgggccccagagguccccug

SEQ ID NO: 217239 - RNA, 32 nt, Homo Sapiens
agcugcccuuggcacccuccagcccucagaag

SEQ ID NO: 217240 - RNA, 32 nt, Homo Sapiens
ucuagucucuugauuauuguuaguuuacuugu

SEQ ID NO: 217241 - RNA, 32 nt, Homo Sapiens
uacccauauaaaauaugcugcuaaaguacaua

SEQ ID NO: 217242 - RNA, 27 nt, Homo Sapiens
augcuuauuuaauucuagguaugaaca

SEQ ID NO: 217243 - RNA, 32 nt, Homo Sapiens
agauggaucuuugggaggaaaaaacuggaccu

SEQ ID NO: 217244 - RNA, 32 nt, Homo Sapiens
uauuacuaaagcaaaauuuccagggguaggga

SEQ ID NO: 217245 - RNA, 32 nt, Homo Sapiens
acuccccgaugacccaggauaugagucugcac

SEQ ID NO: 217246 - RNA, 32 nt, Homo Sapiens
uggaaauaaaauuuaggaccaauaccuccucc

SEQ ID NO: 217247 - RNA, 32 nt, Homo Sapiens
aagagguacagcuaaaagguggaggacugaua

SEQ ID NO: 217248 - RNA, 32 nt, Homo Sapiens
cugcgcccaucccaccuccauccacagagggc

SEQ ID NO: 217249 - RNA, 32 nt, Homo Sapiens
cagcugugaacuccaccuggcuuauuauuuac

SEQ ID NO: 217250 - RNA, 32 nt, Homo Sapiens
cagagcggaucgugcgcacgcucugcaaggug

SEQ ID NO: 217251 - RNA, 32 nt, Homo Sapiens
ggacagaccucucuggaagcagcaagaggaac

SEQ ID NO: 217252 - RNA, 32 nt, Homo Sapiens
ccaacgugucaaccagccuguguucccugcca

SEQ ID NO: 217253 - RNA, 32 nt, Homo Sapiens
gcagcggcaccaaggggccuuagggagcccca

SEQ ID NO: 217254 - RNA, 32 nt, Homo Sapiens
gaaugcuagaggaaacagaacaccgccuuaca

SEQ ID NO: 217255 - RNA, 32 nt, Homo Sapiens
aacaauuuuuuaaauaaaccagcagguugcua

SEQ ID NO: 217256 - RNA, 32 nt, Homo Sapiens
gaccagauuguuuuucugaaaaugagcauauu

SEQ ID NO: 217257 - RNA, 32 nt, Homo Sapiens
gaagcucaccaaaaguuuuucccaaagcucaa

SEQ ID NO: 217258 - RNA, 32 nt, Homo Sapiens
auuuuaucaucagcuucaguauauacuuguau

SEQ ID NO: 217259 - RNA, 32 nt, Homo Sapiens
ucggccugagccagccagaccccgggcaccgc

SEQ ID NO: 217260 - RNA, 32 nt, Homo Sapiens
cuuccuuagauuuuuuuuuuuaagcuguuugc

SEQ ID NO: 217261 - RNA, 32 nt, Homo Sapiens
cuucccuuucccugcucugacuuuuaaguuuu

SEQ ID NO: 217262 - RNA, 32 nt, Homo Sapiens
guggacccaggacugcuuccccugccuggucc

SEQ ID NO: 217263 - RNA, 32 nt, Homo Sapiens
cauugcugucucuugugugugucaugcacaag

SEQ ID NO: 217264 - RNA, 32 nt, Homo Sapiens
ggaagcagggcggggccucugguggcggucgg

SEQ ID NO: 217265 - RNA, 32 nt, Homo Sapiens
caaccaugucccaauaaauguaccucauuaaa

SEQ ID NO: 217266 - RNA, 32 nt, Homo Sapiens
caguauaguuguagaaaaugugaaaucugaug

SEQ ID NO: 217267 - RNA, 32 nt, Homo Sapiens
ugcccagggaggggccuggggcugggagcagu

SEQ ID NO: 217268 - RNA, 32 nt, Homo Sapiens
ccucggccggccgcagagagaaguggccagag

SEQ ID NO: 217269 - RNA, 32 nt, Homo Sapiens
cuuuccccaagcagaggagucaggacuugaga

SEQ ID NO: 217270 - RNA, 32 nt, Homo Sapiens
acuuaggauugugagacuuuuuaauguuugug

SEQ ID NO: 217271 - RNA, 32 nt, Homo Sapiens
accaaauucuguuugagauccuggccaagacc

SEQ ID NO: 217272 - RNA, 32 nt, Homo Sapiens
gagggaggugagcggcgcgcgcggagccggcg

SEQ ID NO: 217273 - RNA, 32 nt, Homo Sapiens
uuccagcguggauuuuguggacagagccccag

SEQ ID NO: 217274 - RNA, 32 nt, Homo Sapiens
ucacccuugggguuaagggacaguugucugcu

SEQ ID NO: 217275 - RNA, 32 nt, Homo Sapiens
agaccaauuuauucccaaagaaaauugccauu

SEQ ID NO: 217276 - RNA, 32 nt, Homo Sapiens
ucucugagccugucucccacuccgugaaaugg

SEQ ID NO: 217277 - RNA, 32 nt, Homo Sapiens
auuuucuguauauaauuaugacauugucacac

SEQ ID NO: 217278 - RNA, 32 nt, Homo Sapiens
gagagugucuucagugcaauguggcauccugg

SEQ ID NO: 217279 - RNA, 32 nt, Homo Sapiens
uacaagugucugguccuuucugagggaggcug

SEQ ID NO: 217280 - RNA, 32 nt, Homo Sapiens
ccuggcggcugauucuagaggaggaagaggcu

SEQ ID NO: 217281 - RNA, 32 nt, Homo Sapiens
uuucucuacauuuuguuuaucuguaaguccuu

SEQ ID NO: 217282 - RNA, 32 nt, Homo Sapiens
ugaccaggucagagauguccccugccaugcag

SEQ ID NO: 217283 - RNA, 32 nt, Homo Sapiens
ugaguccaaccucagcuucccagccagcagcu

SEQ ID NO: 217284 - RNA, 32 nt, Homo Sapiens
gacgccgccgaguggucugugcagguucgcgg

SEQ ID NO: 217285 - RNA, 32 nt, Homo Sapiens
ccucgucggccgcggaggagcugcagccucca

SEQ ID NO: 217286 - RNA, 32 nt, Homo Sapiens
ccuggccagaccaccccuaggacccccugccc

SEQ ID NO: 217287 - RNA, 32 nt, Homo Sapiens
ucccuuuugauuucuuuuuuuuccucuguuuu

SEQ ID NO: 217288 - RNA, 32 nt, Homo Sapiens
ggguggguggaccccugcugcagggcagaguu

SEQ ID NO: 217289 - RNA, 32 nt, Homo Sapiens
ccaccccggcccgaccccgacccggcccgguc

SEQ ID NO: 217290 - RNA, 32 nt, Homo Sapiens
caaaauucaaggaaauucagaaucuaauuaag

SEQ ID NO: 217291 - RNA, 32 nt, Homo Sapiens
caacgauugugucuuuccuggucuguccuagg

SEQ ID NO: 217292 - RNA, 32 nt, Homo Sapiens
agaccuggggcucggggccccuggauuccugc

SEQ ID NO: 217293 - RNA, 32 nt, Homo Sapiens
ugcuuuuuaaagcuaggcccuaaaagguuuua

SEQ ID NO: 217294 - RNA, 32 nt, Homo Sapiens
cccucuuagaacuauuucuccucagggccggg

SEQ ID NO: 217295 - RNA, 32 nt, Homo Sapiens
uuaaggauuuaguuagugauaagauguucauc

SEQ ID NO: 217296 - RNA, 32 nt, Homo Sapiens
aacacguggugcuguuucuacuccaucaccau

SEQ ID NO: 217297 - RNA, 32 nt, Homo Sapiens
ccagaacagugagaauguauuucugcuguuuu

SEQ ID NO: 217298 - RNA, 32 nt, Homo Sapiens
aaaauccauagugucauuuuauuuuagucauu

SEQ ID NO: 217299 - RNA, 32 nt, Homo Sapiens
gcauuccugugcuugaauugccaaauaaacag

SEQ ID NO: 217300 - RNA, 32 nt, Homo Sapiens
uuaugcaaaccucagugggugaugcaggaggg

SEQ ID NO: 217301 - RNA, 32 nt, Homo Sapiens
aucuuggaaugggaaaccaugaaauuugucuu

SEQ ID NO: 217302 - RNA, 32 nt, Homo Sapiens
ucaccuggucacggucucaucugacaguggag

SEQ ID NO: 217303 - RNA, 32 nt, Homo Sapiens
aguguaggagcccccacccccauacucaccug

SEQ ID NO: 217304 - RNA, 32 nt, Homo Sapiens
auauuuaagcaaagugauacaaacacagugau

SEQ ID NO: 217305 - RNA, 32 nt, Homo Sapiens
gagguugggggaguugcccagaggaaucccug

SEQ ID NO: 217306 - RNA, 32 nt, Homo Sapiens
ccagaagaaggggacuuucuaagcacuguuua

SEQ ID NO: 217307 - RNA, 32 nt, Homo Sapiens
caccuugcucauuguugacaauagcuuugcca

SEQ ID NO: 217308 - RNA, 32 nt, Homo Sapiens
cuaacauaaaugguucuucagauucuuccaca

SEQ ID NO: 217309 - RNA, 32 nt, Homo Sapiens
agcacaccaaugugauacuuccacugaccggc

SEQ ID NO: 217310 - RNA, 32 nt, Homo Sapiens
gcgagcuagggcgggagaaggagcgcggggag

SEQ ID NO: 217311 - RNA, 32 nt, Homo Sapiens
ccuuccuauuccuuuccaacuccuuuuccccc

SEQ ID NO: 217312 - RNA, 32 nt, Homo Sapiens
cuagucucgaggcgggagagccagccgcccug

SEQ ID NO: 217313 - RNA, 32 nt, Homo Sapiens
aacaccugacauccuguucucuaguaauggug

SEQ ID NO: 217314 - RNA, 32 nt, Homo Sapiens
accgcagggacccucgccaauaaacagcccuc

SEQ ID NO: 217315 - RNA, 32 nt, Homo Sapiens
uuuuaaguaaguugauuaaaucuuaugugagu

SEQ ID NO: 217316 - RNA, 32 nt, Homo Sapiens
cugaggucaggaguuugagaccagccugguca

SEQ ID NO: 217317 - RNA, 32 nt, Homo Sapiens
agcaaagccccggcucucccccgccacaucug

SEQ ID NO: 217318 - RNA, 31 nt, Homo Sapiens
gggagcuauugagccaccugggaugagauga

SEQ ID NO: 217319 - RNA, 32 nt, Homo Sapiens
ggaguuggcgcuccggccccacagcucuuucc

SEQ ID NO: 217320 - RNA, 32 nt, Homo Sapiens
ucccuuaucugugcaaugagauuggugauguu

SEQ ID NO: 217321 - RNA, 32 nt, Homo Sapiens
uugcuuuggggauauacaaauagcugcauauu

SEQ ID NO: 217322 - RNA, 32 nt, Homo Sapiens
ugaggugccugucccacccccacccccagcuc

SEQ ID NO: 217323 - RNA, 32 nt, Homo Sapiens
auguuuuucugcauuguuuuaugccugaaauc

SEQ ID NO: 217324 - RNA, 29 nt, Homo Sapiens
cucaucauagugaguucucaugggaucug

SEQ ID NO: 217325 - RNA, 32 nt, Homo Sapiens
gagacaggacaaucgcuugaaccugggaggcg

SEQ ID NO: 217326 - RNA, 32 nt, Homo Sapiens
gcagugagcugagauuguaccaugcacuccag

SEQ ID NO: 217327 - RNA, 32 nt, Homo Sapiens
gcucggcccagagcuucccuuccggcuggcuc

SEQ ID NO: 217328 - RNA, 32 nt, Homo Sapiens
cuuuucugcuuaccaaauuaaaggacaaacua

SEQ ID NO: 217329 - RNA, 32 nt, Homo Sapiens
ggccucauuuuucuucucccauguggaaaauc

SEQ ID NO: 217330 - RNA, 32 nt, Homo Sapiens
ggcuggcguuuccacaucugucuucauuagca

SEQ ID NO: 217331 - RNA, 32 nt, Homo Sapiens
uuaauucugugcuaugucaauggcaguuuuca

SEQ ID NO: 217332 - RNA, 32 nt, Homo Sapiens
acgagcccggcagugcagcugccgcuaccgcc

SEQ ID NO: 217333 - RNA, 31 nt, Homo Sapiens
agcggacagcgcagcuagcggggcgcgggcg

SEQ ID NO: 217334 - RNA, 32 nt, Homo Sapiens
cucugggcggccugcgggggcggcgcaguugc

SEQ ID NO: 217335 - RNA, 32 nt, Homo Sapiens
aguggcagccccaccccgucccuggccauucu

SEQ ID NO: 217336 - RNA, 32 nt, Homo Sapiens
uucacacccucuaucauaaacauaugcugcag

SEQ ID NO: 217337 - RNA, 32 nt, Homo Sapiens
auaagugucuugcuauuuuuugagauguuuua

SEQ ID NO: 217338 - RNA, 32 nt, Homo Sapiens
uguaauggauagguaacagagaagaccucguc

SEQ ID NO: 217339 - RNA, 32 nt, Homo Sapiens
cgaacccucgcuuuccagcagucgccggauug

SEQ ID NO: 217340 - RNA, 32 nt, Homo Sapiens
gguggagggcacagcccuccgacccucauggc

SEQ ID NO: 217341 - RNA, 32 nt, Homo Sapiens
aucaauauuuugcuuuuuaacaaggauauuua

SEQ ID NO: 217342 - RNA, 32 nt, Homo Sapiens
uguacccgugagagguugugugaaugugaaag

SEQ ID NO: 217343 - RNA, 32 nt, Homo Sapiens
ccgggcacucccugaguagcggcagcuuaucc

SEQ ID NO: 217344 - RNA, 32 nt, Homo Sapiens
uaccaucgccuucagcugcaaccccgaccaug

SEQ ID NO: 217345 - RNA, 32 nt, Homo Sapiens
auaaugacguaccacucaguuggacccucaag

SEQ ID NO: 217346 - RNA, 32 nt, Homo Sapiens
gugaagaaacacacccagaagagagaugcacu

SEQ ID NO: 217347 - RNA, 32 nt, Homo Sapiens
cacuaucauaauuguuuuuuuaaacucauuuu

SEQ ID NO: 217348 - RNA, 32 nt, Homo Sapiens
ugccaaccccuccggcuacgggccccuuaccg

SEQ ID NO: 217349 - RNA, 32 nt, Homo Sapiens
aaaauuaacaauaauggcaugugauagcaaaa

SEQ ID NO: 217350 - RNA, 32 nt, Homo Sapiens
auuauuuuuguauucuuuuucuuagugugagc

SEQ ID NO: 217351 - RNA, 32 nt, Homo Sapiens
gggagccauuuuguguuuugcauagaaaguuu

SEQ ID NO: 217352 - RNA, 32 nt, Homo Sapiens
aaucugacaaaacaggaguucgucugagcaau

SEQ ID NO: 217353 - RNA, 32 nt, Homo Sapiens
caaaaggcggcugagauuggcagagugaaaua

SEQ ID NO: 217354 - RNA, 32 nt, Homo Sapiens
ucccagaggggagggguugugugugcgagugu

SEQ ID NO: 217355 - RNA, 32 nt, Homo Sapiens
ccgaauuuggccuccucaaaagcagcagcaag

SEQ ID NO: 217356 - RNA, 32 nt, Homo Sapiens
cuuuuccauaagcagaacaagaaccaaaucaa

SEQ ID NO: 217357 - RNA, 32 nt, Homo Sapiens
agugcugcagauguuaaucauucauccauuua

SEQ ID NO: 217358 - RNA, 27 nt, Homo Sapiens
acugaauaaacuacagaaauuuuuuag

SEQ ID NO: 217359 - RNA, 32 nt, Homo Sapiens
agauggccuccguuuccaacguuccccacaaa

SEQ ID NO: 217360 - RNA, 32 nt, Homo Sapiens
cagagcuagagcaagggucucuuuaaauguug

SEQ ID NO: 217361 - RNA, 32 nt, Homo Sapiens
uaaauuuuacaaagauaucucaucucuucuuu

SEQ ID NO: 217362 - RNA, 32 nt, Homo Sapiens
caggcgaagguuccuggugacccaggcucuca

SEQ ID NO: 217363 - RNA, 31 nt, Homo Sapiens
uuuaugguaauaaaguuaucugcacaaguuc

SEQ ID NO: 217364 - RNA, 32 nt, Homo Sapiens
aggagcccuuuuaaguaucuuuuguacgcuuu

SEQ ID NO: 217365 - RNA, 32 nt, Homo Sapiens
cuauguaugacacaacucuucuaugccuggau

SEQ ID NO: 217366 - RNA, 32 nt, Homo Sapiens
cacuugaucagcucagcaacacuguggaauaa

SEQ ID NO: 217367 - RNA, 32 nt, Homo Sapiens
gccccagcuguuccuccuccccuggggacagc

SEQ ID NO: 217368 - RNA, 32 nt, Homo Sapiens
gcgcccggaccaugucgucuccggggccgucg

SEQ ID NO: 217369 - RNA, 32 nt, Homo Sapiens
uccuuucuugucuguuagaaacguaugucaaa

SEQ ID NO: 217370 - RNA, 32 nt, Homo Sapiens
ccagccugugcaacaagagugaaacuccauuu

SEQ ID NO: 217371 - RNA, 32 nt, Homo Sapiens
uuuuuuaaaaagguuucuuuuuucauuauucu

SEQ ID NO: 217372 - RNA, 32 nt, Homo Sapiens
agaggaguuugaugaagaagaugauuaagacc

SEQ ID NO: 217373 - RNA, 31 nt, Homo Sapiens
aagagugggcgucagaaccagggcacaauaa

SEQ ID NO: 217374 - RNA, 32 nt, Homo Sapiens
augacauuaccuugugaaaguccucuuccugg

SEQ ID NO: 217375 - RNA, 32 nt, Homo Sapiens
agggaauuguguuugucuucauuucaguggug

SEQ ID NO: 217376 - RNA, 32 nt, Homo Sapiens
acugaauugacaaaugcauuguaacuacaaau

SEQ ID NO: 217377 - RNA, 32 nt, Homo Sapiens
agaggaugagaggaggccggcccagcuccuuc

SEQ ID NO: 217378 - RNA, 32 nt, Homo Sapiens
uuagcugacuaauuauuuuugaguuaaaaagu

SEQ ID NO: 217379 - RNA, 32 nt, Homo Sapiens
cggcggggcggcugcgcggcugccgggacucg

SEQ ID NO: 217380 - RNA, 32 nt, Homo Sapiens
guccacuuaaaaaaugaugaugaugauaaaaa

SEQ ID NO: 217381 - RNA, 32 nt, Homo Sapiens
gagugugccgggggcuugugggggcucaggaa

SEQ ID NO: 217382 - RNA, 32 nt, Homo Sapiens
acacuuucacacucacagagguggagcagggg

SEQ ID NO: 217383 - RNA, 32 nt, Homo Sapiens
auuuggugagaaggagcugaauguuauggcug

SEQ ID NO: 217384 - RNA, 32 nt, Homo Sapiens
gcuuuucccaggcuugccuuuagugucaugua

SEQ ID NO: 217385 - RNA, 32 nt, Homo Sapiens
ccaccccaccccaccccacccucugaaaugug

SEQ ID NO: 217386 - RNA, 32 nt, Homo Sapiens
uauuuguuuguaaguuucuacucccaucaaag

SEQ ID NO: 217387 - RNA, 32 nt, Homo Sapiens
ggaccgcccccucccaaggauggucccuuugg

SEQ ID NO: 217388 - RNA, 32 nt, Homo Sapiens
uacaaaugaaaaaaaucucauaaaaauacaua

SEQ ID NO: 217389 - RNA, 32 nt, Homo Sapiens
gacugcuuucccuccccugucaggucucuccu

SEQ ID NO: 217390 - RNA, 32 nt, Homo Sapiens
uacugacagguugcccaccucccccaacgcca

SEQ ID NO: 217391 - RNA, 32 nt, Homo Sapiens
cccacacagauggucuguggggcuugcuugau

SEQ ID NO: 217392 - RNA, 32 nt, Homo Sapiens
ccuuccccucaccacgagcucccggccugccc

SEQ ID NO: 217393 - RNA, 32 nt, Homo Sapiens
aagggccuugcgacugacguggcgacguucac

SEQ ID NO: 217394 - RNA, 32 nt, Homo Sapiens
cuggaacccccugaccaucugguucuacaagg

SEQ ID NO: 217395 - RNA, 32 nt, Homo Sapiens
uaucucuucuuugccauggaaacuacacccaa

SEQ ID NO: 217396 - RNA, 32 nt, Homo Sapiens
uauauccucaagguagaaaugucuauguuuuc

SEQ ID NO: 217397 - RNA, 32 nt, Homo Sapiens
cagggcuggggugcugcugcugcacucacgcg

SEQ ID NO: 217398 - RNA, 32 nt, Homo Sapiens
guaauuuucuuacuuuguuuuuguuuacuuug

SEQ ID NO: 217399 - RNA, 32 nt, Homo Sapiens
uagggaggauacugaggggaccaggaugggag

SEQ ID NO: 217400 - RNA, 32 nt, Homo Sapiens
uuuguacauaugccuguaaauuguuuuaaaua

SEQ ID NO: 217401 - RNA, 30 nt, Homo Sapiens
ggggagcauggugggaaugagucuugcuuu

SEQ ID NO: 217402 - RNA, 32 nt, Homo Sapiens
uaaauugcucuauuuuaacuuauuuauguccu

SEQ ID NO: 217403 - RNA, 32 nt, Homo Sapiens
aaaauugugugaaggcugaaaaggggcuugga

SEQ ID NO: 217404 - RNA, 32 nt, Homo Sapiens
gcacacgcuguugcuauaguacgugugauccu

SEQ ID NO: 217405 - RNA, 32 nt, Homo Sapiens
cgugaguggggccccacgcagcuccccgcacu

SEQ ID NO: 217406 - RNA, 32 nt, Homo Sapiens
uuuuuuuuuuaauuauuuuaaaugagauuuuu

SEQ ID NO: 217407 - RNA, 32 nt, Homo Sapiens
gcaagaccuucagucagacaucaucccuugua

SEQ ID NO: 217408 - RNA, 32 nt, Homo Sapiens
gaagaccgcccggaaggaucugggggccccgg

SEQ ID NO: 217409 - RNA, 30 nt, Homo Sapiens
aggacucugcggaggaacggcaggaagaac

SEQ ID NO: 217410 - RNA, 32 nt, Homo Sapiens
acacuuacaaaauaaaacauaacugaaagaag

SEQ ID NO: 217411 - RNA, 32 nt, Homo Sapiens
cuuuccuuuuaaaaggcccuguggucugggga

SEQ ID NO: 217412 - RNA, 32 nt, Homo Sapiens
acaaugcaaaauacacauuaaguaaaagaauu

SEQ ID NO: 217413 - RNA, 32 nt, Homo Sapiens
auuaugaaucacauauaaaaucuuacaauaca

SEQ ID NO: 217414 - RNA, 32 nt, Homo Sapiens
uucaugaaaaauuuauauccaauuauuuucca

SEQ ID NO: 217415 - RNA, 32 nt, Homo Sapiens
gcauugcugacagcuuccugaaguugcucauc

SEQ ID NO: 217416 - RNA, 32 nt, Homo Sapiens
cggcacguucucaccccugucaucucagcccc

SEQ ID NO: 217417 - RNA, 32 nt, Homo Sapiens
gggggaagagaggcaggcucucaguccccgcu

SEQ ID NO: 217418 - RNA, 32 nt, Homo Sapiens
cguggucgccugguggcuggacccccgggauu

SEQ ID NO: 217419 - RNA, 32 nt, Homo Sapiens
ccuggagccgacggaaggcgcucccaggaaua

SEQ ID NO: 217420 - RNA, 32 nt, Homo Sapiens
auguauguaacuaaagcuuuguccucugugaa

SEQ ID NO: 217421 - RNA, 32 nt, Homo Sapiens
uugauacuuguaacuuuuuuuuuuuuuugguu

SEQ ID NO: 217422 - RNA, 32 nt, Homo Sapiens
gugaaggcauuuauggucauuaccaaaaacua

SEQ ID NO: 217423 - RNA, 32 nt, Homo Sapiens
agggcggaaggggacaggcuugaggcuuggau

SEQ ID NO: 217424 - RNA, 32 nt, Homo Sapiens
ucccggcccugaugcguguacacucugcgggc

SEQ ID NO: 217425 - RNA, 32 nt, Homo Sapiens
acuaagagcuuguggagcuugguuuuaaaauc

SEQ ID NO: 217426 - RNA, 32 nt, Homo Sapiens
ugauggcaggcacaacaucugaaacccacaaa

SEQ ID NO: 217427 - RNA, 32 nt, Homo Sapiens
cugccagaccucuucuggaggaagacuggaca

SEQ ID NO: 217428 - RNA, 32 nt, Homo Sapiens
uucccucacucgucucccccaacagcuggacc

SEQ ID NO: 217429 - RNA, 32 nt, Homo Sapiens
gaacauucccagcgcucucccgagggugccac

SEQ ID NO: 217430 - RNA, 32 nt, Homo Sapiens
caccucgucaacaacagucuuuuguugagaaa

SEQ ID NO: 217431 - RNA, 32 nt, Homo Sapiens
ccacugggccggggagucucuccagcuucucu

SEQ ID NO: 217432 - RNA, 32 nt, Homo Sapiens
auuuuucuauacugauguuuucguuuugccaa

SEQ ID NO: 217433 - RNA, 32 nt, Homo Sapiens
aauuauucauauauuucuauacuagauaaaga

SEQ ID NO: 217434 - RNA, 32 nt, Homo Sapiens
ccggauccggugcugugcacacugguggggga

SEQ ID NO: 217435 - RNA, 32 nt, Homo Sapiens
guggccacgacgaggucccgccgcccguguuc

SEQ ID NO: 217436 - RNA, 32 nt, Homo Sapiens
gaacugcuacaacuaacaaacauuuguuucca

SEQ ID NO: 217437 - RNA, 32 nt, Homo Sapiens
aacaaaaagcaguagcaucaacaucaacaaaa

SEQ ID NO: 217438 - RNA, 32 nt, Homo Sapiens
auuguuuccaaaaggguucucuuaauaugucu

SEQ ID NO: 217439 - RNA, 32 nt, Homo Sapiens
caaaucuauuucuaauuauacauauaucagua

SEQ ID NO: 217440 - RNA, 32 nt, Homo Sapiens
accacuaaucaucagagaaaugcaaaucaaaa

SEQ ID NO: 217441 - RNA, 32 nt, Homo Sapiens
cugauuugcacaaggugacuaaaggaccagca

SEQ ID NO: 217442 - RNA, 32 nt, Homo Sapiens
ucaguccaccgccccuacccucccucagagau

SEQ ID NO: 217443 - RNA, 32 nt, Homo Sapiens
aagcuuuuuucuucuuuuuuuuuaaguuuuaa

SEQ ID NO: 217444 - RNA, 32 nt, Homo Sapiens
guauucucagagccugagaguuguuacaguug

SEQ ID NO: 217445 - RNA, 32 nt, Homo Sapiens
uccccaagccccacugugccuuguugucugcu

SEQ ID NO: 217446 - RNA, 32 nt, Homo Sapiens
uuccuggaugucaaguucaagggucuaagagg

SEQ ID NO: 217447 - RNA, 32 nt, Homo Sapiens
cagcugcagacacaacaacgugcagcauuuuu

SEQ ID NO: 217448 - RNA, 31 nt, Homo Sapiens
cacuugccuuacagccugcccuggccgucac

SEQ ID NO: 217449 - RNA, 32 nt, Homo Sapiens
ggcggcgcggaucgcacgucggcggccggugg

SEQ ID NO: 217450 - RNA, 31 nt, Homo Sapiens
gaccuugugaucugccugccuuggccucuca

SEQ ID NO: 217451 - RNA, 32 nt, Homo Sapiens
gacuggccccacuuccuaagcacugcccugcc

SEQ ID NO: 217452 - RNA, 32 nt, Homo Sapiens
gauaauauucugcccaacuccauccucuguua

SEQ ID NO: 217453 - RNA, 32 nt, Homo Sapiens
ggggcagacuuccagccaggaaguagcauugg

SEQ ID NO: 217454 - RNA, 32 nt, Homo Sapiens
uggcagugagaagaagcaucgagggcgagggg

SEQ ID NO: 217455 - RNA, 32 nt, Homo Sapiens
gcagcccagacaccugugcuccuggcacccuu

SEQ ID NO: 217456 - RNA, 32 nt, Homo Sapiens
aagaaaggcuuauauuuaaugcaucuauguuu

SEQ ID NO: 217457 - RNA, 32 nt, Homo Sapiens
aagcauuaaaaauuauuuuucuuaaaaucucu

SEQ ID NO: 217458 - RNA, 32 nt, Homo Sapiens
ccgcuggaucugcuacgccgccgcccgggccc

SEQ ID NO: 217459 - RNA, 32 nt, Homo Sapiens
cacgcguguuuuuuccuuuucauuucagccug

SEQ ID NO: 217460 - RNA, 32 nt, Homo Sapiens
ccacaguuuagcaccuaguuaaaagaaagggc

SEQ ID NO: 217461 - RNA, 32 nt, Homo Sapiens
aauuucccccuguucuuaacacuuccuauuag

SEQ ID NO: 217462 - RNA, 32 nt, Homo Sapiens
ccaguggaaaggaaagguaguaccuauucuuc

SEQ ID NO: 217463 - RNA, 32 nt, Homo Sapiens
agaaaaaagguauugaaauauuaaauggccac

SEQ ID NO: 217464 - RNA, 31 nt, Homo Sapiens
uggcaguccagcagccaagaggguaguggug

SEQ ID NO: 217465 - RNA, 32 nt, Homo Sapiens
uuaguaaaauguccuauuucugauuauuaaga

SEQ ID NO: 217466 - RNA, 32 nt, Homo Sapiens
gacucaccaacgggcggggcggcggcccaugg

SEQ ID NO: 217467 - RNA, 32 nt, Homo Sapiens
gauuuaucaaaauaaauauuacuaaucgaaaa

SEQ ID NO: 217468 - RNA, 32 nt, Homo Sapiens
ugggaauccaacaauuaccaguccuucugccu

SEQ ID NO: 217469 - RNA, 32 nt, Homo Sapiens
gcgggaagcggcggaggcuccgccauggccuc

SEQ ID NO: 217470 - RNA, 32 nt, Homo Sapiens
guagauuaauauuuucaggauguaucauuuuu

SEQ ID NO: 217471 - RNA, 32 nt, Homo Sapiens
augauuuuuucccucuaauuauagaaaguuaa

SEQ ID NO: 217472 - RNA, 32 nt, Homo Sapiens
cgaggcugagggcagagcuguuugccuggcag

SEQ ID NO: 217473 - RNA, 32 nt, Homo Sapiens
cagacauccuuuccucucacaagcugugugac

SEQ ID NO: 217474 - RNA, 32 nt, Homo Sapiens
gccugcccacccccggccagaucccuggagcu

SEQ ID NO: 217475 - RNA, 32 nt, Homo Sapiens
gacacagacagagggaguugggacaugcaugc

SEQ ID NO: 217476 - RNA, 32 nt, Homo Sapiens
auguggcacacgccagcugcgguuucccggag

SEQ ID NO: 217477 - RNA, 32 nt, Homo Sapiens
cacgcuccagcggcugccccagcuacgcuggg

SEQ ID NO: 217478 - RNA, 27 nt, Homo Sapiens
ucacaccauucauucuggucauuuccc

SEQ ID NO: 217479 - RNA, 32 nt, Homo Sapiens
acuaagggacaauuauuuuaagaccauggauu

SEQ ID NO: 217480 - RNA, 32 nt, Homo Sapiens
auuauagcuccuauuaaauuccuuccaugaua

SEQ ID NO: 217481 - RNA, 32 nt, Homo Sapiens
agguggcagcgcgagcugggaccagcgucucg

SEQ ID NO: 217482 - RNA, 32 nt, Homo Sapiens
ggggucccuccaccugggggccccuggacacu

SEQ ID NO: 217483 - RNA, 32 nt, Homo Sapiens
acauuucagugucaauguauuuuaagcuucag

SEQ ID NO: 217484 - RNA, 32 nt, Homo Sapiens
gaggaacacaugucaagcaggaaccuuggcau

SEQ ID NO: 217485 - RNA, 32 nt, Homo Sapiens
aggagauggggucccggcacccaucuguauca

SEQ ID NO: 217486 - RNA, 32 nt, Homo Sapiens
guaacuaauuuaaugugaauacuguuaaacag

SEQ ID NO: 217487 - RNA, 32 nt, Homo Sapiens
uuaaaguguacuuuuuuccccuuuaauccaau

SEQ ID NO: 217488 - RNA, 32 nt, Homo Sapiens
auuguuuagcagauggaguguuuucuguugaa

SEQ ID NO: 217489 - RNA, 32 nt, Homo Sapiens
uguagauagcgcuuuugaaaaauacauauauu

SEQ ID NO: 217490 - RNA, 32 nt, Homo Sapiens
cucuguuuucuuuuccuuuugaaaaagagucc

SEQ ID NO: 217491 - RNA, 32 nt, Homo Sapiens
guaaccgaaaguuuuuucaaaaauccuagaug

SEQ ID NO: 217492 - RNA, 32 nt, Homo Sapiens
cacugaaauggcagcccuggaaucuacaauuu

SEQ ID NO: 217493 - RNA, 32 nt, Homo Sapiens
caaccagucaaugaaacagacacaccugcaca

SEQ ID NO: 217494 - RNA, 32 nt, Homo Sapiens
ucauguuguuuuguuuuccccagggcuuucac

SEQ ID NO: 217495 - RNA, 32 nt, Homo Sapiens
ugcggcaugcagcuucuuagccugcagcuucu

SEQ ID NO: 217496 - RNA, 32 nt, Homo Sapiens
uguauuuuuauaagugauacaagggccccaug

SEQ ID NO: 217497 - RNA, 32 nt, Homo Sapiens
aaacgggcccugcggccuugcggccgcccggg

SEQ ID NO: 217498 - RNA, 32 nt, Homo Sapiens
ugcgcccucucgcgccgcacgcucugcggguu

SEQ ID NO: 217499 - RNA, 32 nt, Homo Sapiens
uccauucccgcuccuggaacacuuccugcagc

SEQ ID NO: 217500 - RNA, 32 nt, Homo Sapiens
cuuggugaauuuugaagucuucaucaguauau

SEQ ID NO: 217501 - RNA, 32 nt, Homo Sapiens
auauaccuugcacugauuuugucugaaugccc

SEQ ID NO: 217502 - RNA, 32 nt, Homo Sapiens
ccugucagauuguugauauauaccuucuguaa

SEQ ID NO: 217503 - RNA, 32 nt, Homo Sapiens
ccagcggucacgcccggcccagcccugccggc

SEQ ID NO: 217504 - RNA, 32 nt, Homo Sapiens
ggaaaagcggguucgagucagcagccuuugga

SEQ ID NO: 217505 - RNA, 32 nt, Homo Sapiens
ugggcgcuggaaccaucaaggugagguucauc

SEQ ID NO: 217506 - RNA, 32 nt, Homo Sapiens
ugcggccuuccacaguguuugugucccugauu

SEQ ID NO: 217507 - RNA, 32 nt, Homo Sapiens
agaaccagcuggaaagccugcagcggcgugua

SEQ ID NO: 217508 - RNA, 32 nt, Homo Sapiens
ggcgacagcggagcagcgugcgcgcgggggaa

SEQ ID NO: 217509 - RNA, 32 nt, Homo Sapiens
agccacgaggucggggcgagggcagaggugau

SEQ ID NO: 217510 - RNA, 32 nt, Homo Sapiens
cuaguccggccccggcuccgggccccccaacc

SEQ ID NO: 217511 - RNA, 32 nt, Homo Sapiens
uaguuaggagcuauggcuaaacaucauccuga

SEQ ID NO: 217512 - RNA, 32 nt, Homo Sapiens
gaagguaucucugugucuuacucugugcaaag

SEQ ID NO: 217513 - RNA, 32 nt, Homo Sapiens
uaaagacauggcuggaugcgcugcugaccaac

SEQ ID NO: 217514 - RNA, 32 nt, Homo Sapiens
caccaguucaccuccuccagcuccaucaaggg

SEQ ID NO: 217515 - RNA, 32 nt, Homo Sapiens
guuuguaaacacaccagucagcacccuguguc

SEQ ID NO: 217516 - RNA, 32 nt, Homo Sapiens
uguugcccugcggcgccccuuugaagacaggc

SEQ ID NO: 217517 - RNA, 32 nt, Homo Sapiens
aggaugagggaagcggcuguaccauguggggc

SEQ ID NO: 217518 - RNA, 32 nt, Homo Sapiens
uccaugcuguuuuuauuuuuuaucuccguaau

SEQ ID NO: 217519 - RNA, 32 nt, Homo Sapiens
uuuuuaucugcuacucuuuauuucauagaguc

SEQ ID NO: 217520 - RNA, 32 nt, Homo Sapiens
uguaaucagugaagggcugugcaccuuguacu

SEQ ID NO: 217521 - RNA, 32 nt, Homo Sapiens
gcagauccucaauaaacauuucauuucccacc

SEQ ID NO: 217522 - RNA, 32 nt, Homo Sapiens
aaaccugcguguguggcugugcaccgcucguu

SEQ ID NO: 217523 - RNA, 32 nt, Homo Sapiens
gggccccauaaacuguggcaucuggcagcagg

SEQ ID NO: 217524 - RNA, 32 nt, Homo Sapiens
caaaggaugaagaggagagaaaaggaacucac

SEQ ID NO: 217525 - RNA, 32 nt, Homo Sapiens
ccuccagcgggcggggccguuggcggagcaga

SEQ ID NO: 217526 - RNA, 32 nt, Homo Sapiens
gcuuugacaggaccagcucuugccucauggca

SEQ ID NO: 217527 - RNA, 32 nt, Homo Sapiens
gccccucgcccggcuuugccuaaccgccacga

SEQ ID NO: 217528 - RNA, 32 nt, Homo Sapiens
ggauguggcaaugaaaugauggugcaaguucc

SEQ ID NO: 217529 - RNA, 32 nt, Homo Sapiens
ggauaaggugggggcgggggaaaugggggaau

SEQ ID NO: 217530 - RNA, 32 nt, Homo Sapiens
gggugacuuaagguaaagagggauaaagguga

SEQ ID NO: 217531 - RNA, 31 nt, Homo Sapiens
ccgcuguggcacugcugcgccucugcugcgc

SEQ ID NO: 217532 - RNA, 32 nt, Homo Sapiens
uaaacaaauaaauguuuccuuuagauugcuca

SEQ ID NO: 217533 - RNA, 32 nt, Homo Sapiens
guuuuuuaaaauuguucuccagcauuuuaugg

SEQ ID NO: 217534 - RNA, 32 nt, Homo Sapiens
cuguuguaaacauauuugaaaacuauuaccaa

SEQ ID NO: 217535 - RNA, 32 nt, Homo Sapiens
uaaucauuuaaccaaagaagauguguagugcc

SEQ ID NO: 217536 - RNA, 32 nt, Homo Sapiens
uguuggacgauuuuuucuucugauuguugaau

SEQ ID NO: 217537 - RNA, 32 nt, Homo Sapiens
gcagccggccccaccgcagcuaccucagcagu

SEQ ID NO: 217538 - RNA, 32 nt, Homo Sapiens
gcacuuaaaauacaaagucuauauuauugcau

SEQ ID NO: 217539 - RNA, 32 nt, Homo Sapiens
uuuuguuuuucccccucuuccuaucuuacaac

SEQ ID NO: 217540 - RNA, 32 nt, Homo Sapiens
ugaauaacccauauauacaacaaaguuucugc

SEQ ID NO: 217541 - RNA, 32 nt, Homo Sapiens
uuuagcugcugccucccucugauuccccagcu

SEQ ID NO: 217542 - RNA, 32 nt, Homo Sapiens
auuuaaauguuuuuaagucuuaaaagggcaag

SEQ ID NO: 217543 - RNA, 31 nt, Homo Sapiens
acuuuuaacuggguaaauccaagggcucgug

SEQ ID NO: 217544 - RNA, 32 nt, Homo Sapiens
guggggcugggcccuccugcccccgcccaucc

SEQ ID NO: 217545 - RNA, 31 nt, Homo Sapiens
ucuccccggagcgggccgagagccuguccuc

SEQ ID NO: 217546 - RNA, 32 nt, Homo Sapiens
cuuucugucugguuaaaaugucuuaaaaagua

SEQ ID NO: 217547 - RNA, 32 nt, Homo Sapiens
ggagaauucaacacaggugugcugccuccucu

SEQ ID NO: 217548 - RNA, 32 nt, Homo Sapiens
aaccccggcagcguggagcugcacaguggccu

SEQ ID NO: 217549 - RNA, 32 nt, Homo Sapiens
aacccugcccucuuccuccccuguccccauuc

SEQ ID NO: 217550 - RNA, 32 nt, Homo Sapiens
ucgagugguguuggagcgccggaggcuagugg

SEQ ID NO: 217551 - RNA, 32 nt, Homo Sapiens
gggguuggccaagcucucggaggagaucucgg

SEQ ID NO: 217552 - RNA, 32 nt, Homo Sapiens
uuccagggagaaugggaaagccagggggcaua

SEQ ID NO: 217553 - RNA, 32 nt, Homo Sapiens
agaggaggaugaugaggaaggcugugccagga

SEQ ID NO: 217554 - RNA, 32 nt, Homo Sapiens
aauucucuauauauuuauuguguacaauguaa

SEQ ID NO: 217555 - RNA, 32 nt, Homo Sapiens
aagccuacuucauauuggcccccucaguuagc

SEQ ID NO: 217556 - RNA, 32 nt, Homo Sapiens
caggcuggccuuuggaucucucuuccaagccu

SEQ ID NO: 217557 - RNA, 32 nt, Homo Sapiens
gauagcccaauuucuuugauaaauuauuucau

SEQ ID NO: 217558 - RNA, 32 nt, Homo Sapiens
uauuggaaggcacauuuucauuucugaugcag

SEQ ID NO: 217559 - RNA, 32 nt, Homo Sapiens
auuacuaaggauuuucacaaugcugcacuggg

SEQ ID NO: 217560 - RNA, 32 nt, Homo Sapiens
guuucuuagcaacagaaaaaucaaacuucugu

SEQ ID NO: 217561 - RNA, 32 nt, Homo Sapiens
ggccgacgcguccaacucccaaggcugccgug

SEQ ID NO: 217562 - RNA, 31 nt, Homo Sapiens
cgggcgagucacugccucucccuggcccuca

SEQ ID NO: 217563 - RNA, 32 nt, Homo Sapiens
gugugacuaaucuccuucucuucgcuccacag

SEQ ID NO: 217564 - RNA, 32 nt, Homo Sapiens
accguccacagcuuuggaauaaaccauccugg

SEQ ID NO: 217565 - RNA, 32 nt, Homo Sapiens
auggcugucacaaagcuuuauuugagcaaauu

SEQ ID NO: 217566 - RNA, 32 nt, Homo Sapiens
uaaugggaggggggccuggggguauuuauuua

SEQ ID NO: 217567 - RNA, 31 nt, Homo Sapiens
ugacuggguuuugcuuuucgucccagccuug

SEQ ID NO: 217568 - RNA, 32 nt, Homo Sapiens
gcugcuggacggguggcugcagcggggcgugg

SEQ ID NO: 217569 - RNA, 32 nt, Homo Sapiens
cccacagccuguccgcagccuggugccgugaa

SEQ ID NO: 217570 - RNA, 32 nt, Homo Sapiens
ggucucaccauguuggcuaggcugguuucgaa

SEQ ID NO: 217571 - RNA, 32 nt, Homo Sapiens
ccagggcugggggugagaaggggagucauuac

SEQ ID NO: 217572 - RNA, 32 nt, Homo Sapiens
aaaggcugcucuuaacuuugucucucuuugac

SEQ ID NO: 217573 - RNA, 32 nt, Homo Sapiens
uuuggagguuauugugauagucuugcaaacag

SEQ ID NO: 217574 - RNA, 32 nt, Homo Sapiens
gugcauuuacacaaggcuggcaggcacggccu

SEQ ID NO: 217575 - RNA, 32 nt, Homo Sapiens
uacaaugagucaauugcagaugaugcuauaac

SEQ ID NO: 217576 - RNA, 32 nt, Homo Sapiens
ugggaccaauacugcugaucauguucgaaauu

SEQ ID NO: 217577 - RNA, 32 nt, Homo Sapiens
acuuaacccagcuguguuccccaacucuguuc

SEQ ID NO: 217578 - RNA, 32 nt, Homo Sapiens
cugaggacagagcugcucuucuucuucuacgu

SEQ ID NO: 217579 - RNA, 32 nt, Homo Sapiens
gccuggacgagccccagggacagucuggcugc

SEQ ID NO: 217580 - RNA, 32 nt, Homo Sapiens
ccaggugugucugcgguacauaugagcgugcu

SEQ ID NO: 217581 - RNA, 32 nt, Homo Sapiens
ccugugaugcccugugaaauggcuugucuccu

SEQ ID NO: 217582 - RNA, 32 nt, Homo Sapiens
cugagucccagccccaggguccucccucggcu

SEQ ID NO: 217583 - RNA, 32 nt, Homo Sapiens
auauaauuaugaacugugaaaauggucuaauu

SEQ ID NO: 217584 - RNA, 32 nt, Homo Sapiens
ucuucuuuuuaacuguguaauugguaauuacu

SEQ ID NO: 217585 - RNA, 32 nt, Homo Sapiens
ugggcagggcagagacccucaaaugcucggga

SEQ ID NO: 217586 - RNA, 32 nt, Homo Sapiens
cagucgccgcgcugcacgcccggggugaaccc

SEQ ID NO: 217587 - RNA, 32 nt, Homo Sapiens
ggacucugccucuuggaguuugguagcuacuu

SEQ ID NO: 217588 - RNA, 32 nt, Homo Sapiens
ccaccacggagccccagggccccugggcuugu

SEQ ID NO: 217589 - RNA, 32 nt, Homo Sapiens
uggguuuugugcauaguuuuuacaaaccuugg

SEQ ID NO: 217590 - RNA, 32 nt, Homo Sapiens
uccccugcugcccuuggcuuucugggccuagc

SEQ ID NO: 217591 - RNA, 32 nt, Homo Sapiens
agcucuacuuuggaauuaucugaguagaaaau

SEQ ID NO: 217592 - RNA, 32 nt, Homo Sapiens
uaguauccuagggcaauuguauuguuaaugac

SEQ ID NO: 217593 - RNA, 32 nt, Homo Sapiens
ugcuuuccuaaauugcaauauggccuugguau

SEQ ID NO: 217594 - RNA, 32 nt, Homo Sapiens
cacagcaaccccagguguccagagcacugccc

SEQ ID NO: 217595 - RNA, 32 nt, Homo Sapiens
ggacagcuuggagauagggcccggaauugcgg

SEQ ID NO: 217596 - RNA, 32 nt, Homo Sapiens
gcucacacauauauguuucuuaccuuagccug

SEQ ID NO: 217597 - RNA, 32 nt, Homo Sapiens
aagaagaggguggagcaggaggcucucacugg

SEQ ID NO: 217598 - RNA, 32 nt, Homo Sapiens
cccccuuaauauuuaagaauuaaaagaugaug

SEQ ID NO: 217599 - RNA, 32 nt, Homo Sapiens
cauaacuuucugggaaaccuuauuuagguaua

SEQ ID NO: 217600 - RNA, 32 nt, Homo Sapiens
uuagacucugugcauuaauaaaacacaccuag

SEQ ID NO: 217601 - RNA, 32 nt, Homo Sapiens
aaugauguuugauucuuaauuuuucugucccu

SEQ ID NO: 217602 - RNA, 32 nt, Homo Sapiens
gcaaguaaaaggaaaugcaaguaaccaccugg

SEQ ID NO: 217603 - RNA, 32 nt, Homo Sapiens
aaccuaccuuguuguuuucucauauuaagaaa

SEQ ID NO: 217604 - RNA, 32 nt, Homo Sapiens
uaauuauguacaacauuuauauauugucugua

SEQ ID NO: 217605 - RNA, 32 nt, Homo Sapiens
cuucggagagcuccccauggcuccucaccacc

SEQ ID NO: 217606 - RNA, 32 nt, Homo Sapiens
guaucuuuaauucuugucauccaggucaacau

SEQ ID NO: 217607 - RNA, 32 nt, Homo Sapiens
cucuggcugcgcacucccgaccgcgacgucca

SEQ ID NO: 217608 - RNA, 32 nt, Homo Sapiens
ugcucuauuuuuguuuaugugugauagugguu

SEQ ID NO: 217609 - RNA, 32 nt, Homo Sapiens
acccaguuaaacaugagaaaagugaggcucag

SEQ ID NO: 217610 - RNA, 32 nt, Homo Sapiens
ggagcugcggggcagguguugcagcuuguggg

SEQ ID NO: 217611 - RNA, 32 nt, Homo Sapiens
uuugugccuaaggaauaauaugcaaaagaacc

SEQ ID NO: 217612 - RNA, 32 nt, Homo Sapiens
auagauauauuucugaggaaaauggacucaga

SEQ ID NO: 217613 - RNA, 32 nt, Homo Sapiens
ggcugcaccauuuuuguaggccugcauuguau

SEQ ID NO: 217614 - RNA, 32 nt, Homo Sapiens
ucuguuuaaaaauaaacugaauauggauguuu

SEQ ID NO: 217615 - RNA, 32 nt, Homo Sapiens
cuaccuggccauccucuuucucuuccggaugu

SEQ ID NO: 217616 - RNA, 32 nt, Homo Sapiens
gccugcgcgccugcagagcggcggcuggagac

SEQ ID NO: 217617 - RNA, 32 nt, Homo Sapiens
ccgccccacccuccccggcugggagggcucug

SEQ ID NO: 217618 - RNA, 32 nt, Homo Sapiens
cgagaggauuccugggugggggugggcgugga

SEQ ID NO: 217619 - RNA, 32 nt, Homo Sapiens
guaauagauaccaguuauucugcacaaaacuu

SEQ ID NO: 217620 - RNA, 32 nt, Homo Sapiens
uccugcugggcugcuccugguugacuacauau

SEQ ID NO: 217621 - RNA, 32 nt, Homo Sapiens
aacaucugacauuuucauaaacugguaucucu

SEQ ID NO: 217622 - RNA, 32 nt, Homo Sapiens
uggccacugccgggugcccgcguggggucgcg

SEQ ID NO: 217623 - RNA, 32 nt, Homo Sapiens
gggaaaauguugccaauagacuugcuugacuc

SEQ ID NO: 217624 - RNA, 32 nt, Homo Sapiens
uaauuuaaacaauguggcacaaacauaguuuu

SEQ ID NO: 217625 - RNA, 32 nt, Homo Sapiens
cggaaccagccagcugccccuggggccuuugc

SEQ ID NO: 217626 - RNA, 32 nt, Homo Sapiens
acugcccgccuccgaggccgccggccgcuucu

SEQ ID NO: 217627 - RNA, 32 nt, Homo Sapiens
auucuccugaagaugccuggaaagguugcaaa

SEQ ID NO: 217628 - RNA, 32 nt, Homo Sapiens
gaggggguggaucaccugaggucgggaguucu

SEQ ID NO: 217629 - RNA, 32 nt, Homo Sapiens
uuccacaugcaaagccaaaaccucugaacuuc

SEQ ID NO: 217630 - RNA, 32 nt, Homo Sapiens
agugcuuucuaaaaggaaauuuuuucaccuuu

SEQ ID NO: 217631 - RNA, 31 nt, Homo Sapiens
gugcggguggcgugccugccugcacggcccu

SEQ ID NO: 217632 - RNA, 32 nt, Homo Sapiens
gcucaugcuuggagagauagagucuuggccau

SEQ ID NO: 217633 - RNA, 32 nt, Homo Sapiens
aucugguucaguguuucccugggcugaaguua

SEQ ID NO: 217634 - RNA, 32 nt, Homo Sapiens
guguaaacagugaaagguauuugcuuguugaa

SEQ ID NO: 217635 - RNA, 32 nt, Homo Sapiens
uaucuuuguaaauuauuuuaugucauaguuua

SEQ ID NO: 217636 - RNA, 32 nt, Homo Sapiens
uggcuucccugauggugucauguuucagcgca

SEQ ID NO: 217637 - RNA, 32 nt, Homo Sapiens
cagccccucccagcacccccagccccacgacc

SEQ ID NO: 217638 - RNA, 32 nt, Homo Sapiens
uguaucuugggggacagggcuggcccagcccu

SEQ ID NO: 217639 - RNA, 32 nt, Homo Sapiens
cuugaguccugggcuaacuaccucugauccuc

SEQ ID NO: 217640 - RNA, 32 nt, Homo Sapiens
uugaauuuguuguuuuuagaaaacgaaugcau

SEQ ID NO: 217641 - RNA, 32 nt, Homo Sapiens
ccaccuuccagugagcucuggaugaagcucug

SEQ ID NO: 217642 - RNA, 32 nt, Homo Sapiens
caggggagaaauaccggaggagucaaacuaug

SEQ ID NO: 217643 - RNA, 32 nt, Homo Sapiens
cucaggcauuuucuacucagcugugaccuuac

SEQ ID NO: 217644 - RNA, 32 nt, Homo Sapiens
ugaggucagguggcucuggguucugacccuga

SEQ ID NO: 217645 - RNA, 32 nt, Homo Sapiens
cauaagccaacgccagagccccuccaccucag

SEQ ID NO: 217646 - RNA, 32 nt, Homo Sapiens
ucuugucccuaggaauucuccucccucaggag

SEQ ID NO: 217647 - RNA, 32 nt, Homo Sapiens
cgccacccgcggccccagcuuuccgccugcac

SEQ ID NO: 217648 - RNA, 32 nt, Homo Sapiens
aaauuagcugggugugguggcacgugccuguu

SEQ ID NO: 217649 - RNA, 32 nt, Homo Sapiens
auuuagaaacagaggacuuaugcagaagcauu

SEQ ID NO: 217650 - RNA, 32 nt, Homo Sapiens
cagcccagccucagccagaaaccaguaaagaa

SEQ ID NO: 217651 - RNA, 32 nt, Homo Sapiens
ccgcgccgggucgcgccgcagucuuccucaag

SEQ ID NO: 217652 - RNA, 32 nt, Homo Sapiens
uaaugcaugaccuuccuaaaaauacccacagc

SEQ ID NO: 217653 - RNA, 32 nt, Homo Sapiens
caucaggagacgggacacgccacacccagcag

SEQ ID NO: 217654 - RNA, 32 nt, Homo Sapiens
gggucucuggguggagagcugacccaggaagg

SEQ ID NO: 217655 - RNA, 32 nt, Homo Sapiens
uugggcaguggagaggggacuuggauaggagc

SEQ ID NO: 217656 - RNA, 32 nt, Homo Sapiens
agcugcagccugcccuggcccuggcucuggcc

SEQ ID NO: 217657 - RNA, 29 nt, Homo Sapiens
ugaucucggggacugaggaugcaggugca

SEQ ID NO: 217658 - RNA, 32 nt, Homo Sapiens
cauuuggcccuguugagcacucuucuugaagc

SEQ ID NO: 217659 - RNA, 32 nt, Homo Sapiens
gacggagcgcgccggggcugugggugccaggg

SEQ ID NO: 217660 - RNA, 32 nt, Homo Sapiens
aucaaguggguuguucugugccugcagcauag

SEQ ID NO: 217661 - RNA, 32 nt, Homo Sapiens
gggaccugagcuggcuguuuccugcuuugccu

SEQ ID NO: 217662 - RNA, 32 nt, Homo Sapiens
augcugcaucacaugguaggguguugccuugc

SEQ ID NO: 217663 - RNA, 32 nt, Homo Sapiens
cauugggaauuaggcuucaacauacaaauuug

SEQ ID NO: 217664 - RNA, 32 nt, Homo Sapiens
auuuagggacgaauagcucuggcgauucaugg

SEQ ID NO: 217665 - RNA, 32 nt, Homo Sapiens
aucuuuuugauuaagagcacaaacuuuuuuuu

SEQ ID NO: 217666 - RNA, 32 nt, Homo Sapiens
ggccacggauccugacccgcccugcccacgau

SEQ ID NO: 217667 - RNA, 32 nt, Homo Sapiens
aaaaauauaugauggcuaacuguucaaaugcu

SEQ ID NO: 217668 - RNA, 32 nt, Homo Sapiens
cuugagaaacaaaaccacaggaggaaaggaag

SEQ ID NO: 217669 - RNA, 32 nt, Homo Sapiens
ugggugagaccuagcccccacccccacagagc

SEQ ID NO: 217670 - RNA, 32 nt, Homo Sapiens
ugguagccaggggaggggucugcacagcgaga

SEQ ID NO: 217671 - RNA, 32 nt, Homo Sapiens
uguuuguagagcuuuaccaaggaguuucccuc

SEQ ID NO: 217672 - RNA, 32 nt, Homo Sapiens
agcuuggcucugccuucugcagugugaguaac

SEQ ID NO: 217673 - RNA, 32 nt, Homo Sapiens
ccuaugaucuguccuuucccagccucgcuggu

SEQ ID NO: 217674 - RNA, 32 nt, Homo Sapiens
acccuggcggccucagcaucuguggagaugug

SEQ ID NO: 217675 - RNA, 32 nt, Homo Sapiens
uuugucaaacauaagugggaaccaaagaaaaa

SEQ ID NO: 217676 - RNA, 32 nt, Homo Sapiens
aguguggccuccuccuaccccaaauacaccca

SEQ ID NO: 217677 - RNA, 32 nt, Homo Sapiens
auggagugaaagacauaaaguggagaccaaga

SEQ ID NO: 217678 - RNA, 32 nt, Homo Sapiens
ggcacuuccuuccuuuucccgaacguccaggg

SEQ ID NO: 217679 - RNA, 32 nt, Homo Sapiens
cucacagcguccccuucugcaauguaggucuc

SEQ ID NO: 217680 - RNA, 32 nt, Homo Sapiens
cgccggaucugcucggccgcccgggaccgcca

SEQ ID NO: 217681 - RNA, 32 nt, Homo Sapiens
gucugucauuuuugaauacuguaaaacuguga

SEQ ID NO: 217682 - RNA, 32 nt, Homo Sapiens
ucagugacacacccaucccauccaccacuucc

SEQ ID NO: 217683 - RNA, 32 nt, Homo Sapiens
cacacugaggaggaucauggccugcuacgguc

SEQ ID NO: 217684 - RNA, 32 nt, Homo Sapiens
aggaauagcuaucugcagggcuuuuguuuugu

SEQ ID NO: 217685 - RNA, 32 nt, Homo Sapiens
cugcuugcucccagccccuuccccggcgaugc

SEQ ID NO: 217686 - RNA, 32 nt, Homo Sapiens
agaucgaaugaacaagaaaauucaacaguugc

SEQ ID NO: 217687 - RNA, 32 nt, Homo Sapiens
gcgacuguggcucgagcuggcccgcagacacg

SEQ ID NO: 217688 - RNA, 32 nt, Homo Sapiens
aaauuauuuaggaaacaaagcaugugagugcu

SEQ ID NO: 217689 - RNA, 32 nt, Homo Sapiens
uuguguuuguuguuuagagucuauuugcacuu

SEQ ID NO: 217690 - RNA, 32 nt, Homo Sapiens
uuccauguacuacuuuaagugauucaauaaau

SEQ ID NO: 217691 - RNA, 32 nt, Homo Sapiens
auccucuuaggcguuuccacgcccgcccccug

SEQ ID NO: 217692 - RNA, 32 nt, Homo Sapiens
ccauuccacucuauaauaaaacaaaagauuuu

SEQ ID NO: 217693 - RNA, 32 nt, Homo Sapiens
uggaagaagcagccgccgcagccccgguggaa

SEQ ID NO: 217694 - RNA, 32 nt, Homo Sapiens
cugcucccucugcucugggggugucugggagc

SEQ ID NO: 217695 - RNA, 32 nt, Homo Sapiens
uccuguuuauucaaaugugugauuuugcugaa

SEQ ID NO: 217696 - RNA, 32 nt, Homo Sapiens
uuaugaaaggcccuagagagauaccucauccu

SEQ ID NO: 217697 - RNA, 32 nt, Homo Sapiens
ccuuggaccuacucucccuccuccccaccauu

SEQ ID NO: 217698 - RNA, 32 nt, Homo Sapiens
uucaccucgcugugucccagguucaagcaguu

SEQ ID NO: 217699 - RNA, 32 nt, Homo Sapiens
uagaagcuuccacuuuucugcuuucuggggaa

SEQ ID NO: 217700 - RNA, 32 nt, Homo Sapiens
aagugguacccacuuccccuuuuuacuguagg

SEQ ID NO: 217701 - RNA, 32 nt, Homo Sapiens
ucuaaaagaugaauuccuauggcucugcaauu

SEQ ID NO: 217702 - RNA, 32 nt, Homo Sapiens
uuacuuuugucaaaacucauaauuuacuacuu

SEQ ID NO: 217703 - RNA, 32 nt, Homo Sapiens
uaccaagacugcagggauggcccgcagccuca

SEQ ID NO: 217704 - RNA, 32 nt, Homo Sapiens
acgggucuuaggaugucuguaauaaauaaaua

SEQ ID NO: 217705 - RNA, 32 nt, Homo Sapiens
aggaggagcuagccaaacaacaacaaaaacaa

SEQ ID NO: 217706 - RNA, 32 nt, Homo Sapiens
ggggguggggaacugggccuagcugugggagg

SEQ ID NO: 217707 - RNA, 32 nt, Homo Sapiens
ugugcuuccugauccaauggugccaaacccuu

SEQ ID NO: 217708 - RNA, 32 nt, Homo Sapiens
cuuaaucuauagaugagucagcuccacacuug

SEQ ID NO: 217709 - RNA, 32 nt, Homo Sapiens
ugguucugccccaccacaaaguuuucuguggc

SEQ ID NO: 217710 - RNA, 32 nt, Homo Sapiens
guguccauuucugcacacacguauaccucggc

SEQ ID NO: 217711 - RNA, 32 nt, Homo Sapiens
cuggcguccgucacgcucucgggcugcgggca

SEQ ID NO: 217712 - RNA, 32 nt, Homo Sapiens
cgguggaggcuccuguuuacagcccucucuuc

SEQ ID NO: 217713 - RNA, 32 nt, Homo Sapiens
cucagcuucuaaaucagaagcuuggacagguu

SEQ ID NO: 217714 - RNA, 32 nt, Homo Sapiens
cagaaaagagcaucacugccagcuaccgccau

SEQ ID NO: 217715 - RNA, 32 nt, Homo Sapiens
aaaauuuuucuuuccucaagaaaagaguuccu

SEQ ID NO: 217716 - RNA, 31 nt, Homo Sapiens
cugugcucagggagaaagacacuucuuugaa

SEQ ID NO: 217717 - RNA, 32 nt, Homo Sapiens
ugcuucuguggaacugguuaucugccauggcc

SEQ ID NO: 217718 - RNA, 32 nt, Homo Sapiens
ggcagagcuggguacugcugugcuuuugccau

SEQ ID NO: 217719 - RNA, 32 nt, Homo Sapiens
aauuagcauaucaaugcaauugcaugaauuuu

SEQ ID NO: 217720 - RNA, 32 nt, Homo Sapiens
ugcuacugugguuuuuaaauuuuugucuaggg

SEQ ID NO: 217721 - RNA, 32 nt, Homo Sapiens
cacagugauggauggugacugcaguugugacc

SEQ ID NO: 217722 - RNA, 32 nt, Homo Sapiens
gaaacuggccuucacagccacccaggcguucc

SEQ ID NO: 217723 - RNA, 32 nt, Homo Sapiens
caauacaguauugaaaaucagaucaucaacag

SEQ ID NO: 217724 - RNA, 32 nt, Homo Sapiens
acaccgacccgcccgcugcugugcccugggag

SEQ ID NO: 217725 - RNA, 32 nt, Homo Sapiens
ccaggcucucccgcccucucagggcacacaca

SEQ ID NO: 217726 - RNA, 32 nt, Homo Sapiens
gugccugagugcaugagacagaauagagacca

SEQ ID NO: 217727 - RNA, 32 nt, Homo Sapiens
ccuuccacaucagccucuguagaugagacuac

SEQ ID NO: 217728 - RNA, 32 nt, Homo Sapiens
guuugaagaaaaagguacaaaaauggcuuuua

SEQ ID NO: 217729 - RNA, 32 nt, Homo Sapiens
acguugucaggaggcccugggggauccugcug

SEQ ID NO: 217730 - RNA, 32 nt, Homo Sapiens
gcggcccgcaugcuaggcguggaccugcccau

SEQ ID NO: 217731 - RNA, 32 nt, Homo Sapiens
aaugcccccaaucacccgccccgccccgacgc

SEQ ID NO: 217732 - RNA, 32 nt, Homo Sapiens
uccucauccccuugcccucccccagcccaggg

SEQ ID NO: 217733 - RNA, 29 nt, Homo Sapiens
aggcccaucagaagaugaaagcuacuaau

SEQ ID NO: 217734 - RNA, 32 nt, Homo Sapiens
aaaguaaaagccauagguugcauaaaacuuug

SEQ ID NO: 217735 - RNA, 32 nt, Homo Sapiens
ugaguucucauccacagaggccaggcauggcc

SEQ ID NO: 217736 - RNA, 32 nt, Homo Sapiens
cucaguuguaaaaaagauguguauuaaauauc

SEQ ID NO: 217737 - RNA, 32 nt, Homo Sapiens
acugaacaaccugcuccugaaugacuacuggg

SEQ ID NO: 217738 - RNA, 32 nt, Homo Sapiens
uggaggaggaggaggggggcccggagugagag

SEQ ID NO: 217739 - RNA, 32 nt, Homo Sapiens
gcggaucccggggcugcugggcuuccugaguc

SEQ ID NO: 217740 - RNA, 32 nt, Homo Sapiens
gcucgaaagcaggaaaugggcggcaaaagcgc

SEQ ID NO: 217741 - RNA, 31 nt, Homo Sapiens
gaaaauuuugguaaucuucuagguucuaaaa

SEQ ID NO: 217742 - RNA, 32 nt, Homo Sapiens
cuuucuguuugcuuuaccacugcacuuguuau

SEQ ID NO: 217743 - RNA, 32 nt, Homo Sapiens
uauacaugaagaugagacccacaucuugauuu

SEQ ID NO: 217744 - RNA, 32 nt, Homo Sapiens
aaaauauauauuacuacuccuuuggaaaauag

SEQ ID NO: 217745 - RNA, 32 nt, Homo Sapiens
aacauucccagcccagccccgccccguuguga

SEQ ID NO: 217746 - RNA, 32 nt, Homo Sapiens
uacugugaauauuuaacaaacacuuacuugau

SEQ ID NO: 217747 - RNA, 32 nt, Homo Sapiens
cucucugagcagagaccccuuuguucuuguua

SEQ ID NO: 217748 - RNA, 32 nt, Homo Sapiens
caugcgugcgcgcacacacacacacacacauu

SEQ ID NO: 217749 - RNA, 32 nt, Homo Sapiens
cauacauccaacauuaaaagccacccccaaau

SEQ ID NO: 217750 - RNA, 32 nt, Homo Sapiens
uccccugcacccacccagcugucuggcccgau

SEQ ID NO: 217751 - RNA, 32 nt, Homo Sapiens
gugaggggcugagaaugagggcaccgacugug

SEQ ID NO: 217752 - RNA, 32 nt, Homo Sapiens
uuugcuuagauaaucccagaucauggccgggc

SEQ ID NO: 217753 - RNA, 32 nt, Homo Sapiens
ugcaucgguagcccugcccaccccuccagacc

SEQ ID NO: 217754 - RNA, 32 nt, Homo Sapiens
ugaguaccaagauaaacuuacaccacauacuu

SEQ ID NO: 217755 - RNA, 32 nt, Homo Sapiens
uuuuguuguuauauuuuauacacagaauagau

SEQ ID NO: 217756 - RNA, 32 nt, Homo Sapiens
aauacaaaaaucagccgggugugguggcaugc

SEQ ID NO: 217757 - RNA, 31 nt, Homo Sapiens
aaugugcuuguacauagagugcuguagcugu

SEQ ID NO: 217758 - RNA, 32 nt, Homo Sapiens
aauaaugcucuuguguuuaccuaguauaugua

SEQ ID NO: 217759 - RNA, 32 nt, Homo Sapiens
ucaguagcacaccugccccugcauuucagugg

SEQ ID NO: 217760 - RNA, 32 nt, Homo Sapiens
aauauguucuguacaagugcucuuucacuagu

SEQ ID NO: 217761 - RNA, 32 nt, Homo Sapiens
uuauaaacagaauugaaugaaaagaguuacag

SEQ ID NO: 217762 - RNA, 32 nt, Homo Sapiens
aauguccuggggauuugaugccaggaaguacc

SEQ ID NO: 217763 - RNA, 32 nt, Homo Sapiens
uuuauguuuucacccuuucuacuuugucagaa

SEQ ID NO: 217764 - RNA, 32 nt, Homo Sapiens
auagagagaggggacuggugucugcgugaagg

SEQ ID NO: 217765 - RNA, 32 nt, Homo Sapiens
aaaauaguucccuuugccaacagaaacaugcc

SEQ ID NO: 217766 - RNA, 32 nt, Homo Sapiens
uaauugaaaauauuuucuggggauuuucucuu

SEQ ID NO: 217767 - RNA, 32 nt, Homo Sapiens
acuccaagcucuuuucuagagauaaucuccag

SEQ ID NO: 217768 - RNA, 32 nt, Homo Sapiens
cucccuggucuuccuccacacaguuguucacc

SEQ ID NO: 217769 - RNA, 32 nt, Homo Sapiens
cucguuugucccuccgccucccaccagcacgc

SEQ ID NO: 217770 - RNA, 32 nt, Homo Sapiens
cugguggauuuguuuuuaaccaaaaagaugaa

SEQ ID NO: 217771 - RNA, 32 nt, Homo Sapiens
ugaugaugaugaugaagaggaggaaggauuag

SEQ ID NO: 217772 - RNA, 32 nt, Homo Sapiens
gaggcagauuuuucuucauugcuuaguugagc

SEQ ID NO: 217773 - RNA, 32 nt, Homo Sapiens
gagacgaaaaggaaaagcaaaccagaaucuua

SEQ ID NO: 217774 - RNA, 32 nt, Homo Sapiens
gcgcgcacagcccagcagcccgaggccgcccg

SEQ ID NO: 217775 - RNA, 32 nt, Homo Sapiens
agcgggccgggcggguggccggccgaguuuuc

SEQ ID NO: 217776 - RNA, 27 nt, Homo Sapiens
uuaaaagucugcuauugaaagaaaaag

SEQ ID NO: 217777 - RNA, 32 nt, Homo Sapiens
gggaguggggccagccguggacagcugagguu

SEQ ID NO: 217778 - RNA, 29 nt, Homo Sapiens
aguuacauauguauacaugugccaugcug

SEQ ID NO: 217779 - RNA, 32 nt, Homo Sapiens
ccuguuccaggcgcccuccucaggccaaccac

SEQ ID NO: 217780 - RNA, 32 nt, Homo Sapiens
ccauguuuaaguguacuggauuuaacuaccuu

SEQ ID NO: 217781 - RNA, 32 nt, Homo Sapiens
uaacgcgucuuccugaguggugccaaacaaaa

SEQ ID NO: 217782 - RNA, 31 nt, Homo Sapiens
gccgagauguugcugcugcugcuacuggcgc

SEQ ID NO: 217783 - RNA, 32 nt, Homo Sapiens
auaaccaguuuucacaucugagacauuacaaa

SEQ ID NO: 217784 - RNA, 32 nt, Homo Sapiens
aucgacccaagaaggucgugggagaugagguc

SEQ ID NO: 217785 - RNA, 32 nt, Homo Sapiens
acauuuaaaaauauuucuuuaaaaauguuacu

SEQ ID NO: 217786 - RNA, 32 nt, Homo Sapiens
cccuucccugucugcugagcccuggcccccug

SEQ ID NO: 217787 - RNA, 32 nt, Homo Sapiens
uugaggccagugggcuuuugagcugaugguuc

SEQ ID NO: 217788 - RNA, 32 nt, Homo Sapiens
cugcacaggaaaaaccaccaguuacuugagug

SEQ ID NO: 217789 - RNA, 32 nt, Homo Sapiens
aaggcagagggggccucuccucacucagaggg

SEQ ID NO: 217790 - RNA, 32 nt, Homo Sapiens
gggccgccggagcgggacucggcgggcggaag

SEQ ID NO: 217791 - RNA, 32 nt, Homo Sapiens
acgcugcugacaccccugacuuuuauuaaaga

SEQ ID NO: 217792 - RNA, 32 nt, Homo Sapiens
aaccuuucaaaauaauaacaggcugggugcaa

SEQ ID NO: 217793 - RNA, 32 nt, Homo Sapiens
caaaacaugcuuccuuuucaaagaauagacuu

SEQ ID NO: 217794 - RNA, 32 nt, Homo Sapiens
cagcccucugcucucagcggcgccacagagag

SEQ ID NO: 217795 - RNA, 32 nt, Homo Sapiens
gcucugcucucccuguaaauguuaguugaacu

SEQ ID NO: 217796 - RNA, 32 nt, Homo Sapiens
ugauggguuuugcugagccauccacucugacu

SEQ ID NO: 217797 - RNA, 32 nt, Homo Sapiens
cagcaagccuugguuguaaaucuaguuugauu

SEQ ID NO: 217798 - RNA, 32 nt, Homo Sapiens
gaugccgccgacgaggaguccugucuggggca

SEQ ID NO: 217799 - RNA, 32 nt, Homo Sapiens
ucuggugauaaggacaugaugcuuuuacugaa

SEQ ID NO: 217800 - RNA, 32 nt, Homo Sapiens
cgccuguaaucccagcacuuugggaggcugug

SEQ ID NO: 217801 - RNA, 32 nt, Homo Sapiens
caaagaucacucccaaugccauauguaauaga

SEQ ID NO: 217802 - RNA, 32 nt, Homo Sapiens
ucucucacucuuuaauuauuuucagcuugucc

SEQ ID NO: 217803 - RNA, 32 nt, Homo Sapiens
gccuugucuccagccggccccgggaggagagc

SEQ ID NO: 217804 - RNA, 32 nt, Homo Sapiens
aauacaguaaucguuaauccagcaaaaagaaa

SEQ ID NO: 217805 - RNA, 32 nt, Homo Sapiens
ggaggccaggcagggcugcugcugaacauccc

SEQ ID NO: 217806 - RNA, 32 nt, Homo Sapiens
accaguggcaggccucaugccucgcucaguca

SEQ ID NO: 217807 - RNA, 32 nt, Homo Sapiens
uucauauaugagagugugaaugauacuuuauu

SEQ ID NO: 217808 - RNA, 30 nt, Homo Sapiens
ucuuauaauaaaaccuuuucugauugaaaa

SEQ ID NO: 217809 - RNA, 32 nt, Homo Sapiens
ugcccaucgggacgcccggccagccgcucggg

SEQ ID NO: 217810 - RNA, 32 nt, Homo Sapiens
aaaaaccgaaugcuuuuguuccguggagaugc

SEQ ID NO: 217811 - RNA, 32 nt, Homo Sapiens
cccggagaggucggguaagggggaaggagugu

SEQ ID NO: 217812 - RNA, 32 nt, Homo Sapiens
uauuaauucauuauuucuuaaauuuaauauaa

SEQ ID NO: 217813 - RNA, 32 nt, Homo Sapiens
uguaauaucagucaaauucuuaaagagauucc

SEQ ID NO: 217814 - RNA, 32 nt, Homo Sapiens
gcccaggcggcagagccgagggcccgcugccc

SEQ ID NO: 217815 - RNA, 32 nt, Homo Sapiens
uugcuauucucuucuuucucccccacaccuau

SEQ ID NO: 217816 - RNA, 32 nt, Homo Sapiens
uuccaccuugggaguucaagcgauuuucccgc

SEQ ID NO: 217817 - RNA, 32 nt, Homo Sapiens
ggcaauuuuggaaaaagagagggggaaaagua

SEQ ID NO: 217818 - RNA, 32 nt, Homo Sapiens
cgcccccgcccccgcccucccacccgcucaga

SEQ ID NO: 217819 - RNA, 32 nt, Homo Sapiens
ucccacuauuuucucuucgcaggacaugagac

SEQ ID NO: 217820 - RNA, 32 nt, Homo Sapiens
agaguuguacucaagacagauacugaaaaaau

SEQ ID NO: 217821 - RNA, 32 nt, Homo Sapiens
uaaucuacucucucuuuauccuccucccagau

SEQ ID NO: 217822 - RNA, 32 nt, Homo Sapiens
agagaguggaaugcuaaacaguucuuauccag

SEQ ID NO: 217823 - RNA, 32 nt, Homo Sapiens
cucucccagaagccucacucugcacagcgucc

SEQ ID NO: 217824 - RNA, 32 nt, Homo Sapiens
uuuuaauauaaauuauuaguuuacaucauuuu

SEQ ID NO: 217825 - RNA, 32 nt, Homo Sapiens
aauacuuuaaacaggaacucccagcccucccc

SEQ ID NO: 217826 - RNA, 32 nt, Homo Sapiens
cagaauaaaaauuagaguuagacaaaguauua

SEQ ID NO: 217827 - RNA, 32 nt, Homo Sapiens
ggacuucauuggcauuguuagucccacaggcc

SEQ ID NO: 217828 - RNA, 32 nt, Homo Sapiens
caguccuggaugccuccuccuacuggugccuu

SEQ ID NO: 217829 - RNA, 32 nt, Homo Sapiens
ggagccaaguggacgccccuccccuugcaccc

SEQ ID NO: 217830 - RNA, 32 nt, Homo Sapiens
aaaaaucuuacauuuccaacuucaaaauuggu

SEQ ID NO: 217831 - RNA, 32 nt, Homo Sapiens
ccgcuguguucgcuuuugagcucuccgauggg

SEQ ID NO: 217832 - RNA, 32 nt, Homo Sapiens
cagccccacugcccgucugccggagcgguucu

SEQ ID NO: 217833 - RNA, 32 nt, Homo Sapiens
ugguugucuauuucucacagcauauuuucagu

SEQ ID NO: 217834 - RNA, 32 nt, Homo Sapiens
gggcggcgguggcugcagcggcuggagcgggg

SEQ ID NO: 217835 - RNA, 32 nt, Homo Sapiens
aggaaguuuuaaaagaccauguuccuaagcuu

SEQ ID NO: 217836 - RNA, 32 nt, Homo Sapiens
gucgccagagcccugcccccagcccccagcaa

SEQ ID NO: 217837 - RNA, 32 nt, Homo Sapiens
uucagcuuccgguguggugggucccggauauc

SEQ ID NO: 217838 - RNA, 32 nt, Homo Sapiens
ccagcccgugcagcugcucuacuccaggaaug

SEQ ID NO: 217839 - RNA, 32 nt, Homo Sapiens
ccuauuacuaaagauauuugccugagguuagg

SEQ ID NO: 217840 - RNA, 32 nt, Homo Sapiens
ugcagccccuccccgcccccaccgucgggcag

SEQ ID NO: 217841 - RNA, 29 nt, Homo Sapiens
ugagucuuuguggacagaggcaggaucau

SEQ ID NO: 217842 - RNA, 32 nt, Homo Sapiens
auguuaaggcuuuguaucaaacauuuuguuac

SEQ ID NO: 217843 - RNA, 32 nt, Homo Sapiens
guuucuucuuugcauugacugcuaggaagcuc

SEQ ID NO: 217844 - RNA, 32 nt, Homo Sapiens
ucacacagcauggucucucuggcagcgucccc

SEQ ID NO: 217845 - RNA, 32 nt, Homo Sapiens
cuugguguggagguggaaaauggugauuuaaa

SEQ ID NO: 217846 - RNA, 32 nt, Homo Sapiens
gaggaagaagaaucuguauaucuguauauauu

SEQ ID NO: 217847 - RNA, 32 nt, Homo Sapiens
guggggaggucugaggcccauccucccacucu

SEQ ID NO: 217848 - RNA, 32 nt, Homo Sapiens
uguccuccugucaucuuccccacccugucccc

SEQ ID NO: 217849 - RNA, 32 nt, Homo Sapiens
gaucacucuauauaaaauauaaauacagugug

SEQ ID NO: 217850 - RNA, 32 nt, Homo Sapiens
auugcuugaggaaaaaugguuguaauuaauuu

SEQ ID NO: 217851 - RNA, 32 nt, Homo Sapiens
acuuacugauucccauaggugugucaacugac

SEQ ID NO: 217852 - RNA, 32 nt, Homo Sapiens
acggcccggaagaggagacgcguccccgggaa

SEQ ID NO: 217853 - RNA, 32 nt, Homo Sapiens
ggccucugcagcugcgcgggcgggcgugguug

SEQ ID NO: 217854 - RNA, 32 nt, Homo Sapiens
uuucuguauguggagcuaauguuuaccuugga

SEQ ID NO: 217855 - RNA, 32 nt, Homo Sapiens
cacaagcauaauaaaaagugucacuguaagau

SEQ ID NO: 217856 - RNA, 32 nt, Homo Sapiens
ugcaucaaaaaucaacacaauuuuauucacua

SEQ ID NO: 217857 - RNA, 32 nt, Homo Sapiens
agggagccgggcgcggggcccugcgcacucgg

SEQ ID NO: 217858 - RNA, 32 nt, Homo Sapiens
gggcugcugcuccucaguugcauuucuucagu

SEQ ID NO: 217859 - RNA, 32 nt, Homo Sapiens
aaggaagagauuuucaaggaaaccaucuaccg

SEQ ID NO: 217860 - RNA, 32 nt, Homo Sapiens
uguuggcuccuugagucaccaacagcagggac

SEQ ID NO: 217861 - RNA, 32 nt, Homo Sapiens
uuauuuacuuuguuuauugucuauaugccuuu

SEQ ID NO: 217862 - RNA, 32 nt, Homo Sapiens
cgugccguuacggccaucacggcggccgcagu

SEQ ID NO: 217863 - RNA, 32 nt, Homo Sapiens
agccccaggcucagccagagcugagcagacgu

SEQ ID NO: 217864 - RNA, 32 nt, Homo Sapiens
auuuaaauuuguuacagguuuucauguucagg

SEQ ID NO: 217865 - RNA, 32 nt, Homo Sapiens
aucugaaaauuggcuauuaauaccuucuacuu

SEQ ID NO: 217866 - RNA, 32 nt, Homo Sapiens
gccuuacccagcugggaagucucugcccugau

SEQ ID NO: 217867 - RNA, 32 nt, Homo Sapiens
augaccagugauuuuugauguugcuauuguaa

SEQ ID NO: 217868 - RNA, 32 nt, Homo Sapiens
ucagggaucacgggggcggggagguggagugg

SEQ ID NO: 217869 - RNA, 27 nt, Homo Sapiens
ugaggguugcagggaggcagggauauc

SEQ ID NO: 217870 - RNA, 32 nt, Homo Sapiens
aaaaauaaaaauuuauaauuugcccuugaauu

SEQ ID NO: 217871 - RNA, 32 nt, Homo Sapiens
gaaauaccaaacuuauggauuaucacuagguu

SEQ ID NO: 217872 - RNA, 32 nt, Homo Sapiens
acauggucaggggaggcccacaccucaauuca

SEQ ID NO: 217873 - RNA, 32 nt, Homo Sapiens
uuuacuuuuaaauuuuaacuuuuaaaaucuau

SEQ ID NO: 217874 - RNA, 32 nt, Homo Sapiens
gggccaggccuggccucugagaugcacuggcu

SEQ ID NO: 217875 - RNA, 32 nt, Homo Sapiens
gcuuaauuucugccuuuccccccucacacaug

SEQ ID NO: 217876 - RNA, 32 nt, Homo Sapiens
cgcccucuuaagccuggcucagcccucagggc

SEQ ID NO: 217877 - RNA, 32 nt, Homo Sapiens
uagaacuucaucgcccucugaucgccgaucac

SEQ ID NO: 217878 - RNA, 32 nt, Homo Sapiens
cugggccgcucccgggccagcgagggcugcga

SEQ ID NO: 217879 - RNA, 32 nt, Homo Sapiens
cacugcacuccagccugggcaacacagggaga

SEQ ID NO: 217880 - RNA, 32 nt, Homo Sapiens
ggggucagaguaaggccuaacacauaguuggc

SEQ ID NO: 217881 - RNA, 32 nt, Homo Sapiens
caugcagguugcaccgagaggucuggagcugu

SEQ ID NO: 217882 - RNA, 32 nt, Homo Sapiens
gccagugacagagaaggcagaggggagugugg

SEQ ID NO: 217883 - RNA, 32 nt, Homo Sapiens
agcacuuugggaagacaaugugggagaauggc

SEQ ID NO: 217884 - RNA, 27 nt, Homo Sapiens
ggauggcggcggcuccgcugcugcugc

SEQ ID NO: 217885 - RNA, 32 nt, Homo Sapiens
guuuauguauacuguuagaaugugguuauaua

SEQ ID NO: 217886 - RNA, 32 nt, Homo Sapiens
gaaaacaaagacugguuuagcagcagacauug

SEQ ID NO: 217887 - RNA, 32 nt, Homo Sapiens
guauaauaugcuuuuucuuagcuuuccuauga

SEQ ID NO: 217888 - RNA, 32 nt, Homo Sapiens
caggagcuuugcgggcagcuggagcgcuaccu

SEQ ID NO: 217889 - RNA, 32 nt, Homo Sapiens
gccgaggcggguggaucaggaggucaggagau

SEQ ID NO: 217890 - RNA, 32 nt, Homo Sapiens
cucucgucuuccagcccuccuuccccccguua

SEQ ID NO: 217891 - RNA, 32 nt, Homo Sapiens
auuuauccaucgagacuaucugguaugcguua

SEQ ID NO: 217892 - RNA, 32 nt, Homo Sapiens
aucccacagcccugcuuuuagagcagcucaag

SEQ ID NO: 217893 - RNA, 32 nt, Homo Sapiens
ccgcggggcaggggcugcugcgagcucgccgg

SEQ ID NO: 217894 - RNA, 30 nt, Homo Sapiens
cgcgcccggcccgugcugccauggccugcc

SEQ ID NO: 217895 - RNA, 32 nt, Homo Sapiens
aggggggaugggggcggggacugggggcgaag

SEQ ID NO: 217896 - RNA, 32 nt, Homo Sapiens
cauuaggguucacgucuuuucuuucugggaca

SEQ ID NO: 217897 - RNA, 32 nt, Homo Sapiens
agcaguccgggccaagcuccccggaacccucg

SEQ ID NO: 217898 - RNA, 32 nt, Homo Sapiens
uagaggucgcacuuaaagauuaugcacaucag

SEQ ID NO: 217899 - RNA, 32 nt, Homo Sapiens
ccagcgaauucuuuuucuuuuucuauuauuau

SEQ ID NO: 217900 - RNA, 32 nt, Homo Sapiens
ggccauguuugggucuccggccagggccuagg

SEQ ID NO: 217901 - RNA, 32 nt, Homo Sapiens
ucauuauguuuuuauagaauaauuaaaccgga

SEQ ID NO: 217902 - RNA, 32 nt, Homo Sapiens
guagccgcggggcgcgcagccagcuuuucccu

SEQ ID NO: 217903 - RNA, 32 nt, Homo Sapiens
ccucucugcgcugaggcccagccccuccagca

SEQ ID NO: 217904 - RNA, 32 nt, Homo Sapiens
uccucccugugcugcucugagauggagucuuc

SEQ ID NO: 217905 - RNA, 32 nt, Homo Sapiens
cauuugcaccccaccccacccucuggcucccc

SEQ ID NO: 217906 - RNA, 32 nt, Homo Sapiens
aagcccugagcauauuuuuagagagaagggga

SEQ ID NO: 217907 - RNA, 30 nt, Homo Sapiens
ccgggagcggcgcagcaucugcgggcggcg

SEQ ID NO: 217908 - RNA, 32 nt, Homo Sapiens
ccgaaagcggcuugggcucgacggagggcacc

SEQ ID NO: 217909 - RNA, 31 nt, Homo Sapiens
caaguuuguagcucaaguuguaaugugaaag

SEQ ID NO: 217910 - RNA, 32 nt, Homo Sapiens
uuauuuugaaagauuuauauaugaugaauucu

SEQ ID NO: 217911 - RNA, 32 nt, Homo Sapiens
uaggaucccuccccuuccgucuucuccacugg

SEQ ID NO: 217912 - RNA, 32 nt, Homo Sapiens
cagccaacuaugaaguuuuuuguuuuugcuuu

SEQ ID NO: 217913 - RNA, 32 nt, Homo Sapiens
guggugauaauuacugaguuuauaaaauuuau

SEQ ID NO: 217914 - RNA, 32 nt, Homo Sapiens
uuuuuguagagauggaguuuugccaugugguc

SEQ ID NO: 217915 - RNA, 32 nt, Homo Sapiens
ggcccgcggcggugcgcggggcguugggucag

SEQ ID NO: 217916 - RNA, 32 nt, Homo Sapiens
cauguaccgcuucuagugaaauguagaggaag

SEQ ID NO: 217917 - RNA, 32 nt, Homo Sapiens
gagaggggcagcugggcccauaugcagggagg

SEQ ID NO: 217918 - RNA, 32 nt, Homo Sapiens
auuuuggugacaaggucuucggauaacucaac

SEQ ID NO: 217919 - RNA, 32 nt, Homo Sapiens
auuaaagaaaauaaugguucuuacuggaaugu

SEQ ID NO: 217920 - RNA, 31 nt, Homo Sapiens
gggggacgggcggugucacgugaucgcgagg

SEQ ID NO: 217921 - RNA, 32 nt, Homo Sapiens
augguagcuguguuuuaauuugagaaucuuga

SEQ ID NO: 217922 - RNA, 32 nt, Homo Sapiens
ggaccagaggggaaggggcugcugcuugcauc

SEQ ID NO: 217923 - RNA, 32 nt, Homo Sapiens
ucgcauaggcuuuagaacuuauucauaaauau

SEQ ID NO: 217924 - RNA, 32 nt, Homo Sapiens
caaaaaauaggcuguuacauauccuaaagacu

SEQ ID NO: 217925 - RNA, 28 nt, Homo Sapiens
ugcauuuaggauuaacaauggacaacac

SEQ ID NO: 217926 - RNA, 32 nt, Homo Sapiens
aaggcgaaaaauaccguuugggaccaggcugg

SEQ ID NO: 217927 - RNA, 31 nt, Homo Sapiens
gagugugucagggccauucaaauuguuggug

SEQ ID NO: 217928 - RNA, 32 nt, Homo Sapiens
uucucccgucuucaaugaccucccauuuggac

SEQ ID NO: 217929 - RNA, 32 nt, Homo Sapiens
cuuguuuccuuucauccaacccuaacccuaac

SEQ ID NO: 217930 - RNA, 32 nt, Homo Sapiens
agccccggcgccuauaaaucgcauucccuccc

SEQ ID NO: 217931 - RNA, 32 nt, Homo Sapiens
gggcucaccauucuuaguccuuucucaagugg

SEQ ID NO: 217932 - RNA, 32 nt, Homo Sapiens
uuccaguuuaauaaacaaaacccuaguucuga

SEQ ID NO: 217933 - RNA, 32 nt, Homo Sapiens
aacagucugcaccuggaguccuuguuuguaac

SEQ ID NO: 217934 - RNA, 32 nt, Homo Sapiens
guucuagggcuggagggcaggggugacaugga

SEQ ID NO: 217935 - RNA, 32 nt, Homo Sapiens
ucacccgggggcgcagagcccccgucgcgccu

SEQ ID NO: 217936 - RNA, 32 nt, Homo Sapiens
ccuguugguggcucaccucucugccucuccag

SEQ ID NO: 217937 - RNA, 32 nt, Homo Sapiens
ggauuaacaggacuucuguuuacaauggaaau

SEQ ID NO: 217938 - RNA, 32 nt, Homo Sapiens
acaaggucaggagaucgagaccaucguggcua

SEQ ID NO: 217939 - RNA, 32 nt, Homo Sapiens
agaaggucaggagaucgagaccauccuggcua

SEQ ID NO: 217940 - RNA, 32 nt, Homo Sapiens
cccuggcccucccggcagcccucggcauguac

SEQ ID NO: 217941 - RNA, 32 nt, Homo Sapiens
uccccuugagucaucaccagcuuccccaagag

SEQ ID NO: 217942 - RNA, 32 nt, Homo Sapiens
aggaggcgcccggcccggcggagcagcccuag

SEQ ID NO: 217943 - RNA, 32 nt, Homo Sapiens
ccgagcaguucuuuuccuuguggccccugcca

SEQ ID NO: 217944 - RNA, 32 nt, Homo Sapiens
uuaaaguauacauuuuuaaauguuagccuauu

SEQ ID NO: 217945 - RNA, 32 nt, Homo Sapiens
aaacagugacauucaguuauauggaaauauag

SEQ ID NO: 217946 - RNA, 29 nt, Homo Sapiens
cagauuccuauccaaugccacauuuuaau

SEQ ID NO: 217947 - RNA, 32 nt, Homo Sapiens
guccacccauccccugccccaaaaccaguuuc

SEQ ID NO: 217948 - RNA, 32 nt, Homo Sapiens
uugguaggaagccugaggcaaaaacugcuuaa

SEQ ID NO: 217949 - RNA, 32 nt, Homo Sapiens
gauuaagguaagaaaaucaugugcucuuaaac

SEQ ID NO: 217950 - RNA, 32 nt, Homo Sapiens
agcagcccgggccagccuucuccuguagggac

SEQ ID NO: 217951 - RNA, 32 nt, Homo Sapiens
caucccuauccugccugaucccuggaucuccc

SEQ ID NO: 217952 - RNA, 32 nt, Homo Sapiens
gcucugccacuacuugaauaagagggaacugu

SEQ ID NO: 217953 - RNA, 32 nt, Homo Sapiens
uuauuuuuaagguaaaaauaauccaugaagau

SEQ ID NO: 217954 - RNA, 32 nt, Homo Sapiens
cuugguguucuacagugucuccagauccagac

SEQ ID NO: 217955 - RNA, 32 nt, Homo Sapiens
cgcgcucccucgcuggcggagcggcugggcgg

SEQ ID NO: 217956 - RNA, 32 nt, Homo Sapiens
guaugggaaaaacagaauaaaggaaucugccu

SEQ ID NO: 217957 - RNA, 32 nt, Homo Sapiens
aagggaagcugaugcuguagcaccuggguacg

SEQ ID NO: 217958 - RNA, 32 nt, Homo Sapiens
gucuuuucuggggaauagacgcaggaguagaa

SEQ ID NO: 217959 - RNA, 32 nt, Homo Sapiens
uccuuacagcaggcuuccagguuggcgcuuag

SEQ ID NO: 217960 - RNA, 32 nt, Homo Sapiens
auggugaauggauuuccaacuuuaucauggaa

SEQ ID NO: 217961 - RNA, 32 nt, Homo Sapiens
gaaggcugaggauauccggcccggagcguuug

SEQ ID NO: 217962 - RNA, 32 nt, Homo Sapiens
aaagaagcugucuuggauuuaaaucuguaaaa

SEQ ID NO: 217963 - RNA, 32 nt, Homo Sapiens
gccuaguuagugugguggucuuucuccagugc

SEQ ID NO: 217964 - RNA, 32 nt, Homo Sapiens
gcuuccagguccagcccucccgcugcagccug

SEQ ID NO: 217965 - RNA, 32 nt, Homo Sapiens
uuuaaccuuggugaauuguuguguguacucag

SEQ ID NO: 217966 - RNA, 32 nt, Homo Sapiens
ugggggcgggucuggucuucggaaggguuugg

SEQ ID NO: 217967 - RNA, 32 nt, Homo Sapiens
auugaagaaagauaaaguacguuccuagaaag

SEQ ID NO: 217968 - RNA, 29 nt, Homo Sapiens
accucuuggccacagaggacucacuugcc

SEQ ID NO: 217969 - RNA, 32 nt, Homo Sapiens
gucaggguuauuaauguauacuuuacauagua

SEQ ID NO: 217970 - RNA, 32 nt, Homo Sapiens
uucuucuggcuuagccucccaaguagcuggga

SEQ ID NO: 217971 - RNA, 32 nt, Homo Sapiens
uuauuuucccccuuuucacagagaaauaaagg

SEQ ID NO: 217972 - RNA, 32 nt, Homo Sapiens
ccaaucuggagcuucauguuuccuucuaaaag

SEQ ID NO: 217973 - RNA, 32 nt, Homo Sapiens
caacaaaggaaagaaauugauccauugcagaa

SEQ ID NO: 217974 - RNA, 32 nt, Homo Sapiens
cagccaccaggagauggggggaggcagggagg

SEQ ID NO: 217975 - RNA, 32 nt, Homo Sapiens
uagagccaguauuuauacuuugugguuaaaau

SEQ ID NO: 217976 - RNA, 32 nt, Homo Sapiens
accagggggagcccggcccagcugcagaggcc

SEQ ID NO: 217977 - RNA, 32 nt, Homo Sapiens
cccaggcucccggccccuuacccacucucucc

SEQ ID NO: 217978 - RNA, 32 nt, Homo Sapiens
uggcggcugccagcagauggcaaggguguguu

SEQ ID NO: 217979 - RNA, 32 nt, Homo Sapiens
gguaucugcgugucgggacgugcggaggcucu

SEQ ID NO: 217980 - RNA, 32 nt, Homo Sapiens
gauucaucacauaaacaaaacuaaagauaaaa

SEQ ID NO: 217981 - RNA, 32 nt, Homo Sapiens
ucugggggauaacagugcucucuuaccucacu

SEQ ID NO: 217982 - RNA, 32 nt, Homo Sapiens
gaggcagggaagcucuaccgcaaggaccugga

SEQ ID NO: 217983 - RNA, 32 nt, Homo Sapiens
ccacacgugaagcucgcgguccucccagggag

SEQ ID NO: 217984 - RNA, 29 nt, Homo Sapiens
uuugaugucacuuuccuuuugccugaagg

SEQ ID NO: 217985 - RNA, 32 nt, Homo Sapiens
agucccugcuacauuccaggcaucguacuaag

SEQ ID NO: 217986 - RNA, 32 nt, Homo Sapiens
gguuucagcgcccuucucaaccccacacuccc

SEQ ID NO: 217987 - RNA, 32 nt, Homo Sapiens
uugguugaagagcucagacaaaagaccaaggc

SEQ ID NO: 217988 - RNA, 31 nt, Homo Sapiens
cuucugcuugguaacuuagauuaaacugagc

SEQ ID NO: 217989 - RNA, 32 nt, Homo Sapiens
acauggucucuucucaggugaaugggaagcca

SEQ ID NO: 217990 - RNA, 32 nt, Homo Sapiens
uccugguuccugcagcagcugcugccacugcu

SEQ ID NO: 217991 - RNA, 32 nt, Homo Sapiens
guggcugccaggagaaggcggcugggaagcca

SEQ ID NO: 217992 - RNA, 32 nt, Homo Sapiens
gccgccggcggggcucacugugguggugugag

SEQ ID NO: 217993 - RNA, 32 nt, Homo Sapiens
gagugagacucugucuccaaaaacagaaaaaa

SEQ ID NO: 217994 - RNA, 32 nt, Homo Sapiens
auacucuuccauccuucucuuccugagaaacu

SEQ ID NO: 217995 - RNA, 32 nt, Homo Sapiens
cuggggcggaaucugugcugucuagguuugug

SEQ ID NO: 217996 - RNA, 32 nt, Homo Sapiens
gggcaguuaccaggacggucuccggaggccgg

SEQ ID NO: 217997 - RNA, 32 nt, Homo Sapiens
uaaaauucucccuguagucaauguuccaccag

SEQ ID NO: 217998 - RNA, 32 nt, Homo Sapiens
uccugccccuggcaauaaaggcccauuucugc

SEQ ID NO: 217999 - RNA, 32 nt, Homo Sapiens
aaaagagaaaggacuuuuuuggugacucaauc

SEQ ID NO: 218000 - RNA, 32 nt, Homo Sapiens
auguguucucuauaaaauacaaaccaacgugc

SEQ ID NO: 218001 - RNA, 32 nt, Homo Sapiens
ucggggaggacgaggaggaaaggcggccucgc

SEQ ID NO: 218002 - RNA, 32 nt, Homo Sapiens
cuuuggaagaucugguguagcuccuucggaga

SEQ ID NO: 218003 - RNA, 32 nt, Homo Sapiens
uggcaugugucugcaaacauccuuauucccaa

SEQ ID NO: 218004 - RNA, 32 nt, Homo Sapiens
uuugcgaagcgcugcgcucgcgcccggauccc

SEQ ID NO: 218005 - RNA, 32 nt, Homo Sapiens
uguaaugcugccguccuucucuugcacugccu

SEQ ID NO: 218006 - RNA, 32 nt, Homo Sapiens
acgcugcgcccggcccugccccgggccuuccu

SEQ ID NO: 218007 - RNA, 32 nt, Homo Sapiens
agagcaggggguaccugugggguucuucucuu

SEQ ID NO: 218008 - RNA, 32 nt, Homo Sapiens
ugugugccaggcccugugcuuugucaggcucu

SEQ ID NO: 218009 - RNA, 32 nt, Homo Sapiens
gucucgaaauucuggagucaagcagucugccu

SEQ ID NO: 218010 - RNA, 32 nt, Homo Sapiens
ggagcggggccgagguacggcggcacggcugc

SEQ ID NO: 218011 - RNA, 32 nt, Homo Sapiens
auuauuaacuuuuuuucuuuuuuaauucuaau

SEQ ID NO: 218012 - RNA, 32 nt, Homo Sapiens
cauacaguugucauacacaaggcgcauauaua

SEQ ID NO: 218013 - RNA, 32 nt, Homo Sapiens
gugauuucccuguguuuucaguuucuuuccuu

SEQ ID NO: 218014 - RNA, 32 nt, Homo Sapiens
auacagguuuuaaguauuuuaaguauauauua

SEQ ID NO: 218015 - RNA, 32 nt, Homo Sapiens
augccauucaagaacaaaaccacagaugccau

SEQ ID NO: 218016 - RNA, 32 nt, Homo Sapiens
guuuccuucugcccguuuuucuugaccuagau

SEQ ID NO: 218017 - RNA, 32 nt, Homo Sapiens
aaaagcacguaugcuucaggggccuucugaga

SEQ ID NO: 218018 - RNA, 32 nt, Homo Sapiens
uucuuucuacuuuugggcuauuacaaauaaag

SEQ ID NO: 218019 - RNA, 32 nt, Homo Sapiens
uaacauagaacagaagugacuucauucuuuuu

SEQ ID NO: 218020 - RNA, 32 nt, Homo Sapiens
accgucacccuucagcagcgaccuccacuccc

SEQ ID NO: 218021 - RNA, 32 nt, Homo Sapiens
uugaagccgcacucagcuuccugccccaccag

SEQ ID NO: 218022 - RNA, 32 nt, Homo Sapiens
ccaacaacacaaaacuauaugauuuuuaaaau

SEQ ID NO: 218023 - RNA, 32 nt, Homo Sapiens
ccauucccgaccccccucuccucuucuagccc

SEQ ID NO: 218024 - RNA, 32 nt, Homo Sapiens
gccccgucuagcuuggcuggcucccgaacaug

SEQ ID NO: 218025 - RNA, 27 nt, Homo Sapiens
ccuguuuuguucuucagcuccucauca

SEQ ID NO: 218026 - RNA, 32 nt, Homo Sapiens
ccucgcccuggcccuggcugggcggggaagcu

SEQ ID NO: 218027 - RNA, 32 nt, Homo Sapiens
ccuccgcugcugucgccuccucugaugcgcuu

SEQ ID NO: 218028 - RNA, 32 nt, Homo Sapiens
cuuugaaauaccauuuacaauguaguauguuu

SEQ ID NO: 218029 - RNA, 32 nt, Homo Sapiens
uuauaucacagcaauucucaugcuaaaaauac

SEQ ID NO: 218030 - RNA, 32 nt, Homo Sapiens
aagaaacucaguguugcugcaauguauguauu

SEQ ID NO: 218031 - RNA, 32 nt, Homo Sapiens
gggugucuguaaucacacucucuucuuacugu

SEQ ID NO: 218032 - RNA, 30 nt, Homo Sapiens
aggugggauaucccuaugcugccuaggcug

SEQ ID NO: 218033 - RNA, 31 nt, Homo Sapiens
aaguagaaccucagcuugcuaacugaagugu

SEQ ID NO: 218034 - RNA, 32 nt, Homo Sapiens
cuccccacaucccacccuuaccccagcccggu

SEQ ID NO: 218035 - RNA, 32 nt, Homo Sapiens
cuauauacaaauaauauauagauauauauguc

SEQ ID NO: 218036 - RNA, 32 nt, Homo Sapiens
uggcucagccccagcucccaaggccugccugg

SEQ ID NO: 218037 - RNA, 32 nt, Homo Sapiens
auaaauuauagcaaguaugauuucuaagaaug

SEQ ID NO: 218038 - RNA, 32 nt, Homo Sapiens
acucuuaccaaagauuugaugguguucuucag

SEQ ID NO: 218039 - RNA, 32 nt, Homo Sapiens
gcaccuauugaccuauccugguaaauuuuuga

SEQ ID NO: 218040 - RNA, 32 nt, Homo Sapiens
ucacgugucgcaugaccgcauuuaugugaaac

SEQ ID NO: 218041 - RNA, 32 nt, Homo Sapiens
aguuuuggaguccaacagaccuggacaugcau

SEQ ID NO: 218042 - RNA, 32 nt, Homo Sapiens
aaaacaaaacaaaacaaacagaauagagggga

SEQ ID NO: 218043 - RNA, 32 nt, Homo Sapiens
ugccccggggguagggggcgcagaauggcgcu

SEQ ID NO: 218044 - RNA, 32 nt, Homo Sapiens
gaccugccccacuauuucuacuccacaagugu

SEQ ID NO: 218045 - RNA, 32 nt, Homo Sapiens
cagggcuuggcggaggagacgcugcuccgcgg

SEQ ID NO: 218046 - RNA, 32 nt, Homo Sapiens
cagcucuagguccaauuguucugcucuaacug

SEQ ID NO: 218047 - RNA, 32 nt, Homo Sapiens
uccugcagcagucugccuccucuuucaacaug

SEQ ID NO: 218048 - RNA, 32 nt, Homo Sapiens
cagggacggcccggaguccguccaggcagcug

SEQ ID NO: 218049 - RNA, 32 nt, Homo Sapiens
ggugggggcuccugguggccuucugcugccca

SEQ ID NO: 218050 - RNA, 32 nt, Homo Sapiens
uuccccaaggccacacccagcccugccuucug

SEQ ID NO: 218051 - RNA, 32 nt, Homo Sapiens
guggcucuuucagaagacccaggaagggcagc

SEQ ID NO: 218052 - RNA, 31 nt, Homo Sapiens
cuuuaggcacagcuggauccaagggcacaaa

SEQ ID NO: 218053 - RNA, 32 nt, Homo Sapiens
aaaaugagcuggaagucuuuggcauucacuug

SEQ ID NO: 218054 - RNA, 31 nt, Homo Sapiens
ccaccuggguuccacuuagcaggagacauuu

SEQ ID NO: 218055 - RNA, 32 nt, Homo Sapiens
gagaagacugcaguaaauuagauggaaugacu

SEQ ID NO: 218056 - RNA, 32 nt, Homo Sapiens
cggccgugccgcgcggccagcagauggcgaug

SEQ ID NO: 218057 - RNA, 32 nt, Homo Sapiens
ucaggcaccagccucccugugcucgacagcaa

SEQ ID NO: 218058 - RNA, 32 nt, Homo Sapiens
uggaaccuagguuuccuuucuaugucaucucu

SEQ ID NO: 218059 - RNA, 32 nt, Homo Sapiens
gcggcccggugccagcuccgccggcgaccggu

SEQ ID NO: 218060 - RNA, 32 nt, Homo Sapiens
agccaggcugaccaggcgcccgggauccagcu

SEQ ID NO: 218061 - RNA, 32 nt, Homo Sapiens
agcugggcauuugggccugguggaugccaacc

SEQ ID NO: 218062 - RNA, 32 nt, Homo Sapiens
cacugccaguguugcagauaucauugcaaauu

SEQ ID NO: 218063 - RNA, 32 nt, Homo Sapiens
cgaaacagcugccggcuggucccggccgaggc

SEQ ID NO: 218064 - RNA, 32 nt, Homo Sapiens
cguucucuuauugggaacuggauggaugaagc

SEQ ID NO: 218065 - RNA, 30 nt, Homo Sapiens
ccagaucggagaagacggacaggugcaagu

SEQ ID NO: 218066 - RNA, 32 nt, Homo Sapiens
ggcucauguauuauuauuauuuuugagaugga

SEQ ID NO: 218067 - RNA, 32 nt, Homo Sapiens
uccauuccucgcccugcccccggagccgaguc

SEQ ID NO: 218068 - RNA, 32 nt, Homo Sapiens
agguucuccccuccccccgcugcccaggugac

SEQ ID NO: 218069 - RNA, 32 nt, Homo Sapiens
aaagcaaaaaauaccuucuaacuuaagacaga

SEQ ID NO: 218070 - RNA, 32 nt, Homo Sapiens
gaugccaaacucagccaaggagcagccccagu

SEQ ID NO: 218071 - RNA, 30 nt, Homo Sapiens
uuagguuugaaauagggggaaauacaugug

SEQ ID NO: 218072 - RNA, 32 nt, Homo Sapiens
uggccacucugcaggggccccugcaggauucc

SEQ ID NO: 218073 - RNA, 31 nt, Homo Sapiens
cuguuuuccauuuuuguucuaacugaaaacu

SEQ ID NO: 218074 - RNA, 32 nt, Homo Sapiens
uccugaggugggccgaggcggcugggcuggac

SEQ ID NO: 218075 - RNA, 32 nt, Homo Sapiens
ucccuuccuuucacagccggucucucugccag

SEQ ID NO: 218076 - RNA, 32 nt, Homo Sapiens
ugauggugggcccucugugcucuucucuuccg

SEQ ID NO: 218077 - RNA, 32 nt, Homo Sapiens
guuucauagguauagaguuuugguuuuacaag

SEQ ID NO: 218078 - RNA, 32 nt, Homo Sapiens
uuugugaaggacuuaaauuauccaguguuucu

SEQ ID NO: 218079 - RNA, 32 nt, Homo Sapiens
gacuagcucuauugcgauauucgccuuguugu

SEQ ID NO: 218080 - RNA, 32 nt, Homo Sapiens
aagaaacagaaauaaacuuaggacacagcaga

SEQ ID NO: 218081 - RNA, 32 nt, Homo Sapiens
gucaccgccggcucgggcgcgcaccugccggc

SEQ ID NO: 218082 - RNA, 32 nt, Homo Sapiens
gcuccguccuuccccagcucccgggcuagcgc

SEQ ID NO: 218083 - RNA, 30 nt, Homo Sapiens
uccuuguguaauggaaugcaaaaaagccaa

SEQ ID NO: 218084 - RNA, 32 nt, Homo Sapiens
acugaagcugcggcuugcgguucagcggguuc

SEQ ID NO: 218085 - RNA, 32 nt, Homo Sapiens
auuuuuugaaagauuuuuaaaaaagccuacaa

SEQ ID NO: 218086 - RNA, 32 nt, Homo Sapiens
uucaguuagauauacuucugcauaaagaguau

SEQ ID NO: 218087 - RNA, 32 nt, Homo Sapiens
agccucuguugucaccucuccuccgucccacc

SEQ ID NO: 218088 - RNA, 32 nt, Homo Sapiens
ucucuuuucugcacuuaauaccugacaguaug

SEQ ID NO: 218089 - RNA, 32 nt, Homo Sapiens
cggagcugcaaugggccgcggcuggggauucu

SEQ ID NO: 218090 - RNA, 32 nt, Homo Sapiens
caucauggaugcugaggccauggaugaaggcc

SEQ ID NO: 218091 - RNA, 32 nt, Homo Sapiens
ugcccccuggaaaggcaugcuguauuaugaaa

SEQ ID NO: 218092 - RNA, 32 nt, Homo Sapiens
uguuuucuuuugcagcaguaucuauccaggag

SEQ ID NO: 218093 - RNA, 32 nt, Homo Sapiens
uguauuuagccucaaggcagcauuucauuugu

SEQ ID NO: 218094 - RNA, 32 nt, Homo Sapiens
cucacugcauccuccgccucccggguucaagc

SEQ ID NO: 218095 - RNA, 32 nt, Homo Sapiens
uuaagggaaugggagagcggcccauagaggug

SEQ ID NO: 218096 - RNA, 32 nt, Homo Sapiens
guaaagauucuaugaauauggacuggccaaaa

SEQ ID NO: 218097 - RNA, 32 nt, Homo Sapiens
ugcugcucgcugauccguggggcccccugugc

SEQ ID NO: 218098 - RNA, 32 nt, Homo Sapiens
cccugagcccccagccccugagcccccuccug

SEQ ID NO: 218099 - RNA, 32 nt, Homo Sapiens
gcaccuccuccuccugauauuccucuucucac

SEQ ID NO: 218100 - RNA, 32 nt, Homo Sapiens
ucugggcugggguggggggagggaggagguuc

SEQ ID NO: 218101 - RNA, 32 nt, Homo Sapiens
caccaccaccuuucccagggugucaugcagga

SEQ ID NO: 218102 - RNA, 32 nt, Homo Sapiens
gcgggaucuucaauuuuuuuuauucaauaaac

SEQ ID NO: 218103 - RNA, 32 nt, Homo Sapiens
ugauauauggcaagugucccccugcccaaacu

SEQ ID NO: 218104 - RNA, 32 nt, Homo Sapiens
uugcaguaagcugaaaucaugccacugcaccc

SEQ ID NO: 218105 - RNA, 32 nt, Homo Sapiens
uuuucagaacuaaaaguuugccagcgcacuaa

SEQ ID NO: 218106 - RNA, 29 nt, Homo Sapiens
ggucggaccugguggaggacgccgggccg

SEQ ID NO: 218107 - RNA, 32 nt, Homo Sapiens
acacugggguagggguugggggugggggguug

SEQ ID NO: 218108 - RNA, 32 nt, Homo Sapiens
gcuuucugggucugugccucuccagaaucuug

SEQ ID NO: 218109 - RNA, 32 nt, Homo Sapiens
cuugcugagagccgccgcagcuggugaaugac

SEQ ID NO: 218110 - RNA, 32 nt, Homo Sapiens
ucagcuugagucccuccucuuccuggagggau

SEQ ID NO: 218111 - RNA, 32 nt, Homo Sapiens
uauauuuauaaauguaugucuucauugcuagg

SEQ ID NO: 218112 - RNA, 32 nt, Homo Sapiens
cuguacuccagauaagaugggguuuagaggga

SEQ ID NO: 218113 - RNA, 31 nt, Homo Sapiens
ugcuguaaaggaaaccugccccgcgcagcgg

SEQ ID NO: 218114 - RNA, 32 nt, Homo Sapiens
gcuuagucggagcuccgaagggagugacuagg

SEQ ID NO: 218115 - RNA, 32 nt, Homo Sapiens
aaaagauuuucagauccuggugugcuuucaag

SEQ ID NO: 218116 - RNA, 32 nt, Homo Sapiens
cugggacuugaccaaaguuguucuguuuuguu

SEQ ID NO: 218117 - RNA, 32 nt, Homo Sapiens
gugcuggagcucuucuguauuaucaauucucc

SEQ ID NO: 218118 - RNA, 32 nt, Homo Sapiens
augaacaugccaaacuccagagguggaccugg

SEQ ID NO: 218119 - RNA, 32 nt, Homo Sapiens
uuguaaccaguguaacaaacauuuuagucaga

SEQ ID NO: 218120 - RNA, 28 nt, Homo Sapiens
uuaagguuuggggacauuauaaacuuga

SEQ ID NO: 218121 - RNA, 32 nt, Homo Sapiens
uucccuauuucugaauuuuaacuuuuugugag

SEQ ID NO: 218122 - RNA, 32 nt, Homo Sapiens
aucacugaaaaugugcucuacaucucguaugg

SEQ ID NO: 218123 - RNA, 32 nt, Homo Sapiens
ccccacccgcaugcucuuugucacuccccggc

SEQ ID NO: 218124 - RNA, 32 nt, Homo Sapiens
guaaacucagcaucaaaauauuucagugaauu

SEQ ID NO: 218125 - RNA, 32 nt, Homo Sapiens
uguguaagaacaaaaaugagaaagguuguuuu

SEQ ID NO: 218126 - RNA, 32 nt, Homo Sapiens
cucuacccgccacugcauuccacagccuguag

SEQ ID NO: 218127 - RNA, 32 nt, Homo Sapiens
gguaggccauuauuuucauuuucauuuuuggc

SEQ ID NO: 218128 - RNA, 32 nt, Homo Sapiens
ggaaggggacccuccgcucuguagugcuacag

SEQ ID NO: 218129 - RNA, 32 nt, Homo Sapiens
agcauagcggcuugguucaccuggaggccggc

SEQ ID NO: 218130 - RNA, 32 nt, Homo Sapiens
gacucagccagacucuggcagaaguggggaug

SEQ ID NO: 218131 - RNA, 32 nt, Homo Sapiens
ugggcaggggguaacuuuacugauuugggggu

SEQ ID NO: 218132 - RNA, 32 nt, Homo Sapiens
uuauccuagcaaaggggccucuggagaccauc

SEQ ID NO: 218133 - RNA, 32 nt, Homo Sapiens
cagaaccgcccggcagcgccagcucggcgacc

SEQ ID NO: 218134 - RNA, 32 nt, Homo Sapiens
uaacugaugacauuccaccacaaaagaagugu

SEQ ID NO: 218135 - RNA, 32 nt, Homo Sapiens
cgggguggccagcagggacgcgccccaggugg

SEQ ID NO: 218136 - RNA, 32 nt, Homo Sapiens
accucacaguccuggguggagagaggccgggg

SEQ ID NO: 218137 - RNA, 32 nt, Homo Sapiens
cagaaggaagucuauuuggugacccagguuuu

SEQ ID NO: 218138 - RNA, 32 nt, Homo Sapiens
guuauaccuugaugauaacacuauugaugagu

SEQ ID NO: 218139 - RNA, 32 nt, Homo Sapiens
agcaguuuucuuuuucugcugcuaaauuacag

SEQ ID NO: 218140 - RNA, 32 nt, Homo Sapiens
augucgcccccgugaugcauauauacacaggu

SEQ ID NO: 218141 - RNA, 32 nt, Homo Sapiens
gcacagcuucacccuaucacagcccucccgua

SEQ ID NO: 218142 - RNA, 32 nt, Homo Sapiens
gagaaaauuacauauucaucuauuauuuuaaa

SEQ ID NO: 218143 - RNA, 32 nt, Homo Sapiens
ucauauugaauguuuccaaccuggaguauaau

SEQ ID NO: 218144 - RNA, 32 nt, Homo Sapiens
aauacucacacgcaacauuucuuguacuuugu

SEQ ID NO: 218145 - RNA, 32 nt, Homo Sapiens
aauuggcagcaucuuagaucugaggaaguaug

SEQ ID NO: 218146 - RNA, 32 nt, Homo Sapiens
caugaacugucaaguguguguugucuugugua

SEQ ID NO: 218147 - RNA, 32 nt, Homo Sapiens
auacugaagauaaaauauaaacaaaugucaac

SEQ ID NO: 218148 - RNA, 32 nt, Homo Sapiens
uucuuugcaagcauuacuuuagcauuuuagca

SEQ ID NO: 218149 - RNA, 32 nt, Homo Sapiens
aggugguagugggacaggacaauuggagcaca

SEQ ID NO: 218150 - RNA, 32 nt, Homo Sapiens
ccugcccacucccagacacacacugucugcag

SEQ ID NO: 218151 - RNA, 32 nt, Homo Sapiens
gcugagacgagauugcugggggugggggcuca

SEQ ID NO: 218152 - RNA, 32 nt, Homo Sapiens
ccuuggcccucccugcagccccuuuccccugc

SEQ ID NO: 218153 - RNA, 32 nt, Homo Sapiens
uuugggaacugggaauauaggguggaaauggu

SEQ ID NO: 218154 - RNA, 32 nt, Homo Sapiens
acugaggguugcuggacuguuccacccagagg

SEQ ID NO: 218155 - RNA, 32 nt, Homo Sapiens
gaaucuucagugacuggaguauguuguaagga

SEQ ID NO: 218156 - RNA, 32 nt, Homo Sapiens
uaguauccggcggguaauggugguuacccaca

SEQ ID NO: 218157 - RNA, 32 nt, Homo Sapiens
aucuaauuguaaauaugaaacuuuuuaaaucu

SEQ ID NO: 218158 - RNA, 29 nt, Homo Sapiens
ugucuacucauagugucuauauagguacc

SEQ ID NO: 218159 - RNA, 32 nt, Homo Sapiens
auggcccggggcucgcguucggcggcccgggc

SEQ ID NO: 218160 - RNA, 32 nt, Homo Sapiens
uuucuuaauauucauucuuguuucacaaauga

SEQ ID NO: 218161 - RNA, 32 nt, Homo Sapiens
uuacuggaaucuauuggugcugcugcaugagu

SEQ ID NO: 218162 - RNA, 32 nt, Homo Sapiens
accagccgccgcaacccaaagccccgggcuuc

SEQ ID NO: 218163 - RNA, 32 nt, Homo Sapiens
caaucuuugagaauuguaaauucaucaaauaa

SEQ ID NO: 218164 - RNA, 32 nt, Homo Sapiens
uuaaugauaaaacauuuaacaaaaucuauaac

SEQ ID NO: 218165 - RNA, 32 nt, Homo Sapiens
caugcaauggaaucaugcuuguccaugugaaa

SEQ ID NO: 218166 - RNA, 32 nt, Homo Sapiens
cucaucuuguccuggguguugagggugucacg

SEQ ID NO: 218167 - RNA, 32 nt, Homo Sapiens
uuuuccaugaaucugcagaaaauaacuaagcu

SEQ ID NO: 218168 - RNA, 32 nt, Homo Sapiens
uuucccuccgggcaggggagccaggguagagc

SEQ ID NO: 218169 - RNA, 32 nt, Homo Sapiens
ugaccacaccacucacccgaucuccuacgaca

SEQ ID NO: 218170 - RNA, 32 nt, Homo Sapiens
uguacccaagcuucccucccccucuccugggg

SEQ ID NO: 218171 - RNA, 31 nt, Homo Sapiens
ccuugugucaccugccugcccaggcagcugu

SEQ ID NO: 218172 - RNA, 32 nt, Homo Sapiens
gccacuccuauccccaggacaggucccuggac

SEQ ID NO: 218173 - RNA, 32 nt, Homo Sapiens
cuuuuuauuguaauuaauaaacauugagaucu

SEQ ID NO: 218174 - RNA, 32 nt, Homo Sapiens
ggaguuagcauuagucucuacugagcaauucc

SEQ ID NO: 218175 - RNA, 32 nt, Homo Sapiens
accaauuuccaaaacacaucugcacaaccauc

SEQ ID NO: 218176 - RNA, 32 nt, Homo Sapiens
gcuuugaaaauauuuugggugauacuuucauu

SEQ ID NO: 218177 - RNA, 32 nt, Homo Sapiens
guuccucagcuggcuccucccuggucaauauc

SEQ ID NO: 218178 - RNA, 32 nt, Homo Sapiens
uuuacuucuccaccucccguccuccccaucau

SEQ ID NO: 218179 - RNA, 32 nt, Homo Sapiens
uuccggccugaagcugcagccgcgccaugucc

SEQ ID NO: 218180 - RNA, 32 nt, Homo Sapiens
cugagcccauuucuucauuuguagaagaaucc

SEQ ID NO: 218181 - RNA, 32 nt, Homo Sapiens
aagaagcucccucuuuuccacagaggcugcug

SEQ ID NO: 218182 - RNA, 32 nt, Homo Sapiens
guagcuaggaauugguauaaauuuaaugcacc

SEQ ID NO: 218183 - RNA, 32 nt, Homo Sapiens
agccucuucuugcaccuucuccugccucucca

SEQ ID NO: 218184 - RNA, 32 nt, Homo Sapiens
uuaaagcaacgcgcauucgcuaggccucgcga

SEQ ID NO: 218185 - RNA, 30 nt, Homo Sapiens
gcggaggccguuccuggcuuuguagcucgc

SEQ ID NO: 218186 - RNA, 32 nt, Homo Sapiens
cauccauaugaaauauaaaaugaagagacacc

SEQ ID NO: 218187 - RNA, 32 nt, Homo Sapiens
cuccccauccuuccuucccagcccuuguggcu

SEQ ID NO: 218188 - RNA, 32 nt, Homo Sapiens
ucuuaucagcggacacuaacuccaccuuuacg

SEQ ID NO: 218189 - RNA, 32 nt, Homo Sapiens
accaaccacagagacugacaccuaguagguuc

SEQ ID NO: 218190 - RNA, 32 nt, Homo Sapiens
guuaucuacucuuccuagaaucaaauauuaaa

SEQ ID NO: 218191 - RNA, 32 nt, Homo Sapiens
gcccgugcugccauggccugccgcccgcgaag

SEQ ID NO: 218192 - RNA, 32 nt, Homo Sapiens
ucuggcgguggcggccuggggcggcgcgacgg

SEQ ID NO: 218193 - RNA, 32 nt, Homo Sapiens
acagucugccccacccccaccuccccacugug

SEQ ID NO: 218194 - RNA, 32 nt, Homo Sapiens
acucuguuauggaacaaaucauaacagauuuu

SEQ ID NO: 218195 - RNA, 32 nt, Homo Sapiens
aaacuggaaugggaguuuagguccaauuuggg

SEQ ID NO: 218196 - RNA, 32 nt, Homo Sapiens
ugugucugggccaccagaccgaaaugguugcu

SEQ ID NO: 218197 - RNA, 32 nt, Homo Sapiens
cccauccauuuucucagaucuccuugaaaauu

SEQ ID NO: 218198 - RNA, 32 nt, Homo Sapiens
uguugaacauucaaauuuguauuauuuggaga

SEQ ID NO: 218199 - RNA, 32 nt, Homo Sapiens
agggagcggggagcuuccuggaggcuucccag

SEQ ID NO: 218200 - RNA, 32 nt, Homo Sapiens
gcgcaagggcucagccccccagcccugagcag

SEQ ID NO: 218201 - RNA, 32 nt, Homo Sapiens
ugcuuuagcagggcucgcugcuuggccugcag

SEQ ID NO: 218202 - RNA, 32 nt, Homo Sapiens
uccauuuaaggguuguccagccagauaguccu

SEQ ID NO: 218203 - RNA, 32 nt, Homo Sapiens
aaaucagacaaaugcuacuuugucuaaccugc

SEQ ID NO: 218204 - RNA, 32 nt, Homo Sapiens
uugauucugcccguagcaggugaaccuggugu

SEQ ID NO: 218205 - RNA, 32 nt, Homo Sapiens
aaggucagggagcaagaggugugcacaccaaa

SEQ ID NO: 218206 - RNA, 31 nt, Homo Sapiens
gcuggagugggccccagaccagagaaaagug

SEQ ID NO: 218207 - RNA, 32 nt, Homo Sapiens
uuguggguugaugugucuaucuaguaauaaua

SEQ ID NO: 218208 - RNA, 32 nt, Homo Sapiens
agucccggccagugccucugcuuccggcucga

SEQ ID NO: 218209 - RNA, 32 nt, Homo Sapiens
gaagcucccccucccugcuucccuuggccgag

SEQ ID NO: 218210 - RNA, 32 nt, Homo Sapiens
cgugaucugggcucaccucccugguucaagcg

SEQ ID NO: 218211 - RNA, 32 nt, Homo Sapiens
agccaaaguugagggaaagagcuuauaaaauu

SEQ ID NO: 218212 - RNA, 32 nt, Homo Sapiens
aauauauccauguaacaaaaccgcacuuguac

SEQ ID NO: 218213 - RNA, 32 nt, Homo Sapiens
uaauuguacagcuagagccugcaaguucaacg

SEQ ID NO: 218214 - RNA, 32 nt, Homo Sapiens
gagccgcugccuccccgcagcauggggggacu

SEQ ID NO: 218215 - RNA, 32 nt, Homo Sapiens
gccggaugcauuuuugaguuuguauuaguuga

SEQ ID NO: 218216 - RNA, 32 nt, Homo Sapiens
uaaguuuuuccucauggcuucaucucuaucuu

SEQ ID NO: 218217 - RNA, 32 nt, Homo Sapiens
acauaaacuuguacaagaauguucauagcagu

SEQ ID NO: 218218 - RNA, 32 nt, Homo Sapiens
uccucacccuucccggcccccggccaaggacc

SEQ ID NO: 218219 - RNA, 32 nt, Homo Sapiens
aguuacuguuucugauuuaauguacggaacuu

SEQ ID NO: 218220 - RNA, 32 nt, Homo Sapiens
gacugucaggauuuuaagauuauacaagugaa

SEQ ID NO: 218221 - RNA, 32 nt, Homo Sapiens
auauuuuugaguuuuguaauggaagaaccagg

SEQ ID NO: 218222 - RNA, 32 nt, Homo Sapiens
auccccugagcaagucagaaguuacucucauc

SEQ ID NO: 218223 - RNA, 32 nt, Homo Sapiens
aaauuccuagggcaaaacuuuuuuauggugcu

SEQ ID NO: 218224 - RNA, 32 nt, Homo Sapiens
ucccauuaaauucaguguaguuucacuugaua

SEQ ID NO: 218225 - RNA, 32 nt, Homo Sapiens
cagagccgcaucccuuccccagccccuguguu

SEQ ID NO: 218226 - RNA, 32 nt, Homo Sapiens
gaucugggaggcccaucgcggccggugcuucc

SEQ ID NO: 218227 - RNA, 32 nt, Homo Sapiens
acgauggugguggaaggugugcucggugagaa

SEQ ID NO: 218228 - RNA, 32 nt, Homo Sapiens
cagagaagauggagucuugcucugucaccagg

SEQ ID NO: 218229 - RNA, 32 nt, Homo Sapiens
ucuccauccucaccacaugaugaccugcugug

SEQ ID NO: 218230 - RNA, 32 nt, Homo Sapiens
aaguagcuagcaugcaguugcagcucaaugaa

SEQ ID NO: 218231 - RNA, 32 nt, Homo Sapiens
gaagcacaaggacuucugugacccagaaacuu

SEQ ID NO: 218232 - RNA, 32 nt, Homo Sapiens
cgucuguacuaaaaauacaaaauuuagcuugg

SEQ ID NO: 218233 - RNA, 30 nt, Homo Sapiens
cgaagauggcggagguacagguccuggugc

SEQ ID NO: 218234 - RNA, 32 nt, Homo Sapiens
ucgccccucgguaccaucuccuccuuguggca

SEQ ID NO: 218235 - RNA, 32 nt, Homo Sapiens
aggaggccagcauggcuggagaggcaggcaua

SEQ ID NO: 218236 - RNA, 30 nt, Homo Sapiens
auccggcgacccucggccggcaggacccgc

SEQ ID NO: 218237 - RNA, 32 nt, Homo Sapiens
cguauccucacaguuacccccaguaaccaacu

SEQ ID NO: 218238 - RNA, 32 nt, Homo Sapiens
aaucccagcacuuuugaggcugaggcgggcgg

SEQ ID NO: 218239 - RNA, 32 nt, Homo Sapiens
cuauuggguuccccccuccccccaccuuuuuu

SEQ ID NO: 218240 - RNA, 32 nt, Homo Sapiens
uuugagcuuggacucgcucgcugcugaauucc

SEQ ID NO: 218241 - RNA, 32 nt, Homo Sapiens
cuuaccuccgaguuaccgucaugcccuugcug

SEQ ID NO: 218242 - RNA, 32 nt, Homo Sapiens
cgcaggcugaaaagccgcuaggcagugcuaaa

SEQ ID NO: 218243 - RNA, 32 nt, Homo Sapiens
ucucuccggccgccccagccgggcgcagcagc

SEQ ID NO: 218244 - RNA, 32 nt, Homo Sapiens
guuacaagaaugcaguaucuggggcgucaaca

SEQ ID NO: 218245 - RNA, 32 nt, Homo Sapiens
cccccacaccugggggacccccuggccccucu

SEQ ID NO: 218246 - RNA, 32 nt, Homo Sapiens
ggcgcgggcggagcggccggccagccagguuc

SEQ ID NO: 218247 - RNA, 32 nt, Homo Sapiens
gagggaaaggggcuaaagucucuucuguuggu

SEQ ID NO: 218248 - RNA, 32 nt, Homo Sapiens
accgcaccgccagcugccagcggccggggcgc

SEQ ID NO: 218249 - RNA, 32 nt, Homo Sapiens
agcccugcccacgcugcccccgcaaacaaugg

SEQ ID NO: 218250 - RNA, 32 nt, Homo Sapiens
ugcaauauuucccccuuacuacuucuuggaaa

SEQ ID NO: 218251 - RNA, 32 nt, Homo Sapiens
gcccccggccagauuccccccggagagacccg

SEQ ID NO: 218252 - RNA, 32 nt, Homo Sapiens
cucuuauuauauuauuaguuuugauuuaaugu

SEQ ID NO: 218253 - RNA, 32 nt, Homo Sapiens
gggggugccugccuagugcuggaguaggggac

SEQ ID NO: 218254 - RNA, 32 nt, Homo Sapiens
cugccuccccugacccaaccacuugcuuaauc

SEQ ID NO: 218255 - RNA, 32 nt, Homo Sapiens
gcuugcaagaaugguaauauuuuggacgugua

SEQ ID NO: 218256 - RNA, 30 nt, Homo Sapiens
auaugguggggcgcgggcggugucgcugug

SEQ ID NO: 218257 - RNA, 32 nt, Homo Sapiens
aauuaaagauucuggucuaaacuaagaauaau

SEQ ID NO: 218258 - RNA, 32 nt, Homo Sapiens
cugaaccugggcgggggcuucuccaggacugu

SEQ ID NO: 218259 - RNA, 32 nt, Homo Sapiens
cuccaggaucccucacauuuccccuguuuguu

SEQ ID NO: 218260 - RNA, 32 nt, Homo Sapiens
cgucugccaggagcugacgaaccacgaaugcu

SEQ ID NO: 218261 - RNA, 32 nt, Homo Sapiens
uggacugggcccauagccuggaccuggacagc

SEQ ID NO: 218262 - RNA, 32 nt, Homo Sapiens
cauuguucauuuucuuuucucauuauguuacu

SEQ ID NO: 218263 - RNA, 32 nt, Homo Sapiens
gguccaggaaauggaaacauugcuuugcuuuu

SEQ ID NO: 218264 - RNA, 32 nt, Homo Sapiens
caguuuggucaacuuaauucuuguccuccgac

SEQ ID NO: 218265 - RNA, 32 nt, Homo Sapiens
aauuuauaagaugccuuauuguuuacaaagua

SEQ ID NO: 218266 - RNA, 32 nt, Homo Sapiens
acuaauuauaaucuuuuuuuuauauuccuagu

SEQ ID NO: 218267 - RNA, 32 nt, Homo Sapiens
gcagauccagcauggaggccacccucaggagu

SEQ ID NO: 218268 - RNA, 32 nt, Homo Sapiens
uguauucagaugacaaguuaaauuggauaaaa

SEQ ID NO: 218269 - RNA, 32 nt, Homo Sapiens
acuucgaugaugaugugugucugggacuggca

SEQ ID NO: 218270 - RNA, 32 nt, Homo Sapiens
cuaggacacgggguacaacagcagccaaauuc

SEQ ID NO: 218271 - RNA, 32 nt, Homo Sapiens
uuuccaaauauguuaaaugacaaaauuauuuu

SEQ ID NO: 218272 - RNA, 32 nt, Homo Sapiens
gggcgcgggugucccccgcuugccagagcccu

SEQ ID NO: 218273 - RNA, 32 nt, Homo Sapiens
uauuuaaaauauuuauuuuuuauaccaaauga

SEQ ID NO: 218274 - RNA, 32 nt, Homo Sapiens
gccaaacccugaaaauuuuacaugacauagaa

SEQ ID NO: 218275 - RNA, 32 nt, Homo Sapiens
uaaaauauuuugcugcuucuguucugggucug

SEQ ID NO: 218276 - RNA, 32 nt, Homo Sapiens
gcggccgagaaagcggggcgccgagggggucg

SEQ ID NO: 218277 - RNA, 32 nt, Homo Sapiens
gcuugaucaaggaaagggauuaggguagggga

SEQ ID NO: 218278 - RNA, 32 nt, Homo Sapiens
ggccucccaaggugcugggacuacaggcgugg

SEQ ID NO: 218279 - RNA, 32 nt, Homo Sapiens
uuguucccgcauguucagccaaucguguuuaa

SEQ ID NO: 218280 - RNA, 32 nt, Homo Sapiens
uuggaaggagcuuuauuguaaauacuauggaa

SEQ ID NO: 218281 - RNA, 32 nt, Homo Sapiens
cccucucggcgcgcccggcgcgaagccugcga

SEQ ID NO: 218282 - RNA, 32 nt, Homo Sapiens
gcgccacacaaaccuggcuauaaggcccagga

SEQ ID NO: 218283 - RNA, 32 nt, Homo Sapiens
uaucuaacuggggcugugaucaagaagguucu

SEQ ID NO: 218284 - RNA, 32 nt, Homo Sapiens
gcccccaucuucugacuuuuccucgugugacc

SEQ ID NO: 218285 - RNA, 32 nt, Homo Sapiens
uuuaacaaacuuaugagaguuauuggcaauug

SEQ ID NO: 218286 - RNA, 32 nt, Homo Sapiens
aggucacagguugaggcccagccacucucccu

SEQ ID NO: 218287 - RNA, 32 nt, Homo Sapiens
aauuagagcagaugaccccuccccuaaugccu

SEQ ID NO: 218288 - RNA, 32 nt, Homo Sapiens
gcuuccucuauaucaagugaguuuacugauuu

SEQ ID NO: 218289 - RNA, 32 nt, Homo Sapiens
gacuuuucuaaugugguccaaaugcggaucac

SEQ ID NO: 218290 - RNA, 32 nt, Homo Sapiens
cucuguagguaaaaaggaggugggaaaaauuu

SEQ ID NO: 218291 - RNA, 32 nt, Homo Sapiens
uaguuugugcuaaaaauacucgaaauaccauu

SEQ ID NO: 218292 - RNA, 32 nt, Homo Sapiens
gcagggguggggauggcucagaggacauaacc

SEQ ID NO: 218293 - RNA, 32 nt, Homo Sapiens
uguaaauaauguacacauuuguggaaaaugcu

SEQ ID NO: 218294 - RNA, 32 nt, Homo Sapiens
gccgcgcgcgggucggccggcucuauggggaa

SEQ ID NO: 218295 - RNA, 32 nt, Homo Sapiens
augugauaugcuccaugaugcuguguguuuug

SEQ ID NO: 218296 - RNA, 32 nt, Homo Sapiens
agugccgcgugcggcccgggaacccugggcug

SEQ ID NO: 218297 - RNA, 32 nt, Homo Sapiens
uugguuuagagacuguuaauaagggacaucac

SEQ ID NO: 218298 - RNA, 32 nt, Homo Sapiens
ucauccaauucugaguggauauuacucugccu

SEQ ID NO: 218299 - RNA, 32 nt, Homo Sapiens
cucacugcagccuccgccucccggguucaagc

SEQ ID NO: 218300 - RNA, 32 nt, Homo Sapiens
ggcagccacagugugcaugcuugucuaugacu

SEQ ID NO: 218301 - RNA, 32 nt, Homo Sapiens
agauaggaaagcugaggcccagagaagcgaag

SEQ ID NO: 218302 - RNA, 32 nt, Homo Sapiens
uccuuaaauuuaauguaauaacauguuaaaga

SEQ ID NO: 218303 - RNA, 32 nt, Homo Sapiens
ugauugggggcgccaggcagggcggcgucaac

SEQ ID NO: 218304 - RNA, 32 nt, Homo Sapiens
ggaugggggauccggaggaaaguagguguggu

SEQ ID NO: 218305 - RNA, 32 nt, Homo Sapiens
aaacuaagccuugcucugucucccaggcugga

SEQ ID NO: 218306 - RNA, 32 nt, Homo Sapiens
ugaggaaaacaaaguucugccuuagguaaaaa

SEQ ID NO: 218307 - RNA, 32 nt, Homo Sapiens
gcaugcccaagcacuggcagcuuugcagcccc

SEQ ID NO: 218308 - RNA, 32 nt, Homo Sapiens
gcagcgcucccuccgcuuccggccgagcccgc

SEQ ID NO: 218309 - RNA, 32 nt, Homo Sapiens
acucucucuauuucuuuuuguuuuucugaugc

SEQ ID NO: 218310 - RNA, 32 nt, Homo Sapiens
auacuauauagagaaucuuaagugauaaccag

SEQ ID NO: 218311 - RNA, 32 nt, Homo Sapiens
ugugccaggugacaccaaggaggggccuguuu

SEQ ID NO: 218312 - RNA, 32 nt, Homo Sapiens
gguaauucuaauucuuaauaaaacaaaugagu

SEQ ID NO: 218313 - RNA, 32 nt, Homo Sapiens
caagaugggguacuacaccacccccaccgccc

SEQ ID NO: 218314 - RNA, 32 nt, Homo Sapiens
cuggccugugcugaaguucccgggccccuggc

SEQ ID NO: 218315 - RNA, 32 nt, Homo Sapiens
ccuccgguuccgggcucucccuucgcuccaag

SEQ ID NO: 218316 - RNA, 32 nt, Homo Sapiens
agagagauaaccuuaaacucugaccaacagug

SEQ ID NO: 218317 - RNA, 32 nt, Homo Sapiens
guuuccugguguuuccucugacucuagugcac

SEQ ID NO: 218318 - RNA, 32 nt, Homo Sapiens
uaaaaauagaaaguaaguuuguagcaugcugu

SEQ ID NO: 218319 - RNA, 32 nt, Homo Sapiens
gacauuuugagauucaaugcaaucuguauaau

SEQ ID NO: 218320 - RNA, 32 nt, Homo Sapiens
accagccugaccaacauagugaaacccccguc

SEQ ID NO: 218321 - RNA, 32 nt, Homo Sapiens
guggauaacucuucuuuuuaaaaagaaaauag

SEQ ID NO: 218322 - RNA, 32 nt, Homo Sapiens
cuuacuccgccccacacccugggcguugcggc

SEQ ID NO: 218323 - RNA, 32 nt, Homo Sapiens
uacuuauagacuauuuuucuugcucugcagca

SEQ ID NO: 218324 - RNA, 32 nt, Homo Sapiens
ggaaccgugauuggcccggccccccgggggcg

SEQ ID NO: 218325 - RNA, 32 nt, Homo Sapiens
gauggggcucugcgcuuugugcucccagcugu

SEQ ID NO: 218326 - RNA, 32 nt, Homo Sapiens
ggacggccgcggagaccauccaggcgacagcg

SEQ ID NO: 218327 - RNA, 32 nt, Homo Sapiens
cuuuaaaaaugaaucuugcuucauuugaugaa

SEQ ID NO: 218328 - RNA, 32 nt, Homo Sapiens
caucgccauuuuccucuuucccaacucuuacu

SEQ ID NO: 218329 - RNA, 32 nt, Homo Sapiens
uugauacacgauggcgcugcugauucaucagu

SEQ ID NO: 218330 - RNA, 32 nt, Homo Sapiens
agcuuucugggagugggagaugauggggaaag

SEQ ID NO: 218331 - RNA, 32 nt, Homo Sapiens
agagggaaggagaggagaggaacagguuuuga

SEQ ID NO: 218332 - RNA, 32 nt, Homo Sapiens
ugggucacuugcugccagcaguuugugaaugg

SEQ ID NO: 218333 - RNA, 32 nt, Homo Sapiens
acuaaggacucgggcauaaacacacacacgug

SEQ ID NO: 218334 - RNA, 32 nt, Homo Sapiens
cugagauguggcuggcugugccaucgucauag

SEQ ID NO: 218335 - RNA, 32 nt, Homo Sapiens
gggaagagggagugaggccuaggcagcuuagg

SEQ ID NO: 218336 - RNA, 31 nt, Homo Sapiens
ccaauaugugauaugaaaguguugggaugag

SEQ ID NO: 218337 - RNA, 32 nt, Homo Sapiens
caucuagcuguaucgaggcaucaggccugaau

SEQ ID NO: 218338 - RNA, 32 nt, Homo Sapiens
agccgccucuuccuccucccuucgcugagagg

SEQ ID NO: 218339 - RNA, 32 nt, Homo Sapiens
cagccgcucucugcccuucucucggccccgcg

SEQ ID NO: 218340 - RNA, 32 nt, Homo Sapiens
cucagcugucccacccaggcccauccucugca

SEQ ID NO: 218341 - RNA, 32 nt, Homo Sapiens
gccugaacccaccuggacugacuucugcacug

SEQ ID NO: 218342 - RNA, 32 nt, Homo Sapiens
aaaaaauuuuuggugugaguuuucacauacuu

SEQ ID NO: 218343 - RNA, 32 nt, Homo Sapiens
aggacaagagggacaagguauggggugggagc

SEQ ID NO: 218344 - RNA, 32 nt, Homo Sapiens
gucggccuaggccggggcgcgacgacgcggac

SEQ ID NO: 218345 - RNA, 32 nt, Homo Sapiens
ugagucuggaugugucggggcuggggcugaac

SEQ ID NO: 218346 - RNA, 32 nt, Homo Sapiens
aaacucaauacuaugaaaaauuaauggaauuu

SEQ ID NO: 218347 - RNA, 32 nt, Homo Sapiens
caggcugcguuucuccuuucuguccgugggca

SEQ ID NO: 218348 - RNA, 32 nt, Homo Sapiens
gcgcagcggcgguggcuggagcgggagaaacc

SEQ ID NO: 218349 - RNA, 32 nt, Homo Sapiens
uaaguucugacuugcucacucuauccuggaua

SEQ ID NO: 218350 - RNA, 32 nt, Homo Sapiens
agaaguggaagaaauuccugugcauguucuau

SEQ ID NO: 218351 - RNA, 32 nt, Homo Sapiens
gaguuagggauggggagucaaguucuagaaag

SEQ ID NO: 218352 - RNA, 32 nt, Homo Sapiens
gccuguuugagugcuccacccggagcaggaag

SEQ ID NO: 218353 - RNA, 32 nt, Homo Sapiens
gcuugcucccagcccccuccccaauuugguuc

SEQ ID NO: 218354 - RNA, 32 nt, Homo Sapiens
accagacuccccugucuccccgcggcccccua

SEQ ID NO: 218355 - RNA, 32 nt, Homo Sapiens
gguucaagaugaauuugucaacuuuugucuuc

SEQ ID NO: 218356 - RNA, 32 nt, Homo Sapiens
acccucugucacuuacaggggccucguuguga

SEQ ID NO: 218357 - RNA, 32 nt, Homo Sapiens
ugguacaaaagcuauugugggugacaggagca

SEQ ID NO: 218358 - RNA, 32 nt, Homo Sapiens
guggcgacggagagaaacagugagcccgaggg

SEQ ID NO: 218359 - RNA, 32 nt, Homo Sapiens
ucagaucugcugucauaaaguggguccaagca

SEQ ID NO: 218360 - RNA, 32 nt, Homo Sapiens
cuccgcuuuuccauuucaaaguagacaauagg

SEQ ID NO: 218361 - RNA, 32 nt, Homo Sapiens
ucaaaucauaauguggauaggauagggaggau

SEQ ID NO: 218362 - RNA, 32 nt, Homo Sapiens
ucccugcuuccucuccaucucaucucuguaau

SEQ ID NO: 218363 - RNA, 32 nt, Homo Sapiens
agucagaggucacccgugauucugccugcacc

SEQ ID NO: 218364 - RNA, 32 nt, Homo Sapiens
ucucaggaaaggaaaauaugcaugguugguga

SEQ ID NO: 218365 - RNA, 32 nt, Homo Sapiens
caagguuucuaaaauguugucuuguauugaaa

SEQ ID NO: 218366 - RNA, 32 nt, Homo Sapiens
guugaucaguuaugaaauguuacuucguuccc

SEQ ID NO: 218367 - RNA, 32 nt, Homo Sapiens
uucaggucugguuuuuauuuuaauuuugcuuu

SEQ ID NO: 218368 - RNA, 32 nt, Homo Sapiens
cuggauuggccucauccaggaucuuuggucac

SEQ ID NO: 218369 - RNA, 32 nt, Homo Sapiens
agucucccauccccauagucauaccccuguga

SEQ ID NO: 218370 - RNA, 32 nt, Homo Sapiens
uccccacuccuccgagacccaggagacaaaca

SEQ ID NO: 218371 - RNA, 32 nt, Homo Sapiens
agagcugugggaagagcugugggauccccuau

SEQ ID NO: 218372 - RNA, 32 nt, Homo Sapiens
cugcuacgucaucgugcuccacuccagcaucc

SEQ ID NO: 218373 - RNA, 32 nt, Homo Sapiens
cuuuucuccgagucgccgcccugcccuuggau

SEQ ID NO: 218374 - RNA, 32 nt, Homo Sapiens
uagauugaaugggaugggaagagccuucccuc

SEQ ID NO: 218375 - RNA, 32 nt, Homo Sapiens
uaagaagugcgcgccgggcuccggcugcgcgc

SEQ ID NO: 218376 - RNA, 32 nt, Homo Sapiens
aucaaucugcuguuggcugcgccagggugcgg

SEQ ID NO: 218377 - RNA, 32 nt, Homo Sapiens
cuggaagauggcggcguccguggucugucggg

SEQ ID NO: 218378 - RNA, 32 nt, Homo Sapiens
ucuugugugauucguggaccagcagcauugug

SEQ ID NO: 218379 - RNA, 32 nt, Homo Sapiens
ccugggcccugccgcagcccagccccuugccu

SEQ ID NO: 218380 - RNA, 32 nt, Homo Sapiens
aacuguuggugcacauuaucuacauuuuccuc

SEQ ID NO: 218381 - RNA, 32 nt, Homo Sapiens
ggaguacggacgggagucagaggcagagcgag

SEQ ID NO: 218382 - RNA, 32 nt, Homo Sapiens
aagggccuguggacagcccacccaggcggcgg

SEQ ID NO: 218383 - RNA, 32 nt, Homo Sapiens
gaagcacaaaaugguugugauuugagcacaau

SEQ ID NO: 218384 - RNA, 32 nt, Homo Sapiens
gcugcuguugucccgggugcugaaaagccggg

SEQ ID NO: 218385 - RNA, 32 nt, Homo Sapiens
gggucguaugaguaaggggauuuggaaacugu

SEQ ID NO: 218386 - RNA, 32 nt, Homo Sapiens
uuggugccugaaggauggcagacgccuggugu

SEQ ID NO: 218387 - RNA, 32 nt, Homo Sapiens
ccgcagccacgcugccgaggcgcccggggacc

SEQ ID NO: 218388 - RNA, 32 nt, Homo Sapiens
gccuccugacagcagaguacacagugucacac

SEQ ID NO: 218389 - RNA, 32 nt, Homo Sapiens
uacauucuucccgaggcuccaggccgcugucu

SEQ ID NO: 218390 - RNA, 32 nt, Homo Sapiens
auuuuggacauacauaagaaacaucauuauaa

SEQ ID NO: 218391 - RNA, 32 nt, Homo Sapiens
agaugugagaagauaauacagaugaaccaaag

SEQ ID NO: 218392 - RNA, 32 nt, Homo Sapiens
gacguuccucgccccgcccgacguucccucaa

SEQ ID NO: 218393 - RNA, 32 nt, Homo Sapiens
ggugcuuuauuuuuguuuuaaucuuuuguugc

SEQ ID NO: 218394 - RNA, 32 nt, Homo Sapiens
cgccgccgagcgccugugccggcacggcuaca

SEQ ID NO: 218395 - RNA, 32 nt, Homo Sapiens
ggaacaaccuggugaugaguuuccuguacccc

SEQ ID NO: 218396 - RNA, 32 nt, Homo Sapiens
uuuauauauguugaaacaauaagauuuuaugg

SEQ ID NO: 218397 - RNA, 32 nt, Homo Sapiens
uauggauggcuucuaacaaaaacuacacauau

SEQ ID NO: 218398 - RNA, 32 nt, Homo Sapiens
auaauuuguuauuuuucaaacaauagugaaua

SEQ ID NO: 218399 - RNA, 32 nt, Homo Sapiens
caaauuauugaguggaucaucucuuggaaaug

SEQ ID NO: 218400 - RNA, 32 nt, Homo Sapiens
caaacaggcuguaauuccaucaucaucguugu

SEQ ID NO: 218401 - RNA, 30 nt, Homo Sapiens
ugcugcugccucccgcucgcccugaaccca

SEQ ID NO: 218402 - RNA, 32 nt, Homo Sapiens
auacaguuuaaaagugcuuacccaggcaagaa

SEQ ID NO: 218403 - RNA, 32 nt, Homo Sapiens
uaaauccagaucugugauugaacagggaggca

SEQ ID NO: 218404 - RNA, 32 nt, Homo Sapiens
cgguugcucccucugccuaggccccugguacu

SEQ ID NO: 218405 - RNA, 32 nt, Homo Sapiens
ugcgccccgugcugccuccccccagagggcca

SEQ ID NO: 218406 - RNA, 32 nt, Homo Sapiens
ggggacacuccuccccucccccacacucacag

SEQ ID NO: 218407 - RNA, 32 nt, Homo Sapiens
gccauguaugaaagucucuuuaugauguuugu

SEQ ID NO: 218408 - RNA, 32 nt, Homo Sapiens
ggcgggggcauccggcggagcugggguccccg

SEQ ID NO: 218409 - RNA, 32 nt, Homo Sapiens
uuuuuuucuucuuuuucuucuuuuucuuuucu

SEQ ID NO: 218410 - RNA, 32 nt, Homo Sapiens
augaucuaaaagaaucaauaaauaagagugaa

SEQ ID NO: 218411 - RNA, 32 nt, Homo Sapiens
uugaaccuuaguuuagugaagaugaacugucu

SEQ ID NO: 218412 - RNA, 32 nt, Homo Sapiens
cuggaggugugcuggcucucgcagguugcaaa

SEQ ID NO: 218413 - RNA, 32 nt, Homo Sapiens
cagauuuuuccuucuuuuuguuuugugaugau

SEQ ID NO: 218414 - RNA, 32 nt, Homo Sapiens
uugaauagauuguuuaagcuauuuucaaaaca

SEQ ID NO: 218415 - RNA, 32 nt, Homo Sapiens
cauaauauagucuguauuaucuguaagaucug

SEQ ID NO: 218416 - RNA, 32 nt, Homo Sapiens
cuuucauuggcagaucuugguagcacuuuaua

SEQ ID NO: 218417 - RNA, 31 nt, Homo Sapiens
ccucaguaaagaaaguccauccguaaaguac

SEQ ID NO: 218418 - RNA, 31 nt, Homo Sapiens
ugcgaccggcacugcccauccgagcgggacg

SEQ ID NO: 218419 - RNA, 32 nt, Homo Sapiens
aagacauuauugcuuccaguuguuauggugau

SEQ ID NO: 218420 - RNA, 32 nt, Homo Sapiens
cagacucuguguguguauguguguguuuauau

SEQ ID NO: 218421 - RNA, 32 nt, Homo Sapiens
gcucagagaagcuugcgcagguacauguuccc

SEQ ID NO: 218422 - RNA, 32 nt, Homo Sapiens
cuccuaaagccugguccccagaaauuguuuuu

SEQ ID NO: 218423 - RNA, 32 nt, Homo Sapiens
cccagcuggcccuccacccccaccucaagugc

SEQ ID NO: 218424 - RNA, 32 nt, Homo Sapiens
cugcuguaagagaaugacaaaaauauucaugu

SEQ ID NO: 218425 - RNA, 32 nt, Homo Sapiens
cagccugcccuaccccaccuacccugccucag

SEQ ID NO: 218426 - RNA, 32 nt, Homo Sapiens
uaacgcgccggcucgggcggcgggcuccgggc

SEQ ID NO: 218427 - RNA, 32 nt, Homo Sapiens
ccaagcguguccucggugggcgcucagaggcg

SEQ ID NO: 218428 - RNA, 32 nt, Homo Sapiens
augccgcagggcgcgccgcggagcgccccgga

SEQ ID NO: 218429 - RNA, 32 nt, Homo Sapiens
cacccugcguugccuggcacggaagaggccau

SEQ ID NO: 218430 - RNA, 32 nt, Homo Sapiens
agaacccacuaggcucacggaacuugcaguuc

SEQ ID NO: 218431 - RNA, 32 nt, Homo Sapiens
gccguccgcucaggaggcgccccgcgaccggc

SEQ ID NO: 218432 - RNA, 32 nt, Homo Sapiens
acgaggucaggagaucgagaccguccuggcua

SEQ ID NO: 218433 - RNA, 32 nt, Homo Sapiens
uuauaauaaaaccacucauguuagaugagcug

SEQ ID NO: 218434 - RNA, 32 nt, Homo Sapiens
caggcuguucuuccuccuccuagaaugucugg

SEQ ID NO: 218435 - RNA, 32 nt, Homo Sapiens
ucuaauaaguguuuuucauauuauuuccacgu

SEQ ID NO: 218436 - RNA, 32 nt, Homo Sapiens
aauaucagucauucacaggggcggccggucuc

SEQ ID NO: 218437 - RNA, 32 nt, Homo Sapiens
gcuugugcccccgcuucgcgcgcgcuccguga

SEQ ID NO: 218438 - RNA, 32 nt, Homo Sapiens
accucuugaaugcuuugcugcuuagaaauuuc

SEQ ID NO: 218439 - RNA, 31 nt, Homo Sapiens
ucuuccuauccccagaaccuugcacagaucc

SEQ ID NO: 218440 - RNA, 32 nt, Homo Sapiens
guuuuucugaaaucuugguuugaucaaaucuu

SEQ ID NO: 218441 - RNA, 32 nt, Homo Sapiens
cgcucggcucccauagcgcccgcgacagcggu

SEQ ID NO: 218442 - RNA, 32 nt, Homo Sapiens
ccugcagaugacccuugguagagucuuuauuu

SEQ ID NO: 218443 - RNA, 32 nt, Homo Sapiens
uaaauccuaaucuuagaguuaucaaaagaaga

SEQ ID NO: 218444 - RNA, 32 nt, Homo Sapiens
aaguggcagcgggcgggcccggcugccaagga

SEQ ID NO: 218445 - RNA, 32 nt, Homo Sapiens
cuuggugaaauuguuuaaguacaggaucaagc

SEQ ID NO: 218446 - RNA, 32 nt, Homo Sapiens
uggguccuaaauguggacucagagguggaaac

SEQ ID NO: 218447 - RNA, 32 nt, Homo Sapiens
aacuagacacuuuccuacuaagaucaggaaca

SEQ ID NO: 218448 - RNA, 32 nt, Homo Sapiens
ggguuucuaaugguuauauguauaucacauuc

SEQ ID NO: 218449 - RNA, 32 nt, Homo Sapiens
gaucggauuugcuuuucucuucugccucggau

SEQ ID NO: 218450 - RNA, 32 nt, Homo Sapiens
guuauuuuuuauucuuugaauuuuuacucuau

SEQ ID NO: 218451 - RNA, 32 nt, Homo Sapiens
ucagggggccgccugcugggaagugcuaccuc

SEQ ID NO: 218452 - RNA, 32 nt, Homo Sapiens
ucuguuaucuucaagcagcacaaaauaugcau

SEQ ID NO: 218453 - RNA, 32 nt, Homo Sapiens
guggagggucaauaaaucacaugauggcuuug

SEQ ID NO: 218454 - RNA, 32 nt, Homo Sapiens
ccuuaucaaccugggucccucacacuucgcca

SEQ ID NO: 218455 - RNA, 32 nt, Homo Sapiens
ccuuuugaccuuuguuacauaauucuaccccu

SEQ ID NO: 218456 - RNA, 32 nt, Homo Sapiens
cugccuccugucagcgucuacaggcccaaccu

SEQ ID NO: 218457 - RNA, 32 nt, Homo Sapiens
gaaguuucuggcccuaccuggacccagcagaa

SEQ ID NO: 218458 - RNA, 32 nt, Homo Sapiens
cuccgacguguccagguccgcggccccgggag

SEQ ID NO: 218459 - RNA, 32 nt, Homo Sapiens
acagccacaguaggagcuuugcgaccccuacg

SEQ ID NO: 218460 - RNA, 32 nt, Homo Sapiens
aaaucguacccuaaauuuuucuugacccagcu

SEQ ID NO: 218461 - RNA, 32 nt, Homo Sapiens
ccuucuugcaacaacaguuucugaauugacuu

SEQ ID NO: 218462 - RNA, 32 nt, Homo Sapiens
gagcgcagucggagcgcggcggcagcggcaga

SEQ ID NO: 218463 - RNA, 32 nt, Homo Sapiens
agcccuccucagaccuuaucaauucauugaga

SEQ ID NO: 218464 - RNA, 32 nt, Homo Sapiens
gcggagcagcagccucugcugcccugacuuuu

SEQ ID NO: 218465 - RNA, 32 nt, Homo Sapiens
aaagcuggugcucugucucuaugcaagacagg

SEQ ID NO: 218466 - RNA, 32 nt, Homo Sapiens
agcugggugcgguggcucaugccuguaauccc

SEQ ID NO: 218467 - RNA, 32 nt, Homo Sapiens
acacacaccuccuugggcccaggccccagcac

SEQ ID NO: 218468 - RNA, 32 nt, Homo Sapiens
cauuucagaaacgugaaagaaaucacauagga

SEQ ID NO: 218469 - RNA, 32 nt, Homo Sapiens
gguguuaaacacagacgaggaaacacacguuu

SEQ ID NO: 218470 - RNA, 32 nt, Homo Sapiens
ggagcgcgcgcccgcugcucucuccagguccc

SEQ ID NO: 218471 - RNA, 32 nt, Homo Sapiens
uaucucauguuuucuuuuuucaaugcuaauua

SEQ ID NO: 218472 - RNA, 32 nt, Homo Sapiens
guggauguuaccuuuuucagauccaagcauau

SEQ ID NO: 218473 - RNA, 32 nt, Homo Sapiens
gagacugugggugugugcaggccggggaguau

SEQ ID NO: 218474 - RNA, 32 nt, Homo Sapiens
acucauuauuccagaggaggguaaaaggcuga

SEQ ID NO: 218475 - RNA, 32 nt, Homo Sapiens
caggagcaaaaauuuuugggaguaguuuagcu

SEQ ID NO: 218476 - RNA, 32 nt, Homo Sapiens
aacuuguucuuugcagcuuaucaccuugugaa

SEQ ID NO: 218477 - RNA, 32 nt, Homo Sapiens
gguuucuccauguuggccaggcuggucucaaa

SEQ ID NO: 218478 - RNA, 32 nt, Homo Sapiens
guauucuggucugcaccguaccagcgcaugag

SEQ ID NO: 218479 - RNA, 32 nt, Homo Sapiens
gcagaugcgcucauccgcccagcccaacaucg

SEQ ID NO: 218480 - RNA, 32 nt, Homo Sapiens
cucugcuccccucccuccaaccaggguucaug

SEQ ID NO: 218481 - RNA, 32 nt, Homo Sapiens
gggaaggcuuccuggaggaagugaggccuaaa

SEQ ID NO: 218482 - RNA, 32 nt, Homo Sapiens
uuacugggggccacgucccaccccucagauau

SEQ ID NO: 218483 - RNA, 32 nt, Homo Sapiens
cuagcaccacaccagaagcacgaggcccuuga

SEQ ID NO: 218484 - RNA, 32 nt, Homo Sapiens
cgggcuuaccuggacacuaaggugauggacgg

SEQ ID NO: 218485 - RNA, 32 nt, Homo Sapiens
uccagccccguccgcgcgucucccggcguggg

SEQ ID NO: 218486 - RNA, 32 nt, Homo Sapiens
aauuugauuggaaaaauguaugugcagcaugu

SEQ ID NO: 218487 - RNA, 32 nt, Homo Sapiens
aaaugguaggccauucugaacugcacacauuu

SEQ ID NO: 218488 - RNA, 32 nt, Homo Sapiens
gcugcauuucuuuuuauauuaaauaugugagu

SEQ ID NO: 218489 - RNA, 32 nt, Homo Sapiens
gaaaaucagucucaccugagaacucaauuaug

SEQ ID NO: 218490 - RNA, 32 nt, Homo Sapiens
agggcaacccucacagggagaugggagggcac

SEQ ID NO: 218491 - RNA, 32 nt, Homo Sapiens
agcacagccaagauggacauguuuauggacag

SEQ ID NO: 218492 - RNA, 32 nt, Homo Sapiens
ugucuucccuucuagacuuucccaucuccugg

SEQ ID NO: 218493 - RNA, 32 nt, Homo Sapiens
ccuucaggcugggauuucacuaagggcuggag

SEQ ID NO: 218494 - RNA, 32 nt, Homo Sapiens
aagcagagaaaaaaccuguaggaugcagccua

SEQ ID NO: 218495 - RNA, 32 nt, Homo Sapiens
cuguccccagggugggggaagggccaggcaga

SEQ ID NO: 218496 - RNA, 32 nt, Homo Sapiens
ccgaucuggucuguugguuugaggaugaaggg

SEQ ID NO: 218497 - RNA, 32 nt, Homo Sapiens
gaggcccagguggaccugggggauggcuacac

SEQ ID NO: 218498 - RNA, 32 nt, Homo Sapiens
ccguccgaggccagccgccucugucagccguc

SEQ ID NO: 218499 - RNA, 32 nt, Homo Sapiens
ccagagccagacgcgccggagcgggcgccucu

SEQ ID NO: 218500 - RNA, 32 nt, Homo Sapiens
gccaaauagguugaagacaaucauccaaacag

SEQ ID NO: 218501 - RNA, 32 nt, Homo Sapiens
gcagagaaggcgcugaucuugaacuaauccug

SEQ ID NO: 218502 - RNA, 32 nt, Homo Sapiens
uuacuacuuaaaccuuuuuuuuuguuuguuua

SEQ ID NO: 218503 - RNA, 32 nt, Homo Sapiens
augcuuccagcauuuucauggauuacaaaugu

SEQ ID NO: 218504 - RNA, 32 nt, Homo Sapiens
augcucagaugaacaacauauuaaaauuaaaa

SEQ ID NO: 218505 - RNA, 32 nt, Homo Sapiens
aaaagggaauaaaaggcugcgcauaaucauaa

SEQ ID NO: 218506 - RNA, 32 nt, Homo Sapiens
aacaaaucuucagcuugucucucaguauuucc

SEQ ID NO: 218507 - RNA, 32 nt, Homo Sapiens
agcuggcagcgggaugaggcuggcccccuccu

SEQ ID NO: 218508 - RNA, 32 nt, Homo Sapiens
ggcccccacgcccgagccucuccgggccuucc

SEQ ID NO: 218509 - RNA, 32 nt, Homo Sapiens
aucuuuacuucaucagagagaccuaaagcgau

SEQ ID NO: 218510 - RNA, 32 nt, Homo Sapiens
gacuuuuagcauuuguggguagacuuaauggc

SEQ ID NO: 218511 - RNA, 32 nt, Homo Sapiens
auauuaagugauauaaacacuucuuuuaacuc

SEQ ID NO: 218512 - RNA, 32 nt, Homo Sapiens
aguuccuacuaaaagaaguggccugcagaagu

SEQ ID NO: 218513 - RNA, 32 nt, Homo Sapiens
gaagccaaugggcgaugaauagacuuacacac

SEQ ID NO: 218514 - RNA, 32 nt, Homo Sapiens
guaauucugucucuuagaaaaauacauaaucu

SEQ ID NO: 218515 - RNA, 32 nt, Homo Sapiens
cuauucuggucuguagccuugauuccaaccau

SEQ ID NO: 218516 - RNA, 32 nt, Homo Sapiens
cuuguggcaaagcgugaagauagggugugggg

SEQ ID NO: 218517 - RNA, 32 nt, Homo Sapiens
uggcacucaagcccccuaccccugcagugccu

SEQ ID NO: 218518 - RNA, 32 nt, Homo Sapiens
uuucaggagagccagcccacagaugaugaaga

SEQ ID NO: 218519 - RNA, 32 nt, Homo Sapiens
cguccuggaaaacuacauuuacuacuuucaga

SEQ ID NO: 218520 - RNA, 32 nt, Homo Sapiens
aaagaauagauauggggaaauaaacuuaaaaa

SEQ ID NO: 218521 - RNA, 32 nt, Homo Sapiens
gugaugacuuggaugugacuccuacuuggcuu

SEQ ID NO: 218522 - RNA, 32 nt, Homo Sapiens
caggcuggcgugaaguggcgcaaccagcucac

SEQ ID NO: 218523 - RNA, 32 nt, Homo Sapiens
cuucuucugccacuccucccugcuugcaucuc

SEQ ID NO: 218524 - RNA, 32 nt, Homo Sapiens
uaguuuacaaaacaguuauucuaggcuugaag

SEQ ID NO: 218525 - RNA, 32 nt, Homo Sapiens
gggaaacugcaugcccacuuucugggaggggu

SEQ ID NO: 218526 - RNA, 32 nt, Homo Sapiens
ucaagcugcccuuaccaccccaucccccacgc

SEQ ID NO: 218527 - RNA, 32 nt, Homo Sapiens
uacuagggucucaugcguguccugcuuggaga

SEQ ID NO: 218528 - RNA, 32 nt, Homo Sapiens
acguuaccuugaugcaaauuugccaaaucuga

SEQ ID NO: 218529 - RNA, 32 nt, Homo Sapiens
uuugguuugaugcauacaauagaguggaaguc

SEQ ID NO: 218530 - RNA, 32 nt, Homo Sapiens
caagaaagggaagggaaaggacuaacgccaag

SEQ ID NO: 218531 - RNA, 32 nt, Homo Sapiens
cucgcccggaaccccaggaggccugcagccug

SEQ ID NO: 218532 - RNA, 32 nt, Homo Sapiens
cccgagccugcggcagcggccaggcgccugcc

SEQ ID NO: 218533 - RNA, 32 nt, Homo Sapiens
cuuuuucuccugcuccuucuccagccuuauug

SEQ ID NO: 218534 - RNA, 32 nt, Homo Sapiens
agagcacuuuaaagucugauauuucucgaugu

SEQ ID NO: 218535 - RNA, 32 nt, Homo Sapiens
uuccacauuuuucauacuuguacaaaggguaa

SEQ ID NO: 218536 - RNA, 32 nt, Homo Sapiens
ucauucaagcuacuaucacaagcuacacauaa

SEQ ID NO: 218537 - RNA, 32 nt, Homo Sapiens
aucugagaauacuggcccugucgacuauugcc

SEQ ID NO: 218538 - RNA, 32 nt, Homo Sapiens
cggaaccugaggcagcuggggagggccgggcg

SEQ ID NO: 218539 - RNA, 32 nt, Homo Sapiens
caacccccauucucaucugcacccuucuuuuc

SEQ ID NO: 218540 - RNA, 32 nt, Homo Sapiens
gcggauacuuugcuuauucguuuaacgaccgc

SEQ ID NO: 218541 - RNA, 32 nt, Homo Sapiens
auguucucauauauugaauucucaacuaagua

SEQ ID NO: 218542 - RNA, 32 nt, Homo Sapiens
cgaagguaccauggccggacuccggagccgca

SEQ ID NO: 218543 - RNA, 32 nt, Homo Sapiens
gccgagaaccccacccccuuucuuugcggaau

SEQ ID NO: 218544 - RNA, 32 nt, Homo Sapiens
gagggcuggccccuccucucaucuucccuuca

SEQ ID NO: 218545 - RNA, 32 nt, Homo Sapiens
agcaacuuuccacacaggacguugaaaacagu

SEQ ID NO: 218546 - RNA, 32 nt, Homo Sapiens
cccuuucccagcugcacucgcccuguggacag

SEQ ID NO: 218547 - RNA, 32 nt, Homo Sapiens
ugggcccucuggggcuuccccucccccaccug

SEQ ID NO: 218548 - RNA, 32 nt, Homo Sapiens
ggcucagggaucuucucccuccccucacccgc

SEQ ID NO: 218549 - RNA, 32 nt, Homo Sapiens
caagggugguagcauacaccuguaguccuagc

SEQ ID NO: 218550 - RNA, 32 nt, Homo Sapiens
ccccggggggccgcuagcgcggaccggcccaa

SEQ ID NO: 218551 - RNA, 32 nt, Homo Sapiens
uuguacugggaucagaauacaugauggaugaa

SEQ ID NO: 218552 - RNA, 32 nt, Homo Sapiens
uuauccaucccucuccaggucagaaaauucau

SEQ ID NO: 218553 - RNA, 32 nt, Homo Sapiens
cugaugaggucuuaacaaaaaccaguguggca

SEQ ID NO: 218554 - RNA, 32 nt, Homo Sapiens
uauuuggugcuuagacaaauucaaaaugagga

SEQ ID NO: 218555 - RNA, 32 nt, Homo Sapiens
ugucuggcugugggauaaaugugugugggaau

SEQ ID NO: 218556 - RNA, 32 nt, Homo Sapiens
gaaacuuacaaccacaagcaauccccagaagc

SEQ ID NO: 218557 - RNA, 32 nt, Homo Sapiens
uuaacauuacuuuuuaaguaaaacaguucauu

SEQ ID NO: 218558 - RNA, 32 nt, Homo Sapiens
uacaaagucgaaagguuaauaauagcagcuag

SEQ ID NO: 218559 - RNA, 32 nt, Homo Sapiens
ggcaccuggccuccgcuggugcagcuuuccuu

SEQ ID NO: 218560 - RNA, 32 nt, Homo Sapiens
gugauuuuucucacuaaugacaaaaggaauaa

SEQ ID NO: 218561 - RNA, 32 nt, Homo Sapiens
gaggaaggacaaaguccggugccgcugcccag

SEQ ID NO: 218562 - RNA, 32 nt, Homo Sapiens
cacauggcccucacugcugcguucagagccac

SEQ ID NO: 218563 - RNA, 32 nt, Homo Sapiens
uggcucacaccuguaauccccagcacuuuggg

SEQ ID NO: 218564 - RNA, 32 nt, Homo Sapiens
aggaugaaaaauaccaagauagcuacauagug

SEQ ID NO: 218565 - RNA, 32 nt, Homo Sapiens
accacagggauccccaggaugcccacuucccu

SEQ ID NO: 218566 - RNA, 32 nt, Homo Sapiens
ugugaguuguugacauuggacaggugaacagu

SEQ ID NO: 218567 - RNA, 32 nt, Homo Sapiens
auacccgggacgggcucuggacacuugcaccu

SEQ ID NO: 218568 - RNA, 32 nt, Homo Sapiens
aagccaaacaggcaaacgauccuggccucucc

SEQ ID NO: 218569 - RNA, 32 nt, Homo Sapiens
uauguccuaagagaagauauuuuuuaaaugcc

SEQ ID NO: 218570 - RNA, 32 nt, Homo Sapiens
ggguugaggacugccccccaccccgcccaagc

SEQ ID NO: 218571 - RNA, 32 nt, Homo Sapiens
gggcccaaggcacagccagggcacaguuaggc

SEQ ID NO: 218572 - RNA, 32 nt, Homo Sapiens
agaaaagaaugcucacggaggucugcccaugc

SEQ ID NO: 218573 - RNA, 32 nt, Homo Sapiens
uaaaagugagauuaauaaaaucugaaaauguu

SEQ ID NO: 218574 - RNA, 32 nt, Homo Sapiens
gggaagauuuuuucucuuucuguagugagcaa

SEQ ID NO: 218575 - RNA, 32 nt, Homo Sapiens
guggccccacccaaucaagggaagaaggagga

SEQ ID NO: 218576 - RNA, 32 nt, Homo Sapiens
cuaaugauaauauugauaaugaaaauaauagc

SEQ ID NO: 218577 - RNA, 32 nt, Homo Sapiens
cagaaguuacacaaacgccagcacaaauucaa

SEQ ID NO: 218578 - RNA, 32 nt, Homo Sapiens
uuuccagacaucuuuuucagauugucuuaagc

SEQ ID NO: 218579 - RNA, 32 nt, Homo Sapiens
cccugccagcagagcaggcuggcguuuggugu

SEQ ID NO: 218580 - RNA, 32 nt, Homo Sapiens
gacuggucucucucugccccagccaguuuggg

SEQ ID NO: 218581 - RNA, 32 nt, Homo Sapiens
gccagggccagcagccuucagucgguagcugg

SEQ ID NO: 218582 - RNA, 32 nt, Homo Sapiens
ugaaacaaagugucggccgcccggcgccggcg

SEQ ID NO: 218583 - RNA, 32 nt, Homo Sapiens
cugggcuccgcggccucggccccgcugcacuc

SEQ ID NO: 218584 - RNA, 32 nt, Homo Sapiens
gggcaccgccgacgccucgggagccauggccg

SEQ ID NO: 218585 - RNA, 32 nt, Homo Sapiens
aagagaaagaggaaaaggagccacuguacuuu

SEQ ID NO: 218586 - RNA, 32 nt, Homo Sapiens
guauuaaguacgauuacccagcacuugcauua

SEQ ID NO: 218587 - RNA, 29 nt, Homo Sapiens
gagcugggaaguuucagagguaggguguc

SEQ ID NO: 218588 - RNA, 32 nt, Homo Sapiens
uggauuugagguugaccuuaugcgcguagguu

SEQ ID NO: 218589 - RNA, 32 nt, Homo Sapiens
cacggaaugaucuccaaacauuccuaggagag

SEQ ID NO: 218590 - RNA, 32 nt, Homo Sapiens
gaucagucaaauccauaccaccacugagaucu

SEQ ID NO: 218591 - RNA, 32 nt, Homo Sapiens
caucaaguguuuacuuagauuuuuauaaaaau

SEQ ID NO: 218592 - RNA, 32 nt, Homo Sapiens
gggaggaaaggcuccucucuuuagucaccacu

SEQ ID NO: 218593 - RNA, 32 nt, Homo Sapiens
caugugcacgccccggccagcuaagccucggg

SEQ ID NO: 218594 - RNA, 32 nt, Homo Sapiens
gagugcuaauuuaguucucagcucuucugacu

SEQ ID NO: 218595 - RNA, 32 nt, Homo Sapiens
ccuuaagcgccggcgcagcugcggcccgcccg

SEQ ID NO: 218596 - RNA, 32 nt, Homo Sapiens
cccauuccaaauaauauuuguguaguguuagc

SEQ ID NO: 218597 - RNA, 32 nt, Homo Sapiens
gugauggaacuguacgagauaggcggggccaa

SEQ ID NO: 218598 - RNA, 32 nt, Homo Sapiens
agccccucaagaccauccuggaugcccaggac

SEQ ID NO: 218599 - RNA, 32 nt, Homo Sapiens
agaaaaaaauauauuuuaugauuuaaaaaaua

SEQ ID NO: 218600 - RNA, 32 nt, Homo Sapiens
uaguuuuuacuuuuauuugcaacauuuacagu

SEQ ID NO: 218601 - RNA, 32 nt, Homo Sapiens
gcaccugcccaaccaaacucagcccuccguua

SEQ ID NO: 218602 - RNA, 32 nt, Homo Sapiens
caacugugaggaauaauguauguuguuuaagc

SEQ ID NO: 218603 - RNA, 32 nt, Homo Sapiens
caaguguuaaaacaaaaacaaacaaacacguu

SEQ ID NO: 218604 - RNA, 32 nt, Homo Sapiens
auucaugaauaaaaacuuugcagaaaauuaga

SEQ ID NO: 218605 - RNA, 32 nt, Homo Sapiens
accggcagcgaggcgccgcucccgccgccuca

SEQ ID NO: 218606 - RNA, 32 nt, Homo Sapiens
gaggcucccgcaccccccgccgcagucgcggg

SEQ ID NO: 218607 - RNA, 32 nt, Homo Sapiens
cuguccuguugccccaggggccccuuuggcuu

SEQ ID NO: 218608 - RNA, 32 nt, Homo Sapiens
ucagagaggacguggaauuuguucaagauaac

SEQ ID NO: 218609 - RNA, 32 nt, Homo Sapiens
aacaaaguccauccugccgccggcuucgacgc

SEQ ID NO: 218610 - RNA, 32 nt, Homo Sapiens
cucaucccgaucucuuccugucagaggaccgg

SEQ ID NO: 218611 - RNA, 32 nt, Homo Sapiens
gcugguagcgcgccgcucucggucgcgcggag

SEQ ID NO: 218612 - RNA, 32 nt, Homo Sapiens
gaccgcggcgcucgcgggccuggcggccguug

SEQ ID NO: 218613 - RNA, 32 nt, Homo Sapiens
acacugguuaaaauuaaacauaaaagaaauug

SEQ ID NO: 218614 - RNA, 32 nt, Homo Sapiens
aacuucauuagcuucugugaugacucaagauu

SEQ ID NO: 218615 - RNA, 32 nt, Homo Sapiens
auacaucuucucuuuccuuguuuuccucuaca

SEQ ID NO: 218616 - RNA, 32 nt, Homo Sapiens
guaauaaagucucuuauuagaaucuuguauuu

SEQ ID NO: 218617 - RNA, 32 nt, Homo Sapiens
cucugccgcgcgcgcagguacggggcagaagu

SEQ ID NO: 218618 - RNA, 32 nt, Homo Sapiens
uucuuucuccuuuccuucuccaaaggcuugga

SEQ ID NO: 218619 - RNA, 32 nt, Homo Sapiens
aacuaguccaugaaaccaagcucagaaaagcu

SEQ ID NO: 218620 - RNA, 30 nt, Homo Sapiens
cacugcaauauccccugggagacucucacc

SEQ ID NO: 218621 - RNA, 32 nt, Homo Sapiens
aacuugcacaaaucaaaacaaacacaaacaaa

SEQ ID NO: 218622 - RNA, 32 nt, Homo Sapiens
agacaagaugcauuugaaagauaccaaccgca

SEQ ID NO: 218623 - RNA, 32 nt, Homo Sapiens
aggaggcagggcccagcuuccacauccggagc

SEQ ID NO: 218624 - RNA, 32 nt, Homo Sapiens
gguaaaaagcaguuuagaaaaaucucaaaaac

SEQ ID NO: 218625 - RNA, 32 nt, Homo Sapiens
cuacauuaaugauguauguguugcugacugaa

SEQ ID NO: 218626 - RNA, 32 nt, Homo Sapiens
cccuuuuguuauuuuacagaaguuuuacagcu

SEQ ID NO: 218627 - RNA, 32 nt, Homo Sapiens
ggauaaacuucuuugcagaagcccauuugacu

SEQ ID NO: 218628 - RNA, 32 nt, Homo Sapiens
cgccgagguggacauccugggcguggauggga

SEQ ID NO: 218629 - RNA, 32 nt, Homo Sapiens
ugguggcguucgcucucccuaggggcugucgg

SEQ ID NO: 218630 - RNA, 32 nt, Homo Sapiens
aagguccccuccccggagcggagcgcaccuag

SEQ ID NO: 218631 - RNA, 32 nt, Homo Sapiens
uggcaagggaagagacccccaacucugcgccc

SEQ ID NO: 218632 - RNA, 32 nt, Homo Sapiens
uaagacaaauguuuaaauuuaguuauguucac

SEQ ID NO: 218633 - RNA, 32 nt, Homo Sapiens
uuuuaagcacauuuauacugaaggaauuugug

SEQ ID NO: 218634 - RNA, 32 nt, Homo Sapiens
ggagacagcuuaggguuuggugcgggccacgg

SEQ ID NO: 218635 - RNA, 32 nt, Homo Sapiens
cccgaugaccucccuuucccacugcuacagcc

SEQ ID NO: 218636 - RNA, 32 nt, Homo Sapiens
gcuuugcaacgcgcaccuaacuccaggggccc

SEQ ID NO: 218637 - RNA, 32 nt, Homo Sapiens
cugagcucgcugcccacgcagauggauuacaa

SEQ ID NO: 218638 - RNA, 32 nt, Homo Sapiens
gugaggacauaugauaaugauaccaaaggaaa

SEQ ID NO: 218639 - RNA, 32 nt, Homo Sapiens
acccacgcgucuggccgcgggccgccucugcg

SEQ ID NO: 218640 - RNA, 32 nt, Homo Sapiens
uugaggugggcauggagugagcagaagaagcc

SEQ ID NO: 218641 - RNA, 32 nt, Homo Sapiens
aggaaauauuauuucuuguaaaacauaacacu

SEQ ID NO: 218642 - RNA, 32 nt, Homo Sapiens
aagugggcgggcccggccaagccacgccuccg

SEQ ID NO: 218643 - RNA, 32 nt, Homo Sapiens
acucagcuuuuacaauaaaaaggauuuguauu

SEQ ID NO: 218644 - RNA, 32 nt, Homo Sapiens
uauaguucuacuuguagagaucuuuuaccuuc

SEQ ID NO: 218645 - RNA, 32 nt, Homo Sapiens
caguggcagugugacgcuguucuccgugguga

SEQ ID NO: 218646 - RNA, 32 nt, Homo Sapiens
ccuaaucccucuauuuuaagauuucugaaaaa

SEQ ID NO: 218647 - RNA, 32 nt, Homo Sapiens
gcaugguggcucauguuuguaauccuagcacu

SEQ ID NO: 218648 - RNA, 32 nt, Homo Sapiens
ccaccacccccucaagccccagcagcccucaa

SEQ ID NO: 218649 - RNA, 32 nt, Homo Sapiens
guauauagguuuuaucucugguugaaucccuc

SEQ ID NO: 218650 - RNA, 32 nt, Homo Sapiens
guaucacacuauaccagccauuugagccagca

SEQ ID NO: 218651 - RNA, 32 nt, Homo Sapiens
uuauuugaaucagauucuauuuagucaaacca

SEQ ID NO: 218652 - RNA, 32 nt, Homo Sapiens
uggcucagcaaccugguuauuuauguggggcc

SEQ ID NO: 218653 - RNA, 32 nt, Homo Sapiens
ccaaggcccgggugguggccuacuucugugag

SEQ ID NO: 218654 - RNA, 32 nt, Homo Sapiens
gcaauaccuggcucaggcccagccccaaucca

SEQ ID NO: 218655 - RNA, 32 nt, Homo Sapiens
aucuauaccacuaggguuuugucuuauguuua

SEQ ID NO: 218656 - RNA, 32 nt, Homo Sapiens
cucagcaauggcaauggggguccccagaguca

SEQ ID NO: 218657 - RNA, 32 nt, Homo Sapiens
guuauggaaauaaaaacaaauaaaacuacaaa

SEQ ID NO: 218658 - RNA, 32 nt, Homo Sapiens
cccgcgcacucggcugcccaggcgcucggaac

SEQ ID NO: 218659 - RNA, 32 nt, Homo Sapiens
uucaggccgcugaaggucaucaucaggcggaa

SEQ ID NO: 218660 - RNA, 32 nt, Homo Sapiens
cgcgggcccugcccuuuccucccgcgccccac

SEQ ID NO: 218661 - RNA, 32 nt, Homo Sapiens
aauucuggagaccuguguaaaagcagacuauu

SEQ ID NO: 218662 - RNA, 32 nt, Homo Sapiens
gacgcagacccggaggagcaucagcaaggggc

SEQ ID NO: 218663 - RNA, 32 nt, Homo Sapiens
caacgggugcgggaaggaugggcuugugccaa

SEQ ID NO: 218664 - RNA, 32 nt, Homo Sapiens
gggagaggcguggcccgagcggugcuggaagc

SEQ ID NO: 218665 - RNA, 32 nt, Homo Sapiens
cugugcaugauucacccccuccuuccauccug

SEQ ID NO: 218666 - RNA, 32 nt, Homo Sapiens
caaacccagagcucaggcuuuuagggcagaga

SEQ ID NO: 218667 - RNA, 32 nt, Homo Sapiens
cugccccuuuaaggaggcguugcaacaaacca

SEQ ID NO: 218668 - RNA, 32 nt, Homo Sapiens
uuuucauccacuuagugaaaaaauaguaaaau

SEQ ID NO: 218669 - RNA, 32 nt, Homo Sapiens
ggcuuaguucccugaggcaggcagggcuuauu

SEQ ID NO: 218670 - RNA, 32 nt, Homo Sapiens
caccaggcaauuugcuaggcucgggggcgggu

SEQ ID NO: 218671 - RNA, 32 nt, Homo Sapiens
acggggaggguuuggcuaccccugcccauccc

SEQ ID NO: 218672 - RNA, 32 nt, Homo Sapiens
guuacaggcaugagccgcuuuaccaagaaauu

SEQ ID NO: 218673 - RNA, 27 nt, Homo Sapiens
agccuccucuucaacagcccccuucuc

SEQ ID NO: 218674 - RNA, 32 nt, Homo Sapiens
auauuugaaaguauuuuuauuaaugaaccaaa

SEQ ID NO: 218675 - RNA, 32 nt, Homo Sapiens
uugauacagucaacaaaaauugguuaaaaaca

SEQ ID NO: 218676 - RNA, 32 nt, Homo Sapiens
aaucuuugcaaagaagcaaggggccaucucag

SEQ ID NO: 218677 - RNA, 27 nt, Homo Sapiens
acuauuuucugcaccagcccccagggc

SEQ ID NO: 218678 - RNA, 32 nt, Homo Sapiens
ugguggggguggggaaagaaagagggaacugg

SEQ ID NO: 218679 - RNA, 32 nt, Homo Sapiens
gaccucagggcacucuccucccugcccacaaa

SEQ ID NO: 218680 - RNA, 32 nt, Homo Sapiens
uguucugccccgaggccggggacgcagggcag

SEQ ID NO: 218681 - RNA, 32 nt, Homo Sapiens
uauauugaucuuaugauucaguguagaucauc

SEQ ID NO: 218682 - RNA, 32 nt, Homo Sapiens
uucucccccacagguucgaaccucugacaugg

SEQ ID NO: 218683 - RNA, 32 nt, Homo Sapiens
cuaggaagcaaaucuuccuucugcugcauaag

SEQ ID NO: 218684 - RNA, 32 nt, Homo Sapiens
cagaauuuaaacaaauguaaaauauuauuccu

SEQ ID NO: 218685 - RNA, 32 nt, Homo Sapiens
cggcaagcaccggucccgggcgcgccccagcc

SEQ ID NO: 218686 - RNA, 32 nt, Homo Sapiens
aucuuaaguguuacagguacaaaagaauauug

SEQ ID NO: 218687 - RNA, 32 nt, Homo Sapiens
ugcccgaguuagguuucgcccagcgcaauuuc

SEQ ID NO: 218688 - RNA, 32 nt, Homo Sapiens
cggcucccgcccggcgcagagccgcggcuccu

SEQ ID NO: 218689 - RNA, 32 nt, Homo Sapiens
cauccuaugcaauauaucuaaauugaauaaug

SEQ ID NO: 218690 - RNA, 32 nt, Homo Sapiens
gaagauacugaugggucuuguuuucuguuagu

SEQ ID NO: 218691 - RNA, 32 nt, Homo Sapiens
cuccuugugucugaugcacagauguggcccuu

SEQ ID NO: 218692 - RNA, 32 nt, Homo Sapiens
caaagugggccagcuccgcgugcuccucgccu

SEQ ID NO: 218693 - RNA, 32 nt, Homo Sapiens
ucggcucugaagaacugacacuagcuagauuu

SEQ ID NO: 218694 - RNA, 31 nt, Homo Sapiens
cugcuggagccccuucacaugguggaugaug

SEQ ID NO: 218695 - RNA, 32 nt, Homo Sapiens
guggaguggggagagggcaguugggugugcug

SEQ ID NO: 218696 - RNA, 32 nt, Homo Sapiens
cuagaugccuucuugaggcugcuuguggccac

SEQ ID NO: 218697 - RNA, 32 nt, Homo Sapiens
cagcgaccgagacccggugggacacuccccuu

SEQ ID NO: 218698 - RNA, 32 nt, Homo Sapiens
caggggguagagucaagacucauaccuaugcc

SEQ ID NO: 218699 - RNA, 32 nt, Homo Sapiens
ucucuuacuccuuccuucucugugaguauugu

SEQ ID NO: 218700 - RNA, 32 nt, Homo Sapiens
gccgacucccgaaguugggguccugggaaaac

SEQ ID NO: 218701 - RNA, 32 nt, Homo Sapiens
ucgugcagccuuggggacccugacacucccac

SEQ ID NO: 218702 - RNA, 32 nt, Homo Sapiens
guuuaccuuucuguuaaucuauguauaaaugu

SEQ ID NO: 218703 - RNA, 32 nt, Homo Sapiens
uucuaacacacacacacacacacacacacaca

SEQ ID NO: 218704 - RNA, 32 nt, Homo Sapiens
cgcacgccugaggcugggaucccgcgcugccu

SEQ ID NO: 218705 - RNA, 32 nt, Homo Sapiens
aagcauuaccuaacauggugaucugcaaguag

SEQ ID NO: 218706 - RNA, 29 nt, Homo Sapiens
auaacuuugacuuucuucugaauauuuua

SEQ ID NO: 218707 - RNA, 31 nt, Homo Sapiens
guucauuuugguaauaaacuggauuugaauu

SEQ ID NO: 218708 - RNA, 32 nt, Homo Sapiens
gaaucaccaaaauagugccuuguuuuaaaauu

SEQ ID NO: 218709 - RNA, 32 nt, Homo Sapiens
aggccugggggcggcgggagccugcgugcgug

SEQ ID NO: 218710 - RNA, 32 nt, Homo Sapiens
ucguggccggugccgucagcagggcccucgca

SEQ ID NO: 218711 - RNA, 32 nt, Homo Sapiens
gcucccagccccaccccgggaucuggugacgc

SEQ ID NO: 218712 - RNA, 32 nt, Homo Sapiens
gcauuacuuguuuuagaucagaaacuugcuau

SEQ ID NO: 218713 - RNA, 32 nt, Homo Sapiens
ugagcaucuucagauguugguaucugcaggga

SEQ ID NO: 218714 - RNA, 32 nt, Homo Sapiens
ccccauaaagcugcaucuccaacacauuguua

SEQ ID NO: 218715 - RNA, 32 nt, Homo Sapiens
augaagcggacgccuuccuucggaagcgagcc

SEQ ID NO: 218716 - RNA, 32 nt, Homo Sapiens
uagagcagacccagcccagaccucugacacau

SEQ ID NO: 218717 - RNA, 32 nt, Homo Sapiens
ccuccccuuuccugaacuguccagguccuucu

SEQ ID NO: 218718 - RNA, 32 nt, Homo Sapiens
guugcuguugguuuuucuucugcugccaaccu

SEQ ID NO: 218719 - RNA, 32 nt, Homo Sapiens
uuccucugugcagauaauaccuuuuucuugcu

SEQ ID NO: 218720 - RNA, 32 nt, Homo Sapiens
uaaagagugucuauuaagguuuggauuggaca

SEQ ID NO: 218721 - RNA, 32 nt, Homo Sapiens
uggugaaaguucagcugaagcuaaugucuaga

SEQ ID NO: 218722 - RNA, 32 nt, Homo Sapiens
gaucugaggauggaaggcuuugggggugucgg

SEQ ID NO: 218723 - RNA, 32 nt, Homo Sapiens
cuugacgacuuccccucccaccagcugagaau

SEQ ID NO: 218724 - RNA, 29 nt, Homo Sapiens
auguuuaaagaaucauauuuucuaagauu

SEQ ID NO: 218725 - RNA, 32 nt, Homo Sapiens
ggcuccccuucccccaggcucguccuuuuuac

SEQ ID NO: 218726 - RNA, 32 nt, Homo Sapiens
uccgcccccacuuccccaucuaccucuugucc

SEQ ID NO: 218727 - RNA, 32 nt, Homo Sapiens
cuugucaccucuuggagcccccuccuaaccag

SEQ ID NO: 218728 - RNA, 32 nt, Homo Sapiens
aucuagaaacaaaaguuccaaaaugugcccca

SEQ ID NO: 218729 - RNA, 32 nt, Homo Sapiens
caauugcauuuaacauuguuauaaauaaaagg

SEQ ID NO: 218730 - RNA, 32 nt, Homo Sapiens
uucccaagaugauguagagaauuucagugcug

SEQ ID NO: 218731 - RNA, 32 nt, Homo Sapiens
aaaacagaguuuccucuccagagggcucaaug

SEQ ID NO: 218732 - RNA, 32 nt, Homo Sapiens
cagcucaggggagaauggaguacugucucagu

SEQ ID NO: 218733 - RNA, 32 nt, Homo Sapiens
aaucuggagcuacacacaggagggaucagcuc

SEQ ID NO: 218734 - RNA, 32 nt, Homo Sapiens
ugcaaaauaauuguagacaaaauaauggcauu

SEQ ID NO: 218735 - RNA, 32 nt, Homo Sapiens
cugcaccuccccggggagccgccccgucgaug

SEQ ID NO: 218736 - RNA, 32 nt, Homo Sapiens
ccucuaaagaagguauacuaacugauaaucuc

SEQ ID NO: 218737 - RNA, 32 nt, Homo Sapiens
aucccaaacaauauuucuauuuuuguaaaaca

SEQ ID NO: 218738 - RNA, 32 nt, Homo Sapiens
gggggcucgaggcgccuccgcggccguggacg

SEQ ID NO: 218739 - RNA, 32 nt, Homo Sapiens
cccugggcccccagccucuggccucccuccag

SEQ ID NO: 218740 - RNA, 32 nt, Homo Sapiens
ggugucccaagcccuggaaauagggaagggaa

SEQ ID NO: 218741 - RNA, 32 nt, Homo Sapiens
cugccgacacgcucccucccccugccccuucu

SEQ ID NO: 218742 - RNA, 32 nt, Homo Sapiens
augccaacaccuucuuggcuucugggaccugu

SEQ ID NO: 218743 - RNA, 32 nt, Homo Sapiens
caaaauuggaacucuuguucuaauucaguuac

SEQ ID NO: 218744 - RNA, 31 nt, Homo Sapiens
uggcagaaauaaaaccacagguagauucugc

SEQ ID NO: 218745 - RNA, 32 nt, Homo Sapiens
gagcuccuggaaagaguugcugacuuuguauc

SEQ ID NO: 218746 - RNA, 32 nt, Homo Sapiens
cuggucugugagccuggcuuugaaaauugguu

SEQ ID NO: 218747 - RNA, 32 nt, Homo Sapiens
guuugauuccuccuuugauuucuuuuucgguu

SEQ ID NO: 218748 - RNA, 32 nt, Homo Sapiens
ugggugauagagugagauucagucucaaaaaa

SEQ ID NO: 218749 - RNA, 32 nt, Homo Sapiens
uguccagcugucucaugccuuuuuguccuguc

SEQ ID NO: 218750 - RNA, 32 nt, Homo Sapiens
gaagagcuggcacuauuggauaaagcccagau

SEQ ID NO: 218751 - RNA, 32 nt, Homo Sapiens
ucuuauuuuaaccuaaaaucuuacuaucagaa

SEQ ID NO: 218752 - RNA, 32 nt, Homo Sapiens
gccacugagaucugggggcugccugggaaggc

SEQ ID NO: 218753 - RNA, 32 nt, Homo Sapiens
gggcugccuccccuccucccguccaccccaga

SEQ ID NO: 218754 - RNA, 32 nt, Homo Sapiens
uggagaaagagcaggugaaauauuuucucagc

SEQ ID NO: 218755 - RNA, 32 nt, Homo Sapiens
aaugcuuuuuauuauuauuauuuuuuagacag

SEQ ID NO: 218756 - RNA, 32 nt, Homo Sapiens
uguccggucaccguauguuuuaagucgguguu

SEQ ID NO: 218757 - RNA, 32 nt, Homo Sapiens
ggagauaaaaagaagaauuugccaagucagag

SEQ ID NO: 218758 - RNA, 32 nt, Homo Sapiens
auccugaagaucucgugacuauacuggcauuu

SEQ ID NO: 218759 - RNA, 32 nt, Homo Sapiens
cgggaguccaucccggcccagcacccccagca

SEQ ID NO: 218760 - RNA, 32 nt, Homo Sapiens
ccuuuggagcagccucgcugcaggaggucacu

SEQ ID NO: 218761 - RNA, 32 nt, Homo Sapiens
cagaaagaucauaauucagaagguaaccaucg

SEQ ID NO: 218762 - RNA, 32 nt, Homo Sapiens
uagauuuauuuuuucuuuucagccagagauuu

SEQ ID NO: 218763 - RNA, 32 nt, Homo Sapiens
gcacaaagucgaccaacaaaagcaucaacuuu

SEQ ID NO: 218764 - RNA, 32 nt, Homo Sapiens
ccuaggcuugucuggaacuccugggcucaagg

SEQ ID NO: 218765 - RNA, 32 nt, Homo Sapiens
ccucccagucugucagaauggccacuugcagg

SEQ ID NO: 218766 - RNA, 32 nt, Homo Sapiens
ccagaaccuuccucuuuuuucuuaaaaacucu

SEQ ID NO: 218767 - RNA, 32 nt, Homo Sapiens
uauaauuugugauauuuucuguaugucugugg

SEQ ID NO: 218768 - RNA, 32 nt, Homo Sapiens
cccaucccaagcauagccagcucccccuccuu

SEQ ID NO: 218769 - RNA, 32 nt, Homo Sapiens
ggagucaggcagagccgguauugaaagugggc

SEQ ID NO: 218770 - RNA, 32 nt, Homo Sapiens
uuauccagacugccuugccacuagaugaaugg

SEQ ID NO: 218771 - RNA, 32 nt, Homo Sapiens
uaccacaagucuuuuuugcaaucuugaacuuu

SEQ ID NO: 218772 - RNA, 32 nt, Homo Sapiens
gggcucccuggccacaagcuuuuucuauccug

SEQ ID NO: 218773 - RNA, 29 nt, Homo Sapiens
ugccaauaaaguuuuucuucuucucgcuc

SEQ ID NO: 218774 - RNA, 31 nt, Homo Sapiens
uggauaaauuuguauuuuucaguguucauug

SEQ ID NO: 218775 - RNA, 32 nt, Homo Sapiens
aacgcucuuggguuuuauguccgcugcuucuu

SEQ ID NO: 218776 - RNA, 32 nt, Homo Sapiens
uccuguuuuauaaauucccauuguuauaugau

SEQ ID NO: 218777 - RNA, 31 nt, Homo Sapiens
agacgugacccagcugaccaggcaagaccuc

SEQ ID NO: 218778 - RNA, 32 nt, Homo Sapiens
agaucuuuuguuuuggguggguuuucugcucu

SEQ ID NO: 218779 - RNA, 32 nt, Homo Sapiens
ugaaugaaagucuugugacuagugcugaagcu

SEQ ID NO: 218780 - RNA, 32 nt, Homo Sapiens
agggucgagacacgguggcugcaggucugaga

SEQ ID NO: 218781 - RNA, 32 nt, Homo Sapiens
caucuguaaucccagcacuuugggaggcagag

SEQ ID NO: 218782 - RNA, 32 nt, Homo Sapiens
cuuuauuuucuuuuauguuucuauauguugcg

SEQ ID NO: 218783 - RNA, 32 nt, Homo Sapiens
cuaaagaaauaacuuauguaaaacucuuagua

SEQ ID NO: 218784 - RNA, 32 nt, Homo Sapiens
ccagaccucuucuggaggaagacuggacaaag

SEQ ID NO: 218785 - RNA, 30 nt, Homo Sapiens
gguugggggaagcuugaccuugugucuucg

SEQ ID NO: 218786 - RNA, 32 nt, Homo Sapiens
ccauggccacgcugcuggccugggcuggcguc

SEQ ID NO: 218787 - RNA, 32 nt, Homo Sapiens
gcaccuuaacuuuaacuguucaguuuuaucug

SEQ ID NO: 218788 - RNA, 32 nt, Homo Sapiens
aaaggcugccagccucagcuaucgccgcugac

SEQ ID NO: 218789 - RNA, 32 nt, Homo Sapiens
cucaugaggggagaggagacggaggggaguag

SEQ ID NO: 218790 - RNA, 32 nt, Homo Sapiens
ggggcucguaauuaccuuucacuuuaauguca

SEQ ID NO: 218791 - RNA, 32 nt, Homo Sapiens
cugcaggaaggggcggcuguaggcgcagcuuc

SEQ ID NO: 218792 - RNA, 32 nt, Homo Sapiens
cauguugggguggaagggaauuggugcccaga

SEQ ID NO: 218793 - RNA, 32 nt, Homo Sapiens
ccggcggcagcugagccagcgcggcgggucug

SEQ ID NO: 218794 - RNA, 32 nt, Homo Sapiens
gaccauuucugcauugcugguuuccccucuug

SEQ ID NO: 218795 - RNA, 32 nt, Homo Sapiens
auggagucucaccacauaggccaggcagucuc

SEQ ID NO: 218796 - RNA, 32 nt, Homo Sapiens
ccauuugcucucugcuggcuaggcugggcugu

SEQ ID NO: 218797 - RNA, 32 nt, Homo Sapiens
cgauacucagaaugaagauauagagaaacaag

SEQ ID NO: 218798 - RNA, 32 nt, Homo Sapiens
gugucccccuccccucuuagccccucagugug

SEQ ID NO: 218799 - RNA, 32 nt, Homo Sapiens
ccuugcaccccgcucccugccuggacacaggc

SEQ ID NO: 218800 - RNA, 32 nt, Homo Sapiens
agauugccuagcuauuugaacaucucaaaguu

SEQ ID NO: 218801 - RNA, 32 nt, Homo Sapiens
gcacgcgcucaaguacaccagggugcgagaug

SEQ ID NO: 218802 - RNA, 32 nt, Homo Sapiens
accccugcuuucuggccaucucuucuuugucu

SEQ ID NO: 218803 - RNA, 32 nt, Homo Sapiens
cucuaucaugcgccucaccaucagcuaccugc

SEQ ID NO: 218804 - RNA, 32 nt, Homo Sapiens
uaaagccagccacaucacggacccaccgggag

SEQ ID NO: 218805 - RNA, 32 nt, Homo Sapiens
gcacuuugggcuuggcuagaucacucacuguu

SEQ ID NO: 218806 - RNA, 32 nt, Homo Sapiens
aaaaaaaaaaaauuaauaagacauggauacaa

SEQ ID NO: 218807 - RNA, 32 nt, Homo Sapiens
guauuauggggcagcuccugcugucuuccaau

SEQ ID NO: 218808 - RNA, 32 nt, Homo Sapiens
gucacgcuggauuuuccaauccauaggcccaa

SEQ ID NO: 218809 - RNA, 32 nt, Homo Sapiens
ugccccagacagagcuggcaacaaaagcagac

SEQ ID NO: 218810 - RNA, 32 nt, Homo Sapiens
cacugauaaaaggcuuuuuuagggcuuuauuu

SEQ ID NO: 218811 - RNA, 32 nt, Homo Sapiens
ugucagguuucaauguucuuggaccucagggc

SEQ ID NO: 218812 - RNA, 32 nt, Homo Sapiens
ucaagcacuaaaacguugaucuuaaccuuuuu

SEQ ID NO: 218813 - RNA, 32 nt, Homo Sapiens
aggcggcgcuggccgcgcugcaggagcagcug

SEQ ID NO: 218814 - RNA, 32 nt, Homo Sapiens
ucucuccacaguguugugccccuucacucauu

SEQ ID NO: 218815 - RNA, 32 nt, Homo Sapiens
ccugguguuguuggguggcagcugcuccuucg

SEQ ID NO: 218816 - RNA, 32 nt, Homo Sapiens
guauaguauuuuauauuuuucuuaauuuuuca

SEQ ID NO: 218817 - RNA, 32 nt, Homo Sapiens
cggggcagcgcuaugggcucucgugcggacgg

SEQ ID NO: 218818 - RNA, 32 nt, Homo Sapiens
uggugucccaaguuggagguuuugugucagcu

SEQ ID NO: 218819 - RNA, 32 nt, Homo Sapiens
gaaggcauuuuuccuaacacugauacuacaag

SEQ ID NO: 218820 - RNA, 31 nt, Homo Sapiens
cauucgaaauaaaauucagucaagucaaagc

SEQ ID NO: 218821 - RNA, 32 nt, Homo Sapiens
uugcuccuauggagcccauuaagggccaauuc

SEQ ID NO: 218822 - RNA, 32 nt, Homo Sapiens
gguuaagacuuccaagccagaagacagagggu

SEQ ID NO: 218823 - RNA, 32 nt, Homo Sapiens
cgcuucaccaggugcuggccacgaacaggagg

SEQ ID NO: 218824 - RNA, 32 nt, Homo Sapiens
ucccuaggaaaugcacaauuuuucuggaaacc

SEQ ID NO: 218825 - RNA, 32 nt, Homo Sapiens
uccuggaccucuguuucuuaaucugcaaaaug

SEQ ID NO: 218826 - RNA, 32 nt, Homo Sapiens
uucuuauuuuuggccgcauucuuagacauuua

SEQ ID NO: 218827 - RNA, 32 nt, Homo Sapiens
gcuacauuggauaauuuuuccucccccagacu

SEQ ID NO: 218828 - RNA, 32 nt, Homo Sapiens
gaacgcucuucgggcucgcgucgucgacccgc

SEQ ID NO: 218829 - RNA, 32 nt, Homo Sapiens
cugcagcaggggcugggagagcagaagggcag

SEQ ID NO: 218830 - RNA, 32 nt, Homo Sapiens
gccacucccgucugcugugacgcgcggacaga

SEQ ID NO: 218831 - RNA, 32 nt, Homo Sapiens
ccccgucgcccggccgccggcuuagggcgcag

SEQ ID NO: 218832 - RNA, 32 nt, Homo Sapiens
gaaguugcuuuuacucauuggaggaagaacac

SEQ ID NO: 218833 - RNA, 32 nt, Homo Sapiens
agacuggcucuggccaggggccccguccugag

SEQ ID NO: 218834 - RNA, 32 nt, Homo Sapiens
agaaagaaagagauguguuacugcacacuggu

SEQ ID NO: 218835 - RNA, 32 nt, Homo Sapiens
uaguucuucaaagaauggcugaugcuggccug

SEQ ID NO: 218836 - RNA, 32 nt, Homo Sapiens
uuuccuuccuucccauuccaaaauucagagau

SEQ ID NO: 218837 - RNA, 32 nt, Homo Sapiens
uucacagguucaauauuuaaugcuucagaagc

SEQ ID NO: 218838 - RNA, 32 nt, Homo Sapiens
ggucggaacacuuuaggagugcagggguucug

SEQ ID NO: 218839 - RNA, 32 nt, Homo Sapiens
ccgcugcgcccgcuccagcuccuccgccgacg

SEQ ID NO: 218840 - RNA, 32 nt, Homo Sapiens
ccucgagggaggggcguggggaaggcggcggg

SEQ ID NO: 218841 - RNA, 32 nt, Homo Sapiens
gggcucccgagcggcagaaaguuccggccacu

SEQ ID NO: 218842 - RNA, 32 nt, Homo Sapiens
aggaagacuuccuggaggaaauggccauugaa

SEQ ID NO: 218843 - RNA, 32 nt, Homo Sapiens
cauucuucauauauuucuccuucaguccauuc

SEQ ID NO: 218844 - RNA, 32 nt, Homo Sapiens
ugugguacccauuaaccuuccccaucucccug

SEQ ID NO: 218845 - RNA, 32 nt, Homo Sapiens
gcugcccaggacuucuacguggagaugaaaug

SEQ ID NO: 218846 - RNA, 32 nt, Homo Sapiens
cugagcuauaaucaacggugagcuuuaauguc

SEQ ID NO: 218847 - RNA, 32 nt, Homo Sapiens
gaauaaagagcagucgcaaaugagcugcccca

SEQ ID NO: 218848 - RNA, 32 nt, Homo Sapiens
cugguugaggaugacacaguugugaacuaacc

SEQ ID NO: 218849 - RNA, 32 nt, Homo Sapiens
uggcuuuacccuaacuuucucuagucuacugu

SEQ ID NO: 218850 - RNA, 32 nt, Homo Sapiens
guuaucuuuacguggacuggcuuggugccuug

SEQ ID NO: 218851 - RNA, 32 nt, Homo Sapiens
gagucugggccucuccugugaugggccagcug

SEQ ID NO: 218852 - RNA, 32 nt, Homo Sapiens
guggaccggccgggcgcugacggaggcggcgc

SEQ ID NO: 218853 - RNA, 32 nt, Homo Sapiens
caaccaaacuucccucucccagcccccgaggc

SEQ ID NO: 218854 - RNA, 32 nt, Homo Sapiens
uugcauccuaucauuuaaaaagaaauuauguc

SEQ ID NO: 218855 - RNA, 31 nt, Homo Sapiens
gggcacgacaggaauaaacgauauuuaagag

SEQ ID NO: 218856 - RNA, 32 nt, Homo Sapiens
uccucacccccgcuucgcccucacacuuucgg

SEQ ID NO: 218857 - RNA, 32 nt, Homo Sapiens
uauaggugguuuucuuuaaguggggugggaag

SEQ ID NO: 218858 - RNA, 32 nt, Homo Sapiens
ccagaaaaacuaucuuaauacuguauacugua

SEQ ID NO: 218859 - RNA, 32 nt, Homo Sapiens
agccacaggagaaaaaucuucaggaucuuggg

SEQ ID NO: 218860 - RNA, 32 nt, Homo Sapiens
ggcagcuggccgggcgcucgcagugggagcug

SEQ ID NO: 218861 - RNA, 32 nt, Homo Sapiens
accagcuggacgucacgcgccggagcaugucu

SEQ ID NO: 218862 - RNA, 32 nt, Homo Sapiens
ucauuccccuccccuuccaggccuccugcuau

SEQ ID NO: 218863 - RNA, 32 nt, Homo Sapiens
agccaucaaguuuuaucguagggcuaugcaac

SEQ ID NO: 218864 - RNA, 32 nt, Homo Sapiens
ucuuuccaaacacuauuuuaacuuguaugaug

SEQ ID NO: 218865 - RNA, 32 nt, Homo Sapiens
auaucaucaaggagcugauaaucuaguggaag

SEQ ID NO: 218866 - RNA, 32 nt, Homo Sapiens
cuggccugccagcauccgccagugccuugcca

SEQ ID NO: 218867 - RNA, 32 nt, Homo Sapiens
ccugccuaaggcugaacuuguuuucugggaac

SEQ ID NO: 218868 - RNA, 32 nt, Homo Sapiens
ugcagggguauguuuuaccaucugcauccagc

SEQ ID NO: 218869 - RNA, 32 nt, Homo Sapiens
cagaaaauguagcucauucccuuaauguuacu

SEQ ID NO: 218870 - RNA, 32 nt, Homo Sapiens
caaaccaagugacccacuuuacuagaaaugag

SEQ ID NO: 218871 - RNA, 32 nt, Homo Sapiens
gggguguuuucauggcgcgaugcacugugacu

SEQ ID NO: 218872 - RNA, 32 nt, Homo Sapiens
ccaggguccagcugcagcccccgccacccuuc

SEQ ID NO: 218873 - RNA, 32 nt, Homo Sapiens
uuaaacugaguaacuguauaaaacaucuauug

SEQ ID NO: 218874 - RNA, 32 nt, Homo Sapiens
uuucaguuuuauaaagggaacugaggacagcu

SEQ ID NO: 218875 - RNA, 32 nt, Homo Sapiens
cccucaccccaaauaaaaaaucuccuacaugu

SEQ ID NO: 218876 - RNA, 32 nt, Homo Sapiens
aauuaccguuuacagggauggccauggguggc

SEQ ID NO: 218877 - RNA, 32 nt, Homo Sapiens
auuuuuuaaaauuuauaggcaaaguaucaaau

SEQ ID NO: 218878 - RNA, 32 nt, Homo Sapiens
agcccuucaccaucuaccugcuuggucuuuca

SEQ ID NO: 218879 - RNA, 32 nt, Homo Sapiens
cugugcuccgcgggacuuuguuuguuuccucc

SEQ ID NO: 218880 - RNA, 32 nt, Homo Sapiens
cacauuuucaagggcaucucuaucuuucgcug

SEQ ID NO: 218881 - RNA, 32 nt, Homo Sapiens
gaacgugaacaaauaaauuaaaaaauaaaaaa

SEQ ID NO: 218882 - RNA, 32 nt, Homo Sapiens
aagguaggggagaucaaagagggcuggauccc

SEQ ID NO: 218883 - RNA, 32 nt, Homo Sapiens
uuccaggcguccgcucgcggcccgcagagccc

SEQ ID NO: 218884 - RNA, 30 nt, Homo Sapiens
cgagguggggcacggccgccggcaagaaac

SEQ ID NO: 218885 - RNA, 32 nt, Homo Sapiens
aaagaaauacauuugguaaaacaucgaagaca

SEQ ID NO: 218886 - RNA, 32 nt, Homo Sapiens
cuggagcugggauccugcucugcuacaccagg

SEQ ID NO: 218887 - RNA, 32 nt, Homo Sapiens
cucauuuuguugauaauuucugcauuuaaugg

SEQ ID NO: 218888 - RNA, 32 nt, Homo Sapiens
cucacagcaaccuccgccucccagguucaagu

SEQ ID NO: 218889 - RNA, 32 nt, Homo Sapiens
ggcugcgucccggcccuuccacaucgguccac

SEQ ID NO: 218890 - RNA, 32 nt, Homo Sapiens
ugcccggagcgcggcggggcggggguggagga

SEQ ID NO: 218891 - RNA, 32 nt, Homo Sapiens
caacacccucaaccggcuccaucacauccuca

SEQ ID NO: 218892 - RNA, 32 nt, Homo Sapiens
cuugugugagagacauaaagacagucucagau

SEQ ID NO: 218893 - RNA, 32 nt, Homo Sapiens
cucuccgcgcggagccgagccggaacugcggc

SEQ ID NO: 218894 - RNA, 31 nt, Homo Sapiens
agaggccuccggagaaaccccaaccucggcu

SEQ ID NO: 218895 - RNA, 32 nt, Homo Sapiens
acaauguaaaaauaaaguucauccuaauaugc

SEQ ID NO: 218896 - RNA, 32 nt, Homo Sapiens
cccauccccgucccccaucuccguccccgucc

SEQ ID NO: 218897 - RNA, 32 nt, Homo Sapiens
cagaugccugaagggagugcuuugaggcaggu

SEQ ID NO: 218898 - RNA, 32 nt, Homo Sapiens
cgaaggccucgcucgcugcaggcucgcuccuc

SEQ ID NO: 218899 - RNA, 32 nt, Homo Sapiens
gucggugggagaagggcgggagggugggcccg

SEQ ID NO: 218900 - RNA, 29 nt, Homo Sapiens
aaaagugcucaauuauauuuucuguauuu

SEQ ID NO: 218901 - RNA, 32 nt, Homo Sapiens
uauuguauauauauucauauacaaacauguau

SEQ ID NO: 218902 - RNA, 32 nt, Homo Sapiens
acugugccuggcccuuuuuuuuuuuuuuuuuu

SEQ ID NO: 218903 - RNA, 32 nt, Homo Sapiens
uauuucuucacugcucccacucugauuugggc

SEQ ID NO: 218904 - RNA, 32 nt, Homo Sapiens
aucagcuauucagucuuaauuucacuaguagu

SEQ ID NO: 218905 - RNA, 32 nt, Homo Sapiens
ggguucagacugcugugacuguggacacgaug

SEQ ID NO: 218906 - RNA, 32 nt, Homo Sapiens
uguaauuguaaaugucaguaaucacuucauga

SEQ ID NO: 218907 - RNA, 32 nt, Homo Sapiens
gggcagaagcaagaagcagaggcucaggcucc

SEQ ID NO: 218908 - RNA, 28 nt, Homo Sapiens
cagacggggcggcuggccgggcagaggg

SEQ ID NO: 218909 - RNA, 32 nt, Homo Sapiens
gcugguccucugggcuuggucaugggaguugu

SEQ ID NO: 218910 - RNA, 32 nt, Homo Sapiens
ucacuauucuggaacauaaaacuuuauucagu

SEQ ID NO: 218911 - RNA, 31 nt, Homo Sapiens
ccugcagugugaucagcaggagucucugucc

SEQ ID NO: 218912 - RNA, 31 nt, Homo Sapiens
gaaguguucugcuccaaucagaauuuugccu

SEQ ID NO: 218913 - RNA, 32 nt, Homo Sapiens
acuuuuuaaaaauaaauauugcucuaaacuuu

SEQ ID NO: 218914 - RNA, 32 nt, Homo Sapiens
agggugccugcucuccuugcccugggccagcc

SEQ ID NO: 218915 - RNA, 32 nt, Homo Sapiens
uuguugaaaaauuuguaggugagaucaccucc

SEQ ID NO: 218916 - RNA, 32 nt, Homo Sapiens
cgccuugccgugguuggcgcgccccgggugca

SEQ ID NO: 218917 - RNA, 32 nt, Homo Sapiens
ccauuuuucuucauuuauuugaauguauuuuu

SEQ ID NO: 218918 - RNA, 32 nt, Homo Sapiens
gucaauucaaggaaauaaggaaugaccuggaa

SEQ ID NO: 218919 - RNA, 32 nt, Homo Sapiens
caaauauucugaacauuuuucuauucauucau

SEQ ID NO: 218920 - RNA, 32 nt, Homo Sapiens
cccgcccccacuucuccaucuuagaaaccccu

SEQ ID NO: 218921 - RNA, 32 nt, Homo Sapiens
aaaaccacagcugcuguaaauucuuaaacacu

SEQ ID NO: 218922 - RNA, 32 nt, Homo Sapiens
caagcuuacaaagauauaaucuauuuuauuau

SEQ ID NO: 218923 - RNA, 32 nt, Homo Sapiens
ccacaccgcuggcgagggacaggcugggccug

SEQ ID NO: 218924 - RNA, 32 nt, Homo Sapiens
uaaagagaccaccagcagugacaccuggcaau

SEQ ID NO: 218925 - RNA, 32 nt, Homo Sapiens
gaguggggagagaggaggaaagcgcugcgcuc

SEQ ID NO: 218926 - RNA, 32 nt, Homo Sapiens
caugaggauauuaaaaauacauugugaagaaa

SEQ ID NO: 218927 - RNA, 32 nt, Homo Sapiens
guuugucccuggggaagcaaccccaauuacag

SEQ ID NO: 218928 - RNA, 32 nt, Homo Sapiens
ucuaaauaaaggccggcuaaagugacauugca

SEQ ID NO: 218929 - RNA, 32 nt, Homo Sapiens
ucuccuuuuucuucuuuuuaauagucuaguuu

SEQ ID NO: 218930 - RNA, 32 nt, Homo Sapiens
gcuccaugggcagcuacuggcuccuacagacc

SEQ ID NO: 218931 - RNA, 28 nt, Homo Sapiens
aaucaaaguauuauuaggaugacuaaau

SEQ ID NO: 218932 - RNA, 32 nt, Homo Sapiens
uccaaauaaaauuuauuaauaagaucuauaga

SEQ ID NO: 218933 - RNA, 32 nt, Homo Sapiens
cauucauugugcuagaugcuuaccauaaaaau

SEQ ID NO: 218934 - RNA, 32 nt, Homo Sapiens
ugugaccccuccccagugccucuccuggcccu

SEQ ID NO: 218935 - RNA, 32 nt, Homo Sapiens
acccacccuuccccggcgagauggcccucggc

SEQ ID NO: 218936 - RNA, 32 nt, Homo Sapiens
gccaguuucacagauggagaagaugucucaga

SEQ ID NO: 218937 - RNA, 32 nt, Homo Sapiens
uagagugggguacugcuauuaagauaucugaa

SEQ ID NO: 218938 - RNA, 32 nt, Homo Sapiens
ccgggacuggacgagcaguagauccagcagcc

SEQ ID NO: 218939 - RNA, 32 nt, Homo Sapiens
guguuggccuaugggaagguggucaaugaaug

SEQ ID NO: 218940 - RNA, 32 nt, Homo Sapiens
aauuuguuuuugaaguuuuuuguauauaaaua

SEQ ID NO: 218941 - RNA, 32 nt, Homo Sapiens
cugcuuggguaaguuauagaaacugugcuuug

SEQ ID NO: 218942 - RNA, 32 nt, Homo Sapiens
gagacagagucuuacucuguugcccaggcugg

SEQ ID NO: 218943 - RNA, 31 nt, Homo Sapiens
uuuuggcuuuggcacaccugaguuagguuuu

SEQ ID NO: 218944 - RNA, 32 nt, Homo Sapiens
ugccugagcaccucccagccccugccccucau

SEQ ID NO: 218945 - RNA, 32 nt, Homo Sapiens
caaagucuagaugacagucuaguucucgauca

SEQ ID NO: 218946 - RNA, 32 nt, Homo Sapiens
agaccaucccagccaccccccaucuuccuggc

SEQ ID NO: 218947 - RNA, 32 nt, Homo Sapiens
uacccccaaaacuauugaaaucuuaaaauagu

SEQ ID NO: 218948 - RNA, 32 nt, Homo Sapiens
cacgguaaaugguguuguuagguagguucugu

SEQ ID NO: 218949 - RNA, 32 nt, Homo Sapiens
cccacaaggggaggggucaaaguugcugcccu

SEQ ID NO: 218950 - RNA, 32 nt, Homo Sapiens
uaaauauuuucauuuuaaguaauauaugaagu

SEQ ID NO: 218951 - RNA, 32 nt, Homo Sapiens
aauccuuggcccuggggucuuccgagugagcu

SEQ ID NO: 218952 - RNA, 32 nt, Homo Sapiens
uuaaauacaguuaaauguguuauuugcuuuua

SEQ ID NO: 218953 - RNA, 30 nt, Homo Sapiens
caagcucuggacugcuaaucucuggacuua

SEQ ID NO: 218954 - RNA, 30 nt, Homo Sapiens
gcgcugggaggugagcuugugacagagcga

SEQ ID NO: 218955 - RNA, 32 nt, Homo Sapiens
uuagggggagacccggcccccaaggggcgggc

SEQ ID NO: 218956 - RNA, 32 nt, Homo Sapiens
cuucuuuauuuuuuaacuuauguaugugguug

SEQ ID NO: 218957 - RNA, 32 nt, Homo Sapiens
uccuggagggcaggagcuguguccuucuauuc

SEQ ID NO: 218958 - RNA, 32 nt, Homo Sapiens
ucaucacguaggagcuggcccgcgccgagagc

SEQ ID NO: 218959 - RNA, 32 nt, Homo Sapiens
cagaacuugucaaugagaaaccacuuguuaag

SEQ ID NO: 218960 - RNA, 32 nt, Homo Sapiens
caccagggacagaguuucuagauacaauuuua

SEQ ID NO: 218961 - RNA, 32 nt, Homo Sapiens
uccugggagguucagcaaggugucuaguccag

SEQ ID NO: 218962 - RNA, 32 nt, Homo Sapiens
gagauaaaaaucauuccuuccuugugauccaa

SEQ ID NO: 218963 - RNA, 32 nt, Homo Sapiens
uaaaugugacaaauuuuucagacaucguucau

SEQ ID NO: 218964 - RNA, 32 nt, Homo Sapiens
uugguaaguuuauuuuaccauccucccaccug

SEQ ID NO: 218965 - RNA, 32 nt, Homo Sapiens
cgacuggaaaacuauuaagugauccucaaagc

SEQ ID NO: 218966 - RNA, 32 nt, Homo Sapiens
aaacauucaaagcagaacuucucaucaucucc

SEQ ID NO: 218967 - RNA, 32 nt, Homo Sapiens
aaacugugcuucucuaugauaauuacaauaca

SEQ ID NO: 218968 - RNA, 32 nt, Homo Sapiens
acaggugauuccucaagacccugcuuaauccu

SEQ ID NO: 218969 - RNA, 32 nt, Homo Sapiens
aaccgcgugcagggaaaggcgcacggcagccu

SEQ ID NO: 218970 - RNA, 32 nt, Homo Sapiens
ucacagccuuuuccccaaccaccacccacccc

SEQ ID NO: 218971 - RNA, 32 nt, Homo Sapiens
aagaacagaugaauaaaacuaaugaauuaaau

SEQ ID NO: 218972 - RNA, 32 nt, Homo Sapiens
ugggcucuuaugucacaucacaugauuuggag

SEQ ID NO: 218973 - RNA, 32 nt, Homo Sapiens
cgggggcggcuuaggagaaggccgccggcgag

SEQ ID NO: 218974 - RNA, 32 nt, Homo Sapiens
aagacuguucuucagaaucauguuaacuauug

SEQ ID NO: 218975 - RNA, 32 nt, Homo Sapiens
ccagcugaacaauuucagucauuugaagccuc

SEQ ID NO: 218976 - RNA, 32 nt, Homo Sapiens
cuccuggcacaccagaggcaggucuucaauac

SEQ ID NO: 218977 - RNA, 32 nt, Homo Sapiens
ugggcccugccuggagugugugccgccuucuc

SEQ ID NO: 218978 - RNA, 32 nt, Homo Sapiens
aauuuaauuauauucaaccaaagcaauauacu

SEQ ID NO: 218979 - RNA, 32 nt, Homo Sapiens
gccccugccucucagccuccccgggugcccgg

SEQ ID NO: 218980 - RNA, 32 nt, Homo Sapiens
cauacagacucacauacagacacacacauaua

SEQ ID NO: 218981 - RNA, 32 nt, Homo Sapiens
gccaaauauaucagacaggcuccucccacagc

SEQ ID NO: 218982 - RNA, 32 nt, Homo Sapiens
caucgucuucauuuuguguguacagugcugug

SEQ ID NO: 218983 - RNA, 32 nt, Homo Sapiens
ugguuguccaaauaaacuuacccaucauucau

SEQ ID NO: 218984 - RNA, 32 nt, Homo Sapiens
uucuuccuuccacaguuaucuuagcuggauau

SEQ ID NO: 218985 - RNA, 32 nt, Homo Sapiens
agcggcacagaaacaucgguaggagggggaug

SEQ ID NO: 218986 - RNA, 32 nt, Homo Sapiens
ccuucuacugccuccaacacggcggcggcggc

SEQ ID NO: 218987 - RNA, 32 nt, Homo Sapiens
uuugauuacauauugucuauggcugcugagca

SEQ ID NO: 218988 - RNA, 32 nt, Homo Sapiens
uucaggauccaaguccguaggcccuuuaaggg

SEQ ID NO: 218989 - RNA, 32 nt, Homo Sapiens
guaucguauguuagauuuuugauaaaauuugg

SEQ ID NO: 218990 - RNA, 32 nt, Homo Sapiens
gacuauaauguaaaaugugucuuuuauugugg

SEQ ID NO: 218991 - RNA, 32 nt, Homo Sapiens
cgggcgggccgcgcgcgcuguguccagagucc

SEQ ID NO: 218992 - RNA, 32 nt, Homo Sapiens
agggaccagggugggagagcugauugcagaaa

SEQ ID NO: 218993 - RNA, 32 nt, Homo Sapiens
uuucucuggaaagaagcacagaggaggaguuc

SEQ ID NO: 218994 - RNA, 32 nt, Homo Sapiens
uucccaggucugggucgcuugcgacccuccuc

SEQ ID NO: 218995 - RNA, 32 nt, Homo Sapiens
cucaguggacauuugugcaauugcucgcccug

SEQ ID NO: 218996 - RNA, 32 nt, Homo Sapiens
guacuacaugugggaaacaagcaagaacuaaa

SEQ ID NO: 218997 - RNA, 32 nt, Homo Sapiens
gguuggagagaaagaacagaccagcgcccuuc

SEQ ID NO: 218998 - RNA, 32 nt, Homo Sapiens
cacacaucaaaccaccaagauuccugcugcaa

SEQ ID NO: 218999 - RNA, 32 nt, Homo Sapiens
gguugccagucgcuaggucagcccauggggcc

SEQ ID NO: 219000 - RNA, 32 nt, Homo Sapiens
caccuucagacagaauggcauucugucccucc

SEQ ID NO: 219001 - RNA, 32 nt, Homo Sapiens
uuggaaguuacuuagcuucucugguuacuuag

SEQ ID NO: 219002 - RNA, 32 nt, Homo Sapiens
gccacgcacugacacugcccaggccaagcaaa

SEQ ID NO: 219003 - RNA, 32 nt, Homo Sapiens
ccguccucucacccccagcaguugccaugggg

SEQ ID NO: 219004 - RNA, 32 nt, Homo Sapiens
gagauuaagcuuuauauuugcuuauuuguugu

SEQ ID NO: 219005 - RNA, 32 nt, Homo Sapiens
gaauuauagaaaguguguuauagagauucaga

SEQ ID NO: 219006 - RNA, 32 nt, Homo Sapiens
aacaaagacgccgggucuggggugccaauagc

SEQ ID NO: 219007 - RNA, 32 nt, Homo Sapiens
cagaggggaaaggggagccggccugcccacac

SEQ ID NO: 219008 - RNA, 32 nt, Homo Sapiens
cagcagcuggagaggaaggggugaggcguggg

SEQ ID NO: 219009 - RNA, 32 nt, Homo Sapiens
uuccuuuuacacaauguauauacuucaagaug

SEQ ID NO: 219010 - RNA, 32 nt, Homo Sapiens
uuuuguauauauuauacugguuuuuuauguug

SEQ ID NO: 219011 - RNA, 32 nt, Homo Sapiens
cacucugaauguuuccccucuacauugucccu

SEQ ID NO: 219012 - RNA, 32 nt, Homo Sapiens
agauaagaugaaucauuuaauaccgugucuuc

SEQ ID NO: 219013 - RNA, 32 nt, Homo Sapiens
augggacgucuuccuuaacaucugcaaacaag

SEQ ID NO: 219014 - RNA, 32 nt, Homo Sapiens
cacccugaccucuuucucuccuccuugauugu

SEQ ID NO: 219015 - RNA, 32 nt, Homo Sapiens
cuagccucucaccccaccuggagcuucaccaa

SEQ ID NO: 219016 - RNA, 32 nt, Homo Sapiens
auuuaagugucuguuauagaaaacccacaccc

SEQ ID NO: 219017 - RNA, 32 nt, Homo Sapiens
ucccacucucgucuccuuccccucgccauaga

SEQ ID NO: 219018 - RNA, 32 nt, Homo Sapiens
acuaaguguuuaugggacaauuauguacuauu

SEQ ID NO: 219019 - RNA, 32 nt, Homo Sapiens
cuuguuaggacacgaggugggaacacuggagu

SEQ ID NO: 219020 - RNA, 32 nt, Homo Sapiens
cgaauuugacuucuggaccaacacuacacuug

SEQ ID NO: 219021 - RNA, 32 nt, Homo Sapiens
gaaacagauucaugcuuguaucuugcauucag

SEQ ID NO: 219022 - RNA, 32 nt, Homo Sapiens
cuggggcaggcggaccuuguagucuugugaga

SEQ ID NO: 219023 - RNA, 32 nt, Homo Sapiens
cuauucaagacguccuggaaaacuacauuuac

SEQ ID NO: 219024 - RNA, 32 nt, Homo Sapiens
gggcucuuuguauagcagaggaucucauuuga

SEQ ID NO: 219025 - RNA, 32 nt, Homo Sapiens
aaaaaugcuguaaaagugugggugaaugugag

SEQ ID NO: 219026 - RNA, 32 nt, Homo Sapiens
gaaguucugcaccugcaccuuuguugaauugu

SEQ ID NO: 219027 - RNA, 32 nt, Homo Sapiens
gagacccucgcagcugacuagggcccaagggg

SEQ ID NO: 219028 - RNA, 30 nt, Homo Sapiens
ucuaagcggcgacgcgcgggugcugggagg

SEQ ID NO: 219029 - RNA, 32 nt, Homo Sapiens
aacuacagaaauuuaugaaaauaaaaaacuuc

SEQ ID NO: 219030 - RNA, 32 nt, Homo Sapiens
gucugaaaaaauaaaguucaucccaacuuuca

SEQ ID NO: 219031 - RNA, 32 nt, Homo Sapiens
ucugucucugcaccaccuguuugcauaaacac

SEQ ID NO: 219032 - RNA, 32 nt, Homo Sapiens
auuacuuauuaagaaauugguuauuaugcuua

SEQ ID NO: 219033 - RNA, 32 nt, Homo Sapiens
ccuggugggcacagagauaggcaucaucaaca

SEQ ID NO: 219034 - RNA, 32 nt, Homo Sapiens
ccagcccccagcauuccagugcucuccaggcu

SEQ ID NO: 219035 - RNA, 32 nt, Homo Sapiens
ugcagaaauauuuaacagauuacuucuugaua

SEQ ID NO: 219036 - RNA, 32 nt, Homo Sapiens
uggagacgagaauaaacuggacuagaauagug

SEQ ID NO: 219037 - RNA, 32 nt, Homo Sapiens
ugcauaacaacacugggccuucuuaacuaaaa

SEQ ID NO: 219038 - RNA, 32 nt, Homo Sapiens
uugaacucuuuucuuguuuaucuagcauagca

SEQ ID NO: 219039 - RNA, 31 nt, Homo Sapiens
ccggcauagcagacccugccccagcaggccc

SEQ ID NO: 219040 - RNA, 32 nt, Homo Sapiens
accuauuuuaguaaauaauguuuuauuggugg

SEQ ID NO: 219041 - RNA, 32 nt, Homo Sapiens
auauaauuugguuugugaaauuaaagacauca

SEQ ID NO: 219042 - RNA, 32 nt, Homo Sapiens
cucacucucaacaggcgauggugcugauguuu

SEQ ID NO: 219043 - RNA, 32 nt, Homo Sapiens
ucugccacuccagcuccuggguuaggggcuuu

SEQ ID NO: 219044 - RNA, 32 nt, Homo Sapiens
cggagagugcuuggguggugggugcuggagga

SEQ ID NO: 219045 - RNA, 32 nt, Homo Sapiens
aaucacugagagaggagggggcagcgccaacg

SEQ ID NO: 219046 - RNA, 32 nt, Homo Sapiens
gcgagggcgagggcgaggcggugcucauggag

SEQ ID NO: 219047 - RNA, 32 nt, Homo Sapiens
aagccgggccgcggccggugcaauggacucca

SEQ ID NO: 219048 - RNA, 32 nt, Homo Sapiens
ccgcuauuugggaaacaaucuaugaaacaaca

SEQ ID NO: 219049 - RNA, 32 nt, Homo Sapiens
caaugcaaccucacugaggagcacaauugggu

SEQ ID NO: 219050 - RNA, 32 nt, Homo Sapiens
auggccgcgggccgcagucguacggagccgcc

SEQ ID NO: 219051 - RNA, 32 nt, Homo Sapiens
ggccagugcccccgacacccccggcccggcac

SEQ ID NO: 219052 - RNA, 32 nt, Homo Sapiens
uuuuggagggugggggacagaagauggggcua

SEQ ID NO: 219053 - RNA, 32 nt, Homo Sapiens
gagucggaaaggaaagcugugggaccauccug

SEQ ID NO: 219054 - RNA, 32 nt, Homo Sapiens
ggucacuuuucucuaucagaggucucugucaa

SEQ ID NO: 219055 - RNA, 32 nt, Homo Sapiens
gcacccuggcuuucccaguccaaacccagugu

SEQ ID NO: 219056 - RNA, 32 nt, Homo Sapiens
uuuuauaaacacacucuuggaaguggaaaaaa

SEQ ID NO: 219057 - RNA, 31 nt, Homo Sapiens
guuccgcagcgcagcaccggaagcggccgag

SEQ ID NO: 219058 - RNA, 32 nt, Homo Sapiens
aagaauacugcuguugacacuccaguggaaau

SEQ ID NO: 219059 - RNA, 32 nt, Homo Sapiens
aaaaacaccaaaaagggauccguacauucaau

SEQ ID NO: 219060 - RNA, 32 nt, Homo Sapiens
caauuuauuauuuuugcucaucaaaaaauaaa

SEQ ID NO: 219061 - RNA, 32 nt, Homo Sapiens
cuuuuuaaggacacuggggucuguuucuggaa

SEQ ID NO: 219062 - RNA, 32 nt, Homo Sapiens
cucucaccuucacuuuacuauuuguauucgau

SEQ ID NO: 219063 - RNA, 32 nt, Homo Sapiens
aagugauucuauuugcaugaauaauuuuguga

SEQ ID NO: 219064 - RNA, 32 nt, Homo Sapiens
guaaacccauaccggcggccaagcagccucaa

SEQ ID NO: 219065 - RNA, 32 nt, Homo Sapiens
cucuccuguaucuuuuucacuccagcccuccu

SEQ ID NO: 219066 - RNA, 32 nt, Homo Sapiens
auguaaaauaauauacauucaguuauuaagaa

SEQ ID NO: 219067 - RNA, 31 nt, Homo Sapiens
gcaaccccagagacacucagagcccucugca

SEQ ID NO: 219068 - RNA, 32 nt, Homo Sapiens
ucucaucaaagauaauggaaauuuaugugauu

SEQ ID NO: 219069 - RNA, 32 nt, Homo Sapiens
aagcauuugguuuuaaacuauuuuaagaauau

SEQ ID NO: 219070 - RNA, 32 nt, Homo Sapiens
ucccacugacauuccuugaaaucagccauuug

SEQ ID NO: 219071 - RNA, 32 nt, Homo Sapiens
cguccaggccuugggugacgcucagucucaua

SEQ ID NO: 219072 - RNA, 32 nt, Homo Sapiens
uguuggguucuuuuuuuuuuuaaaugaaaagu

SEQ ID NO: 219073 - RNA, 32 nt, Homo Sapiens
ccauccugagcucccacaaagggcgccaccuu

SEQ ID NO: 219074 - RNA, 32 nt, Homo Sapiens
ucaaauaugcuucauugucaaaugcauauuua

SEQ ID NO: 219075 - RNA, 32 nt, Homo Sapiens
auucagauaauuagaugauuauauauuguugu

SEQ ID NO: 219076 - RNA, 32 nt, Homo Sapiens
aacccaaugaaggaagaaaugaaagcuggcuc

SEQ ID NO: 219077 - RNA, 32 nt, Homo Sapiens
cauucuuaacuguguccaagugguaauaauua

SEQ ID NO: 219078 - RNA, 32 nt, Homo Sapiens
uuuauuuaaaauuguuuaacauguaccaugua

SEQ ID NO: 219079 - RNA, 32 nt, Homo Sapiens
gcccuaaccugccuccuuugccugugagucau

SEQ ID NO: 219080 - RNA, 32 nt, Homo Sapiens
auggcugcuguaacaaauuacccucuagccca

SEQ ID NO: 219081 - RNA, 32 nt, Homo Sapiens
auaaaaugauagcuuuccuguuugagggaugc

SEQ ID NO: 219082 - RNA, 32 nt, Homo Sapiens
caccucgccagcucaggcacccgcugcagccg

SEQ ID NO: 219083 - RNA, 32 nt, Homo Sapiens
aauuuuuuuagucuuuuuuucuuuuaauauaa

SEQ ID NO: 219084 - RNA, 32 nt, Homo Sapiens
ggagaaaccaaggagcucuggucaucagguca

SEQ ID NO: 219085 - RNA, 32 nt, Homo Sapiens
aagaugaaacaucauuucaaucguaaaauuuc

SEQ ID NO: 219086 - RNA, 32 nt, Homo Sapiens
ucugggaggcggaggcgguggaucacuugagc

SEQ ID NO: 219087 - RNA, 32 nt, Homo Sapiens
gcuugauuugaaaacaaaauaugagaauggau

SEQ ID NO: 219088 - RNA, 32 nt, Homo Sapiens
ugaaaucuggcgcugggaauggccauguggaa

SEQ ID NO: 219089 - RNA, 32 nt, Homo Sapiens
ggaggcugaggccguaggaucccuugagccca

SEQ ID NO: 219090 - RNA, 32 nt, Homo Sapiens
uuaccuccaugaucaauaaccaagaggcugca

SEQ ID NO: 219091 - RNA, 32 nt, Homo Sapiens
agugguccacaucccgggacgcagcaggaggc

SEQ ID NO: 219092 - RNA, 32 nt, Homo Sapiens
guaugcaaugcacaacuugcacaaaugguaag

SEQ ID NO: 219093 - RNA, 32 nt, Homo Sapiens
acagguuuuggugauaaucuugggcaauguuc

SEQ ID NO: 219094 - RNA, 28 nt, Homo Sapiens
agcauggacacaggaccagggagggagc

SEQ ID NO: 219095 - RNA, 32 nt, Homo Sapiens
uuugucauuuguguuauauuugaaauuauuag

SEQ ID NO: 219096 - RNA, 32 nt, Homo Sapiens
agaaggacggcagcagcuccgugccgcugagc

SEQ ID NO: 219097 - RNA, 32 nt, Homo Sapiens
aauuucagagaguggcucggguccuggaaagg

SEQ ID NO: 219098 - RNA, 32 nt, Homo Sapiens
aaagucaccucuugccucugcuuuccugauca

SEQ ID NO: 219099 - RNA, 32 nt, Homo Sapiens
uggaccucaaaauaaacauaaaugaccuggag

SEQ ID NO: 219100 - RNA, 32 nt, Homo Sapiens
cugcugcucgcgccuggagaugucagaggucc

SEQ ID NO: 219101 - RNA, 32 nt, Homo Sapiens
auuuucaucacugcugcuccugugcaaaccaa

SEQ ID NO: 219102 - RNA, 30 nt, Homo Sapiens
ggauagaaaaguuuaugugagucuggcugg

SEQ ID NO: 219103 - RNA, 32 nt, Homo Sapiens
ccguaucugcuucgggcuuccaccucauuuuu

SEQ ID NO: 219104 - RNA, 32 nt, Homo Sapiens
uaagcuagaugaugacagugaugaugaugaag

SEQ ID NO: 219105 - RNA, 32 nt, Homo Sapiens
aagcagcgggagaguuuaauucuuaacuuucc

SEQ ID NO: 219106 - RNA, 32 nt, Homo Sapiens
uuugaagauuaaggggcuacaaaccaaggaac

SEQ ID NO: 219107 - RNA, 32 nt, Homo Sapiens
gcacauguuaagaugaauuaucuccuaaaaau

SEQ ID NO: 219108 - RNA, 32 nt, Homo Sapiens
acacacacacacaugcaugcgaucuguaaaaa

SEQ ID NO: 219109 - RNA, 32 nt, Homo Sapiens
gagagcggguggcugagccgggaccucgcgug

SEQ ID NO: 219110 - RNA, 32 nt, Homo Sapiens
uuacaggcauuugaaaaauagggauucauuuc

SEQ ID NO: 219111 - RNA, 32 nt, Homo Sapiens
gaggccccguggcuccuccuuccuccuccaca

SEQ ID NO: 219112 - RNA, 32 nt, Homo Sapiens
ccuucauccuugugacauuucauuucaguaag

SEQ ID NO: 219113 - RNA, 32 nt, Homo Sapiens
uaagaugugauuugccucuccuugacuuccac

SEQ ID NO: 219114 - RNA, 31 nt, Homo Sapiens
guguuauuugguaauccaaauauuagaguuu

SEQ ID NO: 219115 - RNA, 32 nt, Homo Sapiens
ucauuugucacuggauaauucacgcuggagaa

SEQ ID NO: 219116 - RNA, 32 nt, Homo Sapiens
uccuccuccaccugccuauugcagagcagcag

SEQ ID NO: 219117 - RNA, 32 nt, Homo Sapiens
agccacccggguucuccccgccgcccgcgcuu

SEQ ID NO: 219118 - RNA, 32 nt, Homo Sapiens
cgccuggccccuccccacccaggagggaggug

SEQ ID NO: 219119 - RNA, 32 nt, Homo Sapiens
cggggggcguagcaagguaccuuuaaaacagg

SEQ ID NO: 219120 - RNA, 32 nt, Homo Sapiens
auuugauggaggcugcgccggagugagagguc

SEQ ID NO: 219121 - RNA, 32 nt, Homo Sapiens
auccccuccggaccauggccgacgacgacgug

SEQ ID NO: 219122 - RNA, 32 nt, Homo Sapiens
cuuacaauagaguggaauacuagaaugcagua

SEQ ID NO: 219123 - RNA, 32 nt, Homo Sapiens
cccaggagagccgccucugugcccccauccca

SEQ ID NO: 219124 - RNA, 32 nt, Homo Sapiens
ggugacucccugcuccugggccccacagagag

SEQ ID NO: 219125 - RNA, 32 nt, Homo Sapiens
cgaggagugguguuugauggccucgacacucu

SEQ ID NO: 219126 - RNA, 32 nt, Homo Sapiens
auuuccuguuuauguuauuugccguuguuuga

SEQ ID NO: 219127 - RNA, 32 nt, Homo Sapiens
auauguauauauacacauauauguauguauac

SEQ ID NO: 219128 - RNA, 32 nt, Homo Sapiens
guaaauaugugaggugugcugcugugcugggu

SEQ ID NO: 219129 - RNA, 32 nt, Homo Sapiens
gggcagcccucccugccccgggagaagacggc

SEQ ID NO: 219130 - RNA, 32 nt, Homo Sapiens
uuugaaguguaaauccucaccugggguucucu

SEQ ID NO: 219131 - RNA, 32 nt, Homo Sapiens
ugggagguggagguugcagugagccgagauaa

SEQ ID NO: 219132 - RNA, 32 nt, Homo Sapiens
aguucuaaugugugcaagauuaacucacaaau

SEQ ID NO: 219133 - RNA, 29 nt, Homo Sapiens
accgucucucccacacaccacaaauucac

SEQ ID NO: 219134 - RNA, 32 nt, Homo Sapiens
accagauuuacuauguauauguggugugucug

SEQ ID NO: 219135 - RNA, 32 nt, Homo Sapiens
cagcaauggaaaugcuuggguuccucuugcuu

SEQ ID NO: 219136 - RNA, 32 nt, Homo Sapiens
cauuacuauacauugaauuaugcuguguaaaa

SEQ ID NO: 219137 - RNA, 32 nt, Homo Sapiens
aucccaguucuuccccugcccagcuauuggga

SEQ ID NO: 219138 - RNA, 32 nt, Homo Sapiens
ucaauucauaucuauuuauuaaauuucuaccg

SEQ ID NO: 219139 - RNA, 32 nt, Homo Sapiens
uuguaaauauauuguuuguauguuucccuucu

SEQ ID NO: 219140 - RNA, 32 nt, Homo Sapiens
gggaggaggaggaggaucaugaaggccggagu

SEQ ID NO: 219141 - RNA, 32 nt, Homo Sapiens
ccguaucgcgagcaggucccggcggcccccgg

SEQ ID NO: 219142 - RNA, 32 nt, Homo Sapiens
cggagggggcgcuaggggcaucuuucgagcac

SEQ ID NO: 219143 - RNA, 32 nt, Homo Sapiens
gccaagaacagcaucuccccagcccucauccu

SEQ ID NO: 219144 - RNA, 32 nt, Homo Sapiens
agggaccugcagcgugagagccaguggcaucu

SEQ ID NO: 219145 - RNA, 32 nt, Homo Sapiens
ggcgaggggcauguuuaauuuacuucacuaac

SEQ ID NO: 219146 - RNA, 32 nt, Homo Sapiens
ugccuguuugucucuggagauggaauuaaacc

SEQ ID NO: 219147 - RNA, 32 nt, Homo Sapiens
gucuccgccgccagcccugcagcgggccggcc

SEQ ID NO: 219148 - RNA, 32 nt, Homo Sapiens
auaaauccaagcccgcccaggcccacgggggg

SEQ ID NO: 219149 - RNA, 32 nt, Homo Sapiens
ucgguccugugcucgggacggcggcguuggcg

SEQ ID NO: 219150 - RNA, 32 nt, Homo Sapiens
acguagcucagcggcggccgcggcgcgugcgu

SEQ ID NO: 219151 - RNA, 32 nt, Homo Sapiens
gaaguaacuggagaaucgccaauauagccaga

SEQ ID NO: 219152 - RNA, 32 nt, Homo Sapiens
guguuucuuaauucauuucaaacucuaaaauu

SEQ ID NO: 219153 - RNA, 32 nt, Homo Sapiens
acaaguaauauacuuugaaacucuugaacuaa

SEQ ID NO: 219154 - RNA, 32 nt, Homo Sapiens
ugccccuagcagccucuucuuuguggagccuc

SEQ ID NO: 219155 - RNA, 30 nt, Homo Sapiens
gggagacgcgcgcauccaccagccccggcu

SEQ ID NO: 219156 - RNA, 32 nt, Homo Sapiens
gagauucuuaaaacuuuuuugcuucauaauaa

SEQ ID NO: 219157 - RNA, 32 nt, Homo Sapiens
uuaucuggguuaauuucuuuuaaacauaacaa

SEQ ID NO: 219158 - RNA, 32 nt, Homo Sapiens
uuauauguacuauuguguaacauacuuucuug

SEQ ID NO: 219159 - RNA, 32 nt, Homo Sapiens
uuggcuuuauugcagugacuuuccaaguuuaa

SEQ ID NO: 219160 - RNA, 32 nt, Homo Sapiens
caauggcaaggagugggacucccggcccgggg

SEQ ID NO: 219161 - RNA, 32 nt, Homo Sapiens
uguccagacaccucuggccagguuggacccgc

SEQ ID NO: 219162 - RNA, 32 nt, Homo Sapiens
uggcugggccugcuggagcgcgcgcucccggg

SEQ ID NO: 219163 - RNA, 32 nt, Homo Sapiens
guagguuuuuaacuggaauauaauagcuacca

SEQ ID NO: 219164 - RNA, 32 nt, Homo Sapiens
agccugggcgacagagugacucugucaaaaag

SEQ ID NO: 219165 - RNA, 32 nt, Homo Sapiens
auuaagugaucccacaccccauucugcaagau

SEQ ID NO: 219166 - RNA, 32 nt, Homo Sapiens
cuuugaguggguuuccuuuccuccccuauucc

SEQ ID NO: 219167 - RNA, 32 nt, Homo Sapiens
aauuuagcugggcaugguggcgugccugaaac

SEQ ID NO: 219168 - RNA, 32 nt, Homo Sapiens
agaaaggcaacucgcaaagaugagauggaaga

SEQ ID NO: 219169 - RNA, 32 nt, Homo Sapiens
cacauagaaaucagugguuccauuugugguuu

SEQ ID NO: 219170 - RNA, 32 nt, Homo Sapiens
guugaaggguguuggaggaagcagaguuuuca

SEQ ID NO: 219171 - RNA, 32 nt, Homo Sapiens
ugaauaggaugagucauggaauuuaagugauu

SEQ ID NO: 219172 - RNA, 32 nt, Homo Sapiens
uaugagcugcuauugaacacggcagagccugu

SEQ ID NO: 219173 - RNA, 32 nt, Homo Sapiens
auauuucaguuauaucugugauacaaugucuu

SEQ ID NO: 219174 - RNA, 32 nt, Homo Sapiens
augcaacugagaauaaauauuuuuugucacuu

SEQ ID NO: 219175 - RNA, 32 nt, Homo Sapiens
cauggcauguagaaauagaaauuuagaauuuu

SEQ ID NO: 219176 - RNA, 32 nt, Homo Sapiens
aaggcuacugcaugcaucacuucugcauuuau

SEQ ID NO: 219177 - RNA, 32 nt, Homo Sapiens
accuggcgucccgcaaccauggaugcaagucg

SEQ ID NO: 219178 - RNA, 32 nt, Homo Sapiens
guaaggguuuacaggcuuucauuuuaagguau

SEQ ID NO: 219179 - RNA, 32 nt, Homo Sapiens
gcaagcaauguauauuuuucuaaugugaauau

SEQ ID NO: 219180 - RNA, 32 nt, Homo Sapiens
acauaaauccuccccaguugcccagguugucc

SEQ ID NO: 219181 - RNA, 32 nt, Homo Sapiens
gacgggggcgcggcacucggcgcggagagcgg

SEQ ID NO: 219182 - RNA, 27 nt, Homo Sapiens
agguggggauucuucaguucccuucuu

SEQ ID NO: 219183 - RNA, 32 nt, Homo Sapiens
cccagcaucucuuuuaccaaccagagagugug

SEQ ID NO: 219184 - RNA, 29 nt, Homo Sapiens
acaucaguuuucaugucuauaaaauaagg

SEQ ID NO: 219185 - RNA, 32 nt, Homo Sapiens
ggggaggguuggaaaauuuauuuuuaugaaac

SEQ ID NO: 219186 - RNA, 32 nt, Homo Sapiens
uaauauuuuaaauaaacaaucaugcagaaacu

SEQ ID NO: 219187 - RNA, 32 nt, Homo Sapiens
cuuuuagaaaaacacagggacucgugggagca

SEQ ID NO: 219188 - RNA, 32 nt, Homo Sapiens
aacuugucugggcagccaaaucuguagaauca

SEQ ID NO: 219189 - RNA, 32 nt, Homo Sapiens
agcuucaguggucuggggcccuccgccgcccc

SEQ ID NO: 219190 - RNA, 32 nt, Homo Sapiens
acacuuuuaaaauaaauucucuccuaaugaug

SEQ ID NO: 219191 - RNA, 32 nt, Homo Sapiens
aaaaaauaauaccacuugaugggugaaggcuu

SEQ ID NO: 219192 - RNA, 32 nt, Homo Sapiens
ggcgaaccuagacgaaggcggcuggaaugaac

SEQ ID NO: 219193 - RNA, 31 nt, Homo Sapiens
cuaccacaagaggcugguggaucugagccgc

SEQ ID NO: 219194 - RNA, 32 nt, Homo Sapiens
ucaagaaucuucacaucugaauuuaguccuac

SEQ ID NO: 219195 - RNA, 32 nt, Homo Sapiens
uccucuucaacacauagcaaugguaucauugu

SEQ ID NO: 219196 - RNA, 32 nt, Homo Sapiens
uuauuuucaucuaacauagaaaguguguuuua

SEQ ID NO: 219197 - RNA, 32 nt, Homo Sapiens
ccgaggcccagauccaaggccgcggcccagac

SEQ ID NO: 219198 - RNA, 32 nt, Homo Sapiens
gcuccugguuuguccaucuacugcuuugauuc

SEQ ID NO: 219199 - RNA, 32 nt, Homo Sapiens
aaaacugaagacaaaguucgggucauggcaga

SEQ ID NO: 219200 - RNA, 32 nt, Homo Sapiens
ggcugggccccaccccagauccggccugagcg

SEQ ID NO: 219201 - RNA, 32 nt, Homo Sapiens
auacucucaauugaguuaaaucaguaaucugu

SEQ ID NO: 219202 - RNA, 32 nt, Homo Sapiens
uaucagaaacacacucugaaaacaugcacaga

SEQ ID NO: 219203 - RNA, 32 nt, Homo Sapiens
caucaaccagcccagcagcaucuucgggauuc

SEQ ID NO: 219204 - RNA, 32 nt, Homo Sapiens
uccucauccugcaccccuuccaucccaccuuc

SEQ ID NO: 219205 - RNA, 32 nt, Homo Sapiens
uggacucgauugguugauaucaaccuaguacg

SEQ ID NO: 219206 - RNA, 32 nt, Homo Sapiens
cuuuuauuacacaauauaagaauauguaugua

SEQ ID NO: 219207 - RNA, 32 nt, Homo Sapiens
uggcgugcugucagcacagccuccugcagucc

SEQ ID NO: 219208 - RNA, 32 nt, Homo Sapiens
aaaaaucccucauagauuagccauuguuaaca

SEQ ID NO: 219209 - RNA, 32 nt, Homo Sapiens
ucugcguguacuuuccaggccuucaggagucc

SEQ ID NO: 219210 - RNA, 32 nt, Homo Sapiens
aagcaauaguuauauuuaggugguagaacaua

SEQ ID NO: 219211 - RNA, 32 nt, Homo Sapiens
guuugcgccgcgggggaggcggcggccgcagc

SEQ ID NO: 219212 - RNA, 32 nt, Homo Sapiens
uucuacaggaccacuugagugggcagccaagc

SEQ ID NO: 219213 - RNA, 32 nt, Homo Sapiens
ugccuucagcgcccgacccgggcccccaccug

SEQ ID NO: 219214 - RNA, 32 nt, Homo Sapiens
aagaggauuguuauuucaaagauauauuaaag

SEQ ID NO: 219215 - RNA, 32 nt, Homo Sapiens
agugcuccugugugcuggcccuggccuggauu

SEQ ID NO: 219216 - RNA, 32 nt, Homo Sapiens
uauuuuuagaagaauuauucucucuucuuacu

SEQ ID NO: 219217 - RNA, 32 nt, Homo Sapiens
auacaguuguacacaaguugaauugauaguau

SEQ ID NO: 219218 - RNA, 32 nt, Homo Sapiens
ucuauauauauucggggaguuuuaguuuauau

SEQ ID NO: 219219 - RNA, 32 nt, Homo Sapiens
uccaaagcuuucugucuuccaacugcagucuc

SEQ ID NO: 219220 - RNA, 32 nt, Homo Sapiens
uaauucugaggguggggggagggacaugaaau

SEQ ID NO: 219221 - RNA, 32 nt, Homo Sapiens
ucuuaaaucuucauuugguuuucuguucagga

SEQ ID NO: 219222 - RNA, 32 nt, Homo Sapiens
uccuguccugugauggcuuccacaaacccugu

SEQ ID NO: 219223 - RNA, 32 nt, Homo Sapiens
gcucaucuuccggcccucugauuggccggcuc

SEQ ID NO: 219224 - RNA, 32 nt, Homo Sapiens
gggguccggaagucaacaccaugucaagucug

SEQ ID NO: 219225 - RNA, 32 nt, Homo Sapiens
agugcuuccugguguggguauuacaaucccuu

SEQ ID NO: 219226 - RNA, 32 nt, Homo Sapiens
aagucauuuucagccuuaauucucaucaugua

SEQ ID NO: 219227 - RNA, 32 nt, Homo Sapiens
gugggggugggaagguaaggauggucguggaa

SEQ ID NO: 219228 - RNA, 32 nt, Homo Sapiens
aacauuacaaauaagccuaauaugucacucuu

SEQ ID NO: 219229 - RNA, 32 nt, Homo Sapiens
uugugggaaugggaaaggaaggagacagccaa

SEQ ID NO: 219230 - RNA, 32 nt, Homo Sapiens
ccaccagccacccgcaccuugccugcugccac

SEQ ID NO: 219231 - RNA, 32 nt, Homo Sapiens
gucucaaugcuucaaugucccagugcaaaaag

SEQ ID NO: 219232 - RNA, 32 nt, Homo Sapiens
auacucagaaaaggaaaaagaagcaaaacuaa

SEQ ID NO: 219233 - RNA, 32 nt, Homo Sapiens
ugguugggguguaggcauaaucugcaaacagg

SEQ ID NO: 219234 - RNA, 32 nt, Homo Sapiens
ugaaggcaggaggggaggagcaguuaauggau

SEQ ID NO: 219235 - RNA, 32 nt, Homo Sapiens
aggcucggguggcuugagagucuugggaggcu

SEQ ID NO: 219236 - RNA, 32 nt, Homo Sapiens
cucaugaauggcaagcugacagcuucuccugc

SEQ ID NO: 219237 - RNA, 30 nt, Homo Sapiens
guuaaugauaucccuguucuaauuccacuc

SEQ ID NO: 219238 - RNA, 32 nt, Homo Sapiens
aaacaagaaauggcccgauaguuucacacuau

SEQ ID NO: 219239 - RNA, 32 nt, Homo Sapiens
gcuaagcugucccaggcaggggucuccgcucu

SEQ ID NO: 219240 - RNA, 32 nt, Homo Sapiens
cugcacuccacuccauccugcugcuggaugag

SEQ ID NO: 219241 - RNA, 32 nt, Homo Sapiens
auguguuagacuaucgaaagggccuuauucuc

SEQ ID NO: 219242 - RNA, 32 nt, Homo Sapiens
ccugaaauugaaauugagccacuuccuugaag

SEQ ID NO: 219243 - RNA, 32 nt, Homo Sapiens
aaauuggcuuuucuccuucuguauuuccauac

SEQ ID NO: 219244 - RNA, 32 nt, Homo Sapiens
uccauuucaaggaaaucagagcccuuaauagu

SEQ ID NO: 219245 - RNA, 32 nt, Homo Sapiens
acucacuucuuucuuuggcaaugacccucaug

SEQ ID NO: 219246 - RNA, 32 nt, Homo Sapiens
ggaauuagcaaucccgcuguuuacccggaggc

SEQ ID NO: 219247 - RNA, 32 nt, Homo Sapiens
gggaggccaagccccggaccaugcaccaggcu

SEQ ID NO: 219248 - RNA, 32 nt, Homo Sapiens
uugcucuagauuucuuuuugucuccauuuaau

SEQ ID NO: 219249 - RNA, 32 nt, Homo Sapiens
uaggggaaaaggaaggggugugguuugucuuu

SEQ ID NO: 219250 - RNA, 32 nt, Homo Sapiens
gggcauggagccgccgcgggccugcugagcuc

SEQ ID NO: 219251 - RNA, 32 nt, Homo Sapiens
aagauacgguuucagacugaaaacauguuuca

SEQ ID NO: 219252 - RNA, 32 nt, Homo Sapiens
gcuguuccugaggccuggccuggcuccccgcu

SEQ ID NO: 219253 - RNA, 32 nt, Homo Sapiens
aguccccauccuguugaccugguggaagucau

SEQ ID NO: 219254 - RNA, 32 nt, Homo Sapiens
uuggagccugguuuucccuacugcugccugau

SEQ ID NO: 219255 - RNA, 32 nt, Homo Sapiens
cgucucggccccaugcccccaccagucagccc

SEQ ID NO: 219256 - RNA, 32 nt, Homo Sapiens
ggucuuuuuuauuuuguuugauucauucgaga

SEQ ID NO: 219257 - RNA, 32 nt, Homo Sapiens
cccccgugccaaggcccgcgccgcccggacag

SEQ ID NO: 219258 - RNA, 32 nt, Homo Sapiens
auuguuucaguguguaccugguaaagaaucag

SEQ ID NO: 219259 - RNA, 32 nt, Homo Sapiens
cccccagccaugagugaauaugcugaaugagg

SEQ ID NO: 219260 - RNA, 32 nt, Homo Sapiens
agaggaaugaauugaggaagugaaagaaggca

SEQ ID NO: 219261 - RNA, 32 nt, Homo Sapiens
cugaggggggcugaccgggggcccgugcugcu

SEQ ID NO: 219262 - RNA, 32 nt, Homo Sapiens
cucccucuccaugcccaucaaacaacugcaaa

SEQ ID NO: 219263 - RNA, 32 nt, Homo Sapiens
cucauucagagguauggaucgugaguucugcu

SEQ ID NO: 219264 - RNA, 32 nt, Homo Sapiens
acucgccgcccgggggccccgcgaagccguga

SEQ ID NO: 219265 - RNA, 32 nt, Homo Sapiens
ccguaagaggagaggaguguacggcaaggggc

SEQ ID NO: 219266 - RNA, 32 nt, Homo Sapiens
cuaugcuuuuucuguggugugucacugccuuu

SEQ ID NO: 219267 - RNA, 32 nt, Homo Sapiens
cagugggaauuugaaagaagaaaaccagaugg

SEQ ID NO: 219268 - RNA, 32 nt, Homo Sapiens
aaccaauuucuuccuuccacaguuaucuuagc

SEQ ID NO: 219269 - RNA, 32 nt, Homo Sapiens
uaagaacuaauagugagauacaguuuuuugua

SEQ ID NO: 219270 - RNA, 31 nt, Homo Sapiens
aguuccaggagcaccaccugagugaggugca

SEQ ID NO: 219271 - RNA, 32 nt, Homo Sapiens
acguacugucuccuuagcugccuuagaguaaa

SEQ ID NO: 219272 - RNA, 32 nt, Homo Sapiens
ccuuggccaagguggacgagaaccacucagag

SEQ ID NO: 219273 - RNA, 32 nt, Homo Sapiens
acuacuuagaggaaacaaauggucauugaugu

SEQ ID NO: 219274 - RNA, 32 nt, Homo Sapiens
agaaaaagggguggcuguuggaggaagggagg

SEQ ID NO: 219275 - RNA, 32 nt, Homo Sapiens
guguucagaaaaggagagagaggcugagauca

SEQ ID NO: 219276 - RNA, 32 nt, Homo Sapiens
ggaucuguggugcuauagaaguaugagcaagc

SEQ ID NO: 219277 - RNA, 32 nt, Homo Sapiens
ucuuagggagguugaagcuggugcugguuucu

SEQ ID NO: 219278 - RNA, 32 nt, Homo Sapiens
gucauauuauaaauuuggaaugcugaauagaa

SEQ ID NO: 219279 - RNA, 32 nt, Homo Sapiens
aagcccagguugccagugcagaaggacuugag

SEQ ID NO: 219280 - RNA, 32 nt, Homo Sapiens
aagaacgggaugccaagcccugccugaugugg

SEQ ID NO: 219281 - RNA, 32 nt, Homo Sapiens
augaggagcugcagacgcuggcugggaagcac

SEQ ID NO: 219282 - RNA, 32 nt, Homo Sapiens
cuggccccacccagcucagcugccaggcccuu

SEQ ID NO: 219283 - RNA, 32 nt, Homo Sapiens
agguccacagaccagcagcuucaucauuguca

SEQ ID NO: 219284 - RNA, 32 nt, Homo Sapiens
uggucaggcagacucugaaauuacagacagaa

SEQ ID NO: 219285 - RNA, 32 nt, Homo Sapiens
ugcugcaauucccgugaauacccgaaaccugc

SEQ ID NO: 219286 - RNA, 32 nt, Homo Sapiens
cccuuccagaagcucuccugcuugucaugaag

SEQ ID NO: 219287 - RNA, 32 nt, Homo Sapiens
acuuuagaauaccagcagugaaaugguauuac

SEQ ID NO: 219288 - RNA, 32 nt, Homo Sapiens
ccuagcccaucccccagacuaucucaaggacc

SEQ ID NO: 219289 - RNA, 31 nt, Homo Sapiens
auguccaucaaugauugacagaucgaauaaa

SEQ ID NO: 219290 - RNA, 32 nt, Homo Sapiens
gcggcccuaccucggcccuggccugaccccgg

SEQ ID NO: 219291 - RNA, 32 nt, Homo Sapiens
cuugagaacucuugguuuuuugaaagguugac

SEQ ID NO: 219292 - RNA, 32 nt, Homo Sapiens
aucuaugaccagugauuuuaugcugacccgga

SEQ ID NO: 219293 - RNA, 32 nt, Homo Sapiens
uguauuacaagguacauaaacacauaaacaug

SEQ ID NO: 219294 - RNA, 32 nt, Homo Sapiens
gcucggcaucccagccagacaagauggcaaag

SEQ ID NO: 219295 - RNA, 32 nt, Homo Sapiens
uuuuccuuaauuuuuuuuuuuauuugguuggg

SEQ ID NO: 219296 - RNA, 32 nt, Homo Sapiens
auaacuugccuuucuccaaccccacccaucgu

SEQ ID NO: 219297 - RNA, 32 nt, Homo Sapiens
ucacagcccaccacugcucccugaaguucccu

SEQ ID NO: 219298 - RNA, 32 nt, Homo Sapiens
ggagcgguccuuaccgagacccgcccggcccg

SEQ ID NO: 219299 - RNA, 32 nt, Homo Sapiens
uaugcacugaacaaacaaaacaauuuaauagc

SEQ ID NO: 219300 - RNA, 32 nt, Homo Sapiens
cgccguuccacauugcucccagccccauugcu

SEQ ID NO: 219301 - RNA, 32 nt, Homo Sapiens
aggaaaaggugcuauguaaaucuaagguauuu

SEQ ID NO: 219302 - RNA, 32 nt, Homo Sapiens
ccaagacuuucuucuccaccucuucuuuuucu

SEQ ID NO: 219303 - RNA, 32 nt, Homo Sapiens
caugaucaagguuuccuuaaauuuagcauugc

SEQ ID NO: 219304 - RNA, 32 nt, Homo Sapiens
uauauagacaguaaacaaaaaccuuaauacuu

SEQ ID NO: 219305 - RNA, 32 nt, Homo Sapiens
ugcagcccuucugggagcccaggccuaggaga

SEQ ID NO: 219306 - RNA, 32 nt, Homo Sapiens
gccaccccauguccagcacuuagaauggaggc

SEQ ID NO: 219307 - RNA, 29 nt, Homo Sapiens
uagucucuccguuucagagguguagggcc

SEQ ID NO: 219308 - RNA, 32 nt, Homo Sapiens
ucuacuaaaaauacaaacaaaauuagcugggc

SEQ ID NO: 219309 - RNA, 32 nt, Homo Sapiens
uaccaugcacuuuuggaaauuuuuuauuuuuu

SEQ ID NO: 219310 - RNA, 32 nt, Homo Sapiens
auauccccugcuguggguccacuuccuucauc

SEQ ID NO: 219311 - RNA, 32 nt, Homo Sapiens
auuguuugaguuuaaaaaagacuuuauguaca

SEQ ID NO: 219312 - RNA, 32 nt, Homo Sapiens
uccuucugccucaugggaccaguccagcuucc

SEQ ID NO: 219313 - RNA, 32 nt, Homo Sapiens
aaguaauaauuuggcuucagaaugggaagaga

SEQ ID NO: 219314 - RNA, 28 nt, Homo Sapiens
aggaaaaaugaagagauuauaaaaguca

SEQ ID NO: 219315 - RNA, 32 nt, Homo Sapiens
acaacaaagacaauuacuuaguagggacuaaa

SEQ ID NO: 219316 - RNA, 32 nt, Homo Sapiens
uaaccagccgcuuugaaauaaaacagaucuaa

SEQ ID NO: 219317 - RNA, 29 nt, Homo Sapiens
caucgccugacuuucuguugaauugggaa

SEQ ID NO: 219318 - RNA, 32 nt, Homo Sapiens
gacgauccgcggcugucgggguccugcagccu

SEQ ID NO: 219319 - RNA, 32 nt, Homo Sapiens
ugcagguuggugacuuugcaaauacacuuccu

SEQ ID NO: 219320 - RNA, 32 nt, Homo Sapiens
agaugcccgcuuacacggccacagcaggcacg

SEQ ID NO: 219321 - RNA, 32 nt, Homo Sapiens
gcucacuguagccuccaccucccccaaucaag

SEQ ID NO: 219322 - RNA, 32 nt, Homo Sapiens
gaaggagguaggagucauaacuuuuuagaggc

SEQ ID NO: 219323 - RNA, 32 nt, Homo Sapiens
augggaauuccagcacuaagccaggcaccggg

SEQ ID NO: 219324 - RNA, 32 nt, Homo Sapiens
ccaaagccuucaucagagcggacgauccaacc

SEQ ID NO: 219325 - RNA, 32 nt, Homo Sapiens
uggagaauggcuuuagugauauuuuggguuuu

SEQ ID NO: 219326 - RNA, 32 nt, Homo Sapiens
cagagccaccccuuucccuccuccuaaaguug

SEQ ID NO: 219327 - RNA, 32 nt, Homo Sapiens
aaagcauuuuuccuguagcaauuaagugugcc

SEQ ID NO: 219328 - RNA, 32 nt, Homo Sapiens
aauauauuuacuauauauuaaguggaagugga

SEQ ID NO: 219329 - RNA, 32 nt, Homo Sapiens
agacguccgccgggcucugcaguuccgccggg

SEQ ID NO: 219330 - RNA, 32 nt, Homo Sapiens
uuuuaaggaaacaaaacuauuuuuuuaaucau

SEQ ID NO: 219331 - RNA, 32 nt, Homo Sapiens
augcauuguaagauggcaagguggcauuuuga

SEQ ID NO: 219332 - RNA, 32 nt, Homo Sapiens
ucacccccaucuugcccuuccuguuccuuggc

SEQ ID NO: 219333 - RNA, 32 nt, Homo Sapiens
auauaauggaauaacauggcuccaucaacaau

SEQ ID NO: 219334 - RNA, 32 nt, Homo Sapiens
guuggcagcaggacagggaucagauaauuugu

SEQ ID NO: 219335 - RNA, 32 nt, Homo Sapiens
guaugcauaaaacaggugaugagacugagcuu

SEQ ID NO: 219336 - RNA, 32 nt, Homo Sapiens
ugugacucauugaacaucagaggacauauccu

SEQ ID NO: 219337 - RNA, 32 nt, Homo Sapiens
guucuauuugcuuuaaugagaauagaaacgua

SEQ ID NO: 219338 - RNA, 32 nt, Homo Sapiens
uaauggaaaaguaguaugaugaacaaucauuc

SEQ ID NO: 219339 - RNA, 32 nt, Homo Sapiens
cacaagcagucuuuuucuacagccaguaaggc

SEQ ID NO: 219340 - RNA, 32 nt, Homo Sapiens
gucccgcuggaacuuccgaagccuuggcgcgg

SEQ ID NO: 219341 - RNA, 32 nt, Homo Sapiens
guaauugucuaaguguuuuucuucgugguccc

SEQ ID NO: 219342 - RNA, 32 nt, Homo Sapiens
accuucccaaccccaaacaauuccaucucguu

SEQ ID NO: 219343 - RNA, 32 nt, Homo Sapiens
uuuucauuuuuguggucacuguucucuucuau

SEQ ID NO: 219344 - RNA, 32 nt, Homo Sapiens
ggaggacgcggcagagucacgguggcagcauu

SEQ ID NO: 219345 - RNA, 32 nt, Homo Sapiens
accacgaucuggauuucuuaauuuuuuguuuu

SEQ ID NO: 219346 - RNA, 32 nt, Homo Sapiens
uuguggugugugcuuuuagacacaggguagaa

SEQ ID NO: 219347 - RNA, 32 nt, Homo Sapiens
ccacaguggcugccuccucauuuggcuccugg

SEQ ID NO: 219348 - RNA, 32 nt, Homo Sapiens
gaggaggaugggaccuccuggacccagcuugu

SEQ ID NO: 219349 - RNA, 32 nt, Homo Sapiens
gccauguccccuaauggcuauuaguguucaug

SEQ ID NO: 219350 - RNA, 32 nt, Homo Sapiens
gugcccuaagccucauuucucauguucagacc

SEQ ID NO: 219351 - RNA, 32 nt, Homo Sapiens
aaacaccuuggccugccggaagggcaggcaua

SEQ ID NO: 219352 - RNA, 32 nt, Homo Sapiens
cgucguggagauugcuugcgcuggggugccac

SEQ ID NO: 219353 - RNA, 32 nt, Homo Sapiens
cagcaguccacggccgacaucaucacauccga

SEQ ID NO: 219354 - RNA, 32 nt, Homo Sapiens
auucuaauuuccccccaucuuucugucuugga

SEQ ID NO: 219355 - RNA, 32 nt, Homo Sapiens
gagacauucagcaauuaauuaaauuuaaauua

SEQ ID NO: 219356 - RNA, 32 nt, Homo Sapiens
guuggcaccggcgaaccauggcugggauuuuc

SEQ ID NO: 219357 - RNA, 32 nt, Homo Sapiens
cagaaaucauuuucuuuuugaucucacacacc

SEQ ID NO: 219358 - RNA, 32 nt, Homo Sapiens
aaucggcccucccucaccccuuucccuuccuc

SEQ ID NO: 219359 - RNA, 32 nt, Homo Sapiens
guacucccaccugccugggcagcccucacacc

SEQ ID NO: 219360 - RNA, 32 nt, Homo Sapiens
ugcagucaaaggaacgccuuccccucaguugu

SEQ ID NO: 219361 - RNA, 32 nt, Homo Sapiens
cuagaaacguuuucauucgucauuccaagaga

SEQ ID NO: 219362 - RNA, 32 nt, Homo Sapiens
cgcaagccuuaaaauuuuucuuaagacagagu

SEQ ID NO: 219363 - RNA, 32 nt, Homo Sapiens
aaaggggcugggugcaguggcucacaccugua

SEQ ID NO: 219364 - RNA, 32 nt, Homo Sapiens
ugcuccucagagguaggugcucccucaggauc

SEQ ID NO: 219365 - RNA, 32 nt, Homo Sapiens
gaagugguuuugugggaaugugaaugaacaga

SEQ ID NO: 219366 - RNA, 31 nt, Homo Sapiens
uggcagcaccacugccugcucccuggaaggu

SEQ ID NO: 219367 - RNA, 32 nt, Homo Sapiens
gccuccgucgcggcuccuggagagcugaucgu

SEQ ID NO: 219368 - RNA, 32 nt, Homo Sapiens
uauauauacacacacacacacacacacacgua

SEQ ID NO: 219369 - RNA, 32 nt, Homo Sapiens
cuugggcuuuacuuuucagucguguauuucua

SEQ ID NO: 219370 - RNA, 32 nt, Homo Sapiens
aaugguagaauaauucuuacaugccaggcuca

SEQ ID NO: 219371 - RNA, 32 nt, Homo Sapiens
cuuccuuccuuccuucgagacacagucguacu

SEQ ID NO: 219372 - RNA, 32 nt, Homo Sapiens
uauuuaauggagcugcugcugcugggucuguu

SEQ ID NO: 219373 - RNA, 32 nt, Homo Sapiens
auuccuuucccugccuucucccauacauucca

SEQ ID NO: 219374 - RNA, 32 nt, Homo Sapiens
ccgaggacccaggugcugaggucuggagggag

SEQ ID NO: 219375 - RNA, 32 nt, Homo Sapiens
gucgccaggcgcuggccguggugcugauucug

SEQ ID NO: 219376 - RNA, 32 nt, Homo Sapiens
ucagcgucccaguuucacagccaggcaaaccg

SEQ ID NO: 219377 - RNA, 32 nt, Homo Sapiens
agggugggcauugucauugaccauagggauca

SEQ ID NO: 219378 - RNA, 32 nt, Homo Sapiens
gcucgcgcuucccggcccggcgcggagcccgg

SEQ ID NO: 219379 - RNA, 30 nt, Homo Sapiens
gcagagcgcgcgcagauuucucaaggggaa

SEQ ID NO: 219380 - RNA, 32 nt, Homo Sapiens
acuguuuccccucucugcugcuuuagauguug

SEQ ID NO: 219381 - RNA, 32 nt, Homo Sapiens
aaucauggggacgggucuuucccaugcuguuc

SEQ ID NO: 219382 - RNA, 32 nt, Homo Sapiens
acugcaguguuuugacuucacaaacugccucc

SEQ ID NO: 219383 - RNA, 32 nt, Homo Sapiens
ugggggagggggaggagaaggggcaguuguga

SEQ ID NO: 219384 - RNA, 32 nt, Homo Sapiens
cagcuuccagcccagucggcccggcccggggg

SEQ ID NO: 219385 - RNA, 32 nt, Homo Sapiens
gauuguugagagauggacuaggaaguggaagc

SEQ ID NO: 219386 - RNA, 32 nt, Homo Sapiens
uguucucggaguccgacccagggcgacucacg

SEQ ID NO: 219387 - RNA, 32 nt, Homo Sapiens
uuaaguuuaaucuugguauucuauugggaauc

SEQ ID NO: 219388 - RNA, 32 nt, Homo Sapiens
caaggcagggacugaggggguugggcugcugc

SEQ ID NO: 219389 - RNA, 32 nt, Homo Sapiens
ucacccccggcucagcccaaagcugugaggac

SEQ ID NO: 219390 - RNA, 32 nt, Homo Sapiens
gggguccaacguguucuguacucuguaguucc

SEQ ID NO: 219391 - RNA, 32 nt, Homo Sapiens
cacuguacuccagccugggugaggagagcgag

SEQ ID NO: 219392 - RNA, 32 nt, Homo Sapiens
uguacuuccuguggacauguaguaaugucuau

SEQ ID NO: 219393 - RNA, 32 nt, Homo Sapiens
augucuucagcuugaucagauuuuaaaaucag

SEQ ID NO: 219394 - RNA, 32 nt, Homo Sapiens
aguugaagagcagcuccugugucuagccaggu

SEQ ID NO: 219395 - RNA, 32 nt, Homo Sapiens
guuuucucaucugcagaaugggagcggugggg

SEQ ID NO: 219396 - RNA, 32 nt, Homo Sapiens
gagccugggcaauagggucagagggacuaugg

SEQ ID NO: 219397 - RNA, 32 nt, Homo Sapiens
gcugcccagccagcugguucucccgggacacc

SEQ ID NO: 219398 - RNA, 32 nt, Homo Sapiens
caggggaucuugcuggcaaggugguuaguuac

SEQ ID NO: 219399 - RNA, 32 nt, Homo Sapiens
gggcacggccccacccggcuuuguucuucgcg

SEQ ID NO: 219400 - RNA, 32 nt, Homo Sapiens
gccguggcggcacagggccugugcucucagcu

SEQ ID NO: 219401 - RNA, 32 nt, Homo Sapiens
uuggagaugcaguggauaauaguaauugcugg

SEQ ID NO: 219402 - RNA, 32 nt, Homo Sapiens
ugagcgggcgcguccccgcgacggcgcugccu

SEQ ID NO: 219403 - RNA, 32 nt, Homo Sapiens
uuugcuguggauucuuuuuuuuuuuuuuuuuu

SEQ ID NO: 219404 - RNA, 32 nt, Homo Sapiens
uaaguugauuuaucaaauaacauaucuuggau

SEQ ID NO: 219405 - RNA, 32 nt, Homo Sapiens
ggcucuccccacuggcuggggucuaaccuuga

SEQ ID NO: 219406 - RNA, 32 nt, Homo Sapiens
aaggagagggaagaagggaggagcggugcuug

SEQ ID NO: 219407 - RNA, 32 nt, Homo Sapiens
gggguugcaggggcuccugcccugcuguaucc

SEQ ID NO: 219408 - RNA, 32 nt, Homo Sapiens
cagcgaggcccggcagcucaggaggcagguga

SEQ ID NO: 219409 - RNA, 32 nt, Homo Sapiens
ccccuucuugacuccgcccucucagcgaggcu

SEQ ID NO: 219410 - RNA, 32 nt, Homo Sapiens
cugcaggaauuugguuucaaagccaguguaaa

SEQ ID NO: 219411 - RNA, 32 nt, Homo Sapiens
caugccuguagucgcagcuacucgcgagguug

SEQ ID NO: 219412 - RNA, 32 nt, Homo Sapiens
agaagacaaugagacgagaacacuucuaaggc

SEQ ID NO: 219413 - RNA, 32 nt, Homo Sapiens
aguaaucugccagcugaccuuugucgcaccuu

SEQ ID NO: 219414 - RNA, 32 nt, Homo Sapiens
agcgcugugcuaaggugaucgaggaccagaca

SEQ ID NO: 219415 - RNA, 32 nt, Homo Sapiens
ucaugggaauaauugugagucagcguaacauu

SEQ ID NO: 219416 - RNA, 32 nt, Homo Sapiens
ucuuagauaauuauuucaaauggauauugaug

SEQ ID NO: 219417 - RNA, 32 nt, Homo Sapiens
ugauggggcuccugcccugcacugugagcacu

SEQ ID NO: 219418 - RNA, 32 nt, Homo Sapiens
auauuauugguauuaaagaaauccauucaccc

SEQ ID NO: 219419 - RNA, 32 nt, Homo Sapiens
ugauacuuguuuucuuuuucaugcucaccuau

SEQ ID NO: 219420 - RNA, 32 nt, Homo Sapiens
uggaaaugugacaggaaccuuccaguucaauc

SEQ ID NO: 219421 - RNA, 28 nt, Homo Sapiens
uguuguguauuaaaccauuucaacacau

SEQ ID NO: 219422 - RNA, 32 nt, Homo Sapiens
uauuaauaaaauguauuguacauaguggaaaa

SEQ ID NO: 219423 - RNA, 28 nt, Homo Sapiens
gccauggagacgguacagcugaggaacc

SEQ ID NO: 219424 - RNA, 32 nt, Homo Sapiens
ucaccgcgcggguccgggagccaggcacggga

SEQ ID NO: 219425 - RNA, 32 nt, Homo Sapiens
gcccccucgggauuucgagggcccgggggcgc

SEQ ID NO: 219426 - RNA, 32 nt, Homo Sapiens
aacucgcauugauguauuaaauuuauaauuuu

SEQ ID NO: 219427 - RNA, 32 nt, Homo Sapiens
ccugccgcccccagccaggccgaacuccgcac

SEQ ID NO: 219428 - RNA, 32 nt, Homo Sapiens
uggcagcaggugugcgccgagccccggccugg

SEQ ID NO: 219429 - RNA, 32 nt, Homo Sapiens
accuaagcccauauacucugcacuguguaaag

SEQ ID NO: 219430 - RNA, 32 nt, Homo Sapiens
cgcuccccugcgccuuuucaugcuagggagau

SEQ ID NO: 219431 - RNA, 32 nt, Homo Sapiens
agaacaaacuaaauucaucucaaaaugauuau

SEQ ID NO: 219432 - RNA, 32 nt, Homo Sapiens
aacaucaacuuuucuuuaaaucuuauuuuagu

SEQ ID NO: 219433 - RNA, 32 nt, Homo Sapiens
uuacacuccuaccagcagcauuuggguaucug

SEQ ID NO: 219434 - RNA, 32 nt, Homo Sapiens
ucuaacccuuuuaucaucuccuccacuguuuc

SEQ ID NO: 219435 - RNA, 32 nt, Homo Sapiens
cacgagggucggcugcggcgggugugggaggu

SEQ ID NO: 219436 - RNA, 32 nt, Homo Sapiens
guacuugaaaauuuuaaguguccgaauaagau

SEQ ID NO: 219437 - RNA, 32 nt, Homo Sapiens
agcgaugacuccagucugggugucccagcgag

SEQ ID NO: 219438 - RNA, 32 nt, Homo Sapiens
ucggcugggcagagugcacgcugcuuggcgcc

SEQ ID NO: 219439 - RNA, 32 nt, Homo Sapiens
uuuagcuaaauaacuuuuuuuuaaguauuucu

SEQ ID NO: 219440 - RNA, 32 nt, Homo Sapiens
uacuuuuugucucuaucaucaacuucacuacu

SEQ ID NO: 219441 - RNA, 32 nt, Homo Sapiens
caacagaaaugggaaacguucccuuguucccc

SEQ ID NO: 219442 - RNA, 32 nt, Homo Sapiens
gaucuuucugucuugcagaagccccaguaagc

SEQ ID NO: 219443 - RNA, 32 nt, Homo Sapiens
uuaauccugauuuuuccauaaaacaugaguau

SEQ ID NO: 219444 - RNA, 32 nt, Homo Sapiens
gcccgugaagagaagacugaauguguuaauga

SEQ ID NO: 219445 - RNA, 32 nt, Homo Sapiens
uuaucuguuaauguagauuuuauuuaaaaaac

SEQ ID NO: 219446 - RNA, 32 nt, Homo Sapiens
uuuucaugauauguauuuuuucuauguaaaag

SEQ ID NO: 219447 - RNA, 32 nt, Homo Sapiens
ccgugaggaccgaggauuugggguggaaggca

SEQ ID NO: 219448 - RNA, 32 nt, Homo Sapiens
ucauacuucuauuuugagguaacuguuguaac

SEQ ID NO: 219449 - RNA, 32 nt, Homo Sapiens
ccccaccccacuuguaggcucuggaaucugga

SEQ ID NO: 219450 - RNA, 32 nt, Homo Sapiens
guuuauuaauauauuuaauuucuauuuaaauu

SEQ ID NO: 219451 - RNA, 32 nt, Homo Sapiens
cuccuccgucuuccuguggccuuggggcauca

SEQ ID NO: 219452 - RNA, 32 nt, Homo Sapiens
cccgcggaacagagagcccugcucaucugcuu

SEQ ID NO: 219453 - RNA, 32 nt, Homo Sapiens
uggggaauuggaauggugcuuuggaucuuaug

SEQ ID NO: 219454 - RNA, 32 nt, Homo Sapiens
uaagcgaugaugggaaaggcuauuuagccacu

SEQ ID NO: 219455 - RNA, 32 nt, Homo Sapiens
aagaaauggggaggagggcaggcagagucggu

SEQ ID NO: 219456 - RNA, 32 nt, Homo Sapiens
ccaugguguggacuuuucagagaguucgcuua

SEQ ID NO: 219457 - RNA, 32 nt, Homo Sapiens
uacaggcaccucggccacucugggcugugggu

SEQ ID NO: 219458 - RNA, 32 nt, Homo Sapiens
ccauaaaguuucagccauuaugggcacugguu

SEQ ID NO: 219459 - RNA, 32 nt, Homo Sapiens
uucauaauuuaaaaggaaaacuaaaaacuauu

SEQ ID NO: 219460 - RNA, 32 nt, Homo Sapiens
guuuuugucuuacugaccucugauaacuggaa

SEQ ID NO: 219461 - RNA, 32 nt, Homo Sapiens
ggucucauguccugcuggcuuccagcuucagg

SEQ ID NO: 219462 - RNA, 32 nt, Homo Sapiens
cacucagauaaaacagcuauucaauccaagaa

SEQ ID NO: 219463 - RNA, 32 nt, Homo Sapiens
uguggggucgggcucacgucgcggccgccuuu

SEQ ID NO: 219464 - RNA, 28 nt, Homo Sapiens
caagcaguggcuaacaaaaugauggcua

SEQ ID NO: 219465 - RNA, 32 nt, Homo Sapiens
gggacaucagauagaagcugguucccauggug

SEQ ID NO: 219466 - RNA, 30 nt, Homo Sapiens
gggccuguggacugcagccucggcgaucag

SEQ ID NO: 219467 - RNA, 32 nt, Homo Sapiens
ggagagugccagggagaaccccugcccuccaa

SEQ ID NO: 219468 - RNA, 32 nt, Homo Sapiens
ggcugcguacugagugggugccccacagucaa

SEQ ID NO: 219469 - RNA, 32 nt, Homo Sapiens
agagggcaccgcggccucggugugcgcagccc

SEQ ID NO: 219470 - RNA, 32 nt, Homo Sapiens
gcccuccccucugaccccggccugggcuucag

SEQ ID NO: 219471 - RNA, 32 nt, Homo Sapiens
cuccgcgguccggcccggggccccgggaucuc

SEQ ID NO: 219472 - RNA, 32 nt, Homo Sapiens
acagauuaggaguccgauaaauccacacauuc

SEQ ID NO: 219473 - RNA, 32 nt, Homo Sapiens
uaagugacaacccccauggccuaugauguaau

SEQ ID NO: 219474 - RNA, 32 nt, Homo Sapiens
uggucccuuucugccuuaagggugauggaauc

SEQ ID NO: 219475 - RNA, 32 nt, Homo Sapiens
cccugucccagccccagguccugugcagggca

SEQ ID NO: 219476 - RNA, 32 nt, Homo Sapiens
cuccacuauguguugcuaaaacacaugcuaug

SEQ ID NO: 219477 - RNA, 28 nt, Homo Sapiens
cucuagaaagauuuaaagaagaauauuc

SEQ ID NO: 219478 - RNA, 32 nt, Homo Sapiens
uggaggucuuugcugcacaguuccuggucgca

SEQ ID NO: 219479 - RNA, 32 nt, Homo Sapiens
uggcucugagaaucacggugguaaagaaagug

SEQ ID NO: 219480 - RNA, 32 nt, Homo Sapiens
uaagcaaguguuagaauugccuuaaggccaca

SEQ ID NO: 219481 - RNA, 32 nt, Homo Sapiens
guguguguguguguguuaaaaaucagucacca

SEQ ID NO: 219482 - RNA, 32 nt, Homo Sapiens
uuacugcaaugcccugucucauuuugggaaaa

SEQ ID NO: 219483 - RNA, 32 nt, Homo Sapiens
caaucaacugagguuucuuaauugugauuaua

SEQ ID NO: 219484 - RNA, 32 nt, Homo Sapiens
ccuugccguggguggggacacaggagaagcac

SEQ ID NO: 219485 - RNA, 32 nt, Homo Sapiens
ucugacauucccucccucccucccgcagggcu

SEQ ID NO: 219486 - RNA, 32 nt, Homo Sapiens
uugcaauuuuuacuuuuaagucuauacuaaaa

SEQ ID NO: 219487 - RNA, 32 nt, Homo Sapiens
cuguucaaccucaguaucugaucaggcuccuc

SEQ ID NO: 219488 - RNA, 32 nt, Homo Sapiens
cuguugucucauuguguugcugucccauuuuu

SEQ ID NO: 219489 - RNA, 32 nt, Homo Sapiens
aauguauaugcuuuggaaauuuugauuuuuua

SEQ ID NO: 219490 - RNA, 32 nt, Homo Sapiens
ugucggugaggcagguuuuuacugugagguga

SEQ ID NO: 219491 - RNA, 32 nt, Homo Sapiens
agcuaugacuccaacagacaggauugugugag

SEQ ID NO: 219492 - RNA, 32 nt, Homo Sapiens
uaaguaauaaaauuauuuuaagaacugaaauc

SEQ ID NO: 219493 - RNA, 32 nt, Homo Sapiens
guguuaaaacaucaaaaugauggcgacuugua

SEQ ID NO: 219494 - RNA, 32 nt, Homo Sapiens
acacuguucuguaucuugcucuguuugcuuga

SEQ ID NO: 219495 - RNA, 32 nt, Homo Sapiens
ugggugcgccucgggccgcgggacucgcagcc

SEQ ID NO: 219496 - RNA, 32 nt, Homo Sapiens
uuagacccaaacuuguggaaguaucauguguu

SEQ ID NO: 219497 - RNA, 32 nt, Homo Sapiens
ggggagcccggugacccaggcagcccugguga

SEQ ID NO: 219498 - RNA, 32 nt, Homo Sapiens
gaguuuuggcuccucuccuuuccuccuccccc

SEQ ID NO: 219499 - RNA, 32 nt, Homo Sapiens
aacgaggggaugucaugaaggcagcuuuucuu

SEQ ID NO: 219500 - RNA, 32 nt, Homo Sapiens
uggggccagggccagcauggagcaccuggguc

SEQ ID NO: 219501 - RNA, 32 nt, Homo Sapiens
ccagggagggaagaugagguggggagucugua

SEQ ID NO: 219502 - RNA, 32 nt, Homo Sapiens
caaaguuaauuguaaacaucaucaguacagua

SEQ ID NO: 219503 - RNA, 30 nt, Homo Sapiens
acaggguuucacuguguuagccaggauggu

SEQ ID NO: 219504 - RNA, 32 nt, Homo Sapiens
ccuuguuuuucagauagccugcuuauaauuua

SEQ ID NO: 219505 - RNA, 32 nt, Homo Sapiens
guguauacacacauacaugguguuaguguuuu

SEQ ID NO: 219506 - RNA, 32 nt, Homo Sapiens
agcagcuggggccggggcgcggaugcuggaag

SEQ ID NO: 219507 - RNA, 32 nt, Homo Sapiens
aucgggcugggcccgcgcccauggcaagcgcg

SEQ ID NO: 219508 - RNA, 32 nt, Homo Sapiens
acccaccccacuuccuucucggaaggccagcu

SEQ ID NO: 219509 - RNA, 32 nt, Homo Sapiens
cgcgugggaugaugaguccguuguugucugcc

SEQ ID NO: 219510 - RNA, 32 nt, Homo Sapiens
cgcuggcaauggugugauuugucuggaucaga

SEQ ID NO: 219511 - RNA, 32 nt, Homo Sapiens
gucgccgcguccuuggcuggcguuagagacag

SEQ ID NO: 219512 - RNA, 32 nt, Homo Sapiens
guaaagugacauucuuaugaaacaagucaaaa

SEQ ID NO: 219513 - RNA, 32 nt, Homo Sapiens
cagguccugcccccggccagucugccaagagg

SEQ ID NO: 219514 - RNA, 32 nt, Homo Sapiens
cuuguccaaauggugcccaagaaucugcuuuc

SEQ ID NO: 219515 - RNA, 32 nt, Homo Sapiens
agugaaucccuacaaaugugaagaauguggca

SEQ ID NO: 219516 - RNA, 32 nt, Homo Sapiens
guucuguagucuuuucuuagguggguaacauu

SEQ ID NO: 219517 - RNA, 32 nt, Homo Sapiens
uuaacaagccuuuggaucagggcuugacucau

SEQ ID NO: 219518 - RNA, 32 nt, Homo Sapiens
gccuuaagaaacaaagcccuguccuaauuuau

SEQ ID NO: 219519 - RNA, 32 nt, Homo Sapiens
auuagcagaucuaauuugauaaacaacauggc

SEQ ID NO: 219520 - RNA, 32 nt, Homo Sapiens
cuauagaauauauacauaaauguaaaauacuu

SEQ ID NO: 219521 - RNA, 32 nt, Homo Sapiens
uggggguucgucugcuggguuugcggagcagc

SEQ ID NO: 219522 - RNA, 32 nt, Homo Sapiens
cugggccguggaggugggggcgguggugcugg

SEQ ID NO: 219523 - RNA, 32 nt, Homo Sapiens
ggcugugaccuguuagauaauuagauuauacu

SEQ ID NO: 219524 - RNA, 32 nt, Homo Sapiens
uaguuauuuccuuuguucuccucuccauucuc

SEQ ID NO: 219525 - RNA, 32 nt, Homo Sapiens
guuuuuaugucuucuuuucccuuuccaucuuu

SEQ ID NO: 219526 - RNA, 32 nt, Homo Sapiens
cccugcaggucccacacucucccaggcccuaa

SEQ ID NO: 219527 - RNA, 32 nt, Homo Sapiens
auaugagaagaucuauuuuaaacagucuaaau

SEQ ID NO: 219528 - RNA, 32 nt, Homo Sapiens
uaccucugacuucuguggucccucugugucug

SEQ ID NO: 219529 - RNA, 32 nt, Homo Sapiens
cucccaggguccugggggcugcugcacugccc

SEQ ID NO: 219530 - RNA, 32 nt, Homo Sapiens
cauaaaucuuaaaggggguaugugauaauaga

SEQ ID NO: 219531 - RNA, 32 nt, Homo Sapiens
ggcuucugagaccacaaaauacaaggccagac

SEQ ID NO: 219532 - RNA, 32 nt, Homo Sapiens
caccagagcugaugguaccaaauguuuccuag

SEQ ID NO: 219533 - RNA, 32 nt, Homo Sapiens
ugaacacauugaugaaguacaaaaugaaacag

SEQ ID NO: 219534 - RNA, 32 nt, Homo Sapiens
uggugaggaaacaugaggaucagaggccacau

SEQ ID NO: 219535 - RNA, 32 nt, Homo Sapiens
uucccuuuuuucugugaaauaugugaauaaua

SEQ ID NO: 219536 - RNA, 32 nt, Homo Sapiens
cacuucuccaagaggaaagguagaaguuguuc

SEQ ID NO: 219537 - RNA, 32 nt, Homo Sapiens
ugguuggcggggggugcugagggaggggagug

SEQ ID NO: 219538 - RNA, 32 nt, Homo Sapiens
cucgcgguguccccgagcgccggcggccggga

SEQ ID NO: 219539 - RNA, 32 nt, Homo Sapiens
aaagaugcuuuuuuuuuuuuuaacugacguag

SEQ ID NO: 219540 - RNA, 32 nt, Homo Sapiens
cugauuaauccauuuuaacaaacaaugcaaac

SEQ ID NO: 219541 - RNA, 32 nt, Homo Sapiens
gcagaaagggaagagaaacaaggguguucauu

SEQ ID NO: 219542 - RNA, 32 nt, Homo Sapiens
cccagcggccccacaccacgaugguggccccg

SEQ ID NO: 219543 - RNA, 32 nt, Homo Sapiens
gggcggccgggcgcgguggcucaugccuguaa

SEQ ID NO: 219544 - RNA, 32 nt, Homo Sapiens
auuaccaaacucaaagcuuauuugaguagaau

SEQ ID NO: 219545 - RNA, 32 nt, Homo Sapiens
aagcccucaacagccucccaggcuaucaguau

SEQ ID NO: 219546 - RNA, 32 nt, Homo Sapiens
gacuggaaaguaaguagguggcugguccucac

SEQ ID NO: 219547 - RNA, 32 nt, Homo Sapiens
uaauccucauguuguacauuagaccucuagac

SEQ ID NO: 219548 - RNA, 32 nt, Homo Sapiens
uggaacgagagcacacauuaaagagagaguaa

SEQ ID NO: 219549 - RNA, 32 nt, Homo Sapiens
uggaggcuauaugaucaaacagcaaauuguuu

SEQ ID NO: 219550 - RNA, 32 nt, Homo Sapiens
ucccuugaaaaacagggacgaugauagcaccu

SEQ ID NO: 219551 - RNA, 32 nt, Homo Sapiens
acggggcggcuauggcggccacguucuucgga

SEQ ID NO: 219552 - RNA, 32 nt, Homo Sapiens
uuccccggcuccccugcccacccugccgggga

SEQ ID NO: 219553 - RNA, 32 nt, Homo Sapiens
ugugccugcuaagaagaauugcugugaagauu

SEQ ID NO: 219554 - RNA, 32 nt, Homo Sapiens
aucuggagcaacagcuaggaaauaucauuaau

SEQ ID NO: 219555 - RNA, 32 nt, Homo Sapiens
gacuaggagcagggcugccucuucucccuccc

SEQ ID NO: 219556 - RNA, 32 nt, Homo Sapiens
aucugggagcugguccuggggaugcuggagau

SEQ ID NO: 219557 - RNA, 32 nt, Homo Sapiens
ccccuuucguuuuccggagacuuguugagaaa

SEQ ID NO: 219558 - RNA, 32 nt, Homo Sapiens
uaauguauaucuguaauauauaaucaaaugau

SEQ ID NO: 219559 - RNA, 32 nt, Homo Sapiens
caaggcacauucaaugcaaggggagcaaggau

SEQ ID NO: 219560 - RNA, 32 nt, Homo Sapiens
uuuuguuuuuuuuuuuuuuuuaaauaaccgca

SEQ ID NO: 219561 - RNA, 32 nt, Homo Sapiens
gcuauuucccaagagaagagccaggaggaaga

SEQ ID NO: 219562 - RNA, 32 nt, Homo Sapiens
uugguccugcggucccuucucugggaggcccg

SEQ ID NO: 219563 - RNA, 32 nt, Homo Sapiens
ggucgacugcagggaacugaaacuacagaaau

SEQ ID NO: 219564 - RNA, 32 nt, Homo Sapiens
uucuagccuggacgucucugaauuucagaaua

SEQ ID NO: 219565 - RNA, 32 nt, Homo Sapiens
cacccggcugagucagcccgggcgggcgagag

SEQ ID NO: 219566 - RNA, 32 nt, Homo Sapiens
gucugucucguccgcaucuccgcggccuccug

SEQ ID NO: 219567 - RNA, 32 nt, Homo Sapiens
ugugggaaccccguucccuacuuagcaugauc

SEQ ID NO: 219568 - RNA, 32 nt, Homo Sapiens
acaauuuaagugccugauacaaaguccaaagu

SEQ ID NO: 219569 - RNA, 32 nt, Homo Sapiens
agaauuaaugaaauuauuaaaggcaacaauuu

SEQ ID NO: 219570 - RNA, 32 nt, Homo Sapiens
gcaguggcaaugaaaugccauaguauuauugu

SEQ ID NO: 219571 - RNA, 28 nt, Homo Sapiens
ccaauauguagagaacauuugaaacagu

SEQ ID NO: 219572 - RNA, 32 nt, Homo Sapiens
gaagaggcuuuuccuugccaucuuucugucaa

SEQ ID NO: 219573 - RNA, 32 nt, Homo Sapiens
ggcuccccucgacagcucucugggcacccggu

SEQ ID NO: 219574 - RNA, 32 nt, Homo Sapiens
agugaugcccgucaugugcacuugggucuacc

SEQ ID NO: 219575 - RNA, 32 nt, Homo Sapiens
cccgcguaccgcaagaacgccacgcgggacgc

SEQ ID NO: 219576 - RNA, 32 nt, Homo Sapiens
aggcaggacagagcaggagaucaugagauuuc

SEQ ID NO: 219577 - RNA, 32 nt, Homo Sapiens
ggccucaugggguggcggcugugucuugguuu

SEQ ID NO: 219578 - RNA, 32 nt, Homo Sapiens
ccgaacacccgcaucccuuccuccucccaugg

SEQ ID NO: 219579 - RNA, 32 nt, Homo Sapiens
gggcgcgcguccucgggaguggcgccgugaca

SEQ ID NO: 219580 - RNA, 32 nt, Homo Sapiens
ugccuacucaccccaggggccacagccacagc

SEQ ID NO: 219581 - RNA, 32 nt, Homo Sapiens
aaaugugaacaaauaaaauacagcaaauacuc

SEQ ID NO: 219582 - RNA, 32 nt, Homo Sapiens
aagaggcuccgucuuaacgcagcacuuagaca

SEQ ID NO: 219583 - RNA, 32 nt, Homo Sapiens
accauuuaguccaaccugaggacugauguuag

SEQ ID NO: 219584 - RNA, 32 nt, Homo Sapiens
ccacccuugucccucagcaacaucccaucuaa

SEQ ID NO: 219585 - RNA, 32 nt, Homo Sapiens
aggauuuuuuaaaaucacagaauugauauuua

SEQ ID NO: 219586 - RNA, 32 nt, Homo Sapiens
ugcaaaggggaggcaucaguguccuuggcagg

SEQ ID NO: 219587 - RNA, 32 nt, Homo Sapiens
cuggacgcggaggcgcugggcgcacggcgcgg

SEQ ID NO: 219588 - RNA, 32 nt, Homo Sapiens
gacagacugugcgaggaagcaggggcaggggu

SEQ ID NO: 219589 - RNA, 32 nt, Homo Sapiens
uggcugcugagcgaugaguggaugccacaaag

SEQ ID NO: 219590 - RNA, 32 nt, Homo Sapiens
cucucccuuguacagccuuauuuuguuggugc

SEQ ID NO: 219591 - RNA, 32 nt, Homo Sapiens
ccaugaaaacaucaguguuaagagcaugauga

SEQ ID NO: 219592 - RNA, 32 nt, Homo Sapiens
ccuucccccauccccaggagugcucucaacca

SEQ ID NO: 219593 - RNA, 32 nt, Homo Sapiens
uccgaaucucauccucccuccuccucucuauc

SEQ ID NO: 219594 - RNA, 32 nt, Homo Sapiens
gaaaauucaaggaacuaaauuccuucuccacc

SEQ ID NO: 219595 - RNA, 32 nt, Homo Sapiens
ugucucugagaguggaaugucaccaucgccca

SEQ ID NO: 219596 - RNA, 32 nt, Homo Sapiens
uaaaucaagaucugugauugaacagggaggca

SEQ ID NO: 219597 - RNA, 32 nt, Homo Sapiens
caccaccauugccgccagcaauguuuguugcu

SEQ ID NO: 219598 - RNA, 32 nt, Homo Sapiens
gugaccaggagaacaaggagcuccuccagcaa

SEQ ID NO: 219599 - RNA, 32 nt, Homo Sapiens
aaaauuaaacucuuaaaaagugacugcaacaa

SEQ ID NO: 219600 - RNA, 32 nt, Homo Sapiens
ucucugaagaucugcucaagacguccagcaau

SEQ ID NO: 219601 - RNA, 32 nt, Homo Sapiens
cagagugugaagaaacaaaccugugacagauc

SEQ ID NO: 219602 - RNA, 32 nt, Homo Sapiens
cccggcugcgcuggagccgcccggagcuaggg

SEQ ID NO: 219603 - RNA, 32 nt, Homo Sapiens
ggaaucccagcaccagccccccugccucuccu

SEQ ID NO: 219604 - RNA, 32 nt, Homo Sapiens
gguggucugucaacuauucuacuuaugagaga

SEQ ID NO: 219605 - RNA, 32 nt, Homo Sapiens
uggucagcuacaguuuaauuccacacuguuac

SEQ ID NO: 219606 - RNA, 32 nt, Homo Sapiens
guuuagaaaguuggguggcuucauucagcaug

SEQ ID NO: 219607 - RNA, 32 nt, Homo Sapiens
cgcgucgcgucacuguucucgguccgcugucc

SEQ ID NO: 219608 - RNA, 32 nt, Homo Sapiens
agaaggugcuggauucugagugggccuuuagg

SEQ ID NO: 219609 - RNA, 32 nt, Homo Sapiens
ccacggaggguggggagcucgggcugaaaucc

SEQ ID NO: 219610 - RNA, 32 nt, Homo Sapiens
cagcaggggggccccgccugcgccuccccucc

SEQ ID NO: 219611 - RNA, 32 nt, Homo Sapiens
ucugcucaccuuccugccucaagccccucucc

SEQ ID NO: 219612 - RNA, 32 nt, Homo Sapiens
gugugacgcccauugagcuguuacccgaaguc

SEQ ID NO: 219613 - RNA, 32 nt, Homo Sapiens
gaacuuacaaguguuauaaauguggcaaauuu

SEQ ID NO: 219614 - RNA, 32 nt, Homo Sapiens
ggcacccuugggccugcccccuggcggacccc

SEQ ID NO: 219615 - RNA, 32 nt, Homo Sapiens
ccaggcgccucccugcacguucccagacaccu

SEQ ID NO: 219616 - RNA, 32 nt, Homo Sapiens
ucaagugauccuccugccucagcaucccaaac

SEQ ID NO: 219617 - RNA, 32 nt, Homo Sapiens
aucaugauccuaccuaucaagcacuaaaaagu

SEQ ID NO: 219618 - RNA, 32 nt, Homo Sapiens
gagaaagaacagaccagcgcccuucccgacua

SEQ ID NO: 219619 - RNA, 32 nt, Homo Sapiens
ucaucugggcuccuguccagccccacauguca

SEQ ID NO: 219620 - RNA, 32 nt, Homo Sapiens
agcccuugaaagaugacaguggucuucuugcc

SEQ ID NO: 219621 - RNA, 32 nt, Homo Sapiens
agccuggugcuucuccucuccuagccccuguc

SEQ ID NO: 219622 - RNA, 32 nt, Homo Sapiens
aauauauaaccaauagugaaaugccacagguu

SEQ ID NO: 219623 - RNA, 32 nt, Homo Sapiens
gcaccacacccgagcuacaaucucuggacaaa

SEQ ID NO: 219624 - RNA, 32 nt, Homo Sapiens
uggggcggaggcaaagcggggagugggcgagg

SEQ ID NO: 219625 - RNA, 32 nt, Homo Sapiens
cacugcauuugguuuucuuuucagaacuuggg

SEQ ID NO: 219626 - RNA, 32 nt, Homo Sapiens
cuggcccaaggcugggcugugcuguguccuca

SEQ ID NO: 219627 - RNA, 32 nt, Homo Sapiens
uuuucacuuuuuucuuuuuuuccucacugcua

SEQ ID NO: 219628 - RNA, 32 nt, Homo Sapiens
ucuuaauugugucuuuuaaaaauguaugugcu

SEQ ID NO: 219629 - RNA, 32 nt, Homo Sapiens
uucauuauuuaguuuugucacaagaaaucgac

SEQ ID NO: 219630 - RNA, 32 nt, Homo Sapiens
uagcauuuuuauuuaagcuaaaacagagcaca

SEQ ID NO: 219631 - RNA, 32 nt, Homo Sapiens
ugagggcuucgaucccuucucugauuugcugu

SEQ ID NO: 219632 - RNA, 32 nt, Homo Sapiens
gaaaguuguaaauuccucauaucacuacagug

SEQ ID NO: 219633 - RNA, 32 nt, Homo Sapiens
ccauucacuagccccagggauugaagucuugg

SEQ ID NO: 219634 - RNA, 32 nt, Homo Sapiens
uggucaccccaucuuccaacccacuggcccag

SEQ ID NO: 219635 - RNA, 32 nt, Homo Sapiens
agacggccggccaugcucuccuccucugccag

SEQ ID NO: 219636 - RNA, 32 nt, Homo Sapiens
ccgaucgggcaggugguuuugugcagugugug

SEQ ID NO: 219637 - RNA, 32 nt, Homo Sapiens
cgccgcggauccuggccgcugcucuccagacc

SEQ ID NO: 219638 - RNA, 32 nt, Homo Sapiens
agaucuggccccagcucagcucugcugcaucc

SEQ ID NO: 219639 - RNA, 32 nt, Homo Sapiens
gacagacgcccgccgcgccuuccagccccgag

SEQ ID NO: 219640 - RNA, 32 nt, Homo Sapiens
uggaguucuuugaaaugugcuggaagacuuaa

SEQ ID NO: 219641 - RNA, 32 nt, Homo Sapiens
ccuccaccagccucugcccaccuaccaccaga

SEQ ID NO: 219642 - RNA, 32 nt, Homo Sapiens
uggaggaggaggaggaggauacgccagucagc

SEQ ID NO: 219643 - RNA, 32 nt, Homo Sapiens
uaacccuugaaaacaaggaauuguacagagua

SEQ ID NO: 219644 - RNA, 32 nt, Homo Sapiens
ggucagcucucugguccagacccgccagguga

SEQ ID NO: 219645 - RNA, 32 nt, Homo Sapiens
gcugggguggagggcgggacagaggggcuggg

SEQ ID NO: 219646 - RNA, 32 nt, Homo Sapiens
guaauucugaaucauuugauaauuuaccuuag

SEQ ID NO: 219647 - RNA, 32 nt, Homo Sapiens
caaucauuuaaauaaaccuguauguauaugca

SEQ ID NO: 219648 - RNA, 32 nt, Homo Sapiens
cgcucaauaaacguguuucuccuuuuaaaaaa

SEQ ID NO: 219649 - RNA, 32 nt, Homo Sapiens
agagcuggcaagucagcaucauucccagugca

SEQ ID NO: 219650 - RNA, 32 nt, Homo Sapiens
uugcccaggcuggucucgaacuucugggcuca

SEQ ID NO: 219651 - RNA, 32 nt, Homo Sapiens
gaaacuaugggacucugagccuugcuuuagag

SEQ ID NO: 219652 - RNA, 32 nt, Homo Sapiens
agucugguggaagcuauuuggaugcugagugu

SEQ ID NO: 219653 - RNA, 32 nt, Homo Sapiens
caaauaccaauuuauauauuuucuguuuuguu

SEQ ID NO: 219654 - RNA, 32 nt, Homo Sapiens
ugaaugcggaguaggaauauuuuucguguucu

SEQ ID NO: 219655 - RNA, 32 nt, Homo Sapiens
gucuccuugugcuucugagauguggagaagag

SEQ ID NO: 219656 - RNA, 30 nt, Homo Sapiens
ugggggagcuccgcgccgccggacgcccgu

SEQ ID NO: 219657 - RNA, 32 nt, Homo Sapiens
guggccccaagcccgccucccuccccacccug

SEQ ID NO: 219658 - RNA, 32 nt, Homo Sapiens
cuggucaagcuuuucucacauggcaucacugu

SEQ ID NO: 219659 - RNA, 32 nt, Homo Sapiens
ucagccuggagcccgcgcgccuugggcggaug

SEQ ID NO: 219660 - RNA, 32 nt, Homo Sapiens
ugauaggacuuccuuaagcaugacgggaaaac

SEQ ID NO: 219661 - RNA, 32 nt, Homo Sapiens
cugggagucuuaggggucuuggcagcauggaa

SEQ ID NO: 219662 - RNA, 32 nt, Homo Sapiens
ugcugagaccuauuucccuuucuuggggagag

SEQ ID NO: 219663 - RNA, 32 nt, Homo Sapiens
ggaaaacaaaguucuagauagguuaaaagaaa

SEQ ID NO: 219664 - RNA, 32 nt, Homo Sapiens
acucaauuuuucaggcuucucuuuguuaugaa

SEQ ID NO: 219665 - RNA, 32 nt, Homo Sapiens
agggaggaccagugcagggucugugcaccuuc

SEQ ID NO: 219666 - RNA, 32 nt, Homo Sapiens
uguuuuuauguggaugaagagcauuuuuuaug

SEQ ID NO: 219667 - RNA, 32 nt, Homo Sapiens
aguuuauuuguuucauuguguacauuuuuaua

SEQ ID NO: 219668 - RNA, 32 nt, Homo Sapiens
auaaauaaguuuuccuuuuguuuuccacucaa

SEQ ID NO: 219669 - RNA, 32 nt, Homo Sapiens
ccuggggacuuaaauuuuggcaguguuccucu

SEQ ID NO: 219670 - RNA, 32 nt, Homo Sapiens
caaaguggcacgccuggagagaacuuggaagc

SEQ ID NO: 219671 - RNA, 32 nt, Homo Sapiens
caucucgcaggagagcagggucugggcuccug

SEQ ID NO: 219672 - RNA, 32 nt, Homo Sapiens
aaaugaaguuugggauuuggaacuuucuguau

SEQ ID NO: 219673 - RNA, 32 nt, Homo Sapiens
ccuggugccccggcucccugccccgcgcccag

SEQ ID NO: 219674 - RNA, 32 nt, Homo Sapiens
aggcauuuguaucuuugguagggcaacaagua

SEQ ID NO: 219675 - RNA, 32 nt, Homo Sapiens
caguaagcaguuuauucugagccccgggggua

SEQ ID NO: 219676 - RNA, 32 nt, Homo Sapiens
ugcccuggccgccccaggcuccuggcuucauc

SEQ ID NO: 219677 - RNA, 32 nt, Homo Sapiens
ugcauccucagaaggggaaaagggacugggaa

SEQ ID NO: 219678 - RNA, 32 nt, Homo Sapiens
uuugagcacugacuugaccccacaaguggaaa

SEQ ID NO: 219679 - RNA, 32 nt, Homo Sapiens
ggcgaccacuaccccugcgucccggcccccuc

SEQ ID NO: 219680 - RNA, 32 nt, Homo Sapiens
uguguauuuuucccuugucaaaaauuaguuga

SEQ ID NO: 219681 - RNA, 32 nt, Homo Sapiens
gauuucucugggcccacaucuaucuccaauac

SEQ ID NO: 219682 - RNA, 32 nt, Homo Sapiens
uuaaagugaagaguauuuugaagaagaacauu

SEQ ID NO: 219683 - RNA, 32 nt, Homo Sapiens
aauuucugccaagucaguucucuuuggaggaa

SEQ ID NO: 219684 - RNA, 32 nt, Homo Sapiens
uggagagggugauugaguguggagaucaccgg

SEQ ID NO: 219685 - RNA, 32 nt, Homo Sapiens
ggcggggcagugccuacuacgcaggcgcacgc

SEQ ID NO: 219686 - RNA, 32 nt, Homo Sapiens
uuuaauuucuucccuucuccccaccaguguug

SEQ ID NO: 219687 - RNA, 32 nt, Homo Sapiens
augcuagguaucuuuugccaucuuucucuuua

SEQ ID NO: 219688 - RNA, 32 nt, Homo Sapiens
aggacugucauucagaucucugguucacuucu

SEQ ID NO: 219689 - RNA, 32 nt, Homo Sapiens
ugggcucacagcaccccucuauuucuuucugg

SEQ ID NO: 219690 - RNA, 32 nt, Homo Sapiens
ugcccucugcuccugcuucucagcucuuccac

SEQ ID NO: 219691 - RNA, 32 nt, Homo Sapiens
gcggggcagugauuuuagcccaauguacucau

SEQ ID NO: 219692 - RNA, 32 nt, Homo Sapiens
gagaauugauaaaagaaagacuguuguauuca

SEQ ID NO: 219693 - RNA, 32 nt, Homo Sapiens
accuuucaguccugcuauuuuccuccucuugu

SEQ ID NO: 219694 - RNA, 32 nt, Homo Sapiens
agaaacagcuccgccguccuucgcuucuuuug

SEQ ID NO: 219695 - RNA, 32 nt, Homo Sapiens
ggcuggcauccggcccgggggaaagcggacca

SEQ ID NO: 219696 - RNA, 32 nt, Homo Sapiens
cgaggccccguccgguggaacacgccaugacg

SEQ ID NO: 219697 - RNA, 32 nt, Homo Sapiens
acagcccccuccccuucccucugucuucugug

SEQ ID NO: 219698 - RNA, 32 nt, Homo Sapiens
ugguggauaauuuaugugauguggauugcugg

SEQ ID NO: 219699 - RNA, 32 nt, Homo Sapiens
cuccaggacgagcucauccucccagugcgucu

SEQ ID NO: 219700 - RNA, 32 nt, Homo Sapiens
ccggucgcgaggaggaggaggauguggcgcgc

SEQ ID NO: 219701 - RNA, 32 nt, Homo Sapiens
ucaauuggauuuggucuucauuauuuuauauu

SEQ ID NO: 219702 - RNA, 32 nt, Homo Sapiens
ucggcugaggcgccgcgcggccaggcagcggg

SEQ ID NO: 219703 - RNA, 28 nt, Homo Sapiens
cguuuuucuucuaauauuguuugagcuc

SEQ ID NO: 219704 - RNA, 32 nt, Homo Sapiens
aaauaaauacauaaaaagcaaacaagcgggga

SEQ ID NO: 219705 - RNA, 32 nt, Homo Sapiens
gaugauaccugaccaccacuucugggaaggcc

SEQ ID NO: 219706 - RNA, 32 nt, Homo Sapiens
uuaguuugucaaauaaauaccauauauuuaaa

SEQ ID NO: 219707 - RNA, 32 nt, Homo Sapiens
cucaugcugugcucccugucucuucucuucuc

SEQ ID NO: 219708 - RNA, 32 nt, Homo Sapiens
gugggugccuguagugugaugugucugaacua

SEQ ID NO: 219709 - RNA, 32 nt, Homo Sapiens
guacaggagagccauccaggccauucucccag

SEQ ID NO: 219710 - RNA, 32 nt, Homo Sapiens
gcaguagacgauacagguugcauguggacacu

SEQ ID NO: 219711 - RNA, 32 nt, Homo Sapiens
gagguaugaaguuuauccuguuuuccagagau

SEQ ID NO: 219712 - RNA, 32 nt, Homo Sapiens
cagcccccaagccuauucaggccucugaaucu

SEQ ID NO: 219713 - RNA, 32 nt, Homo Sapiens
ccggcgcccgguggccgagcgcgcccaggaca

SEQ ID NO: 219714 - RNA, 32 nt, Homo Sapiens
auauuguugcuuucuucaaaaguaauuuugac

SEQ ID NO: 219715 - RNA, 32 nt, Homo Sapiens
ugaagcuccaugucuguaagucaaauguuaca

SEQ ID NO: 219716 - RNA, 32 nt, Homo Sapiens
uccccaccuuccuguaccuccuccccacagcu

SEQ ID NO: 219717 - RNA, 31 nt, Homo Sapiens
ccgucgagaaccaccaccuggguugggggga

SEQ ID NO: 219718 - RNA, 32 nt, Homo Sapiens
uggagugccguggcacgaucucagcucacugc

SEQ ID NO: 219719 - RNA, 32 nt, Homo Sapiens
caagucugguguucccucaucaucccccuacc

SEQ ID NO: 219720 - RNA, 32 nt, Homo Sapiens
aaaggggaugagaacugugugcugcgacccuu

SEQ ID NO: 219721 - RNA, 32 nt, Homo Sapiens
agacuuggugccugagcgcagcuccagggaag

SEQ ID NO: 219722 - RNA, 32 nt, Homo Sapiens
gacuuccuacuuugaagaauugauguaugccu

SEQ ID NO: 219723 - RNA, 32 nt, Homo Sapiens
caauccuggaggggcagcaggaggcggagcuc

SEQ ID NO: 219724 - RNA, 32 nt, Homo Sapiens
aauaaauuuagaucucaaaaccacuauuuuua

SEQ ID NO: 219725 - RNA, 32 nt, Homo Sapiens
cggcugggcggccccacagacccgcuggaacc

SEQ ID NO: 219726 - RNA, 32 nt, Homo Sapiens
auuuucuguugguauagcuggcacucuuguuu

SEQ ID NO: 219727 - RNA, 32 nt, Homo Sapiens
cacucuucucccagcccuuaggguccugcucg

SEQ ID NO: 219728 - RNA, 32 nt, Homo Sapiens
agccagacggagagccaccuccucucccagga

SEQ ID NO: 219729 - RNA, 32 nt, Homo Sapiens
uuuucacauuuuccuuuucaaauagggucuaa

SEQ ID NO: 219730 - RNA, 32 nt, Homo Sapiens
ccugaacuuuuguagaaguucaaacuuggaaa

SEQ ID NO: 219731 - RNA, 32 nt, Homo Sapiens
ggccccgccgaggcuucaggggcccccucccc

SEQ ID NO: 219732 - RNA, 32 nt, Homo Sapiens
guuuuaaauauguuuaaaaauagcgauuaaaa

SEQ ID NO: 219733 - RNA, 32 nt, Homo Sapiens
aacauuauuucugaagacuucauuauuggaau

SEQ ID NO: 219734 - RNA, 31 nt, Homo Sapiens
caucagaaauaaagcuguaucugccauuuua

SEQ ID NO: 219735 - RNA, 32 nt, Homo Sapiens
auacuuuaaaggccacuguugcaaagucuaca

SEQ ID NO: 219736 - RNA, 32 nt, Homo Sapiens
ggcuaagcauauacuagauagucaauaaauaa

SEQ ID NO: 219737 - RNA, 32 nt, Homo Sapiens
agcugucgcccggccacaccugguggugucau

SEQ ID NO: 219738 - RNA, 32 nt, Homo Sapiens
gaacauauuuuugccaggaagaugaaaaucac

SEQ ID NO: 219739 - RNA, 32 nt, Homo Sapiens
gcaagagguauaauggauauggcauucauuaa

SEQ ID NO: 219740 - RNA, 32 nt, Homo Sapiens
agcuagcagacacauccaguaucuccuucugg

SEQ ID NO: 219741 - RNA, 32 nt, Homo Sapiens
cacacuguuuucauagcguugauuccacacuu

SEQ ID NO: 219742 - RNA, 32 nt, Homo Sapiens
cugagggcuugguuaagaagcucuucguuuac

SEQ ID NO: 219743 - RNA, 32 nt, Homo Sapiens
auguuuucuaaacaucguccaguguugacugg

SEQ ID NO: 219744 - RNA, 32 nt, Homo Sapiens
gccgggugguggccacgacagcgcgccacucc

SEQ ID NO: 219745 - RNA, 32 nt, Homo Sapiens
guauggugggagagggaguggagugcagugug

SEQ ID NO: 219746 - RNA, 32 nt, Homo Sapiens
cucccuuaagcaaccucacaaacaagccgcuu

SEQ ID NO: 219747 - RNA, 32 nt, Homo Sapiens
gugucaaggaguggggcgggguggcgggggag

SEQ ID NO: 219748 - RNA, 32 nt, Homo Sapiens
ugcccccaggugguggggccccuccuugcccu

SEQ ID NO: 219749 - RNA, 32 nt, Homo Sapiens
aagugauacugaaauaaaaauuauaauaaagc

SEQ ID NO: 219750 - RNA, 32 nt, Homo Sapiens
agcagcugagagauuucuuuggcauguccaac

SEQ ID NO: 219751 - RNA, 29 nt, Homo Sapiens
ucauugucauauguggaauuuaaauauac

SEQ ID NO: 219752 - RNA, 32 nt, Homo Sapiens
aguugcuucuguacugguucucuucuuuugcu

SEQ ID NO: 219753 - RNA, 32 nt, Homo Sapiens
gggcccagacugccugcaggucaggcacaggg

SEQ ID NO: 219754 - RNA, 32 nt, Homo Sapiens
uuccagcagccuguuccacacccccacaccau

SEQ ID NO: 219755 - RNA, 32 nt, Homo Sapiens
ugagucucuuucgccuugcuccgggcuuucuu

SEQ ID NO: 219756 - RNA, 32 nt, Homo Sapiens
ugccugggugcuggcuggucacugccagaggc

SEQ ID NO: 219757 - RNA, 32 nt, Homo Sapiens
ugauccucauuugcaugcuguuuaagauccag

SEQ ID NO: 219758 - RNA, 32 nt, Homo Sapiens
aggcuccugggguggggaucaccagggggauu

SEQ ID NO: 219759 - RNA, 32 nt, Homo Sapiens
acuuugcugaauauuguagauuguaggcaaug

SEQ ID NO: 219760 - RNA, 32 nt, Homo Sapiens
agugcccgucuucgcugucccaucugcucaga

SEQ ID NO: 219761 - RNA, 32 nt, Homo Sapiens
auacccucacuuuccaggccuggcucagaauc

SEQ ID NO: 219762 - RNA, 32 nt, Homo Sapiens
auuuuacauuuggucuuaaugaucuugaauag

SEQ ID NO: 219763 - RNA, 32 nt, Homo Sapiens
agaacuuagaaaaauauuuacuaguugaaguu

SEQ ID NO: 219764 - RNA, 32 nt, Homo Sapiens
cuccuccagcucccccugggaccuccagcaua

SEQ ID NO: 219765 - RNA, 32 nt, Homo Sapiens
gccacccaucauugugaaauaauuaccucagu

SEQ ID NO: 219766 - RNA, 32 nt, Homo Sapiens
ucgcagcugggcccgcggcauggacgaacugu

SEQ ID NO: 219767 - RNA, 32 nt, Homo Sapiens
gucugccugcuccucaggaccacucaguccac

SEQ ID NO: 219768 - RNA, 32 nt, Homo Sapiens
gcggagggcugaacaauguguuuucuagugug

SEQ ID NO: 219769 - RNA, 32 nt, Homo Sapiens
aucuuggaaccuguuuugcaguuucuugcagu

SEQ ID NO: 219770 - RNA, 32 nt, Homo Sapiens
uuaaaaaaguuccagaaauccagugcgaaugu

SEQ ID NO: 219771 - RNA, 32 nt, Homo Sapiens
uccaauugcugcguggucguggcccgaccucu

SEQ ID NO: 219772 - RNA, 32 nt, Homo Sapiens
cucuagccaggcucuuacgccaugguuaugag

SEQ ID NO: 219773 - RNA, 32 nt, Homo Sapiens
uuuaaaaaugucacagaauaugauguaauaac

SEQ ID NO: 219774 - RNA, 32 nt, Homo Sapiens
gggaggagcaaagggaggcuccggcugcccca

SEQ ID NO: 219775 - RNA, 32 nt, Homo Sapiens
gauccuguccucuugggaacagcccucagcca

SEQ ID NO: 219776 - RNA, 32 nt, Homo Sapiens
agauuuauuuaguuucagaaucuaaguuuaug

SEQ ID NO: 219777 - RNA, 32 nt, Homo Sapiens
guguucgagcugauauuuuaauuuaugaguuu

SEQ ID NO: 219778 - RNA, 32 nt, Homo Sapiens
ggccaggucucuccaagugcaucuagccuggc

SEQ ID NO: 219779 - RNA, 32 nt, Homo Sapiens
cuucagccugaagaccuggugaaaguugucuu

SEQ ID NO: 219780 - RNA, 32 nt, Homo Sapiens
cccuuguuauaguggaggaagcugcaggcuag

SEQ ID NO: 219781 - RNA, 32 nt, Homo Sapiens
guuuguuugguuuuuuuaauucuuaaaaacau

SEQ ID NO: 219782 - RNA, 32 nt, Homo Sapiens
aaaacaaaacaaaacaaaaaccaugcugguuc

SEQ ID NO: 219783 - RNA, 32 nt, Homo Sapiens
uguccuugaccugcagagaugugugagcuugg

SEQ ID NO: 219784 - RNA, 30 nt, Homo Sapiens
gggccaggcaggcgauccccgcuuccccuu

SEQ ID NO: 219785 - RNA, 32 nt, Homo Sapiens
ggagccccuggccgcuuucugcggaucgaccc

SEQ ID NO: 219786 - RNA, 32 nt, Homo Sapiens
cagcuacugcccgugcccccggccaccucggu

SEQ ID NO: 219787 - RNA, 32 nt, Homo Sapiens
aaaaaugggaacauuuuaaaugauuuucaccu

SEQ ID NO: 219788 - RNA, 32 nt, Homo Sapiens
agauucagagcagggagggaacuugccagaga

SEQ ID NO: 219789 - RNA, 32 nt, Homo Sapiens
gauucucagucuuuuuauugcacuuauuacag

SEQ ID NO: 219790 - RNA, 32 nt, Homo Sapiens
cggaguugcccgccuuagcccccgcccccggc

SEQ ID NO: 219791 - RNA, 32 nt, Homo Sapiens
cauucguggaaagcggcguagccgugcgugug

SEQ ID NO: 219792 - RNA, 32 nt, Homo Sapiens
acugggauuugccugccacuugguuaucauua

SEQ ID NO: 219793 - RNA, 32 nt, Homo Sapiens
gccauuuuguauugagcuccacagcuggucac

SEQ ID NO: 219794 - RNA, 32 nt, Homo Sapiens
gaaggcccugacgcccuggggcacuucugcuc

SEQ ID NO: 219795 - RNA, 32 nt, Homo Sapiens
cuacaugggcuuugugcccagaucuugucaga

SEQ ID NO: 219796 - RNA, 32 nt, Homo Sapiens
gccacgugacagguuguagcaugcaauguuga

SEQ ID NO: 219797 - RNA, 32 nt, Homo Sapiens
cccgcugccccaagccgcgaugcccaggggcc

SEQ ID NO: 219798 - RNA, 32 nt, Homo Sapiens
gcuucauuaacacaaucaagaccaugcacauu

SEQ ID NO: 219799 - RNA, 32 nt, Homo Sapiens
cagaggcaggccuggggccacccgggaggcuu

SEQ ID NO: 219800 - RNA, 32 nt, Homo Sapiens
uauauuguuuagucucacucuuucuuuugaac

SEQ ID NO: 219801 - RNA, 32 nt, Homo Sapiens
ugucagaaaaggaugaguuuguggugacaguu

SEQ ID NO: 219802 - RNA, 32 nt, Homo Sapiens
gcaacauuaauacauagagacaccgaggagcc

SEQ ID NO: 219803 - RNA, 32 nt, Homo Sapiens
ugagcagcgggaagcugcuuggacccagucuc

SEQ ID NO: 219804 - RNA, 32 nt, Homo Sapiens
acuuugaaaaagagaaguaaaaguuuaacuuu

SEQ ID NO: 219805 - RNA, 32 nt, Homo Sapiens
ccacuccgaccuagcggccgccgcccccggug

SEQ ID NO: 219806 - RNA, 32 nt, Homo Sapiens
cuacugcccugcauuugacaaacaagcauccu

SEQ ID NO: 219807 - RNA, 32 nt, Homo Sapiens
auuggcggcucgauuggcauucugccugcuuc

SEQ ID NO: 219808 - RNA, 32 nt, Homo Sapiens
aucuggggagagcggcuggagaaagaugcagu

SEQ ID NO: 219809 - RNA, 32 nt, Homo Sapiens
ggucuuugccagcaaaggagguucugccugua

SEQ ID NO: 219810 - RNA, 32 nt, Homo Sapiens
ggacgcgcgggccuugccagcgagcacccuca

SEQ ID NO: 219811 - RNA, 32 nt, Homo Sapiens
uuuuuuacauuuucuuuuuucuuaugugauaa

SEQ ID NO: 219812 - RNA, 32 nt, Homo Sapiens
uguucacuaguuccuuuuuucucuacauuuuu

SEQ ID NO: 219813 - RNA, 32 nt, Homo Sapiens
ucagugcugcacccucugggaggaggaccccu

SEQ ID NO: 219814 - RNA, 32 nt, Homo Sapiens
aaaauguacaguguauuuuauagaauugaagu

SEQ ID NO: 219815 - RNA, 32 nt, Homo Sapiens
agcacaaauaaauaaugacugucauacaucca

SEQ ID NO: 219816 - RNA, 32 nt, Homo Sapiens
uauuacaaaaaauuauaaaaauaaguuuucag

SEQ ID NO: 219817 - RNA, 32 nt, Homo Sapiens
gagggcgcuguguucucaaucagcgccuccga

SEQ ID NO: 219818 - RNA, 32 nt, Homo Sapiens
uacuggaaaaagaggaaagagaagacuuucau

SEQ ID NO: 219819 - RNA, 32 nt, Homo Sapiens
ggugcgaggaccacggccggcucggacgugug

SEQ ID NO: 219820 - RNA, 32 nt, Homo Sapiens
cuuugauugacaaaucagcucucaauaaacca

SEQ ID NO: 219821 - RNA, 32 nt, Homo Sapiens
ccuuaauuuguuuuccagaaucaaaagaaaau

SEQ ID NO: 219822 - RNA, 30 nt, Homo Sapiens
uuccuggcgcccggagucccugcugcggcc

SEQ ID NO: 219823 - RNA, 32 nt, Homo Sapiens
uuaaaaacaaaacaaaauauaaaaaacugugu

SEQ ID NO: 219824 - RNA, 31 nt, Homo Sapiens
cugcugaagauccagaaccauggcaagaaac

SEQ ID NO: 219825 - RNA, 29 nt, Homo Sapiens
aggauauuugguuucagaguaaggacuag

SEQ ID NO: 219826 - RNA, 32 nt, Homo Sapiens
ucacauuccuuaaauuaggagaaaugcuggca

SEQ ID NO: 219827 - RNA, 32 nt, Homo Sapiens
uuuuaguggugguaguuuguuuuguuucauau

SEQ ID NO: 219828 - RNA, 32 nt, Homo Sapiens
ugaccccuggaaaaaaucauggcaugaacugc

SEQ ID NO: 219829 - RNA, 32 nt, Homo Sapiens
gucagccccuggggcgcaaacauuccccugag

SEQ ID NO: 219830 - RNA, 32 nt, Homo Sapiens
uuuuaaaguucaugggugagggauaaaaugag

SEQ ID NO: 219831 - RNA, 32 nt, Homo Sapiens
agauugucuuagaaugaauauucauaaguacu

SEQ ID NO: 219832 - RNA, 32 nt, Homo Sapiens
uaaaaggguuauauguaauuugaaagauagac

SEQ ID NO: 219833 - RNA, 32 nt, Homo Sapiens
ccaccugccucacuccucccuaucauguaccg

SEQ ID NO: 219834 - RNA, 32 nt, Homo Sapiens
gaccugguuugaacaaaacauaaaaagccauu

SEQ ID NO: 219835 - RNA, 32 nt, Homo Sapiens
ucccuccuauuauaaggaaauuuuacagauuc

SEQ ID NO: 219836 - RNA, 32 nt, Homo Sapiens
ccagccccagcuaccaccuccuccccggccgg

SEQ ID NO: 219837 - RNA, 32 nt, Homo Sapiens
ggucaccgcccggcugcggggccaguggcagg

SEQ ID NO: 219838 - RNA, 32 nt, Homo Sapiens
aguaacaaaucguggaauauuuuuaaggaaaa

SEQ ID NO: 219839 - RNA, 32 nt, Homo Sapiens
ugugcacggcuguggcagcuguugaugccagu

SEQ ID NO: 219840 - RNA, 32 nt, Homo Sapiens
cccuggggcugagucuccagggccccccaacu

SEQ ID NO: 219841 - RNA, 32 nt, Homo Sapiens
gggcagcuccgucuuggcaggcucaggaggcc

SEQ ID NO: 219842 - RNA, 32 nt, Homo Sapiens
cuaauuuuugcagcagggaagacgaaauaaca

SEQ ID NO: 219843 - RNA, 32 nt, Homo Sapiens
gcggcgguggccauauggcagacgcuccagca

SEQ ID NO: 219844 - RNA, 32 nt, Homo Sapiens
gucagggacuccuggggauccugcuugcuguu

SEQ ID NO: 219845 - RNA, 32 nt, Homo Sapiens
aaguuuugucuccucugagguuggcccauggc

SEQ ID NO: 219846 - RNA, 32 nt, Homo Sapiens
aagagcuaucuggccuugggguacccuggccu

SEQ ID NO: 219847 - RNA, 32 nt, Homo Sapiens
aggcuggugcaggagcaguucugcuauuucca

SEQ ID NO: 219848 - RNA, 32 nt, Homo Sapiens
cuaguuuuucuuucuguuuccaggugaagggg

SEQ ID NO: 219849 - RNA, 32 nt, Homo Sapiens
gcuucugugguuguggaugggaggcuccuggu

SEQ ID NO: 219850 - RNA, 32 nt, Homo Sapiens
uuguacaauccacaauucauucaccagauauu

SEQ ID NO: 219851 - RNA, 32 nt, Homo Sapiens
gcgcgggucuggagcggagcgcggcggggagu

SEQ ID NO: 219852 - RNA, 32 nt, Homo Sapiens
gguuaucaguuaacauuaacaucuauuauaaa

SEQ ID NO: 219853 - RNA, 32 nt, Homo Sapiens
uauuuauuucuguuuugcucuauucaaagaaa

SEQ ID NO: 219854 - RNA, 32 nt, Homo Sapiens
aaaguaaaauauauuucucuucaaugccugag

SEQ ID NO: 219855 - RNA, 32 nt, Homo Sapiens
acgcugaauaaaugucuuuuuuuuaaugugcu

SEQ ID NO: 219856 - RNA, 32 nt, Homo Sapiens
cacccucuggcacaacucugaggccaccaacc

SEQ ID NO: 219857 - RNA, 32 nt, Homo Sapiens
ggaggaggggagauguuuggggucccuggcca

SEQ ID NO: 219858 - RNA, 32 nt, Homo Sapiens
uuuugagguuguauuugcuuuaccaaaacuug

SEQ ID NO: 219859 - RNA, 32 nt, Homo Sapiens
ccuuaaucuugaauauacuaaucuucagcauu

SEQ ID NO: 219860 - RNA, 32 nt, Homo Sapiens
uccugagaugacuguaacuuauuaaugugacu

SEQ ID NO: 219861 - RNA, 30 nt, Homo Sapiens
uaucucagcgcccugccgccgccgccgcgg

SEQ ID NO: 219862 - RNA, 32 nt, Homo Sapiens
acgaugauccaccuuuuauaauguagauguuu

SEQ ID NO: 219863 - RNA, 32 nt, Homo Sapiens
uuccuugccugccuggguacucaugccaagca

SEQ ID NO: 219864 - RNA, 30 nt, Homo Sapiens
ucuccguggggcggugaacgccgaugauua

SEQ ID NO: 219865 - RNA, 32 nt, Homo Sapiens
uaauuugucuucugcuacacauacaucuuuau

SEQ ID NO: 219866 - RNA, 32 nt, Homo Sapiens
uugcagauccugagguacuccggagacugaca

SEQ ID NO: 219867 - RNA, 32 nt, Homo Sapiens
auauauauuccaauguauuccaagcuaagaaa

SEQ ID NO: 219868 - RNA, 32 nt, Homo Sapiens
uugcccaagaucuguacaaggucggggugucu

SEQ ID NO: 219869 - RNA, 32 nt, Homo Sapiens
agagguuaaggguuugcugugagacggugccc

SEQ ID NO: 219870 - RNA, 30 nt, Homo Sapiens
gagggggcgcccggucgcugccuguaccgc

SEQ ID NO: 219871 - RNA, 32 nt, Homo Sapiens
cgcaaggaaagagagggaagagaggcagccug

SEQ ID NO: 219872 - RNA, 29 nt, Homo Sapiens
ucugacugaggggcggggacgccgucugu

SEQ ID NO: 219873 - RNA, 32 nt, Homo Sapiens
gcaguuuucauggacauagaaaauucaaauag

SEQ ID NO: 219874 - RNA, 32 nt, Homo Sapiens
acgagaagaaggacuggcgccacgcgccgcgc

SEQ ID NO: 219875 - RNA, 32 nt, Homo Sapiens
aggcugagggugggguggcugugagugauguc

SEQ ID NO: 219876 - RNA, 32 nt, Homo Sapiens
agugugugagggggcuccugcugugcugcuga

SEQ ID NO: 219877 - RNA, 32 nt, Homo Sapiens
cuuugcaguaguugcagauuucagucgucgug

SEQ ID NO: 219878 - RNA, 32 nt, Homo Sapiens
gacgcguuuucccgucccguccccgaaguagu

SEQ ID NO: 219879 - RNA, 32 nt, Homo Sapiens
cuguguugcccccagacagguuucuuuuguca

SEQ ID NO: 219880 - RNA, 32 nt, Homo Sapiens
ccaguacauucucaguuuuucuuaauauauag

SEQ ID NO: 219881 - RNA, 32 nt, Homo Sapiens
cgcaccucaccucggucaacccuugcuccguc

SEQ ID NO: 219882 - RNA, 32 nt, Homo Sapiens
gcccuuuuagaggcaggguuugugaaaggcug

SEQ ID NO: 219883 - RNA, 32 nt, Homo Sapiens
ucagggcucccucuggcucccgggucacucuu

SEQ ID NO: 219884 - RNA, 32 nt, Homo Sapiens
auucccaaaguaccucacucaugaaccagaau

SEQ ID NO: 219885 - RNA, 32 nt, Homo Sapiens
agaaugauaaguggaaauuaguccucaaagua

SEQ ID NO: 219886 - RNA, 32 nt, Homo Sapiens
uuuauuuguaaaugucugacuuugcauccagu

SEQ ID NO: 219887 - RNA, 32 nt, Homo Sapiens
acaccugcuguaauuggggugcaugagcuaug

SEQ ID NO: 219888 - RNA, 32 nt, Homo Sapiens
ucccgggccccauugcuuccaugcccggugcu

SEQ ID NO: 219889 - RNA, 32 nt, Homo Sapiens
caagcgauuuuccugcuucaucuucccaggua

SEQ ID NO: 219890 - RNA, 32 nt, Homo Sapiens
uuuguuugaagcuuuucauaacauaauacaag

SEQ ID NO: 219891 - RNA, 32 nt, Homo Sapiens
cuugaaugaugauugggagauuccugaugggc

SEQ ID NO: 219892 - RNA, 29 nt, Homo Sapiens
aaauaauuuacuauaaauaagagaaucca

SEQ ID NO: 219893 - RNA, 32 nt, Homo Sapiens
cauacacauaaugcaucuuccuguucuuucua

SEQ ID NO: 219894 - RNA, 32 nt, Homo Sapiens
cuuuuuauucauuugaggaagauaaggcuaaa

SEQ ID NO: 219895 - RNA, 32 nt, Homo Sapiens
aaggcuaguucuuucuagaccaaaaacacaaa

SEQ ID NO: 219896 - RNA, 32 nt, Homo Sapiens
gagucugcagacggccguggcuccucuguucu

SEQ ID NO: 219897 - RNA, 31 nt, Homo Sapiens
gauuggcucgggugcgguccaagggcagcaa

SEQ ID NO: 219898 - RNA, 32 nt, Homo Sapiens
caaaugggucuucauugccaucgccaccuucc

SEQ ID NO: 219899 - RNA, 32 nt, Homo Sapiens
gcggcauuauucccuauaaggaucugaacgau

SEQ ID NO: 219900 - RNA, 32 nt, Homo Sapiens
aguauaagauguuagauucuguaaucuucaca

SEQ ID NO: 219901 - RNA, 32 nt, Homo Sapiens
ucguugugcacaggaucaacaugauggugacu

SEQ ID NO: 219902 - RNA, 32 nt, Homo Sapiens
ugaacagcccuaauugauacaacuuuauggca

SEQ ID NO: 219903 - RNA, 32 nt, Homo Sapiens
gauucaucuccauggaagaggaacccacuagc

SEQ ID NO: 219904 - RNA, 32 nt, Homo Sapiens
cuaguguucuaauguagcacaaauccuaugua

SEQ ID NO: 219905 - RNA, 32 nt, Homo Sapiens
gccuaguagaaaugggggaaaagcauugcugu

SEQ ID NO: 219906 - RNA, 32 nt, Homo Sapiens
cuguacaacgucaggauucagagguaggcucu

SEQ ID NO: 219907 - RNA, 32 nt, Homo Sapiens
gagaccccaacugucuccauggagaagaacua

SEQ ID NO: 219908 - RNA, 32 nt, Homo Sapiens
agcuacugccuuacugcccggagcgccgucgu

SEQ ID NO: 219909 - RNA, 32 nt, Homo Sapiens
gcgagcuaggaugaggggccaggccgccgccc

SEQ ID NO: 219910 - RNA, 32 nt, Homo Sapiens
aggaucaugcaaacuguggagaucacuaagca

SEQ ID NO: 219911 - RNA, 32 nt, Homo Sapiens
aaaagugagcaaagcagacaucucugcccucc

SEQ ID NO: 219912 - RNA, 32 nt, Homo Sapiens
uuacgcaucuuuccuuuugaguagagaaauua

SEQ ID NO: 219913 - RNA, 32 nt, Homo Sapiens
ucaguauugacccaccaggggaggugggguuu

SEQ ID NO: 219914 - RNA, 32 nt, Homo Sapiens
cccaagcaaucuucccaccucugccuccuaaa

SEQ ID NO: 219915 - RNA, 32 nt, Homo Sapiens
uuuguaacauagaaacgcuuccacuaaaggac

SEQ ID NO: 219916 - RNA, 32 nt, Homo Sapiens
guaggugcugucaucugauccucaucacaacu

SEQ ID NO: 219917 - RNA, 32 nt, Homo Sapiens
cucuugaggagcuuacaauccuggcuggaggc

SEQ ID NO: 219918 - RNA, 32 nt, Homo Sapiens
gacauguuuacagaauaauuuuuuguaucaaa

SEQ ID NO: 219919 - RNA, 32 nt, Homo Sapiens
gcagcucugaagacccaggccucaccuccgcc

SEQ ID NO: 219920 - RNA, 31 nt, Homo Sapiens
cgccuugcacugcgccugccccacggugucc

SEQ ID NO: 219921 - RNA, 32 nt, Homo Sapiens
ucuguuuggggauuuugccucagcuaugggcu

SEQ ID NO: 219922 - RNA, 31 nt, Homo Sapiens
uagaaagcuacggaaccugcaaugcggccgc

SEQ ID NO: 219923 - RNA, 32 nt, Homo Sapiens
gaaucggacuaucaaaaauaguuuagggaaag

SEQ ID NO: 219924 - RNA, 32 nt, Homo Sapiens
accccagcagccaauggaaaaaucacgacuuc

SEQ ID NO: 219925 - RNA, 30 nt, Homo Sapiens
gaggaggcgcccgccaugcccggccugcgg

SEQ ID NO: 219926 - RNA, 32 nt, Homo Sapiens
ccacauagaaauaacaaugcauguauuaccca

SEQ ID NO: 219927 - RNA, 32 nt, Homo Sapiens
uggguuuguugauauaaauguaauaauguuca

SEQ ID NO: 219928 - RNA, 32 nt, Homo Sapiens
uauauuauugugugcauagauacuaccauugu

SEQ ID NO: 219929 - RNA, 32 nt, Homo Sapiens
ucuugguugggguuugcugcugcugugccccc

SEQ ID NO: 219930 - RNA, 32 nt, Homo Sapiens
auggcccaggcgggcugcgguuccuccuuagg

SEQ ID NO: 219931 - RNA, 32 nt, Homo Sapiens
acaucuuggaacucaaucuucuguuggaucac

SEQ ID NO: 219932 - RNA, 32 nt, Homo Sapiens
uugauuauuauuauuauuuuugauccuuuucc

SEQ ID NO: 219933 - RNA, 32 nt, Homo Sapiens
ucuguacauaucugucugguccaucaaauuac

SEQ ID NO: 219934 - RNA, 32 nt, Homo Sapiens
uuuuugucugagauuguucaccagagacaaga

SEQ ID NO: 219935 - RNA, 32 nt, Homo Sapiens
gcaggggcugugggagggccccggggccugca

SEQ ID NO: 219936 - RNA, 32 nt, Homo Sapiens
ugauggguaugucagcagauaccgcaggagcu

SEQ ID NO: 219937 - RNA, 32 nt, Homo Sapiens
agacccucacccaaaggaaccgcuccuugucc

SEQ ID NO: 219938 - RNA, 32 nt, Homo Sapiens
auucuuuuuuuuucuuuuuucuuuuuuuuuuu

SEQ ID NO: 219939 - RNA, 32 nt, Homo Sapiens
gagcccgcgccucuccucugcgccccgccucu

SEQ ID NO: 219940 - RNA, 32 nt, Homo Sapiens
uugagaaacaaaucaaucaugguuucuucuag

SEQ ID NO: 219941 - RNA, 32 nt, Homo Sapiens
gccgcagcugcccggggagggcgaagaggagg

SEQ ID NO: 219942 - RNA, 32 nt, Homo Sapiens
cccgggcguccugagcacuuugcaagagagau

SEQ ID NO: 219943 - RNA, 32 nt, Homo Sapiens
uagauuaggagacaccaaacagagauucagac

SEQ ID NO: 219944 - RNA, 32 nt, Homo Sapiens
uaaggaugcucuucuugcuuuuuauaucugca

SEQ ID NO: 219945 - RNA, 32 nt, Homo Sapiens
uagagcccuaauauaaacaaauguagguacau

SEQ ID NO: 219946 - RNA, 32 nt, Homo Sapiens
uuguauuuccguugguuguuggcacuuuuuuc

SEQ ID NO: 219947 - RNA, 29 nt, Homo Sapiens
aggucggggauggagaggacgcgagcccc

SEQ ID NO: 219948 - RNA, 32 nt, Homo Sapiens
gcauuuccggugccgacggagccgggccggaa

SEQ ID NO: 219949 - RNA, 32 nt, Homo Sapiens
aauugaggccuggccucugcugugggugaauu

SEQ ID NO: 219950 - RNA, 32 nt, Homo Sapiens
ccuaaccgggguccggcggucuggccuaggga

SEQ ID NO: 219951 - RNA, 32 nt, Homo Sapiens
ggagcagggccacugaauuugcuguaaucugg

SEQ ID NO: 219952 - RNA, 32 nt, Homo Sapiens
acucaaguuuugcaugaaucacaaagcagaau

SEQ ID NO: 219953 - RNA, 32 nt, Homo Sapiens
acaagaaugcaaacaucaaacagauacucgcu

SEQ ID NO: 219954 - RNA, 32 nt, Homo Sapiens
acagagagagacugagggagagacucugagga

SEQ ID NO: 219955 - RNA, 32 nt, Homo Sapiens
uuugggagauaaagcacgcuaagagcucugga

SEQ ID NO: 219956 - RNA, 32 nt, Homo Sapiens
aaauuagcuggguguggugguaugugccugua

SEQ ID NO: 219957 - RNA, 32 nt, Homo Sapiens
aguccugaucagagccgugguccuuuggggug

SEQ ID NO: 219958 - RNA, 32 nt, Homo Sapiens
acccaagaacagacaucucccaguguugcauu

SEQ ID NO: 219959 - RNA, 32 nt, Homo Sapiens
gaaggccuuugcuucuugcacccaggcccagc

SEQ ID NO: 219960 - RNA, 32 nt, Homo Sapiens
guccuugacgugcugaaagacggaguagaaug

SEQ ID NO: 219961 - RNA, 32 nt, Homo Sapiens
gcguucuucacccccacccccacccccacccc

SEQ ID NO: 219962 - RNA, 32 nt, Homo Sapiens
uucuucccagagccgcgcugccugcagugcgc

SEQ ID NO: 219963 - RNA, 32 nt, Homo Sapiens
aaacagaaagaaaaaauguaucaucuaaagga

SEQ ID NO: 219964 - RNA, 32 nt, Homo Sapiens
cggcgccucggccgccagcagauggccgcgcg

SEQ ID NO: 219965 - RNA, 32 nt, Homo Sapiens
ccugcccugcugcugcugccgccccgcuacag

SEQ ID NO: 219966 - RNA, 32 nt, Homo Sapiens
cuugcugcccaggggagggauaugucuuccuu

SEQ ID NO: 219967 - RNA, 32 nt, Homo Sapiens
aacugagcuaacauuugcaaagggccuggggc

SEQ ID NO: 219968 - RNA, 32 nt, Homo Sapiens
acaggaucaaggaauuaggguggucuacuuga

SEQ ID NO: 219969 - RNA, 32 nt, Homo Sapiens
uguauauuauuguaaauagaaaugaccacauc

SEQ ID NO: 219970 - RNA, 32 nt, Homo Sapiens
uuaaauaguuagagaucucugauaaaaacuuu

SEQ ID NO: 219971 - RNA, 32 nt, Homo Sapiens
accgcguccaccucacaggugcgccaggacua

SEQ ID NO: 219972 - RNA, 32 nt, Homo Sapiens
cgccugagacagcuggccugaccuccaaauca

SEQ ID NO: 219973 - RNA, 32 nt, Homo Sapiens
uggggugagguaguuggcauaggcuuaucugu

SEQ ID NO: 219974 - RNA, 26 nt, Homo Sapiens
caugccaagccaacagaagaaaauca

SEQ ID NO: 219975 - RNA, 32 nt, Homo Sapiens
aaacuguuuuacauuccuuucauuuuauuaug

SEQ ID NO: 219976 - RNA, 32 nt, Homo Sapiens
auuauauuuauauuucugaacucaguacaugu

SEQ ID NO: 219977 - RNA, 32 nt, Homo Sapiens
caccuguaaucucagcacuuuggguggucaag

SEQ ID NO: 219978 - RNA, 30 nt, Homo Sapiens
ggaaguggguuggauggcggcaggacugau

SEQ ID NO: 219979 - RNA, 30 nt, Homo Sapiens
uguugcggcuccggcggcggcggagacuag

SEQ ID NO: 219980 - RNA, 32 nt, Homo Sapiens
gacauuguuuuugucuuguaggauuugcucuu

SEQ ID NO: 219981 - RNA, 32 nt, Homo Sapiens
gaagggaauaagcuccuuggggugcugcugga

SEQ ID NO: 219982 - RNA, 32 nt, Homo Sapiens
uuguacauuauuuaugugauuguuauggaauu

SEQ ID NO: 219983 - RNA, 32 nt, Homo Sapiens
uucccaucucaaaauuauaucuguaccugggu

SEQ ID NO: 219984 - RNA, 32 nt, Homo Sapiens
agacugaaggauuucucaggcuguggacauuu

SEQ ID NO: 219985 - RNA, 32 nt, Homo Sapiens
ucucuuccugguuccccuuaaucuuuauccac

SEQ ID NO: 219986 - RNA, 32 nt, Homo Sapiens
gagagaccaagcauggguagcugccaucugca

SEQ ID NO: 219987 - RNA, 32 nt, Homo Sapiens
uuuauuuauuggggagacacuaacccuucaaa

SEQ ID NO: 219988 - RNA, 32 nt, Homo Sapiens
gacuaaauucagacgacccaucucagaauggu

SEQ ID NO: 219989 - RNA, 32 nt, Homo Sapiens
gagaauacgaggggcagguaagcccccucccg

SEQ ID NO: 219990 - RNA, 32 nt, Homo Sapiens
gucacaaagggacuuuggaaaacuacuuuuug

SEQ ID NO: 219991 - RNA, 32 nt, Homo Sapiens
cccgcgugccccagcgcccuuccgcuccuggc

SEQ ID NO: 219992 - RNA, 32 nt, Homo Sapiens
ucccaugggcagagacccacugucguuccccg

SEQ ID NO: 219993 - RNA, 32 nt, Homo Sapiens
accuuccccccgccucugucuggagccccauc

SEQ ID NO: 219994 - RNA, 32 nt, Homo Sapiens
ugaaaguuguacaugaaauuuuuguaaaucac

SEQ ID NO: 219995 - RNA, 32 nt, Homo Sapiens
uuauaggugugagccacagcacccagccaaaa

SEQ ID NO: 219996 - RNA, 32 nt, Homo Sapiens
uuugauuuuuaaaaaccugucugaauuucaca

SEQ ID NO: 219997 - RNA, 32 nt, Homo Sapiens
gagacaauccugccccgccgccgggauaauca

SEQ ID NO: 219998 - RNA, 32 nt, Homo Sapiens
gguuuuugccccauuuuacagaauaguaaacu

SEQ ID NO: 219999 - RNA, 27 nt, Homo Sapiens
gaagaaaaguaguucugguauguuuca

SEQ ID NO: 220000 - RNA, 32 nt, Homo Sapiens
uugucagcuuuagucugacauaaucuaagggu

SEQ ID NO: 220001 - RNA, 32 nt, Homo Sapiens
cccaggcccagcugagacaggccccugagucc

SEQ ID NO: 220002 - RNA, 32 nt, Homo Sapiens
ugugaauuaaaaguuaugugauuggugucaaa

SEQ ID NO: 220003 - RNA, 32 nt, Homo Sapiens
aguuguuaauaaaaguacauguuaaacuuacu

SEQ ID NO: 220004 - RNA, 32 nt, Homo Sapiens
acgccuacuggcccgcgcugcccccaccgcgc

SEQ ID NO: 220005 - RNA, 32 nt, Homo Sapiens
uccugaagggcgccagcuuuagccucagagcc

SEQ ID NO: 220006 - RNA, 32 nt, Homo Sapiens
auauuccuccugagaugcaaccucaagucuua

SEQ ID NO: 220007 - RNA, 32 nt, Homo Sapiens
auuuuaacugggauaaauguuuuuguaaaaau

SEQ ID NO: 220008 - RNA, 32 nt, Homo Sapiens
accugugggaccgcgggucuuagucacggcgg

SEQ ID NO: 220009 - RNA, 32 nt, Homo Sapiens
aguggauugaguuuggggguagcuccaagccu

SEQ ID NO: 220010 - RNA, 32 nt, Homo Sapiens
uuugacaggaccagcucuugccucauggcagc

SEQ ID NO: 220011 - RNA, 32 nt, Homo Sapiens
ugauguaaauguuuacgcaggagugcugggau

SEQ ID NO: 220012 - RNA, 32 nt, Homo Sapiens
caccaggcucucaagagcuccacacauugagu

SEQ ID NO: 220013 - RNA, 32 nt, Homo Sapiens
uagucuguguaguuaauuuaauuugcaguuug

SEQ ID NO: 220014 - RNA, 32 nt, Homo Sapiens
uucucuugccuuagccucccaaguagcuggga

SEQ ID NO: 220015 - RNA, 32 nt, Homo Sapiens
uacuggguagguucugaacagcagaaacccau

SEQ ID NO: 220016 - RNA, 32 nt, Homo Sapiens
ucccccugccagccgcacugucccaggcccag

SEQ ID NO: 220017 - RNA, 32 nt, Homo Sapiens
ugucucccggacgaggaccucaaccccuuccc

SEQ ID NO: 220018 - RNA, 30 nt, Homo Sapiens
gcagcaggcaggcggcgggcgcucagacgg

SEQ ID NO: 220019 - RNA, 32 nt, Homo Sapiens
gcccggugcaggagguggcucaguuauugaac

SEQ ID NO: 220020 - RNA, 32 nt, Homo Sapiens
cagagagccaggaaacaagaggaaggguuugg

SEQ ID NO: 220021 - RNA, 32 nt, Homo Sapiens
ugcugcaggcaugaggcuucucucucaacauc

SEQ ID NO: 220022 - RNA, 30 nt, Homo Sapiens
ugcgccgcgcgcccuccgccggcgccaaca

SEQ ID NO: 220023 - RNA, 32 nt, Homo Sapiens
guauuucccccuccuaaugacagaggaaacug

SEQ ID NO: 220024 - RNA, 32 nt, Homo Sapiens
ugcucaggcucaggcucugguuucgagcgggc

SEQ ID NO: 220025 - RNA, 32 nt, Homo Sapiens
uauuuaaagcaaauauaaaucauagaugaagu

SEQ ID NO: 220026 - RNA, 32 nt, Homo Sapiens
uuaaucgcacuguuucuaauucuuuuuacaca

SEQ ID NO: 220027 - RNA, 32 nt, Homo Sapiens
uucacuuaaacuuugucacuucugcuguacag

SEQ ID NO: 220028 - RNA, 32 nt, Homo Sapiens
uaauuuuuucguagagaugaggucuugcuaug

SEQ ID NO: 220029 - RNA, 32 nt, Homo Sapiens
ugaugccacugucuccucuccaucccgcccag

SEQ ID NO: 220030 - RNA, 32 nt, Homo Sapiens
uauugagggcuucagcugcugcuauuaugaug

SEQ ID NO: 220031 - RNA, 32 nt, Homo Sapiens
aucuuucucucuggccucuccauccuccagac

SEQ ID NO: 220032 - RNA, 32 nt, Homo Sapiens
gguucuaggcuuccgaaguaaaauuggaugug

SEQ ID NO: 220033 - RNA, 32 nt, Homo Sapiens
cgcuguccacugccucucuccuccccucccug

SEQ ID NO: 220034 - RNA, 32 nt, Homo Sapiens
cuggucggucggcaauggaggguggcuggcuu

SEQ ID NO: 220035 - RNA, 32 nt, Homo Sapiens
ugugaugcucuggggcuucuguggccaagccc

SEQ ID NO: 220036 - RNA, 32 nt, Homo Sapiens
ggugcugcugccgcugccgccggggaggaggu

SEQ ID NO: 220037 - RNA, 32 nt, Homo Sapiens
aaaccgcagagcggcaggcgcggccgcugguu

SEQ ID NO: 220038 - RNA, 32 nt, Homo Sapiens
auggcuagugauguauaaaauaaaauauucuu

SEQ ID NO: 220039 - RNA, 32 nt, Homo Sapiens
ccuaguuuucuuuucggccagaggccggagac

SEQ ID NO: 220040 - RNA, 32 nt, Homo Sapiens
guucugguggauucacauuugcugaugcuggu

SEQ ID NO: 220041 - RNA, 32 nt, Homo Sapiens
ugaauucacuacugaucccaucgccuggccga

SEQ ID NO: 220042 - RNA, 32 nt, Homo Sapiens
ggggagaccaaguuugaucuugccgagagauc

SEQ ID NO: 220043 - RNA, 32 nt, Homo Sapiens
cgggcuccaaccccaccugaccaagcccggga

SEQ ID NO: 220044 - RNA, 32 nt, Homo Sapiens
auuacagaugacccaaugccauuacagaaauu

SEQ ID NO: 220045 - RNA, 32 nt, Homo Sapiens
agcuugcugcguccuaucucggucacugaugu

SEQ ID NO: 220046 - RNA, 32 nt, Homo Sapiens
cagaaauaauguuuuaccaucucuucaccagu

SEQ ID NO: 220047 - RNA, 32 nt, Homo Sapiens
gagcgugugcgcuccagcccagcccgcugcuc

SEQ ID NO: 220048 - RNA, 32 nt, Homo Sapiens
gguucuggacagaaauaguuccaauuaaguac

SEQ ID NO: 220049 - RNA, 32 nt, Homo Sapiens
uguuuuuguccucauucuguacagaaauuugu

SEQ ID NO: 220050 - RNA, 32 nt, Homo Sapiens
cccugaauuggccacugauuucaauucugcag

SEQ ID NO: 220051 - RNA, 32 nt, Homo Sapiens
guuuauuuucuuuaguguauaaguaaggguuu

SEQ ID NO: 220052 - RNA, 32 nt, Homo Sapiens
cgcuuguagacuauuucguguuauagaaggug

SEQ ID NO: 220053 - RNA, 32 nt, Homo Sapiens
cuuuaagaauguggggccuuuuuuaugauuuu

SEQ ID NO: 220054 - RNA, 28 nt, Homo Sapiens
uggaaaguuacagguucauuuuagaaag

SEQ ID NO: 220055 - RNA, 32 nt, Homo Sapiens
cgugggagacugggcugugggguaccggcccg

SEQ ID NO: 220056 - RNA, 32 nt, Homo Sapiens
cauccaugugauuaagauccaggccgcugaag

SEQ ID NO: 220057 - RNA, 32 nt, Homo Sapiens
augagcucauuaguaaaaaugacuucacccac

SEQ ID NO: 220058 - RNA, 32 nt, Homo Sapiens
ugaugagaauuuacgucugcaaucuagaugca

SEQ ID NO: 220059 - RNA, 32 nt, Homo Sapiens
gggaggggcugacagcagcagccggcuguuug

SEQ ID NO: 220060 - RNA, 32 nt, Homo Sapiens
auucuaccaacacaacaauaagcguguugcag

SEQ ID NO: 220061 - RNA, 32 nt, Homo Sapiens
cagguccgagccccuggacagcagccccaggc

SEQ ID NO: 220062 - RNA, 32 nt, Homo Sapiens
uggauggucauguuuuuucuccuccguuuccc

SEQ ID NO: 220063 - RNA, 32 nt, Homo Sapiens
ccaguuuaggguugggaaauaaaggauaggga

SEQ ID NO: 220064 - RNA, 32 nt, Homo Sapiens
gagagcggcgcucggcgggcgcgcccuccuga

SEQ ID NO: 220065 - RNA, 32 nt, Homo Sapiens
uugaacagauuguagcuuuaaaaaauacacag

SEQ ID NO: 220066 - RNA, 32 nt, Homo Sapiens
uguugaguguauuucauuuguauuuuaguuug

SEQ ID NO: 220067 - RNA, 32 nt, Homo Sapiens
accugccccagagcuucucaagggaggguaag

SEQ ID NO: 220068 - RNA, 32 nt, Homo Sapiens
gcaguucugaauuuuggguuaaagguuuuggc

SEQ ID NO: 220069 - RNA, 32 nt, Homo Sapiens
uuuuauuauuuuucucuucuuuuaagucaguc

SEQ ID NO: 220070 - RNA, 32 nt, Homo Sapiens
ggguucgcguccuggguugcgugcauucgugg

SEQ ID NO: 220071 - RNA, 29 nt, Homo Sapiens
cugcugggacgucugacuccaguuccuuc

SEQ ID NO: 220072 - RNA, 32 nt, Homo Sapiens
aggacggagcggggacaggaaagggaauucca

SEQ ID NO: 220073 - RNA, 32 nt, Homo Sapiens
ugggcaucugcacuugaauaucuuuuuggcac

SEQ ID NO: 220074 - RNA, 32 nt, Homo Sapiens
cauuuuaauuuaauguagugaagaaagacaau

SEQ ID NO: 220075 - RNA, 32 nt, Homo Sapiens
ucaagguucguuucaagcaguuggcuuguggg

SEQ ID NO: 220076 - RNA, 31 nt, Homo Sapiens
ccaugucggcucugccugcagugaccagugc

SEQ ID NO: 220077 - RNA, 32 nt, Homo Sapiens
uuaagaggcaaauuauuaauuaaaaaugggcc

SEQ ID NO: 220078 - RNA, 32 nt, Homo Sapiens
gcgcggcggcgguggcaucugcggccauggcg

SEQ ID NO: 220079 - RNA, 32 nt, Homo Sapiens
cagugaugugcaacagggucgggggccugcuu

SEQ ID NO: 220080 - RNA, 32 nt, Homo Sapiens
ugccaaccccacaccccuccacuuccagucgc

SEQ ID NO: 220081 - RNA, 32 nt, Homo Sapiens
ccagagagccccaccaaaccuacgucaagauu

SEQ ID NO: 220082 - RNA, 32 nt, Homo Sapiens
gccugcgcccgcaguuugcgccgcccgacaca

SEQ ID NO: 220083 - RNA, 31 nt, Homo Sapiens
uuuccucccacuuagacucaaacacauuuua

SEQ ID NO: 220084 - RNA, 30 nt, Homo Sapiens
ucuuuggauaaaagacuuagaugcacccug

SEQ ID NO: 220085 - RNA, 32 nt, Homo Sapiens
caagucuaggguggugaguuccugcuaggcaa

SEQ ID NO: 220086 - RNA, 32 nt, Homo Sapiens
augugggggauuggcuuaggccuggucuggcu

SEQ ID NO: 220087 - RNA, 32 nt, Homo Sapiens
auaugaagauaaacaugaauuuauauuuaacu

SEQ ID NO: 220088 - RNA, 32 nt, Homo Sapiens
aguuuguguucucuccuuuucucucuuugccu

SEQ ID NO: 220089 - RNA, 32 nt, Homo Sapiens
aggccagcuacagaauuguccaaacaaacauu

SEQ ID NO: 220090 - RNA, 32 nt, Homo Sapiens
gggacuggggcaaccgggcaguuuucaccaug

SEQ ID NO: 220091 - RNA, 29 nt, Homo Sapiens
uuuuccauauguauauaguaaaauauguu

SEQ ID NO: 220092 - RNA, 32 nt, Homo Sapiens
uuuuauuuuaucaacuuuuucucuuaguuacu

SEQ ID NO: 220093 - RNA, 32 nt, Homo Sapiens
cucagguuguggugcagggaaccuggccugag

SEQ ID NO: 220094 - RNA, 32 nt, Homo Sapiens
ccgagcaauauuuaggaugcaacacgcauggu

SEQ ID NO: 220095 - RNA, 32 nt, Homo Sapiens
cgcgggccacgcugcuggcuggccugaccuag

SEQ ID NO: 220096 - RNA, 30 nt, Homo Sapiens
agcaagcaaguuggcaugcaugagauauag

SEQ ID NO: 220097 - RNA, 32 nt, Homo Sapiens
guagaccugucuccuggcgguuccucguucuc

SEQ ID NO: 220098 - RNA, 32 nt, Homo Sapiens
cucgaagguggagaggcucaggguuggaacag

SEQ ID NO: 220099 - RNA, 32 nt, Homo Sapiens
uuuuucuuucauuaguuuuucauucaguugua

SEQ ID NO: 220100 - RNA, 32 nt, Homo Sapiens
ucagggaucgacugaggcucugagcuaacugg

SEQ ID NO: 220101 - RNA, 32 nt, Homo Sapiens
uccuccugcugcuuccgcuccucccgcagccg

SEQ ID NO: 220102 - RNA, 32 nt, Homo Sapiens
gcgccuugcgggggcgggaucccggcgcccua

SEQ ID NO: 220103 - RNA, 32 nt, Homo Sapiens
accuuagggaacaagaggcaucacucaguccu

SEQ ID NO: 220104 - RNA, 32 nt, Homo Sapiens
agccauuuucaaucccuguauuuuuucaacaa

SEQ ID NO: 220105 - RNA, 32 nt, Homo Sapiens
cuuucuuauagcacuuacuaagaagggaaucc

SEQ ID NO: 220106 - RNA, 32 nt, Homo Sapiens
cucaacuuaugauggguuuagguccagauaag

SEQ ID NO: 220107 - RNA, 32 nt, Homo Sapiens
uugguugugauuuaaacuuaugcuauaaacua

SEQ ID NO: 220108 - RNA, 32 nt, Homo Sapiens
ccugugggagccucgcaacccgugccaagucc

SEQ ID NO: 220109 - RNA, 32 nt, Homo Sapiens
gcauguucagggaucagcacuacugugcuucu

SEQ ID NO: 220110 - RNA, 32 nt, Homo Sapiens
uacuccuucccagcugagauguggguacaggu

SEQ ID NO: 220111 - RNA, 32 nt, Homo Sapiens
ccucuuagcacaagaggcccaggcccuggccu

SEQ ID NO: 220112 - RNA, 32 nt, Homo Sapiens
aaaguccacuaaauaaacacuacucaaguaca

SEQ ID NO: 220113 - RNA, 32 nt, Homo Sapiens
guuaccgggucuuuuuaguguagccauggaag

SEQ ID NO: 220114 - RNA, 32 nt, Homo Sapiens
gauaauucaaccaucuaaucaaaauggaucug

SEQ ID NO: 220115 - RNA, 32 nt, Homo Sapiens
cccccuccaaauaucuguauucuuucaaauuu

SEQ ID NO: 220116 - RNA, 32 nt, Homo Sapiens
ggaccugugccccgcgcuucagcccuccccgc

SEQ ID NO: 220117 - RNA, 32 nt, Homo Sapiens
cggcgagccuccagcccucuccuacuuugauc

SEQ ID NO: 220118 - RNA, 32 nt, Homo Sapiens
gcugccuacccuuuucucuccucugguucuca

SEQ ID NO: 220119 - RNA, 32 nt, Homo Sapiens
ggugcuaucuacuuuucucucuaggauuuaga

SEQ ID NO: 220120 - RNA, 32 nt, Homo Sapiens
agcugaauuguagaaccgcauuuauacucugu

SEQ ID NO: 220121 - RNA, 32 nt, Homo Sapiens
agccgcccacccgggggcgcucuccggacccc

SEQ ID NO: 220122 - RNA, 32 nt, Homo Sapiens
ucucaguugcagcagagaagccccuggcaccc

SEQ ID NO: 220123 - RNA, 32 nt, Homo Sapiens
cagagaggacaaaauaaagugugugugcaggg

SEQ ID NO: 220124 - RNA, 32 nt, Homo Sapiens
gcgcagcuccggccgccuggcuccccauacua

SEQ ID NO: 220125 - RNA, 32 nt, Homo Sapiens
ggaaccuagccuguuuugggggguaggaccca

SEQ ID NO: 220126 - RNA, 32 nt, Homo Sapiens
gugcauguggccagggcggggccguggacagg

SEQ ID NO: 220127 - RNA, 32 nt, Homo Sapiens
gcaccaaccguaucauuauuuguuugaggaaa

SEQ ID NO: 220128 - RNA, 32 nt, Homo Sapiens
ucaaaacaacaacaaaaaaauuccuagaaaga

SEQ ID NO: 220129 - RNA, 32 nt, Homo Sapiens
uuuuuggagcuacuaacuuguauuuauuauug

SEQ ID NO: 220130 - RNA, 32 nt, Homo Sapiens
uaaauuugaaacaaagaccgaucuguguaaaa

SEQ ID NO: 220131 - RNA, 32 nt, Homo Sapiens
ucuugggaagcagcuuccugggagauuagaaa

SEQ ID NO: 220132 - RNA, 32 nt, Homo Sapiens
ucugcaucagagauuggugccaacguaauaau

SEQ ID NO: 220133 - RNA, 32 nt, Homo Sapiens
uaccgggcgggggcucggggcucggccuccua

SEQ ID NO: 220134 - RNA, 32 nt, Homo Sapiens
guuugcaugcuucgugccacacgcccgcggug

SEQ ID NO: 220135 - RNA, 32 nt, Homo Sapiens
cacaguggcgagaggagaggaaaaacgaucgc

SEQ ID NO: 220136 - RNA, 32 nt, Homo Sapiens
gauugcccagauggcaagagguccugggcucc

SEQ ID NO: 220137 - RNA, 32 nt, Homo Sapiens
aucgagccccagcgcccggcccgcagccugcg

SEQ ID NO: 220138 - RNA, 32 nt, Homo Sapiens
agcugccgaugaggugugugcacuugaggaga

SEQ ID NO: 220139 - RNA, 32 nt, Homo Sapiens
gccuggccucaacuguugcuucuuauaaaggu

SEQ ID NO: 220140 - RNA, 32 nt, Homo Sapiens
gggagugggcgcagugcgcugcugccacugag

SEQ ID NO: 220141 - RNA, 32 nt, Homo Sapiens
gcagcuacaucaugcuuuuaguguuggagugu

SEQ ID NO: 220142 - RNA, 32 nt, Homo Sapiens
ccuuuuguuuuacuguauauaaaauuguuaau

SEQ ID NO: 220143 - RNA, 32 nt, Homo Sapiens
ggcaaggcgggaacaccaucuauuguuggggu

SEQ ID NO: 220144 - RNA, 32 nt, Homo Sapiens
gcagauuugaaauaaacuuuuaguaaauguaa

SEQ ID NO: 220145 - RNA, 32 nt, Homo Sapiens
ugcuuuuguauucauuguauuaaaagaaucug

SEQ ID NO: 220146 - RNA, 32 nt, Homo Sapiens
uucuucgaccuggccuggcggcugcgcaugaa

SEQ ID NO: 220147 - RNA, 32 nt, Homo Sapiens
cccaggagcccccagcuauccaaacaacuaca

SEQ ID NO: 220148 - RNA, 32 nt, Homo Sapiens
uuauuguuguacaccaaagaaaugaaaacaga

SEQ ID NO: 220149 - RNA, 32 nt, Homo Sapiens
uguguuuugucuuuuucuuaaauauuauguga

SEQ ID NO: 220150 - RNA, 32 nt, Homo Sapiens
ggaccacucggacccccaccccugcccgccaa

SEQ ID NO: 220151 - RNA, 32 nt, Homo Sapiens
gacagcagcugauuacaagauuuuaggugguu

SEQ ID NO: 220152 - RNA, 32 nt, Homo Sapiens
aguguguaauuugaggaagcaguugggcccug

SEQ ID NO: 220153 - RNA, 32 nt, Homo Sapiens
uucccaaguuccuuuuuccucuuuuccaaucc

SEQ ID NO: 220154 - RNA, 32 nt, Homo Sapiens
cuggcgccaugccccaggcccagucugggccg

SEQ ID NO: 220155 - RNA, 32 nt, Homo Sapiens
ccucacaagagcaucagccuucuagaaucgga

SEQ ID NO: 220156 - RNA, 32 nt, Homo Sapiens
auacuggagagaaacccuaugauugugaaaaa

SEQ ID NO: 220157 - RNA, 32 nt, Homo Sapiens
uacacgagaaaacccagcuuucaucuuuuguc

SEQ ID NO: 220158 - RNA, 32 nt, Homo Sapiens
uggcgcgggccucggcgaagcacuuccgucag

SEQ ID NO: 220159 - RNA, 32 nt, Homo Sapiens
uguaaggacccccugcccuuaguggagagcug

SEQ ID NO: 220160 - RNA, 32 nt, Homo Sapiens
uacauugaacaaaagaaaaaaguugcauucac

SEQ ID NO: 220161 - RNA, 32 nt, Homo Sapiens
gacuaacugugagcuacuaacacggguggaag

SEQ ID NO: 220162 - RNA, 32 nt, Homo Sapiens
caacaaggugggcuggacacccgcccaccugg

SEQ ID NO: 220163 - RNA, 30 nt, Homo Sapiens
uauuuuugcugugcugugcaagguaacucu

SEQ ID NO: 220164 - RNA, 32 nt, Homo Sapiens
acagugugaagacacugugcaggcccaggcag

SEQ ID NO: 220165 - RNA, 32 nt, Homo Sapiens
gucauauaaccaaaauccagaccuuauccaca

SEQ ID NO: 220166 - RNA, 32 nt, Homo Sapiens
gaggcuccaucccacacuguucacccaggcug

SEQ ID NO: 220167 - RNA, 32 nt, Homo Sapiens
accuagccagaagagauaauagaggugaaaac

SEQ ID NO: 220168 - RNA, 32 nt, Homo Sapiens
gcagauggugccuuugugggugcagggcuuuu

SEQ ID NO: 220169 - RNA, 32 nt, Homo Sapiens
guggcugcucccagcccaacuuggcuaucaag

SEQ ID NO: 220170 - RNA, 32 nt, Homo Sapiens
gccuuuaaaaaggaggaaauccugucauuucu

SEQ ID NO: 220171 - RNA, 32 nt, Homo Sapiens
agccggcgaccgccccaccuccucccucccuc

SEQ ID NO: 220172 - RNA, 32 nt, Homo Sapiens
auugucaaccucagcacaacaggcuggcgcca

SEQ ID NO: 220173 - RNA, 32 nt, Homo Sapiens
acccuaaaaucuuguuauguccuaaaauucua

SEQ ID NO: 220174 - RNA, 32 nt, Homo Sapiens
ggcgaagagaggggcguggggaggcuggaaag

SEQ ID NO: 220175 - RNA, 32 nt, Homo Sapiens
ccagaggugcaagaagcagcgacugcagcagc

SEQ ID NO: 220176 - RNA, 32 nt, Homo Sapiens
agaggauggaaguauuaaggauuuuguaacac

SEQ ID NO: 220177 - RNA, 32 nt, Homo Sapiens
gauacgcaccuggaaacaaaaggacuauggaa

SEQ ID NO: 220178 - RNA, 32 nt, Homo Sapiens
cuuccuuuaagugaaaagaugggaagaaaaca

SEQ ID NO: 220179 - RNA, 32 nt, Homo Sapiens
uuuaaagugaaauguaucuuucaacuguuuag

SEQ ID NO: 220180 - RNA, 32 nt, Homo Sapiens
ccucccauuuccccucaccuguacccacaccu

SEQ ID NO: 220181 - RNA, 32 nt, Homo Sapiens
gggugagaaggaacuuuuuucgacaacucuua

SEQ ID NO: 220182 - RNA, 32 nt, Homo Sapiens
cagaaguugaagcacaaccacuguagcaaaau

SEQ ID NO: 220183 - RNA, 32 nt, Homo Sapiens
ccuugaggcagagcaagauacgaugaucaggg

SEQ ID NO: 220184 - RNA, 32 nt, Homo Sapiens
ggucaaccaugguaacaauaguucuuagcuuu

SEQ ID NO: 220185 - RNA, 32 nt, Homo Sapiens
guuucccacuuuucuuuuuacauuaaugcaua

SEQ ID NO: 220186 - RNA, 32 nt, Homo Sapiens
gcaguuuuggagccagaagugcucuccgugca

SEQ ID NO: 220187 - RNA, 32 nt, Homo Sapiens
auggacuggaacaaucauguccagaggggucu

SEQ ID NO: 220188 - RNA, 32 nt, Homo Sapiens
aaaacccguacauauuugauguguaaugcagg

SEQ ID NO: 220189 - RNA, 32 nt, Homo Sapiens
agguuuuccuucccuuccuuuuuccccaaggu

SEQ ID NO: 220190 - RNA, 32 nt, Homo Sapiens
cacagugccucugcaacagccauugcccucag

SEQ ID NO: 220191 - RNA, 32 nt, Homo Sapiens
uuuguauaaacacuaacauuuuccccuucugu

SEQ ID NO: 220192 - RNA, 32 nt, Homo Sapiens
cuguaggcuuguaaauacccgccccgccaaac

SEQ ID NO: 220193 - RNA, 32 nt, Homo Sapiens
gaggcugagggcgcuggucagagcccucccau

SEQ ID NO: 220194 - RNA, 32 nt, Homo Sapiens
ggacguggcggcccgcgccgggcugagucacc

SEQ ID NO: 220195 - RNA, 32 nt, Homo Sapiens
ucacaaaugugcugagagcauuacuguguagc

SEQ ID NO: 220196 - RNA, 32 nt, Homo Sapiens
uuuaagguuccacagcauuaugucuuuaauug

SEQ ID NO: 220197 - RNA, 32 nt, Homo Sapiens
ggggugcgcuggcugucgggggcugggcaugu

SEQ ID NO: 220198 - RNA, 32 nt, Homo Sapiens
agccugggauuaggccucaucaucauccagca

SEQ ID NO: 220199 - RNA, 32 nt, Homo Sapiens
cuauuuuugucuccaucuuuuuuacacacagu

SEQ ID NO: 220200 - RNA, 32 nt, Homo Sapiens
caagacucugaacauacuaccuucacacucgg

SEQ ID NO: 220201 - RNA, 32 nt, Homo Sapiens
aaaauuacuggaaagcacuggaagauguagau

SEQ ID NO: 220202 - RNA, 32 nt, Homo Sapiens
cucccaccugucugcauagaaaggcagaauua

SEQ ID NO: 220203 - RNA, 32 nt, Homo Sapiens
cuuuaccuuagcaaauucuuuaucuuucaaaa

SEQ ID NO: 220204 - RNA, 32 nt, Homo Sapiens
accgauguccauuugggaccagauguccaacu

SEQ ID NO: 220205 - RNA, 32 nt, Homo Sapiens
aaucaagucaaucccccauccucacacccacu

SEQ ID NO: 220206 - RNA, 32 nt, Homo Sapiens
guccuccugggcucccugcgaccgcuccugug

SEQ ID NO: 220207 - RNA, 32 nt, Homo Sapiens
cucaguagaaaagaaucuaagggaagaucacu

SEQ ID NO: 220208 - RNA, 32 nt, Homo Sapiens
gcaucuccgcgaucuccucuccccuccaaucc

SEQ ID NO: 220209 - RNA, 32 nt, Homo Sapiens
auugcccaaugaagucgaugacaacugugaua

SEQ ID NO: 220210 - RNA, 32 nt, Homo Sapiens
aauuggagaguaaaaacugaauggaagguuug

SEQ ID NO: 220211 - RNA, 32 nt, Homo Sapiens
ugaaggugguggcggcagaggaggagggcagc

SEQ ID NO: 220212 - RNA, 32 nt, Homo Sapiens
agauggguuuguggaaugggcugagggugggg

SEQ ID NO: 220213 - RNA, 32 nt, Homo Sapiens
uacugucacaguggaguuuaucuuacagaauu

SEQ ID NO: 220214 - RNA, 32 nt, Homo Sapiens
ugcugcaccagcaccucuugcuccacaucucc

SEQ ID NO: 220215 - RNA, 32 nt, Homo Sapiens
uuagaaaaagugaaauaaaaauacuucaaaag

SEQ ID NO: 220216 - RNA, 32 nt, Homo Sapiens
aauauuuuucuaauggaaauaaaauaggcaga

SEQ ID NO: 220217 - RNA, 32 nt, Homo Sapiens
cucuucucccuucuccucccuuagcccuugga

SEQ ID NO: 220218 - RNA, 32 nt, Homo Sapiens
auuguaugggauuuauaccaaauuauguauuu

SEQ ID NO: 220219 - RNA, 32 nt, Homo Sapiens
guucugcuuuuccagaauucugcccuuuccaa

SEQ ID NO: 220220 - RNA, 32 nt, Homo Sapiens
gagcucccaagccccugcccgccacaucugca

SEQ ID NO: 220221 - RNA, 32 nt, Homo Sapiens
agccagccccagcgccuggugcugcagucuua

SEQ ID NO: 220222 - RNA, 29 nt, Homo Sapiens
cagaaggcuggagcagggacgccgucgcu

SEQ ID NO: 220223 - RNA, 32 nt, Homo Sapiens
uucaaggagaaccacaagccacugcuuaagga

SEQ ID NO: 220224 - RNA, 32 nt, Homo Sapiens
auauuguaauccuagcacuuugggaggccaag

SEQ ID NO: 220225 - RNA, 32 nt, Homo Sapiens
caagugaaguuguaaacuuaugguucaacucu

SEQ ID NO: 220226 - RNA, 32 nt, Homo Sapiens
acucacugcucgccgggcgccguccgccagcu

SEQ ID NO: 220227 - RNA, 27 nt, Homo Sapiens
cggguuuauuaauucuucuguguuucu

SEQ ID NO: 220228 - RNA, 32 nt, Homo Sapiens
ugcuguguguggaauugcuaaaggucaagaua

SEQ ID NO: 220229 - RNA, 32 nt, Homo Sapiens
ugagaugaauauauuuuacaugugaugacaug

SEQ ID NO: 220230 - RNA, 32 nt, Homo Sapiens
auuccuaucuuuucuuuuuauugccucuuaua

SEQ ID NO: 220231 - RNA, 32 nt, Homo Sapiens
caaguagcaucucagcuguggagucaggcccu

SEQ ID NO: 220232 - RNA, 32 nt, Homo Sapiens
aauaauguucccuuuucuucuuuucuaugccu

SEQ ID NO: 220233 - RNA, 29 nt, Homo Sapiens
ggcagccgggugaugucugaugaagacac

SEQ ID NO: 220234 - RNA, 32 nt, Homo Sapiens
uaguuuuuucuaucacauccaccaaaauucuu

SEQ ID NO: 220235 - RNA, 32 nt, Homo Sapiens
ucuucccacaguguucagauuuguccugugug

SEQ ID NO: 220236 - RNA, 32 nt, Homo Sapiens
uguguguuaucuccacccacccacacacauac

SEQ ID NO: 220237 - RNA, 32 nt, Homo Sapiens
ggggccugcccggcucagcgcccaccggaggg

SEQ ID NO: 220238 - RNA, 30 nt, Homo Sapiens
ugcucagagaagccuaggugggcuaccaug

SEQ ID NO: 220239 - RNA, 32 nt, Homo Sapiens
ucaaugugcuuaaauuuguuuaaauuuuccau

SEQ ID NO: 220240 - RNA, 27 nt, Homo Sapiens
cucucuuccuucuuucaaccuuccgga

SEQ ID NO: 220241 - RNA, 32 nt, Homo Sapiens
uagaggagacccacguucuccucucuugcucc

SEQ ID NO: 220242 - RNA, 32 nt, Homo Sapiens
ggagggaagaugaguuauuuaacugguaagcg

SEQ ID NO: 220243 - RNA, 32 nt, Homo Sapiens
aaggacagucauauaagcuuuauuuuccucuu

SEQ ID NO: 220244 - RNA, 32 nt, Homo Sapiens
uuaugauggaccuggaggaaaacccuaagaag

SEQ ID NO: 220245 - RNA, 32 nt, Homo Sapiens
ccugggggcuugccaagugauaaacagacuca

SEQ ID NO: 220246 - RNA, 32 nt, Homo Sapiens
aacaguuaugugccuguaaagucuccucuaau

SEQ ID NO: 220247 - RNA, 32 nt, Homo Sapiens
aauucacuccaagucucuucccuuuccaagcc

SEQ ID NO: 220248 - RNA, 32 nt, Homo Sapiens
acacugcaauguguaugaaccuugaacccauu

SEQ ID NO: 220249 - RNA, 32 nt, Homo Sapiens
ccuccucccgcccaggcgcccggccccgcaac

SEQ ID NO: 220250 - RNA, 31 nt, Homo Sapiens
guccuuuugugcuaagguucuugcggugaac

SEQ ID NO: 220251 - RNA, 31 nt, Homo Sapiens
cucucuuggggacucucaagagccuguguuc

SEQ ID NO: 220252 - RNA, 32 nt, Homo Sapiens
gcccccagccccagccccucuccuguggccca

SEQ ID NO: 220253 - RNA, 32 nt, Homo Sapiens
gaagaaaucugugccacccugggaagguguca

SEQ ID NO: 220254 - RNA, 32 nt, Homo Sapiens
aaauuaauuuuuguuccaacagauauauuuua

SEQ ID NO: 220255 - RNA, 32 nt, Homo Sapiens
aucucugggcuggugaacauaaucucuguccc

SEQ ID NO: 220256 - RNA, 32 nt, Homo Sapiens
ugaggccaugggcgaccgcggcagcucccggc

SEQ ID NO: 220257 - RNA, 32 nt, Homo Sapiens
aagugggaacuuugaggcucagagacagagca

SEQ ID NO: 220258 - RNA, 30 nt, Homo Sapiens
gauuucuucuuugccacccuuuuaaggacu

SEQ ID NO: 220259 - RNA, 32 nt, Homo Sapiens
ugugagugccacuuccccacccgggaaaggcu

SEQ ID NO: 220260 - RNA, 32 nt, Homo Sapiens
gaggggacggagaggagcugcaggagggcugg

SEQ ID NO: 220261 - RNA, 32 nt, Homo Sapiens
auguuucauaaaguaucaauagcugaauagac

SEQ ID NO: 220262 - RNA, 32 nt, Homo Sapiens
auucucuaaaacacaggaacugcuuuucguaa

SEQ ID NO: 220263 - RNA, 32 nt, Homo Sapiens
aaguggcuuucugccccucuugauguaagcaa

SEQ ID NO: 220264 - RNA, 32 nt, Homo Sapiens
uuuucaaaauuccaaggaggguuaauaaagaa

SEQ ID NO: 220265 - RNA, 32 nt, Homo Sapiens
cauuucacagaaaaaccaucccaccgaagaua

SEQ ID NO: 220266 - RNA, 32 nt, Homo Sapiens
cuuuaaaguagauguauauuaagggcuuagau

SEQ ID NO: 220267 - RNA, 32 nt, Homo Sapiens
uauguacacaucuauuuuuuauacuuuuuuuu

SEQ ID NO: 220268 - RNA, 32 nt, Homo Sapiens
aagaugaagauaaggaugauacagucuccaua

SEQ ID NO: 220269 - RNA, 32 nt, Homo Sapiens
ugggaaaugcauggggugggacagguaggagu

SEQ ID NO: 220270 - RNA, 32 nt, Homo Sapiens
cacagcgagcuuucccucuggauguuguguca

SEQ ID NO: 220271 - RNA, 32 nt, Homo Sapiens
acguggggccccagcucccgcugaugccaggc

SEQ ID NO: 220272 - RNA, 32 nt, Homo Sapiens
uaauugucugggguggggagggggguauggag

SEQ ID NO: 220273 - RNA, 32 nt, Homo Sapiens
ucagaaaugugaauguaguaaggggcugaaga

SEQ ID NO: 220274 - RNA, 30 nt, Homo Sapiens
gaucgugagcugcuugaugacugaugcuag

SEQ ID NO: 220275 - RNA, 32 nt, Homo Sapiens
gaguaacuaaccucagcaggccguccaguccu

SEQ ID NO: 220276 - RNA, 32 nt, Homo Sapiens
gguuucaccaugucaagcuggucuuggacucc

SEQ ID NO: 220277 - RNA, 32 nt, Homo Sapiens
uuucuuuccccucccccacccuuccagaugcc

SEQ ID NO: 220278 - RNA, 32 nt, Homo Sapiens
ccucgccccccuccccuuuagcucugugaugc

SEQ ID NO: 220279 - RNA, 32 nt, Homo Sapiens
uucagcuuggggugagcugcacuucaggcaug

SEQ ID NO: 220280 - RNA, 32 nt, Homo Sapiens
agacugccccacuuaaacucuugucagucugg

SEQ ID NO: 220281 - RNA, 32 nt, Homo Sapiens
accuccccagcccgcgcccccggacgccuccg

SEQ ID NO: 220282 - RNA, 32 nt, Homo Sapiens
cugccucugaccagucuguuccggggcccccu

SEQ ID NO: 220283 - RNA, 32 nt, Homo Sapiens
ugaaaaacuguauaaauuuuuaugggacaaag

SEQ ID NO: 220284 - RNA, 32 nt, Homo Sapiens
uaggagagacuaaacuuuuguuuuccuuaccc

SEQ ID NO: 220285 - RNA, 32 nt, Homo Sapiens
uggggcaucccaagugggguccucacccaucc

SEQ ID NO: 220286 - RNA, 32 nt, Homo Sapiens
gagucuguauggaaaucucaccacagauaaug

SEQ ID NO: 220287 - RNA, 32 nt, Homo Sapiens
auuuaucuuuaacauagagaauaucaaaguua

SEQ ID NO: 220288 - RNA, 32 nt, Homo Sapiens
cugcuuucuuugauucuccuuuuauguguagu

SEQ ID NO: 220289 - RNA, 32 nt, Homo Sapiens
uguccucuuccagcugagccaggcccgcgggc

SEQ ID NO: 220290 - RNA, 32 nt, Homo Sapiens
agcccagcccuaugcucugugcuuggcccugg

SEQ ID NO: 220291 - RNA, 32 nt, Homo Sapiens
caauaugacaguuuugugcuucucucugacag

SEQ ID NO: 220292 - RNA, 32 nt, Homo Sapiens
aaagugaaaugcaaaugucuguuaucuaacua

SEQ ID NO: 220293 - RNA, 32 nt, Homo Sapiens
gcaggggucacgcaugguccagcccucaggug

SEQ ID NO: 220294 - RNA, 32 nt, Homo Sapiens
cgaagugggcgggcccggccaagccacgccuc

SEQ ID NO: 220295 - RNA, 32 nt, Homo Sapiens
aaacuggaaaauuaaauuguauuuuugccaga

SEQ ID NO: 220296 - RNA, 32 nt, Homo Sapiens
gaugcaacauuucuuuccugucugggcuguuu

SEQ ID NO: 220297 - RNA, 29 nt, Homo Sapiens
gagccugaagccuuacauuuucuaccaag

SEQ ID NO: 220298 - RNA, 32 nt, Homo Sapiens
caaugucuguuguuuacaagccacucugucuu

SEQ ID NO: 220299 - RNA, 32 nt, Homo Sapiens
uuuagaacaugagaauagcaguuuugcucaug

SEQ ID NO: 220300 - RNA, 32 nt, Homo Sapiens
ucauuucuuuugcuaguucauugcucuggcua

SEQ ID NO: 220301 - RNA, 32 nt, Homo Sapiens
gaaguagcucaucguagugcgggccguauuag

SEQ ID NO: 220302 - RNA, 32 nt, Homo Sapiens
cugggcucuggucagggcuggcaggcuggggg

SEQ ID NO: 220303 - RNA, 32 nt, Homo Sapiens
gcggacugggaacugcagcugcgaccccccgc

SEQ ID NO: 220304 - RNA, 32 nt, Homo Sapiens
cuccagagcccccaugcuggggcuacuaauga

SEQ ID NO: 220305 - RNA, 32 nt, Homo Sapiens
acaacaucucaaacuuuucuaaucauaaaaga

SEQ ID NO: 220306 - RNA, 32 nt, Homo Sapiens
uagcauagugccuggugagugaugucccaaua

SEQ ID NO: 220307 - RNA, 32 nt, Homo Sapiens
uuuuauuuguaucaacucaaagcaaaauagag

SEQ ID NO: 220308 - RNA, 32 nt, Homo Sapiens
gaaaugucaccagguccuuucagucuucacag

SEQ ID NO: 220309 - RNA, 32 nt, Homo Sapiens
aaaaaaacauaguggacagcauuguggugagg

SEQ ID NO: 220310 - RNA, 32 nt, Homo Sapiens
uuaagcaauauuugugguuauuucuuccuuuu

SEQ ID NO: 220311 - RNA, 32 nt, Homo Sapiens
augacuuuauucuuguaucucaucucaaaaua

SEQ ID NO: 220312 - RNA, 32 nt, Homo Sapiens
ucaccgcgccuggccgggagcuuuaauuuuuc

SEQ ID NO: 220313 - RNA, 32 nt, Homo Sapiens
uuuauagucauagucauuggaacuugcauccu

SEQ ID NO: 220314 - RNA, 32 nt, Homo Sapiens
gagcccccuccuccaauaaauaggaaaaaaga

SEQ ID NO: 220315 - RNA, 32 nt, Homo Sapiens
aaaugguguguuaaccgcguuuuguuugcucc

SEQ ID NO: 220316 - RNA, 32 nt, Homo Sapiens
guccagggcgucgccauguccucgguguuugg

SEQ ID NO: 220317 - RNA, 32 nt, Homo Sapiens
uugguacauccccuccucccccacgcccggac

SEQ ID NO: 220318 - RNA, 32 nt, Homo Sapiens
uggucuguggaccagcagcggcagugacaccu

SEQ ID NO: 220319 - RNA, 32 nt, Homo Sapiens
uaauuggaggaaaugaaugcugauuguaacgg

SEQ ID NO: 220320 - RNA, 32 nt, Homo Sapiens
cuuuaagcugacucuccccccauccuacacag

SEQ ID NO: 220321 - RNA, 32 nt, Homo Sapiens
ucacgggccaccagagcaccuacuagagcagc

SEQ ID NO: 220322 - RNA, 32 nt, Homo Sapiens
acuaaaugcaggaagggguuucucugauguau

SEQ ID NO: 220323 - RNA, 32 nt, Homo Sapiens
gccacggcucugccaccacuagguaccugcug

SEQ ID NO: 220324 - RNA, 32 nt, Homo Sapiens
uuacacaauuucugcccccaccgucuuuuuug

SEQ ID NO: 220325 - RNA, 32 nt, Homo Sapiens
cccagcuggcccagccccuccucuuucccuca

SEQ ID NO: 220326 - RNA, 32 nt, Homo Sapiens
guacagggcccugggggaggagcccacugaug

SEQ ID NO: 220327 - RNA, 32 nt, Homo Sapiens
gagaauucuuugaacccaggaggcagagguug

SEQ ID NO: 220328 - RNA, 32 nt, Homo Sapiens
cucacuguggggauugaucauucucaugaagg

SEQ ID NO: 220329 - RNA, 32 nt, Homo Sapiens
cccccaaccuacugccugaugcaggugccauu

SEQ ID NO: 220330 - RNA, 32 nt, Homo Sapiens
cagcccaaaaauaauguuaaaaugacucaagg

SEQ ID NO: 220331 - RNA, 32 nt, Homo Sapiens
ucuaauugagucucuuuuuuauucuguuuucu

SEQ ID NO: 220332 - RNA, 32 nt, Homo Sapiens
uuaccugauggcaacuucuggcucuggaaccg

SEQ ID NO: 220333 - RNA, 32 nt, Homo Sapiens
caaggcacuccagccugggugacagagugaga

SEQ ID NO: 220334 - RNA, 32 nt, Homo Sapiens
uuuuauuauuuuuauuuuuuguagagacugga

SEQ ID NO: 220335 - RNA, 32 nt, Homo Sapiens
agacaacugaaagaagcuguugugaaggcaga

SEQ ID NO: 220336 - RNA, 32 nt, Homo Sapiens
ggauucuggucaacugguggagauuggcugac

SEQ ID NO: 220337 - RNA, 32 nt, Homo Sapiens
gccccaucuuccggcuccagcgucauaugaga

SEQ ID NO: 220338 - RNA, 28 nt, Homo Sapiens
gcgaugaaagauuagcccgcgaacagag

SEQ ID NO: 220339 - RNA, 32 nt, Homo Sapiens
ugcccacccccgugugcuggcucccucacuuc

SEQ ID NO: 220340 - RNA, 32 nt, Homo Sapiens
uuggacugugaaaagaaauguggccccuuucc

SEQ ID NO: 220341 - RNA, 32 nt, Homo Sapiens
gacggcagucgcgcuccgcguggggcagcggc

SEQ ID NO: 220342 - RNA, 32 nt, Homo Sapiens
auacauaugauagcuugugcugauuaauuuaa

SEQ ID NO: 220343 - RNA, 30 nt, Homo Sapiens
ccaggcuucaggcugccgccgcugggaggc

SEQ ID NO: 220344 - RNA, 32 nt, Homo Sapiens
uacagacuuaguaguggagaaaugguguccuc

SEQ ID NO: 220345 - RNA, 32 nt, Homo Sapiens
aucauuuagacuaugaucauuuagacuguauc

SEQ ID NO: 220346 - RNA, 32 nt, Homo Sapiens
gccauugcacuccagccugggcgacaagcgaa

SEQ ID NO: 220347 - RNA, 32 nt, Homo Sapiens
caggcauauuuuacucaguauaguuauuuuga

SEQ ID NO: 220348 - RNA, 32 nt, Homo Sapiens
auuugagucuggccacuagacaucucaucagc

SEQ ID NO: 220349 - RNA, 32 nt, Homo Sapiens
uugacccuggaaagggugcuuuguauauguuc

SEQ ID NO: 220350 - RNA, 32 nt, Homo Sapiens
uuuuuaaucagaaagcacaccuugcacgucau

SEQ ID NO: 220351 - RNA, 32 nt, Homo Sapiens
ccgcuccccccucgcggcccgucgggaggacg

SEQ ID NO: 220352 - RNA, 32 nt, Homo Sapiens
ccucucccuggacagcucugaggggcuccuug

SEQ ID NO: 220353 - RNA, 32 nt, Homo Sapiens
uggacugcaaaugcgcuugauggaaggagaug

SEQ ID NO: 220354 - RNA, 32 nt, Homo Sapiens
cuuugugugucuucugucuguuuaaaccucag

SEQ ID NO: 220355 - RNA, 32 nt, Homo Sapiens
uauucaaaucucagcucuggcucuuucuagcu

SEQ ID NO: 220356 - RNA, 32 nt, Homo Sapiens
gcagacgaggucggccucgucauuccccgcag

SEQ ID NO: 220357 - RNA, 32 nt, Homo Sapiens
aaguaaaggggcaaggagaagacggccugcaa

SEQ ID NO: 220358 - RNA, 32 nt, Homo Sapiens
gcaggaugacagagccugagcagcggaaccag

SEQ ID NO: 220359 - RNA, 32 nt, Homo Sapiens
uugccacaagcagucauucuugacggcuccag

SEQ ID NO: 220360 - RNA, 32 nt, Homo Sapiens
ccuuucuuucuuuucuucuccucugggauggg

SEQ ID NO: 220361 - RNA, 30 nt, Homo Sapiens
ccucauuuuaccaauggggaaacugaggcu

SEQ ID NO: 220362 - RNA, 32 nt, Homo Sapiens
aaaacagaaaaaauaucgaaucccucuuucau

SEQ ID NO: 220363 - RNA, 32 nt, Homo Sapiens
cgguaccagaaagcagcgagagcgagaccugg

SEQ ID NO: 220364 - RNA, 31 nt, Homo Sapiens
accaggcagucgcagaaccaaggaauggaug

SEQ ID NO: 220365 - RNA, 32 nt, Homo Sapiens
ugugaagauagagugaaauucaguaccacauu

SEQ ID NO: 220366 - RNA, 32 nt, Homo Sapiens
uuuuuaaauuuauguauacuagccuggccuuu

SEQ ID NO: 220367 - RNA, 32 nt, Homo Sapiens
gaauaacauucauuauaaauaaaauuauucug

SEQ ID NO: 220368 - RNA, 32 nt, Homo Sapiens
auggcaacguccagggcccagaacccugagga

SEQ ID NO: 220369 - RNA, 32 nt, Homo Sapiens
aacacgggcaagggcugccugcugcccgcugg

SEQ ID NO: 220370 - RNA, 32 nt, Homo Sapiens
auuuuucggaggagccgagggaggcugagcgg

SEQ ID NO: 220371 - RNA, 32 nt, Homo Sapiens
ugagucugucuccuuacuuuagucccugggca

SEQ ID NO: 220372 - RNA, 32 nt, Homo Sapiens
gggacccucccauuuugauacauuaguucccc

SEQ ID NO: 220373 - RNA, 32 nt, Homo Sapiens
guuucuuccauauccugguccuuggcaucugg

SEQ ID NO: 220374 - RNA, 32 nt, Homo Sapiens
uguggcaccgcugccgaccccugcggccgugg

SEQ ID NO: 220375 - RNA, 32 nt, Homo Sapiens
ggaguaugucauuuuacuaaguuccuaaacaa

SEQ ID NO: 220376 - RNA, 32 nt, Homo Sapiens
uuauauguuauuguguuaaaaccucacuugcc

SEQ ID NO: 220377 - RNA, 32 nt, Homo Sapiens
guaauuuaaauacuuaaaauuugcaauuguca

SEQ ID NO: 220378 - RNA, 32 nt, Homo Sapiens
uagucaguagaccgucagaaccacuggccaga

SEQ ID NO: 220379 - RNA, 32 nt, Homo Sapiens
cugcggcucgggcccugagguuuauucagaaa

SEQ ID NO: 220380 - RNA, 32 nt, Homo Sapiens
ugcagaccaaaauaaggcacagcuuuaauuca

SEQ ID NO: 220381 - RNA, 32 nt, Homo Sapiens
cuauucaguggcagcuucuuguuccauaggau

SEQ ID NO: 220382 - RNA, 32 nt, Homo Sapiens
ugggccccucccucagaagcacguuggcagga

SEQ ID NO: 220383 - RNA, 32 nt, Homo Sapiens
ggaccgcgagggugacgccgggccgggugagg

SEQ ID NO: 220384 - RNA, 32 nt, Homo Sapiens
ugauaauguacaguuuuuugugaauuuaaauu

SEQ ID NO: 220385 - RNA, 32 nt, Homo Sapiens
guuuuucguuuuuauagaaacacagaucuuug

SEQ ID NO: 220386 - RNA, 32 nt, Homo Sapiens
gccacacugagacuuugaguagcuccuggugg

SEQ ID NO: 220387 - RNA, 30 nt, Homo Sapiens
cuuuuaccacuugcugcacucuugcacaug

SEQ ID NO: 220388 - RNA, 26 nt, Homo Sapiens
caugaaggugucuuugacagguccag

SEQ ID NO: 220389 - RNA, 32 nt, Homo Sapiens
cacuuuuuaaaauuauuucuaagaagccauaa

SEQ ID NO: 220390 - RNA, 32 nt, Homo Sapiens
gccggcggcgggacagcgcccguaggcagccc

SEQ ID NO: 220391 - RNA, 32 nt, Homo Sapiens
cuugugggcugcuggucgcgcccccgugcaca

SEQ ID NO: 220392 - RNA, 32 nt, Homo Sapiens
uccgccccuggccccaggagcacugcagcccg

SEQ ID NO: 220393 - RNA, 32 nt, Homo Sapiens
cccacccaggacugagaggcuggagaccccag

SEQ ID NO: 220394 - RNA, 32 nt, Homo Sapiens
aacaguaaauuaacacauauuuugcguguuau

SEQ ID NO: 220395 - RNA, 32 nt, Homo Sapiens
cuggaggcgucccaggcaagccuggcuguagu

SEQ ID NO: 220396 - RNA, 32 nt, Homo Sapiens
auuggugccccacuccaucagcacuaacgccc

SEQ ID NO: 220397 - RNA, 32 nt, Homo Sapiens
ucagaaaugaaaauaaaucauguuuuuuauuu

SEQ ID NO: 220398 - RNA, 32 nt, Homo Sapiens
aagagugaaauaauuaaaaaccacugaacauu

SEQ ID NO: 220399 - RNA, 32 nt, Homo Sapiens
uguugaccuggacccacauuugcuccaaucca

SEQ ID NO: 220400 - RNA, 32 nt, Homo Sapiens
uuaguauuuaucuauuguaagauaaagcuggu

SEQ ID NO: 220401 - RNA, 32 nt, Homo Sapiens
ggaaguucaaggaaggcaccacaccagaaaug

SEQ ID NO: 220402 - RNA, 32 nt, Homo Sapiens
ccaucacagugugucccuguccaguguuggug

SEQ ID NO: 220403 - RNA, 32 nt, Homo Sapiens
ucucacuggauccccacuggcaccagcagugu

SEQ ID NO: 220404 - RNA, 32 nt, Homo Sapiens
gucaagacguccccugaggacccaggcccaca

SEQ ID NO: 220405 - RNA, 32 nt, Homo Sapiens
ucugagcccuccccagaaucaccuuuaacauc

SEQ ID NO: 220406 - RNA, 32 nt, Homo Sapiens
gagcaggacaaaguugaccaaggacacuuauu

SEQ ID NO: 220407 - RNA, 32 nt, Homo Sapiens
ucauagugcccagccgucguuauucuucccac

SEQ ID NO: 220408 - RNA, 32 nt, Homo Sapiens
ccagggugucucccgcuuuacucuucaggaau

SEQ ID NO: 220409 - RNA, 32 nt, Homo Sapiens
agaaggaaguggggggcguggagcgcgaacaa

SEQ ID NO: 220410 - RNA, 32 nt, Homo Sapiens
aagaaugugcuaaugauaaaugauuacauguc

SEQ ID NO: 220411 - RNA, 32 nt, Homo Sapiens
ccgcccagagcgagacaccaacauggagcccg

SEQ ID NO: 220412 - RNA, 32 nt, Homo Sapiens
cuguggagaguuuaucuuucucauggaccgcu

SEQ ID NO: 220413 - RNA, 32 nt, Homo Sapiens
uuuagcacugaauaauacuccauugucuagau

SEQ ID NO: 220414 - RNA, 32 nt, Homo Sapiens
gaugcucccagcugaauaaagcccugccuucu

SEQ ID NO: 220415 - RNA, 32 nt, Homo Sapiens
cgggcacgggggugggggguggucacccgagc

SEQ ID NO: 220416 - RNA, 32 nt, Homo Sapiens
ucucccugggacaaaaucaaggcgcuugcagg

SEQ ID NO: 220417 - RNA, 32 nt, Homo Sapiens
accaccccaucuaacacccccacagggccccu

SEQ ID NO: 220418 - RNA, 28 nt, Homo Sapiens
cuggagaggcugacaccgaggugucuug

SEQ ID NO: 220419 - RNA, 32 nt, Homo Sapiens
gcggucggauucuggagggugggaggcaucuu

SEQ ID NO: 220420 - RNA, 32 nt, Homo Sapiens
uguucauagacuuauauauaaaacuagagggu

SEQ ID NO: 220421 - RNA, 32 nt, Homo Sapiens
uauuccuguuuucucuuucugcccaccacauc

SEQ ID NO: 220422 - RNA, 32 nt, Homo Sapiens
aaguguacauuccuuuuucuauaauuuaagaa

SEQ ID NO: 220423 - RNA, 30 nt, Homo Sapiens
gagggggucugugccugaagcucaggagug

SEQ ID NO: 220424 - RNA, 32 nt, Homo Sapiens
cucuccaaacaaaagcaauugugaaauguguu

SEQ ID NO: 220425 - RNA, 32 nt, Homo Sapiens
auuaagggguugggacaagaagagacuccugu

SEQ ID NO: 220426 - RNA, 32 nt, Homo Sapiens
cuucacuucucgccggaguguguggaggagcg

SEQ ID NO: 220427 - RNA, 32 nt, Homo Sapiens
uuggucugugacucagaaaauccacaacuuuu

SEQ ID NO: 220428 - RNA, 32 nt, Homo Sapiens
gagaccacguggugagcgugcagggcaaaaac

SEQ ID NO: 220429 - RNA, 32 nt, Homo Sapiens
caggacacguggcggaagcugcacgaggcggu

SEQ ID NO: 220430 - RNA, 32 nt, Homo Sapiens
uagcucuucagcgucaucuccugcccugagcu

SEQ ID NO: 220431 - RNA, 32 nt, Homo Sapiens
uauuaaaaaaucaaaacauagaugcuagugag

SEQ ID NO: 220432 - RNA, 31 nt, Homo Sapiens
guagagaaauaaaauguagaugcauuuucuu

SEQ ID NO: 220433 - RNA, 32 nt, Homo Sapiens
ggagcugccaugccggccgccugcucacggca

SEQ ID NO: 220434 - RNA, 32 nt, Homo Sapiens
agcaaaaaaguacuuaaaacuguaaauuuauu

SEQ ID NO: 220435 - RNA, 32 nt, Homo Sapiens
ccugccaccagggggaggugaugcagcaugaa

SEQ ID NO: 220436 - RNA, 32 nt, Homo Sapiens
gcuuugagucacaucguuuucauuuuaaauca

SEQ ID NO: 220437 - RNA, 32 nt, Homo Sapiens
ugaaccgcaauaugggaggaacaaagacaacc

SEQ ID NO: 220438 - RNA, 32 nt, Homo Sapiens
ggugccugcagggcuaaccuccacgggagccc

SEQ ID NO: 220439 - RNA, 32 nt, Homo Sapiens
uaggacuccgcgggaaacggcgggggcggagc

SEQ ID NO: 220440 - RNA, 32 nt, Homo Sapiens
ucuuggaaauaguuuuacaaaaauggauuuaa

SEQ ID NO: 220441 - RNA, 32 nt, Homo Sapiens
ggauaucucuucuggaguaucucaagucaagg

SEQ ID NO: 220442 - RNA, 31 nt, Homo Sapiens
aucaucucuuuguauuugccaaauaauuuac

SEQ ID NO: 220443 - RNA, 32 nt, Homo Sapiens
acccgagcgcgcacgcucugcgcucggcccug

SEQ ID NO: 220444 - RNA, 32 nt, Homo Sapiens
gaauaacuagacauuauuuaugcugccaaacu

SEQ ID NO: 220445 - RNA, 32 nt, Homo Sapiens
ugcacuggucccagcccuggccgcagccuagu

SEQ ID NO: 220446 - RNA, 29 nt, Homo Sapiens
cuuaauucuauccacagucaaaaaucccc

SEQ ID NO: 220447 - RNA, 31 nt, Homo Sapiens
uggagcagugccugucagagcccugggggug

SEQ ID NO: 220448 - RNA, 32 nt, Homo Sapiens
accacccguggcaaacgccaggugcuuuuucu

SEQ ID NO: 220449 - RNA, 32 nt, Homo Sapiens
aagugaauucaaaaacagaucuuguaccacca

SEQ ID NO: 220450 - RNA, 32 nt, Homo Sapiens
ucaggagggucagaagcagaaagaaaucaaag

SEQ ID NO: 220451 - RNA, 32 nt, Homo Sapiens
gaccuuggaaaaagcacagguuguaaggcggc

SEQ ID NO: 220452 - RNA, 32 nt, Homo Sapiens
ggagagggacgcggcggacgccggcagccaug

SEQ ID NO: 220453 - RNA, 32 nt, Homo Sapiens
cuccuguaaucccagcacuuugggaggccgag

SEQ ID NO: 220454 - RNA, 32 nt, Homo Sapiens
cucuguaccccccacuuccacuccaugucccc

SEQ ID NO: 220455 - RNA, 32 nt, Homo Sapiens
acuucuagggccuuguaauguuaacugucuca

SEQ ID NO: 220456 - RNA, 31 nt, Homo Sapiens
aacuuagaugucuacugggugagacgaaugu

SEQ ID NO: 220457 - RNA, 32 nt, Homo Sapiens
uggagcuaucauaguuucugguaaacaaaagg

SEQ ID NO: 220458 - RNA, 32 nt, Homo Sapiens
cugugaauauuaguaaucuaaaacuuuuuauu

SEQ ID NO: 220459 - RNA, 32 nt, Homo Sapiens
ggcugagaggccugggccucugggauuccacc

SEQ ID NO: 220460 - RNA, 31 nt, Homo Sapiens
uaggguaagcgcagccauuuuggauuuugca

SEQ ID NO: 220461 - RNA, 32 nt, Homo Sapiens
uugucuucauucugaucuucuucuguucuuuu

SEQ ID NO: 220462 - RNA, 32 nt, Homo Sapiens
gcuaugccgccaccggccccgcccaugaggac

SEQ ID NO: 220463 - RNA, 32 nt, Homo Sapiens
aaugagaacaccuuugcccugaagucaguucu

SEQ ID NO: 220464 - RNA, 32 nt, Homo Sapiens
aggguggagccuugccgcccccugcccccggc

SEQ ID NO: 220465 - RNA, 32 nt, Homo Sapiens
acacgcacauaaaugagcugcaugugaaucca

SEQ ID NO: 220466 - RNA, 32 nt, Homo Sapiens
auguuguguauguuuuuuuuuaaacuuagaca

SEQ ID NO: 220467 - RNA, 32 nt, Homo Sapiens
ggaauagugaacuggggccaugucaguuuguc

SEQ ID NO: 220468 - RNA, 32 nt, Homo Sapiens
ucagauuaacauuucagaaaaauauuuacugu

SEQ ID NO: 220469 - RNA, 32 nt, Homo Sapiens
uggcuuacaccuguaaucccagcacuuuggga

SEQ ID NO: 220470 - RNA, 32 nt, Homo Sapiens
gugguccugaaucuugggcccuuuugauugug

SEQ ID NO: 220471 - RNA, 32 nt, Homo Sapiens
guauauuuauuacaauuuucugcaucuugagg

SEQ ID NO: 220472 - RNA, 32 nt, Homo Sapiens
cgagaagggcaccagcagcauuccacacccag

SEQ ID NO: 220473 - RNA, 32 nt, Homo Sapiens
cuccagcaggccgcaugccuagcgcucaaaca

SEQ ID NO: 220474 - RNA, 32 nt, Homo Sapiens
aucuguguuuuuccuuccuauggauuugauua

SEQ ID NO: 220475 - RNA, 32 nt, Homo Sapiens
aaaaacuugcuuagaaagaaaacucuaggaac

SEQ ID NO: 220476 - RNA, 32 nt, Homo Sapiens
gugccccccgggaagcgcuguuugggcaggcu

SEQ ID NO: 220477 - RNA, 32 nt, Homo Sapiens
uuuugugucccauggucaagcauucuaucuua

SEQ ID NO: 220478 - RNA, 28 nt, Homo Sapiens
aagaugcugcccguguaccaggagguga

SEQ ID NO: 220479 - RNA, 32 nt, Homo Sapiens
ucgccaaagcgcaugugugugcaugugugaac

SEQ ID NO: 220480 - RNA, 32 nt, Homo Sapiens
aaacaaacaaaaaaacaaaaacaaaaaaacaa

SEQ ID NO: 220481 - RNA, 32 nt, Homo Sapiens
gagucuuggggauccagagucuuggggcucca

SEQ ID NO: 220482 - RNA, 32 nt, Homo Sapiens
aauguugaauuaaagaaaauacuuuaucagaa

SEQ ID NO: 220483 - RNA, 30 nt, Homo Sapiens
ccugucuguaaaaugggggaaaaaagucag

SEQ ID NO: 220484 - RNA, 32 nt, Homo Sapiens
uggaauggagggcagggauccaugggagaugu

SEQ ID NO: 220485 - RNA, 32 nt, Homo Sapiens
ccugcagccaagggcacugggccagggcggcg

SEQ ID NO: 220486 - RNA, 32 nt, Homo Sapiens
caaggcuuuggccuucaacggcuccccuuugc

SEQ ID NO: 220487 - RNA, 32 nt, Homo Sapiens
augccuccauuugacuucuguaucgcugaugu

SEQ ID NO: 220488 - RNA, 32 nt, Homo Sapiens
ugauuccuccguguugugaugugaugcuggcc

SEQ ID NO: 220489 - RNA, 32 nt, Homo Sapiens
acgaggucaggagaccgagaucauccuggcua

SEQ ID NO: 220490 - RNA, 32 nt, Homo Sapiens
uauaaagcaauaacaaacaauugauugaccac

SEQ ID NO: 220491 - RNA, 32 nt, Homo Sapiens
gucccugcggcgcgcgcaggcagaaagcggcu

SEQ ID NO: 220492 - RNA, 32 nt, Homo Sapiens
caaaaaugaugaugggaagcuguccuuggagg

SEQ ID NO: 220493 - RNA, 32 nt, Homo Sapiens
aaggcgcagcgggagcgcacaggugccccgcg

SEQ ID NO: 220494 - RNA, 30 nt, Homo Sapiens
ucaaaaaucugaaauccagaagcuucaaaa

SEQ ID NO: 220495 - RNA, 32 nt, Homo Sapiens
cagagggaccagcuucuuuuucaguugucuuu

SEQ ID NO: 220496 - RNA, 32 nt, Homo Sapiens
ggccuugaaguguuuucauauugcuucucccu

SEQ ID NO: 220497 - RNA, 32 nt, Homo Sapiens
cugcuuuagcuaaagacgacugagaagaggug

SEQ ID NO: 220498 - RNA, 32 nt, Homo Sapiens
acugagcugucgugccagcaccauuccugguc

SEQ ID NO: 220499 - RNA, 32 nt, Homo Sapiens
cacagccaagauuucuucaaugggugugagcu

SEQ ID NO: 220500 - RNA, 32 nt, Homo Sapiens
guuccaugucauucaauuuaucauuuucauug

SEQ ID NO: 220501 - RNA, 32 nt, Homo Sapiens
aaccuugaaaacuaccugauauugaaaugguu

SEQ ID NO: 220502 - RNA, 32 nt, Homo Sapiens
aagguccccucuaugugcugcugagccggucc

SEQ ID NO: 220503 - RNA, 32 nt, Homo Sapiens
agagacagggccgggcgggcgccgccugcgga

SEQ ID NO: 220504 - RNA, 32 nt, Homo Sapiens
ccucgacccuccuggguguugguuggagcaga

SEQ ID NO: 220505 - RNA, 32 nt, Homo Sapiens
ccucggguccuugccuggcccagcaugagagg

SEQ ID NO: 220506 - RNA, 32 nt, Homo Sapiens
uuuuucccuugguuucuacuuaucuuuuaaaa

SEQ ID NO: 220507 - RNA, 32 nt, Homo Sapiens
gcucaucacucuuuuccaacaauguauaaucu

SEQ ID NO: 220508 - RNA, 32 nt, Homo Sapiens
cccgcaggcagacguggcugugggccgagcac

SEQ ID NO: 220509 - RNA, 32 nt, Homo Sapiens
aaggaggaugggagaccccuagccugcagcac

SEQ ID NO: 220510 - RNA, 32 nt, Homo Sapiens
ugagcaucuacuguauaucaugugcugaaaua

SEQ ID NO: 220511 - RNA, 32 nt, Homo Sapiens
cuuggaagacucauuuuggacuucugaccuug

SEQ ID NO: 220512 - RNA, 32 nt, Homo Sapiens
auggugucaaggaaggaggacuuggccuaggg

SEQ ID NO: 220513 - RNA, 32 nt, Homo Sapiens
aaaaggugaccaaugacuggacacgcagccgc

SEQ ID NO: 220514 - RNA, 32 nt, Homo Sapiens
gagucgaccucccggccaccccggcccugugc

SEQ ID NO: 220515 - RNA, 32 nt, Homo Sapiens
agccaauaauuuuuguucuuuguuuucacccc

SEQ ID NO: 220516 - RNA, 32 nt, Homo Sapiens
ccuggagaaugcuggaggauccaaacagaagg

SEQ ID NO: 220517 - RNA, 32 nt, Homo Sapiens
aacccugucucuacuaaaaacauggaaauuag

SEQ ID NO: 220518 - RNA, 32 nt, Homo Sapiens
agguucugccccccagaccccacacacggccg

SEQ ID NO: 220519 - RNA, 32 nt, Homo Sapiens
gcccauggaugccccaggccccuggacaguug

SEQ ID NO: 220520 - RNA, 32 nt, Homo Sapiens
caggcagauaacaugcacacaugaagcugguu

SEQ ID NO: 220521 - RNA, 32 nt, Homo Sapiens
aggcugcgaggugggaccugcugcugugcugg

SEQ ID NO: 220522 - RNA, 32 nt, Homo Sapiens
agcucccaucaggagcucggcuucuugcucca

SEQ ID NO: 220523 - RNA, 32 nt, Homo Sapiens
guggcucugugggcgcaucaauaaaagccguc

SEQ ID NO: 220524 - RNA, 32 nt, Homo Sapiens
gccggguauucugccagcugcccugugggcca

SEQ ID NO: 220525 - RNA, 32 nt, Homo Sapiens
gcccagcaugcgccugucggugcggagggugc

SEQ ID NO: 220526 - RNA, 32 nt, Homo Sapiens
uucccgcgccggucccugcagcggcgcguagu

SEQ ID NO: 220527 - RNA, 32 nt, Homo Sapiens
cucauuuccaaauauguuaaaugacaaaauua

SEQ ID NO: 220528 - RNA, 32 nt, Homo Sapiens
ugcuucccaccacuucccucacucccagaccu

SEQ ID NO: 220529 - RNA, 32 nt, Homo Sapiens
uaccaggagcagcauugagguuuuugagcaua

SEQ ID NO: 220530 - RNA, 32 nt, Homo Sapiens
gaguuuuuggugauugguuccuauauggaccc

SEQ ID NO: 220531 - RNA, 32 nt, Homo Sapiens
uuuuuaauagcuaaauacaaugcaguuaaaaa

SEQ ID NO: 220532 - RNA, 32 nt, Homo Sapiens
gaaguauaaaaauuauaaagaguaauuccaaa

SEQ ID NO: 220533 - RNA, 32 nt, Homo Sapiens
acgcccucgcccagcccagcucucccuggccg

SEQ ID NO: 220534 - RNA, 32 nt, Homo Sapiens
uuauuagagaucauuuacauuuuaaaagauac

SEQ ID NO: 220535 - RNA, 32 nt, Homo Sapiens
gugccccacacccaccaauaccuaaaucuguu

SEQ ID NO: 220536 - RNA, 32 nt, Homo Sapiens
acgagugcuaaguguaggauauuuugucacca

SEQ ID NO: 220537 - RNA, 32 nt, Homo Sapiens
aauuuaacuaaauuauuuuaaucuguccuuau

SEQ ID NO: 220538 - RNA, 32 nt, Homo Sapiens
gagguucuuucccacacugaaauucuaaauau

SEQ ID NO: 220539 - RNA, 32 nt, Homo Sapiens
uaaagaagugauuuuucauucucuuggauucu

SEQ ID NO: 220540 - RNA, 32 nt, Homo Sapiens
ucuuugcagccuccuuuuuuuuuuuuuuaaaa

SEQ ID NO: 220541 - RNA, 32 nt, Homo Sapiens
ugagguuccguuuuacacaugauccaacguua

SEQ ID NO: 220542 - RNA, 32 nt, Homo Sapiens
ccucacccacuuuggccuccguucaccccacc

SEQ ID NO: 220543 - RNA, 32 nt, Homo Sapiens
caaaaaucugcaaauuugauaauucuccugaa

SEQ ID NO: 220544 - RNA, 32 nt, Homo Sapiens
gcccaccgcaugccggugcagacggaugcgag

SEQ ID NO: 220545 - RNA, 32 nt, Homo Sapiens
aauguuucgaauuuauagaaauagaaaaguug

SEQ ID NO: 220546 - RNA, 32 nt, Homo Sapiens
gggagcuggugccucuuccugcccguaucuuu

SEQ ID NO: 220547 - RNA, 32 nt, Homo Sapiens
uuucacaaaguauuuuucaaucagaguuuuca

SEQ ID NO: 220548 - RNA, 32 nt, Homo Sapiens
cuauaucaaguacacauuuaggagccagguag

SEQ ID NO: 220549 - RNA, 32 nt, Homo Sapiens
agauuuguuuaaaaguaccauucuaauacuuc

SEQ ID NO: 220550 - RNA, 32 nt, Homo Sapiens
uaaauaagaacaauguaauauagaaaugcuuu

SEQ ID NO: 220551 - RNA, 32 nt, Homo Sapiens
aaaguacucuaagcagcagagcccacagaggc

SEQ ID NO: 220552 - RNA, 32 nt, Homo Sapiens
aggcaggaacaccuuggugcuuuugggccaaa

SEQ ID NO: 220553 - RNA, 32 nt, Homo Sapiens
uaccagagaaggaaaagucugaucccgaaaca

SEQ ID NO: 220554 - RNA, 32 nt, Homo Sapiens
agguugggcugcggcggcggcggcuggggaag

SEQ ID NO: 220555 - RNA, 32 nt, Homo Sapiens
ggauaggagggugccccugggaacacagugcc

SEQ ID NO: 220556 - RNA, 32 nt, Homo Sapiens
uuaaauuauuuuuucuccuuucugggauaaau

SEQ ID NO: 220557 - RNA, 32 nt, Homo Sapiens
agacacccaagcagagcaaucaguuagugaau

SEQ ID NO: 220558 - RNA, 32 nt, Homo Sapiens
uugcuagccuaaaacaucagaauagaacccaa

SEQ ID NO: 220559 - RNA, 32 nt, Homo Sapiens
gaccacgccuccucccagcccaggcgccacga

SEQ ID NO: 220560 - RNA, 32 nt, Homo Sapiens
ccaccgcgccuggccaggcugcacacauucuu

SEQ ID NO: 220561 - RNA, 32 nt, Homo Sapiens
ggcuggagaggcagcaacagggaagucagccu

SEQ ID NO: 220562 - RNA, 32 nt, Homo Sapiens
aacugaugaaacaaauuuguccccacgggcua

SEQ ID NO: 220563 - RNA, 32 nt, Homo Sapiens
auguggcaaagaacuggauauuaaacuuugca

SEQ ID NO: 220564 - RNA, 32 nt, Homo Sapiens
gcaucuggggccugggauggccacagaagggg

SEQ ID NO: 220565 - RNA, 32 nt, Homo Sapiens
uccuucugugcuugcuugcaucuuuaauaaag

SEQ ID NO: 220566 - RNA, 32 nt, Homo Sapiens
agcccaucagccccaaacuccugucucacuuc

SEQ ID NO: 220567 - RNA, 32 nt, Homo Sapiens
uaauagaauuaacacgaggcucacugcauuga

SEQ ID NO: 220568 - RNA, 32 nt, Homo Sapiens
uggcgguuacuuucuugguauuucaugucaaa

SEQ ID NO: 220569 - RNA, 32 nt, Homo Sapiens
gcauacuauaaaaucugaauugaugugaaaua

SEQ ID NO: 220570 - RNA, 32 nt, Homo Sapiens
cggggcuggcaggcggccgcccacaugaugcg

SEQ ID NO: 220571 - RNA, 32 nt, Homo Sapiens
gcuguuagcauugcgcagcaucuucaguucuc

SEQ ID NO: 220572 - RNA, 32 nt, Homo Sapiens
gccagggugugcggagcuucccuguacugcag

SEQ ID NO: 220573 - RNA, 32 nt, Homo Sapiens
aggcguccuguccacacccagcucagcauuuc

SEQ ID NO: 220574 - RNA, 32 nt, Homo Sapiens
uuguaggaaauuuaaacucuaauuaugacagc

SEQ ID NO: 220575 - RNA, 32 nt, Homo Sapiens
guugggcuuuugcuguguugggcacuugcucc

SEQ ID NO: 220576 - RNA, 32 nt, Homo Sapiens
uuccuuaauguuuuacugugcauuaccacuuu

SEQ ID NO: 220577 - RNA, 32 nt, Homo Sapiens
ggaggcauuguaaaaaggaaauagugauguaa

SEQ ID NO: 220578 - RNA, 32 nt, Homo Sapiens
uaaagaauauuuuuucucaguuuuuucagaua

SEQ ID NO: 220579 - RNA, 28 nt, Homo Sapiens
cccacaguuacagccacaagccugccuc

SEQ ID NO: 220580 - RNA, 32 nt, Homo Sapiens
cucaacucacaccguauaugcaacucaacuca

SEQ ID NO: 220581 - RNA, 32 nt, Homo Sapiens
ugccuccguggccuuucguacagugggcaagu

SEQ ID NO: 220582 - RNA, 32 nt, Homo Sapiens
uggaccaggcgcccagcuccccgggaccccgg

SEQ ID NO: 220583 - RNA, 32 nt, Homo Sapiens
uaggacgugggucccaagccaagccuuaagug

SEQ ID NO: 220584 - RNA, 30 nt, Homo Sapiens
gauccagcggccgggcggggucccggcuga

SEQ ID NO: 220585 - RNA, 32 nt, Homo Sapiens
cugauuacuguaaaaauaaaugaaauuacauc

SEQ ID NO: 220586 - RNA, 32 nt, Homo Sapiens
agucucaaguaccaccuguauuaucucacuaa

SEQ ID NO: 220587 - RNA, 32 nt, Homo Sapiens
uacccugggugcccucuuucggccccauggag

SEQ ID NO: 220588 - RNA, 32 nt, Homo Sapiens
aacaguggcaggugcuguacuaggcucuguac

SEQ ID NO: 220589 - RNA, 32 nt, Homo Sapiens
aguuguguuuggcaggagaaucaauaaaaauc

SEQ ID NO: 220590 - RNA, 32 nt, Homo Sapiens
ggcacucccucauccuggugggcacagagaua

SEQ ID NO: 220591 - RNA, 32 nt, Homo Sapiens
uuauguuuacaggcuuccuguuugaugaagau

SEQ ID NO: 220592 - RNA, 32 nt, Homo Sapiens
ccaucggaccccagccccuaucuccaagagac

SEQ ID NO: 220593 - RNA, 32 nt, Homo Sapiens
augcaaaaacaaugcaauaauauucauuuaaa

SEQ ID NO: 220594 - RNA, 32 nt, Homo Sapiens
aagcuacaaugccuagaagagaaugagcggac

SEQ ID NO: 220595 - RNA, 32 nt, Homo Sapiens
uugcuguuuuuagagccucugcuucaguguac

SEQ ID NO: 220596 - RNA, 32 nt, Homo Sapiens
cuggaacuuuaaagagggaaagagugagauuc

SEQ ID NO: 220597 - RNA, 32 nt, Homo Sapiens
uuaguuaaucuguuuugugucuuacgugaaau

SEQ ID NO: 220598 - RNA, 32 nt, Homo Sapiens
augggcagucucuggagagcagcagccuggag

SEQ ID NO: 220599 - RNA, 32 nt, Homo Sapiens
ugauguguucuuccuuuagucaucauguuagg

SEQ ID NO: 220600 - RNA, 32 nt, Homo Sapiens
cgccgcgcgccggccguuaauaggcuugcucc

SEQ ID NO: 220601 - RNA, 32 nt, Homo Sapiens
gcuacccggcgcccaugacggucagcugccag

SEQ ID NO: 220602 - RNA, 32 nt, Homo Sapiens
ggagggcacggcagcagagacacgcacaugca

SEQ ID NO: 220603 - RNA, 32 nt, Homo Sapiens
cggggagugaggcaguggcggcggcggcggua

SEQ ID NO: 220604 - RNA, 32 nt, Homo Sapiens
cucaagcaauccacccaccucugccucccaaa

SEQ ID NO: 220605 - RNA, 32 nt, Homo Sapiens
accaguggauuuuuuuaccuggcacauggguu

SEQ ID NO: 220606 - RNA, 32 nt, Homo Sapiens
uuucauccuugacuaaauucgugauuuucaag

SEQ ID NO: 220607 - RNA, 32 nt, Homo Sapiens
uggguccucccagcugacggcaguaaauccac

SEQ ID NO: 220608 - RNA, 32 nt, Homo Sapiens
cauacggaggucuuguguaucuguggcaacag

SEQ ID NO: 220609 - RNA, 32 nt, Homo Sapiens
gacaagcuggaacccaggagcaguugggaguu

SEQ ID NO: 220610 - RNA, 32 nt, Homo Sapiens
ccaaagguggguuguuaagagaugcuccucca

SEQ ID NO: 220611 - RNA, 32 nt, Homo Sapiens
auuuaggaaaauucacacuagaaaauaaagcu

SEQ ID NO: 220612 - RNA, 32 nt, Homo Sapiens
uaaaagccugggccuuccccagccuuuuuucu

SEQ ID NO: 220613 - RNA, 32 nt, Homo Sapiens
ggcugggcggagccgcagcugcaaacucugac

SEQ ID NO: 220614 - RNA, 32 nt, Homo Sapiens
agcucggggaguccccagccugccugcuagga

SEQ ID NO: 220615 - RNA, 32 nt, Homo Sapiens
aggaacugcauaaagguucuugaauucugcag

SEQ ID NO: 220616 - RNA, 29 nt, Homo Sapiens
auugugccauaauuguuauuaaagagaaa

SEQ ID NO: 220617 - RNA, 32 nt, Homo Sapiens
gccccagcccggccucaggucccggcccugcc

SEQ ID NO: 220618 - RNA, 32 nt, Homo Sapiens
cgagugcugacgggaaaggcagcccuuugaca

SEQ ID NO: 220619 - RNA, 32 nt, Homo Sapiens
cgccccgacgcgccgcccacucacggcaaaga

SEQ ID NO: 220620 - RNA, 32 nt, Homo Sapiens
gccccuuugugggucgcuguugccagaccugc

SEQ ID NO: 220621 - RNA, 32 nt, Homo Sapiens
cgggucccuggcggccggugucugaggagucg

SEQ ID NO: 220622 - RNA, 32 nt, Homo Sapiens
aaacauacaauuuugaauuuaacagaguuuca

SEQ ID NO: 220623 - RNA, 32 nt, Homo Sapiens
ucuguuuaguauguauaacuuaaaaggaacac

SEQ ID NO: 220624 - RNA, 32 nt, Homo Sapiens
ccuacaccaaucagaagcucagugcccaaugg

SEQ ID NO: 220625 - RNA, 32 nt, Homo Sapiens
auuaucaaaaugucuuuuuuuuuauguugacc

SEQ ID NO: 220626 - RNA, 27 nt, Homo Sapiens
ucaugauggugccacugcacuccagcc

SEQ ID NO: 220627 - RNA, 32 nt, Homo Sapiens
ggcgggcagggccgagcuggucucuucccugc

SEQ ID NO: 220628 - RNA, 32 nt, Homo Sapiens
cuggaacaaaaaugaucuagugagauuuaauc

SEQ ID NO: 220629 - RNA, 32 nt, Homo Sapiens
aggcugccaagaucacaccacagugggagugg

SEQ ID NO: 220630 - RNA, 32 nt, Homo Sapiens
ugagucccgggcgggcugcauucgucggggaa

SEQ ID NO: 220631 - RNA, 32 nt, Homo Sapiens
gucagcggaggaagcccgacccugcccgcccu

SEQ ID NO: 220632 - RNA, 32 nt, Homo Sapiens
agccuuucgcccaggcgcccaggcccgcugcg

SEQ ID NO: 220633 - RNA, 32 nt, Homo Sapiens
cauggccgcgcgcgcuccacacaacucaccgg

SEQ ID NO: 220634 - RNA, 32 nt, Homo Sapiens
uguacuggucagucacaucuuacggcgaaggg

SEQ ID NO: 220635 - RNA, 32 nt, Homo Sapiens
accccugcugcccaccaauggagaaucccaau

SEQ ID NO: 220636 - RNA, 32 nt, Homo Sapiens
ccggcagggaugcagcaggcuggccgcgcacc

SEQ ID NO: 220637 - RNA, 32 nt, Homo Sapiens
uaagaaagucuugcuguaaaugcugcccucug

SEQ ID NO: 220638 - RNA, 32 nt, Homo Sapiens
uaaguuuaaugagaaauaggagauuagcugca

SEQ ID NO: 220639 - RNA, 32 nt, Homo Sapiens
gcgaggucaggagaucgagaccauccuggcug

SEQ ID NO: 220640 - RNA, 32 nt, Homo Sapiens
auguggccgcggcugcucccgagcgcaucuuc

SEQ ID NO: 220641 - RNA, 32 nt, Homo Sapiens
cccgcgcugucucggcggcccaggaauucacu

SEQ ID NO: 220642 - RNA, 32 nt, Homo Sapiens
aaggccuuuucucuggcauggaauuguuaauu

SEQ ID NO: 220643 - RNA, 32 nt, Homo Sapiens
cuuuagcccgguuuguuucucccugcucaggu

SEQ ID NO: 220644 - RNA, 32 nt, Homo Sapiens
uacuuuuggauucuuuuuuuuacauuuaauac

SEQ ID NO: 220645 - RNA, 32 nt, Homo Sapiens
uuuugaguuuucguugucauugcucuuaucuu

SEQ ID NO: 220646 - RNA, 32 nt, Homo Sapiens
agccgggcgcgguggcgggugccuguaauccc

SEQ ID NO: 220647 - RNA, 32 nt, Homo Sapiens
auuagccgggcgugguggcgggccccuguaau

SEQ ID NO: 220648 - RNA, 32 nt, Homo Sapiens
cuucuuuacugauaguuucugugccagguucu

SEQ ID NO: 220649 - RNA, 32 nt, Homo Sapiens
cccucccccucuaccaagccacuccaagagcc

SEQ ID NO: 220650 - RNA, 32 nt, Homo Sapiens
cgccuaccggacgcgccgaggucgcgcugccu

SEQ ID NO: 220651 - RNA, 32 nt, Homo Sapiens
ccuggcugguucggucuaacgccccggagagu

SEQ ID NO: 220652 - RNA, 32 nt, Homo Sapiens
cagcccuaggguccaguucagagucugucauc

SEQ ID NO: 220653 - RNA, 32 nt, Homo Sapiens
acaucuuucuccagcuucagacuuguagauau

SEQ ID NO: 220654 - RNA, 32 nt, Homo Sapiens
gaagaaccgaggugggggcuuggugaaggcac

SEQ ID NO: 220655 - RNA, 32 nt, Homo Sapiens
gucucugccacuccugacccagcccugaacaa

SEQ ID NO: 220656 - RNA, 32 nt, Homo Sapiens
gagaaagggcuuugcugaagucucaggcugcc

SEQ ID NO: 220657 - RNA, 32 nt, Homo Sapiens
uguaauauuugaagcacaaauguaauacaguu

SEQ ID NO: 220658 - RNA, 32 nt, Homo Sapiens
gaugauuaauagcagcagcauguucaguuucg

SEQ ID NO: 220659 - RNA, 32 nt, Homo Sapiens
agaauccgcucccaggccugccaugaacgcga

SEQ ID NO: 220660 - RNA, 32 nt, Homo Sapiens
aguucuuaaaguuuagaggcuaacuuacagaa

SEQ ID NO: 220661 - RNA, 32 nt, Homo Sapiens
agagugcccaggguggccccagggcuucuaaa

SEQ ID NO: 220662 - RNA, 32 nt, Homo Sapiens
guauccgcggcuggagacccagcggcgaguag

SEQ ID NO: 220663 - RNA, 32 nt, Homo Sapiens
auaauauggaacaauuauaacaauauacugua

SEQ ID NO: 220664 - RNA, 32 nt, Homo Sapiens
uucuccucauuuccaaagaaacaggauuuuau

SEQ ID NO: 220665 - RNA, 32 nt, Homo Sapiens
ugauguauuugaagaagagaucacuucaggug

SEQ ID NO: 220666 - RNA, 32 nt, Homo Sapiens
uauuguugcauauuaaugauauuuuuaaaacu

SEQ ID NO: 220667 - RNA, 32 nt, Homo Sapiens
acagguguugggaaaaugauccacagucuauu

SEQ ID NO: 220668 - RNA, 30 nt, Homo Sapiens
gggaggggagguguuagugcaugcaagggu

SEQ ID NO: 220669 - RNA, 32 nt, Homo Sapiens
accagaaucucacaugagaugugugggugguu

SEQ ID NO: 220670 - RNA, 32 nt, Homo Sapiens
guacugccccucaacagggaugacucagcagg

SEQ ID NO: 220671 - RNA, 32 nt, Homo Sapiens
uuuuaugggaagcucauaguauuuuaauauuu

SEQ ID NO: 220672 - RNA, 32 nt, Homo Sapiens
caggauugugcuuuauugagccugcaguuaca

SEQ ID NO: 220673 - RNA, 32 nt, Homo Sapiens
ugccccggcagagggacggacacgcggacguc

SEQ ID NO: 220674 - RNA, 32 nt, Homo Sapiens
ucuccguuuaucuguuugaucaacuggaauuu

SEQ ID NO: 220675 - RNA, 32 nt, Homo Sapiens
ggaacuugacccccagaguguggaaagaaaga

SEQ ID NO: 220676 - RNA, 32 nt, Homo Sapiens
gcuuucugggucuguaugaacauaaguaagac

SEQ ID NO: 220677 - RNA, 32 nt, Homo Sapiens
ccuuccccuucugugucacaguucuuggugac

SEQ ID NO: 220678 - RNA, 32 nt, Homo Sapiens
uugcaacuuuggaguugcuguagacugaacug

SEQ ID NO: 220679 - RNA, 32 nt, Homo Sapiens
ugaucaagauaaauguggaguauuaaaguuau

SEQ ID NO: 220680 - RNA, 32 nt, Homo Sapiens
agugaggucggccaggcugcugccgacuuccc

SEQ ID NO: 220681 - RNA, 32 nt, Homo Sapiens
uuuuauguucauauuauguuugagaggguaaa

SEQ ID NO: 220682 - RNA, 30 nt, Homo Sapiens
gcagugggaggugguggcagauaugcuuug

SEQ ID NO: 220683 - RNA, 32 nt, Homo Sapiens
aaaucgugaaggaacuuuaauauuuuauuuaa

SEQ ID NO: 220684 - RNA, 28 nt, Homo Sapiens
cggcagcugcaggagccgaggugccagg

SEQ ID NO: 220685 - RNA, 32 nt, Homo Sapiens
agacuugcugauuuucugguuggaguguuuuu

SEQ ID NO: 220686 - RNA, 32 nt, Homo Sapiens
acgggcaugcuucauugaggcccaggaagagg

SEQ ID NO: 220687 - RNA, 32 nt, Homo Sapiens
aacaagaaaaggagcagcuuugagaguuaaaa

SEQ ID NO: 220688 - RNA, 32 nt, Homo Sapiens
ucccagcacuuugggaggccaagccagaugga

SEQ ID NO: 220689 - RNA, 32 nt, Homo Sapiens
aguuuuguauuuaacuuuauaauuaccuuguc

SEQ ID NO: 220690 - RNA, 32 nt, Homo Sapiens
ugaaacucuuauuugcaccaucuuuuauagcc

SEQ ID NO: 220691 - RNA, 32 nt, Homo Sapiens
cugccgagcugccugccccuuccagcugggca

SEQ ID NO: 220692 - RNA, 32 nt, Homo Sapiens
acgugacaggaagaggagggagagggugacga

SEQ ID NO: 220693 - RNA, 32 nt, Homo Sapiens
ccccgagucuccugcccucccugccaccuggc

SEQ ID NO: 220694 - RNA, 32 nt, Homo Sapiens
ggcgcacgcgguccgcgccggcgucagucugg

SEQ ID NO: 220695 - RNA, 32 nt, Homo Sapiens
cgcucccuuucugaccugggccaguucagcca

SEQ ID NO: 220696 - RNA, 32 nt, Homo Sapiens
acgggaggcccggggcgcuugcgaagaugaag

SEQ ID NO: 220697 - RNA, 32 nt, Homo Sapiens
ugaaaaguggaauuuuuagugauaaaauacau

SEQ ID NO: 220698 - RNA, 32 nt, Homo Sapiens
ccucagugcaggaguuggggacaggcugggga

SEQ ID NO: 220699 - RNA, 32 nt, Homo Sapiens
uggcuaaaaauuaaauguaaagggcaagagua

SEQ ID NO: 220700 - RNA, 32 nt, Homo Sapiens
aucuguuuuggauguugcuauagugacaugca

SEQ ID NO: 220701 - RNA, 32 nt, Homo Sapiens
accaaaaugcaaacgugaguagagaaugaaau

SEQ ID NO: 220702 - RNA, 32 nt, Homo Sapiens
ucaagacaaggagagccaaagacugaugggaa

SEQ ID NO: 220703 - RNA, 32 nt, Homo Sapiens
gauaaauaaauuaaauuaaugaaaaugugacu

SEQ ID NO: 220704 - RNA, 28 nt, Homo Sapiens
gguguggaggauaaaggcuucuguggaa

SEQ ID NO: 220705 - RNA, 31 nt, Homo Sapiens
accuucucagauacucucagaccugaaucau

SEQ ID NO: 220706 - RNA, 32 nt, Homo Sapiens
gcaacuguacgaagaaaacuuccaguggaacu

SEQ ID NO: 220707 - RNA, 32 nt, Homo Sapiens
aucugaucuucaucaaaggaaaacagaaguug

SEQ ID NO: 220708 - RNA, 32 nt, Homo Sapiens
acgaggcugccuucggcgcgcuucucagcagg

SEQ ID NO: 220709 - RNA, 32 nt, Homo Sapiens
aguacauuccguucuuuuuuuuuuuugagaca

SEQ ID NO: 220710 - RNA, 32 nt, Homo Sapiens
caaaaaaacacacacacacacacacacacaca

SEQ ID NO: 220711 - RNA, 32 nt, Homo Sapiens
caagaaaaugugcacauguacacacacacaca

SEQ ID NO: 220712 - RNA, 32 nt, Homo Sapiens
gcagcguccccuccuucagaggaggcucuggg

SEQ ID NO: 220713 - RNA, 32 nt, Homo Sapiens
caauuaaaccaucaaauacauuccauaugcgg

SEQ ID NO: 220714 - RNA, 32 nt, Homo Sapiens
uugagaggggaagagcugagugcgggcuggag

SEQ ID NO: 220715 - RNA, 32 nt, Homo Sapiens
caucugggaaaacagcugcaaccucggauacc

SEQ ID NO: 220716 - RNA, 32 nt, Homo Sapiens
aaaacaaagggcagagaguccuggagaaggug

SEQ ID NO: 220717 - RNA, 32 nt, Homo Sapiens
cucccgcaaccucacucuaguagagccugugc

SEQ ID NO: 220718 - RNA, 31 nt, Homo Sapiens
agagggcucuuggucgcucagggagguggag

SEQ ID NO: 220719 - RNA, 32 nt, Homo Sapiens
uaauucauacuggagagaaacuauaaugugag

SEQ ID NO: 220720 - RNA, 32 nt, Homo Sapiens
cagcuuuccugacaugcaaggaucuacuuuaa

SEQ ID NO: 220721 - RNA, 32 nt, Homo Sapiens
uuuguauuugaauuaaucaucauuccagcuuu

SEQ ID NO: 220722 - RNA, 32 nt, Homo Sapiens
caggucauauccugagauccagcccuccaccc

SEQ ID NO: 220723 - RNA, 32 nt, Homo Sapiens
uuggguaggcaggagagaagggcgccagcagg

SEQ ID NO: 220724 - RNA, 32 nt, Homo Sapiens
uucccacccagcuaaaaaccguuguuugcuuu

SEQ ID NO: 220725 - RNA, 32 nt, Homo Sapiens
ggaggccuggcaauuacaaacaucuucagaug

SEQ ID NO: 220726 - RNA, 32 nt, Homo Sapiens
aaaaagggaaauguccuagguuuucuuugugc

SEQ ID NO: 220727 - RNA, 32 nt, Homo Sapiens
uccccucugagguguuuauuccugcuugugug

SEQ ID NO: 220728 - RNA, 32 nt, Homo Sapiens
uuuauacaucacuguugaucuauacaagauuu

SEQ ID NO: 220729 - RNA, 32 nt, Homo Sapiens
uuacugcagggccugcgagcugcccgugcgcg

SEQ ID NO: 220730 - RNA, 32 nt, Homo Sapiens
aggauuuccucuuuuccaggcacauuguaaac

SEQ ID NO: 220731 - RNA, 32 nt, Homo Sapiens
agcuugccugucuuggaguugaaaugguccug

SEQ ID NO: 220732 - RNA, 32 nt, Homo Sapiens
cugcuaaagggagaaaugccaggcggacaaag

SEQ ID NO: 220733 - RNA, 30 nt, Homo Sapiens
cugucaggcagcuuugcagaagcccagaug

SEQ ID NO: 220734 - RNA, 32 nt, Homo Sapiens
uguuguugccgcccggcccuucccuccacagc

SEQ ID NO: 220735 - RNA, 32 nt, Homo Sapiens
ggcgccgguacuuaagagauuauggcaucaga

SEQ ID NO: 220736 - RNA, 30 nt, Homo Sapiens
ggccgccuguggccaccccaucuuuauaaa

SEQ ID NO: 220737 - RNA, 32 nt, Homo Sapiens
caguggaagaauuuaaauuuggcgcuacgauc

SEQ ID NO: 220738 - RNA, 32 nt, Homo Sapiens
uggccgcgggcucgguacccggugggucggug

SEQ ID NO: 220739 - RNA, 32 nt, Homo Sapiens
cuugaagaggaugacugagacauuaugggcca

SEQ ID NO: 220740 - RNA, 32 nt, Homo Sapiens
uuuuccugcccccguuuuaacaucacccagau

SEQ ID NO: 220741 - RNA, 32 nt, Homo Sapiens
ugacaaugaagggaaauuguuuauguguuaug

SEQ ID NO: 220742 - RNA, 32 nt, Homo Sapiens
cccuggccugcugcccgcacagugggcccuug

SEQ ID NO: 220743 - RNA, 32 nt, Homo Sapiens
cugauugccugcccugggggagagaaguguuu

SEQ ID NO: 220744 - RNA, 32 nt, Homo Sapiens
cuaaauuaaaacauaaauauauuuucaaaagc

SEQ ID NO: 220745 - RNA, 32 nt, Homo Sapiens
gguaaaagaacaaaacugaucagaguaaauuc

SEQ ID NO: 220746 - RNA, 32 nt, Homo Sapiens
gaggaggaagacugagguagagauuccaggcc

SEQ ID NO: 220747 - RNA, 32 nt, Homo Sapiens
caccguugccccagccccuuucuggccccaug

SEQ ID NO: 220748 - RNA, 32 nt, Homo Sapiens
auggaggcuucuccaaggaaaaggcagagacc

SEQ ID NO: 220749 - RNA, 32 nt, Homo Sapiens
uucacuguuucaucuaagugccucacauuuuu

SEQ ID NO: 220750 - RNA, 32 nt, Homo Sapiens
gauucagugccccccuuucuuaaagggguucc

SEQ ID NO: 220751 - RNA, 32 nt, Homo Sapiens
guauuuuucacuuuucuuaauauguuucaucg

SEQ ID NO: 220752 - RNA, 32 nt, Homo Sapiens
gggaaaggguguuacaaggaaaggcuaucggu

SEQ ID NO: 220753 - RNA, 32 nt, Homo Sapiens
uuccugguguugccaacaggcagagaggagau

SEQ ID NO: 220754 - RNA, 32 nt, Homo Sapiens
gagccggccucagcuggugcugccgcggcugg

SEQ ID NO: 220755 - RNA, 32 nt, Homo Sapiens
gccagcuacuuccuccuccccacuuguccgcu

SEQ ID NO: 220756 - RNA, 32 nt, Homo Sapiens
augugacuguuugaacuggaaggucugggguu

SEQ ID NO: 220757 - RNA, 32 nt, Homo Sapiens
uuguucauucagagggugauguguacauaucu

SEQ ID NO: 220758 - RNA, 32 nt, Homo Sapiens
aagcaggggggcccggagacggccccucuaag

SEQ ID NO: 220759 - RNA, 32 nt, Homo Sapiens
uccagccggcgcgcuccgggcucgcggccugc

SEQ ID NO: 220760 - RNA, 32 nt, Homo Sapiens
ugccuguaaucguagcacuuugagaggccaag

SEQ ID NO: 220761 - RNA, 32 nt, Homo Sapiens
acccaaucgcccuucaauuuuaucucacaauu

SEQ ID NO: 220762 - RNA, 32 nt, Homo Sapiens
ugagguccaagaaguucucacccauugaauuu

SEQ ID NO: 220763 - RNA, 32 nt, Homo Sapiens
gaggaccaugcugcgccgcaagcccuccaaug

SEQ ID NO: 220764 - RNA, 32 nt, Homo Sapiens
agaagaacucguauguacacuuuaguuuccag

SEQ ID NO: 220765 - RNA, 29 nt, Homo Sapiens
uucacauggggacaggggauggagcauga

SEQ ID NO: 220766 - RNA, 32 nt, Homo Sapiens
acuauaaaacaguaaacauccaguauugggag

SEQ ID NO: 220767 - RNA, 32 nt, Homo Sapiens
uuuauuugaaaaguaauguaucuuucagagug

SEQ ID NO: 220768 - RNA, 32 nt, Homo Sapiens
uucguucccucccgacugggaaugucaggcuc

SEQ ID NO: 220769 - RNA, 32 nt, Homo Sapiens
gauuggccgggcgugguggcaugcgccuguug

SEQ ID NO: 220770 - RNA, 32 nt, Homo Sapiens
guuuuuugguggcaaaaagggaaaauggcgaa

SEQ ID NO: 220771 - RNA, 32 nt, Homo Sapiens
gggagggcacggcgccgcuugcuuggccugcg

SEQ ID NO: 220772 - RNA, 32 nt, Homo Sapiens
ucuguaugaucaaugucuggauuugaaccuuu

SEQ ID NO: 220773 - RNA, 32 nt, Homo Sapiens
cugcccugcgcuccgcuuugcuuugggauuaa

SEQ ID NO: 220774 - RNA, 32 nt, Homo Sapiens
guaaaaaagagauggauacacuucuugggaau

SEQ ID NO: 220775 - RNA, 32 nt, Homo Sapiens
cugauuccaucccaggaacccaacagagcuca

SEQ ID NO: 220776 - RNA, 32 nt, Homo Sapiens
acccccaccaggccucccuccuccccuccuac

SEQ ID NO: 220777 - RNA, 32 nt, Homo Sapiens
aaucaagucccucuucccuccucccucuucau

SEQ ID NO: 220778 - RNA, 32 nt, Homo Sapiens
uauauuugucacuuuaaaaaauccauuucuuu

SEQ ID NO: 220779 - RNA, 32 nt, Homo Sapiens
gccuggcacggugcccaccuccccuuccgugg

SEQ ID NO: 220780 - RNA, 32 nt, Homo Sapiens
aucagagggcuuugaaaacauacacugagcug

SEQ ID NO: 220781 - RNA, 32 nt, Homo Sapiens
uccucuccuggcccugggcacaaacuuugccc

SEQ ID NO: 220782 - RNA, 31 nt, Homo Sapiens
gccugcguggaggaggcgccccgcgcagcug

SEQ ID NO: 220783 - RNA, 32 nt, Homo Sapiens
uucacaggauccuuccuggggaguggcuccag

SEQ ID NO: 220784 - RNA, 32 nt, Homo Sapiens
caccuguaauuccagcacuuugggaggccaag

SEQ ID NO: 220785 - RNA, 32 nt, Homo Sapiens
caucuacauuggcauucuggaccaugcccuuu

SEQ ID NO: 220786 - RNA, 32 nt, Homo Sapiens
ccacggggagcucccaagcagcagccaggaug

SEQ ID NO: 220787 - RNA, 32 nt, Homo Sapiens
agccugggaaggagagcuugcuuuuguugcuu

SEQ ID NO: 220788 - RNA, 32 nt, Homo Sapiens
aucccgagggucacagggacagugcagagcca

SEQ ID NO: 220789 - RNA, 32 nt, Homo Sapiens
aagcugugaagauaaaauaccaaauaaaauaa

SEQ ID NO: 220790 - RNA, 28 nt, Homo Sapiens
uuaugguggccuuccaggauguggcuca

SEQ ID NO: 220791 - RNA, 32 nt, Homo Sapiens
caaaguacuagaucaccuuaaaauuauuucac

SEQ ID NO: 220792 - RNA, 32 nt, Homo Sapiens
ccugugguuugacucuccuuagaaccaccgcc

SEQ ID NO: 220793 - RNA, 32 nt, Homo Sapiens
guccuuuggcccuauaugaucccggaaguucc

SEQ ID NO: 220794 - RNA, 32 nt, Homo Sapiens
agcuccgcggccggaccccgcggccccgcuuu

SEQ ID NO: 220795 - RNA, 32 nt, Homo Sapiens
gucauugaccaauugcaucccagcuaaaaagc

SEQ ID NO: 220796 - RNA, 32 nt, Homo Sapiens
ucgcugcacgggggcugccuggucacgcgcgg

SEQ ID NO: 220797 - RNA, 32 nt, Homo Sapiens
uauggccauuauugaacuaucacuucaguaaa

SEQ ID NO: 220798 - RNA, 32 nt, Homo Sapiens
ggcgccggcagcgucagcagcggcaacaagug

SEQ ID NO: 220799 - RNA, 32 nt, Homo Sapiens
ugauacagggucuugugucacccaggcuggag

SEQ ID NO: 220800 - RNA, 32 nt, Homo Sapiens
uucuuggccuggcacuuuuuuauaaaucaaug

SEQ ID NO: 220801 - RNA, 32 nt, Homo Sapiens
agccagggucucacuauguugcccaggcaggu

SEQ ID NO: 220802 - RNA, 32 nt, Homo Sapiens
gcuacucgcccggcccugggcggugggaggcg

SEQ ID NO: 220803 - RNA, 32 nt, Homo Sapiens
cucaccggccagggcgcucggugcuggaauuu

SEQ ID NO: 220804 - RNA, 32 nt, Homo Sapiens
cugggcaucgaugccuccuuucugggacuccc

SEQ ID NO: 220805 - RNA, 32 nt, Homo Sapiens
ucugaacucugcaucuauggacggugcuucug

SEQ ID NO: 220806 - RNA, 32 nt, Homo Sapiens
cuguaugacuuuaaaauacauuuuaaaauaua

SEQ ID NO: 220807 - RNA, 32 nt, Homo Sapiens
ccaccugccugccugucgugccuuggacccag

SEQ ID NO: 220808 - RNA, 32 nt, Homo Sapiens
ccagaucgaccccuagaugccuacacaauauc

SEQ ID NO: 220809 - RNA, 32 nt, Homo Sapiens
cuuucacagcuagaaauugaaagggccuuggg

SEQ ID NO: 220810 - RNA, 32 nt, Homo Sapiens
cuuccagcucccgccggcgcugugacggccga

SEQ ID NO: 220811 - RNA, 32 nt, Homo Sapiens
aguaaucacccauguguaucugcaccuucuca

SEQ ID NO: 220812 - RNA, 32 nt, Homo Sapiens
ggucucccuggccucagggcucugacucugcc

SEQ ID NO: 220813 - RNA, 32 nt, Homo Sapiens
caucauuuuuaaacuaauguuuuucuauauua

SEQ ID NO: 220814 - RNA, 32 nt, Homo Sapiens
caaagucacacauucagaacugucucuggcag

SEQ ID NO: 220815 - RNA, 32 nt, Homo Sapiens
ugaguaccuaugacccauaacacauauacauu

SEQ ID NO: 220816 - RNA, 32 nt, Homo Sapiens
gaucaagaggaucauuccugugcuaccugcuu

SEQ ID NO: 220817 - RNA, 32 nt, Homo Sapiens
uuuaagggccaccaccgcccucauggaaagag

SEQ ID NO: 220818 - RNA, 32 nt, Homo Sapiens
cgggaagcagcacccagaccauguaggacacc

SEQ ID NO: 220819 - RNA, 32 nt, Homo Sapiens
cugcccgcaauucggccaggccucgagccugc

SEQ ID NO: 220820 - RNA, 32 nt, Homo Sapiens
cuauuuuguaguaguuguacuaugauaaucug

SEQ ID NO: 220821 - RNA, 32 nt, Homo Sapiens
uacugccccagaggucccuggaggaagcugga

SEQ ID NO: 220822 - RNA, 32 nt, Homo Sapiens
ccagaugcuggcguuacugcuaaccaaggagc

SEQ ID NO: 220823 - RNA, 32 nt, Homo Sapiens
aucugcuucucagaucuaagugacuguacuca

SEQ ID NO: 220824 - RNA, 30 nt, Homo Sapiens
agcagugucugugugucugcauaaacccuc

SEQ ID NO: 220825 - RNA, 32 nt, Homo Sapiens
uaucuuuuuuccuaguuuuucuaauacuaaug

SEQ ID NO: 220826 - RNA, 32 nt, Homo Sapiens
cggcgaggacaggaggcgaccgcgggcgcugc

SEQ ID NO: 220827 - RNA, 32 nt, Homo Sapiens
uugaaggcugagccccacaucuccagguuccc

SEQ ID NO: 220828 - RNA, 32 nt, Homo Sapiens
ucucaaagaacuucagaggaaaaguuaaaugg

SEQ ID NO: 220829 - RNA, 32 nt, Homo Sapiens
cguggguggcacagcgcugcucccagcuugug

SEQ ID NO: 220830 - RNA, 32 nt, Homo Sapiens
gcgugguggaagaggggacaggucccucaccc

SEQ ID NO: 220831 - RNA, 32 nt, Homo Sapiens
aucaauuccggaaacaguuucuggagaucucc

SEQ ID NO: 220832 - RNA, 32 nt, Homo Sapiens
gagcaagucccaucucaccucuaggccucagu

SEQ ID NO: 220833 - RNA, 32 nt, Homo Sapiens
cuuggaggagagagaccccgcacccggcucgu

SEQ ID NO: 220834 - RNA, 32 nt, Homo Sapiens
ccccgggcgagggcugcccggaggagccgagg

SEQ ID NO: 220835 - RNA, 32 nt, Homo Sapiens
uuuguaagaugaauacuuuuuuuuaaugugca

SEQ ID NO: 220836 - RNA, 27 nt, Homo Sapiens
ucauucuugaucuucagccuucguuug

SEQ ID NO: 220837 - RNA, 32 nt, Homo Sapiens
gcgcagguguaccuggcggccgugcuggagca

SEQ ID NO: 220838 - RNA, 32 nt, Homo Sapiens
ugguggggcggguggggccauaaacgguuccu

SEQ ID NO: 220839 - RNA, 32 nt, Homo Sapiens
cccucccuuucugcacccucgcacccacaccc

SEQ ID NO: 220840 - RNA, 32 nt, Homo Sapiens
aaugacuaacuucuaaaagccccaacacauga

SEQ ID NO: 220841 - RNA, 32 nt, Homo Sapiens
ggacaaggacaaaggcuggaggauggaguagg

SEQ ID NO: 220842 - RNA, 32 nt, Homo Sapiens
accgucccgccagcacgccagccccgacucag

SEQ ID NO: 220843 - RNA, 32 nt, Homo Sapiens
cccgccucccaguagccgcgccucacccuagg

SEQ ID NO: 220844 - RNA, 32 nt, Homo Sapiens
uugaaaaauaauauuaaucauuuugcuguuaa

SEQ ID NO: 220845 - RNA, 32 nt, Homo Sapiens
ccuuggccacguguagccccagcugucugcag

SEQ ID NO: 220846 - RNA, 31 nt, Homo Sapiens
cacuuggcaaggucagugaggggccaguaga

SEQ ID NO: 220847 - RNA, 32 nt, Homo Sapiens
aggggacaccacgugcccaggaccccacaguc

SEQ ID NO: 220848 - RNA, 32 nt, Homo Sapiens
agugauagcauuaagagaaauaccuaauguag

SEQ ID NO: 220849 - RNA, 32 nt, Homo Sapiens
agguucuucugcaauuuacuuuucucauuguu

SEQ ID NO: 220850 - RNA, 32 nt, Homo Sapiens
gacccccuaugcccugccccagcccuggcucu

SEQ ID NO: 220851 - RNA, 32 nt, Homo Sapiens
cuccagggcuggaauccugugcucccucugug

SEQ ID NO: 220852 - RNA, 32 nt, Homo Sapiens
acaccucccuucauagugcccagccgucguua

SEQ ID NO: 220853 - RNA, 32 nt, Homo Sapiens
uugugccucucuuucuucuccucuggcugaau

SEQ ID NO: 220854 - RNA, 32 nt, Homo Sapiens
ggcuggucucaaacucuugaccucaggugauc

SEQ ID NO: 220855 - RNA, 32 nt, Homo Sapiens
uguacguacauggggaccugucugcauauaca

SEQ ID NO: 220856 - RNA, 32 nt, Homo Sapiens
cauaaucugaaucacagcccuauaucagugcu

SEQ ID NO: 220857 - RNA, 32 nt, Homo Sapiens
aguauauauacacacacacacacacacacaca

SEQ ID NO: 220858 - RNA, 32 nt, Homo Sapiens
ggaacuaugugcuuuuaaccuuuggaaauaca

SEQ ID NO: 220859 - RNA, 32 nt, Homo Sapiens
uccuuugagaaagaaauaauuguuugagcgca

SEQ ID NO: 220860 - RNA, 32 nt, Homo Sapiens
uagcuuugccagcagcugcgccgcggcagggg

SEQ ID NO: 220861 - RNA, 30 nt, Homo Sapiens
aguaggagcaggcgccagguuuccuggagc

SEQ ID NO: 220862 - RNA, 32 nt, Homo Sapiens
uugacaaaucauauuguauucuuuuguacaaa

SEQ ID NO: 220863 - RNA, 32 nt, Homo Sapiens
uuugaguuaccacuaaaaauggaaggaaauau

SEQ ID NO: 220864 - RNA, 32 nt, Homo Sapiens
cauauauauuaauacugguauuuuuacuuaau

SEQ ID NO: 220865 - RNA, 32 nt, Homo Sapiens
aucuaucguggcggcgacgggacccgccuccc

SEQ ID NO: 220866 - RNA, 32 nt, Homo Sapiens
uagguguucaacaaaaaugugaugaccaaaug

SEQ ID NO: 220867 - RNA, 29 nt, Homo Sapiens
aucucuauauguauguguucccaguugug

SEQ ID NO: 220868 - RNA, 32 nt, Homo Sapiens
agugcuucucccugugcugagguacaggagcc

SEQ ID NO: 220869 - RNA, 32 nt, Homo Sapiens
agaggucgugaggccagcucccggggccccug

SEQ ID NO: 220870 - RNA, 32 nt, Homo Sapiens
augaaguuugcugugguauugcauagccuugc

SEQ ID NO: 220871 - RNA, 32 nt, Homo Sapiens
agcacuuugggaggccgagauggguggaucac

SEQ ID NO: 220872 - RNA, 32 nt, Homo Sapiens
aaaauguugggaugccugaggaccaggagcca

SEQ ID NO: 220873 - RNA, 28 nt, Homo Sapiens
ccgcuggggcggccaggccgugaggacu

SEQ ID NO: 220874 - RNA, 32 nt, Homo Sapiens
acccgccagccugcaccgcgggcacguccuuc

SEQ ID NO: 220875 - RNA, 32 nt, Homo Sapiens
ccucuguccuucccuggcccugcugccgacca

SEQ ID NO: 220876 - RNA, 32 nt, Homo Sapiens
acccccaggaggauugaaggagaccggugggg

SEQ ID NO: 220877 - RNA, 32 nt, Homo Sapiens
gcccaucugggcaaggcccccaucgccugccu

SEQ ID NO: 220878 - RNA, 32 nt, Homo Sapiens
acaaugaucuuuuaaaaagaugaugcaguucu

SEQ ID NO: 220879 - RNA, 32 nt, Homo Sapiens
cugugccuaccaaacacugucaauguuuauua

SEQ ID NO: 220880 - RNA, 32 nt, Homo Sapiens
cucauauacugugaacaaaacaacauauaaca

SEQ ID NO: 220881 - RNA, 32 nt, Homo Sapiens
ugggcacguucuccgaggcaugugucucccug

SEQ ID NO: 220882 - RNA, 32 nt, Homo Sapiens
gacaaagaggauguggauaauauuaugacauu

SEQ ID NO: 220883 - RNA, 32 nt, Homo Sapiens
ugccuuuagccuucuauauacaucaguggaaa

SEQ ID NO: 220884 - RNA, 32 nt, Homo Sapiens
ccgggcuuggccccggcccuagcucgucggcu

SEQ ID NO: 220885 - RNA, 32 nt, Homo Sapiens
cagagccauagucccacuguggguccugcaau

SEQ ID NO: 220886 - RNA, 32 nt, Homo Sapiens
uaugaaauaaaauuauuuuucagaauuaaauu

SEQ ID NO: 220887 - RNA, 32 nt, Homo Sapiens
gccuaaccuuggccuacuggcaagacagaugg

SEQ ID NO: 220888 - RNA, 32 nt, Homo Sapiens
uuuauaaagcuacuggccccagaugcucaggg

SEQ ID NO: 220889 - RNA, 32 nt, Homo Sapiens
ccgccugugggguguccccggcgcgggagggu

SEQ ID NO: 220890 - RNA, 32 nt, Homo Sapiens
ugacuucauguuaaaaacccucaacaaaccag

SEQ ID NO: 220891 - RNA, 32 nt, Homo Sapiens
uuguggcaucuuccucuaguccuucccaccuc

SEQ ID NO: 220892 - RNA, 32 nt, Homo Sapiens
auaaaaaauuuuuauuuuucucucuuacugau

SEQ ID NO: 220893 - RNA, 32 nt, Homo Sapiens
guacccacauacucuuuuuuuuuuuuuuguag

SEQ ID NO: 220894 - RNA, 32 nt, Homo Sapiens
acguuaaagggagagccagagaacucaugggg

SEQ ID NO: 220895 - RNA, 32 nt, Homo Sapiens
ucugggcucagguguauggcccacagcuuuua

SEQ ID NO: 220896 - RNA, 32 nt, Homo Sapiens
gauguacaugguauauuuugaaguagaaauaa

SEQ ID NO: 220897 - RNA, 32 nt, Homo Sapiens
agacucugucuccugcuccuucaggcugcugg

SEQ ID NO: 220898 - RNA, 32 nt, Homo Sapiens
agaggguuggugaucauucuacaggcacuguu

SEQ ID NO: 220899 - RNA, 32 nt, Homo Sapiens
uuuggaaagcuacaguaauuucuguauuacau

SEQ ID NO: 220900 - RNA, 32 nt, Homo Sapiens
uuaaauauaaaacauucccaaguuuggaucag

SEQ ID NO: 220901 - RNA, 32 nt, Homo Sapiens
gaaaacggaugcggcccggcccgcagagcuca

SEQ ID NO: 220902 - RNA, 32 nt, Homo Sapiens
gagcuggcggcgggcggcgcgcgcuuccgagg

SEQ ID NO: 220903 - RNA, 32 nt, Homo Sapiens
cugguucuuagauuccucucccaguccucuuu

SEQ ID NO: 220904 - RNA, 32 nt, Homo Sapiens
aaggagacccgccccagggccgggcuuggccu

SEQ ID NO: 220905 - RNA, 32 nt, Homo Sapiens
aaaggugugcuuccugcuguaugugagcugua

SEQ ID NO: 220906 - RNA, 32 nt, Homo Sapiens
ugggaccuggcaucucugggccucgagggcag

SEQ ID NO: 220907 - RNA, 32 nt, Homo Sapiens
ccuucaggagaccagcgagaggcccuggccca

SEQ ID NO: 220908 - RNA, 32 nt, Homo Sapiens
ccuccccugccagcccuagcgugacuacccag

SEQ ID NO: 220909 - RNA, 32 nt, Homo Sapiens
acaaaggagucuuuuagugcuaacaugucccu

SEQ ID NO: 220910 - RNA, 32 nt, Homo Sapiens
guuauugcagaagagauugagaaaauugguau

SEQ ID NO: 220911 - RNA, 32 nt, Homo Sapiens
aguuuauuugaaaaauuucuagauggucucau

SEQ ID NO: 220912 - RNA, 32 nt, Homo Sapiens
ggaagagggcagaggggccagaaggacuccau

SEQ ID NO: 220913 - RNA, 32 nt, Homo Sapiens
acuucacaaacugucuuaauuuagacaauuac

SEQ ID NO: 220914 - RNA, 32 nt, Homo Sapiens
uguguagauuguguaaauuccuguugucugac

SEQ ID NO: 220915 - RNA, 30 nt, Homo Sapiens
agcccgaacugaggcggcggcgggagcccg

SEQ ID NO: 220916 - RNA, 32 nt, Homo Sapiens
acuuauucucgggccgugcggcugcuagguug

SEQ ID NO: 220917 - RNA, 32 nt, Homo Sapiens
uuuuuucucuauauuucuaguaaaguuuucga

SEQ ID NO: 220918 - RNA, 32 nt, Homo Sapiens
augcaguguggaccggccgggcgcugacggag

SEQ ID NO: 220919 - RNA, 32 nt, Homo Sapiens
cggaucgcagggucaggagaucgagaccaucc

SEQ ID NO: 220920 - RNA, 32 nt, Homo Sapiens
aauccaguuaucaaaauugacuccagaagaga

SEQ ID NO: 220921 - RNA, 32 nt, Homo Sapiens
gacuucuuuacuacacugcacuggauugcuau

SEQ ID NO: 220922 - RNA, 32 nt, Homo Sapiens
aggggagaaaaaaugaccacugaacuuacauu

SEQ ID NO: 220923 - RNA, 32 nt, Homo Sapiens
aacugaggagaugaagguuacagugagccaag

SEQ ID NO: 220924 - RNA, 32 nt, Homo Sapiens
gguccaggcaaggcccugggggucuccuuaaa

SEQ ID NO: 220925 - RNA, 32 nt, Homo Sapiens
uuauuuaccuggggaaggagcuuuuaggguug

SEQ ID NO: 220926 - RNA, 32 nt, Homo Sapiens
gcacugaguccucccugucaauccaauuugug

SEQ ID NO: 220927 - RNA, 32 nt, Homo Sapiens
cgguacagaacaguuccuucacucccaauagc

SEQ ID NO: 220928 - RNA, 32 nt, Homo Sapiens
ucagauccuccucauucacaucgcagauuacu

SEQ ID NO: 220929 - RNA, 32 nt, Homo Sapiens
guaaugaaaaggaaaguugugaucaaauuuua

SEQ ID NO: 220930 - RNA, 32 nt, Homo Sapiens
cagagcagacugcucuguccuuggccuucaca

SEQ ID NO: 220931 - RNA, 32 nt, Homo Sapiens
cccugcuccuguuuuucuuuaguuuggaucug

SEQ ID NO: 220932 - RNA, 32 nt, Homo Sapiens
uucaggaggggccggaguuauguaucugaagc

SEQ ID NO: 220933 - RNA, 32 nt, Homo Sapiens
uaacagcaggagcucauccucuguggagccac

SEQ ID NO: 220934 - RNA, 32 nt, Homo Sapiens
aggaugaaaaauacauuuuaaaaauuauuuug

SEQ ID NO: 220935 - RNA, 32 nt, Homo Sapiens
aaaaaggccugaaggagaaggguggagugaga

SEQ ID NO: 220936 - RNA, 32 nt, Homo Sapiens
ucucgaucucaaccucgugauccacccaccuc

SEQ ID NO: 220937 - RNA, 32 nt, Homo Sapiens
cuucacauaaaagcagauaccuuuaaguuugu

SEQ ID NO: 220938 - RNA, 32 nt, Homo Sapiens
guaguggugccgacuuccuguuguuugaggcc

SEQ ID NO: 220939 - RNA, 32 nt, Homo Sapiens
auuuugugauaaaacaacaaguaaaucauaua

SEQ ID NO: 220940 - RNA, 32 nt, Homo Sapiens
ggagaaauuggagcaggaaaagaaauuaucaa

SEQ ID NO: 220941 - RNA, 32 nt, Homo Sapiens
auucuugauccggaacuuugucacccaggaac

SEQ ID NO: 220942 - RNA, 32 nt, Homo Sapiens
agaccugaagacgcaggaaaagaaucuggcuc

SEQ ID NO: 220943 - RNA, 32 nt, Homo Sapiens
aacuuggcccucuugcgggccuggacaagguc

SEQ ID NO: 220944 - RNA, 32 nt, Homo Sapiens
gaacaagaauuggaagcugcccugcccauggg

SEQ ID NO: 220945 - RNA, 32 nt, Homo Sapiens
ggaggacagaaccaacgggucugugggacugg

SEQ ID NO: 220946 - RNA, 32 nt, Homo Sapiens
aacacauuuacauaguuuaaauaucagaagug

SEQ ID NO: 220947 - RNA, 32 nt, Homo Sapiens
accucggagacgggacccugcccagagcugag

SEQ ID NO: 220948 - RNA, 32 nt, Homo Sapiens
aguguuggcgagaggaggggcccguugucucc

SEQ ID NO: 220949 - RNA, 32 nt, Homo Sapiens
uauucugaaaauaccaguguguggcaguucuc

SEQ ID NO: 220950 - RNA, 32 nt, Homo Sapiens
ggguuaugagagagccucaaaagagagggcaa

SEQ ID NO: 220951 - RNA, 32 nt, Homo Sapiens
agaacuuccgucacaauucagcccuuguaauu

SEQ ID NO: 220952 - RNA, 32 nt, Homo Sapiens
ccaggcgcgccguccccggacccggcgugcgu

SEQ ID NO: 220953 - RNA, 32 nt, Homo Sapiens
ucacagccaggcaauuauuccuguggauguug

SEQ ID NO: 220954 - RNA, 32 nt, Homo Sapiens
agcuuuugugaucacacaccacagggagaauc

SEQ ID NO: 220955 - RNA, 32 nt, Homo Sapiens
ucauuugcauaaaaaucagggacaguuuccaa

SEQ ID NO: 220956 - RNA, 32 nt, Homo Sapiens
ccugucuugugggcacaucuugcuccaucccu

SEQ ID NO: 220957 - RNA, 32 nt, Homo Sapiens
caggugcccgucugauggggagauggcugaug

SEQ ID NO: 220958 - RNA, 32 nt, Homo Sapiens
aaauauugugggaguucucccacccuaagucu

SEQ ID NO: 220959 - RNA, 32 nt, Homo Sapiens
gaggaagaggggcugcugccaucugccccaga

SEQ ID NO: 220960 - RNA, 32 nt, Homo Sapiens
aaaagauaugaagaauaaaauaaugaauaucu

SEQ ID NO: 220961 - RNA, 32 nt, Homo Sapiens
cuggacccgacgagcaguguugacagugaacc

SEQ ID NO: 220962 - RNA, 32 nt, Homo Sapiens
ucuuugguucagaacacagguuuuugccuaac

SEQ ID NO: 220963 - RNA, 32 nt, Homo Sapiens
ggccccucggaggcagcgucaucgguaguuuu

SEQ ID NO: 220964 - RNA, 32 nt, Homo Sapiens
gccccggugcgcgucuccugugcgcgccccuc

SEQ ID NO: 220965 - RNA, 32 nt, Homo Sapiens
gcaaggaauggauucaggauguuguuggagaa

SEQ ID NO: 220966 - RNA, 32 nt, Homo Sapiens
ccucaaaagaauuuaauuuuauauuuaugagg

SEQ ID NO: 220967 - RNA, 32 nt, Homo Sapiens
aggcgggcgaggggcagccgagcagggagcuu

SEQ ID NO: 220968 - RNA, 32 nt, Homo Sapiens
gagcaggaaauguacacacagauuccuguccc

SEQ ID NO: 220969 - RNA, 32 nt, Homo Sapiens
auauagcgcgccccagcagggcccgcgccagg

SEQ ID NO: 220970 - RNA, 32 nt, Homo Sapiens
ccaccugcacuuuguuucugcacuauuaugua

SEQ ID NO: 220971 - RNA, 32 nt, Homo Sapiens
accaccuucuauucgaugggcucuacguauca

SEQ ID NO: 220972 - RNA, 32 nt, Homo Sapiens
cuccuccccucccccaauacaagguuuuugac

SEQ ID NO: 220973 - RNA, 32 nt, Homo Sapiens
aggggagguucagugaauuguguaggagaggu

SEQ ID NO: 220974 - RNA, 32 nt, Homo Sapiens
acagcccugaggagcaggcagcaggcuuaucc

SEQ ID NO: 220975 - RNA, 32 nt, Homo Sapiens
ggauaggaggugcuccagaagcacgggacugu

SEQ ID NO: 220976 - RNA, 30 nt, Homo Sapiens
agagcaguucuugccacccagucuuguauu

SEQ ID NO: 220977 - RNA, 32 nt, Homo Sapiens
cgguuuguuuacacauuuccuguuguacauuu

SEQ ID NO: 220978 - RNA, 32 nt, Homo Sapiens
accccaggccgcgcucugugggccucugaggg

SEQ ID NO: 220979 - RNA, 28 nt, Homo Sapiens
ucaauugcaauaaaaacauuauaacaug

SEQ ID NO: 220980 - RNA, 32 nt, Homo Sapiens
ccccucgcccacccucacugcgccaggcccag

SEQ ID NO: 220981 - RNA, 32 nt, Homo Sapiens
uuuguuuuuaguaggugauauucauucguauc

SEQ ID NO: 220982 - RNA, 32 nt, Homo Sapiens
uggauuuuucaauaaugaauuuagaauacacc

SEQ ID NO: 220983 - RNA, 32 nt, Homo Sapiens
ccuguguaucuacuaucuccaguuuguauuau

SEQ ID NO: 220984 - RNA, 32 nt, Homo Sapiens
gccagcaacuauccuugccaggguuuuuucau

SEQ ID NO: 220985 - RNA, 32 nt, Homo Sapiens
caaggaggaaauaacuaagagauucuucuagg

SEQ ID NO: 220986 - RNA, 27 nt, Homo Sapiens
cccacguccuucucagccugcccucga

SEQ ID NO: 220987 - RNA, 32 nt, Homo Sapiens
gccugggaggaucagucuguccaggucagcga

SEQ ID NO: 220988 - RNA, 32 nt, Homo Sapiens
gaauuguguauucaccagcaucaugaaacagu

SEQ ID NO: 220989 - RNA, 32 nt, Homo Sapiens
ggccucagucuuccgcccccagcccacucuca

SEQ ID NO: 220990 - RNA, 32 nt, Homo Sapiens
aucuuuuguaguuaacuguacuuuuuaagagc

SEQ ID NO: 220991 - RNA, 32 nt, Homo Sapiens
uaaugcuguauauaaaauuugcacuggaaauu

SEQ ID NO: 220992 - RNA, 31 nt, Homo Sapiens
caguaaagaagguaaagaagauauaaaaaug

SEQ ID NO: 220993 - RNA, 32 nt, Homo Sapiens
gccugcauauccuguaccauuuaggcccugca

SEQ ID NO: 220994 - RNA, 32 nt, Homo Sapiens
gacuguuggggaggcaugauugguuuugaaau

SEQ ID NO: 220995 - RNA, 32 nt, Homo Sapiens
ucugugccuaucugcuuugaccaugugaaaaa

SEQ ID NO: 220996 - RNA, 32 nt, Homo Sapiens
ccccuagcaguuaaugccacuccagucucugc

SEQ ID NO: 220997 - RNA, 32 nt, Homo Sapiens
cccuacaccacauacaagcugagagugguggc

SEQ ID NO: 220998 - RNA, 32 nt, Homo Sapiens
gcuuguaauguuugucaugguacauagaaaac

SEQ ID NO: 220999 - RNA, 32 nt, Homo Sapiens
uuuucugcuauuucuuuucaguuuuuccaaag

SEQ ID NO: 221000 - RNA, 32 nt, Homo Sapiens
gaauuauguuuuuauaggagaagccuggaaga

SEQ ID NO: 221001 - RNA, 32 nt, Homo Sapiens
uuaauucuguaaaagugaaauaaaauaacuuu

SEQ ID NO: 221002 - RNA, 32 nt, Homo Sapiens
uacugaagauaaaauauaaacaaaugucaacu

SEQ ID NO: 221003 - RNA, 32 nt, Homo Sapiens
uuguuuugauagauuauaucuuacuccuaaau

SEQ ID NO: 221004 - RNA, 32 nt, Homo Sapiens
uuaugugaucauugauuuuauuucauauggaa

SEQ ID NO: 221005 - RNA, 32 nt, Homo Sapiens
uuagaucagcaauaaugacuauguaaucucaa

SEQ ID NO: 221006 - RNA, 32 nt, Homo Sapiens
uauagaaaacaaaaugaacucuauauuaaaaa

SEQ ID NO: 221007 - RNA, 32 nt, Homo Sapiens
aauaugguuugaugaagaccgugucagacuca

SEQ ID NO: 221008 - RNA, 32 nt, Homo Sapiens
ccugccccucccccggccccccaucccucacu

SEQ ID NO: 221009 - RNA, 32 nt, Homo Sapiens
caucuaguagagaacucaucagagugcggauu

SEQ ID NO: 221010 - RNA, 32 nt, Homo Sapiens
aagaguggucugagcacgaguugcagccaggg

SEQ ID NO: 221011 - RNA, 32 nt, Homo Sapiens
uguaugcaugguguugggaaggugauggugac

SEQ ID NO: 221012 - RNA, 32 nt, Homo Sapiens
cccuaugucccccugauguuacgcauaugcuc

SEQ ID NO: 221013 - RNA, 32 nt, Homo Sapiens
ugauaacacccauuuuaaagguugaggaaaca

SEQ ID NO: 221014 - RNA, 32 nt, Homo Sapiens
aaaacaaaaaaaaaacaaaaacugacgcacug

SEQ ID NO: 221015 - RNA, 32 nt, Homo Sapiens
ccguauggaaaaccugguagcccugcgaguua

SEQ ID NO: 221016 - RNA, 32 nt, Homo Sapiens
ccaagcccugcccagagcugaacccuguagcu

SEQ ID NO: 221017 - RNA, 32 nt, Homo Sapiens
aagaaauaucuagugaaaaaacaggaagcgua

SEQ ID NO: 221018 - RNA, 32 nt, Homo Sapiens
ucccacacagaaaauguuaaggauuucaagag

SEQ ID NO: 221019 - RNA, 32 nt, Homo Sapiens
uauacuguauuuuuaccuuuuuccuuccuuau

SEQ ID NO: 221020 - RNA, 32 nt, Homo Sapiens
auuaucugguugguuuuguguuuucugguaaa

SEQ ID NO: 221021 - RNA, 32 nt, Homo Sapiens
aggcgagcagaucaccugagguccggauuuca

SEQ ID NO: 221022 - RNA, 32 nt, Homo Sapiens
cagcugguagcuuuugaugagacagaauaaag

SEQ ID NO: 221023 - RNA, 32 nt, Homo Sapiens
cugcaagggaguaugagaaggugcagccacuc

SEQ ID NO: 221024 - RNA, 32 nt, Homo Sapiens
cccuuacacacacccucagcacucuugccccu

SEQ ID NO: 221025 - RNA, 32 nt, Homo Sapiens
uccuggacugguuaucuuguuauuauuguuaa

SEQ ID NO: 221026 - RNA, 32 nt, Homo Sapiens
cggagccaucuugggcccggcgcgcagacccg

SEQ ID NO: 221027 - RNA, 32 nt, Homo Sapiens
cgccccuucuccccggccgcacccgagaccuc

SEQ ID NO: 221028 - RNA, 32 nt, Homo Sapiens
uugauguugcagcuuugcucacuuccuggcaa

SEQ ID NO: 221029 - RNA, 32 nt, Homo Sapiens
aaaaucaggaccaagcuucugauccucccaaa

SEQ ID NO: 221030 - RNA, 32 nt, Homo Sapiens
aaaucaacaaaauaugcuuucuggagaacugu

SEQ ID NO: 221031 - RNA, 32 nt, Homo Sapiens
gccagcgccuuccacuccaucauuucauuuca

SEQ ID NO: 221032 - RNA, 32 nt, Homo Sapiens
cauagacauaucuauuaaguggaaagaaggcu

SEQ ID NO: 221033 - RNA, 32 nt, Homo Sapiens
ugcuguucuucagugcugaaauccacgccaga

SEQ ID NO: 221034 - RNA, 32 nt, Homo Sapiens
acauuuaaaaauuauuaaacauuuaaaaauua

SEQ ID NO: 221035 - RNA, 32 nt, Homo Sapiens
gaaacugaaggguaacauucuaacaaguaaac

SEQ ID NO: 221036 - RNA, 32 nt, Homo Sapiens
agagaaguuucuuuucugguuuuaguuuggga

SEQ ID NO: 221037 - RNA, 32 nt, Homo Sapiens
aagugugaucauuguugaacuucagcuccagu

SEQ ID NO: 221038 - RNA, 32 nt, Homo Sapiens
cacaaccaagaaaggaaggcaguugggcccca

SEQ ID NO: 221039 - RNA, 32 nt, Homo Sapiens
aaaaagccugaagagaugagauaggaggaaag

SEQ ID NO: 221040 - RNA, 32 nt, Homo Sapiens
agauacucagaagccaauaacaugacaggagc

SEQ ID NO: 221041 - RNA, 32 nt, Homo Sapiens
ucgugagccucccagagcccaggccuccgugg

SEQ ID NO: 221042 - RNA, 32 nt, Homo Sapiens
ucggucagcucgugugaauccugggaccucuu

SEQ ID NO: 221043 - RNA, 31 nt, Homo Sapiens
gucccgcggcacucagccugcacgcccuccg

SEQ ID NO: 221044 - RNA, 32 nt, Homo Sapiens
auaugagaagccauauuuuuacauaggaguca

SEQ ID NO: 221045 - RNA, 32 nt, Homo Sapiens
aaggcugccguggucaaccucuccugugguuc

SEQ ID NO: 221046 - RNA, 32 nt, Homo Sapiens
ucggccuggacugggagcccccggccccgggc

SEQ ID NO: 221047 - RNA, 32 nt, Homo Sapiens
gacugauuaauagaauauaauuugccaggacc

SEQ ID NO: 221048 - RNA, 32 nt, Homo Sapiens
ugaaaguuucaaccagaaaaccucaagugaau

SEQ ID NO: 221049 - RNA, 32 nt, Homo Sapiens
aagaggucccucggggagcaggggucccugga

SEQ ID NO: 221050 - RNA, 27 nt, Homo Sapiens
aaaauguccuucuucaguuuccguaag

SEQ ID NO: 221051 - RNA, 32 nt, Homo Sapiens
gucacauuuaggguuuauuuuuuacacuuggc

SEQ ID NO: 221052 - RNA, 32 nt, Homo Sapiens
agcugauguuccagcccugugcccccugccca

SEQ ID NO: 221053 - RNA, 32 nt, Homo Sapiens
uuccuugaaacauuuuuuuuuaucugccugua

SEQ ID NO: 221054 - RNA, 32 nt, Homo Sapiens
cucgcccggcccggcgagccccgggcgugaac

SEQ ID NO: 221055 - RNA, 32 nt, Homo Sapiens
gauggggccuuugguaagggaaguuuagauga

SEQ ID NO: 221056 - RNA, 32 nt, Homo Sapiens
aaccaaagaaucuugcacucaaugcacagugu

SEQ ID NO: 221057 - RNA, 32 nt, Homo Sapiens
aauugauaauaguuuggaguaagggacuucau

SEQ ID NO: 221058 - RNA, 32 nt, Homo Sapiens
uggaggagaccuaccggcaagcaaaggagcgg

SEQ ID NO: 221059 - RNA, 32 nt, Homo Sapiens
cugcccugcacacuggcucaccacuguuggac

SEQ ID NO: 221060 - RNA, 32 nt, Homo Sapiens
gacacuggguacuguuacugugaugcuauuga

SEQ ID NO: 221061 - RNA, 32 nt, Homo Sapiens
caggaaauguucgcagauaccagugcaccagg

SEQ ID NO: 221062 - RNA, 32 nt, Homo Sapiens
agagcuacaagugcuuggucuuucccaagaau

SEQ ID NO: 221063 - RNA, 32 nt, Homo Sapiens
gcaauuaugucacccuuuuuuauugcaguugg

SEQ ID NO: 221064 - RNA, 32 nt, Homo Sapiens
gccagucaucugugaagcuagggcgccuaccc

SEQ ID NO: 221065 - RNA, 32 nt, Homo Sapiens
ccacaacaaccacugucuuuguuaccuuuuuu

SEQ ID NO: 221066 - RNA, 32 nt, Homo Sapiens
gccuuaacgacacuagugcaaaugguaacaug

SEQ ID NO: 221067 - RNA, 32 nt, Homo Sapiens
cgaggcucccuucccuuccccagccgcacuca

SEQ ID NO: 221068 - RNA, 32 nt, Homo Sapiens
aguucuuggccaugcuuggccugucacacgcc

SEQ ID NO: 221069 - RNA, 32 nt, Homo Sapiens
uugguuauggaagugacuaaugcugaaaaaau

SEQ ID NO: 221070 - RNA, 32 nt, Homo Sapiens
cugaaaacuucaaaaucagggccuggcagagc

SEQ ID NO: 221071 - RNA, 32 nt, Homo Sapiens
cucgccgcgugcugcgcucaguucuuuguugg

SEQ ID NO: 221072 - RNA, 32 nt, Homo Sapiens
aagcagcuuggcuuuuuuuuuaaaucaaugca

SEQ ID NO: 221073 - RNA, 32 nt, Homo Sapiens
cgccagaggagaaaugucugaaguaagacccc

SEQ ID NO: 221074 - RNA, 32 nt, Homo Sapiens
gucgagcgcugccgcgggaggcgggcgauggg

SEQ ID NO: 221075 - RNA, 32 nt, Homo Sapiens
agagcucaggaugagggaaaagaaaaagauug

SEQ ID NO: 221076 - RNA, 32 nt, Homo Sapiens
acaagaacuuggacuguaguccuucccccucu

SEQ ID NO: 221077 - RNA, 32 nt, Homo Sapiens
aggacuacuuugcaugugaauauuccagccag

SEQ ID NO: 221078 - RNA, 32 nt, Homo Sapiens
gccagguugauagggcgcuggcugcuuggagc

SEQ ID NO: 221079 - RNA, 32 nt, Homo Sapiens
ggagccgggucgucgugcggcugcggcucuga

SEQ ID NO: 221080 - RNA, 32 nt, Homo Sapiens
gguguuuaaguacagggugacgugugccuaug

SEQ ID NO: 221081 - RNA, 32 nt, Homo Sapiens
augaccaagggccaggagcugcugcugaccau

SEQ ID NO: 221082 - RNA, 32 nt, Homo Sapiens
cucacauucuugaauuuuuagaucucugaggc

SEQ ID NO: 221083 - RNA, 32 nt, Homo Sapiens
guucugaguauuuggugcacaauggaaauuau

SEQ ID NO: 221084 - RNA, 32 nt, Homo Sapiens
gaaauguaugaaaugagacaaagcguuuauau

SEQ ID NO: 221085 - RNA, 32 nt, Homo Sapiens
uuuaaccaacacuguaaauauuucagauaaac

SEQ ID NO: 221086 - RNA, 32 nt, Homo Sapiens
gccccggcccucgcggagguguccgaggcgac

SEQ ID NO: 221087 - RNA, 32 nt, Homo Sapiens
guaacccuuuucugcccagcauuguuuucugg

SEQ ID NO: 221088 - RNA, 32 nt, Homo Sapiens
aguaugaaccauguuauaugcaguggaaaggc

SEQ ID NO: 221089 - RNA, 32 nt, Homo Sapiens
gaagagugauguuucagucaagcaaagcgauu

SEQ ID NO: 221090 - RNA, 32 nt, Homo Sapiens
gcaccgccccggcgcgcacagcugcacucagc

SEQ ID NO: 221091 - RNA, 29 nt, Homo Sapiens
caacauggucuucccccuccccacucccc

SEQ ID NO: 221092 - RNA, 32 nt, Homo Sapiens
cugcuccagcccaguucucacauuccccuuug

SEQ ID NO: 221093 - RNA, 32 nt, Homo Sapiens
uucuugagaucaaacuuuacuucuuucuuauu

SEQ ID NO: 221094 - RNA, 32 nt, Homo Sapiens
cacccagaauuugaauccugacccuccccacu

SEQ ID NO: 221095 - RNA, 32 nt, Homo Sapiens
uuugccagaaccacccacuccugaaguggguc

SEQ ID NO: 221096 - RNA, 32 nt, Homo Sapiens
uucucaauugguuuugccucuaucucugaacc

SEQ ID NO: 221097 - RNA, 32 nt, Homo Sapiens
cucaggaccccauggacccgccugcgcugccg

SEQ ID NO: 221098 - RNA, 32 nt, Homo Sapiens
uccgccuucacuccggugugccugcagccccg

SEQ ID NO: 221099 - RNA, 32 nt, Homo Sapiens
uacaguugacucucaugagcugauuggaguca

SEQ ID NO: 221100 - RNA, 32 nt, Homo Sapiens
aggcgaacucccacuauauaaagggaaaaggu

SEQ ID NO: 221101 - RNA, 32 nt, Homo Sapiens
cccaggacucgugcgugcagcaugggcggcgu

SEQ ID NO: 221102 - RNA, 32 nt, Homo Sapiens
gcagaaaucauucacgucuguugugugcgggu

SEQ ID NO: 221103 - RNA, 32 nt, Homo Sapiens
gaaagggcagugggacgcuggccacggccagg

SEQ ID NO: 221104 - RNA, 32 nt, Homo Sapiens
gcccaguccucucccaaguccacacaggggag

SEQ ID NO: 221105 - RNA, 32 nt, Homo Sapiens
ccgaugugaugaauacgaauaaaaggcccuua

SEQ ID NO: 221106 - RNA, 32 nt, Homo Sapiens
uucuuucccccucccugcugaagcauguggua

SEQ ID NO: 221107 - RNA, 32 nt, Homo Sapiens
cugccuggcuggaaggcccaggcaaugacaug

SEQ ID NO: 221108 - RNA, 28 nt, Homo Sapiens
ccacccgggcggccguagggcggucacg

SEQ ID NO: 221109 - RNA, 32 nt, Homo Sapiens
ucuaaugcaauaaucacauaaauauagcgagc

SEQ ID NO: 221110 - RNA, 32 nt, Homo Sapiens
ucccugguuuuuauucucaguaccucaggcuc

SEQ ID NO: 221111 - RNA, 32 nt, Homo Sapiens
cuauuaaaaaucaaguugaugugaauguuugu

SEQ ID NO: 221112 - RNA, 32 nt, Homo Sapiens
acugauacacagaauauaaucuuauuuauacc

SEQ ID NO: 221113 - RNA, 32 nt, Homo Sapiens
cagcaggagcagcguggucauugcugggugcu

SEQ ID NO: 221114 - RNA, 32 nt, Homo Sapiens
cuggggcgcagagggagcccggagcccggcgc

SEQ ID NO: 221115 - RNA, 32 nt, Homo Sapiens
cguacuucugguagugacagaucugcaggaca

SEQ ID NO: 221116 - RNA, 32 nt, Homo Sapiens
cccucauccggcccagcccccauccagccaaa

SEQ ID NO: 221117 - RNA, 32 nt, Homo Sapiens
gauccgcccagaccccucuccugcccucugca

SEQ ID NO: 221118 - RNA, 31 nt, Homo Sapiens
uuuggcuucaaugauuggcaacuucuacagg

SEQ ID NO: 221119 - RNA, 31 nt, Homo Sapiens
ugccgccugguggggccaccaagggcaggca

SEQ ID NO: 221120 - RNA, 32 nt, Homo Sapiens
agucugagccugagaccccagcccuggccucc

SEQ ID NO: 221121 - RNA, 32 nt, Homo Sapiens
agcggccaucucccacugggaauauggcguag

SEQ ID NO: 221122 - RNA, 32 nt, Homo Sapiens
uguaaauuacacaauaaagcaaaagucaguua

SEQ ID NO: 221123 - RNA, 32 nt, Homo Sapiens
guaauaguaagagcuuucuuacaaagcuuugu

SEQ ID NO: 221124 - RNA, 32 nt, Homo Sapiens
gccuguuggucccagcuccgccugccuuuccu

SEQ ID NO: 221125 - RNA, 32 nt, Homo Sapiens
gccaccaaacuccugcacaaccaccucaagaa

SEQ ID NO: 221126 - RNA, 32 nt, Homo Sapiens
accaugccuccugucucaacacugacagcugu

SEQ ID NO: 221127 - RNA, 32 nt, Homo Sapiens
uaccgaauuuaguucaugcauuggucuuagag

SEQ ID NO: 221128 - RNA, 32 nt, Homo Sapiens
uuaauuggaaagauuaaacauauugauuuuaa

SEQ ID NO: 221129 - RNA, 32 nt, Homo Sapiens
gaucuuuauaaccugaugccauaaauacaaga

SEQ ID NO: 221130 - RNA, 32 nt, Homo Sapiens
cuagcucugcugugggcuagcugugugauuug

SEQ ID NO: 221131 - RNA, 32 nt, Homo Sapiens
gcgggggcggaggcuggcagggggcgcuggaa

SEQ ID NO: 221132 - RNA, 32 nt, Homo Sapiens
ccgggccugucccucccagaugggcugggccu

SEQ ID NO: 221133 - RNA, 32 nt, Homo Sapiens
guguaauguuugucuucaaagaguuucuuuau

SEQ ID NO: 221134 - RNA, 32 nt, Homo Sapiens
uccagccccgguuacauauaaucaucuguauc

SEQ ID NO: 221135 - RNA, 32 nt, Homo Sapiens
gaagccuuaacuuaaucacaucugaaaaaucc

SEQ ID NO: 221136 - RNA, 32 nt, Homo Sapiens
agccgggggcggggccggggccagagcagauc

SEQ ID NO: 221137 - RNA, 32 nt, Homo Sapiens
agcagcuaaaauugauacuuagacaauaaaaa

SEQ ID NO: 221138 - RNA, 32 nt, Homo Sapiens
cucccaggcuccugggaagcaccugagcaucu

SEQ ID NO: 221139 - RNA, 32 nt, Homo Sapiens
ugcauuuuacgguaaagauuccugagcugcag

SEQ ID NO: 221140 - RNA, 32 nt, Homo Sapiens
gcauaucaaaguaacuaacaaacuagcuacac

SEQ ID NO: 221141 - RNA, 32 nt, Homo Sapiens
ggucaguauaucaguuaugacgcccauugccc

SEQ ID NO: 221142 - RNA, 32 nt, Homo Sapiens
uugcggggaagggaaguggcggagcccgagga

SEQ ID NO: 221143 - RNA, 32 nt, Homo Sapiens
uaagaacuggagcgugaauucuguaaaaaugu

SEQ ID NO: 221144 - RNA, 32 nt, Homo Sapiens
ugugcugccagccccaggucuuccuccgccug

SEQ ID NO: 221145 - RNA, 30 nt, Homo Sapiens
ggcccaugcucuuuucagcuuucuguguug

SEQ ID NO: 221146 - RNA, 32 nt, Homo Sapiens
ugaggcucggggcuggggcccgagggccaggg

SEQ ID NO: 221147 - RNA, 32 nt, Homo Sapiens
gggcucacaggccucucuuuuccccgccugca

SEQ ID NO: 221148 - RNA, 29 nt, Homo Sapiens
cauuaauaaaguuuaccauucgcaaaaaa

SEQ ID NO: 221149 - RNA, 32 nt, Homo Sapiens
gguuuuguaaaauggauggaagaacuuuguau

SEQ ID NO: 221150 - RNA, 32 nt, Homo Sapiens
ugagcauuuguuugaccccaguuucuucuuac

SEQ ID NO: 221151 - RNA, 32 nt, Homo Sapiens
aggugaggguggcacauggaacuucacggguc

SEQ ID NO: 221152 - RNA, 32 nt, Homo Sapiens
acuggcaauguuuaaaaagagaaacaaacuga

SEQ ID NO: 221153 - RNA, 32 nt, Homo Sapiens
uggccguccgagagccgagaggugagggugcc

SEQ ID NO: 221154 - RNA, 32 nt, Homo Sapiens
aauacuucuaaggacagaaaucucugaaucaa

SEQ ID NO: 221155 - RNA, 32 nt, Homo Sapiens
ucuuagggccgcggcuucucuuaucuuccacc

SEQ ID NO: 221156 - RNA, 32 nt, Homo Sapiens
aauuauaucaaggucucagaugagcuuagugc

SEQ ID NO: 221157 - RNA, 32 nt, Homo Sapiens
ggaacuccauguauuuuaccuacuucagcaau

SEQ ID NO: 221158 - RNA, 32 nt, Homo Sapiens
cauaauuuauuaaaaacauacauaagugucau

SEQ ID NO: 221159 - RNA, 32 nt, Homo Sapiens
cuugauuuuggagagggcaacaaaacaagggu

SEQ ID NO: 221160 - RNA, 32 nt, Homo Sapiens
gaugcagauaaaauauuuuguuaacuuuuguu

SEQ ID NO: 221161 - RNA, 32 nt, Homo Sapiens
ccucagcucccucucccucgaaacccagugga

SEQ ID NO: 221162 - RNA, 32 nt, Homo Sapiens
ucccagcuugugugcuuaagaaugggauuccc

SEQ ID NO: 221163 - RNA, 32 nt, Homo Sapiens
cagcugaauaaaugcaguaucuaaauauaaaa

SEQ ID NO: 221164 - RNA, 32 nt, Homo Sapiens
ccugguaguuuuuucauucucucuaaacaggu

SEQ ID NO: 221165 - RNA, 32 nt, Homo Sapiens
ugaaguuggcuuugcaugcccagcgaugcgcc

SEQ ID NO: 221166 - RNA, 32 nt, Homo Sapiens
guaccaugguguuccuuaaaagaagaaaauuu

SEQ ID NO: 221167 - RNA, 32 nt, Homo Sapiens
cccuccugccagcggucuucaugguccugcuc

SEQ ID NO: 221168 - RNA, 32 nt, Homo Sapiens
aacguuuccacaauugucaaguauauucugag

SEQ ID NO: 221169 - RNA, 32 nt, Homo Sapiens
aucuuguuuugguuuugugcuguaauagaagu

SEQ ID NO: 221170 - RNA, 32 nt, Homo Sapiens
ccccucaguguaauguagggguugugagcaca

SEQ ID NO: 221171 - RNA, 32 nt, Homo Sapiens
uugugggcagugccuucugcugagcgagucau

SEQ ID NO: 221172 - RNA, 32 nt, Homo Sapiens
cccaggcggcgaacacccgguaccccuggcgc

SEQ ID NO: 221173 - RNA, 32 nt, Homo Sapiens
ugaauccuaaaauaaauuagucaaaaaauucc

SEQ ID NO: 221174 - RNA, 32 nt, Homo Sapiens
ucuauuuuuuaaagacugugaaauguuugucu

SEQ ID NO: 221175 - RNA, 32 nt, Homo Sapiens
ccagcacgacugugggcauaugcaaagcugaa

SEQ ID NO: 221176 - RNA, 32 nt, Homo Sapiens
ccuuuaagcugaugacucaguucaagaaagca

SEQ ID NO: 221177 - RNA, 32 nt, Homo Sapiens
ucccagacugugagcucguggccacgggaagc

SEQ ID NO: 221178 - RNA, 32 nt, Homo Sapiens
ugcagguacacacacacacacacacacacaca

SEQ ID NO: 221179 - RNA, 32 nt, Homo Sapiens
aguaggaaaauaagaugaagacuuuguauuuu

SEQ ID NO: 221180 - RNA, 32 nt, Homo Sapiens
gggcuugacccugguacccagcccagccuuag

SEQ ID NO: 221181 - RNA, 32 nt, Homo Sapiens
uugacccuggaaauucugggccaucccccucc

SEQ ID NO: 221182 - RNA, 32 nt, Homo Sapiens
gaugaagaauccaucaggaaucuguuugacuu

SEQ ID NO: 221183 - RNA, 32 nt, Homo Sapiens
ccggccgcccgugcccggggcuguuuucgcga

SEQ ID NO: 221184 - RNA, 31 nt, Homo Sapiens
agcuguacaaagaaaaugauaugaaggcagc

SEQ ID NO: 221185 - RNA, 29 nt, Homo Sapiens
gggaaaucuauccaggcagcaagaucaca

SEQ ID NO: 221186 - RNA, 32 nt, Homo Sapiens
uacagggagaauggaagcauguggcguagaag

SEQ ID NO: 221187 - RNA, 32 nt, Homo Sapiens
cauuuucaggaaaugccuggagcugcuggucc

SEQ ID NO: 221188 - RNA, 32 nt, Homo Sapiens
cgcgccugggcugcgccgcgcuucgcaacgug

SEQ ID NO: 221189 - RNA, 32 nt, Homo Sapiens
accuuccacuuacuguagcaaauaauaccuac

SEQ ID NO: 221190 - RNA, 32 nt, Homo Sapiens
uccuuuacuucuccuaacaacuccaugacaug

SEQ ID NO: 221191 - RNA, 32 nt, Homo Sapiens
cgcccucuagcagcuuccuguagguggcgauc

SEQ ID NO: 221192 - RNA, 32 nt, Homo Sapiens
cuccgcagccgcccuccgccaagccccagcgc

SEQ ID NO: 221193 - RNA, 32 nt, Homo Sapiens
ugccauggcugggcguuugaucugucucccuu

SEQ ID NO: 221194 - RNA, 32 nt, Homo Sapiens
agaaugcuuuuaaauuuuccagggccuuucuc

SEQ ID NO: 221195 - RNA, 32 nt, Homo Sapiens
uuugugucagaaaaaggaaaccacagugagcc

SEQ ID NO: 221196 - RNA, 32 nt, Homo Sapiens
uuguaucuauagauuuaaaauaaucucaagcu

SEQ ID NO: 221197 - RNA, 32 nt, Homo Sapiens
cuuuccuuucccucuugucaggucauccauga

SEQ ID NO: 221198 - RNA, 32 nt, Homo Sapiens
ucuuacauucuaguucuggugcucucuaucug

SEQ ID NO: 221199 - RNA, 32 nt, Homo Sapiens
caucuccccacuuuaggcuucucaaacagacu

SEQ ID NO: 221200 - RNA, 32 nt, Homo Sapiens
gagccggaacugcggcagucucucccugccag

SEQ ID NO: 221201 - RNA, 32 nt, Homo Sapiens
auguguuguauauaacaaauuaguauuuauag

SEQ ID NO: 221202 - RNA, 32 nt, Homo Sapiens
caggaccgugacuucuuggagaaugaacaguu

SEQ ID NO: 221203 - RNA, 32 nt, Homo Sapiens
uucaggcagaacuguuugauaguuaagagaga

SEQ ID NO: 221204 - RNA, 32 nt, Homo Sapiens
ugaggacuccacucacacuggcgagcaaaaag

SEQ ID NO: 221205 - RNA, 32 nt, Homo Sapiens
uuugaaugcagaagggagcagcuccuccuagu

SEQ ID NO: 221206 - RNA, 32 nt, Homo Sapiens
aaacgacuccgggcuaccagaucggccgucca

SEQ ID NO: 221207 - RNA, 32 nt, Homo Sapiens
ucuccgcggcucugucccgcggaccgguggag

SEQ ID NO: 221208 - RNA, 32 nt, Homo Sapiens
auucaauaaucuugugcugaugaccuaaaaau

SEQ ID NO: 221209 - RNA, 32 nt, Homo Sapiens
auuuaguugugcuuuucuucauauacuucaua

SEQ ID NO: 221210 - RNA, 32 nt, Homo Sapiens
guggagaccagucuuucugacacacagugaag

SEQ ID NO: 221211 - RNA, 32 nt, Homo Sapiens
gcugcaguaguuugcuuuuaguauuguuguug

SEQ ID NO: 221212 - RNA, 32 nt, Homo Sapiens
aauuugacaagcuuaaaaauggccuucaugug

SEQ ID NO: 221213 - RNA, 32 nt, Homo Sapiens
gcaggaguucgccagcaaagccaggcaggcca

SEQ ID NO: 221214 - RNA, 32 nt, Homo Sapiens
aauucuaaaauauggucuucugaugggguugg

SEQ ID NO: 221215 - RNA, 31 nt, Homo Sapiens
gugaacaccguccccccgccccgcgccgccu

SEQ ID NO: 221216 - RNA, 32 nt, Homo Sapiens
agcaggcgcuggcgcucuacuaccgcgcgcgu

SEQ ID NO: 221217 - RNA, 32 nt, Homo Sapiens
ccgucccccagcgugguggcgcgcugggauua

SEQ ID NO: 221218 - RNA, 32 nt, Homo Sapiens
gggcaacccgcgcgggacccuuccucccuagu

SEQ ID NO: 221219 - RNA, 32 nt, Homo Sapiens
gcucuguccugugucugcagaauggggcugcc

SEQ ID NO: 221220 - RNA, 32 nt, Homo Sapiens
aucuggaguuugaggaggaagaggaagaggag

SEQ ID NO: 221221 - RNA, 32 nt, Homo Sapiens
cugacaaaaauauucuuguagggccccacaaa

SEQ ID NO: 221222 - RNA, 32 nt, Homo Sapiens
aggaugcaaaccccucucuccuccucaugcca

SEQ ID NO: 221223 - RNA, 32 nt, Homo Sapiens
gaaaaaccaaaauacuccaaagaugacuuccc

SEQ ID NO: 221224 - RNA, 32 nt, Homo Sapiens
agcuucaguuucccccagcacccaggagagcc

SEQ ID NO: 221225 - RNA, 32 nt, Homo Sapiens
cacaccccuccacuuccagucgcuaccuucca

SEQ ID NO: 221226 - RNA, 32 nt, Homo Sapiens
ugugggacccucgggagaccccguggcugucu

SEQ ID NO: 221227 - RNA, 32 nt, Homo Sapiens
caugcguguucccugggcauggccggcuccgu

SEQ ID NO: 221228 - RNA, 32 nt, Homo Sapiens
ugagcaaaaacuacuguaaauaacuuuuuugu

SEQ ID NO: 221229 - RNA, 32 nt, Homo Sapiens
ucagucacuaucguuuguguaguguauaaaug

SEQ ID NO: 221230 - RNA, 32 nt, Homo Sapiens
ugguuucugcugcuucagaaaaguacaccuuu

SEQ ID NO: 221231 - RNA, 32 nt, Homo Sapiens
aaacccuuaauaaaaucuucugaugaguucua

SEQ ID NO: 221232 - RNA, 32 nt, Homo Sapiens
cgcccaggccccaccccuggccuuggacacuu

SEQ ID NO: 221233 - RNA, 32 nt, Homo Sapiens
guugaggaccgcgagggcgcgcgucucgggug

SEQ ID NO: 221234 - RNA, 32 nt, Homo Sapiens
ucucaaguucccugccccuccacaucgcccgc

SEQ ID NO: 221235 - RNA, 30 nt, Homo Sapiens
ccugguccugauggcggcggcgacggccgc

SEQ ID NO: 221236 - RNA, 32 nt, Homo Sapiens
ccagccucgggugagccgccuccggagagacg

SEQ ID NO: 221237 - RNA, 31 nt, Homo Sapiens
cacugugcaagguuggggggugggcaaaggg

SEQ ID NO: 221238 - RNA, 32 nt, Homo Sapiens
cucgaggcgcaucaggcccguuuuuuaccagu

SEQ ID NO: 221239 - RNA, 32 nt, Homo Sapiens
gggcgggagguagauauaggccuguucuuuuu

SEQ ID NO: 221240 - RNA, 32 nt, Homo Sapiens
aaucacggggaacccagaaugauucaacauuu

SEQ ID NO: 221241 - RNA, 32 nt, Homo Sapiens
uuauguaugcugucguaucguaggcguuuaua

SEQ ID NO: 221242 - RNA, 32 nt, Homo Sapiens
uuuaagauauaugacuaaaauggacaauuguu

SEQ ID NO: 221243 - RNA, 32 nt, Homo Sapiens
uccuccccagccccauuuuuuauuuuuugcgg

SEQ ID NO: 221244 - RNA, 32 nt, Homo Sapiens
ggagaauacuucggguuauuacauggguuauu

SEQ ID NO: 221245 - RNA, 32 nt, Homo Sapiens
gcgaagucgaggggcggagagagggggccgga

SEQ ID NO: 221246 - RNA, 32 nt, Homo Sapiens
cugucuggcugcuggaccuggacaccagggcu

SEQ ID NO: 221247 - RNA, 32 nt, Homo Sapiens
gccccucugaaugucauacuguaaucuuuaag

SEQ ID NO: 221248 - RNA, 32 nt, Homo Sapiens
auagucaaguucauguugauaauaaucaaagg

SEQ ID NO: 221249 - RNA, 32 nt, Homo Sapiens
uggcccucucauucucacuccuccuugggccc

SEQ ID NO: 221250 - RNA, 32 nt, Homo Sapiens
aaguuaccaaagugggcucagaaacugucauc

SEQ ID NO: 221251 - RNA, 32 nt, Homo Sapiens
ccaaggacuuuagagcuguuuccuccggcaua

SEQ ID NO: 221252 - RNA, 32 nt, Homo Sapiens
uaguuuggaagccgcacagcuugaccuggaag

SEQ ID NO: 221253 - RNA, 30 nt, Homo Sapiens
ugaaaagauaaaagaauguuaucgaaaacu

SEQ ID NO: 221254 - RNA, 32 nt, Homo Sapiens
uccgcagucauucaaguggaagcuuucacagc

SEQ ID NO: 221255 - RNA, 32 nt, Homo Sapiens
ucaaauaauaaugauguugaaauaaugauagu

SEQ ID NO: 221256 - RNA, 32 nt, Homo Sapiens
ggaguccugcucaagacacggucacuggaucu

SEQ ID NO: 221257 - RNA, 32 nt, Homo Sapiens
ucagauguggcuucuggcuccucggggccucg

SEQ ID NO: 221258 - RNA, 32 nt, Homo Sapiens
uugccgcccucaucucagagaagugcucaggc

SEQ ID NO: 221259 - RNA, 32 nt, Homo Sapiens
accacaggaaauguauacagcuucugauacuu

SEQ ID NO: 221260 - RNA, 32 nt, Homo Sapiens
ugggucauuuauaguuacauuuuauaauuuuc

SEQ ID NO: 221261 - RNA, 32 nt, Homo Sapiens
cgaacaucuacuacaaggucuggugcccggca

SEQ ID NO: 221262 - RNA, 32 nt, Homo Sapiens
uccagcuuuggggucuccagaaagaggcugga

SEQ ID NO: 221263 - RNA, 32 nt, Homo Sapiens
gcugcgcgagggucgacagccuccgccacauc

SEQ ID NO: 221264 - RNA, 32 nt, Homo Sapiens
gacauuuugggguucacuuggaccccgagauc

SEQ ID NO: 221265 - RNA, 32 nt, Homo Sapiens
cuucugacugucagcaccaccggcacagggca

SEQ ID NO: 221266 - RNA, 32 nt, Homo Sapiens
acaggaccccuuagugcccagcccucuguuga

SEQ ID NO: 221267 - RNA, 32 nt, Homo Sapiens
ggacagcaccaccagcagcagcaggcagccgg

SEQ ID NO: 221268 - RNA, 32 nt, Homo Sapiens
acgaauagcacauaacucauauugugaauccu

SEQ ID NO: 221269 - RNA, 32 nt, Homo Sapiens
ccacacaugcauugccuauuaaagaguaucuu

SEQ ID NO: 221270 - RNA, 32 nt, Homo Sapiens
ucucuaugcaagauggagagaggaugcacccu

SEQ ID NO: 221271 - RNA, 32 nt, Homo Sapiens
gccagaggaggguggggucagggccgccccuu

SEQ ID NO: 221272 - RNA, 32 nt, Homo Sapiens
ggagccccagcauggacucaagggacagagca

SEQ ID NO: 221273 - RNA, 30 nt, Homo Sapiens
ccaucugcagguggcauguggcugaguggg

SEQ ID NO: 221274 - RNA, 32 nt, Homo Sapiens
auugaagaauuugaacauagaguaaaagacaa

SEQ ID NO: 221275 - RNA, 32 nt, Homo Sapiens
ugagguaagaauuuuuucaaaucuuaauugug

SEQ ID NO: 221276 - RNA, 31 nt, Homo Sapiens
gcaguuuuacaauaaggaaauguuuuuacuu

SEQ ID NO: 221277 - RNA, 32 nt, Homo Sapiens
cuacucaaaaauacaaaaauuagccuggugug

SEQ ID NO: 221278 - RNA, 32 nt, Homo Sapiens
acguugauaaaacuuauaaauuucauugauua

SEQ ID NO: 221279 - RNA, 32 nt, Homo Sapiens
gcugccuuuucuccuguccugaugggguucug

SEQ ID NO: 221280 - RNA, 31 nt, Homo Sapiens
ggccaucauuugaaugcuuguaaaugaaagg

SEQ ID NO: 221281 - RNA, 31 nt, Homo Sapiens
ucaauaaacuaugugaacucgaagcuacuga

SEQ ID NO: 221282 - RNA, 32 nt, Homo Sapiens
uuuaaucugugaaaauggagagcuggcuucag

SEQ ID NO: 221283 - RNA, 32 nt, Homo Sapiens
uagauguuuauggcauuucuaauuguaaguag

SEQ ID NO: 221284 - RNA, 32 nt, Homo Sapiens
aacucaugcggccagagcgggaaagagacucg

SEQ ID NO: 221285 - RNA, 32 nt, Homo Sapiens
agauggcggccgcggcggugaacggggcggca

SEQ ID NO: 221286 - RNA, 32 nt, Homo Sapiens
acacuacacacacacacacacacacacacaca

SEQ ID NO: 221287 - RNA, 32 nt, Homo Sapiens
gggcccugggcuagcaguuugcuggaugggau

SEQ ID NO: 221288 - RNA, 32 nt, Homo Sapiens
ccgggggcaggaggcucugguuccucacuccu

SEQ ID NO: 221289 - RNA, 32 nt, Homo Sapiens
cccugaauauggacuugaaucuucugagcaga

SEQ ID NO: 221290 - RNA, 32 nt, Homo Sapiens
ucagccgcccaaguaucugggaccacaggcgu

SEQ ID NO: 221291 - RNA, 30 nt, Homo Sapiens
cccuccuuccuuaggaccugggggccaggc

SEQ ID NO: 221292 - RNA, 32 nt, Homo Sapiens
uuccuuuaaaacaguaacuuggaaauaugaaa

SEQ ID NO: 221293 - RNA, 32 nt, Homo Sapiens
ugucaaacucuucuguuucuccaaauauaagg

SEQ ID NO: 221294 - RNA, 32 nt, Homo Sapiens
uccaggaggaaccaggcccugcucuccugugu

SEQ ID NO: 221295 - RNA, 32 nt, Homo Sapiens
cgcuucccccgacuucacacggcggcuucgga

SEQ ID NO: 221296 - RNA, 32 nt, Homo Sapiens
uagaggucaggaguuugagccugaccaacaug

SEQ ID NO: 221297 - RNA, 32 nt, Homo Sapiens
gcacuccagcacugcgcagggaccgccuugga

SEQ ID NO: 221298 - RNA, 32 nt, Homo Sapiens
acaaacaaccucaccaugagcuuuaggaccag

SEQ ID NO: 221299 - RNA, 32 nt, Homo Sapiens
aaugugauucuuucuuguuuugggagacggug

SEQ ID NO: 221300 - RNA, 32 nt, Homo Sapiens
ucugucugcucgaaccacuugccucgggcuaa

SEQ ID NO: 221301 - RNA, 32 nt, Homo Sapiens
uccgaggcucugcgggagaauccguuuccugg

SEQ ID NO: 221302 - RNA, 32 nt, Homo Sapiens
uguccucacugccccaggcugcggcuugccca

SEQ ID NO: 221303 - RNA, 32 nt, Homo Sapiens
ucaccagggcuuuuccuuuuuaaacaaaacaa

SEQ ID NO: 221304 - RNA, 27 nt, Homo Sapiens
cgguggagauaaaaguugauuugcucu

SEQ ID NO: 221305 - RNA, 32 nt, Homo Sapiens
ggugaccguauguggccgcagcuguguggcau

SEQ ID NO: 221306 - RNA, 32 nt, Homo Sapiens
caccuucuauagaagauauuuauuuacucccc

SEQ ID NO: 221307 - RNA, 32 nt, Homo Sapiens
ggcucauugugucauuucaaaauguauugaua

SEQ ID NO: 221308 - RNA, 32 nt, Homo Sapiens
aucgaacccccuccagcacuggagggagcugg

SEQ ID NO: 221309 - RNA, 32 nt, Homo Sapiens
guuuuugcaauaaugacaaaugcccugcaccu

SEQ ID NO: 221310 - RNA, 32 nt, Homo Sapiens
cugggaccuggauugggucagaugccuguccu

SEQ ID NO: 221311 - RNA, 32 nt, Homo Sapiens
ggucucaagaacucucuugauggugggcacaa

SEQ ID NO: 221312 - RNA, 32 nt, Homo Sapiens
ccagccuggcuggccugcaggugucuaggguc

SEQ ID NO: 221313 - RNA, 32 nt, Homo Sapiens
gagggaggacccuggaacaucccggaagccgg

SEQ ID NO: 221314 - RNA, 32 nt, Homo Sapiens
cggggagcugggaggggucuaccggggcucga

SEQ ID NO: 221315 - RNA, 32 nt, Homo Sapiens
uauagggcagaaggauggcagaugagugacuc

SEQ ID NO: 221316 - RNA, 32 nt, Homo Sapiens
aguauuuucagccccagccggccacacagcuc

SEQ ID NO: 221317 - RNA, 32 nt, Homo Sapiens
ggcugcucuugaacuccugaccucaggugauc

SEQ ID NO: 221318 - RNA, 32 nt, Homo Sapiens
aggagggccccgggccccgugcgcuccaccug

SEQ ID NO: 221319 - RNA, 32 nt, Homo Sapiens
ccauccagacauuuggcaaggcugucaucugc

SEQ ID NO: 221320 - RNA, 32 nt, Homo Sapiens
cgcgccggggagagggagcgcacucaccucag

SEQ ID NO: 221321 - RNA, 32 nt, Homo Sapiens
gucuuccagcggggagcuucacguugccgagu

SEQ ID NO: 221322 - RNA, 32 nt, Homo Sapiens
aauuagccgggcgugguggcaggcgccuguag

SEQ ID NO: 221323 - RNA, 32 nt, Homo Sapiens
caagugaccaugagaggugccacgcgagucuc

SEQ ID NO: 221324 - RNA, 32 nt, Homo Sapiens
uggcuccuguccucccuccccaucccugaccu

SEQ ID NO: 221325 - RNA, 29 nt, Homo Sapiens
gauaaauaaaaagcacaguuucaaauggu

SEQ ID NO: 221326 - RNA, 32 nt, Homo Sapiens
uuguuuccuuauacuauaacauuuggaacuug

SEQ ID NO: 221327 - RNA, 32 nt, Homo Sapiens
guauaacuguauggguuuuucuccaucuuuuu

SEQ ID NO: 221328 - RNA, 28 nt, Homo Sapiens
gaagggaagcggccgcugggccccuccu

SEQ ID NO: 221329 - RNA, 32 nt, Homo Sapiens
aauucaucuaaagaugucucuggugauuuuua

SEQ ID NO: 221330 - RNA, 32 nt, Homo Sapiens
uguucugcugcauuaugggaacucaucaaagg

SEQ ID NO: 221331 - RNA, 32 nt, Homo Sapiens
acaaaaauuuaaaaacaaugagcugggcaugg

SEQ ID NO: 221332 - RNA, 32 nt, Homo Sapiens
cacugcccaugacugagcccagccccagcccg

SEQ ID NO: 221333 - RNA, 32 nt, Homo Sapiens
ggucccagcagcggaguagggcggcggcugcg

SEQ ID NO: 221334 - RNA, 32 nt, Homo Sapiens
cuuuuuuuucuuucuuuuuuuuuuuuuuuuaa

SEQ ID NO: 221335 - RNA, 32 nt, Homo Sapiens
cuauuccaacuuuacaagagaaauugugauua

SEQ ID NO: 221336 - RNA, 32 nt, Homo Sapiens
caaaugaaauuugaaucuucuagaaaguagac

SEQ ID NO: 221337 - RNA, 32 nt, Homo Sapiens
cuguuugcuuuuuauaaccaaacucuaucuga

SEQ ID NO: 221338 - RNA, 32 nt, Homo Sapiens
uuuguacaaaaacuaauuauuuuuuaggacca

SEQ ID NO: 221339 - RNA, 32 nt, Homo Sapiens
cgcuccaucacuguggauccaggccucaggga

SEQ ID NO: 221340 - RNA, 32 nt, Homo Sapiens
gcccgccugagcgagccccccggagauggcgg

SEQ ID NO: 221341 - RNA, 32 nt, Homo Sapiens
agcgccacagccgcauacacacaggggagcgg

SEQ ID NO: 221342 - RNA, 32 nt, Homo Sapiens
ugaguuuaaagggacaggauugcccuuccguc

SEQ ID NO: 221343 - RNA, 32 nt, Homo Sapiens
cacgcggggccccggcucgcaagccccagcuc

SEQ ID NO: 221344 - RNA, 32 nt, Homo Sapiens
cguauguaaacaaaaacaacugggggaaucaa

SEQ ID NO: 221345 - RNA, 32 nt, Homo Sapiens
gaaaauauuauuaaugcucucugagucuuuac

SEQ ID NO: 221346 - RNA, 32 nt, Homo Sapiens
guaucugccuucugcugggcuccugugacagg

SEQ ID NO: 221347 - RNA, 32 nt, Homo Sapiens
ugcuacauuuccccagccugguaccacccaaa

SEQ ID NO: 221348 - RNA, 32 nt, Homo Sapiens
agccugcccgcccacaccauccugcugguccu

SEQ ID NO: 221349 - RNA, 32 nt, Homo Sapiens
cugaggggcaugaugggggaggcggccgugcc

SEQ ID NO: 221350 - RNA, 32 nt, Homo Sapiens
gcuuuuaaaauuaaguaucaucugaauuagca

SEQ ID NO: 221351 - RNA, 32 nt, Homo Sapiens
acagcaugaagauaaugccugugguuaugcug

SEQ ID NO: 221352 - RNA, 32 nt, Homo Sapiens
aacuuccugccagcugaaugugugucucccaa

SEQ ID NO: 221353 - RNA, 32 nt, Homo Sapiens
agcagacgacaugugacaggugcuaccacaug

SEQ ID NO: 221354 - RNA, 32 nt, Homo Sapiens
aucuuaaagcuguuuggugauaaagaaggcag

SEQ ID NO: 221355 - RNA, 32 nt, Homo Sapiens
uccuauuuauucaauagaguuuucucaguuau

SEQ ID NO: 221356 - RNA, 32 nt, Homo Sapiens
cgccugccugucauuccugacucaccaccguc

SEQ ID NO: 221357 - RNA, 32 nt, Homo Sapiens
gaaaaacauaucuuguuagaauaaauuaaaac

SEQ ID NO: 221358 - RNA, 32 nt, Homo Sapiens
uccggugugagccgcacuuccggugugagccg

SEQ ID NO: 221359 - RNA, 32 nt, Homo Sapiens
ccccuuguucccucagcucuaagggccgcgau

SEQ ID NO: 221360 - RNA, 28 nt, Homo Sapiens
cuagaaauggcgaaucuuuuaaagaaaa

SEQ ID NO: 221361 - RNA, 32 nt, Homo Sapiens
ucuccuucagcguaaauuccuguccccucugu

SEQ ID NO: 221362 - RNA, 32 nt, Homo Sapiens
ccuggcacuccagugacccacugggugacuca

SEQ ID NO: 221363 - RNA, 32 nt, Homo Sapiens
augacguggaguaucuggcugggcagcauugc

SEQ ID NO: 221364 - RNA, 32 nt, Homo Sapiens
cgcgcggcgagcugaggguggcggcggucgac

SEQ ID NO: 221365 - RNA, 32 nt, Homo Sapiens
uacuagggcuguucuuaccaucuccuucuggc

SEQ ID NO: 221366 - RNA, 32 nt, Homo Sapiens
acagcaucuucagcuuguucuucuucagucag

SEQ ID NO: 221367 - RNA, 32 nt, Homo Sapiens
ugcaggaaaagcugcgggagcaucuggcagag

SEQ ID NO: 221368 - RNA, 32 nt, Homo Sapiens
cuccaaaacaaaagaccagaaaagcacucucc

SEQ ID NO: 221369 - RNA, 32 nt, Homo Sapiens
caguggacgugcugcgcauguucgggagcgaa

SEQ ID NO: 221370 - RNA, 32 nt, Homo Sapiens
gugcggcgcgggugggggagggcggacccgac

SEQ ID NO: 221371 - RNA, 32 nt, Homo Sapiens
cuuuuauguaggauuccaaaccuucccucuaa

SEQ ID NO: 221372 - RNA, 32 nt, Homo Sapiens
cuuugggacuuccaaugggaucuuagaagcag

SEQ ID NO: 221373 - RNA, 32 nt, Homo Sapiens
aggauggauagggauggcugggaaauggagau

SEQ ID NO: 221374 - RNA, 32 nt, Homo Sapiens
ccguccggguccgcggccagcccggccaccag

SEQ ID NO: 221375 - RNA, 32 nt, Homo Sapiens
gaaagaguucccuuuucucauucagaaaccaa

SEQ ID NO: 221376 - RNA, 32 nt, Homo Sapiens
guaagaaagauaaguaagucaguguacuugca

SEQ ID NO: 221377 - RNA, 32 nt, Homo Sapiens
gagcgggagccgugcggcuggugcugggucug

SEQ ID NO: 221378 - RNA, 32 nt, Homo Sapiens
uacuuagggagguuggugucagaggcaggagu

SEQ ID NO: 221379 - RNA, 32 nt, Homo Sapiens
cagcaugguggggcugggucuccagcugguug

SEQ ID NO: 221380 - RNA, 32 nt, Homo Sapiens
cagccaggcgggaagcgcugguguugcggcgc

SEQ ID NO: 221381 - RNA, 32 nt, Homo Sapiens
gcucaagccuggcccuggcccgcagcacacug

SEQ ID NO: 221382 - RNA, 32 nt, Homo Sapiens
gcauuaacaaggaaaaauacugaauuaguaau

SEQ ID NO: 221383 - RNA, 32 nt, Homo Sapiens
cugggaggccccaacaggacagggcuucccug

SEQ ID NO: 221384 - RNA, 32 nt, Homo Sapiens
uuccaaggaaaugucucggauauggguacugu

SEQ ID NO: 221385 - RNA, 32 nt, Homo Sapiens
ugcgugagagaaaacagcugguguuuaugaag

SEQ ID NO: 221386 - RNA, 32 nt, Homo Sapiens
ucaaugagggaggaaggcagggacacccugga

SEQ ID NO: 221387 - RNA, 32 nt, Homo Sapiens
cggugucagacggcccggaucccgguuaccgg

SEQ ID NO: 221388 - RNA, 30 nt, Homo Sapiens
agucugcagaaguugggggaaaacuuuuaa

SEQ ID NO: 221389 - RNA, 32 nt, Homo Sapiens
gguggugucauucuggaauguuuucucucugc

SEQ ID NO: 221390 - RNA, 32 nt, Homo Sapiens
auauggguuuuccagcccacuccagugugauc

SEQ ID NO: 221391 - RNA, 32 nt, Homo Sapiens
gugagcagggagccuuccucccugggccaccu

SEQ ID NO: 221392 - RNA, 32 nt, Homo Sapiens
aucccucucccccaggccccaggaccugcagg

SEQ ID NO: 221393 - RNA, 32 nt, Homo Sapiens
cguccggugacggacccccgccgcccgcggcu

SEQ ID NO: 221394 - RNA, 32 nt, Homo Sapiens
cccagaggguggcaguuuugagccuugccuca

SEQ ID NO: 221395 - RNA, 32 nt, Homo Sapiens
cauaggaauaaaauaaaauauuauuagaacuc

SEQ ID NO: 221396 - RNA, 32 nt, Homo Sapiens
gucauaaaacaucauuugccuuucaauuuaua

SEQ ID NO: 221397 - RNA, 32 nt, Homo Sapiens
ccuggcgccgcucgcccggcccggcuuccgag

SEQ ID NO: 221398 - RNA, 32 nt, Homo Sapiens
uuaacagguucuauuacccagaacuuuuuugu

SEQ ID NO: 221399 - RNA, 32 nt, Homo Sapiens
gucaaauauauucuauaauggaauaaaaaauc

SEQ ID NO: 221400 - RNA, 32 nt, Homo Sapiens
cgcucuucugucaucccgcuccugcugaaaca

SEQ ID NO: 221401 - RNA, 32 nt, Homo Sapiens
gcuagccgggacagagaggagacggccacgaa

SEQ ID NO: 221402 - RNA, 32 nt, Homo Sapiens
uggaucagauaaauaaaaucauuacaaauaua

SEQ ID NO: 221403 - RNA, 32 nt, Homo Sapiens
acugcauuuucugcaauagaaugcacucuuaa

SEQ ID NO: 221404 - RNA, 32 nt, Homo Sapiens
aaagggaucaaaacuuuuucaauugcgauaaa

SEQ ID NO: 221405 - RNA, 32 nt, Homo Sapiens
uuauccacuucccuccucccgccuccccccgg

SEQ ID NO: 221406 - RNA, 32 nt, Homo Sapiens
ccucaaagcaccagcucucucgcuccauccuc

SEQ ID NO: 221407 - RNA, 32 nt, Homo Sapiens
uauagaaaugauuuuucuuuuaauuuuuuacu

SEQ ID NO: 221408 - RNA, 32 nt, Homo Sapiens
ccauuguguuuguuaucuauugcugcauaaua

SEQ ID NO: 221409 - RNA, 32 nt, Homo Sapiens
cccaaaggaaaacaccuauuuuucuacuaccc

SEQ ID NO: 221410 - RNA, 32 nt, Homo Sapiens
uucaagugcaacaaagauuccauacagcucca

SEQ ID NO: 221411 - RNA, 32 nt, Homo Sapiens
ccucccuccuccccgccugcagcucucuuuaa

SEQ ID NO: 221412 - RNA, 32 nt, Homo Sapiens
gaugagggucagggcugcgcggaccccuaucc

SEQ ID NO: 221413 - RNA, 32 nt, Homo Sapiens
acagugcaugaaguaauuuaauuggugaggcc

SEQ ID NO: 221414 - RNA, 32 nt, Homo Sapiens
gggagccaaccugggcgcaucaugcgcagggc

SEQ ID NO: 221415 - RNA, 32 nt, Homo Sapiens
ugaugugaaugucaaaauauauucuuaagugu

SEQ ID NO: 221416 - RNA, 30 nt, Homo Sapiens
cgggggugagagcgcgcggccggauucacc

SEQ ID NO: 221417 - RNA, 32 nt, Homo Sapiens
uuuauuucaaauaguuuggaaauuguuguacu

SEQ ID NO: 221418 - RNA, 32 nt, Homo Sapiens
ccucagugggggauacugcaaguucaaggugg

SEQ ID NO: 221419 - RNA, 32 nt, Homo Sapiens
ucugguuccgccucuacugguucccgcucaag

SEQ ID NO: 221420 - RNA, 32 nt, Homo Sapiens
aucaagcugguguggggcuuuuauugauagug

SEQ ID NO: 221421 - RNA, 32 nt, Homo Sapiens
ccccugcccugguuccguugcgcgccccggau

SEQ ID NO: 221422 - RNA, 32 nt, Homo Sapiens
acuugaaaaucagauacugcaccaaauacagu

SEQ ID NO: 221423 - RNA, 32 nt, Homo Sapiens
ccaagcgccuccguggacacgcacuuccugcg

SEQ ID NO: 221424 - RNA, 32 nt, Homo Sapiens
guuuuccuuuaaauuuucagauuuaccuucau

SEQ ID NO: 221425 - RNA, 32 nt, Homo Sapiens
ucucuggucaaguaccuuugguaaauacacca

SEQ ID NO: 221426 - RNA, 32 nt, Homo Sapiens
agccaggugugguggcucaggccuguaauccc

SEQ ID NO: 221427 - RNA, 31 nt, Homo Sapiens
cguggggagcccccaaaucagggcgggaagc

SEQ ID NO: 221428 - RNA, 32 nt, Homo Sapiens
auuuuauacucuauguuucuguuuauuuuuaa

SEQ ID NO: 221429 - RNA, 32 nt, Homo Sapiens
gcaaguuccugaacaugaugaccuaaggcccg

SEQ ID NO: 221430 - RNA, 32 nt, Homo Sapiens
agguuuuggcaccccuuugucaggaauucagc

SEQ ID NO: 221431 - RNA, 32 nt, Homo Sapiens
ucaacacuccccugcguaccccgguucuagca

SEQ ID NO: 221432 - RNA, 32 nt, Homo Sapiens
cugugucuuuuggaaaaggagcugcauggccu

SEQ ID NO: 221433 - RNA, 32 nt, Homo Sapiens
augguggccgcccacccgcccgagggauggug

SEQ ID NO: 221434 - RNA, 32 nt, Homo Sapiens
cuccuuccaggaacugguuucuugcgcggaaa

SEQ ID NO: 221435 - RNA, 32 nt, Homo Sapiens
gagaugaucaccgugaauccggcuuccucuga

SEQ ID NO: 221436 - RNA, 31 nt, Homo Sapiens
ucugagcggcacuugcaccgggcagugcccc

SEQ ID NO: 221437 - RNA, 31 nt, Homo Sapiens
caucagaaauaaagacaaagcacuaucaaaa

SEQ ID NO: 221438 - RNA, 32 nt, Homo Sapiens
cuuuccugggauuuuuaaaagguccuuuguca

SEQ ID NO: 221439 - RNA, 32 nt, Homo Sapiens
agguaaaggaggaggggcagguggaugaauaa

SEQ ID NO: 221440 - RNA, 32 nt, Homo Sapiens
aggccccggccgcgcgccacccgccucccgcc

SEQ ID NO: 221441 - RNA, 32 nt, Homo Sapiens
ccccaguccuccugggaggcuggccccccuuu

SEQ ID NO: 221442 - RNA, 32 nt, Homo Sapiens
cggcggcgcaucgagaucgcgcacgcccugug

SEQ ID NO: 221443 - RNA, 32 nt, Homo Sapiens
guucacgaaccuguccaacauccaccaagugg

SEQ ID NO: 221444 - RNA, 32 nt, Homo Sapiens
caugaguugcuguggcauuuaaacaacaggaa

SEQ ID NO: 221445 - RNA, 32 nt, Homo Sapiens
gguuucccacuuuucuuuuuacauuaaugcau

SEQ ID NO: 221446 - RNA, 32 nt, Homo Sapiens
ggcaaggcaagagcuugagcuugagccuagac

SEQ ID NO: 221447 - RNA, 32 nt, Homo Sapiens
aauaaguuauuuagacagaauagcacucugca

SEQ ID NO: 221448 - RNA, 32 nt, Homo Sapiens
ggagcgcggcgauggggaugccgcccgggggu

SEQ ID NO: 221449 - RNA, 32 nt, Homo Sapiens
caaggcgcuuuggggguggaggggguggugcu

SEQ ID NO: 221450 - RNA, 32 nt, Homo Sapiens
ugcagaugcuaccccacaagcuugucagaucg

SEQ ID NO: 221451 - RNA, 32 nt, Homo Sapiens
auuuuuaauuuaauguccagaugcugucaguc

SEQ ID NO: 221452 - RNA, 32 nt, Homo Sapiens
gaaguggaaggcuacccucaucuuucacuaau

SEQ ID NO: 221453 - RNA, 32 nt, Homo Sapiens
ucgagaacaacauaucaagucagggcccucau

SEQ ID NO: 221454 - RNA, 32 nt, Homo Sapiens
ccuugccugagggccuggccuggcagcucugc

SEQ ID NO: 221455 - RNA, 32 nt, Homo Sapiens
cucccguggugcuucucuuugcuggggagggg

SEQ ID NO: 221456 - RNA, 32 nt, Homo Sapiens
agcugauaaaauuaccugaggaguguaaugcu

SEQ ID NO: 221457 - RNA, 32 nt, Homo Sapiens
uccugugccugcgcuucuucucccccgccauc

SEQ ID NO: 221458 - RNA, 32 nt, Homo Sapiens
gaguuuaaccagauccuccccacccccgcucc

SEQ ID NO: 221459 - RNA, 32 nt, Homo Sapiens
cacugacagagaaaugaaauaguuuuaucugg

SEQ ID NO: 221460 - RNA, 32 nt, Homo Sapiens
gccaacucgccagcacuuggagaggcccggcu

SEQ ID NO: 221461 - RNA, 32 nt, Homo Sapiens
augauuuucuucauacucugguucccuuucua

SEQ ID NO: 221462 - RNA, 32 nt, Homo Sapiens
uaaacaagcagaugcuaagucuguaaacugug

SEQ ID NO: 221463 - RNA, 32 nt, Homo Sapiens
gaaaggcugacuacagaaauggcugcugccca

SEQ ID NO: 221464 - RNA, 32 nt, Homo Sapiens
cuuaccugcuccaagaagaugggaggaagggg

SEQ ID NO: 221465 - RNA, 32 nt, Homo Sapiens
cugaagauggugcugugucaagaaggaccuuu

SEQ ID NO: 221466 - RNA, 32 nt, Homo Sapiens
agaggagcccccacaaaggacugacccagggc

SEQ ID NO: 221467 - RNA, 32 nt, Homo Sapiens
ugcgagcggagcagagccgaggucgggccgcg

SEQ ID NO: 221468 - RNA, 31 nt, Homo Sapiens
acccccucagccucaucucuaacugcccccu

SEQ ID NO: 221469 - RNA, 32 nt, Homo Sapiens
gucacaggaaauggacgcuggauuacaagcau

SEQ ID NO: 221470 - RNA, 30 nt, Homo Sapiens
cuaacguugcaacugggggaaaaaucacuu

SEQ ID NO: 221471 - RNA, 32 nt, Homo Sapiens
gucauuucuacuugggagcauuuuggagcaga

SEQ ID NO: 221472 - RNA, 32 nt, Homo Sapiens
agguggcuguuauaaauuugacuucauuggca

SEQ ID NO: 221473 - RNA, 32 nt, Homo Sapiens
aucaguucaaggauaugccgaaaaacauagug

SEQ ID NO: 221474 - RNA, 32 nt, Homo Sapiens
ggcccggugugguggcucacgccuauaauccc

SEQ ID NO: 221475 - RNA, 32 nt, Homo Sapiens
gagacccugcuggccugguccuggcacauccu

SEQ ID NO: 221476 - RNA, 32 nt, Homo Sapiens
ugucaguguuuguaacaucgugugucuguaau

SEQ ID NO: 221477 - RNA, 32 nt, Homo Sapiens
caaaaaagccccagcccauuccucccauucaa

SEQ ID NO: 221478 - RNA, 32 nt, Homo Sapiens
uuuauuauaaaccaagaauuuuggacuugcaa

SEQ ID NO: 221479 - RNA, 32 nt, Homo Sapiens
guguugucaaaucaagaaugggugugcaugug

SEQ ID NO: 221480 - RNA, 32 nt, Homo Sapiens
uucuucuggauuuuaaauuuuuucuuuuuaaa

SEQ ID NO: 221481 - RNA, 32 nt, Homo Sapiens
cuucauagcuucugcuggccugggguggaccc

SEQ ID NO: 221482 - RNA, 32 nt, Homo Sapiens
ugaguacuuguaucacgacauacuaaguuuag

SEQ ID NO: 221483 - RNA, 31 nt, Homo Sapiens
ggcgcgauggaccugaccgggcuccugcugg

SEQ ID NO: 221484 - RNA, 32 nt, Homo Sapiens
ccuucccgccgccgucgccgggaccagccgcu

SEQ ID NO: 221485 - RNA, 32 nt, Homo Sapiens
acuguggaaaauuaaaucauagcugaguuaaa

SEQ ID NO: 221486 - RNA, 32 nt, Homo Sapiens
ucugcugcgagcacgcucgcaccacgagggug

SEQ ID NO: 221487 - RNA, 32 nt, Homo Sapiens
uuuugcacaagcucuuccuguugaggaccccu

SEQ ID NO: 221488 - RNA, 32 nt, Homo Sapiens
ggggaggagagccacgcaggaucucacagcug

SEQ ID NO: 221489 - RNA, 32 nt, Homo Sapiens
uaauguucuuccagaucugaaaaggaaaaugc

SEQ ID NO: 221490 - RNA, 32 nt, Homo Sapiens
cugacugaggcggggcgcuaggcaccccaucg

SEQ ID NO: 221491 - RNA, 32 nt, Homo Sapiens
ccucguccuccgcggccccggcgacgugggcc

SEQ ID NO: 221492 - RNA, 32 nt, Homo Sapiens
gaaggagguacccucuuggcagaugggggcau

SEQ ID NO: 221493 - RNA, 32 nt, Homo Sapiens
aggagggaaaauuuauaguggcaauuauuuuc

SEQ ID NO: 221494 - RNA, 32 nt, Homo Sapiens
ccacacacaugcaugcacacaaacaucacugc

SEQ ID NO: 221495 - RNA, 32 nt, Homo Sapiens
gguccugggucucaggauggguccugggggcc

SEQ ID NO: 221496 - RNA, 32 nt, Homo Sapiens
gaaguacuguggcagagcugcuguuuucugaa

SEQ ID NO: 221497 - RNA, 32 nt, Homo Sapiens
caccauugaugaauucaaacaaauggcuguaa

SEQ ID NO: 221498 - RNA, 32 nt, Homo Sapiens
cuuccugccguggccagcgcggccggcgcugg

SEQ ID NO: 221499 - RNA, 29 nt, Homo Sapiens
acugcugugacuuuguacugcaugaucaa

SEQ ID NO: 221500 - RNA, 32 nt, Homo Sapiens
uaaaacaguauuuuauguaacagcuauuccca

SEQ ID NO: 221501 - RNA, 32 nt, Homo Sapiens
gcuccuuuucuaaaccaccucugggacucagc

SEQ ID NO: 221502 - RNA, 32 nt, Homo Sapiens
gacaucaaagauucauugcacuuaugaacaag

SEQ ID NO: 221503 - RNA, 32 nt, Homo Sapiens
guaaagcugaaauaaacuucuugucauugaaa

SEQ ID NO: 221504 - RNA, 32 nt, Homo Sapiens
ugucuuguucuuccuuaaaccacuguacaggu

SEQ ID NO: 221505 - RNA, 32 nt, Homo Sapiens
ugucagggucccuggggucgcuugugcgggcg

SEQ ID NO: 221506 - RNA, 32 nt, Homo Sapiens
gggaccuacugacuucuggacuucugagaagu

SEQ ID NO: 221507 - RNA, 30 nt, Homo Sapiens
uucuuacuacuugccacacacuguucuaag

SEQ ID NO: 221508 - RNA, 32 nt, Homo Sapiens
ggagauggugccugugucaguguggcagucuu

SEQ ID NO: 221509 - RNA, 32 nt, Homo Sapiens
gauuggggaagcccuucuccccgggucugccc

SEQ ID NO: 221510 - RNA, 32 nt, Homo Sapiens
caucugacauaggaauuuacuucuuuuccuug

SEQ ID NO: 221511 - RNA, 32 nt, Homo Sapiens
auacaugugaauauuuauacaugaaggccauu

SEQ ID NO: 221512 - RNA, 32 nt, Homo Sapiens
gcuuagauuaaguggaauuuagggcauagcug

SEQ ID NO: 221513 - RNA, 32 nt, Homo Sapiens
ccacaaaacauagcaggggaacuauuauuuag

SEQ ID NO: 221514 - RNA, 32 nt, Homo Sapiens
gggugaauucucaggacuggucgggagucaag

SEQ ID NO: 221515 - RNA, 32 nt, Homo Sapiens
ugccuggagaaagccaaagaccuuuauuucuu

SEQ ID NO: 221516 - RNA, 32 nt, Homo Sapiens
uguacaggcugaagcccccugcucucccaccc

SEQ ID NO: 221517 - RNA, 32 nt, Homo Sapiens
uaugaugcuuuaaaauuaucagagcacuuuca

SEQ ID NO: 221518 - RNA, 32 nt, Homo Sapiens
aagcuaaaaguuuguuucuguugccugcacac

SEQ ID NO: 221519 - RNA, 32 nt, Homo Sapiens
guccgcaaccucaggggccugggauuccugug

SEQ ID NO: 221520 - RNA, 32 nt, Homo Sapiens
ucugaguagggcugauguguuuccuguuaguc

SEQ ID NO: 221521 - RNA, 32 nt, Homo Sapiens
auacuguuagacaguggggucucaauguguua

SEQ ID NO: 221522 - RNA, 32 nt, Homo Sapiens
gauccuugauguuugugacaagaaaaugagaa

SEQ ID NO: 221523 - RNA, 32 nt, Homo Sapiens
cacugcauuuggggccuuucccauuggucugc

SEQ ID NO: 221524 - RNA, 32 nt, Homo Sapiens
ucaucuggauucucccacuucucuacuccauu

SEQ ID NO: 221525 - RNA, 32 nt, Homo Sapiens
uucuuuucuuuuucuuuuuuuuuuuuuuuuua

SEQ ID NO: 221526 - RNA, 32 nt, Homo Sapiens
guacugucugacucacgugugugauccaaaua

SEQ ID NO: 221527 - RNA, 32 nt, Homo Sapiens
ggagagaaauaaaugcaggaaauacuugaucc

SEQ ID NO: 221528 - RNA, 32 nt, Homo Sapiens
gaacuguugguuuguguucaaggagaccccgu

SEQ ID NO: 221529 - RNA, 31 nt, Homo Sapiens
cgcuugaacauaucugcuggacugaugucuu

SEQ ID NO: 221530 - RNA, 32 nt, Homo Sapiens
uucuacuguucaauuucagaaacuaagaauca

SEQ ID NO: 221531 - RNA, 32 nt, Homo Sapiens
acacuuacuggagaacuguguacaauaaaguc

SEQ ID NO: 221532 - RNA, 32 nt, Homo Sapiens
uggaagugugcagguauaaacacacccucugu

SEQ ID NO: 221533 - RNA, 32 nt, Homo Sapiens
gacugagucugauucagaaaauaauuguaaug

SEQ ID NO: 221534 - RNA, 32 nt, Homo Sapiens
gcguccccgcggccgcuuggccucgaugaccg

SEQ ID NO: 221535 - RNA, 31 nt, Homo Sapiens
uccggcuccugcgucgcuccggaagccugcg

SEQ ID NO: 221536 - RNA, 32 nt, Homo Sapiens
cauaaugcuucuuuccucuuaaugucucaaaa

SEQ ID NO: 221537 - RNA, 32 nt, Homo Sapiens
ggcucacagcagccucugccucccggguucaa

SEQ ID NO: 221538 - RNA, 32 nt, Homo Sapiens
ggcaggcugggcccugcauuucuggggcagga

SEQ ID NO: 221539 - RNA, 32 nt, Homo Sapiens
uccuggacccccagccccgcuuccuggacccg

SEQ ID NO: 221540 - RNA, 32 nt, Homo Sapiens
ucuuaucaagacaaucuugguggcguugggaa

SEQ ID NO: 221541 - RNA, 32 nt, Homo Sapiens
caaaauguugacugccuauuuaaagaaaagaa

SEQ ID NO: 221542 - RNA, 32 nt, Homo Sapiens
cagaguuccacccuuaaaucuguagguuuuca

SEQ ID NO: 221543 - RNA, 28 nt, Homo Sapiens
ugaaguguuuagaacauuauauucucaa

SEQ ID NO: 221544 - RNA, 32 nt, Homo Sapiens
ccuucuuuuucuucuuuuuuugugauguccca

SEQ ID NO: 221545 - RNA, 32 nt, Homo Sapiens
ugaugaccacacggggcagagagaaaccaacc

SEQ ID NO: 221546 - RNA, 32 nt, Homo Sapiens
uucccucaccgccgugaauuuauuuauuuauu

SEQ ID NO: 221547 - RNA, 32 nt, Homo Sapiens
uugcuguagcgaugacauuguuuucagaauuu

SEQ ID NO: 221548 - RNA, 32 nt, Homo Sapiens
ugcuuuguuuuucguaucaaguuauaggaucu

SEQ ID NO: 221549 - RNA, 32 nt, Homo Sapiens
auccuggaccuccggaacaaccacgugcuaga

SEQ ID NO: 221550 - RNA, 32 nt, Homo Sapiens
gaacugguuucugcuuuaauacaaaaacaaaa

SEQ ID NO: 221551 - RNA, 32 nt, Homo Sapiens
aacuguucucuuugucagcagugaagauauug

SEQ ID NO: 221552 - RNA, 32 nt, Homo Sapiens
gcugacugggacucaggcugcgugccuccguc

SEQ ID NO: 221553 - RNA, 32 nt, Homo Sapiens
acggagggccuggucgccuggaggaagccgga

SEQ ID NO: 221554 - RNA, 31 nt, Homo Sapiens
gugaaacagagcacuugcagagccugggaca

SEQ ID NO: 221555 - RNA, 32 nt, Homo Sapiens
gagcaucucggaggaugcggcgcggcgaucgg

SEQ ID NO: 221556 - RNA, 30 nt, Homo Sapiens
uggggauggggucgcagacgcugcagaucc

SEQ ID NO: 221557 - RNA, 32 nt, Homo Sapiens
uuuagucaaugaaacaaaaacaaaaucacaag

SEQ ID NO: 221558 - RNA, 32 nt, Homo Sapiens
gaaucgggcagggcgucugugcauuugcgggu

SEQ ID NO: 221559 - RNA, 32 nt, Homo Sapiens
cauauaaagggggagggaaauagcuaauaaug

SEQ ID NO: 221560 - RNA, 32 nt, Homo Sapiens
gaaacucacuguauacacuaaacacuauucug

SEQ ID NO: 221561 - RNA, 32 nt, Homo Sapiens
cagucuucuuccauguucuauuagcuccacaa

SEQ ID NO: 221562 - RNA, 32 nt, Homo Sapiens
agcugcauccugaaugagaugcgugaccagga

SEQ ID NO: 221563 - RNA, 32 nt, Homo Sapiens
uuaauuuguugaaauauaaucucuuuaaguuc

SEQ ID NO: 221564 - RNA, 32 nt, Homo Sapiens
ggucuauauauuuauguaaaucuuuuccauuu

SEQ ID NO: 221565 - RNA, 32 nt, Homo Sapiens
cucucucccaccuccuccccagaugggaggag

SEQ ID NO: 221566 - RNA, 32 nt, Homo Sapiens
agcccgcguaugcggcggccggcuucccagcg

SEQ ID NO: 221567 - RNA, 32 nt, Homo Sapiens
ggccaucccuggauuucugcagcuccaggacu

SEQ ID NO: 221568 - RNA, 32 nt, Homo Sapiens
ucacgcugacacugcagccagcuccucaaugg

SEQ ID NO: 221569 - RNA, 32 nt, Homo Sapiens
aaacauguuucccccuugacuugcuauuaggg

SEQ ID NO: 221570 - RNA, 32 nt, Homo Sapiens
uaaugaugaagaugacagugaggugcccagcc

SEQ ID NO: 221571 - RNA, 32 nt, Homo Sapiens
ggagccgggaugcacuguuccugcuguggguc

SEQ ID NO: 221572 - RNA, 30 nt, Homo Sapiens
gccucauuucuugcugcagagaaucuuuug

SEQ ID NO: 221573 - RNA, 32 nt, Homo Sapiens
gacugaguucuuccugagggcaguuguuugug

SEQ ID NO: 221574 - RNA, 32 nt, Homo Sapiens
gccucccucccuccccuuggucaugggauuug

SEQ ID NO: 221575 - RNA, 32 nt, Homo Sapiens
gaggaccaggagacggcuguguagcgggccgc

SEQ ID NO: 221576 - RNA, 32 nt, Homo Sapiens
gugcucuuccgcgcuccucgacuccagcuuug

SEQ ID NO: 221577 - RNA, 32 nt, Homo Sapiens
cuucucaccacauucaccuggacaaaucugaa

SEQ ID NO: 221578 - RNA, 32 nt, Homo Sapiens
accuucaaccucagucagcucccaggguugcu

SEQ ID NO: 221579 - RNA, 32 nt, Homo Sapiens
aguauuugggcagaugcuauggguuacaguug

SEQ ID NO: 221580 - RNA, 32 nt, Homo Sapiens
auaaguugauuuacugaugauaugucauauga

SEQ ID NO: 221581 - RNA, 32 nt, Homo Sapiens
agagccagccaagaagaaaauuuuaaaaccaa

SEQ ID NO: 221582 - RNA, 32 nt, Homo Sapiens
agggcaaauaauccuuguuuugucuucaccca

SEQ ID NO: 221583 - RNA, 32 nt, Homo Sapiens
cccugaauacuuugauuggaauuggaauauau

SEQ ID NO: 221584 - RNA, 32 nt, Homo Sapiens
cauuugcuugugaaagaagagaaauguggcuu

SEQ ID NO: 221585 - RNA, 32 nt, Homo Sapiens
aguacaacauucucccucucccuguuuucacu

SEQ ID NO: 221586 - RNA, 32 nt, Homo Sapiens
gcgggauggaggaggaugcaggaagaggaguc

SEQ ID NO: 221587 - RNA, 32 nt, Homo Sapiens
aaaaccauguuuucuuaccuccuuccagaugg

SEQ ID NO: 221588 - RNA, 32 nt, Homo Sapiens
uccuuaguagccaacacuguuaaaucugcaua

SEQ ID NO: 221589 - RNA, 32 nt, Homo Sapiens
guugaguguacaaagccuacugugcgugagau

SEQ ID NO: 221590 - RNA, 32 nt, Homo Sapiens
uacagaagagucucuaaugaaaacacuuuaaa

SEQ ID NO: 221591 - RNA, 32 nt, Homo Sapiens
ggcagaucugauuuguugauagcaauucccug

SEQ ID NO: 221592 - RNA, 32 nt, Homo Sapiens
cgcugaagaaucuggaagguugcgguuugcuc

SEQ ID NO: 221593 - RNA, 32 nt, Homo Sapiens
agacuauaaucccuuaaauauuuuagaagaga

SEQ ID NO: 221594 - RNA, 32 nt, Homo Sapiens
caagucaggaggucaagugugcaugcaagagg

SEQ ID NO: 221595 - RNA, 32 nt, Homo Sapiens
ccccuguaaucucagcacuuuggguggccaag

SEQ ID NO: 221596 - RNA, 32 nt, Homo Sapiens
agaauaaucaaauauauuuuaagcaaguaagu

SEQ ID NO: 221597 - RNA, 32 nt, Homo Sapiens
uguguuggcgcuuugcuuuggucuaucuuuga

SEQ ID NO: 221598 - RNA, 32 nt, Homo Sapiens
auuuauuaaugagaaucuuuguuuuuaugaaa

SEQ ID NO: 221599 - RNA, 32 nt, Homo Sapiens
cccggucccgccugcccgcccucccccacgug

SEQ ID NO: 221600 - RNA, 32 nt, Homo Sapiens
cggggggauugaggagaguccuggggcaggcg

SEQ ID NO: 221601 - RNA, 32 nt, Homo Sapiens
gcuccgaggcgagaggcugcauggaguggccg

SEQ ID NO: 221602 - RNA, 32 nt, Homo Sapiens
cacagagacauuccuccgagccggggaguuuc

SEQ ID NO: 221603 - RNA, 32 nt, Homo Sapiens
uaggagaccuugagccagaggacccagcuaag

SEQ ID NO: 221604 - RNA, 32 nt, Homo Sapiens
ucaccuccacuguaccaagacuuggugggaag

SEQ ID NO: 221605 - RNA, 32 nt, Homo Sapiens
gagcuuggugguuugaggaggagaggccuggg

SEQ ID NO: 221606 - RNA, 32 nt, Homo Sapiens
cauagcuaugcuucaugaggcuuacaagaagu

SEQ ID NO: 221607 - RNA, 32 nt, Homo Sapiens
ugguggccagaauuagauaucuuuaaagaauu

SEQ ID NO: 221608 - RNA, 32 nt, Homo Sapiens
acguacaauuuaaagaauaauuuuaaagugaa

SEQ ID NO: 221609 - RNA, 30 nt, Homo Sapiens
cuuaucacagaaauaaaauaucuccaaaug

SEQ ID NO: 221610 - RNA, 32 nt, Homo Sapiens
gcagugcagggaagaggagacacuggucugca

SEQ ID NO: 221611 - RNA, 32 nt, Homo Sapiens
gauccagaguuuccuagaacgcaacuuaggau

SEQ ID NO: 221612 - RNA, 32 nt, Homo Sapiens
aaagugaaugcugcugucuuggagccugggca

SEQ ID NO: 221613 - RNA, 32 nt, Homo Sapiens
uguuugauauccugcauagaauuugacaaaaa

SEQ ID NO: 221614 - RNA, 32 nt, Homo Sapiens
ccugcccaaacacguggacucuauaaucaaca

SEQ ID NO: 221615 - RNA, 32 nt, Homo Sapiens
aggagggaggggcugucugcagcagcugcacu

SEQ ID NO: 221616 - RNA, 32 nt, Homo Sapiens
aaguuaaaauuugggaguaguagaaaaucaau

SEQ ID NO: 221617 - RNA, 32 nt, Homo Sapiens
ggagggugggugggugggagggggccuuccuc

SEQ ID NO: 221618 - RNA, 32 nt, Homo Sapiens
uacuuucuuucuucuuuuuuauuuuuuugaga

SEQ ID NO: 221619 - RNA, 32 nt, Homo Sapiens
aucggcgggcagaggagagggaggccgcggaa

SEQ ID NO: 221620 - RNA, 32 nt, Homo Sapiens
ucauccccuuccugcucuggcagcucaccccu

SEQ ID NO: 221621 - RNA, 32 nt, Homo Sapiens
agccaagcagugcauugucaguuacgucaucu

SEQ ID NO: 221622 - RNA, 30 nt, Homo Sapiens
agguuggagguagguggugagucugagaaa

SEQ ID NO: 221623 - RNA, 32 nt, Homo Sapiens
ucugcccucacaugcacagggauuuaacaaca

SEQ ID NO: 221624 - RNA, 32 nt, Homo Sapiens
aaugauguacccuguacacguguucaugcugu

SEQ ID NO: 221625 - RNA, 32 nt, Homo Sapiens
ccagaucauuugaaauuucuggcugccuuacu

SEQ ID NO: 221626 - RNA, 32 nt, Homo Sapiens
acaaagugcugggauuauaggcaagagcgaug

SEQ ID NO: 221627 - RNA, 32 nt, Homo Sapiens
gaaaaccguacucagccaaaagaucaggacaa

SEQ ID NO: 221628 - RNA, 32 nt, Homo Sapiens
cugcugauaggcccgcagacggcggcccagca

SEQ ID NO: 221629 - RNA, 32 nt, Homo Sapiens
uuaagcuuacacaaugaaauggaaaaaauguu

SEQ ID NO: 221630 - RNA, 30 nt, Homo Sapiens
ugaccaugucgagaccccggaagaggcugg

SEQ ID NO: 221631 - RNA, 32 nt, Homo Sapiens
aaaaugggaauggagggaaauaggggaacugg

SEQ ID NO: 221632 - RNA, 32 nt, Homo Sapiens
uuucacccagcccaagcagcggcggcccagug

SEQ ID NO: 221633 - RNA, 32 nt, Homo Sapiens
ggggucuccacaucuuccuucucugaagucca

SEQ ID NO: 221634 - RNA, 32 nt, Homo Sapiens
gauacagcuggguucccuggcugacucuguac

SEQ ID NO: 221635 - RNA, 32 nt, Homo Sapiens
gucuaggggcgcccgggcguuggaaccggcgg

SEQ ID NO: 221636 - RNA, 32 nt, Homo Sapiens
gagcaaucuauuuuauaugaacuuuuuugguu

SEQ ID NO: 221637 - RNA, 32 nt, Homo Sapiens
uugaaaaaugaaauagauuuuaacucuucauc

SEQ ID NO: 221638 - RNA, 32 nt, Homo Sapiens
gcugaccgugcggccgcgggacacgcucagcg

SEQ ID NO: 221639 - RNA, 32 nt, Homo Sapiens
cuggcuaaauggacaucauguuuucuggugau

SEQ ID NO: 221640 - RNA, 32 nt, Homo Sapiens
ucgucuaaugaaauccuuagcuguccaaagac

SEQ ID NO: 221641 - RNA, 32 nt, Homo Sapiens
augggaaaggcauucagaaauuaugguuucua

SEQ ID NO: 221642 - RNA, 32 nt, Homo Sapiens
guaacaaaaauauuuguagucuucaauaaacu

SEQ ID NO: 221643 - RNA, 32 nt, Homo Sapiens
agaguaaccccacuggaguggugcuggugucu

SEQ ID NO: 221644 - RNA, 32 nt, Homo Sapiens
ugaugacucguuuuuucuucuacucuguggcc

SEQ ID NO: 221645 - RNA, 32 nt, Homo Sapiens
cgugauguauuuuuuuuaauucuuuugauaca

SEQ ID NO: 221646 - RNA, 32 nt, Homo Sapiens
cggguguagaugccuucccacccaccaggcau

SEQ ID NO: 221647 - RNA, 32 nt, Homo Sapiens
uaaaugugguauacaggacaaacuagacggcc

SEQ ID NO: 221648 - RNA, 32 nt, Homo Sapiens
ugagcauggcagcugguugcuccauuugagag

SEQ ID NO: 221649 - RNA, 32 nt, Homo Sapiens
gaguugucuugacaccacugaugucgaguguc

SEQ ID NO: 221650 - RNA, 32 nt, Homo Sapiens
guccccgaggccggagugcaauggcgugaucu

SEQ ID NO: 221651 - RNA, 32 nt, Homo Sapiens
augacaguucccuguccucccggagaugccug

SEQ ID NO: 221652 - RNA, 32 nt, Homo Sapiens
gccaaaaagcgauugcugugauuggagcugga

SEQ ID NO: 221653 - RNA, 32 nt, Homo Sapiens
accuuaagggaaggucaagagggagaugggca

SEQ ID NO: 221654 - RNA, 32 nt, Homo Sapiens
uccccccaggcauuucuaggcuccucacgagc

SEQ ID NO: 221655 - RNA, 32 nt, Homo Sapiens
gcgacaccgacugcuccggaccgcgccuccaa

SEQ ID NO: 221656 - RNA, 32 nt, Homo Sapiens
gcauugcacgcugccaucgacgccccugacuu

SEQ ID NO: 221657 - RNA, 32 nt, Homo Sapiens
aaugauauggucacggcgcucacugugcccuc

SEQ ID NO: 221658 - RNA, 32 nt, Homo Sapiens
cagagaaaaagagagguugugauuguuggauc

SEQ ID NO: 221659 - RNA, 32 nt, Homo Sapiens
gagcugugguggcucccggcacacgagugucc

SEQ ID NO: 221660 - RNA, 32 nt, Homo Sapiens
gauugagacagaguggaaagaaagacaucauu

SEQ ID NO: 221661 - RNA, 32 nt, Homo Sapiens
cuuccuucaguuccccaggcuccuccuccaaa

SEQ ID NO: 221662 - RNA, 32 nt, Homo Sapiens
ucuaacugcccugaagucuagagcaggggagg

SEQ ID NO: 221663 - RNA, 32 nt, Homo Sapiens
cucacaaauauguuucguuugcucaacauggu

SEQ ID NO: 221664 - RNA, 32 nt, Homo Sapiens
aauuguugacauuccuuuuagaaguugugaaa

SEQ ID NO: 221665 - RNA, 32 nt, Homo Sapiens
uaugugcaaacaaaucaugcaaugcagccaag

SEQ ID NO: 221666 - RNA, 32 nt, Homo Sapiens
gcuccuccgggugacccccggcggggcccugc

SEQ ID NO: 221667 - RNA, 32 nt, Homo Sapiens
ucucaagauaauggauuuaaacuggugucuua

SEQ ID NO: 221668 - RNA, 32 nt, Homo Sapiens
gccugauguugaagaaguaaauuuauaucgga

SEQ ID NO: 221669 - RNA, 32 nt, Homo Sapiens
auaauaauagcuuucauuuacauagugcuuac

SEQ ID NO: 221670 - RNA, 32 nt, Homo Sapiens
ucugccucuugccugcccuccucucagaccua

SEQ ID NO: 221671 - RNA, 32 nt, Homo Sapiens
ccugcaaccucacugugcccgccccgcaccau

SEQ ID NO: 221672 - RNA, 32 nt, Homo Sapiens
cacacuggcguagaaguuuuuguacuguaaag

SEQ ID NO: 221673 - RNA, 32 nt, Homo Sapiens
guucauuccccugggcggggcccugcaccgac

SEQ ID NO: 221674 - RNA, 32 nt, Homo Sapiens
caucugaacaauuuccagauguucuuaaucca

SEQ ID NO: 221675 - RNA, 32 nt, Homo Sapiens
uacaugauguaagugcugcugaagcccugcug

SEQ ID NO: 221676 - RNA, 32 nt, Homo Sapiens
cugaccaccuccccggcauccccucaggcgug

SEQ ID NO: 221677 - RNA, 32 nt, Homo Sapiens
uuuuauuuuaacuggcaugucauuugcucaca

SEQ ID NO: 221678 - RNA, 32 nt, Homo Sapiens
ucaguucugucagcugcaaguucuuguauaau

SEQ ID NO: 221679 - RNA, 32 nt, Homo Sapiens
cugccaacgguccucacccauuagccgaaggc

SEQ ID NO: 221680 - RNA, 32 nt, Homo Sapiens
uugaagaagaaagccaggacuggagcagacga

SEQ ID NO: 221681 - RNA, 32 nt, Homo Sapiens
cugcaacggaggaggacagugagacgaugcca

SEQ ID NO: 221682 - RNA, 32 nt, Homo Sapiens
uuuuggggaaaugugauuucucucucuuuuuu

SEQ ID NO: 221683 - RNA, 32 nt, Homo Sapiens
agugucugcucuuuuccagacacuguucugga

SEQ ID NO: 221684 - RNA, 32 nt, Homo Sapiens
gguaaagaggaugcguguccaccaucccagcc

SEQ ID NO: 221685 - RNA, 32 nt, Homo Sapiens
aagauuuuuaugauuuggaucuauacaaccuu

SEQ ID NO: 221686 - RNA, 31 nt, Homo Sapiens
aaugagugaaacaggccucucacacaagcga

SEQ ID NO: 221687 - RNA, 32 nt, Homo Sapiens
cagcggcggcgacgagggcuacgggacugggg

SEQ ID NO: 221688 - RNA, 32 nt, Homo Sapiens
ucugauuucugcacuugagcauacaucacuca

SEQ ID NO: 221689 - RNA, 32 nt, Homo Sapiens
cugcauuuacacaccagacacacaaacacaca

SEQ ID NO: 221690 - RNA, 32 nt, Homo Sapiens
guuuggugggcaagugggggugaucuuggugu

SEQ ID NO: 221691 - RNA, 32 nt, Homo Sapiens
caagccaaagauuuuauuauguucagaaaccu

SEQ ID NO: 221692 - RNA, 32 nt, Homo Sapiens
agcuacuuuuaaucauuaaccuuauaaauuua

SEQ ID NO: 221693 - RNA, 32 nt, Homo Sapiens
aacacucaacacauguagagccagguguauuc

SEQ ID NO: 221694 - RNA, 32 nt, Homo Sapiens
uuauguauuuaugaauccaugaccaaauuaaa

SEQ ID NO: 221695 - RNA, 30 nt, Homo Sapiens
cguuuaaguguguagcaccagccgggcgca

SEQ ID NO: 221696 - RNA, 32 nt, Homo Sapiens
cagagcacucccucccacuaacuuguucugca

SEQ ID NO: 221697 - RNA, 32 nt, Homo Sapiens
auggauuuccauaaguuuuacuuugagaaucu

SEQ ID NO: 221698 - RNA, 32 nt, Homo Sapiens
uccagaccagccugaccaacguggugaaacuc

SEQ ID NO: 221699 - RNA, 32 nt, Homo Sapiens
aauuuaucuucaaaguaaaugugaguuuuugu

SEQ ID NO: 221700 - RNA, 32 nt, Homo Sapiens
ccgcgcgagcagccggccucucgcaggagccg

SEQ ID NO: 221701 - RNA, 32 nt, Homo Sapiens
uacguguaaaaucuuggguaccuuuagauucu

SEQ ID NO: 221702 - RNA, 32 nt, Homo Sapiens
uaacuauguugcugaaaaugcaaagcugaaga

SEQ ID NO: 221703 - RNA, 32 nt, Homo Sapiens
cagcguggguggggcggggguggucccacagc

SEQ ID NO: 221704 - RNA, 32 nt, Homo Sapiens
agauccggcagcacgaguggcucucggccucc

SEQ ID NO: 221705 - RNA, 32 nt, Homo Sapiens
uguccccggguggccuggccaaguccgggcau

SEQ ID NO: 221706 - RNA, 32 nt, Homo Sapiens
guaucucccuucccucugagcuguauuguucu

SEQ ID NO: 221707 - RNA, 32 nt, Homo Sapiens
ugugagucuaguuuuugcuuuaccaaguguac

SEQ ID NO: 221708 - RNA, 32 nt, Homo Sapiens
aacaauuuacuuucuaauuaaaauuuuguguu

SEQ ID NO: 221709 - RNA, 32 nt, Homo Sapiens
ccagguagcuucccaucaccaacagcaggcag

SEQ ID NO: 221710 - RNA, 32 nt, Homo Sapiens
cacuuaaagaccccaaagacucuguugggaac

SEQ ID NO: 221711 - RNA, 31 nt, Homo Sapiens
ugggggagggcggacccgacgcacagggcca

SEQ ID NO: 221712 - RNA, 32 nt, Homo Sapiens
aagaugugaugagaauuugaagucugccgggc

SEQ ID NO: 221713 - RNA, 32 nt, Homo Sapiens
aggauaauauauuugcagauaauucuggacca

SEQ ID NO: 221714 - RNA, 32 nt, Homo Sapiens
gugguguccccuauccuccccuuuuaccacuc

SEQ ID NO: 221715 - RNA, 32 nt, Homo Sapiens
agcuuuucuuuuucuuuuuuuuuuuuuuuuaa

SEQ ID NO: 221716 - RNA, 32 nt, Homo Sapiens
ugccuucaaaauuuuuguuuagaucaucaggu

SEQ ID NO: 221717 - RNA, 32 nt, Homo Sapiens
gcaccugagcgugcugagcuccagguauagug

SEQ ID NO: 221718 - RNA, 32 nt, Homo Sapiens
acuguacugggagaggcugaggcuagggcugg

SEQ ID NO: 221719 - RNA, 31 nt, Homo Sapiens
cagaagcgagcccgcauucagacaccgcgga

SEQ ID NO: 221720 - RNA, 32 nt, Homo Sapiens
uacuguaccucgugccugcugcggcugcgcug

SEQ ID NO: 221721 - RNA, 32 nt, Homo Sapiens
agcgggauuuugggggugggggggaugggagg

SEQ ID NO: 221722 - RNA, 32 nt, Homo Sapiens
aagaacuuuaaagauuucugccugagagaaua

SEQ ID NO: 221723 - RNA, 32 nt, Homo Sapiens
aucuguacaguuuugugaauuaugacaaacuu

SEQ ID NO: 221724 - RNA, 32 nt, Homo Sapiens
ucaauauccaacaacuagauagauuaggaccu

SEQ ID NO: 221725 - RNA, 32 nt, Homo Sapiens
gucccacccuccccuccugacccuccuacgag

SEQ ID NO: 221726 - RNA, 32 nt, Homo Sapiens
ggcugcgcgcuugcugccgggccuacgcgcuc

SEQ ID NO: 221727 - RNA, 32 nt, Homo Sapiens
agugaccuuuuguccuuuaccugauuggcacu

SEQ ID NO: 221728 - RNA, 32 nt, Homo Sapiens
gugacgugcgucgaaguuggacuuccgguugu

SEQ ID NO: 221729 - RNA, 32 nt, Homo Sapiens
agaaaggagcagcugucucugccguggcugcu

SEQ ID NO: 221730 - RNA, 32 nt, Homo Sapiens
ggucgggcgcuugguccggcaguuggucggug

SEQ ID NO: 221731 - RNA, 32 nt, Homo Sapiens
aggcagguguaacaguuccuuuccaccagauu

SEQ ID NO: 221732 - RNA, 32 nt, Homo Sapiens
cgcuuuaggcuggccggcggcgcugggaggug

SEQ ID NO: 221733 - RNA, 32 nt, Homo Sapiens
cacaauacuugaaaaauaaaaaugaacaagcu

SEQ ID NO: 221734 - RNA, 32 nt, Homo Sapiens
ccgcacucucugggggcgagggccaggucagg

SEQ ID NO: 221735 - RNA, 32 nt, Homo Sapiens
gcuucaccccuaccugcuuccuccccaccgca

SEQ ID NO: 221736 - RNA, 32 nt, Homo Sapiens
acaguccuucaggacccacucccuuuccugcc

SEQ ID NO: 221737 - RNA, 32 nt, Homo Sapiens
acaggggaggggcugguuuguucugugcuuag

SEQ ID NO: 221738 - RNA, 32 nt, Homo Sapiens
gauuauuuaccagguaugugucuuaaacaaau

SEQ ID NO: 221739 - RNA, 32 nt, Homo Sapiens
aauaaaugaagauuacccucaaaugcuagaag

SEQ ID NO: 221740 - RNA, 32 nt, Homo Sapiens
agcgauguuucagccgcaccugcugaccugaa

SEQ ID NO: 221741 - RNA, 32 nt, Homo Sapiens
ccuauauggcauucugucucagugagucaguu

SEQ ID NO: 221742 - RNA, 32 nt, Homo Sapiens
aaauuuugucugcuauuuuguaaaaauaaacu

SEQ ID NO: 221743 - RNA, 32 nt, Homo Sapiens
uggcuaaggggagugaguccagagagggacuu

SEQ ID NO: 221744 - RNA, 31 nt, Homo Sapiens
uuccucggaaacacucuugaaugucugagug

SEQ ID NO: 221745 - RNA, 32 nt, Homo Sapiens
ggaaggcagacgggagagccgccaaagacucu

SEQ ID NO: 221746 - RNA, 32 nt, Homo Sapiens
ccgcuucgcgcgcgcuccgugacgcacacuuc

SEQ ID NO: 221747 - RNA, 31 nt, Homo Sapiens
gagccaauggcagaagacaaaaccaaaccga

SEQ ID NO: 221748 - RNA, 32 nt, Homo Sapiens
caaucuauucccucacugggcccccagagaag

SEQ ID NO: 221749 - RNA, 32 nt, Homo Sapiens
gccgccugggcggccuggccuguacggggcgg

SEQ ID NO: 221750 - RNA, 32 nt, Homo Sapiens
gugcgccagguugugggaagugaggcuggcgg

SEQ ID NO: 221751 - RNA, 32 nt, Homo Sapiens
gggcggccggggcucugggagcgugguaacgu

SEQ ID NO: 221752 - RNA, 32 nt, Homo Sapiens
accgcggucucagucaucggcgcggauggcua

SEQ ID NO: 221753 - RNA, 32 nt, Homo Sapiens
ggcuugaauccauuuccucucaucucagcccu

SEQ ID NO: 221754 - RNA, 32 nt, Homo Sapiens
uuauuuaagcauuugggggucucacuuuugcu

SEQ ID NO: 221755 - RNA, 32 nt, Homo Sapiens
acugcgucuccgcgccccggcgucauccugcg

SEQ ID NO: 221756 - RNA, 32 nt, Homo Sapiens
uucagucuggaaaacuaagcuagucagaacug

SEQ ID NO: 221757 - RNA, 32 nt, Homo Sapiens
acacuaaaauuccacucaugccgggcguggug

SEQ ID NO: 221758 - RNA, 32 nt, Homo Sapiens
ugcaucuuaggggaucgcucuuccucacacca

SEQ ID NO: 221759 - RNA, 32 nt, Homo Sapiens
auaccuuugacaaaaaauguuuauaaauucau

SEQ ID NO: 221760 - RNA, 32 nt, Homo Sapiens
uaaaaagguuuuuugagacagauucuugcucu

SEQ ID NO: 221761 - RNA, 32 nt, Homo Sapiens
cccuguguggcccuguucccaccaugagucug

SEQ ID NO: 221762 - RNA, 32 nt, Homo Sapiens
aguuauauacuauauauaaucacuauaucacu

SEQ ID NO: 221763 - RNA, 32 nt, Homo Sapiens
cucagaaaaacaaaacaaaacaaaacaaauga

SEQ ID NO: 221764 - RNA, 32 nt, Homo Sapiens
caccacuccuccagcccuuugcccgcacauac

SEQ ID NO: 221765 - RNA, 32 nt, Homo Sapiens
cuguccccccagguaaacccaguuaguuccgu

SEQ ID NO: 221766 - RNA, 32 nt, Homo Sapiens
gcuucccguccgggccgcucucagggggcgcc

SEQ ID NO: 221767 - RNA, 32 nt, Homo Sapiens
uugaauauuaucuauuauaaaaguaacuacaa

SEQ ID NO: 221768 - RNA, 32 nt, Homo Sapiens
agucaccauggcggccggaguugcggccuggc

SEQ ID NO: 221769 - RNA, 32 nt, Homo Sapiens
cggggaggccugcggcaccugccgcuccacag

SEQ ID NO: 221770 - RNA, 32 nt, Homo Sapiens
ccuuaggcucugucuccaccgcagggcccaag

SEQ ID NO: 221771 - RNA, 32 nt, Homo Sapiens
ggccuggccggggcccugaggggcgagggugc

SEQ ID NO: 221772 - RNA, 32 nt, Homo Sapiens
ggaaaacagaaccaccuggcuaacccuaggaa

SEQ ID NO: 221773 - RNA, 32 nt, Homo Sapiens
cuccgaaaguuccuuauguauauuuaaaagaa

SEQ ID NO: 221774 - RNA, 32 nt, Homo Sapiens
guggcacucuacacucuaauuaaacuuuuauc

SEQ ID NO: 221775 - RNA, 32 nt, Homo Sapiens
acauggcaggcggucaugucccuugggccugu

SEQ ID NO: 221776 - RNA, 32 nt, Homo Sapiens
auccaaggacugaguuauucuccccaugaggc

SEQ ID NO: 221777 - RNA, 32 nt, Homo Sapiens
agagcuucaggccccaggacugugggggcccc

SEQ ID NO: 221778 - RNA, 32 nt, Homo Sapiens
cauuuugcgggaagaggaggcgcuguaccugc

SEQ ID NO: 221779 - RNA, 32 nt, Homo Sapiens
acauugaaacaaaaauuuaaaauguuaucuuu

SEQ ID NO: 221780 - RNA, 32 nt, Homo Sapiens
aaacuagacugaaaugauacaaacuuccaucu

SEQ ID NO: 221781 - RNA, 32 nt, Homo Sapiens
gcuauagaauaaugcauuaauaaaaugaggcu

SEQ ID NO: 221782 - RNA, 32 nt, Homo Sapiens
aggaacuuuucucgaggaguguuaugucaugg

SEQ ID NO: 221783 - RNA, 32 nt, Homo Sapiens
auaccaaaaucuggcacacacacacacacaca

SEQ ID NO: 221784 - RNA, 32 nt, Homo Sapiens
agcuucccuggugggcucccccgggaucccca

SEQ ID NO: 221785 - RNA, 32 nt, Homo Sapiens
agcaagcauuucugcccuagcuaauucuccug

SEQ ID NO: 221786 - RNA, 32 nt, Homo Sapiens
gcagacaucgccaagucgguguaccuuacuug

SEQ ID NO: 221787 - RNA, 32 nt, Homo Sapiens
aauauuuauuuuaaagugaauaaaauguccac

SEQ ID NO: 221788 - RNA, 32 nt, Homo Sapiens
uugaaagcaaauuuauuuuauuauccuauuuu

SEQ ID NO: 221789 - RNA, 32 nt, Homo Sapiens
cagagaugagaccccuguggggccuacagucc

SEQ ID NO: 221790 - RNA, 30 nt, Homo Sapiens
uuacuauggcggagucggccggagccuccu

SEQ ID NO: 221791 - RNA, 32 nt, Homo Sapiens
uugucccaauacuacugugacccucucugauc

SEQ ID NO: 221792 - RNA, 32 nt, Homo Sapiens
uuagaccugccagccacugucaccgagcgggu

SEQ ID NO: 221793 - RNA, 32 nt, Homo Sapiens
gagggccccucccccaacccaacucgacccuc

SEQ ID NO: 221794 - RNA, 32 nt, Homo Sapiens
gcugaggaugagagggcacagggagguggguu

SEQ ID NO: 221795 - RNA, 30 nt, Homo Sapiens
ugaucaaaaaauuugcauuuaaaaaaaaaa

SEQ ID NO: 221796 - RNA, 32 nt, Homo Sapiens
gugccuggccccagucugggccaucucuuagg

SEQ ID NO: 221797 - RNA, 32 nt, Homo Sapiens
uuuggaaaugacugaaauggaaauuuugaacc

SEQ ID NO: 221798 - RNA, 32 nt, Homo Sapiens
uaccugucacauauuucucuuaggacuuuuaa

SEQ ID NO: 221799 - RNA, 32 nt, Homo Sapiens
acaaauaaaaacaguguuuuauagugaaaucu

SEQ ID NO: 221800 - RNA, 32 nt, Homo Sapiens
guuuugaaaaacaguaauuuagaaauuacaca

SEQ ID NO: 221801 - RNA, 32 nt, Homo Sapiens
gugcaccccugggcaguuuucagacugcagca

SEQ ID NO: 221802 - RNA, 32 nt, Homo Sapiens
ucccuccuaggaccucgcagccaggcaaggcu

SEQ ID NO: 221803 - RNA, 30 nt, Homo Sapiens
caaggugucugugguuuagggggcccagcc

SEQ ID NO: 221804 - RNA, 32 nt, Homo Sapiens
aauauaucaaggaaucucguaaaaccgacacu

SEQ ID NO: 221805 - RNA, 32 nt, Homo Sapiens
gccacacuuccacccgccagggucuuccuccc

SEQ ID NO: 221806 - RNA, 32 nt, Homo Sapiens
gaggcuccucuggccuggcugggcugggucug

SEQ ID NO: 221807 - RNA, 32 nt, Homo Sapiens
auaacuggacauuugaggaaagcuuccaaauu

SEQ ID NO: 221808 - RNA, 32 nt, Homo Sapiens
auccugccccagccagcuuccaucccugacac

SEQ ID NO: 221809 - RNA, 32 nt, Homo Sapiens
uccuuaguucucagacucuccuccgccucuac

SEQ ID NO: 221810 - RNA, 32 nt, Homo Sapiens
cagaacuuggauuucuuaaauaaaacuuuuag

SEQ ID NO: 221811 - RNA, 32 nt, Homo Sapiens
caucgccccaaggggaugaaucugccacacug

SEQ ID NO: 221812 - RNA, 32 nt, Homo Sapiens
cgccggccgaccugaagcugguuucauggcag

SEQ ID NO: 221813 - RNA, 32 nt, Homo Sapiens
ccugguccaucccacccaagucccuaaacucu

SEQ ID NO: 221814 - RNA, 32 nt, Homo Sapiens
gauaaaggcucgccgcugugacccuguuaccu

SEQ ID NO: 221815 - RNA, 32 nt, Homo Sapiens
cagagugugcgcgcccagugacugcaccccgg

SEQ ID NO: 221816 - RNA, 32 nt, Homo Sapiens
cuggcggcaggacaccugugucugcaugcuga

SEQ ID NO: 221817 - RNA, 32 nt, Homo Sapiens
aauugcagaaaucagauaaaaacuacuuggug

SEQ ID NO: 221818 - RNA, 32 nt, Homo Sapiens
ggauaggaaaccccuuucuccuccugcuccuu

SEQ ID NO: 221819 - RNA, 32 nt, Homo Sapiens
caagcagcucggccauguggcuccggagccau

SEQ ID NO: 221820 - RNA, 32 nt, Homo Sapiens
gcaaucccagguccagcgccagcccuaucaug

SEQ ID NO: 221821 - RNA, 32 nt, Homo Sapiens
gucguuuacccagcccuagacaugcugcuacu

SEQ ID NO: 221822 - RNA, 32 nt, Homo Sapiens
cuccacauggcgccacggccacuuccugcugc

SEQ ID NO: 221823 - RNA, 32 nt, Homo Sapiens
aggaguuuuagcuauuugagaucguggaccau

SEQ ID NO: 221824 - RNA, 32 nt, Homo Sapiens
gugaccaagauggaguuuucuggaagaaagcg

SEQ ID NO: 221825 - RNA, 32 nt, Homo Sapiens
cagagggaggaagaggaagacaagauguugga

SEQ ID NO: 221826 - RNA, 32 nt, Homo Sapiens
acuguguacaucuggugacuauacaguuugaa

SEQ ID NO: 221827 - RNA, 31 nt, Homo Sapiens
gaagggagggcgggcuagaaggccaaaagaa

SEQ ID NO: 221828 - RNA, 32 nt, Homo Sapiens
uccccaucuguaaaaugaaggaguuggaccaa

SEQ ID NO: 221829 - RNA, 32 nt, Homo Sapiens
uuuccucacaugcucucaggagacaaggugug

SEQ ID NO: 221830 - RNA, 32 nt, Homo Sapiens
cccgccggccccagcuccagccccgcagccca

SEQ ID NO: 221831 - RNA, 32 nt, Homo Sapiens
gcaccgcccccuggacgagcgggcccugcagg

SEQ ID NO: 221832 - RNA, 32 nt, Homo Sapiens
cucccgagaucgcaacgucaacuugugggacc

SEQ ID NO: 221833 - RNA, 32 nt, Homo Sapiens
ugccugccccagcuaccaccgccaccugcuuc

SEQ ID NO: 221834 - RNA, 32 nt, Homo Sapiens
cuagcuuucugcauuuaauagguuagaaugua

SEQ ID NO: 221835 - RNA, 32 nt, Homo Sapiens
cuccauccuugacccccaacaccucaacacac

SEQ ID NO: 221836 - RNA, 28 nt, Homo Sapiens
guccucaggcggccguggcggcgguggc

SEQ ID NO: 221837 - RNA, 29 nt, Homo Sapiens
aggcguccguguuucagguuccacgcgag

SEQ ID NO: 221838 - RNA, 32 nt, Homo Sapiens
auuauuagcuaauggucuuuggcauguuuuug

SEQ ID NO: 221839 - RNA, 32 nt, Homo Sapiens
caagcuccacgcugcgcccgcugucccggccu

SEQ ID NO: 221840 - RNA, 32 nt, Homo Sapiens
gaaaggcagaacagccuccacucgcggugcac

SEQ ID NO: 221841 - RNA, 32 nt, Homo Sapiens
uaaucccagcuaggaggcugagacaggagaau

SEQ ID NO: 221842 - RNA, 32 nt, Homo Sapiens
caaguuucugaugaacauucugcauccauaua

SEQ ID NO: 221843 - RNA, 32 nt, Homo Sapiens
uguggacauuuggcaggaguuuugacuggggu

SEQ ID NO: 221844 - RNA, 32 nt, Homo Sapiens
cagcugcgccgucuccccaguccccaaacccc

SEQ ID NO: 221845 - RNA, 32 nt, Homo Sapiens
uuaaaauuauuuagccuccauuauuacaaaaa

SEQ ID NO: 221846 - RNA, 32 nt, Homo Sapiens
guguauggaaaacacuugauauuuuaucccug

SEQ ID NO: 221847 - RNA, 32 nt, Homo Sapiens
ggaggcggcgggauggaggcggcggccgagcc

SEQ ID NO: 221848 - RNA, 32 nt, Homo Sapiens
cucucgacggcacgcacuugccuguuggcugc

SEQ ID NO: 221849 - RNA, 32 nt, Homo Sapiens
ccugaggccuugguucaugcaguguucucuuu

SEQ ID NO: 221850 - RNA, 32 nt, Homo Sapiens
aauccuauaaacaguuugauuuuuuaagauga

SEQ ID NO: 221851 - RNA, 32 nt, Homo Sapiens
gucgccucuugccugccagggguuuuucggga

SEQ ID NO: 221852 - RNA, 32 nt, Homo Sapiens
gaaaaacuaugaauguauggaauuuuuuaaaa

SEQ ID NO: 221853 - RNA, 28 nt, Homo Sapiens
gggaugugggcgcuaucuccaacugucu

SEQ ID NO: 221854 - RNA, 28 nt, Homo Sapiens
ucuccucugcucaccaggauggcagaca

SEQ ID NO: 221855 - RNA, 32 nt, Homo Sapiens
caugggagccaccagcagggagagggcaggau

SEQ ID NO: 221856 - RNA, 32 nt, Homo Sapiens
ccucauuaguauccucaauauacuaacagaau

SEQ ID NO: 221857 - RNA, 32 nt, Homo Sapiens
uacauuuuuuaaaacugaaucuuaaucgauga

SEQ ID NO: 221858 - RNA, 29 nt, Homo Sapiens
uuaauuucuaguaaaucuauaaaaauggg

SEQ ID NO: 221859 - RNA, 32 nt, Homo Sapiens
cucagaggcuggagggauccuccguaugcuga

SEQ ID NO: 221860 - RNA, 32 nt, Homo Sapiens
cucugaaucaacccccuuuccuccucuccuaa

SEQ ID NO: 221861 - RNA, 32 nt, Homo Sapiens
uugcucaaccaggugguaaccggcgccgcuuc

SEQ ID NO: 221862 - RNA, 32 nt, Homo Sapiens
uugugcuuuccuauggaaaaaauacauauaua

SEQ ID NO: 221863 - RNA, 32 nt, Homo Sapiens
cuugcccugccagcugugccuugcuugcccuc

SEQ ID NO: 221864 - RNA, 32 nt, Homo Sapiens
caagccugagguuuuauauacaaacucccuga

SEQ ID NO: 221865 - RNA, 32 nt, Homo Sapiens
aacuuuggguacuuauacuaaauuaugguagu

SEQ ID NO: 221866 - RNA, 32 nt, Homo Sapiens
agguggcggugaccgaggggguggggacugag

SEQ ID NO: 221867 - RNA, 32 nt, Homo Sapiens
agagaaggaaacaaaaugagggguggcaggga

SEQ ID NO: 221868 - RNA, 32 nt, Homo Sapiens
cuucaagggacaacuuuuuuaacuuuggagaa

SEQ ID NO: 221869 - RNA, 32 nt, Homo Sapiens
ugagcgccccgcgggggccauggauggugaaa

SEQ ID NO: 221870 - RNA, 32 nt, Homo Sapiens
ugcugagauaaugaaaucaaacuagguucuag

SEQ ID NO: 221871 - RNA, 32 nt, Homo Sapiens
caaguuuuucuaugguuauuuuuaaaucucuu

SEQ ID NO: 221872 - RNA, 32 nt, Homo Sapiens
uagucuuccuuccacacccuucacucaccauc

SEQ ID NO: 221873 - RNA, 32 nt, Homo Sapiens
ggacagagagaggugaaaaacacacccaggcu

SEQ ID NO: 221874 - RNA, 32 nt, Homo Sapiens
acaguauuaagugacagugcuagaaaucaaac

SEQ ID NO: 221875 - RNA, 32 nt, Homo Sapiens
ucaaauaaaucuuucaaugaauccccaacaua

SEQ ID NO: 221876 - RNA, 32 nt, Homo Sapiens
gcacaugugagcaugucacuucccugcuuaaa

SEQ ID NO: 221877 - RNA, 32 nt, Homo Sapiens
ccaucccgcacccuuccaccuccuccgagucc

SEQ ID NO: 221878 - RNA, 32 nt, Homo Sapiens
guuuaguguaauugccgccggaggaggaggcg

SEQ ID NO: 221879 - RNA, 32 nt, Homo Sapiens
ucugacuuccucauuccaaccccagagaagga

SEQ ID NO: 221880 - RNA, 32 nt, Homo Sapiens
uuacacaauuaaaagaagaugcuguuuaaucu

SEQ ID NO: 221881 - RNA, 32 nt, Homo Sapiens
gacgccucuguucucggaauccgggugcugcg

SEQ ID NO: 221882 - RNA, 32 nt, Homo Sapiens
uacguucggggcguggccgggagcacguuggc

SEQ ID NO: 221883 - RNA, 32 nt, Homo Sapiens
acugaccccagcugcgggugcuucucucugcc

SEQ ID NO: 221884 - RNA, 32 nt, Homo Sapiens
ccuacaaaguaccagcagcaaauuagcaaaga

SEQ ID NO: 221885 - RNA, 32 nt, Homo Sapiens
cagcgagugacaggacgucuggaccggcgcgc

SEQ ID NO: 221886 - RNA, 32 nt, Homo Sapiens
aaaaauaaugagaacaagcuguugcaagcucu

SEQ ID NO: 221887 - RNA, 32 nt, Homo Sapiens
agacgauuggugggggcgcggcggcggcggcg

SEQ ID NO: 221888 - RNA, 32 nt, Homo Sapiens
accuuggauaucuauugaauguuaaacaucuc

SEQ ID NO: 221889 - RNA, 32 nt, Homo Sapiens
uguauacaauugcaaaugauaagcauuuuugu

SEQ ID NO: 221890 - RNA, 32 nt, Homo Sapiens
cgacuugcgggaugcaguuuugccauugcagc

SEQ ID NO: 221891 - RNA, 32 nt, Homo Sapiens
gcccuagcggcgucccccggccucucgccggc

SEQ ID NO: 221892 - RNA, 32 nt, Homo Sapiens
aaucugucacucccucagcaauguagauguaa

SEQ ID NO: 221893 - RNA, 32 nt, Homo Sapiens
ucauguguguuucaggcuuauuugggagaacu

SEQ ID NO: 221894 - RNA, 32 nt, Homo Sapiens
cggcucugugcggcugccccccgcagcauugc

SEQ ID NO: 221895 - RNA, 32 nt, Homo Sapiens
cauauugcuggacauuugaauuguuucugguu

SEQ ID NO: 221896 - RNA, 32 nt, Homo Sapiens
uuuugucaaaagugcacucauaucauggcuuu

SEQ ID NO: 221897 - RNA, 32 nt, Homo Sapiens
uuguauuuuauuaauauagacucucauugaau

SEQ ID NO: 221898 - RNA, 32 nt, Homo Sapiens
auauaauguuaauuaugggaauuccauuuuaa

SEQ ID NO: 221899 - RNA, 32 nt, Homo Sapiens
gaaccauguggguacccuccccggccuggguu

SEQ ID NO: 221900 - RNA, 32 nt, Homo Sapiens
auguagacuauauucuaaaaaauaaaaaagca

SEQ ID NO: 221901 - RNA, 32 nt, Homo Sapiens
ccaucauuuuuagaggaaauacucccucugcc

SEQ ID NO: 221902 - RNA, 32 nt, Homo Sapiens
uccagccugcggugcugucugcugggagguca

SEQ ID NO: 221903 - RNA, 32 nt, Homo Sapiens
cucacggggccccaggcuuauucagaacuggu

SEQ ID NO: 221904 - RNA, 32 nt, Homo Sapiens
ugccugaaaccucagcauggagacaucaccac

SEQ ID NO: 221905 - RNA, 32 nt, Homo Sapiens
ucggauuccuuccuuggcucucggggccuccu

SEQ ID NO: 221906 - RNA, 32 nt, Homo Sapiens
agacccuguucuuggccuuccauccucucccc

SEQ ID NO: 221907 - RNA, 32 nt, Homo Sapiens
aggggacaaagaggaggcccagaugucaaccg

SEQ ID NO: 221908 - RNA, 32 nt, Homo Sapiens
cucuccaggguucagugaauauucccauuugu

SEQ ID NO: 221909 - RNA, 32 nt, Homo Sapiens
ugaaaacuaagaagaugauacuguaaaucaca

SEQ ID NO: 221910 - RNA, 32 nt, Homo Sapiens
gaagccacuucaagaggcuggugcugcuagau

SEQ ID NO: 221911 - RNA, 32 nt, Homo Sapiens
gagcccuuucccuuauguccaguuuaagauga

SEQ ID NO: 221912 - RNA, 32 nt, Homo Sapiens
uggauggaguauuucucugaggcccacacaaa

SEQ ID NO: 221913 - RNA, 32 nt, Homo Sapiens
uccucuguggaugacggcgccacugccaccac

SEQ ID NO: 221914 - RNA, 32 nt, Homo Sapiens
gccugccccugcugaggcgucuucaggacugc

SEQ ID NO: 221915 - RNA, 32 nt, Homo Sapiens
uggggaaggguggcccugguccacagccaccc

SEQ ID NO: 221916 - RNA, 32 nt, Homo Sapiens
ugguccugagacuggcugggaagugcuuccag

SEQ ID NO: 221917 - RNA, 32 nt, Homo Sapiens
aaaauccuccauugcuuuuauuagaguuuuga

SEQ ID NO: 221918 - RNA, 32 nt, Homo Sapiens
acugccaaccccaaagcuuccacccuucuccc

SEQ ID NO: 221919 - RNA, 32 nt, Homo Sapiens
caagcccccucccaaugaccccccuucagccc

SEQ ID NO: 221920 - RNA, 32 nt, Homo Sapiens
acccuucagcaguccaaacuacagccucuucu

SEQ ID NO: 221921 - RNA, 31 nt, Homo Sapiens
ugguggcagaacugccugugcgagcacggcu

SEQ ID NO: 221922 - RNA, 32 nt, Homo Sapiens
ccaccccugccaggugggggcauggcgggcag

SEQ ID NO: 221923 - RNA, 32 nt, Homo Sapiens
uaaagugcaucuggaaaacauaugaguguuau

SEQ ID NO: 221924 - RNA, 32 nt, Homo Sapiens
gaaugagggaaacaaaauauuuauuuguuuug

SEQ ID NO: 221925 - RNA, 32 nt, Homo Sapiens
ccgcgacagcuaggcgcgugagaccggccgcc

SEQ ID NO: 221926 - RNA, 32 nt, Homo Sapiens
accacuaaaaauuuacucaaggagcuuuuaaa

SEQ ID NO: 221927 - RNA, 32 nt, Homo Sapiens
gcacaaggcagacaugcagcguugggaggagc

SEQ ID NO: 221928 - RNA, 32 nt, Homo Sapiens
uuucucugccuggcccagggcuggcggccggc

SEQ ID NO: 221929 - RNA, 32 nt, Homo Sapiens
agcugacccuucuugugaccgccugacugcug

SEQ ID NO: 221930 - RNA, 32 nt, Homo Sapiens
uuccccagcuuggcugcccuaggugauuucuc

SEQ ID NO: 221931 - RNA, 32 nt, Homo Sapiens
uuauaucgccugguugggccugggcaauggga

SEQ ID NO: 221932 - RNA, 32 nt, Homo Sapiens
aaauaacagaaauuauuacaaacggucucuca

SEQ ID NO: 221933 - RNA, 32 nt, Homo Sapiens
uagcaaggcagacuuaaccgugcgauggugac

SEQ ID NO: 221934 - RNA, 32 nt, Homo Sapiens
uguaugugguggccggcgggaagaccagcccc

SEQ ID NO: 221935 - RNA, 32 nt, Homo Sapiens
cuuagguguaaauugaugccaucguaggcaag

SEQ ID NO: 221936 - RNA, 32 nt, Homo Sapiens
uccuugggccccggaagcucgcggcgggcccu

SEQ ID NO: 221937 - RNA, 32 nt, Homo Sapiens
uuauuuaacaauagcaauaguucuagugaaug

SEQ ID NO: 221938 - RNA, 32 nt, Homo Sapiens
augaaagaauauauuuauuuaaagcauugcuu

SEQ ID NO: 221939 - RNA, 32 nt, Homo Sapiens
uuccuccucuguucuugggggaccauccccaa

SEQ ID NO: 221940 - RNA, 32 nt, Homo Sapiens
cacacacacaucacaaugacaaacacacaaca

SEQ ID NO: 221941 - RNA, 32 nt, Homo Sapiens
gggcagugcucagggccuccucggagccaaag

SEQ ID NO: 221942 - RNA, 28 nt, Homo Sapiens
agccagcggggagggccgaggucugagc

SEQ ID NO: 221943 - RNA, 32 nt, Homo Sapiens
uagggccggauggagccgcgggacgguagccc

SEQ ID NO: 221944 - RNA, 32 nt, Homo Sapiens
gugagucccucauccggaugagcacuugucac

SEQ ID NO: 221945 - RNA, 32 nt, Homo Sapiens
uaguucuuuaaucugcuuaucuggugauucca

SEQ ID NO: 221946 - RNA, 32 nt, Homo Sapiens
ugccucccaucccgaggccuaggagaaggcgg

SEQ ID NO: 221947 - RNA, 32 nt, Homo Sapiens
gugggggcgaggcgucucggagucucagagac

SEQ ID NO: 221948 - RNA, 32 nt, Homo Sapiens
uugagaucuuuuuaaagcuagcaagaacucua

SEQ ID NO: 221949 - RNA, 32 nt, Homo Sapiens
uuccaggccagccuguguccccucccgcaggc

SEQ ID NO: 221950 - RNA, 32 nt, Homo Sapiens
caaggccggcuggggcucuccgugccaccucu

SEQ ID NO: 221951 - RNA, 32 nt, Homo Sapiens
uaauacaauggcaauacugacauccuucauga

SEQ ID NO: 221952 - RNA, 32 nt, Homo Sapiens
aaucccauccuucuccuuccaacuuggcugaa

SEQ ID NO: 221953 - RNA, 32 nt, Homo Sapiens
aucacucaauuuccuguccuuuuaaauugccc

SEQ ID NO: 221954 - RNA, 32 nt, Homo Sapiens
gggaagcccggaucagaccuccaggucugauc

SEQ ID NO: 221955 - RNA, 32 nt, Homo Sapiens
guauuuuuauuggguguuaacuuugacagcug

SEQ ID NO: 221956 - RNA, 32 nt, Homo Sapiens
guaguauguaagugaccaaaacuuuuuuccau

SEQ ID NO: 221957 - RNA, 32 nt, Homo Sapiens
ggaccgagucguacuuccugugcgaaaggcgg

SEQ ID NO: 221958 - RNA, 32 nt, Homo Sapiens
agagccagacccugucucaaauaaaaauuuaa

SEQ ID NO: 221959 - RNA, 32 nt, Homo Sapiens
cccagggcuccaucuccgccucaggggcuucu

SEQ ID NO: 221960 - RNA, 32 nt, Homo Sapiens
uuaauguguugccauaaugucauuucaguauu

SEQ ID NO: 221961 - RNA, 32 nt, Homo Sapiens
gguuguguuuuaaagguagaguuaacagaaua

SEQ ID NO: 221962 - RNA, 32 nt, Homo Sapiens
gcgaucuuuuaaaauagcuguauuuuuaaaac

SEQ ID NO: 221963 - RNA, 32 nt, Homo Sapiens
ggucuuggagggcaucucgccaguggugcgag

SEQ ID NO: 221964 - RNA, 32 nt, Homo Sapiens
uucucaagacuuuagcuuuuccuuccauccgg

SEQ ID NO: 221965 - RNA, 32 nt, Homo Sapiens
cuuccccgcgcaccccgcacggcccgggccca

SEQ ID NO: 221966 - RNA, 32 nt, Homo Sapiens
agccuccgccuggcgcuggcgcuacgcccccg

SEQ ID NO: 221967 - RNA, 32 nt, Homo Sapiens
gccaagugcaccacacacccucaugggucuuu

SEQ ID NO: 221968 - RNA, 32 nt, Homo Sapiens
cccggacccuugggaaugcccgcggcuccaga

SEQ ID NO: 221969 - RNA, 32 nt, Homo Sapiens
gaucucuuccuguuagcaaggaugaaagagag

SEQ ID NO: 221970 - RNA, 32 nt, Homo Sapiens
cuggucucagagaacacuuagaugggggugaa

SEQ ID NO: 221971 - RNA, 31 nt, Homo Sapiens
cagcaugugucacagaaagugcguggacgga

SEQ ID NO: 221972 - RNA, 32 nt, Homo Sapiens
gcaggacugaagaugggcaaauuguaggcguu

SEQ ID NO: 221973 - RNA, 32 nt, Homo Sapiens
aaaagguauguuuggcaaaauaaaauaaaggu

SEQ ID NO: 221974 - RNA, 32 nt, Homo Sapiens
aguauguuuuuaaauuuuaaaaagcagcugca

SEQ ID NO: 221975 - RNA, 32 nt, Homo Sapiens
uaaaaauacaaaaacuuagccagucaugguga

SEQ ID NO: 221976 - RNA, 31 nt, Homo Sapiens
uuuccuuaauaaauuuuuaguuaugaaacau

SEQ ID NO: 221977 - RNA, 32 nt, Homo Sapiens
agcuaacuuuuguauuuuuaguagagaugggg

SEQ ID NO: 221978 - RNA, 32 nt, Homo Sapiens
gacacgaaaaggaagcaaaugagcugauggaa

SEQ ID NO: 221979 - RNA, 32 nt, Homo Sapiens
uagcuaggaggacggaaguugcuggcaggcgg

SEQ ID NO: 221980 - RNA, 32 nt, Homo Sapiens
ugcccaccaaaaugauccagucuggaauaaca

SEQ ID NO: 221981 - RNA, 32 nt, Homo Sapiens
uggccuuggaaaucuguuacuucuacggcuuc

SEQ ID NO: 221982 - RNA, 32 nt, Homo Sapiens
gugucauuugcucugccuaauuacgauaagga

SEQ ID NO: 221983 - RNA, 32 nt, Homo Sapiens
uugcgcgccgcccggccaggcccgcaaagagg

SEQ ID NO: 221984 - RNA, 32 nt, Homo Sapiens
gaaugaugugaauuggcccuguuuacagaggc

SEQ ID NO: 221985 - RNA, 32 nt, Homo Sapiens
cuaggaucuccaugggcgagcgcggcuggcgg

SEQ ID NO: 221986 - RNA, 32 nt, Homo Sapiens
gguuucagucugaguucucugcacuuugagga

SEQ ID NO: 221987 - RNA, 27 nt, Homo Sapiens
augugacucuucuucagccugcacccu

SEQ ID NO: 221988 - RNA, 32 nt, Homo Sapiens
cuccggcguguucaugcccccggggccccagg

SEQ ID NO: 221989 - RNA, 32 nt, Homo Sapiens
gucuucggcuccucugcaccccgugauucugc

SEQ ID NO: 221990 - RNA, 32 nt, Homo Sapiens
uuagauuacaucagaauaacaaugcaaaucau

SEQ ID NO: 221991 - RNA, 32 nt, Homo Sapiens
caucuauuuuucgcuucaaauaugcguuucug

SEQ ID NO: 221992 - RNA, 32 nt, Homo Sapiens
uauuuuugaaagaauacauuuggucauaaagu

SEQ ID NO: 221993 - RNA, 32 nt, Homo Sapiens
uauuauuagugaaaacaaaacuaaagggaagu

SEQ ID NO: 221994 - RNA, 32 nt, Homo Sapiens
agaaaugacuggugugucgcugaaacgugggg

SEQ ID NO: 221995 - RNA, 32 nt, Homo Sapiens
ucauauuuuuaaaauuugaaucuauuugagcu

SEQ ID NO: 221996 - RNA, 32 nt, Homo Sapiens
uuuacauguaaucaacaugggaacuuuuaggg

SEQ ID NO: 221997 - RNA, 32 nt, Homo Sapiens
gacuccuccagcugcgagcgucccggcuuucc

SEQ ID NO: 221998 - RNA, 32 nt, Homo Sapiens
aaaauucucuacagccuucuuuuucuuccaua

SEQ ID NO: 221999 - RNA, 32 nt, Homo Sapiens
aagaugauccaauauaauacuccuauuuggac

SEQ ID NO: 222000 - RNA, 32 nt, Homo Sapiens
uccuucccggagcccgggacaggcugggcgcg

SEQ ID NO: 222001 - RNA, 32 nt, Homo Sapiens
gggcgccggcgccgucuacgcagugcguucca

SEQ ID NO: 222002 - RNA, 32 nt, Homo Sapiens
gcucaacccaaccggcuccagggcacugguaa

SEQ ID NO: 222003 - RNA, 32 nt, Homo Sapiens
ugcuuacuuggcuccagcccuccagcugcagc

SEQ ID NO: 222004 - RNA, 32 nt, Homo Sapiens
caggcgagucucucuuuuuuauguugcuuuga

SEQ ID NO: 222005 - RNA, 32 nt, Homo Sapiens
ggagucccaucccauccucugcccucuguugg

SEQ ID NO: 222006 - RNA, 32 nt, Homo Sapiens
cuuuaugugaauguauucuccauaaaauucca

SEQ ID NO: 222007 - RNA, 32 nt, Homo Sapiens
uaggcugagcgcgguggcucacgccuguaauc

SEQ ID NO: 222008 - RNA, 32 nt, Homo Sapiens
gccagggugucuauguccaagucaccccuacu

SEQ ID NO: 222009 - RNA, 32 nt, Homo Sapiens
agauacauuuuaaagaaaacuaaaaaucccug

SEQ ID NO: 222010 - RNA, 32 nt, Homo Sapiens
uuauuuuacccaugagcuggccaauacuuccu

SEQ ID NO: 222011 - RNA, 32 nt, Homo Sapiens
accugguuccuugccuggucugcuuucuucca

SEQ ID NO: 222012 - RNA, 32 nt, Homo Sapiens
aaucccugcccccaaguccagauuccagcccc

SEQ ID NO: 222013 - RNA, 32 nt, Homo Sapiens
uccaucacccugcaugagcgccugcggggccu

SEQ ID NO: 222014 - RNA, 32 nt, Homo Sapiens
uucucuacacaccaguaacgggauuucaauuc

SEQ ID NO: 222015 - RNA, 32 nt, Homo Sapiens
aucugggucuuuucgucaguuuggugcauuug

SEQ ID NO: 222016 - RNA, 31 nt, Homo Sapiens
guguucuauacuaagagagugcuguagaagu

SEQ ID NO: 222017 - RNA, 30 nt, Homo Sapiens
auaaccacaugcauaccccaucuuaacucu

SEQ ID NO: 222018 - RNA, 32 nt, Homo Sapiens
ugcugaccauaacagugccagcuucuuugcag

SEQ ID NO: 222019 - RNA, 32 nt, Homo Sapiens
cuuccccucccuccccuggucccacagacugu

SEQ ID NO: 222020 - RNA, 32 nt, Homo Sapiens
ggaaagggaauuuggccuuguauuuagcuuuu

SEQ ID NO: 222021 - RNA, 32 nt, Homo Sapiens
gaaugggggccgauccggggcccucucugcac

SEQ ID NO: 222022 - RNA, 32 nt, Homo Sapiens
ggagggugauucuauuugaagauuaauccuaa

SEQ ID NO: 222023 - RNA, 32 nt, Homo Sapiens
ugcuuguaaucccagcacuuugggaagcugaa

SEQ ID NO: 222024 - RNA, 32 nt, Homo Sapiens
uacacaaacacaaauagagauuucauagcuuu

SEQ ID NO: 222025 - RNA, 32 nt, Homo Sapiens
gaagggguaugucaggcggggaaggggccaag

SEQ ID NO: 222026 - RNA, 32 nt, Homo Sapiens
cuaaaaguauguuuauacugugaauuaauaua

SEQ ID NO: 222027 - RNA, 32 nt, Homo Sapiens
ccucuccuggcgggguucggcggcgggcgagu

SEQ ID NO: 222028 - RNA, 30 nt, Homo Sapiens
aagauccuggacugcgucacagcccagguc

SEQ ID NO: 222029 - RNA, 27 nt, Homo Sapiens
aggaggcuuccuuccagcccccuauuc

SEQ ID NO: 222030 - RNA, 32 nt, Homo Sapiens
uggaagagggugguauauagggaagggccaga

SEQ ID NO: 222031 - RNA, 32 nt, Homo Sapiens
ccugguaccaaaccucuucuuggagcuuuucu

SEQ ID NO: 222032 - RNA, 32 nt, Homo Sapiens
uucuaguaguuuccaggcgcugccgggcggcu

SEQ ID NO: 222033 - RNA, 32 nt, Homo Sapiens
uuguaugguuuauucagaagugccaaauuuca

SEQ ID NO: 222034 - RNA, 32 nt, Homo Sapiens
ucaaaaucuauuauauauuaucuuacuuugaa

SEQ ID NO: 222035 - RNA, 32 nt, Homo Sapiens
cgggagggugacucagguccuccuuccauguc

SEQ ID NO: 222036 - RNA, 32 nt, Homo Sapiens
gaagaugugaaugaaguaugccaugugcauua

SEQ ID NO: 222037 - RNA, 31 nt, Homo Sapiens
gacaguaugagccgcacagccuacacggugg

SEQ ID NO: 222038 - RNA, 32 nt, Homo Sapiens
guaagagagcuccgacugaacaugcugagcag

SEQ ID NO: 222039 - RNA, 32 nt, Homo Sapiens
accuggugguggccgagaggaggcacggagga

SEQ ID NO: 222040 - RNA, 32 nt, Homo Sapiens
agaggggcccuggcgcaaacauuuauccuggg

SEQ ID NO: 222041 - RNA, 32 nt, Homo Sapiens
cgggagaugugccgggcggggggcccggguuc

SEQ ID NO: 222042 - RNA, 32 nt, Homo Sapiens
uuuuguggaaagauuaaaaggauuuuguuggu

SEQ ID NO: 222043 - RNA, 32 nt, Homo Sapiens
agcaaccgcgcgcggccuaggugggucccccc

SEQ ID NO: 222044 - RNA, 32 nt, Homo Sapiens
uuuacaguguaacauugugucaacauuugcag

SEQ ID NO: 222045 - RNA, 32 nt, Homo Sapiens
gaucucaucagccccaggcugcaggugaggcu

SEQ ID NO: 222046 - RNA, 32 nt, Homo Sapiens
uaugcauggguuaguucacagaggaauagcug

SEQ ID NO: 222047 - RNA, 32 nt, Homo Sapiens
cacaugcucccucuuccuaugaccuuccucca

SEQ ID NO: 222048 - RNA, 32 nt, Homo Sapiens
guggagagggagaggcuggaggccugggcaga

SEQ ID NO: 222049 - RNA, 32 nt, Homo Sapiens
cgcugcucgccccacaccccguccugccuccc

SEQ ID NO: 222050 - RNA, 32 nt, Homo Sapiens
ugaugucucuacauugauucagauuugcaccc

SEQ ID NO: 222051 - RNA, 32 nt, Homo Sapiens
ugcaccugagcgcgcgcagggccgcgcggcuc

SEQ ID NO: 222052 - RNA, 32 nt, Homo Sapiens
acagucuugcugacaagcuagagcuuggacug

SEQ ID NO: 222053 - RNA, 32 nt, Homo Sapiens
uuagcauuugaaaugguucugcuuggaaaaug

SEQ ID NO: 222054 - RNA, 30 nt, Homo Sapiens
gagggcaaggacugcacuaguccagggagu

SEQ ID NO: 222055 - RNA, 32 nt, Homo Sapiens
auuccggacugggauggaaagagaguugauug

SEQ ID NO: 222056 - RNA, 32 nt, Homo Sapiens
ucaccacccugaacgcacaaucuccagugcag

SEQ ID NO: 222057 - RNA, 32 nt, Homo Sapiens
cagaggcggggagaggaggcggcgaggguccc

SEQ ID NO: 222058 - RNA, 32 nt, Homo Sapiens
uaccuauaaauuucucuuccacucugagauua

SEQ ID NO: 222059 - RNA, 32 nt, Homo Sapiens
gaagaaucccuuccucuugggguccuugaugg

SEQ ID NO: 222060 - RNA, 32 nt, Homo Sapiens
cccugcuggugccuuauagcuccccucccagu

SEQ ID NO: 222061 - RNA, 32 nt, Homo Sapiens
aaaaauauauguuucauuuaaucuucacaaaa

SEQ ID NO: 222062 - RNA, 32 nt, Homo Sapiens
gcauucuguccagcccgggcuccggagaugca

SEQ ID NO: 222063 - RNA, 32 nt, Homo Sapiens
ucgugggaaagcggaggcucgcuacgacccuc

SEQ ID NO: 222064 - RNA, 32 nt, Homo Sapiens
ccagcacccccgcugccuccacgcugcccacc

SEQ ID NO: 222065 - RNA, 32 nt, Homo Sapiens
cugaacgcgggccaggcagcugcggccugggg

SEQ ID NO: 222066 - RNA, 32 nt, Homo Sapiens
auguaaagaaaugucuuaauuuuugaaaaaag

SEQ ID NO: 222067 - RNA, 32 nt, Homo Sapiens
uuccauuuuuaaauaugccuguauuuucuaua

SEQ ID NO: 222068 - RNA, 32 nt, Homo Sapiens
ucuccugcagcccucugcuccucccggccgcu

SEQ ID NO: 222069 - RNA, 32 nt, Homo Sapiens
cuucucugguuuuggucccugcacuuuguggu

SEQ ID NO: 222070 - RNA, 32 nt, Homo Sapiens
cagguuccaucccaacacuccugucuguggga

SEQ ID NO: 222071 - RNA, 32 nt, Homo Sapiens
uugacaccucaauauucacacccauaaacauu

SEQ ID NO: 222072 - RNA, 28 nt, Homo Sapiens
uggauggacagagggacgagggacgagc

SEQ ID NO: 222073 - RNA, 32 nt, Homo Sapiens
accccacccugccccacccaucugaacacuca

SEQ ID NO: 222074 - RNA, 32 nt, Homo Sapiens
uccuggcaagguggcuuugcagucuggaaggg

SEQ ID NO: 222075 - RNA, 32 nt, Homo Sapiens
cggauggcauaagugauuaaggugguauugag

SEQ ID NO: 222076 - RNA, 28 nt, Homo Sapiens
gugaauaaggauuaacauauuguaaaug

SEQ ID NO: 222077 - RNA, 32 nt, Homo Sapiens
acaaaaacaaaaaaacaaaaccagaaucaggu

SEQ ID NO: 222078 - RNA, 32 nt, Homo Sapiens
aacucugacaugggugacauguugcagagcug

SEQ ID NO: 222079 - RNA, 32 nt, Homo Sapiens
ugagggacgcggagucgcgcugugacgagcgg

SEQ ID NO: 222080 - RNA, 32 nt, Homo Sapiens
gggcuccguuuauuccuggagagaugacgaau

SEQ ID NO: 222081 - RNA, 32 nt, Homo Sapiens
cacuuuuucugcuuuucuuaauccuuuuccag

SEQ ID NO: 222082 - RNA, 32 nt, Homo Sapiens
agcuggguccccuggugaugaguuucagcaua

SEQ ID NO: 222083 - RNA, 32 nt, Homo Sapiens
ucagcccggccgcgcugauuguccugggucac

SEQ ID NO: 222084 - RNA, 30 nt, Homo Sapiens
aggugcgcggcacugccgccggaacuauuu

SEQ ID NO: 222085 - RNA, 32 nt, Homo Sapiens
ccggagucaggaguucgagaccagccugacca

SEQ ID NO: 222086 - RNA, 32 nt, Homo Sapiens
acauuuuaaaagacaucaaagaacucucaagg

SEQ ID NO: 222087 - RNA, 32 nt, Homo Sapiens
ucacguuuacauuuuaauuauuacaaguugcu

SEQ ID NO: 222088 - RNA, 32 nt, Homo Sapiens
acaaaguaaaaauaaacuguuaugaguaguaa

SEQ ID NO: 222089 - RNA, 32 nt, Homo Sapiens
guauaguuuauuucuagguuuuccuucugugu

SEQ ID NO: 222090 - RNA, 32 nt, Homo Sapiens
acaggccacucucuucccuuucuuggugaagu

SEQ ID NO: 222091 - RNA, 32 nt, Homo Sapiens
gcggccucggccuaugcgaccgguggcgccgg

SEQ ID NO: 222092 - RNA, 32 nt, Homo Sapiens
augugcacagaaagucgaugauaugagaaauc

SEQ ID NO: 222093 - RNA, 32 nt, Homo Sapiens
uugccauggucguaucguggacagcuuuuccg

SEQ ID NO: 222094 - RNA, 32 nt, Homo Sapiens
uaucgugucauucagacucugccaccuauuag

SEQ ID NO: 222095 - RNA, 32 nt, Homo Sapiens
ucauauuaaauguacagaaauaaaauauuaga

SEQ ID NO: 222096 - RNA, 32 nt, Homo Sapiens
uguuuuuuuuuuucuuuuucuuuuuuccuguu

SEQ ID NO: 222097 - RNA, 32 nt, Homo Sapiens
acacuuuuucccuuucagccacccaauaucuc

SEQ ID NO: 222098 - RNA, 32 nt, Homo Sapiens
aauacuuuugugacuucauuguaaccagcauu

SEQ ID NO: 222099 - RNA, 32 nt, Homo Sapiens
cccguccccaacuucuauuuuguuuucgccag

SEQ ID NO: 222100 - RNA, 32 nt, Homo Sapiens
gagaagaaaugaauuuacuuuguuugcauuaa

SEQ ID NO: 222101 - RNA, 32 nt, Homo Sapiens
agccuggccaacacggugaaaccccgucacug

SEQ ID NO: 222102 - RNA, 32 nt, Homo Sapiens
ucuucacucagccacaccccacauuggacuuc

SEQ ID NO: 222103 - RNA, 32 nt, Homo Sapiens
agcugccuccuguccugggaggaggccuccug

SEQ ID NO: 222104 - RNA, 27 nt, Homo Sapiens
aagggcccuucuggcagccccccaaac

SEQ ID NO: 222105 - RNA, 32 nt, Homo Sapiens
gacucauccuaacuaacagucacgccguggga

SEQ ID NO: 222106 - RNA, 32 nt, Homo Sapiens
gggaaguagcagcuggagauagcgagugucug

SEQ ID NO: 222107 - RNA, 32 nt, Homo Sapiens
cucuauugauuuguccauuauguguuaggcaa

SEQ ID NO: 222108 - RNA, 32 nt, Homo Sapiens
gugacgugagcaaccuaggaggcuucggcagc

SEQ ID NO: 222109 - RNA, 32 nt, Homo Sapiens
aaggagcucuugcauuugcugucuccucugcu

SEQ ID NO: 222110 - RNA, 32 nt, Homo Sapiens
uuacacaccaaaacuuuuuacaugaagggcug

SEQ ID NO: 222111 - RNA, 32 nt, Homo Sapiens
uacaaccacuuacuguaaaauaaguuuauuag

SEQ ID NO: 222112 - RNA, 32 nt, Homo Sapiens
cgaugcacgcaccuucucugugagagucaagu

SEQ ID NO: 222113 - RNA, 32 nt, Homo Sapiens
accaacauagacggugcaaacacucuuaacag

SEQ ID NO: 222114 - RNA, 32 nt, Homo Sapiens
gcgaguugggcagaugccggcggccgcggugc

SEQ ID NO: 222115 - RNA, 32 nt, Homo Sapiens
gauggcagugauucuguuugccuuuuguuuuc

SEQ ID NO: 222116 - RNA, 32 nt, Homo Sapiens
uaggagaucugucucccugugccuggagaguu

SEQ ID NO: 222117 - RNA, 31 nt, Homo Sapiens
ugcccuggaauacaacucagagcuccaggca

SEQ ID NO: 222118 - RNA, 32 nt, Homo Sapiens
ucagcucugcacccacuuuccugucauuuauu

SEQ ID NO: 222119 - RNA, 32 nt, Homo Sapiens
uaaaauucuacaaaaguugcaguaaauuuuau

SEQ ID NO: 222120 - RNA, 32 nt, Homo Sapiens
ccccaccugccaggacguucuagcaggucauc

SEQ ID NO: 222121 - RNA, 32 nt, Homo Sapiens
auauauguguuguaaaaguacacuacauuaga

SEQ ID NO: 222122 - RNA, 32 nt, Homo Sapiens
aaaaauaaaaacuacaaucauuagcaguuuua

SEQ ID NO: 222123 - RNA, 32 nt, Homo Sapiens
aucggagcucuuucucggcuuucuauuucccc

SEQ ID NO: 222124 - RNA, 32 nt, Homo Sapiens
uauucugaugacugaagaaagaacuugaaccu

SEQ ID NO: 222125 - RNA, 32 nt, Homo Sapiens
ucaauauaaaaauuauuagagauaguuugcau

SEQ ID NO: 222126 - RNA, 32 nt, Homo Sapiens
ucccuuugugaucaucaucacuuuuucccugc

SEQ ID NO: 222127 - RNA, 32 nt, Homo Sapiens
uuuuauuuucucacuauguaugcagacuggac

SEQ ID NO: 222128 - RNA, 32 nt, Homo Sapiens
guggggggcugggaccauggcccgcagaggca

SEQ ID NO: 222129 - RNA, 32 nt, Homo Sapiens
aagcaguguuaagguugguuugcaguguguaa

SEQ ID NO: 222130 - RNA, 32 nt, Homo Sapiens
caguacugaaguucuuuuucuuguggcauuug

SEQ ID NO: 222131 - RNA, 32 nt, Homo Sapiens
auuccucugcuucauagguguucugcauuuga

SEQ ID NO: 222132 - RNA, 32 nt, Homo Sapiens
cccuagcagagguucucuccccugccgcugag

SEQ ID NO: 222133 - RNA, 32 nt, Homo Sapiens
caaguggagcuuugagagaaaaacagaagggu

SEQ ID NO: 222134 - RNA, 31 nt, Homo Sapiens
ccggagccagcgugguggccauagacaacaa

SEQ ID NO: 222135 - RNA, 32 nt, Homo Sapiens
aucuucucaccuucguuuuuuauuucccuuaa

SEQ ID NO: 222136 - RNA, 32 nt, Homo Sapiens
gagcagguaaucaccccucguuuuaaagccaa

SEQ ID NO: 222137 - RNA, 32 nt, Homo Sapiens
augucccuggcuguugaggcgcugcuucagcc

SEQ ID NO: 222138 - RNA, 32 nt, Homo Sapiens
gugggucggggagaggggcggacggcggcacc

SEQ ID NO: 222139 - RNA, 32 nt, Homo Sapiens
cgcaggccagcuuccugcuguguucccugcac

SEQ ID NO: 222140 - RNA, 32 nt, Homo Sapiens
gauuuuacuuaagcagcuaccauuccauggac

SEQ ID NO: 222141 - RNA, 32 nt, Homo Sapiens
accgggagggucacggauggggcgugcagaau

SEQ ID NO: 222142 - RNA, 32 nt, Homo Sapiens
uuaugcaaauguuuagcaucauagugcuguuu

SEQ ID NO: 222143 - RNA, 32 nt, Homo Sapiens
acagcagugugaaggugugucaagguguauau

SEQ ID NO: 222144 - RNA, 32 nt, Homo Sapiens
cagagggacuugacuuucuuucuggacuguuu

SEQ ID NO: 222145 - RNA, 32 nt, Homo Sapiens
ucgcguuccuccccuaccccgccccgccaccu

SEQ ID NO: 222146 - RNA, 32 nt, Homo Sapiens
agauuguagaaaagagacuaagauauaugcaa

SEQ ID NO: 222147 - RNA, 32 nt, Homo Sapiens
ccaguugagguguuuuaugucacgcacacucc

SEQ ID NO: 222148 - RNA, 32 nt, Homo Sapiens
uuccccaaaugagaaagaaccacaagaaauca

SEQ ID NO: 222149 - RNA, 32 nt, Homo Sapiens
ccucgccggcgccgcuuggcugcguccuccga

SEQ ID NO: 222150 - RNA, 32 nt, Homo Sapiens
guucucuucuaaaacaagcuacuaacaagaga

SEQ ID NO: 222151 - RNA, 32 nt, Homo Sapiens
ugguucuaacuuuccuucucaaauacagaccu

SEQ ID NO: 222152 - RNA, 32 nt, Homo Sapiens
auauuauuagacaguaauuuugcuuuccaucc

SEQ ID NO: 222153 - RNA, 32 nt, Homo Sapiens
ggauggggaguggugucuugacauggugggca

SEQ ID NO: 222154 - RNA, 32 nt, Homo Sapiens
agugagaauuuacagagaucauccucuucaga

SEQ ID NO: 222155 - RNA, 32 nt, Homo Sapiens
cacccauauggacuuggaaucaaucuugccaa

SEQ ID NO: 222156 - RNA, 28 nt, Homo Sapiens
augagagaaauaaaacauuuggcacauu

SEQ ID NO: 222157 - RNA, 32 nt, Homo Sapiens
uucuuuuucucauuuuuaauucuuggacucau

SEQ ID NO: 222158 - RNA, 32 nt, Homo Sapiens
ugaugcugugguuaaguuugcuugaccccagc

SEQ ID NO: 222159 - RNA, 32 nt, Homo Sapiens
uugaaguguuguucuuuccaccagcaggaagu

SEQ ID NO: 222160 - RNA, 32 nt, Homo Sapiens
gcagcaaggugacuucggcugaggaugacccu

SEQ ID NO: 222161 - RNA, 32 nt, Homo Sapiens
aggaguccagcggcgcccgggccagcagcgau

SEQ ID NO: 222162 - RNA, 32 nt, Homo Sapiens
acgcagcacccggcacccacggcugagcaugu

SEQ ID NO: 222163 - RNA, 32 nt, Homo Sapiens
aaguccaggaccaaaccaugcuccccaugaca

SEQ ID NO: 222164 - RNA, 32 nt, Homo Sapiens
ggggcgggaugggacagggcacgggcucucag

SEQ ID NO: 222165 - RNA, 32 nt, Homo Sapiens
gguccugcguccccuuccucgggugagccugg

SEQ ID NO: 222166 - RNA, 32 nt, Homo Sapiens
gagaagcagacacugcuccuugugcagcucug

SEQ ID NO: 222167 - RNA, 32 nt, Homo Sapiens
gccugucccgccucaccccgcuccaucacacc

SEQ ID NO: 222168 - RNA, 32 nt, Homo Sapiens
gccgugagcccaagccgcggucccgggccggc

SEQ ID NO: 222169 - RNA, 32 nt, Homo Sapiens
ggcacucgacccccugcccaagcugcuugacg

SEQ ID NO: 222170 - RNA, 32 nt, Homo Sapiens
ccagccccugacccagcucgggcccccgaccc

SEQ ID NO: 222171 - RNA, 32 nt, Homo Sapiens
aucaggacggaagaggaggggguguggggggc

SEQ ID NO: 222172 - RNA, 32 nt, Homo Sapiens
aauaacucaaaauuuuccuguguaaaacuaaa

SEQ ID NO: 222173 - RNA, 31 nt, Homo Sapiens
cugcccgcggcuggggaaccaagggccugga

SEQ ID NO: 222174 - RNA, 32 nt, Homo Sapiens
ugaacaagaugggcaaagucccugcccucaac

SEQ ID NO: 222175 - RNA, 32 nt, Homo Sapiens
aaaacauagaucuggaggcagcagugcugggu

SEQ ID NO: 222176 - RNA, 32 nt, Homo Sapiens
ccaagagucagagccucggggagguggccgcc

SEQ ID NO: 222177 - RNA, 28 nt, Homo Sapiens
agugaggaugaugccaggaugaugucug

SEQ ID NO: 222178 - RNA, 32 nt, Homo Sapiens
aaacaaggaaacaaaaaauaucugugcuuuca

SEQ ID NO: 222179 - RNA, 32 nt, Homo Sapiens
aacugucuucagagaaaccauuagguuaggug

SEQ ID NO: 222180 - RNA, 32 nt, Homo Sapiens
auagaagauauuauguacauuuauuucagaua

SEQ ID NO: 222181 - RNA, 32 nt, Homo Sapiens
cccaccuccauccauuuuccugcuuagggucc

SEQ ID NO: 222182 - RNA, 32 nt, Homo Sapiens
aaaauagccagguguagcgacacacaccugug

SEQ ID NO: 222183 - RNA, 32 nt, Homo Sapiens
ggugugguuaguggaggcucugugcugcacgu

SEQ ID NO: 222184 - RNA, 32 nt, Homo Sapiens
ggggcaggggagagggguggggaguggacacu

SEQ ID NO: 222185 - RNA, 32 nt, Homo Sapiens
cagcucccaggccagcagcagcagcagccuac

SEQ ID NO: 222186 - RNA, 32 nt, Homo Sapiens
uugguuauuacaaaacagaaaagaacaacagc

SEQ ID NO: 222187 - RNA, 32 nt, Homo Sapiens
uuuggggguguugguguuuccucccuggagaa

SEQ ID NO: 222188 - RNA, 32 nt, Homo Sapiens
ggugccuuuuucugcccaacaaguccagggaa

SEQ ID NO: 222189 - RNA, 32 nt, Homo Sapiens
gaaaauuccagaaauaugcaucacuuccuaau

SEQ ID NO: 222190 - RNA, 32 nt, Homo Sapiens
ccagcauccccaccccucuccucugcccaccc

SEQ ID NO: 222191 - RNA, 32 nt, Homo Sapiens
aguuccaacuuccuuaaauuucagaccugacu

SEQ ID NO: 222192 - RNA, 32 nt, Homo Sapiens
ucuucugcagauccauggcugcccugggaacu

SEQ ID NO: 222193 - RNA, 32 nt, Homo Sapiens
gugacacuucggggaccagaggcagcacgagg

SEQ ID NO: 222194 - RNA, 32 nt, Homo Sapiens
cuacaaaaaaauuuaaaacuuagcuggcauug

SEQ ID NO: 222195 - RNA, 32 nt, Homo Sapiens
uuccacgcgggccgcggcuccggcauggccgg

SEQ ID NO: 222196 - RNA, 32 nt, Homo Sapiens
ccccaggcugcagcugcucagaagcuccaggc

SEQ ID NO: 222197 - RNA, 32 nt, Homo Sapiens
caggagcgggcgcccucgggccccacccugcc

SEQ ID NO: 222198 - RNA, 32 nt, Homo Sapiens
uucauugacuggcugcuuguccugcuuccucu

SEQ ID NO: 222199 - RNA, 32 nt, Homo Sapiens
agcagccucuguccagccugcagguggccacu

SEQ ID NO: 222200 - RNA, 32 nt, Homo Sapiens
agagagagcgucuuguggcugcggccugcccc

SEQ ID NO: 222201 - RNA, 32 nt, Homo Sapiens
uuauggucaaacuagaucuuggauuacagcuc

SEQ ID NO: 222202 - RNA, 32 nt, Homo Sapiens
cugugcuggaguauaugacagcugcgguacuu

SEQ ID NO: 222203 - RNA, 32 nt, Homo Sapiens
accacacuccguccacggacucuccguuauuu

SEQ ID NO: 222204 - RNA, 32 nt, Homo Sapiens
gcucggcucacuuuuccuaagugugguuccug

SEQ ID NO: 222205 - RNA, 32 nt, Homo Sapiens
gaucgcuugagcccaggagucuugagaccagc

SEQ ID NO: 222206 - RNA, 32 nt, Homo Sapiens
gaccccccacccagacugacuggggcuucugg

SEQ ID NO: 222207 - RNA, 32 nt, Homo Sapiens
ggacagacaaaaccuccaccaucugacgggac

SEQ ID NO: 222208 - RNA, 32 nt, Homo Sapiens
cuuuguuuuaauauaaagcaauccccaaaaga

SEQ ID NO: 222209 - RNA, 32 nt, Homo Sapiens
ucucccggguuccaucuccccccgcccggugg

SEQ ID NO: 222210 - RNA, 32 nt, Homo Sapiens
cgguggggcgacccuccuuuuggcuuggcccc

SEQ ID NO: 222211 - RNA, 32 nt, Homo Sapiens
cuccugagaagcuguuccagcgucaggagagc

SEQ ID NO: 222212 - RNA, 32 nt, Homo Sapiens
aaacagccacugggguacaggcaccgaagacc

SEQ ID NO: 222213 - RNA, 32 nt, Homo Sapiens
cagcagguggaguaggcacagauggaaaacug

SEQ ID NO: 222214 - RNA, 32 nt, Homo Sapiens
acugcaggacgcugcgccagcggagccggcgg

SEQ ID NO: 222215 - RNA, 30 nt, Homo Sapiens
ggaaaaggcaggcaguggacucugccagua

SEQ ID NO: 222216 - RNA, 32 nt, Homo Sapiens
aauccagguaaucuaaauuugauguugagaug

SEQ ID NO: 222217 - RNA, 32 nt, Homo Sapiens
gcgugugugucugagaaugugugugaugugug

SEQ ID NO: 222218 - RNA, 32 nt, Homo Sapiens
ccccacaguccuggaguaaaucaaaaucaaua

SEQ ID NO: 222219 - RNA, 32 nt, Homo Sapiens
ccuugauccauuuugacauuuguuaugcacua

SEQ ID NO: 222220 - RNA, 32 nt, Homo Sapiens
cucuuaggaaaacaguucuuguggccuucuau

SEQ ID NO: 222221 - RNA, 32 nt, Homo Sapiens
ccagcucccuccccgccucuuuuuacacucug

SEQ ID NO: 222222 - RNA, 32 nt, Homo Sapiens
cugccggcccgagucccggcaacggugggcgc

SEQ ID NO: 222223 - RNA, 32 nt, Homo Sapiens
acccuucggaagaucuuuucauuuucauuuuu

SEQ ID NO: 222224 - RNA, 32 nt, Homo Sapiens
aucuagugaugauuuaaacugugcaggaggau

SEQ ID NO: 222225 - RNA, 32 nt, Homo Sapiens
ccgcagcagcucccccucccccacugccauaa

SEQ ID NO: 222226 - RNA, 32 nt, Homo Sapiens
uaguucgcacaaagccugcucgugacugugcg

SEQ ID NO: 222227 - RNA, 32 nt, Homo Sapiens
uugaguaacaccuuuaucuugguauagaacug

SEQ ID NO: 222228 - RNA, 32 nt, Homo Sapiens
uguguccucccgcugaccacacuuccuuuagu

SEQ ID NO: 222229 - RNA, 32 nt, Homo Sapiens
aagugcuucuuugcauuuacauuuacaucuaa

SEQ ID NO: 222230 - RNA, 32 nt, Homo Sapiens
accuuagaagacaaagccuguuugucauggcu

SEQ ID NO: 222231 - RNA, 32 nt, Homo Sapiens
cccacccgacccccaacccccauccccaguuc

SEQ ID NO: 222232 - RNA, 32 nt, Homo Sapiens
uuauugagagaauuuaguuauauuuuaaauca

SEQ ID NO: 222233 - RNA, 32 nt, Homo Sapiens
gcuaguauaaugguuuacauuuggacaaagua

SEQ ID NO: 222234 - RNA, 32 nt, Homo Sapiens
ucaugguucuauuguagauuuauuuuuauauu

SEQ ID NO: 222235 - RNA, 32 nt, Homo Sapiens
gucccugcuccuuuucuggcagggucuauuug

SEQ ID NO: 222236 - RNA, 32 nt, Homo Sapiens
aaucacccaagcggccucagaagucccaggga

SEQ ID NO: 222237 - RNA, 32 nt, Homo Sapiens
agaggggcagucccccaccuugucacccucag

SEQ ID NO: 222238 - RNA, 32 nt, Homo Sapiens
acuacucagcguuuuggcuaagaucaaguguu

SEQ ID NO: 222239 - RNA, 32 nt, Homo Sapiens
gugaggaguguguggaacaggacccgggacag

SEQ ID NO: 222240 - RNA, 32 nt, Homo Sapiens
caucacaauaucuauuuuugauagaacucgug

SEQ ID NO: 222241 - RNA, 32 nt, Homo Sapiens
acuacaaacaauucauauuuacagaaaauuua

SEQ ID NO: 222242 - RNA, 32 nt, Homo Sapiens
aacuuuguacuauguauagccagaguuuuauu

SEQ ID NO: 222243 - RNA, 32 nt, Homo Sapiens
uuccccaguggcggcagccucaggggccucag

SEQ ID NO: 222244 - RNA, 32 nt, Homo Sapiens
ugcggcgcgcagcgcagcgcagcucagcgcac

SEQ ID NO: 222245 - RNA, 32 nt, Homo Sapiens
gugugccaaaauguaucuauuauaagauaugu

SEQ ID NO: 222246 - RNA, 32 nt, Homo Sapiens
gcccagccaggccgcuggacucgggcuagggg

SEQ ID NO: 222247 - RNA, 32 nt, Homo Sapiens
ccuacacugacuucagaaaacagucugucaga

SEQ ID NO: 222248 - RNA, 32 nt, Homo Sapiens
gucuuguuuuguugauuuuucuuuuuuaauuu

SEQ ID NO: 222249 - RNA, 32 nt, Homo Sapiens
uuuuccagcuccguguuucucuaaggaauuau

SEQ ID NO: 222250 - RNA, 32 nt, Homo Sapiens
agacucuuaucauauuaaucuaaguucucaaa

SEQ ID NO: 222251 - RNA, 32 nt, Homo Sapiens
ucuucagugacucccccuugccuuccagauaa

SEQ ID NO: 222252 - RNA, 32 nt, Homo Sapiens
aguuacuuuuaaaaauauaaguuagggcuagg

SEQ ID NO: 222253 - RNA, 32 nt, Homo Sapiens
ugagagccggcuagagggugccgcccgccggg

SEQ ID NO: 222254 - RNA, 31 nt, Homo Sapiens
ugcauuugugucugccugccucaugcucucu

SEQ ID NO: 222255 - RNA, 32 nt, Homo Sapiens
gucaggcgcugggcgggcucgccaggaccugg

SEQ ID NO: 222256 - RNA, 32 nt, Homo Sapiens
ccgcugacugugggcccggcccucagaugugu

SEQ ID NO: 222257 - RNA, 32 nt, Homo Sapiens
ucuuaaaauuuuugcuuuugcuuauuuaauuu

SEQ ID NO: 222258 - RNA, 32 nt, Homo Sapiens
uuuugcucuucacucuccccagccaauaaagc

SEQ ID NO: 222259 - RNA, 32 nt, Homo Sapiens
gaacacgauccucuuucugggcauuccuaggg

SEQ ID NO: 222260 - RNA, 32 nt, Homo Sapiens
cagcuuuaaaaagccgguccuaauuacggccg

SEQ ID NO: 222261 - RNA, 32 nt, Homo Sapiens
acaguuauuuguuucuucugcaucuugcuacu

SEQ ID NO: 222262 - RNA, 32 nt, Homo Sapiens
guuuaacuuccacuuccaugcuaucggaugug

SEQ ID NO: 222263 - RNA, 32 nt, Homo Sapiens
ucacuggaggacugaggccuuauuaaggaagc

SEQ ID NO: 222264 - RNA, 32 nt, Homo Sapiens
uaaaaaggcagaccagggauguaauguuuuua

SEQ ID NO: 222265 - RNA, 32 nt, Homo Sapiens
gcccauggagggacuugauugccaagugacuu

SEQ ID NO: 222266 - RNA, 32 nt, Homo Sapiens
ucuacuugccucuaaaauaaauguaggagaaa

SEQ ID NO: 222267 - RNA, 31 nt, Homo Sapiens
gaacagcgggcgguguucccggcuccguggg

SEQ ID NO: 222268 - RNA, 32 nt, Homo Sapiens
aaacccucuuguuuaugugauuagcucagagc

SEQ ID NO: 222269 - RNA, 32 nt, Homo Sapiens
cuauugugauaaaaaucagaauaguaauugcc

SEQ ID NO: 222270 - RNA, 32 nt, Homo Sapiens
aguugaugaccuccaauagcucccagugucau

SEQ ID NO: 222271 - RNA, 32 nt, Homo Sapiens
aagguucgcgaaaguucgcggcggcggggguc

SEQ ID NO: 222272 - RNA, 32 nt, Homo Sapiens
gggccgggguggaaggagggggauaaaccuaa

SEQ ID NO: 222273 - RNA, 32 nt, Homo Sapiens
cucuuccccuccccuauccccacuucucaggg

SEQ ID NO: 222274 - RNA, 32 nt, Homo Sapiens
gucuaggccaugcuuccacuuucucaccuggc

SEQ ID NO: 222275 - RNA, 32 nt, Homo Sapiens
uuugacuugggguuugcuuuuuaaaaugaaac

SEQ ID NO: 222276 - RNA, 32 nt, Homo Sapiens
gcucacaaaaauacagugugacguguacuguc

SEQ ID NO: 222277 - RNA, 32 nt, Homo Sapiens
ccuagcggcugcuccuucaggcgaaggguggu

SEQ ID NO: 222278 - RNA, 32 nt, Homo Sapiens
ggguggcggcgguggcaguccgaggucuggcu

SEQ ID NO: 222279 - RNA, 32 nt, Homo Sapiens
uccugaggccuggccuggcuccccgcugaccc

SEQ ID NO: 222280 - RNA, 32 nt, Homo Sapiens
uuagcaagcauuaauauauuuucagugcaggu

SEQ ID NO: 222281 - RNA, 30 nt, Homo Sapiens
gccucucaucuuaggaccuaaugggacccc

SEQ ID NO: 222282 - RNA, 32 nt, Homo Sapiens
uuaagacaauagcacuuaaauuccucaacagu

SEQ ID NO: 222283 - RNA, 32 nt, Homo Sapiens
ugccucccuggccuugucuacuucucgccccc

SEQ ID NO: 222284 - RNA, 32 nt, Homo Sapiens
cucgucuacuagugucccacagugcugcgcua

SEQ ID NO: 222285 - RNA, 32 nt, Homo Sapiens
cggcaggacagcagccaccucccucccaaacu

SEQ ID NO: 222286 - RNA, 32 nt, Homo Sapiens
gccucgggaagguggcuccugcaguucagcgu

SEQ ID NO: 222287 - RNA, 32 nt, Homo Sapiens
ugguccauuuuugucuguuucuaugaagauaa

SEQ ID NO: 222288 - RNA, 32 nt, Homo Sapiens
agagugaauuauauuuccuuaaaaugugagug

SEQ ID NO: 222289 - RNA, 32 nt, Homo Sapiens
guugccaggacacauggccauaaauaauagaa

SEQ ID NO: 222290 - RNA, 32 nt, Homo Sapiens
auaucagugucuguuucucugcauguggcugc

SEQ ID NO: 222291 - RNA, 32 nt, Homo Sapiens
caccgagaggggcuuuccucucucuugcuccc

SEQ ID NO: 222292 - RNA, 32 nt, Homo Sapiens
ugcguuuggcccggccagcgcccgggcgcgcc

SEQ ID NO: 222293 - RNA, 32 nt, Homo Sapiens
uguguggacuggcaccugggcugcuggagaag

SEQ ID NO: 222294 - RNA, 32 nt, Homo Sapiens
cuuuccucucagguuucuuuuaaagggguugg

SEQ ID NO: 222295 - RNA, 32 nt, Homo Sapiens
cgagucacccaccgcccuccuccuacucaggg

SEQ ID NO: 222296 - RNA, 32 nt, Homo Sapiens
ggaccgggcgggggcgccgacgugccucagcc

SEQ ID NO: 222297 - RNA, 32 nt, Homo Sapiens
aaaauugauggaauagcaagacuuuaugccuu

SEQ ID NO: 222298 - RNA, 32 nt, Homo Sapiens
ucuggcaaacuucugcugggaauuaguuugag

SEQ ID NO: 222299 - RNA, 32 nt, Homo Sapiens
uacuauauauugcauuucuuuuauguuuuaca

SEQ ID NO: 222300 - RNA, 32 nt, Homo Sapiens
cacgccgcgaccuacagcucuuucucagcguu

SEQ ID NO: 222301 - RNA, 32 nt, Homo Sapiens
uagaggugcaggugagguguauuuucaucacg

SEQ ID NO: 222302 - RNA, 32 nt, Homo Sapiens
ugccugcccuccccacuggccgggccucaacc

SEQ ID NO: 222303 - RNA, 32 nt, Homo Sapiens
ccccaccaaccucagcucaggugaucagaacu

SEQ ID NO: 222304 - RNA, 32 nt, Homo Sapiens
caacagcaguugcagcaagcucccuccacaag

SEQ ID NO: 222305 - RNA, 32 nt, Homo Sapiens
cuguacccggcgccagcuguguuccugacccc

SEQ ID NO: 222306 - RNA, 32 nt, Homo Sapiens
auucacagguggcugaggagggaccagcaagc

SEQ ID NO: 222307 - RNA, 32 nt, Homo Sapiens
caccgcgcgcucggggaccccgacggcgccca

SEQ ID NO: 222308 - RNA, 32 nt, Homo Sapiens
cgccucggagagccucuggggguggaugggca

SEQ ID NO: 222309 - RNA, 32 nt, Homo Sapiens
cuccuggaccgugaccggcgucgucuuccugg

SEQ ID NO: 222310 - RNA, 32 nt, Homo Sapiens
ggccuauccgcgccuggcagcugucggaacuc

SEQ ID NO: 222311 - RNA, 32 nt, Homo Sapiens
ugaagcaaaucucauuggauauuuuuaaaggu

SEQ ID NO: 222312 - RNA, 32 nt, Homo Sapiens
ugagugugggauauccuuuaucagugucucau

SEQ ID NO: 222313 - RNA, 32 nt, Homo Sapiens
augccugaaggcagaagcuguugcacauggaa

SEQ ID NO: 222314 - RNA, 32 nt, Homo Sapiens
cggccucaaacucaagauaaaaacagaaaagu

SEQ ID NO: 222315 - RNA, 32 nt, Homo Sapiens
ugcuuggaaaauuuucagaguauucuaguuua

SEQ ID NO: 222316 - RNA, 32 nt, Homo Sapiens
cauaaagguugggcuaagugguccuggacuac

SEQ ID NO: 222317 - RNA, 32 nt, Homo Sapiens
cucuccucagguugcuuguccuccccuggccu

SEQ ID NO: 222318 - RNA, 31 nt, Homo Sapiens
cucaugcuguggagaaagucagacucaacug

SEQ ID NO: 222319 - RNA, 32 nt, Homo Sapiens
gcggccccagacccagcuccccggguccgacc

SEQ ID NO: 222320 - RNA, 32 nt, Homo Sapiens
uuuuguaaauaaauaaaaccauagauuuaaag

SEQ ID NO: 222321 - RNA, 32 nt, Homo Sapiens
ccuguggaaauuauauauaaugccugguauuu

SEQ ID NO: 222322 - RNA, 32 nt, Homo Sapiens
acaucccucaaacaaaaagacuaacagggacc

SEQ ID NO: 222323 - RNA, 32 nt, Homo Sapiens
ucugccagcaaccuugagaggaaggacaagaa

SEQ ID NO: 222324 - RNA, 32 nt, Homo Sapiens
augagaagcagagggacaaggcgucauccaag

SEQ ID NO: 222325 - RNA, 32 nt, Homo Sapiens
uggcucugccggcgcccuccucacgucaggag

SEQ ID NO: 222326 - RNA, 32 nt, Homo Sapiens
caaaacaacuuugauaugguacagucauuuug

SEQ ID NO: 222327 - RNA, 32 nt, Homo Sapiens
uaagacauggauguaauuugguggaauuuggc

SEQ ID NO: 222328 - RNA, 32 nt, Homo Sapiens
ccauugugcuuuuuucugguguuuuaugcaag

SEQ ID NO: 222329 - RNA, 32 nt, Homo Sapiens
cugcuguauguggccacagcuuuuuggguuug

SEQ ID NO: 222330 - RNA, 32 nt, Homo Sapiens
uuuaucauuuuauaguacacauguaaagaaua

SEQ ID NO: 222331 - RNA, 32 nt, Homo Sapiens
uagccguucacguguucgguccuccuuagcug

SEQ ID NO: 222332 - RNA, 32 nt, Homo Sapiens
cagugcuucuugguucccaggaugccacuucc

SEQ ID NO: 222333 - RNA, 32 nt, Homo Sapiens
agugugcucagagcuucgauuuugagacuguu

SEQ ID NO: 222334 - RNA, 32 nt, Homo Sapiens
auuagacccaggguugcggagagacgcggccc

SEQ ID NO: 222335 - RNA, 32 nt, Homo Sapiens
cuuuccccuucuuauuuaagacuucccaccuu

SEQ ID NO: 222336 - RNA, 32 nt, Homo Sapiens
agaagccagagccgcagcuguguggagagaca

SEQ ID NO: 222337 - RNA, 32 nt, Homo Sapiens
aagaaguuuuaacuaugccguguaguuucugg

SEQ ID NO: 222338 - RNA, 32 nt, Homo Sapiens
uuuccuuuaaaauggagcgaaugauccuggaa

SEQ ID NO: 222339 - RNA, 32 nt, Homo Sapiens
ggcuuugugucuauggguggccugugguauau

SEQ ID NO: 222340 - RNA, 32 nt, Homo Sapiens
cuacuugguaaauaggcccaccaauucuaucu

SEQ ID NO: 222341 - RNA, 32 nt, Homo Sapiens
cccauccaggcccccucugcccugccccuugu

SEQ ID NO: 222342 - RNA, 32 nt, Homo Sapiens
auaugcuugcugaauguuuucuuaaauugaac

SEQ ID NO: 222343 - RNA, 32 nt, Homo Sapiens
uccacaauuccaaauauuuaucuugguguaua

SEQ ID NO: 222344 - RNA, 32 nt, Homo Sapiens
ugcgccgggucguacacggcggccgcgcgcac

SEQ ID NO: 222345 - RNA, 32 nt, Homo Sapiens
ugugguugcccccucaaccuccccuacacccu

SEQ ID NO: 222346 - RNA, 32 nt, Homo Sapiens
cccggggccgcgggaaggccgaccgacugccg

SEQ ID NO: 222347 - RNA, 32 nt, Homo Sapiens
ugccuuugaaagaucuauguucucucaguaga

SEQ ID NO: 222348 - RNA, 32 nt, Homo Sapiens
aagagcacagaacaauuucucauuucauauuu

SEQ ID NO: 222349 - RNA, 32 nt, Homo Sapiens
acuggccucuuaaauuguugcagguggggaau

SEQ ID NO: 222350 - RNA, 32 nt, Homo Sapiens
agagauuguacauuuauuuauuacugucccua

SEQ ID NO: 222351 - RNA, 32 nt, Homo Sapiens
cugccuaucacugucauagaaaugguaaguuu

SEQ ID NO: 222352 - RNA, 32 nt, Homo Sapiens
guagagcacucuccguccugcugcuggcaagg

SEQ ID NO: 222353 - RNA, 32 nt, Homo Sapiens
cauuguacaaccuugaaucacuugagcaugua

SEQ ID NO: 222354 - RNA, 32 nt, Homo Sapiens
ucuguuuuauuaccgaagacaauuaguacaca

SEQ ID NO: 222355 - RNA, 32 nt, Homo Sapiens
ccuuucacuucuuaaaggaaacaaaggggaag

SEQ ID NO: 222356 - RNA, 32 nt, Homo Sapiens
gcuucuuucuacacacacaucuaaagacggug

SEQ ID NO: 222357 - RNA, 32 nt, Homo Sapiens
uuuugcuacaauuccaugccugucccaggacc

SEQ ID NO: 222358 - RNA, 32 nt, Homo Sapiens
uagaagccagcaggugcccaugugcuacugac

SEQ ID NO: 222359 - RNA, 32 nt, Homo Sapiens
ccaaucguuuuuucuuuuucuggguccaucac

SEQ ID NO: 222360 - RNA, 32 nt, Homo Sapiens
gacuugauauuguggaaugacuagcaaacaag

SEQ ID NO: 222361 - RNA, 32 nt, Homo Sapiens
gauuuugauacauuuuaauguugaaauuaaua

SEQ ID NO: 222362 - RNA, 32 nt, Homo Sapiens
gcuggccugguuggcucuggauuucuggacuu

SEQ ID NO: 222363 - RNA, 32 nt, Homo Sapiens
guucaugacaauggaugacacaaguuugaggu

SEQ ID NO: 222364 - RNA, 32 nt, Homo Sapiens
gaaaaaucaaaauaacauugacucuuccaacc

SEQ ID NO: 222365 - RNA, 32 nt, Homo Sapiens
cuacauguaaagugaacuguuuccuguauaaa

SEQ ID NO: 222366 - RNA, 32 nt, Homo Sapiens
gcugugauauugugauuuauaauaaauauaua

SEQ ID NO: 222367 - RNA, 32 nt, Homo Sapiens
gggggcugaagacaacuuggauugcgaggcua

SEQ ID NO: 222368 - RNA, 32 nt, Homo Sapiens
ccgccgcgcgcccuccaaccugcugcugccgc

SEQ ID NO: 222369 - RNA, 32 nt, Homo Sapiens
guaaacaaggccucgcgccgcugcggguccug

SEQ ID NO: 222370 - RNA, 32 nt, Homo Sapiens
ccauucgucuuggccucucgaagugcugggau

SEQ ID NO: 222371 - RNA, 32 nt, Homo Sapiens
uucugaaaaacaccugcauuugugaaagcacc

SEQ ID NO: 222372 - RNA, 32 nt, Homo Sapiens
uuucacuuucuaugccauuauuuuuguauucu

SEQ ID NO: 222373 - RNA, 32 nt, Homo Sapiens
uacauucauccccuaccacgugccaggcugca

SEQ ID NO: 222374 - RNA, 32 nt, Homo Sapiens
gacucccugcuucccuggaagcuucaggaagc

SEQ ID NO: 222375 - RNA, 32 nt, Homo Sapiens
uaggaccuucccucccgcccagccaggguggg

SEQ ID NO: 222376 - RNA, 32 nt, Homo Sapiens
uagcguccucaauguggacgcccugagcuccc

SEQ ID NO: 222377 - RNA, 32 nt, Homo Sapiens
agggagacucaagagggagaagugacuccagc

SEQ ID NO: 222378 - RNA, 32 nt, Homo Sapiens
aguuuauuugauacucuuucuguguauauauu

SEQ ID NO: 222379 - RNA, 32 nt, Homo Sapiens
ggaugaugucagaacaagacgugguggauuug

SEQ ID NO: 222380 - RNA, 32 nt, Homo Sapiens
auuugaugcaguaaagauuacccuguuuuaug

SEQ ID NO: 222381 - RNA, 32 nt, Homo Sapiens
uuggaaacuacauuuuaaacuuuggaaucaaa

SEQ ID NO: 222382 - RNA, 32 nt, Homo Sapiens
guugggguuuuggggggagggggaguauuagu

SEQ ID NO: 222383 - RNA, 31 nt, Homo Sapiens
ccguaucuugguaguucguuucuggauuggg

SEQ ID NO: 222384 - RNA, 32 nt, Homo Sapiens
gcgugggcuuccgagacucugcgugccccagc

SEQ ID NO: 222385 - RNA, 32 nt, Homo Sapiens
gagugcaggccguggggcgcgagggucccggg

SEQ ID NO: 222386 - RNA, 32 nt, Homo Sapiens
aagauuugcacaaagaaaaugcuaauaaaagu

SEQ ID NO: 222387 - RNA, 32 nt, Homo Sapiens
gccgcgcagcccgccgccccagccauggcgaa

SEQ ID NO: 222388 - RNA, 32 nt, Homo Sapiens
gaauagaggggagggcuuggcacgguggcuca

SEQ ID NO: 222389 - RNA, 32 nt, Homo Sapiens
uacagauaucuaacugaaauaaaaaguguuuu

SEQ ID NO: 222390 - RNA, 32 nt, Homo Sapiens
acauuguacaaaaauaaugugacuucugaggc

SEQ ID NO: 222391 - RNA, 32 nt, Homo Sapiens
acuuacagugauuguacauauuguacaucuuu

SEQ ID NO: 222392 - RNA, 32 nt, Homo Sapiens
acaggaccuggaugcauacuuuccuucugguu

SEQ ID NO: 222393 - RNA, 32 nt, Homo Sapiens
aucuucaucauucauaugaggaaauaaguggu

SEQ ID NO: 222394 - RNA, 32 nt, Homo Sapiens
acaguggguggguuggugugucuggacacuga

SEQ ID NO: 222395 - RNA, 32 nt, Homo Sapiens
cgcgccacccucggggcgccgacggucacgga

SEQ ID NO: 222396 - RNA, 32 nt, Homo Sapiens
aaagacacagauuucggucauaaagaauguaa

SEQ ID NO: 222397 - RNA, 27 nt, Homo Sapiens
cuggguuuauucuucaguuacccuaau

SEQ ID NO: 222398 - RNA, 32 nt, Homo Sapiens
agagugaggccacaguucccaccacacgaggg

SEQ ID NO: 222399 - RNA, 30 nt, Homo Sapiens
ugaagcccacuugcccuaagcauuuuucac

SEQ ID NO: 222400 - RNA, 32 nt, Homo Sapiens
ccuuaaccgggaaauuuccaugcuaucuagag

SEQ ID NO: 222401 - RNA, 32 nt, Homo Sapiens
ugggcugcacccagcccacccuggcccucagg

SEQ ID NO: 222402 - RNA, 32 nt, Homo Sapiens
ggcaucuuuuaaaaauaauaauuuacaguaug

SEQ ID NO: 222403 - RNA, 28 nt, Homo Sapiens
uucccaauuacaggauuauacgguacca

SEQ ID NO: 222404 - RNA, 32 nt, Homo Sapiens
ggggaaaauggcaaaggucaacuagcugcuuc

SEQ ID NO: 222405 - RNA, 32 nt, Homo Sapiens
gaacuuuuucuuuucccucaaucucaauccug

SEQ ID NO: 222406 - RNA, 32 nt, Homo Sapiens
ucaguauaacugaguuuuguccaugcuggugu

SEQ ID NO: 222407 - RNA, 32 nt, Homo Sapiens
uguguggauucuuuaaacgcucuagguacgau

SEQ ID NO: 222408 - RNA, 26 nt, Homo Sapiens
caugggaccggcagaagcugggcgcc

SEQ ID NO: 222409 - RNA, 31 nt, Homo Sapiens
gaaauaaggcuuuagaaccagagcagacaca

SEQ ID NO: 222410 - RNA, 32 nt, Homo Sapiens
cuucacaucgccauccagccucgaagccaaca

SEQ ID NO: 222411 - RNA, 32 nt, Homo Sapiens
accaccacgacagccgcaucguuuuuaguggu

SEQ ID NO: 222412 - RNA, 32 nt, Homo Sapiens
cuaaucuggcacucagccccucugggaaacau

SEQ ID NO: 222413 - RNA, 32 nt, Homo Sapiens
cugucaugcagggagagcugugcuccugggug

SEQ ID NO: 222414 - RNA, 32 nt, Homo Sapiens
uuuucugucuccugggucccugcccccaccac

SEQ ID NO: 222415 - RNA, 32 nt, Homo Sapiens
gcugaaacauguuaauguaauuuuaaaucaca

SEQ ID NO: 222416 - RNA, 32 nt, Homo Sapiens
ccaagguucccucucuguuccuguuuguuuuu

SEQ ID NO: 222417 - RNA, 32 nt, Homo Sapiens
acuacuugaauaguauuuugcugaagagcaag

SEQ ID NO: 222418 - RNA, 32 nt, Homo Sapiens
guggauaucuucugccuucaaccacagaucaa

SEQ ID NO: 222419 - RNA, 32 nt, Homo Sapiens
aacuuuaaacaaguagaaagauaauauuucuc

SEQ ID NO: 222420 - RNA, 32 nt, Homo Sapiens
ucuuuaaggcucccaacaaugcuauacagcgc

SEQ ID NO: 222421 - RNA, 32 nt, Homo Sapiens
gagugcaguucccaugagucacuuccugaacc

SEQ ID NO: 222422 - RNA, 32 nt, Homo Sapiens
gucauguguacuuauuguagaaaguuuguaag

SEQ ID NO: 222423 - RNA, 32 nt, Homo Sapiens
ggaaacugaucagggcagcugcucugugacau

SEQ ID NO: 222424 - RNA, 32 nt, Homo Sapiens
aauggcaguauaguccaugauaucuaaggagu

SEQ ID NO: 222425 - RNA, 32 nt, Homo Sapiens
cuuccaggcagacacagcugucugguucaggc

SEQ ID NO: 222426 - RNA, 32 nt, Homo Sapiens
uaaaauauaugugcuuauuaaauaaugcacag

SEQ ID NO: 222427 - RNA, 32 nt, Homo Sapiens
acagggggccccaguccagguggccuaacagc

SEQ ID NO: 222428 - RNA, 32 nt, Homo Sapiens
caugagugcagcgugcugcggcugggggcaga

SEQ ID NO: 222429 - RNA, 32 nt, Homo Sapiens
guuuauuccugcaugcgugggccacaggcugg

SEQ ID NO: 222430 - RNA, 32 nt, Homo Sapiens
aacaauuuaagugccugauacaaaguccaaag

SEQ ID NO: 222431 - RNA, 32 nt, Homo Sapiens
augaggcauaugcguugucaguuggaaucccu

SEQ ID NO: 222432 - RNA, 32 nt, Homo Sapiens
uucccuuccccaccugggagccagggacuguc

SEQ ID NO: 222433 - RNA, 32 nt, Homo Sapiens
ugagacaaucuaaauguuuaucaguggaagua

SEQ ID NO: 222434 - RNA, 32 nt, Homo Sapiens
acacacauauguuuuucuagucucuggcaugu

SEQ ID NO: 222435 - RNA, 32 nt, Homo Sapiens
acauuguaaaugaaacaccuauauuaacuuuc

SEQ ID NO: 222436 - RNA, 32 nt, Homo Sapiens
aauccaauauccauucauguuaaaaccucuca

SEQ ID NO: 222437 - RNA, 29 nt, Homo Sapiens
aguaaaguggcucuauauuuucucuacgc

SEQ ID NO: 222438 - RNA, 32 nt, Homo Sapiens
cggccgggcugcugcugcugcugcuccaggug

SEQ ID NO: 222439 - RNA, 32 nt, Homo Sapiens
gcacaaccguccccggccccugccccgccccc

SEQ ID NO: 222440 - RNA, 32 nt, Homo Sapiens
cucagagcugccccggccggcccccgucucuu

SEQ ID NO: 222441 - RNA, 32 nt, Homo Sapiens
cucuguucauucugucccacuuucuucauaga

SEQ ID NO: 222442 - RNA, 32 nt, Homo Sapiens
uguaugcauguuuguuuauauguaagcuuggu

SEQ ID NO: 222443 - RNA, 32 nt, Homo Sapiens
gcuugguaggugguggcaagggggcggcggcg

SEQ ID NO: 222444 - RNA, 32 nt, Homo Sapiens
uaaggcaaaugcugagcacuguaaccagucca

SEQ ID NO: 222445 - RNA, 32 nt, Homo Sapiens
gcugagcuugcaggaaacccacuuccugaagc

SEQ ID NO: 222446 - RNA, 32 nt, Homo Sapiens
gccgagacugcgggggcugugcgcgcgcgagc

SEQ ID NO: 222447 - RNA, 32 nt, Homo Sapiens
agcagaagggccuuccccuggacccucagagc

SEQ ID NO: 222448 - RNA, 32 nt, Homo Sapiens
cuggucuccucuaucguguuugcugauccaca

SEQ ID NO: 222449 - RNA, 32 nt, Homo Sapiens
uccccucuuucugcaccuuagaucaucucuac

SEQ ID NO: 222450 - RNA, 32 nt, Homo Sapiens
ggucaacugaauuaaaauuugcaguuuaacaa

SEQ ID NO: 222451 - RNA, 32 nt, Homo Sapiens
uguaguuuucaccaugacagucuugcacauau

SEQ ID NO: 222452 - RNA, 32 nt, Homo Sapiens
gguggccagguggugauuucucuuugaccaau

SEQ ID NO: 222453 - RNA, 32 nt, Homo Sapiens
aaacauuguuacacuuaauuuuacagggcaca

SEQ ID NO: 222454 - RNA, 32 nt, Homo Sapiens
cagccuaggaccaguuuuguaucaaacucguc

SEQ ID NO: 222455 - RNA, 32 nt, Homo Sapiens
uagacuucuuugauaguuuucuuucuuugaug

SEQ ID NO: 222456 - RNA, 32 nt, Homo Sapiens
agcugggacaccugguccugcuagcuggacca

SEQ ID NO: 222457 - RNA, 32 nt, Homo Sapiens
gagaaggcugacuggcuggacucauugagcug

SEQ ID NO: 222458 - RNA, 32 nt, Homo Sapiens
aggggagaauaaaguuaugcuguguacaucac

SEQ ID NO: 222459 - RNA, 32 nt, Homo Sapiens
aagccagaaaccacauuuaauuucauaaauaa

SEQ ID NO: 222460 - RNA, 32 nt, Homo Sapiens
gagaaaugccugaguucuagcucagguuuucu

SEQ ID NO: 222461 - RNA, 32 nt, Homo Sapiens
aauuucuggucaguggcccauaucuaaaaugc

SEQ ID NO: 222462 - RNA, 31 nt, Homo Sapiens
acugcgcccguuugccugccccucgucgggg

SEQ ID NO: 222463 - RNA, 29 nt, Homo Sapiens
ggcauuuuaguucuauauuuuuugugccu

SEQ ID NO: 222464 - RNA, 30 nt, Homo Sapiens
gaauaagccaggcgcgugggcagggccagg

SEQ ID NO: 222465 - RNA, 32 nt, Homo Sapiens
aaaaggcccuugggacaucagaggagccggca

SEQ ID NO: 222466 - RNA, 32 nt, Homo Sapiens
cucaaaaaaaaauuaaaauaaauuuaaauaca

SEQ ID NO: 222467 - RNA, 32 nt, Homo Sapiens
accuugggcguccccaccugccuggaucugaa

SEQ ID NO: 222468 - RNA, 32 nt, Homo Sapiens
augcugguucccucuguccagcgagccucucc

SEQ ID NO: 222469 - RNA, 32 nt, Homo Sapiens
uugcacgauccucacugcaacauuccuuaucc

SEQ ID NO: 222470 - RNA, 32 nt, Homo Sapiens
gacugcaguauccauaacccccugcccacguc

SEQ ID NO: 222471 - RNA, 32 nt, Homo Sapiens
ggcugcugccccgcccgcgccggcggaaggag

SEQ ID NO: 222472 - RNA, 32 nt, Homo Sapiens
ccugaggcaccgagacacaaaggcaggcggga

SEQ ID NO: 222473 - RNA, 32 nt, Homo Sapiens
aaggaagcugucucccuucugacauuuccuag

SEQ ID NO: 222474 - RNA, 31 nt, Homo Sapiens
ggguuuucacggaguaugccugcccugcccc

SEQ ID NO: 222475 - RNA, 32 nt, Homo Sapiens
gccagcuaccauugcaccucuagcugcaaaca

SEQ ID NO: 222476 - RNA, 32 nt, Homo Sapiens
uugcacugggaagaaaauauuuuguaaaagaa

SEQ ID NO: 222477 - RNA, 28 nt, Homo Sapiens
accaugccguggccccugcugcugcugc

SEQ ID NO: 222478 - RNA, 32 nt, Homo Sapiens
gcguucagugggaagcaaagggcuugcccggg

SEQ ID NO: 222479 - RNA, 32 nt, Homo Sapiens
aaauguuuugaugaauacaauguauuaaaaua

SEQ ID NO: 222480 - RNA, 32 nt, Homo Sapiens
auuuuuuacucuaucugugauacucuaagaua

SEQ ID NO: 222481 - RNA, 32 nt, Homo Sapiens
caccucgagggacgcgagcgggcggcggggcu

SEQ ID NO: 222482 - RNA, 32 nt, Homo Sapiens
ucccagcagccaccccacauccagccuacaca

SEQ ID NO: 222483 - RNA, 32 nt, Homo Sapiens
cuugcccugucgccuggcuggaguggaguggc

SEQ ID NO: 222484 - RNA, 32 nt, Homo Sapiens
cauacacaaaaauugguuuuaaaguugacucc

SEQ ID NO: 222485 - RNA, 32 nt, Homo Sapiens
aacucuagcuuucuauacucaacagcaaugcc

SEQ ID NO: 222486 - RNA, 31 nt, Homo Sapiens
uaugcuggguucccugagucgucaggccaga

SEQ ID NO: 222487 - RNA, 32 nt, Homo Sapiens
cggagagggaggaggaggccuccaggggcgcg

SEQ ID NO: 222488 - RNA, 32 nt, Homo Sapiens
uaaaguucuauaaauugcaacaaaaugauacc

SEQ ID NO: 222489 - RNA, 29 nt, Homo Sapiens
aggaaugugugucuccugccgggagcugc

SEQ ID NO: 222490 - RNA, 32 nt, Homo Sapiens
ccgcgccgccggaccugaaacccggcggaggg

SEQ ID NO: 222491 - RNA, 32 nt, Homo Sapiens
ugccuccggcaaagagcccacuaucaaguucc

SEQ ID NO: 222492 - RNA, 32 nt, Homo Sapiens
gcccauaugcucuaucucaagaaacaagauga

SEQ ID NO: 222493 - RNA, 32 nt, Homo Sapiens
cacugugcaaucaucaccaccuuccaucauca

SEQ ID NO: 222494 - RNA, 32 nt, Homo Sapiens
gcagcaagcagaagauccccgggagucacccu

SEQ ID NO: 222495 - RNA, 32 nt, Homo Sapiens
gccacccuaucuccagcugccuuuaaagggua

SEQ ID NO: 222496 - RNA, 32 nt, Homo Sapiens
agggauagagggugggggcucaugguuucccu

SEQ ID NO: 222497 - RNA, 32 nt, Homo Sapiens
ccccacgucuuggccauucaccucugaaacuu

SEQ ID NO: 222498 - RNA, 32 nt, Homo Sapiens
uuagggcuaagugagauacagauuccuccaau

SEQ ID NO: 222499 - RNA, 32 nt, Homo Sapiens
ccgauuccagcaugugagcuucaugcuuccuc

SEQ ID NO: 222500 - RNA, 32 nt, Homo Sapiens
gcuggugcuggagggggcgcaccuggcgcugu

SEQ ID NO: 222501 - RNA, 32 nt, Homo Sapiens
gaguugaaucaucagaguaaacugccaguugc

SEQ ID NO: 222502 - RNA, 32 nt, Homo Sapiens
ggcaauuagcuggacuccaugacccaccccug

SEQ ID NO: 222503 - RNA, 32 nt, Homo Sapiens
aagaaagagaaaguacucagaggcugacacug

SEQ ID NO: 222504 - RNA, 32 nt, Homo Sapiens
aucuguaaugaaaagaaucuguacugcaagua

SEQ ID NO: 222505 - RNA, 32 nt, Homo Sapiens
ccaugcccaacacccacugaucuuuaacucuc

SEQ ID NO: 222506 - RNA, 32 nt, Homo Sapiens
ccagagagguagucuguccuauuuucagacgg

SEQ ID NO: 222507 - RNA, 32 nt, Homo Sapiens
agucaucugccagcugaccuccguguuccccc

SEQ ID NO: 222508 - RNA, 32 nt, Homo Sapiens
cgccggcggcguuuuccagcucgagugcucag

SEQ ID NO: 222509 - RNA, 32 nt, Homo Sapiens
ugccagcccucccagccccaggcccaucugag

SEQ ID NO: 222510 - RNA, 32 nt, Homo Sapiens
auuauaaacuggggucuaaauccuaaagcaaa

SEQ ID NO: 222511 - RNA, 32 nt, Homo Sapiens
cacggauugaagaucggcggauacucauuggc

SEQ ID NO: 222512 - RNA, 32 nt, Homo Sapiens
uccagccccccgcauucccugauccucccauc

SEQ ID NO: 222513 - RNA, 32 nt, Homo Sapiens
uggcuuacaccuguaaucccaacacuuugcga

SEQ ID NO: 222514 - RNA, 32 nt, Homo Sapiens
ugucuugcugaagggagaaaaauguuuuagua

SEQ ID NO: 222515 - RNA, 32 nt, Homo Sapiens
uguccugcauauaaaaguaucuggucauuuca

SEQ ID NO: 222516 - RNA, 32 nt, Homo Sapiens
gagggugggggcagggcuggcugggggcuucu

SEQ ID NO: 222517 - RNA, 32 nt, Homo Sapiens
aagagaugaagaagaugagauauuuuagcauu

SEQ ID NO: 222518 - RNA, 32 nt, Homo Sapiens
ccaguccgcugcgccugcggcggggugugggg

SEQ ID NO: 222519 - RNA, 32 nt, Homo Sapiens
auucacuucuuaauuuaugaccucaaucaauu

SEQ ID NO: 222520 - RNA, 32 nt, Homo Sapiens
agcucauagaaaguaacaaaauuugcugucac

SEQ ID NO: 222521 - RNA, 32 nt, Homo Sapiens
ccugccccauccccagcacucaugaucuugaa

SEQ ID NO: 222522 - RNA, 32 nt, Homo Sapiens
ggauugaucacuuuguuaaaaauauuuucuga

SEQ ID NO: 222523 - RNA, 32 nt, Homo Sapiens
acuucauugcugguaauaaaauuucagaugga

SEQ ID NO: 222524 - RNA, 32 nt, Homo Sapiens
uguauguauaugacuuuaaauagcuaugggua

SEQ ID NO: 222525 - RNA, 32 nt, Homo Sapiens
ccagguaggaggauccuggaagcugugagcac

SEQ ID NO: 222526 - RNA, 32 nt, Homo Sapiens
gacuaguuauuuaaguaaaauaauugucuuau

SEQ ID NO: 222527 - RNA, 32 nt, Homo Sapiens
ucagccucucaaguggcugggaccacagaagu

SEQ ID NO: 222528 - RNA, 32 nt, Homo Sapiens
uuucuuaaaagcuuggugguuaagagcacgga

SEQ ID NO: 222529 - RNA, 32 nt, Homo Sapiens
uuacccgggaaaguacgucuagauuguguggu

SEQ ID NO: 222530 - RNA, 32 nt, Homo Sapiens
uuccuuuuucuuucuuuuuucaauuauuugaa

SEQ ID NO: 222531 - RNA, 32 nt, Homo Sapiens
ccggcucugcaccaucccucacccagaccgua

SEQ ID NO: 222532 - RNA, 32 nt, Homo Sapiens
auguuguccuuaaauauuucuaaaagcgccuu

SEQ ID NO: 222533 - RNA, 32 nt, Homo Sapiens
cauuucaucuucucccuccauccaaaguacag

SEQ ID NO: 222534 - RNA, 32 nt, Homo Sapiens
gucgcguggaaaaacagcaccuuccaggccuc

SEQ ID NO: 222535 - RNA, 32 nt, Homo Sapiens
uucuccgcccccagcccccgcccccgucccca

SEQ ID NO: 222536 - RNA, 32 nt, Homo Sapiens
cacccccgcugcaggguuacgguucugggccc

SEQ ID NO: 222537 - RNA, 32 nt, Homo Sapiens
gggagagccugcuggacggcggcaacaaggug

SEQ ID NO: 222538 - RNA, 32 nt, Homo Sapiens
gacuuuuugauccaaugaggcccccuaaauaa

SEQ ID NO: 222539 - RNA, 32 nt, Homo Sapiens
gcuagggugagguuuagccaucuuacuuggcu

SEQ ID NO: 222540 - RNA, 32 nt, Homo Sapiens
uggcucaccccucucccccgcccaaggcugca

SEQ ID NO: 222541 - RNA, 32 nt, Homo Sapiens
gacugauuauaacccuguuuccccucagagaa

SEQ ID NO: 222542 - RNA, 32 nt, Homo Sapiens
ccugugcugggagaaacuuccaggcguggaca

SEQ ID NO: 222543 - RNA, 32 nt, Homo Sapiens
uuggcucuuuugcacacggcuucaugccauaa

SEQ ID NO: 222544 - RNA, 32 nt, Homo Sapiens
cuggugaaccucaccgcccaccugaggcagaa

SEQ ID NO: 222545 - RNA, 32 nt, Homo Sapiens
cucugcccgggagaaagcccaggccagccugc

SEQ ID NO: 222546 - RNA, 32 nt, Homo Sapiens
augacugucgcgcggccgcgccggcggugagg

SEQ ID NO: 222547 - RNA, 32 nt, Homo Sapiens
uccagaggaucggacacggcccggcccggcca

SEQ ID NO: 222548 - RNA, 32 nt, Homo Sapiens
cccuguggcacccacuaguccugggcacucag

SEQ ID NO: 222549 - RNA, 31 nt, Homo Sapiens
caaagccaagccagcuaccaccaggccugag

SEQ ID NO: 222550 - RNA, 32 nt, Homo Sapiens
agggaugagccuucuuuuuauuauugaguugg

SEQ ID NO: 222551 - RNA, 32 nt, Homo Sapiens
cagagcgcaccucaaacguacaagucaguagg

SEQ ID NO: 222552 - RNA, 32 nt, Homo Sapiens
acuucgaguuggcuuuccuucucuugaccaag

SEQ ID NO: 222553 - RNA, 32 nt, Homo Sapiens
gccacccagagcucagacccaagggagggugg

SEQ ID NO: 222554 - RNA, 32 nt, Homo Sapiens
gaccccagauaaaccccucccaauuaaugcau

SEQ ID NO: 222555 - RNA, 32 nt, Homo Sapiens
caagagaguaaugauuucuuuuuuaaaacauu

SEQ ID NO: 222556 - RNA, 32 nt, Homo Sapiens
uccgugauuaucugcgugcauuuuggacaaag

SEQ ID NO: 222557 - RNA, 32 nt, Homo Sapiens
uuuuaacugcuuuguuauguaagcuuacccag

SEQ ID NO: 222558 - RNA, 32 nt, Homo Sapiens
aaaauuaauaauuucuugauaauuauaaaaau

SEQ ID NO: 222559 - RNA, 32 nt, Homo Sapiens
ucacuuuguuuuacuuuuguuccccagaugaa

SEQ ID NO: 222560 - RNA, 32 nt, Homo Sapiens
auggugcccagcugguuccugcugagguccag

SEQ ID NO: 222561 - RNA, 32 nt, Homo Sapiens
ugucauaggcuccuaacuguuccuccugcuuc

SEQ ID NO: 222562 - RNA, 32 nt, Homo Sapiens
cccgcucuugcgggcucuguccgguugacagg

SEQ ID NO: 222563 - RNA, 32 nt, Homo Sapiens
uuuuuucuucuggcugguuuuuccaucuucuc

SEQ ID NO: 222564 - RNA, 32 nt, Homo Sapiens
ucaggaugggccgcaucccauuuccugccucg

SEQ ID NO: 222565 - RNA, 32 nt, Homo Sapiens
caccccugcccccuaauuuauacagaaaccgg

SEQ ID NO: 222566 - RNA, 32 nt, Homo Sapiens
acauuugcguguaucuaauucagcugaugcuc

SEQ ID NO: 222567 - RNA, 32 nt, Homo Sapiens
cgucuuguccacgcagcuucgucuguauuaac

SEQ ID NO: 222568 - RNA, 32 nt, Homo Sapiens
gcaaauaguauccaacacaggcaauauuccag

SEQ ID NO: 222569 - RNA, 32 nt, Homo Sapiens
gcugaugauguguguuacaugacuuaagaaau

SEQ ID NO: 222570 - RNA, 32 nt, Homo Sapiens
aguuuucaccuuuauucugcugugaaacaauc

SEQ ID NO: 222571 - RNA, 32 nt, Homo Sapiens
cugcucccgaacuugugaccuucucugagguu

SEQ ID NO: 222572 - RNA, 32 nt, Homo Sapiens
uggugcccgggacagaagugggaaauagaugg

SEQ ID NO: 222573 - RNA, 29 nt, Homo Sapiens
gggccccaauguauguguggcugugggug

SEQ ID NO: 222574 - RNA, 32 nt, Homo Sapiens
aucgccacuaccauccugucaccagugggacc

SEQ ID NO: 222575 - RNA, 32 nt, Homo Sapiens
gauguuuucuauuugguuaaaucucacugcaa

SEQ ID NO: 222576 - RNA, 31 nt, Homo Sapiens
gggccgggggcgguggcucacgccuguaauc

SEQ ID NO: 222577 - RNA, 32 nt, Homo Sapiens
ccuugccaaggggaccugucgcaccccaccac

SEQ ID NO: 222578 - RNA, 32 nt, Homo Sapiens
cuuuucugugcaauacgagacccggccgcacc

SEQ ID NO: 222579 - RNA, 32 nt, Homo Sapiens
agggccucuguuuuccucucaugcucucgcug

SEQ ID NO: 222580 - RNA, 32 nt, Homo Sapiens
uuaaaagacaagcaagaacuaaaccaucuuua

SEQ ID NO: 222581 - RNA, 32 nt, Homo Sapiens
aagaauauacauaaggcacuuuaguuaaggaa

SEQ ID NO: 222582 - RNA, 32 nt, Homo Sapiens
ugccacugccauguaagaagugccuuucacca

SEQ ID NO: 222583 - RNA, 32 nt, Homo Sapiens
gcuuggcucaugggaucugcugcugcauuaaa

SEQ ID NO: 222584 - RNA, 32 nt, Homo Sapiens
gcacgcagaggcgggcggcagacggugcccgg

SEQ ID NO: 222585 - RNA, 31 nt, Homo Sapiens
aguaagaaauaaagauuacaucacaauccaa

SEQ ID NO: 222586 - RNA, 32 nt, Homo Sapiens
uuucaguguccauaaacaaaauguuauuagag

SEQ ID NO: 222587 - RNA, 32 nt, Homo Sapiens
auuucauuauauauuucauauaacauauauau

SEQ ID NO: 222588 - RNA, 32 nt, Homo Sapiens
uugagacuuuaaaagaagaaacaaagagggga

SEQ ID NO: 222589 - RNA, 32 nt, Homo Sapiens
ggauggcgauggugggaugugucgcaagcaau

SEQ ID NO: 222590 - RNA, 32 nt, Homo Sapiens
acggcggcagcagcugcgguggcggcgcucuc

SEQ ID NO: 222591 - RNA, 30 nt, Homo Sapiens
ccucgaguccgcuugggggaaaacuucaaa

SEQ ID NO: 222592 - RNA, 32 nt, Homo Sapiens
auuuaaaaaugaaacaagugugguggcacaug

SEQ ID NO: 222593 - RNA, 32 nt, Homo Sapiens
cuaagguggcuguggaugccacagcaugaacc

SEQ ID NO: 222594 - RNA, 32 nt, Homo Sapiens
aucaucccagcuggagucauggagccucccaa

SEQ ID NO: 222595 - RNA, 32 nt, Homo Sapiens
ccuuauuacugucuuugguauugucuuaaaua

SEQ ID NO: 222596 - RNA, 32 nt, Homo Sapiens
agcaacagcagcccucgcagcccgccagcucg

SEQ ID NO: 222597 - RNA, 32 nt, Homo Sapiens
agggaguacuaauagcagcaucauugacaaaa

SEQ ID NO: 222598 - RNA, 32 nt, Homo Sapiens
ucucggauucaaccgauucuugugccucagcc

SEQ ID NO: 222599 - RNA, 32 nt, Homo Sapiens
uaauaaaggucuuugcacaugugaccacauac

SEQ ID NO: 222600 - RNA, 32 nt, Homo Sapiens
aacagagcaaaaaacaaaaacucugaaagcuc

SEQ ID NO: 222601 - RNA, 32 nt, Homo Sapiens
ccaaugagccuuaauuuuuauauagguccaau

SEQ ID NO: 222602 - RNA, 32 nt, Homo Sapiens
aggcacggaaguauuuguggaaggaagaaaug

SEQ ID NO: 222603 - RNA, 32 nt, Homo Sapiens
agaucccuucuuuuccuuuugcaaucagauaa

SEQ ID NO: 222604 - RNA, 28 nt, Homo Sapiens
agcaaaguuacagugaccuggcuggagu

SEQ ID NO: 222605 - RNA, 32 nt, Homo Sapiens
uagauugaucaacgugauguugauuacaucag

SEQ ID NO: 222606 - RNA, 32 nt, Homo Sapiens
ccuaccguagcuuuuuaccguucacuuccccu

SEQ ID NO: 222607 - RNA, 32 nt, Homo Sapiens
ucuccaagggaagacaauuaaaagacaaauuc

SEQ ID NO: 222608 - RNA, 32 nt, Homo Sapiens
uaccuugaaaauagaaugcgguacguuuagga

SEQ ID NO: 222609 - RNA, 32 nt, Homo Sapiens
uucaaagguuaagaaugagauuuuaaaauugg

SEQ ID NO: 222610 - RNA, 32 nt, Homo Sapiens
gcguuggagaauggaaaugagacguuaugaag

SEQ ID NO: 222611 - RNA, 32 nt, Homo Sapiens
uggaggagcccccuccuucucaccucggucuc

SEQ ID NO: 222612 - RNA, 32 nt, Homo Sapiens
ggguggaaaaggaaaacaauucaagcugagaa

SEQ ID NO: 222613 - RNA, 32 nt, Homo Sapiens
auaacaguagccagaucuccuggccagcuguu

SEQ ID NO: 222614 - RNA, 32 nt, Homo Sapiens
ucauguugagguacaguuugcauaggaaaggc

SEQ ID NO: 222615 - RNA, 32 nt, Homo Sapiens
gcacagggaccaggccuugguuaggcugagcu

SEQ ID NO: 222616 - RNA, 32 nt, Homo Sapiens
ucugauguugaauguuccuaaauauuuaaugg

SEQ ID NO: 222617 - RNA, 30 nt, Homo Sapiens
uuuuuuccuuaauuuggggaaacuuuaguu

SEQ ID NO: 222618 - RNA, 32 nt, Homo Sapiens
aauuuggaauccacagugguguugaaacucug

SEQ ID NO: 222619 - RNA, 32 nt, Homo Sapiens
aggaggaaguuuuuguggacaaugaaaaguua

SEQ ID NO: 222620 - RNA, 32 nt, Homo Sapiens
agcuagacagcacagcagcacccauccccugc

SEQ ID NO: 222621 - RNA, 32 nt, Homo Sapiens
aucacagcuggaaaacugagccggcaaguuac

SEQ ID NO: 222622 - RNA, 32 nt, Homo Sapiens
aaguuaagauguuuguguaaagaaauuucuaa

SEQ ID NO: 222623 - RNA, 31 nt, Homo Sapiens
uaaaucauguaugcuugguucuuucuuccca

SEQ ID NO: 222624 - RNA, 32 nt, Homo Sapiens
acggagcggagcaaaagaaugcggcucuauuc

SEQ ID NO: 222625 - RNA, 32 nt, Homo Sapiens
uccaguguuuccuguuauccacaggagaaugu

SEQ ID NO: 222626 - RNA, 32 nt, Homo Sapiens
ggucucacagguuuggaaauagcgccggaaaa

SEQ ID NO: 222627 - RNA, 32 nt, Homo Sapiens
guucuuucuguuuuguuuuuuacuuuaauuuu

SEQ ID NO: 222628 - RNA, 32 nt, Homo Sapiens
cucugcuguaccagcucuguuccagggccucc

SEQ ID NO: 222629 - RNA, 32 nt, Homo Sapiens
uuuuuaaugguucacaauuucauuuuagggcu

SEQ ID NO: 222630 - RNA, 32 nt, Homo Sapiens
ccugacuuuuacuucugggcagauggggugga

SEQ ID NO: 222631 - RNA, 32 nt, Homo Sapiens
aggaggaaaugggaaccaaccaccagacaagc

SEQ ID NO: 222632 - RNA, 32 nt, Homo Sapiens
ggugggaagaguuucucuccaucggccccaug

SEQ ID NO: 222633 - RNA, 32 nt, Homo Sapiens
guucaggguccccugcccuucuaucugggagc

SEQ ID NO: 222634 - RNA, 32 nt, Homo Sapiens
ggucacacaaaagaagcaaucgggcuccgcca

SEQ ID NO: 222635 - RNA, 32 nt, Homo Sapiens
cucuaccuuucugcuaagagugcgguucauuu

SEQ ID NO: 222636 - RNA, 32 nt, Homo Sapiens
uuucccuaccugcugugguauuucauauuuau

SEQ ID NO: 222637 - RNA, 32 nt, Homo Sapiens
ccaaccucccacuccuucucaaugccguuucu

SEQ ID NO: 222638 - RNA, 32 nt, Homo Sapiens
accgagcgcgucgcucgccgccgcggagcgcg

SEQ ID NO: 222639 - RNA, 32 nt, Homo Sapiens
augggaaccgacagaacaugggcugucuuccc

SEQ ID NO: 222640 - RNA, 32 nt, Homo Sapiens
ccguuggguguuuccuucucaggcucugauuc

SEQ ID NO: 222641 - RNA, 32 nt, Homo Sapiens
ggacccucgccagcgccacgcgcgccacgccc

SEQ ID NO: 222642 - RNA, 32 nt, Homo Sapiens
ccugcagcucugcgagccccugcacuccaucc

SEQ ID NO: 222643 - RNA, 32 nt, Homo Sapiens
ugacucugcaaaaucaugcuuuuugagauuaa

SEQ ID NO: 222644 - RNA, 32 nt, Homo Sapiens
caauaugagagaaaauugagauguguaaaauc

SEQ ID NO: 222645 - RNA, 32 nt, Homo Sapiens
ccuucuucuguuggugcuugaacucuugccug

SEQ ID NO: 222646 - RNA, 32 nt, Homo Sapiens
cgucagcucuuguugccaaccuccccccacaa

SEQ ID NO: 222647 - RNA, 32 nt, Homo Sapiens
cccaagugaguggaagugacaugaugcagucu

SEQ ID NO: 222648 - RNA, 32 nt, Homo Sapiens
cuauaagauaaaaauucuauguuuuucuauuu

SEQ ID NO: 222649 - RNA, 32 nt, Homo Sapiens
cagcaucauuuauugaauggggcuugcuuuca

SEQ ID NO: 222650 - RNA, 32 nt, Homo Sapiens
cgcaucaguacuuuuaugcaggucucauuuga

SEQ ID NO: 222651 - RNA, 32 nt, Homo Sapiens
gaauaucuuuugccuuuaagacgauucauucu

SEQ ID NO: 222652 - RNA, 32 nt, Homo Sapiens
agucguggagggcaucaggugcuggggccucu

SEQ ID NO: 222653 - RNA, 32 nt, Homo Sapiens
accccacacacagcuggggcacuggcagcaug

SEQ ID NO: 222654 - RNA, 32 nt, Homo Sapiens
uucauucaccacauuggccagccuggucuuga

SEQ ID NO: 222655 - RNA, 32 nt, Homo Sapiens
uggagugccguggcguaaucucggcucacugc

SEQ ID NO: 222656 - RNA, 32 nt, Homo Sapiens
ugggcuggccaagggagggagccaugaaaccc

SEQ ID NO: 222657 - RNA, 32 nt, Homo Sapiens
agcuugccacgugcccucuccccucuugaaug

SEQ ID NO: 222658 - RNA, 32 nt, Homo Sapiens
uucaguuugggaagaggagaaaguucuggaga

SEQ ID NO: 222659 - RNA, 29 nt, Homo Sapiens
cucugucuccaguaucaccacaaaauugu

SEQ ID NO: 222660 - RNA, 32 nt, Homo Sapiens
ggccgcccugucauccugguccguacacaugg

SEQ ID NO: 222661 - RNA, 32 nt, Homo Sapiens
ugagaggggagggcaggaggggugugauugga

SEQ ID NO: 222662 - RNA, 32 nt, Homo Sapiens
augcauuguuguauuugcuguaucacaguuag

SEQ ID NO: 222663 - RNA, 32 nt, Homo Sapiens
cucucuccucucccuuucccuuugguaggugc

SEQ ID NO: 222664 - RNA, 32 nt, Homo Sapiens
gcagaauaccugucuccacauuccuagagagg

SEQ ID NO: 222665 - RNA, 32 nt, Homo Sapiens
acuucuugccagcaaguuggcaguugccuggu

SEQ ID NO: 222666 - RNA, 32 nt, Homo Sapiens
aaccuaccccugugggucaucaucaugcccuc

SEQ ID NO: 222667 - RNA, 32 nt, Homo Sapiens
gugcaauacgaaauaaaaggccagcgggcggc

SEQ ID NO: 222668 - RNA, 32 nt, Homo Sapiens
cguaaucacuccugccccaacacacacacaca

SEQ ID NO: 222669 - RNA, 32 nt, Homo Sapiens
uuucacuguaugccuguacuugggcugcacug

SEQ ID NO: 222670 - RNA, 32 nt, Homo Sapiens
cccacgaauggcaaaucuccacugcuagacac

SEQ ID NO: 222671 - RNA, 32 nt, Homo Sapiens
aacuaacuucauaaguaguauuaacuaggggu

SEQ ID NO: 222672 - RNA, 29 nt, Homo Sapiens
caucaguugagggagaggacgcuucauuu

SEQ ID NO: 222673 - RNA, 32 nt, Homo Sapiens
ccgaucacguauauaccacuuccauuugauga

SEQ ID NO: 222674 - RNA, 32 nt, Homo Sapiens
cugugcccuguccacacccaggagccauccuc

SEQ ID NO: 222675 - RNA, 32 nt, Homo Sapiens
ggcuugcuguggggguucagggagguggagau

SEQ ID NO: 222676 - RNA, 32 nt, Homo Sapiens
auguaauccaucucuuacaaaauggagacagg

SEQ ID NO: 222677 - RNA, 32 nt, Homo Sapiens
cugcggggaucuugcccgguguccugguccuc

SEQ ID NO: 222678 - RNA, 32 nt, Homo Sapiens
ccuaggacaacacuaacuucuauggccucguc

SEQ ID NO: 222679 - RNA, 32 nt, Homo Sapiens
gccgcugccccggcuccgccgcucgcagagag

SEQ ID NO: 222680 - RNA, 27 nt, Homo Sapiens
gcauggcgggcuccggagccggugugc

SEQ ID NO: 222681 - RNA, 32 nt, Homo Sapiens
ggaggcgcagcucaggcgcccggcucaggagc

SEQ ID NO: 222682 - RNA, 32 nt, Homo Sapiens
auucagaaaaggaggaaaggguaguuuaauuu

SEQ ID NO: 222683 - RNA, 32 nt, Homo Sapiens
gccaugggaaccaggucugaaaaaguagagag

SEQ ID NO: 222684 - RNA, 32 nt, Homo Sapiens
ccuggagcgggccccagggcagaggcccccag

SEQ ID NO: 222685 - RNA, 32 nt, Homo Sapiens
agucccuugcugaaggcggaccgcggagcggc

SEQ ID NO: 222686 - RNA, 32 nt, Homo Sapiens
cguaaaacaaagugaaccgugacuguuaaacu

SEQ ID NO: 222687 - RNA, 32 nt, Homo Sapiens
cagagaaaacaaauagcaacccauuuguacuu

SEQ ID NO: 222688 - RNA, 32 nt, Homo Sapiens
cggacgugcugggcggcugugcuucgguaggc

SEQ ID NO: 222689 - RNA, 32 nt, Homo Sapiens
gucagcgacagccugggcacccgcggggccgu

SEQ ID NO: 222690 - RNA, 32 nt, Homo Sapiens
auacaggaagaaaaaagaaaagaauuacagaa

SEQ ID NO: 222691 - RNA, 32 nt, Homo Sapiens
cauucuccagauggaguguuucccuccgcagc

SEQ ID NO: 222692 - RNA, 32 nt, Homo Sapiens
uaaacugcaccaaggguguuuccuguuggggu

SEQ ID NO: 222693 - RNA, 32 nt, Homo Sapiens
ccugccacccguuguugccgcggccccagcag

SEQ ID NO: 222694 - RNA, 32 nt, Homo Sapiens
ggcagccgauucucuugugcugauuuaaaugc

SEQ ID NO: 222695 - RNA, 32 nt, Homo Sapiens
uaauaaccuuuggagauaaaguggcauuucca

SEQ ID NO: 222696 - RNA, 32 nt, Homo Sapiens
gagguggaggguggggggcgcugaguagggac

SEQ ID NO: 222697 - RNA, 30 nt, Homo Sapiens
guggaguggggcgagaguccuccgaguagu

SEQ ID NO: 222698 - RNA, 32 nt, Homo Sapiens
aagccuacuauaaggaauauaugacaugcuaa

SEQ ID NO: 222699 - RNA, 32 nt, Homo Sapiens
agcucaggcuccagcccuccagugagccgccu

SEQ ID NO: 222700 - RNA, 32 nt, Homo Sapiens
cuuucuauugaaggcuuuugacgguaauaggu

SEQ ID NO: 222701 - RNA, 32 nt, Homo Sapiens
aucaacugagugccgccuucucagucugcuuc

SEQ ID NO: 222702 - RNA, 32 nt, Homo Sapiens
uucacuugucugguugaaauaaagccuguuuc

SEQ ID NO: 222703 - RNA, 32 nt, Homo Sapiens
acaaggagaugaauacuguuuucaugccugcu

SEQ ID NO: 222704 - RNA, 32 nt, Homo Sapiens
ucuuaaaaauaaucugaaaaucuuauugauac

SEQ ID NO: 222705 - RNA, 32 nt, Homo Sapiens
cggggggagucggccgggcugcugcugcugcu

SEQ ID NO: 222706 - RNA, 32 nt, Homo Sapiens
ccgccgcaggccgcgagcugccgcccgacaug

SEQ ID NO: 222707 - RNA, 32 nt, Homo Sapiens
cuccaggaauggggaaaugugacaccaccauc

SEQ ID NO: 222708 - RNA, 32 nt, Homo Sapiens
uuauaauuacaaugcacaauuuauaauuacaa

SEQ ID NO: 222709 - RNA, 32 nt, Homo Sapiens
ccagacccggcgagggcaccgccccgcucccc

SEQ ID NO: 222710 - RNA, 32 nt, Homo Sapiens
cucagagcuagcuucugggaacccucaugcua

SEQ ID NO: 222711 - RNA, 32 nt, Homo Sapiens
cgccgccgcagcgcccucaggccgccauucgc

SEQ ID NO: 222712 - RNA, 32 nt, Homo Sapiens
ucagcaaaacuugauucuauauuguuguuuuu

SEQ ID NO: 222713 - RNA, 32 nt, Homo Sapiens
guuauuucaauuucuaauaauuccuuguacuu

SEQ ID NO: 222714 - RNA, 32 nt, Homo Sapiens
ugugaggauuacccagugugguaggugcucaa

SEQ ID NO: 222715 - RNA, 32 nt, Homo Sapiens
cuucuggugcaaacaguugcuuguggacuuaa

SEQ ID NO: 222716 - RNA, 32 nt, Homo Sapiens
acaagaaugugcugucugugucuagcuucuuu

SEQ ID NO: 222717 - RNA, 32 nt, Homo Sapiens
ccuggcagaacugaagagcggcaccgggccca

SEQ ID NO: 222718 - RNA, 32 nt, Homo Sapiens
auuuguaaaaauagaauugccuuaaaggauuu

SEQ ID NO: 222719 - RNA, 32 nt, Homo Sapiens
uaaauuuuuuucugccuuggguguugaauuuu

SEQ ID NO: 222720 - RNA, 32 nt, Homo Sapiens
gugguucagugucaaggaggcugcugcugguc

SEQ ID NO: 222721 - RNA, 32 nt, Homo Sapiens
cucucugaccccagggccauuauuuuuaaagg

SEQ ID NO: 222722 - RNA, 32 nt, Homo Sapiens
guucuccccacuuuuauccuugucccucuuua

SEQ ID NO: 222723 - RNA, 32 nt, Homo Sapiens
ccccagggccgguggcuggacucugacaacuc

SEQ ID NO: 222724 - RNA, 32 nt, Homo Sapiens
uguugaugccaugaaugaaauggcugguuaga

SEQ ID NO: 222725 - RNA, 32 nt, Homo Sapiens
cuuuaacaguugucuuuuuuuucuaaauucag

SEQ ID NO: 222726 - RNA, 32 nt, Homo Sapiens
ccaggacauauucagcaagcaguuggugauga

SEQ ID NO: 222727 - RNA, 32 nt, Homo Sapiens
gagugccuaaugugucccacuuacugugccac

SEQ ID NO: 222728 - RNA, 32 nt, Homo Sapiens
cuccuuuuggcuauugugaauaaugcuggcua

SEQ ID NO: 222729 - RNA, 32 nt, Homo Sapiens
cuuuuuguacagcugggggcaccuggaacaua

SEQ ID NO: 222730 - RNA, 32 nt, Homo Sapiens
acacacccaggcggcccgcccuugccugucug

SEQ ID NO: 222731 - RNA, 32 nt, Homo Sapiens
uaagagcauuguccuauaaaucugcaauauuu

SEQ ID NO: 222732 - RNA, 32 nt, Homo Sapiens
cuuggggcgcgcgguuugcaugggauggggug

SEQ ID NO: 222733 - RNA, 32 nt, Homo Sapiens
uggaugcauacaguucuguguacugccaggca

SEQ ID NO: 222734 - RNA, 32 nt, Homo Sapiens
acaugggaaaauugguuuauaccaagaaagcu

SEQ ID NO: 222735 - RNA, 32 nt, Homo Sapiens
ucuuuaaaaaauagagugaagauauuuuacug

SEQ ID NO: 222736 - RNA, 32 nt, Homo Sapiens
gcccuccugucccucaccccagccacaacaaa

SEQ ID NO: 222737 - RNA, 32 nt, Homo Sapiens
ucauguucaaccaacaucauuaugaaauuaau

SEQ ID NO: 222738 - RNA, 32 nt, Homo Sapiens
aaaaaauaaaaauuaucuauaaucucagaacc

SEQ ID NO: 222739 - RNA, 32 nt, Homo Sapiens
ccagaacauaauguaguauauguuuuuaggug

SEQ ID NO: 222740 - RNA, 32 nt, Homo Sapiens
gaugcaggacucaccucugugccuugcugcuc

SEQ ID NO: 222741 - RNA, 32 nt, Homo Sapiens
cagugaccagcaugggaggaaaaagcagcugu

SEQ ID NO: 222742 - RNA, 32 nt, Homo Sapiens
uuaguuuccuuccuuagccguuuugaguggug

SEQ ID NO: 222743 - RNA, 32 nt, Homo Sapiens
uacuccuucuaaaauauuugacuuccuaaauu

SEQ ID NO: 222744 - RNA, 32 nt, Homo Sapiens
aggaaagggggagaggaaauugcagacauagc

SEQ ID NO: 222745 - RNA, 32 nt, Homo Sapiens
auuucauacaguguucuuguccuuccucucug

SEQ ID NO: 222746 - RNA, 32 nt, Homo Sapiens
ggcccaccuugugaccuccgcggccggccccu

SEQ ID NO: 222747 - RNA, 32 nt, Homo Sapiens
guguaauuuuaaaauuaauugcuuguaaccuc

SEQ ID NO: 222748 - RNA, 32 nt, Homo Sapiens
gaugugagccuggcgggcugcccgcuaaccug

SEQ ID NO: 222749 - RNA, 32 nt, Homo Sapiens
gggacugaggacauggaugagaaggaggagga

SEQ ID NO: 222750 - RNA, 32 nt, Homo Sapiens
uucuggguagggaaacaaccaacuaauugacu

SEQ ID NO: 222751 - RNA, 32 nt, Homo Sapiens
gagcggcgaccacugcggaucucggaaggaag

SEQ ID NO: 222752 - RNA, 32 nt, Homo Sapiens
auuuuggaaaacuguagaaaauaauccucagg

SEQ ID NO: 222753 - RNA, 32 nt, Homo Sapiens
gcacgccugacgcuccucuacccucgggcagc

SEQ ID NO: 222754 - RNA, 32 nt, Homo Sapiens
ucgugcugacaaugccuugguuuugucugaaa

SEQ ID NO: 222755 - RNA, 32 nt, Homo Sapiens
gccaaacacccacugacaccccggggcucauu

SEQ ID NO: 222756 - RNA, 32 nt, Homo Sapiens
ggagaacuggggugggcgggggguggggcugg

SEQ ID NO: 222757 - RNA, 32 nt, Homo Sapiens
gcugaggggaugugggggccccaaacucauua

SEQ ID NO: 222758 - RNA, 32 nt, Homo Sapiens
gaucucaugucucauuagagugcaagggggag

SEQ ID NO: 222759 - RNA, 32 nt, Homo Sapiens
aagcuagaaaaccuaaaagaaaugauacauuc

SEQ ID NO: 222760 - RNA, 31 nt, Homo Sapiens
acaucacagaaggcugaucgauauuaccagg

SEQ ID NO: 222761 - RNA, 32 nt, Homo Sapiens
ggccaagguaccuuuacaggagcaccuagagc

SEQ ID NO: 222762 - RNA, 32 nt, Homo Sapiens
cucacagcaugccagagcugcccaggacagcc

SEQ ID NO: 222763 - RNA, 32 nt, Homo Sapiens
uggcugucccuguggccccauccaaccacugu

SEQ ID NO: 222764 - RNA, 32 nt, Homo Sapiens
ugcaaccuccuccucccggguucaagcaauuc

SEQ ID NO: 222765 - RNA, 32 nt, Homo Sapiens
uuuggccuaaaacucuguauggcugccuugug

SEQ ID NO: 222766 - RNA, 32 nt, Homo Sapiens
ccgacuucagcagcuuccugcugcuagucgau

SEQ ID NO: 222767 - RNA, 31 nt, Homo Sapiens
ugcgcauuccgcugccugcgccugcgccugc

SEQ ID NO: 222768 - RNA, 32 nt, Homo Sapiens
gcaaaaacuaaauuuuaucucuguaugggcaa

SEQ ID NO: 222769 - RNA, 32 nt, Homo Sapiens
gagccggcgcgggcccgggcuccggcuccgaa

SEQ ID NO: 222770 - RNA, 32 nt, Homo Sapiens
cagcuggggaguauggggaggggguggccgga

SEQ ID NO: 222771 - RNA, 32 nt, Homo Sapiens
uuuacuugacauuaucauuaaaauugcuaggu

SEQ ID NO: 222772 - RNA, 32 nt, Homo Sapiens
ugggccagcgacccucucccuguccgggcugc

SEQ ID NO: 222773 - RNA, 32 nt, Homo Sapiens
gaauccggugugaaacguucacuuccuagguc

SEQ ID NO: 222774 - RNA, 32 nt, Homo Sapiens
uuuuccccuuuucucuuguuucaauugggucu

SEQ ID NO: 222775 - RNA, 32 nt, Homo Sapiens
uugagugugugcucucaaaugcggccucaguu

SEQ ID NO: 222776 - RNA, 32 nt, Homo Sapiens
uggaauggcaaugaaaagcguggauuguggaa

SEQ ID NO: 222777 - RNA, 32 nt, Homo Sapiens
agucaucugaaagucaggccugcugcaggaca

SEQ ID NO: 222778 - RNA, 32 nt, Homo Sapiens
ggggcggagcggggcggggcugaguggguggc

SEQ ID NO: 222779 - RNA, 32 nt, Homo Sapiens
cucucccugccagcaugccugccugacccacc

SEQ ID NO: 222780 - RNA, 32 nt, Homo Sapiens
ccuccagacugcgagaaacaaguaaaaaccca

SEQ ID NO: 222781 - RNA, 32 nt, Homo Sapiens
auugauaaauggaagcgcuuaccagcccagcu

SEQ ID NO: 222782 - RNA, 32 nt, Homo Sapiens
augaauguagcccuuccaacaccugacagaau

SEQ ID NO: 222783 - RNA, 32 nt, Homo Sapiens
gggagagucacccugagccagcccuucccugg

SEQ ID NO: 222784 - RNA, 32 nt, Homo Sapiens
aagcagauacuugaggaaaacacuauuuccaa

SEQ ID NO: 222785 - RNA, 32 nt, Homo Sapiens
cuauaaacauccuuugcugcuacauuagaacu

SEQ ID NO: 222786 - RNA, 32 nt, Homo Sapiens
ccagcccugcccggcgggcccggagccagagc

SEQ ID NO: 222787 - RNA, 32 nt, Homo Sapiens
uaaauggaaaauuaaaauggcaaaaaaggcaa

SEQ ID NO: 222788 - RNA, 32 nt, Homo Sapiens
ucaccgaugcaaacauuggaagauuauugaga

SEQ ID NO: 222789 - RNA, 32 nt, Homo Sapiens
gggagggagccgcuggcugcugccggaggugg

SEQ ID NO: 222790 - RNA, 32 nt, Homo Sapiens
ugauuuucccccuuauugaugggacugauauu

SEQ ID NO: 222791 - RNA, 32 nt, Homo Sapiens
ucgcccucuagauguccaagugccacgugaac

SEQ ID NO: 222792 - RNA, 32 nt, Homo Sapiens
cauacugauuccaucauuuaaucuuuaaaagu

SEQ ID NO: 222793 - RNA, 32 nt, Homo Sapiens
ccuuacaaccucaucaugaaggacgcucauua

SEQ ID NO: 222794 - RNA, 32 nt, Homo Sapiens
uggcggcagcagcggcagccguccgucacucc

SEQ ID NO: 222795 - RNA, 32 nt, Homo Sapiens
ucggggaugaauugcucgcuuuaaaaaugcug

SEQ ID NO: 222796 - RNA, 32 nt, Homo Sapiens
ggagccccgaggacggacucggcugguucugg

SEQ ID NO: 222797 - RNA, 32 nt, Homo Sapiens
ggagagaccgacagaaggugagcacugugggc

SEQ ID NO: 222798 - RNA, 32 nt, Homo Sapiens
ugauuccuugacuccuaugaccuuaugacccc

SEQ ID NO: 222799 - RNA, 32 nt, Homo Sapiens
ugauucugaacucgguuuuucuugacauaccu

SEQ ID NO: 222800 - RNA, 32 nt, Homo Sapiens
gagggcagggauuuuugucuguuguguucucu

SEQ ID NO: 222801 - RNA, 32 nt, Homo Sapiens
uuuaacgucucuucuuccauuacaaugugugu

SEQ ID NO: 222802 - RNA, 32 nt, Homo Sapiens
cuuuuuaaauaaauugcugaaauuuggcugga

SEQ ID NO: 222803 - RNA, 32 nt, Homo Sapiens
gggccuuccuuccuggccuuagccaccuggcu

SEQ ID NO: 222804 - RNA, 32 nt, Homo Sapiens
ggagugcgggugcacagcgcgggacuggcagg

SEQ ID NO: 222805 - RNA, 32 nt, Homo Sapiens
cuccucagccaggcccacauggagcccuccca

SEQ ID NO: 222806 - RNA, 32 nt, Homo Sapiens
auuagaccuugauuuuaaauccaagcaagcuu

SEQ ID NO: 222807 - RNA, 32 nt, Homo Sapiens
gcacugcgccguuugggaacgcaacuuugagg

SEQ ID NO: 222808 - RNA, 32 nt, Homo Sapiens
gugaccccgcggcggccugagggacgcucccu

SEQ ID NO: 222809 - RNA, 32 nt, Homo Sapiens
uccuucagaaaagaaacacugggucccauagc

SEQ ID NO: 222810 - RNA, 31 nt, Homo Sapiens
accgguaacugcccucugccccgccccgcuc

SEQ ID NO: 222811 - RNA, 32 nt, Homo Sapiens
uacugcacagaaaagaauuuuuaguugagaaa

SEQ ID NO: 222812 - RNA, 32 nt, Homo Sapiens
cuggcauaggagcccccucccugcuguggucc

SEQ ID NO: 222813 - RNA, 32 nt, Homo Sapiens
guuacacuuucagaucccuuugugcucaagau

SEQ ID NO: 222814 - RNA, 32 nt, Homo Sapiens
cuuaccggaucccuccauauuaucaugggugu

SEQ ID NO: 222815 - RNA, 32 nt, Homo Sapiens
uccaggaggagcuagccaaacaacaacaaaaa

SEQ ID NO: 222816 - RNA, 32 nt, Homo Sapiens
caccuuuccuuccaggcccuaagcacgugcag

SEQ ID NO: 222817 - RNA, 30 nt, Homo Sapiens
guggggaauaucccuugucuaaaugcagag

SEQ ID NO: 222818 - RNA, 32 nt, Homo Sapiens
ccaccauccaacaaaaggauuacgucugcauc

SEQ ID NO: 222819 - RNA, 32 nt, Homo Sapiens
cagggcagggcagccagugguccagggauggc

SEQ ID NO: 222820 - RNA, 32 nt, Homo Sapiens
agauaauuuuguacugugcuguuuccuaaauc

SEQ ID NO: 222821 - RNA, 32 nt, Homo Sapiens
aagggggaaccuucugccccagcuuugcauga

SEQ ID NO: 222822 - RNA, 32 nt, Homo Sapiens
cagccuugcucuucuuguuuuauccuuaucaa

SEQ ID NO: 222823 - RNA, 32 nt, Homo Sapiens
aacucaugagaaauccuuuucuuaauacagca

SEQ ID NO: 222824 - RNA, 32 nt, Homo Sapiens
ggcgaccccucgcuuccccagucagcgucugc

SEQ ID NO: 222825 - RNA, 32 nt, Homo Sapiens
uuauucagauauauuucaaaaagcaugaauau

SEQ ID NO: 222826 - RNA, 32 nt, Homo Sapiens
aucaucauuucugucuucugcugcuggggaua

SEQ ID NO: 222827 - RNA, 32 nt, Homo Sapiens
aaaggaagaacaaaaggauaaauauaauacaa

SEQ ID NO: 222828 - RNA, 32 nt, Homo Sapiens
ccuguggccuguggggcugaaugugggcccgg

SEQ ID NO: 222829 - RNA, 32 nt, Homo Sapiens
cugugaacuggggauuaaaccagaacgagugg

SEQ ID NO: 222830 - RNA, 32 nt, Homo Sapiens
aucucggccauguccggcugcacgggcgccuu

SEQ ID NO: 222831 - RNA, 32 nt, Homo Sapiens
aaagaaaggaccagucuucacuuucugcauua

SEQ ID NO: 222832 - RNA, 31 nt, Homo Sapiens
gagccuguucgagccauucagguaaauuggu

SEQ ID NO: 222833 - RNA, 32 nt, Homo Sapiens
cguauguuggguagaacagagguggagaaaag

SEQ ID NO: 222834 - RNA, 32 nt, Homo Sapiens
augcaguuauuuaugaaaugguuuuccuuccu

SEQ ID NO: 222835 - RNA, 32 nt, Homo Sapiens
cugucaagggcugcugguuggugcugguacaa

SEQ ID NO: 222836 - RNA, 32 nt, Homo Sapiens
ccagcccggcagucgcaggacccggccgccag

SEQ ID NO: 222837 - RNA, 32 nt, Homo Sapiens
uauaacuacucuagguuguucuucuaaauuug

SEQ ID NO: 222838 - RNA, 32 nt, Homo Sapiens
cagcaauuuccguuggcacgguugagcaguga

SEQ ID NO: 222839 - RNA, 32 nt, Homo Sapiens
cugauagaacagacuuuacuuuucuagcccag

SEQ ID NO: 222840 - RNA, 32 nt, Homo Sapiens
cagguuccagggaaaaugaugucauguggugg

SEQ ID NO: 222841 - RNA, 32 nt, Homo Sapiens
ccaacuuauccuccccccaguugguuucuauu

SEQ ID NO: 222842 - RNA, 32 nt, Homo Sapiens
aggccguguuuccaacauccucucaucccagg

SEQ ID NO: 222843 - RNA, 32 nt, Homo Sapiens
cgcgcucuacggaggcuucuccauugucccug

SEQ ID NO: 222844 - RNA, 32 nt, Homo Sapiens
aucuccaaucagcugcuuugaccuccagggua

SEQ ID NO: 222845 - RNA, 32 nt, Homo Sapiens
aaugaucagaucuggaaacaggcugccauaac

SEQ ID NO: 222846 - RNA, 32 nt, Homo Sapiens
gauucccggagcaaagggaggggagggggccc

SEQ ID NO: 222847 - RNA, 32 nt, Homo Sapiens
gggaagugacaauuuuauuccauuccagagaa

SEQ ID NO: 222848 - RNA, 32 nt, Homo Sapiens
guucucauagaauuuucucuucaccacucaau

SEQ ID NO: 222849 - RNA, 28 nt, Homo Sapiens
acaugugaagucuuacauuugaaaaacc

SEQ ID NO: 222850 - RNA, 32 nt, Homo Sapiens
agaagaaagcccucaaucaaaagcagaaacag

SEQ ID NO: 222851 - RNA, 32 nt, Homo Sapiens
uauuaaaacagaacuguguacuguauaucugu

SEQ ID NO: 222852 - RNA, 32 nt, Homo Sapiens
uccuggggcgaggaggggagggggcggcaugg

SEQ ID NO: 222853 - RNA, 32 nt, Homo Sapiens
cgcugcuccgucccuuuccccagccagacacu

SEQ ID NO: 222854 - RNA, 32 nt, Homo Sapiens
auuugguaauaaagugcuuauuugcagauaac

SEQ ID NO: 222855 - RNA, 32 nt, Homo Sapiens
gaaacgccggcugggcgccggggaggacgaug

SEQ ID NO: 222856 - RNA, 32 nt, Homo Sapiens
aaacagagguuacaaguaaaguagcaauccca

SEQ ID NO: 222857 - RNA, 32 nt, Homo Sapiens
caacagagggauuuuuuaguauccucagcacu

SEQ ID NO: 222858 - RNA, 32 nt, Homo Sapiens
accauggccauugugcagacucugccagugcc

SEQ ID NO: 222859 - RNA, 32 nt, Homo Sapiens
ccgcugugucccgagcacacgugcugaccgca

SEQ ID NO: 222860 - RNA, 32 nt, Homo Sapiens
gugauauuugaaaugaguuaugaaguugcaac

SEQ ID NO: 222861 - RNA, 32 nt, Homo Sapiens
ugcgggcuugugccaugugugaaacagggaag

SEQ ID NO: 222862 - RNA, 32 nt, Homo Sapiens
aaggugugaccucuccuuugccugcauaccuc

SEQ ID NO: 222863 - RNA, 32 nt, Homo Sapiens
agccucuuucuuugucccacauauacauucua

SEQ ID NO: 222864 - RNA, 32 nt, Homo Sapiens
uugauuuuuuaaaacaauguuuacugcgauuu

SEQ ID NO: 222865 - RNA, 32 nt, Homo Sapiens
cccuccgcucccuccugucaccuaccagggca

SEQ ID NO: 222866 - RNA, 32 nt, Homo Sapiens
guacaauuuaaaauauuuguaaaauaucacug

SEQ ID NO: 222867 - RNA, 32 nt, Homo Sapiens
aaugaaaucauccucagaggaugaagccacca

SEQ ID NO: 222868 - RNA, 32 nt, Homo Sapiens
gagaagaugaugcacagauagagaggcaccag

SEQ ID NO: 222869 - RNA, 32 nt, Homo Sapiens
acaugaagaacaauuucacgaagaggauacac

SEQ ID NO: 222870 - RNA, 32 nt, Homo Sapiens
uucuuguuugaaaacaguuauuuggugacuag

SEQ ID NO: 222871 - RNA, 32 nt, Homo Sapiens
cugcuucggaagcagacaucuggggacacagc

SEQ ID NO: 222872 - RNA, 32 nt, Homo Sapiens
gagaacccagacuuaaaauuuuauguauuauu

SEQ ID NO: 222873 - RNA, 32 nt, Homo Sapiens
agcugggcgcaguggcgggcgccuguaguccc

SEQ ID NO: 222874 - RNA, 32 nt, Homo Sapiens
aaaauacaaaaauuagccaggugugguggcgg

SEQ ID NO: 222875 - RNA, 32 nt, Homo Sapiens
acauccgcaccuaccaccccccggcccagcuc

SEQ ID NO: 222876 - RNA, 32 nt, Homo Sapiens
aggcccugcaacgcagagccugcuuaugugga

SEQ ID NO: 222877 - RNA, 32 nt, Homo Sapiens
ggacugcgcgccacgcucugggguccggcgcc

SEQ ID NO: 222878 - RNA, 32 nt, Homo Sapiens
ccuugcccgccgccgccucccggagcagcaug

SEQ ID NO: 222879 - RNA, 32 nt, Homo Sapiens
uugcacaacaaugugaauauaaucaacacuau

SEQ ID NO: 222880 - RNA, 32 nt, Homo Sapiens
uuggaugauuaaaaguuuuuuuauuagaaugu

SEQ ID NO: 222881 - RNA, 32 nt, Homo Sapiens
aauggggccgacgaggccuagggcccuccuac

SEQ ID NO: 222882 - RNA, 31 nt, Homo Sapiens
ugccccccacccuggcuuggagcacacccug

SEQ ID NO: 222883 - RNA, 32 nt, Homo Sapiens
agggcccccucggcuccgacccgcccuccuca

SEQ ID NO: 222884 - RNA, 32 nt, Homo Sapiens
aagaaaaauaauuuauacuaaauuuaguaaaa

SEQ ID NO: 222885 - RNA, 32 nt, Homo Sapiens
aauuguuaacugaguaccaggguaccuuuaaa

SEQ ID NO: 222886 - RNA, 32 nt, Homo Sapiens
uauaauagcuuuuuuucuuuauuuucaaaaug

SEQ ID NO: 222887 - RNA, 32 nt, Homo Sapiens
aggggaucuaaauccucauuuaucucuucuau

SEQ ID NO: 222888 - RNA, 32 nt, Homo Sapiens
auagcacuuacccagauccuuucccagcauag

SEQ ID NO: 222889 - RNA, 32 nt, Homo Sapiens
cagcgguggccgcggggaaugugacaucagcg

SEQ ID NO: 222890 - RNA, 32 nt, Homo Sapiens
cuuuagaaauuugaauggcuuggugaggaaag

SEQ ID NO: 222891 - RNA, 32 nt, Homo Sapiens
ugccugcccaggcccgccucuccggccugccu

SEQ ID NO: 222892 - RNA, 32 nt, Homo Sapiens
aguccagggaccuugacccagccccucucagc

SEQ ID NO: 222893 - RNA, 32 nt, Homo Sapiens
uuucaaagaaugcuucaugcccaaaauaccag

SEQ ID NO: 222894 - RNA, 32 nt, Homo Sapiens
gcaguucaaaaauauuaaauggaaaauuccag

SEQ ID NO: 222895 - RNA, 32 nt, Homo Sapiens
ggcuaguuuuuuaugcuuuguaccuagaaaac

SEQ ID NO: 222896 - RNA, 32 nt, Homo Sapiens
gugguacaagguuuuuaacauggauuguaaac

SEQ ID NO: 222897 - RNA, 32 nt, Homo Sapiens
agcggagagcgcggucccgggucggagccugg

SEQ ID NO: 222898 - RNA, 32 nt, Homo Sapiens
caaccuagaaaucuguaugaagcaaaaauauc

SEQ ID NO: 222899 - RNA, 32 nt, Homo Sapiens
augcuuuguauaauucauuuuaucaaaaauua

SEQ ID NO: 222900 - RNA, 30 nt, Homo Sapiens
uggguuuguuuuuugggggaauuauugguu

SEQ ID NO: 222901 - RNA, 32 nt, Homo Sapiens
ucuuuccguauggguagcuuggcacuucccuc

SEQ ID NO: 222902 - RNA, 32 nt, Homo Sapiens
ccggaacccgcgguuauaaaguaaaggaaccc

SEQ ID NO: 222903 - RNA, 32 nt, Homo Sapiens
uggacacuuucauuccaccuccuaacaaagag

SEQ ID NO: 222904 - RNA, 32 nt, Homo Sapiens
uuuuugcucuuuccuauauaaugaauagauga

SEQ ID NO: 222905 - RNA, 32 nt, Homo Sapiens
uguuccugccccacccuaacugaucaauguac

SEQ ID NO: 222906 - RNA, 32 nt, Homo Sapiens
ugcugugaugguucauuuugcacgucaccuug

SEQ ID NO: 222907 - RNA, 32 nt, Homo Sapiens
uggugccccagcagcuggcacacuggcaccug

SEQ ID NO: 222908 - RNA, 32 nt, Homo Sapiens
uagggaaaaaauuuaaggagguauucacacuc

SEQ ID NO: 222909 - RNA, 32 nt, Homo Sapiens
uuaaggccugcgccucccaucccagggcagcc

SEQ ID NO: 222910 - RNA, 32 nt, Homo Sapiens
ucucucuccccgcuccccagccucgggcgagg

SEQ ID NO: 222911 - RNA, 32 nt, Homo Sapiens
gccuccgcaccucuggccggcuccggcucagu

SEQ ID NO: 222912 - RNA, 32 nt, Homo Sapiens
augucauuuucagauccuuccaaacucucuag

SEQ ID NO: 222913 - RNA, 32 nt, Homo Sapiens
gccucaccuccgccugcaggaccuccucuugg

SEQ ID NO: 222914 - RNA, 32 nt, Homo Sapiens
gguaggguuaguagguaggguucguagguagg

SEQ ID NO: 222915 - RNA, 32 nt, Homo Sapiens
cagcugcggccaggccugcgggccccugguga

SEQ ID NO: 222916 - RNA, 32 nt, Homo Sapiens
cuggagcgcggccucuccuccucccuucccgc

SEQ ID NO: 222917 - RNA, 32 nt, Homo Sapiens
aacuacccauccaugagcugccaggcagucaa

SEQ ID NO: 222918 - RNA, 32 nt, Homo Sapiens
aggaaacaaagcaggaugaugacugaucuugg

SEQ ID NO: 222919 - RNA, 32 nt, Homo Sapiens
ggacaagagcuggguuuagaacuuggaucacg

SEQ ID NO: 222920 - RNA, 32 nt, Homo Sapiens
uuaaauuuucuuugugacuaaauagaugucau

SEQ ID NO: 222921 - RNA, 32 nt, Homo Sapiens
gcgcugccaacccgccacccagcccauggcga

SEQ ID NO: 222922 - RNA, 32 nt, Homo Sapiens
ugaaguguugguaucugagaauaucugucacu

SEQ ID NO: 222923 - RNA, 32 nt, Homo Sapiens
cccaagucucccacccagaacucuggccaaaa

SEQ ID NO: 222924 - RNA, 32 nt, Homo Sapiens
auuccccaaccaaggacagucuauaccaagcu

SEQ ID NO: 222925 - RNA, 32 nt, Homo Sapiens
gggcuuucggucccuuucuuuuaaugcccauc

SEQ ID NO: 222926 - RNA, 32 nt, Homo Sapiens
acaggccuuguaccucuccaggccgauuuuuc

SEQ ID NO: 222927 - RNA, 32 nt, Homo Sapiens
ggguccgccgcgcgccagagccagagucgcag

SEQ ID NO: 222928 - RNA, 32 nt, Homo Sapiens
ccuucucaaugagaaaauaaauguuuuauuau

SEQ ID NO: 222929 - RNA, 32 nt, Homo Sapiens
gcuuccacaaugucuguaaagauugccuacag

SEQ ID NO: 222930 - RNA, 32 nt, Homo Sapiens
cggaggaguuccgggggccaggcggccgccgc

SEQ ID NO: 222931 - RNA, 32 nt, Homo Sapiens
ucuucugcacagcuccuccccugcuacugcug

SEQ ID NO: 222932 - RNA, 32 nt, Homo Sapiens
cagccggggagagcaggacgcgccaucuccau

SEQ ID NO: 222933 - RNA, 32 nt, Homo Sapiens
ggaggggagggagaugucuuguuguggggacu

SEQ ID NO: 222934 - RNA, 32 nt, Homo Sapiens
agcaugcacacaaugucaacacugcuuuuuag

SEQ ID NO: 222935 - RNA, 32 nt, Homo Sapiens
ggugauugcgcgggccuaagauguguccuggg

SEQ ID NO: 222936 - RNA, 32 nt, Homo Sapiens
cugccuucuucuccucccccaacacugcaggg

SEQ ID NO: 222937 - RNA, 32 nt, Homo Sapiens
cuggcagagggagaggacaggaggaggagccu

SEQ ID NO: 222938 - RNA, 32 nt, Homo Sapiens
ggaauacuaaaaucauuacaagguauggauuu

SEQ ID NO: 222939 - RNA, 32 nt, Homo Sapiens
cuucuaugguuucuucuaauucuuauugcuua

SEQ ID NO: 222940 - RNA, 32 nt, Homo Sapiens
cagcgggaaggggguggcgcucaucacugcug

SEQ ID NO: 222941 - RNA, 32 nt, Homo Sapiens
uugguagcucuaagaaaauaucuugcaagcuc

SEQ ID NO: 222942 - RNA, 32 nt, Homo Sapiens
uucaauuaacaaaguaggaaguugagcacaac

SEQ ID NO: 222943 - RNA, 32 nt, Homo Sapiens
uucuuuuuacacaaaacaagggcuuagaguau

SEQ ID NO: 222944 - RNA, 32 nt, Homo Sapiens
auacauauauauaacauuagaauguguguacu

SEQ ID NO: 222945 - RNA, 32 nt, Homo Sapiens
uuccgucagccucccaggauggcagccccuga

SEQ ID NO: 222946 - RNA, 32 nt, Homo Sapiens
aaaucuaaaguagcuauucaguuuucagauuu

SEQ ID NO: 222947 - RNA, 32 nt, Homo Sapiens
gaaagaaauuguuuuucugaaaguaucaccaa

SEQ ID NO: 222948 - RNA, 31 nt, Homo Sapiens
gccugccugccgguugucgguggccccgaug

SEQ ID NO: 222949 - RNA, 32 nt, Homo Sapiens
uuucuucaguuauaaauaugccauacaccuuu

SEQ ID NO: 222950 - RNA, 32 nt, Homo Sapiens
ccaggggcucaagccgcacgugagaaagucug

SEQ ID NO: 222951 - RNA, 32 nt, Homo Sapiens
gauagcgugaaauuaaagauuacagagauaua

SEQ ID NO: 222952 - RNA, 32 nt, Homo Sapiens
cagucauuuuaaaaugguggcugaauuuucca

SEQ ID NO: 222953 - RNA, 32 nt, Homo Sapiens
ugcccgggacgcccccucccaggggucaggcu

SEQ ID NO: 222954 - RNA, 32 nt, Homo Sapiens
uccuuuuuuguccaauguauuccuuguucuuu

SEQ ID NO: 222955 - RNA, 32 nt, Homo Sapiens
aagaacugagaagaaaaauguauaauuuuauc

SEQ ID NO: 222956 - RNA, 32 nt, Homo Sapiens
uaagcuaaaaauuccuuuuuaucaaaguguac

SEQ ID NO: 222957 - RNA, 32 nt, Homo Sapiens
ugucauccuggccacugauggcugguuuuaug

SEQ ID NO: 222958 - RNA, 31 nt, Homo Sapiens
auuugcagcgcaagcagccuagcgugcggcc

SEQ ID NO: 222959 - RNA, 32 nt, Homo Sapiens
cgugucccgagcuuagauucuguaugcgguga

SEQ ID NO: 222960 - RNA, 32 nt, Homo Sapiens
gugcaaaggcucaagaggcauacuggaaguac

SEQ ID NO: 222961 - RNA, 32 nt, Homo Sapiens
augccagucuugcucacggaaccaucacauac

SEQ ID NO: 222962 - RNA, 32 nt, Homo Sapiens
gucuuuacauauauuuucuccacuucuaacug

SEQ ID NO: 222963 - RNA, 32 nt, Homo Sapiens
auucaucagcucuucugcaucccggccuucau

SEQ ID NO: 222964 - RNA, 32 nt, Homo Sapiens
ccugguguggguggaguggggacaagcggugg

SEQ ID NO: 222965 - RNA, 32 nt, Homo Sapiens
cauugccauccuguugcacugcagcuugugua

SEQ ID NO: 222966 - RNA, 32 nt, Homo Sapiens
aaaauuuuauugucugguucuaccacaaaaaa

SEQ ID NO: 222967 - RNA, 32 nt, Homo Sapiens
guaucuauuauguaccucuuaucuauuguguu

SEQ ID NO: 222968 - RNA, 32 nt, Homo Sapiens
aagacauuaucucauuuuuuuauggcugcaua

SEQ ID NO: 222969 - RNA, 32 nt, Homo Sapiens
uacaggcgugcaccaccacaccuggcuaacuu

SEQ ID NO: 222970 - RNA, 32 nt, Homo Sapiens
acaccgcauagggucccccaguccuuccugca

SEQ ID NO: 222971 - RNA, 32 nt, Homo Sapiens
aucaauguuauuuauuugauuguguggucgau

SEQ ID NO: 222972 - RNA, 32 nt, Homo Sapiens
cugccuaugaaguucauuguguagaaggauuu

SEQ ID NO: 222973 - RNA, 32 nt, Homo Sapiens
gcucagucaacacauauuuauuacacacuuag

SEQ ID NO: 222974 - RNA, 32 nt, Homo Sapiens
uuuaggauauuguaaaucuuugcuaaguagug

SEQ ID NO: 222975 - RNA, 32 nt, Homo Sapiens
gcggccgcacaaggaccacaaccggggccgua

SEQ ID NO: 222976 - RNA, 32 nt, Homo Sapiens
gucaaugccuucuuguauauguaauucaauac

SEQ ID NO: 222977 - RNA, 32 nt, Homo Sapiens
gcaagguaacucgccaaagccuaugaggcuag

SEQ ID NO: 222978 - RNA, 32 nt, Homo Sapiens
gggccuggaggaggcgccgcgcggccagggag

SEQ ID NO: 222979 - RNA, 32 nt, Homo Sapiens
auagcagaaagauaaacaaauguugggauguu

SEQ ID NO: 222980 - RNA, 32 nt, Homo Sapiens
cagccggccccggggugucccgaaccccgcag

SEQ ID NO: 222981 - RNA, 32 nt, Homo Sapiens
gaugauauuguacagcuucuaauucacuuuuc

SEQ ID NO: 222982 - RNA, 27 nt, Homo Sapiens
ucugagcucuucuucagccucaguucc

SEQ ID NO: 222983 - RNA, 32 nt, Homo Sapiens
gacuuccagccccacaccucugacaacccggg

SEQ ID NO: 222984 - RNA, 32 nt, Homo Sapiens
cuggcccagcagccucuucucugagcuccaug

SEQ ID NO: 222985 - RNA, 32 nt, Homo Sapiens
aaagagacacagagacaccucuggcuaccuag

SEQ ID NO: 222986 - RNA, 32 nt, Homo Sapiens
aaccucccacuuugucuguacauacuggccuc

SEQ ID NO: 222987 - RNA, 32 nt, Homo Sapiens
acauucuguauauuuuuguuguaacauauuau

SEQ ID NO: 222988 - RNA, 32 nt, Homo Sapiens
uaaaagaccugcaacauugaaaaaacucauuu

SEQ ID NO: 222989 - RNA, 32 nt, Homo Sapiens
gaggaugcaggaagaggagucugggaggaccc

SEQ ID NO: 222990 - RNA, 32 nt, Homo Sapiens
cugaaaggcugcgugagaagauaucucgggcc

SEQ ID NO: 222991 - RNA, 32 nt, Homo Sapiens
uagagagggcccguggaccaucgcugucauga

SEQ ID NO: 222992 - RNA, 32 nt, Homo Sapiens
auucugguaagacuuuuuuccuuccuuucccu

SEQ ID NO: 222993 - RNA, 32 nt, Homo Sapiens
ucaguccccagcagagccugugucucaccccc

SEQ ID NO: 222994 - RNA, 32 nt, Homo Sapiens
accucgggcugcaagagcugcagacccguuca

SEQ ID NO: 222995 - RNA, 32 nt, Homo Sapiens
caccaaaauauuagaggacaaauauuuuuaga

SEQ ID NO: 222996 - RNA, 32 nt, Homo Sapiens
auuucgaucgcccgcggucccccgucucccgg

SEQ ID NO: 222997 - RNA, 32 nt, Homo Sapiens
aaagaauuuuaagaguagcaguauauaugucu

SEQ ID NO: 222998 - RNA, 32 nt, Homo Sapiens
aguuuguuauuuauagaaaugcagaaguuugg

SEQ ID NO: 222999 - RNA, 30 nt, Homo Sapiens
gagacauggaccgcggcgagcaaggucugc

SEQ ID NO: 223000 - RNA, 32 nt, Homo Sapiens
caguuuuccuuccuuaaccaugggugcuagua

SEQ ID NO: 223001 - RNA, 32 nt, Homo Sapiens
aagagacccgguuucuaaucccugcucuguca

SEQ ID NO: 223002 - RNA, 32 nt, Homo Sapiens
cagggaaugggagaggaggaugggaaguagac

SEQ ID NO: 223003 - RNA, 32 nt, Homo Sapiens
cggcggagaccucucccgccagcccuucuuuc

SEQ ID NO: 223004 - RNA, 32 nt, Homo Sapiens
uugugucugccccugcccugccugggacccac

SEQ ID NO: 223005 - RNA, 32 nt, Homo Sapiens
guccaccuggugccggcgugauugccccgggc

SEQ ID NO: 223006 - RNA, 32 nt, Homo Sapiens
gaaaagucauauuuuccuucuguuuaaacuuc

SEQ ID NO: 223007 - RNA, 32 nt, Homo Sapiens
caucuggcugucuagaauguggauuugauuca

SEQ ID NO: 223008 - RNA, 32 nt, Homo Sapiens
uagaauuguaaauucauagaacuucuuuuaua

SEQ ID NO: 223009 - RNA, 32 nt, Homo Sapiens
augaaauguccuuuugaauguuaggucaagaa

SEQ ID NO: 223010 - RNA, 32 nt, Homo Sapiens
gccaaggacgaaagcccucccuuggcuggccu

SEQ ID NO: 223011 - RNA, 32 nt, Homo Sapiens
agaagguugucauggaaaugcaccuguuccaa

SEQ ID NO: 223012 - RNA, 32 nt, Homo Sapiens
cggggaggagcuucccgcggccugcuccgcca

SEQ ID NO: 223013 - RNA, 32 nt, Homo Sapiens
uacagacgugagccaccacucccggcccauag

SEQ ID NO: 223014 - RNA, 32 nt, Homo Sapiens
ucuuuaaugcugugccuagcuuuauuuuucuu

SEQ ID NO: 223015 - RNA, 32 nt, Homo Sapiens
aauuuggaaaauuuaugaaccauuccaaaaau

SEQ ID NO: 223016 - RNA, 32 nt, Homo Sapiens
caagguuugugaugaugucuguacuaguuagc

SEQ ID NO: 223017 - RNA, 32 nt, Homo Sapiens
uccuguucaaaacaggauuugauugccuuaug

SEQ ID NO: 223018 - RNA, 31 nt, Homo Sapiens
gcgguaagggcgguggugcgggcguccgaau

SEQ ID NO: 223019 - RNA, 32 nt, Homo Sapiens
ccggggcccagaugggcgggggagcggccgga

SEQ ID NO: 223020 - RNA, 32 nt, Homo Sapiens
ucccuaauauauucuuauauguagagcaauaa

SEQ ID NO: 223021 - RNA, 32 nt, Homo Sapiens
ggcaagcccagacauggccuucugccugggga

SEQ ID NO: 223022 - RNA, 32 nt, Homo Sapiens
agaacuuccccuuuccucugguuuccuugucc

SEQ ID NO: 223023 - RNA, 32 nt, Homo Sapiens
cuccuaagcugauaucauuggcuuauuggaug

SEQ ID NO: 223024 - RNA, 32 nt, Homo Sapiens
aaccaaggaagauaaaacaaguugcauuuuua

SEQ ID NO: 223025 - RNA, 32 nt, Homo Sapiens
ucuuguaaauccaacacaaguuguuugguacu

SEQ ID NO: 223026 - RNA, 32 nt, Homo Sapiens
auucauugguaaaggauauauuccuuguucuu

SEQ ID NO: 223027 - RNA, 29 nt, Homo Sapiens
caucaauaaaguuguguuuuaagcagcag

SEQ ID NO: 223028 - RNA, 32 nt, Homo Sapiens
caaaaacaaggugggcuccagucucuuggcuu

SEQ ID NO: 223029 - RNA, 32 nt, Homo Sapiens
uagaucaaaaaggcaaaugauuuuauaaacaa

SEQ ID NO: 223030 - RNA, 32 nt, Homo Sapiens
gcgugaaaaugaauggaaguggcuggauggga

SEQ ID NO: 223031 - RNA, 32 nt, Homo Sapiens
auaacuucaaccaauguaaucaccaacaggga

SEQ ID NO: 223032 - RNA, 32 nt, Homo Sapiens
aaaagguuuugcaacaggaagcugagauugau

SEQ ID NO: 223033 - RNA, 30 nt, Homo Sapiens
cuccuggagcuugccaccagcuuggacuuc

SEQ ID NO: 223034 - RNA, 32 nt, Homo Sapiens
agacucuuucuuuaaccauuguauauuuucuu

SEQ ID NO: 223035 - RNA, 27 nt, Homo Sapiens
ccuagccucaucuucagccuucaguga

SEQ ID NO: 223036 - RNA, 32 nt, Homo Sapiens
auccgaagaaugcgacucuuggcggacagcgc

SEQ ID NO: 223037 - RNA, 32 nt, Homo Sapiens
augucuagucaccuuuuaaaauguaaacauuu

SEQ ID NO: 223038 - RNA, 32 nt, Homo Sapiens
ccggaaucccccagccccaccgacucucccag

SEQ ID NO: 223039 - RNA, 32 nt, Homo Sapiens
caccuccaucccuggacuuuggacccuuggcc

SEQ ID NO: 223040 - RNA, 32 nt, Homo Sapiens
ugagaacgaaguuuaaaauugugacucugauu

SEQ ID NO: 223041 - RNA, 32 nt, Homo Sapiens
ccugaaggaggagcuuccuuccccgguggagc

SEQ ID NO: 223042 - RNA, 32 nt, Homo Sapiens
agggaugcucugcgugugucucagcaccgcua

SEQ ID NO: 223043 - RNA, 32 nt, Homo Sapiens
ugcugugaaugcuuuaucuuggagauagaaaa

SEQ ID NO: 223044 - RNA, 32 nt, Homo Sapiens
gaaaugcuuucgguaggcacuccacggcugug

SEQ ID NO: 223045 - RNA, 32 nt, Homo Sapiens
auguuugaagauuguauguaauauaggugucu

SEQ ID NO: 223046 - RNA, 32 nt, Homo Sapiens
uaucuaagugggaccaaagaaaaaauagcgaa

SEQ ID NO: 223047 - RNA, 32 nt, Homo Sapiens
ugggcacaaaaaucuucaugagcaauauuucu

SEQ ID NO: 223048 - RNA, 32 nt, Homo Sapiens
uggcuuuucuuacucuuuucuguuaguagauu

SEQ ID NO: 223049 - RNA, 32 nt, Homo Sapiens
cuaccaacaaaguucaaguggcaucauuuuau

SEQ ID NO: 223050 - RNA, 32 nt, Homo Sapiens
gcgggcuaacgcggccgcuuuguucuucgcuu

SEQ ID NO: 223051 - RNA, 32 nt, Homo Sapiens
uggcugccugaagaggaaggaaacacccccaa

SEQ ID NO: 223052 - RNA, 32 nt, Homo Sapiens
gaagccaugcuguuaacaguuuaucucaagua

SEQ ID NO: 223053 - RNA, 32 nt, Homo Sapiens
aaggcgggcggauuacuuaauacuuaagguca

SEQ ID NO: 223054 - RNA, 32 nt, Homo Sapiens
ggucaucguccucagucccugccugcaacuag

SEQ ID NO: 223055 - RNA, 32 nt, Homo Sapiens
uuuuaaaaauuauuuuuguggacuuggguauc

SEQ ID NO: 223056 - RNA, 32 nt, Homo Sapiens
aauuuauccuuugguuagcauuuuggaaggcc

SEQ ID NO: 223057 - RNA, 32 nt, Homo Sapiens
gucggugucccucccacccccauguaugcugc

SEQ ID NO: 223058 - RNA, 32 nt, Homo Sapiens
uuucuuuucuucccuuuagugauuucaguagu

SEQ ID NO: 223059 - RNA, 32 nt, Homo Sapiens
ggcauccccuggaccuuccucgacuuuggccu

SEQ ID NO: 223060 - RNA, 32 nt, Homo Sapiens
agauugccucugacuuccuccuccccuggguu

SEQ ID NO: 223061 - RNA, 32 nt, Homo Sapiens
ugcuggccaaucagugucaucuccuggguaaa

SEQ ID NO: 223062 - RNA, 31 nt, Homo Sapiens
ggggcaaagcacggcgccccccgcgcggguc

SEQ ID NO: 223063 - RNA, 32 nt, Homo Sapiens
aaacaaacaaacaaacaaaaaaccagaaugca

SEQ ID NO: 223064 - RNA, 32 nt, Homo Sapiens
cugcccggccugccucccaccuggaagucugg

SEQ ID NO: 223065 - RNA, 32 nt, Homo Sapiens
gggacggauugugaauucagagcugaauaagg

SEQ ID NO: 223066 - RNA, 32 nt, Homo Sapiens
guugacuacauauuuggcucucugccuucucu

SEQ ID NO: 223067 - RNA, 32 nt, Homo Sapiens
augagagugggcaaccugucagacauuacugg

SEQ ID NO: 223068 - RNA, 32 nt, Homo Sapiens
aaacuuuacaaccugaugucauauuccauuuu

SEQ ID NO: 223069 - RNA, 31 nt, Homo Sapiens
gagcgcugggcgguguggagcgggcccgcca

SEQ ID NO: 223070 - RNA, 32 nt, Homo Sapiens
cgcugcugcucgccgagcucccggagcugggu

SEQ ID NO: 223071 - RNA, 32 nt, Homo Sapiens
ccucacggggguggagggagccggagccugcc

SEQ ID NO: 223072 - RNA, 32 nt, Homo Sapiens
auccuuucuccuucugaacuagccguugcuca

SEQ ID NO: 223073 - RNA, 32 nt, Homo Sapiens
uucaugugcagggcuauucuuaagggacauca

SEQ ID NO: 223074 - RNA, 32 nt, Homo Sapiens
aagucuggggccuggggauuuuagggaccagc

SEQ ID NO: 223075 - RNA, 32 nt, Homo Sapiens
ggggcaccuggggaggcacagcagccaagugg

SEQ ID NO: 223076 - RNA, 32 nt, Homo Sapiens
uuuaagucuuauuuuuacuguuuauauauuug

SEQ ID NO: 223077 - RNA, 32 nt, Homo Sapiens
guugcaccaggguacugcagccggggccgcgu

SEQ ID NO: 223078 - RNA, 32 nt, Homo Sapiens
gcggggguguugcgguggcucugagggaugag

SEQ ID NO: 223079 - RNA, 32 nt, Homo Sapiens
agugugagugacaaagugaaauuuagaaguga

SEQ ID NO: 223080 - RNA, 23 nt, Homo Sapiens
gcgugcgaggggggcggggagaa

SEQ ID NO: 223081 - RNA, 32 nt, Homo Sapiens
aaccaucgugauuugucuuuucaugcagauua

SEQ ID NO: 223082 - RNA, 32 nt, Homo Sapiens
augaauaugaacuuaauaaauaccauggaucc

SEQ ID NO: 223083 - RNA, 32 nt, Homo Sapiens
agacucaaugacagaagagaggcugggacuug

SEQ ID NO: 223084 - RNA, 32 nt, Homo Sapiens
ccugcaugaacuuccggcuacacgccauuccg

SEQ ID NO: 223085 - RNA, 32 nt, Homo Sapiens
ccuucucauccccaagcucuccagucaacaca

SEQ ID NO: 223086 - RNA, 32 nt, Homo Sapiens
ugagccacugcauccagcaucauuucuuuuca

SEQ ID NO: 223087 - RNA, 32 nt, Homo Sapiens
agccccagccagcagaucccaugcugccccua

SEQ ID NO: 223088 - RNA, 32 nt, Homo Sapiens
uuugacaucugugaugaugaugacuuuuaagg

SEQ ID NO: 223089 - RNA, 32 nt, Homo Sapiens
agcugaagaccaaguggaccgaaaagaagaug

SEQ ID NO: 223090 - RNA, 32 nt, Homo Sapiens
cgcagcaguccggacccaggcgcgccccuccc

SEQ ID NO: 223091 - RNA, 32 nt, Homo Sapiens
ccaggcccagcucagggucugcucuccucuga

SEQ ID NO: 223092 - RNA, 32 nt, Homo Sapiens
ucaauucauuaacuuauuaauuuuauaaugca

SEQ ID NO: 223093 - RNA, 32 nt, Homo Sapiens
acaagaggaucgucuguagacaggauaugauc

SEQ ID NO: 223094 - RNA, 30 nt, Homo Sapiens
gucugaaagugaacugcagaagcuuuccca

SEQ ID NO: 223095 - RNA, 32 nt, Homo Sapiens
ccagacagcaccagcucacagacgcucuuguu

SEQ ID NO: 223096 - RNA, 32 nt, Homo Sapiens
ucccgccccgcccggcccggcgccgacucugc

SEQ ID NO: 223097 - RNA, 32 nt, Homo Sapiens
ugcgauggugccaggaaaggguggagcggauu

SEQ ID NO: 223098 - RNA, 32 nt, Homo Sapiens
uuacaggugugagccaccgcguccagccagcu

SEQ ID NO: 223099 - RNA, 32 nt, Homo Sapiens
aucaugcccagcugcaacccuaauuuuucauu

SEQ ID NO: 223100 - RNA, 32 nt, Homo Sapiens
cccggagaagcaguaccgacaaugacgaagau

SEQ ID NO: 223101 - RNA, 32 nt, Homo Sapiens
cucccccgccucccugcccccgacauggcuca

SEQ ID NO: 223102 - RNA, 32 nt, Homo Sapiens
ucaaccacucuccuaaugaucagaacaaaagc

SEQ ID NO: 223103 - RNA, 32 nt, Homo Sapiens
ugucaccucuccuccuggcccccgcccaaugg

SEQ ID NO: 223104 - RNA, 32 nt, Homo Sapiens
ucugguugucccacccacucuucagaggcuag

SEQ ID NO: 223105 - RNA, 32 nt, Homo Sapiens
gaguagcagguuaccacucuggcaggccccag

SEQ ID NO: 223106 - RNA, 32 nt, Homo Sapiens
cucuucauuuuggggagggaaagggaagaugg

SEQ ID NO: 223107 - RNA, 29 nt, Homo Sapiens
gcauauauauguaugaagggcauguauau

SEQ ID NO: 223108 - RNA, 32 nt, Homo Sapiens
gcugcugcugccuggguaucugggaccccaga

SEQ ID NO: 223109 - RNA, 32 nt, Homo Sapiens
aagcauccauucucuaucacaccuuucauaug

SEQ ID NO: 223110 - RNA, 32 nt, Homo Sapiens
aaugaaucuucuacccuucucccacaauguau

SEQ ID NO: 223111 - RNA, 31 nt, Homo Sapiens
aggaugucacggagaaucuaucuaaucccac

SEQ ID NO: 223112 - RNA, 32 nt, Homo Sapiens
aagaggaagccauggcgcuccgagucaccagg

SEQ ID NO: 223113 - RNA, 32 nt, Homo Sapiens
cacccgcagcucagagcccgggacguccggag

SEQ ID NO: 223114 - RNA, 32 nt, Homo Sapiens
ucuguuuuuuuuuuuuuuuuuaacauuugugu

SEQ ID NO: 223115 - RNA, 32 nt, Homo Sapiens
gcaauuuuuuaaagggcagauauuaggcccga

SEQ ID NO: 223116 - RNA, 32 nt, Homo Sapiens
cuuaucgugggagggcucuugaucugugauuu

SEQ ID NO: 223117 - RNA, 32 nt, Homo Sapiens
ucccagcucuggcgacagcaucagcuuggccc

SEQ ID NO: 223118 - RNA, 32 nt, Homo Sapiens
caaucaagaacaaacguguacugaaacaguug

SEQ ID NO: 223119 - RNA, 32 nt, Homo Sapiens
cucucgggccucggcuacuuggacugcggcgg

SEQ ID NO: 223120 - RNA, 27 nt, Homo Sapiens
uuuacauccuucuuuaagcccaguggc

SEQ ID NO: 223121 - RNA, 32 nt, Homo Sapiens
aacaaaauacuaguaaucaaauauggaacaau

SEQ ID NO: 223122 - RNA, 32 nt, Homo Sapiens
agcgcuaagcaggaugccuucuccuggaggac

SEQ ID NO: 223123 - RNA, 32 nt, Homo Sapiens
cgccaguaaucccagcacuuuggagggcugaa

SEQ ID NO: 223124 - RNA, 32 nt, Homo Sapiens
cgccuguagucccagcacuuugggaggcagag

SEQ ID NO: 223125 - RNA, 32 nt, Homo Sapiens
ccuguccccuccccaaccccaagugccuucau

SEQ ID NO: 223126 - RNA, 32 nt, Homo Sapiens
gccaccgcacuccagccugggcgacagagcaa

SEQ ID NO: 223127 - RNA, 32 nt, Homo Sapiens
gccacugcacuccaaccugggcgacagaguga

SEQ ID NO: 223128 - RNA, 32 nt, Homo Sapiens
uucuuaaucgagaagcgagaaacuauacacuc

SEQ ID NO: 223129 - RNA, 32 nt, Homo Sapiens
acuuucaaggcacaucacuaaagucaaucagu

SEQ ID NO: 223130 - RNA, 32 nt, Homo Sapiens
cgagggaggagaagggaccugccuugugacau

SEQ ID NO: 223131 - RNA, 32 nt, Homo Sapiens
auaauauucucccccucccccaucuccagucu

SEQ ID NO: 223132 - RNA, 32 nt, Homo Sapiens
ccccucagcugucuccucccucccucuggaaa

SEQ ID NO: 223133 - RNA, 32 nt, Homo Sapiens
ggguucuccaaggccgguuucccggcccuuac

SEQ ID NO: 223134 - RNA, 32 nt, Homo Sapiens
cacgcuguggaggaggguggggguggggggaa

SEQ ID NO: 223135 - RNA, 32 nt, Homo Sapiens
cagcacgggagccagugccgcgcaggaaugug

SEQ ID NO: 223136 - RNA, 32 nt, Homo Sapiens
cugccccccgccagcccucaccaccugcccuc

SEQ ID NO: 223137 - RNA, 32 nt, Homo Sapiens
uguauuugauuuccuaaaaucaugucuugaaa

SEQ ID NO: 223138 - RNA, 32 nt, Homo Sapiens
ggacggacccucggcggacagguggucggcgu

SEQ ID NO: 223139 - RNA, 32 nt, Homo Sapiens
aucuuuguucuucacggcagcagcuaccuucc

SEQ ID NO: 223140 - RNA, 30 nt, Homo Sapiens
gcaucaguaggcggcggcguggggucuggc

SEQ ID NO: 223141 - RNA, 32 nt, Homo Sapiens
cugggcccugcgcgucaggucccggccugggg

SEQ ID NO: 223142 - RNA, 32 nt, Homo Sapiens
aauauaucuucagguuauuuucuuacuguugc

SEQ ID NO: 223143 - RNA, 32 nt, Homo Sapiens
gaugcuuucuucauuuaauauuuuccacaucc

SEQ ID NO: 223144 - RNA, 32 nt, Homo Sapiens
uuccgcaagugcuagagacaagggggucuaug

SEQ ID NO: 223145 - RNA, 32 nt, Homo Sapiens
gcagaguaguuugcauugacaccuguaguaau

SEQ ID NO: 223146 - RNA, 28 nt, Homo Sapiens
ucuuugaaagauuauuguuugucggccu

SEQ ID NO: 223147 - RNA, 32 nt, Homo Sapiens
accagguggguggaacaggcaugugacagagu

SEQ ID NO: 223148 - RNA, 32 nt, Homo Sapiens
uguauacaaaucauuugcucauuuuuaauuug

SEQ ID NO: 223149 - RNA, 31 nt, Homo Sapiens
agcacuugaaacacugccuuggggccuuggg

SEQ ID NO: 223150 - RNA, 32 nt, Homo Sapiens
augggaugaacaguguuuuaugcugggaaucu

SEQ ID NO: 223151 - RNA, 32 nt, Homo Sapiens
cacaugauaauggaugauacacaagcuucauu

SEQ ID NO: 223152 - RNA, 32 nt, Homo Sapiens
ggaucacgaccucagcagagccaggagagguu

SEQ ID NO: 223153 - RNA, 32 nt, Homo Sapiens
uagacagagucuugcuccgucgcgcaggcugu

SEQ ID NO: 223154 - RNA, 32 nt, Homo Sapiens
uugagcgggaggaggaggaggagcggcggcgc

SEQ ID NO: 223155 - RNA, 31 nt, Homo Sapiens
gaggacacgcacugcccuccauagacacaga

SEQ ID NO: 223156 - RNA, 32 nt, Homo Sapiens
aucacauuuaauauuucuuaaacuguaaaagu

SEQ ID NO: 223157 - RNA, 32 nt, Homo Sapiens
gaggagugaggagcguggcgccugcugggagg

SEQ ID NO: 223158 - RNA, 32 nt, Homo Sapiens
cucuucugaugauggaauuucgauuaaagugc

SEQ ID NO: 223159 - RNA, 32 nt, Homo Sapiens
ugcggagcugccgggcugagggacgccugguc

SEQ ID NO: 223160 - RNA, 32 nt, Homo Sapiens
gcuccccagcaccgcgcggcggggacgcgagc

SEQ ID NO: 223161 - RNA, 32 nt, Homo Sapiens
agccugugaugacauggugcugauucuggggg

SEQ ID NO: 223162 - RNA, 32 nt, Homo Sapiens
agcggcgagguccgcuuucaguguaugguuuu

SEQ ID NO: 223163 - RNA, 32 nt, Homo Sapiens
ucucuauugcccccaccaccaccacccccauc

SEQ ID NO: 223164 - RNA, 32 nt, Homo Sapiens
ucuggcaugcuccucagaauucuuccagccuc

SEQ ID NO: 223165 - RNA, 32 nt, Homo Sapiens
ucuuccagcguuucuccaucucacgcgcugcc

SEQ ID NO: 223166 - RNA, 32 nt, Homo Sapiens
aaagauuuuguguacucagagaacgaaaagga

SEQ ID NO: 223167 - RNA, 32 nt, Homo Sapiens
uucuugaaaggggaaacgucucccagaucgcu

SEQ ID NO: 223168 - RNA, 32 nt, Homo Sapiens
augggcuuuccacuucucacuuaucaagaccg

SEQ ID NO: 223169 - RNA, 32 nt, Homo Sapiens
aucacauacacacagagacguccaccaauugg

SEQ ID NO: 223170 - RNA, 32 nt, Homo Sapiens
aagccgaagaguccucccauccccucaucuuc

SEQ ID NO: 223171 - RNA, 32 nt, Homo Sapiens
uaauguauuuagugaagaucauaagaaauccu

SEQ ID NO: 223172 - RNA, 32 nt, Homo Sapiens
agcaucguguggagcugcggcccaccacgcug

SEQ ID NO: 223173 - RNA, 32 nt, Homo Sapiens
acagacaaggaccccgucuucagcugaacuaa

SEQ ID NO: 223174 - RNA, 32 nt, Homo Sapiens
auauguugaauugaucuagaaauuauuucaua

SEQ ID NO: 223175 - RNA, 32 nt, Homo Sapiens
ccacagauuggaagccaggucuuuccagaguc

SEQ ID NO: 223176 - RNA, 32 nt, Homo Sapiens
ccuuuucauuuuucuuuuuuuccucguuuccu

SEQ ID NO: 223177 - RNA, 32 nt, Homo Sapiens
uuguuauuuuuuacugauugugugcucugugu

SEQ ID NO: 223178 - RNA, 32 nt, Homo Sapiens
cauugugaauuauguaaaguuguuaagagaca

SEQ ID NO: 223179 - RNA, 32 nt, Homo Sapiens
caccgccaccgccacuaccaccgucugagucu

SEQ ID NO: 223180 - RNA, 32 nt, Homo Sapiens
acuaccacugguccacucuggaccucagacuc

SEQ ID NO: 223181 - RNA, 32 nt, Homo Sapiens
cuuugucaauacugaagucucugcuguaaucc

SEQ ID NO: 223182 - RNA, 32 nt, Homo Sapiens
cagaaucaaaaucaaaguucaucaugucauuc

SEQ ID NO: 223183 - RNA, 32 nt, Homo Sapiens
uuuaugacugagccuuuuccugucccaagagg

SEQ ID NO: 223184 - RNA, 32 nt, Homo Sapiens
uuuucuuuccuacuccuuuccacacauacgca

SEQ ID NO: 223185 - RNA, 32 nt, Homo Sapiens
uuuucuaucauuuaagccggggacaagccgga

SEQ ID NO: 223186 - RNA, 30 nt, Homo Sapiens
cccugaagucgccugccgccgccgccgccg

SEQ ID NO: 223187 - RNA, 32 nt, Homo Sapiens
ccuagucuaguauccuucccacuguaccacau

SEQ ID NO: 223188 - RNA, 32 nt, Homo Sapiens
ucuuauauaaaaaagccccaaaauauugaagu

SEQ ID NO: 223189 - RNA, 32 nt, Homo Sapiens
ugcccggcgcggugcuggcgggagcgcucaag

SEQ ID NO: 223190 - RNA, 32 nt, Homo Sapiens
gcgcgcggcuccugggcugucacagucucccg

SEQ ID NO: 223191 - RNA, 32 nt, Homo Sapiens
accuaaagguaacugcugccaauguuuucaug

SEQ ID NO: 223192 - RNA, 32 nt, Homo Sapiens
caugcuuuuuauuauuuuacccuucauuauuu

SEQ ID NO: 223193 - RNA, 32 nt, Homo Sapiens
ucaucauuucaccucuccagacuuccauuucu

SEQ ID NO: 223194 - RNA, 32 nt, Homo Sapiens
agccugugggcggucggccuucccuccuucgc

SEQ ID NO: 223195 - RNA, 32 nt, Homo Sapiens
cagcacucuguaaaauggaccaaucagugcuc

SEQ ID NO: 223196 - RNA, 32 nt, Homo Sapiens
cgcuccggccuggcccggcgccccggaccuga

SEQ ID NO: 223197 - RNA, 32 nt, Homo Sapiens
acauaucagguggucauugccuuucuccauug

SEQ ID NO: 223198 - RNA, 32 nt, Homo Sapiens
uuuucccuuuguuuuucuuuuuucuucuuuug

SEQ ID NO: 223199 - RNA, 32 nt, Homo Sapiens
auuacuuugaguuugcugggggaagcgggccg

SEQ ID NO: 223200 - RNA, 32 nt, Homo Sapiens
gcaucacccacccugcgauggagguuccaaga

SEQ ID NO: 223201 - RNA, 32 nt, Homo Sapiens
cguugccuggucugcugccccaagcucaaccc

SEQ ID NO: 223202 - RNA, 29 nt, Homo Sapiens
aaccaggaauguaugugugucuguguguc

SEQ ID NO: 223203 - RNA, 32 nt, Homo Sapiens
uccuauuccuuccuagcuucccugcaauaaaa

SEQ ID NO: 223204 - RNA, 32 nt, Homo Sapiens
uuggccgaagcagcugcagugggcagccaggg

SEQ ID NO: 223205 - RNA, 31 nt, Homo Sapiens
ccgcccugugggagccgcagagccugacgcu

SEQ ID NO: 223206 - RNA, 32 nt, Homo Sapiens
gugaugaacaaaacgucgucccugcccuccgg

SEQ ID NO: 223207 - RNA, 32 nt, Homo Sapiens
aucccuuguaaaauaauaauaauaauguugug

SEQ ID NO: 223208 - RNA, 32 nt, Homo Sapiens
ggcaggaggaagaugcggaggaggguggcaag

SEQ ID NO: 223209 - RNA, 30 nt, Homo Sapiens
gcuggaggacccugucgcccugaaggccug

SEQ ID NO: 223210 - RNA, 32 nt, Homo Sapiens
ccgcagcucgcgaggcaccucuccucgucccc

SEQ ID NO: 223211 - RNA, 32 nt, Homo Sapiens
ugauggugaugauguacagguggguuuuuggu

SEQ ID NO: 223212 - RNA, 32 nt, Homo Sapiens
gcaucuugugucuagcuauaauaaaaagaaac

SEQ ID NO: 223213 - RNA, 32 nt, Homo Sapiens
aguaguuuugagaaguuuuucuauauacguau

SEQ ID NO: 223214 - RNA, 27 nt, Homo Sapiens
cccgaccugguuuucagccccagcccc

SEQ ID NO: 223215 - RNA, 32 nt, Homo Sapiens
aucacaaaauuuguaucagaaaaacauuacaa

SEQ ID NO: 223216 - RNA, 32 nt, Homo Sapiens
aauaaaagguggaagugaaaaagaacaacacu

SEQ ID NO: 223217 - RNA, 32 nt, Homo Sapiens
augacaauauuggauuuguagguccugugcca

SEQ ID NO: 223218 - RNA, 32 nt, Homo Sapiens
aagacuaaacacacacuugaggcauucaugug

SEQ ID NO: 223219 - RNA, 32 nt, Homo Sapiens
gcacagcugagcccccugcagcucccaucucc

SEQ ID NO: 223220 - RNA, 32 nt, Homo Sapiens
ugccugcccucccugcccagcuguaaggaccg

SEQ ID NO: 223221 - RNA, 32 nt, Homo Sapiens
acgccuccucucuccgacccagcccuagacgc

SEQ ID NO: 223222 - RNA, 31 nt, Homo Sapiens
cacugccuguccuucucuccaaggaggcuuc

SEQ ID NO: 223223 - RNA, 32 nt, Homo Sapiens
gaagaucuccguuccgcucccagcggcuccag

SEQ ID NO: 223224 - RNA, 32 nt, Homo Sapiens
cggcgcgcugggaggacgcccgggagcugcgc

SEQ ID NO: 223225 - RNA, 32 nt, Homo Sapiens
uuugagaccgacaugggcaacaugacaagacc

SEQ ID NO: 223226 - RNA, 32 nt, Homo Sapiens
acccaggaggcugagguugcagugagcccaga

SEQ ID NO: 223227 - RNA, 32 nt, Homo Sapiens
ucugggcugaggggcgcggcuucgcgguggac

SEQ ID NO: 223228 - RNA, 32 nt, Homo Sapiens
auacugcuguccuugugaguggcaccguacag

SEQ ID NO: 223229 - RNA, 32 nt, Homo Sapiens
ccucugcacucccugccuuggugcguguaguc

SEQ ID NO: 223230 - RNA, 32 nt, Homo Sapiens
caguauugcaguuguggaagagcagaaggagg

SEQ ID NO: 223231 - RNA, 32 nt, Homo Sapiens
uggcaacuuaggauuuuagggugauggcuuug

SEQ ID NO: 223232 - RNA, 32 nt, Homo Sapiens
cgcggggcgccgucucagccccgggaagaugg

SEQ ID NO: 223233 - RNA, 32 nt, Homo Sapiens
agugcggcggauguacggaugauucaguggcu

SEQ ID NO: 223234 - RNA, 32 nt, Homo Sapiens
ggucccccggaacguguguuccagguccuccc

SEQ ID NO: 223235 - RNA, 32 nt, Homo Sapiens
gcauucuuggauagugauagcuccucagagua

SEQ ID NO: 223236 - RNA, 32 nt, Homo Sapiens
caccuccauuuucucagcggcugugaagcagc

SEQ ID NO: 223237 - RNA, 32 nt, Homo Sapiens
aucaagcacuguaauaccuauaaauuaaugua

SEQ ID NO: 223238 - RNA, 32 nt, Homo Sapiens
cccaggaggaggagcuugcagugagccgagau

SEQ ID NO: 223239 - RNA, 32 nt, Homo Sapiens
ucagcaagcagcucgguucugugcagagauaa

SEQ ID NO: 223240 - RNA, 32 nt, Homo Sapiens
cuagccaaauuaaugcauaauuucagauguag

SEQ ID NO: 223241 - RNA, 32 nt, Homo Sapiens
ggcuccagcuggagggauggguuguggggcaa

SEQ ID NO: 223242 - RNA, 32 nt, Homo Sapiens
aaccauuuauaagcuuuuuucuuaugaaaaau

SEQ ID NO: 223243 - RNA, 32 nt, Homo Sapiens
cacugcagaacagcuucauguucccaaaauca

SEQ ID NO: 223244 - RNA, 32 nt, Homo Sapiens
agcgucuucuauuuuccaggucaaguacuugc

SEQ ID NO: 223245 - RNA, 32 nt, Homo Sapiens
cugagucuaagguccagcacaaacccggcaga

SEQ ID NO: 223246 - RNA, 32 nt, Homo Sapiens
gcgccuuccuuuccucuccagagcaggcugcc

SEQ ID NO: 223247 - RNA, 32 nt, Homo Sapiens
uucucuguuuuaaugugucaugaaaucuuaau

SEQ ID NO: 223248 - RNA, 32 nt, Homo Sapiens
ggaggcaggauggucuggaggcugguccugcu

SEQ ID NO: 223249 - RNA, 32 nt, Homo Sapiens
agcugggcgugguggcucacgccuguaauccc

SEQ ID NO: 223250 - RNA, 32 nt, Homo Sapiens
ggccgggcgugguggcucaugccuauaauccc

SEQ ID NO: 223251 - RNA, 32 nt, Homo Sapiens
uaacuuacaaagcuaguugccauauuucuauu

SEQ ID NO: 223252 - RNA, 32 nt, Homo Sapiens
aaaauuaaugguauaaauuugcuauuuuucau

SEQ ID NO: 223253 - RNA, 32 nt, Homo Sapiens
aaagaaaaaaauuuguucaaaagacauaaaug

SEQ ID NO: 223254 - RNA, 32 nt, Homo Sapiens
aggaagagaaagaggacaaaaucaaacuggau

SEQ ID NO: 223255 - RNA, 32 nt, Homo Sapiens
uuauguuuuagggugcagguccauauagucgu

SEQ ID NO: 223256 - RNA, 32 nt, Homo Sapiens
uaauauguauacuaucuuuuuaucugaaguaa

SEQ ID NO: 223257 - RNA, 32 nt, Homo Sapiens
cuugcagcccacgggaccccagcccagggccu

SEQ ID NO: 223258 - RNA, 32 nt, Homo Sapiens
gggguuaguuuuuauauccuauaauacaaagc

SEQ ID NO: 223259 - RNA, 32 nt, Homo Sapiens
ucaggcguuucugaagugcucuuucuuggauu

SEQ ID NO: 223260 - RNA, 32 nt, Homo Sapiens
acauuuuaaauuuugaugaaauccaguuuauu

SEQ ID NO: 223261 - RNA, 32 nt, Homo Sapiens
ucuaacaaucaucaguuaggaauauuaacaug

SEQ ID NO: 223262 - RNA, 32 nt, Homo Sapiens
gcuuucaugaauggaauggaaaaaagaugacu

SEQ ID NO: 223263 - RNA, 32 nt, Homo Sapiens
ccagagacucgcgcguggagcgugguggggcg

SEQ ID NO: 223264 - RNA, 32 nt, Homo Sapiens
ccccggccaggccuccuccccucugggcaggg

SEQ ID NO: 223265 - RNA, 32 nt, Homo Sapiens
gcccccagaacugcagcaucauguaucuggga

SEQ ID NO: 223266 - RNA, 32 nt, Homo Sapiens
uccuaugcaaccucagaagacacccaggagug

SEQ ID NO: 223267 - RNA, 32 nt, Homo Sapiens
uggggcggaggguggaaggcagcuuccgucga

SEQ ID NO: 223268 - RNA, 32 nt, Homo Sapiens
aaaugauuauuuguuuaaaucuguacaguuuu

SEQ ID NO: 223269 - RNA, 31 nt, Homo Sapiens
cccgcugcccugggcucuccaaggcccccuu

SEQ ID NO: 223270 - RNA, 32 nt, Homo Sapiens
uggccacaagguggcauccccuugucaggauc

SEQ ID NO: 223271 - RNA, 32 nt, Homo Sapiens
gaaggggcccugugcuggccccggguccgccc

SEQ ID NO: 223272 - RNA, 32 nt, Homo Sapiens
ucuucagccccacccccuccccacuagcucga

SEQ ID NO: 223273 - RNA, 32 nt, Homo Sapiens
cggagacgcccggccuccugaaggguucggcu

SEQ ID NO: 223274 - RNA, 32 nt, Homo Sapiens
uuuaaugacuguaucuggcaacccuaucagcc

SEQ ID NO: 223275 - RNA, 32 nt, Homo Sapiens
auuggacuguggcgagcggacaucuguucaaa

SEQ ID NO: 223276 - RNA, 32 nt, Homo Sapiens
cggcagucuccagccgucccgcccgcuugugg

SEQ ID NO: 223277 - RNA, 32 nt, Homo Sapiens
uuuuugccauuauuucuucaguuuucuuuucu

SEQ ID NO: 223278 - RNA, 32 nt, Homo Sapiens
uaacuccagucauaaacguuuauuuucuuuug

SEQ ID NO: 223279 - RNA, 32 nt, Homo Sapiens
cguuuaacuucuuguuuguuucaguguaaugc

SEQ ID NO: 223280 - RNA, 32 nt, Homo Sapiens
ggugagucauauuuuugaaaguuaauaauuau

SEQ ID NO: 223281 - RNA, 32 nt, Homo Sapiens
uuuguuuuccuuuuucugggauguacuguuag

SEQ ID NO: 223282 - RNA, 32 nt, Homo Sapiens
ggagagaaaccuuagaagugcaaugagugugg

SEQ ID NO: 223283 - RNA, 32 nt, Homo Sapiens
aagcaucuuggacuuuguuuucccuuccaaac

SEQ ID NO: 223284 - RNA, 32 nt, Homo Sapiens
aaccccaguuuagaguuuagcaccacacgcgc

SEQ ID NO: 223285 - RNA, 32 nt, Homo Sapiens
cagcuguacuuuugugggccugucaucuugau

SEQ ID NO: 223286 - RNA, 32 nt, Homo Sapiens
ugacaaagguaaggguuaagacagugugugug

SEQ ID NO: 223287 - RNA, 32 nt, Homo Sapiens
gccggagguguccaugggcacaaggcgaagcu

SEQ ID NO: 223288 - RNA, 32 nt, Homo Sapiens
gcugugggugaggacggcucuagcuaguuccc

SEQ ID NO: 223289 - RNA, 32 nt, Homo Sapiens
caguccccacccacgaaaugcugggggguggg

SEQ ID NO: 223290 - RNA, 32 nt, Homo Sapiens
cucaagcaguccucccaccucagccucccaag

SEQ ID NO: 223291 - RNA, 32 nt, Homo Sapiens
gaaaacgucaauuuauauugaacuuggaggag

SEQ ID NO: 223292 - RNA, 32 nt, Homo Sapiens
aaaaugcaccguguuuaaauucuuaauauuag

SEQ ID NO: 223293 - RNA, 32 nt, Homo Sapiens
gcacaucuuggcuauguaauucuuguaauuuu

SEQ ID NO: 223294 - RNA, 32 nt, Homo Sapiens
uagccggccgucugguggcccgagguggcggc

SEQ ID NO: 223295 - RNA, 32 nt, Homo Sapiens
cuuucugugggggaugggauucggagccccgu

SEQ ID NO: 223296 - RNA, 32 nt, Homo Sapiens
ccuguuuuuaaaauauacaauuauucuuaaaa

SEQ ID NO: 223297 - RNA, 32 nt, Homo Sapiens
caguguggcauuccgaguuggggcgggugguc

SEQ ID NO: 223298 - RNA, 32 nt, Homo Sapiens
ucuucccagcagccuuaacuucccuugggcgg

SEQ ID NO: 223299 - RNA, 31 nt, Homo Sapiens
uauuaucucucucuggcccuaacugagcuag

SEQ ID NO: 223300 - RNA, 32 nt, Homo Sapiens
gaauaggauuuucucaguugucagccaugacu

SEQ ID NO: 223301 - RNA, 32 nt, Homo Sapiens
uuuaauuuauccucuguugauuuuuucuuuug

SEQ ID NO: 223302 - RNA, 32 nt, Homo Sapiens
uugccuuuuuucuuaaugucagggcagaucuu

SEQ ID NO: 223303 - RNA, 32 nt, Homo Sapiens
aauguagggaaaaacuuuugcccgacugauuu

SEQ ID NO: 223304 - RNA, 32 nt, Homo Sapiens
agucuuggcucacugcaacuucugccucuugg

SEQ ID NO: 223305 - RNA, 32 nt, Homo Sapiens
aauuuggauaauaaaaauuguagcuuuuuauu

SEQ ID NO: 223306 - RNA, 32 nt, Homo Sapiens
ugugcacaggugguuggguuuguuugacuccc

SEQ ID NO: 223307 - RNA, 32 nt, Homo Sapiens
uuggcuuaaguacuucaugcuuuauucaggcu

SEQ ID NO: 223308 - RNA, 32 nt, Homo Sapiens
uuucugguguuuaugaagauccauaacagcug

SEQ ID NO: 223309 - RNA, 32 nt, Homo Sapiens
cugccaccucuuauauguuucagacacucucu

SEQ ID NO: 223310 - RNA, 32 nt, Homo Sapiens
auuuggugguuuuauucuaucgguauaaaggc

SEQ ID NO: 223311 - RNA, 32 nt, Homo Sapiens
ugccuucugauacuacucccaagauggaggcu

SEQ ID NO: 223312 - RNA, 32 nt, Homo Sapiens
cgaggcuggaggcgcgggagggcagcgagagg

SEQ ID NO: 223313 - RNA, 32 nt, Homo Sapiens
gggucucccccuccuuguugcuaaggcccgga

SEQ ID NO: 223314 - RNA, 32 nt, Homo Sapiens
gaaaacuugaccaagaaggcaaugauguaaaa

SEQ ID NO: 223315 - RNA, 32 nt, Homo Sapiens
aagaaaaauuuaugcacugauuuaaaacaaac

SEQ ID NO: 223316 - RNA, 32 nt, Homo Sapiens
ugccaaaucugugacuguagagugggaauauc

SEQ ID NO: 223317 - RNA, 32 nt, Homo Sapiens
gacgguccugucauugcuucagaaucccaucu

SEQ ID NO: 223318 - RNA, 32 nt, Homo Sapiens
aaacaguugcuuaaaaaugcuguuucuggcug

SEQ ID NO: 223319 - RNA, 32 nt, Homo Sapiens
gaggguccgagccagccgcuguuuugccggag

SEQ ID NO: 223320 - RNA, 32 nt, Homo Sapiens
ugacaugguucauguuuuuacucaaaauccaa

SEQ ID NO: 223321 - RNA, 32 nt, Homo Sapiens
ccugaggagcagcccugccugcugcucuuccc

SEQ ID NO: 223322 - RNA, 32 nt, Homo Sapiens
accugcugggccucccaauagacuacaggcag

SEQ ID NO: 223323 - RNA, 32 nt, Homo Sapiens
acagacuuuuaaaaugcccuugugucucccag

SEQ ID NO: 223324 - RNA, 32 nt, Homo Sapiens
gauguccagggccccaggcccgcgggcacagc

SEQ ID NO: 223325 - RNA, 32 nt, Homo Sapiens
gccagcagcaggaaggcugugccuguggcccg

SEQ ID NO: 223326 - RNA, 32 nt, Homo Sapiens
ccagcgguugccgggaaacggcguggcuuccg

SEQ ID NO: 223327 - RNA, 32 nt, Homo Sapiens
uucuuaauauuuuuaacauugugucuuuuaaa

SEQ ID NO: 223328 - RNA, 30 nt, Homo Sapiens
auaucagcagcaagugugcaaaauaaagga

SEQ ID NO: 223329 - RNA, 32 nt, Homo Sapiens
uacaguuuauaaugaaacuaucuacaauucuu

SEQ ID NO: 223330 - RNA, 32 nt, Homo Sapiens
cuucuucagggugcugagcguuccuucccagc

SEQ ID NO: 223331 - RNA, 32 nt, Homo Sapiens
gccuuccucccucucccaucagcagcccugua

SEQ ID NO: 223332 - RNA, 32 nt, Homo Sapiens
auuauguugcuguagcuaccagucaaggucuu

SEQ ID NO: 223333 - RNA, 32 nt, Homo Sapiens
ccaugccauccacaguguuuguuagugagucc

SEQ ID NO: 223334 - RNA, 32 nt, Homo Sapiens
acaauucuuuuuuuuucuuuuucacucaaacu

SEQ ID NO: 223335 - RNA, 32 nt, Homo Sapiens
acaugacugccaaggggugcugcuggccacac

SEQ ID NO: 223336 - RNA, 32 nt, Homo Sapiens
guagccgcuucuccggagcccggugccagugc

SEQ ID NO: 223337 - RNA, 32 nt, Homo Sapiens
aacacagauuguguuuuucuuugguuuuguuu

SEQ ID NO: 223338 - RNA, 32 nt, Homo Sapiens
caggcaugucauugccucuguauuuaagccaa

SEQ ID NO: 223339 - RNA, 32 nt, Homo Sapiens
gcuuucugugucgcugccccgggcggguguau

SEQ ID NO: 223340 - RNA, 32 nt, Homo Sapiens
cgggcgcggagccggcgggcgggcggaggaua

SEQ ID NO: 223341 - RNA, 32 nt, Homo Sapiens
cauuuaucaaggagauaccaacaaagaaagaa

SEQ ID NO: 223342 - RNA, 30 nt, Homo Sapiens
guaccccagcucaugggggacucagcaagu

SEQ ID NO: 223343 - RNA, 32 nt, Homo Sapiens
aaaauacaaaaauuagcugggugugguggugg

SEQ ID NO: 223344 - RNA, 32 nt, Homo Sapiens
uugcaaucccaaagucagaagguugccuggga

SEQ ID NO: 223345 - RNA, 32 nt, Homo Sapiens
gcagccgccgcccacggcacggcagccaccau

SEQ ID NO: 223346 - RNA, 32 nt, Homo Sapiens
ggaacccugggucuugggaagaacaacaggaa

SEQ ID NO: 223347 - RNA, 32 nt, Homo Sapiens
uaacccuuuaaugaacuuaucuguggaguaca

SEQ ID NO: 223348 - RNA, 32 nt, Homo Sapiens
gagagauugcuuaacucaaacucugcuucuac

SEQ ID NO: 223349 - RNA, 32 nt, Homo Sapiens
gaaagcacuggaauguuuugugagauuauuuu

SEQ ID NO: 223350 - RNA, 32 nt, Homo Sapiens
acccccaaaacauaggugucugagagacucca

SEQ ID NO: 223351 - RNA, 32 nt, Homo Sapiens
cuuggagagaccugcgcccaccccuccacucu

SEQ ID NO: 223352 - RNA, 32 nt, Homo Sapiens
aaaacacacacccacccacacacacacacaca

SEQ ID NO: 223353 - RNA, 32 nt, Homo Sapiens
agcucaagugauccuccugccucagucuccug

SEQ ID NO: 223354 - RNA, 32 nt, Homo Sapiens
aauuaagaauuuacaucuuuuacaaauaugug

SEQ ID NO: 223355 - RNA, 32 nt, Homo Sapiens
gugacuugcuguccaugaugagugaugagaag

SEQ ID NO: 223356 - RNA, 32 nt, Homo Sapiens
cuucuugcugucagccacccuuccuucauaca

SEQ ID NO: 223357 - RNA, 32 nt, Homo Sapiens
ccauagucagaaaaguuacugcagcuuaaaca

SEQ ID NO: 223358 - RNA, 32 nt, Homo Sapiens
ggcuccgggucguggcgcgaccgcugcggcgg

SEQ ID NO: 223359 - RNA, 32 nt, Homo Sapiens
gucuauuuaacuaccuaauauuucccccuuua

SEQ ID NO: 223360 - RNA, 32 nt, Homo Sapiens
aaguuuggaaaacaguuuuuauucuguuuuau

SEQ ID NO: 223361 - RNA, 32 nt, Homo Sapiens
ccagccccaagccaggaggacgacugugucuu

SEQ ID NO: 223362 - RNA, 32 nt, Homo Sapiens
ccauaauaaaaauuauuguauguuuacuguga

SEQ ID NO: 223363 - RNA, 32 nt, Homo Sapiens
uuaaggcggaggcccgggagggggccgacccg

SEQ ID NO: 223364 - RNA, 32 nt, Homo Sapiens
aguuucguuucuguuuuuuaauaaaaagcuuu

SEQ ID NO: 223365 - RNA, 32 nt, Homo Sapiens
caugagauuugcaggggacaaauauccaaacu

SEQ ID NO: 223366 - RNA, 32 nt, Homo Sapiens
cuuuuccugagcccgccgcgaugggagcugcg

SEQ ID NO: 223367 - RNA, 32 nt, Homo Sapiens
guuucuggugaaaucugcacaucuguguuuuu

SEQ ID NO: 223368 - RNA, 32 nt, Homo Sapiens
aguauauugguaguuaucaauauagcaguacu

SEQ ID NO: 223369 - RNA, 32 nt, Homo Sapiens
acgugguuuggagagcagccccuugucaggau

SEQ ID NO: 223370 - RNA, 32 nt, Homo Sapiens
aauguaaaguauuguuucuggguguugccaga

SEQ ID NO: 223371 - RNA, 32 nt, Homo Sapiens
cgccuagugccagcugugcgggauccgcacau

SEQ ID NO: 223372 - RNA, 32 nt, Homo Sapiens
cgcugcagcgcgcgcauggcuagcacggcuuc

SEQ ID NO: 223373 - RNA, 32 nt, Homo Sapiens
accuggagagacggaggcugucagugccugcc

SEQ ID NO: 223374 - RNA, 32 nt, Homo Sapiens
uuuccugggucuuuuucuuauuagcacauuug

SEQ ID NO: 223375 - RNA, 32 nt, Homo Sapiens
gaaacuaaaaauuuaggaaguaucuaucaugg

SEQ ID NO: 223376 - RNA, 32 nt, Homo Sapiens
cuucgguggcuaggcuccugcuugcugcacuc

SEQ ID NO: 223377 - RNA, 32 nt, Homo Sapiens
cgcgguuuuugucagcuuacuccggccaaaaa

SEQ ID NO: 223378 - RNA, 32 nt, Homo Sapiens
gggccccgagaccgacugagggagcgaccugc

SEQ ID NO: 223379 - RNA, 32 nt, Homo Sapiens
gccuuguuuuugcugugacaagucccuagucc

SEQ ID NO: 223380 - RNA, 32 nt, Homo Sapiens
cccacgcuguucucgugauagugagucucaug

SEQ ID NO: 223381 - RNA, 32 nt, Homo Sapiens
gcccagccuguggcugcccccgacaccaggag

SEQ ID NO: 223382 - RNA, 32 nt, Homo Sapiens
aacaaaaucagacaauacuguagugcauaaaa

SEQ ID NO: 223383 - RNA, 32 nt, Homo Sapiens
ugaguaggugaggagauuaaaagggagccaua

SEQ ID NO: 223384 - RNA, 32 nt, Homo Sapiens
cugggagagaauaaauuucugauguuguaagc

SEQ ID NO: 223385 - RNA, 31 nt, Homo Sapiens
ucaguguaauaaaaacagaaucuuuguauau

SEQ ID NO: 223386 - RNA, 32 nt, Homo Sapiens
ggcuucacuauauuggucaggcuggucucgau

SEQ ID NO: 223387 - RNA, 32 nt, Homo Sapiens
cuucucccaggagaagacugcccgccucagaa

SEQ ID NO: 223388 - RNA, 32 nt, Homo Sapiens
gaccgcccugcugcgcggggcccgcggcgaug

SEQ ID NO: 223389 - RNA, 32 nt, Homo Sapiens
cugugcagggaaggaagaagagaaaacauauu

SEQ ID NO: 223390 - RNA, 32 nt, Homo Sapiens
cuuaucccagacacaacaccauguggucugga

SEQ ID NO: 223391 - RNA, 32 nt, Homo Sapiens
ucccauggcagacaaagcacccuguaggcaca

SEQ ID NO: 223392 - RNA, 32 nt, Homo Sapiens
cugcagcugauccauaggacuaccgcaggccc

SEQ ID NO: 223393 - RNA, 32 nt, Homo Sapiens
uuggguuaguggcgcggcgggcggcgcggaca

SEQ ID NO: 223394 - RNA, 32 nt, Homo Sapiens
ccaggugaaugggaggccagggccccagacuc

SEQ ID NO: 223395 - RNA, 30 nt, Homo Sapiens
ucgagggcgcccgaggccggguccggcuga

SEQ ID NO: 223396 - RNA, 32 nt, Homo Sapiens
agguucugugcagcuuaucaacgaccgcugcg

SEQ ID NO: 223397 - RNA, 32 nt, Homo Sapiens
uaccacccuaaaauugugugagacuucuccca

SEQ ID NO: 223398 - RNA, 32 nt, Homo Sapiens
ucugcauaaacccuccuguccuggacgugacu

SEQ ID NO: 223399 - RNA, 32 nt, Homo Sapiens
agucucaacccucccccaggugggcaggcacu

SEQ ID NO: 223400 - RNA, 32 nt, Homo Sapiens
uuccagccagucugcugccugcucccucuucc

SEQ ID NO: 223401 - RNA, 32 nt, Homo Sapiens
uuuggggucagaacuucggggguguggaggag

SEQ ID NO: 223402 - RNA, 32 nt, Homo Sapiens
cuuuuguaaaaugauggcaucacuguggacug

SEQ ID NO: 223403 - RNA, 32 nt, Homo Sapiens
gggaaugaaacacuuugaguggccaggccugu

SEQ ID NO: 223404 - RNA, 32 nt, Homo Sapiens
uuuuacaguuauaucauagacuugcuuucugg

SEQ ID NO: 223405 - RNA, 32 nt, Homo Sapiens
cuaucaucuucaggucuuuuguauguaaaaug

SEQ ID NO: 223406 - RNA, 32 nt, Homo Sapiens
gucacugccgcccagggcuggccucuuggugc

SEQ ID NO: 223407 - RNA, 32 nt, Homo Sapiens
gggaaggggcauuugagcuggguuuugaggga

SEQ ID NO: 223408 - RNA, 32 nt, Homo Sapiens
cccauggaaugggcuguauguccugccccaac

SEQ ID NO: 223409 - RNA, 32 nt, Homo Sapiens
accccaagugaccccccgcagcuccucgcccc

SEQ ID NO: 223410 - RNA, 30 nt, Homo Sapiens
ggcggcgccgagucugcggguccucccgcc

SEQ ID NO: 223411 - RNA, 32 nt, Homo Sapiens
ugauuaccauauugaacacauggcauuuguag

SEQ ID NO: 223412 - RNA, 32 nt, Homo Sapiens
aggaucugguaguaggcaaggcugucauugcu

SEQ ID NO: 223413 - RNA, 32 nt, Homo Sapiens
gaauacuaaugaucuguuauguauguuccaau

SEQ ID NO: 223414 - RNA, 32 nt, Homo Sapiens
auucagaaguuccauagauggauuuuugcccc

SEQ ID NO: 223415 - RNA, 32 nt, Homo Sapiens
cacccguaguagcaaaaacauaaaacaaauaa

SEQ ID NO: 223416 - RNA, 32 nt, Homo Sapiens
uuccuggggaguggcuccagggaccaggagua

SEQ ID NO: 223417 - RNA, 32 nt, Homo Sapiens
ccagccaaugaauaaugguaaucaaucaaaua

SEQ ID NO: 223418 - RNA, 26 nt, Homo Sapiens
caugcgggacuacgacgaggugaccg

SEQ ID NO: 223419 - RNA, 32 nt, Homo Sapiens
aaaauagugcuaaauuguaucaugaccaagaa

SEQ ID NO: 223420 - RNA, 32 nt, Homo Sapiens
aggcaccucuagcaugagacagugucuggaag

SEQ ID NO: 223421 - RNA, 32 nt, Homo Sapiens
uccuugggcugcggcuucugugcgaggcuggg

SEQ ID NO: 223422 - RNA, 32 nt, Homo Sapiens
acaccuauaaucgagcacuuugggaggccaag

SEQ ID NO: 223423 - RNA, 32 nt, Homo Sapiens
acuagaacacugggaaaggggcugcagguucc

SEQ ID NO: 223424 - RNA, 32 nt, Homo Sapiens
uccagcagaaggaaacauggcugccaaagugu

SEQ ID NO: 223425 - RNA, 32 nt, Homo Sapiens
uuuuaacagucaagugugcuaaaguuugucaa

SEQ ID NO: 223426 - RNA, 32 nt, Homo Sapiens
ucucgagaggcaauucaguccugggcaaaggu

SEQ ID NO: 223427 - RNA, 32 nt, Homo Sapiens
ccuuugaggagaagugcucuacacugaaguca

SEQ ID NO: 223428 - RNA, 32 nt, Homo Sapiens
aagaaauccaacagaaaacacuugcaccaaaa

SEQ ID NO: 223429 - RNA, 32 nt, Homo Sapiens
ggaggggcgagggcccccaggugguccccaga

SEQ ID NO: 223430 - RNA, 32 nt, Homo Sapiens
gucagggucccucaggcuucccuugugucucc

SEQ ID NO: 223431 - RNA, 32 nt, Homo Sapiens
gguuacuauccacugcaguccucaguuguugg

SEQ ID NO: 223432 - RNA, 32 nt, Homo Sapiens
acaggugcacugucucguauguauuugaauua

SEQ ID NO: 223433 - RNA, 32 nt, Homo Sapiens
uguauagcauguguauuaaugucuaacuacau

SEQ ID NO: 223434 - RNA, 32 nt, Homo Sapiens
uucauuuuucagaacuuguuuacucauuuaua

SEQ ID NO: 223435 - RNA, 32 nt, Homo Sapiens
gggccuucaaagcuggacugaguugguccugu

SEQ ID NO: 223436 - RNA, 32 nt, Homo Sapiens
ggguaaaaucuguaauugauaauagguggggg

SEQ ID NO: 223437 - RNA, 32 nt, Homo Sapiens
uuagacuuccucuccuuccaccccucauuucc

SEQ ID NO: 223438 - RNA, 32 nt, Homo Sapiens
uuguaagaaaaccaaaauaaaaauugaaaaau

SEQ ID NO: 223439 - RNA, 32 nt, Homo Sapiens
cucacuccaaaauaggugcugauccuuccuau

SEQ ID NO: 223440 - RNA, 32 nt, Homo Sapiens
caacauaaccucacccaggccuuacaacaguc

SEQ ID NO: 223441 - RNA, 32 nt, Homo Sapiens
ggcugcgcgugagaagguggcgguguaggcac

SEQ ID NO: 223442 - RNA, 32 nt, Homo Sapiens
aguugggagacggccggaagccaguaaaagaa

SEQ ID NO: 223443 - RNA, 32 nt, Homo Sapiens
ugcagggaacauauggcacagugucugaccuc

SEQ ID NO: 223444 - RNA, 32 nt, Homo Sapiens
ugggccucucggauccagcugcacagccccug

SEQ ID NO: 223445 - RNA, 32 nt, Homo Sapiens
uaaagagaucagagaccuaaagugccagacca

SEQ ID NO: 223446 - RNA, 32 nt, Homo Sapiens
cguggcccaccgcuccuucgcggucccugccg

SEQ ID NO: 223447 - RNA, 32 nt, Homo Sapiens
caggugcgcgccgccgcaccuggcugauauuu

SEQ ID NO: 223448 - RNA, 32 nt, Homo Sapiens
caaacagaauaaaacagagccaacaacaguau

SEQ ID NO: 223449 - RNA, 32 nt, Homo Sapiens
augaugacaacacugccucgcguuucaauagc

SEQ ID NO: 223450 - RNA, 32 nt, Homo Sapiens
agcgccggagucaaacgguucccggcccaguc

SEQ ID NO: 223451 - RNA, 32 nt, Homo Sapiens
uggacagcugucuccgugcuuucaccagugag

SEQ ID NO: 223452 - RNA, 32 nt, Homo Sapiens
aguccuuggcugccuguggagcuccugugcca

SEQ ID NO: 223453 - RNA, 32 nt, Homo Sapiens
gcuaagcaggagucuuuugugcuugagccaag

SEQ ID NO: 223454 - RNA, 32 nt, Homo Sapiens
cuagggcagacaccaugaccacccuugaugau

SEQ ID NO: 223455 - RNA, 32 nt, Homo Sapiens
ccagccccugucaucagcuaaaggucagcaaa

SEQ ID NO: 223456 - RNA, 32 nt, Homo Sapiens
gcuuguggagcgagggcggcgccacgaggugg

SEQ ID NO: 223457 - RNA, 32 nt, Homo Sapiens
gaugcuggggaugaggcccacaucgagcgcuc

SEQ ID NO: 223458 - RNA, 32 nt, Homo Sapiens
augagagugggucuuucucucauguucacucu

SEQ ID NO: 223459 - RNA, 32 nt, Homo Sapiens
agaaagaauuguauuucuuuaaucuaguaugg

SEQ ID NO: 223460 - RNA, 32 nt, Homo Sapiens
ggcgagagagagcuggggugcuggggugcggg

SEQ ID NO: 223461 - RNA, 30 nt, Homo Sapiens
uguucuuccugugcugcacagcuuggagau

SEQ ID NO: 223462 - RNA, 32 nt, Homo Sapiens
uugcuagagaaugucauuccugaagauuuuau

SEQ ID NO: 223463 - RNA, 32 nt, Homo Sapiens
caaugauuuuugcuuauaaucacuuuacuuag

SEQ ID NO: 223464 - RNA, 32 nt, Homo Sapiens
uuuacccggccccuguguucugccugccaggc

SEQ ID NO: 223465 - RNA, 32 nt, Homo Sapiens
aacuuaaucauucguuacuuacagucuuaacg

SEQ ID NO: 223466 - RNA, 32 nt, Homo Sapiens
ucuucuucuucuucuuuuuuuuuuuuuuuuuu

SEQ ID NO: 223467 - RNA, 32 nt, Homo Sapiens
uuggggacgccccucccagagcccaggucacc

SEQ ID NO: 223468 - RNA, 32 nt, Homo Sapiens
aagcuucucagcacguuccucccuggagagcg

SEQ ID NO: 223469 - RNA, 32 nt, Homo Sapiens
agucaggcugcgcccgcgucuucagggcccag

SEQ ID NO: 223470 - RNA, 32 nt, Homo Sapiens
auuaaaacuggaucucuuuucuuccauggcac

SEQ ID NO: 223471 - RNA, 32 nt, Homo Sapiens
ugagccccaagguuuugauggaguuugcuugg

SEQ ID NO: 223472 - RNA, 32 nt, Homo Sapiens
gccuccucuucgucuccucccccucccccguc

SEQ ID NO: 223473 - RNA, 32 nt, Homo Sapiens
ugacggagccgcggcgccggcgaagucgcuga

SEQ ID NO: 223474 - RNA, 32 nt, Homo Sapiens
uucagaauaguuuugcaaauuguacauaaaca

SEQ ID NO: 223475 - RNA, 32 nt, Homo Sapiens
uaacucgcuggcggcccugcaggcaggcuuga

SEQ ID NO: 223476 - RNA, 32 nt, Homo Sapiens
aagucaugcaaaggcugggaccacgugagauc

SEQ ID NO: 223477 - RNA, 30 nt, Homo Sapiens
cacuguguguggaaggcagaagcuagcggu

SEQ ID NO: 223478 - RNA, 32 nt, Homo Sapiens
cucagccaguuuccucugcagcugcuaaaacu

SEQ ID NO: 223479 - RNA, 32 nt, Homo Sapiens
uauguaauauauauaaaauauugugacauguu

SEQ ID NO: 223480 - RNA, 32 nt, Homo Sapiens
auaguguuuauaaagguuaauaaauuucuuga

SEQ ID NO: 223481 - RNA, 32 nt, Homo Sapiens
guucagagauguuuaaaguuugaucuuuguuu

SEQ ID NO: 223482 - RNA, 32 nt, Homo Sapiens
ggaggugccggggguggggugcccuagcguga

SEQ ID NO: 223483 - RNA, 32 nt, Homo Sapiens
aaucacaauuuagaaucacuuuuccucugucc

SEQ ID NO: 223484 - RNA, 32 nt, Homo Sapiens
uggagaaauggcaagucuagagucucagaaac

SEQ ID NO: 223485 - RNA, 32 nt, Homo Sapiens
auagacucauacacgcgaagugccagauucau

SEQ ID NO: 223486 - RNA, 30 nt, Homo Sapiens
caaaaugugaagcuugguugacugauguuc

SEQ ID NO: 223487 - RNA, 32 nt, Homo Sapiens
uggugacaaaaaugaaggagcuuuguaaauuu

SEQ ID NO: 223488 - RNA, 32 nt, Homo Sapiens
cacuuuucuuuguaaagaaguuuaccuuuuga

SEQ ID NO: 223489 - RNA, 32 nt, Homo Sapiens
agagcugcccucagcauccgggccgggaccaa

SEQ ID NO: 223490 - RNA, 32 nt, Homo Sapiens
ugccgagcccucggcguugccucagaaucccc

SEQ ID NO: 223491 - RNA, 32 nt, Homo Sapiens
uaagccaaaagaauuuacgccuuaauguguca

SEQ ID NO: 223492 - RNA, 32 nt, Homo Sapiens
uuauuugcaauaauucauagguuccaagggug

SEQ ID NO: 223493 - RNA, 30 nt, Homo Sapiens
uggaaggguucccuuguccuagacauugag

SEQ ID NO: 223494 - RNA, 32 nt, Homo Sapiens
gggcugcggugacagcauaugccgcgagcugg

SEQ ID NO: 223495 - RNA, 32 nt, Homo Sapiens
cucuucaccuugcgcgccuccuccuccuucug

SEQ ID NO: 223496 - RNA, 32 nt, Homo Sapiens
gcaaaguggagagaaagaagaugcaucuguca

SEQ ID NO: 223497 - RNA, 32 nt, Homo Sapiens
ccucauccuguauaguuuaaugaugaaugugc

SEQ ID NO: 223498 - RNA, 32 nt, Homo Sapiens
uuuauuuuacuuuuuuaaagaacagaaaaaga

SEQ ID NO: 223499 - RNA, 32 nt, Homo Sapiens
ccugccucccagccuucucucuaggcccugaa

SEQ ID NO: 223500 - RNA, 32 nt, Homo Sapiens
guuauucuauagaacacguuagaauagaucua

SEQ ID NO: 223501 - RNA, 32 nt, Homo Sapiens
cgguggccucgcugggucucggggaagcagag

SEQ ID NO: 223502 - RNA, 32 nt, Homo Sapiens
guaaagaaaaauauuuaauguugaacaaaaua

SEQ ID NO: 223503 - RNA, 32 nt, Homo Sapiens
agcauaaaauacugaggcugauuuagucaggg

SEQ ID NO: 223504 - RNA, 32 nt, Homo Sapiens
guaauuuagggugacgccuccguguggauuag

SEQ ID NO: 223505 - RNA, 32 nt, Homo Sapiens
gaucaagauauuaaaaugucggauuuaucuuu

SEQ ID NO: 223506 - RNA, 32 nt, Homo Sapiens
ucagcuuggaguuuaggguggcacucagcaag

SEQ ID NO: 223507 - RNA, 30 nt, Homo Sapiens
ggggcuguaaggcgcgcgcggucagcuguu

SEQ ID NO: 223508 - RNA, 32 nt, Homo Sapiens
auaaacuguauguaguuuuuagucuuucugua

SEQ ID NO: 223509 - RNA, 32 nt, Homo Sapiens
aggagagaagaaauugaaaagcaggcacuuga

SEQ ID NO: 223510 - RNA, 26 nt, Homo Sapiens
cugagaaggauugauaucauggcuag

SEQ ID NO: 223511 - RNA, 32 nt, Homo Sapiens
aggaacuuaaacuugugguuccguggguugau

SEQ ID NO: 223512 - RNA, 32 nt, Homo Sapiens
ugcuccccacgugaaggcacccgcccugcgcg

SEQ ID NO: 223513 - RNA, 32 nt, Homo Sapiens
aagggcgccucccggccacgcucgcuguagug

SEQ ID NO: 223514 - RNA, 32 nt, Homo Sapiens
gagaucugaggauggaaggcuuuggggguguc

SEQ ID NO: 223515 - RNA, 32 nt, Homo Sapiens
uugucuugguuacuguacaagauacaaaugac

SEQ ID NO: 223516 - RNA, 32 nt, Homo Sapiens
guuaaauauauaaacaaacaaacaaaaauugc

SEQ ID NO: 223517 - RNA, 32 nt, Homo Sapiens
agcaacucaaucccaaaggaaccaaaggcucu

SEQ ID NO: 223518 - RNA, 32 nt, Homo Sapiens
aacccugagcgggcugccggccuccaaguucc

SEQ ID NO: 223519 - RNA, 32 nt, Homo Sapiens
gcuggacgaagaggagcugcaccccgagaaca

SEQ ID NO: 223520 - RNA, 32 nt, Homo Sapiens
ggcagguugucugcuccccugauucauugagg

SEQ ID NO: 223521 - RNA, 32 nt, Homo Sapiens
ucaggagaaaaguuaagaggcuucugcagggc

SEQ ID NO: 223522 - RNA, 32 nt, Homo Sapiens
guagucuacggauauuuuuuaucauaaaaaug

SEQ ID NO: 223523 - RNA, 32 nt, Homo Sapiens
uccugccaggguggcgauuccgcuccacaguc

SEQ ID NO: 223524 - RNA, 32 nt, Homo Sapiens
gaauuuguuggguauacacugguguauauagu

SEQ ID NO: 223525 - RNA, 31 nt, Homo Sapiens
agcggauuaccaggcacgcgcaggaaacaug

SEQ ID NO: 223526 - RNA, 32 nt, Homo Sapiens
aagaggaggaagacagugggagucaucaggag

SEQ ID NO: 223527 - RNA, 32 nt, Homo Sapiens
uggaaucugaauaaaccaauuacaaaauaaaa

SEQ ID NO: 223528 - RNA, 32 nt, Homo Sapiens
aagcacccaucccuccuaccccauuccccacc

SEQ ID NO: 223529 - RNA, 32 nt, Homo Sapiens
guugcccaggcuggucucggaguccuggucuc

SEQ ID NO: 223530 - RNA, 32 nt, Homo Sapiens
ucugcaagaggaguauugaaaacugguggacu

SEQ ID NO: 223531 - RNA, 32 nt, Homo Sapiens
ugcggccgcugcagagugaaggcgcugcagcg

SEQ ID NO: 223532 - RNA, 32 nt, Homo Sapiens
uauggggggaggcugcacugcugcugccagca

SEQ ID NO: 223533 - RNA, 32 nt, Homo Sapiens
aagaagaaaaggaaguguggcuaaggcuugcg

SEQ ID NO: 223534 - RNA, 32 nt, Homo Sapiens
accugcugccccagcugacuguggcccccucc

SEQ ID NO: 223535 - RNA, 32 nt, Homo Sapiens
cucgcgcgcuggccugggcucuagccgaggag

SEQ ID NO: 223536 - RNA, 32 nt, Homo Sapiens
gaaccucagguacggagaagaauagagguccu

SEQ ID NO: 223537 - RNA, 32 nt, Homo Sapiens
gccccacugacacccaguguccuuccaucuuc

SEQ ID NO: 223538 - RNA, 32 nt, Homo Sapiens
uuucaggagcagccucagaacaaagugagaca

SEQ ID NO: 223539 - RNA, 32 nt, Homo Sapiens
cagcuaggguauagcuggccugagaaggcagu

SEQ ID NO: 223540 - RNA, 32 nt, Homo Sapiens
uguguaagaacaacuaccugagcuaaauaaag

SEQ ID NO: 223541 - RNA, 32 nt, Homo Sapiens
ccccugcuaggcggggacccucgagagcgaug

SEQ ID NO: 223542 - RNA, 25 nt, Homo Sapiens
uugaauaaagucuagcagaacuaug

SEQ ID NO: 223543 - RNA, 32 nt, Homo Sapiens
acaauguuuaaaccuuuuuugggggagugaca

SEQ ID NO: 223544 - RNA, 32 nt, Homo Sapiens
uuaaauuauugauaguucaucuggauuaccaa

SEQ ID NO: 223545 - RNA, 30 nt, Homo Sapiens
aaggaugcuaucaaaggggaaacugacauc

SEQ ID NO: 223546 - RNA, 32 nt, Homo Sapiens
accagccugggcaacauagugagaccccaucu

SEQ ID NO: 223547 - RNA, 32 nt, Homo Sapiens
accagccuggguaacauagugagacccuaucu

SEQ ID NO: 223548 - RNA, 32 nt, Homo Sapiens
aaaccuggucauuuuuauggcacauaaccaua

SEQ ID NO: 223549 - RNA, 32 nt, Homo Sapiens
cuacacaauuuaauuccucuuuuuagggucaa

SEQ ID NO: 223550 - RNA, 32 nt, Homo Sapiens
gguaggccaguuccagauaguuucauuucacc

SEQ ID NO: 223551 - RNA, 32 nt, Homo Sapiens
uugaacaguuuaggucuuaaagagaaagucaa

SEQ ID NO: 223552 - RNA, 32 nt, Homo Sapiens
gagagguauguagccacauuugaaagagaugg

SEQ ID NO: 223553 - RNA, 32 nt, Homo Sapiens
uaaggccccgcgggcguccuggccgccaugug

SEQ ID NO: 223554 - RNA, 32 nt, Homo Sapiens
ggcaggggugguccuggcuggcauugccugag

SEQ ID NO: 223555 - RNA, 32 nt, Homo Sapiens
auuguugauuuuuguuugauaaauuaaaaaua

SEQ ID NO: 223556 - RNA, 32 nt, Homo Sapiens
ggucaccugugcuauucagccaaggggaccac

SEQ ID NO: 223557 - RNA, 32 nt, Homo Sapiens
ucaaucugcugucugugagcuggagaccuagg

SEQ ID NO: 223558 - RNA, 32 nt, Homo Sapiens
uaggcaaaauaccagcugaugaaggcaucuga

SEQ ID NO: 223559 - RNA, 32 nt, Homo Sapiens
ucgucucuacccaagcucaagagcugcuucug

SEQ ID NO: 223560 - RNA, 32 nt, Homo Sapiens
ucaaccauauauuguggauuuauuuucacugu

SEQ ID NO: 223561 - RNA, 32 nt, Homo Sapiens
gucgagugucagucucuuucugugaaggcuuu

SEQ ID NO: 223562 - RNA, 32 nt, Homo Sapiens
gccgagggccccaggaugucugccuggucccu

SEQ ID NO: 223563 - RNA, 32 nt, Homo Sapiens
agcccacgcccggccccacucccaccauccug

SEQ ID NO: 223564 - RNA, 32 nt, Homo Sapiens
cuugucggugccccggccccucccgcagcguu

SEQ ID NO: 223565 - RNA, 32 nt, Homo Sapiens
ucaacugcagcaucaacagaucagugccgacc

SEQ ID NO: 223566 - RNA, 32 nt, Homo Sapiens
agcuugccggugccccgaaggugucuucuccu

SEQ ID NO: 223567 - RNA, 32 nt, Homo Sapiens
uuaggugggggaggggcgacaguagugagcgc

SEQ ID NO: 223568 - RNA, 32 nt, Homo Sapiens
ugccagaguuguuuuccacaguucuuauaaag

SEQ ID NO: 223569 - RNA, 32 nt, Homo Sapiens
cauauauguugggggaaaauuaacucaucuaa

SEQ ID NO: 223570 - RNA, 32 nt, Homo Sapiens
ccucccacuccagaccccaccuugucuucccu

SEQ ID NO: 223571 - RNA, 32 nt, Homo Sapiens
ugugguauauauacacaauagaauacuaugca

SEQ ID NO: 223572 - RNA, 31 nt, Homo Sapiens
caaaaucauuuguaacaguccacucugucuu

SEQ ID NO: 223573 - RNA, 32 nt, Homo Sapiens
uucuccuuuuaacguguuauugacaaaccucc

SEQ ID NO: 223574 - RNA, 28 nt, Homo Sapiens
gcugggauuacaggaccagugaugguau

SEQ ID NO: 223575 - RNA, 32 nt, Homo Sapiens
uuguagaaccucagcauacuagguucccuuac

SEQ ID NO: 223576 - RNA, 32 nt, Homo Sapiens
aggugaaggggagaggcagacacggaagaagc

SEQ ID NO: 223577 - RNA, 30 nt, Homo Sapiens
ugcagaggagguggcauuccgacagcagga

SEQ ID NO: 223578 - RNA, 32 nt, Homo Sapiens
ggcucuccacccagcccgcuccugacccuuau

SEQ ID NO: 223579 - RNA, 32 nt, Homo Sapiens
ccugugcuggaacaucaucucaguuggccacc

SEQ ID NO: 223580 - RNA, 32 nt, Homo Sapiens
caccugcaaucccagcacuuugggaggccgag

SEQ ID NO: 223581 - RNA, 32 nt, Homo Sapiens
gguacccgggggugggggaaggccccuggccg

SEQ ID NO: 223582 - RNA, 32 nt, Homo Sapiens
gugcagucugcacuauauuguuuuaaaaacga

SEQ ID NO: 223583 - RNA, 32 nt, Homo Sapiens
ugcagauaagaugaaggauauuggacagcagc

SEQ ID NO: 223584 - RNA, 32 nt, Homo Sapiens
uaaguguuuuaaagaaacuagagcagcagaga

SEQ ID NO: 223585 - RNA, 32 nt, Homo Sapiens
acuccucagggcagccucccccggcucuacgg

SEQ ID NO: 223586 - RNA, 32 nt, Homo Sapiens
ggggcaggggccaccagccuccccuucuugug

SEQ ID NO: 223587 - RNA, 32 nt, Homo Sapiens
uggaacaggaggagaaagggugucugcugccu

SEQ ID NO: 223588 - RNA, 32 nt, Homo Sapiens
ucuucucggucuuuccucucugagcagccucc

SEQ ID NO: 223589 - RNA, 32 nt, Homo Sapiens
gagccuggcugagauggcuaggcggagggcuu

SEQ ID NO: 223590 - RNA, 32 nt, Homo Sapiens
ucgcuuugauucagggaaucuagcccacgugg

SEQ ID NO: 223591 - RNA, 32 nt, Homo Sapiens
gcgcuugcaggggcucccccaguucugcgcug

SEQ ID NO: 223592 - RNA, 32 nt, Homo Sapiens
aaaacuaauaauaaugaguaaacacaguuacc

SEQ ID NO: 223593 - RNA, 32 nt, Homo Sapiens
gugccaugucuuucuucaguguuauggcuaua

SEQ ID NO: 223594 - RNA, 32 nt, Homo Sapiens
cuccgaacaggauucuuucacccaggcaucuc

SEQ ID NO: 223595 - RNA, 32 nt, Homo Sapiens
acaagauauuuauaaugacgacuguauagcuu

SEQ ID NO: 223596 - RNA, 32 nt, Homo Sapiens
uucauaagucuuugguacaaguuuacaugaua

SEQ ID NO: 223597 - RNA, 32 nt, Homo Sapiens
ccagggugggacagggugggcgggggugaggc

SEQ ID NO: 223598 - RNA, 30 nt, Homo Sapiens
ccacgggcgcccgcccggcugcgcuuccag

SEQ ID NO: 223599 - RNA, 32 nt, Homo Sapiens
auuugcauccugaggaagucucuucuucagag

SEQ ID NO: 223600 - RNA, 32 nt, Homo Sapiens
ggaauaacaaagguacuacaucuuuccagcca

SEQ ID NO: 223601 - RNA, 32 nt, Homo Sapiens
cuuaaaauucuaucgaaauaaucuucaugcag

SEQ ID NO: 223602 - RNA, 32 nt, Homo Sapiens
ccggaccaguguuccccaguugugggagcaga

SEQ ID NO: 223603 - RNA, 32 nt, Homo Sapiens
caccccaccccacccucuggcuccccauggcg

SEQ ID NO: 223604 - RNA, 32 nt, Homo Sapiens
uuaucuaaguuuuaauacaagaacgauuuccc

SEQ ID NO: 223605 - RNA, 32 nt, Homo Sapiens
cccacagggcaaaccuucccccggccuccugg

SEQ ID NO: 223606 - RNA, 32 nt, Homo Sapiens
gaccacuguggacuuugcccugaaaccuucug

SEQ ID NO: 223607 - RNA, 32 nt, Homo Sapiens
aagccccaaagccccagauccccuuaaagcag

SEQ ID NO: 223608 - RNA, 32 nt, Homo Sapiens
aucucucagaucugcugccugagaaauaagcu

SEQ ID NO: 223609 - RNA, 32 nt, Homo Sapiens
cccuggcccuguaagauggacucuuucauccu

SEQ ID NO: 223610 - RNA, 32 nt, Homo Sapiens
cgccugcaguccccgcgccgugcccggaaugc

SEQ ID NO: 223611 - RNA, 32 nt, Homo Sapiens
caucuuuugugauuucuuuuaaauacuauuca

SEQ ID NO: 223612 - RNA, 32 nt, Homo Sapiens
ccaaagagauaaaguuuguaaaacuucgaaaa

SEQ ID NO: 223613 - RNA, 31 nt, Homo Sapiens
agaagugagucuccucucagauccugggccu

SEQ ID NO: 223614 - RNA, 32 nt, Homo Sapiens
aucucuggcagacaguguugucugcuuuggcu

SEQ ID NO: 223615 - RNA, 32 nt, Homo Sapiens
aaauucauuuuauucuuauuaaggaaauacuu

SEQ ID NO: 223616 - RNA, 32 nt, Homo Sapiens
gccugucgacaugguuaaaaacgagagaaaca

SEQ ID NO: 223617 - RNA, 32 nt, Homo Sapiens
acuccggccgggugcccggccccuggccccug

SEQ ID NO: 223618 - RNA, 32 nt, Homo Sapiens
gauugcaguguguccuguggacaggcugggga

SEQ ID NO: 223619 - RNA, 32 nt, Homo Sapiens
gaacaagagaaguugcagcaucagcuggauga

SEQ ID NO: 223620 - RNA, 29 nt, Homo Sapiens
uacgcuggcgcucucaguuuagggcucug

SEQ ID NO: 223621 - RNA, 32 nt, Homo Sapiens
acagacccacugugcacccagcccuccaugcu

SEQ ID NO: 223622 - RNA, 32 nt, Homo Sapiens
agacagcuuugcuggauaaaguauuguugguu

SEQ ID NO: 223623 - RNA, 32 nt, Homo Sapiens
gaaacuuaaaaaagacaagaaacuacugagga

SEQ ID NO: 223624 - RNA, 32 nt, Homo Sapiens
auaucguugauaacauauccacagguaacacc

SEQ ID NO: 223625 - RNA, 32 nt, Homo Sapiens
gagugcauggcgagaaucaagcacgcacacga

SEQ ID NO: 223626 - RNA, 32 nt, Homo Sapiens
ugcuuuuggccaugucucaaagacaggaccaa

SEQ ID NO: 223627 - RNA, 29 nt, Homo Sapiens
guguuucggggacugcggccacaggcagg

SEQ ID NO: 223628 - RNA, 32 nt, Homo Sapiens
guguuuuuguuuucucuuccaagggccguccc

SEQ ID NO: 223629 - RNA, 32 nt, Homo Sapiens
ccgcccagcuccagcccuccucucugcauccu

SEQ ID NO: 223630 - RNA, 32 nt, Homo Sapiens
ccucagaucaucugcccuccucggccucccaa

SEQ ID NO: 223631 - RNA, 32 nt, Homo Sapiens
ggccagacuuuuccgucguuuauuuucaauaa

SEQ ID NO: 223632 - RNA, 32 nt, Homo Sapiens
acuauuuucaccugguagucugggguuugaga

SEQ ID NO: 223633 - RNA, 32 nt, Homo Sapiens
accaugucuguuggucaaaaucugcaaacucu

SEQ ID NO: 223634 - RNA, 32 nt, Homo Sapiens
aguugagccugagcccccggcgcgggggcugc

SEQ ID NO: 223635 - RNA, 29 nt, Homo Sapiens
auuuacauggaauuuuauuuucuacaagu

SEQ ID NO: 223636 - RNA, 32 nt, Homo Sapiens
acuuuuacaaaacauacccaguguuuggggug

SEQ ID NO: 223637 - RNA, 32 nt, Homo Sapiens
aagggccgcccgcucccuuccugccacugccg

SEQ ID NO: 223638 - RNA, 32 nt, Homo Sapiens
gucaccccucuccuguggagcgggcguccgag

SEQ ID NO: 223639 - RNA, 32 nt, Homo Sapiens
ggaaccaggguccucccuccccuuucugccug

SEQ ID NO: 223640 - RNA, 32 nt, Homo Sapiens
acuuuggauuuguaaucagauugguucuauga

SEQ ID NO: 223641 - RNA, 32 nt, Homo Sapiens
uuggcaaugaauggaaggagagaugacagccu

SEQ ID NO: 223642 - RNA, 32 nt, Homo Sapiens
ucguccuccucgccuuccuccuccucgucagg

SEQ ID NO: 223643 - RNA, 32 nt, Homo Sapiens
ucucuugucaagguuuuuuucuuacacaggaa

SEQ ID NO: 223644 - RNA, 32 nt, Homo Sapiens
uacugaagaaauuaauagcagauucuugacaa

SEQ ID NO: 223645 - RNA, 32 nt, Homo Sapiens
gugauagaggucacugggaaauacuagggagc

SEQ ID NO: 223646 - RNA, 30 nt, Homo Sapiens
uuagacagguuggcugcagaaggcuucucu

SEQ ID NO: 223647 - RNA, 32 nt, Homo Sapiens
ccugaccagcagccucggccucuucuggguuc

SEQ ID NO: 223648 - RNA, 31 nt, Homo Sapiens
gacgccagaaagcauuucugaguuaaguaua

SEQ ID NO: 223649 - RNA, 32 nt, Homo Sapiens
ugauagaugcauagacaaaaaauuaugggaug

SEQ ID NO: 223650 - RNA, 32 nt, Homo Sapiens
gcucuggaaaaugugacccagauccucacaac

SEQ ID NO: 223651 - RNA, 32 nt, Homo Sapiens
ugagacuguccagaucuagucuguaaacccag

SEQ ID NO: 223652 - RNA, 32 nt, Homo Sapiens
cuuuuaaggaggacacccggacaccuggaagc

SEQ ID NO: 223653 - RNA, 32 nt, Homo Sapiens
ugucauuuauaugcacuaaauaaacagcuaaa

SEQ ID NO: 223654 - RNA, 32 nt, Homo Sapiens
uagcuaaaggauuguaaaugcaccaaucagca

SEQ ID NO: 223655 - RNA, 32 nt, Homo Sapiens
uguguacuuuugcuuaguauuacuuugaaaaa

SEQ ID NO: 223656 - RNA, 32 nt, Homo Sapiens
caccuaacaaaguaaagggcuaaaagccauuc

SEQ ID NO: 223657 - RNA, 32 nt, Homo Sapiens
agguaucucucagaucugcugccugagaaaua

SEQ ID NO: 223658 - RNA, 32 nt, Homo Sapiens
ugggcggggugauaaugaauauuuucaguuaa

SEQ ID NO: 223659 - RNA, 32 nt, Homo Sapiens
cauacauugccaucaacuuuguuuccucaucu

SEQ ID NO: 223660 - RNA, 32 nt, Homo Sapiens
ccaccuuccuuccaugguucccacccuccacg

SEQ ID NO: 223661 - RNA, 32 nt, Homo Sapiens
cuugauuuucuuuuccuuuauaaaugucuagu

SEQ ID NO: 223662 - RNA, 32 nt, Homo Sapiens
cuuugucaugucucugguggugcuggggcugg

SEQ ID NO: 223663 - RNA, 32 nt, Homo Sapiens
agcuuuuggagaguggguuuuguccauuauua

SEQ ID NO: 223664 - RNA, 32 nt, Homo Sapiens
aguuuugaucaguugugaauagagugcaaagc

SEQ ID NO: 223665 - RNA, 32 nt, Homo Sapiens
uuuucuuuccuuuauuugauugauggucauug

SEQ ID NO: 223666 - RNA, 32 nt, Homo Sapiens
cauccucauuuacaagggacauguggaaaguc

SEQ ID NO: 223667 - RNA, 32 nt, Homo Sapiens
cauuccuucuauuagggaaauucauuuuaccc

SEQ ID NO: 223668 - RNA, 32 nt, Homo Sapiens
ucuuuaugccucaguuuucucaucugguaaau

SEQ ID NO: 223669 - RNA, 32 nt, Homo Sapiens
ccgguucugugcgcuaaccccggagcccggcc

SEQ ID NO: 223670 - RNA, 32 nt, Homo Sapiens
aguguguauuuuucuuuuucuauaauaccuuu

SEQ ID NO: 223671 - RNA, 31 nt, Homo Sapiens
uucucgcugcgcagccuccagggcccgaggu

SEQ ID NO: 223672 - RNA, 32 nt, Homo Sapiens
cucaaacuucaggguuuuuucuuccuucaaau

SEQ ID NO: 223673 - RNA, 32 nt, Homo Sapiens
cacuaguaaguacauaauuugcuggcaugauu

SEQ ID NO: 223674 - RNA, 32 nt, Homo Sapiens
acucacguccuaacccccaggaccucagaaga

SEQ ID NO: 223675 - RNA, 32 nt, Homo Sapiens
auuaguaacuuuuagcugggaaaguauagcau

SEQ ID NO: 223676 - RNA, 32 nt, Homo Sapiens
caccaccugccaggcccggccacugagcagcc

SEQ ID NO: 223677 - RNA, 32 nt, Homo Sapiens
ucagcuuuuuaaaguggguuauucuggaguuu

SEQ ID NO: 223678 - RNA, 32 nt, Homo Sapiens
caccagaccccucccuccacauguggggauua

SEQ ID NO: 223679 - RNA, 32 nt, Homo Sapiens
aggaagaguuugggggcuguggagggaaggcu

SEQ ID NO: 223680 - RNA, 32 nt, Homo Sapiens
cucaugcugaauuauuuuugccuuacuuucuu

SEQ ID NO: 223681 - RNA, 32 nt, Homo Sapiens
gcuuuauucuuugugaaagugguauaauuuau

SEQ ID NO: 223682 - RNA, 32 nt, Homo Sapiens
gcggcguggaccggcgacggguggcacagcug

SEQ ID NO: 223683 - RNA, 32 nt, Homo Sapiens
cacuucuccuuccccuccucgaagcugguugg

SEQ ID NO: 223684 - RNA, 32 nt, Homo Sapiens
aauuuuguauuaugaaaugccuacuauaauua

SEQ ID NO: 223685 - RNA, 32 nt, Homo Sapiens
uuauuuugcauaaucaugcccuucacugacag

SEQ ID NO: 223686 - RNA, 32 nt, Homo Sapiens
caccccccauucuaucuuugucauguuaucag

SEQ ID NO: 223687 - RNA, 32 nt, Homo Sapiens
uucauuaaauguucaaaauuguaguuuuaaaa

SEQ ID NO: 223688 - RNA, 32 nt, Homo Sapiens
ugccccgcugauuaagaaauaugacgaggcca

SEQ ID NO: 223689 - RNA, 32 nt, Homo Sapiens
cuccgauuuuuagaugaguuuccugucuagag

SEQ ID NO: 223690 - RNA, 32 nt, Homo Sapiens
uggugaacaaguuacuauaccugcuguguaua

SEQ ID NO: 223691 - RNA, 32 nt, Homo Sapiens
ccuuuccucuucugcccuauucuucucagacc

SEQ ID NO: 223692 - RNA, 32 nt, Homo Sapiens
cauuuuuauugugauaaauguauguaaccauc

SEQ ID NO: 223693 - RNA, 32 nt, Homo Sapiens
caaagcuauuuucucaucuguccuguggauga

SEQ ID NO: 223694 - RNA, 32 nt, Homo Sapiens
gagaagcguggccaggcagguggcacguggca

SEQ ID NO: 223695 - RNA, 32 nt, Homo Sapiens
gccagccgguccccgcgugcccgccccuucuc

SEQ ID NO: 223696 - RNA, 31 nt, Homo Sapiens
gacaccauguccacaaugguguacauaaagg

SEQ ID NO: 223697 - RNA, 32 nt, Homo Sapiens
gccaaauuuggguuagccucuaucuugucuua

SEQ ID NO: 223698 - RNA, 32 nt, Homo Sapiens
auaauucaggacuuauuccuucuuguguugug

SEQ ID NO: 223699 - RNA, 32 nt, Homo Sapiens
gcgugggccgaguggccgcgggcgccauggag

SEQ ID NO: 223700 - RNA, 32 nt, Homo Sapiens
gaacggguauggacaggucauaaaccuagagu

SEQ ID NO: 223701 - RNA, 32 nt, Homo Sapiens
agagccccgcugugcacccccaucuccaccuc

SEQ ID NO: 223702 - RNA, 32 nt, Homo Sapiens
cuaauugugguagaaauuuuuaccaacucuau

SEQ ID NO: 223703 - RNA, 32 nt, Homo Sapiens
cccuggccacgcccaagggaagagggagguga

SEQ ID NO: 223704 - RNA, 32 nt, Homo Sapiens
ggggaagggaagugcggcucggucggcgcggg

SEQ ID NO: 223705 - RNA, 32 nt, Homo Sapiens
uuuacauugcuagauguacaaacuuuauacag

SEQ ID NO: 223706 - RNA, 32 nt, Homo Sapiens
gacagagggcuuucuguaucccagguucuugc

SEQ ID NO: 223707 - RNA, 32 nt, Homo Sapiens
gaucaggauucaguaacuguagucuugugagc

SEQ ID NO: 223708 - RNA, 31 nt, Homo Sapiens
guggagaaauaaaguucaaaauauauuaauu

SEQ ID NO: 223709 - RNA, 32 nt, Homo Sapiens
acuuugaaguuggagaagguggaauaaaguua

SEQ ID NO: 223710 - RNA, 32 nt, Homo Sapiens
ugcaagcgcugggccugccagacagaggcccc

SEQ ID NO: 223711 - RNA, 32 nt, Homo Sapiens
uuuuccauuuguaguuaauuauaggaaaagca

SEQ ID NO: 223712 - RNA, 32 nt, Homo Sapiens
caagcaguccuccaugugagcaaccccgagac

SEQ ID NO: 223713 - RNA, 30 nt, Homo Sapiens
augggagacggcuuugaugaguggagaaac

SEQ ID NO: 223714 - RNA, 32 nt, Homo Sapiens
aaagagccacccacauagcuucaccaacccuu

SEQ ID NO: 223715 - RNA, 27 nt, Homo Sapiens
uucuuuguauucuucaguccuuuuaca

SEQ ID NO: 223716 - RNA, 32 nt, Homo Sapiens
aaauauuuuuucuguaccuaacuugagcauaa

SEQ ID NO: 223717 - RNA, 32 nt, Homo Sapiens
agcuguauuuaguuauaauuuuuguaucuuac

SEQ ID NO: 223718 - RNA, 27 nt, Homo Sapiens
cucagcaccuucuucucuccuccagcu

SEQ ID NO: 223719 - RNA, 30 nt, Homo Sapiens
ccccaugucugugcugucuaguuuguguuc

SEQ ID NO: 223720 - RNA, 32 nt, Homo Sapiens
uuaacaccagaacacgaagccugcuucagaag

SEQ ID NO: 223721 - RNA, 32 nt, Homo Sapiens
agggauagcauuaggagauauaccuaaugcua

SEQ ID NO: 223722 - RNA, 32 nt, Homo Sapiens
agcauaacggaagggcuuggucuggauguaga

SEQ ID NO: 223723 - RNA, 32 nt, Homo Sapiens
acuugaaaagacugugaagauuuuuuacauug

SEQ ID NO: 223724 - RNA, 32 nt, Homo Sapiens
aacuccuaaucuuuuuauugucuccauaguuu

SEQ ID NO: 223725 - RNA, 32 nt, Homo Sapiens
ccccagcaugaagaccccggcggacacagggu

SEQ ID NO: 223726 - RNA, 32 nt, Homo Sapiens
uugagugggaagaauuuuaaaaccuuuauaug

SEQ ID NO: 223727 - RNA, 32 nt, Homo Sapiens
cauauaauaaugauucuuaaaugcuguauggu

SEQ ID NO: 223728 - RNA, 32 nt, Homo Sapiens
ccccagaugaucuccaggcagcucagaucucu

SEQ ID NO: 223729 - RNA, 32 nt, Homo Sapiens
cucccgcagcggggacugggugccccucugcc

SEQ ID NO: 223730 - RNA, 32 nt, Homo Sapiens
uaagcggauccgccaggcugagacccuggagc

SEQ ID NO: 223731 - RNA, 32 nt, Homo Sapiens
uauauagaaguaggaagaaggcauuauaaugu

SEQ ID NO: 223732 - RNA, 32 nt, Homo Sapiens
guugcccacugcacugccccagcccagcccca

SEQ ID NO: 223733 - RNA, 32 nt, Homo Sapiens
gaauuaaaauuugcaguuuaacaagaugacua

SEQ ID NO: 223734 - RNA, 32 nt, Homo Sapiens
aggcuguauguacaauccugggcauugacucu

SEQ ID NO: 223735 - RNA, 32 nt, Homo Sapiens
gggaacuccucaaaaaaucaugcagcggaacc

SEQ ID NO: 223736 - RNA, 32 nt, Homo Sapiens
aggaggcgggagagggagcugccaucucuagg

SEQ ID NO: 223737 - RNA, 32 nt, Homo Sapiens
aagguucuaaucacuuucauuacaggcauuug

SEQ ID NO: 223738 - RNA, 32 nt, Homo Sapiens
uacacaaugauuauaaguauuaaucuccauaa

SEQ ID NO: 223739 - RNA, 32 nt, Homo Sapiens
ugcugaggccggagcggagggcccgggagcgu

SEQ ID NO: 223740 - RNA, 30 nt, Homo Sapiens
aaguugaugcuaaugaggccaaccgauggg

SEQ ID NO: 223741 - RNA, 32 nt, Homo Sapiens
cuuucauaagugaguuacuaagauuucuauac

SEQ ID NO: 223742 - RNA, 32 nt, Homo Sapiens
cucacaccgcugcuccucuggaccucugucac

SEQ ID NO: 223743 - RNA, 32 nt, Homo Sapiens
aaauuuuuacuuuccaucuuaauguaaccuua

SEQ ID NO: 223744 - RNA, 32 nt, Homo Sapiens
cugcuccaguguuuccuucagagagaaguguu

SEQ ID NO: 223745 - RNA, 32 nt, Homo Sapiens
gccggugcucaauaaauguuuauucauugacg

SEQ ID NO: 223746 - RNA, 32 nt, Homo Sapiens
ggacuugguccgugaggccuugucaguaaggu

SEQ ID NO: 223747 - RNA, 32 nt, Homo Sapiens
ugcccuuggguggucacuuuucuuccuaggac

SEQ ID NO: 223748 - RNA, 32 nt, Homo Sapiens
cugucccggccgccauggagcagccgccggcg

SEQ ID NO: 223749 - RNA, 32 nt, Homo Sapiens
uaaauugugaaagucugguucuuaauuaaaga

SEQ ID NO: 223750 - RNA, 32 nt, Homo Sapiens
aaugugagagguugguacuaagaagugccuuu

SEQ ID NO: 223751 - RNA, 32 nt, Homo Sapiens
aacugcaggaccaguuucucugccaaggggag

SEQ ID NO: 223752 - RNA, 32 nt, Homo Sapiens
uuuuauguuaaaagagaggugaaucuucuuug

SEQ ID NO: 223753 - RNA, 32 nt, Homo Sapiens
uuuagucuuauguguugaaauguuuuuguaag

SEQ ID NO: 223754 - RNA, 32 nt, Homo Sapiens
aggugggguguggacccggcccuggcggcgga

SEQ ID NO: 223755 - RNA, 32 nt, Homo Sapiens
acgcugaccacguuccucuccucggucuccuc

SEQ ID NO: 223756 - RNA, 32 nt, Homo Sapiens
cagaggcgccuggccuccgcagagcugcaaag

SEQ ID NO: 223757 - RNA, 32 nt, Homo Sapiens
gcagcagccccggccccauccccgcccagagc

SEQ ID NO: 223758 - RNA, 32 nt, Homo Sapiens
acaauggaucacauuuucaugugcugugucuu

SEQ ID NO: 223759 - RNA, 32 nt, Homo Sapiens
cgauuggcucuagaucuacauucuucaaaaaa

SEQ ID NO: 223760 - RNA, 32 nt, Homo Sapiens
uguguaguuuauaaguuuuuccucuauuuauc

SEQ ID NO: 223761 - RNA, 32 nt, Homo Sapiens
cucucuggucccucaucgucauucccauuggc

SEQ ID NO: 223762 - RNA, 32 nt, Homo Sapiens
ccuuugagguagcuaaaaauggcagccaaaaa

SEQ ID NO: 223763 - RNA, 31 nt, Homo Sapiens
uauucucaagagguuugugaagauuuaaucu

SEQ ID NO: 223764 - RNA, 32 nt, Homo Sapiens
uaguuuuucuauuuuucaauagauuuguacuu

SEQ ID NO: 223765 - RNA, 32 nt, Homo Sapiens
cccggucgcucccguuccgcgccaugcagagc

SEQ ID NO: 223766 - RNA, 32 nt, Homo Sapiens
ccccugcuaucccuccucccauccuguacccc

SEQ ID NO: 223767 - RNA, 32 nt, Homo Sapiens
gaaaguuauuuucagacauauuugaaugacug

SEQ ID NO: 223768 - RNA, 32 nt, Homo Sapiens
ugcacuugagcagggaagaaauccacaaggac

SEQ ID NO: 223769 - RNA, 32 nt, Homo Sapiens
uuccaaauaguauuuuuguugucaaacuuuaa

SEQ ID NO: 223770 - RNA, 32 nt, Homo Sapiens
acuucuacaguucucccuuccacuucccuaag

SEQ ID NO: 223771 - RNA, 32 nt, Homo Sapiens
cucucccauucuccgagcuuguccucagagaa

SEQ ID NO: 223772 - RNA, 32 nt, Homo Sapiens
cuccguuuuuauuuauuuauuuccguucccgc

SEQ ID NO: 223773 - RNA, 32 nt, Homo Sapiens
guagccuugugcuucuugcuaagagaaagaaa

SEQ ID NO: 223774 - RNA, 32 nt, Homo Sapiens
uuauuuauacaagauugaaaaucuuguguaaa

SEQ ID NO: 223775 - RNA, 32 nt, Homo Sapiens
cuuccuccuuagaauuuagagauacaagaguu

SEQ ID NO: 223776 - RNA, 32 nt, Homo Sapiens
gcugcaguucccuacgugaaccugccuugggc

SEQ ID NO: 223777 - RNA, 32 nt, Homo Sapiens
guccuaucaguuaagagcugcuuguuauuugc

SEQ ID NO: 223778 - RNA, 32 nt, Homo Sapiens
ugggaggaucauuugagcccaggaguucgaga

SEQ ID NO: 223779 - RNA, 32 nt, Homo Sapiens
ccagacagcaccgcggaacucgguggcuucca

SEQ ID NO: 223780 - RNA, 32 nt, Homo Sapiens
uggauuuuguuauauagacaauuaaaaaagaa

SEQ ID NO: 223781 - RNA, 32 nt, Homo Sapiens
gacccuaggaccacgcaggagguggugggcuc

SEQ ID NO: 223782 - RNA, 32 nt, Homo Sapiens
cugccgggcaucggcuucccguccgccgcgcc

SEQ ID NO: 223783 - RNA, 32 nt, Homo Sapiens
uugcccgccuuggccucccaaagugcugggau

SEQ ID NO: 223784 - RNA, 32 nt, Homo Sapiens
acggccuuuucucuugcuugccugcggugcca

SEQ ID NO: 223785 - RNA, 32 nt, Homo Sapiens
ucaaccuguaaauuauuuuaaauuauaaggac

SEQ ID NO: 223786 - RNA, 32 nt, Homo Sapiens
ggcccucugugccuuucccuaggccgaggggu

SEQ ID NO: 223787 - RNA, 32 nt, Homo Sapiens
cagguuuuuccccacaccucugaacucagggc

SEQ ID NO: 223788 - RNA, 32 nt, Homo Sapiens
cugagcuggugcccuccugccacccaagcugc

SEQ ID NO: 223789 - RNA, 29 nt, Homo Sapiens
aaauaaaaugacuguuacauuuuucaaau

SEQ ID NO: 223790 - RNA, 32 nt, Homo Sapiens
gaucuccuggucuggggccugauucucaggaa

SEQ ID NO: 223791 - RNA, 32 nt, Homo Sapiens
gggggguauuccaggaccagcugguagggggg

SEQ ID NO: 223792 - RNA, 32 nt, Homo Sapiens
cuuucuuuuucuuuugugcuccuuggaaguua

SEQ ID NO: 223793 - RNA, 32 nt, Homo Sapiens
uuagaggagcccaguguccuaaccucucucag

SEQ ID NO: 223794 - RNA, 32 nt, Homo Sapiens
cucuauaaugcacccgaggggcgauacaagca

SEQ ID NO: 223795 - RNA, 32 nt, Homo Sapiens
uacccaaaagauuuguuuauauuguuaaucuu

SEQ ID NO: 223796 - RNA, 32 nt, Homo Sapiens
acauguuugaauugucaaauauaaaauaaugu

SEQ ID NO: 223797 - RNA, 32 nt, Homo Sapiens
ccuuggggccccacaccccgucucucaccaag

SEQ ID NO: 223798 - RNA, 32 nt, Homo Sapiens
gugcggcaagucuacugcgggcugguccgggc

SEQ ID NO: 223799 - RNA, 32 nt, Homo Sapiens
ucccucagguccaccuucuccuccaggagguc

SEQ ID NO: 223800 - RNA, 30 nt, Homo Sapiens
caggccguggggcgcgagggucccgggccu

SEQ ID NO: 223801 - RNA, 32 nt, Homo Sapiens
auccuaguucccuagcucucccauuuuugaau

SEQ ID NO: 223802 - RNA, 32 nt, Homo Sapiens
cuccaucugcucgaggcagcuuucucgaaccu

SEQ ID NO: 223803 - RNA, 32 nt, Homo Sapiens
uucuagugcaugccacaguucgcaguagaggg

SEQ ID NO: 223804 - RNA, 27 nt, Homo Sapiens
ucccccuguaccuucagccccugugca

SEQ ID NO: 223805 - RNA, 32 nt, Homo Sapiens
uauaguucacaaauaaugcuuaaaagacauau

SEQ ID NO: 223806 - RNA, 32 nt, Homo Sapiens
cauuuaucuucccuugucuuccugcuuugcau

SEQ ID NO: 223807 - RNA, 32 nt, Homo Sapiens
ggguggggccgaguggcugcccugccccccuc

SEQ ID NO: 223808 - RNA, 32 nt, Homo Sapiens
auguaacaaaaauacccaaguguauucccagu

SEQ ID NO: 223809 - RNA, 32 nt, Homo Sapiens
cgcugaugaugaugaugagaagcucuucuucc

SEQ ID NO: 223810 - RNA, 32 nt, Homo Sapiens
ccucggaggaggagggccgguccggcagugca

SEQ ID NO: 223811 - RNA, 32 nt, Homo Sapiens
gcuaguacaucauucaugaucaccuuaaugcu

SEQ ID NO: 223812 - RNA, 32 nt, Homo Sapiens
cccgacgccgacggccucucaguggcucccgg

SEQ ID NO: 223813 - RNA, 32 nt, Homo Sapiens
ccccggggugguuuccucgccuggcccccgag

SEQ ID NO: 223814 - RNA, 31 nt, Homo Sapiens
gauaaucuugguaauuuaaauguggcugauu

SEQ ID NO: 223815 - RNA, 32 nt, Homo Sapiens
cuguuagcugggugggugucaucagccccugc

SEQ ID NO: 223816 - RNA, 32 nt, Homo Sapiens
guuggggcggccuggcucccucagguuuaaga

SEQ ID NO: 223817 - RNA, 31 nt, Homo Sapiens
gucacuacugccugccugccugccugcuacg

SEQ ID NO: 223818 - RNA, 32 nt, Homo Sapiens
agugcggagcgaccagcgugcgcucggaggaa

SEQ ID NO: 223819 - RNA, 30 nt, Homo Sapiens
cuagggccacuugcuugauuuaucaugaga

SEQ ID NO: 223820 - RNA, 32 nt, Homo Sapiens
guucccagaucaaccugccaguggagucaggc

SEQ ID NO: 223821 - RNA, 32 nt, Homo Sapiens
gcccucgcccgcguccccggccgcggcgugau

SEQ ID NO: 223822 - RNA, 32 nt, Homo Sapiens
ccacagaagauaacaacacccaaguccucuuu

SEQ ID NO: 223823 - RNA, 32 nt, Homo Sapiens
gugugaauugacaagcacuuuuacugacaaau

SEQ ID NO: 223824 - RNA, 32 nt, Homo Sapiens
uggagggacuuccaguuuuaacaauggguugg

SEQ ID NO: 223825 - RNA, 32 nt, Homo Sapiens
cugcccagagcugaguuggggguguggcucug

SEQ ID NO: 223826 - RNA, 32 nt, Homo Sapiens
uccggcaguccagggccuccucccgagcacag

SEQ ID NO: 223827 - RNA, 32 nt, Homo Sapiens
ccgcacugcugccugggcgcggcggcggcgac

SEQ ID NO: 223828 - RNA, 32 nt, Homo Sapiens
auuggugagcugcauauauaaauuugacagau

SEQ ID NO: 223829 - RNA, 32 nt, Homo Sapiens
ggucggagcucggagcugcugcuucugguucu

SEQ ID NO: 223830 - RNA, 32 nt, Homo Sapiens
ggcugaggcaaggucagcgagagacaguucuc

SEQ ID NO: 223831 - RNA, 32 nt, Homo Sapiens
uccacugccucccagguucaugccauucuccu

SEQ ID NO: 223832 - RNA, 32 nt, Homo Sapiens
aauauuuuuagacucugugcugucauacugaa

SEQ ID NO: 223833 - RNA, 32 nt, Homo Sapiens
agaccaagcgccccuccuggggcugcugcagc

SEQ ID NO: 223834 - RNA, 32 nt, Homo Sapiens
augagggauggcccggccaaagucuaggcaga

SEQ ID NO: 223835 - RNA, 32 nt, Homo Sapiens
aggauuggcucccaggacccaggccccgccuc

SEQ ID NO: 223836 - RNA, 32 nt, Homo Sapiens
agcuguugauaaaggggcaggcuugcguuauu

SEQ ID NO: 223837 - RNA, 32 nt, Homo Sapiens
gaagcgcacggccugcgccgggggcucccgcu

SEQ ID NO: 223838 - RNA, 32 nt, Homo Sapiens
cuuucaccuuggauuaucgugacagccuccua

SEQ ID NO: 223839 - RNA, 29 nt, Homo Sapiens
agccuccggguccgggucugggucugggu

SEQ ID NO: 223840 - RNA, 30 nt, Homo Sapiens
cacgagggucacggcggcggggagaggugg

SEQ ID NO: 223841 - RNA, 32 nt, Homo Sapiens
guguauuggggacagaaaguuguguaaagcuu

SEQ ID NO: 223842 - RNA, 32 nt, Homo Sapiens
cuugaagaauaaaaacuacccucagaaauauu

SEQ ID NO: 223843 - RNA, 32 nt, Homo Sapiens
uuguuugugcuaauuugggaauuguguacucc

SEQ ID NO: 223844 - RNA, 32 nt, Homo Sapiens
uucuuucucucguggcuccccagcuguaucac

SEQ ID NO: 223845 - RNA, 32 nt, Homo Sapiens
ugaguagucgcauguguggacaucaguaggca

SEQ ID NO: 223846 - RNA, 32 nt, Homo Sapiens
aggcucugucuggaagauggggaccagcagcc

SEQ ID NO: 223847 - RNA, 32 nt, Homo Sapiens
uugucgccaaacuuggguauucauggaauuuc

SEQ ID NO: 223848 - RNA, 32 nt, Homo Sapiens
gaucugaaaauauuaaaugaaaaauuccagaa

SEQ ID NO: 223849 - RNA, 32 nt, Homo Sapiens
aauucuuaaacacuggagagccauccuuuggu

SEQ ID NO: 223850 - RNA, 32 nt, Homo Sapiens
ggccacugagucggggacuccggaacugaaau

SEQ ID NO: 223851 - RNA, 32 nt, Homo Sapiens
aacuagaaaaucuggaaccuuacuucucuggg

SEQ ID NO: 223852 - RNA, 32 nt, Homo Sapiens
cgcccuggcccaccggccccacucccugggca

SEQ ID NO: 223853 - RNA, 27 nt, Homo Sapiens
ccauggggcagcccugggcggcuggga

SEQ ID NO: 223854 - RNA, 32 nt, Homo Sapiens
caaacauugguuauuucacugaaacagauuuu

SEQ ID NO: 223855 - RNA, 32 nt, Homo Sapiens
cggcggcugcugcuccagacaccugcggcggc

SEQ ID NO: 223856 - RNA, 32 nt, Homo Sapiens
cuuccgcccgguucuccuucccgcagucugca

SEQ ID NO: 223857 - RNA, 32 nt, Homo Sapiens
auggggcugggccagcucucugggauacagcc

SEQ ID NO: 223858 - RNA, 32 nt, Homo Sapiens
augaccuucccagggagaaacccacgaccugu

SEQ ID NO: 223859 - RNA, 32 nt, Homo Sapiens
guuacuccaccgagcuagcccuguggaagggg

SEQ ID NO: 223860 - RNA, 31 nt, Homo Sapiens
ccagcacagagcugccugcguccagcucccu

SEQ ID NO: 223861 - RNA, 32 nt, Homo Sapiens
gaaugaugugaccuccccggcgcucacccugg

SEQ ID NO: 223862 - RNA, 32 nt, Homo Sapiens
cuuagaucugauuccuguuuugaaaguccugc

SEQ ID NO: 223863 - RNA, 32 nt, Homo Sapiens
cagauaaucuuccaauggaaauccaugguuca

SEQ ID NO: 223864 - RNA, 29 nt, Homo Sapiens
uggcuaaagaaauuauauuuuguucuauu

SEQ ID NO: 223865 - RNA, 32 nt, Homo Sapiens
caggggagcuguagaagaauuccuccuuuucu

SEQ ID NO: 223866 - RNA, 32 nt, Homo Sapiens
auaacaucuagacuuaauauauuguggaguau

SEQ ID NO: 223867 - RNA, 32 nt, Homo Sapiens
gagagcugagcugccccuaggaccccuccuuu

SEQ ID NO: 223868 - RNA, 32 nt, Homo Sapiens
gggccuguuuucuuacggcggcaugccaggua

SEQ ID NO: 223869 - RNA, 32 nt, Homo Sapiens
uuuuuccacccuggcuccuucagacacgugcu

SEQ ID NO: 223870 - RNA, 32 nt, Homo Sapiens
cuuuuucuuuuuuuuucuuuuuacuuuuuuug

SEQ ID NO: 223871 - RNA, 32 nt, Homo Sapiens
ucccgcacuuugguggggaggggguggauccu

SEQ ID NO: 223872 - RNA, 31 nt, Homo Sapiens
gauccugggccggucguguuaggguuguccc

SEQ ID NO: 223873 - RNA, 32 nt, Homo Sapiens
ucguucuccaugaccugucccagaaacacgug

SEQ ID NO: 223874 - RNA, 32 nt, Homo Sapiens
gucucaaaccacaacuaagaagcacuucaacg

SEQ ID NO: 223875 - RNA, 32 nt, Homo Sapiens
agcuugcacguuacaucaccgaugcaucucuu

SEQ ID NO: 223876 - RNA, 32 nt, Homo Sapiens
ugacauuaaaaacacauacacuuuuuaaaaaa

SEQ ID NO: 223877 - RNA, 32 nt, Homo Sapiens
aaacauuaaggguacccgggcacaaccguacc

SEQ ID NO: 223878 - RNA, 32 nt, Homo Sapiens
cucacuuuauuacaagaucuuuccaaauaccc

SEQ ID NO: 223879 - RNA, 32 nt, Homo Sapiens
auaugcaauauuucuucuggcuucucaugggg

SEQ ID NO: 223880 - RNA, 32 nt, Homo Sapiens
cagucuccgcggcugcgucgagcucccuugca

SEQ ID NO: 223881 - RNA, 32 nt, Homo Sapiens
uuguaaaagaagaaagagcaaaaagcugugug

SEQ ID NO: 223882 - RNA, 32 nt, Homo Sapiens
cccagggagguaguucauucagucauggaaca

SEQ ID NO: 223883 - RNA, 32 nt, Homo Sapiens
gcuuccuccugguccccaagggcccgcccucu

SEQ ID NO: 223884 - RNA, 32 nt, Homo Sapiens
cuccccuggcugauguucucugggacauuuuc

SEQ ID NO: 223885 - RNA, 32 nt, Homo Sapiens
ucugcucaccuuccaaaggcaccuggaggugc

SEQ ID NO: 223886 - RNA, 32 nt, Homo Sapiens
uauuuuaucuuaaauugugauuuuaaacgagc

SEQ ID NO: 223887 - RNA, 32 nt, Homo Sapiens
cugucucacccuugcuugcaaaacagauggcc

SEQ ID NO: 223888 - RNA, 32 nt, Homo Sapiens
gagugccggggaguuccuggggagccgggcuu

SEQ ID NO: 223889 - RNA, 32 nt, Homo Sapiens
ccgcgccgcgcuccacaaaagccccgggaguu

SEQ ID NO: 223890 - RNA, 32 nt, Homo Sapiens
gcucucccggcggcucaugcugccggcccugc

SEQ ID NO: 223891 - RNA, 32 nt, Homo Sapiens
gaaaccacagaaagaaaacuacagaccucaag

SEQ ID NO: 223892 - RNA, 32 nt, Homo Sapiens
cauggcagaaaagaaaggggcgccagcauaug

SEQ ID NO: 223893 - RNA, 32 nt, Homo Sapiens
uccccuucccaaccccgaggggcuugcaggga

SEQ ID NO: 223894 - RNA, 32 nt, Homo Sapiens
gaagggcucugauaggcccacuccucuucucc

SEQ ID NO: 223895 - RNA, 32 nt, Homo Sapiens
ccugguccaccucucauugcaagccccaagca

SEQ ID NO: 223896 - RNA, 32 nt, Homo Sapiens
guuuuauuuucuuuuucccuguuuagcauuuu

SEQ ID NO: 223897 - RNA, 32 nt, Homo Sapiens
uguauaucaugaagugggaugccaaguaagcu

SEQ ID NO: 223898 - RNA, 32 nt, Homo Sapiens
uggaagccccgacacgagccccggcccgcgcg

SEQ ID NO: 223899 - RNA, 32 nt, Homo Sapiens
gcgcccgaagcugagugcgcauccucuaccgc

SEQ ID NO: 223900 - RNA, 32 nt, Homo Sapiens
aaucucaucccucuccuaagugagcccugagc

SEQ ID NO: 223901 - RNA, 32 nt, Homo Sapiens
agagagaaacugaguuccugacaaugcauuca

SEQ ID NO: 223902 - RNA, 32 nt, Homo Sapiens
uacaggcgugagccaccacaccuggccagcuc

SEQ ID NO: 223903 - RNA, 32 nt, Homo Sapiens
aaccaauuuguauuuucauauuaggcuuaauc

SEQ ID NO: 223904 - RNA, 32 nt, Homo Sapiens
guucauuuaaacugcaccuugcagaaaugcau

SEQ ID NO: 223905 - RNA, 32 nt, Homo Sapiens
auuaauucuuucugcccuucaguucuuuaucc

SEQ ID NO: 223906 - RNA, 32 nt, Homo Sapiens
aggaaggcgauacucucgcucacgcagcagga

SEQ ID NO: 223907 - RNA, 32 nt, Homo Sapiens
gcuugcacuccgguacccgacccggcgcccug

SEQ ID NO: 223908 - RNA, 32 nt, Homo Sapiens
ucuaccaaaaauaaaaauaaaaauuauccagg

SEQ ID NO: 223909 - RNA, 32 nt, Homo Sapiens
auccucuguccaaauauuguauauuauuaaaa

SEQ ID NO: 223910 - RNA, 30 nt, Homo Sapiens
cccgggcuggacugcgcuaucucugaaggg

SEQ ID NO: 223911 - RNA, 32 nt, Homo Sapiens
cuaugugaaaguugaggacaauuuauauaacu

SEQ ID NO: 223912 - RNA, 32 nt, Homo Sapiens
aggcgccgcccggguguccccgcggcgcagga

SEQ ID NO: 223913 - RNA, 32 nt, Homo Sapiens
gucacucuacugcuguuuccuguguccacaug

SEQ ID NO: 223914 - RNA, 32 nt, Homo Sapiens
aacaagcaaugggaaaaagacucccuauuuua

SEQ ID NO: 223915 - RNA, 32 nt, Homo Sapiens
ucaugcugcuguauguccaaguauuguuauuu

SEQ ID NO: 223916 - RNA, 32 nt, Homo Sapiens
gcauuuucacugucaaagaaaguucuauuaga

SEQ ID NO: 223917 - RNA, 31 nt, Homo Sapiens
agacagaguuucgcacuucuugcccaggcug

SEQ ID NO: 223918 - RNA, 32 nt, Homo Sapiens
gccgccuggccgggcguagacgcgguggcaga

SEQ ID NO: 223919 - RNA, 32 nt, Homo Sapiens
uuggauucugaaaacuaacuggcaucaacacu

SEQ ID NO: 223920 - RNA, 32 nt, Homo Sapiens
cuggguugggggcuagggagacgccaugugau

SEQ ID NO: 223921 - RNA, 30 nt, Homo Sapiens
aauggauuuggggauggggaaacaugcaca

SEQ ID NO: 223922 - RNA, 32 nt, Homo Sapiens
cuuuaucugaagauuuucagcugaugaagaac

SEQ ID NO: 223923 - RNA, 32 nt, Homo Sapiens
gucaggcggcgucagcgggcgcggcggagggc

SEQ ID NO: 223924 - RNA, 32 nt, Homo Sapiens
accaccauccaacagaccuggugcucuaaugc

SEQ ID NO: 223925 - RNA, 32 nt, Homo Sapiens
ggggauuuguaagacuuagaugagauagcgca

SEQ ID NO: 223926 - RNA, 32 nt, Homo Sapiens
ccgugacuggccgggccuggggucgcugucaa

SEQ ID NO: 223927 - RNA, 30 nt, Homo Sapiens
ugcaacuugcccgugccuuugggugcugug

SEQ ID NO: 223928 - RNA, 32 nt, Homo Sapiens
gcuugaauucuauuuucuagugauuuuucaca

SEQ ID NO: 223929 - RNA, 32 nt, Homo Sapiens
uuuuuauacuuugagaguacaaaugcagauuu

SEQ ID NO: 223930 - RNA, 32 nt, Homo Sapiens
caggcuuucccacuucccacccugccccucag

SEQ ID NO: 223931 - RNA, 32 nt, Homo Sapiens
aggcccaaccucagccugcuguggcugagcga

SEQ ID NO: 223932 - RNA, 32 nt, Homo Sapiens
accucucccagaguggccccagcuccacggcg

SEQ ID NO: 223933 - RNA, 32 nt, Homo Sapiens
cuucaggaugguuuuuaaauuugguaugagau

SEQ ID NO: 223934 - RNA, 32 nt, Homo Sapiens
aaauaaauaaguaaacaaaaugaagauugccu

SEQ ID NO: 223935 - RNA, 32 nt, Homo Sapiens
uggccccacucugggaagguggccagaaaccg

SEQ ID NO: 223936 - RNA, 32 nt, Homo Sapiens
uguugacagaucccugaacuaauuauagugaa

SEQ ID NO: 223937 - RNA, 32 nt, Homo Sapiens
auucccaggaggaaaagguggcagagagggca

SEQ ID NO: 223938 - RNA, 32 nt, Homo Sapiens
cuacccucgggcagcacagcggggcugggacu

SEQ ID NO: 223939 - RNA, 32 nt, Homo Sapiens
gggcgccgccgccgcccgccucagcccaacau

SEQ ID NO: 223940 - RNA, 32 nt, Homo Sapiens
cccggcgcccgcagccccggcgccgccauggu

SEQ ID NO: 223941 - RNA, 32 nt, Homo Sapiens
ggcugccauaaccaaacaccacagacuaggug

SEQ ID NO: 223942 - RNA, 31 nt, Homo Sapiens
aaaacuggcccugcccugccccugccccauu

SEQ ID NO: 223943 - RNA, 32 nt, Homo Sapiens
gaaagccccuccccgaccuucggucccuccgc

SEQ ID NO: 223944 - RNA, 30 nt, Homo Sapiens
ucagauuuggacugcuuuucacaguugagg

SEQ ID NO: 223945 - RNA, 32 nt, Homo Sapiens
gaucccaggccacgcgccagccaggcuguggg

SEQ ID NO: 223946 - RNA, 32 nt, Homo Sapiens
ggcggggcggcauggccaccaccgcgcaguac

SEQ ID NO: 223947 - RNA, 32 nt, Homo Sapiens
ccaucuaugggggguggggcgagggcuaggcc

SEQ ID NO: 223948 - RNA, 32 nt, Homo Sapiens
ccuacaaugaaagcccucaugugcaguagaga

SEQ ID NO: 223949 - RNA, 32 nt, Homo Sapiens
ccauugguuacaaaacagacacagccaagaua

SEQ ID NO: 223950 - RNA, 32 nt, Homo Sapiens
aaucaagcugaaacuuuuuugauguucaugua

SEQ ID NO: 223951 - RNA, 32 nt, Homo Sapiens
cgagccagccggcgggcgucccggaggcggug

SEQ ID NO: 223952 - RNA, 32 nt, Homo Sapiens
uuacuucuuugccaucagcaagaguaggauuu

SEQ ID NO: 223953 - RNA, 32 nt, Homo Sapiens
agagaaagaaguccucuuggggcuuuuuaguu

SEQ ID NO: 223954 - RNA, 32 nt, Homo Sapiens
gagcaugauuccacagcuuuucugggauguuu

SEQ ID NO: 223955 - RNA, 32 nt, Homo Sapiens
gcucuagggccucagucuggagugggauagga

SEQ ID NO: 223956 - RNA, 32 nt, Homo Sapiens
ccuuugaacuguuguacuuaugcugaggaugc

SEQ ID NO: 223957 - RNA, 32 nt, Homo Sapiens
ugcaguagaaauaagugguuuacuucucccau

SEQ ID NO: 223958 - RNA, 32 nt, Homo Sapiens
uuauguaaaaauuugcauuucuaccuauuuua

SEQ ID NO: 223959 - RNA, 32 nt, Homo Sapiens
ugcugcuccuccucccagccccggcccauucc

SEQ ID NO: 223960 - RNA, 32 nt, Homo Sapiens
ggggcagaaaucaaaucagcccaaggauauag

SEQ ID NO: 223961 - RNA, 32 nt, Homo Sapiens
ggccccgacagagauugugagaacaguaagug

SEQ ID NO: 223962 - RNA, 32 nt, Homo Sapiens
gccugcugcauaacucuuaaauuugauuauuc

SEQ ID NO: 223963 - RNA, 32 nt, Homo Sapiens
cccccagggaccagcacugugucccucccccu

SEQ ID NO: 223964 - RNA, 32 nt, Homo Sapiens
guuagcaauauuuauagggcuuuuauuuuuua

SEQ ID NO: 223965 - RNA, 32 nt, Homo Sapiens
uuucuuacccucacauugaaaugaggauuuug

SEQ ID NO: 223966 - RNA, 32 nt, Homo Sapiens
acucccuauuuugggcccucacuuccuugggg

SEQ ID NO: 223967 - RNA, 32 nt, Homo Sapiens
gccaccaagcccucaagaaguugugcccuucc

SEQ ID NO: 223968 - RNA, 32 nt, Homo Sapiens
caaaucauugaucaaaguauuggucugucacc

SEQ ID NO: 223969 - RNA, 32 nt, Homo Sapiens
guuucucuggggaugccuggguugggagugga

SEQ ID NO: 223970 - RNA, 32 nt, Homo Sapiens
auucugcacugaccgagggccagauguaccaa

SEQ ID NO: 223971 - RNA, 31 nt, Homo Sapiens
guugcucauuugacaaaauaagguaaggauu

SEQ ID NO: 223972 - RNA, 32 nt, Homo Sapiens
gggggcacccaguggggugcugagugggcaga

SEQ ID NO: 223973 - RNA, 32 nt, Homo Sapiens
accccaagagaauugucacacaugacacaaga

SEQ ID NO: 223974 - RNA, 32 nt, Homo Sapiens
cccccgguucaccaccugaaccacgggccgcc

SEQ ID NO: 223975 - RNA, 32 nt, Homo Sapiens
guuauuggacuaucuaauaucuauguauuuau

SEQ ID NO: 223976 - RNA, 32 nt, Homo Sapiens
agucacugcuaguguucaaaauaaaaauguua

SEQ ID NO: 223977 - RNA, 32 nt, Homo Sapiens
caauguaguaaaaugaaagagaauuaagaaag

SEQ ID NO: 223978 - RNA, 32 nt, Homo Sapiens
aaugggggcaagauccuggggcugugugcccu

SEQ ID NO: 223979 - RNA, 32 nt, Homo Sapiens
aggcaaagggggcaauggcggcuuccuguguu

SEQ ID NO: 223980 - RNA, 32 nt, Homo Sapiens
aaucucucgucuccgcacacagggagaacacc

SEQ ID NO: 223981 - RNA, 32 nt, Homo Sapiens
uacucuuuuaucagaucacaaacuccuagagu

SEQ ID NO: 223982 - RNA, 32 nt, Homo Sapiens
gagaagaccccacuaaaagaguccagugucac

SEQ ID NO: 223983 - RNA, 32 nt, Homo Sapiens
ggguggacuuucucaauugcucugccaggagg

SEQ ID NO: 223984 - RNA, 32 nt, Homo Sapiens
aauaagcugauuuuaaugacguuuucaacugg

SEQ ID NO: 223985 - RNA, 32 nt, Homo Sapiens
gagcgcauugagccaguggugcuaaaugcuac

SEQ ID NO: 223986 - RNA, 32 nt, Homo Sapiens
gggugauaaaguuuucuguuucccugguuuuc

SEQ ID NO: 223987 - RNA, 32 nt, Homo Sapiens
gggcucagcuccuggggugauaucuagccugc

SEQ ID NO: 223988 - RNA, 32 nt, Homo Sapiens
cccacgccgggcgauauggggugccugcuguu

SEQ ID NO: 223989 - RNA, 32 nt, Homo Sapiens
cgcuuugagcccagaggugcggugccgcacgc

SEQ ID NO: 223990 - RNA, 32 nt, Homo Sapiens
uaaaaaccacccacaaagaaacaaagcaaauu

SEQ ID NO: 223991 - RNA, 32 nt, Homo Sapiens
gcccuccuccaacuccucccgcccccaacucc

SEQ ID NO: 223992 - RNA, 32 nt, Homo Sapiens
caauaaugaccuaaaacaccuuuuugaaaggg

SEQ ID NO: 223993 - RNA, 32 nt, Homo Sapiens
gggaccuugagugcggcgaggcguggcuguuu

SEQ ID NO: 223994 - RNA, 32 nt, Homo Sapiens
uuggagugaugaauguaguuuacuuuuguauu

SEQ ID NO: 223995 - RNA, 32 nt, Homo Sapiens
cccacagcuuccgcccacagaccuccagggac

SEQ ID NO: 223996 - RNA, 32 nt, Homo Sapiens
caaagacggguauuguugggaaaggaacaggc

SEQ ID NO: 223997 - RNA, 32 nt, Homo Sapiens
gcuuuauuacaauuugagaaauuauaaacuuu

SEQ ID NO: 223998 - RNA, 32 nt, Homo Sapiens
gacuagauuucagaaauuaauuauuacaggga

SEQ ID NO: 223999 - RNA, 32 nt, Homo Sapiens
ccagcuccagcaccacccuugccccaagucuu

SEQ ID NO: 224000 - RNA, 32 nt, Homo Sapiens
uaagagaggcuuccagguccagcccucccgcu

SEQ ID NO: 224001 - RNA, 32 nt, Homo Sapiens
ucuggcugcauuaauauugaaacuacucugcc

SEQ ID NO: 224002 - RNA, 32 nt, Homo Sapiens
gggugugggaugcacggccucgugggggccgg

SEQ ID NO: 224003 - RNA, 32 nt, Homo Sapiens
cuuugacaaaaauguguacuguguaagccuug

SEQ ID NO: 224004 - RNA, 32 nt, Homo Sapiens
acaggugcucuagccauuaggaccacaaaugg

SEQ ID NO: 224005 - RNA, 32 nt, Homo Sapiens
cucacucuugucaccuaggcaagagugcaaug

SEQ ID NO: 224006 - RNA, 32 nt, Homo Sapiens
acauugagaaaguuauggaagcaacugucacu

SEQ ID NO: 224007 - RNA, 32 nt, Homo Sapiens
cucuuggaaagcacauccuaagaucuuugcag

SEQ ID NO: 224008 - RNA, 32 nt, Homo Sapiens
acgcgggguuuuucuucucuugaauauaucuu

SEQ ID NO: 224009 - RNA, 32 nt, Homo Sapiens
ccaaggagaaaguggaccagcucccaugaccu

SEQ ID NO: 224010 - RNA, 32 nt, Homo Sapiens
cuuccugucuuugcucccuccccucucuuaga

SEQ ID NO: 224011 - RNA, 32 nt, Homo Sapiens
auacaaaaaaucagcugggcgugguggugggu

SEQ ID NO: 224012 - RNA, 32 nt, Homo Sapiens
uuccaugggcgccgcgcucgccugcagccgcc

SEQ ID NO: 224013 - RNA, 32 nt, Homo Sapiens
ccucacacucggagcucgccugcccugcuugg

SEQ ID NO: 224014 - RNA, 32 nt, Homo Sapiens
uucuggucggagcggcuuacaugauggcagug

SEQ ID NO: 224015 - RNA, 32 nt, Homo Sapiens
acaucaaaacaucuaaaagagugcaaacagac

SEQ ID NO: 224016 - RNA, 32 nt, Homo Sapiens
aaagcagcccuccccucccuccccuuaugagg

SEQ ID NO: 224017 - RNA, 32 nt, Homo Sapiens
gcguuucgcucuuguugcccaggcuagcaugc

SEQ ID NO: 224018 - RNA, 32 nt, Homo Sapiens
cauacagguuuggagauuaggacauuaacauu

SEQ ID NO: 224019 - RNA, 32 nt, Homo Sapiens
gauuugcacucuugguucuuuggagccuugug

SEQ ID NO: 224020 - RNA, 32 nt, Homo Sapiens
auuuggagaugugaagauacacugcuuuaagg

SEQ ID NO: 224021 - RNA, 32 nt, Homo Sapiens
gacucccugaagaucucauccucuucacaccu

SEQ ID NO: 224022 - RNA, 32 nt, Homo Sapiens
cuggaucuccugccuccucccgaggagaggga

SEQ ID NO: 224023 - RNA, 32 nt, Homo Sapiens
aacuuuccuuaaaguucucauugccuuugcac

SEQ ID NO: 224024 - RNA, 32 nt, Homo Sapiens
gccacacacuuguguuuuugagggaucagaaa

SEQ ID NO: 224025 - RNA, 32 nt, Homo Sapiens
uaguuuacaaauuuauauuaccaccagcauug

SEQ ID NO: 224026 - RNA, 32 nt, Homo Sapiens
ugcccucacgggggagcccgcccucacgugca

SEQ ID NO: 224027 - RNA, 32 nt, Homo Sapiens
cugccgcagacacgcaggacccgcucgcccuc

SEQ ID NO: 224028 - RNA, 32 nt, Homo Sapiens
cuuuggccucuccagcagggugcuccugcucu

SEQ ID NO: 224029 - RNA, 32 nt, Homo Sapiens
agagaacugaagauuccuggugcuuuuguuaa

SEQ ID NO: 224030 - RNA, 32 nt, Homo Sapiens
ugaaaauaacucccaaaagcaacaaacaaaaa

SEQ ID NO: 224031 - RNA, 32 nt, Homo Sapiens
cuccugcccuccccuccccagcaggaggcagg

SEQ ID NO: 224032 - RNA, 32 nt, Homo Sapiens
guccuucugaccagcuuggaucuuuaaaauaa

SEQ ID NO: 224033 - RNA, 32 nt, Homo Sapiens
uccccuucaucccacccugcucagcauuuaca

SEQ ID NO: 224034 - RNA, 32 nt, Homo Sapiens
auucuugaauguauuaaaauggcugaaacaac

SEQ ID NO: 224035 - RNA, 32 nt, Homo Sapiens
gagguguauauacagggaggccaggcagccug

SEQ ID NO: 224036 - RNA, 32 nt, Homo Sapiens
accugccaccgccuuugccauuucuuugagcu

SEQ ID NO: 224037 - RNA, 32 nt, Homo Sapiens
ucaccuggccuggccucagcuggcuuuugggg

SEQ ID NO: 224038 - RNA, 32 nt, Homo Sapiens
ggaaggguccugggccccgggcggcggucgcc

SEQ ID NO: 224039 - RNA, 32 nt, Homo Sapiens
ugaaauuaugaccaggugggcccgaguuagua

SEQ ID NO: 224040 - RNA, 32 nt, Homo Sapiens
cuaguaagagaaaaaauauaaagagaauauaa

SEQ ID NO: 224041 - RNA, 32 nt, Homo Sapiens
auaacaaguucacuucuguuuauguuuugagu

SEQ ID NO: 224042 - RNA, 32 nt, Homo Sapiens
gcucugcucgcgccagcucgcucccgcagcca

SEQ ID NO: 224043 - RNA, 32 nt, Homo Sapiens
ccccagcucuaagggagguggcagcaucaaag

SEQ ID NO: 224044 - RNA, 32 nt, Homo Sapiens
aaaguugaaaauaaacuggaaugaucaucuug

SEQ ID NO: 224045 - RNA, 32 nt, Homo Sapiens
gaguguguuucauuuguucuguugccaagaau

SEQ ID NO: 224046 - RNA, 32 nt, Homo Sapiens
aucuugucugaauaugucgugcaggcuguggu

SEQ ID NO: 224047 - RNA, 32 nt, Homo Sapiens
cagaagcaaccucuggaagaccaguuucuuuc

SEQ ID NO: 224048 - RNA, 32 nt, Homo Sapiens
gaagagaggccgggcugcugcagaaccccgcc

SEQ ID NO: 224049 - RNA, 32 nt, Homo Sapiens
cucugcgggacucugaggaaaagcucgcacca

SEQ ID NO: 224050 - RNA, 31 nt, Homo Sapiens
gcuguggcggagcuccugcccccuacgcccu

SEQ ID NO: 224051 - RNA, 30 nt, Homo Sapiens
ggagcaggcaggcuggggcucucugcagac

SEQ ID NO: 224052 - RNA, 32 nt, Homo Sapiens
acucuacuuggguagaaaauauuuuaucucua

SEQ ID NO: 224053 - RNA, 32 nt, Homo Sapiens
ugagaucccagcugaagccuuucuuugguaaa

SEQ ID NO: 224054 - RNA, 32 nt, Homo Sapiens
ucaacacugucucucaaucagaucaucuggau

SEQ ID NO: 224055 - RNA, 32 nt, Homo Sapiens
uugccugcuuuccccauuccagcccucucugc

SEQ ID NO: 224056 - RNA, 32 nt, Homo Sapiens
acacuuuuuccacaauuaacccaaguuguguu

SEQ ID NO: 224057 - RNA, 32 nt, Homo Sapiens
aucucaggagccagcuuccucuccucguuucu

SEQ ID NO: 224058 - RNA, 32 nt, Homo Sapiens
aggcauuuauuaugauguucauacuuucccuc

SEQ ID NO: 224059 - RNA, 32 nt, Homo Sapiens
ggggguggggacucagggcuggaccgacgucc

SEQ ID NO: 224060 - RNA, 32 nt, Homo Sapiens
gcaggaaaccaucagaaaccuggacuguauag

SEQ ID NO: 224061 - RNA, 32 nt, Homo Sapiens
uggugccccucauuccagaaucuccuaccccc

SEQ ID NO: 224062 - RNA, 32 nt, Homo Sapiens
cccaauguuugccuauccaccucccccaagcc

SEQ ID NO: 224063 - RNA, 32 nt, Homo Sapiens
aaacagucccucaggaaagcuuagugaagguu

SEQ ID NO: 224064 - RNA, 32 nt, Homo Sapiens
gcuuucgauguuguaacaaaauugggaucacc

SEQ ID NO: 224065 - RNA, 32 nt, Homo Sapiens
uaagaaguuaguauugccaaucuuucacugca

SEQ ID NO: 224066 - RNA, 32 nt, Homo Sapiens
aaugaaaaacaucugcaaugagagguaauuuu

SEQ ID NO: 224067 - RNA, 32 nt, Homo Sapiens
cuacacccaagccugauccagccuuuccaagu

SEQ ID NO: 224068 - RNA, 32 nt, Homo Sapiens
aagcuuuuucuuuuccuuuuuaaugaugccug

SEQ ID NO: 224069 - RNA, 32 nt, Homo Sapiens
uuuccuccacuccccccauaucuuuaaagugu

SEQ ID NO: 224070 - RNA, 32 nt, Homo Sapiens
ggcuuugaauaaaaaacaggaauauccagcca

SEQ ID NO: 224071 - RNA, 32 nt, Homo Sapiens
uggcguaaauuaacauuuuaauuucauauaua

SEQ ID NO: 224072 - RNA, 32 nt, Homo Sapiens
uugugccuaaaauguuagauuggacuguaugc

SEQ ID NO: 224073 - RNA, 32 nt, Homo Sapiens
aucucugguuugucauuagugguauucugaaa

SEQ ID NO: 224074 - RNA, 32 nt, Homo Sapiens
guggcccagguacuaauuucaagaugccagga

SEQ ID NO: 224075 - RNA, 32 nt, Homo Sapiens
ugcugguuauuuuggcggcuguaguugugggg

SEQ ID NO: 224076 - RNA, 32 nt, Homo Sapiens
ucacacuuuggucuuauuucauuuucaaugau

SEQ ID NO: 224077 - RNA, 32 nt, Homo Sapiens
gcuguugguuuggacugagcuccugcaauagg

SEQ ID NO: 224078 - RNA, 32 nt, Homo Sapiens
guugcuggucagagggaggggaggcuuuacaa

SEQ ID NO: 224079 - RNA, 29 nt, Homo Sapiens
ccggcuccgguccggaucucgaguaggcg

SEQ ID NO: 224080 - RNA, 32 nt, Homo Sapiens
ccugcucugggcccgugaccugcgugucugac

SEQ ID NO: 224081 - RNA, 32 nt, Homo Sapiens
uucagguaaccuggugucugugcucacccagg

SEQ ID NO: 224082 - RNA, 31 nt, Homo Sapiens
auagauaacaagaaaaaguuauauuagcaug

SEQ ID NO: 224083 - RNA, 32 nt, Homo Sapiens
uuaauucucuguccuuucccuuucacuguuuc

SEQ ID NO: 224084 - RNA, 32 nt, Homo Sapiens
cacccagcucacggacgcugaguaacugaccc

SEQ ID NO: 224085 - RNA, 31 nt, Homo Sapiens
caguaugagccccaguucagccggccucagc

SEQ ID NO: 224086 - RNA, 32 nt, Homo Sapiens
acaggcaaaucacgccaccuccucucugagcc

SEQ ID NO: 224087 - RNA, 32 nt, Homo Sapiens
acuauauuuuaggucuuaauacacacaguuau

SEQ ID NO: 224088 - RNA, 32 nt, Homo Sapiens
cccuccugugcuggguggaggccacgggacac

SEQ ID NO: 224089 - RNA, 32 nt, Homo Sapiens
ugaccuguuguaggcagcuaucuuacagacgc

SEQ ID NO: 224090 - RNA, 32 nt, Homo Sapiens
ccaagcuuucccuccgccaggauugcaaaagc

SEQ ID NO: 224091 - RNA, 32 nt, Homo Sapiens
cugggcaucuucuguaaugaugccucuuucuu

SEQ ID NO: 224092 - RNA, 32 nt, Homo Sapiens
ugguguuucuaaaaauaaguguuuuaccauua

SEQ ID NO: 224093 - RNA, 32 nt, Homo Sapiens
agaggaaaaugaagcugcuuggauuacccugu

SEQ ID NO: 224094 - RNA, 32 nt, Homo Sapiens
uucuaggacuuccgugugcguugccaccagau

SEQ ID NO: 224095 - RNA, 32 nt, Homo Sapiens
cgccauuaacuguggccccgacaggccugggu

SEQ ID NO: 224096 - RNA, 32 nt, Homo Sapiens
cuacuccgccauggagcgccccgacgggcugg

SEQ ID NO: 224097 - RNA, 32 nt, Homo Sapiens
gcacugaguucacgugaggaaccgggacccuc

SEQ ID NO: 224098 - RNA, 32 nt, Homo Sapiens
ugggacucugcagcugcuucgcagcgcaacuc

SEQ ID NO: 224099 - RNA, 30 nt, Homo Sapiens
agugcgaucuucgggcugucagaguugguc

SEQ ID NO: 224100 - RNA, 32 nt, Homo Sapiens
cacacuguuuucauaguguugauuccacacuu

SEQ ID NO: 224101 - RNA, 32 nt, Homo Sapiens
uccacgggugaaugccggcagcugugccaaua

SEQ ID NO: 224102 - RNA, 32 nt, Homo Sapiens
auacuucaaaaauaaugugccaugugggugag

SEQ ID NO: 224103 - RNA, 32 nt, Homo Sapiens
gaccaaaaacaucuucuuuaugucaagguuaa

SEQ ID NO: 224104 - RNA, 32 nt, Homo Sapiens
uuggcccccguguaggccuccuugguucgggu

SEQ ID NO: 224105 - RNA, 32 nt, Homo Sapiens
uauaagucacuuuacagugcuacuucacacuu

SEQ ID NO: 224106 - RNA, 32 nt, Homo Sapiens
uccugagcggguggaggaggcccaagcgaugc

SEQ ID NO: 224107 - RNA, 32 nt, Homo Sapiens
aguauggaaaguucuuauaacaauaauaguac

SEQ ID NO: 224108 - RNA, 32 nt, Homo Sapiens
acgacucucccggcugcccggaacuuagagag

SEQ ID NO: 224109 - RNA, 32 nt, Homo Sapiens
gauugcuucagaugaaaacaaaucacacaccg

SEQ ID NO: 224110 - RNA, 32 nt, Homo Sapiens
augccuuuaaaauaaacuauuucaacuacugu

SEQ ID NO: 224111 - RNA, 32 nt, Homo Sapiens
uauaucugcuauucuccauacucuguaacagu

SEQ ID NO: 224112 - RNA, 32 nt, Homo Sapiens
ccguccccgcccagccccaggucuccccgccu

SEQ ID NO: 224113 - RNA, 32 nt, Homo Sapiens
gacccgauggcucgcauucuguguaguguuuu

SEQ ID NO: 224114 - RNA, 32 nt, Homo Sapiens
guuaggcaaccuggcuuuuauucauccucagc

SEQ ID NO: 224115 - RNA, 31 nt, Homo Sapiens
aacuguacaaagaagacgacuguuuuccauu

SEQ ID NO: 224116 - RNA, 32 nt, Homo Sapiens
aggcccugguggcccugggauggggaaccgcg

SEQ ID NO: 224117 - RNA, 32 nt, Homo Sapiens
agaggaggguugaggcuggagcagaaccagaa

SEQ ID NO: 224118 - RNA, 32 nt, Homo Sapiens
uaagcccacccccuguuaacugccuauuuaua

SEQ ID NO: 224119 - RNA, 32 nt, Homo Sapiens
acaugauagcauuuauacuugagaaaaauugu

SEQ ID NO: 224120 - RNA, 32 nt, Homo Sapiens
aguggggugggaaggggagcacaauuucccuu

SEQ ID NO: 224121 - RNA, 32 nt, Homo Sapiens
gcugcaugcggauugaagacgugcgccugggg

SEQ ID NO: 224122 - RNA, 32 nt, Homo Sapiens
ggggauugaaaggauccaggaugggcuuugug

SEQ ID NO: 224123 - RNA, 32 nt, Homo Sapiens
ugcacagggucaucuuuguaauuauauaaccc

SEQ ID NO: 224124 - RNA, 32 nt, Homo Sapiens
guuuuucagcuauaaugcauauacaacuauag

SEQ ID NO: 224125 - RNA, 32 nt, Homo Sapiens
uuucugacugguuuucuucagucccuuuaucu

SEQ ID NO: 224126 - RNA, 32 nt, Homo Sapiens
cuuuggguguggcuucaaccacuacaaacuga

SEQ ID NO: 224127 - RNA, 32 nt, Homo Sapiens
cuucacaccaugggauaaaucuguaucaagac

SEQ ID NO: 224128 - RNA, 32 nt, Homo Sapiens
uauuuuaaguauuuagacaguucuuuguuagc

SEQ ID NO: 224129 - RNA, 31 nt, Homo Sapiens
gggugcugguggagaaaggacccuggaccug

SEQ ID NO: 224130 - RNA, 32 nt, Homo Sapiens
ggcaaacaaaguggcaguggggaccagggugu

SEQ ID NO: 224131 - RNA, 32 nt, Homo Sapiens
caagccccgccggcugcugugggagcggcggc

SEQ ID NO: 224132 - RNA, 32 nt, Homo Sapiens
gccguggcuuaaagcaggccugucugaauccu

SEQ ID NO: 224133 - RNA, 32 nt, Homo Sapiens
caaguugugaaagugagaaaaaauauuugugc

SEQ ID NO: 224134 - RNA, 32 nt, Homo Sapiens
cacggggucucuccuuccuccucccuagcuca

SEQ ID NO: 224135 - RNA, 32 nt, Homo Sapiens
uugcuuaacgcaggaugugcuggguguuuugu

SEQ ID NO: 224136 - RNA, 32 nt, Homo Sapiens
uguuguuucugcacuuuauaauaaagcaugga

SEQ ID NO: 224137 - RNA, 32 nt, Homo Sapiens
uccauuaguguucauuuuuauagaauuaugcu

SEQ ID NO: 224138 - RNA, 32 nt, Homo Sapiens
uucuccaaagagaauuguuauuuuaaaguacc

SEQ ID NO: 224139 - RNA, 32 nt, Homo Sapiens
aggggugggcgacacaggcagcuucuucggca

SEQ ID NO: 224140 - RNA, 32 nt, Homo Sapiens
aggaguccugauugcagcugccaugcuggcug

SEQ ID NO: 224141 - RNA, 32 nt, Homo Sapiens
uggccaggagauagugagcagcucccaggagg

SEQ ID NO: 224142 - RNA, 32 nt, Homo Sapiens
ggcaggcccaacaggcugggaaauauuguguu

SEQ ID NO: 224143 - RNA, 32 nt, Homo Sapiens
gugaagaaugacagauguggggccucugccaa

SEQ ID NO: 224144 - RNA, 32 nt, Homo Sapiens
cccgcgcugcugagcaggcaugcggccccagu

SEQ ID NO: 224145 - RNA, 32 nt, Homo Sapiens
agaaagaaaaagaggaacugaaugaaaucuca

SEQ ID NO: 224146 - RNA, 32 nt, Homo Sapiens
ucucccugcaucuuccucuccuuucccaaggc

SEQ ID NO: 224147 - RNA, 32 nt, Homo Sapiens
gaaauggagagugaggaaugggagaggcccag

SEQ ID NO: 224148 - RNA, 32 nt, Homo Sapiens
uuugcucaggucaggauuacuccagcaagagg

SEQ ID NO: 224149 - RNA, 32 nt, Homo Sapiens
agucuccuggaaaaggaucuguccacuccugg

SEQ ID NO: 224150 - RNA, 32 nt, Homo Sapiens
ggccucucauaucacgaccagacggcgggucu

SEQ ID NO: 224151 - RNA, 32 nt, Homo Sapiens
ugaccucagggugaucagcccaccucggccuc

SEQ ID NO: 224152 - RNA, 32 nt, Homo Sapiens
ggagaagagaauacucauuuuuguccaguguu

SEQ ID NO: 224153 - RNA, 32 nt, Homo Sapiens
uccagaggaauauuuuuaucaacuauuuugua

SEQ ID NO: 224154 - RNA, 32 nt, Homo Sapiens
ccuguaccaauguccucagcacguucuucagc

SEQ ID NO: 224155 - RNA, 32 nt, Homo Sapiens
cucaucccaagcaugggacaccucaagaugaa

SEQ ID NO: 224156 - RNA, 32 nt, Homo Sapiens
aggaaaaaggauuaggcaaaaauaauuuauuu

SEQ ID NO: 224157 - RNA, 32 nt, Homo Sapiens
gcgcugacggcugcugcgcccgcggcucccca

SEQ ID NO: 224158 - RNA, 32 nt, Homo Sapiens
gggauuccaaggauuuaccuaauuguccaauu

SEQ ID NO: 224159 - RNA, 32 nt, Homo Sapiens
cuaaauguaagauuuuuacacuuuuucagaaa

SEQ ID NO: 224160 - RNA, 31 nt, Homo Sapiens
ggauuucauuugaaauuacagcaugaugaau

SEQ ID NO: 224161 - RNA, 32 nt, Homo Sapiens
uguaaaaaugagaacauguuaguauuuaucua

SEQ ID NO: 224162 - RNA, 32 nt, Homo Sapiens
cuucuguugcauguuccagaaaaggccaauuu

SEQ ID NO: 224163 - RNA, 32 nt, Homo Sapiens
ccuuagucucucugcucccugauucccccuug

SEQ ID NO: 224164 - RNA, 32 nt, Homo Sapiens
ugcccguccagcacugcagaugccaccucgcc

SEQ ID NO: 224165 - RNA, 32 nt, Homo Sapiens
uuggacggcagagucagagaucuccaguccac

SEQ ID NO: 224166 - RNA, 32 nt, Homo Sapiens
accccaaaaguacuuacccuaaaacauguguu

SEQ ID NO: 224167 - RNA, 32 nt, Homo Sapiens
ccauuccucccauucaagauucccacucccca

SEQ ID NO: 224168 - RNA, 32 nt, Homo Sapiens
cuuugaauggaacacgguacugagaagccgag

SEQ ID NO: 224169 - RNA, 32 nt, Homo Sapiens
uucaguuucuaaaaacaacuacauuaccugca

SEQ ID NO: 224170 - RNA, 32 nt, Homo Sapiens
aggagcccacccaagagagaucaggaacucaa

SEQ ID NO: 224171 - RNA, 32 nt, Homo Sapiens
uuguauuacacuuuuaguauucaccagcauaa

SEQ ID NO: 224172 - RNA, 32 nt, Homo Sapiens
accccuuuuuucccuuuuccugugagauacau

SEQ ID NO: 224173 - RNA, 32 nt, Homo Sapiens
gcugcaagccccacagugaagaacaucugagc

SEQ ID NO: 224174 - RNA, 32 nt, Homo Sapiens
agaucagcucugccagccccagcggucacgcc

SEQ ID NO: 224175 - RNA, 32 nt, Homo Sapiens
gccuucugcguggaugugcgcgggcggcguca

SEQ ID NO: 224176 - RNA, 32 nt, Homo Sapiens
aguuggagaccuaaaaauaauucucuuguauu

SEQ ID NO: 224177 - RNA, 32 nt, Homo Sapiens
cagcuccgaggucggcgggggucuggguggcc

SEQ ID NO: 224178 - RNA, 32 nt, Homo Sapiens
cagaggucaggaaaacacaagauggaaaauug

SEQ ID NO: 224179 - RNA, 32 nt, Homo Sapiens
gggcggccgcuuucgccaguccguccggccgu

SEQ ID NO: 224180 - RNA, 32 nt, Homo Sapiens
cagguaggggaaaaagugauuuuucaaucauu

SEQ ID NO: 224181 - RNA, 32 nt, Homo Sapiens
aucccagaacuuuccaaaccugugguuccacc

SEQ ID NO: 224182 - RNA, 27 nt, Homo Sapiens
ccauggcggaauccaggggccgucugu

SEQ ID NO: 224183 - RNA, 29 nt, Homo Sapiens
uuuuagucauaugaagugagagagaguuu

SEQ ID NO: 224184 - RNA, 32 nt, Homo Sapiens
gaaaaaucucagcagcuaauagcaacucauuu

SEQ ID NO: 224185 - RNA, 32 nt, Homo Sapiens
uucgaggcucgugggagccgcuucuccaaguc

SEQ ID NO: 224186 - RNA, 32 nt, Homo Sapiens
cccccacccuccccccaccgugcccuuggccu

SEQ ID NO: 224187 - RNA, 32 nt, Homo Sapiens
cgcagccguggcggcaucuccuccuccuuccu

SEQ ID NO: 224188 - RNA, 32 nt, Homo Sapiens
cccagggcgggugugcuggggacccacgcggc

SEQ ID NO: 224189 - RNA, 32 nt, Homo Sapiens
uggguggcgggugcacagagacggucuggaag

SEQ ID NO: 224190 - RNA, 32 nt, Homo Sapiens
ugccuccaaagcccagagccugccugucagcc

SEQ ID NO: 224191 - RNA, 32 nt, Homo Sapiens
cuuccgccugccucugcuuccccgucaugcau

SEQ ID NO: 224192 - RNA, 32 nt, Homo Sapiens
cucccgucugcacugcauguccugggguccuu

SEQ ID NO: 224193 - RNA, 32 nt, Homo Sapiens
ccuuuguccugccccaggauuuagaucuuggc

SEQ ID NO: 224194 - RNA, 32 nt, Homo Sapiens
ugcgccaagagacagacagagaaggcugcagg

SEQ ID NO: 224195 - RNA, 32 nt, Homo Sapiens
uggacggaagaccccuggcucuauaagcugaa

SEQ ID NO: 224196 - RNA, 32 nt, Homo Sapiens
ugaaaccaaaaauaaaaauaugucuugaaaaa

SEQ ID NO: 224197 - RNA, 32 nt, Homo Sapiens
ccauccaguuuugcccagaugugcuagaaugg

SEQ ID NO: 224198 - RNA, 32 nt, Homo Sapiens
uauucuucuguagaggaagagaaaggagugaa

SEQ ID NO: 224199 - RNA, 32 nt, Homo Sapiens
gcauccuucuaaaaaggggaaauuuggacaca

SEQ ID NO: 224200 - RNA, 32 nt, Homo Sapiens
cuaccuguguuaucuguaaauuccagacacug

SEQ ID NO: 224201 - RNA, 32 nt, Homo Sapiens
cuaccuguguuaucuguaaaucccagacauug

SEQ ID NO: 224202 - RNA, 32 nt, Homo Sapiens
gauuacaagugagauaagguauuuuuaucaau

SEQ ID NO: 224203 - RNA, 32 nt, Homo Sapiens
ccuuccugcccccaaugccaccauugcagugg

SEQ ID NO: 224204 - RNA, 32 nt, Homo Sapiens
ggccgggcgcgguggcuaacgcuuguaauccc

SEQ ID NO: 224205 - RNA, 32 nt, Homo Sapiens
cagggucucucccucagguguuuuuuaugaag

SEQ ID NO: 224206 - RNA, 32 nt, Homo Sapiens
ucaccucugugcccgacaucagacgcugccag

SEQ ID NO: 224207 - RNA, 32 nt, Homo Sapiens
ccagugcgccgcgcucgcagccgguagcgcgc

SEQ ID NO: 224208 - RNA, 32 nt, Homo Sapiens
gagcucagugcacaacugcuggaugaacucaa

SEQ ID NO: 224209 - RNA, 32 nt, Homo Sapiens
gcagagacccccucgucguccuggacaccaca

SEQ ID NO: 224210 - RNA, 32 nt, Homo Sapiens
gccgggcgagguccgcugcggucccggcggcu

SEQ ID NO: 224211 - RNA, 32 nt, Homo Sapiens
ccucagaggguggagugagggcggaccggccc

SEQ ID NO: 224212 - RNA, 32 nt, Homo Sapiens
ugagggcccuccccagcccagacuaacacauc

SEQ ID NO: 224213 - RNA, 32 nt, Homo Sapiens
uuaugauucuggaagauuaaggcagauaggaa

SEQ ID NO: 224214 - RNA, 32 nt, Homo Sapiens
cggaggccccacugggccccaguccccagcuu

SEQ ID NO: 224215 - RNA, 32 nt, Homo Sapiens
ccaugcugugcuugccgcucugaaacaaacag

SEQ ID NO: 224216 - RNA, 32 nt, Homo Sapiens
cugggaggccccacacgaaagauucuuaccau

SEQ ID NO: 224217 - RNA, 32 nt, Homo Sapiens
ccggggaccgagggggcggggaggugacccgg

SEQ ID NO: 224218 - RNA, 32 nt, Homo Sapiens
ucagcaugccugccagcgucucacugccagug

SEQ ID NO: 224219 - RNA, 32 nt, Homo Sapiens
cuccuucccaccgggcuagggcggcggcggca

SEQ ID NO: 224220 - RNA, 32 nt, Homo Sapiens
accuguuauaugccaggcgcugcuguagacau

SEQ ID NO: 224221 - RNA, 32 nt, Homo Sapiens
gguuggcacaaaacgacacugcccacaaaacc

SEQ ID NO: 224222 - RNA, 32 nt, Homo Sapiens
gcugcucugcgccaggugccaaggcuucaggc

SEQ ID NO: 224223 - RNA, 27 nt, Homo Sapiens
ccugacacccuccccagcccccacaga

SEQ ID NO: 224224 - RNA, 32 nt, Homo Sapiens
caaccuacccugauguuuuacucauuggaaug

SEQ ID NO: 224225 - RNA, 32 nt, Homo Sapiens
uaauuuguguguuuuucugucuuuauuuucug

SEQ ID NO: 224226 - RNA, 32 nt, Homo Sapiens
ccgagcguuaggugcugcucucugcgcggcgu

SEQ ID NO: 224227 - RNA, 32 nt, Homo Sapiens
ccugcccccgguucgauguccuuccaagaaug

SEQ ID NO: 224228 - RNA, 32 nt, Homo Sapiens
uaacguuuuaauuacuauaguguuauguagag

SEQ ID NO: 224229 - RNA, 32 nt, Homo Sapiens
gacccuggugcugauaucuccuccucuucccu

SEQ ID NO: 224230 - RNA, 32 nt, Homo Sapiens
agacaguauugcuaacaucucaucuuaauguc

SEQ ID NO: 224231 - RNA, 32 nt, Homo Sapiens
ccuuggggaccaccgggcgccacgccgcgaac

SEQ ID NO: 224232 - RNA, 32 nt, Homo Sapiens
uccacagccaaggguaagaauuccuggucuag

SEQ ID NO: 224233 - RNA, 32 nt, Homo Sapiens
aguuggcggagcaggucuggcugugagccagc

SEQ ID NO: 224234 - RNA, 32 nt, Homo Sapiens
agagcugacaaaggagauuccugagagagcac

SEQ ID NO: 224235 - RNA, 32 nt, Homo Sapiens
uccgccccucgccccaaccccugggcgccggg

SEQ ID NO: 224236 - RNA, 32 nt, Homo Sapiens
ucuucauuuuggccccagcauucuuaauuuca

SEQ ID NO: 224237 - RNA, 32 nt, Homo Sapiens
cauugacagauugaauuugccuaauaugauga

SEQ ID NO: 224238 - RNA, 28 nt, Homo Sapiens
auaguguugucuaaaauguggacucagg

SEQ ID NO: 224239 - RNA, 32 nt, Homo Sapiens
gguggguggaggaggagggcacgugucugccu

SEQ ID NO: 224240 - RNA, 32 nt, Homo Sapiens
auuuccaaagcucugaaagauauuucaggaga

SEQ ID NO: 224241 - RNA, 32 nt, Homo Sapiens
aaggcuugcauucuuggaaacuuugaaaccca

SEQ ID NO: 224242 - RNA, 28 nt, Homo Sapiens
uuccuggggcggccgcugacgggagguu

SEQ ID NO: 224243 - RNA, 32 nt, Homo Sapiens
cugcggaggaggaggccguuaugaggaguacc

SEQ ID NO: 224244 - RNA, 32 nt, Homo Sapiens
cagaaaccuauuuucucagaccccuuuuucuc

SEQ ID NO: 224245 - RNA, 32 nt, Homo Sapiens
ccauccugucgcgcgccgcgucagguccccau

SEQ ID NO: 224246 - RNA, 32 nt, Homo Sapiens
gcacccacacuccugcccugccagggaggcuc

SEQ ID NO: 224247 - RNA, 32 nt, Homo Sapiens
aaacugcacuugucucucucauuuccuucaaa

SEQ ID NO: 224248 - RNA, 32 nt, Homo Sapiens
cuacuaaacugggggauauuaugaagggccuu

SEQ ID NO: 224249 - RNA, 32 nt, Homo Sapiens
cagauaccagccuuucugguccugcugcuccc

SEQ ID NO: 224250 - RNA, 32 nt, Homo Sapiens
uaucucuacgcuggaaauuugcugccucaaug

SEQ ID NO: 224251 - RNA, 32 nt, Homo Sapiens
aacccuaccaugcuccaucauacucaggucuc

SEQ ID NO: 224252 - RNA, 32 nt, Homo Sapiens
aguucuuaugggccaugaccaaggcugcugcu

SEQ ID NO: 224253 - RNA, 28 nt, Homo Sapiens
auccagauaguauuacauuugaaauugu

SEQ ID NO: 224254 - RNA, 32 nt, Homo Sapiens
uugucgcucguguccuucucaugcccggcgac

SEQ ID NO: 224255 - RNA, 32 nt, Homo Sapiens
gacgugaccgcucaguacauggagcggcugaa

SEQ ID NO: 224256 - RNA, 32 nt, Homo Sapiens
gggugacagacugggaggaaaccaggcuggac

SEQ ID NO: 224257 - RNA, 32 nt, Homo Sapiens
ccucuaaucgauauucucgucuuccuaaacca

SEQ ID NO: 224258 - RNA, 32 nt, Homo Sapiens
ugggggcuagagaggguaaugggaguuauuuu

SEQ ID NO: 224259 - RNA, 32 nt, Homo Sapiens
agagcccagaaagcuccucugagaaugcugga

SEQ ID NO: 224260 - RNA, 32 nt, Homo Sapiens
ccuauucauuggcaccacagaugcucuccagg

SEQ ID NO: 224261 - RNA, 32 nt, Homo Sapiens
cggcuccuuuaauguaggauugagagcugggc

SEQ ID NO: 224262 - RNA, 32 nt, Homo Sapiens
aaacaauuuacuagcuuagaauagaaagcaau

SEQ ID NO: 224263 - RNA, 32 nt, Homo Sapiens
aaaagaaaaaaguacuuaggaauaauuuaaca

SEQ ID NO: 224264 - RNA, 32 nt, Homo Sapiens
ggccgagagcauuggaggcaucuugagggcca

SEQ ID NO: 224265 - RNA, 32 nt, Homo Sapiens
cugcagcccagccagugguuccagguccagcc

SEQ ID NO: 224266 - RNA, 32 nt, Homo Sapiens
gucccggccaauggaggcgauuuagacuggag

SEQ ID NO: 224267 - RNA, 32 nt, Homo Sapiens
uccuuuaguuuccagacuggcuugcucuuugg

SEQ ID NO: 224268 - RNA, 32 nt, Homo Sapiens
gucuaucgccugaguccccgggccccucuagc

SEQ ID NO: 224269 - RNA, 32 nt, Homo Sapiens
accccccuuaucccugaugcuuccucuuagua

SEQ ID NO: 224270 - RNA, 32 nt, Homo Sapiens
gcagguggaguacccacggaaggggaccacag

SEQ ID NO: 224271 - RNA, 32 nt, Homo Sapiens
ccaagugauggcaacugcccucccgccgcguc

SEQ ID NO: 224272 - RNA, 32 nt, Homo Sapiens
guugcuaauccagugggagauguuugagagag

SEQ ID NO: 224273 - RNA, 32 nt, Homo Sapiens
uuuccuuguuucccuuaauauuucaugaauug

SEQ ID NO: 224274 - RNA, 32 nt, Homo Sapiens
gccgagcuaauuuuuguauuuauaauagagau

SEQ ID NO: 224275 - RNA, 32 nt, Homo Sapiens
aacugcuucuugcucuugggguauccuucaag

SEQ ID NO: 224276 - RNA, 32 nt, Homo Sapiens
ggaccugccugagggcucccugcugcaguucg

SEQ ID NO: 224277 - RNA, 32 nt, Homo Sapiens
cucuguccucauugcgcccagacgggccggcc

SEQ ID NO: 224278 - RNA, 32 nt, Homo Sapiens
ucauucuacucucugcuucugugagucuggcu

SEQ ID NO: 224279 - RNA, 32 nt, Homo Sapiens
ucugcagcacgcuggacagcacucugccaucc

SEQ ID NO: 224280 - RNA, 30 nt, Homo Sapiens
ggcacugucuguggccccagggguugagga

SEQ ID NO: 224281 - RNA, 32 nt, Homo Sapiens
uggcauaaggacccggagcuuugggagcgcag

SEQ ID NO: 224282 - RNA, 32 nt, Homo Sapiens
gacugugaugacugggagagcaggcugaaugc

SEQ ID NO: 224283 - RNA, 32 nt, Homo Sapiens
cacgcccucgcugcggggccuguggagagugg

SEQ ID NO: 224284 - RNA, 32 nt, Homo Sapiens
uuugguuucccuaugauuuauagagaagaaga

SEQ ID NO: 224285 - RNA, 32 nt, Homo Sapiens
agaaagaucuucaucaacaucuguaucuuucc

SEQ ID NO: 224286 - RNA, 32 nt, Homo Sapiens
aaucguuacacgcuuucgccucgcuccagcuu

SEQ ID NO: 224287 - RNA, 32 nt, Homo Sapiens
gucuucucuauggccuggcuagagcugcaaaa

SEQ ID NO: 224288 - RNA, 32 nt, Homo Sapiens
auuaaauuaaaauaaaacaugcgcuggguaca

SEQ ID NO: 224289 - RNA, 32 nt, Homo Sapiens
auuuaaacaaaauaagcugacuaagaaaaacu

SEQ ID NO: 224290 - RNA, 32 nt, Homo Sapiens
guaaaugucuuacuggaaaugacaaguuuuug

SEQ ID NO: 224291 - RNA, 32 nt, Homo Sapiens
guaaccuccccauuuuagcacuacagaauuuu

SEQ ID NO: 224292 - RNA, 32 nt, Homo Sapiens
agaaaaugaguuauaauguagguccaaugaca

SEQ ID NO: 224293 - RNA, 32 nt, Homo Sapiens
ccguugaaggcagaauaucuuugugcacauca

SEQ ID NO: 224294 - RNA, 32 nt, Homo Sapiens
gaaauaaagagaaaaagaacucauuauagaaa

SEQ ID NO: 224295 - RNA, 32 nt, Homo Sapiens
aaaauacucugcugccuauacaauguaaaccu

SEQ ID NO: 224296 - RNA, 32 nt, Homo Sapiens
aggucacaucuguugccuggaaugugucuaca

SEQ ID NO: 224297 - RNA, 32 nt, Homo Sapiens
auggaucacugacgcuuucucugucuuuccgg

SEQ ID NO: 224298 - RNA, 32 nt, Homo Sapiens
gguaucuccagauguuccgugacaagcauuuc

SEQ ID NO: 224299 - RNA, 32 nt, Homo Sapiens
aucagaguuguuuuuuggauagaugguuaucu

SEQ ID NO: 224300 - RNA, 32 nt, Homo Sapiens
aguggguucucucuccuugugcccucuuagga

SEQ ID NO: 224301 - RNA, 32 nt, Homo Sapiens
ucuuggggagagaggaggaggugacugcuuag

SEQ ID NO: 224302 - RNA, 32 nt, Homo Sapiens
aaauuaaagauaaggguauccaaaauagucua

SEQ ID NO: 224303 - RNA, 32 nt, Homo Sapiens
cuuccucaaacacuucaugcugcugccccagc

SEQ ID NO: 224304 - RNA, 32 nt, Homo Sapiens
cuggaccacugccucccucccucccccuggca

SEQ ID NO: 224305 - RNA, 32 nt, Homo Sapiens
uggucuauggacaacaguuugaggagcaaggu

SEQ ID NO: 224306 - RNA, 32 nt, Homo Sapiens
agcuggaaacucuggugacgugaugaaugugg

SEQ ID NO: 224307 - RNA, 32 nt, Homo Sapiens
cuagcccaguugcacagcugcugcugacaggu

SEQ ID NO: 224308 - RNA, 32 nt, Homo Sapiens
aauuaaaaaaauuugaaaguaacuuaaucuaa

SEQ ID NO: 224309 - RNA, 32 nt, Homo Sapiens
gaaucucugcugcugcugcugcugcugcugcu

SEQ ID NO: 224310 - RNA, 32 nt, Homo Sapiens
gccccuccaguguugccuccucccauccagcg

SEQ ID NO: 224311 - RNA, 32 nt, Homo Sapiens
cccugccuucugcaugagaggaccaggagacu

SEQ ID NO: 224312 - RNA, 28 nt, Homo Sapiens
gaggaaguaacuggaccaaguugacaca

SEQ ID NO: 224313 - RNA, 32 nt, Homo Sapiens
aagggaccucgcgagcagacgcgcgcccgcga

SEQ ID NO: 224314 - RNA, 32 nt, Homo Sapiens
ucaagagaacagaacacucuccccgccccagc

SEQ ID NO: 224315 - RNA, 32 nt, Homo Sapiens
aauugcuauuggcaauguagccuggugcuuca

SEQ ID NO: 224316 - RNA, 32 nt, Homo Sapiens
uguguaagaucuuggaggaagacagcagagag

SEQ ID NO: 224317 - RNA, 32 nt, Homo Sapiens
ccuuaaacagauauuucuauagcugucaguau

SEQ ID NO: 224318 - RNA, 32 nt, Homo Sapiens
aaauacuuugaaacguauuuauauauuucaau

SEQ ID NO: 224319 - RNA, 32 nt, Homo Sapiens
cucucuggaaaugcuucucaacuuugaugaug

SEQ ID NO: 224320 - RNA, 32 nt, Homo Sapiens
aauccucauuucaucuuguguacaguccuuug

SEQ ID NO: 224321 - RNA, 32 nt, Homo Sapiens
agccuagcagagugucagcagaugaagaugca

SEQ ID NO: 224322 - RNA, 32 nt, Homo Sapiens
ggugggagggugggagggugggggaacacaaa

SEQ ID NO: 224323 - RNA, 32 nt, Homo Sapiens
cccgcacccccgcuccccgccugacgcacgga

SEQ ID NO: 224324 - RNA, 32 nt, Homo Sapiens
ccuccucugugcuacccauaauacacacuucu

SEQ ID NO: 224325 - RNA, 32 nt, Homo Sapiens
cugaggcugggagggagggccauugggcgugg

SEQ ID NO: 224326 - RNA, 32 nt, Homo Sapiens
ugguacugucacugcagggaaugcaucgggga

SEQ ID NO: 224327 - RNA, 32 nt, Homo Sapiens
cacucggccccggacgugggaagcaagccguc

SEQ ID NO: 224328 - RNA, 32 nt, Homo Sapiens
cugacugacuugaccugugaccucugacccgg

SEQ ID NO: 224329 - RNA, 32 nt, Homo Sapiens
gacgccuuguuggggagggaaaucuguuuauu

SEQ ID NO: 224330 - RNA, 32 nt, Homo Sapiens
ggcguggguggaacagagcggccaggagucag

SEQ ID NO: 224331 - RNA, 32 nt, Homo Sapiens
aguccuuugaugccuccagcugugauaucuca

SEQ ID NO: 224332 - RNA, 32 nt, Homo Sapiens
ccagacacauucuccugugccccucagagagg

SEQ ID NO: 224333 - RNA, 32 nt, Homo Sapiens
gugugugagcgcgggugugaggcggugcgcag

SEQ ID NO: 224334 - RNA, 29 nt, Homo Sapiens
ccgcauguauugcugcagugcccaggaca

SEQ ID NO: 224335 - RNA, 32 nt, Homo Sapiens
ucuaugccaaaauauauggcuguaaaacagua

SEQ ID NO: 224336 - RNA, 32 nt, Homo Sapiens
cacauggaguuucaaauucagaauagauuacc

SEQ ID NO: 224337 - RNA, 32 nt, Homo Sapiens
uugcucauuuuucgaguuuuuaacuagacuac

SEQ ID NO: 224338 - RNA, 32 nt, Homo Sapiens
agcuggcaaguggggcaccaguccuguagcaa

SEQ ID NO: 224339 - RNA, 32 nt, Homo Sapiens
uaaccuuguacaguuauuuucaucucuugaaa

SEQ ID NO: 224340 - RNA, 32 nt, Homo Sapiens
cguguuugcauuucuguaaaacuucuacaacu

SEQ ID NO: 224341 - RNA, 31 nt, Homo Sapiens
cauucacugcacugccaaagcugcgccccug

SEQ ID NO: 224342 - RNA, 32 nt, Homo Sapiens
caucuguaaucccagcacuuugggaguccaag

SEQ ID NO: 224343 - RNA, 32 nt, Homo Sapiens
caccuguaaucccagcacuuugggagcccaag

SEQ ID NO: 224344 - RNA, 32 nt, Homo Sapiens
uuaguuucugucaucaggacacuaucucaccc

SEQ ID NO: 224345 - RNA, 32 nt, Homo Sapiens
guauauggcagauggguaagaauagaaagcca

SEQ ID NO: 224346 - RNA, 32 nt, Homo Sapiens
uguguuagaggcugaggauauagaaauaugua

SEQ ID NO: 224347 - RNA, 32 nt, Homo Sapiens
auaaaaccuuccaagaaugcagcccucauagg

SEQ ID NO: 224348 - RNA, 32 nt, Homo Sapiens
cucuaguacuuggagaucuuggacguacaccu

SEQ ID NO: 224349 - RNA, 32 nt, Homo Sapiens
gaccgcuugcuuccuuccggaccucuggguuc

SEQ ID NO: 224350 - RNA, 32 nt, Homo Sapiens
gcuguacagacauggcggcggcuuuucggaag

SEQ ID NO: 224351 - RNA, 32 nt, Homo Sapiens
ccccccugccggccugccguccuuccacgcgg

SEQ ID NO: 224352 - RNA, 32 nt, Homo Sapiens
gaucuguacgaaaugugaaauguuuagggaca

SEQ ID NO: 224353 - RNA, 32 nt, Homo Sapiens
cuggaucuggucuagcuuccggauucgguggc

SEQ ID NO: 224354 - RNA, 32 nt, Homo Sapiens
caggaggcgugggaaacucuggcuuaggaaaa

SEQ ID NO: 224355 - RNA, 32 nt, Homo Sapiens
auuuuuaaucauaaguuguucaaauuaaaacu

SEQ ID NO: 224356 - RNA, 32 nt, Homo Sapiens
uagucauaagacuuaugggaaucacccauaua

SEQ ID NO: 224357 - RNA, 32 nt, Homo Sapiens
cauggcgcgggccucggcgaagcacuuccguc

SEQ ID NO: 224358 - RNA, 32 nt, Homo Sapiens
aaagugugcuuguguuucucauuuuuauacca

SEQ ID NO: 224359 - RNA, 32 nt, Homo Sapiens
uugcuaucuaauggggaaauguagcuaugggc

SEQ ID NO: 224360 - RNA, 32 nt, Homo Sapiens
aggggcggagacccggcccggggagguggaga

SEQ ID NO: 224361 - RNA, 32 nt, Homo Sapiens
gucuacccacccucccucccccauccucccca

SEQ ID NO: 224362 - RNA, 32 nt, Homo Sapiens
agaucuugauuuccuggucguuucucaaccug

SEQ ID NO: 224363 - RNA, 32 nt, Homo Sapiens
gaguuguuuuccuugucuuccuccucaucacg

SEQ ID NO: 224364 - RNA, 32 nt, Homo Sapiens
ggaggaccagugcagggucugugcaccuuccc

SEQ ID NO: 224365 - RNA, 32 nt, Homo Sapiens
ucccagagcugcuggcgcugaggucagagcgg

SEQ ID NO: 224366 - RNA, 32 nt, Homo Sapiens
gaucauuauauguauauagauacauuuuuauu

SEQ ID NO: 224367 - RNA, 32 nt, Homo Sapiens
ggcuucucaugggaaaugugcccccgccccag

SEQ ID NO: 224368 - RNA, 32 nt, Homo Sapiens
auaaaaucucuuagauaauacauauuuguugu

SEQ ID NO: 224369 - RNA, 31 nt, Homo Sapiens
cuucugcugcccgcccugccccggccgcauc

SEQ ID NO: 224370 - RNA, 32 nt, Homo Sapiens
guuuuguuguuuugcuuguuugcaauaaccgu

SEQ ID NO: 224371 - RNA, 32 nt, Homo Sapiens
uaaauauugccaaaugcuuuccuuuagauugu

SEQ ID NO: 224372 - RNA, 32 nt, Homo Sapiens
ucgggaaggaggagagcgccugacgccgaccc

SEQ ID NO: 224373 - RNA, 32 nt, Homo Sapiens
uauuuguuauuuaauugauguagcucaauucu

SEQ ID NO: 224374 - RNA, 32 nt, Homo Sapiens
gccacguggggaugagauuugcugggcuggua

SEQ ID NO: 224375 - RNA, 32 nt, Homo Sapiens
cugggauugacccaucaagaugcuuggcucaa

SEQ ID NO: 224376 - RNA, 32 nt, Homo Sapiens
cauacacauagaagcugagucucugauccaau

SEQ ID NO: 224377 - RNA, 32 nt, Homo Sapiens
uaaggaaacuggggugcagaaaggugaauuaa

SEQ ID NO: 224378 - RNA, 32 nt, Homo Sapiens
uaaggaaacuggggugcagaaaagugaauuga

SEQ ID NO: 224379 - RNA, 32 nt, Homo Sapiens
ugaaacaaaaauuuaaaauguuaucuuuuaau

SEQ ID NO: 224380 - RNA, 32 nt, Homo Sapiens
caguguaguuuguuguuuaaaauaauguaauc

SEQ ID NO: 224381 - RNA, 32 nt, Homo Sapiens
acuggagcggguggggccagggcggugguggg

SEQ ID NO: 224382 - RNA, 32 nt, Homo Sapiens
ggagcgggcggcagagcagggcggcggcgacu

SEQ ID NO: 224383 - RNA, 32 nt, Homo Sapiens
cuaccaaccacuuuaaaccaaccacgagaaca

SEQ ID NO: 224384 - RNA, 32 nt, Homo Sapiens
ucuuuagcuaaaaauaaaguuaaugucuuugg

SEQ ID NO: 224385 - RNA, 32 nt, Homo Sapiens
uguaugaagauguaaagugcugaacauauuuu

SEQ ID NO: 224386 - RNA, 32 nt, Homo Sapiens
gggccggcaggugcucgaugggccccccaggg

SEQ ID NO: 224387 - RNA, 32 nt, Homo Sapiens
agagacuuguuucugagacaguucuuugccuu

SEQ ID NO: 224388 - RNA, 32 nt, Homo Sapiens
uauuuggaaaucaaauuagaucauugacagaa

SEQ ID NO: 224389 - RNA, 32 nt, Homo Sapiens
ggccgcugagaguggggguggcugggagcagc

SEQ ID NO: 224390 - RNA, 31 nt, Homo Sapiens
gccagcaugggugcccaguucuccaagaccg

SEQ ID NO: 224391 - RNA, 32 nt, Homo Sapiens
gguugggaaggagggauuccgggagaagaaac

SEQ ID NO: 224392 - RNA, 29 nt, Homo Sapiens
caaaaauguguuuucagaggaaaucuuau

SEQ ID NO: 224393 - RNA, 32 nt, Homo Sapiens
cuccccggcuaugacgcccccggcccgugcuc

SEQ ID NO: 224394 - RNA, 32 nt, Homo Sapiens
gcccugcucacgucucggggcauuuuggcaga

SEQ ID NO: 224395 - RNA, 32 nt, Homo Sapiens
guagucuuuuuuuugcagaaugggccaagggg

SEQ ID NO: 224396 - RNA, 32 nt, Homo Sapiens
ggcaccccaagcccuaccaccaugaccugccu

SEQ ID NO: 224397 - RNA, 32 nt, Homo Sapiens
ugucuuucaaggaaacgcguugaagcuaaaau

SEQ ID NO: 224398 - RNA, 32 nt, Homo Sapiens
ugccgggcgcggugcucacgccuguaauccca

SEQ ID NO: 224399 - RNA, 32 nt, Homo Sapiens
cacaguaguucaggcaauuaagaauaugcaac

SEQ ID NO: 224400 - RNA, 32 nt, Homo Sapiens
uauuguauuaaacaaauguugcauagagauaa

SEQ ID NO: 224401 - RNA, 32 nt, Homo Sapiens
gggaagaaucuuguuuauuccauccuuguuug

SEQ ID NO: 224402 - RNA, 32 nt, Homo Sapiens
ggggaaucucaagaagaaagugccaagaaucc

SEQ ID NO: 224403 - RNA, 32 nt, Homo Sapiens
uuguucaggguugccaugcugcugcugagcug

SEQ ID NO: 224404 - RNA, 32 nt, Homo Sapiens
auauauacauauauauauauauuuccuaaaag

SEQ ID NO: 224405 - RNA, 32 nt, Homo Sapiens
ccccaacucuaaccagaccccaucccccuaag

SEQ ID NO: 224406 - RNA, 32 nt, Homo Sapiens
gggucccgagcagcugcccuccucgccggcau

SEQ ID NO: 224407 - RNA, 32 nt, Homo Sapiens
gcuuagcuguacacccugagucuugcaaaagc

SEQ ID NO: 224408 - RNA, 32 nt, Homo Sapiens
aagaaagaaacaaaaacugagauuuagaacac

SEQ ID NO: 224409 - RNA, 32 nt, Homo Sapiens
cauggcagcuuggccugguuccacuugcaucg

SEQ ID NO: 224410 - RNA, 32 nt, Homo Sapiens
uuggauucauuuccucaaaauauggagagaaa

SEQ ID NO: 224411 - RNA, 32 nt, Homo Sapiens
ucuuggacaacgccagcggcugcucccucaca

SEQ ID NO: 224412 - RNA, 32 nt, Homo Sapiens
cccgggcucgagaaucaagggccucggccgcc

SEQ ID NO: 224413 - RNA, 32 nt, Homo Sapiens
uggagucccggccggagcuggugguucggggg

SEQ ID NO: 224414 - RNA, 32 nt, Homo Sapiens
uagcauuccccaaaugaacagcagccagaauu

SEQ ID NO: 224415 - RNA, 32 nt, Homo Sapiens
uccaaauaaaauucucuuucuaaaagccaaaa

SEQ ID NO: 224416 - RNA, 32 nt, Homo Sapiens
augcuuuuuugugugugucaugucuguuuguu

SEQ ID NO: 224417 - RNA, 32 nt, Homo Sapiens
gauccuguccucaggaccagaagcacgucucu

SEQ ID NO: 224418 - RNA, 32 nt, Homo Sapiens
acucacaggaaggaugcaaaaacuacaaaaau

SEQ ID NO: 224419 - RNA, 32 nt, Homo Sapiens
ccaagucacuaccucacucaccucugagggau

SEQ ID NO: 224420 - RNA, 32 nt, Homo Sapiens
ucuucucugucuuagggcuggugcuggcccug

SEQ ID NO: 224421 - RNA, 32 nt, Homo Sapiens
acauaacagcagggggcaaggcuggaggaaaa

SEQ ID NO: 224422 - RNA, 32 nt, Homo Sapiens
auaacuucuaaccaauaguuuauuuguuucau

SEQ ID NO: 224423 - RNA, 32 nt, Homo Sapiens
uuauuuuuaacgcugcaucuucgcgugugcuc

SEQ ID NO: 224424 - RNA, 32 nt, Homo Sapiens
gcagggcagcuagauggcagagagaccuugga

SEQ ID NO: 224425 - RNA, 32 nt, Homo Sapiens
uuacaggugugagccaccacacccggcccaac

SEQ ID NO: 224426 - RNA, 32 nt, Homo Sapiens
cacugacuugcucgcgcggccguggccucuga

SEQ ID NO: 224427 - RNA, 32 nt, Homo Sapiens
cucccagcacaccuccaggaacaaacucccug

SEQ ID NO: 224428 - RNA, 32 nt, Homo Sapiens
ugucauuugugauuuugacuuauuuauuuaau

SEQ ID NO: 224429 - RNA, 30 nt, Homo Sapiens
ugcugccuggugcucccgccggcccacagg

SEQ ID NO: 224430 - RNA, 32 nt, Homo Sapiens
gcaucgcgggaguccucgcccacgcggcgccu

SEQ ID NO: 224431 - RNA, 30 nt, Homo Sapiens
agguggcccugcuggcagagcgugacgccu

SEQ ID NO: 224432 - RNA, 32 nt, Homo Sapiens
uccugaagccccagugggaguguguuacaggg

SEQ ID NO: 224433 - RNA, 32 nt, Homo Sapiens
caagaugaccacugaggauuacaagaagcugu

SEQ ID NO: 224434 - RNA, 32 nt, Homo Sapiens
ugugucccuguaucugcccacccugcacaggg

SEQ ID NO: 224435 - RNA, 32 nt, Homo Sapiens
uuuguucaaaauaguuugcacuuuuuguuaau

SEQ ID NO: 224436 - RNA, 32 nt, Homo Sapiens
ggaggagcuaggaaacaaauucuuuuuuuuuu

SEQ ID NO: 224437 - RNA, 32 nt, Homo Sapiens
acacaacuguggaaaugaaacugcaauacaag

SEQ ID NO: 224438 - RNA, 32 nt, Homo Sapiens
augaguaaacaguaaaguguggauccugcuuu

SEQ ID NO: 224439 - RNA, 32 nt, Homo Sapiens
ucccuacagucaaggagcaaagggaauagaca

SEQ ID NO: 224440 - RNA, 32 nt, Homo Sapiens
ggugcccgaacacagggucuccaggacguagc

SEQ ID NO: 224441 - RNA, 32 nt, Homo Sapiens
auuaccugacuucaaacuauacuacagggcua

SEQ ID NO: 224442 - RNA, 32 nt, Homo Sapiens
ucucucagucccaauuaugacaguggccaccg

SEQ ID NO: 224443 - RNA, 32 nt, Homo Sapiens
gguuuucuuaccuggugaauaagucaugaucu

SEQ ID NO: 224444 - RNA, 32 nt, Homo Sapiens
cuacugaaaaauuuacauuuugagucagguuu

SEQ ID NO: 224445 - RNA, 32 nt, Homo Sapiens
uuuauaauuuaggaaccuuacauauuauaucc

SEQ ID NO: 224446 - RNA, 29 nt, Homo Sapiens
uucuagaaaauacugacuauaaaaauguc

SEQ ID NO: 224447 - RNA, 32 nt, Homo Sapiens
guggagggggagaggagagagagccugugugu

SEQ ID NO: 224448 - RNA, 32 nt, Homo Sapiens
gugcgagugugauucuaucaguagauuuugcc

SEQ ID NO: 224449 - RNA, 32 nt, Homo Sapiens
guuacuuauuuuuucuuuuuggguucucggug

SEQ ID NO: 224450 - RNA, 32 nt, Homo Sapiens
agccccuggguaacacagguccugcuguggcc

SEQ ID NO: 224451 - RNA, 32 nt, Homo Sapiens
gcugaaucaauuuuauuuaaauuugugauuaa

SEQ ID NO: 224452 - RNA, 32 nt, Homo Sapiens
guuggauuaaucuugaaacaucacuuaauugu

SEQ ID NO: 224453 - RNA, 32 nt, Homo Sapiens
cggcugcaggcugggagggagaagugcuacgc

SEQ ID NO: 224454 - RNA, 32 nt, Homo Sapiens
cuaagacauucuuuuuauuauaaacaguuuuc

SEQ ID NO: 224455 - RNA, 32 nt, Homo Sapiens
aagaaauauuuugaaucugccaaguacauuua

SEQ ID NO: 224456 - RNA, 32 nt, Homo Sapiens
aagggaacaaaguguauaaaaccugccacaau

SEQ ID NO: 224457 - RNA, 32 nt, Homo Sapiens
cagccugggcgacagggcaagacucugucuca

SEQ ID NO: 224458 - RNA, 32 nt, Homo Sapiens
gacaaacaaccugcuccguggacgccugaaac

SEQ ID NO: 224459 - RNA, 32 nt, Homo Sapiens
cugcuuguuguaauggugaaugcuuuaagaaa

SEQ ID NO: 224460 - RNA, 29 nt, Homo Sapiens
uugcuacacaaauaaacauuuuuuccagg

SEQ ID NO: 224461 - RNA, 32 nt, Homo Sapiens
uuggccacuaaaauucauauugagauuaucuu

SEQ ID NO: 224462 - RNA, 32 nt, Homo Sapiens
uuuaguguaucugguuucuacauggaagacua

SEQ ID NO: 224463 - RNA, 32 nt, Homo Sapiens
uggacccggggggcugcucuucccucccccgc

SEQ ID NO: 224464 - RNA, 32 nt, Homo Sapiens
uuguucacaccaaaaugugacaguucuuucau

SEQ ID NO: 224465 - RNA, 32 nt, Homo Sapiens
aaaccucugugcuagcaauaaagcauuuauau

SEQ ID NO: 224466 - RNA, 32 nt, Homo Sapiens
uagaaauaaaauuguugucacacuuucaagaa

SEQ ID NO: 224467 - RNA, 32 nt, Homo Sapiens
cccaggaaaggggacguucagcugagccgagu

SEQ ID NO: 224468 - RNA, 32 nt, Homo Sapiens
uuuauaaauauguauggaaauucuuaggauuu

SEQ ID NO: 224469 - RNA, 32 nt, Homo Sapiens
guucccugugcucuucagaauuacuguuuuug

SEQ ID NO: 224470 - RNA, 32 nt, Homo Sapiens
agcgccgcgccgggagaguugagaauuauggc

SEQ ID NO: 224471 - RNA, 30 nt, Homo Sapiens
gacccuggggguggcauggggguagauuag

SEQ ID NO: 224472 - RNA, 32 nt, Homo Sapiens
uaagcuggcuccuggggaucucuguucaccuu

SEQ ID NO: 224473 - RNA, 32 nt, Homo Sapiens
guggcugcaggcugcuggcuucugcggcugcg

SEQ ID NO: 224474 - RNA, 32 nt, Homo Sapiens
uuagaaagacuacauguuacuaagcaggccac

SEQ ID NO: 224475 - RNA, 32 nt, Homo Sapiens
uuugagauaccuuguuuucauuuuuucuaauu

SEQ ID NO: 224476 - RNA, 32 nt, Homo Sapiens
agccaauuuccacaauauaucuccucuuaugu

SEQ ID NO: 224477 - RNA, 32 nt, Homo Sapiens
ggcuugcaccccacccagcccugggaugaaca

SEQ ID NO: 224478 - RNA, 30 nt, Homo Sapiens
ggaaccaggcuccaggcgccggcgccgggg

SEQ ID NO: 224479 - RNA, 32 nt, Homo Sapiens
uauugucccaucuucacccccauuccagagca

SEQ ID NO: 224480 - RNA, 32 nt, Homo Sapiens
gccaggcaucauauuaaguauuucauauauau

SEQ ID NO: 224481 - RNA, 32 nt, Homo Sapiens
acuaaguuacacaagcauaucugacaggaaug

SEQ ID NO: 224482 - RNA, 32 nt, Homo Sapiens
uuacuccucuauuuuuaaagugccaaacaaau

SEQ ID NO: 224483 - RNA, 32 nt, Homo Sapiens
cuccuuguccaaguccucguuuuaagggcaug

SEQ ID NO: 224484 - RNA, 32 nt, Homo Sapiens
cuguccucaucccagucgcgccggcggugacc

SEQ ID NO: 224485 - RNA, 32 nt, Homo Sapiens
cgccacaggcgcagcucugccccccagcuucc

SEQ ID NO: 224486 - RNA, 32 nt, Homo Sapiens
gaagucaagaucugccggaggcgcugggcaau

SEQ ID NO: 224487 - RNA, 32 nt, Homo Sapiens
auuaagcccaguaggugaccugcacaagacgc

SEQ ID NO: 224488 - RNA, 32 nt, Homo Sapiens
ccagugggcggacgccaggagcucacggaggc

SEQ ID NO: 224489 - RNA, 29 nt, Homo Sapiens
ccaaaugacaggucggauggcaacccugg

SEQ ID NO: 224490 - RNA, 32 nt, Homo Sapiens
caugacgacauucccaccaugggggucuugac

SEQ ID NO: 224491 - RNA, 29 nt, Homo Sapiens
caaauagcagugauguuuuaggaacugaa

SEQ ID NO: 224492 - RNA, 32 nt, Homo Sapiens
cucuggggccuccacuccgacaucaggaccug

SEQ ID NO: 224493 - RNA, 32 nt, Homo Sapiens
uuuaguuuuauauuguguuuuccacuaguaua

SEQ ID NO: 224494 - RNA, 32 nt, Homo Sapiens
aagggcaauauuuuaacacuaauguuucucag

SEQ ID NO: 224495 - RNA, 32 nt, Homo Sapiens
gcccuccagcucagccagaaaaagcccagaaa

SEQ ID NO: 224496 - RNA, 32 nt, Homo Sapiens
uguaaagaaaguagggaggccuuuuugguggc

SEQ ID NO: 224497 - RNA, 32 nt, Homo Sapiens
aaagccgccggccucggaggagggauuaaucc

SEQ ID NO: 224498 - RNA, 32 nt, Homo Sapiens
uugggggcccaggccuggccucgggguucccc

SEQ ID NO: 224499 - RNA, 32 nt, Homo Sapiens
cucccagguucaagggauucugccucagccuc

SEQ ID NO: 224500 - RNA, 32 nt, Homo Sapiens
uacuguauuuuuguucucugguaauguaauaa

SEQ ID NO: 224501 - RNA, 32 nt, Homo Sapiens
cggccuacagauccuccaguuccuccuuuuca

SEQ ID NO: 224502 - RNA, 32 nt, Homo Sapiens
uacguuuaaacacaauucaauccgacaaguuu

SEQ ID NO: 224503 - RNA, 32 nt, Homo Sapiens
aaaucacaaaaauaauaacacugaaauaauuc

SEQ ID NO: 224504 - RNA, 32 nt, Homo Sapiens
aucagccauggcucccaaaaagagugugagca

SEQ ID NO: 224505 - RNA, 32 nt, Homo Sapiens
uuuauaugcucuuuuuacuuaaguuuuaauuu

SEQ ID NO: 224506 - RNA, 32 nt, Homo Sapiens
uagaguggccuggccccucccccucuaccuca

SEQ ID NO: 224507 - RNA, 32 nt, Homo Sapiens
aaauguuaauguaugugucauuuaacucugcc

SEQ ID NO: 224508 - RNA, 27 nt, Homo Sapiens
gagcucaacuucuucaagccccucacu

SEQ ID NO: 224509 - RNA, 32 nt, Homo Sapiens
ugguaaucaauaccccaccaucccuguucuca

SEQ ID NO: 224510 - RNA, 32 nt, Homo Sapiens
acuauuuuaacugggauugguuaucacuuuuc

SEQ ID NO: 224511 - RNA, 32 nt, Homo Sapiens
gcucguuucuuuccaauaaaaguuucugugac

SEQ ID NO: 224512 - RNA, 32 nt, Homo Sapiens
agaaauuugucaagaaggccuuauccauuucg

SEQ ID NO: 224513 - RNA, 32 nt, Homo Sapiens
uucacccaguguucuuuggaugucccuucccu

SEQ ID NO: 224514 - RNA, 32 nt, Homo Sapiens
aguuuuagggucgggcagucuuggagggaaau

SEQ ID NO: 224515 - RNA, 32 nt, Homo Sapiens
aauugguugucuuguaaauaucuuauaaagag

SEQ ID NO: 224516 - RNA, 30 nt, Homo Sapiens
cacuucuccaaaagcggggaaaccuaagca

SEQ ID NO: 224517 - RNA, 30 nt, Homo Sapiens
acgcuggagggcguggacgcagcgggcuuu

SEQ ID NO: 224518 - RNA, 32 nt, Homo Sapiens
ucaaacguguaaauaaaagcaaauuuugacgc

SEQ ID NO: 224519 - RNA, 32 nt, Homo Sapiens
gaauuacugaguuuuuuauuccaguuguagca

SEQ ID NO: 224520 - RNA, 32 nt, Homo Sapiens
uccugagccuggcgagccaggcagccccuugc

SEQ ID NO: 224521 - RNA, 32 nt, Homo Sapiens
gcuuccucuagcccggcccucucuaagggagc

SEQ ID NO: 224522 - RNA, 32 nt, Homo Sapiens
gggaaaggcagccccagaggaucccgcccucc

SEQ ID NO: 224523 - RNA, 32 nt, Homo Sapiens
ccugcccacacgcuccuguuccaccuucacaa

SEQ ID NO: 224524 - RNA, 32 nt, Homo Sapiens
uguacagaugacucagugaagaaacugaggcu

SEQ ID NO: 224525 - RNA, 32 nt, Homo Sapiens
uagaauauuauuaauuuuaaguccugucuuua

SEQ ID NO: 224526 - RNA, 32 nt, Homo Sapiens
cuuuguauuaaaccuauugguauaucauaggu

SEQ ID NO: 224527 - RNA, 30 nt, Homo Sapiens
uagugagagaagcugguaauucuggacaua

SEQ ID NO: 224528 - RNA, 32 nt, Homo Sapiens
accuaacaucucucgguaaaaagcagacaaga

SEQ ID NO: 224529 - RNA, 32 nt, Homo Sapiens
aaacauuuauuuacaagaugauaucaagauua

SEQ ID NO: 224530 - RNA, 32 nt, Homo Sapiens
ccuuuggcuggaggugagcugcacugaaacuu

SEQ ID NO: 224531 - RNA, 32 nt, Homo Sapiens
uguacaucaaggacagauuaacuggaaaacau

SEQ ID NO: 224532 - RNA, 32 nt, Homo Sapiens
agagcucacugcagcuucaaucuccuggcuca

SEQ ID NO: 224533 - RNA, 32 nt, Homo Sapiens
uggaaguuuuaaccuugaugugggauaaaggc

SEQ ID NO: 224534 - RNA, 30 nt, Homo Sapiens
cauaaauuacuguggccccaucuuauuucu

SEQ ID NO: 224535 - RNA, 32 nt, Homo Sapiens
cuccucacuucagauuucuguacaucacguug

SEQ ID NO: 224536 - RNA, 32 nt, Homo Sapiens
auuccaugcucaauggaugaauguagacacaa

SEQ ID NO: 224537 - RNA, 32 nt, Homo Sapiens
gggggcugggcagcagcaccgacgacgacucg

SEQ ID NO: 224538 - RNA, 32 nt, Homo Sapiens
aagaaaaagaaggacugaacuccaucgccauc

SEQ ID NO: 224539 - RNA, 32 nt, Homo Sapiens
uggaagguauuguugcagcaucuggcagugag

SEQ ID NO: 224540 - RNA, 32 nt, Homo Sapiens
ugccgguuguacaaucucugaucagugucuuu

SEQ ID NO: 224541 - RNA, 32 nt, Homo Sapiens
ggucccugccuggccaguggggaaacaccggu

SEQ ID NO: 224542 - RNA, 32 nt, Homo Sapiens
cacuguagaauggauaaaaauuauuuugugau

SEQ ID NO: 224543 - RNA, 32 nt, Homo Sapiens
gcugccucaucucagcucuagggggcacgagc

SEQ ID NO: 224544 - RNA, 27 nt, Homo Sapiens
uccccagccuucuucagccuucuucag

SEQ ID NO: 224545 - RNA, 32 nt, Homo Sapiens
acgaagcgccaaccuuccuuucggaguaaucc

SEQ ID NO: 224546 - RNA, 32 nt, Homo Sapiens
gggcucucucgggcugugcgcuucuuguucac

SEQ ID NO: 224547 - RNA, 32 nt, Homo Sapiens
auccuguuauuuauucggaagguuucaaauca

SEQ ID NO: 224548 - RNA, 32 nt, Homo Sapiens
uuuuauuauacaccaaagguuaacagugaauc

SEQ ID NO: 224549 - RNA, 32 nt, Homo Sapiens
ccuguguguugccagccgaagaaggaugauga

SEQ ID NO: 224550 - RNA, 32 nt, Homo Sapiens
uggauuuucuaaaaauaauguaaaugucuucu

SEQ ID NO: 224551 - RNA, 32 nt, Homo Sapiens
uuuggccacggcgggggugggggcgggggguu

SEQ ID NO: 224552 - RNA, 32 nt, Homo Sapiens
caccucugccgggaaguuccuguguugugcug

SEQ ID NO: 224553 - RNA, 32 nt, Homo Sapiens
gcugccgccccggggcccccagccaugucggc

SEQ ID NO: 224554 - RNA, 32 nt, Homo Sapiens
ugacgauaauuucccuguauauuauguucauu

SEQ ID NO: 224555 - RNA, 32 nt, Homo Sapiens
auucugcacacacacucacacacacacacaca

SEQ ID NO: 224556 - RNA, 32 nt, Homo Sapiens
caguccccgagcgcccgacgucuccgcgcagg

SEQ ID NO: 224557 - RNA, 32 nt, Homo Sapiens
cacacacucuucgaugcuuucccacagccccu

SEQ ID NO: 224558 - RNA, 32 nt, Homo Sapiens
ucaacagacaaaugcuccagaaaucuaugcug

SEQ ID NO: 224559 - RNA, 32 nt, Homo Sapiens
caggacuccucgcuccuccuggagggccuggg

SEQ ID NO: 224560 - RNA, 32 nt, Homo Sapiens
auuggcuccuggaugucauuucuggacuccca

SEQ ID NO: 224561 - RNA, 30 nt, Homo Sapiens
acgacauugcuaaugaggacaccguauaag

SEQ ID NO: 224562 - RNA, 32 nt, Homo Sapiens
caguuccacgaacacaucccucagcacaaauc

SEQ ID NO: 224563 - RNA, 32 nt, Homo Sapiens
uccucccaggugcuugccccagcucccacccc

SEQ ID NO: 224564 - RNA, 32 nt, Homo Sapiens
gguuuguagcggaggaggagcgggcgccaugg

SEQ ID NO: 224565 - RNA, 32 nt, Homo Sapiens
cgccguugguuguugguggucagaauuauugu

SEQ ID NO: 224566 - RNA, 32 nt, Homo Sapiens
cagaaaguauacauucuagugagaaaucuacc

SEQ ID NO: 224567 - RNA, 32 nt, Homo Sapiens
ugucuuacuguguuauuaaaucuuaucuuuua

SEQ ID NO: 224568 - RNA, 32 nt, Homo Sapiens
cgucugucuucacagcucuguguugccaugug

SEQ ID NO: 224569 - RNA, 32 nt, Homo Sapiens
cgcgggaggcggaggaugccgccgcggcugcu

SEQ ID NO: 224570 - RNA, 32 nt, Homo Sapiens
ucguucauugucagcaaaacuguuaggugagu

SEQ ID NO: 224571 - RNA, 32 nt, Homo Sapiens
gaaauaaugacggaagaaugccauguugcuga

SEQ ID NO: 224572 - RNA, 32 nt, Homo Sapiens
ggaucuuguggaagacugucuuggauggggaa

SEQ ID NO: 224573 - RNA, 32 nt, Homo Sapiens
cacaucuauaguaaccauuucaguuucauauu

SEQ ID NO: 224574 - RNA, 32 nt, Homo Sapiens
ccugguaucugcccccaguccaggccaggcgg

SEQ ID NO: 224575 - RNA, 32 nt, Homo Sapiens
ugugggcugcagauuuccugugugggguucag

SEQ ID NO: 224576 - RNA, 32 nt, Homo Sapiens
aaguaauugcaaacaggcuggauuuggacaaa

SEQ ID NO: 224577 - RNA, 32 nt, Homo Sapiens
gcuggccagcccgugcugcccuggugggguga

SEQ ID NO: 224578 - RNA, 32 nt, Homo Sapiens
guaaaugagcuuggugugaacaacucuuccuu

SEQ ID NO: 224579 - RNA, 30 nt, Homo Sapiens
gccccaggcaggccucgccuccagcagccc

SEQ ID NO: 224580 - RNA, 32 nt, Homo Sapiens
uccugguuucaacauggaagugagauagcuga

SEQ ID NO: 224581 - RNA, 32 nt, Homo Sapiens
cuuaaacaacacacagaagaauugguccaguu

SEQ ID NO: 224582 - RNA, 32 nt, Homo Sapiens
aaagagcccugugacuguaguggccuugguga

SEQ ID NO: 224583 - RNA, 32 nt, Homo Sapiens
ugaccacaaagccuugucacugauugcugugu

SEQ ID NO: 224584 - RNA, 32 nt, Homo Sapiens
cggaaacuucucgagcuccccccucuaccccg

SEQ ID NO: 224585 - RNA, 32 nt, Homo Sapiens
aacaaaaaagugaaggaaauauuuucaggaag

SEQ ID NO: 224586 - RNA, 32 nt, Homo Sapiens
cugucccuccggccgguccccagcugcagugg

SEQ ID NO: 224587 - RNA, 32 nt, Homo Sapiens
agccuauuguagugacucuggcaugguuaccu

SEQ ID NO: 224588 - RNA, 32 nt, Homo Sapiens
uugaguaccauugauccaaagcuuucccacag

SEQ ID NO: 224589 - RNA, 32 nt, Homo Sapiens
uuauauuuuuggcugggcucggucgcucacac

SEQ ID NO: 224590 - RNA, 32 nt, Homo Sapiens
caacccgcgcuccuuugcccugccgggcccca

SEQ ID NO: 224591 - RNA, 32 nt, Homo Sapiens
ccaauuuuuuaaaugucauauugugauaaugc

SEQ ID NO: 224592 - RNA, 32 nt, Homo Sapiens
ccggggccaccauugggugcugccacaaagga

SEQ ID NO: 224593 - RNA, 32 nt, Homo Sapiens
gaaucccauaauugacaugggcgacaguaaaa

SEQ ID NO: 224594 - RNA, 31 nt, Homo Sapiens
aaggcccccggcucccugcccccugcccugg

SEQ ID NO: 224595 - RNA, 32 nt, Homo Sapiens
cuaguuucaaacaggcccuaaacaagucugcu

SEQ ID NO: 224596 - RNA, 32 nt, Homo Sapiens
gguuuuaccauguuggccaggcuggucuuaga

SEQ ID NO: 224597 - RNA, 32 nt, Homo Sapiens
uguuauauaaaauuauuauuuuggcuuuuauc

SEQ ID NO: 224598 - RNA, 32 nt, Homo Sapiens
uugcugaucuuugucuuuauuagauuuuccuc

SEQ ID NO: 224599 - RNA, 32 nt, Homo Sapiens
gccgcgcagaggaugccgagcacuuuccggga

SEQ ID NO: 224600 - RNA, 32 nt, Homo Sapiens
accgucuccucccacaccuuccugcucaccuu

SEQ ID NO: 224601 - RNA, 32 nt, Homo Sapiens
cgcccucccuccccagcuccgccucuguccuc

SEQ ID NO: 224602 - RNA, 32 nt, Homo Sapiens
ugggccagcccagccgcccccggcggucgcug

SEQ ID NO: 224603 - RNA, 32 nt, Homo Sapiens
uaaacaaaaugaagggauuaugacagguauua

SEQ ID NO: 224604 - RNA, 32 nt, Homo Sapiens
aguuuccuggagccccaacacauuccuggcag

SEQ ID NO: 224605 - RNA, 32 nt, Homo Sapiens
acuuauaauugugacaccagaugcuuaggauc

SEQ ID NO: 224606 - RNA, 32 nt, Homo Sapiens
aaaaauguuuuaaauuuuuucuuuaauuuugu

SEQ ID NO: 224607 - RNA, 32 nt, Homo Sapiens
uugacugguuacccuccucucugcagguaggu

SEQ ID NO: 224608 - RNA, 32 nt, Homo Sapiens
ccggcugcgagugcugcuggccggcgaggccg

SEQ ID NO: 224609 - RNA, 32 nt, Homo Sapiens
ucuggauccagaaggccuuaugcuccaagcau

SEQ ID NO: 224610 - RNA, 32 nt, Homo Sapiens
uaaccucauuuccguuuccuaccuguuugcuu

SEQ ID NO: 224611 - RNA, 32 nt, Homo Sapiens
gaccggaaucggcgagagcgcuucucgccacc

SEQ ID NO: 224612 - RNA, 32 nt, Homo Sapiens
gguuaucugcaagugaggugugucacaaugag

SEQ ID NO: 224613 - RNA, 32 nt, Homo Sapiens
gaucuuuuuaucaugauccuaccuaucaagca

SEQ ID NO: 224614 - RNA, 32 nt, Homo Sapiens
ggcccgcgcgcccggcgcgaccucugcggauu

SEQ ID NO: 224615 - RNA, 32 nt, Homo Sapiens
uugcggggucugcuugccaggggcucagccug

SEQ ID NO: 224616 - RNA, 32 nt, Homo Sapiens
uagccccuucacugcccuucuccaucucuucc

SEQ ID NO: 224617 - RNA, 27 nt, Homo Sapiens
cuauggcuggucccgugagcuugcgag

SEQ ID NO: 224618 - RNA, 32 nt, Homo Sapiens
uggcuucucuggcugacugcaaggcugucucc

SEQ ID NO: 224619 - RNA, 32 nt, Homo Sapiens
agcugugugugguccaggauaguucaauuauc

SEQ ID NO: 224620 - RNA, 32 nt, Homo Sapiens
ccaccaguggcuucugcugcugcugcagagca

SEQ ID NO: 224621 - RNA, 32 nt, Homo Sapiens
gaaaauauauaagcaaugauuuuuuaaaaggg

SEQ ID NO: 224622 - RNA, 32 nt, Homo Sapiens
gaagcugagugcauaugguauauuuuauucau

SEQ ID NO: 224623 - RNA, 32 nt, Homo Sapiens
cgucaggacgacggagcggguucgggucggug

SEQ ID NO: 224624 - RNA, 32 nt, Homo Sapiens
ucuucucccuccccucacccgcugcccagccc

SEQ ID NO: 224625 - RNA, 32 nt, Homo Sapiens
ucauguguagaauuuacuguuguuaugcaaau

SEQ ID NO: 224626 - RNA, 32 nt, Homo Sapiens
aauauucagugagaauguuacugcugauuuuc

SEQ ID NO: 224627 - RNA, 32 nt, Homo Sapiens
gauaaggcacugaaaauauaaaaggacuggua

SEQ ID NO: 224628 - RNA, 32 nt, Homo Sapiens
ggacugguuuucuaggcagaucugcaaggcug

SEQ ID NO: 224629 - RNA, 32 nt, Homo Sapiens
ggaggagaggcccauguaucugcacgagcacu

SEQ ID NO: 224630 - RNA, 32 nt, Homo Sapiens
auucgggcgguccucggagacacgcggcggug

SEQ ID NO: 224631 - RNA, 32 nt, Homo Sapiens
ucuuuucgcauuugcgccccgugggugaugcc

SEQ ID NO: 224632 - RNA, 32 nt, Homo Sapiens
ggacaggccccgggcacugccucacagccaag

SEQ ID NO: 224633 - RNA, 32 nt, Homo Sapiens
ggcuggagcggagacgggaggccuggccuguc

SEQ ID NO: 224634 - RNA, 32 nt, Homo Sapiens
uuacuuuuauuacagucaauuuugaggauauu

SEQ ID NO: 224635 - RNA, 32 nt, Homo Sapiens
aaccgccauuuucuaguaauucgccaaaauga

SEQ ID NO: 224636 - RNA, 30 nt, Homo Sapiens
auacuucuggacucucuguuuggggagugu

SEQ ID NO: 224637 - RNA, 32 nt, Homo Sapiens
gaauccuggaggaggaaauaaagggaaaggga

SEQ ID NO: 224638 - RNA, 32 nt, Homo Sapiens
agaggcaccugcagcccuccuuccucagcagg

SEQ ID NO: 224639 - RNA, 27 nt, Homo Sapiens
uuccccucccauuucagcccuuaacuu

SEQ ID NO: 224640 - RNA, 31 nt, Homo Sapiens
gugagcacaaagaagaaagcugauuuuuguc

SEQ ID NO: 224641 - RNA, 32 nt, Homo Sapiens
gugggagagggagaccuagagaucuggcugug

SEQ ID NO: 224642 - RNA, 32 nt, Homo Sapiens
uacauaaguuuaggauaaaauaaugggauuuu

SEQ ID NO: 224643 - RNA, 32 nt, Homo Sapiens
uggagucucggucuuucacccaggcuggagug

SEQ ID NO: 224644 - RNA, 32 nt, Homo Sapiens
uuucacucugagguuaguggucucucugcugu

SEQ ID NO: 224645 - RNA, 32 nt, Homo Sapiens
aauacgcucuuaaauuauuuucuagucuuauu

SEQ ID NO: 224646 - RNA, 32 nt, Homo Sapiens
ggaggggcggcgggcugcuccugucacccagc

SEQ ID NO: 224647 - RNA, 32 nt, Homo Sapiens
uuauccuugggguagagccaguaccgacaauc

SEQ ID NO: 224648 - RNA, 32 nt, Homo Sapiens
ugacuuuacaaaauaugcuaccucaaagugcu

SEQ ID NO: 224649 - RNA, 32 nt, Homo Sapiens
ccucgcgugggcuccuggcccccgacggacac

SEQ ID NO: 224650 - RNA, 32 nt, Homo Sapiens
aaugaagccagagggaauuucaagacuuaugg

SEQ ID NO: 224651 - RNA, 32 nt, Homo Sapiens
ucuuuagucauaugcagcaacaugacauuuua

SEQ ID NO: 224652 - RNA, 32 nt, Homo Sapiens
cccuuuccucgcaacuaacugucaacuguuga

SEQ ID NO: 224653 - RNA, 32 nt, Homo Sapiens
cgggucggggagcggcuccgggcggcagcuau

SEQ ID NO: 224654 - RNA, 32 nt, Homo Sapiens
aagcccuuugaaaaaugaauuaagaaggaaau

SEQ ID NO: 224655 - RNA, 32 nt, Homo Sapiens
aucagguuagagaauagauuuuuauuuugaug

SEQ ID NO: 224656 - RNA, 32 nt, Homo Sapiens
ccuuuuccuuuuuuuaaacaaacaaacauaca

SEQ ID NO: 224657 - RNA, 32 nt, Homo Sapiens
auuuaaggagauguaagaggcuuuacaaaaaa

SEQ ID NO: 224658 - RNA, 32 nt, Homo Sapiens
gggaaaguuaauuauuggucucuucaaguuuu

SEQ ID NO: 224659 - RNA, 32 nt, Homo Sapiens
aguagagacugagaaaggguugugaauagcuu

SEQ ID NO: 224660 - RNA, 32 nt, Homo Sapiens
uacuuuuauuuuuuaaagaaauuacaguguag

SEQ ID NO: 224661 - RNA, 32 nt, Homo Sapiens
uuuagugacagguuuuguuugcugcacaccuc

SEQ ID NO: 224662 - RNA, 32 nt, Homo Sapiens
accggaugcagaccccacccugucugcaggcc

SEQ ID NO: 224663 - RNA, 32 nt, Homo Sapiens
gaacucaaggacauugcaacccugcccggcgc

SEQ ID NO: 224664 - RNA, 32 nt, Homo Sapiens
ccugaggcuuuccguccgccagugcaggaacc

SEQ ID NO: 224665 - RNA, 32 nt, Homo Sapiens
cuguggccgcugcgccggggccuggcuucuga

SEQ ID NO: 224666 - RNA, 32 nt, Homo Sapiens
ucuuuuaaugaauuucaagagaauucucuggu

SEQ ID NO: 224667 - RNA, 32 nt, Homo Sapiens
gguaagaaauuccacuuugggccagacaagca

SEQ ID NO: 224668 - RNA, 32 nt, Homo Sapiens
ccuuaagaaaugcaaagauguacaauaaauca

SEQ ID NO: 224669 - RNA, 32 nt, Homo Sapiens
gguaauguggugucugaagcagggccagggga

SEQ ID NO: 224670 - RNA, 32 nt, Homo Sapiens
cccucucuucgcggagcggcgccgcguagcuu

SEQ ID NO: 224671 - RNA, 32 nt, Homo Sapiens
guguauugagggaaggggagaugugugcaaca

SEQ ID NO: 224672 - RNA, 32 nt, Homo Sapiens
ggauauguauaagauauauauaggguagggca

SEQ ID NO: 224673 - RNA, 32 nt, Homo Sapiens
acuauuggugaaauauuucuguuaauuuuguu

SEQ ID NO: 224674 - RNA, 32 nt, Homo Sapiens
uugcucagggucacacagagacucaguggggg

SEQ ID NO: 224675 - RNA, 32 nt, Homo Sapiens
gggaaggagcagggcugccugaggcuccccag

SEQ ID NO: 224676 - RNA, 30 nt, Homo Sapiens
ccaggcccugagaugggggaaaacgggcag

SEQ ID NO: 224677 - RNA, 31 nt, Homo Sapiens
ccugauuuuaauuguuuuggauauguaucua

SEQ ID NO: 224678 - RNA, 32 nt, Homo Sapiens
ucaaaugcuguaaugguggaggugugggcaga

SEQ ID NO: 224679 - RNA, 32 nt, Homo Sapiens
auccccucacuaugaauggguuguuaaaggca

SEQ ID NO: 224680 - RNA, 32 nt, Homo Sapiens
ugaggacguucaacauggugaggggcuacaag

SEQ ID NO: 224681 - RNA, 32 nt, Homo Sapiens
uagggcccaucccuggccuccuguuacccaca

SEQ ID NO: 224682 - RNA, 32 nt, Homo Sapiens
ccaaacgccccgaaaauuaaaagccuuaggag

SEQ ID NO: 224683 - RNA, 32 nt, Homo Sapiens
aauauaucuuaaugcagacaaacaaacauaaa

SEQ ID NO: 224684 - RNA, 32 nt, Homo Sapiens
guuaaggugggcccggcccgcgccacaggacc

SEQ ID NO: 224685 - RNA, 32 nt, Homo Sapiens
aaauguaaacaaagacuacauaacccaaugau

SEQ ID NO: 224686 - RNA, 32 nt, Homo Sapiens
ucaccagccuuuucuuuuuuucuuucuuuuuu

SEQ ID NO: 224687 - RNA, 29 nt, Homo Sapiens
uuccugggacguccgguugaccgcgcguc

SEQ ID NO: 224688 - RNA, 32 nt, Homo Sapiens
gcccucugugcccucagccagcccuguaaggc

SEQ ID NO: 224689 - RNA, 32 nt, Homo Sapiens
cagccccggccgucccggcgucgcuucggagc

SEQ ID NO: 224690 - RNA, 32 nt, Homo Sapiens
aaccugggaggcggaggcugcagugagccgag

SEQ ID NO: 224691 - RNA, 32 nt, Homo Sapiens
uuacuuuauuuugaauuggacaaaauauguug

SEQ ID NO: 224692 - RNA, 32 nt, Homo Sapiens
acugcccucaauaaagauuaaaguaccccagc

SEQ ID NO: 224693 - RNA, 32 nt, Homo Sapiens
uuuuuaaaacuagauugcuuugaaaacaugac

SEQ ID NO: 224694 - RNA, 32 nt, Homo Sapiens
uuugcuuauagcauuuuucucuaaccuauaac

SEQ ID NO: 224695 - RNA, 32 nt, Homo Sapiens
aaaggaaucuucagccuagaucacuuucuuau

SEQ ID NO: 224696 - RNA, 32 nt, Homo Sapiens
agucugagggcucugcagcaucagacccaccu

SEQ ID NO: 224697 - RNA, 32 nt, Homo Sapiens
ccgcgaagaggagauggcggagucguugaggu

SEQ ID NO: 224698 - RNA, 32 nt, Homo Sapiens
agccucccccggccgugccccucccccgugga

SEQ ID NO: 224699 - RNA, 32 nt, Homo Sapiens
ugcaauaaaaauuacugaguugcaucaaaaaa

SEQ ID NO: 224700 - RNA, 32 nt, Homo Sapiens
ugaaccuauguuauaugauacaugcauaacuu

SEQ ID NO: 224701 - RNA, 32 nt, Homo Sapiens
cauucaaggaugccucuguggccuucaccgag

SEQ ID NO: 224702 - RNA, 32 nt, Homo Sapiens
acugugucaaagcccuggguccucuuuuugau

SEQ ID NO: 224703 - RNA, 32 nt, Homo Sapiens
ucucccugccagcacagcagucugaagucaac

SEQ ID NO: 224704 - RNA, 32 nt, Homo Sapiens
ugucggaggggagccagcugggcgcgcguugu

SEQ ID NO: 224705 - RNA, 32 nt, Homo Sapiens
gggaggaggcggagccggugccucggguucag

SEQ ID NO: 224706 - RNA, 32 nt, Homo Sapiens
aaaaucacauauaucauguuucaguaaaugca

SEQ ID NO: 224707 - RNA, 32 nt, Homo Sapiens
auuuaucauagaaaugugauuacaaagaaguc

SEQ ID NO: 224708 - RNA, 32 nt, Homo Sapiens
uugucaauguuuuauuuuuuuauuuacaacaa

SEQ ID NO: 224709 - RNA, 32 nt, Homo Sapiens
gugguguugggacaacuugcucauggaguugc

SEQ ID NO: 224710 - RNA, 32 nt, Homo Sapiens
aaagacuuuccuccaggggcuuccucacuggg

SEQ ID NO: 224711 - RNA, 32 nt, Homo Sapiens
ccauuauuauuuacuucauuuauuuuuaugag

SEQ ID NO: 224712 - RNA, 32 nt, Homo Sapiens
gcuuuuuggagaagaugaugcauaaagcugug

SEQ ID NO: 224713 - RNA, 32 nt, Homo Sapiens
ucaacaagugacaugaauguuacuacaugaac

SEQ ID NO: 224714 - RNA, 32 nt, Homo Sapiens
gagcggggccgcgggcgcgcaccgacucaaga

SEQ ID NO: 224715 - RNA, 32 nt, Homo Sapiens
ucagucgucuguauuuauauuccuucaucagc

SEQ ID NO: 224716 - RNA, 32 nt, Homo Sapiens
cuaaguucuaggcuggaaauaagggcaaaaug

SEQ ID NO: 224717 - RNA, 32 nt, Homo Sapiens
cuucagcgcuccccggcucccucgcucugcag

SEQ ID NO: 224718 - RNA, 32 nt, Homo Sapiens
gaaaaaugaaagaugauuugcaaugggaugua

SEQ ID NO: 224719 - RNA, 32 nt, Homo Sapiens
cagugaaacaaauugcggacuggccuuguccu

SEQ ID NO: 224720 - RNA, 32 nt, Homo Sapiens
cauuagcucuggcuccuucucucugggguggc

SEQ ID NO: 224721 - RNA, 32 nt, Homo Sapiens
gguagaauagggcugaagcaucugauaauagg

SEQ ID NO: 224722 - RNA, 32 nt, Homo Sapiens
uggcccugaaccugcccucccaucaguguauc

SEQ ID NO: 224723 - RNA, 32 nt, Homo Sapiens
uucccauuuuucccuccaucaaaaucguacaa

SEQ ID NO: 224724 - RNA, 32 nt, Homo Sapiens
cagcgcacaguugcagcaacacgccgcguuca

SEQ ID NO: 224725 - RNA, 32 nt, Homo Sapiens
uauuuuuauuuuuuuucuuuuuuucuucagug

SEQ ID NO: 224726 - RNA, 32 nt, Homo Sapiens
uuuugccuuuaaguuauuuuaccuguuuuugu

SEQ ID NO: 224727 - RNA, 32 nt, Homo Sapiens
guuccagcuaaaaacaaguacuuuuuauuagu

SEQ ID NO: 224728 - RNA, 32 nt, Homo Sapiens
aaaucauuuccuuuuuucuuucguuugcccuu

SEQ ID NO: 224729 - RNA, 32 nt, Homo Sapiens
aaugcuaaaaauuuuugaaauguucuguaauu

SEQ ID NO: 224730 - RNA, 32 nt, Homo Sapiens
cacacguccuacugcuucugagcccgcacugc

SEQ ID NO: 224731 - RNA, 32 nt, Homo Sapiens
uggcccagcuucuccuucucccucugcauaaa

SEQ ID NO: 224732 - RNA, 32 nt, Homo Sapiens
guaugcccacccagccccaaagccaccggcau

SEQ ID NO: 224733 - RNA, 32 nt, Homo Sapiens
aacauauugcugaaugcucugauuccacccaa

SEQ ID NO: 224734 - RNA, 32 nt, Homo Sapiens
cccaaaacagaaaagagaaacacaagcucacc

SEQ ID NO: 224735 - RNA, 29 nt, Homo Sapiens
ugauugauauguauuugccccagggcacu

SEQ ID NO: 224736 - RNA, 32 nt, Homo Sapiens
uccaggggcauguuauuuuagguucugugaac

SEQ ID NO: 224737 - RNA, 32 nt, Homo Sapiens
cuuguauucuuucaccucuucccacaagaaau

SEQ ID NO: 224738 - RNA, 32 nt, Homo Sapiens
uaccugcagggcccaaaggucccucccuguuu

SEQ ID NO: 224739 - RNA, 32 nt, Homo Sapiens
caucuggcuaauuuuucuuacuuuuuggagaa

SEQ ID NO: 224740 - RNA, 32 nt, Homo Sapiens
cggagagugcagcagacagggcuggucccgag

SEQ ID NO: 224741 - RNA, 32 nt, Homo Sapiens
uuuaauugcagacaguaaugcaugucacacua

SEQ ID NO: 224742 - RNA, 32 nt, Homo Sapiens
agccagggacaucagugcagucggaugcacag

SEQ ID NO: 224743 - RNA, 32 nt, Homo Sapiens
aaucaccuggggaagggugaggccaucgaggc

SEQ ID NO: 224744 - RNA, 32 nt, Homo Sapiens
uucauucauauuuuuguuguuuccaggaauuu

SEQ ID NO: 224745 - RNA, 32 nt, Homo Sapiens
agaucaaccaaccuuaaauauauguauguaua

SEQ ID NO: 224746 - RNA, 32 nt, Homo Sapiens
ugggccaggacacguggggugccugggacgcu

SEQ ID NO: 224747 - RNA, 32 nt, Homo Sapiens
acauaccugcgguuccagcuacucaagaggcu

SEQ ID NO: 224748 - RNA, 32 nt, Homo Sapiens
uagaaauggcuguugucauguuuucuggacuu

SEQ ID NO: 224749 - RNA, 29 nt, Homo Sapiens
cccagauaaacaguguauuuucuucuuuu

SEQ ID NO: 224750 - RNA, 32 nt, Homo Sapiens
guuucuaauaucuauuaauuagaucauaaggu

SEQ ID NO: 224751 - RNA, 32 nt, Homo Sapiens
agcaaagauaccugcuucuucuauaugauaca

SEQ ID NO: 224752 - RNA, 32 nt, Homo Sapiens
ucaagucauuuucuguucaccugccgcacagg

SEQ ID NO: 224753 - RNA, 32 nt, Homo Sapiens
ucgcugccugggaucuugggguuggccuuugc

SEQ ID NO: 224754 - RNA, 32 nt, Homo Sapiens
auuuucacuggacuuuuaaaucuagacuuuag

SEQ ID NO: 224755 - RNA, 32 nt, Homo Sapiens
cucuguuucuuccugggcagguccuggagcgg

SEQ ID NO: 224756 - RNA, 32 nt, Homo Sapiens
acucuuagcauaucuuuuuuuccuuuggcuuu

SEQ ID NO: 224757 - RNA, 27 nt, Homo Sapiens
acaugccguugaccuuguuacaggacu

SEQ ID NO: 224758 - RNA, 32 nt, Homo Sapiens
aaucaauuacugauugugaccuaaugaacuaa

SEQ ID NO: 224759 - RNA, 32 nt, Homo Sapiens
aagcuagaaaucacguccuucuuccaggauca

SEQ ID NO: 224760 - RNA, 32 nt, Homo Sapiens
ucgggcugccuggccuggcugcacagaaggca

SEQ ID NO: 224761 - RNA, 32 nt, Homo Sapiens
gcgcugcgcgccccggccuccagggacuccua

SEQ ID NO: 224762 - RNA, 32 nt, Homo Sapiens
cuagcggaggcaaauauaaaauaaucaguaaa

SEQ ID NO: 224763 - RNA, 32 nt, Homo Sapiens
gggugaccagcauguucugcgacugcagauga

SEQ ID NO: 224764 - RNA, 32 nt, Homo Sapiens
gcguuuuccuuuucuuuuuuuuuuuuuuuaaa

SEQ ID NO: 224765 - RNA, 32 nt, Homo Sapiens
aaaacauuuuaaaauauaaauccuguaguuua

SEQ ID NO: 224766 - RNA, 32 nt, Homo Sapiens
ggaucuuccagaagauaucuaaaagucuguaa

SEQ ID NO: 224767 - RNA, 32 nt, Homo Sapiens
aagccuuuuguguaauaagaaaguauaaaguc

SEQ ID NO: 224768 - RNA, 32 nt, Homo Sapiens
ccuuugaagaacugacagggacuuggucuucc

SEQ ID NO: 224769 - RNA, 32 nt, Homo Sapiens
acauuugcuguguagcugggacaguuacauuu

SEQ ID NO: 224770 - RNA, 32 nt, Homo Sapiens
cagaauacugucauuguccuuggggcggggug

SEQ ID NO: 224771 - RNA, 32 nt, Homo Sapiens
cugccaccccacccggcccgaaucugucuuga

SEQ ID NO: 224772 - RNA, 32 nt, Homo Sapiens
ccccaggccccggcaagauccccacaaggcug

SEQ ID NO: 224773 - RNA, 32 nt, Homo Sapiens
gguugagauucugccucccaggagagggauuu

SEQ ID NO: 224774 - RNA, 32 nt, Homo Sapiens
agucugcuuccuucaggcaucauucucaauuc

SEQ ID NO: 224775 - RNA, 32 nt, Homo Sapiens
gaggagcccucguaguuguaaaagcacagacu

SEQ ID NO: 224776 - RNA, 32 nt, Homo Sapiens
auuugguuccauuuuuauuucauuuuuauuuu

SEQ ID NO: 224777 - RNA, 32 nt, Homo Sapiens
cugugcgggagcugugacacggugccuucccc

SEQ ID NO: 224778 - RNA, 32 nt, Homo Sapiens
uuuucaccaacccaaagcuuuuguaaaaguaa

SEQ ID NO: 224779 - RNA, 32 nt, Homo Sapiens
aauuuaaccucauagcagcuuugguuuucccu

SEQ ID NO: 224780 - RNA, 32 nt, Homo Sapiens
aauccaccucccucaggugugcccgcgggacc

SEQ ID NO: 224781 - RNA, 32 nt, Homo Sapiens
ggucaguaucaauguaaauguuagagccauga

SEQ ID NO: 224782 - RNA, 32 nt, Homo Sapiens
auuugaccuuggcgccuuuuuuaaaccacccu

SEQ ID NO: 224783 - RNA, 32 nt, Homo Sapiens
uggagcucucagugugugaaaguucuaaagcc

SEQ ID NO: 224784 - RNA, 32 nt, Homo Sapiens
uuauuuuauuuuugugggacaccacaauccca

SEQ ID NO: 224785 - RNA, 32 nt, Homo Sapiens
aucgagaagcuggaacuuguauuguuaggccc

SEQ ID NO: 224786 - RNA, 32 nt, Homo Sapiens
ucuaggucuucagaucuagauucccaucaguu

SEQ ID NO: 224787 - RNA, 32 nt, Homo Sapiens
gugcuccugccagcugugcacacaucucugua

SEQ ID NO: 224788 - RNA, 32 nt, Homo Sapiens
uuuuggaaauuaugaauuuguccuagguuugu

SEQ ID NO: 224789 - RNA, 32 nt, Homo Sapiens
gccugaucugacaacaucccaagguuuccggc

SEQ ID NO: 224790 - RNA, 32 nt, Homo Sapiens
uuucugugcaugcacaaagaagagaucauguc

SEQ ID NO: 224791 - RNA, 32 nt, Homo Sapiens
ccgcaguggcuugccguggcagcccucgacaa

SEQ ID NO: 224792 - RNA, 32 nt, Homo Sapiens
auaucaucucuauucagaguauaauaaaauua

SEQ ID NO: 224793 - RNA, 32 nt, Homo Sapiens
gucauccgcucccuaaugagacugucugugcu

SEQ ID NO: 224794 - RNA, 32 nt, Homo Sapiens
auuuuggcaugaugacuguacucucaauaaag

SEQ ID NO: 224795 - RNA, 32 nt, Homo Sapiens
ggaucuggaagcucagccggcagagcugagag

SEQ ID NO: 224796 - RNA, 32 nt, Homo Sapiens
ggucgggaagggccuggucagcugcguccggc

SEQ ID NO: 224797 - RNA, 32 nt, Homo Sapiens
uuuuuucacaauguuucauuuuuacacaucuc

SEQ ID NO: 224798 - RNA, 32 nt, Homo Sapiens
ugagaacccacuuuuuucugcaugcuagcuug

SEQ ID NO: 224799 - RNA, 32 nt, Homo Sapiens
uucuuucuuugcaaaugaaauaugaaauuuag

SEQ ID NO: 224800 - RNA, 32 nt, Homo Sapiens
ggccuauggagagcccugggaccgcuacacca

SEQ ID NO: 224801 - RNA, 32 nt, Homo Sapiens
ggauguugccuggcccaggacuugggacagug

SEQ ID NO: 224802 - RNA, 32 nt, Homo Sapiens
gcguucgcgccuucccacuccccucgccaccg

SEQ ID NO: 224803 - RNA, 32 nt, Homo Sapiens
uggugguuagcuauacgggaaaugguaaguag

SEQ ID NO: 224804 - RNA, 32 nt, Homo Sapiens
cggggcugcgcgcgccauggagccgcggugcc

SEQ ID NO: 224805 - RNA, 32 nt, Homo Sapiens
ccaaagcugguaucguagcugcccuaauguug

SEQ ID NO: 224806 - RNA, 32 nt, Homo Sapiens
ggcagguggcgggaacguugcuggggugggca

SEQ ID NO: 224807 - RNA, 32 nt, Homo Sapiens
gaauuuugccgauuucaugacuaaccagucca

SEQ ID NO: 224808 - RNA, 32 nt, Homo Sapiens
aagcuaagaacaaagaggccgcuggggacgga

SEQ ID NO: 224809 - RNA, 32 nt, Homo Sapiens
cagcucagccgugggccaaugcagcuuacaga

SEQ ID NO: 224810 - RNA, 31 nt, Homo Sapiens
cuccuugagccccaguucaaggcccaggaac

SEQ ID NO: 224811 - RNA, 32 nt, Homo Sapiens
gggccugggauuggcuggcgucguccgacccc

SEQ ID NO: 224812 - RNA, 32 nt, Homo Sapiens
gaaaaagggcaugaaaguuguuuagauugucu

SEQ ID NO: 224813 - RNA, 32 nt, Homo Sapiens
accagccugggcaacauagugaggccccuguc

SEQ ID NO: 224814 - RNA, 32 nt, Homo Sapiens
gaaggaauccgacgcuggggggcuugcucggg

SEQ ID NO: 224815 - RNA, 32 nt, Homo Sapiens
gccuggaggacccuggguagguccugagggug

SEQ ID NO: 224816 - RNA, 32 nt, Homo Sapiens
aauuauguuguguauguuuuaacaucucugau

SEQ ID NO: 224817 - RNA, 32 nt, Homo Sapiens
gguuccuggugccccuuuccccccacuuucag

SEQ ID NO: 224818 - RNA, 32 nt, Homo Sapiens
agcccucccgcugaucccccagccagcggucc

SEQ ID NO: 224819 - RNA, 32 nt, Homo Sapiens
ugauccaauaauaucuacuauagagaagcuga

SEQ ID NO: 224820 - RNA, 32 nt, Homo Sapiens
uccuggaggaaccuccuggggcucuggggcca

SEQ ID NO: 224821 - RNA, 32 nt, Homo Sapiens
guuacuuucuguuuuuccuaccucuuaggcug

SEQ ID NO: 224822 - RNA, 32 nt, Homo Sapiens
gguuaggaacauugaaaaauggcugcaaauag

SEQ ID NO: 224823 - RNA, 32 nt, Homo Sapiens
aucagucacauggcuuuugaaaaaugauguau

SEQ ID NO: 224824 - RNA, 32 nt, Homo Sapiens
ccuuuguaccucagguguuuuaggugugagau

SEQ ID NO: 224825 - RNA, 32 nt, Homo Sapiens
agcacucuucccuuucuccccuuccaccugcu

SEQ ID NO: 224826 - RNA, 32 nt, Homo Sapiens
uuugcgcuguuaaauuugcaaugagaagcaaa

SEQ ID NO: 224827 - RNA, 32 nt, Homo Sapiens
uguuguggaauaaaaacuguaagaaaauuaag

SEQ ID NO: 224828 - RNA, 32 nt, Homo Sapiens
caaagccccccuccucguacaucgcgcucauc

SEQ ID NO: 224829 - RNA, 32 nt, Homo Sapiens
ccucagcugauggcccacuuuuguuuauauaa

SEQ ID NO: 224830 - RNA, 32 nt, Homo Sapiens
gugacaccuggccugcccuuucucagcugccu

SEQ ID NO: 224831 - RNA, 32 nt, Homo Sapiens
caggugggguccgcggccgccggagcguuccg

SEQ ID NO: 224832 - RNA, 32 nt, Homo Sapiens
auccagauccagagccgggaccagaggcugcu

SEQ ID NO: 224833 - RNA, 27 nt, Homo Sapiens
gcgguuuccuucuucauagucccuugc

SEQ ID NO: 224834 - RNA, 32 nt, Homo Sapiens
ccuucugaguccccggcccuuggugcgauguc

SEQ ID NO: 224835 - RNA, 32 nt, Homo Sapiens
aaccugaguauaagauaaaauaaaauuuuauu

SEQ ID NO: 224836 - RNA, 32 nt, Homo Sapiens
gccugcuugaagacauaaaggaauaaugauac

SEQ ID NO: 224837 - RNA, 32 nt, Homo Sapiens
gacucgcgggaccggcguccccggcgcgaaga

SEQ ID NO: 224838 - RNA, 32 nt, Homo Sapiens
aggccuggccuuucccucuccugcugagaacc

SEQ ID NO: 224839 - RNA, 32 nt, Homo Sapiens
caugcugcuagaucuuuauuauggaaaacauu

SEQ ID NO: 224840 - RNA, 32 nt, Homo Sapiens
gcugggugagggacaggaggccccacaggagg

SEQ ID NO: 224841 - RNA, 32 nt, Homo Sapiens
uaacuuuucaaaaacuaacauuaaaugucaau

SEQ ID NO: 224842 - RNA, 32 nt, Homo Sapiens
aauguucaguuauuaauauguauacugccauu

SEQ ID NO: 224843 - RNA, 32 nt, Homo Sapiens
auucugacaugauugaaaaagcacuaauagua

SEQ ID NO: 224844 - RNA, 32 nt, Homo Sapiens
cauggcaggucagccuguggaacuugcgcagg

SEQ ID NO: 224845 - RNA, 32 nt, Homo Sapiens
accuggagccucuggaggaagaggagggacaa

SEQ ID NO: 224846 - RNA, 32 nt, Homo Sapiens
uacgcuuauaggcauggaauugcagaggcugu

SEQ ID NO: 224847 - RNA, 32 nt, Homo Sapiens
aagaaguggaccguagcccugucuguucaaag

SEQ ID NO: 224848 - RNA, 32 nt, Homo Sapiens
ggcgggacgcgggccuggcccguguguguccu

SEQ ID NO: 224849 - RNA, 32 nt, Homo Sapiens
acaaggucaggaguucaagaccagcugaccaa

SEQ ID NO: 224850 - RNA, 32 nt, Homo Sapiens
agccaagcugaaucaaaacaguuuuaaaagag

SEQ ID NO: 224851 - RNA, 32 nt, Homo Sapiens
cauagaaccauaacuucuagauaauguaguug

SEQ ID NO: 224852 - RNA, 32 nt, Homo Sapiens
guuuuguguaaauuuaagguaauuauacuauc

SEQ ID NO: 224853 - RNA, 32 nt, Homo Sapiens
auguucccuuggcgagcaauugaaacuuguuu

SEQ ID NO: 224854 - RNA, 32 nt, Homo Sapiens
ggagccgccccaccgcagcuggcgauggaccc

SEQ ID NO: 224855 - RNA, 32 nt, Homo Sapiens
cugcaucugcccgucucccuggcccaccaugu

SEQ ID NO: 224856 - RNA, 32 nt, Homo Sapiens
ccagcucagaaucuugcugcucggcccccagg

SEQ ID NO: 224857 - RNA, 32 nt, Homo Sapiens
caugccccgcugugucccuuucucucuccuua

SEQ ID NO: 224858 - RNA, 32 nt, Homo Sapiens
aaaauaccaaaauuaguuagucaugguggcau

SEQ ID NO: 224859 - RNA, 32 nt, Homo Sapiens
ccugcgagcuccguccugccugcagcagcaca

SEQ ID NO: 224860 - RNA, 32 nt, Homo Sapiens
cugacagaucuucugucauuuauuuuucccaa

SEQ ID NO: 224861 - RNA, 32 nt, Homo Sapiens
gcugaaauuaguuuuuuuuuuaauucuccaau

SEQ ID NO: 224862 - RNA, 32 nt, Homo Sapiens
cguaaacccuccccacuacccgucuuucuccc

SEQ ID NO: 224863 - RNA, 32 nt, Homo Sapiens
cuuuaugcaauaaagaauuacauuaagaagaa

SEQ ID NO: 224864 - RNA, 32 nt, Homo Sapiens
ccaccuggaaugcacagcucagggaagcuggu

SEQ ID NO: 224865 - RNA, 32 nt, Homo Sapiens
cuggggugaggguggcacccaggcagcugcau

SEQ ID NO: 224866 - RNA, 32 nt, Homo Sapiens
ccccaggccccggcccaggagggguccccaga

SEQ ID NO: 224867 - RNA, 32 nt, Homo Sapiens
aagaaaauuguuucuauguacuguauauuuug

SEQ ID NO: 224868 - RNA, 32 nt, Homo Sapiens
uuauuuacuuugcauuuuguuucacucuuucc

SEQ ID NO: 224869 - RNA, 32 nt, Homo Sapiens
aaggagaaagagacuaccuacugcauuucugu

SEQ ID NO: 224870 - RNA, 32 nt, Homo Sapiens
uuucaguuucauuuccacggacccuccugccu

SEQ ID NO: 224871 - RNA, 28 nt, Homo Sapiens
gaaaugggcagcaaaaccuugccggcgc

SEQ ID NO: 224872 - RNA, 32 nt, Homo Sapiens
aggaccugcauaagccagcuuucgaggcagac

SEQ ID NO: 224873 - RNA, 32 nt, Homo Sapiens
cgcgggcuugcagcugcggcaagugcuggcgg

SEQ ID NO: 224874 - RNA, 32 nt, Homo Sapiens
acuguccccugcggcggggacccggcacggcu

SEQ ID NO: 224875 - RNA, 32 nt, Homo Sapiens
ccaaggccaagaguguccccagggcugggcug

SEQ ID NO: 224876 - RNA, 32 nt, Homo Sapiens
auuucacgggucugaagugauguccaggcaaa

SEQ ID NO: 224877 - RNA, 32 nt, Homo Sapiens
ggaauguguuugacuuccucaaugaaaagcug

SEQ ID NO: 224878 - RNA, 32 nt, Homo Sapiens
aacuuuaaccggagcuucaucuagugauugca

SEQ ID NO: 224879 - RNA, 32 nt, Homo Sapiens
ugcccuggcuuggccuggacucgcccugccuc

SEQ ID NO: 224880 - RNA, 32 nt, Homo Sapiens
gccuuaaaggaugaggaggagcagaaaucuua

SEQ ID NO: 224881 - RNA, 32 nt, Homo Sapiens
acuccaccuuggaccucagugacucagaacuu

SEQ ID NO: 224882 - RNA, 32 nt, Homo Sapiens
gaccucaaucugucuuagcauuuuguaacuaa

SEQ ID NO: 224883 - RNA, 32 nt, Homo Sapiens
aaauaguaaaugcuuugugugauugaaucuga

SEQ ID NO: 224884 - RNA, 30 nt, Homo Sapiens
cagcgaggcugggcggcggguccugcugug

SEQ ID NO: 224885 - RNA, 32 nt, Homo Sapiens
acgaaagcuugaaaagcagcuuugaaaaacaa

SEQ ID NO: 224886 - RNA, 32 nt, Homo Sapiens
uagcugcaagccagcucuggcuucuggaguuu

SEQ ID NO: 224887 - RNA, 32 nt, Homo Sapiens
gacuggaaacuauauucagugcacuuucucca

SEQ ID NO: 224888 - RNA, 32 nt, Homo Sapiens
gagcacuuggcaauuuacaaaauacaucugcc

SEQ ID NO: 224889 - RNA, 32 nt, Homo Sapiens
aggcacugagaguagcagaaauccugcaaagc

SEQ ID NO: 224890 - RNA, 32 nt, Homo Sapiens
accuccuacaugggucaugacucuggguccug

SEQ ID NO: 224891 - RNA, 32 nt, Homo Sapiens
gcuguugaaguuucugggaacacauaauaugu

SEQ ID NO: 224892 - RNA, 32 nt, Homo Sapiens
uuggaggaaaaucaccuggggggaggggacuu

SEQ ID NO: 224893 - RNA, 32 nt, Homo Sapiens
aacaucagcuggaagaaguaacgugauuucgu

SEQ ID NO: 224894 - RNA, 27 nt, Homo Sapiens
uuugagcuguuccucagcccccuaccc

SEQ ID NO: 224895 - RNA, 32 nt, Homo Sapiens
aaacaaaaaaauuuuuaauuggauuuugauau

SEQ ID NO: 224896 - RNA, 32 nt, Homo Sapiens
caugagaaacaguguucuuggaccucacagcc

SEQ ID NO: 224897 - RNA, 32 nt, Homo Sapiens
uuccagggaaaggcuuugugcaauugccuggu

SEQ ID NO: 224898 - RNA, 32 nt, Homo Sapiens
gguauacccagcugggagaucuuggugcugcc

SEQ ID NO: 224899 - RNA, 32 nt, Homo Sapiens
ucgcucugcccaggacgcacagaugagagcgc

SEQ ID NO: 224900 - RNA, 32 nt, Homo Sapiens
cgaaauugggaugggugagcacccuugcugug

SEQ ID NO: 224901 - RNA, 32 nt, Homo Sapiens
uuaauuagucacugccuugcuaacuuugcugu

SEQ ID NO: 224902 - RNA, 32 nt, Homo Sapiens
ggggugcucccgggccgcucucagagaagugg

SEQ ID NO: 224903 - RNA, 32 nt, Homo Sapiens
ccacucaccuuuuuaccuuguucugagaaaua

SEQ ID NO: 224904 - RNA, 31 nt, Homo Sapiens
cgucuggagcggcuccuuggaguccacagca

SEQ ID NO: 224905 - RNA, 32 nt, Homo Sapiens
acuggagugcagccccuuccccugcccagggu

SEQ ID NO: 224906 - RNA, 32 nt, Homo Sapiens
aaaagaaaacauugcaucucaaaaggugaaga

SEQ ID NO: 224907 - RNA, 32 nt, Homo Sapiens
cagguggcggcucucacagagccccugaugcu

SEQ ID NO: 224908 - RNA, 32 nt, Homo Sapiens
uccagccaguguuuuuugugguaugagaacag

SEQ ID NO: 224909 - RNA, 32 nt, Homo Sapiens
cccagaggccuugccugggcaacccuaagccc

SEQ ID NO: 224910 - RNA, 32 nt, Homo Sapiens
ggcggcgggaugcuggcgcugcuggccgccag

SEQ ID NO: 224911 - RNA, 32 nt, Homo Sapiens
ugucaugugagcauaagccaaugguagcuugc

SEQ ID NO: 224912 - RNA, 32 nt, Homo Sapiens
uccuguucacaccagagaaccaggcuacaaga

SEQ ID NO: 224913 - RNA, 32 nt, Homo Sapiens
cauagggccugcugccugccgccccgcgggac

SEQ ID NO: 224914 - RNA, 32 nt, Homo Sapiens
ggccgcccgcgcgcgacgggaccggcagcaug

SEQ ID NO: 224915 - RNA, 32 nt, Homo Sapiens
ugaauaaaguauguuugacuuccccggaaaaa

SEQ ID NO: 224916 - RNA, 32 nt, Homo Sapiens
acugcuucuccuauacauaacuucuauuaucu

SEQ ID NO: 224917 - RNA, 32 nt, Homo Sapiens
cucuggcaccucagcagucggaggcacagaag

SEQ ID NO: 224918 - RNA, 32 nt, Homo Sapiens
cagaacaauugggugaguuuucccucccuucc

SEQ ID NO: 224919 - RNA, 32 nt, Homo Sapiens
ucaucugauauucugcagaaauaucaaugaga

SEQ ID NO: 224920 - RNA, 32 nt, Homo Sapiens
gacagagaagguccucuugggcugcuuuagug

SEQ ID NO: 224921 - RNA, 32 nt, Homo Sapiens
gggaggccccagccccugcugcuugcuuucug

SEQ ID NO: 224922 - RNA, 27 nt, Homo Sapiens
augaaauaaaacacacuauucucuggc

SEQ ID NO: 224923 - RNA, 32 nt, Homo Sapiens
agccugacucucacuauggacugguggcagcu

SEQ ID NO: 224924 - RNA, 32 nt, Homo Sapiens
uuggaagccuuauagaaaagcuuauuuugguu

SEQ ID NO: 224925 - RNA, 32 nt, Homo Sapiens
uggaagggagcaguauaaagcuuauuuguauu

SEQ ID NO: 224926 - RNA, 32 nt, Homo Sapiens
guuuaucuugccauccuccccuucugguucuc

SEQ ID NO: 224927 - RNA, 30 nt, Homo Sapiens
cgaggaggcaggccccgggcccugcgcugc

SEQ ID NO: 224928 - RNA, 32 nt, Homo Sapiens
gagcgcgccuucgaucaaggcgcggacgcuau

SEQ ID NO: 224929 - RNA, 32 nt, Homo Sapiens
uuaccggaaauacuucuggggaaacuucaugg

SEQ ID NO: 224930 - RNA, 32 nt, Homo Sapiens
gccuuccccacuuuguccugagaagcuggguc

SEQ ID NO: 224931 - RNA, 32 nt, Homo Sapiens
gcgagggcugucaucagugugcucuccccagu

SEQ ID NO: 224932 - RNA, 32 nt, Homo Sapiens
gaauuuggaaacuguagaagagaaucaagaag

SEQ ID NO: 224933 - RNA, 32 nt, Homo Sapiens
gcaagcuccgccuccuggguucacgucauuuu

SEQ ID NO: 224934 - RNA, 32 nt, Homo Sapiens
gaaucauccacauuacgaagaugcagacuuga

SEQ ID NO: 224935 - RNA, 32 nt, Homo Sapiens
ggccucugccagcugccuucccugccagagaa

SEQ ID NO: 224936 - RNA, 32 nt, Homo Sapiens
ugucagucaaggaaaggccacuuaaggaucug

SEQ ID NO: 224937 - RNA, 32 nt, Homo Sapiens
guguugcagccucugacacguggcucacugcu

SEQ ID NO: 224938 - RNA, 32 nt, Homo Sapiens
acauuuuggccauaauccuagaugcaugcuuc

SEQ ID NO: 224939 - RNA, 32 nt, Homo Sapiens
cuguggagaugaugugcuggugguggccaaag

SEQ ID NO: 224940 - RNA, 32 nt, Homo Sapiens
cugauuaggcugggauuugaggugauaaucca

SEQ ID NO: 224941 - RNA, 32 nt, Homo Sapiens
aguaugggaagccccaaggugaccuggccaag

SEQ ID NO: 224942 - RNA, 32 nt, Homo Sapiens
ugaaaugccaaaaaccugagaagugcuccuaa

SEQ ID NO: 224943 - RNA, 32 nt, Homo Sapiens
ucugggaccugccaggcaggggugggggugga

SEQ ID NO: 224944 - RNA, 32 nt, Homo Sapiens
caguaaguguuagagggaacagggcggagaua

SEQ ID NO: 224945 - RNA, 32 nt, Homo Sapiens
gaauuauaaaaauuauauuuugcuuacauuuu

SEQ ID NO: 224946 - RNA, 32 nt, Homo Sapiens
augcuuuuucuacuuucaaagccucccucugu

SEQ ID NO: 224947 - RNA, 32 nt, Homo Sapiens
uuuccaccagugccacagccucgucuggaaaa

SEQ ID NO: 224948 - RNA, 32 nt, Homo Sapiens
gaacccgggagguggagcuugcggugagcuga

SEQ ID NO: 224949 - RNA, 32 nt, Homo Sapiens
ugcuugccaggcaccaggguagauaaaaagau

SEQ ID NO: 224950 - RNA, 32 nt, Homo Sapiens
cuuccccggggagucaguuccuccccgggccc

SEQ ID NO: 224951 - RNA, 32 nt, Homo Sapiens
agaaagaggggacaggugucagagcagggaga

SEQ ID NO: 224952 - RNA, 32 nt, Homo Sapiens
cguuaguccaacaaagacaguaacuucucaca

SEQ ID NO: 224953 - RNA, 32 nt, Homo Sapiens
uuuuucaggcucauccuguucuuccagaaucu

SEQ ID NO: 224954 - RNA, 32 nt, Homo Sapiens
agagugggcuucuggagagauguuaggaauau

SEQ ID NO: 224955 - RNA, 32 nt, Homo Sapiens
guguuccugugcuuauauucagucugugccua

SEQ ID NO: 224956 - RNA, 32 nt, Homo Sapiens
ugaggacuuuguggcugguuuguccgugauuc

SEQ ID NO: 224957 - RNA, 32 nt, Homo Sapiens
uugcgcgggcugcugcggcugcugccgggacg

SEQ ID NO: 224958 - RNA, 28 nt, Homo Sapiens
aaacacgaggugaaacauuugaaugggu

SEQ ID NO: 224959 - RNA, 32 nt, Homo Sapiens
ccagccugccccagcccagucccucccggccg

SEQ ID NO: 224960 - RNA, 32 nt, Homo Sapiens
cucuaagacauuaaguaacuugccuugaaguu

SEQ ID NO: 224961 - RNA, 32 nt, Homo Sapiens
aaguaacaggaaaauggcuaaacuauacaugg

SEQ ID NO: 224962 - RNA, 32 nt, Homo Sapiens
cccgaguggggagcaggguucuccucaaagcc

SEQ ID NO: 224963 - RNA, 32 nt, Homo Sapiens
aggcuaggcccagaaagaaaagaggcucucag

SEQ ID NO: 224964 - RNA, 32 nt, Homo Sapiens
cuugucuauuacaacuuuugcuguguauugug

SEQ ID NO: 224965 - RNA, 30 nt, Homo Sapiens
cccaggccuggcagccacgcagcggcugag

SEQ ID NO: 224966 - RNA, 32 nt, Homo Sapiens
cucccauggaagugcugucuccagcucgcucc

SEQ ID NO: 224967 - RNA, 32 nt, Homo Sapiens
uguggaacgugcccccuuggucugccuaugcc

SEQ ID NO: 224968 - RNA, 32 nt, Homo Sapiens
cccaaugaaauaacauuuugcauaucugaaaa

SEQ ID NO: 224969 - RNA, 32 nt, Homo Sapiens
ugcaacuguaaauaugaaauggucaucacauc

SEQ ID NO: 224970 - RNA, 32 nt, Homo Sapiens
aagcaauugauguaauuuaacucucaaauuca

SEQ ID NO: 224971 - RNA, 32 nt, Homo Sapiens
aacuacuuuuucagcaucacuucaccugugga

SEQ ID NO: 224972 - RNA, 32 nt, Homo Sapiens
agguccggcagacauguuagaagaugcaaugu

SEQ ID NO: 224973 - RNA, 32 nt, Homo Sapiens
ccgggacccagcugcccguaugaccgcgccgg

SEQ ID NO: 224974 - RNA, 32 nt, Homo Sapiens
guugaaagcugauuuccacuccuauguccaug

SEQ ID NO: 224975 - RNA, 32 nt, Homo Sapiens
aaaauacaaaaauuaauugggcaugguggugg

SEQ ID NO: 224976 - RNA, 32 nt, Homo Sapiens
gugcagcuucggcuggugucaucgguguccuu

SEQ ID NO: 224977 - RNA, 32 nt, Homo Sapiens
aaacgaccgagaccgaagauuggcuacuguaa

SEQ ID NO: 224978 - RNA, 32 nt, Homo Sapiens
uagggacaagagucuuccccagccuugaaccu

SEQ ID NO: 224979 - RNA, 32 nt, Homo Sapiens
gaaggugacugauuuugaaacuacacccucag

SEQ ID NO: 224980 - RNA, 32 nt, Homo Sapiens
aacagaacaaaaugagugauguguguagagug

SEQ ID NO: 224981 - RNA, 32 nt, Homo Sapiens
uagcugucuugugugcauccacagucugcgaa

SEQ ID NO: 224982 - RNA, 32 nt, Homo Sapiens
uuucuucugcuuuuccaaauaaauuugauuaa

SEQ ID NO: 224983 - RNA, 32 nt, Homo Sapiens
uuuauaauuaccuuguccuuucugguugacua

SEQ ID NO: 224984 - RNA, 32 nt, Homo Sapiens
aaaauuaauugauuucuuccaagugugugcag

SEQ ID NO: 224985 - RNA, 32 nt, Homo Sapiens
auggaccgcuagggcccggccuagccccgcga

SEQ ID NO: 224986 - RNA, 32 nt, Homo Sapiens
acgaggauggagcagccaccccggcccgggac

SEQ ID NO: 224987 - RNA, 32 nt, Homo Sapiens
uuugccuccaaauugaggcauuuauuaugaug

SEQ ID NO: 224988 - RNA, 32 nt, Homo Sapiens
gcucacccucacccucaugggcacuggcgugg

SEQ ID NO: 224989 - RNA, 32 nt, Homo Sapiens
uuaaacuugcuuugauuuggugauguaaacuu

SEQ ID NO: 224990 - RNA, 32 nt, Homo Sapiens
cuguuuuuaaguaguuuguaauuuguaacaaa

SEQ ID NO: 224991 - RNA, 32 nt, Homo Sapiens
cagcagcucuauuugccuauuccucuuuaaau

SEQ ID NO: 224992 - RNA, 32 nt, Homo Sapiens
ccgucuguccuugaucugcccgcggcggcccg

SEQ ID NO: 224993 - RNA, 32 nt, Homo Sapiens
gggcuucugaagauggacuuaccugggaccug

SEQ ID NO: 224994 - RNA, 32 nt, Homo Sapiens
ugacuauuuaguuuauuuuguuuacuuuacag

SEQ ID NO: 224995 - RNA, 32 nt, Homo Sapiens
aaguguaaauauuuuaaaauuugacauacccu

SEQ ID NO: 224996 - RNA, 32 nt, Homo Sapiens
gagcugaucuucuugggggugggaaaaucgaa

SEQ ID NO: 224997 - RNA, 32 nt, Homo Sapiens
uucugggcucggaccuaggucgcggcgacaug

SEQ ID NO: 224998 - RNA, 32 nt, Homo Sapiens
agccaccguccuccgugacacacggcccccuu

SEQ ID NO: 224999 - RNA, 32 nt, Homo Sapiens
uagaggaagaggaggacgacaggccauacgac

SEQ ID NO: 225000 - RNA, 32 nt, Homo Sapiens
agccggccugucccgcggggccccugcagacg

SEQ ID NO: 225001 - RNA, 32 nt, Homo Sapiens
guucuguuaauuacauuucuauuguuaaaaau

SEQ ID NO: 225002 - RNA, 32 nt, Homo Sapiens
acgggaagagggugggagagccagagcaaaga

SEQ ID NO: 225003 - RNA, 32 nt, Homo Sapiens
cacagauggaagaaguuuuaacuaugccgugu

SEQ ID NO: 225004 - RNA, 32 nt, Homo Sapiens
uccugcagacugcaggugcugggcugccucug

SEQ ID NO: 225005 - RNA, 32 nt, Homo Sapiens
ugggguggggcugcaucagucuccggaguggc

SEQ ID NO: 225006 - RNA, 32 nt, Homo Sapiens
ucaccuuauauaaauauguugaugauggaagc

SEQ ID NO: 225007 - RNA, 32 nt, Homo Sapiens
ucuacuaaaauuacaaaaauuagccggccaug

SEQ ID NO: 225008 - RNA, 32 nt, Homo Sapiens
gugugugcagugauggcaagccagucagcaug

SEQ ID NO: 225009 - RNA, 32 nt, Homo Sapiens
cugagcguccccagccccaccuggcggcaugg

SEQ ID NO: 225010 - RNA, 32 nt, Homo Sapiens
guccucccugccccgcuccuggccucagugcg

SEQ ID NO: 225011 - RNA, 32 nt, Homo Sapiens
gucagaauaguuauucucuaagaggaaacuag

SEQ ID NO: 225012 - RNA, 32 nt, Homo Sapiens
gcucccuaagaccuugagagccaugacagguc

SEQ ID NO: 225013 - RNA, 32 nt, Homo Sapiens
cccucccacucuccacacccacagcagagaca

SEQ ID NO: 225014 - RNA, 32 nt, Homo Sapiens
gcaaccuccgccuccuggguucaagggauucu

SEQ ID NO: 225015 - RNA, 32 nt, Homo Sapiens
uuaugcauccagccccuggccccuuuaaucua

SEQ ID NO: 225016 - RNA, 32 nt, Homo Sapiens
aaaauuuauuuguucauaaauuccuugaguau

SEQ ID NO: 225017 - RNA, 32 nt, Homo Sapiens
ugguccaguggcuuuggugagggcgccuccau

SEQ ID NO: 225018 - RNA, 32 nt, Homo Sapiens
gacgggguuacgggggcuaaaagcagaaaaaa

SEQ ID NO: 225019 - RNA, 32 nt, Homo Sapiens
ugagaacugccaaauguugcccuaguagccaa

SEQ ID NO: 225020 - RNA, 32 nt, Homo Sapiens
uguguguguugaccacgucucugcugugaaua

SEQ ID NO: 225021 - RNA, 32 nt, Homo Sapiens
agauguaccuaugucaagagaagggaugaggc

SEQ ID NO: 225022 - RNA, 32 nt, Homo Sapiens
gaggccccgugccccaggcauggcaagcgccu

SEQ ID NO: 225023 - RNA, 32 nt, Homo Sapiens
acugcaagaucaguggcaccccgcccccuguu

SEQ ID NO: 225024 - RNA, 32 nt, Homo Sapiens
agucucaaaauccuaagcuuucaguauuuguu

SEQ ID NO: 225025 - RNA, 32 nt, Homo Sapiens
uccucuuaucccauugcauuagucuggauucu

SEQ ID NO: 225026 - RNA, 32 nt, Homo Sapiens
cccagaucucugcaucucugguucaaggccuu

SEQ ID NO: 225027 - RNA, 32 nt, Homo Sapiens
cuguuauguagaggaaauacgagggguggugc

SEQ ID NO: 225028 - RNA, 32 nt, Homo Sapiens
ccggggggaaaaaaccacaaauugguaaauaa

SEQ ID NO: 225029 - RNA, 32 nt, Homo Sapiens
uggaaaauauuuuuauuuuauugcucuuuuag

SEQ ID NO: 225030 - RNA, 32 nt, Homo Sapiens
gagcggcccgcggcccguuuucgggaggaggc

SEQ ID NO: 225031 - RNA, 32 nt, Homo Sapiens
ucauacaauuuucaagcaacaagcauugcuuc

SEQ ID NO: 225032 - RNA, 32 nt, Homo Sapiens
auauugaacacuuugagguaauuaugguacug

SEQ ID NO: 225033 - RNA, 32 nt, Homo Sapiens
acucggagaucaagacaagcaagugggauuug

SEQ ID NO: 225034 - RNA, 32 nt, Homo Sapiens
ucauuagggcuuuugauuuauaaaacuuuggg

SEQ ID NO: 225035 - RNA, 32 nt, Homo Sapiens
uuugcucccuguaauagaacuacuuuucaaca

SEQ ID NO: 225036 - RNA, 32 nt, Homo Sapiens
agacguacugaaugaaauauuuuacuaagcgu

SEQ ID NO: 225037 - RNA, 32 nt, Homo Sapiens
cggccucggggagacggcgugcaggcccagca

SEQ ID NO: 225038 - RNA, 32 nt, Homo Sapiens
guaugcuguaugaauauuuuauauuaaaauau

SEQ ID NO: 225039 - RNA, 32 nt, Homo Sapiens
guaaauaggaccagucuuacacucgcuguagu

SEQ ID NO: 225040 - RNA, 32 nt, Homo Sapiens
uuuggccuggggugcaucuccucccgcccuuc

SEQ ID NO: 225041 - RNA, 32 nt, Homo Sapiens
cuauuuuaaaauuuagagaaaaauaaaauggc

SEQ ID NO: 225042 - RNA, 32 nt, Homo Sapiens
uuucuacuuuugugggacuucagucaugcuga

SEQ ID NO: 225043 - RNA, 28 nt, Homo Sapiens
uggcuggagcggccgcuccggugcuguc

SEQ ID NO: 225044 - RNA, 32 nt, Homo Sapiens
uuaucuugcacaaagaaaaagaaaauuucuuu

SEQ ID NO: 225045 - RNA, 32 nt, Homo Sapiens
gugcguuuggccaaaaagaaucugcauuuagc

SEQ ID NO: 225046 - RNA, 32 nt, Homo Sapiens
acuccaggacagcaccaccuccccuacacugg

SEQ ID NO: 225047 - RNA, 32 nt, Homo Sapiens
ggagacguucccucugcccaggugggggccgu

SEQ ID NO: 225048 - RNA, 32 nt, Homo Sapiens
cacacacacacacacacacacacacacgcuug

SEQ ID NO: 225049 - RNA, 32 nt, Homo Sapiens
accucuccgagccaugugagcccccugaugcc

SEQ ID NO: 225050 - RNA, 32 nt, Homo Sapiens
ugucauuugcaaagcaaggaaauacuacuacu

SEQ ID NO: 225051 - RNA, 32 nt, Homo Sapiens
uugaggucaggaguucaaaaccaaccuggucu

SEQ ID NO: 225052 - RNA, 32 nt, Homo Sapiens
acccaugacccggagcguccacuuccagggac

SEQ ID NO: 225053 - RNA, 32 nt, Homo Sapiens
aggaguuugugaccaacuauguuuucuuucuu

SEQ ID NO: 225054 - RNA, 32 nt, Homo Sapiens
augaggaauuucuguucuuccaucaccucccc

SEQ ID NO: 225055 - RNA, 32 nt, Homo Sapiens
aguauugugaccgcggagccacaggggacccc

SEQ ID NO: 225056 - RNA, 27 nt, Homo Sapiens
gcaugaacucucccaacgagucggaug

SEQ ID NO: 225057 - RNA, 32 nt, Homo Sapiens
agaagcugagaaaugauacccaggagcagcag

SEQ ID NO: 225058 - RNA, 32 nt, Homo Sapiens
augucuuucuccaguuuucucaucuauaagug

SEQ ID NO: 225059 - RNA, 32 nt, Homo Sapiens
agacaugaauggagacuucuaauuuguaucgg

SEQ ID NO: 225060 - RNA, 32 nt, Homo Sapiens
ggccccuccagcuuguggagccccacacuggg

SEQ ID NO: 225061 - RNA, 32 nt, Homo Sapiens
uaucgcugccuugccaugucuuguucagaaga

SEQ ID NO: 225062 - RNA, 32 nt, Homo Sapiens
guacacccgagcucaaagcaagaugagaaggc

SEQ ID NO: 225063 - RNA, 32 nt, Homo Sapiens
cuucucugugucgccccgcccagcccccuggu

SEQ ID NO: 225064 - RNA, 30 nt, Homo Sapiens
gagcauguggacugcauggcugggugggga

SEQ ID NO: 225065 - RNA, 32 nt, Homo Sapiens
gauccuuuaugcccggccccugccccucccuc

SEQ ID NO: 225066 - RNA, 32 nt, Homo Sapiens
cugacucaggaucaaaaaccaaaggaugguuu

SEQ ID NO: 225067 - RNA, 32 nt, Homo Sapiens
uuaaaaucaauucuuucaguuacuguauuguu

SEQ ID NO: 225068 - RNA, 28 nt, Homo Sapiens
gauauggcuuuaguuaaggagcuccagg

SEQ ID NO: 225069 - RNA, 32 nt, Homo Sapiens
aaaacugagacucagacaggaaagggaaggcc

SEQ ID NO: 225070 - RNA, 32 nt, Homo Sapiens
aaagagaaauaccgacugaguguauucauuaa

SEQ ID NO: 225071 - RNA, 32 nt, Homo Sapiens
gagcgagggccagggcggugggcgcgcgcaga

SEQ ID NO: 225072 - RNA, 31 nt, Homo Sapiens
ccacagagcaguagugcgcaggcaagacuuu

SEQ ID NO: 225073 - RNA, 32 nt, Homo Sapiens
ggugccuguuguucacacuuaagggaaguuua

SEQ ID NO: 225074 - RNA, 32 nt, Homo Sapiens
gacugcacuauaagaaaaguccucuccucaac

SEQ ID NO: 225075 - RNA, 32 nt, Homo Sapiens
gcggccauuggggcuccucauuggggugcuug

SEQ ID NO: 225076 - RNA, 32 nt, Homo Sapiens
ucuuucuuuuuuucuuuuuuuuugugagacag

SEQ ID NO: 225077 - RNA, 32 nt, Homo Sapiens
uagcuggaugugguggugggcgccuguaauuc

SEQ ID NO: 225078 - RNA, 32 nt, Homo Sapiens
aaagaccaagaaaaaauaaagaaaagaugauu

SEQ ID NO: 225079 - RNA, 32 nt, Homo Sapiens
accaaauaaaaauauuguguugugaauguugu

SEQ ID NO: 225080 - RNA, 32 nt, Homo Sapiens
ucauaugugagacuuuuaagugauuaacaagg

SEQ ID NO: 225081 - RNA, 32 nt, Homo Sapiens
agacuagguguugaaggcagguggugcagaaa

SEQ ID NO: 225082 - RNA, 32 nt, Homo Sapiens
gguggagaaggggaugugcaagcacauaugga

SEQ ID NO: 225083 - RNA, 32 nt, Homo Sapiens
aggaauuugcuauuucacuuuaaacuuucugu

SEQ ID NO: 225084 - RNA, 32 nt, Homo Sapiens
aaucucacucagugcuguugcuccaucuacug

SEQ ID NO: 225085 - RNA, 32 nt, Homo Sapiens
aaauaaauccuccaaggagguaaaucaguuag

SEQ ID NO: 225086 - RNA, 32 nt, Homo Sapiens
uugucccccugccugguccucuggggccacug

SEQ ID NO: 225087 - RNA, 32 nt, Homo Sapiens
ggugucuucacaggaggcaaauccagagccug

SEQ ID NO: 225088 - RNA, 32 nt, Homo Sapiens
cucucagggcccggcucuguggcacuuuggac

SEQ ID NO: 225089 - RNA, 32 nt, Homo Sapiens
ugaggcuggggcggggcuggagguggcgcccc

SEQ ID NO: 225090 - RNA, 32 nt, Homo Sapiens
acccugccucggacugguuuacguguccuggu

SEQ ID NO: 225091 - RNA, 32 nt, Homo Sapiens
aacagccguuuaccgcagauccucucauugug

SEQ ID NO: 225092 - RNA, 32 nt, Homo Sapiens
augguccgaggggggcggggcugacgucgcgc

SEQ ID NO: 225093 - RNA, 32 nt, Homo Sapiens
gcaguuuuuaaacucucacuccccucucaccu

SEQ ID NO: 225094 - RNA, 32 nt, Homo Sapiens
ugcccugcccaagucacugucuuuuaacuuuu

SEQ ID NO: 225095 - RNA, 32 nt, Homo Sapiens
ggaucaggcugccaacucuauugccagcgcgu

SEQ ID NO: 225096 - RNA, 32 nt, Homo Sapiens
cggcggggguccauccaccccgguggcaggcc

SEQ ID NO: 225097 - RNA, 32 nt, Homo Sapiens
cagucacccagcugcugaucggcugaguuagg

SEQ ID NO: 225098 - RNA, 32 nt, Homo Sapiens
cacuagcugagcuucugcugcccucugcuguc

SEQ ID NO: 225099 - RNA, 32 nt, Homo Sapiens
ccccuccccacuucccaucuguaauuugcagg

SEQ ID NO: 225100 - RNA, 32 nt, Homo Sapiens
aacuuuuuuaguccaugcauucacuaauguau

SEQ ID NO: 225101 - RNA, 32 nt, Homo Sapiens
gugacauucucucucagcauucuuuauccccu

SEQ ID NO: 225102 - RNA, 32 nt, Homo Sapiens
uuuuccuggaagaucuggauuugguggaagac

SEQ ID NO: 225103 - RNA, 32 nt, Homo Sapiens
ucacacccuggugaaccccgggugcuaagaau

SEQ ID NO: 225104 - RNA, 32 nt, Homo Sapiens
cuccucucaggucuggacaucaucauccuagc

SEQ ID NO: 225105 - RNA, 32 nt, Homo Sapiens
ggagauaaauuaacaggcauauucuuaucacc

SEQ ID NO: 225106 - RNA, 32 nt, Homo Sapiens
gugauuuucuucacagaucaugucaucuacaa

SEQ ID NO: 225107 - RNA, 32 nt, Homo Sapiens
acaucuccagcaugcgccagguguucugccag

SEQ ID NO: 225108 - RNA, 32 nt, Homo Sapiens
ccgccaccgggcggaggcugcgcggcgcagac

SEQ ID NO: 225109 - RNA, 32 nt, Homo Sapiens
ggcguccuugaacauauuggagggaucaugga

SEQ ID NO: 225110 - RNA, 32 nt, Homo Sapiens
cgaaugcaugccaacauuccaguguuuuaaga

SEQ ID NO: 225111 - RNA, 32 nt, Homo Sapiens
uuugacaugauuccuuuuuccuuuuaaacaau

SEQ ID NO: 225112 - RNA, 32 nt, Homo Sapiens
cgaagaaaggauuacaccagaagauuuaggau

SEQ ID NO: 225113 - RNA, 32 nt, Homo Sapiens
cgagcucugcaguucuccucccggcccccguu

SEQ ID NO: 225114 - RNA, 32 nt, Homo Sapiens
uauuaguguaaauaauauaugugcagucuagg

SEQ ID NO: 225115 - RNA, 32 nt, Homo Sapiens
guccuuaaggcacaaaucacucaugguauugu

SEQ ID NO: 225116 - RNA, 32 nt, Homo Sapiens
gggaccaugccggcccgggugguccaugccug

SEQ ID NO: 225117 - RNA, 32 nt, Homo Sapiens
uguccuguggcgcccccaccccggggccacuc

SEQ ID NO: 225118 - RNA, 32 nt, Homo Sapiens
cuacccuuucuuuuaucaaguaauuaaaauaa

SEQ ID NO: 225119 - RNA, 32 nt, Homo Sapiens
ggaugucagguggaucuauguuucugaaggaa

SEQ ID NO: 225120 - RNA, 32 nt, Homo Sapiens
uagaucaugggauccuaaaauaaaccuuggaa

SEQ ID NO: 225121 - RNA, 32 nt, Homo Sapiens
ccucagguaugggaaacuaggccgcccagucg

SEQ ID NO: 225122 - RNA, 32 nt, Homo Sapiens
acugacaaccaggugggaccaaaguuuaugug

SEQ ID NO: 225123 - RNA, 30 nt, Homo Sapiens
ggcuggauguacccugccugaggccccgac

SEQ ID NO: 225124 - RNA, 32 nt, Homo Sapiens
agcuuuugccacugcucggccguguccugaca

SEQ ID NO: 225125 - RNA, 32 nt, Homo Sapiens
uggcuucauaaauuuucuuaauuuuuuuuaac

SEQ ID NO: 225126 - RNA, 32 nt, Homo Sapiens
gcaaacaaggacucucuguauaagguacuggu

SEQ ID NO: 225127 - RNA, 32 nt, Homo Sapiens
agaggcaggugcacucagcugcacugcccaga

SEQ ID NO: 225128 - RNA, 32 nt, Homo Sapiens
uuuuacuauucaauaaauauuaacuuaucaug

SEQ ID NO: 225129 - RNA, 32 nt, Homo Sapiens
ucgucuccgagcuccgucagaaauggggaacu

SEQ ID NO: 225130 - RNA, 32 nt, Homo Sapiens
caaaaaauuuaaaaaggauguauacauuuuau

SEQ ID NO: 225131 - RNA, 32 nt, Homo Sapiens
guggguggagggcugccaggaaacauggugca

SEQ ID NO: 225132 - RNA, 32 nt, Homo Sapiens
ccucccuccccuccccuccagcauggugcucg

SEQ ID NO: 225133 - RNA, 32 nt, Homo Sapiens
cauaacauuuaaaagaauggaaaaugacugaa

SEQ ID NO: 225134 - RNA, 32 nt, Homo Sapiens
gggucagugauuuaaucauauaauuuaaugaa

SEQ ID NO: 225135 - RNA, 32 nt, Homo Sapiens
aggccgaccugucccugggacccggcguuucg

SEQ ID NO: 225136 - RNA, 31 nt, Homo Sapiens
cuuucggagcgcagccgaaccucugacccgg

SEQ ID NO: 225137 - RNA, 32 nt, Homo Sapiens
cauuccgucccuguuugagacaucaguaugua

SEQ ID NO: 225138 - RNA, 32 nt, Homo Sapiens
uaauggaugcugggcuucauaccugggugaug

SEQ ID NO: 225139 - RNA, 32 nt, Homo Sapiens
cggauauaaauauuaaaguggacgagaugacc

SEQ ID NO: 225140 - RNA, 32 nt, Homo Sapiens
ggcggcugcggcggaggcgccgacucggccuu

SEQ ID NO: 225141 - RNA, 32 nt, Homo Sapiens
cucucagaaagauaagauuguaugccagaaau

SEQ ID NO: 225142 - RNA, 32 nt, Homo Sapiens
ccagaaagcugaggagugugggcuggcagaga

SEQ ID NO: 225143 - RNA, 32 nt, Homo Sapiens
gcgaacugacucucagcccgcgccugggcuaa

SEQ ID NO: 225144 - RNA, 32 nt, Homo Sapiens
gguaucuuuuuuccacagcaguguuccauuau

SEQ ID NO: 225145 - RNA, 32 nt, Homo Sapiens
caaugguagugauucuucuguguucacucuac

SEQ ID NO: 225146 - RNA, 32 nt, Homo Sapiens
uaacuuaaggcuuuugccauuaacuuagcugg

SEQ ID NO: 225147 - RNA, 32 nt, Homo Sapiens
ugguacacacacccccaccuccugcaauuaaa

SEQ ID NO: 225148 - RNA, 32 nt, Homo Sapiens
agucaauaguggcucucauuagccaggcaugg

SEQ ID NO: 225149 - RNA, 32 nt, Homo Sapiens
ggcccuggugcuguaggcuacauccugauacc

SEQ ID NO: 225150 - RNA, 32 nt, Homo Sapiens
gcuggacggacggacggacggggcagccgugc

SEQ ID NO: 225151 - RNA, 32 nt, Homo Sapiens
cuuccggugugagccgcacuuccggugugagc

SEQ ID NO: 225152 - RNA, 32 nt, Homo Sapiens
aacagauguggaaaaauguuuacuucagagaa

SEQ ID NO: 225153 - RNA, 32 nt, Homo Sapiens
aggggagagggcucccggcagcaccaggaccg

SEQ ID NO: 225154 - RNA, 32 nt, Homo Sapiens
aggcguccgcugcaguccgccggcgagggagu

SEQ ID NO: 225155 - RNA, 32 nt, Homo Sapiens
cccgucaagacgggacccagccagcaugcguc

SEQ ID NO: 225156 - RNA, 32 nt, Homo Sapiens
acugaaagucuugaaaguauggucauuucagc

SEQ ID NO: 225157 - RNA, 32 nt, Homo Sapiens
aauugcugucuggucaucaucuauuguuggaa

SEQ ID NO: 225158 - RNA, 32 nt, Homo Sapiens
aauuaugcuuuucuguauuuuacaacuuucuu

SEQ ID NO: 225159 - RNA, 32 nt, Homo Sapiens
auucuuugaacaggcugucacucauccauaag

SEQ ID NO: 225160 - RNA, 32 nt, Homo Sapiens
ggcaucaaggaguacgagugcaaggagugcca

SEQ ID NO: 225161 - RNA, 32 nt, Homo Sapiens
gaaacuacagaaaaggaaagaagcagaaugag

SEQ ID NO: 225162 - RNA, 32 nt, Homo Sapiens
ugggcgugguggcucaugccuguaaucccggc

SEQ ID NO: 225163 - RNA, 32 nt, Homo Sapiens
auuagcagccccaucacccagugaucagucgc

SEQ ID NO: 225164 - RNA, 32 nt, Homo Sapiens
uuaaaaagcagggcccaaagcuuauuaguuua

SEQ ID NO: 225165 - RNA, 32 nt, Homo Sapiens
auaugucgucauaauuccugcuauuguuaaua

SEQ ID NO: 225166 - RNA, 32 nt, Homo Sapiens
auccucccacugacauuccuugaaaucagcca

SEQ ID NO: 225167 - RNA, 32 nt, Homo Sapiens
aagcauuucugcaacagcaguuucauggaacc

SEQ ID NO: 225168 - RNA, 32 nt, Homo Sapiens
acugcaucucaaaaaauaauaaugaaacuuuc

SEQ ID NO: 225169 - RNA, 32 nt, Homo Sapiens
gcuucacccacccccacgccaggggagaggau

SEQ ID NO: 225170 - RNA, 32 nt, Homo Sapiens
cccacugugucacagagcugccuggcacaggu

SEQ ID NO: 225171 - RNA, 32 nt, Homo Sapiens
accuguauuccacuuacuccaccuuccauucc

SEQ ID NO: 225172 - RNA, 32 nt, Homo Sapiens
uagggagaaaaauuaauuuacuagaaaggcau

SEQ ID NO: 225173 - RNA, 32 nt, Homo Sapiens
gagaaaggugagaggaggagaguggcauuauc

SEQ ID NO: 225174 - RNA, 32 nt, Homo Sapiens
ucaccccgccgccgccgccguccccgagcucc

SEQ ID NO: 225175 - RNA, 32 nt, Homo Sapiens
ucgaguggcaaaauguuuuuuauuacggcuuu

SEQ ID NO: 225176 - RNA, 28 nt, Homo Sapiens
agggguuauggcaacauuauugaauuuu

SEQ ID NO: 225177 - RNA, 32 nt, Homo Sapiens
aagcccgagcccucagccccuggggagaacaa

SEQ ID NO: 225178 - RNA, 32 nt, Homo Sapiens
cuguuuuuugguuuuuccuuaauguuuuuaau

SEQ ID NO: 225179 - RNA, 32 nt, Homo Sapiens
cugaagaaggagcagaauaaggaauggaaacc

SEQ ID NO: 225180 - RNA, 32 nt, Homo Sapiens
uauuuaagugaucguuacauuuuaggacacug

SEQ ID NO: 225181 - RNA, 32 nt, Homo Sapiens
ugcgucuggcacccaggaggugaggcagacac

SEQ ID NO: 225182 - RNA, 32 nt, Homo Sapiens
uuguuauauaucuauuugaauagcugaaggac

SEQ ID NO: 225183 - RNA, 30 nt, Homo Sapiens
gcacccaugccauucacccaucuagacuuu

SEQ ID NO: 225184 - RNA, 32 nt, Homo Sapiens
aaacuacaccaauuaauuuaauguaucuugcu

SEQ ID NO: 225185 - RNA, 32 nt, Homo Sapiens
ggcacaggggaagaggcaccuaacagauucuu

SEQ ID NO: 225186 - RNA, 32 nt, Homo Sapiens
accgagcuuuccugggggcuagcaggucgugg

SEQ ID NO: 225187 - RNA, 32 nt, Homo Sapiens
uaaguucucaggcuuccaagucaaauggagaa

SEQ ID NO: 225188 - RNA, 32 nt, Homo Sapiens
gagggcguggggacagcgcccgggucggcggg

SEQ ID NO: 225189 - RNA, 32 nt, Homo Sapiens
aaugagaaaaauacuaaaaauugacuugaguu

SEQ ID NO: 225190 - RNA, 32 nt, Homo Sapiens
aucacugagccugcgaucuauacaccacccca

SEQ ID NO: 225191 - RNA, 32 nt, Homo Sapiens
uaaaaugaugaaauauuuuauguagacauuag

SEQ ID NO: 225192 - RNA, 32 nt, Homo Sapiens
uacugaagacaauuaaguccguuauguuuaga

SEQ ID NO: 225193 - RNA, 32 nt, Homo Sapiens
ugaacccugcagcucacccauucauucaccca

SEQ ID NO: 225194 - RNA, 32 nt, Homo Sapiens
cugucaaugcuaaagagcccccugcucccugg

SEQ ID NO: 225195 - RNA, 32 nt, Homo Sapiens
gcccccaccuaaaauaucaucuugaauuguaa

SEQ ID NO: 225196 - RNA, 32 nt, Homo Sapiens
uuucuuuguaucagccaaaguuuuagcacaac

SEQ ID NO: 225197 - RNA, 32 nt, Homo Sapiens
cgggcaggccccaagggcgcgucauggcccca

SEQ ID NO: 225198 - RNA, 32 nt, Homo Sapiens
ggugcccucaggggaggaucugucccaucucu

SEQ ID NO: 225199 - RNA, 32 nt, Homo Sapiens
uuaauguuagacaguuauuuguuucuucugca

SEQ ID NO: 225200 - RNA, 32 nt, Homo Sapiens
cccuauguguugacaagguauuucuaauauca

SEQ ID NO: 225201 - RNA, 32 nt, Homo Sapiens
auagaaaauuaugaaugaaauuuaucuaggaa

SEQ ID NO: 225202 - RNA, 32 nt, Homo Sapiens
gccaguugaugcggaaggaacuuuuuuggcau

SEQ ID NO: 225203 - RNA, 32 nt, Homo Sapiens
ucccgagcucugcgcccgcacgcgccagccgc

SEQ ID NO: 225204 - RNA, 32 nt, Homo Sapiens
ucccuuacuacagggacuugcauguccuaaag

SEQ ID NO: 225205 - RNA, 32 nt, Homo Sapiens
ucaggacaguggggguuggggguggggugggu

SEQ ID NO: 225206 - RNA, 32 nt, Homo Sapiens
augucuccaaaaaauugauaguugcagguuau

SEQ ID NO: 225207 - RNA, 32 nt, Homo Sapiens
uacuaagggagcugagcaguguccuuggagac

SEQ ID NO: 225208 - RNA, 32 nt, Homo Sapiens
cagcgucaggccgaggagacggcggccuucga

SEQ ID NO: 225209 - RNA, 32 nt, Homo Sapiens
agugagaggggagggcuccuggggcagagaag

SEQ ID NO: 225210 - RNA, 32 nt, Homo Sapiens
ccccuguaaucccagcacuuugggaggcuaag

SEQ ID NO: 225211 - RNA, 32 nt, Homo Sapiens
cggcuuucuauuucccccaguucuuuaagcag

SEQ ID NO: 225212 - RNA, 32 nt, Homo Sapiens
cuccucugggaugugcauguguguguacgugc

SEQ ID NO: 225213 - RNA, 32 nt, Homo Sapiens
ucgcugcugaaggcugugguggaccgggcugg

SEQ ID NO: 225214 - RNA, 30 nt, Homo Sapiens
uaugguggagguggaggauaugaugguuac

SEQ ID NO: 225215 - RNA, 32 nt, Homo Sapiens
gcccacucaaagaaaaauaaacagagacaaau

SEQ ID NO: 225216 - RNA, 32 nt, Homo Sapiens
cucagccgccgggagcacccagagggacggga

SEQ ID NO: 225217 - RNA, 32 nt, Homo Sapiens
ggccgggcgagguggcucacgccuguaauccc

SEQ ID NO: 225218 - RNA, 32 nt, Homo Sapiens
gggaggcagggccggccccacguccucugcgc

SEQ ID NO: 225219 - RNA, 32 nt, Homo Sapiens
gggagaaccgcugcuagucgaccuccaaagaa

SEQ ID NO: 225220 - RNA, 32 nt, Homo Sapiens
cgggcuccgccgggcucugaggcgcgucucag

SEQ ID NO: 225221 - RNA, 32 nt, Homo Sapiens
cggcuguacugggacagcgguggaggccgagg

SEQ ID NO: 225222 - RNA, 32 nt, Homo Sapiens
ccugggcugcggugcuucuacugcugcacggg

SEQ ID NO: 225223 - RNA, 32 nt, Homo Sapiens
gucugcacaauaacaccaaaauguaggauuug

SEQ ID NO: 225224 - RNA, 32 nt, Homo Sapiens
ggaacacccagcugugagaacuggcuucucag

SEQ ID NO: 225225 - RNA, 32 nt, Homo Sapiens
ggcacggccaacgagcugcgggcccgggaucg

SEQ ID NO: 225226 - RNA, 32 nt, Homo Sapiens
gagguucccuugcugggcaugcuucguagagg

SEQ ID NO: 225227 - RNA, 32 nt, Homo Sapiens
agcguccaugaucuaaagauguaacagucccu

SEQ ID NO: 225228 - RNA, 32 nt, Homo Sapiens
agcaccugcucccacccuccccaaacucaaau

SEQ ID NO: 225229 - RNA, 32 nt, Homo Sapiens
auaauauuauuucuauuuuuuauuuuuuucau

SEQ ID NO: 225230 - RNA, 32 nt, Homo Sapiens
uaaauuuuuaaguuuuuuuucuuuuuagucuu

SEQ ID NO: 225231 - RNA, 32 nt, Homo Sapiens
agggccucagggcacccuccccaccuagcccu

SEQ ID NO: 225232 - RNA, 32 nt, Homo Sapiens
uccuuucugucaagacuuagccccgcugagau

SEQ ID NO: 225233 - RNA, 32 nt, Homo Sapiens
gggcuugcaccggcugcacucugagaaccagc

SEQ ID NO: 225234 - RNA, 32 nt, Homo Sapiens
uccuuagucuguuaguuaaacccauuaccaau

SEQ ID NO: 225235 - RNA, 32 nt, Homo Sapiens
augaugauucagaagcuaauuuuaaaaaacgg

SEQ ID NO: 225236 - RNA, 32 nt, Homo Sapiens
gccauuacacuccagccugggcgacagaacga

SEQ ID NO: 225237 - RNA, 32 nt, Homo Sapiens
uuucccauaguuuauuucucucucagugcauc

SEQ ID NO: 225238 - RNA, 31 nt, Homo Sapiens
aagugagcuucucggcugccccgcgggccgg

SEQ ID NO: 225239 - RNA, 30 nt, Homo Sapiens
uuccaccucuucagccccggcaggacgggg

SEQ ID NO: 225240 - RNA, 32 nt, Homo Sapiens
aggggcggagucugcugcugcccugcgcugcc

SEQ ID NO: 225241 - RNA, 32 nt, Homo Sapiens
ccucaccuggcaccccccugcugcugcccaag

SEQ ID NO: 225242 - RNA, 30 nt, Homo Sapiens
gccaucugcacugugggggaaccaaucuuc

SEQ ID NO: 225243 - RNA, 32 nt, Homo Sapiens
uuaaugaugauacugacugugaaaauagcauu

SEQ ID NO: 225244 - RNA, 32 nt, Homo Sapiens
aguuugggggcggcugggcgcuuggcguuccu

SEQ ID NO: 225245 - RNA, 32 nt, Homo Sapiens
agggauccccugggcugcuggcgagccauuug

SEQ ID NO: 225246 - RNA, 32 nt, Homo Sapiens
gugccagcucccuucccuccccguuguccugu

SEQ ID NO: 225247 - RNA, 29 nt, Homo Sapiens
cuaaaugggggaggaggggacgggcggca

SEQ ID NO: 225248 - RNA, 32 nt, Homo Sapiens
gaaauauuuaaaguggauacaaaacuauuuca

SEQ ID NO: 225249 - RNA, 32 nt, Homo Sapiens
gcucccugucuccucuuucugccacuugugcg

SEQ ID NO: 225250 - RNA, 32 nt, Homo Sapiens
cucggaggacggcuccgggcccggggggacgg

SEQ ID NO: 225251 - RNA, 32 nt, Homo Sapiens
ccucgacccacccacccgaucccggccgcacc

SEQ ID NO: 225252 - RNA, 32 nt, Homo Sapiens
ggcuggucucgagcuccugaccucaagugauc

SEQ ID NO: 225253 - RNA, 32 nt, Homo Sapiens
ggcugcccucagucccccugcugcugaagcug

SEQ ID NO: 225254 - RNA, 32 nt, Homo Sapiens
aaaacaugacgauauuuagcacaccuuuuaau

SEQ ID NO: 225255 - RNA, 32 nt, Homo Sapiens
cagggaaauggcuucagaaaugguuugaguug

SEQ ID NO: 225256 - RNA, 32 nt, Homo Sapiens
ucagaaauuuuacuuuuuuccccuccugggag

SEQ ID NO: 225257 - RNA, 32 nt, Homo Sapiens
cccccuggggagagaggaaguugccgccugcu

SEQ ID NO: 225258 - RNA, 32 nt, Homo Sapiens
uuuaaaaaauuccauguuuaaccauaugaccc

SEQ ID NO: 225259 - RNA, 32 nt, Homo Sapiens
aucacacgagggugcaggcggcccaggucaug

SEQ ID NO: 225260 - RNA, 32 nt, Homo Sapiens
ugguaucaggagauccugaggcugguagggga

SEQ ID NO: 225261 - RNA, 32 nt, Homo Sapiens
acuguucagggccacggagaauucucgaaguc

SEQ ID NO: 225262 - RNA, 28 nt, Homo Sapiens
gguugucuauuaacuuguucaaaaaagu

SEQ ID NO: 225263 - RNA, 32 nt, Homo Sapiens
ucuuggggagaaggcgggguauucccacucac

SEQ ID NO: 225264 - RNA, 32 nt, Homo Sapiens
gcaguccuggggaggacagauucgcaguguuu

SEQ ID NO: 225265 - RNA, 32 nt, Homo Sapiens
ucuaccuauuuuagacaccuucaucagcucca

SEQ ID NO: 225266 - RNA, 32 nt, Homo Sapiens
cuccaucuguuucuugccauuaguuuauauga

SEQ ID NO: 225267 - RNA, 32 nt, Homo Sapiens
aagaccgcgccgagccgccgggacucagcgcc

SEQ ID NO: 225268 - RNA, 32 nt, Homo Sapiens
uggguccucuacuugggaucucaggaggcugc

SEQ ID NO: 225269 - RNA, 32 nt, Homo Sapiens
agauuaauguugaggaaauuguauggacaugc

SEQ ID NO: 225270 - RNA, 32 nt, Homo Sapiens
guaccagccaaauaaacuugucagcuguggug

SEQ ID NO: 225271 - RNA, 32 nt, Homo Sapiens
uuccgccucccucccccgggaauggcgcuauc

SEQ ID NO: 225272 - RNA, 32 nt, Homo Sapiens
gggcgggucuggcgcuagguccagccccugcg

SEQ ID NO: 225273 - RNA, 32 nt, Homo Sapiens
guugcuaccaugcuggccacccgccucuccag

SEQ ID NO: 225274 - RNA, 32 nt, Homo Sapiens
gccccuccccccagccuuccaagcccaucccg

SEQ ID NO: 225275 - RNA, 30 nt, Homo Sapiens
cugcggcgcgcgcaggcagaaagcggcuuc

SEQ ID NO: 225276 - RNA, 32 nt, Homo Sapiens
uuagaggacuauuacauauuuuuuguauauuu

SEQ ID NO: 225277 - RNA, 32 nt, Homo Sapiens
aucugauuugaaaggaguauugaggaagguuu

SEQ ID NO: 225278 - RNA, 32 nt, Homo Sapiens
uccuuaccgccggcugcuguggagugccucgc

SEQ ID NO: 225279 - RNA, 32 nt, Homo Sapiens
gaauugagcgccaugucaggcuguugugggua

SEQ ID NO: 225280 - RNA, 29 nt, Homo Sapiens
acacuuaguuguuugagaaagcuaaauuu

SEQ ID NO: 225281 - RNA, 32 nt, Homo Sapiens
cauaaacuugagguggaagauaccuugaggau

SEQ ID NO: 225282 - RNA, 32 nt, Homo Sapiens
aggauagccugcauuugcauguguguacauau

SEQ ID NO: 225283 - RNA, 32 nt, Homo Sapiens
cuggggcccggugauggagccugccuugggga

SEQ ID NO: 225284 - RNA, 32 nt, Homo Sapiens
guuguggaccugucaggaugacagauucgccu

SEQ ID NO: 225285 - RNA, 32 nt, Homo Sapiens
guucaugcagauuuuuauuccagaugaacaug

SEQ ID NO: 225286 - RNA, 32 nt, Homo Sapiens
uuaaaggccccggcuggcagggucuagguggc

SEQ ID NO: 225287 - RNA, 32 nt, Homo Sapiens
gagaucugaggugcucuggucugugggucagu

SEQ ID NO: 225288 - RNA, 32 nt, Homo Sapiens
cuuggagucugcucuugugcaaaugagccuag

SEQ ID NO: 225289 - RNA, 32 nt, Homo Sapiens
aaaucagcaccccuucccgguguccaggggga

SEQ ID NO: 225290 - RNA, 32 nt, Homo Sapiens
uagcuguagaaauguauccugauaaacauuaa

SEQ ID NO: 225291 - RNA, 32 nt, Homo Sapiens
cugaggucaggaguucaagaccaaucugacua

SEQ ID NO: 225292 - RNA, 32 nt, Homo Sapiens
auaauacauauuaaaauguaugggagaaccaa

SEQ ID NO: 225293 - RNA, 32 nt, Homo Sapiens
cccagagcaagccgauucucuacacacugccu

SEQ ID NO: 225294 - RNA, 32 nt, Homo Sapiens
gacuguauauguugugaaugggcuuucauaaa

SEQ ID NO: 225295 - RNA, 32 nt, Homo Sapiens
cacagauucaacauuagaauauguuuuaucuc

SEQ ID NO: 225296 - RNA, 32 nt, Homo Sapiens
ugagugucuugacauagucuuaaaagaguauu

SEQ ID NO: 225297 - RNA, 32 nt, Homo Sapiens
uauaauucaccuucuuuuuuuuuuuugucuga

SEQ ID NO: 225298 - RNA, 32 nt, Homo Sapiens
ucuuccacgcggcauccugcuccggagccucc

SEQ ID NO: 225299 - RNA, 32 nt, Homo Sapiens
aagaugggugauuaugaaaugccagacuucua

SEQ ID NO: 225300 - RNA, 32 nt, Homo Sapiens
ucggaggcucugcgcucugauccgcuguuuga

SEQ ID NO: 225301 - RNA, 29 nt, Homo Sapiens
uuauguauaguacacucuauaaauguaaa

SEQ ID NO: 225302 - RNA, 32 nt, Homo Sapiens
augaaagauuuaauaaggcaaagcagaaucug

SEQ ID NO: 225303 - RNA, 32 nt, Homo Sapiens
ggccaucccucgugguccccaacagcgacaua

SEQ ID NO: 225304 - RNA, 32 nt, Homo Sapiens
agggagcaaggagcagaccagucagcaaaaug

SEQ ID NO: 225305 - RNA, 32 nt, Homo Sapiens
ucaagucuuacuccccaggagcucccagggcc

SEQ ID NO: 225306 - RNA, 30 nt, Homo Sapiens
uuuaaacuaugaaauaaaucaucuggccug

SEQ ID NO: 225307 - RNA, 32 nt, Homo Sapiens
ucggcuggagacgaggccgcagaccccuucuc

SEQ ID NO: 225308 - RNA, 32 nt, Homo Sapiens
uggagguggcggcggcagcggcaacuuugcgg

SEQ ID NO: 225309 - RNA, 32 nt, Homo Sapiens
aaaggcaaauacaugaaaaauaauaaugcuac

SEQ ID NO: 225310 - RNA, 28 nt, Homo Sapiens
uguugaggggacaccaggaugaggucag

SEQ ID NO: 225311 - RNA, 32 nt, Homo Sapiens
gcuggcagcuggaagcauccugcaggcccgca

SEQ ID NO: 225312 - RNA, 32 nt, Homo Sapiens
aacugauuuaaugugguauagaaagauggucc

SEQ ID NO: 225313 - RNA, 32 nt, Homo Sapiens
gaaagacucugcaccugcugucuuagggaaga

SEQ ID NO: 225314 - RNA, 32 nt, Homo Sapiens
ggggaggaaagagcuuccagggggcgaacgca

SEQ ID NO: 225315 - RNA, 32 nt, Homo Sapiens
auacuggaaaucaaaagauacugaaagaaugg

SEQ ID NO: 225316 - RNA, 32 nt, Homo Sapiens
cagguggacuccuggguccccgaggaggaggg

SEQ ID NO: 225317 - RNA, 32 nt, Homo Sapiens
gcgcgcgcggacuggcgucuccccucccggcg

SEQ ID NO: 225318 - RNA, 32 nt, Homo Sapiens
aaggacgccgacgggguccucugccgguacaa

SEQ ID NO: 225319 - RNA, 32 nt, Homo Sapiens
cauucaguuugugggcauuuccugucauuucg

SEQ ID NO: 225320 - RNA, 32 nt, Homo Sapiens
cuggaagugucugugagggcauuguaaaagga

SEQ ID NO: 225321 - RNA, 32 nt, Homo Sapiens
auggccaaauauauuuccugauaacauuaugu

SEQ ID NO: 225322 - RNA, 32 nt, Homo Sapiens
caauuccuggauuccuuaguccugcuggccuu

SEQ ID NO: 225323 - RNA, 32 nt, Homo Sapiens
uccugugcagagucgcggauuucaucagaggu

SEQ ID NO: 225324 - RNA, 32 nt, Homo Sapiens
uucuaggcccgaguuagaauccugucagcuga

SEQ ID NO: 225325 - RNA, 32 nt, Homo Sapiens
uucguguccagaauugguggguucuuggucuc

SEQ ID NO: 225326 - RNA, 32 nt, Homo Sapiens
guccagcagccgggccggcgucgacgcuaggg

SEQ ID NO: 225327 - RNA, 32 nt, Homo Sapiens
gccuggggcuccugggcugcagaccugcacag

SEQ ID NO: 225328 - RNA, 29 nt, Homo Sapiens
auccauggguugaugucucuggaagugca

SEQ ID NO: 225329 - RNA, 32 nt, Homo Sapiens
ccccaccuugaccuuggucuccaggggugugg

SEQ ID NO: 225330 - RNA, 32 nt, Homo Sapiens
agccaucugcagcagaggcagccuaucccauu

SEQ ID NO: 225331 - RNA, 32 nt, Homo Sapiens
guccugagcaaauggcacaaagguugcuuuuu

SEQ ID NO: 225332 - RNA, 32 nt, Homo Sapiens
uuauuuuguauuucuuuuuuaacacucuacau

SEQ ID NO: 225333 - RNA, 32 nt, Homo Sapiens
gcccaaacaccguggcagggacacucccaagg

SEQ ID NO: 225334 - RNA, 32 nt, Homo Sapiens
aaggcuaguuuauuuuguuacacuaaagggca

SEQ ID NO: 225335 - RNA, 32 nt, Homo Sapiens
aauguucacagcagcgugaacuccacagcagg

SEQ ID NO: 225336 - RNA, 32 nt, Homo Sapiens
aaagaacagcuauauaaaaugacuugacaaau

SEQ ID NO: 225337 - RNA, 32 nt, Homo Sapiens
uauguaaaauuuauuauaucacugguuuucaa

SEQ ID NO: 225338 - RNA, 32 nt, Homo Sapiens
gggagcgcggcgcggccgccgcgugcgcgagc

SEQ ID NO: 225339 - RNA, 32 nt, Homo Sapiens
ccgcggcccucccauuuucugcguccucagcg

SEQ ID NO: 225340 - RNA, 32 nt, Homo Sapiens
gggcacuagccgagcaggcuggccucuggccg

SEQ ID NO: 225341 - RNA, 32 nt, Homo Sapiens
ggcagcaggcaaggagcagagauggaaagaaa

SEQ ID NO: 225342 - RNA, 32 nt, Homo Sapiens
gugggaacccucagaagauaggaaaaaagcau

SEQ ID NO: 225343 - RNA, 32 nt, Homo Sapiens
gaugggcaggcuuugccccagcccaccccugg

SEQ ID NO: 225344 - RNA, 32 nt, Homo Sapiens
aaacacccucacagcgacgucuacacuggugu

SEQ ID NO: 225345 - RNA, 32 nt, Homo Sapiens
auuuacucuugaaugcuuuuuaauuuucaugu

SEQ ID NO: 225346 - RNA, 32 nt, Homo Sapiens
caacuccucccucuccgccccauaguccaccc

SEQ ID NO: 225347 - RNA, 32 nt, Homo Sapiens
gcccugcccguagcacagccaagcccuaccuc

SEQ ID NO: 225348 - RNA, 32 nt, Homo Sapiens
gaccgugcagguccugcagaugaagguaaggc

SEQ ID NO: 225349 - RNA, 32 nt, Homo Sapiens
acugcuuuaugaaaauaauagugucuucuaug

SEQ ID NO: 225350 - RNA, 32 nt, Homo Sapiens
gaggggagguugcaggggagagcugccgccag

SEQ ID NO: 225351 - RNA, 32 nt, Homo Sapiens
aauggaaguucuaggaaccaauuuagcucagg

SEQ ID NO: 225352 - RNA, 28 nt, Homo Sapiens
gggauggcggcggcuccgcugcugcugc

SEQ ID NO: 225353 - RNA, 32 nt, Homo Sapiens
uauuaguggaugguggguaaaauaucauucac

SEQ ID NO: 225354 - RNA, 32 nt, Homo Sapiens
gccagcccccaguuccucccccaguuccuccc

SEQ ID NO: 225355 - RNA, 32 nt, Homo Sapiens
acuucaaguauuuuucuauaaucacuuucccc

SEQ ID NO: 225356 - RNA, 32 nt, Homo Sapiens
cugggacuggccgccccuccccagcgucccag

SEQ ID NO: 225357 - RNA, 32 nt, Homo Sapiens
gguugaaguuuggagucuguccgaguuugcag

SEQ ID NO: 225358 - RNA, 32 nt, Homo Sapiens
ccuucaacaaggaaauucuauuaaaggaaaau

SEQ ID NO: 225359 - RNA, 32 nt, Homo Sapiens
caggacagauagugccugggggugggggcgga

SEQ ID NO: 225360 - RNA, 31 nt, Homo Sapiens
ccuacugggcuuccucccuagccagagagcu

SEQ ID NO: 225361 - RNA, 32 nt, Homo Sapiens
aguuguuggacagaauaaauaccaugaauccu

SEQ ID NO: 225362 - RNA, 32 nt, Homo Sapiens
ugauccuggccgauggggugccaggcauuaga

SEQ ID NO: 225363 - RNA, 32 nt, Homo Sapiens
ugagaccacaaggcugguugcauauuacaugg

SEQ ID NO: 225364 - RNA, 32 nt, Homo Sapiens
ucauggagggggucauuucagagcccucggag

SEQ ID NO: 225365 - RNA, 32 nt, Homo Sapiens
ugaggcccaagcacuaguagagaugcgcgaua

SEQ ID NO: 225366 - RNA, 32 nt, Homo Sapiens
acccuugcaauaaugagaaacacugauauuuu

SEQ ID NO: 225367 - RNA, 32 nt, Homo Sapiens
gucagauaguaugauggaaaagaaagcugggg

SEQ ID NO: 225368 - RNA, 32 nt, Homo Sapiens
gaagaaacacugaggaauauaagugauagcug

SEQ ID NO: 225369 - RNA, 32 nt, Homo Sapiens
uaugcuccagugcuugccauaauuugucugag

SEQ ID NO: 225370 - RNA, 32 nt, Homo Sapiens
ccuguucuccaucuccauuucuucccaugcug

SEQ ID NO: 225371 - RNA, 32 nt, Homo Sapiens
acccaaaugcuguuuaaccugguuuuauuuuu

SEQ ID NO: 225372 - RNA, 32 nt, Homo Sapiens
gaggcuuugaugauuuuuuucuuaauuauugg

SEQ ID NO: 225373 - RNA, 32 nt, Homo Sapiens
ccugggagaggggaagcagaucugaggacauc

SEQ ID NO: 225374 - RNA, 32 nt, Homo Sapiens
ggccaggugugguggcucaugccuguaauccc

SEQ ID NO: 225375 - RNA, 32 nt, Homo Sapiens
guaagcuaaaauaaguuuuuguuuguuuauuu

SEQ ID NO: 225376 - RNA, 32 nt, Homo Sapiens
ugugggcuuaaugugaauagaggaacaagugg

SEQ ID NO: 225377 - RNA, 28 nt, Homo Sapiens
aaauuccaaaagaagcauuugaacaacc

SEQ ID NO: 225378 - RNA, 32 nt, Homo Sapiens
uauuuauauaagauuauaagaaaaauuaugua

SEQ ID NO: 225379 - RNA, 32 nt, Homo Sapiens
aauuacugaauauuuuacugugcuuuucuuca

SEQ ID NO: 225380 - RNA, 32 nt, Homo Sapiens
acuucagucuugccuaggcgauuuugucuacc

SEQ ID NO: 225381 - RNA, 31 nt, Homo Sapiens
cucugggcuggcugccugcaccggccauguc

SEQ ID NO: 225382 - RNA, 32 nt, Homo Sapiens
guucuaggaacugacccugcuccaucacacac

SEQ ID NO: 225383 - RNA, 32 nt, Homo Sapiens
cuuuaaagcaauugcauaauagauaaaaaccu

SEQ ID NO: 225384 - RNA, 32 nt, Homo Sapiens
ggaggauagaccaggaaauaaagggucaacag

SEQ ID NO: 225385 - RNA, 32 nt, Homo Sapiens
ggguggggaugaagccuggggggugggccacc

SEQ ID NO: 225386 - RNA, 32 nt, Homo Sapiens
uuguguugagaugauauuuaacuuuuugccaa

SEQ ID NO: 225387 - RNA, 32 nt, Homo Sapiens
cccgccgcccuucuuccccaucucucccccgg

SEQ ID NO: 225388 - RNA, 32 nt, Homo Sapiens
uucaucuaugagaaauaacaaacaagaaggga

SEQ ID NO: 225389 - RNA, 32 nt, Homo Sapiens
uguucugugggguuuguuaacauggaacuacu

SEQ ID NO: 225390 - RNA, 32 nt, Homo Sapiens
cguacuucaccaccugcccccggggcaaggug

SEQ ID NO: 225391 - RNA, 32 nt, Homo Sapiens
aaaguauauguggauaaauuuuuuguaaucuu

SEQ ID NO: 225392 - RNA, 32 nt, Homo Sapiens
caaagcucaucccaccccacaccccucccaga

SEQ ID NO: 225393 - RNA, 32 nt, Homo Sapiens
gacaucaucauucuugugggagacagcagccu

SEQ ID NO: 225394 - RNA, 32 nt, Homo Sapiens
ggacaaaugaauuuaaaaaaucagaaaaaugc

SEQ ID NO: 225395 - RNA, 28 nt, Homo Sapiens
agugagaaaggugcucauuugaauauca

SEQ ID NO: 225396 - RNA, 32 nt, Homo Sapiens
aaugaaaaucagaaaaagccccugccuagcuc

SEQ ID NO: 225397 - RNA, 32 nt, Homo Sapiens
auacugguaggaccgugaugacaaccccgagc

SEQ ID NO: 225398 - RNA, 32 nt, Homo Sapiens
uuuaauucuaacuuuuuaucuuuauuguugaa

SEQ ID NO: 225399 - RNA, 32 nt, Homo Sapiens
auuucauguauuucuacuuucuucuuaaacaa

SEQ ID NO: 225400 - RNA, 32 nt, Homo Sapiens
cccucaggaguauuuuuguugaggcuuuccug

SEQ ID NO: 225401 - RNA, 32 nt, Homo Sapiens
uagguuacaucauuuuucuugcugucuugggc

SEQ ID NO: 225402 - RNA, 32 nt, Homo Sapiens
ccggcucggcccgggcagccgccuucugagcc

SEQ ID NO: 225403 - RNA, 29 nt, Homo Sapiens
gugcagcggggacagggcagggcagacgg

SEQ ID NO: 225404 - RNA, 32 nt, Homo Sapiens
gcuccggcgaggggcagggccgcguucguccg

SEQ ID NO: 225405 - RNA, 32 nt, Homo Sapiens
uguaacuuuuaaaauauuaagugucuuguaug

SEQ ID NO: 225406 - RNA, 32 nt, Homo Sapiens
acccacuugauuauguauuucagaucccuccg

SEQ ID NO: 225407 - RNA, 32 nt, Homo Sapiens
gcacccaggcugcgcgcacgcggucccggugu

SEQ ID NO: 225408 - RNA, 32 nt, Homo Sapiens
acuucuuucuuauguuguuuucugugucuaua

SEQ ID NO: 225409 - RNA, 32 nt, Homo Sapiens
caccgcggccccacccucuuccggccucagcu

SEQ ID NO: 225410 - RNA, 32 nt, Homo Sapiens
uauucuuucuuacccauuauuugagcucucuu

SEQ ID NO: 225411 - RNA, 32 nt, Homo Sapiens
gacacuuccuuccuccccacucgccuccucuc

SEQ ID NO: 225412 - RNA, 32 nt, Homo Sapiens
ugcuuuucuaacaaacuguugaucagcaaaaa

SEQ ID NO: 225413 - RNA, 32 nt, Homo Sapiens
gaaguggccugcgggcggagaagugccucagg

SEQ ID NO: 225414 - RNA, 32 nt, Homo Sapiens
cgggccuaccucagcccucaccccucugccug

SEQ ID NO: 225415 - RNA, 32 nt, Homo Sapiens
acguuguaauuacaacucuacauucauuuacu

SEQ ID NO: 225416 - RNA, 32 nt, Homo Sapiens
auguaaacugaaaauaagaaaauacauuagca

SEQ ID NO: 225417 - RNA, 32 nt, Homo Sapiens
gacauguggggagaggaccagcugggugcuug

SEQ ID NO: 225418 - RNA, 32 nt, Homo Sapiens
acacuggaaggggauuuguauaauaaaugugu

SEQ ID NO: 225419 - RNA, 32 nt, Homo Sapiens
agagcccagacucuuggagcaguuguuccccc

SEQ ID NO: 225420 - RNA, 32 nt, Homo Sapiens
gugggccuauuuggauuuuagaggcaacacau

SEQ ID NO: 225421 - RNA, 32 nt, Homo Sapiens
guuucauuuuuggccuucaucuuagaugacug

SEQ ID NO: 225422 - RNA, 32 nt, Homo Sapiens
aaguguugcagggcugugacacaauagggacu

SEQ ID NO: 225423 - RNA, 32 nt, Homo Sapiens
aaccccugcuccaguccuggagggaguggguu

SEQ ID NO: 225424 - RNA, 32 nt, Homo Sapiens
agcuggcuuaguugguggacggccugggguag

SEQ ID NO: 225425 - RNA, 32 nt, Homo Sapiens
gacagggcuucauucugucacccaggcuggag

SEQ ID NO: 225426 - RNA, 32 nt, Homo Sapiens
uaggagaugauuaauguuauccccauuagaga

SEQ ID NO: 225427 - RNA, 32 nt, Homo Sapiens
cuugcugaaaaacacaacuuguguuuauggca

SEQ ID NO: 225428 - RNA, 32 nt, Homo Sapiens
ugaugggcuuugaaccugguuggccggggaag

SEQ ID NO: 225429 - RNA, 32 nt, Homo Sapiens
cagcgacccgcggcggggcggcauccccagcu

SEQ ID NO: 225430 - RNA, 32 nt, Homo Sapiens
ucugcuuaagugcucggaaccccgucaccuaa

SEQ ID NO: 225431 - RNA, 30 nt, Homo Sapiens
auugcaguguuuugcaugcaaaauauaaaa

SEQ ID NO: 225432 - RNA, 32 nt, Homo Sapiens
ccugaugacacuccugucuuucuggggcuucu

SEQ ID NO: 225433 - RNA, 32 nt, Homo Sapiens
ccuuccaucaguugaguggcugagagagaagu

SEQ ID NO: 225434 - RNA, 32 nt, Homo Sapiens
cccgcgcccuuaauuuaaaucgcaguauacug

SEQ ID NO: 225435 - RNA, 32 nt, Homo Sapiens
agguauuuacacaacagaucaacauuuaagua

SEQ ID NO: 225436 - RNA, 32 nt, Homo Sapiens
agcugccgcucccugggcuauggaucgaggag

SEQ ID NO: 225437 - RNA, 28 nt, Homo Sapiens
ccuguuuguaaauaaaacaauaaaaugg

SEQ ID NO: 225438 - RNA, 32 nt, Homo Sapiens
cuaguccgccccaccacacuccccgccugucc

SEQ ID NO: 225439 - RNA, 32 nt, Homo Sapiens
acagcugccuguuuccuccccaccagccuccu

SEQ ID NO: 225440 - RNA, 32 nt, Homo Sapiens
cucccuccgcccggcggcugggcagguggcug

SEQ ID NO: 225441 - RNA, 32 nt, Homo Sapiens
ugguuuugauuugcauuucucuaaugaccagu

SEQ ID NO: 225442 - RNA, 32 nt, Homo Sapiens
caaaguaaauguuuaaaccuuuuacguuaaaa

SEQ ID NO: 225443 - RNA, 32 nt, Homo Sapiens
auggugaaacccugucucuacugaaaauacaa

SEQ ID NO: 225444 - RNA, 32 nt, Homo Sapiens
ccaguguaggugucagaaauacuccuagagcc

SEQ ID NO: 225445 - RNA, 27 nt, Homo Sapiens
uauaaacauaaaauaaaagaaacccuc

SEQ ID NO: 225446 - RNA, 32 nt, Homo Sapiens
auaaccagggguuuucuuggggccgggaguag

SEQ ID NO: 225447 - RNA, 32 nt, Homo Sapiens
cacuacuaaaaauacaaaaauuagaugggcgu

SEQ ID NO: 225448 - RNA, 32 nt, Homo Sapiens
gcaaauaugagcauacaaucccuuuguucuaa

SEQ ID NO: 225449 - RNA, 32 nt, Homo Sapiens
caaacauaaaaauaaacuuauuagaaaaauga

SEQ ID NO: 225450 - RNA, 26 nt, Homo Sapiens
ggucuaggugaggacagaagccacug

SEQ ID NO: 225451 - RNA, 32 nt, Homo Sapiens
aaaggggaagaacacgauggcuuuuagcagcc

SEQ ID NO: 225452 - RNA, 32 nt, Homo Sapiens
ucaacucucauaccucauggucucucuuuaau

SEQ ID NO: 225453 - RNA, 32 nt, Homo Sapiens
guuacagaugcuaccuugucucauggaauacu

SEQ ID NO: 225454 - RNA, 32 nt, Homo Sapiens
guggguuuucccuuugagccuuuggccacauc

SEQ ID NO: 225455 - RNA, 30 nt, Homo Sapiens
uuuccuuuguaauaaauugcuuuguacuuc

SEQ ID NO: 225456 - RNA, 32 nt, Homo Sapiens
uuucuucucuucauugcugcuucucagcauuu

SEQ ID NO: 225457 - RNA, 32 nt, Homo Sapiens
agaaugauaaccucuuuuagagaacaaauaag

SEQ ID NO: 225458 - RNA, 32 nt, Homo Sapiens
ccuuguugauaaagguucagacuucugcugau

SEQ ID NO: 225459 - RNA, 32 nt, Homo Sapiens
cgcuguacacgacauugcuaaugaggacagcg

SEQ ID NO: 225460 - RNA, 32 nt, Homo Sapiens
gagcagugugugaaauuccauguguuugcuga

SEQ ID NO: 225461 - RNA, 32 nt, Homo Sapiens
uucgcuacucuguguccucugcuccuagaggc

SEQ ID NO: 225462 - RNA, 32 nt, Homo Sapiens
gcuuuuagcucuucgaguuuacccuaagauac

SEQ ID NO: 225463 - RNA, 30 nt, Homo Sapiens
uacagaugaaaagaagcaaagaauugauaa

SEQ ID NO: 225464 - RNA, 32 nt, Homo Sapiens
cucuggaccugccugccucagacuucugugaa

SEQ ID NO: 225465 - RNA, 32 nt, Homo Sapiens
ugcacgcgucggagcacggccagccuuccgcc

SEQ ID NO: 225466 - RNA, 32 nt, Homo Sapiens
uucagcacguaggacugaguggcauuagguac

SEQ ID NO: 225467 - RNA, 32 nt, Homo Sapiens
ccaguucuuagccuaaugcaaacugcagcgcc

SEQ ID NO: 225468 - RNA, 32 nt, Homo Sapiens
agcaaagaaauauuuugcccacuuugagaaau

SEQ ID NO: 225469 - RNA, 32 nt, Homo Sapiens
gcuacuuuuguuccacauucucucucuuuacc

SEQ ID NO: 225470 - RNA, 32 nt, Homo Sapiens
uggagugcaauggcgugaucgcugcucaccgc

SEQ ID NO: 225471 - RNA, 32 nt, Homo Sapiens
ggguagucacugccuccccaaacuggacucag

SEQ ID NO: 225472 - RNA, 32 nt, Homo Sapiens
ccacaugugaguuuuacacaacaacaaaugaa

SEQ ID NO: 225473 - RNA, 32 nt, Homo Sapiens
ggggcgggcggacgggaagccuggggucgugg

SEQ ID NO: 225474 - RNA, 32 nt, Homo Sapiens
aggcuguacagcugcaagcuuugccgcucacg

SEQ ID NO: 225475 - RNA, 32 nt, Homo Sapiens
ucauuagaacagaagacucuccugucaccugg

SEQ ID NO: 225476 - RNA, 32 nt, Homo Sapiens
aauuuauuuccucuccuucccccacccagcuu

SEQ ID NO: 225477 - RNA, 32 nt, Homo Sapiens
uaguaaaucuccccggcccagcuggcgaaccc

SEQ ID NO: 225478 - RNA, 32 nt, Homo Sapiens
ugagccaugcuucuggcuucccugggagcccc

SEQ ID NO: 225479 - RNA, 32 nt, Homo Sapiens
gugaucuggcuucuccucggaccucugugaau

SEQ ID NO: 225480 - RNA, 32 nt, Homo Sapiens
ucccucccauucugccccagcuuccuccagug

SEQ ID NO: 225481 - RNA, 32 nt, Homo Sapiens
guguaauuaaugucagaaaacaccugucacuu

SEQ ID NO: 225482 - RNA, 32 nt, Homo Sapiens
aggcugucaauuacaggaaguacuggagaaaa

SEQ ID NO: 225483 - RNA, 32 nt, Homo Sapiens
auaucucacagcacaaaguucaaguguaugcc

SEQ ID NO: 225484 - RNA, 32 nt, Homo Sapiens
aaagaaaaauggaaaaacuuuguaugguagcu

SEQ ID NO: 225485 - RNA, 32 nt, Homo Sapiens
gcugcucaccuggaucccggcgcuguucaucg

SEQ ID NO: 225486 - RNA, 32 nt, Homo Sapiens
gcauucucuguucucaaggcaccuggauggug

SEQ ID NO: 225487 - RNA, 32 nt, Homo Sapiens
uggcuguaccugaaacuuaugguggccuagac

SEQ ID NO: 225488 - RNA, 32 nt, Homo Sapiens
ccagguacuuacagagcagauuucauacauca

SEQ ID NO: 225489 - RNA, 32 nt, Homo Sapiens
cucucuggaagacagcgcguggcuuggcuuca

SEQ ID NO: 225490 - RNA, 31 nt, Homo Sapiens
ggcuuccggugcugccugcgucaucuccgcg

SEQ ID NO: 225491 - RNA, 32 nt, Homo Sapiens
ggccaacacaugagaccccaccucccucccug

SEQ ID NO: 225492 - RNA, 32 nt, Homo Sapiens
uucaucuucuggcagcagaaauccaugaagcc

SEQ ID NO: 225493 - RNA, 32 nt, Homo Sapiens
uccgcgcgcgucgccggcccaguccugucgcu

SEQ ID NO: 225494 - RNA, 32 nt, Homo Sapiens
aauaauaguuuuuaggcuccaugaauuggcuc

SEQ ID NO: 225495 - RNA, 32 nt, Homo Sapiens
cggacgcccccgcuccucggcuccagagcgcc

SEQ ID NO: 225496 - RNA, 32 nt, Homo Sapiens
ggccgggcuagugggagggggcggcggccaug

SEQ ID NO: 225497 - RNA, 32 nt, Homo Sapiens
gcugacacaccgugcuuuguuagccuaauaau

SEQ ID NO: 225498 - RNA, 32 nt, Homo Sapiens
gucuuauauuaagauuaacauguuguuaauag

SEQ ID NO: 225499 - RNA, 32 nt, Homo Sapiens
uacugaugguacuguuauucauaagucauauu

SEQ ID NO: 225500 - RNA, 32 nt, Homo Sapiens
auuacugcugucuaucuucuugcuccacucac

SEQ ID NO: 225501 - RNA, 32 nt, Homo Sapiens
cuuaauuuuacagcccuuggcuuguguuaucg

SEQ ID NO: 225502 - RNA, 32 nt, Homo Sapiens
gcuuccaccccucgucuucccucccucggggc

SEQ ID NO: 225503 - RNA, 32 nt, Homo Sapiens
auauuaucauaucucucuuuacuucccaguau

SEQ ID NO: 225504 - RNA, 32 nt, Homo Sapiens
cauccacagcugccagugcagcuccugccagg

SEQ ID NO: 225505 - RNA, 32 nt, Homo Sapiens
gaaaagugggucuuauguuuucaaaugguuaa

SEQ ID NO: 225506 - RNA, 32 nt, Homo Sapiens
uccugcgcccuguggcggccaccuccaucgcc

SEQ ID NO: 225507 - RNA, 32 nt, Homo Sapiens
auauauuacauucuauugucuuucuuauauaa

SEQ ID NO: 225508 - RNA, 32 nt, Homo Sapiens
agcagggugaugcacagcagucugccuccccu

SEQ ID NO: 225509 - RNA, 32 nt, Homo Sapiens
ccgagaguggacuggcugccggggcccaucag

SEQ ID NO: 225510 - RNA, 32 nt, Homo Sapiens
aguagagaacuaaagaauaaggccuuuagaau

SEQ ID NO: 225511 - RNA, 32 nt, Homo Sapiens
cgagaagaacagacgcucuuuaaguuugauuc

SEQ ID NO: 225512 - RNA, 32 nt, Homo Sapiens
uggccgaccuacccagcggcgccggggcgucu

SEQ ID NO: 225513 - RNA, 32 nt, Homo Sapiens
uauauuaguaauuuauauagaugucagcaauu

SEQ ID NO: 225514 - RNA, 32 nt, Homo Sapiens
acucuucaucucuccacccccaaacuaguccc

SEQ ID NO: 225515 - RNA, 32 nt, Homo Sapiens
cauuaggcaagagaccucuaccuaguagaaag

SEQ ID NO: 225516 - RNA, 32 nt, Homo Sapiens
cugaccugucuccccagcucccacacagaaag

SEQ ID NO: 225517 - RNA, 32 nt, Homo Sapiens
caagguuagugcccuccaccuagggaagcaug

SEQ ID NO: 225518 - RNA, 32 nt, Homo Sapiens
gggcuacuguauuugcagagcuaaguccucca

SEQ ID NO: 225519 - RNA, 32 nt, Homo Sapiens
cucccucacacugaccaagggccugugcugcc

SEQ ID NO: 225520 - RNA, 32 nt, Homo Sapiens
cuuacgaacacaaaaacccagcccacaugacu

SEQ ID NO: 225521 - RNA, 32 nt, Homo Sapiens
cacacacacacacacacacacacacacuaguu

SEQ ID NO: 225522 - RNA, 32 nt, Homo Sapiens
ggagggauuuguggugaccuaccgcugcccuc

SEQ ID NO: 225523 - RNA, 32 nt, Homo Sapiens
ggcaucugcucagaucuuugccuuuggccuuu

SEQ ID NO: 225524 - RNA, 32 nt, Homo Sapiens
gaccguugcuaaggggcguggcucagccgcac

SEQ ID NO: 225525 - RNA, 32 nt, Homo Sapiens
ugugagccaaaauaaaugucuuuucuuuauaa

SEQ ID NO: 225526 - RNA, 32 nt, Homo Sapiens
gaaugagggcggcagcgguggcggcgguagcc

SEQ ID NO: 225527 - RNA, 32 nt, Homo Sapiens
agggcagggcuuuugguuuuguucucugaugu

SEQ ID NO: 225528 - RNA, 32 nt, Homo Sapiens
uaaguauuccuccuccauccuucauucuucac

SEQ ID NO: 225529 - RNA, 32 nt, Homo Sapiens
cccacagcuucucccagccugaaaccaacaca

SEQ ID NO: 225530 - RNA, 32 nt, Homo Sapiens
ugccugagaagguagccugugcaucuggugag

SEQ ID NO: 225531 - RNA, 32 nt, Homo Sapiens
uccaacauugaauaaacucaguuugcaucaaa

SEQ ID NO: 225532 - RNA, 32 nt, Homo Sapiens
ccuaggcaggagaggaugggcgcagcccugcc

SEQ ID NO: 225533 - RNA, 30 nt, Homo Sapiens
ccuuuggagagauccucugagucuguggag

SEQ ID NO: 225534 - RNA, 32 nt, Homo Sapiens
ugcuauaaugaaaucuuuuauuuuuauagcuc

SEQ ID NO: 225535 - RNA, 32 nt, Homo Sapiens
uuuccugcucagcagagccccucccuucagag

SEQ ID NO: 225536 - RNA, 30 nt, Homo Sapiens
uuugugcaugaacuauacaagaguaucuga

SEQ ID NO: 225537 - RNA, 32 nt, Homo Sapiens
agggaucccucaugccacuugcugccaccacc

SEQ ID NO: 225538 - RNA, 32 nt, Homo Sapiens
aaaguguguauauauguuugcauuuacauaua

SEQ ID NO: 225539 - RNA, 32 nt, Homo Sapiens
ccgcgccccuccccagcccaucuuacugcaag

SEQ ID NO: 225540 - RNA, 32 nt, Homo Sapiens
gcggcauagcggcuugguucaccuggaggcug

SEQ ID NO: 225541 - RNA, 32 nt, Homo Sapiens
uuuuaaggugauguuggaaccacugaagcaga

SEQ ID NO: 225542 - RNA, 32 nt, Homo Sapiens
cagaaguguuuuucuuuuuuuaaugaacaagu

SEQ ID NO: 225543 - RNA, 32 nt, Homo Sapiens
uuguccccaagcaacagagugagggucugucu

SEQ ID NO: 225544 - RNA, 32 nt, Homo Sapiens
uuaaaaauuagcaaacaaaagugacuugcuca

SEQ ID NO: 225545 - RNA, 32 nt, Homo Sapiens
cuuccccucaaccccggcccaggccgcccugg

SEQ ID NO: 225546 - RNA, 32 nt, Homo Sapiens
ccucuucccuucccuggcccccggguguaaau

SEQ ID NO: 225547 - RNA, 32 nt, Homo Sapiens
cacagauaaauccuauuaaauuuuauaguuau

SEQ ID NO: 225548 - RNA, 32 nt, Homo Sapiens
agggggcagcccacugcucuuggucccugugc

SEQ ID NO: 225549 - RNA, 32 nt, Homo Sapiens
auuuggcaucugaaggguauaaaggccugggg

SEQ ID NO: 225550 - RNA, 32 nt, Homo Sapiens
uccuccuucugcagcugcugcuccucauaguc

SEQ ID NO: 225551 - RNA, 32 nt, Homo Sapiens
cuggugcaggugggguucgaggggaaaggacg

SEQ ID NO: 225552 - RNA, 32 nt, Homo Sapiens
gcccaggauaaucaacacuguucucucuguac

SEQ ID NO: 225553 - RNA, 32 nt, Homo Sapiens
aauacagcugaaaccccgcgggcccuuagcac

SEQ ID NO: 225554 - RNA, 32 nt, Homo Sapiens
aucuuucucuuuucuaaaagacuucccuaaca

SEQ ID NO: 225555 - RNA, 32 nt, Homo Sapiens
auuuagacucaucuuacuguaccuguuccuua

SEQ ID NO: 225556 - RNA, 32 nt, Homo Sapiens
cauccucaccccuuugccuugcugucugucuc

SEQ ID NO: 225557 - RNA, 32 nt, Homo Sapiens
cacuaaaauggcauuaaaauuaccaaaaggaa

SEQ ID NO: 225558 - RNA, 32 nt, Homo Sapiens
accuccugugagcugcacgccagccaccgugu

SEQ ID NO: 225559 - RNA, 32 nt, Homo Sapiens
gccccuuuuaaccugauguguaccuuacucuu

SEQ ID NO: 225560 - RNA, 32 nt, Homo Sapiens
ggaauuaauucccccagucuaccaauggcacc

SEQ ID NO: 225561 - RNA, 32 nt, Homo Sapiens
ugcaagaccccgaggccacgggccugggcucu

SEQ ID NO: 225562 - RNA, 32 nt, Homo Sapiens
gcgcuggggagcuucuaggcuuccugggguuc

SEQ ID NO: 225563 - RNA, 32 nt, Homo Sapiens
ccccagagcugggacagcagccgggcugcggc

SEQ ID NO: 225564 - RNA, 32 nt, Homo Sapiens
ugagcaccgaggggcaguuggcagcuucaccu

SEQ ID NO: 225565 - RNA, 32 nt, Homo Sapiens
uaaccaggaauguaugugugucugugugucuc

SEQ ID NO: 225566 - RNA, 32 nt, Homo Sapiens
cgggagacucccuccacgccccguguguggag

SEQ ID NO: 225567 - RNA, 32 nt, Homo Sapiens
uuucugcuuccacucauauucucuacacauuu

SEQ ID NO: 225568 - RNA, 32 nt, Homo Sapiens
gcuguucuacuauuuuaacuacuggcaaagca

SEQ ID NO: 225569 - RNA, 32 nt, Homo Sapiens
uccagcaaacuccagcagaccugcagccgagg

SEQ ID NO: 225570 - RNA, 32 nt, Homo Sapiens
cgcucgggaagcagcucuugccgaaaaccuuu

SEQ ID NO: 225571 - RNA, 32 nt, Homo Sapiens
uauuaugcauuaccugggaauuuauauaagcc

SEQ ID NO: 225572 - RNA, 32 nt, Homo Sapiens
gggcagaggcaguggcucuuuagaaggaaaag

SEQ ID NO: 225573 - RNA, 32 nt, Homo Sapiens
gugaccgguccgggugcaaacacgcgggucag

SEQ ID NO: 225574 - RNA, 32 nt, Homo Sapiens
ccagggggaaauguggaaggcauuccaucaac

SEQ ID NO: 225575 - RNA, 32 nt, Homo Sapiens
ucaaagauauaauauuugauguauaaaugcaa

SEQ ID NO: 225576 - RNA, 29 nt, Homo Sapiens
ucuccccggggacaugaggcacccauacc

SEQ ID NO: 225577 - RNA, 32 nt, Homo Sapiens
acuggggagggccggcggggcgcggaggagga

SEQ ID NO: 225578 - RNA, 32 nt, Homo Sapiens
caaguacuuguaaaaaugaaaguaaucuccau

SEQ ID NO: 225579 - RNA, 32 nt, Homo Sapiens
ggcagagcugaggucugagagaucuggacucc

SEQ ID NO: 225580 - RNA, 32 nt, Homo Sapiens
gguagccucacagaugagucuuggaugcauuc

SEQ ID NO: 225581 - RNA, 32 nt, Homo Sapiens
accugugugggucuuaccugugcaggucuccu

SEQ ID NO: 225582 - RNA, 32 nt, Homo Sapiens
auggcuacuguaaaagcgucaccaagaaacuc

SEQ ID NO: 225583 - RNA, 32 nt, Homo Sapiens
guggcuccaauuuuugucauuacaucugcauu

SEQ ID NO: 225584 - RNA, 29 nt, Homo Sapiens
guggauuuuaaaugucaccacaaagaaau

SEQ ID NO: 225585 - RNA, 32 nt, Homo Sapiens
ugauccacagcccugcggagccaggucaagcc

SEQ ID NO: 225586 - RNA, 32 nt, Homo Sapiens
aacuaaucagacuuccugccaguguccuaacc

SEQ ID NO: 225587 - RNA, 32 nt, Homo Sapiens
uauuuguuggcaagugauacaauuuacuguau

SEQ ID NO: 225588 - RNA, 32 nt, Homo Sapiens
uguggugguggaagagggcaugcaaguucugc

SEQ ID NO: 225589 - RNA, 32 nt, Homo Sapiens
uugacauaaaauaugaauauggcuuagcaaag

SEQ ID NO: 225590 - RNA, 32 nt, Homo Sapiens
guaguagcagugccucccucaagggccugggu

SEQ ID NO: 225591 - RNA, 32 nt, Homo Sapiens
cauggcgauccgcuccuccggcucucauggca

SEQ ID NO: 225592 - RNA, 32 nt, Homo Sapiens
ugagaugcauuacaaucauccuccauaagugu

SEQ ID NO: 225593 - RNA, 32 nt, Homo Sapiens
uuuaaauuuuuauagugauuauagagaaugau

SEQ ID NO: 225594 - RNA, 32 nt, Homo Sapiens
gaagauccagcuuuugaaaacagugauuuagg

SEQ ID NO: 225595 - RNA, 32 nt, Homo Sapiens
guucauuauguggccgaaaagcauacacugag

SEQ ID NO: 225596 - RNA, 32 nt, Homo Sapiens
agauguuugauacauuuuaaguauuuuuaaau

SEQ ID NO: 225597 - RNA, 32 nt, Homo Sapiens
gcaguuguugucagaguacaaaccuucuucca

SEQ ID NO: 225598 - RNA, 32 nt, Homo Sapiens
auaaauguucuuccucuuuucagaaccccuga

SEQ ID NO: 225599 - RNA, 32 nt, Homo Sapiens
aggugucagagguaggggaaccaggggcaagc

SEQ ID NO: 225600 - RNA, 32 nt, Homo Sapiens
uccgggguagaauccgccccagcccuccgggc

SEQ ID NO: 225601 - RNA, 32 nt, Homo Sapiens
agaacccuuuugcugcuuuucuuacauaccua

SEQ ID NO: 225602 - RNA, 32 nt, Homo Sapiens
gggaagguaagaaaauacuuuuuuauauuugu

SEQ ID NO: 225603 - RNA, 32 nt, Homo Sapiens
ccaucuuggucucaccuuuucucuccauaucc

SEQ ID NO: 225604 - RNA, 32 nt, Homo Sapiens
uucucuuucucuuuauuuuuuauccuuuucuu

SEQ ID NO: 225605 - RNA, 32 nt, Homo Sapiens
uauucagggccucgcuuccccugagucauucu

SEQ ID NO: 225606 - RNA, 32 nt, Homo Sapiens
uaguauuauacagaauaauuucacugccuuaa

SEQ ID NO: 225607 - RNA, 32 nt, Homo Sapiens
cuccugcuccucaggaacuaugggagccucag

SEQ ID NO: 225608 - RNA, 32 nt, Homo Sapiens
uggcugcugcuggucagccaccuagcgcuggc

SEQ ID NO: 225609 - RNA, 32 nt, Homo Sapiens
uagaaacccaggucagacacacucucugggcu

SEQ ID NO: 225610 - RNA, 32 nt, Homo Sapiens
uggacgccgggcggcggcccuggacgugcggg

SEQ ID NO: 225611 - RNA, 32 nt, Homo Sapiens
uuaaauucaacacaauucuagauagcugaaac

SEQ ID NO: 225612 - RNA, 32 nt, Homo Sapiens
cgacggauccuccuccucccuuauucccuugc

SEQ ID NO: 225613 - RNA, 32 nt, Homo Sapiens
ugggcggcuucuuuaaauccagcccuucaccc

SEQ ID NO: 225614 - RNA, 32 nt, Homo Sapiens
aauuggagauaauuagucaaagggcacaugga

SEQ ID NO: 225615 - RNA, 32 nt, Homo Sapiens
gggggaccaauauucuuagauauuuagagcau

SEQ ID NO: 225616 - RNA, 32 nt, Homo Sapiens
uucucugugaacuauuaaucauccucugaguu

SEQ ID NO: 225617 - RNA, 32 nt, Homo Sapiens
aguucaucuaaaaaucauuaagaucagagaaa

SEQ ID NO: 225618 - RNA, 32 nt, Homo Sapiens
gccagaucuguggggagcugcccaggccaccc

SEQ ID NO: 225619 - RNA, 30 nt, Homo Sapiens
ggggcccaggacugcagcggcuucggaagg

SEQ ID NO: 225620 - RNA, 32 nt, Homo Sapiens
cuuggucagagguagcugcagaggggggaggc

SEQ ID NO: 225621 - RNA, 32 nt, Homo Sapiens
uauggagaccucuccuuccuacccuccugcac

SEQ ID NO: 225622 - RNA, 32 nt, Homo Sapiens
gcuuuuugacuucuuagaaauauuuuccagca

SEQ ID NO: 225623 - RNA, 32 nt, Homo Sapiens
cggaaacaacgcuucccuucuggugugucugu

SEQ ID NO: 225624 - RNA, 32 nt, Homo Sapiens
cugggaggacugguugugcugcuggagaaggg

SEQ ID NO: 225625 - RNA, 27 nt, Homo Sapiens
guuguccuucuuccuccaccaccugcg

SEQ ID NO: 225626 - RNA, 32 nt, Homo Sapiens
ugccuuuuuuuuucuuuuuuuuuuuuuggaac

SEQ ID NO: 225627 - RNA, 32 nt, Homo Sapiens
aggagcaaugagaaacaaaacuaauuuuugga

SEQ ID NO: 225628 - RNA, 32 nt, Homo Sapiens
acucuaguuuuaaauacgaauuuucaaaaacg

SEQ ID NO: 225629 - RNA, 32 nt, Homo Sapiens
guugggucugguuuuguuuggcuuuguuuugu

SEQ ID NO: 225630 - RNA, 32 nt, Homo Sapiens
uuuaaagacuucugcugcugcuaugccucuug

SEQ ID NO: 225631 - RNA, 32 nt, Homo Sapiens
guucuuaaauacuacaacuucuuauugugggg

SEQ ID NO: 225632 - RNA, 32 nt, Homo Sapiens
cgcgggccugcgccucggcguccccgaggagg

SEQ ID NO: 225633 - RNA, 32 nt, Homo Sapiens
aagucaaaaaugggaaagcaaaaaguagcugu

SEQ ID NO: 225634 - RNA, 32 nt, Homo Sapiens
ggggacccugaauuugcccauccaccuggguc

SEQ ID NO: 225635 - RNA, 32 nt, Homo Sapiens
gcaccuggaggcggccccggacggggaugguc

SEQ ID NO: 225636 - RNA, 32 nt, Homo Sapiens
aggccucuaucuccaggcacaaugucccugcu

SEQ ID NO: 225637 - RNA, 32 nt, Homo Sapiens
cucucagccauuucagcagccccgucaaccgc

SEQ ID NO: 225638 - RNA, 32 nt, Homo Sapiens
cugggaccugucuuuccaacuaaauuggaggc

SEQ ID NO: 225639 - RNA, 32 nt, Homo Sapiens
ggaacagaaagauaugacagaguuuuuuacug

SEQ ID NO: 225640 - RNA, 32 nt, Homo Sapiens
augaucugaagaugaugcuaauccccaaauac

SEQ ID NO: 225641 - RNA, 32 nt, Homo Sapiens
gucuacuuaggacaauggagacuuuuucaguu

SEQ ID NO: 225642 - RNA, 32 nt, Homo Sapiens
gaaccggcgcgcgggcugaggccgcccgggau

SEQ ID NO: 225643 - RNA, 32 nt, Homo Sapiens
uacaugcacauguacucacauacucccucuuc

SEQ ID NO: 225644 - RNA, 32 nt, Homo Sapiens
aaauuuccuacaaguaagaacaauguggcaaa

SEQ ID NO: 225645 - RNA, 32 nt, Homo Sapiens
gugcuaggagagggccugugcuccacacagcc

SEQ ID NO: 225646 - RNA, 32 nt, Homo Sapiens
caaucaaacuggguggcaggaagaagcaagcu

SEQ ID NO: 225647 - RNA, 32 nt, Homo Sapiens
gcuaggauugaaugcuuggggacaccuaccug

SEQ ID NO: 225648 - RNA, 32 nt, Homo Sapiens
ucucuuuaguuucaaaaaccauauauaauuaa

SEQ ID NO: 225649 - RNA, 32 nt, Homo Sapiens
ccagguguuuuaaggaaugaauuggucacugc

SEQ ID NO: 225650 - RNA, 32 nt, Homo Sapiens
uucuuugaacaugaaaaagaaaacaacuuuga

SEQ ID NO: 225651 - RNA, 32 nt, Homo Sapiens
gcccuggagacuggagccuuggagcauggcaa

SEQ ID NO: 225652 - RNA, 32 nt, Homo Sapiens
ccccaagccaucugaguacuguuaggguuuua

SEQ ID NO: 225653 - RNA, 32 nt, Homo Sapiens
ccagccccaaggaaacacugaaaacacauauc

SEQ ID NO: 225654 - RNA, 32 nt, Homo Sapiens
cggaaguguggagguguggcugcccgaggcgg

SEQ ID NO: 225655 - RNA, 32 nt, Homo Sapiens
aucaugaacuaaaaugucccccgaaaacaguc

SEQ ID NO: 225656 - RNA, 27 nt, Homo Sapiens
ucaagguguuuucacagcccccugagg

SEQ ID NO: 225657 - RNA, 29 nt, Homo Sapiens
gcgcugccguguuuccgggcggggacacu

SEQ ID NO: 225658 - RNA, 32 nt, Homo Sapiens
caccuuuucuaaaaagucaauucaucuaguua

SEQ ID NO: 225659 - RNA, 32 nt, Homo Sapiens
ccgccgcuggugaccacucgccgccccuccgg

SEQ ID NO: 225660 - RNA, 32 nt, Homo Sapiens
cuuaauuucuaccuuccuguuucucugaauca

SEQ ID NO: 225661 - RNA, 32 nt, Homo Sapiens
uuuucuuaacuuuuuuuuuuuaacacacuaau

SEQ ID NO: 225662 - RNA, 32 nt, Homo Sapiens
aggaguuuucuuuuucucuuuaguacuuacgu

SEQ ID NO: 225663 - RNA, 32 nt, Homo Sapiens
ucuguguacugggugaugcacccauugugauu

SEQ ID NO: 225664 - RNA, 32 nt, Homo Sapiens
uugaagucugcugguucucacaccagcagcaa

SEQ ID NO: 225665 - RNA, 32 nt, Homo Sapiens
cagguuucuuuggaccaaauccaaaagaacac

SEQ ID NO: 225666 - RNA, 32 nt, Homo Sapiens
uucuccugcgcccacgucacgcagcagguggg

SEQ ID NO: 225667 - RNA, 32 nt, Homo Sapiens
caucaaucaauauauuuaagaaguacauuggu

SEQ ID NO: 225668 - RNA, 32 nt, Homo Sapiens
cagaaucgcccggcccagcccuggagcccccu

SEQ ID NO: 225669 - RNA, 32 nt, Homo Sapiens
ccagaccauuuuaaucaacuuuauugagauuc

SEQ ID NO: 225670 - RNA, 32 nt, Homo Sapiens
guaaaaucugcucuugcaugcuaagguaauuu

SEQ ID NO: 225671 - RNA, 32 nt, Homo Sapiens
ucuauaguucuccuggcagagccuuugagaau

SEQ ID NO: 225672 - RNA, 32 nt, Homo Sapiens
gaaauaaagacaaagcacuaucaaaaaaaaaa

SEQ ID NO: 225673 - RNA, 32 nt, Homo Sapiens
uauaagugaccuuauuucugcuuuucugagcu

SEQ ID NO: 225674 - RNA, 32 nt, Homo Sapiens
aauauccacagacucccuccccugcccccauc

SEQ ID NO: 225675 - RNA, 32 nt, Homo Sapiens
uaccuuaacagaaaaaggcagcucuucaaugg

SEQ ID NO: 225676 - RNA, 32 nt, Homo Sapiens
aauccugcagcccuccccaaaaacagauugac

SEQ ID NO: 225677 - RNA, 32 nt, Homo Sapiens
ucuugcugccagcacagcagucugaaauugac

SEQ ID NO: 225678 - RNA, 32 nt, Homo Sapiens
cagccuggugccugcugagccaguccuggagc

SEQ ID NO: 225679 - RNA, 29 nt, Homo Sapiens
guuaucuuuauccaauuucacaauuucua

SEQ ID NO: 225680 - RNA, 32 nt, Homo Sapiens
agagggugucaacagugacaccauuguccgua

SEQ ID NO: 225681 - RNA, 32 nt, Homo Sapiens
gggacaggggucuguuucugcucuggccuuaa

SEQ ID NO: 225682 - RNA, 32 nt, Homo Sapiens
aauaauacuccagcucacagccaggcaauuau

SEQ ID NO: 225683 - RNA, 32 nt, Homo Sapiens
uucauugccuucuccuuucaaaguguacguuu

SEQ ID NO: 225684 - RNA, 32 nt, Homo Sapiens
aauaucucuaaaaacauagaaaacacuacagu

SEQ ID NO: 225685 - RNA, 32 nt, Homo Sapiens
gcuuuggaguuccuugacuucucugaauuguu

SEQ ID NO: 225686 - RNA, 31 nt, Homo Sapiens
ccacauccucccucagcuccacagcgucuga

SEQ ID NO: 225687 - RNA, 32 nt, Homo Sapiens
auauaaauaaggaaaauaaaucaaugaaaugu

SEQ ID NO: 225688 - RNA, 31 nt, Homo Sapiens
aggcgcaggcacugcugccgagagcgccgag

SEQ ID NO: 225689 - RNA, 32 nt, Homo Sapiens
guagguuuuggaaagggaaaccacagagauua

SEQ ID NO: 225690 - RNA, 32 nt, Homo Sapiens
aaaaugcauguuuuauacuaaguuuuaaccag

SEQ ID NO: 225691 - RNA, 32 nt, Homo Sapiens
guccaaauggaagaauauugggaaauaaaccu

SEQ ID NO: 225692 - RNA, 32 nt, Homo Sapiens
gggaggagcagcugaggccacccccgccagcc

SEQ ID NO: 225693 - RNA, 32 nt, Homo Sapiens
uaugcuugaauuuguccugacucucaauagaa

SEQ ID NO: 225694 - RNA, 32 nt, Homo Sapiens
gccuuagcugcuggacuugaucuccuaagccu

SEQ ID NO: 225695 - RNA, 32 nt, Homo Sapiens
ugaucuggcauccucaggcugcagcuuuauua

SEQ ID NO: 225696 - RNA, 32 nt, Homo Sapiens
ccccaagguccccgccgccgcuccagggccgc

SEQ ID NO: 225697 - RNA, 32 nt, Homo Sapiens
gagccucgcuugcucugucacccaggcuagag

SEQ ID NO: 225698 - RNA, 32 nt, Homo Sapiens
uuaucaccuuccaaacaaaagcacuuacuuuu

SEQ ID NO: 225699 - RNA, 32 nt, Homo Sapiens
acccaccugccaguuggcgugacugugagguu

SEQ ID NO: 225700 - RNA, 32 nt, Homo Sapiens
uaaauucaaaacauuugguugaggaugccaaa

SEQ ID NO: 225701 - RNA, 32 nt, Homo Sapiens
gagcugaggcgguguaugugcggcaauaacau

SEQ ID NO: 225702 - RNA, 32 nt, Homo Sapiens
cuauuucaaggauuuggauuuauucagguaau

SEQ ID NO: 225703 - RNA, 32 nt, Homo Sapiens
ugugcugaauuacuaugccaugugcuauuuua

SEQ ID NO: 225704 - RNA, 32 nt, Homo Sapiens
cuacaucuggccaguggcucuggugcuagaug

SEQ ID NO: 225705 - RNA, 32 nt, Homo Sapiens
gauggggcaggcugggguguggguguggccug

SEQ ID NO: 225706 - RNA, 32 nt, Homo Sapiens
uguguuaaucuuccucuuuaaaaugcuaauau

SEQ ID NO: 225707 - RNA, 32 nt, Homo Sapiens
uuuuuuaaaaauugaguggcacaucaaagaaa

SEQ ID NO: 225708 - RNA, 32 nt, Homo Sapiens
aagccgcaucccccggccgccccucgcagccc

SEQ ID NO: 225709 - RNA, 32 nt, Homo Sapiens
ugaggguauaaaggccugggggugcacaucaa

SEQ ID NO: 225710 - RNA, 28 nt, Homo Sapiens
cuaggagcauaggcgggaaaucugagua

SEQ ID NO: 225711 - RNA, 32 nt, Homo Sapiens
gcccggcccagcugcagaggccagugcagagc

SEQ ID NO: 225712 - RNA, 32 nt, Homo Sapiens
gguuacugcucccagugcaucauuugcaucau

SEQ ID NO: 225713 - RNA, 32 nt, Homo Sapiens
uacaaauaaccugucuuaauucucauaaaagu

SEQ ID NO: 225714 - RNA, 32 nt, Homo Sapiens
agccucccucuucgccagcagcgagggcucug

SEQ ID NO: 225715 - RNA, 32 nt, Homo Sapiens
aggcccauugucccccuuccccggccuucugc

SEQ ID NO: 225716 - RNA, 32 nt, Homo Sapiens
gauuuaauacuaguaaagcugauuuaauacug

SEQ ID NO: 225717 - RNA, 31 nt, Homo Sapiens
uaugcgguuaauuuugaagugcuguuuauua

SEQ ID NO: 225718 - RNA, 31 nt, Homo Sapiens
cuuuuuugaaacacuucagaacugcugcuau

SEQ ID NO: 225719 - RNA, 32 nt, Homo Sapiens
gauaagcuaaucuuguauaaagcaucacauuu

SEQ ID NO: 225720 - RNA, 32 nt, Homo Sapiens
gucucugccugccggauaaugcuugagauuga

SEQ ID NO: 225721 - RNA, 32 nt, Homo Sapiens
auuuuuuaauuaugaaugcauauccuauuucc

SEQ ID NO: 225722 - RNA, 32 nt, Homo Sapiens
ugggaacuauacaagaggcaggaaaaaagaca

SEQ ID NO: 225723 - RNA, 32 nt, Homo Sapiens
agcugugaacagagagcgcuuuugucugcaau

SEQ ID NO: 225724 - RNA, 32 nt, Homo Sapiens
uuagauguauauauuuccuauauuguuuucag

SEQ ID NO: 225725 - RNA, 32 nt, Homo Sapiens
agugguccugaagagagcugauggcaagucuu

SEQ ID NO: 225726 - RNA, 32 nt, Homo Sapiens
accucugugacuuaauuuuucuuaaugucucc

SEQ ID NO: 225727 - RNA, 32 nt, Homo Sapiens
aacuccucuuucgucuuucuuuaacacacacu

SEQ ID NO: 225728 - RNA, 32 nt, Homo Sapiens
auaacuccacagcuccuccuggacccugcgcg

SEQ ID NO: 225729 - RNA, 32 nt, Homo Sapiens
cggggcccggcgggcggggcucggcuaagcac

SEQ ID NO: 225730 - RNA, 32 nt, Homo Sapiens
cgaagggcauugugggggcguuauguaaaagu

SEQ ID NO: 225731 - RNA, 32 nt, Homo Sapiens
ggacccuccgcgggcuucuccgccgcgccguc

SEQ ID NO: 225732 - RNA, 32 nt, Homo Sapiens
acugcccuccaucccggccgccggggcccgcc

SEQ ID NO: 225733 - RNA, 32 nt, Homo Sapiens
ccuguucuggggcccagggcccgggcacccac

SEQ ID NO: 225734 - RNA, 32 nt, Homo Sapiens
ugucuccgcgagccggcugugugccugcgaga

SEQ ID NO: 225735 - RNA, 32 nt, Homo Sapiens
auauauuuauggugaucugcauuuucauaaua

SEQ ID NO: 225736 - RNA, 32 nt, Homo Sapiens
gggggcgguggacaccaaggggcgagugugug

SEQ ID NO: 225737 - RNA, 32 nt, Homo Sapiens
cucucagacugaggauaguuaugacgaagcca

SEQ ID NO: 225738 - RNA, 32 nt, Homo Sapiens
guuggcccacuagucugauaagaagucuuggu

SEQ ID NO: 225739 - RNA, 32 nt, Homo Sapiens
agagagagggcugggaggaaaaguaguucauc

SEQ ID NO: 225740 - RNA, 32 nt, Homo Sapiens
gcacuuugccagcagcuucuagccuuaaaacc

SEQ ID NO: 225741 - RNA, 32 nt, Homo Sapiens
cgguggccuagagaugcugcugccgcgguugc

SEQ ID NO: 225742 - RNA, 32 nt, Homo Sapiens
auagauuugggguuggcgggaccugcugguga

SEQ ID NO: 225743 - RNA, 32 nt, Homo Sapiens
cacuucuccuaaaauauuauuuugguugaaau

SEQ ID NO: 225744 - RNA, 32 nt, Homo Sapiens
guauaccagauguuguaaaauaauucuaacuu

SEQ ID NO: 225745 - RNA, 32 nt, Homo Sapiens
uaaugaggagccaaauguuaauccccaagaca

SEQ ID NO: 225746 - RNA, 32 nt, Homo Sapiens
cugaugggcgcuccugguguugauagagaugg

SEQ ID NO: 225747 - RNA, 32 nt, Homo Sapiens
cagaacuacauauuugugccuccuugguaaau

SEQ ID NO: 225748 - RNA, 32 nt, Homo Sapiens
cacacaaaaauauucuuaagggcucagauuua

SEQ ID NO: 225749 - RNA, 32 nt, Homo Sapiens
gagguccagaaugauaugcaaaaacuacuuuu

SEQ ID NO: 225750 - RNA, 32 nt, Homo Sapiens
ucccuugucagcccguuugccacacauuguuc

SEQ ID NO: 225751 - RNA, 29 nt, Homo Sapiens
gaguguguauguauguguauagcaguggu

SEQ ID NO: 225752 - RNA, 32 nt, Homo Sapiens
gacacaguucuaugacccugggaaucauuccu

SEQ ID NO: 225753 - RNA, 32 nt, Homo Sapiens
gaaaccauugugcaaaauggauuacacaugua

SEQ ID NO: 225754 - RNA, 32 nt, Homo Sapiens
ucuuugcuaccuguguuaaagaauaucagguu

SEQ ID NO: 225755 - RNA, 32 nt, Homo Sapiens
gauggagauggugaggaugucuauuaauaugg

SEQ ID NO: 225756 - RNA, 32 nt, Homo Sapiens
uuuggagaacaaauuuaaaaaccaucagucau

SEQ ID NO: 225757 - RNA, 32 nt, Homo Sapiens
gcugccuccucccccacccccagccgcggagg

SEQ ID NO: 225758 - RNA, 32 nt, Homo Sapiens
gguccuaaaacgauugcagagccuuggggugc

SEQ ID NO: 225759 - RNA, 32 nt, Homo Sapiens
cacccgggaaaggcugccgccaccaccaccac

SEQ ID NO: 225760 - RNA, 32 nt, Homo Sapiens
auuugauggugguauugugaccacugaauuca

SEQ ID NO: 225761 - RNA, 30 nt, Homo Sapiens
gucaaugcguccuuggcagaagcuccucag

SEQ ID NO: 225762 - RNA, 32 nt, Homo Sapiens
caggguaccuuauggggccauauccuacagau

SEQ ID NO: 225763 - RNA, 32 nt, Homo Sapiens
ggggcggucccggccccgcagauccucguucc

SEQ ID NO: 225764 - RNA, 32 nt, Homo Sapiens
cuuuuuagagugauuaaaauguuacaaaauug

SEQ ID NO: 225765 - RNA, 32 nt, Homo Sapiens
agucaaauacaauacugguccuuaccacaagu

SEQ ID NO: 225766 - RNA, 32 nt, Homo Sapiens
uccuccugccaccugcugcugcugcugcugcu

SEQ ID NO: 225767 - RNA, 32 nt, Homo Sapiens
cuuuuugugucuucauuuuuccuccugucugc

SEQ ID NO: 225768 - RNA, 32 nt, Homo Sapiens
caccuaggguagucccuggucgccuccgcucu

SEQ ID NO: 225769 - RNA, 32 nt, Homo Sapiens
ggcggcgcuguguccgucgccaugacagauca

SEQ ID NO: 225770 - RNA, 32 nt, Homo Sapiens
ccagccagcucuuuggcggcagcccccaccag

SEQ ID NO: 225771 - RNA, 32 nt, Homo Sapiens
uguguaucgcagugacacuaucgauacuguuu

SEQ ID NO: 225772 - RNA, 32 nt, Homo Sapiens
guauauuauagaaacaguuuuauuuuccauuu

SEQ ID NO: 225773 - RNA, 32 nt, Homo Sapiens
aggugggcugguuuuaguacucugaaggacaa

SEQ ID NO: 225774 - RNA, 32 nt, Homo Sapiens
gaaggaggacgaagcccuccucagcuggccug

SEQ ID NO: 225775 - RNA, 32 nt, Homo Sapiens
gguccuggggagagcauggcgccgaggugccc

SEQ ID NO: 225776 - RNA, 32 nt, Homo Sapiens
ugguucuaacaacucacaaucccuuuagcuuu

SEQ ID NO: 225777 - RNA, 32 nt, Homo Sapiens
ucagaaaacaucucugggccauacagucaggu

SEQ ID NO: 225778 - RNA, 32 nt, Homo Sapiens
uggggacccagcucagggaggcucugcucaga

SEQ ID NO: 225779 - RNA, 32 nt, Homo Sapiens
ugccaugggaaccugaaccugaaacacuucau

SEQ ID NO: 225780 - RNA, 32 nt, Homo Sapiens
acagagccugaagauucaagauacugugauuu

SEQ ID NO: 225781 - RNA, 32 nt, Homo Sapiens
gccuccccugccccccagggggcccgccuuug

SEQ ID NO: 225782 - RNA, 32 nt, Homo Sapiens
cugugcuguguccagauguugcuggggccuca

SEQ ID NO: 225783 - RNA, 32 nt, Homo Sapiens
cuuaaaacagcugagaguuuuguuuucuucag

SEQ ID NO: 225784 - RNA, 32 nt, Homo Sapiens
cauuguuugaggaaacagugacaauagguaau

SEQ ID NO: 225785 - RNA, 32 nt, Homo Sapiens
ccacacaaagauuuucuaaggaaugcacaaau

SEQ ID NO: 225786 - RNA, 32 nt, Homo Sapiens
cuuaaggaccuuugggucuacaaguauaugug

SEQ ID NO: 225787 - RNA, 32 nt, Homo Sapiens
uuucuuuuggcuaaagaaauaguuuugcuuuc

SEQ ID NO: 225788 - RNA, 30 nt, Homo Sapiens
ggcacugcgcccguuugccugccccucguc

SEQ ID NO: 225789 - RNA, 32 nt, Homo Sapiens
gugguuucucaguagagaagugacuguagugu

SEQ ID NO: 225790 - RNA, 32 nt, Homo Sapiens
aggggaauggcuugaacccaggaggcagaggu

SEQ ID NO: 225791 - RNA, 32 nt, Homo Sapiens
uuaaaauuucagugacuguuuacuggaugagg

SEQ ID NO: 225792 - RNA, 32 nt, Homo Sapiens
gacccuuguuucugccaaaaccaugcuaugaa

SEQ ID NO: 225793 - RNA, 32 nt, Homo Sapiens
gccuggugcagggcccguguggauggacgaug

SEQ ID NO: 225794 - RNA, 29 nt, Homo Sapiens
gcccuggugaaggaccugccgagucagcu

SEQ ID NO: 225795 - RNA, 32 nt, Homo Sapiens
ccuccugaacgguugccccuuauuuaaugcug

SEQ ID NO: 225796 - RNA, 32 nt, Homo Sapiens
gcccccaugcgugguccauaugguccuauggu

SEQ ID NO: 225797 - RNA, 32 nt, Homo Sapiens
gcuguggugucugcuuauuuuuguauuugugc

SEQ ID NO: 225798 - RNA, 32 nt, Homo Sapiens
uguaguuuuaucuccuuuuuuaugucauagaa

SEQ ID NO: 225799 - RNA, 32 nt, Homo Sapiens
cccugccccauuuccuccucaucuguccccca

SEQ ID NO: 225800 - RNA, 32 nt, Homo Sapiens
cagccugucuuuggaagggaugaugaggcauc

SEQ ID NO: 225801 - RNA, 32 nt, Homo Sapiens
ugcucugcauguguagcugagguccugcugga

SEQ ID NO: 225802 - RNA, 32 nt, Homo Sapiens
uuuucuuucccuuuuuucugugccugcauaau

SEQ ID NO: 225803 - RNA, 32 nt, Homo Sapiens
gaacugaacaaugagaacaccuggacacagga

SEQ ID NO: 225804 - RNA, 32 nt, Homo Sapiens
aaguuccuuuuugcaccgucaccacccaacac

SEQ ID NO: 225805 - RNA, 32 nt, Homo Sapiens
cucaagcugccugacuucuggugcuggaacau

SEQ ID NO: 225806 - RNA, 32 nt, Homo Sapiens
auguguguuuauaugcagaaaaaaauaauucc

SEQ ID NO: 225807 - RNA, 32 nt, Homo Sapiens
gccgccucgcgcccgcgcggaucccgucaccu

SEQ ID NO: 225808 - RNA, 32 nt, Homo Sapiens
gcggccccgcggcaggcaggcgcccgcaguuc

SEQ ID NO: 225809 - RNA, 32 nt, Homo Sapiens
cuuucuuuucuuuucuuuucuuuuucaagaug

SEQ ID NO: 225810 - RNA, 32 nt, Homo Sapiens
ccccagcgcucgccugccucccugggugcccc

SEQ ID NO: 225811 - RNA, 32 nt, Homo Sapiens
agacggacagccagcccucccgcgggacgcac

SEQ ID NO: 225812 - RNA, 32 nt, Homo Sapiens
ucaguggacuuuugugggccuccagcuucucu

SEQ ID NO: 225813 - RNA, 32 nt, Homo Sapiens
ccucugcucccaugcucauaccucuucuuacu

SEQ ID NO: 225814 - RNA, 32 nt, Homo Sapiens
acggucuccgagucgcggacgccagcuccgag

SEQ ID NO: 225815 - RNA, 32 nt, Homo Sapiens
cuuguuggucugaucuguuugucuguccgcuu

SEQ ID NO: 225816 - RNA, 32 nt, Homo Sapiens
uaaggaugccacauuuuucaugcagaaaagaa

SEQ ID NO: 225817 - RNA, 32 nt, Homo Sapiens
uccuccagugguccccaggcgcagcagcaccg

SEQ ID NO: 225818 - RNA, 32 nt, Homo Sapiens
ugcucaucuucaguugaaugcccucacuccaa

SEQ ID NO: 225819 - RNA, 32 nt, Homo Sapiens
acauacacauacaaaacagaaaacauuuuuua

SEQ ID NO: 225820 - RNA, 32 nt, Homo Sapiens
ugucacgggcaucauucucuaauauccacuug

SEQ ID NO: 225821 - RNA, 32 nt, Homo Sapiens
gcccugacaugcacaccuccccugccccacca

SEQ ID NO: 225822 - RNA, 32 nt, Homo Sapiens
uugccaaaucuaaauggaccaggaugaacaaa

SEQ ID NO: 225823 - RNA, 32 nt, Homo Sapiens
cgauucuccaguucccgcacagcaggagcgaa

SEQ ID NO: 225824 - RNA, 32 nt, Homo Sapiens
gcaagaagaaaauacgugaaaacggaaauuaa

SEQ ID NO: 225825 - RNA, 32 nt, Homo Sapiens
ggaaauuaagaguauuagagaaauaaaugcua

SEQ ID NO: 225826 - RNA, 32 nt, Homo Sapiens
cuagagccugacgccggggccccugaccccug

SEQ ID NO: 225827 - RNA, 32 nt, Homo Sapiens
uguuaauauggacuuggacuaauaaccuuaaa

SEQ ID NO: 225828 - RNA, 32 nt, Homo Sapiens
agcuggaggaggagaaggaaggcccggcgacu

SEQ ID NO: 225829 - RNA, 32 nt, Homo Sapiens
ccuuccccgccagcgcgugcccuuccacuccg

SEQ ID NO: 225830 - RNA, 32 nt, Homo Sapiens
uagauaauuuuuucgauuaggagaggaagaaa

SEQ ID NO: 225831 - RNA, 32 nt, Homo Sapiens
ccaggcaccaggcugccucugcucuuggaaaa

SEQ ID NO: 225832 - RNA, 32 nt, Homo Sapiens
aacugaccacgcgccagucaggcucuccaggg

SEQ ID NO: 225833 - RNA, 32 nt, Homo Sapiens
ggucaccaaacagcacccugugcgaccuagcc

SEQ ID NO: 225834 - RNA, 32 nt, Homo Sapiens
cccucauucccucucucuucuugcaguccacu

SEQ ID NO: 225835 - RNA, 32 nt, Homo Sapiens
ccauccugccccuucuucuacuccacggaggc

SEQ ID NO: 225836 - RNA, 32 nt, Homo Sapiens
aggcucacaccuguaaucccaguacuuugaga

SEQ ID NO: 225837 - RNA, 32 nt, Homo Sapiens
gaggucucgggccccaggacccccggggcccg

SEQ ID NO: 225838 - RNA, 32 nt, Homo Sapiens
ucuuuccccucuauuucuuuguaugacuguca

SEQ ID NO: 225839 - RNA, 32 nt, Homo Sapiens
auggauucaaagcuaggauuucagggcccagc

SEQ ID NO: 225840 - RNA, 32 nt, Homo Sapiens
ucacuucccaguaggggcggccaggcagaggc

SEQ ID NO: 225841 - RNA, 32 nt, Homo Sapiens
uuugcggagacgguauugcuauguugccaagg

SEQ ID NO: 225842 - RNA, 32 nt, Homo Sapiens
auuugcaauuuaaaaugaagggguuaaauaag

SEQ ID NO: 225843 - RNA, 32 nt, Homo Sapiens
aggaacacagcagaagcagaauaaugacacua

SEQ ID NO: 225844 - RNA, 30 nt, Homo Sapiens
uggcggggcaggcgaggcggucgcuucgag

SEQ ID NO: 225845 - RNA, 32 nt, Homo Sapiens
ccacuuuaaagcuauucuuaugcuguaacagu

SEQ ID NO: 225846 - RNA, 32 nt, Homo Sapiens
ggcaucagcucuuccuccaaaauuugucuuuc

SEQ ID NO: 225847 - RNA, 32 nt, Homo Sapiens
aaccagagaaaagaacgccgggggauuuggcu

SEQ ID NO: 225848 - RNA, 32 nt, Homo Sapiens
uguggaaggggcugaggccuaauugagguugg

SEQ ID NO: 225849 - RNA, 32 nt, Homo Sapiens
ugguccccuggccgugagccggcuucugaaug

SEQ ID NO: 225850 - RNA, 32 nt, Homo Sapiens
acaguucccaucuuuuuuuuuaaauuuuuucu

SEQ ID NO: 225851 - RNA, 32 nt, Homo Sapiens
ggcuuuguuuuccucccucguuugcuuccacc

SEQ ID NO: 225852 - RNA, 32 nt, Homo Sapiens
cccuggggacaaagcagcgucuggcucgagug

SEQ ID NO: 225853 - RNA, 32 nt, Homo Sapiens
gagauacggggaugccuugaaaaaaugucaug

SEQ ID NO: 225854 - RNA, 32 nt, Homo Sapiens
caagggacuaguguuuagaauaucuaaagaac

SEQ ID NO: 225855 - RNA, 32 nt, Homo Sapiens
gauccggccccggaaacccgacccacagacgc

SEQ ID NO: 225856 - RNA, 32 nt, Homo Sapiens
cagcacugcccccguggcagcccacuuggacc

SEQ ID NO: 225857 - RNA, 31 nt, Homo Sapiens
ggcagccaguaccuccugccccaugcugccc

SEQ ID NO: 225858 - RNA, 32 nt, Homo Sapiens
aaacauaaauauauuuucaaaagcauuugauu

SEQ ID NO: 225859 - RNA, 32 nt, Homo Sapiens
guuuaaauuguaggacaauauuuuaaauuuua

SEQ ID NO: 225860 - RNA, 32 nt, Homo Sapiens
gccauugcacuccagccugggcgacagagcag

SEQ ID NO: 225861 - RNA, 32 nt, Homo Sapiens
ugucuuuaguuuacucagcaucagcuacuaac

SEQ ID NO: 225862 - RNA, 32 nt, Homo Sapiens
agggcggcgggccugcagcccgaggaaggcuu

SEQ ID NO: 225863 - RNA, 32 nt, Homo Sapiens
uaugugcucauucuucaacaaacuuacuuuug

SEQ ID NO: 225864 - RNA, 32 nt, Homo Sapiens
uagaaucuauuuacaaaaaugguucacguaua

SEQ ID NO: 225865 - RNA, 32 nt, Homo Sapiens
uuuauuuuauacaacuaaaucugauuuuaauu

SEQ ID NO: 225866 - RNA, 32 nt, Homo Sapiens
aucuucugcauaaauuaccuacuuaaucaaga

SEQ ID NO: 225867 - RNA, 32 nt, Homo Sapiens
uacugaaaaugaauaaugguguaaugguucuc

SEQ ID NO: 225868 - RNA, 32 nt, Homo Sapiens
gcugugguucuguauuuuuuuauuuuuugacc

SEQ ID NO: 225869 - RNA, 32 nt, Homo Sapiens
ggaaccugcccccucuccuuucccaccaggcg

SEQ ID NO: 225870 - RNA, 32 nt, Homo Sapiens
uugagcugucucuuuucauguauuaccuuucu

SEQ ID NO: 225871 - RNA, 32 nt, Homo Sapiens
ggcacaaggggaggacauuguggcauucagaa

SEQ ID NO: 225872 - RNA, 32 nt, Homo Sapiens
gaggggcuguguuugaggggaccuccacccug

SEQ ID NO: 225873 - RNA, 32 nt, Homo Sapiens
uuacaguaaaaauuaaaaaaugaaaaagacua

SEQ ID NO: 225874 - RNA, 32 nt, Homo Sapiens
gaaaauuguaacagagcagcugcuuccaccuu

SEQ ID NO: 225875 - RNA, 32 nt, Homo Sapiens
gcacagcuccaggcuguggaaaacagaguugu

SEQ ID NO: 225876 - RNA, 32 nt, Homo Sapiens
ccucccugccccagcacccuucccauugcccu

SEQ ID NO: 225877 - RNA, 32 nt, Homo Sapiens
gacaggucguuguuggugcuuccguguggaug

SEQ ID NO: 225878 - RNA, 32 nt, Homo Sapiens
cugacccaacugggggcaaagguuugaagaca

SEQ ID NO: 225879 - RNA, 32 nt, Homo Sapiens
augaaacccuguacacaccugguucauaaucc

SEQ ID NO: 225880 - RNA, 32 nt, Homo Sapiens
cuuuauccuccucccagauaccucucacccuc

SEQ ID NO: 225881 - RNA, 32 nt, Homo Sapiens
cugcuaaugggaaaaauugacuaagucuuuaa

SEQ ID NO: 225882 - RNA, 32 nt, Homo Sapiens
aagacuuacuuccuaaugaugaacuaauuaaa

SEQ ID NO: 225883 - RNA, 32 nt, Homo Sapiens
acuuuuaucuauucuuuuuauucauuguuuca

SEQ ID NO: 225884 - RNA, 30 nt, Homo Sapiens
ccucucucugcccgcguccguccgugaaau

SEQ ID NO: 225885 - RNA, 32 nt, Homo Sapiens
aaacugggcauagcugcagagccacaggccgu

SEQ ID NO: 225886 - RNA, 32 nt, Homo Sapiens
agagcacguccagccgccucuggcucaaguuc

SEQ ID NO: 225887 - RNA, 32 nt, Homo Sapiens
acugaaggcgcccucgccccagcgccccucug

SEQ ID NO: 225888 - RNA, 32 nt, Homo Sapiens
gucuuuguuuaaaauuacuugguuugugaauc

SEQ ID NO: 225889 - RNA, 32 nt, Homo Sapiens
ccaggccguuugcuuuuucagguuguuuuguu

SEQ ID NO: 225890 - RNA, 32 nt, Homo Sapiens
gcccugcagcugcugagacaagaggcgaaggg

SEQ ID NO: 225891 - RNA, 32 nt, Homo Sapiens
uuguucugacaguugugugguaacaagcuaau

SEQ ID NO: 225892 - RNA, 32 nt, Homo Sapiens
agaagccagacccaauaagcuaccaaaguagg

SEQ ID NO: 225893 - RNA, 32 nt, Homo Sapiens
ucaccuucaucuagccuggccgcggccuuucg

SEQ ID NO: 225894 - RNA, 32 nt, Homo Sapiens
cugaguccucuuugucauaccuuuggauuuag

SEQ ID NO: 225895 - RNA, 32 nt, Homo Sapiens
aauucaguuucccccaaggaucucuucuuuga

SEQ ID NO: 225896 - RNA, 28 nt, Homo Sapiens
ugaagggggcggccuaugacuugggcac

SEQ ID NO: 225897 - RNA, 32 nt, Homo Sapiens
gguaaaaaauaaaaaauucuaugcuauauugu

SEQ ID NO: 225898 - RNA, 30 nt, Homo Sapiens
ccgacaggcaggccaggguccccggagaag

SEQ ID NO: 225899 - RNA, 32 nt, Homo Sapiens
ccugccauuuuuguguggagauauucauaauu

SEQ ID NO: 225900 - RNA, 32 nt, Homo Sapiens
gaacuagccugccacucagggauucgaguccc

SEQ ID NO: 225901 - RNA, 32 nt, Homo Sapiens
gcagucggucgcugcgccccggcgggccacuu

SEQ ID NO: 225902 - RNA, 32 nt, Homo Sapiens
caccgugugggccgugcuguguccuuauguca

SEQ ID NO: 225903 - RNA, 32 nt, Homo Sapiens
uuugcuagaaaagaccaagaaagagccaucag

SEQ ID NO: 225904 - RNA, 32 nt, Homo Sapiens
cggagacauguugcaaaaaccgaggaaccggg

SEQ ID NO: 225905 - RNA, 32 nt, Homo Sapiens
acaggccccuccccaugcaccagucccuccug

SEQ ID NO: 225906 - RNA, 32 nt, Homo Sapiens
aacuguacgcagugacgugcacuggccugggg

SEQ ID NO: 225907 - RNA, 32 nt, Homo Sapiens
ugugaggaauuaauggacuuugaaauugcuga

SEQ ID NO: 225908 - RNA, 32 nt, Homo Sapiens
gcccacaucucuucaaaccgucuugcagcccc

SEQ ID NO: 225909 - RNA, 32 nt, Homo Sapiens
aaggcugcuucuuucacuuguuuuuaaauugc

SEQ ID NO: 225910 - RNA, 32 nt, Homo Sapiens
gccacuccaagcccccuggcagcugccccucc

SEQ ID NO: 225911 - RNA, 32 nt, Homo Sapiens
auuguccgugggagggcuccagugucugggaa

SEQ ID NO: 225912 - RNA, 32 nt, Homo Sapiens
aucuccccaucccuacucccagccccuucucc

SEQ ID NO: 225913 - RNA, 32 nt, Homo Sapiens
cccuuaucuuccuacucugccccucccccuaa

SEQ ID NO: 225914 - RNA, 32 nt, Homo Sapiens
uaaagaugacaaaaacuaaauaugcuucucaa

SEQ ID NO: 225915 - RNA, 27 nt, Homo Sapiens
uguuuucauuaauuuuacugguggacc

SEQ ID NO: 225916 - RNA, 32 nt, Homo Sapiens
uguacuuuuaaaacguauagggucaggguugg

SEQ ID NO: 225917 - RNA, 32 nt, Homo Sapiens
gugaaaauaaacgauuggcucuuaucaaucac

SEQ ID NO: 225918 - RNA, 32 nt, Homo Sapiens
cuaacuuaacauugcaucaugaaacucuuugg

SEQ ID NO: 225919 - RNA, 32 nt, Homo Sapiens
uucucccccuuucucuccagccugacuugggg

SEQ ID NO: 225920 - RNA, 27 nt, Homo Sapiens
ccaugccgccccgaugggaacuggcac

SEQ ID NO: 225921 - RNA, 32 nt, Homo Sapiens
ggggcgcccucccgcgcccucuugcacccucg

SEQ ID NO: 225922 - RNA, 32 nt, Homo Sapiens
gccucgggcuccuggggugcagggugcuuggg

SEQ ID NO: 225923 - RNA, 32 nt, Homo Sapiens
cuuccugcguuaauucaucugguaagauucuc

SEQ ID NO: 225924 - RNA, 32 nt, Homo Sapiens
cuccccugggcgauggcgggcugggggcugcc

SEQ ID NO: 225925 - RNA, 32 nt, Homo Sapiens
uauaacuugcugacaaagauguguggcauauu

SEQ ID NO: 225926 - RNA, 32 nt, Homo Sapiens
uucugccuccaucccacccaucagggcugcag

SEQ ID NO: 225927 - RNA, 32 nt, Homo Sapiens
cgcccaccagcaggaccugucgaccugaggug

SEQ ID NO: 225928 - RNA, 32 nt, Homo Sapiens
auccagcgccgccgcucauaacacccgcgacc

SEQ ID NO: 225929 - RNA, 32 nt, Homo Sapiens
uguuguauauauacaccauggaauacuacuca

SEQ ID NO: 225930 - RNA, 32 nt, Homo Sapiens
uguucucaggccccggccuuucucaccgugcg

SEQ ID NO: 225931 - RNA, 32 nt, Homo Sapiens
ugcaaaggaaauguucauguucucccuggcau

SEQ ID NO: 225932 - RNA, 32 nt, Homo Sapiens
ucauauuguauauaaauaaugaaaugcauuaa

SEQ ID NO: 225933 - RNA, 32 nt, Homo Sapiens
gccgggucacguggccggcggccccccaugac

SEQ ID NO: 225934 - RNA, 32 nt, Homo Sapiens
gaggaacuguuguuucggccucagugagguug

SEQ ID NO: 225935 - RNA, 30 nt, Homo Sapiens
cccaggggguugaauaugcaaaagcaguuc

SEQ ID NO: 225936 - RNA, 32 nt, Homo Sapiens
ggaucacauugugugaguuggccacgggcuga

SEQ ID NO: 225937 - RNA, 32 nt, Homo Sapiens
ucccagcccccugaccacucagagacaugcag

SEQ ID NO: 225938 - RNA, 31 nt, Homo Sapiens
cggggguuggagcgcugcccccgcgcacagu

SEQ ID NO: 225939 - RNA, 32 nt, Homo Sapiens
gcccaucagucuuuuuccuaaugcuaaacauu

SEQ ID NO: 225940 - RNA, 32 nt, Homo Sapiens
guucgccaugcgucccggggcgccagggccac

SEQ ID NO: 225941 - RNA, 32 nt, Homo Sapiens
agcguggggcgcgggcccgcggcgggagcugu

SEQ ID NO: 225942 - RNA, 32 nt, Homo Sapiens
ccaaagcuuucacagaauauuuucucauaaua

SEQ ID NO: 225943 - RNA, 32 nt, Homo Sapiens
ucagcguccggccgaggcgcgguguaugcuga

SEQ ID NO: 225944 - RNA, 32 nt, Homo Sapiens
gaguaccuacuauaauacaguagcuaacaugu

SEQ ID NO: 225945 - RNA, 32 nt, Homo Sapiens
gaaagaaaaauauuaaaaaagcuaauauuuga

SEQ ID NO: 225946 - RNA, 32 nt, Homo Sapiens
gagggggaagcaggggcgcagcugcugggcgu

SEQ ID NO: 225947 - RNA, 32 nt, Homo Sapiens
uuguucaccguaaacuguaauacaauccuguu

SEQ ID NO: 225948 - RNA, 32 nt, Homo Sapiens
uuuaguucuagcuuaguugacucucagaauuu

SEQ ID NO: 225949 - RNA, 32 nt, Homo Sapiens
uauuaugaugucagcagaccccaggcauaaaa

SEQ ID NO: 225950 - RNA, 32 nt, Homo Sapiens
gggcugggcuccugggguugucccgggggcuc

SEQ ID NO: 225951 - RNA, 32 nt, Homo Sapiens
augacaccugccgcugccccucggggcuggaa

SEQ ID NO: 225952 - RNA, 32 nt, Homo Sapiens
ugggaggacuuauuugagaaauacuaccuuac

SEQ ID NO: 225953 - RNA, 32 nt, Homo Sapiens
cugggagaggggcuucggugcgcggggggaau

SEQ ID NO: 225954 - RNA, 32 nt, Homo Sapiens
aauaucugucuccucucaauuccccaccacac

SEQ ID NO: 225955 - RNA, 32 nt, Homo Sapiens
cagccucuguccccucccucacuuccuugggc

SEQ ID NO: 225956 - RNA, 32 nt, Homo Sapiens
auuugagauauaaaucaaauuuuacacguaag

SEQ ID NO: 225957 - RNA, 32 nt, Homo Sapiens
uuuuuggcauuuacuucuuuuacagcugaugu

SEQ ID NO: 225958 - RNA, 32 nt, Homo Sapiens
ccccucuccguugugcccuggaccucgggcac

SEQ ID NO: 225959 - RNA, 32 nt, Homo Sapiens
cucaggcgacggcagcugggugagauucagcu

SEQ ID NO: 225960 - RNA, 32 nt, Homo Sapiens
agggcuggguugggcuggccuuugccaccucc

SEQ ID NO: 225961 - RNA, 32 nt, Homo Sapiens
uuguuuguuuguuucuggcggugucuaaagau

SEQ ID NO: 225962 - RNA, 32 nt, Homo Sapiens
gugaggaagaggaaaagcccucuugucagccu

SEQ ID NO: 225963 - RNA, 32 nt, Homo Sapiens
cagccccacagccccaggcuccugucaccugg

SEQ ID NO: 225964 - RNA, 32 nt, Homo Sapiens
uuuagggcugugcaggaugugccuuguuaaca

SEQ ID NO: 225965 - RNA, 32 nt, Homo Sapiens
ucuagggcugugcaggacgugccuuguuaaca

SEQ ID NO: 225966 - RNA, 32 nt, Homo Sapiens
acuaagacugggcauguuuugcuggugugguc

SEQ ID NO: 225967 - RNA, 31 nt, Homo Sapiens
gcgggaccacgcagccaccugugagccuucg

SEQ ID NO: 225968 - RNA, 32 nt, Homo Sapiens
uuaaauaugugaaugguggaaauggugacuag

SEQ ID NO: 225969 - RNA, 32 nt, Homo Sapiens
auuaggaucuaaaauaauuugcugucaauugu

SEQ ID NO: 225970 - RNA, 32 nt, Homo Sapiens
uguccugggcagcuucuguuucccucugcugc

SEQ ID NO: 225971 - RNA, 32 nt, Homo Sapiens
cuugcugggggccccucagcgucuuucugugc

SEQ ID NO: 225972 - RNA, 32 nt, Homo Sapiens
gucuccaacuguuggaucugcuccaccuucca

SEQ ID NO: 225973 - RNA, 32 nt, Homo Sapiens
cuaucuuccuuuuuuucuucuucagccuccau

SEQ ID NO: 225974 - RNA, 32 nt, Homo Sapiens
auugggcagacaccagggcaaccugcccuccg

SEQ ID NO: 225975 - RNA, 32 nt, Homo Sapiens
agcaauuuuuauuuuuauuuuugaacuuuagg

SEQ ID NO: 225976 - RNA, 32 nt, Homo Sapiens
gguacaaugguuacuuuccaucaaaaauacgg

SEQ ID NO: 225977 - RNA, 32 nt, Homo Sapiens
uuuaccuuuccauuuuaauaaugguuaaaaua

SEQ ID NO: 225978 - RNA, 32 nt, Homo Sapiens
cagggaggguaaaaccucagacuuuaugugau

SEQ ID NO: 225979 - RNA, 32 nt, Homo Sapiens
gcauuagaauguguuaggucauuugaauuaau

SEQ ID NO: 225980 - RNA, 32 nt, Homo Sapiens
uacugcaugauggagcagcgggccccugggac

SEQ ID NO: 225981 - RNA, 32 nt, Homo Sapiens
gacacuggacuuuuuacccauuuucuuuaauc

SEQ ID NO: 225982 - RNA, 32 nt, Homo Sapiens
gcagaugaaaaacaacuaagccuuuuugaggu

SEQ ID NO: 225983 - RNA, 32 nt, Homo Sapiens
ucaggcauuaaccaccucuguccacgugcacc

SEQ ID NO: 225984 - RNA, 32 nt, Homo Sapiens
ugaggaagggcugagugaaaaugccacucucc

SEQ ID NO: 225985 - RNA, 32 nt, Homo Sapiens
guacuuuuugauucuaaaauaguugucuagga

SEQ ID NO: 225986 - RNA, 31 nt, Homo Sapiens
cagagcccacccucccaagcucaggggcauc

SEQ ID NO: 225987 - RNA, 32 nt, Homo Sapiens
caauagcaaaaauuaauaaauacaugaauaac

SEQ ID NO: 225988 - RNA, 32 nt, Homo Sapiens
cuccggggucuguaagaggccgcaggggccua

SEQ ID NO: 225989 - RNA, 32 nt, Homo Sapiens
cagcccuccaugauccuccccucccugagaug

SEQ ID NO: 225990 - RNA, 32 nt, Homo Sapiens
uuaaagcacgugucugucugucguuuuuuacu

SEQ ID NO: 225991 - RNA, 32 nt, Homo Sapiens
ucagcuuuggccugcuggccucgguguggggc

SEQ ID NO: 225992 - RNA, 32 nt, Homo Sapiens
acuaaauuacucaucgucaaaauaaugucaaa

SEQ ID NO: 225993 - RNA, 32 nt, Homo Sapiens
guccuccuaccgcaggaguaucuugcagucca

SEQ ID NO: 225994 - RNA, 32 nt, Homo Sapiens
agcuuugcuuuucuccuccuccccuucccagu

SEQ ID NO: 225995 - RNA, 32 nt, Homo Sapiens
uugguuaaauguugauacgaagcaauguuuug

SEQ ID NO: 225996 - RNA, 32 nt, Homo Sapiens
ccaaaagccaaggggaauuuugcagugauagg

SEQ ID NO: 225997 - RNA, 27 nt, Homo Sapiens
ggauguacuuuuuucagaaaagguggc

SEQ ID NO: 225998 - RNA, 32 nt, Homo Sapiens
gcgcggagcugcucgcgccccgcccagucgcc

SEQ ID NO: 225999 - RNA, 32 nt, Homo Sapiens
gcucagcagcagaggcuccucguuaagacugg

SEQ ID NO: 226000 - RNA, 32 nt, Homo Sapiens
ugucacucugugcaagacccacccccaucuca

SEQ ID NO: 226001 - RNA, 32 nt, Homo Sapiens
uaaaggaauguugguuuacauugucuucaaag

SEQ ID NO: 226002 - RNA, 32 nt, Homo Sapiens
caucagggaaagggcauggcugugucuuuugc

SEQ ID NO: 226003 - RNA, 32 nt, Homo Sapiens
ugugcuaauaaguuugaaauauauuauuuccu

SEQ ID NO: 226004 - RNA, 32 nt, Homo Sapiens
uaggcucgggacagcuggucuuuccggccauc

SEQ ID NO: 226005 - RNA, 32 nt, Homo Sapiens
cuagaugucuaauucaggauacugucuauaga

SEQ ID NO: 226006 - RNA, 32 nt, Homo Sapiens
uaguuuagaaacaaaacuugguccucucuccu

SEQ ID NO: 226007 - RNA, 32 nt, Homo Sapiens
gucuucucgcuccgcacccccgcggccgcgcu

SEQ ID NO: 226008 - RNA, 32 nt, Homo Sapiens
auaaaugucugcauuacuuuuccaucugucau

SEQ ID NO: 226009 - RNA, 32 nt, Homo Sapiens
gcuggggccggggcgcggaugcuggaaguuca

SEQ ID NO: 226010 - RNA, 32 nt, Homo Sapiens
ggacacuuuguacaggcuguuuugcaccugau

SEQ ID NO: 226011 - RNA, 30 nt, Homo Sapiens
cagccagcaaggugcccccaucuuagagug

SEQ ID NO: 226012 - RNA, 32 nt, Homo Sapiens
agacagaggagaaaugaaugcauaaaauaacu

SEQ ID NO: 226013 - RNA, 32 nt, Homo Sapiens
gagaggcugccggcacgaugcccgccucccuc

SEQ ID NO: 226014 - RNA, 32 nt, Homo Sapiens
gcacaaucaaggagcuggaacacacucuccag

SEQ ID NO: 226015 - RNA, 32 nt, Homo Sapiens
ucugguaucagaaagcacuggaauuucucuuu

SEQ ID NO: 226016 - RNA, 32 nt, Homo Sapiens
guauuuaaauucaacacaauucuagauagcug

SEQ ID NO: 226017 - RNA, 32 nt, Homo Sapiens
ggucucaaacuccugaccucguaauccaccug

SEQ ID NO: 226018 - RNA, 32 nt, Homo Sapiens
gaaucaagaacaaaauuauagugggauaauuu

SEQ ID NO: 226019 - RNA, 32 nt, Homo Sapiens
ccacuuccaaccugguauggcuccuucugcga

SEQ ID NO: 226020 - RNA, 32 nt, Homo Sapiens
ggcaggaagugcgcuuggagaagaugacaccc

SEQ ID NO: 226021 - RNA, 32 nt, Homo Sapiens
uguccuggcagggcuuucaacugcacauguuu

SEQ ID NO: 226022 - RNA, 32 nt, Homo Sapiens
gcuuaguuucagagaccuuaauuuauauucuc

SEQ ID NO: 226023 - RNA, 32 nt, Homo Sapiens
ugaagcagucuuagauauuucuuaacccagac

SEQ ID NO: 226024 - RNA, 32 nt, Homo Sapiens
uguaacaggaauucaugguuuuaaaugucaaa

SEQ ID NO: 226025 - RNA, 32 nt, Homo Sapiens
gcuucugcggggcugagacgccggcuuccucc

SEQ ID NO: 226026 - RNA, 32 nt, Homo Sapiens
cagagcuggaggaggaggagggcaaacccgag

SEQ ID NO: 226027 - RNA, 28 nt, Homo Sapiens
ggugguaaagauuaaauuugguugcauc

SEQ ID NO: 226028 - RNA, 32 nt, Homo Sapiens
ggaggaaugcuggaagaacauaaagagcaguu

SEQ ID NO: 226029 - RNA, 32 nt, Homo Sapiens
cacaucccgggcccggcggccggcgagcaugg

SEQ ID NO: 226030 - RNA, 32 nt, Homo Sapiens
auauucuguuuccauagcaccauuccucaaga

SEQ ID NO: 226031 - RNA, 32 nt, Homo Sapiens
auguuucuggggcgcguggugugugucaggcg

SEQ ID NO: 226032 - RNA, 31 nt, Homo Sapiens
uauuguaagaauacaguauaaauacacauac

SEQ ID NO: 226033 - RNA, 32 nt, Homo Sapiens
gauuaagaagcuggacucuacugccauuaaag

SEQ ID NO: 226034 - RNA, 32 nt, Homo Sapiens
uucuuaaaugucauugaguugcuuugauucua

SEQ ID NO: 226035 - RNA, 32 nt, Homo Sapiens
aaccuuuccuuccugcuuucuuuccagcaggc

SEQ ID NO: 226036 - RNA, 32 nt, Homo Sapiens
cuugcaggucgcuccuuucccagccguggaua

SEQ ID NO: 226037 - RNA, 32 nt, Homo Sapiens
uuuuaagguauuuuaccucaaaaaugaaucau

SEQ ID NO: 226038 - RNA, 32 nt, Homo Sapiens
gaggguguuaugagagucacugucugaaaccc

SEQ ID NO: 226039 - RNA, 32 nt, Homo Sapiens
gugaaugguuguguugaacacgcuaagaacaa

SEQ ID NO: 226040 - RNA, 32 nt, Homo Sapiens
ucccagucgcgccguccucgccgccccaugga

SEQ ID NO: 226041 - RNA, 32 nt, Homo Sapiens
cccauaucuuacucugcuuccaucucucuccc

SEQ ID NO: 226042 - RNA, 32 nt, Homo Sapiens
cucaacagacugccucugucaccgggucccuc

SEQ ID NO: 226043 - RNA, 32 nt, Homo Sapiens
ucggcggcgucucccaccugcacacucaguca

SEQ ID NO: 226044 - RNA, 32 nt, Homo Sapiens
cuaaaaugauauaggguuuauuuuauauuuuc

SEQ ID NO: 226045 - RNA, 32 nt, Homo Sapiens
guuagagugggaagucugagggaacuggagaa

SEQ ID NO: 226046 - RNA, 32 nt, Homo Sapiens
cgcuuacccagcuggagaccaugccucuggca

SEQ ID NO: 226047 - RNA, 32 nt, Homo Sapiens
aguauuuuaaucuuguucuuguucaguauuuu

SEQ ID NO: 226048 - RNA, 32 nt, Homo Sapiens
guauuauguuuugagcuacuguaguuuuggcg

SEQ ID NO: 226049 - RNA, 32 nt, Homo Sapiens
gggccccugagcuccgccccaacagccaacag

SEQ ID NO: 226050 - RNA, 32 nt, Homo Sapiens
caguggccaaaggaaagcuuucugggcuuugg

SEQ ID NO: 226051 - RNA, 32 nt, Homo Sapiens
auucagcaaccucguaccucagcaugccauug

SEQ ID NO: 226052 - RNA, 32 nt, Homo Sapiens
cccccgccgcccgcgccgcaguccgcauccac

SEQ ID NO: 226053 - RNA, 32 nt, Homo Sapiens
gucuguuucguggugggaaauauccuauguuu

SEQ ID NO: 226054 - RNA, 32 nt, Homo Sapiens
ucccagcccucccuggucaccgccuucgccau

SEQ ID NO: 226055 - RNA, 32 nt, Homo Sapiens
caguggagcucuuuucacccggugcuucuacg

SEQ ID NO: 226056 - RNA, 32 nt, Homo Sapiens
cugguaccaguguaaagaaucuauuucuguaa

SEQ ID NO: 226057 - RNA, 32 nt, Homo Sapiens
auagugaccgcaguuugcugcagaggcuguga

SEQ ID NO: 226058 - RNA, 32 nt, Homo Sapiens
gacuuccccgagacgcgccgcggucggcacgg

SEQ ID NO: 226059 - RNA, 32 nt, Homo Sapiens
cacauuaucuccauuucaaacauauuauuugu

SEQ ID NO: 226060 - RNA, 32 nt, Homo Sapiens
gacuuugcuucucuccuuuuccugauugcuuu

SEQ ID NO: 226061 - RNA, 32 nt, Homo Sapiens
cugcugcagagguuauaccuuaugauacuuuu

SEQ ID NO: 226062 - RNA, 32 nt, Homo Sapiens
guuccuuuccgauggaggaaggcagaccugcc

SEQ ID NO: 226063 - RNA, 32 nt, Homo Sapiens
cgagcuuggggaccgcccggcgccugaccgcc

SEQ ID NO: 226064 - RNA, 32 nt, Homo Sapiens
cucaggugaacuuuuuucaguuauaaaacauc

SEQ ID NO: 226065 - RNA, 32 nt, Homo Sapiens
gagggacccagcucuguuucugcugcuuccau

SEQ ID NO: 226066 - RNA, 32 nt, Homo Sapiens
gggacaggcccuuccccuccucaugucuccuu

SEQ ID NO: 226067 - RNA, 32 nt, Homo Sapiens
ggacagcggaaucgugccacgcuucgaaagga

SEQ ID NO: 226068 - RNA, 32 nt, Homo Sapiens
cccaagugacaagggacaacugacgccgucuc

SEQ ID NO: 226069 - RNA, 32 nt, Homo Sapiens
aaauguagaggggccaauaaacaugaaaaaau

SEQ ID NO: 226070 - RNA, 32 nt, Homo Sapiens
gauacuacaaauaauuuucuuaaaagucuaag

SEQ ID NO: 226071 - RNA, 32 nt, Homo Sapiens
cagcagcagcagcagcagcagcaacaacagcu

SEQ ID NO: 226072 - RNA, 32 nt, Homo Sapiens
ggaguccucaacuacugguguucuucagggaa

SEQ ID NO: 226073 - RNA, 32 nt, Homo Sapiens
augaacauaggagugcagauacugcuuugaca

SEQ ID NO: 226074 - RNA, 32 nt, Homo Sapiens
uuguuugcuucuuuuccagaguguggaaaguc

SEQ ID NO: 226075 - RNA, 32 nt, Homo Sapiens
aacugcccuuuaaauuuuaagugacacuacag

SEQ ID NO: 226076 - RNA, 32 nt, Homo Sapiens
uuguuugaaaacaguuauuuggugacuagaaa

SEQ ID NO: 226077 - RNA, 32 nt, Homo Sapiens
aaauaaauuuuuucuuuuggauuucuuaacca

SEQ ID NO: 226078 - RNA, 32 nt, Homo Sapiens
uuuuuucauagugaaauuguguuucaggcuua

SEQ ID NO: 226079 - RNA, 31 nt, Homo Sapiens
gcuguguuucacugccuccugcccacagacc

SEQ ID NO: 226080 - RNA, 32 nt, Homo Sapiens
gcacagccucugcuccuccuggagccggucgg

SEQ ID NO: 226081 - RNA, 32 nt, Homo Sapiens
agccuuuccuuaaauguucaagggcgccggag

SEQ ID NO: 226082 - RNA, 32 nt, Homo Sapiens
cuuuccuucuuacugugucaauuccuauuuuc

SEQ ID NO: 226083 - RNA, 32 nt, Homo Sapiens
aguuguguaauuauuucauuauauauuacagu

SEQ ID NO: 226084 - RNA, 32 nt, Homo Sapiens
uugggaagauuuuuuucuugcuuuuggauuug

SEQ ID NO: 226085 - RNA, 32 nt, Homo Sapiens
aucugccuugaggaaggagcccugcccugccu

SEQ ID NO: 226086 - RNA, 32 nt, Homo Sapiens
gcacguguucacuuugaaaacacgucauuucc

SEQ ID NO: 226087 - RNA, 32 nt, Homo Sapiens
agucuguucuuguucauagugagaauccugug

SEQ ID NO: 226088 - RNA, 29 nt, Homo Sapiens
caggaugccaucaacuaacagagcaggca

SEQ ID NO: 226089 - RNA, 32 nt, Homo Sapiens
agcucugugggaaaaaagaaaaaccugcuccc

SEQ ID NO: 226090 - RNA, 32 nt, Homo Sapiens
aucucccguuugcgccgcguucagcugcuccc

SEQ ID NO: 226091 - RNA, 32 nt, Homo Sapiens
cacaggaaaacacacacacacacacacacaca

SEQ ID NO: 226092 - RNA, 32 nt, Homo Sapiens
uuacaucaaaucaacacugcuccauggugaga

SEQ ID NO: 226093 - RNA, 32 nt, Homo Sapiens
ccaaaagacaaaggggcaucggcaugucagcg

SEQ ID NO: 226094 - RNA, 32 nt, Homo Sapiens
cugagagcgggcaaagagggaaggagacuggg

SEQ ID NO: 226095 - RNA, 32 nt, Homo Sapiens
ggucgcggcgccccgcgcuuccgcugcagcgc

SEQ ID NO: 226096 - RNA, 32 nt, Homo Sapiens
gugugcguggggccagcgucgccgggcugccc

SEQ ID NO: 226097 - RNA, 32 nt, Homo Sapiens
ugcccugcagacccugcaccccgggacgcggc

SEQ ID NO: 226098 - RNA, 32 nt, Homo Sapiens
ccugaacauuccuuuccauggaucucaggucu

SEQ ID NO: 226099 - RNA, 32 nt, Homo Sapiens
gagcuggcacaccagcagcaugggcggcugcc

SEQ ID NO: 226100 - RNA, 30 nt, Homo Sapiens
ccgaacugaggcggcggcgggagcccgguu

SEQ ID NO: 226101 - RNA, 32 nt, Homo Sapiens
ggagcucucuaaugaagggauaccaaagucuu

SEQ ID NO: 226102 - RNA, 32 nt, Homo Sapiens
uccuuaucauauccuuuauuaauucagccagu

SEQ ID NO: 226103 - RNA, 32 nt, Homo Sapiens
auacuuuggccauagccuacugcaguaaucca

SEQ ID NO: 226104 - RNA, 32 nt, Homo Sapiens
acaauaauuacauuggcacaauguauacuuca

SEQ ID NO: 226105 - RNA, 32 nt, Homo Sapiens
gaagguggaaaaggcuauggaaaaagccagcu

SEQ ID NO: 226106 - RNA, 32 nt, Homo Sapiens
ccggccccuccaugucagcaguguuuggucgu

SEQ ID NO: 226107 - RNA, 32 nt, Homo Sapiens
agaacauuuuuugaaauucaguuuacagaaau

SEQ ID NO: 226108 - RNA, 32 nt, Homo Sapiens
agguguucugucugcccugucuccugucuucc

SEQ ID NO: 226109 - RNA, 32 nt, Homo Sapiens
cugcuccucuagagacacgaggcaucccuuuu

SEQ ID NO: 226110 - RNA, 32 nt, Homo Sapiens
uccucucaccucagccucccaaguagcuggga

SEQ ID NO: 226111 - RNA, 32 nt, Homo Sapiens
ccccgcuuuguugcagagaaauuauuuucuac

SEQ ID NO: 226112 - RNA, 31 nt, Homo Sapiens
gggcaccgagccaccaggagguuguugaucu

SEQ ID NO: 226113 - RNA, 32 nt, Homo Sapiens
caugggaauguuuaguucacuacauuucaaug

SEQ ID NO: 226114 - RNA, 32 nt, Homo Sapiens
cugcuauuacuauauuuacuugcauaugucag

SEQ ID NO: 226115 - RNA, 32 nt, Homo Sapiens
aacaacaguuaaaacuuugauucucaaaugca

SEQ ID NO: 226116 - RNA, 32 nt, Homo Sapiens
cuuccaaccugggucaacgaaaacggagaaga

SEQ ID NO: 226117 - RNA, 32 nt, Homo Sapiens
cacagaccucuugcugccccucagugacaagu

SEQ ID NO: 226118 - RNA, 32 nt, Homo Sapiens
cuaucaauucuuccuuucccuaugugcuccua

SEQ ID NO: 226119 - RNA, 32 nt, Homo Sapiens
cccccacccucucuccuccccaacccuucagg

SEQ ID NO: 226120 - RNA, 32 nt, Homo Sapiens
agaagcaccuugaaaucuguaaaaccacaaga

SEQ ID NO: 226121 - RNA, 32 nt, Homo Sapiens
ggggugggcgaccugggcgggucccaggcacu

SEQ ID NO: 226122 - RNA, 32 nt, Homo Sapiens
ggcucuccccagggggccccaggcucgccuga

SEQ ID NO: 226123 - RNA, 32 nt, Homo Sapiens
cccgcccuccacgcgccgaaggccucaauaaa

SEQ ID NO: 226124 - RNA, 32 nt, Homo Sapiens
agcaaauuuccuuucuggccaagcccucugag

SEQ ID NO: 226125 - RNA, 32 nt, Homo Sapiens
uuuuauucauuaaaacaaaaucaaccugaaaa

SEQ ID NO: 226126 - RNA, 30 nt, Homo Sapiens
ccccggguugccggcggcgacagcggggga

SEQ ID NO: 226127 - RNA, 32 nt, Homo Sapiens
uucuuaguuuuuagguggcccccgcuggcuaa

SEQ ID NO: 226128 - RNA, 32 nt, Homo Sapiens
ccacagaaaaauacaaagggaaacuucugcuu

SEQ ID NO: 226129 - RNA, 32 nt, Homo Sapiens
gaauuuaauuuaauguuuuuucuuuguaccug

SEQ ID NO: 226130 - RNA, 32 nt, Homo Sapiens
ccguucuucguuuucuuccuccguauugauuu

SEQ ID NO: 226131 - RNA, 32 nt, Homo Sapiens
guccucuugugcuacuugugcaaauaaaccgg

SEQ ID NO: 226132 - RNA, 32 nt, Homo Sapiens
agcgaaggaaccauccuugguucucccagcuu

SEQ ID NO: 226133 - RNA, 32 nt, Homo Sapiens
gcagcccgcccgggacccgagggcaggagggu

SEQ ID NO: 226134 - RNA, 32 nt, Homo Sapiens
uggcugcaggagaggccuucccggggcccccc

SEQ ID NO: 226135 - RNA, 32 nt, Homo Sapiens
gcagguugcugcagcucugccuucuccauggg

SEQ ID NO: 226136 - RNA, 32 nt, Homo Sapiens
gggucggggaggagggaugcgguucggcggag

SEQ ID NO: 226137 - RNA, 32 nt, Homo Sapiens
uguuguuugcugucugaucuuuguagacuguu

SEQ ID NO: 226138 - RNA, 32 nt, Homo Sapiens
ucaaggacauucaaaugugaaaaugaauuuuu

SEQ ID NO: 226139 - RNA, 32 nt, Homo Sapiens
agcugccaucugcucugggaagcaccagggug

SEQ ID NO: 226140 - RNA, 32 nt, Homo Sapiens
uauucaaguauuuuuaucaugcuauugugaua

SEQ ID NO: 226141 - RNA, 32 nt, Homo Sapiens
cauauuuaagucuugugaaacuguauaggaaa

SEQ ID NO: 226142 - RNA, 32 nt, Homo Sapiens
ggaggugagcgcggcgccggcuccuccugcgg

SEQ ID NO: 226143 - RNA, 32 nt, Homo Sapiens
cugagacauucugauuuggaugaugcuagagc

SEQ ID NO: 226144 - RNA, 32 nt, Homo Sapiens
gcucucccaggacgggcugugcgugcccccag

SEQ ID NO: 226145 - RNA, 32 nt, Homo Sapiens
agccgcggaacucggcggccgccauggcgucc

SEQ ID NO: 226146 - RNA, 32 nt, Homo Sapiens
ccuccccaacaaggucuuauaaaccacagcac

SEQ ID NO: 226147 - RNA, 32 nt, Homo Sapiens
gacaagucgcggccaccugcuccggagcuggg

SEQ ID NO: 226148 - RNA, 32 nt, Homo Sapiens
ucugagaaucccgugcucuccucucuuuuggu

SEQ ID NO: 226149 - RNA, 32 nt, Homo Sapiens
aaaacccagagacuuggggucugugggccccc

SEQ ID NO: 226150 - RNA, 32 nt, Homo Sapiens
agacuguuauaaaaagaugacacacacgcuuu

SEQ ID NO: 226151 - RNA, 32 nt, Homo Sapiens
acauacucugguuuccuucccucuguaucuuu

SEQ ID NO: 226152 - RNA, 32 nt, Homo Sapiens
guugcucuguuuccugaaaauaacucggggau

SEQ ID NO: 226153 - RNA, 32 nt, Homo Sapiens
ggcacgagcucagcuggcaguuaccaccgugu

SEQ ID NO: 226154 - RNA, 32 nt, Homo Sapiens
uccaaggggaccuggugacagacgaggcugca

SEQ ID NO: 226155 - RNA, 32 nt, Homo Sapiens
ggaccugcggcgaugccacgggccugccuuuu

SEQ ID NO: 226156 - RNA, 32 nt, Homo Sapiens
agcaugccaucccagccucacccugcauuuua

SEQ ID NO: 226157 - RNA, 32 nt, Homo Sapiens
uucaggggggaaaggaggagcuggagacagau

SEQ ID NO: 226158 - RNA, 32 nt, Homo Sapiens
accuuuuacuuggcuuuucuagauagcuuuau

SEQ ID NO: 226159 - RNA, 32 nt, Homo Sapiens
uauauuucaaggacuuuuuauggucuuucuca

SEQ ID NO: 226160 - RNA, 32 nt, Homo Sapiens
uauaugcaaaucaacauauccaaacaugccaa

SEQ ID NO: 226161 - RNA, 32 nt, Homo Sapiens
caaaugucuugaaggggagauuggcaugcaga

SEQ ID NO: 226162 - RNA, 32 nt, Homo Sapiens
auauuugcauuauauuuauugguugagcaucc

SEQ ID NO: 226163 - RNA, 32 nt, Homo Sapiens
gggagccccuccccggggaguucuuggugaag

SEQ ID NO: 226164 - RNA, 32 nt, Homo Sapiens
agcagccccuccuuccugguugaggcagccag

SEQ ID NO: 226165 - RNA, 32 nt, Homo Sapiens
uaccggcgccgacgggucggaccucccugcgc

SEQ ID NO: 226166 - RNA, 32 nt, Homo Sapiens
uguccugguguacugguggggaggcugccccc

SEQ ID NO: 226167 - RNA, 32 nt, Homo Sapiens
gcaguguggaccggccgggcgcugacggaggc

SEQ ID NO: 226168 - RNA, 32 nt, Homo Sapiens
cauggaccucaucucggccagugcugaccugg

SEQ ID NO: 226169 - RNA, 32 nt, Homo Sapiens
acaaggggaaauuuaagauuguuaacccuguu

SEQ ID NO: 226170 - RNA, 32 nt, Homo Sapiens
ucaggcucuuaccuccaccuccagggcacaga

SEQ ID NO: 226171 - RNA, 32 nt, Homo Sapiens
aaauauagcuaauagaauuuucuaaauuuuac

SEQ ID NO: 226172 - RNA, 32 nt, Homo Sapiens
uuaaggauccuuugaaacuucuuaagaauuca

SEQ ID NO: 226173 - RNA, 32 nt, Homo Sapiens
auucauauacuaguaaauucaucuaguauaag

SEQ ID NO: 226174 - RNA, 29 nt, Homo Sapiens
uguuugcauaaagugucuauaauaaaacu

SEQ ID NO: 226175 - RNA, 32 nt, Homo Sapiens
cuuuugguucucuauggauacccauuagaccc

SEQ ID NO: 226176 - RNA, 32 nt, Homo Sapiens
aacauagcaaaauaaauuuuuuaacaaaggaa

SEQ ID NO: 226177 - RNA, 32 nt, Homo Sapiens
gacuggaaaaggaaaacuaaaggucagaaucc

SEQ ID NO: 226178 - RNA, 32 nt, Homo Sapiens
gagggacccagcuccaucgcgcuggaggagag

SEQ ID NO: 226179 - RNA, 32 nt, Homo Sapiens
gcaaggaagagcaguuguuuugugaaaaauaa

SEQ ID NO: 226180 - RNA, 32 nt, Homo Sapiens
auauaccuaaaggaauacaaucauucuauuau

SEQ ID NO: 226181 - RNA, 32 nt, Homo Sapiens
ccaccuguuccuguuuuucccuuuaaaauaug

SEQ ID NO: 226182 - RNA, 32 nt, Homo Sapiens
uuccagguagccuacgugguguuccagaagcc

SEQ ID NO: 226183 - RNA, 32 nt, Homo Sapiens
cuacauuugcccgcccuuccagcccuucccca

SEQ ID NO: 226184 - RNA, 32 nt, Homo Sapiens
ucuggugggaugcacagucacuccacauccac

SEQ ID NO: 226185 - RNA, 32 nt, Homo Sapiens
cgggcgggaacugcgcaggacccggccaggau

SEQ ID NO: 226186 - RNA, 32 nt, Homo Sapiens
guguccccuccacagcugggugccaggggcag

SEQ ID NO: 226187 - RNA, 32 nt, Homo Sapiens
ucuggacuccccaagaaaccaggccgacuaac

SEQ ID NO: 226188 - RNA, 32 nt, Homo Sapiens
cacuggugcaggacagcccacccuccuacagc

SEQ ID NO: 226189 - RNA, 32 nt, Homo Sapiens
ggucccagaaccaaagccaugccggggugugg

SEQ ID NO: 226190 - RNA, 32 nt, Homo Sapiens
gaaugcuuuaguguuugauuugaaauaaaagg

SEQ ID NO: 226191 - RNA, 32 nt, Homo Sapiens
ccagguuuuugggcagccacccugcccgcucu

SEQ ID NO: 226192 - RNA, 32 nt, Homo Sapiens
gccacugcuugcccccugacagaugguaugcu

SEQ ID NO: 226193 - RNA, 32 nt, Homo Sapiens
ccguaggagcgcgggggcggcuccugcucuuc

SEQ ID NO: 226194 - RNA, 32 nt, Homo Sapiens
uccccagccugagucuucuccuugcucugcgg

SEQ ID NO: 226195 - RNA, 32 nt, Homo Sapiens
cgacaagcaguaccuggcaugcaggagcacuc

SEQ ID NO: 226196 - RNA, 32 nt, Homo Sapiens
agaaaccuggaaaguacccuuggcuguguaca

SEQ ID NO: 226197 - RNA, 29 nt, Homo Sapiens
cuuugaauagugaugggcuauaaaagacg

SEQ ID NO: 226198 - RNA, 32 nt, Homo Sapiens
cuugauaaucauauuauaauuuuuuaucauga

SEQ ID NO: 226199 - RNA, 32 nt, Homo Sapiens
auguuaaguauucaaaucagucuuaaauuuuu

SEQ ID NO: 226200 - RNA, 32 nt, Homo Sapiens
aucuguuauuaagaaagucauauuuuugcauu

SEQ ID NO: 226201 - RNA, 32 nt, Homo Sapiens
guagaaauuuuuuuuucuuaauaaauuaucac

SEQ ID NO: 226202 - RNA, 32 nt, Homo Sapiens
caauucaacgcuguucuuucugaaaaaguaca

SEQ ID NO: 226203 - RNA, 32 nt, Homo Sapiens
gcccggcagagccgcaggcgcuaggccgcccg

SEQ ID NO: 226204 - RNA, 32 nt, Homo Sapiens
acauuucugaagauuuuuucucaguaaaguag

SEQ ID NO: 226205 - RNA, 31 nt, Homo Sapiens
ucugugucacuggcugccuccacucccacuu

SEQ ID NO: 226206 - RNA, 32 nt, Homo Sapiens
ggguagcgcuggcccuuggaggcuggcacuag

SEQ ID NO: 226207 - RNA, 32 nt, Homo Sapiens
aaggcagaugaaaucuaaaucgcugugguuuc

SEQ ID NO: 226208 - RNA, 32 nt, Homo Sapiens
ccuccaucgcucuguaaccugcggguauugga

SEQ ID NO: 226209 - RNA, 32 nt, Homo Sapiens
agacauugcugccagccagcucugccuuccca

SEQ ID NO: 226210 - RNA, 32 nt, Homo Sapiens
uaaaugagaaaaagcuauuaugcugauggagc

SEQ ID NO: 226211 - RNA, 32 nt, Homo Sapiens
aaaguacaguugagauaguuaagauauaacca

SEQ ID NO: 226212 - RNA, 32 nt, Homo Sapiens
uuuggugggacaugaggccucaguggguggug

SEQ ID NO: 226213 - RNA, 32 nt, Homo Sapiens
cgggacggggcgcgaagccggaggcuccggga

SEQ ID NO: 226214 - RNA, 32 nt, Homo Sapiens
gcuucgguagguggggcggggcaggggcgggg

SEQ ID NO: 226215 - RNA, 32 nt, Homo Sapiens
auucucaaaaagacaauuuaaaugucauuuaa

SEQ ID NO: 226216 - RNA, 32 nt, Homo Sapiens
cacguacacauccagauggccugaagcaacug

SEQ ID NO: 226217 - RNA, 32 nt, Homo Sapiens
ccccgggagggagagccgagcagccccggcuc

SEQ ID NO: 226218 - RNA, 27 nt, Homo Sapiens
aucuguaucuucuucagugccccucua

SEQ ID NO: 226219 - RNA, 31 nt, Homo Sapiens
uagggcucagaguggaaggccuccugaggga

SEQ ID NO: 226220 - RNA, 32 nt, Homo Sapiens
gcacaugugagcauaugcauuaugauccaauu

SEQ ID NO: 226221 - RNA, 32 nt, Homo Sapiens
ugucccuguugaggagccacucugccagucuu

SEQ ID NO: 226222 - RNA, 29 nt, Homo Sapiens
uguuuuauauguauguuauauaacauuca

SEQ ID NO: 226223 - RNA, 32 nt, Homo Sapiens
uuuccauacagaacaacagccagagcagcugg

SEQ ID NO: 226224 - RNA, 32 nt, Homo Sapiens
cacucacacacaaucacagacacacacuuucu

SEQ ID NO: 226225 - RNA, 32 nt, Homo Sapiens
agagaagcagcacucuuaggcuugcuuacucu

SEQ ID NO: 226226 - RNA, 32 nt, Homo Sapiens
uccuaggccccggccgcgcgccacccgccucc

SEQ ID NO: 226227 - RNA, 32 nt, Homo Sapiens
gucuaagaucacauaacuaggaaguggcagaa

SEQ ID NO: 226228 - RNA, 32 nt, Homo Sapiens
gugcaggaaugggccaugccgucucacccaca

SEQ ID NO: 226229 - RNA, 29 nt, Homo Sapiens
uuuaauauauguaucuaaaccauaugaac

SEQ ID NO: 226230 - RNA, 32 nt, Homo Sapiens
agaggacgguugguugugugucugugcucgug

SEQ ID NO: 226231 - RNA, 32 nt, Homo Sapiens
uccccugcccccagcccguccccugcccaggg

SEQ ID NO: 226232 - RNA, 32 nt, Homo Sapiens
uccauuuguauuacugcuucccauugaguaau

SEQ ID NO: 226233 - RNA, 32 nt, Homo Sapiens
agaaacuguacuuuuuucuugaucugucugua

SEQ ID NO: 226234 - RNA, 32 nt, Homo Sapiens
cuccagcacgcgacuucucaggacgacgaauc

SEQ ID NO: 226235 - RNA, 32 nt, Homo Sapiens
ccuacuuuccauucacuguuaacauggaauaa

SEQ ID NO: 226236 - RNA, 32 nt, Homo Sapiens
ucagugcagcucugccagcaucaaggcuuuua

SEQ ID NO: 226237 - RNA, 32 nt, Homo Sapiens
ggcgcacgcucgcucguacggcggccgcggcg

SEQ ID NO: 226238 - RNA, 32 nt, Homo Sapiens
ucgcccucagaauauggucgagacaaugaaac

SEQ ID NO: 226239 - RNA, 32 nt, Homo Sapiens
gccggugcugguggcccggcgcgcuggaaccg

SEQ ID NO: 226240 - RNA, 28 nt, Homo Sapiens
uugggaugagagaacauuauaaaaccac

SEQ ID NO: 226241 - RNA, 32 nt, Homo Sapiens
uaaaaagcagaaaaagaaaacuaagaccuuca

SEQ ID NO: 226242 - RNA, 32 nt, Homo Sapiens
ugggaaguggggaggcggggagggaucuugac

SEQ ID NO: 226243 - RNA, 32 nt, Homo Sapiens
aaacguggcagagccuucagaccauccacaaa

SEQ ID NO: 226244 - RNA, 32 nt, Homo Sapiens
gagguuccaacuugcaggauccuuucccagag

SEQ ID NO: 226245 - RNA, 32 nt, Homo Sapiens
aguagcuuuucucuugggaagucuugcagccc

SEQ ID NO: 226246 - RNA, 32 nt, Homo Sapiens
acagugguaucagagcuaagaaugggacccag

SEQ ID NO: 226247 - RNA, 32 nt, Homo Sapiens
cgcucuaggacccagggcuggcuucuaaguuu

SEQ ID NO: 226248 - RNA, 32 nt, Homo Sapiens
aguaccuagauuuguuugauaaucaacaaauc

SEQ ID NO: 226249 - RNA, 32 nt, Homo Sapiens
cuugauaauauuugaaugugacucuuggauuu

SEQ ID NO: 226250 - RNA, 32 nt, Homo Sapiens
uuauaaaauuguuuuucuaauacuuuauaggg

SEQ ID NO: 226251 - RNA, 32 nt, Homo Sapiens
agggaggugccucagucuccucaccccaaccc

SEQ ID NO: 226252 - RNA, 32 nt, Homo Sapiens
caaucuaagucaaacuaaguuauaauuuagga

SEQ ID NO: 226253 - RNA, 32 nt, Homo Sapiens
ucuuaggauauuuuuucuuuuaaauuguauuu

SEQ ID NO: 226254 - RNA, 32 nt, Homo Sapiens
aggggucaggugguuguagucugugccugaag

SEQ ID NO: 226255 - RNA, 32 nt, Homo Sapiens
auacucacuaaaagcugguugcacuuugagau

SEQ ID NO: 226256 - RNA, 32 nt, Homo Sapiens
gggaugaggaucccuacccaggcuagguggga

SEQ ID NO: 226257 - RNA, 32 nt, Homo Sapiens
aaugauaaugaagaauggccauuuuguaccag

SEQ ID NO: 226258 - RNA, 32 nt, Homo Sapiens
guccagaagcuuuaccauccacaccccagucu

SEQ ID NO: 226259 - RNA, 32 nt, Homo Sapiens
ggggacgcggcgagacugucggcgggggcgcg

SEQ ID NO: 226260 - RNA, 32 nt, Homo Sapiens
accggaacccaccaaacuuuaaacaccagccu

SEQ ID NO: 226261 - RNA, 32 nt, Homo Sapiens
aacuaaaacuaaaaugcuuucugcaaagaaua

SEQ ID NO: 226262 - RNA, 32 nt, Homo Sapiens
cuuuaauuucuuucuuuuuuucuuugagacag

SEQ ID NO: 226263 - RNA, 32 nt, Homo Sapiens
ccacuagagauugccuguguccugccucuugc

SEQ ID NO: 226264 - RNA, 32 nt, Homo Sapiens
agccagggucacccuuguggggccuggacaug

SEQ ID NO: 226265 - RNA, 32 nt, Homo Sapiens
aauauuuguauuauuuuuauacuaguaagugu

SEQ ID NO: 226266 - RNA, 32 nt, Homo Sapiens
uguacacuguauagaguagaguaucuguuaag

SEQ ID NO: 226267 - RNA, 32 nt, Homo Sapiens
uuuccaaaagcugaggaacauaaagcaaauuu

SEQ ID NO: 226268 - RNA, 32 nt, Homo Sapiens
uuucaggcguaaauccagagaagugcuuuaua

SEQ ID NO: 226269 - RNA, 32 nt, Homo Sapiens
aucuaugauaugagugagauaauuaugggagu

SEQ ID NO: 226270 - RNA, 32 nt, Homo Sapiens
cgggggcagacaccucuggccugaagucacag

SEQ ID NO: 226271 - RNA, 32 nt, Homo Sapiens
ccuugcguggaguaugccaacucauuguuugg

SEQ ID NO: 226272 - RNA, 32 nt, Homo Sapiens
uccccacaucugggucucuucccuuuuggagg

SEQ ID NO: 226273 - RNA, 32 nt, Homo Sapiens
uggaauauacuuucuuuuuuuaacuuauuucg

SEQ ID NO: 226274 - RNA, 32 nt, Homo Sapiens
cauuuguuguacacaguugauauuccaaauug

SEQ ID NO: 226275 - RNA, 32 nt, Homo Sapiens
ggagguggauauuuaaagcugccauuaaucuu

SEQ ID NO: 226276 - RNA, 32 nt, Homo Sapiens
gcagcuggguggcacugccaugcagggccuca

SEQ ID NO: 226277 - RNA, 32 nt, Homo Sapiens
aagagccaguauaguuucugugcccuggagca

SEQ ID NO: 226278 - RNA, 32 nt, Homo Sapiens
gcccagagcccuuggaguguugguggagauca

SEQ ID NO: 226279 - RNA, 32 nt, Homo Sapiens
cagggcccagccuuccccuucucccccggggc

SEQ ID NO: 226280 - RNA, 32 nt, Homo Sapiens
ccgugcaggcucugaagggagcucccagucac

SEQ ID NO: 226281 - RNA, 32 nt, Homo Sapiens
gaaauaaagugauguuaauaaaaguuuuggca

SEQ ID NO: 226282 - RNA, 32 nt, Homo Sapiens
cuuugucauggcaaccagcuucugaaaagccc

SEQ ID NO: 226283 - RNA, 32 nt, Homo Sapiens
gacaccggcgagagcuacagugcucggcccgg

SEQ ID NO: 226284 - RNA, 32 nt, Homo Sapiens
uaaugcuuaccugauggcaacuucuggcucug

SEQ ID NO: 226285 - RNA, 32 nt, Homo Sapiens
ccucuugcugucaucugcauucgugcuuccca

SEQ ID NO: 226286 - RNA, 32 nt, Homo Sapiens
ucauuuggcuguuuuucuuugcuuuauaaaga

SEQ ID NO: 226287 - RNA, 32 nt, Homo Sapiens
ccuggccacugacuggcggcgccugcgcagcc

SEQ ID NO: 226288 - RNA, 32 nt, Homo Sapiens
cucuuugugauuuucuaauaaccaugcuaagu

SEQ ID NO: 226289 - RNA, 32 nt, Homo Sapiens
uuucuuuuggagagauuguauauuuuaaaaua

SEQ ID NO: 226290 - RNA, 32 nt, Homo Sapiens
acugaugaugagaaucacuggauuguaagcug

SEQ ID NO: 226291 - RNA, 32 nt, Homo Sapiens
uggucacgcaaaacagaacccaguuagcagca

SEQ ID NO: 226292 - RNA, 32 nt, Homo Sapiens
ccaugagcuggcuucaggggaagugcuauuca

SEQ ID NO: 226293 - RNA, 32 nt, Homo Sapiens
gaucuccugaccucgugaugggcccgccucgg

SEQ ID NO: 226294 - RNA, 32 nt, Homo Sapiens
aggaugaaaauauuugucaaaaucuuaacuga

SEQ ID NO: 226295 - RNA, 32 nt, Homo Sapiens
aggucccuuuugguucucaguuucauugguuc

SEQ ID NO: 226296 - RNA, 32 nt, Homo Sapiens
accaaccugaggauguccugggaaauguuuuc

SEQ ID NO: 226297 - RNA, 32 nt, Homo Sapiens
acuuaauucugauaaaccuguuuaagcaauac

SEQ ID NO: 226298 - RNA, 32 nt, Homo Sapiens
agguccaggacgggcgcacagcagcagccgag

SEQ ID NO: 226299 - RNA, 32 nt, Homo Sapiens
aacuuuaaauuugaauguauucuuguaaaaca

SEQ ID NO: 226300 - RNA, 32 nt, Homo Sapiens
gacccuacucucuucgcugagaacggccgcua

SEQ ID NO: 226301 - RNA, 32 nt, Homo Sapiens
auuauucaacugacgggcuuucauuuccauuu

SEQ ID NO: 226302 - RNA, 32 nt, Homo Sapiens
gacugugucugcaggaaggagcuccccauucg

SEQ ID NO: 226303 - RNA, 32 nt, Homo Sapiens
aaaauaacucagaacauguuucucuccugcuu

SEQ ID NO: 226304 - RNA, 32 nt, Homo Sapiens
cuggacccgcuagcugggccgacgcuuuccca

SEQ ID NO: 226305 - RNA, 32 nt, Homo Sapiens
ugaaaauugugggaaagagaauuuguaugggc

SEQ ID NO: 226306 - RNA, 32 nt, Homo Sapiens
gggcguggagggcguggagggcgugggagcgu

SEQ ID NO: 226307 - RNA, 32 nt, Homo Sapiens
cacccucucugauaucauauuccuccuuuuuc

SEQ ID NO: 226308 - RNA, 32 nt, Homo Sapiens
acaaaguuaaauuuauaagcuagcauuaagua

SEQ ID NO: 226309 - RNA, 32 nt, Homo Sapiens
gccccaguguguccccaccucucccagccugu

SEQ ID NO: 226310 - RNA, 32 nt, Homo Sapiens
caggucaggugggaccggcaggccagcaugag

SEQ ID NO: 226311 - RNA, 32 nt, Homo Sapiens
auugagaagauggaggaauaucuuauauacaa

SEQ ID NO: 226312 - RNA, 32 nt, Homo Sapiens
ccugcgcgaggcggccaaggccugcugguccg

SEQ ID NO: 226313 - RNA, 32 nt, Homo Sapiens
uucaccuuccagugucucggagggauuccccu

SEQ ID NO: 226314 - RNA, 32 nt, Homo Sapiens
uaugauagaggcaauguugcuuugaaaaucuc

SEQ ID NO: 226315 - RNA, 32 nt, Homo Sapiens
ccugaacacagaccucuuucuugugccuuguu

SEQ ID NO: 226316 - RNA, 32 nt, Homo Sapiens
aagucacacaucauaaugcagcuccuuguggu

SEQ ID NO: 226317 - RNA, 31 nt, Homo Sapiens
guagcuggguucccaggccggacaaaacaga

SEQ ID NO: 226318 - RNA, 32 nt, Homo Sapiens
gaugagugaaagauaaucauguugguuuuaau

SEQ ID NO: 226319 - RNA, 32 nt, Homo Sapiens
gggagguccccggccucuggaugcagcaggga

SEQ ID NO: 226320 - RNA, 32 nt, Homo Sapiens
uacacccagagcauucucuuccccucaucucu

SEQ ID NO: 226321 - RNA, 32 nt, Homo Sapiens
uauucacugucacuuuuucucauguucuaauu

SEQ ID NO: 226322 - RNA, 32 nt, Homo Sapiens
gagggcccgcggcggccgcggccggugcaugu

SEQ ID NO: 226323 - RNA, 32 nt, Homo Sapiens
uggaaacuuccacauauuuuucaacugcagua

SEQ ID NO: 226324 - RNA, 32 nt, Homo Sapiens
agcauaauauuaugaaguuuauucugccuuau

SEQ ID NO: 226325 - RNA, 32 nt, Homo Sapiens
uccaacuguauuuguggauuuauuuauuuuuc

SEQ ID NO: 226326 - RNA, 32 nt, Homo Sapiens
uccugggauuaggugaaaaaugucuagcaaaa

SEQ ID NO: 226327 - RNA, 32 nt, Homo Sapiens
cguccugcugucagccuugucaucuugucuga

SEQ ID NO: 226328 - RNA, 32 nt, Homo Sapiens
cggagagcaugauccgugcccuugcuucugac

SEQ ID NO: 226329 - RNA, 29 nt, Homo Sapiens
gacuuuuccccuugcagaggcagaauuaa

SEQ ID NO: 226330 - RNA, 32 nt, Homo Sapiens
uauaucuggaaaauuugcugccugccuucuac

SEQ ID NO: 226331 - RNA, 32 nt, Homo Sapiens
uucucagagguagggacaaaaccacaucaggu

SEQ ID NO: 226332 - RNA, 32 nt, Homo Sapiens
guguacgcagggggccggggccccgcgaagcu

SEQ ID NO: 226333 - RNA, 32 nt, Homo Sapiens
cccacucgagccauccacacuugccccagccu

SEQ ID NO: 226334 - RNA, 32 nt, Homo Sapiens
gggaggacagucguuucuuuuccagccuccug

SEQ ID NO: 226335 - RNA, 32 nt, Homo Sapiens
ucuccaacuccacagugaugggcuuuccucca

SEQ ID NO: 226336 - RNA, 32 nt, Homo Sapiens
cuggucgcgcagcucgccccccugucugucac

SEQ ID NO: 226337 - RNA, 31 nt, Homo Sapiens
ccagcaauggcuuuugcaaaucugcggaaag

SEQ ID NO: 226338 - RNA, 32 nt, Homo Sapiens
uuuuauguuuuucccuuuuuuauguugguuga

SEQ ID NO: 226339 - RNA, 32 nt, Homo Sapiens
uacuuguuucuuuuucagguugugauguggcc

SEQ ID NO: 226340 - RNA, 32 nt, Homo Sapiens
guuaucagaaucuggucuacuuaggacaaugg

SEQ ID NO: 226341 - RNA, 32 nt, Homo Sapiens
ccccuaccaagcaugggggugcugugcaggca

SEQ ID NO: 226342 - RNA, 32 nt, Homo Sapiens
ugaggacucaaaugaaucaaaccccgugggaa

SEQ ID NO: 226343 - RNA, 32 nt, Homo Sapiens
gauaucuaaggauccaagcaaacuacuuuaag

SEQ ID NO: 226344 - RNA, 32 nt, Homo Sapiens
ccgauuucccagggcugugaccaucuaugaca

SEQ ID NO: 226345 - RNA, 32 nt, Homo Sapiens
gcagaggccaggcugauuuaaacuacagaaau

SEQ ID NO: 226346 - RNA, 32 nt, Homo Sapiens
cguacuccggccccggccugcgcccucagaaa

SEQ ID NO: 226347 - RNA, 32 nt, Homo Sapiens
gggguggaagcagccgcaggagcaagggcccc

SEQ ID NO: 226348 - RNA, 32 nt, Homo Sapiens
ucgcaccauccagcugcagcccucggggucga

SEQ ID NO: 226349 - RNA, 32 nt, Homo Sapiens
uugcugggacuauaggugugcgccaccaugcc

SEQ ID NO: 226350 - RNA, 32 nt, Homo Sapiens
acucacuggguaccccaccuccucucucauau

SEQ ID NO: 226351 - RNA, 32 nt, Homo Sapiens
gaaacugugcuaaaaagagaaaguccaaaaga

SEQ ID NO: 226352 - RNA, 32 nt, Homo Sapiens
agaggaguuccgagggaucacugugguggagc

SEQ ID NO: 226353 - RNA, 32 nt, Homo Sapiens
cacgggagucuagggagcgagaaggagaagga

SEQ ID NO: 226354 - RNA, 32 nt, Homo Sapiens
aagucaaagcuaccuuccccuagauagccaaa

SEQ ID NO: 226355 - RNA, 32 nt, Homo Sapiens
cagauacccugaaucuuaauuuaucucccauu

SEQ ID NO: 226356 - RNA, 32 nt, Homo Sapiens
cgguccccuaguccggccccggcuccgggccc

SEQ ID NO: 226357 - RNA, 32 nt, Homo Sapiens
aagcuucaaaaaauauacuaauugcugguaau

SEQ ID NO: 226358 - RNA, 32 nt, Homo Sapiens
agggguaaaagcugaucugguuugacuccgcu

SEQ ID NO: 226359 - RNA, 32 nt, Homo Sapiens
gauuuagcucuuuguuuaaguuuuguguuaga

SEQ ID NO: 226360 - RNA, 32 nt, Homo Sapiens
ggcagcccggcggccgaucuggccaacgggcc

SEQ ID NO: 226361 - RNA, 32 nt, Homo Sapiens
cugaggucaggagcucgagaccagccuggccg

SEQ ID NO: 226362 - RNA, 32 nt, Homo Sapiens
cggggcugagccgcccgggaucagcgcgagca

SEQ ID NO: 226363 - RNA, 32 nt, Homo Sapiens
guguagugaccauuuuacuccugacucucuug

SEQ ID NO: 226364 - RNA, 32 nt, Homo Sapiens
guucuucuccaaguucuccuuuucucuccaga

SEQ ID NO: 226365 - RNA, 30 nt, Homo Sapiens
gcccugcgcgcgcaccauccucgcggucuc

SEQ ID NO: 226366 - RNA, 32 nt, Homo Sapiens
gauaauuaaauaucuuggugucuuguuucuau

SEQ ID NO: 226367 - RNA, 32 nt, Homo Sapiens
uaccuguucucaaaggccccaguauucucucu

SEQ ID NO: 226368 - RNA, 32 nt, Homo Sapiens
cugccuugccccacccauaggcccuguccaua

SEQ ID NO: 226369 - RNA, 32 nt, Homo Sapiens
cgcucaccgagacacccgcgcuggcuggucuc

SEQ ID NO: 226370 - RNA, 32 nt, Homo Sapiens
cacaccgcaccucagcuccugcccggccucgc

SEQ ID NO: 226371 - RNA, 32 nt, Homo Sapiens
accuuugcuguaauuucauuugagauuuucua

SEQ ID NO: 226372 - RNA, 32 nt, Homo Sapiens
ccugugcgggcucugggggcagagguggcagg

SEQ ID NO: 226373 - RNA, 32 nt, Homo Sapiens
gcugccucuccagggagggcugccauucauuc

SEQ ID NO: 226374 - RNA, 31 nt, Homo Sapiens
aaucagguuguaaaauggcaaagguaaagaa

SEQ ID NO: 226375 - RNA, 32 nt, Homo Sapiens
gggaaggaggaccccgggcaccccccucaggg

SEQ ID NO: 226376 - RNA, 32 nt, Homo Sapiens
cgccgcgcuucgugccgccgcgcgcgcaggga

SEQ ID NO: 226377 - RNA, 32 nt, Homo Sapiens
uccugcuucgcccucccagcgccuagaagccu

SEQ ID NO: 226378 - RNA, 32 nt, Homo Sapiens
ggcgaggauggcaacgagauggucuucuguga

SEQ ID NO: 226379 - RNA, 32 nt, Homo Sapiens
uugugaaacaauucagcuuuugauucagcccc

SEQ ID NO: 226380 - RNA, 28 nt, Homo Sapiens
gaaauggggaaugggcugucagaccaga

SEQ ID NO: 226381 - RNA, 32 nt, Homo Sapiens
accccuuaagggugcuuaauucuguugaaacc

SEQ ID NO: 226382 - RNA, 32 nt, Homo Sapiens
accuugaagugcuguauagugaaguauaaauu

SEQ ID NO: 226383 - RNA, 32 nt, Homo Sapiens
caacagggcauguagucugcacucaagcaugc

SEQ ID NO: 226384 - RNA, 32 nt, Homo Sapiens
guuuaucaguaguucuuuuguagcugcuuaca

SEQ ID NO: 226385 - RNA, 32 nt, Homo Sapiens
caaacaaaacaaaaaucuguguaacuguaaaa

SEQ ID NO: 226386 - RNA, 32 nt, Homo Sapiens
uaccuggagaugugauuccauaaaaauggaag

SEQ ID NO: 226387 - RNA, 32 nt, Homo Sapiens
uagaguccuacuuacauaguugaaauaucaag

SEQ ID NO: 226388 - RNA, 32 nt, Homo Sapiens
cacggaucacgauguaaauuauuaagcauuuu

SEQ ID NO: 226389 - RNA, 32 nt, Homo Sapiens
ugagcccuuccccgucagccgggccgcgggag

SEQ ID NO: 226390 - RNA, 32 nt, Homo Sapiens
uguauaaaaauauuuuuucuaauccuccaguu

SEQ ID NO: 226391 - RNA, 32 nt, Homo Sapiens
cgcggguccgcccuaggcgcugggcuccaggg

SEQ ID NO: 226392 - RNA, 32 nt, Homo Sapiens
cagggaggccccagccccugcugcuugcuuuc

SEQ ID NO: 226393 - RNA, 32 nt, Homo Sapiens
cugcaccugugcuggggaguaggaggcccacu

SEQ ID NO: 226394 - RNA, 32 nt, Homo Sapiens
ccuucuccagcucuccuucuggcuucauccug

SEQ ID NO: 226395 - RNA, 32 nt, Homo Sapiens
ucccggcugccccugcccgccggcgccuccag

SEQ ID NO: 226396 - RNA, 32 nt, Homo Sapiens
aaacaucccacugacuguauggcacucuguag

SEQ ID NO: 226397 - RNA, 32 nt, Homo Sapiens
ucaaaaaaacaaaacaaacaaacaaaaauaca

SEQ ID NO: 226398 - RNA, 32 nt, Homo Sapiens
ucagaaaaagcuugcggaggcuaagcaccagu

SEQ ID NO: 226399 - RNA, 32 nt, Homo Sapiens
uggauccauugccccugagcucccagagucac

SEQ ID NO: 226400 - RNA, 32 nt, Homo Sapiens
caggaggugauggcacaaugcugcuggcagcg

SEQ ID NO: 226401 - RNA, 32 nt, Homo Sapiens
aacuguggaggccucagcaucuucuacccaga

SEQ ID NO: 226402 - RNA, 32 nt, Homo Sapiens
ugggcuugaugaagaaagaauagggaaggaga

SEQ ID NO: 226403 - RNA, 32 nt, Homo Sapiens
acaugaagaugaugaggaugacgaccuuuacg

SEQ ID NO: 226404 - RNA, 32 nt, Homo Sapiens
augacccuugugugccucuuugugaagcccua

SEQ ID NO: 226405 - RNA, 32 nt, Homo Sapiens
cugaagcccucccucgcccgcgccucuccuua

SEQ ID NO: 226406 - RNA, 30 nt, Homo Sapiens
uucacagacacauacacccaucuuggcacc

SEQ ID NO: 226407 - RNA, 31 nt, Homo Sapiens
gggcaaugugacugccugccgugacguaaaa

SEQ ID NO: 226408 - RNA, 32 nt, Homo Sapiens
gagaagagacacgcgagcggggagaccuccaa

SEQ ID NO: 226409 - RNA, 32 nt, Homo Sapiens
auguagcggccagagaggcacucgcggcagcc

SEQ ID NO: 226410 - RNA, 32 nt, Homo Sapiens
aagaaacagcucagauuugaccaagaucacac

SEQ ID NO: 226411 - RNA, 32 nt, Homo Sapiens
uuguuacuuaggaagccuggggagggcagagg

SEQ ID NO: 226412 - RNA, 32 nt, Homo Sapiens
gagagcggacugccugcccacccugagguccc

SEQ ID NO: 226413 - RNA, 27 nt, Homo Sapiens
aagcaguccuucugccuuagccuccua

SEQ ID NO: 226414 - RNA, 27 nt, Homo Sapiens
aagcaguccuucugccucagccuccca

SEQ ID NO: 226415 - RNA, 32 nt, Homo Sapiens
cuaggcacgcguucaccagccugugucucuga

SEQ ID NO: 226416 - RNA, 32 nt, Homo Sapiens
cugcacuuucccucuguucacgcugcuucccu

SEQ ID NO: 226417 - RNA, 32 nt, Homo Sapiens
aacuaucagaggugggauuaucuugccuccuc

SEQ ID NO: 226418 - RNA, 32 nt, Homo Sapiens
gggccgccagggcaucggagcgggugugcggc

SEQ ID NO: 226419 - RNA, 32 nt, Homo Sapiens
uaauguaaauuaauauacagucauucauuauu

SEQ ID NO: 226420 - RNA, 29 nt, Homo Sapiens
acaugcauauguauguagacauaugcaug

SEQ ID NO: 226421 - RNA, 32 nt, Homo Sapiens
agggucacacgcgugcccuguugcugaaugua

SEQ ID NO: 226422 - RNA, 32 nt, Homo Sapiens
aagagauucacaaaaacaaagaaucacaaugu

SEQ ID NO: 226423 - RNA, 32 nt, Homo Sapiens
uguggagguagagggacaauuugucauggaug

SEQ ID NO: 226424 - RNA, 32 nt, Homo Sapiens
ucuucagaucauaagucuuaggaccaaaggug

SEQ ID NO: 226425 - RNA, 32 nt, Homo Sapiens
agggaagugacaugcauugccacaaaacaauu

SEQ ID NO: 226426 - RNA, 32 nt, Homo Sapiens
auugauucaccuuguuuuuuuaaccugguugu

SEQ ID NO: 226427 - RNA, 32 nt, Homo Sapiens
uucccugccaguuugucucauguggcauucag

SEQ ID NO: 226428 - RNA, 32 nt, Homo Sapiens
acacauuccagaagcucaccaggcuacuuuau

SEQ ID NO: 226429 - RNA, 32 nt, Homo Sapiens
ucucacuuuccacugagaaccccugcccccaa

SEQ ID NO: 226430 - RNA, 32 nt, Homo Sapiens
cccuagaacuugccuaccuuucuggccuuacc

SEQ ID NO: 226431 - RNA, 32 nt, Homo Sapiens
ugccccgggccccauggagcugcgggucagca

SEQ ID NO: 226432 - RNA, 32 nt, Homo Sapiens
uaucagaccuuuuaaugaauuuucauggaugc

SEQ ID NO: 226433 - RNA, 32 nt, Homo Sapiens
cugugguaagaagaauagaaaaggcucucaga

SEQ ID NO: 226434 - RNA, 32 nt, Homo Sapiens
uuaccugaggaacuggccagguccuugaucau

SEQ ID NO: 226435 - RNA, 32 nt, Homo Sapiens
uguguugugaccucaugguuuaagugggaaua

SEQ ID NO: 226436 - RNA, 32 nt, Homo Sapiens
ugugacacgggaccgggugcgagggggccagc

SEQ ID NO: 226437 - RNA, 32 nt, Homo Sapiens
ugaaacugguuggggaaugaggugauaagcaa

SEQ ID NO: 226438 - RNA, 32 nt, Homo Sapiens
ucccccgcuggcccccuccccggagggauaau

SEQ ID NO: 226439 - RNA, 32 nt, Homo Sapiens
ucagacugaacacaguccacaaggcugccaau

SEQ ID NO: 226440 - RNA, 32 nt, Homo Sapiens
ugcaacauugugacaaagaagauggaagauag

SEQ ID NO: 226441 - RNA, 32 nt, Homo Sapiens
gaagaugccgugggaugcgcuccagcacagag

SEQ ID NO: 226442 - RNA, 30 nt, Homo Sapiens
gagucggagaagcuggaaagugugaaugcu

SEQ ID NO: 226443 - RNA, 32 nt, Homo Sapiens
guggggaggggaggcagguguggguagcgcac

SEQ ID NO: 226444 - RNA, 32 nt, Homo Sapiens
aggaucacagaaaacccuuggaguuguuuuga

SEQ ID NO: 226445 - RNA, 32 nt, Homo Sapiens
aggaaaauguugccuuuuagcauuccagaacu

SEQ ID NO: 226446 - RNA, 32 nt, Homo Sapiens
acauuuugucagcagagagccuuuuaaacuug

SEQ ID NO: 226447 - RNA, 32 nt, Homo Sapiens
ucuuggugggcccagggacacccacacaggug

SEQ ID NO: 226448 - RNA, 31 nt, Homo Sapiens
cuguccacacacugccuccccaccgcccacc

SEQ ID NO: 226449 - RNA, 32 nt, Homo Sapiens
gccaggcagguggugaggaagagugggguaga

SEQ ID NO: 226450 - RNA, 32 nt, Homo Sapiens
aaucuagauugugaaucagccaacugaaaauc

SEQ ID NO: 226451 - RNA, 32 nt, Homo Sapiens
uuuagagguggcagugucuggaucuaccuugg

SEQ ID NO: 226452 - RNA, 32 nt, Homo Sapiens
ccgcaggacgccugcccccagcccccgcagcc

SEQ ID NO: 226453 - RNA, 32 nt, Homo Sapiens
cgcagccagucuuuuuugcuucuccuacaaaa

SEQ ID NO: 226454 - RNA, 32 nt, Homo Sapiens
cugcaggcgauggggcaggggccacgggaaga

SEQ ID NO: 226455 - RNA, 30 nt, Homo Sapiens
gugcgguccgcgcagcugcaguaagggggc

SEQ ID NO: 226456 - RNA, 32 nt, Homo Sapiens
uaggguuuuucuuuuucuuuuuuaaauaaaca

SEQ ID NO: 226457 - RNA, 32 nt, Homo Sapiens
gaaagguggcucauggaauguuuucuuauccu

SEQ ID NO: 226458 - RNA, 32 nt, Homo Sapiens
aacagggccccgggagggaacccugcccccaa

SEQ ID NO: 226459 - RNA, 32 nt, Homo Sapiens
gaaggcaauuuaaucaaaauuccugucaagaa

SEQ ID NO: 226460 - RNA, 32 nt, Homo Sapiens
uuugacggugucauggaauuugccauggaugg

SEQ ID NO: 226461 - RNA, 32 nt, Homo Sapiens
acuugccacucuggcuggugcugcugccacug

SEQ ID NO: 226462 - RNA, 32 nt, Homo Sapiens
aacccauagcauguacagcacaaagcguuugc

SEQ ID NO: 226463 - RNA, 32 nt, Homo Sapiens
guauuuauuaaguaccuacugugugcucagca

SEQ ID NO: 226464 - RNA, 32 nt, Homo Sapiens
ugggugguggggggcggggggcaggacugaag

SEQ ID NO: 226465 - RNA, 32 nt, Homo Sapiens
ccugcccacacccuccuccccuccuuccagcg

SEQ ID NO: 226466 - RNA, 32 nt, Homo Sapiens
gagagacucugcaguguggaguggagccucau

SEQ ID NO: 226467 - RNA, 32 nt, Homo Sapiens
gcauuucugggaaggaugucucuucuucugau

SEQ ID NO: 226468 - RNA, 32 nt, Homo Sapiens
ccuccagggccuccuaccugcugaggaagagu

SEQ ID NO: 226469 - RNA, 32 nt, Homo Sapiens
gcucccaucuauuuucuucucuagaauccacu

SEQ ID NO: 226470 - RNA, 32 nt, Homo Sapiens
uugcaagccagcacuauccuugggcaacauuc

SEQ ID NO: 226471 - RNA, 32 nt, Homo Sapiens
aauugugcucaaaauuugaagaaugaacaaau

SEQ ID NO: 226472 - RNA, 32 nt, Homo Sapiens
ccagaggacuggcccuacgugcucucucucgu

SEQ ID NO: 226473 - RNA, 32 nt, Homo Sapiens
uaucccaggcauacuauaaaacgaagagugcc

SEQ ID NO: 226474 - RNA, 32 nt, Homo Sapiens
auuaacuucuauuuucaaguggaaaccuugcu

SEQ ID NO: 226475 - RNA, 32 nt, Homo Sapiens
cgaaagucauaaguucuuuacauauuacuugu

SEQ ID NO: 226476 - RNA, 32 nt, Homo Sapiens
cgugggucccgagugcuccgccgcccgccccg

SEQ ID NO: 226477 - RNA, 32 nt, Homo Sapiens
cagcagauguugaccuuuuacacaucaaauca

SEQ ID NO: 226478 - RNA, 30 nt, Homo Sapiens
uggcgagucaggcgcgcggggcggcguugg

SEQ ID NO: 226479 - RNA, 32 nt, Homo Sapiens
auggaaaauuuaugaacuugaucuucggccag

SEQ ID NO: 226480 - RNA, 31 nt, Homo Sapiens
uaaguuaaauaaaaauaugugugcauguauu

SEQ ID NO: 226481 - RNA, 32 nt, Homo Sapiens
gauccuaaugcaaucuaauuuuucagacuucg

SEQ ID NO: 226482 - RNA, 32 nt, Homo Sapiens
gggacgacgaggcccaggccuccuaccccucg

SEQ ID NO: 226483 - RNA, 32 nt, Homo Sapiens
uugaaauggauauguacaaauaaaauaaaugg

SEQ ID NO: 226484 - RNA, 32 nt, Homo Sapiens
gugacacucagcaccuuugccacagccggggg

SEQ ID NO: 226485 - RNA, 32 nt, Homo Sapiens
gcggcggcggcgacgauggggcugcgugcagg

SEQ ID NO: 226486 - RNA, 32 nt, Homo Sapiens
ccuucaaaugcuguuuuaucucagcggaacgu

SEQ ID NO: 226487 - RNA, 32 nt, Homo Sapiens
ucugggaugguguaaacuuauucagcuucaaa

SEQ ID NO: 226488 - RNA, 32 nt, Homo Sapiens
auacugaggagaaaauggcagauuguguuugc

SEQ ID NO: 226489 - RNA, 32 nt, Homo Sapiens
cggcgguccuugcgcuccccaacagcggcgcg

SEQ ID NO: 226490 - RNA, 32 nt, Homo Sapiens
ucgccaacucgccagcacuuggagaggcccgg

SEQ ID NO: 226491 - RNA, 32 nt, Homo Sapiens
cagugaaacaacagggcaaaggaagcaaucag

SEQ ID NO: 226492 - RNA, 32 nt, Homo Sapiens
uuuucuacuguaaacguagcaagaucuguaua

SEQ ID NO: 226493 - RNA, 32 nt, Homo Sapiens
uuuuuuggaaaaccuuuugaacccucaaguua

SEQ ID NO: 226494 - RNA, 32 nt, Homo Sapiens
caggaccucccucccccuggcacugguuuguu

SEQ ID NO: 226495 - RNA, 32 nt, Homo Sapiens
acuucccggacgggguggcuggccgggcgggg

SEQ ID NO: 226496 - RNA, 32 nt, Homo Sapiens
caguagcgcugggccuaggagcacucgggagu

SEQ ID NO: 226497 - RNA, 32 nt, Homo Sapiens
uguauugggcuaaccagagccaaauacuuuug

SEQ ID NO: 226498 - RNA, 32 nt, Homo Sapiens
ucugcaguaucauacuuguuuauauuacauug

SEQ ID NO: 226499 - RNA, 32 nt, Homo Sapiens
caaauaaggaagauccaguuguggccacccaa

SEQ ID NO: 226500 - RNA, 32 nt, Homo Sapiens
acaguaaggaugagaccccacuguguacccuu

SEQ ID NO: 226501 - RNA, 32 nt, Homo Sapiens
ggccgcgcaccaaggcugcgauggggcuggag

SEQ ID NO: 226502 - RNA, 32 nt, Homo Sapiens
cugaggagauauaaaacguaauaauccaugau

SEQ ID NO: 226503 - RNA, 32 nt, Homo Sapiens
gcccacccauccccugagcacacuaaccaccu

SEQ ID NO: 226504 - RNA, 32 nt, Homo Sapiens
uuaaugaaggcacugcuuauuuguagucaccu

SEQ ID NO: 226505 - RNA, 32 nt, Homo Sapiens
uacugaucaaguccuuuccccaaugcccagug

SEQ ID NO: 226506 - RNA, 32 nt, Homo Sapiens
aaaguaaauauaaaaacuuugcucuuaacguc

SEQ ID NO: 226507 - RNA, 30 nt, Homo Sapiens
gugcccccacuugccuacccucuguccugc

SEQ ID NO: 226508 - RNA, 32 nt, Homo Sapiens
gaacccauugguuagagugcaguggcuucuuu

SEQ ID NO: 226509 - RNA, 32 nt, Homo Sapiens
gaaguaaauauguuacuuaaauuuucuuuccu

SEQ ID NO: 226510 - RNA, 32 nt, Homo Sapiens
aggauaaagggggcagggacuggccagacugc

SEQ ID NO: 226511 - RNA, 32 nt, Homo Sapiens
gaguggccgccaugcuccugccuugggccacc

SEQ ID NO: 226512 - RNA, 32 nt, Homo Sapiens
uuguuucaggcacggauaacagcaaauggaau

SEQ ID NO: 226513 - RNA, 32 nt, Homo Sapiens
gaacucagcaacaugagacauugagagagcaa

SEQ ID NO: 226514 - RNA, 32 nt, Homo Sapiens
aaaggaugagagaagcaagagcaaacacauuc

SEQ ID NO: 226515 - RNA, 32 nt, Homo Sapiens
agcauaaaucugggugagcuaaauuggauguu

SEQ ID NO: 226516 - RNA, 32 nt, Homo Sapiens
uuuacaccaaaauaaaguauugacacaagaga

SEQ ID NO: 226517 - RNA, 32 nt, Homo Sapiens
cugcgaggagcucaggaccagucuucucucca

SEQ ID NO: 226518 - RNA, 32 nt, Homo Sapiens
agguccaaucccauuuaccaggucuaggucuu

SEQ ID NO: 226519 - RNA, 32 nt, Homo Sapiens
cugauuacaucauuauuguuccaaauucauua

SEQ ID NO: 226520 - RNA, 32 nt, Homo Sapiens
gcaagagauuaaugaucugccuuauauuagag

SEQ ID NO: 226521 - RNA, 32 nt, Homo Sapiens
aucccaguccagacgggugcugccggcucagc

SEQ ID NO: 226522 - RNA, 32 nt, Homo Sapiens
uccaccugccagcagaggcucuuccuguucau

SEQ ID NO: 226523 - RNA, 32 nt, Homo Sapiens
caagcagaggaggaaggcagggguaccaccac

SEQ ID NO: 226524 - RNA, 32 nt, Homo Sapiens
auuccccucccgccccgcacagagaccccgac

SEQ ID NO: 226525 - RNA, 32 nt, Homo Sapiens
guuggccccagcgcagaguagcugcuuccugg

SEQ ID NO: 226526 - RNA, 32 nt, Homo Sapiens
gauguaauugucuaauguucugaugggaacgu

SEQ ID NO: 226527 - RNA, 32 nt, Homo Sapiens
aagcacuaucguaccaaauauuucauauuuca

SEQ ID NO: 226528 - RNA, 32 nt, Homo Sapiens
ccgccugacgaucuaauuguaaaaaguaaagc

SEQ ID NO: 226529 - RNA, 32 nt, Homo Sapiens
guuucuuccagaagacuggucuucauccugcc

SEQ ID NO: 226530 - RNA, 32 nt, Homo Sapiens
cagccguuugcuaccucgauuccuccuguguu

SEQ ID NO: 226531 - RNA, 32 nt, Homo Sapiens
agaaccugaauauaaauuuguuuucucaaaua

SEQ ID NO: 226532 - RNA, 32 nt, Homo Sapiens
ugccaacacugaggauguaaagaucaauaaaa

SEQ ID NO: 226533 - RNA, 32 nt, Homo Sapiens
ucaggcaucugauaaccucugagauuuccagg

SEQ ID NO: 226534 - RNA, 32 nt, Homo Sapiens
cuuuaagaauaaaccugucaauguacaaaugc

SEQ ID NO: 226535 - RNA, 32 nt, Homo Sapiens
aguuuaaaaaucagaaagacauucuuaguuaa

SEQ ID NO: 226536 - RNA, 32 nt, Homo Sapiens
aguagauaucagcuauuuccugucuuacuuga

SEQ ID NO: 226537 - RNA, 32 nt, Homo Sapiens
ucacuggcccugaagacuggccccacuucugg

SEQ ID NO: 226538 - RNA, 32 nt, Homo Sapiens
cuccccgcccagggaccccucccggccucccu

SEQ ID NO: 226539 - RNA, 32 nt, Homo Sapiens
caucauugaucuuccuguguccguauuuuccu

SEQ ID NO: 226540 - RNA, 32 nt, Homo Sapiens
gcccagagaagcacagcaugcgugccugcacu

SEQ ID NO: 226541 - RNA, 32 nt, Homo Sapiens
guuucugugacccagcagcaucaagccccucg

SEQ ID NO: 226542 - RNA, 32 nt, Homo Sapiens
cuaagagagugcuguagaaguccccauggaau

SEQ ID NO: 226543 - RNA, 32 nt, Homo Sapiens
uaguugaccugccuuuucugacuccgggacga

SEQ ID NO: 226544 - RNA, 32 nt, Homo Sapiens
gaucuuaaaagcuuugugauugcaaagguguu

SEQ ID NO: 226545 - RNA, 32 nt, Homo Sapiens
aucuuucaguuauuaaaugauagauaaugccu

SEQ ID NO: 226546 - RNA, 32 nt, Homo Sapiens
ggaggccagaaaccacaaguaugaugacuagg

SEQ ID NO: 226547 - RNA, 32 nt, Homo Sapiens
gccugagcuccccuggccccaggugccuccau

SEQ ID NO: 226548 - RNA, 32 nt, Homo Sapiens
ucaucuucucuuucucuccucaguuuacaucu

SEQ ID NO: 226549 - RNA, 32 nt, Homo Sapiens
gacaaggucccuuucugucacccagguuagag

SEQ ID NO: 226550 - RNA, 32 nt, Homo Sapiens
uauauccuggggagcuuuggucuauuaguuug

SEQ ID NO: 226551 - RNA, 32 nt, Homo Sapiens
acccaggccaacaaauuauccccagugauaug

SEQ ID NO: 226552 - RNA, 32 nt, Homo Sapiens
cggggccauggcgaggcgcgggccaggguggc

SEQ ID NO: 226553 - RNA, 32 nt, Homo Sapiens
caaccagaggcggcagcccacccuuccugccu

SEQ ID NO: 226554 - RNA, 32 nt, Homo Sapiens
cucaaaaaaaaaaaacaaaaauauucaacuau

SEQ ID NO: 226555 - RNA, 32 nt, Homo Sapiens
gacccgaguggaccucaggucuggccaggucg

SEQ ID NO: 226556 - RNA, 32 nt, Homo Sapiens
cacacacacacacacacacacacacacacguu

SEQ ID NO: 226557 - RNA, 32 nt, Homo Sapiens
gccgccggguccggggcaacgagcugaggcgc

SEQ ID NO: 226558 - RNA, 32 nt, Homo Sapiens
aaauaccugccucccucccccaucaccgaacu

SEQ ID NO: 226559 - RNA, 32 nt, Homo Sapiens
uaaaagagaaugagccaguggcaugagaucag

SEQ ID NO: 226560 - RNA, 32 nt, Homo Sapiens
cgccgcgcugaggcccgcgggcccgucaugga

SEQ ID NO: 226561 - RNA, 32 nt, Homo Sapiens
gguucagcuauauuguauuugugcaguguaau

SEQ ID NO: 226562 - RNA, 32 nt, Homo Sapiens
uuuucccucucccugcuucuucaccuggucac

SEQ ID NO: 226563 - RNA, 32 nt, Homo Sapiens
acaagcaguauuaaaauuucaggagccaaguc

SEQ ID NO: 226564 - RNA, 32 nt, Homo Sapiens
cgggaggcagaauugaagugaacaugaaguuu

SEQ ID NO: 226565 - RNA, 32 nt, Homo Sapiens
cagguaaccuugaguucugacguccacgggca

SEQ ID NO: 226566 - RNA, 32 nt, Homo Sapiens
ugugauugacauuuuucucauaaugaauccuc

SEQ ID NO: 226567 - RNA, 32 nt, Homo Sapiens
uuccccauuucccauauuuaucucaucugguu

SEQ ID NO: 226568 - RNA, 32 nt, Homo Sapiens
accgucagagccgggcccgggaccgcagaccu

SEQ ID NO: 226569 - RNA, 32 nt, Homo Sapiens
cagagacaggaauaaacuuggcccugcgucuu

SEQ ID NO: 226570 - RNA, 32 nt, Homo Sapiens
uccagaaaugacuuuagacugccuuucacaua

SEQ ID NO: 226571 - RNA, 32 nt, Homo Sapiens
acagcaggagaugcaugucgacaggcuggccc

SEQ ID NO: 226572 - RNA, 32 nt, Homo Sapiens
ggaggugacggcuggugacugauggaugggua

SEQ ID NO: 226573 - RNA, 32 nt, Homo Sapiens
uggucugccuugcccguuugccuguuccuauu

SEQ ID NO: 226574 - RNA, 32 nt, Homo Sapiens
ugacgcggguuugggugauaccccucacagcc

SEQ ID NO: 226575 - RNA, 32 nt, Homo Sapiens
ucggccugugguggacacagaugugugcagga

SEQ ID NO: 226576 - RNA, 32 nt, Homo Sapiens
uuugcagucugccugucuaaucugcaguaguc

SEQ ID NO: 226577 - RNA, 32 nt, Homo Sapiens
aucagcaggaggacgacugugagcguacugua

SEQ ID NO: 226578 - RNA, 32 nt, Homo Sapiens
agagguugcagugggccaagauuacggcauua

SEQ ID NO: 226579 - RNA, 32 nt, Homo Sapiens
acggcggcgggggcgguaauggcggagcuggu

SEQ ID NO: 226580 - RNA, 32 nt, Homo Sapiens
gucuugaaugguuuucuggagagauagcauug

SEQ ID NO: 226581 - RNA, 32 nt, Homo Sapiens
uauuuuggaaaauaaggaucugauugagucuu

SEQ ID NO: 226582 - RNA, 32 nt, Homo Sapiens
cccaauuaaauuuuauuuuugcugguuuugaa

SEQ ID NO: 226583 - RNA, 32 nt, Homo Sapiens
gcaagaagccccuggggugcccucuugccaug

SEQ ID NO: 226584 - RNA, 32 nt, Homo Sapiens
cauugcacuccagccuggcgaccgagcgggac

SEQ ID NO: 226585 - RNA, 32 nt, Homo Sapiens
caagucacggguuuccauagccaggcaguugg

SEQ ID NO: 226586 - RNA, 32 nt, Homo Sapiens
uauguuucuagguugucuuaugcuacaguuuc

SEQ ID NO: 226587 - RNA, 32 nt, Homo Sapiens
gguuucaccauguuggcaaggcuggucucaaa

SEQ ID NO: 226588 - RNA, 32 nt, Homo Sapiens
ucugcucccucgacacuugauuggagggcugu

SEQ ID NO: 226589 - RNA, 32 nt, Homo Sapiens
uucucccggaccccaggagccggcgcccccgc

SEQ ID NO: 226590 - RNA, 32 nt, Homo Sapiens
acucaacccucaaucccuuagcacugauugau

SEQ ID NO: 226591 - RNA, 32 nt, Homo Sapiens
gucccagcuuucccagccccagcguuuugggu

SEQ ID NO: 226592 - RNA, 32 nt, Homo Sapiens
uugccggguccgagaggcuccccgucaauuuu

SEQ ID NO: 226593 - RNA, 32 nt, Homo Sapiens
uggcagagcugagagaucagcggcagggggag

SEQ ID NO: 226594 - RNA, 32 nt, Homo Sapiens
uugcacacauacugccuaguugugaaccaaau

SEQ ID NO: 226595 - RNA, 32 nt, Homo Sapiens
ucuuuaaaaagggaaggucaagcaaagaacug

SEQ ID NO: 226596 - RNA, 32 nt, Homo Sapiens
ucucuagaauccaauuagggauguuuguuacu

SEQ ID NO: 226597 - RNA, 32 nt, Homo Sapiens
auccagaauaccucagagacacacccagaaua

SEQ ID NO: 226598 - RNA, 32 nt, Homo Sapiens
caguugcucuagugaauggggcguuaggggcc

SEQ ID NO: 226599 - RNA, 32 nt, Homo Sapiens
ggggaccagucgcgcugggggugggcgcgcgc

SEQ ID NO: 226600 - RNA, 32 nt, Homo Sapiens
ccuaauuucuaaaaauacuuuuuauuagccug

SEQ ID NO: 226601 - RNA, 32 nt, Homo Sapiens
ucucaagcucugcccuucccagcccagcccag

SEQ ID NO: 226602 - RNA, 32 nt, Homo Sapiens
gcccagagaguagacaauccagggcuugagga

SEQ ID NO: 226603 - RNA, 32 nt, Homo Sapiens
caugcugcuugguuuucuuacuuagugcuuua

SEQ ID NO: 226604 - RNA, 32 nt, Homo Sapiens
uagcuguaauguagggggaggcgggggaggcu

SEQ ID NO: 226605 - RNA, 32 nt, Homo Sapiens
ugcaggggaaaguuaaaggugaugacgaucau

SEQ ID NO: 226606 - RNA, 32 nt, Homo Sapiens
gaccaggggaucuucgucaagcaagugcugaa

SEQ ID NO: 226607 - RNA, 32 nt, Homo Sapiens
ggagccaacugggagcgcaguacgcguuuucu

SEQ ID NO: 226608 - RNA, 32 nt, Homo Sapiens
gacuuugauguguacugugcuguugaugaagu

SEQ ID NO: 226609 - RNA, 32 nt, Homo Sapiens
uuaccuuuucccuuuugugcuuugggggaaac

SEQ ID NO: 226610 - RNA, 32 nt, Homo Sapiens
ugauuggcccuauccuucucaaguuccucuuu

SEQ ID NO: 226611 - RNA, 32 nt, Homo Sapiens
cucauccucuuuacacugugucucucuggcuc

SEQ ID NO: 226612 - RNA, 32 nt, Homo Sapiens
cagacagaagucugcugcagggguaagcucuc

SEQ ID NO: 226613 - RNA, 32 nt, Homo Sapiens
agaggucggcaccgccccaggaccccguccgc

SEQ ID NO: 226614 - RNA, 31 nt, Homo Sapiens
agcugccagcgcagccgccagcgccggcaca

SEQ ID NO: 226615 - RNA, 32 nt, Homo Sapiens
guccaggagggugcggcuguggacaggccagc

SEQ ID NO: 226616 - RNA, 32 nt, Homo Sapiens
ccaucagccaguccaggcacccgcaugaagcc

SEQ ID NO: 226617 - RNA, 32 nt, Homo Sapiens
cuccgugccacucccgccccagccuagcccca

SEQ ID NO: 226618 - RNA, 32 nt, Homo Sapiens
ucagccuccugcccuagggaccgcggggcagc

SEQ ID NO: 226619 - RNA, 32 nt, Homo Sapiens
gaggcggcggcaccuccuuugaggaggaccug

SEQ ID NO: 226620 - RNA, 32 nt, Homo Sapiens
agcagaauauccauguuuauuaccagacuggu

SEQ ID NO: 226621 - RNA, 32 nt, Homo Sapiens
cugagcgggggagcggcggcccccagcugaau

SEQ ID NO: 226622 - RNA, 32 nt, Homo Sapiens
guaaacauuuuucauuuggcaaauggcauaau

SEQ ID NO: 226623 - RNA, 32 nt, Homo Sapiens
caauuucuguggcaagucaaucuccuacagcu

SEQ ID NO: 226624 - RNA, 32 nt, Homo Sapiens
agaaaaauauaugcuuacauuuuucacuuuug

SEQ ID NO: 226625 - RNA, 32 nt, Homo Sapiens
gugggcccagagaggggaggggaggggguucu

SEQ ID NO: 226626 - RNA, 32 nt, Homo Sapiens
cuauugcaacaaaguuaggaaguuuguuguuu

SEQ ID NO: 226627 - RNA, 32 nt, Homo Sapiens
guaugauaaaaaaaaaucauguaugcauuuga

SEQ ID NO: 226628 - RNA, 32 nt, Homo Sapiens
ccugccugcuccauggagcagaaggccuggau

SEQ ID NO: 226629 - RNA, 32 nt, Homo Sapiens
uuauaaauacaaaaauacauucuccaaagaua

SEQ ID NO: 226630 - RNA, 32 nt, Homo Sapiens
aauccuggaggcucagcaaacaucccaucaau

SEQ ID NO: 226631 - RNA, 32 nt, Homo Sapiens
ucgucuugccucagucucccaaguagcuggga

SEQ ID NO: 226632 - RNA, 32 nt, Homo Sapiens
cagaggaggugggaaagacgcuuuugucauug

SEQ ID NO: 226633 - RNA, 32 nt, Homo Sapiens
ccacagagcugcuuuucugcccgccucacccu

SEQ ID NO: 226634 - RNA, 32 nt, Homo Sapiens
uagagagccauuccuagaaaauguccuacugc

SEQ ID NO: 226635 - RNA, 32 nt, Homo Sapiens
gcacagagacacaaggaagaaaacacuaguaa

SEQ ID NO: 226636 - RNA, 32 nt, Homo Sapiens
aaauacaucuucauagcuaacuuuuuucacau

SEQ ID NO: 226637 - RNA, 32 nt, Homo Sapiens
ucccacccgagaccucucacugagcccgagcc

SEQ ID NO: 226638 - RNA, 32 nt, Homo Sapiens
aagauauggucuuuacaucucuuuccaguauu

SEQ ID NO: 226639 - RNA, 32 nt, Homo Sapiens
aguuuggccccggcgguucuacuacgucacua

SEQ ID NO: 226640 - RNA, 32 nt, Homo Sapiens
uccuuugcucucuuugcuucuaccucaaauag

SEQ ID NO: 226641 - RNA, 32 nt, Homo Sapiens
gggaaggaauuuaauacuuugaagucaugaga

SEQ ID NO: 226642 - RNA, 32 nt, Homo Sapiens
aaagcccuggagggaaucacauguguacuuuu

SEQ ID NO: 226643 - RNA, 32 nt, Homo Sapiens
acuauucacuucauauuuuucuuguauuaacu

SEQ ID NO: 226644 - RNA, 32 nt, Homo Sapiens
cagggacuaugcgugcggggacacgggucgcu

SEQ ID NO: 226645 - RNA, 32 nt, Homo Sapiens
acugggucaggaguuugagaccagccuggcca

SEQ ID NO: 226646 - RNA, 32 nt, Homo Sapiens
aagcugggauuacaggcaugcgccaccacgcc

SEQ ID NO: 226647 - RNA, 32 nt, Homo Sapiens
uccccacagcaggccggcgcgcgacgcgggag

SEQ ID NO: 226648 - RNA, 31 nt, Homo Sapiens
ccaauuacagggaaaaaacgugugaugaucc

SEQ ID NO: 226649 - RNA, 32 nt, Homo Sapiens
uuuuccuugguagaacugaauuccuuccuccc

SEQ ID NO: 226650 - RNA, 32 nt, Homo Sapiens
cugcaggauguggugucugugcucagcgucac

SEQ ID NO: 226651 - RNA, 32 nt, Homo Sapiens
uuggggugacagucaucaucagggccuggggc

SEQ ID NO: 226652 - RNA, 32 nt, Homo Sapiens
ugaacaacacugggauuucacugcagaggacu

SEQ ID NO: 226653 - RNA, 32 nt, Homo Sapiens
uuggugucugaccucccuccccgggggccuuc

SEQ ID NO: 226654 - RNA, 32 nt, Homo Sapiens
guauccaggucccuacucuacugaaaauauaa

SEQ ID NO: 226655 - RNA, 32 nt, Homo Sapiens
agguguguugucccaguggcucucaacccaug

SEQ ID NO: 226656 - RNA, 32 nt, Homo Sapiens
ccucccaauguuagaaagaagaaaagggagac

SEQ ID NO: 226657 - RNA, 32 nt, Homo Sapiens
uuguccacaucaggaguugcugauugaauucu

SEQ ID NO: 226658 - RNA, 32 nt, Homo Sapiens
ccccuggaagggucgggugcgcggcccaggag

SEQ ID NO: 226659 - RNA, 32 nt, Homo Sapiens
uucuuuugauuuccucugacagucuugcugcu

SEQ ID NO: 226660 - RNA, 32 nt, Homo Sapiens
gacaggaagagcagcucuggcuaucaccacug

SEQ ID NO: 226661 - RNA, 30 nt, Homo Sapiens
aagaguuuggacugcccgucagauuguuuc

SEQ ID NO: 226662 - RNA, 32 nt, Homo Sapiens
aguuggugccagcuggguuugcauggcuauag

SEQ ID NO: 226663 - RNA, 32 nt, Homo Sapiens
ccauaccguucacagccaaaccacugacauuc

SEQ ID NO: 226664 - RNA, 32 nt, Homo Sapiens
agccagcggagcaccgcgggcuggggcgcagc

SEQ ID NO: 226665 - RNA, 31 nt, Homo Sapiens
cagagggcguugggggugccaagggcuucuc

SEQ ID NO: 226666 - RNA, 32 nt, Homo Sapiens
gcaugucccuucccuuccccagcccugccagg

SEQ ID NO: 226667 - RNA, 32 nt, Homo Sapiens
gcccagccuugccccaggacccuugggugcau

SEQ ID NO: 226668 - RNA, 32 nt, Homo Sapiens
cacaugaugcucuauuuauuguagagagugac

SEQ ID NO: 226669 - RNA, 32 nt, Homo Sapiens
ccaagguuuugauauacuugucuuaagauauu

SEQ ID NO: 226670 - RNA, 32 nt, Homo Sapiens
agcacccgagauugucaaucagagccccgugu

SEQ ID NO: 226671 - RNA, 32 nt, Homo Sapiens
gacaguacuauacaaauagaaugcaagcugua

SEQ ID NO: 226672 - RNA, 32 nt, Homo Sapiens
cagagcugaugcccggcccccaggggggcaga

SEQ ID NO: 226673 - RNA, 32 nt, Homo Sapiens
aguguuggcucgggaugaaaugaggugugugc

SEQ ID NO: 226674 - RNA, 32 nt, Homo Sapiens
uauguggaagguaaaaauaguggugugaucau

SEQ ID NO: 226675 - RNA, 32 nt, Homo Sapiens
ggugauucuucucuuuaccauuucuggggacu

SEQ ID NO: 226676 - RNA, 32 nt, Homo Sapiens
gauuuguguuauauuuccuauguacauguaca

SEQ ID NO: 226677 - RNA, 32 nt, Homo Sapiens
auugcucauuuucuaaugugggaccugaaauu

SEQ ID NO: 226678 - RNA, 32 nt, Homo Sapiens
cuucuuuuucaaaacuaguucuuaggaacaga

SEQ ID NO: 226679 - RNA, 32 nt, Homo Sapiens
gcugcuccuccuccuuucccagcccgccgcgg

SEQ ID NO: 226680 - RNA, 32 nt, Homo Sapiens
gaagucaacggcucaagggugcauggcuggga

SEQ ID NO: 226681 - RNA, 32 nt, Homo Sapiens
guucaucuacugaagcacuuuaauaaaaauaa

SEQ ID NO: 226682 - RNA, 32 nt, Homo Sapiens
uuagaaguaaucaauuaacuugaaagaaauaa

SEQ ID NO: 226683 - RNA, 32 nt, Homo Sapiens
uauuguagguuaacauuaaauguuuuauagca

SEQ ID NO: 226684 - RNA, 32 nt, Homo Sapiens
ggcggcggcggcggcggcauggagcgcagugg

SEQ ID NO: 226685 - RNA, 32 nt, Homo Sapiens
uuuccaugccauuguggaauugagcagagaac

SEQ ID NO: 226686 - RNA, 32 nt, Homo Sapiens
cagcugucauuuugguuuucauuuucacuuca

SEQ ID NO: 226687 - RNA, 32 nt, Homo Sapiens
aacaguuuaaagaaaaucauaaucuuauauuu

SEQ ID NO: 226688 - RNA, 32 nt, Homo Sapiens
augcccuuaccuaauuagauuaugauaaauag

SEQ ID NO: 226689 - RNA, 32 nt, Homo Sapiens
uuuuuucaaacuaaaguccuagcugauuauuu

SEQ ID NO: 226690 - RNA, 32 nt, Homo Sapiens
ggaggguucaaaggaugaaagaaggaccuuug

SEQ ID NO: 226691 - RNA, 32 nt, Homo Sapiens
aucaaagaauuaugaaaguaagaucauuuaga

SEQ ID NO: 226692 - RNA, 32 nt, Homo Sapiens
ggcucccugaacuuuuuuccuugucccauccu

SEQ ID NO: 226693 - RNA, 32 nt, Homo Sapiens
gcuaaagccgcaggugaagauguccaacuacg

SEQ ID NO: 226694 - RNA, 32 nt, Homo Sapiens
aagauguucucuuuucuccuauguuuuaucug

SEQ ID NO: 226695 - RNA, 32 nt, Homo Sapiens
aggcguccaggcgggacagggcccggggagcg

SEQ ID NO: 226696 - RNA, 32 nt, Homo Sapiens
uguuuaauguuuuaauugauaauugucacuga

SEQ ID NO: 226697 - RNA, 32 nt, Homo Sapiens
ccgcucaccguccaccgccggugcuggguaaa

SEQ ID NO: 226698 - RNA, 32 nt, Homo Sapiens
agccaccacacccagccuccucuucuuuuuaa

SEQ ID NO: 226699 - RNA, 32 nt, Homo Sapiens
auacaacuaaauuuaugcuggguuuuugguuu

SEQ ID NO: 226700 - RNA, 32 nt, Homo Sapiens
ccagcucagccaugcuggccugucugcagagg

SEQ ID NO: 226701 - RNA, 32 nt, Homo Sapiens
auuuuuguuucauucagugguacuucagcaga

SEQ ID NO: 226702 - RNA, 32 nt, Homo Sapiens
ccaggagccggcgucccgcggccagggccaga

SEQ ID NO: 226703 - RNA, 32 nt, Homo Sapiens
ggguuuucuucccagcggcuacaggagucaug

SEQ ID NO: 226704 - RNA, 32 nt, Homo Sapiens
ggguauguauaggugcaaaugauaaaaaagaa

SEQ ID NO: 226705 - RNA, 32 nt, Homo Sapiens
caggaaauacuagagcucucuguuuuacacag

SEQ ID NO: 226706 - RNA, 32 nt, Homo Sapiens
aauaacucuugacuaacagccgcagagcagcc

SEQ ID NO: 226707 - RNA, 32 nt, Homo Sapiens
caggcccggaggcggccgcgggcacccuggaa

SEQ ID NO: 226708 - RNA, 32 nt, Homo Sapiens
cgcgcgggggguaauucggggucuggguucug

SEQ ID NO: 226709 - RNA, 32 nt, Homo Sapiens
gagagacccagcugcagaccaugccagaccca

SEQ ID NO: 226710 - RNA, 32 nt, Homo Sapiens
aagcaaaaucuaccaggucaaaauagugccac

SEQ ID NO: 226711 - RNA, 32 nt, Homo Sapiens
cugagcacagaaauuaaggcaaaaaaccaaag

SEQ ID NO: 226712 - RNA, 32 nt, Homo Sapiens
ggaggggguggcggccgcgucucgccuccacg

SEQ ID NO: 226713 - RNA, 32 nt, Homo Sapiens
cccaugcucccuccuuuaggcaggcccagaaa

SEQ ID NO: 226714 - RNA, 32 nt, Homo Sapiens
agccucccggccuggggcuaauccugggaggu

SEQ ID NO: 226715 - RNA, 32 nt, Homo Sapiens
cagcaccguccagccgcggagcccgcguucca

SEQ ID NO: 226716 - RNA, 32 nt, Homo Sapiens
gaaaggaggggaggggggacucgcugcuacaa

SEQ ID NO: 226717 - RNA, 32 nt, Homo Sapiens
uuucacauuaaauuauuugaguuuauacagac

SEQ ID NO: 226718 - RNA, 32 nt, Homo Sapiens
ucauuuguccacaaagauggcuucagagaggu

SEQ ID NO: 226719 - RNA, 32 nt, Homo Sapiens
agcccaguguuuucuuugaggaccccuuaauc

SEQ ID NO: 226720 - RNA, 32 nt, Homo Sapiens
ccaggccagcguggaggggcgaggggaugggg

SEQ ID NO: 226721 - RNA, 32 nt, Homo Sapiens
uggggcaggcgagcaccccaccccggccccgg

SEQ ID NO: 226722 - RNA, 32 nt, Homo Sapiens
ucagcaagcugugaaacuaaauccacaaccuu

SEQ ID NO: 226723 - RNA, 32 nt, Homo Sapiens
uaccagucuauuuccauucuuucagcuguguc

SEQ ID NO: 226724 - RNA, 32 nt, Homo Sapiens
accucucuugcauccauucucuagacggccgu

SEQ ID NO: 226725 - RNA, 32 nt, Homo Sapiens
caagcucagcccuugggacaagagcagccacu

SEQ ID NO: 226726 - RNA, 32 nt, Homo Sapiens
cauguagucugcugaucucagucuggaaacuu

SEQ ID NO: 226727 - RNA, 32 nt, Homo Sapiens
uguuacuucuaaaauuacagacaaaauuacuu

SEQ ID NO: 226728 - RNA, 32 nt, Homo Sapiens
auguuuuaaauaugaaaucacuuuuuagaauu

SEQ ID NO: 226729 - RNA, 32 nt, Homo Sapiens
aaaccaacucguggucagacuccagcaaauga

SEQ ID NO: 226730 - RNA, 32 nt, Homo Sapiens
uugcacuguauuucaaucaucuguaauuaaaa

SEQ ID NO: 226731 - RNA, 29 nt, Homo Sapiens
gaagguuuuuguuucagcuguacccccua

SEQ ID NO: 226732 - RNA, 32 nt, Homo Sapiens
ggcucccggccgcgccucgccccaugcacucg

SEQ ID NO: 226733 - RNA, 32 nt, Homo Sapiens
uaccauuuauuacuguacuugaguuaggauuu

SEQ ID NO: 226734 - RNA, 29 nt, Homo Sapiens
ucuccugugcuaagaaauagcuccagcca

SEQ ID NO: 226735 - RNA, 31 nt, Homo Sapiens
cagggucaccagagaaaguuccuuuccccag

SEQ ID NO: 226736 - RNA, 32 nt, Homo Sapiens
auuuugucauauccccucuccuuauuuuucua

SEQ ID NO: 226737 - RNA, 32 nt, Homo Sapiens
gggacgcggaguugaggcucuccaucugcggc

SEQ ID NO: 226738 - RNA, 32 nt, Homo Sapiens
uaguaguuaugcgaguggauagauugguaugu

SEQ ID NO: 226739 - RNA, 30 nt, Homo Sapiens
ucagccggcgccgcgccgccggguguuacu

SEQ ID NO: 226740 - RNA, 32 nt, Homo Sapiens
cggggaaggaggagcgcuaggucgguguacga

SEQ ID NO: 226741 - RNA, 31 nt, Homo Sapiens
aaaugugaaaaacguggcagagccuucagac

SEQ ID NO: 226742 - RNA, 32 nt, Homo Sapiens
uagcgagccgggcugacgcucccggccccggc

SEQ ID NO: 226743 - RNA, 32 nt, Homo Sapiens
aucaaagcacugggcuuguccaggcucauaau

SEQ ID NO: 226744 - RNA, 32 nt, Homo Sapiens
uuaagucauaaaauacauaggguacaaauacc

SEQ ID NO: 226745 - RNA, 32 nt, Homo Sapiens
guguaaaguaucuuggaauauaaagaauuucu

SEQ ID NO: 226746 - RNA, 32 nt, Homo Sapiens
aaccccgcgggcccuuagcacgcgccccagcg

SEQ ID NO: 226747 - RNA, 32 nt, Homo Sapiens
uuaauaaauacuguuucuuuuaaaacaaaaaa

SEQ ID NO: 226748 - RNA, 32 nt, Homo Sapiens
ccauagacauuugguuauuuaugaagauaauu

SEQ ID NO: 226749 - RNA, 32 nt, Homo Sapiens
ucugcccgcucgcgccguuucguccugucacc

SEQ ID NO: 226750 - RNA, 32 nt, Homo Sapiens
ucucuaacccucauugucagagggaauuggag

SEQ ID NO: 226751 - RNA, 32 nt, Homo Sapiens
auauucucuuuuuuuucuuuauuuaugacugu

SEQ ID NO: 226752 - RNA, 32 nt, Homo Sapiens
gaaagcacucggagaauugugcaggugucauu

SEQ ID NO: 226753 - RNA, 32 nt, Homo Sapiens
uuuuaagcuuugcauguguaucuuggaggaga

SEQ ID NO: 226754 - RNA, 32 nt, Homo Sapiens
uuucuuggucucagguagaacuuugaugacua

SEQ ID NO: 226755 - RNA, 32 nt, Homo Sapiens
cuggagcaggacuucagaguguuuguuuucag

SEQ ID NO: 226756 - RNA, 32 nt, Homo Sapiens
cgcugagcaaccugaggccugcagacuccgac

SEQ ID NO: 226757 - RNA, 32 nt, Homo Sapiens
cagggcaggacacuguccuuucuggaggggau

SEQ ID NO: 226758 - RNA, 32 nt, Homo Sapiens
gucacgucccgccgcccucugcccuugaaaug

SEQ ID NO: 226759 - RNA, 32 nt, Homo Sapiens
ucugucuugccucuccuucagugccuuuuaaa

SEQ ID NO: 226760 - RNA, 32 nt, Homo Sapiens
ggaaaguuaagaauaccugaaaaacuuaugag

SEQ ID NO: 226761 - RNA, 32 nt, Homo Sapiens
uggcccgcaccucgcugaccccguaauaaucc

SEQ ID NO: 226762 - RNA, 32 nt, Homo Sapiens
uuaugccucuguaucucaguaugcugcuaaaa

SEQ ID NO: 226763 - RNA, 29 nt, Homo Sapiens
aguagguggcugguccugccggacucucc

SEQ ID NO: 226764 - RNA, 32 nt, Homo Sapiens
cagcuucggguccugcggcugcggcugccgcc

SEQ ID NO: 226765 - RNA, 32 nt, Homo Sapiens
ucucuguguguguaguuuuguaaacacuauag

SEQ ID NO: 226766 - RNA, 31 nt, Homo Sapiens
aggccggcugcgugggguccccgcgcugcag

SEQ ID NO: 226767 - RNA, 32 nt, Homo Sapiens
ccucaagucaucugcuggccuugaccucacaa

SEQ ID NO: 226768 - RNA, 32 nt, Homo Sapiens
cugucucagggaggcccggcuccuccuucaac

SEQ ID NO: 226769 - RNA, 32 nt, Homo Sapiens
uguggaagaacaauccagggcugagaaaucgu

SEQ ID NO: 226770 - RNA, 30 nt, Homo Sapiens
cagccaggcaggccccugcguccccgaaga

SEQ ID NO: 226771 - RNA, 32 nt, Homo Sapiens
caguauauuuggauugggacucuaagcagaua

SEQ ID NO: 226772 - RNA, 32 nt, Homo Sapiens
ucuguuuguaggaugcuuuguauguuuuguau

SEQ ID NO: 226773 - RNA, 32 nt, Homo Sapiens
agugaucuuuguaucugaacuuugcacgucug

SEQ ID NO: 226774 - RNA, 32 nt, Homo Sapiens
uagcugggacugcaggcacgcgccaccacgcc

SEQ ID NO: 226775 - RNA, 32 nt, Homo Sapiens
gucuacuuugcaaagaaauggaaaucaaaaua

SEQ ID NO: 226776 - RNA, 32 nt, Homo Sapiens
uagcaaagaggcacaccacacacacacacaca

SEQ ID NO: 226777 - RNA, 32 nt, Homo Sapiens
gcugcccgggcucgcugcguggugcuaccgcc

SEQ ID NO: 226778 - RNA, 31 nt, Homo Sapiens
auauguaaauaagcucucagaguuucuguga

SEQ ID NO: 226779 - RNA, 32 nt, Homo Sapiens
augugacacauaguacaaauaguuugcuagga

SEQ ID NO: 226780 - RNA, 32 nt, Homo Sapiens
ccuguguuuuuggccgauuuucaugucugacc

SEQ ID NO: 226781 - RNA, 32 nt, Homo Sapiens
ugcacgcgcgcgugcacacacacacacacaca

SEQ ID NO: 226782 - RNA, 32 nt, Homo Sapiens
ucucauuaucucggucucugguuccuaauccu

SEQ ID NO: 226783 - RNA, 32 nt, Homo Sapiens
gaaauggaaauaaaauauaugugcuuauuaaa

SEQ ID NO: 226784 - RNA, 32 nt, Homo Sapiens
cacacacacacacacacacacacacacacgcu

SEQ ID NO: 226785 - RNA, 32 nt, Homo Sapiens
gaugaguggaacuguggaacaagugaugugga

SEQ ID NO: 226786 - RNA, 32 nt, Homo Sapiens
uugacaaugagggcugaccaguccugggucca

SEQ ID NO: 226787 - RNA, 32 nt, Homo Sapiens
aauaauuggccauguaugccacacuuacucac

SEQ ID NO: 226788 - RNA, 32 nt, Homo Sapiens
acaagugugggagaggaagcggcggcggcggc

SEQ ID NO: 226789 - RNA, 32 nt, Homo Sapiens
acgggggaaugggauccaggccagguugcuug

SEQ ID NO: 226790 - RNA, 32 nt, Homo Sapiens
ggcccgggccgcguugcgcucccgccacuccg

SEQ ID NO: 226791 - RNA, 32 nt, Homo Sapiens
uguggccugcucaucacccuuccgacaggagc

SEQ ID NO: 226792 - RNA, 32 nt, Homo Sapiens
uaccaguagaaggaugaaaauaccuuccaaag

SEQ ID NO: 226793 - RNA, 32 nt, Homo Sapiens
aaguaccgcuggcgccgccuccgggaccccca

SEQ ID NO: 226794 - RNA, 32 nt, Homo Sapiens
ggucccugccuugucugucuaggcccauuugg

SEQ ID NO: 226795 - RNA, 32 nt, Homo Sapiens
agcuggccgggcgcucgcagugggagcugcug

SEQ ID NO: 226796 - RNA, 32 nt, Homo Sapiens
aaccgacgcuuacugugcgagaaucggagggc

SEQ ID NO: 226797 - RNA, 32 nt, Homo Sapiens
cucuuccguuugcgguuuucugccuaauugug

SEQ ID NO: 226798 - RNA, 32 nt, Homo Sapiens
ugcaggggaugguguggucaagcccucgucua

SEQ ID NO: 226799 - RNA, 32 nt, Homo Sapiens
aggaucugggacacacagacuuugaaauaugu

SEQ ID NO: 226800 - RNA, 32 nt, Homo Sapiens
agaauuuaguguaucuguaauuuuauuaucaa

SEQ ID NO: 226801 - RNA, 32 nt, Homo Sapiens
ucuaaauaaccaaaaccuugauuacagccaug

SEQ ID NO: 226802 - RNA, 32 nt, Homo Sapiens
gauuuuuggaauguauucaggaccuguagcuu

SEQ ID NO: 226803 - RNA, 32 nt, Homo Sapiens
gauagggucuugcucucucacccaggcuggag

SEQ ID NO: 226804 - RNA, 32 nt, Homo Sapiens
aggaaugcgugggugacuuggcguggauuuag

SEQ ID NO: 226805 - RNA, 32 nt, Homo Sapiens
agguucacacaccagauguaacuguuuuucag

SEQ ID NO: 226806 - RNA, 32 nt, Homo Sapiens
cacagguguggaaacagacggcagaaugccuc

SEQ ID NO: 226807 - RNA, 32 nt, Homo Sapiens
gugagcuggcacccaacaccccuuucuccaca

SEQ ID NO: 226808 - RNA, 32 nt, Homo Sapiens
caaaugcucugucuucaaugaucaaauuuuga

SEQ ID NO: 226809 - RNA, 32 nt, Homo Sapiens
gaguaaacaaaggaauaaaaauaauugaggcc

SEQ ID NO: 226810 - RNA, 32 nt, Homo Sapiens
auccggguucagaacacuuuuuaugacaaaaa

SEQ ID NO: 226811 - RNA, 32 nt, Homo Sapiens
gagucuauuucuggggauuucaaaauggaucc

SEQ ID NO: 226812 - RNA, 32 nt, Homo Sapiens
gacguggugacugagaugacauccucucuaaa

SEQ ID NO: 226813 - RNA, 32 nt, Homo Sapiens
auaguuguguuuuuauuguuaacucuugucua

SEQ ID NO: 226814 - RNA, 32 nt, Homo Sapiens
uauuucauguuuaaguuuugcuuuugaauaaa

SEQ ID NO: 226815 - RNA, 32 nt, Homo Sapiens
aaaggaacagaaauucuuaagaugccaaugua

SEQ ID NO: 226816 - RNA, 32 nt, Homo Sapiens
ugauggcagccggucuggucacaggggaggac

SEQ ID NO: 226817 - RNA, 32 nt, Homo Sapiens
guauuuuuguacuugcagaaacugcugcuaac

SEQ ID NO: 226818 - RNA, 32 nt, Homo Sapiens
uuuugaacuaugaaaagacccuguuugugaau

SEQ ID NO: 226819 - RNA, 32 nt, Homo Sapiens
cugcuccuugccaccuugggguuccugcuggg

SEQ ID NO: 226820 - RNA, 32 nt, Homo Sapiens
gcuugaucuauuucuauaacaguuuugaucuu

SEQ ID NO: 226821 - RNA, 32 nt, Homo Sapiens
acggcgcgcucuuggcucacugcaaccuccgc

SEQ ID NO: 226822 - RNA, 32 nt, Homo Sapiens
caucugauuuugaacacaccauccauguuggc

SEQ ID NO: 226823 - RNA, 32 nt, Homo Sapiens
ugagcuucagggcagccagcuccucccggucu

SEQ ID NO: 226824 - RNA, 32 nt, Homo Sapiens
uugcaaugaagaugagcagauccacaggaaaa

SEQ ID NO: 226825 - RNA, 32 nt, Homo Sapiens
aggaggggguaaucugcccacccaggcuaagg

SEQ ID NO: 226826 - RNA, 32 nt, Homo Sapiens
gauucuaauguuuuauuuucaugcuuauccaa

SEQ ID NO: 226827 - RNA, 32 nt, Homo Sapiens
accaacuaaugcggugucgcuggcggcugagg

SEQ ID NO: 226828 - RNA, 32 nt, Homo Sapiens
ucggccgccucgaaguccccagcccuggcgag

SEQ ID NO: 226829 - RNA, 32 nt, Homo Sapiens
cugugaguaccuguuugucuccaggccaaacc

SEQ ID NO: 226830 - RNA, 32 nt, Homo Sapiens
gaagggaccagagggaucaaagaccagccaug

SEQ ID NO: 226831 - RNA, 32 nt, Homo Sapiens
acacuucaaaaauuauuguagacacagaauuu

SEQ ID NO: 226832 - RNA, 32 nt, Homo Sapiens
acggcacaccaaucaauaaagaacugagcaga

SEQ ID NO: 226833 - RNA, 32 nt, Homo Sapiens
ggaaauaaacacaggcaccaaaccacuauccu

SEQ ID NO: 226834 - RNA, 32 nt, Homo Sapiens
gaagauaccacagauagcauuuauaaaguaua

SEQ ID NO: 226835 - RNA, 32 nt, Homo Sapiens
acuauuguuuauuuuuaauggguauuucagau

SEQ ID NO: 226836 - RNA, 32 nt, Homo Sapiens
uuccuuuugacuguaaacuguuuaccuugcuu

SEQ ID NO: 226837 - RNA, 32 nt, Homo Sapiens
accugagcuccugcuucgcgccugcugcucug

SEQ ID NO: 226838 - RNA, 32 nt, Homo Sapiens
ugugacaguaaggaaguggugcaugccacgga

SEQ ID NO: 226839 - RNA, 32 nt, Homo Sapiens
gugguccagcuggaucugcaagauuguaagac

SEQ ID NO: 226840 - RNA, 32 nt, Homo Sapiens
agugauuuagaccuuuugagaauaggacacuu

SEQ ID NO: 226841 - RNA, 32 nt, Homo Sapiens
aguguucuguuguuuacaugaaguguguuuuu

SEQ ID NO: 226842 - RNA, 32 nt, Homo Sapiens
ggcgccgugcgcggcaacugccugcaguuuug

SEQ ID NO: 226843 - RNA, 32 nt, Homo Sapiens
gguauauuaggagacuaguucuacacaauauu

SEQ ID NO: 226844 - RNA, 32 nt, Homo Sapiens
acagacaaugacuggccaaucuauguggaguc

SEQ ID NO: 226845 - RNA, 32 nt, Homo Sapiens
cgaauuacauugaguuuguuaauuauuauuuc

SEQ ID NO: 226846 - RNA, 32 nt, Homo Sapiens
uagcgcuuuuguuacuugaaugucuagcugag

SEQ ID NO: 226847 - RNA, 32 nt, Homo Sapiens
cuauggcugcuuaauguaaguuuuaaaauguc

SEQ ID NO: 226848 - RNA, 32 nt, Homo Sapiens
gaaagaugaauaaagacaaacaugacaaacua

SEQ ID NO: 226849 - RNA, 32 nt, Homo Sapiens
agccgccgugcucagcgcgagccccggagccc

SEQ ID NO: 226850 - RNA, 32 nt, Homo Sapiens
caugagguccgucaccaccccaaauacuuuac

SEQ ID NO: 226851 - RNA, 32 nt, Homo Sapiens
ggagaggcagagagggcgcggggaccgucagc

SEQ ID NO: 226852 - RNA, 32 nt, Homo Sapiens
uggcggcacaggggcucugagcuccugaccug

SEQ ID NO: 226853 - RNA, 32 nt, Homo Sapiens
ccaggauccaaauguggugucugaaauggaaa

SEQ ID NO: 226854 - RNA, 32 nt, Homo Sapiens
ugucuuugauauugaucaaugaacuccuucuc

SEQ ID NO: 226855 - RNA, 32 nt, Homo Sapiens
gcguggggaaauguggugacacccauuucaca

SEQ ID NO: 226856 - RNA, 32 nt, Homo Sapiens
ccuuuagggagaaaacuuuguauuuuuaaaac

SEQ ID NO: 226857 - RNA, 32 nt, Homo Sapiens
auuuaauugggaugccagguuuauagcaauuu

SEQ ID NO: 226858 - RNA, 32 nt, Homo Sapiens
gggcggccgcugccuccccgggacgggccgua

SEQ ID NO: 226859 - RNA, 32 nt, Homo Sapiens
ugacaauaaguuauuuuuaccuaguguuucga

SEQ ID NO: 226860 - RNA, 32 nt, Homo Sapiens
acaagaaggggagcugucagucguguggccug

SEQ ID NO: 226861 - RNA, 32 nt, Homo Sapiens
auagccuuuggaggugggcucuauuccugucc

SEQ ID NO: 226862 - RNA, 32 nt, Homo Sapiens
ggguucggagggugggggcgcaggcccgggag

SEQ ID NO: 226863 - RNA, 32 nt, Homo Sapiens
cugagcgccuccugagagccagcccugacgug

SEQ ID NO: 226864 - RNA, 32 nt, Homo Sapiens
ggagcuggguuaugcaccgccauggcccacau

SEQ ID NO: 226865 - RNA, 32 nt, Homo Sapiens
ucuugcuggaaccaaggcaauccuggaugucc

SEQ ID NO: 226866 - RNA, 32 nt, Homo Sapiens
acauaaucuauuaagcaauaaguuuauguuag

SEQ ID NO: 226867 - RNA, 32 nt, Homo Sapiens
ggagcgggggcuggcuagcgggccccccagcc

SEQ ID NO: 226868 - RNA, 32 nt, Homo Sapiens
cgcgcgcgccgguccggcagcgcacggguuaa

SEQ ID NO: 226869 - RNA, 32 nt, Homo Sapiens
gagucugggacacgcuguaacuuuaacacauu

SEQ ID NO: 226870 - RNA, 32 nt, Homo Sapiens
aaccuccagcuaaaccacuuccagauuccuag

SEQ ID NO: 226871 - RNA, 32 nt, Homo Sapiens
uugcuaagaauaauucaugaucuguuuaugcg

SEQ ID NO: 226872 - RNA, 32 nt, Homo Sapiens
aucagcuuucagagaaugcagcugcgucagag

SEQ ID NO: 226873 - RNA, 32 nt, Homo Sapiens
uugagccccauggccuggugcagggcugcgug

SEQ ID NO: 226874 - RNA, 32 nt, Homo Sapiens
guaagcuaaacaaacaaacaaacaaacaaaca

SEQ ID NO: 226875 - RNA, 32 nt, Homo Sapiens
uuuaaauguuuuccacuagucauuucacuucu

SEQ ID NO: 226876 - RNA, 32 nt, Homo Sapiens
caguagcuggaaccacgggggugugccaccac

SEQ ID NO: 226877 - RNA, 32 nt, Homo Sapiens
cuggacgccuucucaacuguccguggagccug

SEQ ID NO: 226878 - RNA, 32 nt, Homo Sapiens
uggacauugaauaaauauucauuuuccuuugc

SEQ ID NO: 226879 - RNA, 32 nt, Homo Sapiens
ugcgaaagggcgggaaaggcaguuggagaaga

SEQ ID NO: 226880 - RNA, 32 nt, Homo Sapiens
gccccaccguccuccccaccccggggcgauga

SEQ ID NO: 226881 - RNA, 32 nt, Homo Sapiens
aucuuguuaugaauacaucuauuugcaaaugg

SEQ ID NO: 226882 - RNA, 32 nt, Homo Sapiens
agggcucggaagcaguaaggaggaugcuacag

SEQ ID NO: 226883 - RNA, 32 nt, Homo Sapiens
cccugggauuggacaaaagggcccaugcugca

SEQ ID NO: 226884 - RNA, 32 nt, Homo Sapiens
guaagcuaaaauuaugacuuucccuggguaaa

SEQ ID NO: 226885 - RNA, 32 nt, Homo Sapiens
aaauuuacuguaacuucuuaaucuaagaaaau

SEQ ID NO: 226886 - RNA, 32 nt, Homo Sapiens
gccuucagggcuggccucggccucgagucucg

SEQ ID NO: 226887 - RNA, 32 nt, Homo Sapiens
uugcaauaaaaauuacugaguugcaucaaaaa

SEQ ID NO: 226888 - RNA, 32 nt, Homo Sapiens
uuaagaaagauuuucauacuuaaaagauuuuc

SEQ ID NO: 226889 - RNA, 32 nt, Homo Sapiens
gaagccgggcucucuugagccugggacccccc

SEQ ID NO: 226890 - RNA, 32 nt, Homo Sapiens
gucuccaaacaaaaagaaaagauaauuacuuu

SEQ ID NO: 226891 - RNA, 32 nt, Homo Sapiens
gcaaagcugggugugguguugcaccgcuauac

SEQ ID NO: 226892 - RNA, 32 nt, Homo Sapiens
acuuuguauggauaaucuuucuauucauauca

SEQ ID NO: 226893 - RNA, 32 nt, Homo Sapiens
uugagaaaaaaguuaccgaauauuuuuuagac

SEQ ID NO: 226894 - RNA, 32 nt, Homo Sapiens
gaacucugacagagcuuugggggccgugaugu

SEQ ID NO: 226895 - RNA, 32 nt, Homo Sapiens
aaggcgcggaaauuugucuaagaucacauaac

SEQ ID NO: 226896 - RNA, 32 nt, Homo Sapiens
ugggaacugcaccagagcuggagguuagcauc

SEQ ID NO: 226897 - RNA, 32 nt, Homo Sapiens
aggcucucuaguuuaauaaaaaucauggaaag

SEQ ID NO: 226898 - RNA, 32 nt, Homo Sapiens
aaacaaucuccugguccaaggugcuugagugg

SEQ ID NO: 226899 - RNA, 32 nt, Homo Sapiens
acuguguaauuauaaacaaaaauacauaaagc

SEQ ID NO: 226900 - RNA, 32 nt, Homo Sapiens
ugguagaaaucagguuacaaagcaaaaccaca

SEQ ID NO: 226901 - RNA, 32 nt, Homo Sapiens
caagauuugcucaagacguccaacugucucuc

SEQ ID NO: 226902 - RNA, 32 nt, Homo Sapiens
gcugcuacaauagaaaaaucaaaaaggguaac

SEQ ID NO: 226903 - RNA, 32 nt, Homo Sapiens
agcgucugcagccuaagcaggugcuggcucag

SEQ ID NO: 226904 - RNA, 32 nt, Homo Sapiens
ggaugcaggcggcgugugcugcuguugauuuu

SEQ ID NO: 226905 - RNA, 32 nt, Homo Sapiens
ggguuugagagcaucauucuuuuaauaaaaca

SEQ ID NO: 226906 - RNA, 32 nt, Homo Sapiens
guuuccacauaaagaucagcuacugaauuggu

SEQ ID NO: 226907 - RNA, 32 nt, Homo Sapiens
ggacuccaugaccugcuguguacccaggccag

SEQ ID NO: 226908 - RNA, 32 nt, Homo Sapiens
uuugcuaaacacacacccucacacgcaaaaac

SEQ ID NO: 226909 - RNA, 32 nt, Homo Sapiens
auccauuuguuacuuuaacauuuuaaaauuau

SEQ ID NO: 226910 - RNA, 32 nt, Homo Sapiens
augugcagcucccauuuggccuugugcgguug

SEQ ID NO: 226911 - RNA, 32 nt, Homo Sapiens
acagccccgggccagcggcccccucgggaaau

SEQ ID NO: 226912 - RNA, 32 nt, Homo Sapiens
uuuuguuuuuuguuuuuuuuuaauucuugagg

SEQ ID NO: 226913 - RNA, 32 nt, Homo Sapiens
aaauuaauggcauuuuaaagguuaaaacauuu

SEQ ID NO: 226914 - RNA, 32 nt, Homo Sapiens
uuguaggaaaauuaucuaguuaaucauaauau

SEQ ID NO: 226915 - RNA, 32 nt, Homo Sapiens
auuuuaauuuaguucucaauagauaugccuca

SEQ ID NO: 226916 - RNA, 32 nt, Homo Sapiens
ccccgccuguggcacaccccagagccagaaau

SEQ ID NO: 226917 - RNA, 32 nt, Homo Sapiens
acuaauuuaaacaaaauuaaauccuuugccuu

SEQ ID NO: 226918 - RNA, 32 nt, Homo Sapiens
aauugugugaauagcaacauauauuauggaua

SEQ ID NO: 226919 - RNA, 32 nt, Homo Sapiens
caccuuuguaagaugccuggcacagcucugag

SEQ ID NO: 226920 - RNA, 32 nt, Homo Sapiens
uuugguuauuuauuauacuugauuccaaaaua

SEQ ID NO: 226921 - RNA, 32 nt, Homo Sapiens
cggcggugcggcgggcggccgacgcuccucuu

SEQ ID NO: 226922 - RNA, 32 nt, Homo Sapiens
ccugccacugucccggcccggccaccucucug

SEQ ID NO: 226923 - RNA, 27 nt, Homo Sapiens
agcaucucggucuucagcucacaccag

SEQ ID NO: 226924 - RNA, 32 nt, Homo Sapiens
agagacaagaaaccuagauguuuuuuggugcc

SEQ ID NO: 226925 - RNA, 32 nt, Homo Sapiens
aguuucacaauuuugccucaaguguacuuugc

SEQ ID NO: 226926 - RNA, 32 nt, Homo Sapiens
ggcccccaaaacaugcacacaugaaaagggca

SEQ ID NO: 226927 - RNA, 32 nt, Homo Sapiens
ggcuccacagccugggaugcugccguaccaag

SEQ ID NO: 226928 - RNA, 32 nt, Homo Sapiens
aguucauaggacuuacauauguacaaguggua

SEQ ID NO: 226929 - RNA, 32 nt, Homo Sapiens
agacuguucuugcauuucuauaaagaaauaug

SEQ ID NO: 226930 - RNA, 32 nt, Homo Sapiens
uauaagaguucuaggcggggcgugguggcuca

SEQ ID NO: 226931 - RNA, 32 nt, Homo Sapiens
ucucaucaggauuaaugagguacugguaccca

SEQ ID NO: 226932 - RNA, 32 nt, Homo Sapiens
uccugaugcuccggggcucaccccccuuccag

SEQ ID NO: 226933 - RNA, 32 nt, Homo Sapiens
cccggcugaugguuagccccuugcugccugcu

SEQ ID NO: 226934 - RNA, 32 nt, Homo Sapiens
guuucauuucccuuuuucaauuuacauagaag

SEQ ID NO: 226935 - RNA, 32 nt, Homo Sapiens
cagcuuacaaauacguauugucuaaaugcauu

SEQ ID NO: 226936 - RNA, 32 nt, Homo Sapiens
ugcgguugcccgccucgccgccggccacagcc

SEQ ID NO: 226937 - RNA, 32 nt, Homo Sapiens
ggaauccuuccaaggaauaucuauguacaaug

SEQ ID NO: 226938 - RNA, 32 nt, Homo Sapiens
ucacuguggccuccccaguccaaagcuccugc

SEQ ID NO: 226939 - RNA, 32 nt, Homo Sapiens
caaaccuccugcuccuugguggcaccucuccu

SEQ ID NO: 226940 - RNA, 32 nt, Homo Sapiens
auguguuuaauuuuccuuucugaaaacucuca

SEQ ID NO: 226941 - RNA, 32 nt, Homo Sapiens
ucugauuggccucggcggcaccccucgucccg

SEQ ID NO: 226942 - RNA, 32 nt, Homo Sapiens
aagucaaccacuacaaccguguguguaugcca

SEQ ID NO: 226943 - RNA, 32 nt, Homo Sapiens
gacuuggucccuagguccccagauggggagac

SEQ ID NO: 226944 - RNA, 30 nt, Homo Sapiens
cggagccgcgcgcagcauggccgagaaccc

SEQ ID NO: 226945 - RNA, 32 nt, Homo Sapiens
ugcaccagguguacaaguaccccuucgagcag

SEQ ID NO: 226946 - RNA, 32 nt, Homo Sapiens
uggagccgagggcagugguggagcacacuggg

SEQ ID NO: 226947 - RNA, 32 nt, Homo Sapiens
ccagcugcuugggcuucauccuccucagaucu

SEQ ID NO: 226948 - RNA, 32 nt, Homo Sapiens
uauaaguugcuguaaaauuuguguaaauuugu

SEQ ID NO: 226949 - RNA, 32 nt, Homo Sapiens
uauauagcaaagauauauauucaccaauguug

SEQ ID NO: 226950 - RNA, 32 nt, Homo Sapiens
ucuggaaauaugucuuuaaguauuuuagacau

SEQ ID NO: 226951 - RNA, 32 nt, Homo Sapiens
gugccugagcagcucugggugcucuccaugag

SEQ ID NO: 226952 - RNA, 32 nt, Homo Sapiens
ccccucucaucccacagucccuucucuccugg

SEQ ID NO: 226953 - RNA, 32 nt, Homo Sapiens
auggccuugugucaaggugccucuuaaagagu

SEQ ID NO: 226954 - RNA, 32 nt, Homo Sapiens
uauagacgcucuuuucuaaguggcgugugcau

SEQ ID NO: 226955 - RNA, 32 nt, Homo Sapiens
uucuuuuugauuuuucugacacugugugcgaa

SEQ ID NO: 226956 - RNA, 32 nt, Homo Sapiens
aucaguggcuuugaaugaauacagaugcauua

SEQ ID NO: 226957 - RNA, 32 nt, Homo Sapiens
uaaaaggccuugugagguggccccacccucca

SEQ ID NO: 226958 - RNA, 32 nt, Homo Sapiens
augcgaguuagccauccacacccaggcauagc

SEQ ID NO: 226959 - RNA, 32 nt, Homo Sapiens
cugacagccuaaggugguuaugcugugacgcu

SEQ ID NO: 226960 - RNA, 32 nt, Homo Sapiens
caaaugcucuucuccuuuuucugucuucccuu

SEQ ID NO: 226961 - RNA, 32 nt, Homo Sapiens
aucuuuuaaaaauggacgagguacuaggaccc

SEQ ID NO: 226962 - RNA, 32 nt, Homo Sapiens
uuccuguggccugguccuauagccaaaaucac

SEQ ID NO: 226963 - RNA, 32 nt, Homo Sapiens
cagaugaggggaggggccgcagugcgcagaac

SEQ ID NO: 226964 - RNA, 32 nt, Homo Sapiens
ccaccggcccgcggagcccggaugcuggcccg

SEQ ID NO: 226965 - RNA, 32 nt, Homo Sapiens
auuaaaaaacaaaaauuucuaauggauuuauc

SEQ ID NO: 226966 - RNA, 32 nt, Homo Sapiens
cugccuguacaaccuguauuguuccauagccu

SEQ ID NO: 226967 - RNA, 32 nt, Homo Sapiens
aagagggugcagugccggcgugggcggccggc

SEQ ID NO: 226968 - RNA, 32 nt, Homo Sapiens
aaccuuaaggcuaaacaaaaauaaacaaaaaa

SEQ ID NO: 226969 - RNA, 32 nt, Homo Sapiens
cucaaacucuaccuguucucugcaaucaucca

SEQ ID NO: 226970 - RNA, 32 nt, Homo Sapiens
agcuaggugugguggcucaugccuguaauccu

SEQ ID NO: 226971 - RNA, 32 nt, Homo Sapiens
gucucaccucggcugcagaaacccacccugcu

SEQ ID NO: 226972 - RNA, 32 nt, Homo Sapiens
uuucucuaauuauuagagaaauuagaagacuu

SEQ ID NO: 226973 - RNA, 32 nt, Homo Sapiens
guccagcccuccccucuccugcacuccaaggg

SEQ ID NO: 226974 - RNA, 32 nt, Homo Sapiens
ugaaggaucuuauaagaaaugcaagaggauau

SEQ ID NO: 226975 - RNA, 32 nt, Homo Sapiens
agcggggaggaggagaaggaugcagccgccga

SEQ ID NO: 226976 - RNA, 32 nt, Homo Sapiens
gauuaaaugaauuaagaucgauaaagugcuua

SEQ ID NO: 226977 - RNA, 32 nt, Homo Sapiens
uguauugucucuucuuaaacuaucuuauugac

SEQ ID NO: 226978 - RNA, 32 nt, Homo Sapiens
ccaaaaugucacaaccaaaacuuuacaagcuu

SEQ ID NO: 226979 - RNA, 32 nt, Homo Sapiens
cugggaucaagcgauucuccuaccucagccuc

SEQ ID NO: 226980 - RNA, 32 nt, Homo Sapiens
ucagcaagcucccugggccugauuuucaaauc

SEQ ID NO: 226981 - RNA, 32 nt, Homo Sapiens
aggcucucggugccgaagauugccugccagag

SEQ ID NO: 226982 - RNA, 32 nt, Homo Sapiens
uggcuuguaucucuuauuugcacauguuuuua

SEQ ID NO: 226983 - RNA, 32 nt, Homo Sapiens
aaagcccgcgcgcugcugcgucccacacccgg

SEQ ID NO: 226984 - RNA, 32 nt, Homo Sapiens
aaagaucuuaagagggugcagaacgaaccacu

SEQ ID NO: 226985 - RNA, 32 nt, Homo Sapiens
ccuguggagacugugcacgugccucuuccugg

SEQ ID NO: 226986 - RNA, 32 nt, Homo Sapiens
guagcuaggaccaggugcgcgccaccacgccc

SEQ ID NO: 226987 - RNA, 32 nt, Homo Sapiens
agugguaacagcggacguuguccucgugguca

SEQ ID NO: 226988 - RNA, 32 nt, Homo Sapiens
auuucccucccuccccacuccccuggcccuag

SEQ ID NO: 226989 - RNA, 28 nt, Homo Sapiens
cggggcggcggcggcggcgugaagucac

SEQ ID NO: 226990 - RNA, 32 nt, Homo Sapiens
aauccuuaaaaauaaacuugagcuggaauuug

SEQ ID NO: 226991 - RNA, 31 nt, Homo Sapiens
cugacuucuggacuucugagaaguacgucau

SEQ ID NO: 226992 - RNA, 32 nt, Homo Sapiens
aacucuguauucucccuugucauuccaaccaa

SEQ ID NO: 226993 - RNA, 32 nt, Homo Sapiens
cccugugccaccuccugccugugaaagccccc

SEQ ID NO: 226994 - RNA, 32 nt, Homo Sapiens
uucaucuauaaaaugucaugaaagaaaauaaa

SEQ ID NO: 226995 - RNA, 32 nt, Homo Sapiens
ccauuuuuauuacugaaagaaauaugggcauu

SEQ ID NO: 226996 - RNA, 32 nt, Homo Sapiens
gacaggaaggaguguuacacacugcuuacccu

SEQ ID NO: 226997 - RNA, 32 nt, Homo Sapiens
gguuguagaucgaguucucaaaggugaaacca

SEQ ID NO: 226998 - RNA, 32 nt, Homo Sapiens
ccuuuuaaaaauuauuauuugaaguaauuuau

SEQ ID NO: 226999 - RNA, 32 nt, Homo Sapiens
uuggaguugggcggccgggccgagggcccagg

SEQ ID NO: 227000 - RNA, 32 nt, Homo Sapiens
ucgcuccccagaagcaccucucuggguauggg

SEQ ID NO: 227001 - RNA, 30 nt, Homo Sapiens
gccgguuccucugcugcagaaguccucggg

SEQ ID NO: 227002 - RNA, 32 nt, Homo Sapiens
ccguuugcagcacugguuuuguuuccuuaaua

SEQ ID NO: 227003 - RNA, 32 nt, Homo Sapiens
ucuggacggaaccacguacuuuuuacauacau

SEQ ID NO: 227004 - RNA, 32 nt, Homo Sapiens
augucuuuaguuccucauguuaacacgaagcc

SEQ ID NO: 227005 - RNA, 32 nt, Homo Sapiens
ggcuucuccuucuccuucccauuucucuacac

SEQ ID NO: 227006 - RNA, 32 nt, Homo Sapiens
ucauuacuuuguaccccuauccuuccaagcac

SEQ ID NO: 227007 - RNA, 32 nt, Homo Sapiens
auuugaauuuaaaaauagaugcuggcuccacg

SEQ ID NO: 227008 - RNA, 32 nt, Homo Sapiens
ccaagcaaccucagccaaugaguccaauguca

SEQ ID NO: 227009 - RNA, 32 nt, Homo Sapiens
gcaagugaauccacauuaaugccuugucgugg

SEQ ID NO: 227010 - RNA, 32 nt, Homo Sapiens
acagugcgcccauuccaacuggaauagcaguu

SEQ ID NO: 227011 - RNA, 32 nt, Homo Sapiens
ccucacagcuggaggcuuuccaggccaaaaug

SEQ ID NO: 227012 - RNA, 32 nt, Homo Sapiens
gccuucugacuucuagaaccacauuuccucug

SEQ ID NO: 227013 - RNA, 32 nt, Homo Sapiens
ccgcggcgccgaucccggcugaggcgcagcgg

SEQ ID NO: 227014 - RNA, 32 nt, Homo Sapiens
ugccauuucauuauuugauuaucaccaaauua

SEQ ID NO: 227015 - RNA, 32 nt, Homo Sapiens
ggaagcccacccaagccggcggggcccuagcg

SEQ ID NO: 227016 - RNA, 32 nt, Homo Sapiens
cuuuuuuccuuuccuuuugacauuggagaauu

SEQ ID NO: 227017 - RNA, 32 nt, Homo Sapiens
ugcgaagucaaucugcuacuuaacccugaaaa

SEQ ID NO: 227018 - RNA, 32 nt, Homo Sapiens
cgccaaggaaguuugagacgcgggagaaugca

SEQ ID NO: 227019 - RNA, 32 nt, Homo Sapiens
ggugcugccccaggacacacuccaguugccgu

SEQ ID NO: 227020 - RNA, 32 nt, Homo Sapiens
ucuggagaaagaccuuauaaauguaagacaug

SEQ ID NO: 227021 - RNA, 32 nt, Homo Sapiens
auguguuuaagugcucauccauaaucacagca

SEQ ID NO: 227022 - RNA, 32 nt, Homo Sapiens
acaccuugauacugaggccauuuagagcaauu

SEQ ID NO: 227023 - RNA, 32 nt, Homo Sapiens
gcccaaaauggcaaagcggcguccguggccgc

SEQ ID NO: 227024 - RNA, 32 nt, Homo Sapiens
cucggcugccuuuuccucuaucuugagcccua

SEQ ID NO: 227025 - RNA, 32 nt, Homo Sapiens
cuuuuguuugguuacauaguaacaggaagucc

SEQ ID NO: 227026 - RNA, 32 nt, Homo Sapiens
ugagagaggaggaagagggagucuggcaugag

SEQ ID NO: 227027 - RNA, 32 nt, Homo Sapiens
uaucuagaauacuaugauuagguaguugagca

SEQ ID NO: 227028 - RNA, 32 nt, Homo Sapiens
cauugcauuguuaguacaaguguuuuuccccc

SEQ ID NO: 227029 - RNA, 32 nt, Homo Sapiens
ggauguuugucaaaaaguggaucuucuuggag

SEQ ID NO: 227030 - RNA, 32 nt, Homo Sapiens
ucaagcaguccacagcagucuggcuggcaggu

SEQ ID NO: 227031 - RNA, 32 nt, Homo Sapiens
ggucauacagcuugguggaggacacagaugug

SEQ ID NO: 227032 - RNA, 30 nt, Homo Sapiens
gcaccaacagaacguucugagucugaccaa

SEQ ID NO: 227033 - RNA, 32 nt, Homo Sapiens
ggcccgacuuccccggcugaggccgcugcgac

SEQ ID NO: 227034 - RNA, 32 nt, Homo Sapiens
uuuuaucuuuuuucuuuuuuuuuguuuaagcu

SEQ ID NO: 227035 - RNA, 32 nt, Homo Sapiens
aguggcaggcccuggaggaugagaagguggca

SEQ ID NO: 227036 - RNA, 32 nt, Homo Sapiens
ucauccagaaaagaaaaacacgagaaacgcca

SEQ ID NO: 227037 - RNA, 32 nt, Homo Sapiens
cuuauuccucccauuccucuacuuuacugugu

SEQ ID NO: 227038 - RNA, 32 nt, Homo Sapiens
auggcuauuaucuauuucaucaguuauugaau

SEQ ID NO: 227039 - RNA, 32 nt, Homo Sapiens
uggcauuuuccacaccuguccacuccuuggag

SEQ ID NO: 227040 - RNA, 31 nt, Homo Sapiens
uucucucacccagagcagcaaacacaugaaa

SEQ ID NO: 227041 - RNA, 32 nt, Homo Sapiens
aagaugggcucaauuaugagccagggaggauu

SEQ ID NO: 227042 - RNA, 32 nt, Homo Sapiens
ugggugcugcccguggaagccagggagggaug

SEQ ID NO: 227043 - RNA, 32 nt, Homo Sapiens
aauauaaaugucagcugguuuugauacugaau

SEQ ID NO: 227044 - RNA, 32 nt, Homo Sapiens
cucugggaggaagaagcgucaggacugcagcu

SEQ ID NO: 227045 - RNA, 32 nt, Homo Sapiens
uauuuuuuccauaaauacuuugaaacguauuu

SEQ ID NO: 227046 - RNA, 32 nt, Homo Sapiens
cuauuuugauaaagauaaucuuaaagcugagg

SEQ ID NO: 227047 - RNA, 32 nt, Homo Sapiens
cauuuguguugcaccuguuaggccagcuguaa

SEQ ID NO: 227048 - RNA, 32 nt, Homo Sapiens
uaaaugccuuuuuuccucuccuuuuggucucc

SEQ ID NO: 227049 - RNA, 32 nt, Homo Sapiens
ugagaaagauuguacaaguauaaagaauguga

SEQ ID NO: 227050 - RNA, 32 nt, Homo Sapiens
aacugcgguguugggagagucuuuguguuggg

SEQ ID NO: 227051 - RNA, 32 nt, Homo Sapiens
auuucuggcucuaucagaguuguuucaugcuc

SEQ ID NO: 227052 - RNA, 32 nt, Homo Sapiens
ugguaacucacagaacagcucagguucauuuc

SEQ ID NO: 227053 - RNA, 32 nt, Homo Sapiens
aaaguaaggguuuuuuuuuuuagcuuccacuc

SEQ ID NO: 227054 - RNA, 32 nt, Homo Sapiens
ccucaauguucccuccugcucuccugccccau

SEQ ID NO: 227055 - RNA, 32 nt, Homo Sapiens
uuucuuacuggugcuuaagcucuucuuugcac

SEQ ID NO: 227056 - RNA, 32 nt, Homo Sapiens
uggaaggccccuccccaucgccagccgggccc

SEQ ID NO: 227057 - RNA, 32 nt, Homo Sapiens
gugccgcagcggggagaugugcccagaggagg

SEQ ID NO: 227058 - RNA, 32 nt, Homo Sapiens
cgucagggggcagccuugucccggcccagugu

SEQ ID NO: 227059 - RNA, 32 nt, Homo Sapiens
cuugaaaggggaggcagaucucaaacuccagg

SEQ ID NO: 227060 - RNA, 32 nt, Homo Sapiens
cauuuggcagggcaucgaagggaugcauccau

SEQ ID NO: 227061 - RNA, 32 nt, Homo Sapiens
acagucuggugggagagugcagacacacacgg

SEQ ID NO: 227062 - RNA, 32 nt, Homo Sapiens
ucaagcagccgagccugggcccgggcugcggg

SEQ ID NO: 227063 - RNA, 32 nt, Homo Sapiens
cacuccacaacccaagaaucugcagcuaacuu

SEQ ID NO: 227064 - RNA, 32 nt, Homo Sapiens
gacccgcggcggggcggcauccccagcugguu

SEQ ID NO: 227065 - RNA, 32 nt, Homo Sapiens
gagauucaacaaauugucaaguuacacacuuc

SEQ ID NO: 227066 - RNA, 32 nt, Homo Sapiens
uguuuguuuugccucuucuguuucuuggagga

SEQ ID NO: 227067 - RNA, 32 nt, Homo Sapiens
gcuaccagggucucagagaaaagcagauuaca

SEQ ID NO: 227068 - RNA, 32 nt, Homo Sapiens
ccagggcagguaucagggugaacugaucuuag

SEQ ID NO: 227069 - RNA, 32 nt, Homo Sapiens
agcuggaggagcuggcucuuugccuggccccg

SEQ ID NO: 227070 - RNA, 29 nt, Homo Sapiens
caauuucuuccuuuccugcuugaauaaga

SEQ ID NO: 227071 - RNA, 32 nt, Homo Sapiens
ccuuccccaccuuuuccagaggaaccuguucu

SEQ ID NO: 227072 - RNA, 32 nt, Homo Sapiens
ccaccaucaccgcucgcaccccagccgcccgg

SEQ ID NO: 227073 - RNA, 32 nt, Homo Sapiens
gaggggggaggggacagagggggcgucacggg

SEQ ID NO: 227074 - RNA, 32 nt, Homo Sapiens
aguagcuaaacuaaucaaaaucuuauaugaau

SEQ ID NO: 227075 - RNA, 32 nt, Homo Sapiens
ugucacccacccaccgcaggcuggccgggccu

SEQ ID NO: 227076 - RNA, 32 nt, Homo Sapiens
uuuccagcgcauuccaguuugcuggcgugauu

SEQ ID NO: 227077 - RNA, 32 nt, Homo Sapiens
gagauguuagaccgagagaaaagcaaacaaau

SEQ ID NO: 227078 - RNA, 32 nt, Homo Sapiens
acccgcgggcaggcacugcccgggcuggacga

SEQ ID NO: 227079 - RNA, 32 nt, Homo Sapiens
aaugcacccaccagcucaaacacaccaauaaa

SEQ ID NO: 227080 - RNA, 32 nt, Homo Sapiens
ccucuccuugggauuauggguguaacaaaaau

SEQ ID NO: 227081 - RNA, 32 nt, Homo Sapiens
gagcguggcucaccgggcccggccggaaccua

SEQ ID NO: 227082 - RNA, 32 nt, Homo Sapiens
caacacggguggcgagcagaucaaccaggugg

SEQ ID NO: 227083 - RNA, 32 nt, Homo Sapiens
gaggcagguggucuaagugcugacuggcuacg

SEQ ID NO: 227084 - RNA, 32 nt, Homo Sapiens
aaaacauguuuguugcuuuuuaucucgcugcc

SEQ ID NO: 227085 - RNA, 32 nt, Homo Sapiens
cugucagcauuacaggauccccagaaagcugu

SEQ ID NO: 227086 - RNA, 32 nt, Homo Sapiens
gucuggccgcaccuuaaaaacuauuuauucac

SEQ ID NO: 227087 - RNA, 32 nt, Homo Sapiens
accccagcuuuaggaaagaucaugucuacuag

SEQ ID NO: 227088 - RNA, 32 nt, Homo Sapiens
gaaaaauggguggaagacaagugcagggaaag

SEQ ID NO: 227089 - RNA, 32 nt, Homo Sapiens
gggguggaggagaauauguggguguggacagg

SEQ ID NO: 227090 - RNA, 32 nt, Homo Sapiens
gaacucggguaguccaguggccuagcugguac

SEQ ID NO: 227091 - RNA, 32 nt, Homo Sapiens
aucuggugggagaggguggggagguuguggcc

SEQ ID NO: 227092 - RNA, 32 nt, Homo Sapiens
aguucccaaguccauguguaccccgcucacca

SEQ ID NO: 227093 - RNA, 32 nt, Homo Sapiens
gcacgccagggcuggggugcugcugcugcacu

SEQ ID NO: 227094 - RNA, 32 nt, Homo Sapiens
aaaggagcauauaaggcuaaauguaaaacaca

SEQ ID NO: 227095 - RNA, 31 nt, Homo Sapiens
gaagggcaagaggucuucugaacacauccac

SEQ ID NO: 227096 - RNA, 32 nt, Homo Sapiens
gguguggacuaagccagcuuugaaaggcauuu

SEQ ID NO: 227097 - RNA, 32 nt, Homo Sapiens
accacaguucccugccaccuccaggcacaaaa

SEQ ID NO: 227098 - RNA, 32 nt, Homo Sapiens
ugauugcugacagcuacagucaaugaaccugc

SEQ ID NO: 227099 - RNA, 32 nt, Homo Sapiens
gagccaggcccggcccucccgcccccgaccug

SEQ ID NO: 227100 - RNA, 32 nt, Homo Sapiens
caguccauauaccacccaggccugcgaggagc

SEQ ID NO: 227101 - RNA, 32 nt, Homo Sapiens
uagaaggccccugccaggucacagcaaugcuc

SEQ ID NO: 227102 - RNA, 31 nt, Homo Sapiens
aauaugaaauaaaaauucuucagugaaauag

SEQ ID NO: 227103 - RNA, 32 nt, Homo Sapiens
gguguaagucacuguacccagcccaaaagcag

SEQ ID NO: 227104 - RNA, 32 nt, Homo Sapiens
cacccauauuaagaaaccauggagcaagaaag

SEQ ID NO: 227105 - RNA, 32 nt, Homo Sapiens
aacgaaugaaaaacuggaaauaauucguuucc

SEQ ID NO: 227106 - RNA, 32 nt, Homo Sapiens
aaacugaugaaacuuuuagaccgaauauuccu

SEQ ID NO: 227107 - RNA, 32 nt, Homo Sapiens
cagguaaagauaggcuaucucaacacugcuga

SEQ ID NO: 227108 - RNA, 32 nt, Homo Sapiens
aguggguugggacuuuuaaauacugagccugg

SEQ ID NO: 227109 - RNA, 32 nt, Homo Sapiens
aagggagggcgagcccuugggaugccgucuga

SEQ ID NO: 227110 - RNA, 32 nt, Homo Sapiens
caggugagagaauucuuaggggcuguggguuu

SEQ ID NO: 227111 - RNA, 32 nt, Homo Sapiens
cagaaacaggugugugcuuccaggcgcacaga

SEQ ID NO: 227112 - RNA, 28 nt, Homo Sapiens
ggcuucuuagaaaauauuauaaaaagaa

SEQ ID NO: 227113 - RNA, 32 nt, Homo Sapiens
acugguuuucuauuuacgcaugauauuuuccu

SEQ ID NO: 227114 - RNA, 32 nt, Homo Sapiens
uuuuugcugaaauaaugaagauaauaauaaaa

SEQ ID NO: 227115 - RNA, 32 nt, Homo Sapiens
uuagaggucuugauauacaauuuuccugaagc

SEQ ID NO: 227116 - RNA, 32 nt, Homo Sapiens
aaaagcccagcauguauguaugcacacauugu

SEQ ID NO: 227117 - RNA, 32 nt, Homo Sapiens
gaauuugaagauuggaagcuuauauugagacc

SEQ ID NO: 227118 - RNA, 32 nt, Homo Sapiens
aaaaagucucuaacuggcaugauuugauuacu

SEQ ID NO: 227119 - RNA, 32 nt, Homo Sapiens
uguuagggaucuuuguucucugaaacgcaacc

SEQ ID NO: 227120 - RNA, 30 nt, Homo Sapiens
ccuuucugcugcugcaucccuccagugucc

SEQ ID NO: 227121 - RNA, 32 nt, Homo Sapiens
accaguauuuauugagcaucuaccauguacca

SEQ ID NO: 227122 - RNA, 32 nt, Homo Sapiens
ggcaguacuguaaauucaguugaauuuugaua

SEQ ID NO: 227123 - RNA, 32 nt, Homo Sapiens
gacauuucaaggauuuuuauugcucugugagu

SEQ ID NO: 227124 - RNA, 27 nt, Homo Sapiens
uacaccuguaucuucagccccacagua

SEQ ID NO: 227125 - RNA, 32 nt, Homo Sapiens
ccuuugucuaaucaacguuuccacuuagaucu

SEQ ID NO: 227126 - RNA, 32 nt, Homo Sapiens
acagugauagcggcuuccuggcgggugggagg

SEQ ID NO: 227127 - RNA, 32 nt, Homo Sapiens
agcugcucaagaccaugggaacccaucucuug

SEQ ID NO: 227128 - RNA, 32 nt, Homo Sapiens
auauaacguguuauugccaucuagaagaacua

SEQ ID NO: 227129 - RNA, 32 nt, Homo Sapiens
gugcacccagcauguccuaggaaugcagcccc

SEQ ID NO: 227130 - RNA, 32 nt, Homo Sapiens
agagaggacacagucccggccugggcugcccc

SEQ ID NO: 227131 - RNA, 32 nt, Homo Sapiens
cauugguuuucuuuuucuuuuuucuuucuuuu

SEQ ID NO: 227132 - RNA, 32 nt, Homo Sapiens
cuggauuaagcuuuguugugauugugaccaac

SEQ ID NO: 227133 - RNA, 32 nt, Homo Sapiens
gagcagccaucuauagaccucccccgaggaau

SEQ ID NO: 227134 - RNA, 32 nt, Homo Sapiens
cagacucucccucuucugcuuuucccagcagg

SEQ ID NO: 227135 - RNA, 32 nt, Homo Sapiens
uguuauuguaguaguauguaacuauuaccuaa

SEQ ID NO: 227136 - RNA, 32 nt, Homo Sapiens
aaguuuacuuggaaagaaagggcuugcuaaga

SEQ ID NO: 227137 - RNA, 32 nt, Homo Sapiens
uucacaguauaaaauuuccucaccugaaguaa

SEQ ID NO: 227138 - RNA, 32 nt, Homo Sapiens
ggcaggaaaauauuuugucuccaaacuacagc

SEQ ID NO: 227139 - RNA, 32 nt, Homo Sapiens
gagcggcggcggcggacgugcgcacggagcug

SEQ ID NO: 227140 - RNA, 32 nt, Homo Sapiens
cagugcagccuggauccugucgaucuuuacuu

SEQ ID NO: 227141 - RNA, 32 nt, Homo Sapiens
cagcggaucaugacccgggcggcggccgcgaa

SEQ ID NO: 227142 - RNA, 31 nt, Homo Sapiens
aacuaaaaauaaaaauauaugccaaagauuu

SEQ ID NO: 227143 - RNA, 32 nt, Homo Sapiens
auuucauuuuuggagaacuuaauuaacgugag

SEQ ID NO: 227144 - RNA, 32 nt, Homo Sapiens
aaaugacuuaugaauuugauagcauuugggga

SEQ ID NO: 227145 - RNA, 32 nt, Homo Sapiens
ugcuuuacagaaaaggaaacucauucagacug

SEQ ID NO: 227146 - RNA, 32 nt, Homo Sapiens
gugauuuguugauuggcaaugaggauaaaaug

SEQ ID NO: 227147 - RNA, 32 nt, Homo Sapiens
ugcuauagauucugcugagaccucucauagua

SEQ ID NO: 227148 - RNA, 32 nt, Homo Sapiens
uuuuguagcugagaccucucuggagacccaga

SEQ ID NO: 227149 - RNA, 32 nt, Homo Sapiens
gccuagcugcugucacauuuuucuuguuuugu

SEQ ID NO: 227150 - RNA, 32 nt, Homo Sapiens
uaauugggaaaguuagaauguccuuucugaau

SEQ ID NO: 227151 - RNA, 32 nt, Homo Sapiens
cugucgcgagccugccgcgaggaggccagggu

SEQ ID NO: 227152 - RNA, 32 nt, Homo Sapiens
ccuucaaugggguuguguccugauaaacccau

SEQ ID NO: 227153 - RNA, 32 nt, Homo Sapiens
ugaguaaaucugcaaaaggcaaugaaaaugcc

SEQ ID NO: 227154 - RNA, 32 nt, Homo Sapiens
gccagcgggcgccgucggcggcuggcccuguc

SEQ ID NO: 227155 - RNA, 32 nt, Homo Sapiens
gagccauugauagaaaagcaaauaaaacuaga

SEQ ID NO: 227156 - RNA, 32 nt, Homo Sapiens
cagugccucccgccagacccaggcggcuuccu

SEQ ID NO: 227157 - RNA, 29 nt, Homo Sapiens
cuuaacaugaagaucauuggacaagccac

SEQ ID NO: 227158 - RNA, 32 nt, Homo Sapiens
ccgcuggaggccaccaagcugcucuccuucac

SEQ ID NO: 227159 - RNA, 32 nt, Homo Sapiens
aaacagaacuguauuuuugccuuuaaaauuaa

SEQ ID NO: 227160 - RNA, 32 nt, Homo Sapiens
uguaccugggauuuuuaauuccucuugcagug

SEQ ID NO: 227161 - RNA, 32 nt, Homo Sapiens
agaugaugugauggaacacacacacacgcaga

SEQ ID NO: 227162 - RNA, 32 nt, Homo Sapiens
aucccagcugucaguggucucaucucauuagu

SEQ ID NO: 227163 - RNA, 32 nt, Homo Sapiens
agcccugggaugcaccggccagaggccaugcu

SEQ ID NO: 227164 - RNA, 32 nt, Homo Sapiens
accuucuuuuucuauuauguuuguggacuaau

SEQ ID NO: 227165 - RNA, 32 nt, Homo Sapiens
acacagaaaugguagcccugcugcuggaguuc

SEQ ID NO: 227166 - RNA, 32 nt, Homo Sapiens
aagcaggcuuuaauugcuuuaaaauuauauuu

SEQ ID NO: 227167 - RNA, 32 nt, Homo Sapiens
uagggcuugaacuugggccuucugacuccuug

SEQ ID NO: 227168 - RNA, 32 nt, Homo Sapiens
ccugaugagguggcguuugguaacuuguagac

SEQ ID NO: 227169 - RNA, 32 nt, Homo Sapiens
cgggugaggaugacuguuauuuuuguagcuga

SEQ ID NO: 227170 - RNA, 29 nt, Homo Sapiens
uuuuauucuauccuaaaugauagaaacau

SEQ ID NO: 227171 - RNA, 32 nt, Homo Sapiens
cauuaaaauagcaaaaucugccgggcauggug

SEQ ID NO: 227172 - RNA, 32 nt, Homo Sapiens
guggcuuccccucugucaaaucuaguuuccua

SEQ ID NO: 227173 - RNA, 32 nt, Homo Sapiens
accccaaauugucuacuggaaacuauaggcuc

SEQ ID NO: 227174 - RNA, 32 nt, Homo Sapiens
uucccgggagccguuugugcccgggguaaccc

SEQ ID NO: 227175 - RNA, 32 nt, Homo Sapiens
cuauaugagcagaaacaaaacauuguguaaca

SEQ ID NO: 227176 - RNA, 32 nt, Homo Sapiens
gaaaucuagaaauaaugaaaauauaaagaaag

SEQ ID NO: 227177 - RNA, 32 nt, Homo Sapiens
uuucaaguuacauccgcuuuauggagauacua

SEQ ID NO: 227178 - RNA, 32 nt, Homo Sapiens
gugccuucugccgugcgcccgcguggcugcca

SEQ ID NO: 227179 - RNA, 32 nt, Homo Sapiens
gagcauccacaccagacuugcaguacagccuc

SEQ ID NO: 227180 - RNA, 32 nt, Homo Sapiens
guggcuugcacuaauauuugccugcaggcagu

SEQ ID NO: 227181 - RNA, 32 nt, Homo Sapiens
acugaagaugcauaagaaaugcccaagucacu

SEQ ID NO: 227182 - RNA, 32 nt, Homo Sapiens
agcgggcgcgucugcggcugguguuggcgcau

SEQ ID NO: 227183 - RNA, 32 nt, Homo Sapiens
cacgugccuuugauuucggacagauugggccu

SEQ ID NO: 227184 - RNA, 32 nt, Homo Sapiens
uggugagggcuugugggucaucuugcaccuuu

SEQ ID NO: 227185 - RNA, 32 nt, Homo Sapiens
cccuuguugcuguccuugugauaguucucaug

SEQ ID NO: 227186 - RNA, 32 nt, Homo Sapiens
acagguguccaagcagcgagagcuccagcauc

SEQ ID NO: 227187 - RNA, 32 nt, Homo Sapiens
augggccgcucccggggcucccgcggggaggc

SEQ ID NO: 227188 - RNA, 32 nt, Homo Sapiens
cagacuccuuuaaaaaaacaaacaaacaaaaa

SEQ ID NO: 227189 - RNA, 32 nt, Homo Sapiens
ccaagagccaucucgugccaagacuucugcug

SEQ ID NO: 227190 - RNA, 32 nt, Homo Sapiens
ggaaaagaaauccaagaacuacagaagagcag

SEQ ID NO: 227191 - RNA, 32 nt, Homo Sapiens
accuaauuucuuucuuuuuuugauaaggaaau

SEQ ID NO: 227192 - RNA, 32 nt, Homo Sapiens
gugaucauauuuguuuuaguaaaggcugucac

SEQ ID NO: 227193 - RNA, 32 nt, Homo Sapiens
uccaucuugacaaguccuuucagaaacaguag

SEQ ID NO: 227194 - RNA, 32 nt, Homo Sapiens
caguccgcgcagcagucggcguccgccuccca

SEQ ID NO: 227195 - RNA, 32 nt, Homo Sapiens
cgagcagccccugagcacuuucugggacuggg

SEQ ID NO: 227196 - RNA, 32 nt, Homo Sapiens
gucugggcggucggcuuccacuccuucaggcg

SEQ ID NO: 227197 - RNA, 32 nt, Homo Sapiens
agugugacagugaaagguuguauuuguaaagg

SEQ ID NO: 227198 - RNA, 32 nt, Homo Sapiens
uucuggcuuguggcuuaucuuuucacacuuuu

SEQ ID NO: 227199 - RNA, 32 nt, Homo Sapiens
uuuccuuucuucauuuuucugccuggaaugca

SEQ ID NO: 227200 - RNA, 32 nt, Homo Sapiens
agauucuaucaugagguauuuggcugggagcu

SEQ ID NO: 227201 - RNA, 32 nt, Homo Sapiens
cacagcaaacucucuuuucugugggcuaauuu

SEQ ID NO: 227202 - RNA, 32 nt, Homo Sapiens
gggucugugggacuggcccaccccucuucccc

SEQ ID NO: 227203 - RNA, 32 nt, Homo Sapiens
uguaauuuguauuugcauagaucuuugaucua

SEQ ID NO: 227204 - RNA, 32 nt, Homo Sapiens
aaaauacccuuaaggucuuuaagggaggaagu

SEQ ID NO: 227205 - RNA, 29 nt, Homo Sapiens
ugagcggagaucugggcacuguacuuuag

SEQ ID NO: 227206 - RNA, 32 nt, Homo Sapiens
uauuagggcaaugagacugaaacuacuggugu

SEQ ID NO: 227207 - RNA, 32 nt, Homo Sapiens
guaauugucacacaucucugguauaagcaaca

SEQ ID NO: 227208 - RNA, 32 nt, Homo Sapiens
aagcuauaaauuccucuuugcuuugcuuucug

SEQ ID NO: 227209 - RNA, 32 nt, Homo Sapiens
guugcuggcuguuuccuccuuugacucccacu

SEQ ID NO: 227210 - RNA, 32 nt, Homo Sapiens
cgauguggccgcggcugcucccgagcgcaucu

SEQ ID NO: 227211 - RNA, 32 nt, Homo Sapiens
ggaaccucgggagcggcagcuccggcgccugg

SEQ ID NO: 227212 - RNA, 32 nt, Homo Sapiens
caaugaagaacaguugaaacaugcaaaauaug

SEQ ID NO: 227213 - RNA, 32 nt, Homo Sapiens
gacaauggucugagguugggacaguggcagga

SEQ ID NO: 227214 - RNA, 32 nt, Homo Sapiens
aguuccgggaguuccggcguugcccggcaguc

SEQ ID NO: 227215 - RNA, 32 nt, Homo Sapiens
uaacccucagcaugcuaggagagugcacccgu

SEQ ID NO: 227216 - RNA, 29 nt, Homo Sapiens
uugcuuuagggucaucauuuucuaaagaa

SEQ ID NO: 227217 - RNA, 32 nt, Homo Sapiens
gcgagccgggccgggggcggggaaaggggugg

SEQ ID NO: 227218 - RNA, 32 nt, Homo Sapiens
ggggcgggaccggcccggccuauauauugggu

SEQ ID NO: 227219 - RNA, 32 nt, Homo Sapiens
cacccaaggaagacauucugugccggagagag

SEQ ID NO: 227220 - RNA, 32 nt, Homo Sapiens
ugaaugcucugugacacucagaauaggcuauu

SEQ ID NO: 227221 - RNA, 32 nt, Homo Sapiens
gggcacugccagccugucccucauuacccaag

SEQ ID NO: 227222 - RNA, 32 nt, Homo Sapiens
gaagggacgagccugcccuuugaaaggguuuu

SEQ ID NO: 227223 - RNA, 32 nt, Homo Sapiens
gugggagccgcccuucuucaucuuagagaacc

SEQ ID NO: 227224 - RNA, 32 nt, Homo Sapiens
uucaaaacacaaggggcuucuauaguggcaac

SEQ ID NO: 227225 - RNA, 32 nt, Homo Sapiens
agccccggccccagcuucagcucuucgaguug

SEQ ID NO: 227226 - RNA, 32 nt, Homo Sapiens
agcccaacuuucagccagacaggaccuggaug

SEQ ID NO: 227227 - RNA, 32 nt, Homo Sapiens
uucaacauguauuguucauuaagcuagcuucc

SEQ ID NO: 227228 - RNA, 32 nt, Homo Sapiens
cuggggugcagggauguggguuccacagacgg

SEQ ID NO: 227229 - RNA, 32 nt, Homo Sapiens
gcggguccaagcccagcaaccggcuucgcucc

SEQ ID NO: 227230 - RNA, 32 nt, Homo Sapiens
aagcuuuuaaacaguccucaaucuuuauuaca

SEQ ID NO: 227231 - RNA, 32 nt, Homo Sapiens
aauguggagcuguuauuuugcauauauguucu

SEQ ID NO: 227232 - RNA, 32 nt, Homo Sapiens
uucugccuccauguucccucccaacaguucuu

SEQ ID NO: 227233 - RNA, 32 nt, Homo Sapiens
gaaaaguucaaaaacuaauuaauuugaccuug

SEQ ID NO: 227234 - RNA, 32 nt, Homo Sapiens
augcauccucagaggacgagucuacuaauuau

SEQ ID NO: 227235 - RNA, 32 nt, Homo Sapiens
cagcagguacacagggcggggagccucgggag

SEQ ID NO: 227236 - RNA, 32 nt, Homo Sapiens
ugucugugcuacugucugcugcagcuuccgug

SEQ ID NO: 227237 - RNA, 32 nt, Homo Sapiens
gggucuuuccucuaccagguggcacucaugaa

SEQ ID NO: 227238 - RNA, 32 nt, Homo Sapiens
accccgagggaagaugaacgggacgcggaacu

SEQ ID NO: 227239 - RNA, 32 nt, Homo Sapiens
aauuuaguucccuacaugggacccaguacccc

SEQ ID NO: 227240 - RNA, 32 nt, Homo Sapiens
uuauacuguauaugauuauggccuacaauguu

SEQ ID NO: 227241 - RNA, 32 nt, Homo Sapiens
uaaggggcagauuggcgguggguguggggcag

SEQ ID NO: 227242 - RNA, 32 nt, Homo Sapiens
ucauucugugccuccuucugugccuccuacca

SEQ ID NO: 227243 - RNA, 29 nt, Homo Sapiens
aagagcagaguauuuauuuaaaaaauaaa

SEQ ID NO: 227244 - RNA, 32 nt, Homo Sapiens
cgggucaggacggagggaagggcggguugggg

SEQ ID NO: 227245 - RNA, 32 nt, Homo Sapiens
acgagcugugucuuccuucucuccgccgcgaa

SEQ ID NO: 227246 - RNA, 32 nt, Homo Sapiens
ugcaccgcauguccugggguccuucuuugugc

SEQ ID NO: 227247 - RNA, 32 nt, Homo Sapiens
gauguuuugacaaaaauaaaccucaucguugu

SEQ ID NO: 227248 - RNA, 32 nt, Homo Sapiens
gucggguuugucucuggugggcuuucagcucc

SEQ ID NO: 227249 - RNA, 32 nt, Homo Sapiens
gggaagugggagcacaguacugagaaguggga

SEQ ID NO: 227250 - RNA, 30 nt, Homo Sapiens
gcgggcgggcggaccugcgcccugagccuu

SEQ ID NO: 227251 - RNA, 32 nt, Homo Sapiens
uagucuugggguuggcuuggugcagcuggggg

SEQ ID NO: 227252 - RNA, 32 nt, Homo Sapiens
ugccucucccucugccuucucucacagugccc

SEQ ID NO: 227253 - RNA, 32 nt, Homo Sapiens
gggcagcccagcaagacaaaacacauuuacac

SEQ ID NO: 227254 - RNA, 31 nt, Homo Sapiens
ccaggcaauaaacaggcuagagccugggaag

SEQ ID NO: 227255 - RNA, 27 nt, Homo Sapiens
gcauggagggcggggccucggcagcca

SEQ ID NO: 227256 - RNA, 32 nt, Homo Sapiens
acguagaaggcacgguuuuacugugaggagca

SEQ ID NO: 227257 - RNA, 32 nt, Homo Sapiens
ccuaugcccagcccggcccccugcggcuugag

SEQ ID NO: 227258 - RNA, 32 nt, Homo Sapiens
cuacgccggccgccuggcuuugagacaacgug

SEQ ID NO: 227259 - RNA, 32 nt, Homo Sapiens
cuuagaagacauuuuuguacaugcucuucccc

SEQ ID NO: 227260 - RNA, 32 nt, Homo Sapiens
gcuaccguggaucuccuucccuucucuugggg

SEQ ID NO: 227261 - RNA, 32 nt, Homo Sapiens
gaucaaaaggcuaguaugaugaaucugggauc

SEQ ID NO: 227262 - RNA, 32 nt, Homo Sapiens
guaacuaaaaauuauuugaaaaaauuaugccu

SEQ ID NO: 227263 - RNA, 32 nt, Homo Sapiens
agacguggcccuuaaccuccccgaacugaccu

SEQ ID NO: 227264 - RNA, 32 nt, Homo Sapiens
gagcagccccuccccagauaccucuggagcag

SEQ ID NO: 227265 - RNA, 32 nt, Homo Sapiens
uauugguuacuagggcugccacagcaauguac

SEQ ID NO: 227266 - RNA, 32 nt, Homo Sapiens
ucccugucauauuuuccacucuccacgagguc

SEQ ID NO: 227267 - RNA, 32 nt, Homo Sapiens
uuccagaucaucccgucauuuucaguuuguug

SEQ ID NO: 227268 - RNA, 32 nt, Homo Sapiens
uuuucugcaguuccuuauaggcgaagggaacc

SEQ ID NO: 227269 - RNA, 32 nt, Homo Sapiens
uugcccucaggagaugagagccaucucaccuc

SEQ ID NO: 227270 - RNA, 32 nt, Homo Sapiens
ccaacucggggaggaauuagacacggcggcac

SEQ ID NO: 227271 - RNA, 32 nt, Homo Sapiens
caguagagaugccagcagcucuuccuugccag

SEQ ID NO: 227272 - RNA, 32 nt, Homo Sapiens
auauuggagucuuuaaaaguguugaagaauaa

SEQ ID NO: 227273 - RNA, 32 nt, Homo Sapiens
cagaccccauucucucuguucguccuuccuug

SEQ ID NO: 227274 - RNA, 32 nt, Homo Sapiens
ugcaggccgaaucagacccggcgugggcgaau

SEQ ID NO: 227275 - RNA, 32 nt, Homo Sapiens
aacuuuaguguuuuaauacauucaccuguuac

SEQ ID NO: 227276 - RNA, 32 nt, Homo Sapiens
cggcuauucuaaaagugucuuucuaucacugu

SEQ ID NO: 227277 - RNA, 32 nt, Homo Sapiens
aaccaaauugauuuaagaccggacccaagaca

SEQ ID NO: 227278 - RNA, 32 nt, Homo Sapiens
ugguggacauagugaagagguacaacuggacc

SEQ ID NO: 227279 - RNA, 32 nt, Homo Sapiens
gugaauaaccucagccagcgagaucuggccau

SEQ ID NO: 227280 - RNA, 32 nt, Homo Sapiens
agaaguccccaggucaugcugcuguugcugga

SEQ ID NO: 227281 - RNA, 32 nt, Homo Sapiens
uccacguucagaagcugacucugcaggcaaga

SEQ ID NO: 227282 - RNA, 32 nt, Homo Sapiens
aaguuuuguauuuuauauuacuuuuuaguuug

SEQ ID NO: 227283 - RNA, 32 nt, Homo Sapiens
cuaaauacaacacugauacuagauuccacagg

SEQ ID NO: 227284 - RNA, 32 nt, Homo Sapiens
cggccguccugcgagccagccaucccguacgc

SEQ ID NO: 227285 - RNA, 32 nt, Homo Sapiens
uuuucaaggggagucauuugagauauauuuau

SEQ ID NO: 227286 - RNA, 32 nt, Homo Sapiens
acuggguccgccccgcuguagccucaggccug

SEQ ID NO: 227287 - RNA, 32 nt, Homo Sapiens
cggcuuccaacccccaggacaggaccaacccu

SEQ ID NO: 227288 - RNA, 32 nt, Homo Sapiens
gcgcgcguguggaggcgugcgcgucggcggcg

SEQ ID NO: 227289 - RNA, 32 nt, Homo Sapiens
cccgagagggucaggagaaaagcggaggaagc

SEQ ID NO: 227290 - RNA, 32 nt, Homo Sapiens
ccguugguggggggcgggacgggcccauccca

SEQ ID NO: 227291 - RNA, 32 nt, Homo Sapiens
ggggccaggguuggguggguccugucccucca

SEQ ID NO: 227292 - RNA, 32 nt, Homo Sapiens
uauauuggaguaaaaaggacaggguauagaca

SEQ ID NO: 227293 - RNA, 32 nt, Homo Sapiens
ugccacucuggguaucgucuccuauggcaaag

SEQ ID NO: 227294 - RNA, 32 nt, Homo Sapiens
ucaggagaucuggaugcauccuggacaaggga

SEQ ID NO: 227295 - RNA, 32 nt, Homo Sapiens
uggagguggagagaaaucaggcugggacggag

SEQ ID NO: 227296 - RNA, 32 nt, Homo Sapiens
ugacuaaggcuuuauuuauguuugugaaacug

SEQ ID NO: 227297 - RNA, 32 nt, Homo Sapiens
auggauucuaucauccagguccgauuagcaua

SEQ ID NO: 227298 - RNA, 32 nt, Homo Sapiens
agcuuuggucugaguugauaugggagccucag

SEQ ID NO: 227299 - RNA, 32 nt, Homo Sapiens
acgcucccgagcucccccgcggccuggagugg

SEQ ID NO: 227300 - RNA, 32 nt, Homo Sapiens
cuuggacacuucauggaaacacugcugauuug

SEQ ID NO: 227301 - RNA, 32 nt, Homo Sapiens
augagaacagagagaaauauauucauaauuua

SEQ ID NO: 227302 - RNA, 32 nt, Homo Sapiens
ggcuuugcggacucaccuccgggccucguccu

SEQ ID NO: 227303 - RNA, 32 nt, Homo Sapiens
uccuaggacaucucuguaaaaagcaggugacu

SEQ ID NO: 227304 - RNA, 32 nt, Homo Sapiens
ccucgcuggccuacucucuccucccguacggc

SEQ ID NO: 227305 - RNA, 32 nt, Homo Sapiens
cauucuuuggagauggaguauacaugacugca

SEQ ID NO: 227306 - RNA, 32 nt, Homo Sapiens
acagaauggaaauugcuaugucuuuuuaaaug

SEQ ID NO: 227307 - RNA, 32 nt, Homo Sapiens
ucagcaauaccauaguuuuucuacaugugcuc

SEQ ID NO: 227308 - RNA, 32 nt, Homo Sapiens
cucaaagugggaagguuuugggggagggggaa

SEQ ID NO: 227309 - RNA, 32 nt, Homo Sapiens
ccauuuaccacucacuugacaguguccuuuaa

SEQ ID NO: 227310 - RNA, 32 nt, Homo Sapiens
uuuccuggccauucuuguuuccauugugugga

SEQ ID NO: 227311 - RNA, 32 nt, Homo Sapiens
uuuuucuuagaauugaccaaauaagaagugga

SEQ ID NO: 227312 - RNA, 32 nt, Homo Sapiens
cauucaugaagauuaugaauuguuaggacagc

SEQ ID NO: 227313 - RNA, 32 nt, Homo Sapiens
agacaggacuaaguagcagagaauagcuaaga

SEQ ID NO: 227314 - RNA, 32 nt, Homo Sapiens
cacacgaguguucacccgccuggaugagacac

SEQ ID NO: 227315 - RNA, 32 nt, Homo Sapiens
aauaaauauuaagcucuugguuaaauguuuuu

SEQ ID NO: 227316 - RNA, 32 nt, Homo Sapiens
uuuaauuauagcagacacgccauucuaacagg

SEQ ID NO: 227317 - RNA, 32 nt, Homo Sapiens
uagugaaagugaugaagaagaguggcugggag

SEQ ID NO: 227318 - RNA, 32 nt, Homo Sapiens
uccugcaggcggaggccccggcggagaaugag

SEQ ID NO: 227319 - RNA, 32 nt, Homo Sapiens
auccccugugaaaauaaaauuuucaauguuuu

SEQ ID NO: 227320 - RNA, 32 nt, Homo Sapiens
auacucauacauuuuuaauaugguuuaucaau

SEQ ID NO: 227321 - RNA, 32 nt, Homo Sapiens
ggcagccaaccuccggccccaggcaccggggc

SEQ ID NO: 227322 - RNA, 32 nt, Homo Sapiens
aagguuuuuuuuuuuucuuuuuuuuuuuuuua

SEQ ID NO: 227323 - RNA, 32 nt, Homo Sapiens
ggauauuguaagaauaaaugagauaauucaca

SEQ ID NO: 227324 - RNA, 32 nt, Homo Sapiens
auauuucugcuuccccucacuuuuagaaguua

SEQ ID NO: 227325 - RNA, 32 nt, Homo Sapiens
ugggcugugaaugauaauggaauggcuggagu

SEQ ID NO: 227326 - RNA, 32 nt, Homo Sapiens
ucaaccucacccucuccuaguuuuccaacaag

SEQ ID NO: 227327 - RNA, 32 nt, Homo Sapiens
uuauauggcagccaagaaacaccuggagauaa

SEQ ID NO: 227328 - RNA, 32 nt, Homo Sapiens
aaggaguccugcuuaucacaaugaauguucuc

SEQ ID NO: 227329 - RNA, 32 nt, Homo Sapiens
gggauagggcuuugaugucuucauggacuuag

SEQ ID NO: 227330 - RNA, 32 nt, Homo Sapiens
gccaagcugcugucucagcugcagcgcuucga

SEQ ID NO: 227331 - RNA, 32 nt, Homo Sapiens
aggguuuguaaaacuuuauugugagugaugcu

SEQ ID NO: 227332 - RNA, 32 nt, Homo Sapiens
guuagaagauaaagucaaguuuguguucaggg

SEQ ID NO: 227333 - RNA, 31 nt, Homo Sapiens
cacgcgccgcgcagccucggugggcgcccgu

SEQ ID NO: 227334 - RNA, 32 nt, Homo Sapiens
cacugcugcagggccuuccugccuggacagag

SEQ ID NO: 227335 - RNA, 32 nt, Homo Sapiens
ugugugaaauaccagugugguuuguguuugag

SEQ ID NO: 227336 - RNA, 32 nt, Homo Sapiens
gcugagacaacauacucuguccauacauaagc

SEQ ID NO: 227337 - RNA, 32 nt, Homo Sapiens
cugcuuccccuggcagagcuggguggcagcuc

SEQ ID NO: 227338 - RNA, 32 nt, Homo Sapiens
ucauuugcaauguguugagcuccguuaagcac

SEQ ID NO: 227339 - RNA, 32 nt, Homo Sapiens
gaagcggccggcgggggcgaggcagauggggc

SEQ ID NO: 227340 - RNA, 32 nt, Homo Sapiens
gcaccagcugucccaccuccaggguccugacc

SEQ ID NO: 227341 - RNA, 32 nt, Homo Sapiens
ugacagggcccaugucccacaaggcugcuugg

SEQ ID NO: 227342 - RNA, 31 nt, Homo Sapiens
aaaggaaauguguaauaaaacauuuaaaauu

SEQ ID NO: 227343 - RNA, 32 nt, Homo Sapiens
augaaacuuuuguaugauacauaaagugcuug

SEQ ID NO: 227344 - RNA, 32 nt, Homo Sapiens
gguuuucauccaaagguugggccucuucuuaa

SEQ ID NO: 227345 - RNA, 32 nt, Homo Sapiens
aucaggaagaugcagcaauacaugcuggucau

SEQ ID NO: 227346 - RNA, 32 nt, Homo Sapiens
auaaauauuaaacugauuauuucauucuaaaa

SEQ ID NO: 227347 - RNA, 32 nt, Homo Sapiens
gggcggcagaggcucaacgggaugcugacugg

SEQ ID NO: 227348 - RNA, 28 nt, Homo Sapiens
aagaugcuguccgugcgcguugcugcgg

SEQ ID NO: 227349 - RNA, 32 nt, Homo Sapiens
caggggaggaggagaagccagcaggcaccacu

SEQ ID NO: 227350 - RNA, 32 nt, Homo Sapiens
guggugucaauacauuuuagcggacaaagaag

SEQ ID NO: 227351 - RNA, 32 nt, Homo Sapiens
ccaguccaaacaccacggagcauuuggcaauc

SEQ ID NO: 227352 - RNA, 32 nt, Homo Sapiens
gcagggacugccuucuccuuccugcuucaucc

SEQ ID NO: 227353 - RNA, 32 nt, Homo Sapiens
gcacacaguaaguacacaaauuugagcaacag

SEQ ID NO: 227354 - RNA, 32 nt, Homo Sapiens
uucaauuaugcuuuaaugcuuuacagaccaca

SEQ ID NO: 227355 - RNA, 32 nt, Homo Sapiens
augguuacugauggugagcaucuuucaauaug

SEQ ID NO: 227356 - RNA, 32 nt, Homo Sapiens
aauaaauguggguaccucuagugucauauaug

SEQ ID NO: 227357 - RNA, 32 nt, Homo Sapiens
uguguggcagaagggcagggggcuugcaucag

SEQ ID NO: 227358 - RNA, 32 nt, Homo Sapiens
gaagcaagcugaugauauguaguagcugguuc

SEQ ID NO: 227359 - RNA, 32 nt, Homo Sapiens
ccgagaggccccaggugccuccgccacggcuc

SEQ ID NO: 227360 - RNA, 32 nt, Homo Sapiens
cuccuccgccgccgccagcccggagccugagc

SEQ ID NO: 227361 - RNA, 27 nt, Homo Sapiens
cuaacccauuaauugcuggaauaagua

SEQ ID NO: 227362 - RNA, 32 nt, Homo Sapiens
ugagacccucauuguucacuggcuccaucgca

SEQ ID NO: 227363 - RNA, 32 nt, Homo Sapiens
uccaggcagacccaucacuggaagugggauuu

SEQ ID NO: 227364 - RNA, 32 nt, Homo Sapiens
cugguuccagggugggccggugccagcuccgg

SEQ ID NO: 227365 - RNA, 32 nt, Homo Sapiens
gggucuguggcuggggaauagacccauuccuu

SEQ ID NO: 227366 - RNA, 32 nt, Homo Sapiens
uaacaaaaaacgcagcagaggggauccaacgu

SEQ ID NO: 227367 - RNA, 32 nt, Homo Sapiens
uuuuucacaaauuuauucuauuauugaguggc

SEQ ID NO: 227368 - RNA, 32 nt, Homo Sapiens
auaccuucccgagagcagugucgggcaguggg

SEQ ID NO: 227369 - RNA, 32 nt, Homo Sapiens
auacauguguuauuguugcauuacuguguugu

SEQ ID NO: 227370 - RNA, 32 nt, Homo Sapiens
uaccuuucucaguuaccagaaucuugcugcua

SEQ ID NO: 227371 - RNA, 32 nt, Homo Sapiens
cucuacucccacccccacuaccucugggaacc

SEQ ID NO: 227372 - RNA, 32 nt, Homo Sapiens
cggacgcgugggucgggcacuuucccaguccc

SEQ ID NO: 227373 - RNA, 32 nt, Homo Sapiens
ucagccgccgcggcggaugcggcggccaggcu

SEQ ID NO: 227374 - RNA, 32 nt, Homo Sapiens
guauuguuugaaaauuuuuaugaaaccaaaaa

SEQ ID NO: 227375 - RNA, 32 nt, Homo Sapiens
auccaggccccggcugccuggucuugccccac

SEQ ID NO: 227376 - RNA, 32 nt, Homo Sapiens
ggccuguccacgcuuuccugccucccagacga

SEQ ID NO: 227377 - RNA, 32 nt, Homo Sapiens
uccccagaaguggaauugcuaaaccauauggu

SEQ ID NO: 227378 - RNA, 32 nt, Homo Sapiens
gccucaacgcucaugcuucucuaaucaagccc

SEQ ID NO: 227379 - RNA, 32 nt, Homo Sapiens
guacaugagaaacuuugaaaauggaucuucau

SEQ ID NO: 227380 - RNA, 32 nt, Homo Sapiens
acaagcgcgggccugggacggaguagcccccc

SEQ ID NO: 227381 - RNA, 32 nt, Homo Sapiens
cucggccccguccagccguuccugacugcucu

SEQ ID NO: 227382 - RNA, 32 nt, Homo Sapiens
aauccagacauuuggaauugcauauuaaggaa

SEQ ID NO: 227383 - RNA, 32 nt, Homo Sapiens
aaagggcuggggcggucgccgcgcucgcgugu

SEQ ID NO: 227384 - RNA, 32 nt, Homo Sapiens
uguuuguucauuuaaaauauaagauguguugc

SEQ ID NO: 227385 - RNA, 32 nt, Homo Sapiens
gugagccggggcgggggcggaaucccccgcug

SEQ ID NO: 227386 - RNA, 32 nt, Homo Sapiens
uuucggggagguggguggggugcggagcggga

SEQ ID NO: 227387 - RNA, 32 nt, Homo Sapiens
uggggugagcucucuguacauguuguuguucc

SEQ ID NO: 227388 - RNA, 32 nt, Homo Sapiens
ugucucaauaaaagccauuuuaaaagaauauu

SEQ ID NO: 227389 - RNA, 32 nt, Homo Sapiens
uguauguguuugucucuuaaagcauuggugaa

SEQ ID NO: 227390 - RNA, 32 nt, Homo Sapiens
gccuugcccggugcacggcggcuggcgcaccg

SEQ ID NO: 227391 - RNA, 32 nt, Homo Sapiens
ugcggccuccucagcccuccccguucuccugc

SEQ ID NO: 227392 - RNA, 32 nt, Homo Sapiens
ugacuaugcuuaaguguuuaauuuaguuugcu

SEQ ID NO: 227393 - RNA, 32 nt, Homo Sapiens
gacauuuauuaagugaaaaucauggaguuggg

SEQ ID NO: 227394 - RNA, 32 nt, Homo Sapiens
gugggacuuaauaaauacaauaugcuacuccc

SEQ ID NO: 227395 - RNA, 32 nt, Homo Sapiens
cagaaacgauggcggaggaagaaggaccaccu

SEQ ID NO: 227396 - RNA, 32 nt, Homo Sapiens
gaauaggauccgagauguucugcuuuuauccc

SEQ ID NO: 227397 - RNA, 32 nt, Homo Sapiens
gguuuuaaaaaguuuuaaaaauaaucuguuuc

SEQ ID NO: 227398 - RNA, 32 nt, Homo Sapiens
gaaaauacuguaaaacuuuuuguucuguuagc

SEQ ID NO: 227399 - RNA, 32 nt, Homo Sapiens
guagcccaggucggcuugucacucgcugugag

SEQ ID NO: 227400 - RNA, 32 nt, Homo Sapiens
guuccccaugccuugccuguccugcugggcuc

SEQ ID NO: 227401 - RNA, 32 nt, Homo Sapiens
ucuuacaccguuuggugauuuucauguuucuu

SEQ ID NO: 227402 - RNA, 32 nt, Homo Sapiens
accuuggccuuucugaacuauuuccuuuacac

SEQ ID NO: 227403 - RNA, 32 nt, Homo Sapiens
agcccuggccaagcccuccccaucccauguau

SEQ ID NO: 227404 - RNA, 32 nt, Homo Sapiens
ugacuccucaaaccucuuccagauuucucuaa

SEQ ID NO: 227405 - RNA, 28 nt, Homo Sapiens
aagguguggaagggaccaagcgaccaag

SEQ ID NO: 227406 - RNA, 32 nt, Homo Sapiens
ccucuuucccauuguucuguugcuccaccuua

SEQ ID NO: 227407 - RNA, 32 nt, Homo Sapiens
gcgauuccgggcgggcggcggaagaggaggag

SEQ ID NO: 227408 - RNA, 32 nt, Homo Sapiens
uucaagcgauucuccugccucagccuccucag

SEQ ID NO: 227409 - RNA, 32 nt, Homo Sapiens
uuugggaggcggaggcaggaggaucgcucaag

SEQ ID NO: 227410 - RNA, 32 nt, Homo Sapiens
guuuccucugcauuuauauacucuguaguguu

SEQ ID NO: 227411 - RNA, 32 nt, Homo Sapiens
cuugccucaaggaaggacauucucugaggagu

SEQ ID NO: 227412 - RNA, 32 nt, Homo Sapiens
uuuuuucaagccaaauacaugacauaagauca

SEQ ID NO: 227413 - RNA, 32 nt, Homo Sapiens
cucccaugaagaugucgugugcauaagcacaa

SEQ ID NO: 227414 - RNA, 32 nt, Homo Sapiens
cuugaggcaacaggacaagggccugcugucca

SEQ ID NO: 227415 - RNA, 32 nt, Homo Sapiens
cguuccacuugagauagguuggucaucgugca

SEQ ID NO: 227416 - RNA, 32 nt, Homo Sapiens
ccugcuaacuuuuuuucuuaagcuuucuguca

SEQ ID NO: 227417 - RNA, 32 nt, Homo Sapiens
cuccacggugcagcugcggcuuaucucucagc

SEQ ID NO: 227418 - RNA, 32 nt, Homo Sapiens
cuucacuaaaauuuauuauauguacaguauuc

SEQ ID NO: 227419 - RNA, 32 nt, Homo Sapiens
cugagugcuguuuuaaacaggauuggguugau

SEQ ID NO: 227420 - RNA, 32 nt, Homo Sapiens
gggagcacacagcauuauucugauggaaaaag

SEQ ID NO: 227421 - RNA, 32 nt, Homo Sapiens
ucccccaucuacacagaagacugucaccaugc

SEQ ID NO: 227422 - RNA, 32 nt, Homo Sapiens
gcuuccccugcgcccugggaguuugaucucuu

SEQ ID NO: 227423 - RNA, 32 nt, Homo Sapiens
gcuggccgugcagcucugggaauucagaaagc

SEQ ID NO: 227424 - RNA, 32 nt, Homo Sapiens
ccccuucuccucagccuucuccuuagccggug

SEQ ID NO: 227425 - RNA, 32 nt, Homo Sapiens
uuuagaugaugaaacugcagugcagauguucu

SEQ ID NO: 227426 - RNA, 32 nt, Homo Sapiens
gaaacgguagagagaaauagguggggcucccg

SEQ ID NO: 227427 - RNA, 32 nt, Homo Sapiens
auuaagaauuccaaucuaaguauaaagguaca

SEQ ID NO: 227428 - RNA, 32 nt, Homo Sapiens
ccaguugauaucaagaaaauaaauucuuccag

SEQ ID NO: 227429 - RNA, 32 nt, Homo Sapiens
gugaauccucaauuuucugucucguugucugu

SEQ ID NO: 227430 - RNA, 32 nt, Homo Sapiens
aacuugagacaguuuuuuuaaucuuuuaauca

SEQ ID NO: 227431 - RNA, 32 nt, Homo Sapiens
uuuuaaaacaacaaaaagggagggcguugaca

SEQ ID NO: 227432 - RNA, 32 nt, Homo Sapiens
gagaaucugaagaaugagacauugagaaaacu

SEQ ID NO: 227433 - RNA, 32 nt, Homo Sapiens
uaucaagauuuaugucugggaacuaaaauaua

SEQ ID NO: 227434 - RNA, 32 nt, Homo Sapiens
uugggaaauaauuaauagauauuuuucugggg

SEQ ID NO: 227435 - RNA, 32 nt, Homo Sapiens
uucggcgagcggggccgcugcuuguugcgcuc

SEQ ID NO: 227436 - RNA, 32 nt, Homo Sapiens
gcacaaacaugggucauuguagccucaaccuc

SEQ ID NO: 227437 - RNA, 28 nt, Homo Sapiens
ccgagaguuacaggucaaaaagccuugu

SEQ ID NO: 227438 - RNA, 32 nt, Homo Sapiens
cacuggguagagaggaugagggcugguggcug

SEQ ID NO: 227439 - RNA, 32 nt, Homo Sapiens
ggacagagcaagcaaagaagauggaucgauug

SEQ ID NO: 227440 - RNA, 32 nt, Homo Sapiens
cucaguaaaaauacaguguuguugcuguagga

SEQ ID NO: 227441 - RNA, 32 nt, Homo Sapiens
cgaggaacucaauaaagugcuuugaaaaugcu

SEQ ID NO: 227442 - RNA, 32 nt, Homo Sapiens
cuaccuugucuuuuuuuuuuuaaauuuucuuu

SEQ ID NO: 227443 - RNA, 32 nt, Homo Sapiens
gagggcccggacuaggggcggcgggcaccgca

SEQ ID NO: 227444 - RNA, 32 nt, Homo Sapiens
uagcagacaaugacaucacacauuuuaaauaa

SEQ ID NO: 227445 - RNA, 32 nt, Homo Sapiens
uaacuaagaacagcucugaauguauuugcaug

SEQ ID NO: 227446 - RNA, 32 nt, Homo Sapiens
uaaguuuacaccuuuaucuuuccaugggagcc

SEQ ID NO: 227447 - RNA, 32 nt, Homo Sapiens
ugggguggaguagaaagggucuuggauaccag

SEQ ID NO: 227448 - RNA, 32 nt, Homo Sapiens
gaggcgcuggaacccugcguccaggcgugacg

SEQ ID NO: 227449 - RNA, 31 nt, Homo Sapiens
uuagcuucuguggugacucaagauuguuacu

SEQ ID NO: 227450 - RNA, 32 nt, Homo Sapiens
cucugggugcucuccaugagaauggggccauc

SEQ ID NO: 227451 - RNA, 32 nt, Homo Sapiens
gauacaaauauuaaauuacuuuauggaacaaa

SEQ ID NO: 227452 - RNA, 32 nt, Homo Sapiens
ugacugcucccucgaccucucucuucucacuu

SEQ ID NO: 227453 - RNA, 32 nt, Homo Sapiens
gguagagcauaaacucaagaaaauagccuuga

SEQ ID NO: 227454 - RNA, 32 nt, Homo Sapiens
cugcuucuugccacaucuucucagaagacuuu

SEQ ID NO: 227455 - RNA, 32 nt, Homo Sapiens
ggaugaggaaacaagaauaaacagaaugguau

SEQ ID NO: 227456 - RNA, 32 nt, Homo Sapiens
agagccgggccgccccgggggcccgucuuagu

SEQ ID NO: 227457 - RNA, 32 nt, Homo Sapiens
uaucaccuauagaaagacuauauagagauaag

SEQ ID NO: 227458 - RNA, 32 nt, Homo Sapiens
cuucaucucuucgaacuucaguuucuucauaa

SEQ ID NO: 227459 - RNA, 32 nt, Homo Sapiens
ggaggccguggcugugguucgcggcggugcug

SEQ ID NO: 227460 - RNA, 32 nt, Homo Sapiens
caagugggcccagcccggcccgcgucucgaag

SEQ ID NO: 227461 - RNA, 32 nt, Homo Sapiens
gccccacugauaagguaacauuugagcaaguc

SEQ ID NO: 227462 - RNA, 32 nt, Homo Sapiens
ugucuagcacgcucaguccgggcuuggggccc

SEQ ID NO: 227463 - RNA, 32 nt, Homo Sapiens
agugcuggggaguucugccuguguauacuugg

SEQ ID NO: 227464 - RNA, 32 nt, Homo Sapiens
gcugccaguuccucuuugauaaauauauaguu

SEQ ID NO: 227465 - RNA, 32 nt, Homo Sapiens
ccagaucggcccgcccugugguugccccggcc

SEQ ID NO: 227466 - RNA, 32 nt, Homo Sapiens
ccaccccagggccagcuuuuccucaccaggag

SEQ ID NO: 227467 - RNA, 32 nt, Homo Sapiens
ucacaucacuggaguguaaaauuuaaaacaag

SEQ ID NO: 227468 - RNA, 32 nt, Homo Sapiens
gccugcacccgcuguuccgcggcagcggcgag

SEQ ID NO: 227469 - RNA, 32 nt, Homo Sapiens
uuucagauugauuaauucacauaugcuguguu

SEQ ID NO: 227470 - RNA, 32 nt, Homo Sapiens
guggggccaagcccaggcugcccgacugcaga

SEQ ID NO: 227471 - RNA, 32 nt, Homo Sapiens
uuuuguucuuauucuuuuucucauaaguacuc

SEQ ID NO: 227472 - RNA, 32 nt, Homo Sapiens
auaaucuaugaucuuguacagcacuuauagaa

SEQ ID NO: 227473 - RNA, 32 nt, Homo Sapiens
uugcaucaaacuuuuaauuaccucugacugag

SEQ ID NO: 227474 - RNA, 32 nt, Homo Sapiens
cuaggaccaacccaaaugccucuaccuuuauu

SEQ ID NO: 227475 - RNA, 32 nt, Homo Sapiens
ggggaauggugcugcgcggcgggcggguggca

SEQ ID NO: 227476 - RNA, 32 nt, Homo Sapiens
acuuuugacagcuuggcagauuuuaacuccag

SEQ ID NO: 227477 - RNA, 32 nt, Homo Sapiens
gugagccaccgcgcccggccagguuguggguu

SEQ ID NO: 227478 - RNA, 32 nt, Homo Sapiens
gaagucaucaauauuucucuacauuuuguuua

SEQ ID NO: 227479 - RNA, 32 nt, Homo Sapiens
uuggcuguccucggggacuccggcugaggcac

SEQ ID NO: 227480 - RNA, 32 nt, Homo Sapiens
uccucuucuauuaaguuuuagugaaaagccua

SEQ ID NO: 227481 - RNA, 32 nt, Homo Sapiens
ggguuuugagauuagacacauuuuauaauggg

SEQ ID NO: 227482 - RNA, 32 nt, Homo Sapiens
caugucacuagugacuaccacacuggacagug

SEQ ID NO: 227483 - RNA, 32 nt, Homo Sapiens
gggggcaguauuugcauagaaucuaugcauau

SEQ ID NO: 227484 - RNA, 32 nt, Homo Sapiens
gacagucagggugaaacuucuuuugccagaag

SEQ ID NO: 227485 - RNA, 32 nt, Homo Sapiens
uaauuuugcauucuguuuauuuguuaaaggga

SEQ ID NO: 227486 - RNA, 32 nt, Homo Sapiens
guucgggaauuguuuuauguacacuugucagg

SEQ ID NO: 227487 - RNA, 32 nt, Homo Sapiens
agcagggaagaaagccagugcuaacaugcaac

SEQ ID NO: 227488 - RNA, 32 nt, Homo Sapiens
cuggacacauaaaucagcacgcggccggagaa

SEQ ID NO: 227489 - RNA, 32 nt, Homo Sapiens
agugccaggaggacaggagaggccgguccugg

SEQ ID NO: 227490 - RNA, 32 nt, Homo Sapiens
caugugacacuggcucccgguagacgggcacc

SEQ ID NO: 227491 - RNA, 32 nt, Homo Sapiens
gaagccaggggguggggaagagagacgucagc

SEQ ID NO: 227492 - RNA, 32 nt, Homo Sapiens
ggcuauuuuuauuugcagccuaugaguacaca

SEQ ID NO: 227493 - RNA, 32 nt, Homo Sapiens
gguccgugugggcuuccaccucagacaguugc

SEQ ID NO: 227494 - RNA, 32 nt, Homo Sapiens
uacaugauauucccuugcaaguaaauuuuauu

SEQ ID NO: 227495 - RNA, 32 nt, Homo Sapiens
cagcgacuguuggcuucccagaacggaucucc

SEQ ID NO: 227496 - RNA, 32 nt, Homo Sapiens
gacagcuuuggaagagguguccugcugcuguu

SEQ ID NO: 227497 - RNA, 32 nt, Homo Sapiens
uggccccagcucagcucugcugcaucccaggu

SEQ ID NO: 227498 - RNA, 32 nt, Homo Sapiens
ggucugagcggcccggguccugccgggcugac

SEQ ID NO: 227499 - RNA, 32 nt, Homo Sapiens
cugcccgccucagccucccaaagugcuaggau

SEQ ID NO: 227500 - RNA, 32 nt, Homo Sapiens
cugcccgccucggccucccaaagugcugggau

SEQ ID NO: 227501 - RNA, 32 nt, Homo Sapiens
caggugugcacggggcggccaagggcaccuuc

SEQ ID NO: 227502 - RNA, 32 nt, Homo Sapiens
gauguuauaauuuuaggggaaaucacauuuuu

SEQ ID NO: 227503 - RNA, 32 nt, Homo Sapiens
uggagggccccggaauaccggagucccuuuag

SEQ ID NO: 227504 - RNA, 32 nt, Homo Sapiens
acauaagcaauaacaucuguaugguaaaguag

SEQ ID NO: 227505 - RNA, 32 nt, Homo Sapiens
augccaaggccagucugcagccgucgucgcuc

SEQ ID NO: 227506 - RNA, 32 nt, Homo Sapiens
aaauaagaauaaaauaggccaggcacaguggc

SEQ ID NO: 227507 - RNA, 32 nt, Homo Sapiens
aaaagguuauuuauugaaaauuuuucgguaug

SEQ ID NO: 227508 - RNA, 32 nt, Homo Sapiens
gaaacguuguggaaaauccucuggggaauagc

SEQ ID NO: 227509 - RNA, 32 nt, Homo Sapiens
cuuuccagagcauugcgccuucugcagcccag

SEQ ID NO: 227510 - RNA, 32 nt, Homo Sapiens
ucaaaggcguaacgaguucaucuuucuuucac

SEQ ID NO: 227511 - RNA, 32 nt, Homo Sapiens
ggccgguugccuaccggccgcuucucgccgag

SEQ ID NO: 227512 - RNA, 32 nt, Homo Sapiens
aagugccugaggacgguuccagcccugggcca

SEQ ID NO: 227513 - RNA, 32 nt, Homo Sapiens
accuguuaucuaaauccuuuuuaagaaacuua

SEQ ID NO: 227514 - RNA, 32 nt, Homo Sapiens
ggcggaagguggcucgccgucagcgccugcuu

SEQ ID NO: 227515 - RNA, 32 nt, Homo Sapiens
agaguuaaauauuauuugaucguggcugucaa

SEQ ID NO: 227516 - RNA, 32 nt, Homo Sapiens
ucagagcaucagaaugugaguuucacacagau

SEQ ID NO: 227517 - RNA, 32 nt, Homo Sapiens
uuuuccccuaaugccuucuccugccuuuucug

SEQ ID NO: 227518 - RNA, 32 nt, Homo Sapiens
cugcucacccccucagccucaucucuaacugc

SEQ ID NO: 227519 - RNA, 32 nt, Homo Sapiens
ccgcauuuuucccccauuguaccaaaaagaua

SEQ ID NO: 227520 - RNA, 32 nt, Homo Sapiens
ucacugcaagcaaugaaagaaauucugugugg

SEQ ID NO: 227521 - RNA, 32 nt, Homo Sapiens
uccauucaucugcccacccauccgucccuccg

SEQ ID NO: 227522 - RNA, 32 nt, Homo Sapiens
cgggggccgggcgggagccugguggcggguaa

SEQ ID NO: 227523 - RNA, 32 nt, Homo Sapiens
auucacucuguuuugcagaaaagauucugugg

SEQ ID NO: 227524 - RNA, 31 nt, Homo Sapiens
gcuggcagugcaugugcuugaguuaaaugug

SEQ ID NO: 227525 - RNA, 32 nt, Homo Sapiens
gaccgaggguggcacagccuggcuugaguggu

SEQ ID NO: 227526 - RNA, 32 nt, Homo Sapiens
ugcugcaaaaguuugucauucaccucagugga

SEQ ID NO: 227527 - RNA, 32 nt, Homo Sapiens
guaaaccuaguaaaaccuuguucuauuuuuca

SEQ ID NO: 227528 - RNA, 32 nt, Homo Sapiens
uuuuuuugcuucuuaaauuugcuuuucaucau

SEQ ID NO: 227529 - RNA, 32 nt, Homo Sapiens
aacuaguagaaucuuugugccaaggauuacag

SEQ ID NO: 227530 - RNA, 32 nt, Homo Sapiens
guagcacaauugggcuuuggcaaauggguauu

SEQ ID NO: 227531 - RNA, 32 nt, Homo Sapiens
uugcauccgcguuggcuccguccccaggaucu

SEQ ID NO: 227532 - RNA, 32 nt, Homo Sapiens
cggggcuccgacagaggcggcgauuguggcgg

SEQ ID NO: 227533 - RNA, 32 nt, Homo Sapiens
cccacacagcugccgcagcaucucacaccccg

SEQ ID NO: 227534 - RNA, 32 nt, Homo Sapiens
guauuguuguuuucauuuuuuagauuuauucg

SEQ ID NO: 227535 - RNA, 32 nt, Homo Sapiens
auaugagaauucagcgaacuugaaagaaaaau

SEQ ID NO: 227536 - RNA, 32 nt, Homo Sapiens
ccaggugugugauguucccuuuccugugucca

SEQ ID NO: 227537 - RNA, 32 nt, Homo Sapiens
ugcagacuccaagaacaaaaccaccagguauu

SEQ ID NO: 227538 - RNA, 32 nt, Homo Sapiens
uguagguuaugaaaauaaagauuuaggcacug

SEQ ID NO: 227539 - RNA, 32 nt, Homo Sapiens
uguugguugcuuacaguguugauugauuuugu

SEQ ID NO: 227540 - RNA, 32 nt, Homo Sapiens
ucucuucauuggcuuuuggauuuguacauaca

SEQ ID NO: 227541 - RNA, 32 nt, Homo Sapiens
uugcugguacuucaucuggggaccccgaaggg

SEQ ID NO: 227542 - RNA, 32 nt, Homo Sapiens
ucucugacccagucuucggacucauucuguaa

SEQ ID NO: 227543 - RNA, 32 nt, Homo Sapiens
gauccugguuagauucuccuucugcuuguccc

SEQ ID NO: 227544 - RNA, 32 nt, Homo Sapiens
ccgcaccuccucuccuccccagcccuguaggc

SEQ ID NO: 227545 - RNA, 32 nt, Homo Sapiens
aucgagucaagagcuucuaucgcgucaacaau

SEQ ID NO: 227546 - RNA, 32 nt, Homo Sapiens
auuuccaauauuuggaaagcucuuuauagcca

SEQ ID NO: 227547 - RNA, 32 nt, Homo Sapiens
uucccagguucccucggccuguaccucgcgca

SEQ ID NO: 227548 - RNA, 32 nt, Homo Sapiens
caaaaccugauuggccacuggauccugcugcu

SEQ ID NO: 227549 - RNA, 32 nt, Homo Sapiens
caaacacgauaaaccuuucaaaagacuuucua

SEQ ID NO: 227550 - RNA, 32 nt, Homo Sapiens
gccagggguucucaauggaaaaacgaaugcuc

SEQ ID NO: 227551 - RNA, 32 nt, Homo Sapiens
aguuucugacgcgcccgcgucgucccagcucc

SEQ ID NO: 227552 - RNA, 32 nt, Homo Sapiens
gaacggagcuucggagccuccucagugaaggu

SEQ ID NO: 227553 - RNA, 32 nt, Homo Sapiens
agccaugcacacaggugcagacaccccccaac

SEQ ID NO: 227554 - RNA, 32 nt, Homo Sapiens
ccccuaaacaauuuauacauugaagcccuaac

SEQ ID NO: 227555 - RNA, 32 nt, Homo Sapiens
acagauuugauuuguguuuuugaaaugucagu

SEQ ID NO: 227556 - RNA, 32 nt, Homo Sapiens
uucuguagaaucuauuuuaugguuggcauuuu

SEQ ID NO: 227557 - RNA, 32 nt, Homo Sapiens
cgccacgcugcacggcuaccggaccaacuggg

SEQ ID NO: 227558 - RNA, 32 nt, Homo Sapiens
cagcaagcgccggcugggggucgggccgagcg

SEQ ID NO: 227559 - RNA, 32 nt, Homo Sapiens
aagagacuaaaauaaaaugcuaaaucuuaaaa

SEQ ID NO: 227560 - RNA, 32 nt, Homo Sapiens
ugacuuugcccauagaccaaacaaagaaauac

SEQ ID NO: 227561 - RNA, 32 nt, Homo Sapiens
gagaguauugucucuuccccaacacuaacccc

SEQ ID NO: 227562 - RNA, 32 nt, Homo Sapiens
gccaccuggccaugcuguaccagccuugugcu

SEQ ID NO: 227563 - RNA, 32 nt, Homo Sapiens
aauuauucaaaugccuagaaauccauaguuug

SEQ ID NO: 227564 - RNA, 32 nt, Homo Sapiens
guaguccuggaaagaacaucaguugcagaugu

SEQ ID NO: 227565 - RNA, 32 nt, Homo Sapiens
uuguccuucaacaaaaauauaaauugcaaguc

SEQ ID NO: 227566 - RNA, 32 nt, Homo Sapiens
aggagaugcugcugagguuuugaaagaaauuu

SEQ ID NO: 227567 - RNA, 32 nt, Homo Sapiens
gggcgcggugacucacgccuauaaucccagca

SEQ ID NO: 227568 - RNA, 32 nt, Homo Sapiens
cauacaucuucagauugugcuuuugcugaugu

SEQ ID NO: 227569 - RNA, 32 nt, Homo Sapiens
guggcacgaucucggcggcucacuacaaccuc

SEQ ID NO: 227570 - RNA, 32 nt, Homo Sapiens
acgucucugaccucacccuauucaucagcaua

SEQ ID NO: 227571 - RNA, 32 nt, Homo Sapiens
uuagaaaggggagaggcacuugugacuuuguu

SEQ ID NO: 227572 - RNA, 32 nt, Homo Sapiens
agcugggcuuugggccucuccugcccaccucu

SEQ ID NO: 227573 - RNA, 32 nt, Homo Sapiens
cggaaaaguggaagaagcugcagugggagaca

SEQ ID NO: 227574 - RNA, 32 nt, Homo Sapiens
auuaauuaaaacacauagaucugcuuuguguu

SEQ ID NO: 227575 - RNA, 32 nt, Homo Sapiens
auacugcugugucaguuuuguaaaaaauguac

SEQ ID NO: 227576 - RNA, 32 nt, Homo Sapiens
ucagcugccuucuaggacaccugugcaggguc

SEQ ID NO: 227577 - RNA, 32 nt, Homo Sapiens
gccuggggguggcagacgagcccacggcgccg

SEQ ID NO: 227578 - RNA, 32 nt, Homo Sapiens
accauuggccuugucaucgcaagcauuugaca

SEQ ID NO: 227579 - RNA, 32 nt, Homo Sapiens
acuugucuuucuuuccucuuccucuuccggcg

SEQ ID NO: 227580 - RNA, 32 nt, Homo Sapiens
ggagcagcacuucaucgccgcgggggugcugg

SEQ ID NO: 227581 - RNA, 32 nt, Homo Sapiens
agucgggcguggggcgggcagggaguggaguc

SEQ ID NO: 227582 - RNA, 32 nt, Homo Sapiens
aacacaguucccugccuucacaagagguguca

SEQ ID NO: 227583 - RNA, 32 nt, Homo Sapiens
auugcugauuuggggggugccuggugaugagg

SEQ ID NO: 227584 - RNA, 32 nt, Homo Sapiens
uuguuucuuuugcuuuuuaaucaguucuuaau

SEQ ID NO: 227585 - RNA, 32 nt, Homo Sapiens
cgguuuuuauuuugauuuuuucaguauaaaaa

SEQ ID NO: 227586 - RNA, 32 nt, Homo Sapiens
aggaucaugaaugucaaaggcuuuuaucuuga

SEQ ID NO: 227587 - RNA, 32 nt, Homo Sapiens
guguggaaaugacaggacacauccucaaaucc

SEQ ID NO: 227588 - RNA, 32 nt, Homo Sapiens
cugggccucccucugacuucugggcgccagau

SEQ ID NO: 227589 - RNA, 32 nt, Homo Sapiens
agcccucggcccgcugccguagcgccgcuucc

SEQ ID NO: 227590 - RNA, 32 nt, Homo Sapiens
agauucuggagccagagggagagaccccagaa

SEQ ID NO: 227591 - RNA, 32 nt, Homo Sapiens
uuucagauugguguagggcaaagcagaaagua

SEQ ID NO: 227592 - RNA, 32 nt, Homo Sapiens
ggcggcucucucugagacccaaggcugcaguc

SEQ ID NO: 227593 - RNA, 32 nt, Homo Sapiens
uauguggauacccggaaacacacacacacaca

SEQ ID NO: 227594 - RNA, 32 nt, Homo Sapiens
gugagaaaaaaauuaagccuuuaaguuucaga

SEQ ID NO: 227595 - RNA, 32 nt, Homo Sapiens
guuccggcgaacugggggagcggcagugggag

SEQ ID NO: 227596 - RNA, 32 nt, Homo Sapiens
ugugagagugaagacaacauggggcauuuaga

SEQ ID NO: 227597 - RNA, 32 nt, Homo Sapiens
ggcuguugcgaucacagaaggugguggagugu

SEQ ID NO: 227598 - RNA, 32 nt, Homo Sapiens
ucuaggcccucccucaccugaggcccagagug

SEQ ID NO: 227599 - RNA, 32 nt, Homo Sapiens
uucauuauggauauuucugcugccagucacaa

SEQ ID NO: 227600 - RNA, 27 nt, Homo Sapiens
gccacuucuggcuucagcccccaccag

SEQ ID NO: 227601 - RNA, 32 nt, Homo Sapiens
aaauaagaggaugugcuuagcacacagguguc

SEQ ID NO: 227602 - RNA, 32 nt, Homo Sapiens
agugggggacugaguucagguuaccagaacca

SEQ ID NO: 227603 - RNA, 32 nt, Homo Sapiens
cauuuucugcaccuucugauuuuacuuaagca

SEQ ID NO: 227604 - RNA, 32 nt, Homo Sapiens
ggagaagaugacuuaaacuuugcuuuuuguuu

SEQ ID NO: 227605 - RNA, 32 nt, Homo Sapiens
cuggcuaccccgagacccaggaggcgcucugc

SEQ ID NO: 227606 - RNA, 32 nt, Homo Sapiens
cggcugcgcccgccgcgcggcugcacagucac

SEQ ID NO: 227607 - RNA, 32 nt, Homo Sapiens
gcccaucuaugguuucauuccuccccuggcuc

SEQ ID NO: 227608 - RNA, 32 nt, Homo Sapiens
ugggugauggaaggcuccugccugggcccugc

SEQ ID NO: 227609 - RNA, 32 nt, Homo Sapiens
uaauguacauaaaauauauuuauaguacucua

SEQ ID NO: 227610 - RNA, 32 nt, Homo Sapiens
accaagcucuaccccauccccaucccagaccu

SEQ ID NO: 227611 - RNA, 32 nt, Homo Sapiens
uguauccauuagucuaugguaaaauugguuuu

SEQ ID NO: 227612 - RNA, 32 nt, Homo Sapiens
uguuggucgaagcggccgaccacugacuuugu

SEQ ID NO: 227613 - RNA, 32 nt, Homo Sapiens
ucugcgcugccggcccggcgcgggguccggag

SEQ ID NO: 227614 - RNA, 32 nt, Homo Sapiens
uuugaaaugcaaaacuaggaaaagguuaaacu

SEQ ID NO: 227615 - RNA, 32 nt, Homo Sapiens
aaauauuuuuauuuucuuccuugucucauaac

SEQ ID NO: 227616 - RNA, 32 nt, Homo Sapiens
augggaagguuguaaacuauguuguaaaaaua

SEQ ID NO: 227617 - RNA, 32 nt, Homo Sapiens
gaugauaaaacuaauuuugaacuuuuuaauuu

SEQ ID NO: 227618 - RNA, 32 nt, Homo Sapiens
acagaggugucugccaucucuguggccucugg

SEQ ID NO: 227619 - RNA, 32 nt, Homo Sapiens
caaaaacuuuuguaguuuuguauguuacucau

SEQ ID NO: 227620 - RNA, 32 nt, Homo Sapiens
uggccagagacuuacuuguaacucucuaaaug

SEQ ID NO: 227621 - RNA, 29 nt, Homo Sapiens
uguuggguuucgcucagaggcagguuuua

SEQ ID NO: 227622 - RNA, 32 nt, Homo Sapiens
uggaagcccagccgcccgcucccgcggauaaa

SEQ ID NO: 227623 - RNA, 32 nt, Homo Sapiens
gggcuuguggggccugggaggggcaauccuca

SEQ ID NO: 227624 - RNA, 32 nt, Homo Sapiens
uccuggaaucaguauuuccuuccacuguagcu

SEQ ID NO: 227625 - RNA, 32 nt, Homo Sapiens
caagagcuaguagauguguagaucuccguccu

SEQ ID NO: 227626 - RNA, 32 nt, Homo Sapiens
uccaggcuggucuggaacuccugggaucaagu

SEQ ID NO: 227627 - RNA, 32 nt, Homo Sapiens
ugugggcccucccggggcgccuccccucaccc

SEQ ID NO: 227628 - RNA, 32 nt, Homo Sapiens
uucuuuuuacgaugucccacuucgcaucugcu

SEQ ID NO: 227629 - RNA, 32 nt, Homo Sapiens
gaaacggaaauauuugaagugagauuugaccc

SEQ ID NO: 227630 - RNA, 32 nt, Homo Sapiens
uuuacagucgauuuugaagagcuucuacauau

SEQ ID NO: 227631 - RNA, 32 nt, Homo Sapiens
gaaaguugggauuugcaaauaaaggcucugga

SEQ ID NO: 227632 - RNA, 32 nt, Homo Sapiens
auuugugugcauauauuuuauguuguaaacag

SEQ ID NO: 227633 - RNA, 32 nt, Homo Sapiens
uugcugugucuccucagaguauccuguuccgc

SEQ ID NO: 227634 - RNA, 32 nt, Homo Sapiens
cugcauuugcccgaggcccccuccccagcacu

SEQ ID NO: 227635 - RNA, 32 nt, Homo Sapiens
agcagccugagcaacauagugagaccccaucc

SEQ ID NO: 227636 - RNA, 32 nt, Homo Sapiens
gggugagucuguggccuucucuccagggcccc

SEQ ID NO: 227637 - RNA, 32 nt, Homo Sapiens
cggagcugccagccgggcacccccaaccucau

SEQ ID NO: 227638 - RNA, 32 nt, Homo Sapiens
aauugauucuucccacccacgcggcagauggg

SEQ ID NO: 227639 - RNA, 32 nt, Homo Sapiens
cccauaaaaauauuuuaucagaauugcagaac

SEQ ID NO: 227640 - RNA, 32 nt, Homo Sapiens
cacgcuuucaugaccacugggccugcuagucu

SEQ ID NO: 227641 - RNA, 32 nt, Homo Sapiens
caaaaauuaaauuuauauaccuggcuuagaua

SEQ ID NO: 227642 - RNA, 32 nt, Homo Sapiens
agcucggucaggggcugcuuggcgcggcacug

SEQ ID NO: 227643 - RNA, 32 nt, Homo Sapiens
ucuuaaauuaggaaacaauagcuauuuaagaa

SEQ ID NO: 227644 - RNA, 32 nt, Homo Sapiens
cucugugcuucuugugaagucucugauuugaa

SEQ ID NO: 227645 - RNA, 32 nt, Homo Sapiens
ucccugaagaaccauucaggaaaaguacuggg

SEQ ID NO: 227646 - RNA, 32 nt, Homo Sapiens
ucaaucaaugaugcagaaauaacugguuaguc

SEQ ID NO: 227647 - RNA, 32 nt, Homo Sapiens
gagacuucaaggaucaacucuaaagugcuaga

SEQ ID NO: 227648 - RNA, 32 nt, Homo Sapiens
ucuaaauaccagcagaagaggcucccgccucu

SEQ ID NO: 227649 - RNA, 32 nt, Homo Sapiens
cgggaacaggaucggcccgcgggcuggcgucg

SEQ ID NO: 227650 - RNA, 32 nt, Homo Sapiens
cugggcccacugaucagggugcucaggaccag

SEQ ID NO: 227651 - RNA, 32 nt, Homo Sapiens
agcgacggagcuggggccggccugggaccaug

SEQ ID NO: 227652 - RNA, 32 nt, Homo Sapiens
ugcugggaauggggugggugguagacccaacu

SEQ ID NO: 227653 - RNA, 32 nt, Homo Sapiens
ccccucagcacccuccgggcuguggaggaccu

SEQ ID NO: 227654 - RNA, 32 nt, Homo Sapiens
aaccaaacuccagccgcugccagucgggacuu

SEQ ID NO: 227655 - RNA, 32 nt, Homo Sapiens
uuggaacucugcaagaccuacuagauugaauu

SEQ ID NO: 227656 - RNA, 32 nt, Homo Sapiens
cgccuucuggggacgcggcccgggcuacgucg

SEQ ID NO: 227657 - RNA, 32 nt, Homo Sapiens
uugugguuucagaacaagcuuuauuuuauuac

SEQ ID NO: 227658 - RNA, 32 nt, Homo Sapiens
auucacugaaaaauaaaugcuuguuuaguauc

SEQ ID NO: 227659 - RNA, 32 nt, Homo Sapiens
gccacacaccuuuacacccccuccuauagagc

SEQ ID NO: 227660 - RNA, 32 nt, Homo Sapiens
guguccccuacaccccucccccagcuccuucc

SEQ ID NO: 227661 - RNA, 30 nt, Homo Sapiens
gaaacaggcaggcccuugccuuucucggaa

SEQ ID NO: 227662 - RNA, 32 nt, Homo Sapiens
gguuuauagauuuuuuacccauuucuacucuu

SEQ ID NO: 227663 - RNA, 32 nt, Homo Sapiens
uuuuaauucaacaucaaaacuuaagaugggcc

SEQ ID NO: 227664 - RNA, 32 nt, Homo Sapiens
gucucuaucuucugcccuuugcccucuacuuu

SEQ ID NO: 227665 - RNA, 32 nt, Homo Sapiens
aaaauagguucaagauauuauucauugcagua

SEQ ID NO: 227666 - RNA, 32 nt, Homo Sapiens
accuaguucuuugcguuugugcaauaacucuu

SEQ ID NO: 227667 - RNA, 32 nt, Homo Sapiens
uagucgccgccauggcgaccccguccaccucg

SEQ ID NO: 227668 - RNA, 32 nt, Homo Sapiens
ucggcuacugaaugauacaaccaauuccaacc

SEQ ID NO: 227669 - RNA, 32 nt, Homo Sapiens
aggugaacuucucaccugagggcuguaaagac

SEQ ID NO: 227670 - RNA, 32 nt, Homo Sapiens
augagucaaugaggggcagggcccgaggagug

SEQ ID NO: 227671 - RNA, 32 nt, Homo Sapiens
aaaauuaggagauguuacguaacuuggcacuu

SEQ ID NO: 227672 - RNA, 32 nt, Homo Sapiens
accuccccaagccccagggccuaaagagaaga

SEQ ID NO: 227673 - RNA, 32 nt, Homo Sapiens
aggagguucgggugcuggguaagugccauguc

SEQ ID NO: 227674 - RNA, 32 nt, Homo Sapiens
cucagaaagauauuuuuauauuacuucucagc

SEQ ID NO: 227675 - RNA, 32 nt, Homo Sapiens
ggggcgugguggccgccaccuugagggcagag

SEQ ID NO: 227676 - RNA, 32 nt, Homo Sapiens
acuaacauucaacuuguuuuaaaauuaugacu

SEQ ID NO: 227677 - RNA, 32 nt, Homo Sapiens
uuggcccagaagcucaggaucccuggggcugg

SEQ ID NO: 227678 - RNA, 32 nt, Homo Sapiens
agccgagccgcgccgcgccgaugcccucacac

SEQ ID NO: 227679 - RNA, 32 nt, Homo Sapiens
aaauaacuaaugucucuacaauuuugaaauaa

SEQ ID NO: 227680 - RNA, 32 nt, Homo Sapiens
aaccuuuuuuauuuucuuuccuccuucauaag

SEQ ID NO: 227681 - RNA, 32 nt, Homo Sapiens
gaacccaaggaccccccaguugcagccauguc

SEQ ID NO: 227682 - RNA, 32 nt, Homo Sapiens
ggccauccccacuugggaccaggucuguuucc

SEQ ID NO: 227683 - RNA, 32 nt, Homo Sapiens
cuguccccuggccuagccucucuguccuuccc

SEQ ID NO: 227684 - RNA, 32 nt, Homo Sapiens
caguuuuuacuuuagaaguuuaaagugauaua

SEQ ID NO: 227685 - RNA, 32 nt, Homo Sapiens
caauucguucucccuuucccccucucuccagc

SEQ ID NO: 227686 - RNA, 32 nt, Homo Sapiens
uucuccaagggcgcgccuucuaccuccagccc

SEQ ID NO: 227687 - RNA, 32 nt, Homo Sapiens
uuugagcuaaugacugucuccagaaaauaacu

SEQ ID NO: 227688 - RNA, 32 nt, Homo Sapiens
caaguccggaagcuggagaagaugacaaagag

SEQ ID NO: 227689 - RNA, 32 nt, Homo Sapiens
accuccugccagcaagcacucccaggccagcu

SEQ ID NO: 227690 - RNA, 32 nt, Homo Sapiens
uaaaaaugcuggaaaugaaauugugucuagac

SEQ ID NO: 227691 - RNA, 32 nt, Homo Sapiens
uccaugcggaagcuugugcacccauguucaca

SEQ ID NO: 227692 - RNA, 32 nt, Homo Sapiens
ucucucccacugaaaccaaggucuuuucaaau

SEQ ID NO: 227693 - RNA, 28 nt, Homo Sapiens
caggacaggcggccggagagcugccccu

SEQ ID NO: 227694 - RNA, 32 nt, Homo Sapiens
cuugauguauuccacuguuauuacuguuaccu

SEQ ID NO: 227695 - RNA, 32 nt, Homo Sapiens
gguuggugguggccacagaccaguaggagggc

SEQ ID NO: 227696 - RNA, 32 nt, Homo Sapiens
gggagugaggugccaugacagcagccacagcc

SEQ ID NO: 227697 - RNA, 32 nt, Homo Sapiens
ugucugggacccucccucuccugagaggggag

SEQ ID NO: 227698 - RNA, 32 nt, Homo Sapiens
cagcuccacagcuuuacccagaagcccuguaa

SEQ ID NO: 227699 - RNA, 32 nt, Homo Sapiens
cacuccuacacacacacacacacacacacacg

SEQ ID NO: 227700 - RNA, 32 nt, Homo Sapiens
agagcugccgccccagggagcccgccacggcc

SEQ ID NO: 227701 - RNA, 32 nt, Homo Sapiens
uucuuuuucgucuauauauacauauguaacag

SEQ ID NO: 227702 - RNA, 32 nt, Homo Sapiens
cacaucauucuaauguauaguuucaagucuua

SEQ ID NO: 227703 - RNA, 32 nt, Homo Sapiens
ccauuuuuaaacauucagguugccagaccugu

SEQ ID NO: 227704 - RNA, 32 nt, Homo Sapiens
uguaacaaagauuguaugcaguugguauucuc

SEQ ID NO: 227705 - RNA, 32 nt, Homo Sapiens
ugagggggccagggcugcugccauccuggccu

SEQ ID NO: 227706 - RNA, 32 nt, Homo Sapiens
aucaagagaacaaaaugccagaauguuaaaac

SEQ ID NO: 227707 - RNA, 31 nt, Homo Sapiens
cgaguggaaccgagacugccccgcggagccg

SEQ ID NO: 227708 - RNA, 32 nt, Homo Sapiens
uugacagacaccuauauucaugacuugagaau

SEQ ID NO: 227709 - RNA, 32 nt, Homo Sapiens
agucagugccgcgcgcccgccgccccgcgccu

SEQ ID NO: 227710 - RNA, 32 nt, Homo Sapiens
ugaggaaagcaaaugacuaauauuuuauuuuc

SEQ ID NO: 227711 - RNA, 32 nt, Homo Sapiens
aacgaauuuuauuucuuuuuuaucugaucauu

SEQ ID NO: 227712 - RNA, 32 nt, Homo Sapiens
gcuggggaguaggaggcccacucacaagcccu

SEQ ID NO: 227713 - RNA, 32 nt, Homo Sapiens
uuuccuugucgucaccaauuaucauaaccaau

SEQ ID NO: 227714 - RNA, 32 nt, Homo Sapiens
aggcccugcgcggagcggagcggcgcggcguc

SEQ ID NO: 227715 - RNA, 32 nt, Homo Sapiens
uuggcucggcgcccccaccccuggcuaccuug

SEQ ID NO: 227716 - RNA, 32 nt, Homo Sapiens
caugacucguugagaaaguugaggaauuuccu

SEQ ID NO: 227717 - RNA, 32 nt, Homo Sapiens
auauugagcaaaugcagugugugauuucugag

SEQ ID NO: 227718 - RNA, 32 nt, Homo Sapiens
gggcugcauggugugacagagcccuucucugu

SEQ ID NO: 227719 - RNA, 32 nt, Homo Sapiens
agaggaaaacaucacaagccaauggggcucaa

SEQ ID NO: 227720 - RNA, 32 nt, Homo Sapiens
ggcuauacauaaauuauuaagaaauauggauu

SEQ ID NO: 227721 - RNA, 32 nt, Homo Sapiens
cccauggcugcccauggaccaauuggcaugug

SEQ ID NO: 227722 - RNA, 32 nt, Homo Sapiens
ucuucaccuguuggcuuucucuucugcagcaa

SEQ ID NO: 227723 - RNA, 32 nt, Homo Sapiens
agccucccgugucccgucuccuccccucuccg

SEQ ID NO: 227724 - RNA, 32 nt, Homo Sapiens
uucacuccuggaaccuucacuaaccagaucca

SEQ ID NO: 227725 - RNA, 32 nt, Homo Sapiens
guauauacuguaagacugaaagcuuugaugaa

SEQ ID NO: 227726 - RNA, 32 nt, Homo Sapiens
cccagccgggcugccgcccgcgucccggaagc

SEQ ID NO: 227727 - RNA, 32 nt, Homo Sapiens
agcugguguuuguccacagauguucauggguu

SEQ ID NO: 227728 - RNA, 32 nt, Homo Sapiens
gcacuacccacccuuuagggauaagugaagua

SEQ ID NO: 227729 - RNA, 32 nt, Homo Sapiens
cuggauauuuaguggaugucaauguagaugaa

SEQ ID NO: 227730 - RNA, 32 nt, Homo Sapiens
ugugacagugaggguugagggcugguccagag

SEQ ID NO: 227731 - RNA, 32 nt, Homo Sapiens
uaacaaaacugcuaccuucucauccaaguggu

SEQ ID NO: 227732 - RNA, 32 nt, Homo Sapiens
ggaaucugccccgauauuuguuuaccuggaag

SEQ ID NO: 227733 - RNA, 32 nt, Homo Sapiens
ccugcccuugguccuaagugccacuaucugug

SEQ ID NO: 227734 - RNA, 32 nt, Homo Sapiens
aaaaguaucuucugcuccggcuguuucacugc

SEQ ID NO: 227735 - RNA, 32 nt, Homo Sapiens
caucaccuuugaaaccauguuaaacuuuagga

SEQ ID NO: 227736 - RNA, 32 nt, Homo Sapiens
aaggaguuaauacuaaucuuguacauacacaa

SEQ ID NO: 227737 - RNA, 32 nt, Homo Sapiens
ccucgcccucagucucgucuccggcgcggcua

SEQ ID NO: 227738 - RNA, 32 nt, Homo Sapiens
uguagaaaaacauuauuuuaaaaaaguuccaa

SEQ ID NO: 227739 - RNA, 32 nt, Homo Sapiens
gcaaccuccgccucuuggguucaagcgauucu

SEQ ID NO: 227740 - RNA, 32 nt, Homo Sapiens
gccaugggcgcggcuccgcgugcgccuguacc

SEQ ID NO: 227741 - RNA, 32 nt, Homo Sapiens
uacaacccuaaaacacagagaucucacugacc

SEQ ID NO: 227742 - RNA, 32 nt, Homo Sapiens
ugcagaaggcaaggcccugcccugcccaaccu

SEQ ID NO: 227743 - RNA, 32 nt, Homo Sapiens
ugaaacaaucacugugcaaaauguagaggaaa

SEQ ID NO: 227744 - RNA, 32 nt, Homo Sapiens
gccagcuuuucucauguucuaggaaugacaga

SEQ ID NO: 227745 - RNA, 32 nt, Homo Sapiens
gccccuggacuucuugugccuggcagcuggga

SEQ ID NO: 227746 - RNA, 32 nt, Homo Sapiens
cagcggcagcgggagcuguccggaggccggcg

SEQ ID NO: 227747 - RNA, 32 nt, Homo Sapiens
ugggucaugagccaugaguccugggacaucug

SEQ ID NO: 227748 - RNA, 32 nt, Homo Sapiens
ccugcagccaguacaccaaggcuguagggauc

SEQ ID NO: 227749 - RNA, 32 nt, Homo Sapiens
cuaagagugucuaugacuuauuuccuucacuu

SEQ ID NO: 227750 - RNA, 32 nt, Homo Sapiens
cccaggaggacgcuccugugcugcugaccaac

SEQ ID NO: 227751 - RNA, 32 nt, Homo Sapiens
cuuucuucuggcuuuggaaaaaucucaugaug

SEQ ID NO: 227752 - RNA, 32 nt, Homo Sapiens
cuaaugaaguccaucuaauuuugccacuggau

SEQ ID NO: 227753 - RNA, 32 nt, Homo Sapiens
uugcagaaacccagcccugccccugccuccug

SEQ ID NO: 227754 - RNA, 32 nt, Homo Sapiens
uaaagcuccucuuuuccaaggaagccacacca

SEQ ID NO: 227755 - RNA, 32 nt, Homo Sapiens
ugaacauaaccucacuuaauucugguguaggg

SEQ ID NO: 227756 - RNA, 32 nt, Homo Sapiens
ccguauucuggcuuuuuccccaaggaacaugc

SEQ ID NO: 227757 - RNA, 32 nt, Homo Sapiens
ugcuugcagcuaggaggaccuugaagagaaau

SEQ ID NO: 227758 - RNA, 32 nt, Homo Sapiens
aaagaggcaauucaaaaguaaaaaagaauauu

SEQ ID NO: 227759 - RNA, 32 nt, Homo Sapiens
agacauagacaaagagagauaagauuucacau

SEQ ID NO: 227760 - RNA, 32 nt, Homo Sapiens
agaaauuuuucaagcagugugauuauagaugu

SEQ ID NO: 227761 - RNA, 32 nt, Homo Sapiens
uuaggucuuggcgucgggaucccuuuucguca

SEQ ID NO: 227762 - RNA, 32 nt, Homo Sapiens
uggucugcugcagcuggggaugggagugggaa

SEQ ID NO: 227763 - RNA, 32 nt, Homo Sapiens
accgcucagucucuccucucucacuucccuuc

SEQ ID NO: 227764 - RNA, 29 nt, Homo Sapiens
ugagcucggggacaggugacaguggcugc

SEQ ID NO: 227765 - RNA, 32 nt, Homo Sapiens
ugugcucaugauguucuuucuggagguucaac

SEQ ID NO: 227766 - RNA, 32 nt, Homo Sapiens
ggccgucuuccgcucccccucccggccuuuac

SEQ ID NO: 227767 - RNA, 32 nt, Homo Sapiens
aggccgccuuggcgggagccuuagagaggagg

SEQ ID NO: 227768 - RNA, 32 nt, Homo Sapiens
ccccucuuagaucuacuuccccugcccugacu

SEQ ID NO: 227769 - RNA, 32 nt, Homo Sapiens
cuccccaguccccagaacugccugcaggugcc

SEQ ID NO: 227770 - RNA, 32 nt, Homo Sapiens
ugaucggagcagcauuuguuucuccccaaauc

SEQ ID NO: 227771 - RNA, 32 nt, Homo Sapiens
ggagcgcacgggccggcugccgugcccaccac

SEQ ID NO: 227772 - RNA, 32 nt, Homo Sapiens
uaucccauagccugcccgcucaucucucccac

SEQ ID NO: 227773 - RNA, 32 nt, Homo Sapiens
cugaaacaagguggcgagauaucuguauggga

SEQ ID NO: 227774 - RNA, 32 nt, Homo Sapiens
uuuaagcgacauaaggaugaaauacugaugaa

SEQ ID NO: 227775 - RNA, 32 nt, Homo Sapiens
gagguugggggaggggugggcggcaucucgac

SEQ ID NO: 227776 - RNA, 32 nt, Homo Sapiens
uucaagccauucuccugccucagucuccugag

SEQ ID NO: 227777 - RNA, 32 nt, Homo Sapiens
gcacccugguuaguggggaaucuugcaugcug

SEQ ID NO: 227778 - RNA, 32 nt, Homo Sapiens
acucaguuucauauauuauuccguauuacauu

SEQ ID NO: 227779 - RNA, 32 nt, Homo Sapiens
uaaaaacugucaagauuaaaauuuaauaguuu

SEQ ID NO: 227780 - RNA, 32 nt, Homo Sapiens
gcuucuuuuucuuuaaucuccuccacaaugcc

SEQ ID NO: 227781 - RNA, 32 nt, Homo Sapiens
caggaaggaaagacuuuuuaaaaaauaaaaac

SEQ ID NO: 227782 - RNA, 32 nt, Homo Sapiens
guuguaaaacauuauuaauagcagccauccaa

SEQ ID NO: 227783 - RNA, 32 nt, Homo Sapiens
gaaacagggaauaaaucaggauuugugugugu

SEQ ID NO: 227784 - RNA, 32 nt, Homo Sapiens
ucaacaagaaauaccaauaacacacacagaac

SEQ ID NO: 227785 - RNA, 32 nt, Homo Sapiens
ggggaagccuguaggggcgccacgucgccgcc

SEQ ID NO: 227786 - RNA, 32 nt, Homo Sapiens
uaagccccuaaagugcagcaaaacccacugcc

SEQ ID NO: 227787 - RNA, 32 nt, Homo Sapiens
guacccacugucagcagccugcaggcaggucc

SEQ ID NO: 227788 - RNA, 32 nt, Homo Sapiens
cucuuccugugcuucuuuuugaaagaucaaga

SEQ ID NO: 227789 - RNA, 31 nt, Homo Sapiens
ugccugcagcgcagugggcaccagcugauaa

SEQ ID NO: 227790 - RNA, 32 nt, Homo Sapiens
cuaugucugggagggagggaagauggcagccg

SEQ ID NO: 227791 - RNA, 32 nt, Homo Sapiens
cugagccugggcugcccauucaucucagcgac

SEQ ID NO: 227792 - RNA, 32 nt, Homo Sapiens
cacuggaagacaauugccacuuguaaaggaug

SEQ ID NO: 227793 - RNA, 32 nt, Homo Sapiens
caucauacuguaaaaagaguaugugaauagua

SEQ ID NO: 227794 - RNA, 32 nt, Homo Sapiens
uccacacacacacacacacacacacacacaaa

SEQ ID NO: 227795 - RNA, 32 nt, Homo Sapiens
ugagccgggcgcgggcgccuuccgcagagacc

SEQ ID NO: 227796 - RNA, 32 nt, Homo Sapiens
cuugcaucagcugcgcgccccaucccgaggaa

SEQ ID NO: 227797 - RNA, 32 nt, Homo Sapiens
cugcagcugugcccggccccgccuggagccac

SEQ ID NO: 227798 - RNA, 32 nt, Homo Sapiens
acuagacagaaaagguacaaaaauauuucaaa

SEQ ID NO: 227799 - RNA, 32 nt, Homo Sapiens
uccuugcaccccucacucuggccucagccgac

SEQ ID NO: 227800 - RNA, 32 nt, Homo Sapiens
uagucaaugaauucuggaaugcagucuguaua

SEQ ID NO: 227801 - RNA, 32 nt, Homo Sapiens
ugcucaucuucagacuuaauacagcaauaaga

SEQ ID NO: 227802 - RNA, 32 nt, Homo Sapiens
cccaccuuuugacuccccgcccgccccaaucc

SEQ ID NO: 227803 - RNA, 32 nt, Homo Sapiens
acauccucauugaaaauggagggcacucuauc

SEQ ID NO: 227804 - RNA, 32 nt, Homo Sapiens
aggcaugaugcggcagcuuaacaucaauggag

SEQ ID NO: 227805 - RNA, 32 nt, Homo Sapiens
cuggcugagggcggggggcgcuggacacucuc

SEQ ID NO: 227806 - RNA, 32 nt, Homo Sapiens
cacugcacuccagccugggugacagagggaaa

SEQ ID NO: 227807 - RNA, 32 nt, Homo Sapiens
aaagucggcugccacaccaugcccucggcagu

SEQ ID NO: 227808 - RNA, 32 nt, Homo Sapiens
ucagaaccuucuaaugaaaacuccaugccucu

SEQ ID NO: 227809 - RNA, 32 nt, Homo Sapiens
gaacgcaugcgugcuguggucgccuaguaaac

SEQ ID NO: 227810 - RNA, 32 nt, Homo Sapiens
cagugcuggaacaacuaacuaacuugguguua

SEQ ID NO: 227811 - RNA, 32 nt, Homo Sapiens
acuguuuuagaauuaagaagguaauuacuuug

SEQ ID NO: 227812 - RNA, 32 nt, Homo Sapiens
uggucgaucguguggcgccggaggacguuccc

SEQ ID NO: 227813 - RNA, 32 nt, Homo Sapiens
ccccuccugccagcuggacgugggcauuucug

SEQ ID NO: 227814 - RNA, 32 nt, Homo Sapiens
ugguaccucaguuuccucaucccauuuacagu

SEQ ID NO: 227815 - RNA, 32 nt, Homo Sapiens
uguucccuugaccucccuguuugguuucauuc

SEQ ID NO: 227816 - RNA, 32 nt, Homo Sapiens
acuacuuuaagugauucaauaaaugucacaaa

SEQ ID NO: 227817 - RNA, 32 nt, Homo Sapiens
uuugugucuuuacuccacccuucacccuaguu

SEQ ID NO: 227818 - RNA, 32 nt, Homo Sapiens
acuagcaaccagaacuaauauuucauuuaacc

SEQ ID NO: 227819 - RNA, 32 nt, Homo Sapiens
uaaccauacuuagggaggcagacgucaaaggc

SEQ ID NO: 227820 - RNA, 32 nt, Homo Sapiens
cugaaaccuaacuucacccccauaacaccagc

SEQ ID NO: 227821 - RNA, 32 nt, Homo Sapiens
aagcccagaacacuaacaagcgguucucccau

SEQ ID NO: 227822 - RNA, 32 nt, Homo Sapiens
ccucccugggccuccauucuucugggaaacac

SEQ ID NO: 227823 - RNA, 32 nt, Homo Sapiens
gggucugucccgggcgcagcgagaggaugguc

SEQ ID NO: 227824 - RNA, 32 nt, Homo Sapiens
guuuguaaacucuaaagugacauuacuauuau

SEQ ID NO: 227825 - RNA, 32 nt, Homo Sapiens
gcaccaaucaauuuacaaaaccagcgaggcac

SEQ ID NO: 227826 - RNA, 32 nt, Homo Sapiens
cauacagucaacacugagaaucagcacacacc

SEQ ID NO: 227827 - RNA, 32 nt, Homo Sapiens
uggaucuacauucugauuuuuauuuucuacuu

SEQ ID NO: 227828 - RNA, 32 nt, Homo Sapiens
aacuugcauuguuaaucaaaaauucuuuucuc

SEQ ID NO: 227829 - RNA, 32 nt, Homo Sapiens
gacaagagaaagcucugugcucucccagggcg

SEQ ID NO: 227830 - RNA, 32 nt, Homo Sapiens
cuuuuuacuugaugaaacaaaacuauaccucu

SEQ ID NO: 227831 - RNA, 32 nt, Homo Sapiens
aauuucauuuuuccuauauaguagaaaacacg

SEQ ID NO: 227832 - RNA, 32 nt, Homo Sapiens
acaauaugugaaucaaacuguuuaaugaaucc

SEQ ID NO: 227833 - RNA, 32 nt, Homo Sapiens
ccaaggaaggauuuaaccuggugccaagguua

SEQ ID NO: 227834 - RNA, 32 nt, Homo Sapiens
ggcaaaauuuaaaaucacaaauuggcuaaaag

SEQ ID NO: 227835 - RNA, 32 nt, Homo Sapiens
accucggaggccagcccuguccacuccacucu

SEQ ID NO: 227836 - RNA, 32 nt, Homo Sapiens
ucagauaaacacauagaggccagcuuaaaaua

SEQ ID NO: 227837 - RNA, 32 nt, Homo Sapiens
ucugaaacaguauauuacuauuucauauucug

SEQ ID NO: 227838 - RNA, 32 nt, Homo Sapiens
gcagccccgcggccgucccuccucgcugcggc

SEQ ID NO: 227839 - RNA, 32 nt, Homo Sapiens
agaaagaauggcacucuugggcuuggcccaga

SEQ ID NO: 227840 - RNA, 32 nt, Homo Sapiens
uucccaggcuccuggggccccuuggaccugac

SEQ ID NO: 227841 - RNA, 32 nt, Homo Sapiens
guuuugccugaaguuggagugaguguggcucc

SEQ ID NO: 227842 - RNA, 32 nt, Homo Sapiens
gugagcagcuagccgaccaagccccggaaggc

SEQ ID NO: 227843 - RNA, 29 nt, Homo Sapiens
cuaauucgacaucagaggacgcauacagg

SEQ ID NO: 227844 - RNA, 32 nt, Homo Sapiens
ccuuuaaaaaauaauuuagauauucauacuuu

SEQ ID NO: 227845 - RNA, 32 nt, Homo Sapiens
guauggauuuuaaauggaugaaacuucaaauu

SEQ ID NO: 227846 - RNA, 32 nt, Homo Sapiens
cccagcaccucaaggagcacaaaauaugauuc

SEQ ID NO: 227847 - RNA, 32 nt, Homo Sapiens
auuuuuaaaaauuuaaaauucauuauucucug

SEQ ID NO: 227848 - RNA, 32 nt, Homo Sapiens
guggcaggacacucaccuggguguccuggagc

SEQ ID NO: 227849 - RNA, 32 nt, Homo Sapiens
aauuaaagaauguaaaauaaagaauaugccgu

SEQ ID NO: 227850 - RNA, 32 nt, Homo Sapiens
ccucacuguccagcucccguccuguggcucca

SEQ ID NO: 227851 - RNA, 32 nt, Homo Sapiens
auuaugaaaccugguuguacauguuaugaaag

SEQ ID NO: 227852 - RNA, 32 nt, Homo Sapiens
uauuuuauaggaauagugaaaacauuuaggga

SEQ ID NO: 227853 - RNA, 32 nt, Homo Sapiens
auuggaaaugcuucaguccucacaugauaaua

SEQ ID NO: 227854 - RNA, 32 nt, Homo Sapiens
uucuuucccgcacugauccccuccauuuuuug

SEQ ID NO: 227855 - RNA, 32 nt, Homo Sapiens
ggagcagcgucacgggcgcccggcccguuaaa

SEQ ID NO: 227856 - RNA, 32 nt, Homo Sapiens
ucgagcaucagagcuuccagcaggaggaaggg

SEQ ID NO: 227857 - RNA, 32 nt, Homo Sapiens
gcaaucugauucuccugaauuucccagccagg

SEQ ID NO: 227858 - RNA, 32 nt, Homo Sapiens
ugagcccggccgccaucgaugaccccggucgc

SEQ ID NO: 227859 - RNA, 30 nt, Homo Sapiens
ugacaugucugugggaagcucccagaguuu

SEQ ID NO: 227860 - RNA, 32 nt, Homo Sapiens
uuguaaaugcuguucaauuauuaauguaacag

SEQ ID NO: 227861 - RNA, 32 nt, Homo Sapiens
guucuaauauuuuuagcucuguucuuuauaac

SEQ ID NO: 227862 - RNA, 32 nt, Homo Sapiens
ccuacugccggaacucucuggauggccagugg

SEQ ID NO: 227863 - RNA, 32 nt, Homo Sapiens
ggugggcugugugcagcuccgucuuuugcucg

SEQ ID NO: 227864 - RNA, 32 nt, Homo Sapiens
ucuucuaucuguuuucuuuuggauagaagcag

SEQ ID NO: 227865 - RNA, 32 nt, Homo Sapiens
cgguggcacguggagccacggcgugggaguag

SEQ ID NO: 227866 - RNA, 32 nt, Homo Sapiens
ucccagcccgucuccccgcuccaguuuagaac

SEQ ID NO: 227867 - RNA, 32 nt, Homo Sapiens
uuacacagguaacagacauucuucaccuuuuc

SEQ ID NO: 227868 - RNA, 32 nt, Homo Sapiens
ggggauuucuacaggcccuucaacgcuaggcu

SEQ ID NO: 227869 - RNA, 32 nt, Homo Sapiens
cugaguguccaaggcuggcccgaggagccccc

SEQ ID NO: 227870 - RNA, 32 nt, Homo Sapiens
uccgcgcacgagagcuucacggcggccgaggg

SEQ ID NO: 227871 - RNA, 32 nt, Homo Sapiens
uuguaacccaugugccagauguguggaauuuu

SEQ ID NO: 227872 - RNA, 32 nt, Homo Sapiens
uggcagagcuuacaauaaacauuugauaauug

SEQ ID NO: 227873 - RNA, 32 nt, Homo Sapiens
uuucaaauuaaauaauuuuaaaguugcuggcc

SEQ ID NO: 227874 - RNA, 32 nt, Homo Sapiens
uuuauguuuuaaaggggguaacguuuggugug

SEQ ID NO: 227875 - RNA, 32 nt, Homo Sapiens
caauggaaugccaaacacuguugugccaugug

SEQ ID NO: 227876 - RNA, 32 nt, Homo Sapiens
aggaguagcagacaauucugcauuacagagca

SEQ ID NO: 227877 - RNA, 32 nt, Homo Sapiens
ccacgaggguugcuaggcaacagccccugggu

SEQ ID NO: 227878 - RNA, 32 nt, Homo Sapiens
gaaguaaauguuucuuuuauguugcagauaca

SEQ ID NO: 227879 - RNA, 32 nt, Homo Sapiens
aaacugguacucccugacccaggcccccaauc

SEQ ID NO: 227880 - RNA, 32 nt, Homo Sapiens
cauccugccuucagagguuucuccaggacguc

SEQ ID NO: 227881 - RNA, 32 nt, Homo Sapiens
gcuacuucgauauuuauuaaagaaguauuuuu

SEQ ID NO: 227882 - RNA, 32 nt, Homo Sapiens
cccccgcaagcacuggccuuucccgagcacgg

SEQ ID NO: 227883 - RNA, 32 nt, Homo Sapiens
aaggggaacugggauuuggggaggggcuggag

SEQ ID NO: 227884 - RNA, 32 nt, Homo Sapiens
ggaggaauuggaacuagaaugugugacucugu

SEQ ID NO: 227885 - RNA, 31 nt, Homo Sapiens
gguccuggguuaggcaccugagauugacaug

SEQ ID NO: 227886 - RNA, 32 nt, Homo Sapiens
caccgccuccugcccgccugcccgccugcccg

SEQ ID NO: 227887 - RNA, 32 nt, Homo Sapiens
cucagaaaacaaguauagucagguauucucuc

SEQ ID NO: 227888 - RNA, 32 nt, Homo Sapiens
aguguuuuguauuacauagucuauucaguaca

SEQ ID NO: 227889 - RNA, 32 nt, Homo Sapiens
agcugcaguuugguggauugguggaguaugug

SEQ ID NO: 227890 - RNA, 32 nt, Homo Sapiens
uuuuccaaaagccccagguuuuggcuucacug

SEQ ID NO: 227891 - RNA, 32 nt, Homo Sapiens
cauaugcccagcugcacagcuuacccucaaac

SEQ ID NO: 227892 - RNA, 32 nt, Homo Sapiens
guccggcaguugccugcuuuuggcugcuggca

SEQ ID NO: 227893 - RNA, 32 nt, Homo Sapiens
uaaguucucagcugcuggccugcgcucaucac

SEQ ID NO: 227894 - RNA, 32 nt, Homo Sapiens
uuaugauccaaguuuuuacaucacauccauug

SEQ ID NO: 227895 - RNA, 32 nt, Homo Sapiens
ugcugggcucugcuacuggcggccgccuuccu

SEQ ID NO: 227896 - RNA, 32 nt, Homo Sapiens
gccuugggccccuuagccccagcgccagggcc

SEQ ID NO: 227897 - RNA, 32 nt, Homo Sapiens
uuccucagcucuuuucuccagcuuuugcagug

SEQ ID NO: 227898 - RNA, 32 nt, Homo Sapiens
guugugugcuauauuucuuguauaauuuacaa

SEQ ID NO: 227899 - RNA, 32 nt, Homo Sapiens
uaacaggcuaauuuaaaacugcaguuuucaga

SEQ ID NO: 227900 - RNA, 32 nt, Homo Sapiens
uaguuuuggggauggggcacagggcauagcua

SEQ ID NO: 227901 - RNA, 32 nt, Homo Sapiens
ggacuaugaacaaaaacaaaugauagauauag

SEQ ID NO: 227902 - RNA, 32 nt, Homo Sapiens
aucaugcauauauaauuuuuuguagauaacuu

SEQ ID NO: 227903 - RNA, 32 nt, Homo Sapiens
cuuuaggcuugucucggcccauuugaagacca

SEQ ID NO: 227904 - RNA, 32 nt, Homo Sapiens
ggcauaggucacauuuugggaguucagaggag

SEQ ID NO: 227905 - RNA, 32 nt, Homo Sapiens
cgucugcgggcgcgagcacgccgcgacccugc

SEQ ID NO: 227906 - RNA, 32 nt, Homo Sapiens
uccucucccuuuucuuuuuaccacccuaccuu

SEQ ID NO: 227907 - RNA, 32 nt, Homo Sapiens
cccgagcccuguaccacugagugccuuucaca

SEQ ID NO: 227908 - RNA, 32 nt, Homo Sapiens
uuuuacaaaaauuaacagaacagugugauaga

SEQ ID NO: 227909 - RNA, 32 nt, Homo Sapiens
aaggggcacugucauuaagaauacuaaggaag

SEQ ID NO: 227910 - RNA, 32 nt, Homo Sapiens
ucugcuuaacugaugugaaccacagggaaggg

SEQ ID NO: 227911 - RNA, 32 nt, Homo Sapiens
cuguggccugaagggauggggaguagcaacau

SEQ ID NO: 227912 - RNA, 32 nt, Homo Sapiens
uuaguuugccuaauucauguuuucacuuaaaa

SEQ ID NO: 227913 - RNA, 32 nt, Homo Sapiens
aaaccaccuuggccuucauucuggcaauuuca

SEQ ID NO: 227914 - RNA, 32 nt, Homo Sapiens
guggguggguguagacacuuugccaugggugg

SEQ ID NO: 227915 - RNA, 32 nt, Homo Sapiens
auggggacacuugugaacaauuaacugccagg

SEQ ID NO: 227916 - RNA, 32 nt, Homo Sapiens
cacgcgguggcaugcauggaggacucuccucu

SEQ ID NO: 227917 - RNA, 32 nt, Homo Sapiens
guaucuauuuuuuuuucuuuuuaaacugguuc

SEQ ID NO: 227918 - RNA, 32 nt, Homo Sapiens
aagccucugcaccuggaacuguuuacuuuccu

SEQ ID NO: 227919 - RNA, 32 nt, Homo Sapiens
accccucauucucacagcacagaugagguuga

SEQ ID NO: 227920 - RNA, 32 nt, Homo Sapiens
agguucaggcuuuuuccaaccuguaguucagc

SEQ ID NO: 227921 - RNA, 32 nt, Homo Sapiens
gaacuauacucuuuuuauuuuuauuuuuuauu

SEQ ID NO: 227922 - RNA, 32 nt, Homo Sapiens
uguuucuucaguguaaaaugucuuagauaaua

SEQ ID NO: 227923 - RNA, 32 nt, Homo Sapiens
acaauuugacuucaguuuugagccccguuaug

SEQ ID NO: 227924 - RNA, 32 nt, Homo Sapiens
ugcuuuggaaaaagacaggaaauaaacaccaa

SEQ ID NO: 227925 - RNA, 32 nt, Homo Sapiens
cuagaaacuaaauuauaacuuuugcauaugug

SEQ ID NO: 227926 - RNA, 32 nt, Homo Sapiens
auuaaaaaggauuauuaggcuggguguggugg

SEQ ID NO: 227927 - RNA, 32 nt, Homo Sapiens
ugguugugggucuggaaaccuggcaggaacca

SEQ ID NO: 227928 - RNA, 30 nt, Homo Sapiens
ucccgggagaaaagacggauggcaggaucc

SEQ ID NO: 227929 - RNA, 32 nt, Homo Sapiens
ucauuccacaguguauauacauguaucaaaaa

SEQ ID NO: 227930 - RNA, 32 nt, Homo Sapiens
aguuguaauguguaugucugguaaauagguau

SEQ ID NO: 227931 - RNA, 32 nt, Homo Sapiens
gaccagcccucucgguuugggaauaaggcaua

SEQ ID NO: 227932 - RNA, 32 nt, Homo Sapiens
caaauauaugacuugaaaaggaucuuaggugu

SEQ ID NO: 227933 - RNA, 32 nt, Homo Sapiens
cacugggcggugagccaccuccuggcaacucu

SEQ ID NO: 227934 - RNA, 32 nt, Homo Sapiens
cccugucugaccacugccaugcugaccugaca

SEQ ID NO: 227935 - RNA, 32 nt, Homo Sapiens
gggagaaaaaaguuguggagaguagcuuuuaa

SEQ ID NO: 227936 - RNA, 32 nt, Homo Sapiens
cuuuaaaaacaaaaacaaaaacaucaaugagu

SEQ ID NO: 227937 - RNA, 32 nt, Homo Sapiens
gcugaagaggcguuacugcugcuuuuauuuuu

SEQ ID NO: 227938 - RNA, 32 nt, Homo Sapiens
cuugccuccagauuuggguggagccucugugg

SEQ ID NO: 227939 - RNA, 32 nt, Homo Sapiens
uccucacaccaauuuuauggacuggacguuaa

SEQ ID NO: 227940 - RNA, 32 nt, Homo Sapiens
cuucaggucugcugcuuuuuuauuuuuuuuuu

SEQ ID NO: 227941 - RNA, 32 nt, Homo Sapiens
ccaacuccaccagauagcagagggguaagaga

SEQ ID NO: 227942 - RNA, 32 nt, Homo Sapiens
gcgcccacucccccuccaccggacacggcugg

SEQ ID NO: 227943 - RNA, 32 nt, Homo Sapiens
cccggcgcgcugggaggacgcccgggagcugc

SEQ ID NO: 227944 - RNA, 32 nt, Homo Sapiens
uuggaagaugagaaagaaguaugcccaaaagc

SEQ ID NO: 227945 - RNA, 32 nt, Homo Sapiens
gauaaagggaggaggaggagcuagcagacaca

SEQ ID NO: 227946 - RNA, 32 nt, Homo Sapiens
agcccucgguaccccgggccccggggcccugg

SEQ ID NO: 227947 - RNA, 32 nt, Homo Sapiens
cccagcccaagcccccucaagagucugggucg

SEQ ID NO: 227948 - RNA, 32 nt, Homo Sapiens
gaggcaaaaaugcauguuuguuagaauggaaa

SEQ ID NO: 227949 - RNA, 32 nt, Homo Sapiens
ucagcucccagcccagcuuccaugcagcuuua

SEQ ID NO: 227950 - RNA, 32 nt, Homo Sapiens
uucuucagacugcgccauggggcucagcgacg

SEQ ID NO: 227951 - RNA, 27 nt, Homo Sapiens
gguggguccuucugcagauacucuaau

SEQ ID NO: 227952 - RNA, 32 nt, Homo Sapiens
cuuggugccuguaccgucaaccccgcugcugc

SEQ ID NO: 227953 - RNA, 32 nt, Homo Sapiens
uaauuucggaugcccagccgcggccgccuucc

SEQ ID NO: 227954 - RNA, 32 nt, Homo Sapiens
cuuugaucucaaauuuuuauauguaaaacaaa

SEQ ID NO: 227955 - RNA, 32 nt, Homo Sapiens
uguuccuuuuucuggguuuuguuggcuuuuug

SEQ ID NO: 227956 - RNA, 32 nt, Homo Sapiens
cuggccucacuguguccugccugaauuccuga

SEQ ID NO: 227957 - RNA, 32 nt, Homo Sapiens
gcagaaauuuuaagccaaaaacaaacgaaagg

SEQ ID NO: 227958 - RNA, 32 nt, Homo Sapiens
cucggugcacauuggggugcuuugggauaaaa

SEQ ID NO: 227959 - RNA, 32 nt, Homo Sapiens
ggagacgaggugcagguucuagaguggagaau

SEQ ID NO: 227960 - RNA, 32 nt, Homo Sapiens
uaaaauacuguaacucagcauaaacuauuacu

SEQ ID NO: 227961 - RNA, 32 nt, Homo Sapiens
accaucccgucucccucacaggagcuggaagg

SEQ ID NO: 227962 - RNA, 32 nt, Homo Sapiens
ggagguggugaaauagaaugguccugggggac

SEQ ID NO: 227963 - RNA, 32 nt, Homo Sapiens
ccucccucuucuucuuuuucauccuucugucu

SEQ ID NO: 227964 - RNA, 32 nt, Homo Sapiens
agccgccuccccugugccccagccuccuuaau

SEQ ID NO: 227965 - RNA, 32 nt, Homo Sapiens
auauauuucuucauugccaaagaggcuguacc

SEQ ID NO: 227966 - RNA, 32 nt, Homo Sapiens
ccuugcacaccuggcaugcaucaggcacaucu

SEQ ID NO: 227967 - RNA, 32 nt, Homo Sapiens
uguaucagcuagcuguugcuagauaaaaaacc

SEQ ID NO: 227968 - RNA, 32 nt, Homo Sapiens
aaagaucuucuuccaagaaaugcaaacaggcu

SEQ ID NO: 227969 - RNA, 31 nt, Homo Sapiens
ccaggagagccccaguacugccaguauggca

SEQ ID NO: 227970 - RNA, 32 nt, Homo Sapiens
acccgagcccugagggucccagccccgcgcuc

SEQ ID NO: 227971 - RNA, 32 nt, Homo Sapiens
uggaggcagcuagcgcgaggcuggggagcgcu

SEQ ID NO: 227972 - RNA, 32 nt, Homo Sapiens
ccacaaccaaaauuuacucaaaucaaaguuaa

SEQ ID NO: 227973 - RNA, 32 nt, Homo Sapiens
uccaugggguauugguuccuggaccguccccc

SEQ ID NO: 227974 - RNA, 32 nt, Homo Sapiens
uucugaaauuuauauuuuaaacuuuucaugca

SEQ ID NO: 227975 - RNA, 32 nt, Homo Sapiens
gcgguccucgucgcgaccggcccgggccgcag

SEQ ID NO: 227976 - RNA, 32 nt, Homo Sapiens
gcagaagaaaaaauuaaugggacuauuaacua

SEQ ID NO: 227977 - RNA, 32 nt, Homo Sapiens
ugagcccugcucgguuuaggccugucugcgga

SEQ ID NO: 227978 - RNA, 32 nt, Homo Sapiens
caaaaagcacuuuuuucuuaaugguagcagua

SEQ ID NO: 227979 - RNA, 32 nt, Homo Sapiens
ccccagcagcgcugcggacggugcuggccgug

SEQ ID NO: 227980 - RNA, 32 nt, Homo Sapiens
uucugaugcauauauugaucuacuucuguaau

SEQ ID NO: 227981 - RNA, 32 nt, Homo Sapiens
caucugaggaagaacugucugggugcaaaagu

SEQ ID NO: 227982 - RNA, 32 nt, Homo Sapiens
auucugaugaguccagaaaacuacguuuuguc

SEQ ID NO: 227983 - RNA, 32 nt, Homo Sapiens
auguagauaguuauucaguagauaguaaauua

SEQ ID NO: 227984 - RNA, 32 nt, Homo Sapiens
gauacccuaccuuguuuuaaccugaagugacu

SEQ ID NO: 227985 - RNA, 32 nt, Homo Sapiens
auauauauauauauuuccuaaaagaagaaaag

SEQ ID NO: 227986 - RNA, 28 nt, Homo Sapiens
ccagauuuugugcagauuauaaaauuuu

SEQ ID NO: 227987 - RNA, 32 nt, Homo Sapiens
gguuuuucuguuccuuuuuuuuuuuuuuuuuu

SEQ ID NO: 227988 - RNA, 32 nt, Homo Sapiens
ugacagugaagauaugagaauuuacuggcaag

SEQ ID NO: 227989 - RNA, 32 nt, Homo Sapiens
auuggaaaaauauuuugugaaaagcuguauuu

SEQ ID NO: 227990 - RNA, 32 nt, Homo Sapiens
uauaacugguccuacauuaaaauaaugcuucu

SEQ ID NO: 227991 - RNA, 32 nt, Homo Sapiens
gucugguauugagcguuauaggugauauguga

SEQ ID NO: 227992 - RNA, 32 nt, Homo Sapiens
acauaaagcuguauuucuuaaucaucuuuaau

SEQ ID NO: 227993 - RNA, 32 nt, Homo Sapiens
uguuuuaucuucugcucuuucuucuuccacac

SEQ ID NO: 227994 - RNA, 32 nt, Homo Sapiens
ugaaaaauuaucaucucaauagacaaagcuuu

SEQ ID NO: 227995 - RNA, 32 nt, Homo Sapiens
gcaauggugucugcccuccuaccuuagaagac

SEQ ID NO: 227996 - RNA, 32 nt, Homo Sapiens
cggugucaagggugccccugcugcuguuucua

SEQ ID NO: 227997 - RNA, 32 nt, Homo Sapiens
ucuagaaaauuaucauugaacauauuaauggu

SEQ ID NO: 227998 - RNA, 32 nt, Homo Sapiens
gccaagcagaaucucucaaccugaucuuagca

SEQ ID NO: 227999 - RNA, 32 nt, Homo Sapiens
cuuggcccggaccccgcccaauaaagagugcg

SEQ ID NO: 228000 - RNA, 32 nt, Homo Sapiens
uuucaugaacauuuugauacaaauuucaucau

SEQ ID NO: 228001 - RNA, 32 nt, Homo Sapiens
ggugacugacacaaagugacuuucagggcugu

SEQ ID NO: 228002 - RNA, 32 nt, Homo Sapiens
ccaucuaaggcuggcucuggccucaacuuauu

SEQ ID NO: 228003 - RNA, 32 nt, Homo Sapiens
aaaaacaagcaaaaacagguuuauauagggcu

SEQ ID NO: 228004 - RNA, 32 nt, Homo Sapiens
cccccucccuccccggcccgugcagcaguguc

SEQ ID NO: 228005 - RNA, 32 nt, Homo Sapiens
agagugaaaacgcagauucauaaugaaagcua

SEQ ID NO: 228006 - RNA, 32 nt, Homo Sapiens
uaaaauuggaaaauaaggaacugggggcauuu

SEQ ID NO: 228007 - RNA, 32 nt, Homo Sapiens
uccccuguaacucuaaauaaaauaaugaugug

SEQ ID NO: 228008 - RNA, 32 nt, Homo Sapiens
uucagaaggaaugucuguucuuuaucaagugu

SEQ ID NO: 228009 - RNA, 32 nt, Homo Sapiens
uaacuagguaacaguuugauaacuagggaaga

SEQ ID NO: 228010 - RNA, 32 nt, Homo Sapiens
aguguuaaaaauuuagaauuaaaaaacccuga

SEQ ID NO: 228011 - RNA, 32 nt, Homo Sapiens
aaguauucuuaccugcuuuaauuuugaaacag

SEQ ID NO: 228012 - RNA, 32 nt, Homo Sapiens
guggacaggaggaaggaguacgugacuuuguc

SEQ ID NO: 228013 - RNA, 32 nt, Homo Sapiens
cccuuggugcucuguccccauccaccuccuuu

SEQ ID NO: 228014 - RNA, 32 nt, Homo Sapiens
auuuauaccaagcagugauuccugucagaauc

SEQ ID NO: 228015 - RNA, 32 nt, Homo Sapiens
gguugucuuaggauaauugcugacuuuguauc

SEQ ID NO: 228016 - RNA, 32 nt, Homo Sapiens
caaucggccuccccgggcccagcuccguccuc

SEQ ID NO: 228017 - RNA, 32 nt, Homo Sapiens
cgccgguccggggcugggcagcagccgcgccu

SEQ ID NO: 228018 - RNA, 32 nt, Homo Sapiens
caguuuucaaggcgggcuguaacugguggcau

SEQ ID NO: 228019 - RNA, 32 nt, Homo Sapiens
guuuaaagauggaugaaaggccaggcauggug

SEQ ID NO: 228020 - RNA, 32 nt, Homo Sapiens
gcagagacuuagggauuuuaaauuggcuugcu

SEQ ID NO: 228021 - RNA, 32 nt, Homo Sapiens
cccaggaucugacggcgcagguccuccccuuc

SEQ ID NO: 228022 - RNA, 32 nt, Homo Sapiens
ucacguuuccccggacgcggcgcgcucccugg

SEQ ID NO: 228023 - RNA, 32 nt, Homo Sapiens
gaggccuaaguuugcuggccugugguuuucuu

SEQ ID NO: 228024 - RNA, 32 nt, Homo Sapiens
cacgcagacccagaagcaggaagcagacagua

SEQ ID NO: 228025 - RNA, 32 nt, Homo Sapiens
cagcgcccagcccuuccgucuuguuacgucca

SEQ ID NO: 228026 - RNA, 32 nt, Homo Sapiens
caccggggcugcagagggcggcugggguuccg

SEQ ID NO: 228027 - RNA, 32 nt, Homo Sapiens
acuauccaccggguaacagugcuuacccacga

SEQ ID NO: 228028 - RNA, 32 nt, Homo Sapiens
ugugaaaaaauaagcuaaaccaauucacacug

SEQ ID NO: 228029 - RNA, 32 nt, Homo Sapiens
gaguggcugucaucggccuguguaggcaguga

SEQ ID NO: 228030 - RNA, 32 nt, Homo Sapiens
uuuggggagggagagacagacgggcgguuuga

SEQ ID NO: 228031 - RNA, 32 nt, Homo Sapiens
uuugcucaguuauacuuuuaaugguaguaugu

SEQ ID NO: 228032 - RNA, 32 nt, Homo Sapiens
aggcguuagcccgggguuggcuccaccuagcu

SEQ ID NO: 228033 - RNA, 32 nt, Homo Sapiens
uugaaagagggagaggggagacuguagccugg

SEQ ID NO: 228034 - RNA, 32 nt, Homo Sapiens
aaaauaguggugcuucuuucugaucucuagug

SEQ ID NO: 228035 - RNA, 32 nt, Homo Sapiens
auagaagggcauccuccagggcugguccauuc

SEQ ID NO: 228036 - RNA, 32 nt, Homo Sapiens
uuggguucgcaugauuaauuuccagcccuaga

SEQ ID NO: 228037 - RNA, 32 nt, Homo Sapiens
uaauauguuugcugccuaccccauuggguuuu

SEQ ID NO: 228038 - RNA, 32 nt, Homo Sapiens
guaucagaccuuuuaaugaauuuucauggaug

SEQ ID NO: 228039 - RNA, 32 nt, Homo Sapiens
uugcucguggagucuuuuuccuccucagcuau

SEQ ID NO: 228040 - RNA, 32 nt, Homo Sapiens
uuuuucaaacuuaaaaacuaauuuagcuucau

SEQ ID NO: 228041 - RNA, 32 nt, Homo Sapiens
agagggaaaggcugugaaggacaggcugcccg

SEQ ID NO: 228042 - RNA, 32 nt, Homo Sapiens
guaagcuagcaaauaguaaucuguaagcauaa

SEQ ID NO: 228043 - RNA, 32 nt, Homo Sapiens
gcggcgguuuguucucaggccccggccuuucu

SEQ ID NO: 228044 - RNA, 32 nt, Homo Sapiens
gugugaaauauguuuagagacagugggcuaca

SEQ ID NO: 228045 - RNA, 32 nt, Homo Sapiens
ucccagggacagucagggccucgggggcccag

SEQ ID NO: 228046 - RNA, 32 nt, Homo Sapiens
guuuuguugagcacucacuagaguuagaacca

SEQ ID NO: 228047 - RNA, 32 nt, Homo Sapiens
guccuuacuccagccuacuccucucaugaccc

SEQ ID NO: 228048 - RNA, 32 nt, Homo Sapiens
auuacaggcauuagccaccaugccuggccugg

SEQ ID NO: 228049 - RNA, 32 nt, Homo Sapiens
gaggguacuuuuuuaauggauauuuguaaauc

SEQ ID NO: 228050 - RNA, 32 nt, Homo Sapiens
gaacguuuucuucuuucccuggacaggcagcc

SEQ ID NO: 228051 - RNA, 32 nt, Homo Sapiens
cucccugccugaggcguccgcggccgggaucc

SEQ ID NO: 228052 - RNA, 32 nt, Homo Sapiens
acagugacaccagugaaggcaaaugaagugga

SEQ ID NO: 228053 - RNA, 32 nt, Homo Sapiens
accacggacaggcgcuccugcgagcuggaagc

SEQ ID NO: 228054 - RNA, 32 nt, Homo Sapiens
caaccucucuguucaggcacagaucugguuuu

SEQ ID NO: 228055 - RNA, 32 nt, Homo Sapiens
uugaggauugaauaauaaucaccagauuaacu

SEQ ID NO: 228056 - RNA, 32 nt, Homo Sapiens
uuauuuauuuuuccuuucaguucuauuaguuu

SEQ ID NO: 228057 - RNA, 31 nt, Homo Sapiens
ugggugaaggugacggcgucgagccauugac

SEQ ID NO: 228058 - RNA, 31 nt, Homo Sapiens
ggugguuacacaguuuaaccauaggccaauu

SEQ ID NO: 228059 - RNA, 32 nt, Homo Sapiens
ugaucauuuuuagacagccaguguaacaacug

SEQ ID NO: 228060 - RNA, 32 nt, Homo Sapiens
gucgagcaaugccuacccccgcgcucccgcac

SEQ ID NO: 228061 - RNA, 32 nt, Homo Sapiens
uuuauuggugaugaugaaugggaaugaaauca

SEQ ID NO: 228062 - RNA, 32 nt, Homo Sapiens
uccaagccauucagugaugucuucagcaucac

SEQ ID NO: 228063 - RNA, 32 nt, Homo Sapiens
auguaucaaaaauaacacaccuuggaagcaau

SEQ ID NO: 228064 - RNA, 32 nt, Homo Sapiens
ccggagggaggggccaagggcugggucagucu

SEQ ID NO: 228065 - RNA, 32 nt, Homo Sapiens
ccuccugccagucuccgggccgcggccgucug

SEQ ID NO: 228066 - RNA, 32 nt, Homo Sapiens
gcgccauccuaaccauccagccaggccaccca

SEQ ID NO: 228067 - RNA, 32 nt, Homo Sapiens
cucacaguauucacaaaguaaauugccacaac

SEQ ID NO: 228068 - RNA, 32 nt, Homo Sapiens
gcaucagcugucuuccuuauucuaccagggcu

SEQ ID NO: 228069 - RNA, 32 nt, Homo Sapiens
gcgaggaaggcacccugcugccugcacuuauu

SEQ ID NO: 228070 - RNA, 32 nt, Homo Sapiens
ccccccgaacccugagcuugggcuuguguggg

SEQ ID NO: 228071 - RNA, 32 nt, Homo Sapiens
aauuuuauuuuuguuuucuuaaugauguuaag

SEQ ID NO: 228072 - RNA, 32 nt, Homo Sapiens
auauagggaauauuuuuaacuucacagcaguu

SEQ ID NO: 228073 - RNA, 32 nt, Homo Sapiens
acugucuagugcacaggcaaccuggccuucgc

SEQ ID NO: 228074 - RNA, 32 nt, Homo Sapiens
cagacaagacuccuuagaacuguccucagauu

SEQ ID NO: 228075 - RNA, 32 nt, Homo Sapiens
uauuuuuuacuuuuaaguacuuacgugugagu

SEQ ID NO: 228076 - RNA, 32 nt, Homo Sapiens
acauauuuuuauucagcaguguucuuuaaacg

SEQ ID NO: 228077 - RNA, 32 nt, Homo Sapiens
cggaagucgucuggccuccccgcggccgcucg

SEQ ID NO: 228078 - RNA, 32 nt, Homo Sapiens
aaaauaaaaaacaaaauggugccacuuugggu

SEQ ID NO: 228079 - RNA, 32 nt, Homo Sapiens
uucucuccauagaacagcacuauccucaucuc

SEQ ID NO: 228080 - RNA, 32 nt, Homo Sapiens
ggaagaaaacccuuuacccuguuguucaggga

SEQ ID NO: 228081 - RNA, 32 nt, Homo Sapiens
uaaaguaucuuacugguaacaaaaaucauaau

SEQ ID NO: 228082 - RNA, 32 nt, Homo Sapiens
aaguuguauguggcaugaauacuuuuuguaau

SEQ ID NO: 228083 - RNA, 32 nt, Homo Sapiens
auauguguuaagauauauacaugagaaacuuu

SEQ ID NO: 228084 - RNA, 28 nt, Homo Sapiens
gcuugggggcggcugaggugccccucug

SEQ ID NO: 228085 - RNA, 32 nt, Homo Sapiens
aguuucaccauguuggccaggcuggucaagaa

SEQ ID NO: 228086 - RNA, 32 nt, Homo Sapiens
uuuccauagaaagggaaccuaaacuguccuaa

SEQ ID NO: 228087 - RNA, 32 nt, Homo Sapiens
aaaucuuccuguacaaaacaucuuuaaaaaua

SEQ ID NO: 228088 - RNA, 32 nt, Homo Sapiens
ggaggaagccaggcggggugcagacggcugcu

SEQ ID NO: 228089 - RNA, 32 nt, Homo Sapiens
cucagugcagggacgucaccccugccaggcaa

SEQ ID NO: 228090 - RNA, 32 nt, Homo Sapiens
uuuaaagcaaggaaaagcagcugagcucaagu

SEQ ID NO: 228091 - RNA, 32 nt, Homo Sapiens
aucggccaucaccgcgcggccgcgcagcggac

SEQ ID NO: 228092 - RNA, 32 nt, Homo Sapiens
ucuggauggaaccugagcugggucucugacuc

SEQ ID NO: 228093 - RNA, 32 nt, Homo Sapiens
guaguggugucugcgcuguaucaagugaaggu

SEQ ID NO: 228094 - RNA, 32 nt, Homo Sapiens
ggaggaauugggaugguggggguggucaagag

SEQ ID NO: 228095 - RNA, 32 nt, Homo Sapiens
ggggucgagcggggcggggaauggggcgcagu

SEQ ID NO: 228096 - RNA, 32 nt, Homo Sapiens
auucugauaggagacaagauccaaacugagau

SEQ ID NO: 228097 - RNA, 32 nt, Homo Sapiens
cuuccaucgugggcucagcugcagcugccacc

SEQ ID NO: 228098 - RNA, 32 nt, Homo Sapiens
ccacccaaaagcauagggagggaaggcagggu

SEQ ID NO: 228099 - RNA, 32 nt, Homo Sapiens
ucuugcccuagcggcgucccccggccucucgc

SEQ ID NO: 228100 - RNA, 32 nt, Homo Sapiens
cuuugagaggaugagguaggcggaucacuggg

SEQ ID NO: 228101 - RNA, 32 nt, Homo Sapiens
agcucucucguggugcggcugccgaggcugcg

SEQ ID NO: 228102 - RNA, 32 nt, Homo Sapiens
cccaaggucuaccuuagauacuaguugucuga

SEQ ID NO: 228103 - RNA, 32 nt, Homo Sapiens
guugcuacuucugaauuaaaacuaguugaggu

SEQ ID NO: 228104 - RNA, 32 nt, Homo Sapiens
ccuugauuacaaguguugucauccucuuuuaa

SEQ ID NO: 228105 - RNA, 32 nt, Homo Sapiens
cucccucauuuucucucaucccuaccuauugu

SEQ ID NO: 228106 - RNA, 31 nt, Homo Sapiens
gagcagugguggcgccugcccugaggcugcc

SEQ ID NO: 228107 - RNA, 32 nt, Homo Sapiens
ugccugcccagcugcgcggcggagcggagcga

SEQ ID NO: 228108 - RNA, 32 nt, Homo Sapiens
aacuguacaaccacauucaucaccuuggcccu

SEQ ID NO: 228109 - RNA, 32 nt, Homo Sapiens
cacaugggagucucccagcaccucugacucag

SEQ ID NO: 228110 - RNA, 32 nt, Homo Sapiens
ugcuuugugaugacgugagaucaauaagaaga

SEQ ID NO: 228111 - RNA, 32 nt, Homo Sapiens
auaaagggacagagcucaaaagagagaaauuu

SEQ ID NO: 228112 - RNA, 32 nt, Homo Sapiens
ugcaaccuguaaaugguaaaacgucuguguau

SEQ ID NO: 228113 - RNA, 32 nt, Homo Sapiens
uaguguuccuuugaggagcacccaggagaaua

SEQ ID NO: 228114 - RNA, 32 nt, Homo Sapiens
accuuccaauuugaaaucagaagcaaaaaagg

SEQ ID NO: 228115 - RNA, 32 nt, Homo Sapiens
aggcaccucuuucuccuucuccaaccacuauu

SEQ ID NO: 228116 - RNA, 32 nt, Homo Sapiens
auuaagauccccacugucaaugggggauuguc

SEQ ID NO: 228117 - RNA, 32 nt, Homo Sapiens
acagcuucccucacuguguacagaacgcaaga

SEQ ID NO: 228118 - RNA, 32 nt, Homo Sapiens
ccacggugcgcgguuccccagcccucgcggcc

SEQ ID NO: 228119 - RNA, 32 nt, Homo Sapiens
uuucuuggauuuauguucuguaucugugaaaa

SEQ ID NO: 228120 - RNA, 32 nt, Homo Sapiens
ugcaggcccaggugcucacaugcgcacacaug

SEQ ID NO: 228121 - RNA, 32 nt, Homo Sapiens
gaacacaggaggaagcaggaguccaugcucuc

SEQ ID NO: 228122 - RNA, 32 nt, Homo Sapiens
ugagguagcuaugccaguggucugcaugcgca

SEQ ID NO: 228123 - RNA, 32 nt, Homo Sapiens
uagagccuauuaucaucuuguucuaaauaacu

SEQ ID NO: 228124 - RNA, 32 nt, Homo Sapiens
uuucuucccccuccaucucucagggagacaaa

SEQ ID NO: 228125 - RNA, 32 nt, Homo Sapiens
aauuucugacuauacuuuugguacgaacaaaa

SEQ ID NO: 228126 - RNA, 32 nt, Homo Sapiens
cuucgcaucccggucgcugauaccccugaggu

SEQ ID NO: 228127 - RNA, 32 nt, Homo Sapiens
auggccccagcauuugcucagcuucuggggag

SEQ ID NO: 228128 - RNA, 32 nt, Homo Sapiens
uucguucguccucagugcagggcaacaggacu

SEQ ID NO: 228129 - RNA, 32 nt, Homo Sapiens
cuuucugccauaauucuucacuagucaagaau

SEQ ID NO: 228130 - RNA, 32 nt, Homo Sapiens
gucccagggcggugcugagugacaggcacacc

SEQ ID NO: 228131 - RNA, 32 nt, Homo Sapiens
uguuuuuucuuaccaguauucugccuaacguu

SEQ ID NO: 228132 - RNA, 32 nt, Homo Sapiens
uuucacauaaagggaacaaaugucuaguuuua

SEQ ID NO: 228133 - RNA, 32 nt, Homo Sapiens
uuuuugacagcuuuuugcaugggauaggagca

SEQ ID NO: 228134 - RNA, 30 nt, Homo Sapiens
ugaaguuaacauuugggggaaauugagcug

SEQ ID NO: 228135 - RNA, 32 nt, Homo Sapiens
cucccuccuccaccgccacucccuuggccucg

SEQ ID NO: 228136 - RNA, 32 nt, Homo Sapiens
aucuauggcagacauuuaagaaugcgcuuuau

SEQ ID NO: 228137 - RNA, 32 nt, Homo Sapiens
ccguuccggccgccacagccccuccggggcgg

SEQ ID NO: 228138 - RNA, 32 nt, Homo Sapiens
cacacuggcgcagcugcagggagcugggcaga

SEQ ID NO: 228139 - RNA, 32 nt, Homo Sapiens
uucccccuggguuuccuuggcuuccugcagca

SEQ ID NO: 228140 - RNA, 32 nt, Homo Sapiens
agaggagccaauuuaagaagacccuuauggag

SEQ ID NO: 228141 - RNA, 32 nt, Homo Sapiens
cugcccccaccgucuuuuuuguuuguuuguuu

SEQ ID NO: 228142 - RNA, 32 nt, Homo Sapiens
gccugaggaaauacauuuuucuuaauaaacug

SEQ ID NO: 228143 - RNA, 31 nt, Homo Sapiens
aguguguguaacauaccuguuguuuaucagc

SEQ ID NO: 228144 - RNA, 32 nt, Homo Sapiens
cccugaacaccaggcucaggggcuugcuuggu

SEQ ID NO: 228145 - RNA, 32 nt, Homo Sapiens
ggugccuguccccgggggcgccauggcgaccg

SEQ ID NO: 228146 - RNA, 32 nt, Homo Sapiens
cauuagggcugaggucuguuucucugggaggu

SEQ ID NO: 228147 - RNA, 32 nt, Homo Sapiens
guccacaaggccagagauagccugacccuugc

SEQ ID NO: 228148 - RNA, 32 nt, Homo Sapiens
cccuugugaucucagcacuuugagaggccgug

SEQ ID NO: 228149 - RNA, 32 nt, Homo Sapiens
cgcugcucccagguuaugaggcugguucuugg

SEQ ID NO: 228150 - RNA, 32 nt, Homo Sapiens
aucuguggagguugcugguacacaccaaauga

SEQ ID NO: 228151 - RNA, 32 nt, Homo Sapiens
ucagauuauuaagggaauaagccaugacguca

SEQ ID NO: 228152 - RNA, 31 nt, Homo Sapiens
acuuagcuaaaauaaaagcaaucuguguuug

SEQ ID NO: 228153 - RNA, 32 nt, Homo Sapiens
caaagauugaucuauuuuggaguuaguucuuu

SEQ ID NO: 228154 - RNA, 32 nt, Homo Sapiens
gcugccuggagagcuuugccuccaucacuggu

SEQ ID NO: 228155 - RNA, 32 nt, Homo Sapiens
uuguuuaaagcaugcauaaaaauuuauguauu

SEQ ID NO: 228156 - RNA, 32 nt, Homo Sapiens
gaaagauccaaaauugacacccuaacaucaca

SEQ ID NO: 228157 - RNA, 32 nt, Homo Sapiens
caggcuggucugagagagaacuccugaccucg

SEQ ID NO: 228158 - RNA, 32 nt, Homo Sapiens
ugggccaguuggguggcuagguugccucauuu

SEQ ID NO: 228159 - RNA, 32 nt, Homo Sapiens
ggaagccgcucccgacacccuuugccuggcuc

SEQ ID NO: 228160 - RNA, 32 nt, Homo Sapiens
uucaaguuauuuaaaauacuaagucaucuuac

SEQ ID NO: 228161 - RNA, 32 nt, Homo Sapiens
acaacaguugguuuaaaauaugaggggcaagg

SEQ ID NO: 228162 - RNA, 32 nt, Homo Sapiens
guuuugucuccaucgugguauuagccccaucc

SEQ ID NO: 228163 - RNA, 32 nt, Homo Sapiens
caccugccauccccggcucugccacuuuaggg

SEQ ID NO: 228164 - RNA, 32 nt, Homo Sapiens
uaguguggaaauuaagaagaaacuaggucuga

SEQ ID NO: 228165 - RNA, 32 nt, Homo Sapiens
aaugcuccagcaugugcgagcacaugaccuga

SEQ ID NO: 228166 - RNA, 32 nt, Homo Sapiens
aggacagcaacucagcugcugcaagccagaaa

SEQ ID NO: 228167 - RNA, 32 nt, Homo Sapiens
uuugugagauuggucucuguggugugauucuc

SEQ ID NO: 228168 - RNA, 32 nt, Homo Sapiens
uucauacuggacagaagcugugugaauacaaa

SEQ ID NO: 228169 - RNA, 32 nt, Homo Sapiens
agcccacacacugacugauacaugguauguua

SEQ ID NO: 228170 - RNA, 32 nt, Homo Sapiens
cagccucaaaaauauaugugucugcaacccuc

SEQ ID NO: 228171 - RNA, 32 nt, Homo Sapiens
aauaaaaguuucauacauccacugaaacuugu

SEQ ID NO: 228172 - RNA, 32 nt, Homo Sapiens
uggacuguccuuuccugcagccccacaguccu

SEQ ID NO: 228173 - RNA, 29 nt, Homo Sapiens
ugcagaggacgucuucuuuaaggacagcc

SEQ ID NO: 228174 - RNA, 32 nt, Homo Sapiens
gauuuuccugaauauuaaucccagcccuaccc

SEQ ID NO: 228175 - RNA, 32 nt, Homo Sapiens
auuacucccagaagccaaaacucuuuaauucc

SEQ ID NO: 228176 - RNA, 32 nt, Homo Sapiens
gggcguauaauucagcccuguuuaaauauacu

SEQ ID NO: 228177 - RNA, 32 nt, Homo Sapiens
ggccuggggugggacagggagggccggcggcu

SEQ ID NO: 228178 - RNA, 32 nt, Homo Sapiens
gaugcccaaagcuacaguacaggcuguguuag

SEQ ID NO: 228179 - RNA, 32 nt, Homo Sapiens
acuguuguggaggugaguucggcuguaguuag

SEQ ID NO: 228180 - RNA, 32 nt, Homo Sapiens
cugcaguggguucuccaaacuagauucauggc

SEQ ID NO: 228181 - RNA, 32 nt, Homo Sapiens
gcugggcccucccacccugagccuuccuagac

SEQ ID NO: 228182 - RNA, 32 nt, Homo Sapiens
gggaacugggcuuguccaaauucuuucaaggg

SEQ ID NO: 228183 - RNA, 32 nt, Homo Sapiens
uucuccucggcgggccugcgguucugauuucg

SEQ ID NO: 228184 - RNA, 32 nt, Homo Sapiens
auucucugauuuugauuugcugacguguuaau

SEQ ID NO: 228185 - RNA, 32 nt, Homo Sapiens
auagugauacagugguguccccggggccaggc

SEQ ID NO: 228186 - RNA, 32 nt, Homo Sapiens
cgucuaggccccaccaguggugugguuuuccu

SEQ ID NO: 228187 - RNA, 32 nt, Homo Sapiens
cccgggaaccccagccugccacgcugccuucc

SEQ ID NO: 228188 - RNA, 32 nt, Homo Sapiens
cccuuccagcaggccagugguuauggccagca

SEQ ID NO: 228189 - RNA, 32 nt, Homo Sapiens
augcagcugggccccagggcccggcccaaccc

SEQ ID NO: 228190 - RNA, 32 nt, Homo Sapiens
cccggccgccccagcgaccucccuggcacggc

SEQ ID NO: 228191 - RNA, 32 nt, Homo Sapiens
ggacuguuaacagguggcuauacaucgacguu

SEQ ID NO: 228192 - RNA, 32 nt, Homo Sapiens
gcuccaucccacacuguucacccaggcugcgg

SEQ ID NO: 228193 - RNA, 32 nt, Homo Sapiens
auuuuucuguuggucuuaacuaauguaaauau

SEQ ID NO: 228194 - RNA, 32 nt, Homo Sapiens
aggaacugacuucuguugagcacucaacacgc

SEQ ID NO: 228195 - RNA, 32 nt, Homo Sapiens
ccaaccucuccugccacccccacaccaagaac

SEQ ID NO: 228196 - RNA, 32 nt, Homo Sapiens
cuaggagauggggccggugcugauggggaaca

SEQ ID NO: 228197 - RNA, 32 nt, Homo Sapiens
ccccgugaggaugucacucagauggaaccgca

SEQ ID NO: 228198 - RNA, 32 nt, Homo Sapiens
caccgcccccucggagaguccacgcgcgacga

SEQ ID NO: 228199 - RNA, 32 nt, Homo Sapiens
guuucgcuacauggauauuagcacugaugaag

SEQ ID NO: 228200 - RNA, 32 nt, Homo Sapiens
gaccccagggauuguuuggcugcuuaguggga

SEQ ID NO: 228201 - RNA, 32 nt, Homo Sapiens
uagaaucuuccaaguauuaauucauaaugaac

SEQ ID NO: 228202 - RNA, 32 nt, Homo Sapiens
uuuugacuuaaguuuuagaaaauauucaugua

SEQ ID NO: 228203 - RNA, 32 nt, Homo Sapiens
aacauucugcaccugcccccuuuuuuaaaucu

SEQ ID NO: 228204 - RNA, 32 nt, Homo Sapiens
auuagccgguugcccaccccagcccucugguc

SEQ ID NO: 228205 - RNA, 32 nt, Homo Sapiens
uuuuuuccuuuucacauuuuuaaaagaacaau

SEQ ID NO: 228206 - RNA, 32 nt, Homo Sapiens
uguuccgcccucaucuggcccggccaaauccc

SEQ ID NO: 228207 - RNA, 32 nt, Homo Sapiens
ucacuccccgguuuuacgccucuugagaagca

SEQ ID NO: 228208 - RNA, 32 nt, Homo Sapiens
acaggauucuuuaaaaaggaaagcagaaaaug

SEQ ID NO: 228209 - RNA, 32 nt, Homo Sapiens
aacaaaaguuuuuaauuuuuuauuacagaagg

SEQ ID NO: 228210 - RNA, 31 nt, Homo Sapiens
ugaugaugaaaugaggucagagccucgaguu

SEQ ID NO: 228211 - RNA, 32 nt, Homo Sapiens
ccggcuuccuuccuuccccugcgggcaucguc

SEQ ID NO: 228212 - RNA, 32 nt, Homo Sapiens
aucugucgacugcuaccacgggaguuccccgg

SEQ ID NO: 228213 - RNA, 32 nt, Homo Sapiens
accacccaaguaucaucugugcucuggccccu

SEQ ID NO: 228214 - RNA, 32 nt, Homo Sapiens
agcuuuuuuggaaaggcggggaagaaggauga

SEQ ID NO: 228215 - RNA, 32 nt, Homo Sapiens
gggccagauggggacuccauggagacagccga

SEQ ID NO: 228216 - RNA, 32 nt, Homo Sapiens
agcugugcgcaaaucuuccucacccauuugcu

SEQ ID NO: 228217 - RNA, 32 nt, Homo Sapiens
ucccacuucaccccauucuccucuccucugac

SEQ ID NO: 228218 - RNA, 31 nt, Homo Sapiens
ccuacguggcgcugccugcucggguggcgca

SEQ ID NO: 228219 - RNA, 32 nt, Homo Sapiens
gccaggccucgccugcccuccucucccgucuc

SEQ ID NO: 228220 - RNA, 32 nt, Homo Sapiens
aucccuuuucagauuaaucuuuuauccuuucc

SEQ ID NO: 228221 - RNA, 32 nt, Homo Sapiens
cggguuugcgguggaggacgcugaggcccgug

SEQ ID NO: 228222 - RNA, 32 nt, Homo Sapiens
aaugguggaagacacaacuugguuucagaaag

SEQ ID NO: 228223 - RNA, 32 nt, Homo Sapiens
auggugaggauggcagaguagagcuaaagugg

SEQ ID NO: 228224 - RNA, 32 nt, Homo Sapiens
gcucuuugcccagcuccuggggugggaguggu

SEQ ID NO: 228225 - RNA, 32 nt, Homo Sapiens
caucccccacuucuccacggaagccccauccc

SEQ ID NO: 228226 - RNA, 32 nt, Homo Sapiens
ggggccccucucagcccucacacacccugucu

SEQ ID NO: 228227 - RNA, 32 nt, Homo Sapiens
ucagccacaaaauaaauguugggagaaaugau

SEQ ID NO: 228228 - RNA, 32 nt, Homo Sapiens
aaaggcuguugauuguaauauucacacagcuc

SEQ ID NO: 228229 - RNA, 32 nt, Homo Sapiens
aauucauaaaaauaaccaaaaaaugugagcua

SEQ ID NO: 228230 - RNA, 32 nt, Homo Sapiens
gagucccucacagagacucagggccacccgaa

SEQ ID NO: 228231 - RNA, 32 nt, Homo Sapiens
gugcugcuuucuuuuucuuuuuuuaauuuugu

SEQ ID NO: 228232 - RNA, 32 nt, Homo Sapiens
cagcaggaauaauuugaaaugugugaggugac

SEQ ID NO: 228233 - RNA, 32 nt, Homo Sapiens
acaaucaugguggaaggcaaggaggugcaaaa

SEQ ID NO: 228234 - RNA, 32 nt, Homo Sapiens
aggagucugcacaugcagcugcacccucccuc

SEQ ID NO: 228235 - RNA, 32 nt, Homo Sapiens
uuagcaaauaggaacuuaauucucagcacuga

SEQ ID NO: 228236 - RNA, 32 nt, Homo Sapiens
uguacuucccaauugccacauuuuaaauaaag

SEQ ID NO: 228237 - RNA, 32 nt, Homo Sapiens
auucgauuccaagaguagugguguaaauugcc

SEQ ID NO: 228238 - RNA, 32 nt, Homo Sapiens
aagcaggagggacgaccccccucacccugaca

SEQ ID NO: 228239 - RNA, 32 nt, Homo Sapiens
gcaguggcagcagcgaggacucggggggcgcg

SEQ ID NO: 228240 - RNA, 32 nt, Homo Sapiens
ugcccgacgccaggaccccgcuccaucgggcc

SEQ ID NO: 228241 - RNA, 32 nt, Homo Sapiens
uugcugauaaccuugucaggucaccagauaaa

SEQ ID NO: 228242 - RNA, 32 nt, Homo Sapiens
gcugcuccuugggaaccccaguccugagcuug

SEQ ID NO: 228243 - RNA, 32 nt, Homo Sapiens
uuguauuagacacccaacaugccuuucagaaa

SEQ ID NO: 228244 - RNA, 32 nt, Homo Sapiens
uaugaaaguggaaaaggacauuucuguaguag

SEQ ID NO: 228245 - RNA, 32 nt, Homo Sapiens
cuuuccagauacugcuucuccucucuccccca

SEQ ID NO: 228246 - RNA, 32 nt, Homo Sapiens
gggagagccaagggggcggcccagccuggaca

SEQ ID NO: 228247 - RNA, 32 nt, Homo Sapiens
aaucaucucgcaccaccaguuacacuugaauu

SEQ ID NO: 228248 - RNA, 32 nt, Homo Sapiens
ugcuccuagaacuggugauauaaagaaugaaa

SEQ ID NO: 228249 - RNA, 32 nt, Homo Sapiens
uuuaaagaaauauuuaaucuaaaagaaaacuc

SEQ ID NO: 228250 - RNA, 32 nt, Homo Sapiens
auuaugccacgcggagguccccccgcagcagc

SEQ ID NO: 228251 - RNA, 32 nt, Homo Sapiens
gggucuauuguuaucugacaucucuugacaug

SEQ ID NO: 228252 - RNA, 32 nt, Homo Sapiens
aacaaaauguguauauuuuaauaaaugcauaa

SEQ ID NO: 228253 - RNA, 32 nt, Homo Sapiens
cccaggugacccagcucugugucauuuggagc

SEQ ID NO: 228254 - RNA, 32 nt, Homo Sapiens
cccacagaagcagagcccauggagccagaccc

SEQ ID NO: 228255 - RNA, 32 nt, Homo Sapiens
augguaaaaaauuuauaacguguucaauauuu

SEQ ID NO: 228256 - RNA, 32 nt, Homo Sapiens
gccauuuccuccucuuguuuucacuccggauu

SEQ ID NO: 228257 - RNA, 32 nt, Homo Sapiens
agcuccgccgacgggcuggacggccccgccau

SEQ ID NO: 228258 - RNA, 32 nt, Homo Sapiens
acacgugcaccuguagcaguauuucuagaaac

SEQ ID NO: 228259 - RNA, 32 nt, Homo Sapiens
aguuuccugcaccgugaauccaacugugccaa

SEQ ID NO: 228260 - RNA, 32 nt, Homo Sapiens
gcggaaaauuuauuaaauuaacuauuaaccac

SEQ ID NO: 228261 - RNA, 32 nt, Homo Sapiens
cuacuacauuauaucauuaccugguaucccau

SEQ ID NO: 228262 - RNA, 32 nt, Homo Sapiens
ggccagcagcagagggcggcggaggaaggguu

SEQ ID NO: 228263 - RNA, 32 nt, Homo Sapiens
uaagggaagagaggaguguuuuuaacuuuuua

SEQ ID NO: 228264 - RNA, 32 nt, Homo Sapiens
aacauauuuuaauguaaaaauuugcauucaaa

SEQ ID NO: 228265 - RNA, 32 nt, Homo Sapiens
aguucaaaaauauucauuucaaucuuuucaua

SEQ ID NO: 228266 - RNA, 32 nt, Homo Sapiens
gauggcuugagcccaggagguugaggucacag

SEQ ID NO: 228267 - RNA, 32 nt, Homo Sapiens
cuuaugcuccuggugucuuuugcuccacuugc

SEQ ID NO: 228268 - RNA, 30 nt, Homo Sapiens
aaaggagucauugcugcagcuccuugucga

SEQ ID NO: 228269 - RNA, 32 nt, Homo Sapiens
cgaucucuugagucucuuucuuguccucccag

SEQ ID NO: 228270 - RNA, 32 nt, Homo Sapiens
uacguugagaagggaccugcugauugcuuuga

SEQ ID NO: 228271 - RNA, 32 nt, Homo Sapiens
ugagcccgggggcacggcccaggugcaugggg

SEQ ID NO: 228272 - RNA, 31 nt, Homo Sapiens
gagccgcugccggagggucguuuuaaagggc

SEQ ID NO: 228273 - RNA, 32 nt, Homo Sapiens
ggcccauggguggguguugagguuuuuaaagu

SEQ ID NO: 228274 - RNA, 32 nt, Homo Sapiens
gcucucgcugcggccgcacccgcgcccgugcc

SEQ ID NO: 228275 - RNA, 32 nt, Homo Sapiens
augggucccaguaucaucuuuaaugcuauggg

SEQ ID NO: 228276 - RNA, 32 nt, Homo Sapiens
cagacccaagagcugcagcaccucaagucccu

SEQ ID NO: 228277 - RNA, 32 nt, Homo Sapiens
auugagugcuugcuguaugccaggcgcugaug

SEQ ID NO: 228278 - RNA, 32 nt, Homo Sapiens
uacuuaaaggcacaacuaaaugcuuuauuacc

SEQ ID NO: 228279 - RNA, 32 nt, Homo Sapiens
aaagacccgccagugccugaugguuacugaga

SEQ ID NO: 228280 - RNA, 32 nt, Homo Sapiens
acuguucuggguggcuggaucuccaggguacc

SEQ ID NO: 228281 - RNA, 32 nt, Homo Sapiens
agcagcgccuccuucagcuccacagccagacg

SEQ ID NO: 228282 - RNA, 32 nt, Homo Sapiens
gauugcagacugcauguucacagagcuggggg

SEQ ID NO: 228283 - RNA, 32 nt, Homo Sapiens
ucuaaggcaguagaaugguggcugggaagaug

SEQ ID NO: 228284 - RNA, 32 nt, Homo Sapiens
gaaguaggggagaagggacaggccccagcgcu

SEQ ID NO: 228285 - RNA, 32 nt, Homo Sapiens
ggggcuggaggcggggcgagggcgcggcucga

SEQ ID NO: 228286 - RNA, 32 nt, Homo Sapiens
uccugccuuggggucagcagccaccagcuggc

SEQ ID NO: 228287 - RNA, 32 nt, Homo Sapiens
gagccugagauccggcaccccaucccccucca

SEQ ID NO: 228288 - RNA, 32 nt, Homo Sapiens
uugacuuauuuugaauggacuacauuauagcu

SEQ ID NO: 228289 - RNA, 32 nt, Homo Sapiens
gaaggugcauguccgggcucucgggggccccc

SEQ ID NO: 228290 - RNA, 32 nt, Homo Sapiens
aagcucaugguuugcccacgggcacccacugu

SEQ ID NO: 228291 - RNA, 30 nt, Homo Sapiens
agagcaggcaggcccacugcugcugagaac

SEQ ID NO: 228292 - RNA, 32 nt, Homo Sapiens
gggcacugccagcuucgcuccacucagccccc

SEQ ID NO: 228293 - RNA, 32 nt, Homo Sapiens
gaucugguacccauagcuggaccaaucaugac

SEQ ID NO: 228294 - RNA, 32 nt, Homo Sapiens
uucugugcuuaggguuugcugcugcuggugag

SEQ ID NO: 228295 - RNA, 32 nt, Homo Sapiens
ugauggaaacaaaagccuuggaacaauugcac

SEQ ID NO: 228296 - RNA, 32 nt, Homo Sapiens
cgugugcagggcuuccggcggcgugggggcaa

SEQ ID NO: 228297 - RNA, 28 nt, Homo Sapiens
ugaaccaugugagaauaaucccauacau

SEQ ID NO: 228298 - RNA, 30 nt, Homo Sapiens
cugugagccaaauaaacuucuuuauaaauu

SEQ ID NO: 228299 - RNA, 32 nt, Homo Sapiens
cuuaguucuggugauuucuugaugguuuggaa

SEQ ID NO: 228300 - RNA, 32 nt, Homo Sapiens
uacggaauuggagaaaauauuuguaaacuaug

SEQ ID NO: 228301 - RNA, 30 nt, Homo Sapiens
agugugcuucucagggaggaaaccggcuug

SEQ ID NO: 228302 - RNA, 32 nt, Homo Sapiens
gacagaaucauuaagauaaucaaauuguccua

SEQ ID NO: 228303 - RNA, 28 nt, Homo Sapiens
auguacuauucaacuauguguuucuguu

SEQ ID NO: 228304 - RNA, 32 nt, Homo Sapiens
gcacuucgacgaagacgaguucuggacugagg

SEQ ID NO: 228305 - RNA, 32 nt, Homo Sapiens
cuucuuaaacuuuuuuuuuuuaaaaacugcuc

SEQ ID NO: 228306 - RNA, 32 nt, Homo Sapiens
ccugcaguacuuccuggagaagagggagaagc

SEQ ID NO: 228307 - RNA, 32 nt, Homo Sapiens
cuucggacccagcagaaggauccgccacaggg

SEQ ID NO: 228308 - RNA, 32 nt, Homo Sapiens
cggcuggauggcagacaaaccuaugauuauag

SEQ ID NO: 228309 - RNA, 32 nt, Homo Sapiens
acgagaccugugugccaggggcagauggccug

SEQ ID NO: 228310 - RNA, 32 nt, Homo Sapiens
agacucggaggggacacgaugagcaccaggcc

SEQ ID NO: 228311 - RNA, 32 nt, Homo Sapiens
cguccauuucccucucugcgcgcggaccuucc

SEQ ID NO: 228312 - RNA, 32 nt, Homo Sapiens
uuuucagagaguuuggggucuaccucagagcu

SEQ ID NO: 228313 - RNA, 32 nt, Homo Sapiens
caucuccuguaaauucaaaggcacauacacca

SEQ ID NO: 228314 - RNA, 32 nt, Homo Sapiens
accuguacucaaaauauaagcagcuugaaacu

SEQ ID NO: 228315 - RNA, 32 nt, Homo Sapiens
ggggaaguggggugaaggaggcgugcagggag

SEQ ID NO: 228316 - RNA, 32 nt, Homo Sapiens
uccccaauuuacuuuuuuuuuauaccuuaaaa

SEQ ID NO: 228317 - RNA, 30 nt, Homo Sapiens
ggaaguggcggcggcggcggcgggacugcg

SEQ ID NO: 228318 - RNA, 32 nt, Homo Sapiens
gaggggcuguggacuucggacucgggccugga

SEQ ID NO: 228319 - RNA, 27 nt, Homo Sapiens
ccuucccauuaauucauugggauggaa

SEQ ID NO: 228320 - RNA, 32 nt, Homo Sapiens
uaaagggcccuguggcagcugucacuggaacu

SEQ ID NO: 228321 - RNA, 32 nt, Homo Sapiens
agcuugccuuccauuuaucucuaggguuagcu

SEQ ID NO: 228322 - RNA, 32 nt, Homo Sapiens
uggaaaagaacaaagugaaacuguaucacugu

SEQ ID NO: 228323 - RNA, 32 nt, Homo Sapiens
agagcuacgccagcaggcgccaagcacccaac

SEQ ID NO: 228324 - RNA, 32 nt, Homo Sapiens
cacugagauuauuccuauaauuuuaaaguauc

SEQ ID NO: 228325 - RNA, 32 nt, Homo Sapiens
uuucgaaugagucuaagaaccacagggauaau

SEQ ID NO: 228326 - RNA, 32 nt, Homo Sapiens
aguuuuuugcagggaaucauggagcugagaau

SEQ ID NO: 228327 - RNA, 32 nt, Homo Sapiens
ccaggcgcugcgcggcugcucuggcguccagu

SEQ ID NO: 228328 - RNA, 32 nt, Homo Sapiens
cuguggguucgcguccuggguugcgugcauuc

SEQ ID NO: 228329 - RNA, 32 nt, Homo Sapiens
ucagugucuucgccggcccccggcccguacgc

SEQ ID NO: 228330 - RNA, 32 nt, Homo Sapiens
gacaacaucaccguacugcaugugaagcucac

SEQ ID NO: 228331 - RNA, 32 nt, Homo Sapiens
augggccacaggugcugcugcugugaggacac

SEQ ID NO: 228332 - RNA, 32 nt, Homo Sapiens
ggggacgccugcccuucugucuccggacgcuc

SEQ ID NO: 228333 - RNA, 32 nt, Homo Sapiens
uuccaccccacaaugguaggccaggcauccau

SEQ ID NO: 228334 - RNA, 32 nt, Homo Sapiens
cuuggaggcuacugccuugaagaugaccucua

SEQ ID NO: 228335 - RNA, 30 nt, Homo Sapiens
uuguucaguuaccugggggaaccucaccca

SEQ ID NO: 228336 - RNA, 32 nt, Homo Sapiens
uuccagagucucuaaacucucaucuuccccca

SEQ ID NO: 228337 - RNA, 32 nt, Homo Sapiens
aaaaaaacaacuucuuuuuugcuuccgcauaa

SEQ ID NO: 228338 - RNA, 32 nt, Homo Sapiens
uuucuacuucugucacaaaccacauuaaauug

SEQ ID NO: 228339 - RNA, 32 nt, Homo Sapiens
acuauacugugucaauaucuguaaaaagagag

SEQ ID NO: 228340 - RNA, 32 nt, Homo Sapiens
ggcuguuaaaaauaaacuucugugaacauucg

SEQ ID NO: 228341 - RNA, 32 nt, Homo Sapiens
aguaaggugcaaugaagaaguguugauugcca

SEQ ID NO: 228342 - RNA, 32 nt, Homo Sapiens
auuagaaauggcaucccuaucuacuuacuuua

SEQ ID NO: 228343 - RNA, 32 nt, Homo Sapiens
ccccuccccuccccaggugaccugcucucuuu

SEQ ID NO: 228344 - RNA, 32 nt, Homo Sapiens
agggacccugccgcugccccucugaggggucu

SEQ ID NO: 228345 - RNA, 32 nt, Homo Sapiens
aucuuauuagauacuauuauuauccccuuuua

SEQ ID NO: 228346 - RNA, 32 nt, Homo Sapiens
augguguuauuuauuccauggcuuagcuuccu

SEQ ID NO: 228347 - RNA, 32 nt, Homo Sapiens
cucggcaggacaccgggguguggaagggggaa

SEQ ID NO: 228348 - RNA, 32 nt, Homo Sapiens
uagcauguucuucugucuuccauaguuauuac

SEQ ID NO: 228349 - RNA, 32 nt, Homo Sapiens
ggugcagagauggaggaagaagaauaugaaca

SEQ ID NO: 228350 - RNA, 32 nt, Homo Sapiens
agcuugccugacgccuacagcggcgaccacga

SEQ ID NO: 228351 - RNA, 32 nt, Homo Sapiens
aggccgagucccuccccuccccacggcugcgu

SEQ ID NO: 228352 - RNA, 32 nt, Homo Sapiens
uuguuucuuuugcuuaggaaauugcucauaau

SEQ ID NO: 228353 - RNA, 31 nt, Homo Sapiens
uuuggaaaauaaaaaucaugucaucuucuau

SEQ ID NO: 228354 - RNA, 32 nt, Homo Sapiens
uggggguauaucuauuucugaagagguaagcu

SEQ ID NO: 228355 - RNA, 32 nt, Homo Sapiens
aaaaauaaacacaaugaaaccgaucacuguua

SEQ ID NO: 228356 - RNA, 32 nt, Homo Sapiens
cauaaccugcgguuuggggaacggagagauga

SEQ ID NO: 228357 - RNA, 32 nt, Homo Sapiens
cugcuguagcuuucugaagaagauuguagaaa

SEQ ID NO: 228358 - RNA, 32 nt, Homo Sapiens
acugaaacuccccuggccccagcccucuccug

SEQ ID NO: 228359 - RNA, 32 nt, Homo Sapiens
uggaaaggccuuucgucaguuuucccaccuug

SEQ ID NO: 228360 - RNA, 32 nt, Homo Sapiens
agcuucuccagauggagaagagaccaucacug

SEQ ID NO: 228361 - RNA, 32 nt, Homo Sapiens
ccugcucucccucucccuccuccaggccacgg

SEQ ID NO: 228362 - RNA, 32 nt, Homo Sapiens
cuugaguugaagaucuuugacauagguucuuc

SEQ ID NO: 228363 - RNA, 32 nt, Homo Sapiens
aggagaagcucggcggcgucccggggccggag

SEQ ID NO: 228364 - RNA, 32 nt, Homo Sapiens
guacauuuaaacacaaaccaaauacuccaggg

SEQ ID NO: 228365 - RNA, 32 nt, Homo Sapiens
ggaccgugaugcccggcccugcuccugacagc

SEQ ID NO: 228366 - RNA, 32 nt, Homo Sapiens
aagacgagauuaugagacagguccucaggccu

SEQ ID NO: 228367 - RNA, 32 nt, Homo Sapiens
uuguccugaauucuacauuauuagauuacuuu

SEQ ID NO: 228368 - RNA, 32 nt, Homo Sapiens
gggcagaguuucuggaggaaaccgcagccucu

SEQ ID NO: 228369 - RNA, 32 nt, Homo Sapiens
gggcguggugagucgcggucuguucucacgga

SEQ ID NO: 228370 - RNA, 30 nt, Homo Sapiens
gggugucuggacuguuuccaguuuuuggcu

SEQ ID NO: 228371 - RNA, 32 nt, Homo Sapiens
uggcuucccaacuccugaacacgacacaauuu

SEQ ID NO: 228372 - RNA, 32 nt, Homo Sapiens
cuccugcugacagcugcaggacagcugcuggg

SEQ ID NO: 228373 - RNA, 32 nt, Homo Sapiens
cuagagugggaagagggggcuggccauggggc

SEQ ID NO: 228374 - RNA, 32 nt, Homo Sapiens
cuccagucuccucccgggggcccccagcccgc

SEQ ID NO: 228375 - RNA, 32 nt, Homo Sapiens
uuugugcuuugaugccaggaaugccgccuagu

SEQ ID NO: 228376 - RNA, 32 nt, Homo Sapiens
gugagugggaggaaaggggucuguaaagcggg

SEQ ID NO: 228377 - RNA, 27 nt, Homo Sapiens
ccucgguccuucucagccgucgggaua

SEQ ID NO: 228378 - RNA, 32 nt, Homo Sapiens
gagcaaccaucccccacccccacauccacugu

SEQ ID NO: 228379 - RNA, 32 nt, Homo Sapiens
ggaccaggcgcuuggcaagacaucagacacac

SEQ ID NO: 228380 - RNA, 32 nt, Homo Sapiens
guguguguuuaaaaauaauguuuuaucuuccc

SEQ ID NO: 228381 - RNA, 32 nt, Homo Sapiens
augaggcaccaaucagugacacuggaaugcuu

SEQ ID NO: 228382 - RNA, 32 nt, Homo Sapiens
aguuucugaauagguggaccggaggagaccaa

SEQ ID NO: 228383 - RNA, 32 nt, Homo Sapiens
ggaacaguauauaaaaguauugaagcagcugc

SEQ ID NO: 228384 - RNA, 32 nt, Homo Sapiens
cguuuccggcucgcuggguccgggccagguaa

SEQ ID NO: 228385 - RNA, 31 nt, Homo Sapiens
ggccgugagucccguggcagagccuucuggg

SEQ ID NO: 228386 - RNA, 32 nt, Homo Sapiens
gugaagccaagccccagagccacggacuccag

SEQ ID NO: 228387 - RNA, 32 nt, Homo Sapiens
cacauuggaccagaugaggaucugaaauggca

SEQ ID NO: 228388 - RNA, 32 nt, Homo Sapiens
guuuguaagauguugcuuaauacagucuggaa

SEQ ID NO: 228389 - RNA, 32 nt, Homo Sapiens
ccccuccccauugucaggcucuccauguccac

SEQ ID NO: 228390 - RNA, 32 nt, Homo Sapiens
cgcucgccgagcuccagccgaaggagaagggg

SEQ ID NO: 228391 - RNA, 32 nt, Homo Sapiens
aucuuaacucauuuuagcauuaacucaaacga

SEQ ID NO: 228392 - RNA, 32 nt, Homo Sapiens
aaagaagugggaaggaucugcgcggaagaagc

SEQ ID NO: 228393 - RNA, 32 nt, Homo Sapiens
accccacaggcuugagguguugccaggauucu

SEQ ID NO: 228394 - RNA, 32 nt, Homo Sapiens
uuuauguaaaauguaaaaugaaauagcuauca

SEQ ID NO: 228395 - RNA, 32 nt, Homo Sapiens
ucugacugguaaauuucuuuuuuuuaaucuuc

SEQ ID NO: 228396 - RNA, 32 nt, Homo Sapiens
gugaaagaggaaaauaugguaguaaucgagua

SEQ ID NO: 228397 - RNA, 32 nt, Homo Sapiens
cacauguagucaucagaaaauaagccauuccu

SEQ ID NO: 228398 - RNA, 32 nt, Homo Sapiens
acaggggggucccggagaaagaaggacaguga

SEQ ID NO: 228399 - RNA, 32 nt, Homo Sapiens
gccuuuaauauuuguaucucuaauuuuauuuu

SEQ ID NO: 228400 - RNA, 32 nt, Homo Sapiens
ggcgccuccuucggcuccuccucggaauagcu

SEQ ID NO: 228401 - RNA, 32 nt, Homo Sapiens
aggggcagauggaucagaagauacuucugaaa

SEQ ID NO: 228402 - RNA, 32 nt, Homo Sapiens
ggagacagcuccgagacggcuucaccucggag

SEQ ID NO: 228403 - RNA, 32 nt, Homo Sapiens
uuuauaaaggagaauaauaugcuuuuaaaaaa

SEQ ID NO: 228404 - RNA, 32 nt, Homo Sapiens
uggcggcgcgcccugccccacggacccgggca

SEQ ID NO: 228405 - RNA, 32 nt, Homo Sapiens
acuugguaaggauaaugaugcuguagaugucu

SEQ ID NO: 228406 - RNA, 29 nt, Homo Sapiens
uucccuucuucuuagcaccacaaauaauc

SEQ ID NO: 228407 - RNA, 32 nt, Homo Sapiens
uaaacuuuuuauuccauuauaucuugucuaga

SEQ ID NO: 228408 - RNA, 32 nt, Homo Sapiens
ccagaauugagggucuccgggggagggcagag

SEQ ID NO: 228409 - RNA, 32 nt, Homo Sapiens
gcaaguaaauuaagaugaaaauaccaucagau

SEQ ID NO: 228410 - RNA, 32 nt, Homo Sapiens
ggccuuaugagcucagccucgcuuugagguac

SEQ ID NO: 228411 - RNA, 32 nt, Homo Sapiens
cgucuugucugugaucuuuguucuugaccucu

SEQ ID NO: 228412 - RNA, 29 nt, Homo Sapiens
ccugguuggggacagggugaagaggguug

SEQ ID NO: 228413 - RNA, 32 nt, Homo Sapiens
gcagcagcgcggagcuccgaaguaaaggcgcc

SEQ ID NO: 228414 - RNA, 32 nt, Homo Sapiens
gaaaagugaaaucuuaaccaaggaaugaaaag

SEQ ID NO: 228415 - RNA, 32 nt, Homo Sapiens
cauugcacuccagccugggugacaagagugaa

SEQ ID NO: 228416 - RNA, 32 nt, Homo Sapiens
uaaggggcuguggggugaaauguugacuggaa

SEQ ID NO: 228417 - RNA, 32 nt, Homo Sapiens
uacccuagagcaggacacagggugugguacug

SEQ ID NO: 228418 - RNA, 32 nt, Homo Sapiens
acuccuggaagugggacuccccugccuugcaa

SEQ ID NO: 228419 - RNA, 32 nt, Homo Sapiens
ugcacugagccgagaucacaccaccguacucc

SEQ ID NO: 228420 - RNA, 32 nt, Homo Sapiens
ugacaacuccuagugaacuuggacuugguugc

SEQ ID NO: 228421 - RNA, 32 nt, Homo Sapiens
cccccagguggugcggaaagccaggcaguugg

SEQ ID NO: 228422 - RNA, 32 nt, Homo Sapiens
agagcggcgggcccgcagcggccuggagccuc

SEQ ID NO: 228423 - RNA, 32 nt, Homo Sapiens
uagacaaaauaauucagaaauccauugugcca

SEQ ID NO: 228424 - RNA, 32 nt, Homo Sapiens
gcauauuggagaaggguaaugccagaagccag

SEQ ID NO: 228425 - RNA, 32 nt, Homo Sapiens
cacuggcagugaacaccaugucugcaggaggu

SEQ ID NO: 228426 - RNA, 32 nt, Homo Sapiens
gaccaaugggaggacggcggcgcagcccgcuc

SEQ ID NO: 228427 - RNA, 32 nt, Homo Sapiens
aggaugcagggccugcgggucucuacagugcc

SEQ ID NO: 228428 - RNA, 32 nt, Homo Sapiens
aggcuagcggcggcccgcaggcggcggggaga

SEQ ID NO: 228429 - RNA, 32 nt, Homo Sapiens
caaaguuugugguaauuuguuaugacagcccu

SEQ ID NO: 228430 - RNA, 32 nt, Homo Sapiens
gcaaucugaccuccuccugucuguuucccuuc

SEQ ID NO: 228431 - RNA, 32 nt, Homo Sapiens
gggaggcugaggcaggaugauugcuuaagccc

SEQ ID NO: 228432 - RNA, 32 nt, Homo Sapiens
caggaagggacccggguccacgagcugcccac

SEQ ID NO: 228433 - RNA, 32 nt, Homo Sapiens
aggcaaaguucaguugaugacaauuguguaua

SEQ ID NO: 228434 - RNA, 32 nt, Homo Sapiens
auuugugauugaaagcacuuuagugacuugga

SEQ ID NO: 228435 - RNA, 32 nt, Homo Sapiens
uuccuggcccucgggggccucucgaggucagc

SEQ ID NO: 228436 - RNA, 32 nt, Homo Sapiens
uugugcauggugcuuuuuaacuuucaucgagu

SEQ ID NO: 228437 - RNA, 32 nt, Homo Sapiens
caggcauuccuuaucauuuggaucuacauguu

SEQ ID NO: 228438 - RNA, 32 nt, Homo Sapiens
aauuagaaggggaagaaacaaacaagugccau

SEQ ID NO: 228439 - RNA, 32 nt, Homo Sapiens
caguguuagauccaccugaaggaguccugaga

SEQ ID NO: 228440 - RNA, 32 nt, Homo Sapiens
ggcauuuccacacuauugguggcaccuggagg

SEQ ID NO: 228441 - RNA, 32 nt, Homo Sapiens
ggaaaauagggacugagaaaaagcagauccua

SEQ ID NO: 228442 - RNA, 32 nt, Homo Sapiens
gccaggaccuuuccgaagcgucgaguggccua

SEQ ID NO: 228443 - RNA, 32 nt, Homo Sapiens
acagccauguuguaaauggccucugaggagga

SEQ ID NO: 228444 - RNA, 32 nt, Homo Sapiens
auugugcgcuggccgccaccgcugccaccugc

SEQ ID NO: 228445 - RNA, 32 nt, Homo Sapiens
gucaguucugcugagagcuucaucucuugguu

SEQ ID NO: 228446 - RNA, 32 nt, Homo Sapiens
cugugccgcgcgcuggcgcugcuggaagacga

SEQ ID NO: 228447 - RNA, 31 nt, Homo Sapiens
cugggugagagucuuggcagagccuuugcaa

SEQ ID NO: 228448 - RNA, 32 nt, Homo Sapiens
uccaccauggucacugcccauccagucacagg

SEQ ID NO: 228449 - RNA, 32 nt, Homo Sapiens
ccaacuuuucuuuaaaagacaagcauuucagu

SEQ ID NO: 228450 - RNA, 32 nt, Homo Sapiens
aaacaaaaagagcuuuccuucuccaggaauac

SEQ ID NO: 228451 - RNA, 32 nt, Homo Sapiens
ccuggcugcagccugggaaggcuggagaggca

SEQ ID NO: 228452 - RNA, 32 nt, Homo Sapiens
auucacugccccaccuccccugccugcccacc

SEQ ID NO: 228453 - RNA, 32 nt, Homo Sapiens
agaaggacauugacacugauuaaggcauaaac

SEQ ID NO: 228454 - RNA, 32 nt, Homo Sapiens
ccuauauaaccaaaguuuccagcagggaagga

SEQ ID NO: 228455 - RNA, 32 nt, Homo Sapiens
gugucgcaauuuuggaaggcaagaugugagag

SEQ ID NO: 228456 - RNA, 32 nt, Homo Sapiens
auaugccuccccuggcccccagccccucugcc

SEQ ID NO: 228457 - RNA, 32 nt, Homo Sapiens
ccacuaagaauucaaacuggggccuccagaac

SEQ ID NO: 228458 - RNA, 32 nt, Homo Sapiens
gagacaaucaguaugugcuuaccuguguucaa

SEQ ID NO: 228459 - RNA, 32 nt, Homo Sapiens
ccacgucacaagcaccugaggaguccggccgg

SEQ ID NO: 228460 - RNA, 32 nt, Homo Sapiens
uggggagcaguuugggggcggccggcagcagg

SEQ ID NO: 228461 - RNA, 32 nt, Homo Sapiens
uacagacucagguucucuuauuuuggaaguuu

SEQ ID NO: 228462 - RNA, 32 nt, Homo Sapiens
auggccauguguuccaggaaguucuuaugcug

SEQ ID NO: 228463 - RNA, 32 nt, Homo Sapiens
uacucccccuccucacuccccagccgccccca

SEQ ID NO: 228464 - RNA, 32 nt, Homo Sapiens
auugccauucugauuuugauagauauccucuc

SEQ ID NO: 228465 - RNA, 32 nt, Homo Sapiens
caccacccugaaccuccagauuaccaacucag

SEQ ID NO: 228466 - RNA, 30 nt, Homo Sapiens
uucagugucugugucuaagagagcacuuug

SEQ ID NO: 228467 - RNA, 32 nt, Homo Sapiens
uggccgcucccggcccuggggugcacaucggc

SEQ ID NO: 228468 - RNA, 32 nt, Homo Sapiens
ggagaaagcuguuuuucuuuaacuaaaaauaa

SEQ ID NO: 228469 - RNA, 32 nt, Homo Sapiens
uggugcggagcguucggcgggcggcggccggg

SEQ ID NO: 228470 - RNA, 32 nt, Homo Sapiens
gcgacucggccccaggcuuccggcgccggugg

SEQ ID NO: 228471 - RNA, 32 nt, Homo Sapiens
caaggcccuuccucccugaggaccccaccccc

SEQ ID NO: 228472 - RNA, 32 nt, Homo Sapiens
aaaucaguguaaacuuggaggagagauuuuuc

SEQ ID NO: 228473 - RNA, 32 nt, Homo Sapiens
gguuguuuugguuuuuuuucuuuggaguuuuu

SEQ ID NO: 228474 - RNA, 32 nt, Homo Sapiens
gcaaauggcacuuauauauaaaagagagaaca

SEQ ID NO: 228475 - RNA, 32 nt, Homo Sapiens
accucaaaugauauggcucauuguaggagcua

SEQ ID NO: 228476 - RNA, 32 nt, Homo Sapiens
ggacuccagcgccugcccucccugggguccuu

SEQ ID NO: 228477 - RNA, 32 nt, Homo Sapiens
caucgagaccucugcaagcuucagcagacgag

SEQ ID NO: 228478 - RNA, 32 nt, Homo Sapiens
ccccaagaccucuugagagagcauuucagcuc

SEQ ID NO: 228479 - RNA, 32 nt, Homo Sapiens
ugccugcugugcccgcgcugucgccgcugcua

SEQ ID NO: 228480 - RNA, 32 nt, Homo Sapiens
ccucuucaccccacaagaagccuuauccuacg

SEQ ID NO: 228481 - RNA, 32 nt, Homo Sapiens
agcaagcaccaaugcagacaugagcgucagug

SEQ ID NO: 228482 - RNA, 32 nt, Homo Sapiens
gauaauaauauugauauuuaguuucuuuggag

SEQ ID NO: 228483 - RNA, 32 nt, Homo Sapiens
guguuugcuccaccuucauauuggcuagguag

SEQ ID NO: 228484 - RNA, 32 nt, Homo Sapiens
ugguggugcucgcugcugcugcugagaggagg

SEQ ID NO: 228485 - RNA, 32 nt, Homo Sapiens
uaaacguauuuugaucaguauuacaaggguau

SEQ ID NO: 228486 - RNA, 32 nt, Homo Sapiens
ccagauaccccucccccacagauuccuagcaa

SEQ ID NO: 228487 - RNA, 32 nt, Homo Sapiens
augcacugcaagcagcuaacaugcaagaucau

SEQ ID NO: 228488 - RNA, 32 nt, Homo Sapiens
cucaggcccucucggcagcuguagggugggga

SEQ ID NO: 228489 - RNA, 32 nt, Homo Sapiens
uucaaagaaaucaaguauaugaggagagcgag

SEQ ID NO: 228490 - RNA, 32 nt, Homo Sapiens
ggccauggcagagcucguuccauucacgaagg

SEQ ID NO: 228491 - RNA, 32 nt, Homo Sapiens
uucucaggggcucuagggacugccaggcuguu

SEQ ID NO: 228492 - RNA, 32 nt, Homo Sapiens
caauuuuucuaaaaguucagucgaaagcuuuu

SEQ ID NO: 228493 - RNA, 32 nt, Homo Sapiens
uacaaaugagaaaauccuaccgaggaauuucc

SEQ ID NO: 228494 - RNA, 32 nt, Homo Sapiens
acgucugguuucugcugggcugcccucucaug

SEQ ID NO: 228495 - RNA, 32 nt, Homo Sapiens
uauucaaacuuucaaaaaggacaguguuuaga

SEQ ID NO: 228496 - RNA, 32 nt, Homo Sapiens
gacuccgucccccacaccacaguucugacugu

SEQ ID NO: 228497 - RNA, 28 nt, Homo Sapiens
aggaugggcugcggcgggagccgggcgg

SEQ ID NO: 228498 - RNA, 31 nt, Homo Sapiens
uccuggugaauucgguaaccauagaccaaaa

SEQ ID NO: 228499 - RNA, 30 nt, Homo Sapiens
ucccuaauaccugccacccaacucuuaauc

SEQ ID NO: 228500 - RNA, 32 nt, Homo Sapiens
aaauggaguauuuuuauuuuauguauauacua

SEQ ID NO: 228501 - RNA, 32 nt, Homo Sapiens
ggcggcggcgcgcgggugcgaucgcggagcug

SEQ ID NO: 228502 - RNA, 32 nt, Homo Sapiens
cgcauaccuuggaauacacugugaccccaguu

SEQ ID NO: 228503 - RNA, 32 nt, Homo Sapiens
uagcuccucuuaggaaaacaguucuuguggcc

SEQ ID NO: 228504 - RNA, 32 nt, Homo Sapiens
ggccggcgcggcgggggaggcggaggauggaa

SEQ ID NO: 228505 - RNA, 32 nt, Homo Sapiens
agcugaaucugugccuacaaauggaaucaaag

SEQ ID NO: 228506 - RNA, 32 nt, Homo Sapiens
acugccaaggccaggugcaguggcuuacaccu

SEQ ID NO: 228507 - RNA, 32 nt, Homo Sapiens
auggaggggaaacaaccuccuuugcagggcgu

SEQ ID NO: 228508 - RNA, 32 nt, Homo Sapiens
uagugcuugacaaaguagugucacucuuaaga

SEQ ID NO: 228509 - RNA, 32 nt, Homo Sapiens
ucucuuggccuucaggaagaaagcgccucucu

SEQ ID NO: 228510 - RNA, 32 nt, Homo Sapiens
ucuugcaucuaccugcuccuuggccuagucag

SEQ ID NO: 228511 - RNA, 32 nt, Homo Sapiens
agaauaugaaaauaaacaccggcuuaaaaaau

SEQ ID NO: 228512 - RNA, 32 nt, Homo Sapiens
aaaacuaaacauuuaaacaaaaaugggauaag

SEQ ID NO: 228513 - RNA, 32 nt, Homo Sapiens
agaucuggagcccgucucggaggaucuggacc

SEQ ID NO: 228514 - RNA, 32 nt, Homo Sapiens
cugauaugaauauaaauggugcacauaaguuc

SEQ ID NO: 228515 - RNA, 32 nt, Homo Sapiens
guucccggguggcuucggaccccugucggauc

SEQ ID NO: 228516 - RNA, 32 nt, Homo Sapiens
acuucuacugaauacaagaugaaaaugugguu

SEQ ID NO: 228517 - RNA, 32 nt, Homo Sapiens
gcagcgcugagacccccagcccgcccccucgg

SEQ ID NO: 228518 - RNA, 30 nt, Homo Sapiens
cacgcugucugugacuaaagagggcacagc

SEQ ID NO: 228519 - RNA, 32 nt, Homo Sapiens
gggcagcuuccacuuucugccggacacucuga

SEQ ID NO: 228520 - RNA, 32 nt, Homo Sapiens
uucucuuucuaaaauauuucauuuugauggag

SEQ ID NO: 228521 - RNA, 32 nt, Homo Sapiens
aagaagacuguaacaucauugccauuccuacu

SEQ ID NO: 228522 - RNA, 32 nt, Homo Sapiens
agggcauagagcagggcggggggaugggacug

SEQ ID NO: 228523 - RNA, 32 nt, Homo Sapiens
cuccuccugcucccggggcggagagcggggcc

SEQ ID NO: 228524 - RNA, 32 nt, Homo Sapiens
ccuucccgcccucccccugccagaggccuggu

SEQ ID NO: 228525 - RNA, 32 nt, Homo Sapiens
acagcucugcccgccgccccuggagcggaucc

SEQ ID NO: 228526 - RNA, 32 nt, Homo Sapiens
ucagaaagaagucaaggcacccgcgagccggg

SEQ ID NO: 228527 - RNA, 32 nt, Homo Sapiens
gguugagcugcgccuguaggcugugggcagcu

SEQ ID NO: 228528 - RNA, 32 nt, Homo Sapiens
cagggggugucagcugcacagcgggacucuag

SEQ ID NO: 228529 - RNA, 32 nt, Homo Sapiens
gcccccgcgagccccagcgcccuggcagucag

SEQ ID NO: 228530 - RNA, 32 nt, Homo Sapiens
ugagcucgacauuaggccucaaggcugccauc

SEQ ID NO: 228531 - RNA, 32 nt, Homo Sapiens
aguauuauaugaugacuauugauuuccuggag

SEQ ID NO: 228532 - RNA, 32 nt, Homo Sapiens
gguacaaaaaucacaaggcauucaaguguaca

SEQ ID NO: 228533 - RNA, 32 nt, Homo Sapiens
ugacaaagcuuccuggccuucccuuuaacaca

SEQ ID NO: 228534 - RNA, 32 nt, Homo Sapiens
acagaucuuugccaaauucuagauauuauagu

SEQ ID NO: 228535 - RNA, 32 nt, Homo Sapiens
gucucuucuacaauugugguuuauugaaugug

SEQ ID NO: 228536 - RNA, 32 nt, Homo Sapiens
gcugcucucuaugacaucaagcugcaggcguu

SEQ ID NO: 228537 - RNA, 32 nt, Homo Sapiens
aacucuuguacaaaauuaacaauucuguuauu

SEQ ID NO: 228538 - RNA, 32 nt, Homo Sapiens
ucuguuucuuuauguuuucucccuuugcucua

SEQ ID NO: 228539 - RNA, 32 nt, Homo Sapiens
aaggcucucacugaugaaagugccaggaaggc

SEQ ID NO: 228540 - RNA, 30 nt, Homo Sapiens
ccagccagccagucagugggucccgcaguc

SEQ ID NO: 228541 - RNA, 32 nt, Homo Sapiens
uaaaaaugaugauagggaagugucuaauguau

SEQ ID NO: 228542 - RNA, 28 nt, Homo Sapiens
uacgcaguuacaggguguagucuguuua

SEQ ID NO: 228543 - RNA, 32 nt, Homo Sapiens
uccauuuuuguccuuccuaagacccuguuauu

SEQ ID NO: 228544 - RNA, 32 nt, Homo Sapiens
gccugauauuccauugaaagggugugggauaa

SEQ ID NO: 228545 - RNA, 32 nt, Homo Sapiens
cuggcuguugcagguggugggcuacugcaggg

SEQ ID NO: 228546 - RNA, 32 nt, Homo Sapiens
aguuuuuaaaagacauacaugcaaaguuccuu

SEQ ID NO: 228547 - RNA, 32 nt, Homo Sapiens
cugaaaaaauuucagaauaauguuauuaaaga

SEQ ID NO: 228548 - RNA, 32 nt, Homo Sapiens
ugaaacauaacuuauaugcuagguucaacccu

SEQ ID NO: 228549 - RNA, 32 nt, Homo Sapiens
cagugugucgaaggaagaaaauuacagccuag

SEQ ID NO: 228550 - RNA, 32 nt, Homo Sapiens
ggaaaagagggcacccagcccuucccccuccc

SEQ ID NO: 228551 - RNA, 32 nt, Homo Sapiens
ggagaguugaacaugaauauuagagaaggaau

SEQ ID NO: 228552 - RNA, 32 nt, Homo Sapiens
uuucuaaguaucaguuugauaacuuuauauua

SEQ ID NO: 228553 - RNA, 32 nt, Homo Sapiens
cuugggucaaucucucacuuuauuuuguagaa

SEQ ID NO: 228554 - RNA, 32 nt, Homo Sapiens
gggcacauuuuucaacgauuaagaaucaucau

SEQ ID NO: 228555 - RNA, 32 nt, Homo Sapiens
cuccuuuuagaagaucauggugucacaguuug

SEQ ID NO: 228556 - RNA, 32 nt, Homo Sapiens
uauuuaugguuuacuuugaagaucucaacugc

SEQ ID NO: 228557 - RNA, 32 nt, Homo Sapiens
uagccgggcgugguggugggcgccuguagucc

SEQ ID NO: 228558 - RNA, 32 nt, Homo Sapiens
aauaacauuuuucccaucuuguaauauccaga

SEQ ID NO: 228559 - RNA, 32 nt, Homo Sapiens
acuagacccacuggacucaccucccccaucuc

SEQ ID NO: 228560 - RNA, 32 nt, Homo Sapiens
cuguugggacucauccagugcuccacaacgug

SEQ ID NO: 228561 - RNA, 32 nt, Homo Sapiens
caaaaagaguccuuccuggggugugggaggcu

SEQ ID NO: 228562 - RNA, 32 nt, Homo Sapiens
ggguuggacaaugaauguaguuaacugguucc

SEQ ID NO: 228563 - RNA, 32 nt, Homo Sapiens
cgcgggcgcucccggcgagccacgguggugcu

SEQ ID NO: 228564 - RNA, 31 nt, Homo Sapiens
caacuggcaaagaaagucuaauguuaaaaac

SEQ ID NO: 228565 - RNA, 32 nt, Homo Sapiens
uuagugucaauuucuucagaccuuucaccagg

SEQ ID NO: 228566 - RNA, 32 nt, Homo Sapiens
uugcagacuuuuccccaccuuuggggcucgug

SEQ ID NO: 228567 - RNA, 32 nt, Homo Sapiens
ccguggaggaagacugugagacuguggcugga

SEQ ID NO: 228568 - RNA, 32 nt, Homo Sapiens
ggccaggugcgguggcucacgucuguaaucuc

SEQ ID NO: 228569 - RNA, 32 nt, Homo Sapiens
gcucucccggggcgggcgcagaugggcgccgc

SEQ ID NO: 228570 - RNA, 32 nt, Homo Sapiens
acucaagccugggcaauguagcaagauccugu

SEQ ID NO: 228571 - RNA, 32 nt, Homo Sapiens
uggccgggggcucgggccgccgguacccacgg

SEQ ID NO: 228572 - RNA, 32 nt, Homo Sapiens
ccuccucccgcacuggccagccgaguccagcu

SEQ ID NO: 228573 - RNA, 32 nt, Homo Sapiens
ugaccuuugacaaaagaugacacucccuuuau

SEQ ID NO: 228574 - RNA, 32 nt, Homo Sapiens
guucaauauugguuuaggaaauuuaaggccuu

SEQ ID NO: 228575 - RNA, 32 nt, Homo Sapiens
ccggagcuguagcagcagcagcagccgccgug

SEQ ID NO: 228576 - RNA, 32 nt, Homo Sapiens
ggccuggccaagggucagggauccugggaccu

SEQ ID NO: 228577 - RNA, 32 nt, Homo Sapiens
uaucuuuugaguuugaaaagaaauuaauuugc

SEQ ID NO: 228578 - RNA, 32 nt, Homo Sapiens
agagaggcuccauggccgugcugcugggccau

SEQ ID NO: 228579 - RNA, 31 nt, Homo Sapiens
uuuagagaaaauggcagacgauauuaauauu

SEQ ID NO: 228580 - RNA, 32 nt, Homo Sapiens
cuaugagacuuguggucaaagcaagaaugagg

SEQ ID NO: 228581 - RNA, 32 nt, Homo Sapiens
acagaugccccgagaagagaugacuaggcauc

SEQ ID NO: 228582 - RNA, 32 nt, Homo Sapiens
agcccagcccgucuccucuucccuucccuggc

SEQ ID NO: 228583 - RNA, 32 nt, Homo Sapiens
ccggccggugucgcuccgcggcgggccauggc

SEQ ID NO: 228584 - RNA, 32 nt, Homo Sapiens
ggcuucggggacgcggggcgcuucucgggcgg

SEQ ID NO: 228585 - RNA, 32 nt, Homo Sapiens
cuggaggaagccuggguauuuugacacgggau

SEQ ID NO: 228586 - RNA, 32 nt, Homo Sapiens
ugugagcaaggcuuggugcccuggacaaggcc

SEQ ID NO: 228587 - RNA, 32 nt, Homo Sapiens
acguuaaaaaccaaaaaacuacauauuuuauu

SEQ ID NO: 228588 - RNA, 32 nt, Homo Sapiens
cucacacacacacacacacacacacacgcaca

SEQ ID NO: 228589 - RNA, 32 nt, Homo Sapiens
aggagaugagcguccuaaggcauguugggaua

SEQ ID NO: 228590 - RNA, 32 nt, Homo Sapiens
aauucagguuuccaaaguacuuuagaaaucau

SEQ ID NO: 228591 - RNA, 32 nt, Homo Sapiens
caaaaagauggcagaggcaaauccacagaagg

SEQ ID NO: 228592 - RNA, 32 nt, Homo Sapiens
uacuucuuaauuuguucauuaauuacauuaau

SEQ ID NO: 228593 - RNA, 32 nt, Homo Sapiens
gcgaccgcugggacagcgacgccugcacagcu

SEQ ID NO: 228594 - RNA, 32 nt, Homo Sapiens
agacaucaucugucugcauuuauugagaaugu

SEQ ID NO: 228595 - RNA, 32 nt, Homo Sapiens
ugcagugaagaaggaguaucagagcuccagcu

SEQ ID NO: 228596 - RNA, 32 nt, Homo Sapiens
ugcacuaaaagcuuaauggauuguuaaaauca

SEQ ID NO: 228597 - RNA, 32 nt, Homo Sapiens
gaagagugggcgcagcagcccagcggaggcca

SEQ ID NO: 228598 - RNA, 32 nt, Homo Sapiens
cugacaggccccagugugugauguucuucucc

SEQ ID NO: 228599 - RNA, 32 nt, Homo Sapiens
ugaugaaauuugcuuuuuauccaaauauuuug

SEQ ID NO: 228600 - RNA, 32 nt, Homo Sapiens
gggagcagauguaagcucccaagagccugggg

SEQ ID NO: 228601 - RNA, 32 nt, Homo Sapiens
ucccccugaagucaggaccagugccugugauc

SEQ ID NO: 228602 - RNA, 32 nt, Homo Sapiens
ccgaagguuuggccgccgcgggacaccuguuu

SEQ ID NO: 228603 - RNA, 32 nt, Homo Sapiens
agguauuugaaacuacagguguguaccaccac

SEQ ID NO: 228604 - RNA, 32 nt, Homo Sapiens
auguuuuuguagaaaguuggcauuggaaucug

SEQ ID NO: 228605 - RNA, 32 nt, Homo Sapiens
agccuccggagaagacaagggcaucgccgccu

SEQ ID NO: 228606 - RNA, 32 nt, Homo Sapiens
gguaaaaugggucauugggguggccccgauuu

SEQ ID NO: 228607 - RNA, 32 nt, Homo Sapiens
aguaauguaaaaagguugcuauuuuacuggug

SEQ ID NO: 228608 - RNA, 32 nt, Homo Sapiens
cccuaggaaaauuuuaccgcugucuaauuuau

SEQ ID NO: 228609 - RNA, 32 nt, Homo Sapiens
acuguguguaaaauaucuuuaaguaggauuga

SEQ ID NO: 228610 - RNA, 32 nt, Homo Sapiens
guacuguaaauucaguugaauuuugauaucua

SEQ ID NO: 228611 - RNA, 32 nt, Homo Sapiens
gcaucuuaauaaaaccugcuuauacuucccug

SEQ ID NO: 228612 - RNA, 32 nt, Homo Sapiens
uuuuauuuucuuuacaauuucacuuagucugu

SEQ ID NO: 228613 - RNA, 32 nt, Homo Sapiens
cggcgucggcugaggcgggcggaccggcgagg

SEQ ID NO: 228614 - RNA, 32 nt, Homo Sapiens
ccgccgccgccgccgccucagcgagaggagga

SEQ ID NO: 228615 - RNA, 32 nt, Homo Sapiens
acgcggaggaggagacaugagccggcgggcgc

SEQ ID NO: 228616 - RNA, 32 nt, Homo Sapiens
cucccucuccccuccgcccucacccagccaau

SEQ ID NO: 228617 - RNA, 32 nt, Homo Sapiens
cccacauggaaauuuagggguuucugaaucaa

SEQ ID NO: 228618 - RNA, 32 nt, Homo Sapiens
acagggcaggggugguggagggggcugggcuc

SEQ ID NO: 228619 - RNA, 32 nt, Homo Sapiens
gccuuagacggggugugcaguauuuuagguac

SEQ ID NO: 228620 - RNA, 32 nt, Homo Sapiens
uauuuucaauuguuuuucuuuauuuucuucag

SEQ ID NO: 228621 - RNA, 32 nt, Homo Sapiens
ucaccagucucuuucucuuuccugcuucaccc

SEQ ID NO: 228622 - RNA, 32 nt, Homo Sapiens
augagcggggaagggguccacacccuuacaug

SEQ ID NO: 228623 - RNA, 32 nt, Homo Sapiens
aucacaagcacucaaaacguggcugccaccuu

SEQ ID NO: 228624 - RNA, 32 nt, Homo Sapiens
uggaauuucuucauugugcugacugauucuau

SEQ ID NO: 228625 - RNA, 32 nt, Homo Sapiens
uauaccauauuuuuacuguaccuuuucuaugu

SEQ ID NO: 228626 - RNA, 32 nt, Homo Sapiens
ccuccggcacaagcuuccagcucugcagcugg

SEQ ID NO: 228627 - RNA, 32 nt, Homo Sapiens
ggugacccagcaucugaguuagguuccagcau

SEQ ID NO: 228628 - RNA, 32 nt, Homo Sapiens
gcuccaccccuacaagaggcagcacgcaaacu

SEQ ID NO: 228629 - RNA, 32 nt, Homo Sapiens
gugggagcacugggcucaugccuggcacacaa

SEQ ID NO: 228630 - RNA, 32 nt, Homo Sapiens
gucccuuuaaacagacugcugccuucagcuaa

SEQ ID NO: 228631 - RNA, 32 nt, Homo Sapiens
ucagcgcugggucagaaaggaagugcuugcca

SEQ ID NO: 228632 - RNA, 32 nt, Homo Sapiens
guuguuuguaaugaccguuauagagaagggcu

SEQ ID NO: 228633 - RNA, 32 nt, Homo Sapiens
aaucagugcaguuugaggauacguagaccccu

SEQ ID NO: 228634 - RNA, 32 nt, Homo Sapiens
gaaaggaacucugggcagcuggaggcgcagga

SEQ ID NO: 228635 - RNA, 32 nt, Homo Sapiens
ucuugauaaacacuuaauauuugggccugaag

SEQ ID NO: 228636 - RNA, 32 nt, Homo Sapiens
gcaucugccguggucagauccauuucaaauga

SEQ ID NO: 228637 - RNA, 32 nt, Homo Sapiens
aucuucagagaggugaccuacugcauacuucu

SEQ ID NO: 228638 - RNA, 32 nt, Homo Sapiens
gauuucuccgugugggggcuacaugcgacccu

SEQ ID NO: 228639 - RNA, 32 nt, Homo Sapiens
agacauauuaaauaugagacaccaggacuuga

SEQ ID NO: 228640 - RNA, 32 nt, Homo Sapiens
cagccggcgucugcgagccguccucaagcgca

SEQ ID NO: 228641 - RNA, 32 nt, Homo Sapiens
cgcagaagaaggagccguacucccagcggccc

SEQ ID NO: 228642 - RNA, 32 nt, Homo Sapiens
gucugaacacugggcuuaugccuuacucucag

SEQ ID NO: 228643 - RNA, 32 nt, Homo Sapiens
cagcccuguccccacaccuccugcuccccgac

SEQ ID NO: 228644 - RNA, 32 nt, Homo Sapiens
cugcaucccagcugcuccagccauugcuaaaa

SEQ ID NO: 228645 - RNA, 32 nt, Homo Sapiens
gcgcggcucuccccggaaacccggaccuggcc

SEQ ID NO: 228646 - RNA, 32 nt, Homo Sapiens
guuuucuuauccacagagaaagaaagaaaaaa

SEQ ID NO: 228647 - RNA, 32 nt, Homo Sapiens
agcgcgcucgcagcuccuggaaguguugccgc

SEQ ID NO: 228648 - RNA, 32 nt, Homo Sapiens
aucacugcaggaaaaagaugcaaccauuagau

SEQ ID NO: 228649 - RNA, 31 nt, Homo Sapiens
uagaagugguauauccaaguauaucagcuac

SEQ ID NO: 228650 - RNA, 32 nt, Homo Sapiens
caagaauacugggaaacagagaaguugugacu

SEQ ID NO: 228651 - RNA, 32 nt, Homo Sapiens
ucacuggccggaaggaugugucucagcccugc

SEQ ID NO: 228652 - RNA, 32 nt, Homo Sapiens
agguuaccaucaagugcaaucuguaaaauugu

SEQ ID NO: 228653 - RNA, 27 nt, Homo Sapiens
agggcguccuucuccagcaucaccugg

SEQ ID NO: 228654 - RNA, 32 nt, Homo Sapiens
cagaacaccucguggcugcugcugcuccugcu

SEQ ID NO: 228655 - RNA, 28 nt, Homo Sapiens
gccacucaaagucaacauuugagauaug

SEQ ID NO: 228656 - RNA, 28 nt, Homo Sapiens
guaucaugagaaagacauuugagagaaa

SEQ ID NO: 228657 - RNA, 32 nt, Homo Sapiens
uuauguuggaggugggaccuggugggagguga

SEQ ID NO: 228658 - RNA, 29 nt, Homo Sapiens
uuaaaaauauguauguuuucauagacuuu

SEQ ID NO: 228659 - RNA, 32 nt, Homo Sapiens
uugcugagaaauuuuucuuuugagugcugguc

SEQ ID NO: 228660 - RNA, 32 nt, Homo Sapiens
gucguggcgagaggggcgggguggccggggcu

SEQ ID NO: 228661 - RNA, 32 nt, Homo Sapiens
gaaggcugaccguucuguuuaauuaucuguaa

SEQ ID NO: 228662 - RNA, 32 nt, Homo Sapiens
uauuauaaaagucauuuagaaggucaggggga

SEQ ID NO: 228663 - RNA, 30 nt, Homo Sapiens
cccccauuuacaauuggggaaacugcggcu

SEQ ID NO: 228664 - RNA, 32 nt, Homo Sapiens
gguugcccuggaaagccugcugcucagcccau

SEQ ID NO: 228665 - RNA, 29 nt, Homo Sapiens
ggaucgcugaagauuccugcugaggguug

SEQ ID NO: 228666 - RNA, 32 nt, Homo Sapiens
gcaacugggcuuugccucacguauuccugcug

SEQ ID NO: 228667 - RNA, 32 nt, Homo Sapiens
gcccucugcccagcugacaguggcauccccag

SEQ ID NO: 228668 - RNA, 32 nt, Homo Sapiens
uguuuagauauuaaaguagguucugaaaagcg

SEQ ID NO: 228669 - RNA, 32 nt, Homo Sapiens
gcugcccaggaagggcagggcuggggugauga

SEQ ID NO: 228670 - RNA, 32 nt, Homo Sapiens
acuuuauguuacuuaugggaaccucaucuaaa

SEQ ID NO: 228671 - RNA, 32 nt, Homo Sapiens
acccaaaaaaucaacugaugucacuuagugau

SEQ ID NO: 228672 - RNA, 32 nt, Homo Sapiens
uuuuauaaaaaauuauauuuuuauucaguaau

SEQ ID NO: 228673 - RNA, 32 nt, Homo Sapiens
cacagccagccuucccuccacccaggccagca

SEQ ID NO: 228674 - RNA, 32 nt, Homo Sapiens
caauccugacuuccuggaggaagcucaugaau

SEQ ID NO: 228675 - RNA, 32 nt, Homo Sapiens
gguuucaccauauugggcaggcuggucucgaa

SEQ ID NO: 228676 - RNA, 32 nt, Homo Sapiens
gccucgaggcgggcgucuucggucaucuccgg

SEQ ID NO: 228677 - RNA, 32 nt, Homo Sapiens
gcucuuuuuucucggugggguguggguaauag

SEQ ID NO: 228678 - RNA, 32 nt, Homo Sapiens
caggacccaggagagggaagaaucugaggaac

SEQ ID NO: 228679 - RNA, 32 nt, Homo Sapiens
cuucggccgccgcacggccgggacucggaggc

SEQ ID NO: 228680 - RNA, 32 nt, Homo Sapiens
agaaacuuucccugucaaaggcuccggggggc

SEQ ID NO: 228681 - RNA, 32 nt, Homo Sapiens
guucagucuccauuguggcaugccacacucuc

SEQ ID NO: 228682 - RNA, 32 nt, Homo Sapiens
guguccuuucuccagaaggaaaagcaucucag

SEQ ID NO: 228683 - RNA, 32 nt, Homo Sapiens
acgcccagcuggagaagcaguuagggcggacg

SEQ ID NO: 228684 - RNA, 32 nt, Homo Sapiens
cuucucuccccccaagccuccauauuuauuuc

SEQ ID NO: 228685 - RNA, 32 nt, Homo Sapiens
aggagacaggauccagcccugugcagugguga

SEQ ID NO: 228686 - RNA, 32 nt, Homo Sapiens
auuuacauguuaucuucuuaauuuuagguuuc

SEQ ID NO: 228687 - RNA, 32 nt, Homo Sapiens
accucacucuauucuguaaauuugaaaaaaaa

SEQ ID NO: 228688 - RNA, 32 nt, Homo Sapiens
ccccaaagccgcccccucccccggcucccugg

SEQ ID NO: 228689 - RNA, 32 nt, Homo Sapiens
aguuuaagcugauguguaugggagccuaaaca

SEQ ID NO: 228690 - RNA, 32 nt, Homo Sapiens
aggccacccuccagcuuucucuuaucccagua

SEQ ID NO: 228691 - RNA, 32 nt, Homo Sapiens
acagcagcccgccccggccucucgggagccgu

SEQ ID NO: 228692 - RNA, 32 nt, Homo Sapiens
caguguggccccagcccgacaggcaugcacca

SEQ ID NO: 228693 - RNA, 32 nt, Homo Sapiens
cccuucuggcaggucagcccaaggcuaaagag

SEQ ID NO: 228694 - RNA, 32 nt, Homo Sapiens
ccggccagggucacaucaaccgccagaagugg

SEQ ID NO: 228695 - RNA, 25 nt, Homo Sapiens
uuaaaaggacuuuaucaaaaauuga

SEQ ID NO: 228696 - RNA, 32 nt, Homo Sapiens
caccaucaccaccagcagcaccugcugaacag

SEQ ID NO: 228697 - RNA, 32 nt, Homo Sapiens
caggggagcugggucaggcggucgccgggaca

SEQ ID NO: 228698 - RNA, 32 nt, Homo Sapiens
uguuucaaagacaauauucuuauuuuaauacg

SEQ ID NO: 228699 - RNA, 32 nt, Homo Sapiens
gggacugcauugagcaggcccaccugcuuccc

SEQ ID NO: 228700 - RNA, 32 nt, Homo Sapiens
aggaugcacuguauagccaggcugugggagga

SEQ ID NO: 228701 - RNA, 32 nt, Homo Sapiens
gaggggaaaaggaaacgggauaacuugcggua

SEQ ID NO: 228702 - RNA, 32 nt, Homo Sapiens
ccaaggauacaccagcagccugcuuacuacua

SEQ ID NO: 228703 - RNA, 32 nt, Homo Sapiens
agcccugagaucaguuauuccuacaaguuuaa

SEQ ID NO: 228704 - RNA, 32 nt, Homo Sapiens
uuccagggucucuggagggucgaggaggcagu

SEQ ID NO: 228705 - RNA, 32 nt, Homo Sapiens
gguugaugacugucagcaucacugccgcaggc

SEQ ID NO: 228706 - RNA, 32 nt, Homo Sapiens
agcagccgccgggcacgguuaugggggcgggg

SEQ ID NO: 228707 - RNA, 32 nt, Homo Sapiens
cgcuccgggucccggcgccgcgccaugugggc

SEQ ID NO: 228708 - RNA, 32 nt, Homo Sapiens
uucuauuaugccuuuuucuaacacagacuuuc

SEQ ID NO: 228709 - RNA, 32 nt, Homo Sapiens
aagggagagcggggcagucucggguggcuagu

SEQ ID NO: 228710 - RNA, 32 nt, Homo Sapiens
uaauauauuucuguggcaucaaauuuuaguug

SEQ ID NO: 228711 - RNA, 32 nt, Homo Sapiens
uccugccucuuccagcucccaggggcuccagg

SEQ ID NO: 228712 - RNA, 27 nt, Homo Sapiens
gcaccaggugucuucagccuccaaccu

SEQ ID NO: 228713 - RNA, 32 nt, Homo Sapiens
uguucuuguaaaaugaauauguauguaggguu

SEQ ID NO: 228714 - RNA, 32 nt, Homo Sapiens
uucuccccccuccccccuuccccuccucucaa

SEQ ID NO: 228715 - RNA, 32 nt, Homo Sapiens
cagugguaacaaguacccacagcuugguuuga

SEQ ID NO: 228716 - RNA, 32 nt, Homo Sapiens
ggaaagcagcagcagcagcaggagcgacuaga

SEQ ID NO: 228717 - RNA, 32 nt, Homo Sapiens
uuuuaaaauaccacuuuuagugucagugaacc

SEQ ID NO: 228718 - RNA, 32 nt, Homo Sapiens
cucuguggacaagauaccaguccccaaaacag

SEQ ID NO: 228719 - RNA, 32 nt, Homo Sapiens
ggugaugcucuuggagggaugaaaggaggcaa

SEQ ID NO: 228720 - RNA, 32 nt, Homo Sapiens
acagaagaacagaaguuuaaguuauuguuuaa

SEQ ID NO: 228721 - RNA, 32 nt, Homo Sapiens
uaccucacagagcuucaccaaaucacagauuc

SEQ ID NO: 228722 - RNA, 32 nt, Homo Sapiens
aauauaucugaagauaaugaugacuuuuuaau

SEQ ID NO: 228723 - RNA, 32 nt, Homo Sapiens
uugugguuuaguuauuugaugauauugagauu

SEQ ID NO: 228724 - RNA, 32 nt, Homo Sapiens
gcccuucugccagcugggaggcgagggcacac

SEQ ID NO: 228725 - RNA, 32 nt, Homo Sapiens
ccgcgcugcugaggcgcgcccggccgcuccca

SEQ ID NO: 228726 - RNA, 32 nt, Homo Sapiens
ggcgaggcggcggccccaggcccgagggacuc

SEQ ID NO: 228727 - RNA, 32 nt, Homo Sapiens
cggggcccuccugaggccccagaggaagagac

SEQ ID NO: 228728 - RNA, 32 nt, Homo Sapiens
aauagauucagagaaauuuagagcuaaaaagg

SEQ ID NO: 228729 - RNA, 32 nt, Homo Sapiens
aggucuuguuuuaggauaacuacuuuaaaauu

SEQ ID NO: 228730 - RNA, 32 nt, Homo Sapiens
uuauucugcuccauucccuucacuguauaccu

SEQ ID NO: 228731 - RNA, 32 nt, Homo Sapiens
cauuucuauccugacugccucuuggguuguca

SEQ ID NO: 228732 - RNA, 32 nt, Homo Sapiens
cgagcugagcggagcauccuuuccgggugagg

SEQ ID NO: 228733 - RNA, 32 nt, Homo Sapiens
uaccccaaacucccaacacagauggaggcagc

SEQ ID NO: 228734 - RNA, 32 nt, Homo Sapiens
cacauguaaaagacacagaacagugcuuggca

SEQ ID NO: 228735 - RNA, 32 nt, Homo Sapiens
cucauauuaaacaaacccuggccgggcgcggu

SEQ ID NO: 228736 - RNA, 32 nt, Homo Sapiens
cuaaaaaugaauuauugaccuaauaaauauag

SEQ ID NO: 228737 - RNA, 32 nt, Homo Sapiens
gccuuugccugaauaccacguccccaagaauc

SEQ ID NO: 228738 - RNA, 32 nt, Homo Sapiens
gccguuugcugcgucuagggguguucuaugua

SEQ ID NO: 228739 - RNA, 30 nt, Homo Sapiens
cguggucguggcggcggcggugagaagagc

SEQ ID NO: 228740 - RNA, 32 nt, Homo Sapiens
auuuuuacuuggaugagcauucacuugugguc

SEQ ID NO: 228741 - RNA, 32 nt, Homo Sapiens
gcagaggagcagcuggcuugcccggaguccuc

SEQ ID NO: 228742 - RNA, 32 nt, Homo Sapiens
gcacuagggggcccggccucuggcgcuaccau

SEQ ID NO: 228743 - RNA, 32 nt, Homo Sapiens
ccggugcucccucugucauccucaggaaccaa

SEQ ID NO: 228744 - RNA, 32 nt, Homo Sapiens
ucauucuguaagucauagaaaaguuugaaaca

SEQ ID NO: 228745 - RNA, 30 nt, Homo Sapiens
acaccauguucccuccuacugccaacaugc

SEQ ID NO: 228746 - RNA, 32 nt, Homo Sapiens
aaguagcuucgggucuugaugcuugaguagag

SEQ ID NO: 228747 - RNA, 32 nt, Homo Sapiens
cagcaucaccaucagcagcaacuguggaaaua

SEQ ID NO: 228748 - RNA, 32 nt, Homo Sapiens
aucccgcccuccccacuugcuuccccacuccu

SEQ ID NO: 228749 - RNA, 29 nt, Homo Sapiens
ggugcggggaggggaaggacgccuccaag

SEQ ID NO: 228750 - RNA, 32 nt, Homo Sapiens
gcuggcuaauucuauuuuuuuauagaggcgaa

SEQ ID NO: 228751 - RNA, 32 nt, Homo Sapiens
uggcuacagacaccaaguuccgucaguccaag

SEQ ID NO: 228752 - RNA, 32 nt, Homo Sapiens
uuggaaacugacaucaaggaacaacuaucauc

SEQ ID NO: 228753 - RNA, 32 nt, Homo Sapiens
ugcaggugagggugggaggcagaaaagaggca

SEQ ID NO: 228754 - RNA, 32 nt, Homo Sapiens
gcgcuugcgcgguggcacgggcgagugggggg

SEQ ID NO: 228755 - RNA, 32 nt, Homo Sapiens
aaaauuguacaacuaauuuaagagugggaaau

SEQ ID NO: 228756 - RNA, 32 nt, Homo Sapiens
cacccaggaggguggaugccaggucccacuca

SEQ ID NO: 228757 - RNA, 32 nt, Homo Sapiens
uucccagagggcaccacgcaagggcagagcug

SEQ ID NO: 228758 - RNA, 32 nt, Homo Sapiens
cggcgaaggaggaggcguugccgguuuucuga

SEQ ID NO: 228759 - RNA, 32 nt, Homo Sapiens
ccucacgggaggaggacugagcgacugggaaa

SEQ ID NO: 228760 - RNA, 32 nt, Homo Sapiens
cccgcgucucugggcuuuugcucugucaggcu

SEQ ID NO: 228761 - RNA, 32 nt, Homo Sapiens
uagcacuaaauguuuaaauauguaugaaugcc

SEQ ID NO: 228762 - RNA, 32 nt, Homo Sapiens
agggccagguggcugcccuuucaccuagggua

SEQ ID NO: 228763 - RNA, 32 nt, Homo Sapiens
gguuccuuucuuuuccauccaacaauuaaaga

SEQ ID NO: 228764 - RNA, 32 nt, Homo Sapiens
guaucugauaauuuauacuaacuagaaacaga

SEQ ID NO: 228765 - RNA, 32 nt, Homo Sapiens
ggauuuuguuacuguguagaguggauugagaa

SEQ ID NO: 228766 - RNA, 32 nt, Homo Sapiens
ggauucuguacgugcauugugcucucucaugg

SEQ ID NO: 228767 - RNA, 32 nt, Homo Sapiens
aagcaaccaaaauaaaaguugaaguuguggga

SEQ ID NO: 228768 - RNA, 32 nt, Homo Sapiens
augaauaggaaaaacuuugacucuugcccagu

SEQ ID NO: 228769 - RNA, 32 nt, Homo Sapiens
ugccuguaaucccagcacuuucggaggccgag

SEQ ID NO: 228770 - RNA, 27 nt, Homo Sapiens
ggaugaggucgcggccggcgggucccg

SEQ ID NO: 228771 - RNA, 32 nt, Homo Sapiens
gcgguugcuucuuuaggagagucgacgugucu

SEQ ID NO: 228772 - RNA, 32 nt, Homo Sapiens
acagacaauuuaaaaguucaagucuguacugu

SEQ ID NO: 228773 - RNA, 32 nt, Homo Sapiens
guaggcagggggaggagaacgcucacccguuc

SEQ ID NO: 228774 - RNA, 32 nt, Homo Sapiens
cuugaggaggauaaaaauauguuggaagaaga

SEQ ID NO: 228775 - RNA, 32 nt, Homo Sapiens
guaaaugucgaaggcuguaguggacacaggcu

SEQ ID NO: 228776 - RNA, 32 nt, Homo Sapiens
cucguucucuguaguauugaugaugaacauuu

SEQ ID NO: 228777 - RNA, 32 nt, Homo Sapiens
ucucuggacagcaggagaugcaugucgacagg

SEQ ID NO: 228778 - RNA, 31 nt, Homo Sapiens
cuguccagacaccuggugagagccugaggcu

SEQ ID NO: 228779 - RNA, 32 nt, Homo Sapiens
gccguuagcgcgcgccgucggugagucagucc

SEQ ID NO: 228780 - RNA, 32 nt, Homo Sapiens
uugucguuguacaauugagaucaagugaauug

SEQ ID NO: 228781 - RNA, 32 nt, Homo Sapiens
agcagcuccggcggccgagacgggggcggcgg

SEQ ID NO: 228782 - RNA, 32 nt, Homo Sapiens
ugccacugccguggcccagccgggccauagcu

SEQ ID NO: 228783 - RNA, 32 nt, Homo Sapiens
gucugccggcgccccgccacguuacugugcua

SEQ ID NO: 228784 - RNA, 32 nt, Homo Sapiens
auacagccucugcugcgccgccuguggugccu

SEQ ID NO: 228785 - RNA, 32 nt, Homo Sapiens
ugccccggccccagggcuucccccaggaacuc

SEQ ID NO: 228786 - RNA, 32 nt, Homo Sapiens
gagacuuuauaaguauuugcucgugucuguug

SEQ ID NO: 228787 - RNA, 32 nt, Homo Sapiens
gcuugagaucuguuucuggggccucuggcggu

SEQ ID NO: 228788 - RNA, 32 nt, Homo Sapiens
uggucucugugggccuugggagcccauguuca

SEQ ID NO: 228789 - RNA, 32 nt, Homo Sapiens
gaggaugacagagggauggcgaauaccucaug

SEQ ID NO: 228790 - RNA, 32 nt, Homo Sapiens
gagcaaaauauuaaaauauagugaggaucuuc

SEQ ID NO: 228791 - RNA, 32 nt, Homo Sapiens
ggaugaagggaguuagcugagguacuugcccc

SEQ ID NO: 228792 - RNA, 32 nt, Homo Sapiens
gcucugagcccaggacauucccugccccuugc

SEQ ID NO: 228793 - RNA, 32 nt, Homo Sapiens
cuaaauaagcaucuucccacugcgaguugggg

SEQ ID NO: 228794 - RNA, 32 nt, Homo Sapiens
aaaaaagcuuggcuccuucuguauucuuuaaa

SEQ ID NO: 228795 - RNA, 30 nt, Homo Sapiens
gucaccaucaggcuccagggucccgcacga

SEQ ID NO: 228796 - RNA, 32 nt, Homo Sapiens
gaccauguggggaaacaaugacuuuaaaaugc

SEQ ID NO: 228797 - RNA, 32 nt, Homo Sapiens
ggaauuuuuguuguuuuguccuggacuuuccu

SEQ ID NO: 228798 - RNA, 32 nt, Homo Sapiens
gggaauggaaagaagcaguuuacucuagacua

SEQ ID NO: 228799 - RNA, 32 nt, Homo Sapiens
auauauuccuuccucccaggaguauuagacua

SEQ ID NO: 228800 - RNA, 32 nt, Homo Sapiens
ccuuugaaacgugugcugaaaaagaagaauca

SEQ ID NO: 228801 - RNA, 28 nt, Homo Sapiens
guuuuagguuuugauauguguuuacuag

SEQ ID NO: 228802 - RNA, 32 nt, Homo Sapiens
cauggcugaaggaaacagugcaacagcacugg

SEQ ID NO: 228803 - RNA, 32 nt, Homo Sapiens
aaauguuaaaauuuaaagauuugauauacaug

SEQ ID NO: 228804 - RNA, 32 nt, Homo Sapiens
ucuccuccuuaaccucuuucuuuuuggcgaga

SEQ ID NO: 228805 - RNA, 32 nt, Homo Sapiens
cacuuugggaggaauuacagggaccaggaguu

SEQ ID NO: 228806 - RNA, 32 nt, Homo Sapiens
aguucaggugacugaggaagagccacaaaaca

SEQ ID NO: 228807 - RNA, 32 nt, Homo Sapiens
aaagcgggagacgcaaguucucgcgagaucuc

SEQ ID NO: 228808 - RNA, 32 nt, Homo Sapiens
ugauccugggagaggugaagagggccaggaug

SEQ ID NO: 228809 - RNA, 32 nt, Homo Sapiens
uggucugugugcucugagccgugcaggggcac

SEQ ID NO: 228810 - RNA, 32 nt, Homo Sapiens
uauguuaauaacuuguccuaugucaauuugua

SEQ ID NO: 228811 - RNA, 32 nt, Homo Sapiens
uccugaugaugaugaagaugaugaugaggaug

SEQ ID NO: 228812 - RNA, 32 nt, Homo Sapiens
ugauuaaaacaaguagauuccuuuucugguuc

SEQ ID NO: 228813 - RNA, 32 nt, Homo Sapiens
ugcauuggaaaacagacagcucccacuaagau

SEQ ID NO: 228814 - RNA, 32 nt, Homo Sapiens
uaauuuguuguaauaaaguccaguauuuaaua

SEQ ID NO: 228815 - RNA, 32 nt, Homo Sapiens
ugcaggcccuucaaaacaauccuaggcagagu

SEQ ID NO: 228816 - RNA, 32 nt, Homo Sapiens
ccugguuuuaaaccuaugauggaauucuaaug

SEQ ID NO: 228817 - RNA, 32 nt, Homo Sapiens
acaucuuuuuauucuugcagguucuuaaugau

SEQ ID NO: 228818 - RNA, 32 nt, Homo Sapiens
aagagauagccaggcguccgcccggccgcuca

SEQ ID NO: 228819 - RNA, 32 nt, Homo Sapiens
cagaaauacugaaugacuuuacacuuaggaaa

SEQ ID NO: 228820 - RNA, 32 nt, Homo Sapiens
uacacaauauaaaauuuaaauagccaucuuaa

SEQ ID NO: 228821 - RNA, 32 nt, Homo Sapiens
aguaucugcuguucuucaguccuuugucuuuc

SEQ ID NO: 228822 - RNA, 32 nt, Homo Sapiens
gcagcuuccauugagaagucuuucugugucgu

SEQ ID NO: 228823 - RNA, 32 nt, Homo Sapiens
gacauuuggggaugugaguguuagagcuggug

SEQ ID NO: 228824 - RNA, 32 nt, Homo Sapiens
cucauagacgcuucacagagccugcagggcag

SEQ ID NO: 228825 - RNA, 32 nt, Homo Sapiens
ggucgcacuauguugcccgggcuggucucaaa

SEQ ID NO: 228826 - RNA, 30 nt, Homo Sapiens
agauaggauaaaagugagugugagaucacc

SEQ ID NO: 228827 - RNA, 32 nt, Homo Sapiens
cucaaaggucagcucaaagguuccgaacucgg

SEQ ID NO: 228828 - RNA, 32 nt, Homo Sapiens
uuuuucauuuugacaugugguuuaccuaauag

SEQ ID NO: 228829 - RNA, 32 nt, Homo Sapiens
gaaaggaggggaagccccuucuccggggaccu

SEQ ID NO: 228830 - RNA, 32 nt, Homo Sapiens
gaaagguggcugggagcgccggacaccucaga

SEQ ID NO: 228831 - RNA, 32 nt, Homo Sapiens
ggugcucccccucccuaagcuccagggucccu

SEQ ID NO: 228832 - RNA, 32 nt, Homo Sapiens
caugccuccuucccaggacccaggucugcugc

SEQ ID NO: 228833 - RNA, 32 nt, Homo Sapiens
aacugggauuuuaaaaugagccuggaauugag

SEQ ID NO: 228834 - RNA, 32 nt, Homo Sapiens
cuguggucacuguugagaucuccgucaacagc

SEQ ID NO: 228835 - RNA, 32 nt, Homo Sapiens
uauccuucuaaagacuuguucuuucagaaaaa

SEQ ID NO: 228836 - RNA, 32 nt, Homo Sapiens
gaauaaauaaaacacuuuauauuuucaugaac

SEQ ID NO: 228837 - RNA, 32 nt, Homo Sapiens
cccucacccagcugugguccggcuuugggaga

SEQ ID NO: 228838 - RNA, 32 nt, Homo Sapiens
acaguauuuauuauaaacauuuagacuuuuua

SEQ ID NO: 228839 - RNA, 32 nt, Homo Sapiens
uucuuugucauucagauugcauuugaccucuu

SEQ ID NO: 228840 - RNA, 32 nt, Homo Sapiens
aaacauuccuagaagaugauaauugugaaaac

SEQ ID NO: 228841 - RNA, 32 nt, Homo Sapiens
cgggcaagaggggaguccgggcggcggccggc

SEQ ID NO: 228842 - RNA, 31 nt, Homo Sapiens
uuauauuugugcuuuuugucaguguguaagc

SEQ ID NO: 228843 - RNA, 32 nt, Homo Sapiens
aggcaggccccugagccggugcaccgcgaagu

SEQ ID NO: 228844 - RNA, 32 nt, Homo Sapiens
ggccuggcagcuccgccucccaugcccgcacg

SEQ ID NO: 228845 - RNA, 32 nt, Homo Sapiens
cuccccucaucccacaucucaaagcagacaau

SEQ ID NO: 228846 - RNA, 32 nt, Homo Sapiens
auuggacuuauuuuccaaccagauaacauuua

SEQ ID NO: 228847 - RNA, 32 nt, Homo Sapiens
ugccgucaagguggcgucuuacucgggauucc

SEQ ID NO: 228848 - RNA, 31 nt, Homo Sapiens
aaugugggaaacacuuuuaccugucccucag

SEQ ID NO: 228849 - RNA, 32 nt, Homo Sapiens
cauguuguucauccauuuuguagcauguguca

SEQ ID NO: 228850 - RNA, 32 nt, Homo Sapiens
caguucccccagggacggccacuuccuggucc

SEQ ID NO: 228851 - RNA, 32 nt, Homo Sapiens
ggccacuucuauuuuuugaggcuccucauaaa

SEQ ID NO: 228852 - RNA, 32 nt, Homo Sapiens
gaaaauauucuagcucagcuuuacucuucuuc

SEQ ID NO: 228853 - RNA, 32 nt, Homo Sapiens
aaugaauguauuauuuguuagaggagugacuu

SEQ ID NO: 228854 - RNA, 32 nt, Homo Sapiens
cugagcucagcccccacccccauacuccuggu

SEQ ID NO: 228855 - RNA, 30 nt, Homo Sapiens
agaggcagagguggccuuaaagauguggcc

SEQ ID NO: 228856 - RNA, 32 nt, Homo Sapiens
gccuuccacgcccuuccgauuccaccuccacc

SEQ ID NO: 228857 - RNA, 32 nt, Homo Sapiens
cgcaggggucgccccgccggcgcgagggacac

SEQ ID NO: 228858 - RNA, 32 nt, Homo Sapiens
aacuucuuuucuccuucaggaacugugaaugg

SEQ ID NO: 228859 - RNA, 32 nt, Homo Sapiens
uuggaguuacuuccuucuuaaucuuucuuaaa

SEQ ID NO: 228860 - RNA, 32 nt, Homo Sapiens
ccaaaaauguacaggcuuauuucugggcacuu

SEQ ID NO: 228861 - RNA, 32 nt, Homo Sapiens
ucuagcuguaccuauuuuuuuaaauauauguu

SEQ ID NO: 228862 - RNA, 32 nt, Homo Sapiens
uggaggggccaucguggggcucucccggaaac

SEQ ID NO: 228863 - RNA, 32 nt, Homo Sapiens
ucugagcacaucacaccagcaccagcucccug

SEQ ID NO: 228864 - RNA, 32 nt, Homo Sapiens
ucaacuaaauucaguauguuggcauuacuugg

SEQ ID NO: 228865 - RNA, 32 nt, Homo Sapiens
gaaagugauauggagcaaacaucuuucaaaug

SEQ ID NO: 228866 - RNA, 32 nt, Homo Sapiens
aauacuuacugauuuuauuguuaauagccacu

SEQ ID NO: 228867 - RNA, 32 nt, Homo Sapiens
uucuacuaaaagauacagcaguuacccccuua

SEQ ID NO: 228868 - RNA, 32 nt, Homo Sapiens
caaggucuccuuugucucuccuccuugucccc

SEQ ID NO: 228869 - RNA, 32 nt, Homo Sapiens
aauguaaaacaaaaauguaaugaucauaaguc

SEQ ID NO: 228870 - RNA, 32 nt, Homo Sapiens
ggaggaggcaacccaucuggauguguggagga

SEQ ID NO: 228871 - RNA, 32 nt, Homo Sapiens
aauuauaugacauaaacuuauuugcucuccaa

SEQ ID NO: 228872 - RNA, 32 nt, Homo Sapiens
gacaugguggccauugcccacccagguaccag

SEQ ID NO: 228873 - RNA, 32 nt, Homo Sapiens
aaguucccacaagggccuucuccggagagucc

SEQ ID NO: 228874 - RNA, 32 nt, Homo Sapiens
gaggcuccucugaguucuuauucaauauaaug

SEQ ID NO: 228875 - RNA, 32 nt, Homo Sapiens
ucccaggcacucucuuuugguuugugggucca

SEQ ID NO: 228876 - RNA, 32 nt, Homo Sapiens
guaguacacccgcgaccccgccccauucccag

SEQ ID NO: 228877 - RNA, 32 nt, Homo Sapiens
gucagcauuugaaccaaguaaauguuuucacu

SEQ ID NO: 228878 - RNA, 32 nt, Homo Sapiens
agcacccuguccccuccuccccaggccuguga

SEQ ID NO: 228879 - RNA, 32 nt, Homo Sapiens
uaucugagauuguuguaauaaucagucauuuu

SEQ ID NO: 228880 - RNA, 32 nt, Homo Sapiens
agacgcuucuauuggagcaauucuuguaauuc

SEQ ID NO: 228881 - RNA, 32 nt, Homo Sapiens
guuggauacacauguguaaaucuauugacaau

SEQ ID NO: 228882 - RNA, 32 nt, Homo Sapiens
guuuucuucgaagauuuggggcuccgcgauac

SEQ ID NO: 228883 - RNA, 29 nt, Homo Sapiens
ugacaguugaguaugucuaugaaaggaug

SEQ ID NO: 228884 - RNA, 32 nt, Homo Sapiens
acuagugccugagcucagugcugcuggaugau

SEQ ID NO: 228885 - RNA, 32 nt, Homo Sapiens
agaaugauuacaaguugcucuaugauagaagg

SEQ ID NO: 228886 - RNA, 32 nt, Homo Sapiens
uggggcugcaaccagagcugaauaacauguua

SEQ ID NO: 228887 - RNA, 32 nt, Homo Sapiens
ggacgacaccggguucaggaauauguggcuau

SEQ ID NO: 228888 - RNA, 32 nt, Homo Sapiens
caagcugcuuugccuccagcugccucagucuc

SEQ ID NO: 228889 - RNA, 32 nt, Homo Sapiens
ggcugggcggggagagccgacggccgcggcgg

SEQ ID NO: 228890 - RNA, 32 nt, Homo Sapiens
gaggacuggucaucagcugcacguucuggguc

SEQ ID NO: 228891 - RNA, 32 nt, Homo Sapiens
gacuggggaggggaggggaggggcgggauguu

SEQ ID NO: 228892 - RNA, 32 nt, Homo Sapiens
gguccguucugggcgggggaugacucacagcc

SEQ ID NO: 228893 - RNA, 32 nt, Homo Sapiens
gaugaugaagacugagguguagacucagccuc

SEQ ID NO: 228894 - RNA, 31 nt, Homo Sapiens
uaaaugaugucacuuuuagugcuguuggcaa

SEQ ID NO: 228895 - RNA, 32 nt, Homo Sapiens
aaggacugcaugguaauuuauaguuuauacag

SEQ ID NO: 228896 - RNA, 32 nt, Homo Sapiens
uuggucucuucugcugguaaaagcagagaugu

SEQ ID NO: 228897 - RNA, 32 nt, Homo Sapiens
uggggccuggggauagcgagaggcuugagaau

SEQ ID NO: 228898 - RNA, 32 nt, Homo Sapiens
cucccaacccuggcuuggggucaagaaacagc

SEQ ID NO: 228899 - RNA, 32 nt, Homo Sapiens
gaauccauuaaaccucuuuccuuuauaaauua

SEQ ID NO: 228900 - RNA, 32 nt, Homo Sapiens
cagccauuguaucucaccagcagaccaggaga

SEQ ID NO: 228901 - RNA, 28 nt, Homo Sapiens
aaauaaaugcuguucauguguguagcuc

SEQ ID NO: 228902 - RNA, 32 nt, Homo Sapiens
gccuggaccugccggcccucccuccaggaccg

SEQ ID NO: 228903 - RNA, 32 nt, Homo Sapiens
accucagcggggaggaggagcugcugcaaggc

SEQ ID NO: 228904 - RNA, 32 nt, Homo Sapiens
cuauuucccuggauguuagacacaauaucaca

SEQ ID NO: 228905 - RNA, 32 nt, Homo Sapiens
ugcuccccacccaggaaaaauaaagacguccg

SEQ ID NO: 228906 - RNA, 32 nt, Homo Sapiens
ugacuacaagaggaaauucuacaggauuagga

SEQ ID NO: 228907 - RNA, 31 nt, Homo Sapiens
cugcuccagcacaggaaccagggaggaaaga

SEQ ID NO: 228908 - RNA, 32 nt, Homo Sapiens
ccuccucccagcgaccccacgcuggacccccu

SEQ ID NO: 228909 - RNA, 32 nt, Homo Sapiens
gcuuuagaccggagauaauacagugacuuuac

SEQ ID NO: 228910 - RNA, 32 nt, Homo Sapiens
gggaggugggagaggccgagggcuuugccuag

SEQ ID NO: 228911 - RNA, 32 nt, Homo Sapiens
gagcaaaagagaccuuauagguuaaugaaugu

SEQ ID NO: 228912 - RNA, 32 nt, Homo Sapiens
accccaccaccucggcccagcgccccgugcac

SEQ ID NO: 228913 - RNA, 32 nt, Homo Sapiens
cacagcacccucaaggcuugaggaggagagcc

SEQ ID NO: 228914 - RNA, 32 nt, Homo Sapiens
caccaguuuacaaagacagucuuaacauccga

SEQ ID NO: 228915 - RNA, 32 nt, Homo Sapiens
aggagcagcuggaggaggagcagggaggcaag

SEQ ID NO: 228916 - RNA, 32 nt, Homo Sapiens
uacuauauuuuggagauuuguucauauugcuc

SEQ ID NO: 228917 - RNA, 32 nt, Homo Sapiens
ucccuggcccucgggacuguccucgggcggca

SEQ ID NO: 228918 - RNA, 32 nt, Homo Sapiens
auccccacaggcuggggacgggcccggugcgg

SEQ ID NO: 228919 - RNA, 32 nt, Homo Sapiens
ucccugaggcggaggaggagcugggacgaaca

SEQ ID NO: 228920 - RNA, 32 nt, Homo Sapiens
gaaggcuuugcgcuccggggccuggaugcggc

SEQ ID NO: 228921 - RNA, 32 nt, Homo Sapiens
aaguagagcaguguaucuugcaugucaucgga

SEQ ID NO: 228922 - RNA, 32 nt, Homo Sapiens
ccuuguauaaagaccucaacacugcugaccau

SEQ ID NO: 228923 - RNA, 31 nt, Homo Sapiens
gcaucugaagccaccugguucuguuaaacug

SEQ ID NO: 228924 - RNA, 32 nt, Homo Sapiens
gagauguaaaaugaguuuguauuauuacaaau

SEQ ID NO: 228925 - RNA, 32 nt, Homo Sapiens
caagaaacuugugggucuuuuacauaugucac

SEQ ID NO: 228926 - RNA, 32 nt, Homo Sapiens
agaucucccucuaucacaugcuugccaccacu

SEQ ID NO: 228927 - RNA, 32 nt, Homo Sapiens
gugguggcggggggccuguggcagaggccuug

SEQ ID NO: 228928 - RNA, 32 nt, Homo Sapiens
gcaggcacugauucucuagaacacugggcaug

SEQ ID NO: 228929 - RNA, 32 nt, Homo Sapiens
cggccuuggccagcugagucgcgacggccgcc

SEQ ID NO: 228930 - RNA, 32 nt, Homo Sapiens
ggggccggcggcggcccgggcgggacgaugaa

SEQ ID NO: 228931 - RNA, 32 nt, Homo Sapiens
augaauugacuucuaauaaaaucuagugguga

SEQ ID NO: 228932 - RNA, 32 nt, Homo Sapiens
ucucacuagcuauguucuccaauccacacugc

SEQ ID NO: 228933 - RNA, 32 nt, Homo Sapiens
ucggcuggaaggaaccgcucucgcuucguccu

SEQ ID NO: 228934 - RNA, 32 nt, Homo Sapiens
guacuuaacaugucuguaaauaugucuuuuau

SEQ ID NO: 228935 - RNA, 32 nt, Homo Sapiens
gcggcuucucccagcccucgaggcucuccuga

SEQ ID NO: 228936 - RNA, 32 nt, Homo Sapiens
gggugagugcccuccgcuuuuuguggccaaac

SEQ ID NO: 228937 - RNA, 32 nt, Homo Sapiens
aagagaggaaaugugauggaauuucaaguuug

SEQ ID NO: 228938 - RNA, 32 nt, Homo Sapiens
ucagucccuacugaguacucuuucucuccccu

SEQ ID NO: 228939 - RNA, 32 nt, Homo Sapiens
gggagcugaucauggcggccagggcccugcag

SEQ ID NO: 228940 - RNA, 32 nt, Homo Sapiens
gcggggggaggguuggggaggggcggcaggag

SEQ ID NO: 228941 - RNA, 32 nt, Homo Sapiens
caauuuuuaaaguguuucugacaucaaaggug

SEQ ID NO: 228942 - RNA, 32 nt, Homo Sapiens
guuuacccacccauuaaaugggaacauuacug

SEQ ID NO: 228943 - RNA, 32 nt, Homo Sapiens
caaaaagaauuauccagauaaaaguuagacua

SEQ ID NO: 228944 - RNA, 32 nt, Homo Sapiens
gaucggggcgaccccugcagauguggagccau

SEQ ID NO: 228945 - RNA, 32 nt, Homo Sapiens
ucacuuuuucccuuuaucauggacuuuuauuu

SEQ ID NO: 228946 - RNA, 32 nt, Homo Sapiens
gguugagauaugaguuauuucugaguaaguga

SEQ ID NO: 228947 - RNA, 28 nt, Homo Sapiens
gugagaguuucaggaccaggcagcuuga

SEQ ID NO: 228948 - RNA, 32 nt, Homo Sapiens
uaaucagguauugauugacaacuuuuuggcau

SEQ ID NO: 228949 - RNA, 32 nt, Homo Sapiens
ucuuugaaggcaaugucuuuucucucuguuaa

SEQ ID NO: 228950 - RNA, 32 nt, Homo Sapiens
uuuaagccccagcuauagcuacuacaaagaaa

SEQ ID NO: 228951 - RNA, 32 nt, Homo Sapiens
cuccaugucaagcagcaggugucagcaggaaa

SEQ ID NO: 228952 - RNA, 32 nt, Homo Sapiens
gugaccccugccugugacguggaggaucccag

SEQ ID NO: 228953 - RNA, 32 nt, Homo Sapiens
uaauacuccuccccgaacugccaacucuucac

SEQ ID NO: 228954 - RNA, 32 nt, Homo Sapiens
cuaacucuguuguuuucaaccucuacguuauu

SEQ ID NO: 228955 - RNA, 32 nt, Homo Sapiens
aagcuacucgcuaccagcuuggaccugucugc

SEQ ID NO: 228956 - RNA, 32 nt, Homo Sapiens
ggccuuugagcucagaaaauaucccuccuguu

SEQ ID NO: 228957 - RNA, 32 nt, Homo Sapiens
uccgguggccccugggguggaagugggguagg

SEQ ID NO: 228958 - RNA, 32 nt, Homo Sapiens
cacaaugccucgguauaggaggcuguguugag

SEQ ID NO: 228959 - RNA, 32 nt, Homo Sapiens
caggagaggaccagcgucaggcucacugcgag

SEQ ID NO: 228960 - RNA, 32 nt, Homo Sapiens
uguggaaaacaucagccauuacauuacuuggc

SEQ ID NO: 228961 - RNA, 32 nt, Homo Sapiens
aaacuuaguaauuauuugauggauaacaaaaa

SEQ ID NO: 228962 - RNA, 32 nt, Homo Sapiens
ggaaguaagcuaugaaaaaucuguaaccucug

SEQ ID NO: 228963 - RNA, 32 nt, Homo Sapiens
aucgaugucuauuugugagaaguggagcaggg

SEQ ID NO: 228964 - RNA, 32 nt, Homo Sapiens
ggcccguggaucccagggaacugugcuuuuca

SEQ ID NO: 228965 - RNA, 32 nt, Homo Sapiens
acagggugacccagggaucccuggacaucugg

SEQ ID NO: 228966 - RNA, 32 nt, Homo Sapiens
auccuuuaucccagccagucauccagcucgac

SEQ ID NO: 228967 - RNA, 32 nt, Homo Sapiens
agggguugaagaaaacaaaauagcuuauuaua

SEQ ID NO: 228968 - RNA, 32 nt, Homo Sapiens
guuagaauccuaauuagcuacuuuaagauccu

SEQ ID NO: 228969 - RNA, 32 nt, Homo Sapiens
ggggcuauccgggucugaauucugaguggcgc

SEQ ID NO: 228970 - RNA, 32 nt, Homo Sapiens
cuuugucuauaagauauggucaaguacagcuc

SEQ ID NO: 228971 - RNA, 32 nt, Homo Sapiens
gugagcugccccagcccccucccagcccuugc

SEQ ID NO: 228972 - RNA, 29 nt, Homo Sapiens
cauacuauguguuucagaaauauguagaa

SEQ ID NO: 228973 - RNA, 32 nt, Homo Sapiens
auaguuucaguuccuauuuucuuccauugacc

SEQ ID NO: 228974 - RNA, 32 nt, Homo Sapiens
ugggaucucacccacaccucuaugagacgucc

SEQ ID NO: 228975 - RNA, 32 nt, Homo Sapiens
ccccuccucccucccccgcagucggacucccu

SEQ ID NO: 228976 - RNA, 32 nt, Homo Sapiens
caaaauaaccacagucugaucuuaccaaaauu

SEQ ID NO: 228977 - RNA, 32 nt, Homo Sapiens
aacuuuucacucacggcaaagccauuguauga

SEQ ID NO: 228978 - RNA, 32 nt, Homo Sapiens
uauuggguucaagcgauucuucugccucaguc

SEQ ID NO: 228979 - RNA, 32 nt, Homo Sapiens
uccugaccucaagugaucugcccgccucggcc

SEQ ID NO: 228980 - RNA, 32 nt, Homo Sapiens
ugcuuuguccgucuauccacccgcccacccgc

SEQ ID NO: 228981 - RNA, 32 nt, Homo Sapiens
ugaccccaacaauaaacuuugauaauaaagac

SEQ ID NO: 228982 - RNA, 32 nt, Homo Sapiens
ucuagagaaugggaagaaggccuguuauuuug

SEQ ID NO: 228983 - RNA, 32 nt, Homo Sapiens
aagaagcgggagggcguccggucugcacgccc

SEQ ID NO: 228984 - RNA, 32 nt, Homo Sapiens
accaacacaacacagcuuucaguuuuuagagc

SEQ ID NO: 228985 - RNA, 32 nt, Homo Sapiens
aaugcuuguuaugggaaccaguucuuagccac

SEQ ID NO: 228986 - RNA, 32 nt, Homo Sapiens
ccugcucugcaccuggauuguaucuucagcaa

SEQ ID NO: 228987 - RNA, 30 nt, Homo Sapiens
auauuuggcccuuccacccauuuuuaauug

SEQ ID NO: 228988 - RNA, 32 nt, Homo Sapiens
caagaggcacccccuuccccagccucucgccu

SEQ ID NO: 228989 - RNA, 32 nt, Homo Sapiens
guguauaauuuguuaacacuagaaaccuauua

SEQ ID NO: 228990 - RNA, 32 nt, Homo Sapiens
acuugaccucugagccgaggugggccggaaac

SEQ ID NO: 228991 - RNA, 32 nt, Homo Sapiens
ucagacauuaaucaacgaaugcaaucauuuuu

SEQ ID NO: 228992 - RNA, 32 nt, Homo Sapiens
ugggagcagccacccgcuccgcgcuugcuguu

SEQ ID NO: 228993 - RNA, 32 nt, Homo Sapiens
cuagucaugugccccuuuccugucccuaacag

SEQ ID NO: 228994 - RNA, 31 nt, Homo Sapiens
uaacauuauuuuaaaaugccaaauauguucu

SEQ ID NO: 228995 - RNA, 32 nt, Homo Sapiens
ucuuaacuucugucuuugacuuucccagcguu

SEQ ID NO: 228996 - RNA, 29 nt, Homo Sapiens
caccaugccaaggggauuccuggugaagc

SEQ ID NO: 228997 - RNA, 32 nt, Homo Sapiens
cccaggccugacggcccagcugacccggccaa

SEQ ID NO: 228998 - RNA, 32 nt, Homo Sapiens
cucuucuuucguucuuuuuuuuuuuuuuuuga

SEQ ID NO: 228999 - RNA, 32 nt, Homo Sapiens
gguuccagcugggcuuccugggucaaguaggg

SEQ ID NO: 229000 - RNA, 32 nt, Homo Sapiens
auuuucugugguuaaaaaugaucuccagaaua

SEQ ID NO: 229001 - RNA, 32 nt, Homo Sapiens
ggguaauaguagcacccaccucauggugucuc

SEQ ID NO: 229002 - RNA, 29 nt, Homo Sapiens
augcucaggggacagagauggacgaugcu

SEQ ID NO: 229003 - RNA, 32 nt, Homo Sapiens
cgcuccccuccuccccggcggccgcacucacc

SEQ ID NO: 229004 - RNA, 32 nt, Homo Sapiens
ggcuucuuuccacacccacagucucgcguuug

SEQ ID NO: 229005 - RNA, 29 nt, Homo Sapiens
cccguuucuauccaaaagagcaauaaaaa

SEQ ID NO: 229006 - RNA, 32 nt, Homo Sapiens
acggcagcaacuggcccucccaggacccccuc

SEQ ID NO: 229007 - RNA, 32 nt, Homo Sapiens
cucugcaggccucgacaaggcccggccuccug

SEQ ID NO: 229008 - RNA, 30 nt, Homo Sapiens
ggaccauggggacgggaaggcguggggguc

SEQ ID NO: 229009 - RNA, 27 nt, Homo Sapiens
accuccucgcucuucagcaccuccuug

SEQ ID NO: 229010 - RNA, 32 nt, Homo Sapiens
uucuuuauuauuaaagguuuucuauuuucucc

SEQ ID NO: 229011 - RNA, 32 nt, Homo Sapiens
ugauaaaaacauccaguguaaaaaggaaguug

SEQ ID NO: 229012 - RNA, 32 nt, Homo Sapiens
gccuaucuguaaguaauuaacuugcuucaugu

SEQ ID NO: 229013 - RNA, 32 nt, Homo Sapiens
uugcucucaucuugguuuccauauacuauuuu

SEQ ID NO: 229014 - RNA, 32 nt, Homo Sapiens
aagccucuccuccaccuucaccccaagacuag

SEQ ID NO: 229015 - RNA, 32 nt, Homo Sapiens
aaguaagaucauaaaacauuuaucaauuuuua

SEQ ID NO: 229016 - RNA, 32 nt, Homo Sapiens
ggccgcuccagagcuuccucccggggcgcccc

SEQ ID NO: 229017 - RNA, 32 nt, Homo Sapiens
gauuccagcuggacggccgaucugguagcccg

SEQ ID NO: 229018 - RNA, 32 nt, Homo Sapiens
uccuggugggugaggggcaggggcaguggcag

SEQ ID NO: 229019 - RNA, 32 nt, Homo Sapiens
gagugccccacuucuggccacaucagccccac

SEQ ID NO: 229020 - RNA, 32 nt, Homo Sapiens
cugaguaggaggccuccacuccggaucgaggc

SEQ ID NO: 229021 - RNA, 32 nt, Homo Sapiens
accucaacccuguaacguaacccauuaaaaug

SEQ ID NO: 229022 - RNA, 32 nt, Homo Sapiens
ucccaggugcaagcgauuccccugccucagcu

SEQ ID NO: 229023 - RNA, 32 nt, Homo Sapiens
aauuccaggucaagaggaacugucuacuuucg

SEQ ID NO: 229024 - RNA, 31 nt, Homo Sapiens
gcgaggcggcgcagccauccccggaccaggg

SEQ ID NO: 229025 - RNA, 32 nt, Homo Sapiens
uuuuuauaaucucaauaauaaacaaguacuau

SEQ ID NO: 229026 - RNA, 32 nt, Homo Sapiens
gaaaucauuuuucuuuuuucuuuuuuagaaaa

SEQ ID NO: 229027 - RNA, 32 nt, Homo Sapiens
ccaggcugggagagggagcagggcggcggccc

SEQ ID NO: 229028 - RNA, 32 nt, Homo Sapiens
ccacuuuuaggagauacuuagagcagucagaa

SEQ ID NO: 229029 - RNA, 32 nt, Homo Sapiens
aacgguuccccucccucccugccuucauggau

SEQ ID NO: 229030 - RNA, 32 nt, Homo Sapiens
ccauugucuaucugaccaucuuucucuuacug

SEQ ID NO: 229031 - RNA, 32 nt, Homo Sapiens
aaguccugcauaacuuucgaacuuuguuaaau

SEQ ID NO: 229032 - RNA, 32 nt, Homo Sapiens
ccaagggacuccugggagguggcagcauucac

SEQ ID NO: 229033 - RNA, 32 nt, Homo Sapiens
ggaccucuugguauuccguguacaccauccuu

SEQ ID NO: 229034 - RNA, 32 nt, Homo Sapiens
gguaacggcuccugggccucucccgggucaag

SEQ ID NO: 229035 - RNA, 32 nt, Homo Sapiens
aguaaggccuagagggggugauguguggcaca

SEQ ID NO: 229036 - RNA, 32 nt, Homo Sapiens
cucauaacacauacuuuuuuuuucucaguacu

SEQ ID NO: 229037 - RNA, 32 nt, Homo Sapiens
ugacgucaauccgagcucgucccggccucacc

SEQ ID NO: 229038 - RNA, 32 nt, Homo Sapiens
cugcgcucaaaucuccucccaccucucucccu

SEQ ID NO: 229039 - RNA, 32 nt, Homo Sapiens
cccggggcacugggcggugagccaccuccugg

SEQ ID NO: 229040 - RNA, 30 nt, Homo Sapiens
auagacugcugugcugaaagagcuuuauca

SEQ ID NO: 229041 - RNA, 32 nt, Homo Sapiens
ggguccuggcgccucagagcccggcccaggcc

SEQ ID NO: 229042 - RNA, 32 nt, Homo Sapiens
cauggggcguagccagcucggaacuugccagg

SEQ ID NO: 229043 - RNA, 32 nt, Homo Sapiens
acgagacaggacgaggcagaaaagcacauuuu

SEQ ID NO: 229044 - RNA, 32 nt, Homo Sapiens
uucugcaaaauuuccaucugaggguuuuuaca

SEQ ID NO: 229045 - RNA, 32 nt, Homo Sapiens
ucaggagaauuugaacaauaacaagaauaggg

SEQ ID NO: 229046 - RNA, 32 nt, Homo Sapiens
ccaucccggccgccggggcccgcccucugcau

SEQ ID NO: 229047 - RNA, 32 nt, Homo Sapiens
gcuugaggcuuuuagugaguuccgaaaagcaa

SEQ ID NO: 229048 - RNA, 32 nt, Homo Sapiens
gcugggagccuccuuccuccccggggaccuuu

SEQ ID NO: 229049 - RNA, 32 nt, Homo Sapiens
uuaaaaaaauagcugguaaaucuuucuaggua

SEQ ID NO: 229050 - RNA, 32 nt, Homo Sapiens
acaacuguuauacaugagacuaugguuggacu

SEQ ID NO: 229051 - RNA, 32 nt, Homo Sapiens
cguccagguggccgaccucacugcacagaccc

SEQ ID NO: 229052 - RNA, 32 nt, Homo Sapiens
uggggucugcauuuucugaaacuaaugaaagc

SEQ ID NO: 229053 - RNA, 32 nt, Homo Sapiens
cgguguuuaagugaucaggaugccguuggugg

SEQ ID NO: 229054 - RNA, 32 nt, Homo Sapiens
ucaaauggaaaagaaaaugauggaucacaaca

SEQ ID NO: 229055 - RNA, 32 nt, Homo Sapiens
agccaggaaggauuuugauauucaucagaaau

SEQ ID NO: 229056 - RNA, 32 nt, Homo Sapiens
agaccaauauucaaaugcguaauuaaaagaau

SEQ ID NO: 229057 - RNA, 32 nt, Homo Sapiens
aucguugcugguagagccugggcuugcugugc

SEQ ID NO: 229058 - RNA, 32 nt, Homo Sapiens
acucgugccuucccuccucagggccggcggca

SEQ ID NO: 229059 - RNA, 32 nt, Homo Sapiens
uccuuuuuuacuaccgaugaccaaaugaagca

SEQ ID NO: 229060 - RNA, 32 nt, Homo Sapiens
uccagggaauaauuacuuuaaugaucuuuuaa

SEQ ID NO: 229061 - RNA, 32 nt, Homo Sapiens
auccuuguuuuugucgugucuauaaaggaaga

SEQ ID NO: 229062 - RNA, 32 nt, Homo Sapiens
cgcucaguccgggcuuggggccccgcggcgga

SEQ ID NO: 229063 - RNA, 32 nt, Homo Sapiens
aggagggcucugcaggagcuacagguccuucu

SEQ ID NO: 229064 - RNA, 32 nt, Homo Sapiens
ugauaggaaaauuaaagcuaacugaaagacuu

SEQ ID NO: 229065 - RNA, 28 nt, Homo Sapiens
acugggguuacaggcgcgcgauaccacg

SEQ ID NO: 229066 - RNA, 32 nt, Homo Sapiens
gcucgccugcccgcacgccgcccgccacccag

SEQ ID NO: 229067 - RNA, 32 nt, Homo Sapiens
gcccgaggcugaggcugggccggcgcugcccc

SEQ ID NO: 229068 - RNA, 32 nt, Homo Sapiens
ggacagcaagcccccgaauagccccggcugcc

SEQ ID NO: 229069 - RNA, 32 nt, Homo Sapiens
cucuccauauucuucuggaaaagcagaugcuu

SEQ ID NO: 229070 - RNA, 32 nt, Homo Sapiens
guuuagaaagacugaagugacagauuaagagu

SEQ ID NO: 229071 - RNA, 32 nt, Homo Sapiens
cuuauacaguacauuucuauaaaauuaucaau

SEQ ID NO: 229072 - RNA, 32 nt, Homo Sapiens
gaauuauuuuaaucuuuuucucucuuuccaaa

SEQ ID NO: 229073 - RNA, 32 nt, Homo Sapiens
aagaacccaugacuguauucucucccuuggac

SEQ ID NO: 229074 - RNA, 32 nt, Homo Sapiens
gaagcugaaaccucuuuaaaucuucagaauga

SEQ ID NO: 229075 - RNA, 32 nt, Homo Sapiens
ugugaccuuucugcacucucuaaugaguucau

SEQ ID NO: 229076 - RNA, 32 nt, Homo Sapiens
cuggugugguggcucaugccuguaaucccugc

SEQ ID NO: 229077 - RNA, 32 nt, Homo Sapiens
ugggguggcuucucuccuuccuccucccauag

SEQ ID NO: 229078 - RNA, 32 nt, Homo Sapiens
uacuaaaaacaaugaaauugugauuuggaagu

SEQ ID NO: 229079 - RNA, 32 nt, Homo Sapiens
agagccuguuccuggcaucacacgccaguggc

SEQ ID NO: 229080 - RNA, 32 nt, Homo Sapiens
guagaugugaaugguacuauucaacggagcac

SEQ ID NO: 229081 - RNA, 32 nt, Homo Sapiens
uuucuaugacuucuaaucuuagauucccagga

SEQ ID NO: 229082 - RNA, 32 nt, Homo Sapiens
auauuuucuguaaauugcuuuuuucgguucgc

SEQ ID NO: 229083 - RNA, 29 nt, Homo Sapiens
agcaaggcuuuccaauacauaaauagugc

SEQ ID NO: 229084 - RNA, 32 nt, Homo Sapiens
cccugugcauucucccugggccucaguaaaau

SEQ ID NO: 229085 - RNA, 32 nt, Homo Sapiens
cagggcugaguuugggucuucauuuuuccacc

SEQ ID NO: 229086 - RNA, 32 nt, Homo Sapiens
cccagcacccaggccucucuccaggucuccuu

SEQ ID NO: 229087 - RNA, 31 nt, Homo Sapiens
uagcuguggauggagaucagagccuugaagu

SEQ ID NO: 229088 - RNA, 32 nt, Homo Sapiens
uugaaaugucaucaaagcgucaaauauaaaug

SEQ ID NO: 229089 - RNA, 32 nt, Homo Sapiens
aaugucuggacauucugaaauaauuuccgguu

SEQ ID NO: 229090 - RNA, 32 nt, Homo Sapiens
ggauacaaaacuauuucagcaaugcagacaau

SEQ ID NO: 229091 - RNA, 32 nt, Homo Sapiens
uuuuuccuacuuucuuuaaguguggucaucag

SEQ ID NO: 229092 - RNA, 32 nt, Homo Sapiens
gaagaggccuauguuaucccaacagugcagaa

SEQ ID NO: 229093 - RNA, 32 nt, Homo Sapiens
gggcgcugaggguggggccugugucagaagca

SEQ ID NO: 229094 - RNA, 29 nt, Homo Sapiens
uaaguuugcuguuucagaggcuagcccaa

SEQ ID NO: 229095 - RNA, 32 nt, Homo Sapiens
ugaagagaccucaaaaucauggugguaggcaa

SEQ ID NO: 229096 - RNA, 32 nt, Homo Sapiens
aggaggguggcaccaugggcccgggcggugcc

SEQ ID NO: 229097 - RNA, 32 nt, Homo Sapiens
gcccccgccucccugucccccguuucacacac

SEQ ID NO: 229098 - RNA, 32 nt, Homo Sapiens
uaaucauggccuuuuaaaaauaaaauaaagug

SEQ ID NO: 229099 - RNA, 32 nt, Homo Sapiens
cccacaggcuucuacagccucuucuccaccua

SEQ ID NO: 229100 - RNA, 32 nt, Homo Sapiens
uaacuauuucagugacuuuaucugguuccaag

SEQ ID NO: 229101 - RNA, 32 nt, Homo Sapiens
uagcugggacuacaggugugcgccaccaugcc

SEQ ID NO: 229102 - RNA, 32 nt, Homo Sapiens
cagcugggacuacaggcgugcgccaccaugcc

SEQ ID NO: 229103 - RNA, 32 nt, Homo Sapiens
uaguuagccuacuuggcauuuacuacaucggu

SEQ ID NO: 229104 - RNA, 32 nt, Homo Sapiens
acuggagaguguggggaaugggaagaaguagu

SEQ ID NO: 229105 - RNA, 32 nt, Homo Sapiens
ucucacaugcuucccaggcagggcagaggugg

SEQ ID NO: 229106 - RNA, 32 nt, Homo Sapiens
agguugggugcuucauuuguguucagucugaa

SEQ ID NO: 229107 - RNA, 32 nt, Homo Sapiens
uuguguauacuucugugucuguuauguucaau

SEQ ID NO: 229108 - RNA, 32 nt, Homo Sapiens
ucuuuauugaauugaaagaaaaacgaacuuga

SEQ ID NO: 229109 - RNA, 32 nt, Homo Sapiens
uggggcaugcguugcaccugcccggcccggug

SEQ ID NO: 229110 - RNA, 32 nt, Homo Sapiens
gcccacguccgucaccuccccauccccuaguc

SEQ ID NO: 229111 - RNA, 32 nt, Homo Sapiens
ugcgugcgugcgccugugugugagaauaagug

SEQ ID NO: 229112 - RNA, 32 nt, Homo Sapiens
uaaaaugucauucaggguuuccugacugcuaa

SEQ ID NO: 229113 - RNA, 32 nt, Homo Sapiens
auucgggggucuggggccgagaacgugaccgc

SEQ ID NO: 229114 - RNA, 32 nt, Homo Sapiens
cgggugcggagcacuuugggaggcugaggcgg

SEQ ID NO: 229115 - RNA, 32 nt, Homo Sapiens
ccugugugcagggacugauuccucagcacacg

SEQ ID NO: 229116 - RNA, 32 nt, Homo Sapiens
gagugccagugguccuuggaggucgaguccaa

SEQ ID NO: 229117 - RNA, 32 nt, Homo Sapiens
cagaaacuccuuuugcugucuuucucuaaaua

SEQ ID NO: 229118 - RNA, 32 nt, Homo Sapiens
uggcccugcgugcccugaaacugcuggguuuc

SEQ ID NO: 229119 - RNA, 32 nt, Homo Sapiens
ccugguacuguaauaggagccuaagacagcac

SEQ ID NO: 229120 - RNA, 32 nt, Homo Sapiens
aggauucucugucaucucuggugacugagugu

SEQ ID NO: 229121 - RNA, 32 nt, Homo Sapiens
auguuuuuucccuuugccccauaaucaguauu

SEQ ID NO: 229122 - RNA, 27 nt, Homo Sapiens
cccagcgucuuccccagcccccgggag

SEQ ID NO: 229123 - RNA, 32 nt, Homo Sapiens
auauugccccaggacagaugucuugcaagagu

SEQ ID NO: 229124 - RNA, 32 nt, Homo Sapiens
cggcuugcuacaaaacccgaaaagcgcugagu

SEQ ID NO: 229125 - RNA, 32 nt, Homo Sapiens
ucaugaagaugaaaaugcauuucuagugaauu

SEQ ID NO: 229126 - RNA, 32 nt, Homo Sapiens
cuuuagcuguaggccuaggagcuagcgauuua

SEQ ID NO: 229127 - RNA, 32 nt, Homo Sapiens
acuuugccccgaaagcacauccauaaaagaca

SEQ ID NO: 229128 - RNA, 32 nt, Homo Sapiens
gaaaaagaaaaagaagggaaaauugccuaaga

SEQ ID NO: 229129 - RNA, 32 nt, Homo Sapiens
cggccagcggggaagaugagcggcagcagcgc

SEQ ID NO: 229130 - RNA, 32 nt, Homo Sapiens
cagcagggcaggaucgccauuaaagcacaucu

SEQ ID NO: 229131 - RNA, 31 nt, Homo Sapiens
augaagaaauaaaaauguuugucuagaaugu

SEQ ID NO: 229132 - RNA, 28 nt, Homo Sapiens
aaacaaugaaaggaacauuugaaagaaa

SEQ ID NO: 229133 - RNA, 29 nt, Homo Sapiens
gaacauggcgcugcgaguggugcggagcg

SEQ ID NO: 229134 - RNA, 32 nt, Homo Sapiens
gggaagggcccggcacccuuucugggucccuc

SEQ ID NO: 229135 - RNA, 32 nt, Homo Sapiens
ugccugcaccucaccacgauauugaggaagca

SEQ ID NO: 229136 - RNA, 32 nt, Homo Sapiens
ggcucgcccggggucugcucacauaccggucc

SEQ ID NO: 229137 - RNA, 32 nt, Homo Sapiens
uuggcccccugcccuccucucccucccagaug

SEQ ID NO: 229138 - RNA, 32 nt, Homo Sapiens
agcagcccccuggugcggcccgagaccgggca

SEQ ID NO: 229139 - RNA, 32 nt, Homo Sapiens
aagugcaaaaauacacuugaugagaauuuccu

SEQ ID NO: 229140 - RNA, 29 nt, Homo Sapiens
caguugcuugacaaccuugggaaaauugu

SEQ ID NO: 229141 - RNA, 32 nt, Homo Sapiens
cugccaauugaaacagaagaagaaaaaaaaaa

SEQ ID NO: 229142 - RNA, 32 nt, Homo Sapiens
uuuaaaauauaaaacaaucucaauuuagauca

SEQ ID NO: 229143 - RNA, 32 nt, Homo Sapiens
acaauaaaauuccucugugugauuagagucug

SEQ ID NO: 229144 - RNA, 32 nt, Homo Sapiens
uaaugaauguggauagcugccuuuuuuaacac

SEQ ID NO: 229145 - RNA, 32 nt, Homo Sapiens
uggagucaucauggccaauuauaggaccuaau

SEQ ID NO: 229146 - RNA, 32 nt, Homo Sapiens
acuucuaaaacgcaaauggaguuuagagagga

SEQ ID NO: 229147 - RNA, 32 nt, Homo Sapiens
agaaaugaagagaaugaaaguuuuaaacugca

SEQ ID NO: 229148 - RNA, 32 nt, Homo Sapiens
ggugccugucccaucccgcgggcgcggccguu

SEQ ID NO: 229149 - RNA, 32 nt, Homo Sapiens
auagggccuuggaggagaagguccaguuuuaa

SEQ ID NO: 229150 - RNA, 32 nt, Homo Sapiens
cucccagcagugcuucccuccuccacccucca

SEQ ID NO: 229151 - RNA, 32 nt, Homo Sapiens
cggagcccgccccacaccacccugccccucca

SEQ ID NO: 229152 - RNA, 32 nt, Homo Sapiens
ggggacgaggcccuggagcccugggucucgcc

SEQ ID NO: 229153 - RNA, 32 nt, Homo Sapiens
aggaggcggaggaggaggagcaugucggacgg

SEQ ID NO: 229154 - RNA, 32 nt, Homo Sapiens
agcggaggcagagcggcuccgcgagcuucucu

SEQ ID NO: 229155 - RNA, 32 nt, Homo Sapiens
cuccuucuccuguccuggcccaggcauccuag

SEQ ID NO: 229156 - RNA, 32 nt, Homo Sapiens
uccucugaccucuggaggacccggcacuccga

SEQ ID NO: 229157 - RNA, 32 nt, Homo Sapiens
uggcucccucccugggguccugccuuccaacc

SEQ ID NO: 229158 - RNA, 32 nt, Homo Sapiens
cacaguuugaauagaagaauccaaagcuacaa

SEQ ID NO: 229159 - RNA, 31 nt, Homo Sapiens
ugugacaaggucuuuaaucagaauugauucc

SEQ ID NO: 229160 - RNA, 32 nt, Homo Sapiens
aucugacuccagcagagucugugccaaugugg

SEQ ID NO: 229161 - RNA, 32 nt, Homo Sapiens
ccgaggaugccccugguggggguggccuucuc

SEQ ID NO: 229162 - RNA, 32 nt, Homo Sapiens
ugguuguuucggucuguuuucauuuucaguuu

SEQ ID NO: 229163 - RNA, 32 nt, Homo Sapiens
uggucuucuaguuguaaguuggguauuauuua

SEQ ID NO: 229164 - RNA, 32 nt, Homo Sapiens
ccaacuauuacauaguuuuucuugagauccgu

SEQ ID NO: 229165 - RNA, 32 nt, Homo Sapiens
ccauugucaccauuggaugaaccucugguuua

SEQ ID NO: 229166 - RNA, 32 nt, Homo Sapiens
cucggccgccaggcugccccugagguucacuu

SEQ ID NO: 229167 - RNA, 32 nt, Homo Sapiens
ccaggaccuucgugcccuccucaagcgaaaac

SEQ ID NO: 229168 - RNA, 32 nt, Homo Sapiens
gguccauucuacccccagcuucacucagcacu

SEQ ID NO: 229169 - RNA, 32 nt, Homo Sapiens
cauccgccuuucccuuuagccagucugcuguc

SEQ ID NO: 229170 - RNA, 32 nt, Homo Sapiens
uugaugggcuggggaacccuggagagccucga

SEQ ID NO: 229171 - RNA, 32 nt, Homo Sapiens
uacagcuuggcagagaaaauaaauaucaucaa

SEQ ID NO: 229172 - RNA, 32 nt, Homo Sapiens
uuccugagggagcagagcagccgcguccuccc

SEQ ID NO: 229173 - RNA, 32 nt, Homo Sapiens
gguagaguaaaaauggauauuuuuuauguacu

SEQ ID NO: 229174 - RNA, 32 nt, Homo Sapiens
ugcggcggcuccgaccugccgccuggcgcugc

SEQ ID NO: 229175 - RNA, 32 nt, Homo Sapiens
ccagcuaggagcugaugcugcaucguaauaac

SEQ ID NO: 229176 - RNA, 32 nt, Homo Sapiens
ggagguggagagacagcccacccuugugucca

SEQ ID NO: 229177 - RNA, 32 nt, Homo Sapiens
cuccccgcgucccaggcgccggcgccuggagc

SEQ ID NO: 229178 - RNA, 32 nt, Homo Sapiens
uccugugcuuuuuauuucuggcucuucggaug

SEQ ID NO: 229179 - RNA, 32 nt, Homo Sapiens
aguuagguuaucauuuucucuacaucauagau

SEQ ID NO: 229180 - RNA, 32 nt, Homo Sapiens
uccacaaaucaucuguaacaauuauguuuuca

SEQ ID NO: 229181 - RNA, 32 nt, Homo Sapiens
agcgcgcccuccccgugcggccacucgcagcg

SEQ ID NO: 229182 - RNA, 32 nt, Homo Sapiens
gaaagaaggcuuucugaagucuguuugcacag

SEQ ID NO: 229183 - RNA, 32 nt, Homo Sapiens
acugugagaaaauaaauuucugcuguuuauuc

SEQ ID NO: 229184 - RNA, 32 nt, Homo Sapiens
gccuccuacccagagguuugugcgagccugug

SEQ ID NO: 229185 - RNA, 32 nt, Homo Sapiens
agaaaaguauaaaauguuuguugaaguaucuu

SEQ ID NO: 229186 - RNA, 32 nt, Homo Sapiens
uccugggcucacggaucagcuugcugggccag

SEQ ID NO: 229187 - RNA, 32 nt, Homo Sapiens
agcaauguuuuuccuuuaauccaguguuacug

SEQ ID NO: 229188 - RNA, 32 nt, Homo Sapiens
ggauccaguauguuuuauaaaucugaaugagu

SEQ ID NO: 229189 - RNA, 32 nt, Homo Sapiens
gcuggccccuccuaccuucucuuccccaccag

SEQ ID NO: 229190 - RNA, 32 nt, Homo Sapiens
aagccaagggaaggauaaaucaaggcucaagg

SEQ ID NO: 229191 - RNA, 32 nt, Homo Sapiens
cguugaccgggaagagcgggcaccgcggcagu

SEQ ID NO: 229192 - RNA, 32 nt, Homo Sapiens
auaugucgaggaccagaugcuuuuuggucucc

SEQ ID NO: 229193 - RNA, 32 nt, Homo Sapiens
cacaccgccagccccaggccaggcugcgaggg

SEQ ID NO: 229194 - RNA, 32 nt, Homo Sapiens
ucaucaaaauucuaguggacuggcuaguucag

SEQ ID NO: 229195 - RNA, 32 nt, Homo Sapiens
gguucaaacuccagcccugcccuuugguucau

SEQ ID NO: 229196 - RNA, 32 nt, Homo Sapiens
ucagugccaaugugucccacagaacuucccac

SEQ ID NO: 229197 - RNA, 32 nt, Homo Sapiens
cagugcccagcaugacauggguccucgggaag

SEQ ID NO: 229198 - RNA, 32 nt, Homo Sapiens
acuccccuggaaauauguguggcucugaucag

SEQ ID NO: 229199 - RNA, 32 nt, Homo Sapiens
gaaagaaaaaauacuguaagacauccuuaaag

SEQ ID NO: 229200 - RNA, 32 nt, Homo Sapiens
cauagagcagcuccccaccuggcucucagcca

SEQ ID NO: 229201 - RNA, 32 nt, Homo Sapiens
uggggugggccuaguccugcuccuagggcugu

SEQ ID NO: 229202 - RNA, 32 nt, Homo Sapiens
caacucugaaauuauuuccuguuguuucuuca

SEQ ID NO: 229203 - RNA, 32 nt, Homo Sapiens
uugcucaaaacacuuccagucuggagagcugu

SEQ ID NO: 229204 - RNA, 32 nt, Homo Sapiens
ccccuaaggaggagggcgaaggguaugugugu

SEQ ID NO: 229205 - RNA, 32 nt, Homo Sapiens
aucaugauaaaacaugaugauuacugcuauau

SEQ ID NO: 229206 - RNA, 32 nt, Homo Sapiens
gggguuggagccugggaugagccccggcagcg

SEQ ID NO: 229207 - RNA, 32 nt, Homo Sapiens
gggcuucccgcaccccaggcuggggcagcgag

SEQ ID NO: 229208 - RNA, 32 nt, Homo Sapiens
uccccgcuccgagggccgcgccaggccaugcc

SEQ ID NO: 229209 - RNA, 32 nt, Homo Sapiens
uucugugaacugaaugcagccuggacacuggc

SEQ ID NO: 229210 - RNA, 32 nt, Homo Sapiens
ugcaaggcggccuggggcggcggaaggggcgc

SEQ ID NO: 229211 - RNA, 32 nt, Homo Sapiens
uccauugagaccaggagaucaaggcugcagcg

SEQ ID NO: 229212 - RNA, 32 nt, Homo Sapiens
agugucccuguaucugcgccacugccgcaagg

SEQ ID NO: 229213 - RNA, 32 nt, Homo Sapiens
acauuucauguguauucaacccuaaguaaagu

SEQ ID NO: 229214 - RNA, 32 nt, Homo Sapiens
auuuucauuguuguuauauguauguacuuuau

SEQ ID NO: 229215 - RNA, 32 nt, Homo Sapiens
ccgaucagcaguaucuuuguuaucauagcggg

SEQ ID NO: 229216 - RNA, 32 nt, Homo Sapiens
ggcgcucugaccgcgcguccccggcccgccau

SEQ ID NO: 229217 - RNA, 31 nt, Homo Sapiens
gccgccaugcaggcgcgagcgcugcuccugg

SEQ ID NO: 229218 - RNA, 32 nt, Homo Sapiens
cccgccgcugacggagcccgccgcuccgggca

SEQ ID NO: 229219 - RNA, 32 nt, Homo Sapiens
cagguugugagguuuauuaguccccaaggcaa

SEQ ID NO: 229220 - RNA, 32 nt, Homo Sapiens
uucuuuaacugccuuccuggcuuagcucagau

SEQ ID NO: 229221 - RNA, 32 nt, Homo Sapiens
aaauauaaaaggaacaaccauauagccaaccu

SEQ ID NO: 229222 - RNA, 32 nt, Homo Sapiens
gguggaauuuaguaucuuccaguguucuuaca

SEQ ID NO: 229223 - RNA, 32 nt, Homo Sapiens
acucugggaaaacuuacggaaauacacaaaug

SEQ ID NO: 229224 - RNA, 32 nt, Homo Sapiens
uagacccggcgccaucaugcugcuucugccaa

SEQ ID NO: 229225 - RNA, 29 nt, Homo Sapiens
ggcuauccgguccucggcugcggcgggca

SEQ ID NO: 229226 - RNA, 32 nt, Homo Sapiens
cucuuuggaccucagagggacccugguuugga

SEQ ID NO: 229227 - RNA, 32 nt, Homo Sapiens
uuaaacuacaguuuugucauuuaugaaauuuu

SEQ ID NO: 229228 - RNA, 32 nt, Homo Sapiens
cugcaggagaggcuuucugugcuuuucacaua

SEQ ID NO: 229229 - RNA, 32 nt, Homo Sapiens
cuccacugugauuaaaaauaaaaauugcuaga

SEQ ID NO: 229230 - RNA, 32 nt, Homo Sapiens
aagaauucuacauuuuaaugaguuauaaaauu

SEQ ID NO: 229231 - RNA, 32 nt, Homo Sapiens
cuaugucuuuugccagagaggcugauugcuca

SEQ ID NO: 229232 - RNA, 32 nt, Homo Sapiens
cuaagguaggugccucuuccaucuuuugccac

SEQ ID NO: 229233 - RNA, 32 nt, Homo Sapiens
gagagcggcgggagcccgaggcggcggcgcuc

SEQ ID NO: 229234 - RNA, 32 nt, Homo Sapiens
caugcaagauaaagagguaauuuuucuccucc

SEQ ID NO: 229235 - RNA, 32 nt, Homo Sapiens
uuacuucuaaauagaauauacaugaucaaaag

SEQ ID NO: 229236 - RNA, 30 nt, Homo Sapiens
aagaggaucaggaaggaugagucugaucug

SEQ ID NO: 229237 - RNA, 32 nt, Homo Sapiens
auguucuucacuugaacuaaucaaauacaaua

SEQ ID NO: 229238 - RNA, 32 nt, Homo Sapiens
ggugcucgcgcugccgcugcucacgcgcgccg

SEQ ID NO: 229239 - RNA, 32 nt, Homo Sapiens
caggccccgaacuguggucgccaggcccagga

SEQ ID NO: 229240 - RNA, 32 nt, Homo Sapiens
auggcaguaggagccagggcuggccauggguc

SEQ ID NO: 229241 - RNA, 32 nt, Homo Sapiens
agaaccaggggccagagcugggggguggcugg

SEQ ID NO: 229242 - RNA, 32 nt, Homo Sapiens
cacacaccaacccagcaacauccguggagaaa

SEQ ID NO: 229243 - RNA, 32 nt, Homo Sapiens
cagucaguggaguggaggcuccagucagaccc

SEQ ID NO: 229244 - RNA, 32 nt, Homo Sapiens
cauucaaagaugugucuguggacuucacccag

SEQ ID NO: 229245 - RNA, 32 nt, Homo Sapiens
uaaggagaggcggucccgguguccucgggucc

SEQ ID NO: 229246 - RNA, 32 nt, Homo Sapiens
uuucacgcugccucggcggcccggcccggcuc

SEQ ID NO: 229247 - RNA, 32 nt, Homo Sapiens
uguggggagagccacagggccagguggacacg

SEQ ID NO: 229248 - RNA, 32 nt, Homo Sapiens
ugccucauuuuacaagaagagaauaggaagga

SEQ ID NO: 229249 - RNA, 32 nt, Homo Sapiens
gacgucggcggagggaagccggcccaggcucg

SEQ ID NO: 229250 - RNA, 32 nt, Homo Sapiens
caaccugacaacagagaagaugaugagccuuu

SEQ ID NO: 229251 - RNA, 32 nt, Homo Sapiens
aacauuccagaauacccgguaguuccacucuu

SEQ ID NO: 229252 - RNA, 32 nt, Homo Sapiens
uugaggaaaaaacaacuccauguauuuauuca

SEQ ID NO: 229253 - RNA, 32 nt, Homo Sapiens
aaaugcugucaauuuuuuuuuaacccaaguau

SEQ ID NO: 229254 - RNA, 32 nt, Homo Sapiens
gcucuacaacugaguccuuaaacagggcaucu

SEQ ID NO: 229255 - RNA, 32 nt, Homo Sapiens
auauaauuuguaaagcacuugguuuaaauuuc

SEQ ID NO: 229256 - RNA, 32 nt, Homo Sapiens
agcuuaaaaaaauuacugugaauuguuuuugu

SEQ ID NO: 229257 - RNA, 32 nt, Homo Sapiens
ugcugugcacccagcuccagugucucagcuca

SEQ ID NO: 229258 - RNA, 32 nt, Homo Sapiens
ucuaugaaaaauuuaaaaaaaaaaaaaaggcc

SEQ ID NO: 229259 - RNA, 32 nt, Homo Sapiens
cuuauacuuccacuuaagucuucucgccggau

SEQ ID NO: 229260 - RNA, 32 nt, Homo Sapiens
ccucgccgccgccgcugccagcugaccugucc

SEQ ID NO: 229261 - RNA, 32 nt, Homo Sapiens
cccaacccccucgggccccaugggucaggggg

SEQ ID NO: 229262 - RNA, 32 nt, Homo Sapiens
ggugguccaagcccaggaagcgcucccugaug

SEQ ID NO: 229263 - RNA, 32 nt, Homo Sapiens
aguagugaaugacacagauuugccagaugaca

SEQ ID NO: 229264 - RNA, 32 nt, Homo Sapiens
aaaaucacuaaaaauucccacaaaucuuguuu

SEQ ID NO: 229265 - RNA, 32 nt, Homo Sapiens
ugguaacaaaaauaguuuagccauaauuguuu

SEQ ID NO: 229266 - RNA, 32 nt, Homo Sapiens
cugcugcuguuugccugguuucugacccagug

SEQ ID NO: 229267 - RNA, 32 nt, Homo Sapiens
aauaauuuuuugguuuuuuuuaauugacacau

SEQ ID NO: 229268 - RNA, 32 nt, Homo Sapiens
cuucgagaggcgccggggacuggucauuguca

SEQ ID NO: 229269 - RNA, 32 nt, Homo Sapiens
guuaugcugcagccggagcccgggcuuccucc

SEQ ID NO: 229270 - RNA, 27 nt, Homo Sapiens
guguccuccuucuugaaccccucagcc

SEQ ID NO: 229271 - RNA, 32 nt, Homo Sapiens
uugcagcccagcugaccaccccucccagcucc

SEQ ID NO: 229272 - RNA, 32 nt, Homo Sapiens
uauaagacaucaccaaugaggaugcuguauau

SEQ ID NO: 229273 - RNA, 32 nt, Homo Sapiens
uggacaucaagccccagguggauaccuagucc

SEQ ID NO: 229274 - RNA, 32 nt, Homo Sapiens
agaucaggaacacaacgugguggcacugaagg

SEQ ID NO: 229275 - RNA, 32 nt, Homo Sapiens
uuggcggcgggguggggugggggugggcagca

SEQ ID NO: 229276 - RNA, 32 nt, Homo Sapiens
cugaaauaaaaauuauauuacgaaauuuccuu

SEQ ID NO: 229277 - RNA, 32 nt, Homo Sapiens
cccucacccccucccacccccagccccgacuc

SEQ ID NO: 229278 - RNA, 32 nt, Homo Sapiens
uauccaccccgcccggccgcccucgucuugug

SEQ ID NO: 229279 - RNA, 32 nt, Homo Sapiens
ugguuuuucccuucacaggggacgacuuagcu

SEQ ID NO: 229280 - RNA, 32 nt, Homo Sapiens
aaagacuugacaagaaaucuucauauucucug

SEQ ID NO: 229281 - RNA, 32 nt, Homo Sapiens
aagugucauuggcaugucuggcaguagucucu

SEQ ID NO: 229282 - RNA, 32 nt, Homo Sapiens
augcuggccauggccuggcggggcgcagggcc

SEQ ID NO: 229283 - RNA, 32 nt, Homo Sapiens
guccugucaccgccaccgccaaaaaagucacc

SEQ ID NO: 229284 - RNA, 32 nt, Homo Sapiens
uagguauuuacuauggaguauaauucucacaa

SEQ ID NO: 229285 - RNA, 32 nt, Homo Sapiens
cucgcgccggugccgccgcccuucucauccgg

SEQ ID NO: 229286 - RNA, 32 nt, Homo Sapiens
acacccaggccuuuuuuaacggugugaagcau

SEQ ID NO: 229287 - RNA, 32 nt, Homo Sapiens
cuuuuuauuuuuguauuacauugggaugcauu

SEQ ID NO: 229288 - RNA, 32 nt, Homo Sapiens
uuuuucccagaucaagaugacaugacaucacu

SEQ ID NO: 229289 - RNA, 32 nt, Homo Sapiens
aaguucuccaugaauguacgucacaaugauga

SEQ ID NO: 229290 - RNA, 32 nt, Homo Sapiens
uccugccuccucugcaccuggacaacucaacu

SEQ ID NO: 229291 - RNA, 32 nt, Homo Sapiens
aguagcugggacuauagaugcgccaccauggc

SEQ ID NO: 229292 - RNA, 32 nt, Homo Sapiens
gaaguguugccaaauaacuuguauguaguuga

SEQ ID NO: 229293 - RNA, 32 nt, Homo Sapiens
uuuacuaaguucuuguaaucauuauuuuagac

SEQ ID NO: 229294 - RNA, 32 nt, Homo Sapiens
ugggagggggcggcggccauggagcgggugaa

SEQ ID NO: 229295 - RNA, 32 nt, Homo Sapiens
aaacccccaugacacaccuuuauguauguaac

SEQ ID NO: 229296 - RNA, 32 nt, Homo Sapiens
uuauaaaaaagaccuuauacuuaaugaucauu

SEQ ID NO: 229297 - RNA, 32 nt, Homo Sapiens
cucugcauuccccuccucccccagacuucaga

SEQ ID NO: 229298 - RNA, 32 nt, Homo Sapiens
gcgcuaugaagauacaaaggcacaagaaugau

SEQ ID NO: 229299 - RNA, 32 nt, Homo Sapiens
agacaucccugccccaggguccacccucgucu

SEQ ID NO: 229300 - RNA, 32 nt, Homo Sapiens
ggauaaauuauaaaaauagcuauaaaaucaac

SEQ ID NO: 229301 - RNA, 32 nt, Homo Sapiens
gcuggaccccgacgaggcucugggcaccagag

SEQ ID NO: 229302 - RNA, 32 nt, Homo Sapiens
gauaauuuuuaaaaauauuuuuaguagagaca

SEQ ID NO: 229303 - RNA, 32 nt, Homo Sapiens
uaaucccaggacuuugggaggcugaggaaagc

SEQ ID NO: 229304 - RNA, 32 nt, Homo Sapiens
ccuagggaaaggcugcucuugcucucccuccc

SEQ ID NO: 229305 - RNA, 32 nt, Homo Sapiens
uuugauauguguauauuaacacacugugaaag

SEQ ID NO: 229306 - RNA, 32 nt, Homo Sapiens
cgccuguaaucccagcacuuugggaguccaag

SEQ ID NO: 229307 - RNA, 32 nt, Homo Sapiens
aaaacuggaaaacacauuguuuggucuugugu

SEQ ID NO: 229308 - RNA, 32 nt, Homo Sapiens
uaugggugcuacaggcuugucuuucuaaguga

SEQ ID NO: 229309 - RNA, 32 nt, Homo Sapiens
uagccggaggucggagauaaguacccgccgcc

SEQ ID NO: 229310 - RNA, 32 nt, Homo Sapiens
agcgaggcaucggacaugugucagcacaucug

SEQ ID NO: 229311 - RNA, 32 nt, Homo Sapiens
cugucacgggcagcggcuccccggaccccgcg

SEQ ID NO: 229312 - RNA, 32 nt, Homo Sapiens
ucgcggugguccuccgccuucccccaggucgu

SEQ ID NO: 229313 - RNA, 32 nt, Homo Sapiens
uaucaauuuucauuuuaaguguauuaguacua

SEQ ID NO: 229314 - RNA, 32 nt, Homo Sapiens
augaggcgcugcugcggccgcugcugcugaca

SEQ ID NO: 229315 - RNA, 32 nt, Homo Sapiens
cagccuauuauuauuauuauuuauuguuuuuu

SEQ ID NO: 229316 - RNA, 32 nt, Homo Sapiens
ccaaagcaaaaauggacaaaugggaucacauc

SEQ ID NO: 229317 - RNA, 32 nt, Homo Sapiens
aggggcggccuggcccgggaccugcugcugcu

SEQ ID NO: 229318 - RNA, 32 nt, Homo Sapiens
uuaaacuccccauuuccuuguuuugcugcaau

SEQ ID NO: 229319 - RNA, 32 nt, Homo Sapiens
cuuuggauuuuugcauagaguacaauagacac

SEQ ID NO: 229320 - RNA, 32 nt, Homo Sapiens
caaguauaaccacugucaugugguucacccuu

SEQ ID NO: 229321 - RNA, 32 nt, Homo Sapiens
gcuugcgccacccacgucccaggggaguccgu

SEQ ID NO: 229322 - RNA, 32 nt, Homo Sapiens
guuaccggaggaggcagagccggucgcacgcc

SEQ ID NO: 229323 - RNA, 32 nt, Homo Sapiens
ugaacuuauaaaauauacaaggaguagcaaaa

SEQ ID NO: 229324 - RNA, 32 nt, Homo Sapiens
gugggccgagggggccggcccgggcugcugug

SEQ ID NO: 229325 - RNA, 32 nt, Homo Sapiens
ccgcucuguggagggcagcuguggcuucuagg

SEQ ID NO: 229326 - RNA, 31 nt, Homo Sapiens
ggcacgaggcugccugccccccggguggggc

SEQ ID NO: 229327 - RNA, 32 nt, Homo Sapiens
auuucaggacaagugaagaagauucuuugggc

SEQ ID NO: 229328 - RNA, 32 nt, Homo Sapiens
ccccucgccccagcccaguccaacccggccca

SEQ ID NO: 229329 - RNA, 32 nt, Homo Sapiens
uuguugauccaaacucccuuucugugaaagag

SEQ ID NO: 229330 - RNA, 32 nt, Homo Sapiens
ucuuucucugaaaaaagccaaagcguuauagg

SEQ ID NO: 229331 - RNA, 32 nt, Homo Sapiens
cucugaaaaauggaaccaaauucucugaggac

SEQ ID NO: 229332 - RNA, 32 nt, Homo Sapiens
aagaaacaucagaaaaacucaaauugaggaac

SEQ ID NO: 229333 - RNA, 32 nt, Homo Sapiens
aaccccacagaaauacgaaaaacccucaaaga

SEQ ID NO: 229334 - RNA, 32 nt, Homo Sapiens
cagccacuggggagcauagaaaaacugggaag

SEQ ID NO: 229335 - RNA, 32 nt, Homo Sapiens
agauugauguuauugucucuuguagaggaaac

SEQ ID NO: 229336 - RNA, 32 nt, Homo Sapiens
uccaugcagggggcuccuggggguggggaggu

SEQ ID NO: 229337 - RNA, 32 nt, Homo Sapiens
uuuguuuuaaaauaaaaauucugaauguacac

SEQ ID NO: 229338 - RNA, 32 nt, Homo Sapiens
ccaggcucucagagacccuucggugccucggg

SEQ ID NO: 229339 - RNA, 32 nt, Homo Sapiens
aaucuaaacaacaucuguacauuagcauggug

SEQ ID NO: 229340 - RNA, 32 nt, Homo Sapiens
gagcuggaaugggaacugagaaccgauucuuu

SEQ ID NO: 229341 - RNA, 32 nt, Homo Sapiens
caaaaugcuauuuuaaaguaguuucuuccgcc

SEQ ID NO: 229342 - RNA, 32 nt, Homo Sapiens
aucgcucuugcauuuuaauggucuugacauga

SEQ ID NO: 229343 - RNA, 32 nt, Homo Sapiens
cccagaggggcuguccugggggagggcugggg

SEQ ID NO: 229344 - RNA, 32 nt, Homo Sapiens
guuuucucuuacuauuuguguuuaccagaguu

SEQ ID NO: 229345 - RNA, 32 nt, Homo Sapiens
cugucugguagugaagacaagcaaguggagaa

SEQ ID NO: 229346 - RNA, 32 nt, Homo Sapiens
cagcagcagggccagagcuaucugagccggcg

SEQ ID NO: 229347 - RNA, 32 nt, Homo Sapiens
uauauuuaucuacuaaaauagaguguuuacca

SEQ ID NO: 229348 - RNA, 32 nt, Homo Sapiens
ccaauuugcccugccuggaguucccccuggcu

SEQ ID NO: 229349 - RNA, 32 nt, Homo Sapiens
ccuggcugcgguguccgcggacuggcugggga

SEQ ID NO: 229350 - RNA, 32 nt, Homo Sapiens
aaucucacccucacaggaaaacugaaaccaca

SEQ ID NO: 229351 - RNA, 32 nt, Homo Sapiens
cauggcaggccauaguucuacuuaucugagaa

SEQ ID NO: 229352 - RNA, 32 nt, Homo Sapiens
guuugaugccagcagcuucggccauccaaaca

SEQ ID NO: 229353 - RNA, 32 nt, Homo Sapiens
ucuccaccucacggcucugugcucuucugugu

SEQ ID NO: 229354 - RNA, 32 nt, Homo Sapiens
ccaaagucacuguaacaguuaagugugucauu

SEQ ID NO: 229355 - RNA, 32 nt, Homo Sapiens
aucugggcaagaagcaggauccugagucuggg

SEQ ID NO: 229356 - RNA, 32 nt, Homo Sapiens
aaccucaguuaaucagaggaaauaguuucagu

SEQ ID NO: 229357 - RNA, 32 nt, Homo Sapiens
aggcccuguggcugcuggcugaggguucugcu

SEQ ID NO: 229358 - RNA, 32 nt, Homo Sapiens
gugugugccuccccgagccucagccccaagcu

SEQ ID NO: 229359 - RNA, 32 nt, Homo Sapiens
uacaggcaugcgccacugcgcccagcugauuu

SEQ ID NO: 229360 - RNA, 32 nt, Homo Sapiens
gcuggggcuggacgaggcccaagcgccucucc

SEQ ID NO: 229361 - RNA, 32 nt, Homo Sapiens
ugcuuuuuguaucacacaguauaugauggggc

SEQ ID NO: 229362 - RNA, 32 nt, Homo Sapiens
uuacguguucccuggugacuuuuccuacuacu

SEQ ID NO: 229363 - RNA, 32 nt, Homo Sapiens
uccucccagggccacagcuuuuccugccccug

SEQ ID NO: 229364 - RNA, 32 nt, Homo Sapiens
ggacugcugcugucacugccauccauuggagc

SEQ ID NO: 229365 - RNA, 32 nt, Homo Sapiens
auagacuaaccucuaacaacaaauuaaaagug

SEQ ID NO: 229366 - RNA, 32 nt, Homo Sapiens
gcagccuggcaguuguguggcugcugggcagc

SEQ ID NO: 229367 - RNA, 32 nt, Homo Sapiens
cgugggcggcagagaggacuguugacauccaa

SEQ ID NO: 229368 - RNA, 32 nt, Homo Sapiens
uuacccaggccucugaggggccaggcaccccc

SEQ ID NO: 229369 - RNA, 32 nt, Homo Sapiens
ggaaccaauuuucaccaugauuuuaaaaauua

SEQ ID NO: 229370 - RNA, 32 nt, Homo Sapiens
uggaagcaaugaacaccacagugaugcaaggc

SEQ ID NO: 229371 - RNA, 32 nt, Homo Sapiens
auucagacccuccuuccaccggcaccccccua

SEQ ID NO: 229372 - RNA, 32 nt, Homo Sapiens
gaggcucuuaacuuugugaaaaucccauguuu

SEQ ID NO: 229373 - RNA, 28 nt, Homo Sapiens
ccgauuuagaagaaacauuugaaaaccu

SEQ ID NO: 229374 - RNA, 32 nt, Homo Sapiens
cucccagguugcaccugcugcuggcggugagc

SEQ ID NO: 229375 - RNA, 32 nt, Homo Sapiens
gcugagcuggccuuuuaacauaggaauguauu

SEQ ID NO: 229376 - RNA, 32 nt, Homo Sapiens
acuaaaugucauucuuuaaaaguuguucccuc

SEQ ID NO: 229377 - RNA, 32 nt, Homo Sapiens
uagcccuccuuccuagguguuaccauucacug

SEQ ID NO: 229378 - RNA, 32 nt, Homo Sapiens
cuuuuucaaauuaagugugcaugauuguauau

SEQ ID NO: 229379 - RNA, 32 nt, Homo Sapiens
cagccucccgaguagcugggaguacaggugca

SEQ ID NO: 229380 - RNA, 32 nt, Homo Sapiens
ugcuuuauuuuccaaguuucucucucaccuuc

SEQ ID NO: 229381 - RNA, 32 nt, Homo Sapiens
ggccccaggacaccccucaccuacuuucagcu

SEQ ID NO: 229382 - RNA, 32 nt, Homo Sapiens
ggccccaaaccucuuuuucacaguauaaagaa

SEQ ID NO: 229383 - RNA, 32 nt, Homo Sapiens
ugguugacucuucuuggagauuuucacuuggu

SEQ ID NO: 229384 - RNA, 30 nt, Homo Sapiens
gggccaugggcggggaucuggugcuuggcc

SEQ ID NO: 229385 - RNA, 32 nt, Homo Sapiens
ccuagcugucuccucaucucauccuagucuag

SEQ ID NO: 229386 - RNA, 32 nt, Homo Sapiens
aucuguacauauauuauuuugauguauuaaga

SEQ ID NO: 229387 - RNA, 32 nt, Homo Sapiens
cacgcgcuggaacagcgggauaagcuggugcu

SEQ ID NO: 229388 - RNA, 32 nt, Homo Sapiens
acuacggaggccugggcuacagcuguggaggc

SEQ ID NO: 229389 - RNA, 32 nt, Homo Sapiens
cauagaagaugaauucuuccacuuccaccaug

SEQ ID NO: 229390 - RNA, 32 nt, Homo Sapiens
cuuuuaaaagugucuguaaaucuucaguguua

SEQ ID NO: 229391 - RNA, 32 nt, Homo Sapiens
uggagaagcugcuuaugacagugccugucccu

SEQ ID NO: 229392 - RNA, 32 nt, Homo Sapiens
cacucgaccugcacgggcucugcccgacaugc

SEQ ID NO: 229393 - RNA, 32 nt, Homo Sapiens
gugcgggcagugcccugucuccacguuuguuu

SEQ ID NO: 229394 - RNA, 32 nt, Homo Sapiens
uagcaauucaagaaacaaaaagguauuuugcu

SEQ ID NO: 229395 - RNA, 32 nt, Homo Sapiens
aauaauuaggcuuuuuaccaucaaaauuuuua

SEQ ID NO: 229396 - RNA, 32 nt, Homo Sapiens
uguugaagaauuuuaauacaauauuaaauuac

SEQ ID NO: 229397 - RNA, 32 nt, Homo Sapiens
cguaaaugucauuugugauuuugacuuauuua

SEQ ID NO: 229398 - RNA, 32 nt, Homo Sapiens
acaaacccuucaaagauuaaauuuuaaucaag

SEQ ID NO: 229399 - RNA, 32 nt, Homo Sapiens
uacauguucuucugguaguguuuggauaauau

SEQ ID NO: 229400 - RNA, 32 nt, Homo Sapiens
cugauaucuccaugaauccuaguuagggauug

SEQ ID NO: 229401 - RNA, 32 nt, Homo Sapiens
aaaugaaacaaaaauguauuagacauuacccc

SEQ ID NO: 229402 - RNA, 31 nt, Homo Sapiens
auaccguggcacugcuugcgcucuuugccac

SEQ ID NO: 229403 - RNA, 32 nt, Homo Sapiens
agugaaugagucaacagcuuucaacagaucuu

SEQ ID NO: 229404 - RNA, 32 nt, Homo Sapiens
gucuuccccgguuuaucugaucuacucggggc

SEQ ID NO: 229405 - RNA, 32 nt, Homo Sapiens
aggugggcggcuuugaccgagaggcugcugga

SEQ ID NO: 229406 - RNA, 32 nt, Homo Sapiens
agaccugguucccgccucccccaaggcucaug

SEQ ID NO: 229407 - RNA, 32 nt, Homo Sapiens
auuuugcuugccgcuggcaugccugaggaaug

SEQ ID NO: 229408 - RNA, 32 nt, Homo Sapiens
cuucugcccuucccugccaccccucgcauguc

SEQ ID NO: 229409 - RNA, 32 nt, Homo Sapiens
uuuugaauuuguauuacaauuaaugaaauugc

SEQ ID NO: 229410 - RNA, 32 nt, Homo Sapiens
cuguaguuagcaaaauuggcauccucuuuagg

SEQ ID NO: 229411 - RNA, 32 nt, Homo Sapiens
ucucccuccuggccauucugggcuuggguauc

SEQ ID NO: 229412 - RNA, 31 nt, Homo Sapiens
cccuacccacccuagcucaggccggcagagc

SEQ ID NO: 229413 - RNA, 32 nt, Homo Sapiens
ugcaaaauagaguaaaaaagaucagcuagaaa

SEQ ID NO: 229414 - RNA, 32 nt, Homo Sapiens
gacagagaaaucaccuuaucucagacuaaugg

SEQ ID NO: 229415 - RNA, 32 nt, Homo Sapiens
acauuucuuccacuccccuuuccccuaccugc

SEQ ID NO: 229416 - RNA, 32 nt, Homo Sapiens
gaacgcccccguugagguucacuuccuggauc

SEQ ID NO: 229417 - RNA, 32 nt, Homo Sapiens
agcaccgggugagaggucagugcugaagccag

SEQ ID NO: 229418 - RNA, 32 nt, Homo Sapiens
cagaauaauuuuucagaaaacuuccauauauu

SEQ ID NO: 229419 - RNA, 31 nt, Homo Sapiens
ugugguaaguccagccugcccagggcugcug

SEQ ID NO: 229420 - RNA, 32 nt, Homo Sapiens
cucugucgugugggugccaagugcuuguguag

SEQ ID NO: 229421 - RNA, 32 nt, Homo Sapiens
uaacaggcuccuuauaccaggugcaguggcuc

SEQ ID NO: 229422 - RNA, 32 nt, Homo Sapiens
cugcgcagcuccggccgccuggcuccccauac

SEQ ID NO: 229423 - RNA, 32 nt, Homo Sapiens
aggcaugacaccuuuuugucugcucuuggcca

SEQ ID NO: 229424 - RNA, 32 nt, Homo Sapiens
ucaacacuuccacugcuauaaccaccaagcca

SEQ ID NO: 229425 - RNA, 32 nt, Homo Sapiens
aaaauaaaugcagacuaauuuccugcccaaag

SEQ ID NO: 229426 - RNA, 32 nt, Homo Sapiens
aagauaagaggaaaaguagaacuuaaacucca

SEQ ID NO: 229427 - RNA, 32 nt, Homo Sapiens
aauacuugguaguuuugacaucucugcuuaac

SEQ ID NO: 229428 - RNA, 32 nt, Homo Sapiens
cagccucggcauagacccccuucugguccgcc

SEQ ID NO: 229429 - RNA, 32 nt, Homo Sapiens
cauggccccguccaggcugcagcucggccucc

SEQ ID NO: 229430 - RNA, 32 nt, Homo Sapiens
cagccagagguguuccuggggagauggcggaa

SEQ ID NO: 229431 - RNA, 32 nt, Homo Sapiens
uuagcccaccaaucuugaugacuaaaaguagc

SEQ ID NO: 229432 - RNA, 31 nt, Homo Sapiens
aaacccuauugaggcagugacuguugaaaaa

SEQ ID NO: 229433 - RNA, 32 nt, Homo Sapiens
ucuucccgcgcgcuuuagcucccuguccuuug

SEQ ID NO: 229434 - RNA, 32 nt, Homo Sapiens
agcugcaaguaugccaguggguccgcucacga

SEQ ID NO: 229435 - RNA, 32 nt, Homo Sapiens
gcccucacccucaggacuaggcagaggugagg

SEQ ID NO: 229436 - RNA, 32 nt, Homo Sapiens
gucccagucugugucuccaucaggcuuaagcc

SEQ ID NO: 229437 - RNA, 32 nt, Homo Sapiens
uccggcuuccucccucaccucccccaucuuag

SEQ ID NO: 229438 - RNA, 32 nt, Homo Sapiens
aggaugccaugaaggaaaugacugcuuuguaa

SEQ ID NO: 229439 - RNA, 32 nt, Homo Sapiens
ugcaggcgagaacacgaucuucuuccacaucu

SEQ ID NO: 229440 - RNA, 32 nt, Homo Sapiens
cagaauuguauauacauacuuacuguaacaca

SEQ ID NO: 229441 - RNA, 32 nt, Homo Sapiens
aagccaguguaaacaacuaugccagugaucca

SEQ ID NO: 229442 - RNA, 32 nt, Homo Sapiens
aacuccucagagccagaguguugcagaaugga

SEQ ID NO: 229443 - RNA, 32 nt, Homo Sapiens
uaucccuguuuacugaagaccaaauacugguu

SEQ ID NO: 229444 - RNA, 32 nt, Homo Sapiens
ggcaacauagugagaccccaucucuuuaaaaa

SEQ ID NO: 229445 - RNA, 32 nt, Homo Sapiens
aaucccacagaaaucaguaaguuuacauuuca

SEQ ID NO: 229446 - RNA, 31 nt, Homo Sapiens
uaauugauaagcauuuuuaaucuguguaaac

SEQ ID NO: 229447 - RNA, 32 nt, Homo Sapiens
caaacacaucagaaauucacacuggugaggau

SEQ ID NO: 229448 - RNA, 32 nt, Homo Sapiens
augaggagaagaugcugugucuggaggccuua

SEQ ID NO: 229449 - RNA, 29 nt, Homo Sapiens
guacuuuaauguauguauguauaauggcu

SEQ ID NO: 229450 - RNA, 32 nt, Homo Sapiens
guuggagcugggcuccgucuccaggucugguu

SEQ ID NO: 229451 - RNA, 32 nt, Homo Sapiens
gagagguaacuguguauaauguuguauauuuu

SEQ ID NO: 229452 - RNA, 32 nt, Homo Sapiens
guaguaauuacauugugguauuaauauuuaga

SEQ ID NO: 229453 - RNA, 31 nt, Homo Sapiens
agauccaggggcugaucggcagugcggagga

SEQ ID NO: 229454 - RNA, 32 nt, Homo Sapiens
gaauuuccagcuuuugaaaguggccuggauag

SEQ ID NO: 229455 - RNA, 32 nt, Homo Sapiens
gcaggauucgcacccccgucaucgcugggccc

SEQ ID NO: 229456 - RNA, 32 nt, Homo Sapiens
guuauaauauccaagaaguacuaauagguuuu

SEQ ID NO: 229457 - RNA, 32 nt, Homo Sapiens
ggcagagcagugccucuacgugucugcgcccu

SEQ ID NO: 229458 - RNA, 32 nt, Homo Sapiens
aguuuuacuguaacuaugaauaauuaugcuau

SEQ ID NO: 229459 - RNA, 32 nt, Homo Sapiens
gccaggccccaacagcaggaauccccauggag

SEQ ID NO: 229460 - RNA, 32 nt, Homo Sapiens
ugaguuccagaccugcccguccccucaccagc

SEQ ID NO: 229461 - RNA, 32 nt, Homo Sapiens
ggccacuggcccagccccagccccggccccca

SEQ ID NO: 229462 - RNA, 32 nt, Homo Sapiens
cagggcccugucugcucuguggacucaacagu

SEQ ID NO: 229463 - RNA, 31 nt, Homo Sapiens
cagcugcugccggggguccugggaccgcggg

SEQ ID NO: 229464 - RNA, 32 nt, Homo Sapiens
gggggaacaaaauagucagggauauugguucc

SEQ ID NO: 229465 - RNA, 32 nt, Homo Sapiens
ggcgcgggaagcugcuucgcggagaucauggc

SEQ ID NO: 229466 - RNA, 31 nt, Homo Sapiens
aguaggugaaacauggcagcuuggccugguu

SEQ ID NO: 229467 - RNA, 32 nt, Homo Sapiens
caaauucccugccugugccugcugggaccaga

SEQ ID NO: 229468 - RNA, 32 nt, Homo Sapiens
auccgcaaagacccugucuccaaauaagguca

SEQ ID NO: 229469 - RNA, 32 nt, Homo Sapiens
auuucuagaaacaaaauuaggaagaacuagag

SEQ ID NO: 229470 - RNA, 32 nt, Homo Sapiens
guaugaaauggcaaagugaggcucugggguua

SEQ ID NO: 229471 - RNA, 32 nt, Homo Sapiens
gugaggucaggaguuugagaccagccuggcca

SEQ ID NO: 229472 - RNA, 32 nt, Homo Sapiens
gauguuccaaaaccccaccucccuuuauugac

SEQ ID NO: 229473 - RNA, 32 nt, Homo Sapiens
ugucccucuauauauugauuuauauuauguau

SEQ ID NO: 229474 - RNA, 32 nt, Homo Sapiens
cauacauuaaaaauacuugucacuguuuuaag

SEQ ID NO: 229475 - RNA, 32 nt, Homo Sapiens
gccccggacgccccggccccuuuggguuggcg

SEQ ID NO: 229476 - RNA, 32 nt, Homo Sapiens
gaccuccgggggccggcggggcagcuuggaga

SEQ ID NO: 229477 - RNA, 32 nt, Homo Sapiens
ggccccacccucggggauguguccugacacug

SEQ ID NO: 229478 - RNA, 32 nt, Homo Sapiens
caagcgcguggccgccaugcagugcguggccc

SEQ ID NO: 229479 - RNA, 32 nt, Homo Sapiens
cacagagugcagugccugcaucaggacagggu

SEQ ID NO: 229480 - RNA, 32 nt, Homo Sapiens
uauccuuccuaaaaauauaguuuuauauuaau

SEQ ID NO: 229481 - RNA, 31 nt, Homo Sapiens
aagcaagcuccacggccaccauagauaaccc

SEQ ID NO: 229482 - RNA, 32 nt, Homo Sapiens
gaacuagggaagcucagggggguuacuggcuu

SEQ ID NO: 229483 - RNA, 32 nt, Homo Sapiens
uccuucaauauuuaaaauguuucuuacaauac

SEQ ID NO: 229484 - RNA, 32 nt, Homo Sapiens
gagcaccauccggagaguggggaggaggcugu

SEQ ID NO: 229485 - RNA, 32 nt, Homo Sapiens
aguggccgcggcuuugggacaccuggggucgg

SEQ ID NO: 229486 - RNA, 32 nt, Homo Sapiens
gccguggggaucugguuuaccaggagggcaca

SEQ ID NO: 229487 - RNA, 32 nt, Homo Sapiens
gcuucucccacccacaacguguauuuuaaacc

SEQ ID NO: 229488 - RNA, 32 nt, Homo Sapiens
uucucugaccccacccaggcugcuucccaggc

SEQ ID NO: 229489 - RNA, 32 nt, Homo Sapiens
cuuuuuucuuuuucuuuuuuuuuuuuuaacuu

SEQ ID NO: 229490 - RNA, 32 nt, Homo Sapiens
acuguuaauacagauuucucuccauaucugau

SEQ ID NO: 229491 - RNA, 30 nt, Homo Sapiens
uuuuuauuaaaugugcuucaaguuuuaaca

SEQ ID NO: 229492 - RNA, 32 nt, Homo Sapiens
auacuuccugucaucugccccuuccagaaaaa

SEQ ID NO: 229493 - RNA, 32 nt, Homo Sapiens
uuuaugcauuggacuuccugugccugccccca

SEQ ID NO: 229494 - RNA, 32 nt, Homo Sapiens
cuucagcaaccucguggagauccgccuggacg

SEQ ID NO: 229495 - RNA, 32 nt, Homo Sapiens
uccugccuuucugaacucaaccaauguauuuc

SEQ ID NO: 229496 - RNA, 32 nt, Homo Sapiens
ucaacaccagaaagccuccucuggagaaucuu

SEQ ID NO: 229497 - RNA, 32 nt, Homo Sapiens
uggagccgcccucaccgccgggcccguggccc

SEQ ID NO: 229498 - RNA, 32 nt, Homo Sapiens
gaaacguguucgcuugcccagaagaagggaag

SEQ ID NO: 229499 - RNA, 32 nt, Homo Sapiens
cauccaggcagagggauugauguccgaagaag

SEQ ID NO: 229500 - RNA, 32 nt, Homo Sapiens
guaagaagcaauauuucucuuacuauucugag

SEQ ID NO: 229501 - RNA, 32 nt, Homo Sapiens
uuacauaaaccagagcugagccaggcaggaau

SEQ ID NO: 229502 - RNA, 32 nt, Homo Sapiens
ggggcuggaagcugguagugacugcuaauggg

SEQ ID NO: 229503 - RNA, 32 nt, Homo Sapiens
cucucaaagagcuaaacuuauucagaaaggaa

SEQ ID NO: 229504 - RNA, 32 nt, Homo Sapiens
gacaugccaaacuccaucugguugccuggcug

SEQ ID NO: 229505 - RNA, 32 nt, Homo Sapiens
ucgguggucgagccagggaggaggcggcugag

SEQ ID NO: 229506 - RNA, 32 nt, Homo Sapiens
gaugggucagagcuaaacuccuuccuggccug

SEQ ID NO: 229507 - RNA, 32 nt, Homo Sapiens
uggcuucuagaauagaggauugcucagcauga

SEQ ID NO: 229508 - RNA, 32 nt, Homo Sapiens
uuuuuuuuguuuuuuuuuuuuaagaaaacuga

SEQ ID NO: 229509 - RNA, 31 nt, Homo Sapiens
uaaaccugaagaaaguuuagagccuggggcu

SEQ ID NO: 229510 - RNA, 32 nt, Homo Sapiens
uacuuuugacaaaagaucgccuaugaguuaca

SEQ ID NO: 229511 - RNA, 30 nt, Homo Sapiens
ggcccgggagguggcugagggguccaggcg

SEQ ID NO: 229512 - RNA, 32 nt, Homo Sapiens
ugaaaauacaaugugaaauguacaauaaauca

SEQ ID NO: 229513 - RNA, 32 nt, Homo Sapiens
acaauaucaaaccauggcuccuccucagcaug

SEQ ID NO: 229514 - RNA, 32 nt, Homo Sapiens
gcugcucaugggcagagcugcccucgggcaac

SEQ ID NO: 229515 - RNA, 32 nt, Homo Sapiens
augcuuuuuaucgcuaaaugacuugcagauga

SEQ ID NO: 229516 - RNA, 32 nt, Homo Sapiens
ucuacaagugucccuuuuaaaaauaguaugug

SEQ ID NO: 229517 - RNA, 32 nt, Homo Sapiens
uggcagccgcuggacguccgguguugauggug

SEQ ID NO: 229518 - RNA, 32 nt, Homo Sapiens
cgcucucuggcugcuuagcgccgcccgcccgc

SEQ ID NO: 229519 - RNA, 32 nt, Homo Sapiens
ggcacauucuuuaucuaaaugucuaacauauu

SEQ ID NO: 229520 - RNA, 32 nt, Homo Sapiens
aggcggguggaucaccugaggucaguucgaga

SEQ ID NO: 229521 - RNA, 32 nt, Homo Sapiens
aagagaaggcgcuuucugucugccggggucgc

SEQ ID NO: 229522 - RNA, 32 nt, Homo Sapiens
uccuggaugcaaaccuugagaaaucaacuugg

SEQ ID NO: 229523 - RNA, 32 nt, Homo Sapiens
cuuucuauguucauauacuguuuaccuuuuuc

SEQ ID NO: 229524 - RNA, 32 nt, Homo Sapiens
gauuuuucuuuccauauuugaauuaauuuuuu

SEQ ID NO: 229525 - RNA, 32 nt, Homo Sapiens
uuucuuuucuuuucuuuuuuuuuuuuuuuuuu

SEQ ID NO: 229526 - RNA, 32 nt, Homo Sapiens
cucuccccuggugaagacccagggaacccagg

SEQ ID NO: 229527 - RNA, 32 nt, Homo Sapiens
ucuucuuauguauguaaaauuuucguauuuug

SEQ ID NO: 229528 - RNA, 32 nt, Homo Sapiens
aguuauaaaaauuuuaaggaaaacauuuaaaa

SEQ ID NO: 229529 - RNA, 32 nt, Homo Sapiens
cucgccccgccggcguccccagcccuaucacc

SEQ ID NO: 229530 - RNA, 32 nt, Homo Sapiens
uugaagguugaauaauaguccauuauacuaaa

SEQ ID NO: 229531 - RNA, 32 nt, Homo Sapiens
uuugguaaguuuucuuuuugcuuguuuguuug

SEQ ID NO: 229532 - RNA, 32 nt, Homo Sapiens
agaaaaagggggggcgcaaaaauggcuggggc

SEQ ID NO: 229533 - RNA, 32 nt, Homo Sapiens
aaacaaaaaaagacaagagagaugaaaacguu

SEQ ID NO: 229534 - RNA, 32 nt, Homo Sapiens
acaggggcggguggacgugcuggccgaggaac

SEQ ID NO: 229535 - RNA, 32 nt, Homo Sapiens
uuccacauaaaauuauauuaucuguaggcuag

SEQ ID NO: 229536 - RNA, 32 nt, Homo Sapiens
gaaauaagcugucucuucaaucauugcaugca

SEQ ID NO: 229537 - RNA, 32 nt, Homo Sapiens
auaaauuaaaaauuaauuugguuucuucuauu

SEQ ID NO: 229538 - RNA, 32 nt, Homo Sapiens
agaaaaacaaaaaacaaaaaacaggggccaau

SEQ ID NO: 229539 - RNA, 32 nt, Homo Sapiens
ucacaauuucaaugcuucuuuuagucagaaau

SEQ ID NO: 229540 - RNA, 32 nt, Homo Sapiens
auucggagggguggagauaaagcuggggauug

SEQ ID NO: 229541 - RNA, 32 nt, Homo Sapiens
agccguuccugcuccuacccagccccgguuac

SEQ ID NO: 229542 - RNA, 32 nt, Homo Sapiens
gaguccaucuaccuuaaaucuguaccucugac

SEQ ID NO: 229543 - RNA, 32 nt, Homo Sapiens
uuuguuuacagaauaaaacuucaaauaaaacc

SEQ ID NO: 229544 - RNA, 32 nt, Homo Sapiens
ccuucucccaggguccagagccaggaccccuu

SEQ ID NO: 229545 - RNA, 32 nt, Homo Sapiens
guaaaaaucauguuaauuuauuucauaguuga

SEQ ID NO: 229546 - RNA, 32 nt, Homo Sapiens
ccuaacugaagaagguucaagagugaauggaa

SEQ ID NO: 229547 - RNA, 32 nt, Homo Sapiens
guucguugauucucuagcaccaugacacugug

SEQ ID NO: 229548 - RNA, 32 nt, Homo Sapiens
guuuccuagaucugguccacauagaagaaauc

SEQ ID NO: 229549 - RNA, 32 nt, Homo Sapiens
gccacuguccucagaugacaccacccaggagc

SEQ ID NO: 229550 - RNA, 32 nt, Homo Sapiens
uacuaugcuguucuuugguaauggaauaaauu

SEQ ID NO: 229551 - RNA, 30 nt, Homo Sapiens
cccggauggaugugcccggcccggugucuc

SEQ ID NO: 229552 - RNA, 30 nt, Homo Sapiens
cagaggaggaggugcggcggcggcggcggc

SEQ ID NO: 229553 - RNA, 32 nt, Homo Sapiens
uugaaugaaaauauguggacugucauuuuguu

SEQ ID NO: 229554 - RNA, 32 nt, Homo Sapiens
cuaugacugugccacugcacuccagccugguc

SEQ ID NO: 229555 - RNA, 32 nt, Homo Sapiens
uuaugggcugugcucgcccccuggacaguuga

SEQ ID NO: 229556 - RNA, 32 nt, Homo Sapiens
gccuucuuuuucugcacugagucucaggcagu

SEQ ID NO: 229557 - RNA, 32 nt, Homo Sapiens
guguuagaaugggaaauagagugugccaucuu

SEQ ID NO: 229558 - RNA, 32 nt, Homo Sapiens
augauaggaaggaaaaguuuuggugccauaau

SEQ ID NO: 229559 - RNA, 32 nt, Homo Sapiens
cagacucuuacguggagagugcacugaccugu

SEQ ID NO: 229560 - RNA, 32 nt, Homo Sapiens
caacugucugaccccgaggagcucuguaaguc

SEQ ID NO: 229561 - RNA, 32 nt, Homo Sapiens
ggagaccggccgcauggacccagggacagugg

SEQ ID NO: 229562 - RNA, 32 nt, Homo Sapiens
ugugaccccaucuguggccccaguuaucaugg

SEQ ID NO: 229563 - RNA, 32 nt, Homo Sapiens
uucccucuucauccgcagcaguguaucuauuc

SEQ ID NO: 229564 - RNA, 32 nt, Homo Sapiens
guauuuucauauuuuuaaucauuuauuaagag

SEQ ID NO: 229565 - RNA, 32 nt, Homo Sapiens
uaugugaagcuacuauuuggaguuggacacga

SEQ ID NO: 229566 - RNA, 32 nt, Homo Sapiens
gccagccaaaguaggaacagcguaagaggaga

SEQ ID NO: 229567 - RNA, 32 nt, Homo Sapiens
guccuggugcccagcccaacgugguccaaggu

SEQ ID NO: 229568 - RNA, 32 nt, Homo Sapiens
caccuuguacuauuucacaauggguucugcug

SEQ ID NO: 229569 - RNA, 32 nt, Homo Sapiens
cauucaucuccacacuuuccugucucaagccc

SEQ ID NO: 229570 - RNA, 32 nt, Homo Sapiens
ggcggucgcugcugcgccccaggcagccccag

SEQ ID NO: 229571 - RNA, 32 nt, Homo Sapiens
cucaccggccuggggaaggcggggggugccca

SEQ ID NO: 229572 - RNA, 32 nt, Homo Sapiens
uauguaauaugcauaaaguaaaucaaauagcg

SEQ ID NO: 229573 - RNA, 32 nt, Homo Sapiens
uucgugguacuacaaaauguguagaaguuaug

SEQ ID NO: 229574 - RNA, 32 nt, Homo Sapiens
ucuaacaagaaaacagaagacauuuaaaugac

SEQ ID NO: 229575 - RNA, 32 nt, Homo Sapiens
ucauguuuugucuacaguagaggucuaaucca

SEQ ID NO: 229576 - RNA, 32 nt, Homo Sapiens
ggguccggccggagaggccucccgcggacgcc

SEQ ID NO: 229577 - RNA, 32 nt, Homo Sapiens
gcugcaggagaguuuuaccaaccauuguguau

SEQ ID NO: 229578 - RNA, 32 nt, Homo Sapiens
caguggcuccagauagcaaggauccuaggcag

SEQ ID NO: 229579 - RNA, 32 nt, Homo Sapiens
aaguauauggauaaaaaguuaugaacuauuaa

SEQ ID NO: 229580 - RNA, 32 nt, Homo Sapiens
ccgcccggccccagcacucgcuagcuuuccug

SEQ ID NO: 229581 - RNA, 32 nt, Homo Sapiens
ugcucuguccccauccaccuccuuucagcugc

SEQ ID NO: 229582 - RNA, 32 nt, Homo Sapiens
gguuaauaauccuuaaaauacuuuuauuucca

SEQ ID NO: 229583 - RNA, 32 nt, Homo Sapiens
uuuguauaacaugauagacauaaaauugguuu

SEQ ID NO: 229584 - RNA, 32 nt, Homo Sapiens
uauuaaauguacuggugacuaguacauguauu

SEQ ID NO: 229585 - RNA, 31 nt, Homo Sapiens
cacuuaaguggccagggcagaauuaaugaag

SEQ ID NO: 229586 - RNA, 32 nt, Homo Sapiens
gggucggggguuccuuucccuucccaguugcu

SEQ ID NO: 229587 - RNA, 32 nt, Homo Sapiens
auuuaaaauaggaggaaucacuuuuugccuua

SEQ ID NO: 229588 - RNA, 32 nt, Homo Sapiens
aucucuuucugcaaaggcaucugaaugugucu

SEQ ID NO: 229589 - RNA, 27 nt, Homo Sapiens
acugcuucuucaggaucccaggucuug

SEQ ID NO: 229590 - RNA, 32 nt, Homo Sapiens
auauuuuauaugccuuuuggagcuguguaagu

SEQ ID NO: 229591 - RNA, 32 nt, Homo Sapiens
agcgagcuggcagaagucucccuugccuauug

SEQ ID NO: 229592 - RNA, 32 nt, Homo Sapiens
cucggcccuggccugaccccggcggcccugcc

SEQ ID NO: 229593 - RNA, 32 nt, Homo Sapiens
aaaaccgaaaaauggacggggcaugaagagac

SEQ ID NO: 229594 - RNA, 28 nt, Homo Sapiens
aaguguugaacauuacaagggcuuuuau

SEQ ID NO: 229595 - RNA, 32 nt, Homo Sapiens
aaugaaaauggcacuaaaaguuucuugagauu

SEQ ID NO: 229596 - RNA, 32 nt, Homo Sapiens
aagagucuagaaugccauuuuaguuucugccc

SEQ ID NO: 229597 - RNA, 32 nt, Homo Sapiens
accggggcccugccuccagucggccgcugccg

SEQ ID NO: 229598 - RNA, 32 nt, Homo Sapiens
uaguguucuagaaagagcuauuacuguggaua

SEQ ID NO: 229599 - RNA, 32 nt, Homo Sapiens
gcgggugcgcuccuuccacggcccgcacacca

SEQ ID NO: 229600 - RNA, 32 nt, Homo Sapiens
ucuaggucccagagacccucugccuggaggcg

SEQ ID NO: 229601 - RNA, 32 nt, Homo Sapiens
gugauaagcaaacuguggaaauuuauauaaga

SEQ ID NO: 229602 - RNA, 32 nt, Homo Sapiens
gaaggauuccacgugaagcaguguuugcauuu

SEQ ID NO: 229603 - RNA, 32 nt, Homo Sapiens
uuuucugauuuaaagcacuuuuaaaucuuauc

SEQ ID NO: 229604 - RNA, 32 nt, Homo Sapiens
augauguggcagaacugccaaacaagcucugg

SEQ ID NO: 229605 - RNA, 30 nt, Homo Sapiens
cugaugaugcuaauggagaugaugguaaug

SEQ ID NO: 229606 - RNA, 32 nt, Homo Sapiens
cagaaccuccaggagcacccaggcuugggcag

SEQ ID NO: 229607 - RNA, 32 nt, Homo Sapiens
ugacuaauagugaguuguaaaaaggaaacuuc

SEQ ID NO: 229608 - RNA, 32 nt, Homo Sapiens
ccucccuccgcggaugaagcccagccacauuu

SEQ ID NO: 229609 - RNA, 32 nt, Homo Sapiens
gggcuagcgcucccccuucucuuaaaggaaca

SEQ ID NO: 229610 - RNA, 32 nt, Homo Sapiens
uuguuuggccaucgguauaauuucauacagaa

SEQ ID NO: 229611 - RNA, 32 nt, Homo Sapiens
uguucccagccuuuuccaggcgugugacuuaa

SEQ ID NO: 229612 - RNA, 32 nt, Homo Sapiens
ggugggcaccucagcaaccaguagccaugcgc

SEQ ID NO: 229613 - RNA, 32 nt, Homo Sapiens
ugaauuaaauuaauugcuagcuuaaucaaaau

SEQ ID NO: 229614 - RNA, 32 nt, Homo Sapiens
aaaggauaugaacucaucauuuuuuauggcug

SEQ ID NO: 229615 - RNA, 32 nt, Homo Sapiens
ccaaccugacuaucauggacaagagauuugau

SEQ ID NO: 229616 - RNA, 32 nt, Homo Sapiens
aaagaaaagggagggcucugcgggcggcggcg

SEQ ID NO: 229617 - RNA, 32 nt, Homo Sapiens
ucauuuaggaagcugggaguuucgugaagcug

SEQ ID NO: 229618 - RNA, 32 nt, Homo Sapiens
cuggaagagauuaccaagagaauaaaaagaga

SEQ ID NO: 229619 - RNA, 32 nt, Homo Sapiens
uagugaaaugacuuuaaacuuaaguaggaaau

SEQ ID NO: 229620 - RNA, 32 nt, Homo Sapiens
uuaauuaugggggugggucuuuccugugcugu

SEQ ID NO: 229621 - RNA, 32 nt, Homo Sapiens
uagaaacaccaaucaagacuggcaaugaguac

SEQ ID NO: 229622 - RNA, 32 nt, Homo Sapiens
caugcuaauaaacuuuuuuggagaugacuuug

SEQ ID NO: 229623 - RNA, 32 nt, Homo Sapiens
cugagcccucacugccugaggacccccagccu

SEQ ID NO: 229624 - RNA, 32 nt, Homo Sapiens
guguauaagaauuuuuucaacauuaaggauaa

SEQ ID NO: 229625 - RNA, 32 nt, Homo Sapiens
gcugggaugguccgaaucugcugcuugguccg

SEQ ID NO: 229626 - RNA, 32 nt, Homo Sapiens
gaaaguaaggcacagagagguugaauaacuug

SEQ ID NO: 229627 - RNA, 32 nt, Homo Sapiens
ccgcgcgcacucgcgcacggacccgcacgggg

SEQ ID NO: 229628 - RNA, 32 nt, Homo Sapiens
agaucagcugcagacaagagcagagcuuucaa

SEQ ID NO: 229629 - RNA, 30 nt, Homo Sapiens
ggaggggggcuugggucugagucugggucu

SEQ ID NO: 229630 - RNA, 32 nt, Homo Sapiens
ucuuuacauuuuauucaauacgcuguccugaa

SEQ ID NO: 229631 - RNA, 32 nt, Homo Sapiens
gaagucggccuggaguugggguugcagggacg

SEQ ID NO: 229632 - RNA, 32 nt, Homo Sapiens
cccugcgaagcaacaauaaacuuuacaucucu

SEQ ID NO: 229633 - RNA, 32 nt, Homo Sapiens
cuucuuuaaggguaaggaggcuaguuacagug

SEQ ID NO: 229634 - RNA, 32 nt, Homo Sapiens
gggagccccugugcugccccugccguggcagg

SEQ ID NO: 229635 - RNA, 32 nt, Homo Sapiens
uuggaggugcugcuuaauaccaaacaugcggu

SEQ ID NO: 229636 - RNA, 31 nt, Homo Sapiens
uugaccugguguucuucaucauucuugcuau

SEQ ID NO: 229637 - RNA, 32 nt, Homo Sapiens
ccuaccccuuccuguccugccuccucaucagu

SEQ ID NO: 229638 - RNA, 32 nt, Homo Sapiens
uucccucucccucucucugggaccacugggua

SEQ ID NO: 229639 - RNA, 32 nt, Homo Sapiens
agaaacacugauaaggaagaaaaaagaacuaa

SEQ ID NO: 229640 - RNA, 32 nt, Homo Sapiens
ccaaauuaucuuuucuuccuugguuuuguucu

SEQ ID NO: 229641 - RNA, 32 nt, Homo Sapiens
gaggaagaggcugccuggggcugggccagccc

SEQ ID NO: 229642 - RNA, 32 nt, Homo Sapiens
uuuguggugucaguggaauggauagguaacuu

SEQ ID NO: 229643 - RNA, 32 nt, Homo Sapiens
ucaugcggccagagcgggaaagagacucgucu

SEQ ID NO: 229644 - RNA, 32 nt, Homo Sapiens
cgguaugcgcccggagcgaccggggagcgagc

SEQ ID NO: 229645 - RNA, 32 nt, Homo Sapiens
uauguuugcuucccuuuccaccaugauuguaa

SEQ ID NO: 229646 - RNA, 32 nt, Homo Sapiens
cauaguugucaugguuuugauagagaaccuca

SEQ ID NO: 229647 - RNA, 32 nt, Homo Sapiens
cgggggcaguccugggggugcugcggcuacac

SEQ ID NO: 229648 - RNA, 32 nt, Homo Sapiens
uuccacagagcaugcaagaacuucuacaaaac

SEQ ID NO: 229649 - RNA, 32 nt, Homo Sapiens
uggccgauauuuuuauuucuuuaaugauuuug

SEQ ID NO: 229650 - RNA, 29 nt, Homo Sapiens
uccuuagcuauccaaaagcccaaauggaa

SEQ ID NO: 229651 - RNA, 32 nt, Homo Sapiens
caagugauaugggaaaccacagcaaauuuuga

SEQ ID NO: 229652 - RNA, 32 nt, Homo Sapiens
uaucaaggcagcuauuuuauuaaauuuuucac

SEQ ID NO: 229653 - RNA, 32 nt, Homo Sapiens
auaagauguacaagacaaauaugcuuauuucu

SEQ ID NO: 229654 - RNA, 32 nt, Homo Sapiens
cccaucuuauugauuuaauuuaauuuuucacu

SEQ ID NO: 229655 - RNA, 32 nt, Homo Sapiens
accacagaaaacauuuucuauguccugugaga

SEQ ID NO: 229656 - RNA, 32 nt, Homo Sapiens
aagugacggacuguucuaugacugcaaagaug

SEQ ID NO: 229657 - RNA, 32 nt, Homo Sapiens
uuaggaucccucccagccccagcccuaguccc

SEQ ID NO: 229658 - RNA, 32 nt, Homo Sapiens
auaaauggcaaaugaacaaccacaaaauuguu

SEQ ID NO: 229659 - RNA, 32 nt, Homo Sapiens
augaccgcggcugcugcccccagcccagagug

SEQ ID NO: 229660 - RNA, 32 nt, Homo Sapiens
gaugucgagauguuaaaacacucaaauuuuaa

SEQ ID NO: 229661 - RNA, 32 nt, Homo Sapiens
aguccuaagggcagaagaauuucuguucucac

SEQ ID NO: 229662 - RNA, 32 nt, Homo Sapiens
cucagcaucgccaucuuuguggcaauucuaca

SEQ ID NO: 229663 - RNA, 32 nt, Homo Sapiens
ggcuucucuaaagaaccauugguuucuucaca

SEQ ID NO: 229664 - RNA, 32 nt, Homo Sapiens
cugccaggcuccacaagaggucaggacagugc

SEQ ID NO: 229665 - RNA, 32 nt, Homo Sapiens
ggggccagcuccggcguguguucaguguuagc

SEQ ID NO: 229666 - RNA, 32 nt, Homo Sapiens
ugugaguuugucugauguucuaccacaacgug

SEQ ID NO: 229667 - RNA, 32 nt, Homo Sapiens
auuauggggauuacaauucaagaugagaugug

SEQ ID NO: 229668 - RNA, 32 nt, Homo Sapiens
uaugaauggugauuuuuaaaucggagaccuag

SEQ ID NO: 229669 - RNA, 32 nt, Homo Sapiens
uacgagguggaggauaaaacaauauaauucca

SEQ ID NO: 229670 - RNA, 32 nt, Homo Sapiens
aggugagcaaauaguuuuaacuuuucuuuuuu

SEQ ID NO: 229671 - RNA, 32 nt, Homo Sapiens
aguuucccggaggagccgcgggccgcccuucc

SEQ ID NO: 229672 - RNA, 32 nt, Homo Sapiens
gauaguuugaauagaaauuuaauuuucuaagu

SEQ ID NO: 229673 - RNA, 30 nt, Homo Sapiens
cucccugucugugguuccagagggaagaag

SEQ ID NO: 229674 - RNA, 32 nt, Homo Sapiens
ugcccuagaugccccaggagaccuggcaccau

SEQ ID NO: 229675 - RNA, 32 nt, Homo Sapiens
acaaucugagccaugagaacgaggggaucugg

SEQ ID NO: 229676 - RNA, 32 nt, Homo Sapiens
cuuguuucucuuuuauuuuuuauuuuuucgca

SEQ ID NO: 229677 - RNA, 32 nt, Homo Sapiens
agugugccaagaguucgauguuaguguuucca

SEQ ID NO: 229678 - RNA, 32 nt, Homo Sapiens
gacagaugcuagauaaugaauaaaaacugguu

SEQ ID NO: 229679 - RNA, 32 nt, Homo Sapiens
agcguaacaaacaaaaucauggagcugaggag

SEQ ID NO: 229680 - RNA, 32 nt, Homo Sapiens
aauccaggaaauguuucagauuucuaaagaag

SEQ ID NO: 229681 - RNA, 32 nt, Homo Sapiens
cugcucuuuuucugcugucacugucaaucugc

SEQ ID NO: 229682 - RNA, 26 nt, Homo Sapiens
uucuuuaaauaaaagguauaucucuc

SEQ ID NO: 229683 - RNA, 32 nt, Homo Sapiens
cccccuucuugguccgagcagugugagugugc

SEQ ID NO: 229684 - RNA, 32 nt, Homo Sapiens
ggaggcagccgcgccagucgugcacccacccc

SEQ ID NO: 229685 - RNA, 32 nt, Homo Sapiens
ggccuggggaaccgcgcgguuuggagaucgga

SEQ ID NO: 229686 - RNA, 32 nt, Homo Sapiens
cucuuggcgaggguggagggaggagugucauu

SEQ ID NO: 229687 - RNA, 32 nt, Homo Sapiens
cacuggcauauuuagaauaucucuaaaaggac

SEQ ID NO: 229688 - RNA, 32 nt, Homo Sapiens
cuguguucuacuggggucaagccugcuagaac

SEQ ID NO: 229689 - RNA, 32 nt, Homo Sapiens
ugauucugcaguaaaucuuuuacaacugccuc

SEQ ID NO: 229690 - RNA, 32 nt, Homo Sapiens
acugucauuucccagauguuuggccacagaaa

SEQ ID NO: 229691 - RNA, 32 nt, Homo Sapiens
cuccucuggucccagggaggccucucugcccu

SEQ ID NO: 229692 - RNA, 32 nt, Homo Sapiens
gcaagaaguccuccagcugcgucguuugccgc

SEQ ID NO: 229693 - RNA, 32 nt, Homo Sapiens
uauguuuggaauuuuucuuaauaaaagauugu

SEQ ID NO: 229694 - RNA, 32 nt, Homo Sapiens
uccagaacugcuaaaaaucauuuuaaaaacca

SEQ ID NO: 229695 - RNA, 32 nt, Homo Sapiens
ucaaucauugccuucccauugauccuucuaac

SEQ ID NO: 229696 - RNA, 32 nt, Homo Sapiens
ucugggguagagagagggguagcaaguucaug

SEQ ID NO: 229697 - RNA, 32 nt, Homo Sapiens
cagaaggaaugaugauguaggaggcugucacc

SEQ ID NO: 229698 - RNA, 32 nt, Homo Sapiens
uggugaauggugucugcauuaaaauuauuauc

SEQ ID NO: 229699 - RNA, 32 nt, Homo Sapiens
ucuagcugacaggccagcuucuccaggaagcc

SEQ ID NO: 229700 - RNA, 32 nt, Homo Sapiens
uucauuacacggcuucucggcauuccacaggu

SEQ ID NO: 229701 - RNA, 32 nt, Homo Sapiens
auugcuuccagaaacaaaauuauguaucugug

SEQ ID NO: 229702 - RNA, 32 nt, Homo Sapiens
ugggcucggcaggacaccgggguguggaaggg

SEQ ID NO: 229703 - RNA, 32 nt, Homo Sapiens
gagaaugaugggcguacagaggagugaagaaa

SEQ ID NO: 229704 - RNA, 32 nt, Homo Sapiens
aacaguugccuuuuuucuuaaugucagggcag

SEQ ID NO: 229705 - RNA, 32 nt, Homo Sapiens
uuguacucaaggaaagaacacaagaaaauguu

SEQ ID NO: 229706 - RNA, 32 nt, Homo Sapiens
uguucuccucguccaucagggaucucagaggc

SEQ ID NO: 229707 - RNA, 32 nt, Homo Sapiens
acacgccgcugccccaggccaucccgccggcg

SEQ ID NO: 229708 - RNA, 32 nt, Homo Sapiens
aaaaauauuucucauuugauauaauuuuucuc

SEQ ID NO: 229709 - RNA, 32 nt, Homo Sapiens
ugggaaagggcacggccugugcuccugacacg

SEQ ID NO: 229710 - RNA, 32 nt, Homo Sapiens
uccacggacuggccccucguccuucuacuuga

SEQ ID NO: 229711 - RNA, 30 nt, Homo Sapiens
cuucuuugcccaccugcagaagcuugaggu

SEQ ID NO: 229712 - RNA, 32 nt, Homo Sapiens
uaaaucuuuucagagguucucaucugaauuac

SEQ ID NO: 229713 - RNA, 32 nt, Homo Sapiens
acuguuuuaucuccagggccaacagcaguguu

SEQ ID NO: 229714 - RNA, 32 nt, Homo Sapiens
uggaucuuggauuuggggguggaucgcggguu

SEQ ID NO: 229715 - RNA, 32 nt, Homo Sapiens
aaaugaaaacaucagcuuacugguuuguaguu

SEQ ID NO: 229716 - RNA, 32 nt, Homo Sapiens
cgcauaaacaacaugaauaaagcaaacacucu

SEQ ID NO: 229717 - RNA, 32 nt, Homo Sapiens
cuuuuuaugaauauuucuguuuaagcuauuuc

SEQ ID NO: 229718 - RNA, 32 nt, Homo Sapiens
cuacaugucauucagauauuauguauaucuuc

SEQ ID NO: 229719 - RNA, 32 nt, Homo Sapiens
ugggacagcuucggggaccaguggcucagaag

SEQ ID NO: 229720 - RNA, 28 nt, Homo Sapiens
ggugaggcaggugucaggaugaccccaa

SEQ ID NO: 229721 - RNA, 32 nt, Homo Sapiens
ugggcgcaguggcucacgccuauaaucccaga

SEQ ID NO: 229722 - RNA, 32 nt, Homo Sapiens
aacauggaaaauuuaucaaccagaauaugcag

SEQ ID NO: 229723 - RNA, 32 nt, Homo Sapiens
uuuuagacugaacugcuccauuccuagucuua

SEQ ID NO: 229724 - RNA, 32 nt, Homo Sapiens
uggaaacugcuagggagggaaccaaccacuua

SEQ ID NO: 229725 - RNA, 32 nt, Homo Sapiens
cucuaagaaugaugaagcauuguuuuuaaucu

SEQ ID NO: 229726 - RNA, 32 nt, Homo Sapiens
gcaugaagaggauuuucuuaaguucagaugac

SEQ ID NO: 229727 - RNA, 32 nt, Homo Sapiens
aaggucccacuuccuucagggauucucccuaa

SEQ ID NO: 229728 - RNA, 32 nt, Homo Sapiens
uugaaauuaucacccauauaaaagagggacau

SEQ ID NO: 229729 - RNA, 32 nt, Homo Sapiens
uuguuugcauaacuuuaccaccuucccauccu

SEQ ID NO: 229730 - RNA, 32 nt, Homo Sapiens
cacugcacuccagcaugcaugacagagugaga

SEQ ID NO: 229731 - RNA, 32 nt, Homo Sapiens
cuuucagccagacaggaccuggaugcauacuu

SEQ ID NO: 229732 - RNA, 32 nt, Homo Sapiens
gcugcccaggaacccuccagaccuccaaguga

SEQ ID NO: 229733 - RNA, 32 nt, Homo Sapiens
gugagacggccgcggcggcggcgacagcgcgg

SEQ ID NO: 229734 - RNA, 32 nt, Homo Sapiens
agauguaaacagcccagaggcuuaugagcuac

SEQ ID NO: 229735 - RNA, 32 nt, Homo Sapiens
agggcggauccgagaacacacaagugaaagac

SEQ ID NO: 229736 - RNA, 32 nt, Homo Sapiens
ggcuguaaaaacaaaacaauguagaguuuuau

SEQ ID NO: 229737 - RNA, 32 nt, Homo Sapiens
agcccgcgagaccuuaaaaugaaccugccuuc

SEQ ID NO: 229738 - RNA, 32 nt, Homo Sapiens
auacaaggcugcugaggccuggucuccaguug

SEQ ID NO: 229739 - RNA, 32 nt, Homo Sapiens
guaggaguucauuuggccuccuccugacuugu

SEQ ID NO: 229740 - RNA, 32 nt, Homo Sapiens
gacuacucugggcagcucccaucccagucugg

SEQ ID NO: 229741 - RNA, 32 nt, Homo Sapiens
gcagccaccggggcgccagguuaugcuggggc

SEQ ID NO: 229742 - RNA, 32 nt, Homo Sapiens
caguuuacagaaaagaagauggagagaccacc

SEQ ID NO: 229743 - RNA, 32 nt, Homo Sapiens
ccuccgaggccgccggccgcuucucucuccca

SEQ ID NO: 229744 - RNA, 32 nt, Homo Sapiens
acuaaauaagaccugcuuuugcuggagcugug

SEQ ID NO: 229745 - RNA, 32 nt, Homo Sapiens
ugcuuggcucugcgccucuccaccuggcuuca

SEQ ID NO: 229746 - RNA, 32 nt, Homo Sapiens
aaaugagagcucuggagccagaaugccagggu

SEQ ID NO: 229747 - RNA, 32 nt, Homo Sapiens
agcuccgccucccggguacaagcgauucucag

SEQ ID NO: 229748 - RNA, 32 nt, Homo Sapiens
ggagcccugcaccuucaccccauuaccugugc

SEQ ID NO: 229749 - RNA, 32 nt, Homo Sapiens
ggggcagcccgucgaggcgccucccuagucag

SEQ ID NO: 229750 - RNA, 32 nt, Homo Sapiens
augcauuuuuaaaagcuagguguuaucuuacu

SEQ ID NO: 229751 - RNA, 32 nt, Homo Sapiens
aaggggauaucuauuuaaauaauuacuuauau

SEQ ID NO: 229752 - RNA, 32 nt, Homo Sapiens
aggcgggcgcgguggcucaugccuguaauccc

SEQ ID NO: 229753 - RNA, 32 nt, Homo Sapiens
gggugggcacgguggcucacgccuguaauccc

SEQ ID NO: 229754 - RNA, 32 nt, Homo Sapiens
uugacauuuuuggaagaacucuuugccagaua

SEQ ID NO: 229755 - RNA, 32 nt, Homo Sapiens
uucuagccauuaauaaagagaacugcuccuag

SEQ ID NO: 229756 - RNA, 32 nt, Homo Sapiens
agauugucugacagcaggaacugagagaagca

SEQ ID NO: 229757 - RNA, 32 nt, Homo Sapiens
ggacguggccccugcugccagcccuugagcag

SEQ ID NO: 229758 - RNA, 32 nt, Homo Sapiens
auucgcagcaggcggcuggggcggcggcuggg

SEQ ID NO: 229759 - RNA, 32 nt, Homo Sapiens
ggggaguggaccgagaacgaagcggugcccca

SEQ ID NO: 229760 - RNA, 32 nt, Homo Sapiens
ugaaaucaacuguguuuuguguucucuauguc

SEQ ID NO: 229761 - RNA, 32 nt, Homo Sapiens
uaaaaauugacaaauaaaaguugucuauguuu

SEQ ID NO: 229762 - RNA, 32 nt, Homo Sapiens
cuccccugggaagaggggaugagaggagaagu

SEQ ID NO: 229763 - RNA, 32 nt, Homo Sapiens
gcacggggcacggggggcagcuggggucguug

SEQ ID NO: 229764 - RNA, 32 nt, Homo Sapiens
aagagagcccaccgcuuguggugcuggagcug

SEQ ID NO: 229765 - RNA, 32 nt, Homo Sapiens
caaauaguuucuuuuuaaaguaguuucuucca

SEQ ID NO: 229766 - RNA, 32 nt, Homo Sapiens
aaguguuugcugcaauuuuauaaggacuuccu

SEQ ID NO: 229767 - RNA, 32 nt, Homo Sapiens
cgcggggacaugucgguggcgacgggcagcag

SEQ ID NO: 229768 - RNA, 32 nt, Homo Sapiens
guccaagcuucaaauaauuuugaaagaaauuu

SEQ ID NO: 229769 - RNA, 29 nt, Homo Sapiens
gaccgugcugcuuuccugggaauuugagg

SEQ ID NO: 229770 - RNA, 32 nt, Homo Sapiens
ggcuucuucuuugcccugguccagcaaucgac

SEQ ID NO: 229771 - RNA, 32 nt, Homo Sapiens
cagcugagaaugcccccuccucccugacuccu

SEQ ID NO: 229772 - RNA, 31 nt, Homo Sapiens
uccacagaccuacugcacugaguuaaaauag

SEQ ID NO: 229773 - RNA, 32 nt, Homo Sapiens
auuuggauagggugaagcuuugaaauaaauac

SEQ ID NO: 229774 - RNA, 27 nt, Homo Sapiens
aaccucacuuaauucugguguagggug

SEQ ID NO: 229775 - RNA, 31 nt, Homo Sapiens
acacugcggaacagccaacauagaguacuug

SEQ ID NO: 229776 - RNA, 32 nt, Homo Sapiens
aagcgcccagcggagcgaccccugccuggccg

SEQ ID NO: 229777 - RNA, 30 nt, Homo Sapiens
ccaggcuccggcggcggcgggggucacaua

SEQ ID NO: 229778 - RNA, 32 nt, Homo Sapiens
aggucgugagcuccucuucugcugcaggagug

SEQ ID NO: 229779 - RNA, 32 nt, Homo Sapiens
ccagccgaaggaaaaucacuuccguuaugucc

SEQ ID NO: 229780 - RNA, 32 nt, Homo Sapiens
auuccgcuccacagucucggacggaucugcuc

SEQ ID NO: 229781 - RNA, 32 nt, Homo Sapiens
ggacauuuuuauuaaucuccuuuauuauuauu

SEQ ID NO: 229782 - RNA, 32 nt, Homo Sapiens
cuggcaaaagaguaggacaaucaugagacugc

SEQ ID NO: 229783 - RNA, 32 nt, Homo Sapiens
ucuccguguugcaaucugguuccuaaggagga

SEQ ID NO: 229784 - RNA, 32 nt, Homo Sapiens
cauagaaucagugauggaggccaggcacggua

SEQ ID NO: 229785 - RNA, 32 nt, Homo Sapiens
ccagaggugguuaugacucgugcugcaugccu

SEQ ID NO: 229786 - RNA, 32 nt, Homo Sapiens
ggcagggugcgguggcucacgccuguaauccc

SEQ ID NO: 229787 - RNA, 32 nt, Homo Sapiens
ggccgggugcgguggcucaagccuguaauccc

SEQ ID NO: 229788 - RNA, 32 nt, Homo Sapiens
cugagguugggcccgaacacggcgguacauuu

SEQ ID NO: 229789 - RNA, 32 nt, Homo Sapiens
ggccgggugcgguggcucaugccuguauuccc

SEQ ID NO: 229790 - RNA, 32 nt, Homo Sapiens
ggccgggcgcgguggcucaugccuuuaauccc

SEQ ID NO: 229791 - RNA, 32 nt, Homo Sapiens
auguuaauauccaguuuuuuuauaguuuaaaa

SEQ ID NO: 229792 - RNA, 32 nt, Homo Sapiens
gcucccgcagggccgcgccgaggcaggcgagc

SEQ ID NO: 229793 - RNA, 32 nt, Homo Sapiens
ugaaggaagaacucaagcuccgggaagugaug

SEQ ID NO: 229794 - RNA, 32 nt, Homo Sapiens
gagguucaguuauuauuaauaaagaaauuauu

SEQ ID NO: 229795 - RNA, 32 nt, Homo Sapiens
gaagaccuggggugggggcugaugggggcagg

SEQ ID NO: 229796 - RNA, 32 nt, Homo Sapiens
uuaaauuguaaaaauacaaacagaucguguga

SEQ ID NO: 229797 - RNA, 32 nt, Homo Sapiens
guggggcacaggauguccugcugcuggggucu

SEQ ID NO: 229798 - RNA, 32 nt, Homo Sapiens
uguguuuaauuaugaauaauauguaagcuagg

SEQ ID NO: 229799 - RNA, 32 nt, Homo Sapiens
caccaggccccgugcccuccccuggcccuggc

SEQ ID NO: 229800 - RNA, 32 nt, Homo Sapiens
gacucugagcauccuuaccccuggccacccga

SEQ ID NO: 229801 - RNA, 32 nt, Homo Sapiens
auaaacgcauaaaggaacuucucuaaacuuuu

SEQ ID NO: 229802 - RNA, 32 nt, Homo Sapiens
uagcgcaguuuuuuuucuugucuuaaagcauu

SEQ ID NO: 229803 - RNA, 32 nt, Homo Sapiens
uucaacaaacuuauuuucaagauacaacuuuu

SEQ ID NO: 229804 - RNA, 32 nt, Homo Sapiens
cugucuaaaaauuuuucucuuacguuuaacau

SEQ ID NO: 229805 - RNA, 32 nt, Homo Sapiens
ugugcccggagaacugcccccagagcuguggg

SEQ ID NO: 229806 - RNA, 32 nt, Homo Sapiens
gcagcuucacagcaccugaucccggccugaag

SEQ ID NO: 229807 - RNA, 32 nt, Homo Sapiens
cggaccacucccagccccccauccccccguuc

SEQ ID NO: 229808 - RNA, 32 nt, Homo Sapiens
guaacccacacgccuuuucacuucugaaguug

SEQ ID NO: 229809 - RNA, 32 nt, Homo Sapiens
auagaaggccagcagggagacugcuuuccaga

SEQ ID NO: 229810 - RNA, 32 nt, Homo Sapiens
aacgacaaacaggacaacaagacuccgacccc

SEQ ID NO: 229811 - RNA, 29 nt, Homo Sapiens
gaaaguuuguguuucaguuggagggaaua

SEQ ID NO: 229812 - RNA, 32 nt, Homo Sapiens
auuauuauuauuauuacaguuguuauuguugu

SEQ ID NO: 229813 - RNA, 32 nt, Homo Sapiens
gaguuuucccaaagcaguguccaggauagaau

SEQ ID NO: 229814 - RNA, 32 nt, Homo Sapiens
aacuugaagauaaaucuuuugacuccagcucu

SEQ ID NO: 229815 - RNA, 32 nt, Homo Sapiens
ucucccacugcccugcacaccaccacauugga

SEQ ID NO: 229816 - RNA, 32 nt, Homo Sapiens
cugggagcgcggggaaggcgguugggguucug

SEQ ID NO: 229817 - RNA, 32 nt, Homo Sapiens
aaacugcuccuccccucccccaucuagagucu

SEQ ID NO: 229818 - RNA, 32 nt, Homo Sapiens
ggugggcccuaggauggaugacacucaagaua

SEQ ID NO: 229819 - RNA, 32 nt, Homo Sapiens
gguguuuaaugugauccaagaccucucuguga

SEQ ID NO: 229820 - RNA, 32 nt, Homo Sapiens
ccccaccgccagcagcugcuccuccagccaca

SEQ ID NO: 229821 - RNA, 32 nt, Homo Sapiens
acucugcucccucucguggccuagucugccuc

SEQ ID NO: 229822 - RNA, 32 nt, Homo Sapiens
gggugcuagggggcagggaggggacacccccu

SEQ ID NO: 229823 - RNA, 31 nt, Homo Sapiens
uguuucucacggauggaauucuagucagcug

SEQ ID NO: 229824 - RNA, 32 nt, Homo Sapiens
ucuuuuggggugggggcggggguccaggcaga

SEQ ID NO: 229825 - RNA, 32 nt, Homo Sapiens
cucaaaugcugaagcuuuuggucaggauuuuc

SEQ ID NO: 229826 - RNA, 32 nt, Homo Sapiens
gacuaucuugcaugcaugagaaugaaggaugc

SEQ ID NO: 229827 - RNA, 32 nt, Homo Sapiens
cagccucucgccagccuucccguccuucaguu

SEQ ID NO: 229828 - RNA, 32 nt, Homo Sapiens
uacggggccucggaccccggcgccgcggcgac

SEQ ID NO: 229829 - RNA, 32 nt, Homo Sapiens
cggguugguguggggaauacaagggaacuccc

SEQ ID NO: 229830 - RNA, 32 nt, Homo Sapiens
ggccuuuccuuuuuccucuccucuccugccga

SEQ ID NO: 229831 - RNA, 32 nt, Homo Sapiens
ugauaccucccucucgcuucugccuccaaacc

SEQ ID NO: 229832 - RNA, 32 nt, Homo Sapiens
cagcugggccuggccaagggcgaggaggaggg

SEQ ID NO: 229833 - RNA, 32 nt, Homo Sapiens
ucgagccacugccccagggucugcugcuccac

SEQ ID NO: 229834 - RNA, 32 nt, Homo Sapiens
cuauguuuuauaaaccaaaacaaaauuuccaa

SEQ ID NO: 229835 - RNA, 32 nt, Homo Sapiens
gccuccagccccagcaacccggccgcccugcc

SEQ ID NO: 229836 - RNA, 32 nt, Homo Sapiens
ugcuggcucuguuccgagcugcacuuugggca

SEQ ID NO: 229837 - RNA, 32 nt, Homo Sapiens
uugguuuuuucuuuuucuuuuuuuuuccaaaa

SEQ ID NO: 229838 - RNA, 31 nt, Homo Sapiens
gggucuuuacccacagcgcaaacacaaugcc

SEQ ID NO: 229839 - RNA, 32 nt, Homo Sapiens
acacuauagagucaaaauaccauuuacaaaga

SEQ ID NO: 229840 - RNA, 32 nt, Homo Sapiens
ggcaagaaacaucauucuacauaauggaaaac

SEQ ID NO: 229841 - RNA, 32 nt, Homo Sapiens
aaacugcugccuuugccuccagugcauccuua

SEQ ID NO: 229842 - RNA, 32 nt, Homo Sapiens
ugaucugcacccucugaccccugacauugacc

SEQ ID NO: 229843 - RNA, 32 nt, Homo Sapiens
cgcuccccucgcccacuuccccggcgaccugg

SEQ ID NO: 229844 - RNA, 32 nt, Homo Sapiens
agacguagcuccuccgcccaccauggcugagg

SEQ ID NO: 229845 - RNA, 32 nt, Homo Sapiens
cagacgucagagagcccgcggcuuaaagcgcg

SEQ ID NO: 229846 - RNA, 32 nt, Homo Sapiens
guaguccucuccaucugcccguagcuugccag

SEQ ID NO: 229847 - RNA, 32 nt, Homo Sapiens
agugguugauaaaggcacacagaagggccacg

SEQ ID NO: 229848 - RNA, 32 nt, Homo Sapiens
uaaagccaaaaguagguacauaaaaaccacac

SEQ ID NO: 229849 - RNA, 32 nt, Homo Sapiens
gggagccuggcugcccugcugcuucuccugcc

SEQ ID NO: 229850 - RNA, 32 nt, Homo Sapiens
uccaguuccuacucuaguuucaucucaugcug

SEQ ID NO: 229851 - RNA, 32 nt, Homo Sapiens
aaauauagauauauuuuauuuuuauuaaaaug

SEQ ID NO: 229852 - RNA, 27 nt, Homo Sapiens
cgauggcuucagacagcauauuugagu

SEQ ID NO: 229853 - RNA, 32 nt, Homo Sapiens
gagaagagccuccugccugaccacgugaacug

SEQ ID NO: 229854 - RNA, 32 nt, Homo Sapiens
ggggcugguuggggcgggagcugcggggguuu

SEQ ID NO: 229855 - RNA, 32 nt, Homo Sapiens
auugucacaaagucuucaguaauauuacagcc

SEQ ID NO: 229856 - RNA, 32 nt, Homo Sapiens
uuggucgccugcuggucuucuaugucagggag

SEQ ID NO: 229857 - RNA, 32 nt, Homo Sapiens
ggcaaacgccagcagggcugcugugaauuugu

SEQ ID NO: 229858 - RNA, 32 nt, Homo Sapiens
guccacagggacccaggcaggguuggguguug

SEQ ID NO: 229859 - RNA, 32 nt, Homo Sapiens
acaaggggugggaauuucugugcccugucccu

SEQ ID NO: 229860 - RNA, 32 nt, Homo Sapiens
uuguaaaauuguccuaaucuuuccuagcuuuu

SEQ ID NO: 229861 - RNA, 32 nt, Homo Sapiens
aacuccagucccagcucugcaggcccccaagg

SEQ ID NO: 229862 - RNA, 32 nt, Homo Sapiens
ggagaaggaaaugcagggcacaugaucuggcc

SEQ ID NO: 229863 - RNA, 32 nt, Homo Sapiens
agacagcccugcgggcgggggcggggccuccg

SEQ ID NO: 229864 - RNA, 32 nt, Homo Sapiens
cgagggagacuucaggagucgcugucucugaa

SEQ ID NO: 229865 - RNA, 28 nt, Homo Sapiens
cgagccggaggcugcaggaugaugcggu

SEQ ID NO: 229866 - RNA, 32 nt, Homo Sapiens
uccucagacuauuuuccagccuucugucaguc

SEQ ID NO: 229867 - RNA, 32 nt, Homo Sapiens
cuucagagaaggaaacaaaaugagggguggca

SEQ ID NO: 229868 - RNA, 30 nt, Homo Sapiens
aggggaggcaggcaggugggugagcagcag

SEQ ID NO: 229869 - RNA, 32 nt, Homo Sapiens
cagcacugugcuugcgggaggcgguggggcau

SEQ ID NO: 229870 - RNA, 32 nt, Homo Sapiens
uacccucgcgccccccgccguuggcugcggga

SEQ ID NO: 229871 - RNA, 32 nt, Homo Sapiens
uucuaagaaugauggcauaauuuaguacuuuu

SEQ ID NO: 229872 - RNA, 32 nt, Homo Sapiens
ggaggccagcaggcccgggcccagcaccccuu

SEQ ID NO: 229873 - RNA, 32 nt, Homo Sapiens
auuucaaguauuuuucuauaaucacuuucccc

SEQ ID NO: 229874 - RNA, 32 nt, Homo Sapiens
ucccaggucuaugcccaagagaauugaaaaca

SEQ ID NO: 229875 - RNA, 32 nt, Homo Sapiens
acucugaagaucuaaauagcccuuggaucagu

SEQ ID NO: 229876 - RNA, 32 nt, Homo Sapiens
ggccugcggcggcggcagcggcggcguuucuc

SEQ ID NO: 229877 - RNA, 32 nt, Homo Sapiens
uuacugguuguaauauaaaaagguacagccac

SEQ ID NO: 229878 - RNA, 32 nt, Homo Sapiens
ucugccuccuggauucacaccauucuccugcc

SEQ ID NO: 229879 - RNA, 32 nt, Homo Sapiens
ucugccucgggccaucgcuccuccccagggcc

SEQ ID NO: 229880 - RNA, 32 nt, Homo Sapiens
ugauuguugguuagagacuuggacucaaguca

SEQ ID NO: 229881 - RNA, 32 nt, Homo Sapiens
gucuucccgcguccgccgauuccuccuccuug

SEQ ID NO: 229882 - RNA, 32 nt, Homo Sapiens
aguauugcagacauugcugcaaugggaagcag

SEQ ID NO: 229883 - RNA, 32 nt, Homo Sapiens
gguggagcaacaaugcaccuccccuccugucg

SEQ ID NO: 229884 - RNA, 32 nt, Homo Sapiens
cccguuccgcguccccgccgccgggaggaggu

SEQ ID NO: 229885 - RNA, 31 nt, Homo Sapiens
aauaggcacagagaagaaugcaacagggcac

SEQ ID NO: 229886 - RNA, 32 nt, Homo Sapiens
gucucagccaaguugcguggacccgcucuuuc

SEQ ID NO: 229887 - RNA, 32 nt, Homo Sapiens
gcaccaccacacuccagccugggugacagagc

SEQ ID NO: 229888 - RNA, 32 nt, Homo Sapiens
gcccuggaaaauuuugugcuuccaacguggcc

SEQ ID NO: 229889 - RNA, 32 nt, Homo Sapiens
ggaagcugucuccugacaucgccccuccaaag

SEQ ID NO: 229890 - RNA, 32 nt, Homo Sapiens
ccuaaggacugccugcuuucuggucacaugug

SEQ ID NO: 229891 - RNA, 32 nt, Homo Sapiens
aguauaaagaauuuauauuugcacuguaaacu

SEQ ID NO: 229892 - RNA, 32 nt, Homo Sapiens
aacugaauacuccuuccuuccuccccacccau

SEQ ID NO: 229893 - RNA, 32 nt, Homo Sapiens
aggcuuguauauucuguauagcacccuaaucu

SEQ ID NO: 229894 - RNA, 32 nt, Homo Sapiens
ccugaggcccagagacgaggagggaugggucu

SEQ ID NO: 229895 - RNA, 32 nt, Homo Sapiens
gcaucacccccgcuuugguucuucagaugcuc

SEQ ID NO: 229896 - RNA, 32 nt, Homo Sapiens
ggagcugcgcuaggcgaacggcugcggcgcuu

SEQ ID NO: 229897 - RNA, 32 nt, Homo Sapiens
uguacgggccucguacugccucauggaaaauc

SEQ ID NO: 229898 - RNA, 32 nt, Homo Sapiens
uuaaacaaagauucugccaacuguggaaacuu

SEQ ID NO: 229899 - RNA, 32 nt, Homo Sapiens
acgccgggauuucggcggccccggcgcucccu

SEQ ID NO: 229900 - RNA, 32 nt, Homo Sapiens
caaaugggaacuaucuccaaagugcuaaauuu

SEQ ID NO: 229901 - RNA, 32 nt, Homo Sapiens
agguucucucuguguguccuacaggagucuuc

SEQ ID NO: 229902 - RNA, 32 nt, Homo Sapiens
uggaaaacacauuuggaaugagcuuccacacu

SEQ ID NO: 229903 - RNA, 32 nt, Homo Sapiens
caggggaggcggggcgugcugcccagagccag

SEQ ID NO: 229904 - RNA, 32 nt, Homo Sapiens
acaggccccagcucagccuccgcgagggaggu

SEQ ID NO: 229905 - RNA, 32 nt, Homo Sapiens
uggcauggcuucagcaaacaugacucaaagcc

SEQ ID NO: 229906 - RNA, 32 nt, Homo Sapiens
ugcugugucaucuccuacccagcccacccugc

SEQ ID NO: 229907 - RNA, 32 nt, Homo Sapiens
cugaccccaagcacaaggucuuuccccuucug

SEQ ID NO: 229908 - RNA, 32 nt, Homo Sapiens
gaaucaaaggagacauaaaccaaaauaguuaa

SEQ ID NO: 229909 - RNA, 32 nt, Homo Sapiens
ucucucuuucucucuuuuuuuuuuugucacua

SEQ ID NO: 229910 - RNA, 32 nt, Homo Sapiens
cccuucagcuaaugaguuuuguuaucucagua

SEQ ID NO: 229911 - RNA, 32 nt, Homo Sapiens
aagcuguacaugaaacauaauggacuuacauu

SEQ ID NO: 229912 - RNA, 32 nt, Homo Sapiens
ccauuaucuucaguuauucagugguuuauuaa

SEQ ID NO: 229913 - RNA, 32 nt, Homo Sapiens
caccuguaauaccagcacuuugggaaguggag

SEQ ID NO: 229914 - RNA, 32 nt, Homo Sapiens
ccauucugcaggucuugcuucuuucuccaggc

SEQ ID NO: 229915 - RNA, 32 nt, Homo Sapiens
aaacauucugugcgucagacaccagcggccca

SEQ ID NO: 229916 - RNA, 32 nt, Homo Sapiens
cgcuccugccccaccccaccucccccgggcuu

SEQ ID NO: 229917 - RNA, 32 nt, Homo Sapiens
gugguguggagauuguuaaucuuguauaaagc

SEQ ID NO: 229918 - RNA, 32 nt, Homo Sapiens
uauaaauaaaaugcuuuuucuacuauuugucu

SEQ ID NO: 229919 - RNA, 32 nt, Homo Sapiens
ccaccugcccugccucccuccuccccguuggc

SEQ ID NO: 229920 - RNA, 32 nt, Homo Sapiens
gugaagggaugggaaaaguggacucucauugu

SEQ ID NO: 229921 - RNA, 32 nt, Homo Sapiens
ggaucugguuccccuugagaccaugcggugca

SEQ ID NO: 229922 - RNA, 32 nt, Homo Sapiens
cuuuuucauguuucaucuagguuuuuagaagu

SEQ ID NO: 229923 - RNA, 31 nt, Homo Sapiens
gcuguuccuaaauucuuaggauaugucccag

SEQ ID NO: 229924 - RNA, 32 nt, Homo Sapiens
cugcuuccuuaaaacauagagaauuaaugagc

SEQ ID NO: 229925 - RNA, 32 nt, Homo Sapiens
gucagcaugaauuuguaaugucuugagcucua

SEQ ID NO: 229926 - RNA, 32 nt, Homo Sapiens
ugaguuuaaugauacuggaaauuguuucugua

SEQ ID NO: 229927 - RNA, 32 nt, Homo Sapiens
ccugguccccugcaccucuccuguucgguuua

SEQ ID NO: 229928 - RNA, 32 nt, Homo Sapiens
uuaagauauggaccuuuuauugaaaauaucac

SEQ ID NO: 229929 - RNA, 32 nt, Homo Sapiens
cuggaccaaggaagaguugggcugggauucag

SEQ ID NO: 229930 - RNA, 29 nt, Homo Sapiens
gugcugcuuguggcucauggcagagcauu

SEQ ID NO: 229931 - RNA, 32 nt, Homo Sapiens
aagaggucaggagaucgagaccauccuggcua

SEQ ID NO: 229932 - RNA, 32 nt, Homo Sapiens
ggcucacaggccccaaacuaccagccguaucu

SEQ ID NO: 229933 - RNA, 32 nt, Homo Sapiens
ugucaaccaccagcuuccuguaccagaggcuc

SEQ ID NO: 229934 - RNA, 32 nt, Homo Sapiens
aagcgaggcugaggacuccgaucgcgaugucu

SEQ ID NO: 229935 - RNA, 32 nt, Homo Sapiens
uggauugauggaaggaguaaacaaaggaauaa

SEQ ID NO: 229936 - RNA, 32 nt, Homo Sapiens
aauagacacuuaucuauauaauauggguaagu

SEQ ID NO: 229937 - RNA, 32 nt, Homo Sapiens
caaagaaauuauaacggagauguuugaacuaa

SEQ ID NO: 229938 - RNA, 32 nt, Homo Sapiens
gcuuguucaaacaugaauaaaagacugugcau

SEQ ID NO: 229939 - RNA, 32 nt, Homo Sapiens
cagcagcagcagcagcagcaacaacaacaacu

SEQ ID NO: 229940 - RNA, 32 nt, Homo Sapiens
ucuuucuugggucuuauuauuugugaaggucu

SEQ ID NO: 229941 - RNA, 32 nt, Homo Sapiens
ugcuggcccucccccagcuccuuggugccccg

SEQ ID NO: 229942 - RNA, 32 nt, Homo Sapiens
gccucucuccauccacccaccuuucccucauu

SEQ ID NO: 229943 - RNA, 32 nt, Homo Sapiens
auucgggcgccgcggcagcugcuccggcugcc

SEQ ID NO: 229944 - RNA, 32 nt, Homo Sapiens
aucuuugcucuucuccuacucugccuuggccu

SEQ ID NO: 229945 - RNA, 32 nt, Homo Sapiens
ugccagggccuucacaguuugauuccauucuc

SEQ ID NO: 229946 - RNA, 32 nt, Homo Sapiens
ccaguagccuggagcuccaugguggcuucaug

SEQ ID NO: 229947 - RNA, 32 nt, Homo Sapiens
uugugcugauauuucccaaccaaaaaagacau

SEQ ID NO: 229948 - RNA, 32 nt, Homo Sapiens
gucuuagaccucuaaaaauagacaggaagggc

SEQ ID NO: 229949 - RNA, 32 nt, Homo Sapiens
uuugggaauuuauuuguccaugggcgaggcug

SEQ ID NO: 229950 - RNA, 32 nt, Homo Sapiens
gcauguagacugggucaaagcuuauuuaagua

SEQ ID NO: 229951 - RNA, 32 nt, Homo Sapiens
accccaaggacaccgaacaguuacaacaaacc

SEQ ID NO: 229952 - RNA, 32 nt, Homo Sapiens
gaguuaagacuuugggggacaguuggaagggc

SEQ ID NO: 229953 - RNA, 32 nt, Homo Sapiens
cacuuacaagaacacauugcaagauagcugac

SEQ ID NO: 229954 - RNA, 32 nt, Homo Sapiens
gaaaauuauaagguaaaauuuuccuguuuuuc

SEQ ID NO: 229955 - RNA, 32 nt, Homo Sapiens
uguucccgaugacccuucuccugucccgcauc

SEQ ID NO: 229956 - RNA, 32 nt, Homo Sapiens
cugguuccuaggaugcuggacuucuagcuuag

SEQ ID NO: 229957 - RNA, 32 nt, Homo Sapiens
gagaugcagcauuuguaauauuucaucccccc

SEQ ID NO: 229958 - RNA, 32 nt, Homo Sapiens
aauguuucuaucuuguaauaaacaugggcauu

SEQ ID NO: 229959 - RNA, 32 nt, Homo Sapiens
cgccggcucugggcacucagcaucguuuccuu

SEQ ID NO: 229960 - RNA, 32 nt, Homo Sapiens
augaugugccguggcccggccguggcuggcgu

SEQ ID NO: 229961 - RNA, 32 nt, Homo Sapiens
uuauuaaaaacgcaaggaccucagagacguuc

SEQ ID NO: 229962 - RNA, 32 nt, Homo Sapiens
cuggccauaaacaaaaucucugcagcacugac

SEQ ID NO: 229963 - RNA, 32 nt, Homo Sapiens
ggcacgaggaacauacacaggggguuggugaa

SEQ ID NO: 229964 - RNA, 32 nt, Homo Sapiens
cacagacucugauggcauuuugguaagcuuuc

SEQ ID NO: 229965 - RNA, 32 nt, Homo Sapiens
auaauuuuacuucuuucuuucugauuuggaug

SEQ ID NO: 229966 - RNA, 32 nt, Homo Sapiens
cuucaucuuuuaaagaaauaaccacugcaagu

SEQ ID NO: 229967 - RNA, 32 nt, Homo Sapiens
cucagcuacucggcauucugaggugggaggau

SEQ ID NO: 229968 - RNA, 32 nt, Homo Sapiens
gaagugucagaauuccucccccugccucuccu

SEQ ID NO: 229969 - RNA, 31 nt, Homo Sapiens
cacugugugcgaaggcuuggaguccaaggug

SEQ ID NO: 229970 - RNA, 32 nt, Homo Sapiens
cagauuagagccugcgcaauggaauaaagucc

SEQ ID NO: 229971 - RNA, 32 nt, Homo Sapiens
uuguaauaaaaauuauagaaucugcaaaaaaa

SEQ ID NO: 229972 - RNA, 32 nt, Homo Sapiens
cucucggagcugccuccaugggcacaguaaag

SEQ ID NO: 229973 - RNA, 32 nt, Homo Sapiens
gggcuggcgaugccgaagccacccuaccaggc

SEQ ID NO: 229974 - RNA, 32 nt, Homo Sapiens
ucugccugugcaauauuuuucuuuuuuauuuc

SEQ ID NO: 229975 - RNA, 32 nt, Homo Sapiens
cugggcauuucaucuucaguccccucauuaga

SEQ ID NO: 229976 - RNA, 32 nt, Homo Sapiens
cccccauaauucagucaccuuccacuggguuc

SEQ ID NO: 229977 - RNA, 32 nt, Homo Sapiens
ugcugugguguugggcaggucucugucccucu

SEQ ID NO: 229978 - RNA, 32 nt, Homo Sapiens
cuccuuccaggccccaggcuggaugcuggguu

SEQ ID NO: 229979 - RNA, 32 nt, Homo Sapiens
uuggucaggcugaucuggaacuucugaccuca

SEQ ID NO: 229980 - RNA, 32 nt, Homo Sapiens
ggcugguccuaggagccacgcgagcccucugg

SEQ ID NO: 229981 - RNA, 32 nt, Homo Sapiens
ugcugaaggcagagaccucaugacccaauagc

SEQ ID NO: 229982 - RNA, 32 nt, Homo Sapiens
ccugcuuucucuuuugagaauucauaaccagg

SEQ ID NO: 229983 - RNA, 32 nt, Homo Sapiens
cggcagccggcugagugggaaccgcgcggugu

SEQ ID NO: 229984 - RNA, 32 nt, Homo Sapiens
uagaaggcugaguuugacauguugauauuacg

SEQ ID NO: 229985 - RNA, 32 nt, Homo Sapiens
aggggcgggcccggcgcgcgcgggaagucucu

SEQ ID NO: 229986 - RNA, 32 nt, Homo Sapiens
ugagaaaauccuuguaaugaugagauaaaggg

SEQ ID NO: 229987 - RNA, 32 nt, Homo Sapiens
ucugaugaaaauaaaguuguuucucccuccaa

SEQ ID NO: 229988 - RNA, 32 nt, Homo Sapiens
uccagcuacagaucucucugcucaucaugccc

SEQ ID NO: 229989 - RNA, 32 nt, Homo Sapiens
uucauugucaggcuauauuuuuguacaaucau

SEQ ID NO: 229990 - RNA, 32 nt, Homo Sapiens
gggaggagggcagaaggcuacgcagggcugag

SEQ ID NO: 229991 - RNA, 32 nt, Homo Sapiens
ccuguaaugaaugucggcggcgcugggguugc

SEQ ID NO: 229992 - RNA, 32 nt, Homo Sapiens
uccaaacaaaacaaaacacuggcacuuuuggg

SEQ ID NO: 229993 - RNA, 32 nt, Homo Sapiens
ucagccucucgaguugcugggaccacagguca

SEQ ID NO: 229994 - RNA, 32 nt, Homo Sapiens
uggagcucugauccccugcuuaccucuucaca

SEQ ID NO: 229995 - RNA, 32 nt, Homo Sapiens
uguauugauacuggucccacuucacagcugga

SEQ ID NO: 229996 - RNA, 32 nt, Homo Sapiens
aucuagguaauuaagguugugaauuuuuauuu

SEQ ID NO: 229997 - RNA, 32 nt, Homo Sapiens
ggaacauuagacugcagagcacauaaucauga

SEQ ID NO: 229998 - RNA, 32 nt, Homo Sapiens
cucuuaggucuaaaaugagaaaaaagagagaa

SEQ ID NO: 229999 - RNA, 32 nt, Homo Sapiens
ucucucagauuuccaagagccagagaugaauu

SEQ ID NO: 230000 - RNA, 32 nt, Homo Sapiens
gauugauuagugccucuuucugcaaacuuuuc

SEQ ID NO: 230001 - RNA, 32 nt, Homo Sapiens
gugccaaguauuuugcuucgaugauuucacgu

SEQ ID NO: 230002 - RNA, 32 nt, Homo Sapiens
ugcgguccgggaggccccauggagguggcggu

SEQ ID NO: 230003 - RNA, 31 nt, Homo Sapiens
ugccaaacuguucagauucaagauuauucca

SEQ ID NO: 230004 - RNA, 32 nt, Homo Sapiens
auuuaauuaugucucaugagguaucaaacuau

SEQ ID NO: 230005 - RNA, 32 nt, Homo Sapiens
cuccuuuuguugaacaaauuugauuuccggag

SEQ ID NO: 230006 - RNA, 32 nt, Homo Sapiens
ggccgcccuuacacgucuccuacuucaauggu

SEQ ID NO: 230007 - RNA, 32 nt, Homo Sapiens
gauaaaaucucauacauggauuuuuucguguc

SEQ ID NO: 230008 - RNA, 32 nt, Homo Sapiens
uuaagguugggucuuucaggcugguuuugguu

SEQ ID NO: 230009 - RNA, 32 nt, Homo Sapiens
gccuguaaucccaauacuuugggaggcugagg

SEQ ID NO: 230010 - RNA, 32 nt, Homo Sapiens
ucucuguggcugggcuggcugcaccaugggca

SEQ ID NO: 230011 - RNA, 32 nt, Homo Sapiens
uauuauacaaauacuaucucuguauuguucug

SEQ ID NO: 230012 - RNA, 32 nt, Homo Sapiens
gugacucucauuucuuuuuuucugucuccugc

SEQ ID NO: 230013 - RNA, 32 nt, Homo Sapiens
uaugauagaggccuaucucuguuuacaugcau

SEQ ID NO: 230014 - RNA, 32 nt, Homo Sapiens
gccaccuggugccucucggcucggugacagcc

SEQ ID NO: 230015 - RNA, 32 nt, Homo Sapiens
uccaaggaauacugagaugaaaugugguaaau

SEQ ID NO: 230016 - RNA, 32 nt, Homo Sapiens
gaggucgagucugguggcgccucgguauccuu

SEQ ID NO: 230017 - RNA, 32 nt, Homo Sapiens
caguagcgcuggcgccaucugcaggagcuggc

SEQ ID NO: 230018 - RNA, 32 nt, Homo Sapiens
gacagccggccgcacaacggaucugcaggcgc

SEQ ID NO: 230019 - RNA, 32 nt, Homo Sapiens
uuugugucauucuccccacuuuauuaguuaau

SEQ ID NO: 230020 - RNA, 32 nt, Homo Sapiens
aaggaaucaacauuuacccacuuugugaaugg

SEQ ID NO: 230021 - RNA, 32 nt, Homo Sapiens
cccucugcaaggcgauggcccgcgccccgagc

SEQ ID NO: 230022 - RNA, 32 nt, Homo Sapiens
aacuaaaaggauuuuuaaaaauaaauaacagu

SEQ ID NO: 230023 - RNA, 32 nt, Homo Sapiens
uaccuuuggaccagccaucuccauuuuauaaa

SEQ ID NO: 230024 - RNA, 32 nt, Homo Sapiens
caccuguuuccauucaacaagagcacuacauu

SEQ ID NO: 230025 - RNA, 32 nt, Homo Sapiens
gcgccccagacccgccugcgggcccggauccu

SEQ ID NO: 230026 - RNA, 32 nt, Homo Sapiens
aucaccucauuucuaccaauaauuucagaugu

SEQ ID NO: 230027 - RNA, 32 nt, Homo Sapiens
uacuggguuugcuuuucuuaaaacauaccaaa

SEQ ID NO: 230028 - RNA, 32 nt, Homo Sapiens
ucuggggaggcugaggugugaggugacagcag

SEQ ID NO: 230029 - RNA, 32 nt, Homo Sapiens
ggccccgcggagacggagcggcuugaggacga

SEQ ID NO: 230030 - RNA, 31 nt, Homo Sapiens
caggugugagccaccaugccugggcuaaacu

SEQ ID NO: 230031 - RNA, 32 nt, Homo Sapiens
uacaagguauggauuuuaaauggaugaaacuu

SEQ ID NO: 230032 - RNA, 32 nt, Homo Sapiens
uccccaccaaccccuccaaugcuguuaucccu

SEQ ID NO: 230033 - RNA, 32 nt, Homo Sapiens
ccuccccuucuccuccucucccuuggagagcc

SEQ ID NO: 230034 - RNA, 30 nt, Homo Sapiens
cucucuugucuaaugggacacacugccugc

SEQ ID NO: 230035 - RNA, 32 nt, Homo Sapiens
gugacagaacuaagaugaucaucuccaguuua

SEQ ID NO: 230036 - RNA, 32 nt, Homo Sapiens
uuuuccagaagcaauuucuuguuuccuccaaa

SEQ ID NO: 230037 - RNA, 32 nt, Homo Sapiens
ccugcauaauguuuaaauaaaaauguuauuuu

SEQ ID NO: 230038 - RNA, 32 nt, Homo Sapiens
gcucugauucuauggcuugguuguuacuauaa

SEQ ID NO: 230039 - RNA, 32 nt, Homo Sapiens
uaaaauguauaaaaccaagguaugccccaacc

SEQ ID NO: 230040 - RNA, 29 nt, Homo Sapiens
aguggguuuauccaauguuccagagacuc

SEQ ID NO: 230041 - RNA, 32 nt, Homo Sapiens
cuagaauacauuuuuguguaaaguaaauuaca

SEQ ID NO: 230042 - RNA, 32 nt, Homo Sapiens
cccucgccgcucgaccccgcccucaccacacu

SEQ ID NO: 230043 - RNA, 32 nt, Homo Sapiens
cuuggcauuccagcugaccucgacccaaggcc

SEQ ID NO: 230044 - RNA, 32 nt, Homo Sapiens
ggcccucuucagcccccucccccaaaggucug

SEQ ID NO: 230045 - RNA, 32 nt, Homo Sapiens
ucugccaucuucucuccuucccaaaggaucug

SEQ ID NO: 230046 - RNA, 30 nt, Homo Sapiens
aaccagccacuugcacuauggcuuccaagc

SEQ ID NO: 230047 - RNA, 32 nt, Homo Sapiens
cauaugcuguauauauuguauacaugguuuaa

SEQ ID NO: 230048 - RNA, 32 nt, Homo Sapiens
uauuguggaaaacaaauauagauuuuaucuga

SEQ ID NO: 230049 - RNA, 32 nt, Homo Sapiens
aacugguuguacaaucaugauguuaguaaugg

SEQ ID NO: 230050 - RNA, 32 nt, Homo Sapiens
uacauuaaauuaauauauguauaagcauaugu

SEQ ID NO: 230051 - RNA, 32 nt, Homo Sapiens
cagaagaaacuaacuuagaaacaaaggauuca

SEQ ID NO: 230052 - RNA, 32 nt, Homo Sapiens
auuggaucuaaauauaaaaguggugcuuucag

SEQ ID NO: 230053 - RNA, 32 nt, Homo Sapiens
uaauucuuuuucucuggauuuugguuucuuuu

SEQ ID NO: 230054 - RNA, 32 nt, Homo Sapiens
guggcuuuggccucaccaucggcuggcccucc

SEQ ID NO: 230055 - RNA, 32 nt, Homo Sapiens
uuuacugcauuuauuuauuuaauuguaacauc

SEQ ID NO: 230056 - RNA, 32 nt, Homo Sapiens
uuacuuucagagaaaccagauauuuuauagag

SEQ ID NO: 230057 - RNA, 32 nt, Homo Sapiens
uuuagcaaaccugauucagaaaacauuugaga

SEQ ID NO: 230058 - RNA, 32 nt, Homo Sapiens
aaacaaacaacaaaguuguggugaagcuauaa

SEQ ID NO: 230059 - RNA, 32 nt, Homo Sapiens
ucuagaauuuuggcaauguugacuaagaaaca

SEQ ID NO: 230060 - RNA, 32 nt, Homo Sapiens
gauggaggcucgcucugucacccaggcuggag

SEQ ID NO: 230061 - RNA, 32 nt, Homo Sapiens
cacggaacagauucaucauauuuggucuuuau

SEQ ID NO: 230062 - RNA, 32 nt, Homo Sapiens
ucagguagcacuuuauacucaggcagaucuca

SEQ ID NO: 230063 - RNA, 32 nt, Homo Sapiens
agacaaaugacaggauuaugaguauacagugu

SEQ ID NO: 230064 - RNA, 32 nt, Homo Sapiens
cugaguugggucccuccucccuccaaggagug

SEQ ID NO: 230065 - RNA, 32 nt, Homo Sapiens
gauauauaaucuuaagcaccacaggugaguuu

SEQ ID NO: 230066 - RNA, 32 nt, Homo Sapiens
aggcugaaacugauguuuaucuucauugacaa

SEQ ID NO: 230067 - RNA, 32 nt, Homo Sapiens
uucuaaugugguauuuuaaauaaaguaucaua

SEQ ID NO: 230068 - RNA, 32 nt, Homo Sapiens
gacuccaugcccaaaucugcuuucuauggcau

SEQ ID NO: 230069 - RNA, 32 nt, Homo Sapiens
augggcaucccccaagucacuacagcaucugg

SEQ ID NO: 230070 - RNA, 32 nt, Homo Sapiens
ucuguggcugcggcugggaaaccgcgcggagg

SEQ ID NO: 230071 - RNA, 30 nt, Homo Sapiens
aggcgcggcaggcggcaggucccggccgaa

SEQ ID NO: 230072 - RNA, 32 nt, Homo Sapiens
uucccaggaucccacaccaugccucacauggu

SEQ ID NO: 230073 - RNA, 32 nt, Homo Sapiens
gccuggcugaguuuucuuaaagugagcuuaau

SEQ ID NO: 230074 - RNA, 32 nt, Homo Sapiens
uguuccgagugucugcccuuugggaggggcuc

SEQ ID NO: 230075 - RNA, 32 nt, Homo Sapiens
uauauauaucauauauauaguugaauggcagu

SEQ ID NO: 230076 - RNA, 32 nt, Homo Sapiens
uucuauguaauaauaaaucucuuuucguauga

SEQ ID NO: 230077 - RNA, 32 nt, Homo Sapiens
uuaacacuacaaauauuagauacaauuuuuua

SEQ ID NO: 230078 - RNA, 32 nt, Homo Sapiens
ggccugccugggccgcgccagcgccgcuccac

SEQ ID NO: 230079 - RNA, 32 nt, Homo Sapiens
uagaggaagaagucgaacaaaaauggugucuc

SEQ ID NO: 230080 - RNA, 32 nt, Homo Sapiens
ccuccugcagaacuuugaaaagcuggguugag

SEQ ID NO: 230081 - RNA, 32 nt, Homo Sapiens
agcggcuccgcggggucucggccggguccgcg

SEQ ID NO: 230082 - RNA, 32 nt, Homo Sapiens
cuauucaucaaugaagauuagcacugagaucc

SEQ ID NO: 230083 - RNA, 32 nt, Homo Sapiens
cccaauucaucccacagcacugaucaucuuuu

SEQ ID NO: 230084 - RNA, 32 nt, Homo Sapiens
cauauuaauauuugaguuauuuuuauuguaug

SEQ ID NO: 230085 - RNA, 32 nt, Homo Sapiens
agaaggaggggggugacugagcuccucuugca

SEQ ID NO: 230086 - RNA, 32 nt, Homo Sapiens
cacuuggccgucuucugcauucugggaacaug

SEQ ID NO: 230087 - RNA, 32 nt, Homo Sapiens
ccaugggcuggcauauaggagcugcucaauaa

SEQ ID NO: 230088 - RNA, 32 nt, Homo Sapiens
ugaagcccagccacccaaaguuucugagggga

SEQ ID NO: 230089 - RNA, 32 nt, Homo Sapiens
acccggggccgcggugccuccugcgcgucccc

SEQ ID NO: 230090 - RNA, 32 nt, Homo Sapiens
acucccaaauccaugccuuguuuaucuuuuua

SEQ ID NO: 230091 - RNA, 32 nt, Homo Sapiens
uucuucaggaggaggggucucuaaggcaggug

SEQ ID NO: 230092 - RNA, 32 nt, Homo Sapiens
ccagcagcagugccacgcaguuccuccucucc

SEQ ID NO: 230093 - RNA, 32 nt, Homo Sapiens
guuccacccuccccuucaacugccccucuaaa

SEQ ID NO: 230094 - RNA, 32 nt, Homo Sapiens
ggaaaaccucaagucagacucaguggcagaac

SEQ ID NO: 230095 - RNA, 32 nt, Homo Sapiens
ggagagaggaggaggagugcggcgcggcggcc

SEQ ID NO: 230096 - RNA, 32 nt, Homo Sapiens
cggccucgugcgugcgcacgcgcgcugucccc

SEQ ID NO: 230097 - RNA, 29 nt, Homo Sapiens
gggugagucaaugagugaguggugaguca

SEQ ID NO: 230098 - RNA, 32 nt, Homo Sapiens
cgcugccacccacaaacagacacacaugccgu

SEQ ID NO: 230099 - RNA, 32 nt, Homo Sapiens
ugggcgccugaagacaaggauggagcaugaag

SEQ ID NO: 230100 - RNA, 32 nt, Homo Sapiens
uaccaacccaaaagccagaccagugcaaugga

SEQ ID NO: 230101 - RNA, 32 nt, Homo Sapiens
cuuguaucucuuaaaaguauggaugcuucauc

SEQ ID NO: 230102 - RNA, 32 nt, Homo Sapiens
aggaaccaccacacccagcagcuccugacaga

SEQ ID NO: 230103 - RNA, 32 nt, Homo Sapiens
ggcccccaggcaaggcugagccaggccccaag

SEQ ID NO: 230104 - RNA, 32 nt, Homo Sapiens
uuuacuucucccuugaguccccaugcuuuguc

SEQ ID NO: 230105 - RNA, 32 nt, Homo Sapiens
gcuaaacuuccacuucauaacuuucggcgaga

SEQ ID NO: 230106 - RNA, 32 nt, Homo Sapiens
aaggaggcaagggcuccgcggcgcugucgcgc

SEQ ID NO: 230107 - RNA, 32 nt, Homo Sapiens
uuccuuuuucuccuagaggaaaucccucaugg

SEQ ID NO: 230108 - RNA, 32 nt, Homo Sapiens
gcaaaaucuuguaguuuuuaaucuuaaacacu

SEQ ID NO: 230109 - RNA, 32 nt, Homo Sapiens
acaacuaucuucuguuuuuagaauucguaguc

SEQ ID NO: 230110 - RNA, 32 nt, Homo Sapiens
ucuuuuuggcagaaauaaaaccacagguagau

SEQ ID NO: 230111 - RNA, 32 nt, Homo Sapiens
aaguagaaggcacaugugcucugauggccccu

SEQ ID NO: 230112 - RNA, 32 nt, Homo Sapiens
aagaugcugcuuccaggagaucugcaagaacu

SEQ ID NO: 230113 - RNA, 32 nt, Homo Sapiens
uuaauugccaguugccaacaaaucuaguucua

SEQ ID NO: 230114 - RNA, 32 nt, Homo Sapiens
uaggggagacccaggcccauuauuagggucgg

SEQ ID NO: 230115 - RNA, 32 nt, Homo Sapiens
acuaagcccgccccgcuggccgccagcugccc

SEQ ID NO: 230116 - RNA, 32 nt, Homo Sapiens
aggagcaggaggaggacaucacaggaugggaa

SEQ ID NO: 230117 - RNA, 32 nt, Homo Sapiens
uuccacaucagcccaaggucuuuuuaaugccu

SEQ ID NO: 230118 - RNA, 32 nt, Homo Sapiens
aggaacagugauugccccugcuccggaagaug

SEQ ID NO: 230119 - RNA, 32 nt, Homo Sapiens
cguuuuggguguccucaccagcaaggcugcuc

SEQ ID NO: 230120 - RNA, 32 nt, Homo Sapiens
ucaaggcauaaaauacaauuaaagcaaaauau

SEQ ID NO: 230121 - RNA, 32 nt, Homo Sapiens
gaauguugcaggugcugccuccgagucugugg

SEQ ID NO: 230122 - RNA, 32 nt, Homo Sapiens
gaguuaguagaaucugaggaugaugcuucuuc

SEQ ID NO: 230123 - RNA, 32 nt, Homo Sapiens
ccuuccccacaucccaggaucucaggucagug

SEQ ID NO: 230124 - RNA, 32 nt, Homo Sapiens
gaggaaggcgccuggggucaagcucagagcca

SEQ ID NO: 230125 - RNA, 31 nt, Homo Sapiens
cgggcauggcggccaccuccaaggggcgggc

SEQ ID NO: 230126 - RNA, 32 nt, Homo Sapiens
aaaagagaaaauugaagcauaaauguauuuuu

SEQ ID NO: 230127 - RNA, 32 nt, Homo Sapiens
agguuggauaaggaucuucagaacuccucagc

SEQ ID NO: 230128 - RNA, 32 nt, Homo Sapiens
agaaucggcucccagacaccugccacucguga

SEQ ID NO: 230129 - RNA, 32 nt, Homo Sapiens
gaaaguugauucaaucauggcauuucugucac

SEQ ID NO: 230130 - RNA, 32 nt, Homo Sapiens
cccgcugcaaacagggaguggggugcaggaag

SEQ ID NO: 230131 - RNA, 32 nt, Homo Sapiens
ugugaagcgucucagaggcauuucagaaccug

SEQ ID NO: 230132 - RNA, 32 nt, Homo Sapiens
acugcauggaaauaggucauuaacuugaaacu

SEQ ID NO: 230133 - RNA, 32 nt, Homo Sapiens
agacauccugaacacauugccuccucaucuuc

SEQ ID NO: 230134 - RNA, 32 nt, Homo Sapiens
aucguucacguugauuuuuuuauucaucacca

SEQ ID NO: 230135 - RNA, 32 nt, Homo Sapiens
uuaucacaagcugucugaacuuacucagggga

SEQ ID NO: 230136 - RNA, 32 nt, Homo Sapiens
aaucauugucuccugagauuuuucuaauuagg

SEQ ID NO: 230137 - RNA, 32 nt, Homo Sapiens
gcagguagacuacuuuuuugcaucuuggggaa

SEQ ID NO: 230138 - RNA, 32 nt, Homo Sapiens
uggcagcccucccucgcucuuggugccuccuu

SEQ ID NO: 230139 - RNA, 32 nt, Homo Sapiens
augaaguuagaucucuuccucacaucauacag

SEQ ID NO: 230140 - RNA, 32 nt, Homo Sapiens
ccaauucuugucaccuucgaggaggccaugga

SEQ ID NO: 230141 - RNA, 32 nt, Homo Sapiens
ccagugcgaaagcagccaggaguccccguugg

SEQ ID NO: 230142 - RNA, 32 nt, Homo Sapiens
acucauuuccuucccaggaucuaggacccaca

SEQ ID NO: 230143 - RNA, 32 nt, Homo Sapiens
aagaccccacccaagcuuggcagccgagcucg

SEQ ID NO: 230144 - RNA, 32 nt, Homo Sapiens
gcuggccgcuccuggaggcggcggcgggagcg

SEQ ID NO: 230145 - RNA, 31 nt, Homo Sapiens
uacaaggaagagguugugucuuugauagaaa

SEQ ID NO: 230146 - RNA, 32 nt, Homo Sapiens
aguugagccccguccggguccuggacccgcgu

SEQ ID NO: 230147 - RNA, 30 nt, Homo Sapiens
cacgaggcgcccgcggggcuguccgcgguc

SEQ ID NO: 230148 - RNA, 32 nt, Homo Sapiens
uuacccuaaaucuauuuuaaaauuguuuucuu

SEQ ID NO: 230149 - RNA, 31 nt, Homo Sapiens
gacgcgcggcacugcccucgagaacuggcgc

SEQ ID NO: 230150 - RNA, 32 nt, Homo Sapiens
uaauuuucccuuucuccaacccuguagaauaa

SEQ ID NO: 230151 - RNA, 32 nt, Homo Sapiens
cauggcccuaaacucugcuuggaccagaacau

SEQ ID NO: 230152 - RNA, 32 nt, Homo Sapiens
uucccacccagcugagaaugcccccuccuccc

SEQ ID NO: 230153 - RNA, 32 nt, Homo Sapiens
gcagugaccagauaaacuugaauugacacgug

SEQ ID NO: 230154 - RNA, 32 nt, Homo Sapiens
ugcccccaauaaacccaacaaacauaaaguug

SEQ ID NO: 230155 - RNA, 32 nt, Homo Sapiens
uggggauuuaggaggcggagcggcgcccccuu

SEQ ID NO: 230156 - RNA, 32 nt, Homo Sapiens
cggcagcugcucggcagcccagcccugggccu

SEQ ID NO: 230157 - RNA, 32 nt, Homo Sapiens
gcgggucacgacuaugcgugggaaagucucaa

SEQ ID NO: 230158 - RNA, 32 nt, Homo Sapiens
ugggcccccagcugccuuggacuguguuuuuc

SEQ ID NO: 230159 - RNA, 32 nt, Homo Sapiens
aggagauguagaaaaauguguacaauguuauu

SEQ ID NO: 230160 - RNA, 32 nt, Homo Sapiens
gcgacucgucccgccuucuggggcacuaguuu

SEQ ID NO: 230161 - RNA, 32 nt, Homo Sapiens
agauguguaauguggcuguggugucaggcugc

SEQ ID NO: 230162 - RNA, 32 nt, Homo Sapiens
cuuccuuuaaucuuuugccccagccauccagu

SEQ ID NO: 230163 - RNA, 32 nt, Homo Sapiens
uuccuugaccucuuuacccugaagcuuuuguc

SEQ ID NO: 230164 - RNA, 32 nt, Homo Sapiens
gacugaggccccauuugcauuguuuaacauac

SEQ ID NO: 230165 - RNA, 32 nt, Homo Sapiens
ugccucuccagaugugaggcagauccacacgu

SEQ ID NO: 230166 - RNA, 32 nt, Homo Sapiens
cugcuccucugucagggaagccaggcagagcc

SEQ ID NO: 230167 - RNA, 32 nt, Homo Sapiens
gaaaaaucaaggaaacacaaucaggauuuuau

SEQ ID NO: 230168 - RNA, 32 nt, Homo Sapiens
uccugaaguugcaauuuauacuguauggcuuc

SEQ ID NO: 230169 - RNA, 32 nt, Homo Sapiens
uggcggggcgccccgccugcagaacccugcuu

SEQ ID NO: 230170 - RNA, 32 nt, Homo Sapiens
aacccaggcggccugauucucacaucuccccu

SEQ ID NO: 230171 - RNA, 30 nt, Homo Sapiens
cuggggccgcccgugaggaugucgcgaccg

SEQ ID NO: 230172 - RNA, 28 nt, Homo Sapiens
uguuaggugacaggaccaaaugaaaaua

SEQ ID NO: 230173 - RNA, 32 nt, Homo Sapiens
gcuuuacaucuucauuuugacuguuccauagc

SEQ ID NO: 230174 - RNA, 32 nt, Homo Sapiens
uaagucaguuaaaauacauaaauaaaaacaua

SEQ ID NO: 230175 - RNA, 32 nt, Homo Sapiens
agugcagcacgcugaccugaguauccaccaug

SEQ ID NO: 230176 - RNA, 32 nt, Homo Sapiens
ucccccuuuguccuccaucccgacuccaucuc

SEQ ID NO: 230177 - RNA, 32 nt, Homo Sapiens
uaagcuugaaagaaauacagguccuggcaagg

SEQ ID NO: 230178 - RNA, 32 nt, Homo Sapiens
ggggaggauggauagggauggcugggaaaugg

SEQ ID NO: 230179 - RNA, 32 nt, Homo Sapiens
auagcacuagccacucuuauuaauauuuauag

SEQ ID NO: 230180 - RNA, 32 nt, Homo Sapiens
ucauguacuuggauaucacagcaacauugaaa

SEQ ID NO: 230181 - RNA, 32 nt, Homo Sapiens
cccaggcagcgggauuccgacuggcaagaugg

SEQ ID NO: 230182 - RNA, 32 nt, Homo Sapiens
ggcaacgggaugcccaggcuccuacucuccuu

SEQ ID NO: 230183 - RNA, 32 nt, Homo Sapiens
ucuaauuuuuaaaugcuguauauauggcuuuc

SEQ ID NO: 230184 - RNA, 32 nt, Homo Sapiens
aaagccaaaugcagcccucccuggccuccaga

SEQ ID NO: 230185 - RNA, 32 nt, Homo Sapiens
aggccaagcuggacugcauaaagauugguaug

SEQ ID NO: 230186 - RNA, 32 nt, Homo Sapiens
caguugacugguuuuguguccuguuugaacuu

SEQ ID NO: 230187 - RNA, 32 nt, Homo Sapiens
aaacguuuucuaaauuuuuaguuaaguauaug

SEQ ID NO: 230188 - RNA, 32 nt, Homo Sapiens
agagaggcccuccccaccuggcucaccaggaa

SEQ ID NO: 230189 - RNA, 32 nt, Homo Sapiens
ucuggaguggguggagggagggagcuacgggc

SEQ ID NO: 230190 - RNA, 32 nt, Homo Sapiens
gggccuucggggaggcggagggcgcgucgggu

SEQ ID NO: 230191 - RNA, 32 nt, Homo Sapiens
uauguagcgguguuuugauagaauagaaaauu

SEQ ID NO: 230192 - RNA, 32 nt, Homo Sapiens
uauggguuuaguaaagcuuuuaucuuuagaaa

SEQ ID NO: 230193 - RNA, 32 nt, Homo Sapiens
ucuaaauuuccaaagcacuaaagggagagaaa

SEQ ID NO: 230194 - RNA, 32 nt, Homo Sapiens
cucuccgcgccguggacuggcuccuaggcagu

SEQ ID NO: 230195 - RNA, 32 nt, Homo Sapiens
uugacgugccuggcccugagcgaagcacauua

SEQ ID NO: 230196 - RNA, 32 nt, Homo Sapiens
acacaggguagucagauacguuauuuguuccu

SEQ ID NO: 230197 - RNA, 32 nt, Homo Sapiens
gaggauccggagcagcugcugccagcccgcgg

SEQ ID NO: 230198 - RNA, 31 nt, Homo Sapiens
aaagcagcaagguccuggguccagcccacaa

SEQ ID NO: 230199 - RNA, 32 nt, Homo Sapiens
gggccgcccuccccuccugcucucuucccagc

SEQ ID NO: 230200 - RNA, 32 nt, Homo Sapiens
uaucaacacucuucuuuuccaaacuccuauag

SEQ ID NO: 230201 - RNA, 32 nt, Homo Sapiens
auauauauauauauuuuuuaguagagacgggg

SEQ ID NO: 230202 - RNA, 32 nt, Homo Sapiens
agucaggauugugacuauauauuaaugagacu

SEQ ID NO: 230203 - RNA, 32 nt, Homo Sapiens
uuuuguuuuccuuuuucuuuaaaucuuggacu

SEQ ID NO: 230204 - RNA, 32 nt, Homo Sapiens
ugaagaagaacccgcacagcuauguggucugc

SEQ ID NO: 230205 - RNA, 32 nt, Homo Sapiens
acagaaucuggaacugggcuucugugauucaa

SEQ ID NO: 230206 - RNA, 32 nt, Homo Sapiens
gauaggccugggugcuggcugcccagacccuc

SEQ ID NO: 230207 - RNA, 29 nt, Homo Sapiens
uaaaauuuauaugggaaccacaaaagacu

SEQ ID NO: 230208 - RNA, 32 nt, Homo Sapiens
gcugugaaccaccugggcuucaucucaagccu

SEQ ID NO: 230209 - RNA, 32 nt, Homo Sapiens
ccuuccccaagcccccacagcuacuccaaccc

SEQ ID NO: 230210 - RNA, 32 nt, Homo Sapiens
uuaaauucagacuauuuguaacuuauuguuau

SEQ ID NO: 230211 - RNA, 32 nt, Homo Sapiens
cauggacgaaguugccgauggauguugucagg

SEQ ID NO: 230212 - RNA, 32 nt, Homo Sapiens
acuaaauauuccaugguggugaaggauguaca

SEQ ID NO: 230213 - RNA, 32 nt, Homo Sapiens
augggugagccacagcucgaggaggcaggccc

SEQ ID NO: 230214 - RNA, 32 nt, Homo Sapiens
agcuacuucggccuggaagagaacggccgccu

SEQ ID NO: 230215 - RNA, 32 nt, Homo Sapiens
aggcaccgccaguuggccccagcccgcagcau

SEQ ID NO: 230216 - RNA, 32 nt, Homo Sapiens
aaccaagaacguuauucuuaaucuggaaauuu

SEQ ID NO: 230217 - RNA, 32 nt, Homo Sapiens
ucauuguucugaaacuaacagugaggggacaa

SEQ ID NO: 230218 - RNA, 32 nt, Homo Sapiens
uucuugucauccccacucccagccccuauucc

SEQ ID NO: 230219 - RNA, 32 nt, Homo Sapiens
accacccaacauucuacaagaaaauccacaag

SEQ ID NO: 230220 - RNA, 32 nt, Homo Sapiens
gggcuggaggccgggugccuggugggugggcc

SEQ ID NO: 230221 - RNA, 32 nt, Homo Sapiens
cguggcaggcacccuccuuugcagggcgaggu

SEQ ID NO: 230222 - RNA, 32 nt, Homo Sapiens
ucaaucagaagcugcuguggugcugcgggacc

SEQ ID NO: 230223 - RNA, 32 nt, Homo Sapiens
ucaggggcuccauugugaaaagaaaccauaua

SEQ ID NO: 230224 - RNA, 32 nt, Homo Sapiens
auaaugcucauaaugcaguaaauaucagaaua

SEQ ID NO: 230225 - RNA, 31 nt, Homo Sapiens
aggcagcggucccaucugccccgcggucucc

SEQ ID NO: 230226 - RNA, 32 nt, Homo Sapiens
uuuugggguacaauuagaaucuaaguguuugc

SEQ ID NO: 230227 - RNA, 32 nt, Homo Sapiens
guccaucugucccgcugccccgcggcccaucc

SEQ ID NO: 230228 - RNA, 32 nt, Homo Sapiens
cuccgcgccccgaggucuccgcggcccgaggu

SEQ ID NO: 230229 - RNA, 32 nt, Homo Sapiens
uaugcuuacugauauauuuuacaauuuuuuau

SEQ ID NO: 230230 - RNA, 32 nt, Homo Sapiens
agagggcauauaaauuccccauauuuguguuc

SEQ ID NO: 230231 - RNA, 32 nt, Homo Sapiens
ggugccaggagccuuccugugcuccccauugc

SEQ ID NO: 230232 - RNA, 32 nt, Homo Sapiens
gcaacacugccucacucuuccccucccaccuu

SEQ ID NO: 230233 - RNA, 29 nt, Homo Sapiens
uuggcauggggacagagcggacuaacugg

SEQ ID NO: 230234 - RNA, 32 nt, Homo Sapiens
gauuaucuaauugccauuaguguuaaggugag

SEQ ID NO: 230235 - RNA, 32 nt, Homo Sapiens
cguuccuccacucaucuguuucuccgguucuc

SEQ ID NO: 230236 - RNA, 32 nt, Homo Sapiens
auacuuaauuauuggacuaucacuacugauag

SEQ ID NO: 230237 - RNA, 32 nt, Homo Sapiens
gcccacagagggcccaggccccugcccagcug

SEQ ID NO: 230238 - RNA, 30 nt, Homo Sapiens
ugcgaugauauugccaccuaccucuuacau

SEQ ID NO: 230239 - RNA, 32 nt, Homo Sapiens
accuacaccgugacauccuccuccucagccug

SEQ ID NO: 230240 - RNA, 32 nt, Homo Sapiens
gggaaugugcggggccagucccugcccuccca

SEQ ID NO: 230241 - RNA, 30 nt, Homo Sapiens
gucagugucugugacugaauaaaguuccau

SEQ ID NO: 230242 - RNA, 30 nt, Homo Sapiens
agcagcugcaggcgcgcgccggggccgugc

SEQ ID NO: 230243 - RNA, 32 nt, Homo Sapiens
caccccagaucccacauccccugacgaagcuu

SEQ ID NO: 230244 - RNA, 32 nt, Homo Sapiens
cuuaccauuucccuuacuccguuuucccugca

SEQ ID NO: 230245 - RNA, 32 nt, Homo Sapiens
cgaugggucuggaacauguguacuguauaucu

SEQ ID NO: 230246 - RNA, 32 nt, Homo Sapiens
auaagguggaaggaaacauaguagcaauggau

SEQ ID NO: 230247 - RNA, 32 nt, Homo Sapiens
uccuuucuaaggaugagggaauccacaacaga

SEQ ID NO: 230248 - RNA, 32 nt, Homo Sapiens
gaggcuccucugauggcugacaucagucacug

SEQ ID NO: 230249 - RNA, 32 nt, Homo Sapiens
ggcaccuuacuccagcagccuccaggugcuuu

SEQ ID NO: 230250 - RNA, 32 nt, Homo Sapiens
cuuucccuaccguguuugauaaauguugucca

SEQ ID NO: 230251 - RNA, 32 nt, Homo Sapiens
ugaguccuagagcuacagggguucuggaaaca

SEQ ID NO: 230252 - RNA, 32 nt, Homo Sapiens
cuauugguucuuaaguuuuuuaucuccagauc

SEQ ID NO: 230253 - RNA, 32 nt, Homo Sapiens
ugcauuugauaaauguaucuguauggcagcaa

SEQ ID NO: 230254 - RNA, 32 nt, Homo Sapiens
uuuguggucuuagguauggugcuauagguugc

SEQ ID NO: 230255 - RNA, 32 nt, Homo Sapiens
uuuccaaaucucccuuucucuucaguuccuuc

SEQ ID NO: 230256 - RNA, 32 nt, Homo Sapiens
aaaaaucgccccacccccaagccuccaucgcc

SEQ ID NO: 230257 - RNA, 32 nt, Homo Sapiens
agguaaaauaaucaggaauauuucuauaguaa

SEQ ID NO: 230258 - RNA, 32 nt, Homo Sapiens
gagccucucucccuccuuucagcccucuccag

SEQ ID NO: 230259 - RNA, 32 nt, Homo Sapiens
gagagagagagagguuaauuauagauagacaa

SEQ ID NO: 230260 - RNA, 32 nt, Homo Sapiens
cucaccuccaucccccgucacccaggcaccuu

SEQ ID NO: 230261 - RNA, 32 nt, Homo Sapiens
agaaaaggagaugucuggcuuugcucugcccu

SEQ ID NO: 230262 - RNA, 32 nt, Homo Sapiens
caacacucaccccuuguccccccgcagggcua

SEQ ID NO: 230263 - RNA, 32 nt, Homo Sapiens
uuccauuucugggauuuuauccuaaggaaaua

SEQ ID NO: 230264 - RNA, 32 nt, Homo Sapiens
gaauacuuuagcgucgugaaccccgcugcuuu

SEQ ID NO: 230265 - RNA, 32 nt, Homo Sapiens
ccccuaaucuagcuccucaagaacccaaggga

SEQ ID NO: 230266 - RNA, 32 nt, Homo Sapiens
gcaaagggguauuuaaagcagaucaagagagu

SEQ ID NO: 230267 - RNA, 32 nt, Homo Sapiens
uacccuugagcuuagccgcgggucccugugaa

SEQ ID NO: 230268 - RNA, 32 nt, Homo Sapiens
caggcuccuucaccacccaacauucuacaaga

SEQ ID NO: 230269 - RNA, 32 nt, Homo Sapiens
agaaaaaaaaggaaacaaaaccaaaaagaaag

SEQ ID NO: 230270 - RNA, 32 nt, Homo Sapiens
auaaagaaauaaagguuaaauaugcaggcuuc

SEQ ID NO: 230271 - RNA, 32 nt, Homo Sapiens
cgggguaguggcgggggccgccggcgggucgu

SEQ ID NO: 230272 - RNA, 32 nt, Homo Sapiens
ggaagcuagcuuucccagggaccaagaagcca

SEQ ID NO: 230273 - RNA, 32 nt, Homo Sapiens
uugccugaacucuccuuuuuucuucagaucug

SEQ ID NO: 230274 - RNA, 32 nt, Homo Sapiens
gagaaucuauugaaccugggagguggagguug

SEQ ID NO: 230275 - RNA, 32 nt, Homo Sapiens
uuguaggaaaugcagccaaaggugcagucgga

SEQ ID NO: 230276 - RNA, 32 nt, Homo Sapiens
agcgccgcgggaagcgcaugugccucaaauuc

SEQ ID NO: 230277 - RNA, 32 nt, Homo Sapiens
ugucgucaacugacagugauucaccacuggug

SEQ ID NO: 230278 - RNA, 32 nt, Homo Sapiens
cagaguugagggagccgagcugagccacgcug

SEQ ID NO: 230279 - RNA, 32 nt, Homo Sapiens
ugccgggugggcgucuuccuggacuaugaagc

SEQ ID NO: 230280 - RNA, 30 nt, Homo Sapiens
cucgucugugucccugccacucugaguuau

SEQ ID NO: 230281 - RNA, 32 nt, Homo Sapiens
ggaucugcuacgccgccgcccgggccccgcag

SEQ ID NO: 230282 - RNA, 32 nt, Homo Sapiens
ggauggggaggccucccugcuuccaccugcau

SEQ ID NO: 230283 - RNA, 32 nt, Homo Sapiens
ugugccucucaucuuucuuuuguguuauguaa

SEQ ID NO: 230284 - RNA, 32 nt, Homo Sapiens
ggacuggauccggaugaucaugaggaacaacu

SEQ ID NO: 230285 - RNA, 32 nt, Homo Sapiens
cuguguuuuuaaaauacuacaugacauucugu

SEQ ID NO: 230286 - RNA, 32 nt, Homo Sapiens
gaccgccacguguggcaucuuuccaagggagc

SEQ ID NO: 230287 - RNA, 32 nt, Homo Sapiens
agguugcugggguuacaggugugugccaccac

SEQ ID NO: 230288 - RNA, 32 nt, Homo Sapiens
uguaguuuuccacagugucuuuuccuugguuu

SEQ ID NO: 230289 - RNA, 32 nt, Homo Sapiens
aacaaaauaaacaaaaacuggccaaaacaaaa

SEQ ID NO: 230290 - RNA, 30 nt, Homo Sapiens
guggcgagcaggcgcguguguagggacgaa

SEQ ID NO: 230291 - RNA, 28 nt, Homo Sapiens
caaguuguacuguguauguguuuccuau

SEQ ID NO: 230292 - RNA, 32 nt, Homo Sapiens
gagccaguccuuucugggggucggcucccaga

SEQ ID NO: 230293 - RNA, 32 nt, Homo Sapiens
gccaaccuggaaaggugcagucuagauuucag

SEQ ID NO: 230294 - RNA, 32 nt, Homo Sapiens
uaauaccccacuuuuauucgcuauaauuugca

SEQ ID NO: 230295 - RNA, 32 nt, Homo Sapiens
ugaguaaaacaaagucauguggguaugucugg

SEQ ID NO: 230296 - RNA, 32 nt, Homo Sapiens
aagcaccuacaagaaacuuauaacucaagguu

SEQ ID NO: 230297 - RNA, 32 nt, Homo Sapiens
aaaccuuguaaauccaaaccccauaaaagaga

SEQ ID NO: 230298 - RNA, 32 nt, Homo Sapiens
cugccacugugggcaaagcggcugcuagggga

SEQ ID NO: 230299 - RNA, 32 nt, Homo Sapiens
uucccaccuucuaacagguaauuauuaguugu

SEQ ID NO: 230300 - RNA, 32 nt, Homo Sapiens
guggcagcgggcgggcccggcugccaaggagg

SEQ ID NO: 230301 - RNA, 32 nt, Homo Sapiens
gcccagaggcccucuccccagcccugcuugcc

SEQ ID NO: 230302 - RNA, 32 nt, Homo Sapiens
gaaauugguucuuuuuacuuuuauauuuuugc

SEQ ID NO: 230303 - RNA, 29 nt, Homo Sapiens
agauucuugcacuucagaggcagacagug

SEQ ID NO: 230304 - RNA, 32 nt, Homo Sapiens
auacuuggaaagauagucauggcccaauauga

SEQ ID NO: 230305 - RNA, 32 nt, Homo Sapiens
acugcuuuuaucucauuuauuaagucucagaa

SEQ ID NO: 230306 - RNA, 32 nt, Homo Sapiens
gucgggccggagcauccgggcggccgcuugag

SEQ ID NO: 230307 - RNA, 32 nt, Homo Sapiens
cucugcccccuuucccaggguaucuguggguu

SEQ ID NO: 230308 - RNA, 32 nt, Homo Sapiens
gagggaggauguaaauagccgcacaaaggggu

SEQ ID NO: 230309 - RNA, 27 nt, Homo Sapiens
ugccucauugaauucuggugagggacg

SEQ ID NO: 230310 - RNA, 32 nt, Homo Sapiens
gacagacaucugaggacccagccucagggaug

SEQ ID NO: 230311 - RNA, 32 nt, Homo Sapiens
cugaggagcuacagcccugugcucccgggacc

SEQ ID NO: 230312 - RNA, 32 nt, Homo Sapiens
ccaaaugaaaugcccugcaaagggcaguaacc

SEQ ID NO: 230313 - RNA, 32 nt, Homo Sapiens
aaucugauuuugcugcugcuacacauccucgu

SEQ ID NO: 230314 - RNA, 32 nt, Homo Sapiens
gaauggaaaaggaggccauucugagccacacu

SEQ ID NO: 230315 - RNA, 32 nt, Homo Sapiens
caagcaagaagaggaguggaagcacaguugcc

SEQ ID NO: 230316 - RNA, 32 nt, Homo Sapiens
augucaauauugcauaccuuuucuaccuaaag

SEQ ID NO: 230317 - RNA, 32 nt, Homo Sapiens
aggaugaggagaaaaaacuuuaggugaaggga

SEQ ID NO: 230318 - RNA, 30 nt, Homo Sapiens
cggcggccgggugggagcgcagcgaggacg

SEQ ID NO: 230319 - RNA, 32 nt, Homo Sapiens
ccacgugacacccacccacaaggaagucguga

SEQ ID NO: 230320 - RNA, 31 nt, Homo Sapiens
acgugccaagccauguauguugguuggcauu

SEQ ID NO: 230321 - RNA, 32 nt, Homo Sapiens
aaagacacagaaauagagugcagagugggaau

SEQ ID NO: 230322 - RNA, 32 nt, Homo Sapiens
gacaaguccucccucacugaauguagaaucgu

SEQ ID NO: 230323 - RNA, 32 nt, Homo Sapiens
aucauagccaaggggaaaucuaucaguauaag

SEQ ID NO: 230324 - RNA, 32 nt, Homo Sapiens
uugcugggagcaaaaacuagaaugauacaaag

SEQ ID NO: 230325 - RNA, 32 nt, Homo Sapiens
uuccccaaagccacaggcaaccccagagacac

SEQ ID NO: 230326 - RNA, 32 nt, Homo Sapiens
uguuuaaacaccauuuacccuacuuaucccuc

SEQ ID NO: 230327 - RNA, 32 nt, Homo Sapiens
ccagauguguccccagauccacagcaggcaca

SEQ ID NO: 230328 - RNA, 32 nt, Homo Sapiens
cuuccccuccagcccacugcuuuaggaugaca

SEQ ID NO: 230329 - RNA, 32 nt, Homo Sapiens
caccgcccaccucggcugcuaggccccucgcc

SEQ ID NO: 230330 - RNA, 32 nt, Homo Sapiens
uuagaggcaaaguuaagagacucaucagauuc

SEQ ID NO: 230331 - RNA, 32 nt, Homo Sapiens
gccgcugcucaccaaucagggaaugggaagcu

SEQ ID NO: 230332 - RNA, 32 nt, Homo Sapiens
gcagcaggcuggugcuguguaguggccaccca

SEQ ID NO: 230333 - RNA, 32 nt, Homo Sapiens
gguaguuuauucaaagagaacucuguauccca

SEQ ID NO: 230334 - RNA, 30 nt, Homo Sapiens
ucuguuggcugaauggggggagugugugug

SEQ ID NO: 230335 - RNA, 32 nt, Homo Sapiens
uuguaccggacacuggauuccuggacccccuu

SEQ ID NO: 230336 - RNA, 32 nt, Homo Sapiens
cacccacccagcugcugucauuccgcucacug

SEQ ID NO: 230337 - RNA, 32 nt, Homo Sapiens
auuuaguauuuuguuucagugcacuaauaugu

SEQ ID NO: 230338 - RNA, 32 nt, Homo Sapiens
aacagggagaccugggguccuguggauaacug

SEQ ID NO: 230339 - RNA, 32 nt, Homo Sapiens
aaaugggaaaggaaaagacucauaccaacauu

SEQ ID NO: 230340 - RNA, 32 nt, Homo Sapiens
auugguacagggugccuauuuuagucauggau

SEQ ID NO: 230341 - RNA, 32 nt, Homo Sapiens
uaacugaaguuuaauaaaaaugucuucagcuc

SEQ ID NO: 230342 - RNA, 32 nt, Homo Sapiens
cuugcuggagguugaggacgcccagaggugau

SEQ ID NO: 230343 - RNA, 32 nt, Homo Sapiens
cugaucccugacugccaucuggacuuggaggc

SEQ ID NO: 230344 - RNA, 32 nt, Homo Sapiens
ccucgcccgcccucccugggcacaugugcaca

SEQ ID NO: 230345 - RNA, 32 nt, Homo Sapiens
accucugcugaucccggccggcccuggcuugg

SEQ ID NO: 230346 - RNA, 32 nt, Homo Sapiens
uucccuacagaaaagaaauuggacagaacaga

SEQ ID NO: 230347 - RNA, 32 nt, Homo Sapiens
auaaacaauuuaugcaugcugugacuuagucu

SEQ ID NO: 230348 - RNA, 32 nt, Homo Sapiens
ugucauccugcuaguuugugauguuuucugac

SEQ ID NO: 230349 - RNA, 32 nt, Homo Sapiens
cccucccugcguuuuauuaaaugauguauauu

SEQ ID NO: 230350 - RNA, 32 nt, Homo Sapiens
aggguguuugugcacaauagcucugcaguacc

SEQ ID NO: 230351 - RNA, 32 nt, Homo Sapiens
cauucuugacauucaguuaguccagaucugcc

SEQ ID NO: 230352 - RNA, 32 nt, Homo Sapiens
uuauagaaggcacuguuguaguuggaauaguu

SEQ ID NO: 230353 - RNA, 32 nt, Homo Sapiens
gguuuccuguuccuccuucugcgcggcugcag

SEQ ID NO: 230354 - RNA, 32 nt, Homo Sapiens
uaaaugaaacuguaauaauuucaguggaaacu

SEQ ID NO: 230355 - RNA, 32 nt, Homo Sapiens
agaaaauccucaaaccacagggaaugaaaugg

SEQ ID NO: 230356 - RNA, 32 nt, Homo Sapiens
cccacggccacgcgcgcacccugccgcccgca

SEQ ID NO: 230357 - RNA, 32 nt, Homo Sapiens
guguauuucuuaugcaaacaaucuucaggcag

SEQ ID NO: 230358 - RNA, 32 nt, Homo Sapiens
aauucaggagagauuauuuuauagaagucaau

SEQ ID NO: 230359 - RNA, 32 nt, Homo Sapiens
caucuauccaacauaaaugcccauguugaaag

SEQ ID NO: 230360 - RNA, 32 nt, Homo Sapiens
cucugcccggcagcgccgcgcaccaugggcuc

SEQ ID NO: 230361 - RNA, 32 nt, Homo Sapiens
ccgggccgcgcgcucccagcuucgcucggacg

SEQ ID NO: 230362 - RNA, 32 nt, Homo Sapiens
acaccaacacuggacgccuucccaugaaaaau

SEQ ID NO: 230363 - RNA, 32 nt, Homo Sapiens
aggccccgccccagcccagugccagccacucc

SEQ ID NO: 230364 - RNA, 32 nt, Homo Sapiens
ucuucccccuuucucucugucucauggggccu

SEQ ID NO: 230365 - RNA, 32 nt, Homo Sapiens
cgugagccgggccgaggcggggcgcgcgagga

SEQ ID NO: 230366 - RNA, 32 nt, Homo Sapiens
uuuccaauagugugguaaauguaaagugcuua

SEQ ID NO: 230367 - RNA, 32 nt, Homo Sapiens
cgcuuccccugccugccugggaagaggaaagg

SEQ ID NO: 230368 - RNA, 32 nt, Homo Sapiens
gcccccuccuccccggccaaggcgccuggacc

SEQ ID NO: 230369 - RNA, 32 nt, Homo Sapiens
cuugaagugccacuucccccagccccaccucu

SEQ ID NO: 230370 - RNA, 32 nt, Homo Sapiens
ccuuugaaagacugugcuguccuuuaacauag

SEQ ID NO: 230371 - RNA, 32 nt, Homo Sapiens
cccaaacaaaaaugacucuaaauagcccagau

SEQ ID NO: 230372 - RNA, 32 nt, Homo Sapiens
uuuguugauuuuucuuuuuuaauuuuggaaca

SEQ ID NO: 230373 - RNA, 32 nt, Homo Sapiens
accucaccuucuuuucugcaucucuggagcuc

SEQ ID NO: 230374 - RNA, 32 nt, Homo Sapiens
caagccccgaacuguggucgccaggcccagga

SEQ ID NO: 230375 - RNA, 32 nt, Homo Sapiens
ugaauuuuaaaaggauaaaaaugcuuuauuua

SEQ ID NO: 230376 - RNA, 32 nt, Homo Sapiens
cuccccagcucuuuuccaguccucaugcaggg

SEQ ID NO: 230377 - RNA, 32 nt, Homo Sapiens
cgcagcugcccccacuuccuuugagaccugca

SEQ ID NO: 230378 - RNA, 32 nt, Homo Sapiens
uggcagugacuguguccagaacugacagaacu

SEQ ID NO: 230379 - RNA, 32 nt, Homo Sapiens
caguuucuggcaugcaggaagcauacaauaau

SEQ ID NO: 230380 - RNA, 32 nt, Homo Sapiens
uguagucguuuccucagccucaucucacugug

SEQ ID NO: 230381 - RNA, 32 nt, Homo Sapiens
agccaagguagauuuuacuuucaacuuuuuaa

SEQ ID NO: 230382 - RNA, 32 nt, Homo Sapiens
aauagaguuggaaaagaugguaagcuuuuguc

SEQ ID NO: 230383 - RNA, 32 nt, Homo Sapiens
aagaauauuuaguuucaaguuuuaaaacuguu

SEQ ID NO: 230384 - RNA, 32 nt, Homo Sapiens
cucuuagucaaguggaaugugcaugcuggcau

SEQ ID NO: 230385 - RNA, 32 nt, Homo Sapiens
gaaggauauggacuauugcaauacauuucuuc

SEQ ID NO: 230386 - RNA, 32 nt, Homo Sapiens
ccucccacccccaccccacuucuggccaguug

SEQ ID NO: 230387 - RNA, 32 nt, Homo Sapiens
agcugaucccuacaaaaaugcauauaaaagca

SEQ ID NO: 230388 - RNA, 32 nt, Homo Sapiens
auagugaauauuaaagugugcuggacauggug

SEQ ID NO: 230389 - RNA, 32 nt, Homo Sapiens
gugcgaaauauguuuguaaagugauuugccau

SEQ ID NO: 230390 - RNA, 32 nt, Homo Sapiens
uaaaacaaaggaucuugauuuccuuguuguac

SEQ ID NO: 230391 - RNA, 32 nt, Homo Sapiens
cuuuguauuucaguuucuuuugaauuaugcca

SEQ ID NO: 230392 - RNA, 32 nt, Homo Sapiens
uaugaaaaugucauuguucuugugaacccaaa

SEQ ID NO: 230393 - RNA, 32 nt, Homo Sapiens
ccauuaaaaauauuuaaaaauuagccagacau

SEQ ID NO: 230394 - RNA, 32 nt, Homo Sapiens
caguaggcauagacuggaauagauaaauucau

SEQ ID NO: 230395 - RNA, 31 nt, Homo Sapiens
gcggcgcugccggagcccagagcgcgcgucg

SEQ ID NO: 230396 - RNA, 32 nt, Homo Sapiens
gguuucagcaacaccaguggccuacagagaag

SEQ ID NO: 230397 - RNA, 32 nt, Homo Sapiens
cacacagagaacugaggaacugaugcuguuug

SEQ ID NO: 230398 - RNA, 32 nt, Homo Sapiens
aaagaaugaagaugagacagaccggccaucau

SEQ ID NO: 230399 - RNA, 32 nt, Homo Sapiens
gacccucagcuuucccaucuguuuaauggugg

SEQ ID NO: 230400 - RNA, 32 nt, Homo Sapiens
aaaccacagaguuuucuguuuaauggaagaaa

SEQ ID NO: 230401 - RNA, 32 nt, Homo Sapiens
ugagcuuuucagcugggaagccuuuccauuuu

SEQ ID NO: 230402 - RNA, 32 nt, Homo Sapiens
gccggagcucuguggcggggcuggagggcugg

SEQ ID NO: 230403 - RNA, 32 nt, Homo Sapiens
agggauggcgagaaguauuuguugacauugau

SEQ ID NO: 230404 - RNA, 32 nt, Homo Sapiens
ucgcccguuguaauaaggcgcauccagguacc

SEQ ID NO: 230405 - RNA, 32 nt, Homo Sapiens
ggcgguccagcauuauauugaaacacuacagc

SEQ ID NO: 230406 - RNA, 32 nt, Homo Sapiens
gcugugcgccagcagcucuggugcugugcuuc

SEQ ID NO: 230407 - RNA, 32 nt, Homo Sapiens
uucuggaauguugcugacccaggccguggacu

SEQ ID NO: 230408 - RNA, 32 nt, Homo Sapiens
gacugaccuaugacagcaucaagcauucuuug

SEQ ID NO: 230409 - RNA, 32 nt, Homo Sapiens
ccaagggagagcaaagacaaaauacaccagua

SEQ ID NO: 230410 - RNA, 32 nt, Homo Sapiens
ugaccacuaccuuguggagccugcucagaaac

SEQ ID NO: 230411 - RNA, 32 nt, Homo Sapiens
ucuccuuggggcaaaaucacuuaauugccaag

SEQ ID NO: 230412 - RNA, 32 nt, Homo Sapiens
auguguauugaagaaaagcacuuuuuaaaaag

SEQ ID NO: 230413 - RNA, 32 nt, Homo Sapiens
gagccggaggggauaguggggguggggaauuc

SEQ ID NO: 230414 - RNA, 32 nt, Homo Sapiens
ucaauauggcaugcagaauuaucccucuuucc

SEQ ID NO: 230415 - RNA, 32 nt, Homo Sapiens
ugaaccccacgcugcugagcagggugauggcc

SEQ ID NO: 230416 - RNA, 32 nt, Homo Sapiens
aauauacaaacagcuucacacacacacacaca

SEQ ID NO: 230417 - RNA, 32 nt, Homo Sapiens
cacaagaaugcagugugaaauaccauaaagaa

SEQ ID NO: 230418 - RNA, 32 nt, Homo Sapiens
ggcccgagaagcucgcccggagaacggggagg

SEQ ID NO: 230419 - RNA, 32 nt, Homo Sapiens
ggauugcugcccgucugcugaugugaccagug

SEQ ID NO: 230420 - RNA, 32 nt, Homo Sapiens
ugaaguuacaguacaaaaauucucugaaugaa

SEQ ID NO: 230421 - RNA, 32 nt, Homo Sapiens
agacugaugauaagauuauuucaacucaacau

SEQ ID NO: 230422 - RNA, 32 nt, Homo Sapiens
uugugucauuuuuuucauuugcuggaccauug

SEQ ID NO: 230423 - RNA, 32 nt, Homo Sapiens
cucccuggcugcuuccucucgcucauccguca

SEQ ID NO: 230424 - RNA, 32 nt, Homo Sapiens
gagcgaggcgggggcgggugaggaggggguga

SEQ ID NO: 230425 - RNA, 32 nt, Homo Sapiens
aaauaccggaacaaagugcagaugaacacuuu

SEQ ID NO: 230426 - RNA, 32 nt, Homo Sapiens
cuuauuugccagcagauaaaucaugcccguuc

SEQ ID NO: 230427 - RNA, 32 nt, Homo Sapiens
cuguucucccgcugcuguaacucuguguguuc

SEQ ID NO: 230428 - RNA, 31 nt, Homo Sapiens
uaacuuuugugcuuuagggauaguuguuaaa

SEQ ID NO: 230429 - RNA, 32 nt, Homo Sapiens
cccaggccuggcugaggcgccgcggccggguc

SEQ ID NO: 230430 - RNA, 32 nt, Homo Sapiens
cgggggccucucuggcccuacccaggccgugu

SEQ ID NO: 230431 - RNA, 32 nt, Homo Sapiens
gcuccgacgcggguccaagggcagcuucccgc

SEQ ID NO: 230432 - RNA, 32 nt, Homo Sapiens
gauuuucuguaauaagagaaauccaauuugua

SEQ ID NO: 230433 - RNA, 32 nt, Homo Sapiens
agcaggcagcauauguugaaauaaguuauuac

SEQ ID NO: 230434 - RNA, 32 nt, Homo Sapiens
uucagcaaccuaaugaucucuaucucugaaca

SEQ ID NO: 230435 - RNA, 32 nt, Homo Sapiens
uccugaaaccaaucaauuacuuagaacuaggc

SEQ ID NO: 230436 - RNA, 32 nt, Homo Sapiens
uguauagaaacacaagugauauuugcauguua

SEQ ID NO: 230437 - RNA, 32 nt, Homo Sapiens
cuaggggcgcccugggucuuccaggagugauc

SEQ ID NO: 230438 - RNA, 32 nt, Homo Sapiens
cccugcuuucccuaguuccaguuccaagaugg

SEQ ID NO: 230439 - RNA, 32 nt, Homo Sapiens
acuucagagcuguacguuaguacucugaaguu

SEQ ID NO: 230440 - RNA, 32 nt, Homo Sapiens
cggugucugggcucagccagguggaaggaacc

SEQ ID NO: 230441 - RNA, 32 nt, Homo Sapiens
guuccuggggucugagauguguuaggaggcgu

SEQ ID NO: 230442 - RNA, 32 nt, Homo Sapiens
auuuccgagguccuguccacggcggggccuca

SEQ ID NO: 230443 - RNA, 32 nt, Homo Sapiens
aucaaaaucaauagauuaaaaauaguuugaca

SEQ ID NO: 230444 - RNA, 32 nt, Homo Sapiens
gcaaggagggagcgugaggagcagccagguga

SEQ ID NO: 230445 - RNA, 32 nt, Homo Sapiens
uuuuuacucccccucuaaacacugcugcugcc

SEQ ID NO: 230446 - RNA, 32 nt, Homo Sapiens
ccugaaggcagacgugugcccagaugugaaag

SEQ ID NO: 230447 - RNA, 32 nt, Homo Sapiens
aagcgcgugucugcgucggguucuguuggagu

SEQ ID NO: 230448 - RNA, 32 nt, Homo Sapiens
ggccgggcgcggugcucacgccuguaauccca

SEQ ID NO: 230449 - RNA, 32 nt, Homo Sapiens
accccucaccccacccccaccucuucuguaug

SEQ ID NO: 230450 - RNA, 32 nt, Homo Sapiens
ggaauugcugaccccuggaacuggcggguauu

SEQ ID NO: 230451 - RNA, 32 nt, Homo Sapiens
aauagaggcuuuucugcguuaagggagaagga

SEQ ID NO: 230452 - RNA, 32 nt, Homo Sapiens
cuggugaggaagagcuggggggcagagguaaa

SEQ ID NO: 230453 - RNA, 32 nt, Homo Sapiens
cagauaguaauauauaaacacacacaaugauu

SEQ ID NO: 230454 - RNA, 32 nt, Homo Sapiens
ucagcccuuuccaaagucgccaaaaacccaca

SEQ ID NO: 230455 - RNA, 32 nt, Homo Sapiens
gccuguagagacagaccuaggaggcggguuug

SEQ ID NO: 230456 - RNA, 32 nt, Homo Sapiens
cuauaaacuugucauugguaaauaguagucua

SEQ ID NO: 230457 - RNA, 32 nt, Homo Sapiens
caagcccagaaggcagaaucaagcuuugcuuu

SEQ ID NO: 230458 - RNA, 32 nt, Homo Sapiens
gugcuguggaccagcuguguggaucucuagcc

SEQ ID NO: 230459 - RNA, 32 nt, Homo Sapiens
gucuucuggggauuggaaaauggggaugaggc

SEQ ID NO: 230460 - RNA, 32 nt, Homo Sapiens
acaaaggagacgggggagcagcacgauuuugc

SEQ ID NO: 230461 - RNA, 29 nt, Homo Sapiens
ugugauggcugugcugccuggcccucugc

SEQ ID NO: 230462 - RNA, 32 nt, Homo Sapiens
gcaaggacgcagaauaagcagugagggcggcu

SEQ ID NO: 230463 - RNA, 32 nt, Homo Sapiens
caucuggaaaauugauaaagaagcgauucugu

SEQ ID NO: 230464 - RNA, 32 nt, Homo Sapiens
ugcuuguuaugaacuacacugaaaucuaccaa

SEQ ID NO: 230465 - RNA, 32 nt, Homo Sapiens
gccgggcgcuggcaagccgcgcgcugccuggg

SEQ ID NO: 230466 - RNA, 32 nt, Homo Sapiens
aauaaaauauuguaaaauacaacaaauuuugg

SEQ ID NO: 230467 - RNA, 32 nt, Homo Sapiens
gggcaccgucacggucagggccacgccacggg

SEQ ID NO: 230468 - RNA, 32 nt, Homo Sapiens
uggaggguauuuuuuauuuguggguucaaaaa

SEQ ID NO: 230469 - RNA, 32 nt, Homo Sapiens
gaaaauaucucccuuaagcaguguuaagguug

SEQ ID NO: 230470 - RNA, 32 nt, Homo Sapiens
uaaggguucuuugguaccucuaguagauagug

SEQ ID NO: 230471 - RNA, 32 nt, Homo Sapiens
uguuaacgcuuuguuucugcuauucaaaaacu

SEQ ID NO: 230472 - RNA, 32 nt, Homo Sapiens
uccucuggcagggcugugacugcugcaagcuc

SEQ ID NO: 230473 - RNA, 32 nt, Homo Sapiens
gucuccagggguguggaauggugggggaauuu

SEQ ID NO: 230474 - RNA, 32 nt, Homo Sapiens
uuagggcgaaacaaucacaagcccuuugcaca

SEQ ID NO: 230475 - RNA, 31 nt, Homo Sapiens
cccucggagccccccacucaguaggucugaa

SEQ ID NO: 230476 - RNA, 32 nt, Homo Sapiens
ugacccuagucauagacuguucucacuucacg

SEQ ID NO: 230477 - RNA, 32 nt, Homo Sapiens
gaaugcauaauguuuaaauagcauaaaaugaa

SEQ ID NO: 230478 - RNA, 32 nt, Homo Sapiens
aaauccaaccaaguccuccccugcuuugaagc

SEQ ID NO: 230479 - RNA, 32 nt, Homo Sapiens
ccugguucgcagugucuuuugacuuggguggg

SEQ ID NO: 230480 - RNA, 32 nt, Homo Sapiens
cauucccgccacucggggacagaugggcacaa

SEQ ID NO: 230481 - RNA, 32 nt, Homo Sapiens
ucaauucaauuuuuaaaagauaccgaauggau

SEQ ID NO: 230482 - RNA, 32 nt, Homo Sapiens
ucaaaaguuacuugccacuuaagcaaggaacu

SEQ ID NO: 230483 - RNA, 32 nt, Homo Sapiens
accauacacauuucugcacagcccuuacagaa

SEQ ID NO: 230484 - RNA, 32 nt, Homo Sapiens
ccacgccccucccccguccgcgcccucccucu

SEQ ID NO: 230485 - RNA, 32 nt, Homo Sapiens
uuuuguaacacaaaacauguugugaaagagug

SEQ ID NO: 230486 - RNA, 32 nt, Homo Sapiens
uuuucauguaacccuuuguucuuucaggaauu

SEQ ID NO: 230487 - RNA, 32 nt, Homo Sapiens
uguugcuucccucuccugucuuucccacugga

SEQ ID NO: 230488 - RNA, 32 nt, Homo Sapiens
uuuuauggggcgcuuauaauguuuauaauauu

SEQ ID NO: 230489 - RNA, 27 nt, Homo Sapiens
ggcccuuuuuucuucagagcuuguugu

SEQ ID NO: 230490 - RNA, 32 nt, Homo Sapiens
aaggccccuccccgcccacccgcggcucaaau

SEQ ID NO: 230491 - RNA, 32 nt, Homo Sapiens
cuccuccuacucagggacccagccccuccucu

SEQ ID NO: 230492 - RNA, 32 nt, Homo Sapiens
uggaggucccagcacauguguuuucaagaggc

SEQ ID NO: 230493 - RNA, 32 nt, Homo Sapiens
ucugccuggccggcucccccagccccaugcug

SEQ ID NO: 230494 - RNA, 32 nt, Homo Sapiens
uugcuugaguccaggaguucaaggcugcagug

SEQ ID NO: 230495 - RNA, 32 nt, Homo Sapiens
agacacugaugcugaggccucccuggaggaag

SEQ ID NO: 230496 - RNA, 32 nt, Homo Sapiens
gccugaggaaugacggggacuccaucgaggac

SEQ ID NO: 230497 - RNA, 32 nt, Homo Sapiens
gcacggagucucggcgucccauggcgcaaccu

SEQ ID NO: 230498 - RNA, 32 nt, Homo Sapiens
ucccugcccggggcuggugcugugguaccuac

SEQ ID NO: 230499 - RNA, 32 nt, Homo Sapiens
uuauuuacauguauauuuucacaugaaauacc

SEQ ID NO: 230500 - RNA, 32 nt, Homo Sapiens
gaugcccaacuuucugccagauguagaucuua

SEQ ID NO: 230501 - RNA, 32 nt, Homo Sapiens
uuguauaguauuuauuugaucuuauuuacuuu

SEQ ID NO: 230502 - RNA, 32 nt, Homo Sapiens
uguauuuguggccuuggacaugaggcagucag

SEQ ID NO: 230503 - RNA, 32 nt, Homo Sapiens
acacggaauccacagaucugcccugugaucau

SEQ ID NO: 230504 - RNA, 32 nt, Homo Sapiens
uaucuccuucccguuccucauccaccugccca

SEQ ID NO: 230505 - RNA, 32 nt, Homo Sapiens
uuuguggcaauagaaaacaguaaaaaacaggg

SEQ ID NO: 230506 - RNA, 32 nt, Homo Sapiens
cacagacuguggcagagcugcgcccaucccgc

SEQ ID NO: 230507 - RNA, 32 nt, Homo Sapiens
cggguccccucuuuuuuggccccaguauucau

SEQ ID NO: 230508 - RNA, 32 nt, Homo Sapiens
cccgauccgagccuccggcaaagguuuuuccc

SEQ ID NO: 230509 - RNA, 32 nt, Homo Sapiens
gauuccuucucucaucaacgggaaaguacuuc

SEQ ID NO: 230510 - RNA, 32 nt, Homo Sapiens
uaugguaugauuuauaaagauaaaugggccaa

SEQ ID NO: 230511 - RNA, 32 nt, Homo Sapiens
gccacgcucccuccccggagggcggcgggacu

SEQ ID NO: 230512 - RNA, 32 nt, Homo Sapiens
uacauuguuucauugcucuagauuucuuuuug

SEQ ID NO: 230513 - RNA, 32 nt, Homo Sapiens
gcucccugccccaggucacgccgccgguucca

SEQ ID NO: 230514 - RNA, 32 nt, Homo Sapiens
ggaauaaaagggaacuuaauucauacagguac

SEQ ID NO: 230515 - RNA, 32 nt, Homo Sapiens
acaccauaaaaguuuaauuccuuacagaagaa

SEQ ID NO: 230516 - RNA, 31 nt, Homo Sapiens
gugcgguagcuccagaaccaccucguuccug

SEQ ID NO: 230517 - RNA, 32 nt, Homo Sapiens
uggcagggugggugccugcugcugauaacauu

SEQ ID NO: 230518 - RNA, 32 nt, Homo Sapiens
cccugagcucugcaagcugugaucugucuggg

SEQ ID NO: 230519 - RNA, 32 nt, Homo Sapiens
gucuuaccuugauguaagacgacgugucgggg

SEQ ID NO: 230520 - RNA, 32 nt, Homo Sapiens
ugcaggauagagaacauuuccagaauacaaau

SEQ ID NO: 230521 - RNA, 32 nt, Homo Sapiens
uucucuuuuaccauuuuucugcgugcucucac

SEQ ID NO: 230522 - RNA, 32 nt, Homo Sapiens
agcccucgcccggcccccaccccagcugcccu

SEQ ID NO: 230523 - RNA, 32 nt, Homo Sapiens
ccaggggaggggcuguuugcuggcucaggcug

SEQ ID NO: 230524 - RNA, 32 nt, Homo Sapiens
gcucugcccucccuggcuccuggacuagagcc

SEQ ID NO: 230525 - RNA, 32 nt, Homo Sapiens
uucaguaucgacaaagauuacauucugaguac

SEQ ID NO: 230526 - RNA, 32 nt, Homo Sapiens
caccccucugcuggaucagaucacuacagguc

SEQ ID NO: 230527 - RNA, 32 nt, Homo Sapiens
gaggccacggcucagugaugggcucaccaccc

SEQ ID NO: 230528 - RNA, 32 nt, Homo Sapiens
gguccucggaagcugaguccagagcgaugcug

SEQ ID NO: 230529 - RNA, 32 nt, Homo Sapiens
cggucgaaaaagagauaaaguugaaggaaaua

SEQ ID NO: 230530 - RNA, 32 nt, Homo Sapiens
uuuuucaucucuauuuagcaacagaauuaagu

SEQ ID NO: 230531 - RNA, 32 nt, Homo Sapiens
ucguggguucuuccucuguuacauccugcuac

SEQ ID NO: 230532 - RNA, 32 nt, Homo Sapiens
uacccacccacccacacccacagccacgagga

SEQ ID NO: 230533 - RNA, 32 nt, Homo Sapiens
cagcucuccagccccaggacuucugcuggaac

SEQ ID NO: 230534 - RNA, 32 nt, Homo Sapiens
aaaaaugauuguaggaaaguugcaggauuagc

SEQ ID NO: 230535 - RNA, 32 nt, Homo Sapiens
ggccaccuccugcggcagguagcauggccaag

SEQ ID NO: 230536 - RNA, 32 nt, Homo Sapiens
guaucaacuaaaacaguguacaaaaucauuaa

SEQ ID NO: 230537 - RNA, 32 nt, Homo Sapiens
uuuugggaaaaauuauuuguguugggggaaau

SEQ ID NO: 230538 - RNA, 32 nt, Homo Sapiens
gauggcggguggggguggaauaaaauacuauu

SEQ ID NO: 230539 - RNA, 32 nt, Homo Sapiens
gcucuagcucagaaguugcagagcagccuggg

SEQ ID NO: 230540 - RNA, 32 nt, Homo Sapiens
uugauuguaauugcguuaaaucuuuugagagu

SEQ ID NO: 230541 - RNA, 32 nt, Homo Sapiens
acugcgugccuggcccuaugagggcggcggcg

SEQ ID NO: 230542 - RNA, 32 nt, Homo Sapiens
ucugacacacagagacacgcuccuugccucac

SEQ ID NO: 230543 - RNA, 32 nt, Homo Sapiens
uugaggucaggaguuugagagcagccuggcua

SEQ ID NO: 230544 - RNA, 32 nt, Homo Sapiens
uaugguuacaaggggcugcugcugcugcuggg

SEQ ID NO: 230545 - RNA, 32 nt, Homo Sapiens
uccaguauugaggaaagaaaaacugcaggauc

SEQ ID NO: 230546 - RNA, 32 nt, Homo Sapiens
cuauaaucacuacagauaaauuucauacucuu

SEQ ID NO: 230547 - RNA, 32 nt, Homo Sapiens
cccgucucaggauugcgcucgcuuucauggga

SEQ ID NO: 230548 - RNA, 32 nt, Homo Sapiens
aggcuuucucggccccucuccucagcuugcag

SEQ ID NO: 230549 - RNA, 32 nt, Homo Sapiens
ccaccuugcccugcauuuccccggcuuuaaca

SEQ ID NO: 230550 - RNA, 32 nt, Homo Sapiens
auuuaagaaugcuacauagugaccggacgugg

SEQ ID NO: 230551 - RNA, 32 nt, Homo Sapiens
agaauugagccugggaggcggguccggagagg

SEQ ID NO: 230552 - RNA, 32 nt, Homo Sapiens
aagugguguacaccauuugaauaaaggcacau

SEQ ID NO: 230553 - RNA, 32 nt, Homo Sapiens
uuccaucaccuuuuguaauauuacaauugcca

SEQ ID NO: 230554 - RNA, 32 nt, Homo Sapiens
gcauaaaguacaauagugaaauauuugaguug

SEQ ID NO: 230555 - RNA, 32 nt, Homo Sapiens
gcaccuuccugauccccuuaucucuaaggcgc

SEQ ID NO: 230556 - RNA, 32 nt, Homo Sapiens
gagugcggauugccaagacccuucuccagaga

SEQ ID NO: 230557 - RNA, 32 nt, Homo Sapiens
agggagacugcugugugcugcccgccugccug

SEQ ID NO: 230558 - RNA, 32 nt, Homo Sapiens
accccaaagccgcccccucccccggcucccug

SEQ ID NO: 230559 - RNA, 32 nt, Homo Sapiens
gagcuggaggucggcgcuuccucucgugcuug

SEQ ID NO: 230560 - RNA, 32 nt, Homo Sapiens
ugagcucagcuggcagaguuugcaaguggcgg

SEQ ID NO: 230561 - RNA, 32 nt, Homo Sapiens
aaugggauauaaaauacguaaucagcacuugu

SEQ ID NO: 230562 - RNA, 32 nt, Homo Sapiens
gcaguggccccgagcacauauugaguaucagu

SEQ ID NO: 230563 - RNA, 32 nt, Homo Sapiens
acuuuugaaaauaaaucuuucuuuauauugcu

SEQ ID NO: 230564 - RNA, 32 nt, Homo Sapiens
uuuuuucaauuucaguuugaaguuucacucuu

SEQ ID NO: 230565 - RNA, 32 nt, Homo Sapiens
auguaaccgcccagagggcuccagguccgcaa

SEQ ID NO: 230566 - RNA, 32 nt, Homo Sapiens
cuacagccacaaagcaaaccacagggccagug

SEQ ID NO: 230567 - RNA, 32 nt, Homo Sapiens
augcaguacuuugaaauauaucagccaaaacc

SEQ ID NO: 230568 - RNA, 32 nt, Homo Sapiens
uaucuuuguauguaucucuguaucuguaccuu

SEQ ID NO: 230569 - RNA, 32 nt, Homo Sapiens
cugaauguuugugucccccgccccacaaaucc

SEQ ID NO: 230570 - RNA, 32 nt, Homo Sapiens
uuauucucaaagaaaaucuuugaaagaaucag

SEQ ID NO: 230571 - RNA, 32 nt, Homo Sapiens
ggaauugugaauucauacuaagcuuucugugc

SEQ ID NO: 230572 - RNA, 32 nt, Homo Sapiens
uaggguauucagggaaccugucuuaaauugug

SEQ ID NO: 230573 - RNA, 32 nt, Homo Sapiens
aagggagaagcuuuguuuugccugcagaagca

SEQ ID NO: 230574 - RNA, 28 nt, Homo Sapiens
gggcggcggcggccgaggcugaaggaag

SEQ ID NO: 230575 - RNA, 32 nt, Homo Sapiens
auuacagaugaaaucucacugcuaaugcucag

SEQ ID NO: 230576 - RNA, 32 nt, Homo Sapiens
uggaggcgacggcggcugcggcggcggcggga

SEQ ID NO: 230577 - RNA, 32 nt, Homo Sapiens
accacugcagaacacgagccuuuccuggguau

SEQ ID NO: 230578 - RNA, 32 nt, Homo Sapiens
uuugaguguacaaacccauggcugggcucagc

SEQ ID NO: 230579 - RNA, 32 nt, Homo Sapiens
uuggaauauaguacucuagaugaugaaugugu

SEQ ID NO: 230580 - RNA, 32 nt, Homo Sapiens
gaacaugcuuucaaaacauauaaaaugucaaa

SEQ ID NO: 230581 - RNA, 32 nt, Homo Sapiens
ggcugagccgcgggccggcggggccgagcuga

SEQ ID NO: 230582 - RNA, 30 nt, Homo Sapiens
agaggggccccgcgcgcggaucucgcgaga

SEQ ID NO: 230583 - RNA, 32 nt, Homo Sapiens
gugggaaaacaaaauagucaauggaaaccuga

SEQ ID NO: 230584 - RNA, 32 nt, Homo Sapiens
cccccucccgcggcgacuuggagagagggaag

SEQ ID NO: 230585 - RNA, 32 nt, Homo Sapiens
aggucagaggggccucugugggugcuggguac

SEQ ID NO: 230586 - RNA, 32 nt, Homo Sapiens
gaacauacaaugauggggauaacugguccuca

SEQ ID NO: 230587 - RNA, 32 nt, Homo Sapiens
cgggggccaguagccagccaaccccgugggga

SEQ ID NO: 230588 - RNA, 27 nt, Homo Sapiens
aaggccuccuucuucagcagcucugag

SEQ ID NO: 230589 - RNA, 32 nt, Homo Sapiens
uuucuggaauguagccauuugcuguuaucugg

SEQ ID NO: 230590 - RNA, 32 nt, Homo Sapiens
cuccagcccguccuacccugggcucacauggg

SEQ ID NO: 230591 - RNA, 32 nt, Homo Sapiens
cuuuuaugaaaauuauaacaguuuuaucuccu

SEQ ID NO: 230592 - RNA, 32 nt, Homo Sapiens
auugcaccuggauuuguaguauccuucaaugu

SEQ ID NO: 230593 - RNA, 32 nt, Homo Sapiens
agucgugcacagagacacacccacacuagccc

SEQ ID NO: 230594 - RNA, 32 nt, Homo Sapiens
cagggugaccccagcccuggggcccagccaca

SEQ ID NO: 230595 - RNA, 32 nt, Homo Sapiens
cuaaauaucccaauaaaggaauguagaacaca

SEQ ID NO: 230596 - RNA, 32 nt, Homo Sapiens
ucgugacacugccccaccccagccaccuccac

SEQ ID NO: 230597 - RNA, 32 nt, Homo Sapiens
ggcugagguggggccggcagggggcgccaggc

SEQ ID NO: 230598 - RNA, 32 nt, Homo Sapiens
ggugaggggggcuggcggggcgaaguuugggg

SEQ ID NO: 230599 - RNA, 32 nt, Homo Sapiens
gagcacuuggaaagaugugcuucccugcugga

SEQ ID NO: 230600 - RNA, 32 nt, Homo Sapiens
ugauggcucauuuuccagaaaucucuguaggu

SEQ ID NO: 230601 - RNA, 32 nt, Homo Sapiens
uuugauaguguuauugucuguauuuuguuaaa

SEQ ID NO: 230602 - RNA, 32 nt, Homo Sapiens
auccccucacccgcccuuccuguccacgcccc

SEQ ID NO: 230603 - RNA, 30 nt, Homo Sapiens
aggccucuggacucagugcuuccuguccca

SEQ ID NO: 230604 - RNA, 32 nt, Homo Sapiens
cuccaucuuuuucucuguaaugguggagaggc

SEQ ID NO: 230605 - RNA, 32 nt, Homo Sapiens
ugugcgcucucgucgggagucccagccauguc

SEQ ID NO: 230606 - RNA, 32 nt, Homo Sapiens
ugggggcuguggggccgaugagguggacucag

SEQ ID NO: 230607 - RNA, 32 nt, Homo Sapiens
uggugugcaacagauuguacaauuacauuuug

SEQ ID NO: 230608 - RNA, 32 nt, Homo Sapiens
aggcgacaggaucaguccuucucuaggguucu

SEQ ID NO: 230609 - RNA, 32 nt, Homo Sapiens
uuucgccaucuuuugucuuuccguggagcugu

SEQ ID NO: 230610 - RNA, 32 nt, Homo Sapiens
agucccccucugccggccccccaaugccccag

SEQ ID NO: 230611 - RNA, 32 nt, Homo Sapiens
aaagaagagauuauaguaaacaagucuuuauc

SEQ ID NO: 230612 - RNA, 32 nt, Homo Sapiens
aggguuaguagcgcgucugugcugcuuccacc

SEQ ID NO: 230613 - RNA, 32 nt, Homo Sapiens
uauuuaaaccccgagauagugcuggaacacug

SEQ ID NO: 230614 - RNA, 32 nt, Homo Sapiens
ccagcuccuuggccauuucuaugugauuuccc

SEQ ID NO: 230615 - RNA, 32 nt, Homo Sapiens
ucauuuuucuguuagacuaggcaaauuguuca

SEQ ID NO: 230616 - RNA, 32 nt, Homo Sapiens
uucucaguaguuguccgugauaaucguguccu

SEQ ID NO: 230617 - RNA, 32 nt, Homo Sapiens
ugugacccugcaucaaagaaauuaaaaggaga

SEQ ID NO: 230618 - RNA, 32 nt, Homo Sapiens
gcgacgggagggggcugcgucucggcucccca

SEQ ID NO: 230619 - RNA, 32 nt, Homo Sapiens
auuguucuaaucuuugaaaucagggucaauua

SEQ ID NO: 230620 - RNA, 32 nt, Homo Sapiens
cgcggccgggccuugccccccauggugucccg

SEQ ID NO: 230621 - RNA, 32 nt, Homo Sapiens
ccuaaaccccaauacaucauugaauucaaaua

SEQ ID NO: 230622 - RNA, 32 nt, Homo Sapiens
uuuuuuacuuuguaguuuauuuuuuagugaau

SEQ ID NO: 230623 - RNA, 32 nt, Homo Sapiens
ccagaggaggccggugaagugcaucuucugcg

SEQ ID NO: 230624 - RNA, 32 nt, Homo Sapiens
cuuuccaaacugacaagcacacuuuuuuccuc

SEQ ID NO: 230625 - RNA, 32 nt, Homo Sapiens
uaucuuucccucuuuuucacuuugagcuuugg

SEQ ID NO: 230626 - RNA, 32 nt, Homo Sapiens
aguguggcugcagugcgccgggacaccagggc

SEQ ID NO: 230627 - RNA, 32 nt, Homo Sapiens
agugcacaaggugggaaaagccagcucagagg

SEQ ID NO: 230628 - RNA, 32 nt, Homo Sapiens
ugacggcacaaagguucuugggaaauagaauc

SEQ ID NO: 230629 - RNA, 32 nt, Homo Sapiens
acaaaaaucuucaaagacugguuucuuuuuua

SEQ ID NO: 230630 - RNA, 32 nt, Homo Sapiens
uucucaucuauccauguccacuggccugccag

SEQ ID NO: 230631 - RNA, 32 nt, Homo Sapiens
ugcacucccccgcugucuucccugucuucauc

SEQ ID NO: 230632 - RNA, 32 nt, Homo Sapiens
aggggcucccccuguugcgggugaggcggcug

SEQ ID NO: 230633 - RNA, 32 nt, Homo Sapiens
accaugcccuucugccaucuucugggagaagg

SEQ ID NO: 230634 - RNA, 32 nt, Homo Sapiens
gguuuugaugcuuguuuagagaucagcagucu

SEQ ID NO: 230635 - RNA, 32 nt, Homo Sapiens
gcacccuuugcaucuucccauccacgccucuc

SEQ ID NO: 230636 - RNA, 32 nt, Homo Sapiens
auacuuuucauuuuaaaauguauaaaguaaca

SEQ ID NO: 230637 - RNA, 32 nt, Homo Sapiens
uucccaaguuucuccuugguccuccugucauu

SEQ ID NO: 230638 - RNA, 32 nt, Homo Sapiens
uugauaguaacaacagaagcauaauuuuagga

SEQ ID NO: 230639 - RNA, 32 nt, Homo Sapiens
guuauccuuucuguauuugcgucuuucuugug

SEQ ID NO: 230640 - RNA, 32 nt, Homo Sapiens
caccuagaaauucgugucaccgccgagguccc

SEQ ID NO: 230641 - RNA, 32 nt, Homo Sapiens
ucaccagcaggucccggcagcaacucuucuac

SEQ ID NO: 230642 - RNA, 32 nt, Homo Sapiens
agcugaguguuuuuauuaauuacuuuuuggcu

SEQ ID NO: 230643 - RNA, 32 nt, Homo Sapiens
acugauuugaagauagccuuuuuuauguuucu

SEQ ID NO: 230644 - RNA, 32 nt, Homo Sapiens
gguccagccucccagcugccucgauuugugcg

SEQ ID NO: 230645 - RNA, 32 nt, Homo Sapiens
ugugggcccagucauuggguuuuaucagugcu

SEQ ID NO: 230646 - RNA, 32 nt, Homo Sapiens
guaaguucucaauaaaaauuguuaagaaaugc

SEQ ID NO: 230647 - RNA, 32 nt, Homo Sapiens
agaccaguugacuucagcaucaguccaccucu

SEQ ID NO: 230648 - RNA, 32 nt, Homo Sapiens
cccgggcagcggggacacguaccggcccaagc

SEQ ID NO: 230649 - RNA, 32 nt, Homo Sapiens
gggacaaaagaccgggacucggguugccgucg

SEQ ID NO: 230650 - RNA, 32 nt, Homo Sapiens
uuuacacacacacacacacacacacacacaca

SEQ ID NO: 230651 - RNA, 32 nt, Homo Sapiens
ucguggccaaccccuggcaccccuaucaaccc

SEQ ID NO: 230652 - RNA, 32 nt, Homo Sapiens
ucgcaggugcaaacacacaaggaguuuggugg

SEQ ID NO: 230653 - RNA, 32 nt, Homo Sapiens
ugggcaaugcugugaggaaugugugucuccug

SEQ ID NO: 230654 - RNA, 32 nt, Homo Sapiens
cuccgggcggcgugcgccgcggugccuagugu

SEQ ID NO: 230655 - RNA, 32 nt, Homo Sapiens
cuggaccaguguuuccauaacagggacuucaa

SEQ ID NO: 230656 - RNA, 32 nt, Homo Sapiens
cucuaggaggcagccccuaggagcacgcacgu

SEQ ID NO: 230657 - RNA, 32 nt, Homo Sapiens
uucuaaugaucccaucaccaaaguagcaaacg

SEQ ID NO: 230658 - RNA, 32 nt, Homo Sapiens
caaagacaagguggcuguggccuaugucuacc

SEQ ID NO: 230659 - RNA, 32 nt, Homo Sapiens
accccacuuccacauggcccucgucccuuccu

SEQ ID NO: 230660 - RNA, 32 nt, Homo Sapiens
agagugggaacaaccagaaucuuaccuggggu

SEQ ID NO: 230661 - RNA, 32 nt, Homo Sapiens
ggacagcauuugcugcccccaccccucuuuuc

SEQ ID NO: 230662 - RNA, 32 nt, Homo Sapiens
auuauaggaguguugaucacaaaagaacuauu

SEQ ID NO: 230663 - RNA, 32 nt, Homo Sapiens
acauaugccaugcagcuacaccuaccggcccu

SEQ ID NO: 230664 - RNA, 32 nt, Homo Sapiens
cacacccaccgcccaggucuuaacuuucuggc

SEQ ID NO: 230665 - RNA, 32 nt, Homo Sapiens
uugcuucaauuucaaacuuuugaaagauguau

SEQ ID NO: 230666 - RNA, 30 nt, Homo Sapiens
agugguagcggcggcggcggcgaccggggc

SEQ ID NO: 230667 - RNA, 32 nt, Homo Sapiens
caaagaagauugugcuaaggcuugagugcauu

SEQ ID NO: 230668 - RNA, 32 nt, Homo Sapiens
agccccuuucugcacucucugcucuucucugg

SEQ ID NO: 230669 - RNA, 32 nt, Homo Sapiens
caugaauuugcacuuugguuuuugauaccugu

SEQ ID NO: 230670 - RNA, 32 nt, Homo Sapiens
cuucaggccuucccuucuccauccugccaugu

SEQ ID NO: 230671 - RNA, 30 nt, Homo Sapiens
caaucauggaacuguguuuggccacuggaa

SEQ ID NO: 230672 - RNA, 32 nt, Homo Sapiens
agagggugaacagggaacucuaugcuagauuu

SEQ ID NO: 230673 - RNA, 32 nt, Homo Sapiens
auauugugcuguaucuguguuugugucugugu

SEQ ID NO: 230674 - RNA, 32 nt, Homo Sapiens
ucugggcaugcgccacagcggccguuacgaga

SEQ ID NO: 230675 - RNA, 32 nt, Homo Sapiens
uucuuaccccaccccucaauaagauuugguga

SEQ ID NO: 230676 - RNA, 31 nt, Homo Sapiens
cagaugauguuacauaagguauaucagaccu

SEQ ID NO: 230677 - RNA, 30 nt, Homo Sapiens
ggcucggcgcccgcugcuugcaccucccgg

SEQ ID NO: 230678 - RNA, 32 nt, Homo Sapiens
agaucugugaaugggauuaagguggacaagau

SEQ ID NO: 230679 - RNA, 32 nt, Homo Sapiens
agguaggaaggggaggaagucugaguaagcca

SEQ ID NO: 230680 - RNA, 32 nt, Homo Sapiens
uuccauuggcuguguuacuggauguuuuacug

SEQ ID NO: 230681 - RNA, 32 nt, Homo Sapiens
ugcaggaggcuugucaugggucgggggugccc

SEQ ID NO: 230682 - RNA, 32 nt, Homo Sapiens
gcuaacacacugcuauuaauucuaaaugaguu

SEQ ID NO: 230683 - RNA, 32 nt, Homo Sapiens
acacucaagaggccuuggcagcuccuagccau

SEQ ID NO: 230684 - RNA, 32 nt, Homo Sapiens
aaacaagcuuaccaagagacuaaagagugaau

SEQ ID NO: 230685 - RNA, 32 nt, Homo Sapiens
acugcuacuauaauucaauuuucaauuuaagg

SEQ ID NO: 230686 - RNA, 32 nt, Homo Sapiens
cagaccuuuccuguucccacucuuguuggcuc

SEQ ID NO: 230687 - RNA, 32 nt, Homo Sapiens
uucucccgccaccgccgccgccgccuuccgca

SEQ ID NO: 230688 - RNA, 32 nt, Homo Sapiens
uucgcacccaucgcugccgccggucaccgccg

SEQ ID NO: 230689 - RNA, 32 nt, Homo Sapiens
gagaagagugcugagcugagcggcgaguuucc

SEQ ID NO: 230690 - RNA, 32 nt, Homo Sapiens
gccccgcccccgcuuucccgccugccggggac

SEQ ID NO: 230691 - RNA, 32 nt, Homo Sapiens
ggacaguugccucccccucaucuccagugacu

SEQ ID NO: 230692 - RNA, 32 nt, Homo Sapiens
auggcgaccgcgaagugacucccuuaccgccg

SEQ ID NO: 230693 - RNA, 32 nt, Homo Sapiens
ucucgagaacagaaggaucucuccuuaacgcc

SEQ ID NO: 230694 - RNA, 32 nt, Homo Sapiens
aaagcagccaacaucagccuccccugucaacu

SEQ ID NO: 230695 - RNA, 32 nt, Homo Sapiens
uggaaggauauuguccuuuuggagcagggcag

SEQ ID NO: 230696 - RNA, 32 nt, Homo Sapiens
uauugacugaugccagcucugugccagacaca

SEQ ID NO: 230697 - RNA, 32 nt, Homo Sapiens
ggccauccuuuagaaacccugucuaguuguuc

SEQ ID NO: 230698 - RNA, 32 nt, Homo Sapiens
acguuauguugaugaagguuuacauuuuauca

SEQ ID NO: 230699 - RNA, 32 nt, Homo Sapiens
gcuguugcuguuuuuauuauaaaauguuauau

SEQ ID NO: 230700 - RNA, 32 nt, Homo Sapiens
cagcuguuauaaauaaaauacaugcugagccu

SEQ ID NO: 230701 - RNA, 32 nt, Homo Sapiens
cgggugaugucugaugaagacacacuccuacu

SEQ ID NO: 230702 - RNA, 32 nt, Homo Sapiens
aguccacuccgugcgugcgggcggaggccggc

SEQ ID NO: 230703 - RNA, 31 nt, Homo Sapiens
uggggggugggccccaugcggacccagcccg

SEQ ID NO: 230704 - RNA, 32 nt, Homo Sapiens
aaacacccucccucacuacaggaucuucaugu

SEQ ID NO: 230705 - RNA, 32 nt, Homo Sapiens
cugaaguccggggcagucacccggggcuccug

SEQ ID NO: 230706 - RNA, 32 nt, Homo Sapiens
uauguauuuuaaaguguguaacuauuaaaaau

SEQ ID NO: 230707 - RNA, 32 nt, Homo Sapiens
aacuguuuaaacauugauuugcaguuaagaau

SEQ ID NO: 230708 - RNA, 32 nt, Homo Sapiens
ggucugcagguuagacguucccugcccuggga

SEQ ID NO: 230709 - RNA, 32 nt, Homo Sapiens
gucugccucuccuuccucucugcagcccaaau

SEQ ID NO: 230710 - RNA, 32 nt, Homo Sapiens
gugucuaauguuuuucuuucuucuauuucuag

SEQ ID NO: 230711 - RNA, 32 nt, Homo Sapiens
caggccaggcaccgccgcucugacugggggcc

SEQ ID NO: 230712 - RNA, 32 nt, Homo Sapiens
aggagccaaccuugcugccugcgacccuggag

SEQ ID NO: 230713 - RNA, 32 nt, Homo Sapiens
aucagcggggagcuacugaggaccuccucacu

SEQ ID NO: 230714 - RNA, 32 nt, Homo Sapiens
aaaaucuggauuuauuucucuaguuuacuuau

SEQ ID NO: 230715 - RNA, 32 nt, Homo Sapiens
cugggcgguggcggccgagacuggcgggggug

SEQ ID NO: 230716 - RNA, 32 nt, Homo Sapiens
agcuaggcucugcagugcuguuuggagacugu

SEQ ID NO: 230717 - RNA, 32 nt, Homo Sapiens
cauggguauaucuauuuuucuaccacgucuag

SEQ ID NO: 230718 - RNA, 32 nt, Homo Sapiens
ucgagggcucugcuguccucugcgcugggugu

SEQ ID NO: 230719 - RNA, 32 nt, Homo Sapiens
ggcaucugucuccugcucguccuggcaaugga

SEQ ID NO: 230720 - RNA, 32 nt, Homo Sapiens
ugagagacuauaagagcguucccuaccgccau

SEQ ID NO: 230721 - RNA, 32 nt, Homo Sapiens
ccuuccuucccuccccgcaucuccagagagag

SEQ ID NO: 230722 - RNA, 32 nt, Homo Sapiens
aagccagccaggccguucauuauuuaaaacgu

SEQ ID NO: 230723 - RNA, 32 nt, Homo Sapiens
aaaugugucuuacuacuguuugagacuagugu

SEQ ID NO: 230724 - RNA, 32 nt, Homo Sapiens
cuucggagaguggaggccauggucauccgaga

SEQ ID NO: 230725 - RNA, 32 nt, Homo Sapiens
cccccaacugcaccccagccacaccaugucaa

SEQ ID NO: 230726 - RNA, 32 nt, Homo Sapiens
acuggcaguaaccuagugaauuuuugaaagau

SEQ ID NO: 230727 - RNA, 32 nt, Homo Sapiens
acuuggggugggaggggagaaagggaaccuuu

SEQ ID NO: 230728 - RNA, 32 nt, Homo Sapiens
caccuaaauuguaucugauaugguuuggcugu

SEQ ID NO: 230729 - RNA, 32 nt, Homo Sapiens
uuaauuuuauguuuuuaacaugguauuuuuga

SEQ ID NO: 230730 - RNA, 32 nt, Homo Sapiens
gaguaggagaaucaaagcuguuguauaauuag

SEQ ID NO: 230731 - RNA, 32 nt, Homo Sapiens
aucagauccuaaacaaaccaauucugagaauu

SEQ ID NO: 230732 - RNA, 32 nt, Homo Sapiens
uucuuaauuacauuucauucauuuauauuaga

SEQ ID NO: 230733 - RNA, 32 nt, Homo Sapiens
aaaaccccuacccuccuugguuuaccuccauc

SEQ ID NO: 230734 - RNA, 30 nt, Homo Sapiens
cccggcuggguuccgauccgccgugucucu

SEQ ID NO: 230735 - RNA, 32 nt, Homo Sapiens
uauuuaaauacacacccagacacacacacaca

SEQ ID NO: 230736 - RNA, 32 nt, Homo Sapiens
aaacuuaaacacagccgagaaguugcuucuuu

SEQ ID NO: 230737 - RNA, 32 nt, Homo Sapiens
ugccucuguacccacuugaucuacgccuuugc

SEQ ID NO: 230738 - RNA, 32 nt, Homo Sapiens
ugugcaaaaugaagaaaagcagaugaacagaa

SEQ ID NO: 230739 - RNA, 32 nt, Homo Sapiens
agcucggugcagccuucuguaauggggagaga

SEQ ID NO: 230740 - RNA, 32 nt, Homo Sapiens
ugaauggauggcaagaaggaaguaaaagggag

SEQ ID NO: 230741 - RNA, 32 nt, Homo Sapiens
gggauggaauccaccaggcuccagcucauccc

SEQ ID NO: 230742 - RNA, 32 nt, Homo Sapiens
uuguagaggggugggugcgcacgcucuguccc

SEQ ID NO: 230743 - RNA, 32 nt, Homo Sapiens
ccacggcggcagcgaucugcccggggucucgg

SEQ ID NO: 230744 - RNA, 32 nt, Homo Sapiens
auaauuggcucaggucucggcucugccaucua

SEQ ID NO: 230745 - RNA, 32 nt, Homo Sapiens
gccugagcugucgcaccuggcgcggaggucgc

SEQ ID NO: 230746 - RNA, 32 nt, Homo Sapiens
auccaguucuuacugauugagacagaguggaa

SEQ ID NO: 230747 - RNA, 32 nt, Homo Sapiens
aggggccaagcgggauacgggcggcgggagcu

SEQ ID NO: 230748 - RNA, 32 nt, Homo Sapiens
ccgaaggcagcaagugcccaucuuuccccagc

SEQ ID NO: 230749 - RNA, 31 nt, Homo Sapiens
cagccucguuccacucgucuaauuggcuugu

SEQ ID NO: 230750 - RNA, 32 nt, Homo Sapiens
gcccaggagggguggggaggggggcgaggaga

SEQ ID NO: 230751 - RNA, 32 nt, Homo Sapiens
uccuguuugggaagagcuuagaaacuggaaau

SEQ ID NO: 230752 - RNA, 32 nt, Homo Sapiens
gcaucaauacucaaauauaggcugauuaugcc

SEQ ID NO: 230753 - RNA, 32 nt, Homo Sapiens
auuugguguuccaugaggaaaagggaaaaucu

SEQ ID NO: 230754 - RNA, 32 nt, Homo Sapiens
cuccugguauauaaaaugaugguauucuaagg

SEQ ID NO: 230755 - RNA, 32 nt, Homo Sapiens
ccuuaguugucaugguugguuauuuucagggc

SEQ ID NO: 230756 - RNA, 32 nt, Homo Sapiens
agccgggcgugggggcgggcaucuguaguccc

SEQ ID NO: 230757 - RNA, 32 nt, Homo Sapiens
caccccauaucuucuuuccauuuauuucguac

SEQ ID NO: 230758 - RNA, 32 nt, Homo Sapiens
aaugcagucccuggauucugugccaucugaac

SEQ ID NO: 230759 - RNA, 32 nt, Homo Sapiens
ugacauauuuacgcuugugaucaaauaaugau

SEQ ID NO: 230760 - RNA, 32 nt, Homo Sapiens
accguacaguuucauuugcauuuugacauuac

SEQ ID NO: 230761 - RNA, 32 nt, Homo Sapiens
ucucccugccagcggagugcugggccgaggac

SEQ ID NO: 230762 - RNA, 32 nt, Homo Sapiens
caacucugcuacuuuuauuuuaucuuagaaaa

SEQ ID NO: 230763 - RNA, 32 nt, Homo Sapiens
uuauguuaaaacuuugaagaaauugaacauga

SEQ ID NO: 230764 - RNA, 32 nt, Homo Sapiens
ugcuauagcauccucagcuggaugcuaggaga

SEQ ID NO: 230765 - RNA, 32 nt, Homo Sapiens
auuuuaguuugaaagaaaauuucuucccaagc

SEQ ID NO: 230766 - RNA, 32 nt, Homo Sapiens
uggauugcucaguaagacccaggccuuuccgg

SEQ ID NO: 230767 - RNA, 32 nt, Homo Sapiens
aagcaguuaccugaugccugcugcugaagagc

SEQ ID NO: 230768 - RNA, 32 nt, Homo Sapiens
cgugcugccaggucacccagaccuccagacag

SEQ ID NO: 230769 - RNA, 32 nt, Homo Sapiens
cccaagcucagcucagcguccggacccaauaa

SEQ ID NO: 230770 - RNA, 32 nt, Homo Sapiens
cacaacagcacugcccucugaggcugccauga

SEQ ID NO: 230771 - RNA, 32 nt, Homo Sapiens
uugcuggcugggccacgcgugcuugagaaggu

SEQ ID NO: 230772 - RNA, 32 nt, Homo Sapiens
uuuaagaaguauuuuuccuauuuuuugcuguc

SEQ ID NO: 230773 - RNA, 32 nt, Homo Sapiens
uaaaaaaguguuacuuuguaaaaauuguauau

SEQ ID NO: 230774 - RNA, 32 nt, Homo Sapiens
gggaucugggugccggcaucuccagccagccc

SEQ ID NO: 230775 - RNA, 32 nt, Homo Sapiens
uucuugcucccuguuuucucuucugugggaug

SEQ ID NO: 230776 - RNA, 32 nt, Homo Sapiens
uucugccugugcucagagcuccagcagcagaa

SEQ ID NO: 230777 - RNA, 32 nt, Homo Sapiens
guguauuagguuuuuaaauaccagcuaaagga

SEQ ID NO: 230778 - RNA, 32 nt, Homo Sapiens
ccuccgcucagcucaugggaacacucauucua

SEQ ID NO: 230779 - RNA, 32 nt, Homo Sapiens
ugcugagcacugggccugugcugggugggaga

SEQ ID NO: 230780 - RNA, 32 nt, Homo Sapiens
gcagagaaaaauacuauaauggagacuauucu

SEQ ID NO: 230781 - RNA, 32 nt, Homo Sapiens
aagagguugggaagagggagugggaggggucu

SEQ ID NO: 230782 - RNA, 32 nt, Homo Sapiens
gcaagagcuuuuuuuuuuuuuaaacuaccauc

SEQ ID NO: 230783 - RNA, 32 nt, Homo Sapiens
ugaagagcagagcagaauagagacagaugcac

SEQ ID NO: 230784 - RNA, 32 nt, Homo Sapiens
ugguuuuccaugaaucagccaagauuccugua

SEQ ID NO: 230785 - RNA, 32 nt, Homo Sapiens
caaguucuccccacccccagccccacaguuua

SEQ ID NO: 230786 - RNA, 32 nt, Homo Sapiens
gguagcgguggccuugguugucuuccagucuc

SEQ ID NO: 230787 - RNA, 32 nt, Homo Sapiens
ggcucagccacaucuuggggucugggaggccc

SEQ ID NO: 230788 - RNA, 32 nt, Homo Sapiens
cucacguggguuggcugcuugugcgcaaacac

SEQ ID NO: 230789 - RNA, 32 nt, Homo Sapiens
aggcucacugcaaccucugucuccaggguuga

SEQ ID NO: 230790 - RNA, 32 nt, Homo Sapiens
ggaaaguuuccucauuuuguuugacagggucc

SEQ ID NO: 230791 - RNA, 32 nt, Homo Sapiens
uuacuucaagacaggagacauggguugaaugc

SEQ ID NO: 230792 - RNA, 32 nt, Homo Sapiens
cauguugaaacaagagagggugagauuaaccu

SEQ ID NO: 230793 - RNA, 32 nt, Homo Sapiens
cugaagcuuuauuugcauauuuauuucagaug

SEQ ID NO: 230794 - RNA, 32 nt, Homo Sapiens
ugcaaaucauaauuuuaagcaauauaaauuau

SEQ ID NO: 230795 - RNA, 32 nt, Homo Sapiens
acuuuuaucacagaucaguuucaacuguuaaa

SEQ ID NO: 230796 - RNA, 32 nt, Homo Sapiens
acucgccaggggcgccgccggcggcggaggga

SEQ ID NO: 230797 - RNA, 32 nt, Homo Sapiens
cugauuauauccuggugacaaggaggacaaau

SEQ ID NO: 230798 - RNA, 32 nt, Homo Sapiens
gccaaucccuucccucccagaagcuggccgcc

SEQ ID NO: 230799 - RNA, 29 nt, Homo Sapiens
ucgaugaugaagacucagauuauuccuuu

SEQ ID NO: 230800 - RNA, 32 nt, Homo Sapiens
guucaguucucuucaugguuaugucugguuuc

SEQ ID NO: 230801 - RNA, 31 nt, Homo Sapiens
ggaaauauguaaauaaauauaucagcaaagc

SEQ ID NO: 230802 - RNA, 29 nt, Homo Sapiens
cgcacuccggucccggucucgucgccaag

SEQ ID NO: 230803 - RNA, 32 nt, Homo Sapiens
gcgcauuccucgcgccgcauuccugagcuuaa

SEQ ID NO: 230804 - RNA, 32 nt, Homo Sapiens
aauuuuaauauauucuucuauggaucacacac

SEQ ID NO: 230805 - RNA, 32 nt, Homo Sapiens
acuacacuacaggauaugaucuccauguaguc

SEQ ID NO: 230806 - RNA, 32 nt, Homo Sapiens
acccagucugguuuuuuuuuuaaaugggguaa

SEQ ID NO: 230807 - RNA, 32 nt, Homo Sapiens
cauaugcauaagaaguuaaucaccuugccagu

SEQ ID NO: 230808 - RNA, 32 nt, Homo Sapiens
aaaaauaaaaauuuggggaguuaaaaaaaaaa

SEQ ID NO: 230809 - RNA, 32 nt, Homo Sapiens
aguuugguugauaacaggauagauaacagaau

SEQ ID NO: 230810 - RNA, 32 nt, Homo Sapiens
gaaagagccaaugcaagaacucuggcaacuca

SEQ ID NO: 230811 - RNA, 32 nt, Homo Sapiens
cccucacccuuaaagcuuaaagcaguuguaag

SEQ ID NO: 230812 - RNA, 32 nt, Homo Sapiens
caaaccacauuacuucugucacuucagggcau

SEQ ID NO: 230813 - RNA, 32 nt, Homo Sapiens
gagagaaucucuuuagcucauuccuaauggag

SEQ ID NO: 230814 - RNA, 32 nt, Homo Sapiens
agggagauaugauuauauuguauuuucucaga

SEQ ID NO: 230815 - RNA, 32 nt, Homo Sapiens
cgccagccucgacggcggccccgccaucuccg

SEQ ID NO: 230816 - RNA, 32 nt, Homo Sapiens
auaaaaaauuguacuuugaacaaccaaauggg

SEQ ID NO: 230817 - RNA, 32 nt, Homo Sapiens
acaacuggaaaacaggaaugaagucucuccua

SEQ ID NO: 230818 - RNA, 32 nt, Homo Sapiens
ccuaaggcaugugugaaacauacucauagaug

SEQ ID NO: 230819 - RNA, 32 nt, Homo Sapiens
uugggggaagggguaugugucacuaauagaau

SEQ ID NO: 230820 - RNA, 32 nt, Homo Sapiens
uauagauagggaccguggacucgggggcccuu

SEQ ID NO: 230821 - RNA, 32 nt, Homo Sapiens
aaggggauguuucaaggcaaccuuuccugcac

SEQ ID NO: 230822 - RNA, 32 nt, Homo Sapiens
ugugugggagacgaaauaacuuguuuacauaa

SEQ ID NO: 230823 - RNA, 32 nt, Homo Sapiens
ucaccaaaaaauuuauauauuuugcucauaua

SEQ ID NO: 230824 - RNA, 32 nt, Homo Sapiens
uggagauuucauggccucuggaccucaaaguc

SEQ ID NO: 230825 - RNA, 32 nt, Homo Sapiens
cgccauggcccggaucccgacggccgcccugg

SEQ ID NO: 230826 - RNA, 32 nt, Homo Sapiens
ccauugcuggcuuugcagacacaucacccagu

SEQ ID NO: 230827 - RNA, 32 nt, Homo Sapiens
ggcuccccgccuuaacuuccuccgcggggccc

SEQ ID NO: 230828 - RNA, 32 nt, Homo Sapiens
gcauucauuucccuuuauauuucccugaaaua

SEQ ID NO: 230829 - RNA, 32 nt, Homo Sapiens
gccugggagaggggcuucggugcgcgggggga

SEQ ID NO: 230830 - RNA, 32 nt, Homo Sapiens
gaaggaaagcggagacccgagcagggguuuua

SEQ ID NO: 230831 - RNA, 32 nt, Homo Sapiens
aacaagaaaaggaaagucugagcaguuuugau

SEQ ID NO: 230832 - RNA, 32 nt, Homo Sapiens
uccgaggcgaggggcaagugggcgaagggagg

SEQ ID NO: 230833 - RNA, 32 nt, Homo Sapiens
ccauccccagccuccacccccauccagauggg

SEQ ID NO: 230834 - RNA, 32 nt, Homo Sapiens
gugcugguucccucucugcacccggacuggac

SEQ ID NO: 230835 - RNA, 32 nt, Homo Sapiens
ccccaagccguuccgcaccgcggccgcucagc

SEQ ID NO: 230836 - RNA, 32 nt, Homo Sapiens
gcccuucuccggccugcagccucccccagggu

SEQ ID NO: 230837 - RNA, 32 nt, Homo Sapiens
ggggccagaggguggggcagguggcggcgaug

SEQ ID NO: 230838 - RNA, 32 nt, Homo Sapiens
agaagaaaaugaauuuauguauauaucagaug

SEQ ID NO: 230839 - RNA, 32 nt, Homo Sapiens
aagcagcacaugugucgaacacugccgagccc

SEQ ID NO: 230840 - RNA, 32 nt, Homo Sapiens
gcaacaaucuucauuguaaguucuguccuaca

SEQ ID NO: 230841 - RNA, 32 nt, Homo Sapiens
ugcgaggaauggaugcaguuugaaaugaucac

SEQ ID NO: 230842 - RNA, 32 nt, Homo Sapiens
guaaccgggccccgggagccggucggcggcgg

SEQ ID NO: 230843 - RNA, 32 nt, Homo Sapiens
guugcguuuaauauauuuuuugaacuuuguag

SEQ ID NO: 230844 - RNA, 32 nt, Homo Sapiens
aguuuuaagagauaauuuuuaugagaauugac

SEQ ID NO: 230845 - RNA, 32 nt, Homo Sapiens
aggucggcgggggucuggguggccauggagga

SEQ ID NO: 230846 - RNA, 32 nt, Homo Sapiens
cauagauuuaacauuuaccaucuucaaaguac

SEQ ID NO: 230847 - RNA, 32 nt, Homo Sapiens
uguauucccacuuucguagucauuucgguucu

SEQ ID NO: 230848 - RNA, 32 nt, Homo Sapiens
agcuuuguagguucaucugugcugcaccucug

SEQ ID NO: 230849 - RNA, 32 nt, Homo Sapiens
caguccuuuaacaaagauuuauuaagccuaua

SEQ ID NO: 230850 - RNA, 32 nt, Homo Sapiens
cgcucugccugccugcucagaagagguggcuu

SEQ ID NO: 230851 - RNA, 32 nt, Homo Sapiens
agguagggggugggcugggggaggcgggugag

SEQ ID NO: 230852 - RNA, 32 nt, Homo Sapiens
aauguuuacaguguuauuuuguaucucucaag

SEQ ID NO: 230853 - RNA, 32 nt, Homo Sapiens
guuaacgugggguuggagccagacacauacaa

SEQ ID NO: 230854 - RNA, 32 nt, Homo Sapiens
ugauaucuguuguugcaauguuagugauguuu

SEQ ID NO: 230855 - RNA, 32 nt, Homo Sapiens
ggcgggcucagggagcgagggaggcggcggcu

SEQ ID NO: 230856 - RNA, 32 nt, Homo Sapiens
gauguaauuuaaaacuuuuguuuaaagcauua

SEQ ID NO: 230857 - RNA, 32 nt, Homo Sapiens
gaacagcccuccugggguccccacgagccgcg

SEQ ID NO: 230858 - RNA, 32 nt, Homo Sapiens
cagggcccacccagaagaccgugaacaguucc

SEQ ID NO: 230859 - RNA, 32 nt, Homo Sapiens
uccuguugcuuggaauguggaucugguaguga

SEQ ID NO: 230860 - RNA, 32 nt, Homo Sapiens
aaaccuaaggucuuagaaaaucuuaacuugaa

SEQ ID NO: 230861 - RNA, 32 nt, Homo Sapiens
gggacauaacuggugccuggaaaucaccaugg

SEQ ID NO: 230862 - RNA, 32 nt, Homo Sapiens
accuuccagugguuuuauguuuuguuuuguuu

SEQ ID NO: 230863 - RNA, 32 nt, Homo Sapiens
uccaguauccugaaacaguguuuggugacaua

SEQ ID NO: 230864 - RNA, 32 nt, Homo Sapiens
ggcaugucaguaagugguguguucaauguguu

SEQ ID NO: 230865 - RNA, 32 nt, Homo Sapiens
ggcugccauguucucucuuccaucccuccccu

SEQ ID NO: 230866 - RNA, 32 nt, Homo Sapiens
ugcucacugagaucuccuuuuuggggcagaga

SEQ ID NO: 230867 - RNA, 32 nt, Homo Sapiens
guuuuuaaaaauuaauaacuuuuaguaauuac

SEQ ID NO: 230868 - RNA, 32 nt, Homo Sapiens
cagugaugaccucagccuagggacaccaaaaa

SEQ ID NO: 230869 - RNA, 32 nt, Homo Sapiens
uugugucuugaaaacuaaguauuggaguggau

SEQ ID NO: 230870 - RNA, 32 nt, Homo Sapiens
gaucauuuuaucacaacuuccagcugcuauca

SEQ ID NO: 230871 - RNA, 32 nt, Homo Sapiens
ccggccauucuccccucacccuccucaccuuc

SEQ ID NO: 230872 - RNA, 32 nt, Homo Sapiens
cugcugaggaagaucaauaauaccuacuggaa

SEQ ID NO: 230873 - RNA, 32 nt, Homo Sapiens
ggcuucuaaccacccugucuccagcugcucug

SEQ ID NO: 230874 - RNA, 32 nt, Homo Sapiens
ugcccacccugggagcucuccuuggaacccau

SEQ ID NO: 230875 - RNA, 32 nt, Homo Sapiens
gcgacccggcagggggcugugcagauucugca

SEQ ID NO: 230876 - RNA, 32 nt, Homo Sapiens
caugagccaccaacagaagagaacacaaacua

SEQ ID NO: 230877 - RNA, 32 nt, Homo Sapiens
accugccccacgcacaccccuaccccucugug

SEQ ID NO: 230878 - RNA, 32 nt, Homo Sapiens
ccagugggcggguccgcgguggaguugggagg

SEQ ID NO: 230879 - RNA, 32 nt, Homo Sapiens
ucaguguuuccccaacuucucccuuuagagcc

SEQ ID NO: 230880 - RNA, 32 nt, Homo Sapiens
uaauaaaugcauccaauguuauacaucaauuu

SEQ ID NO: 230881 - RNA, 32 nt, Homo Sapiens
ucuuaucuaaucuugauuaaaauuuggcaaac

SEQ ID NO: 230882 - RNA, 32 nt, Homo Sapiens
ucuggaggagucugucccacucugucaagugg

SEQ ID NO: 230883 - RNA, 32 nt, Homo Sapiens
agccacaacuguaaauguuuuuguacccaugc

SEQ ID NO: 230884 - RNA, 32 nt, Homo Sapiens
aaauuugggagggugagacacugcacagaaga

SEQ ID NO: 230885 - RNA, 32 nt, Homo Sapiens
gaaguagaggacuaaccauguguuauguuuuc

SEQ ID NO: 230886 - RNA, 32 nt, Homo Sapiens
agcugcauucccuccgcguccgccccacgcuu

SEQ ID NO: 230887 - RNA, 32 nt, Homo Sapiens
cuuuucucagggcuugcauucaauuaccauaa

SEQ ID NO: 230888 - RNA, 32 nt, Homo Sapiens
acugcauagaaagaacuuuacgagcuuggcug

SEQ ID NO: 230889 - RNA, 32 nt, Homo Sapiens
ggagagcccuucagagcauacacaccacgucu

SEQ ID NO: 230890 - RNA, 32 nt, Homo Sapiens
cugaccgccgcagcugccuggcagccggccac

SEQ ID NO: 230891 - RNA, 32 nt, Homo Sapiens
uuuucauugacucuauugaacucuuuaggaug

SEQ ID NO: 230892 - RNA, 32 nt, Homo Sapiens
guugcuuauaaaaugcauacauaaauaaaaua

SEQ ID NO: 230893 - RNA, 32 nt, Homo Sapiens
cauaaacaaacaggccaucugccgccaaauac

SEQ ID NO: 230894 - RNA, 32 nt, Homo Sapiens
cggggcacagaaaaugaggauuauuaaagguc

SEQ ID NO: 230895 - RNA, 32 nt, Homo Sapiens
ucuccgcucccucugcucuuggaggugccaug

SEQ ID NO: 230896 - RNA, 32 nt, Homo Sapiens
uguccagaauguggacucccucuuccugagca

SEQ ID NO: 230897 - RNA, 32 nt, Homo Sapiens
gcacuggaauggguccaagaccggcacuguug

SEQ ID NO: 230898 - RNA, 32 nt, Homo Sapiens
acaguuccaagcccugauccuggcagacccca

SEQ ID NO: 230899 - RNA, 32 nt, Homo Sapiens
guguuuguguccuaaucuucucuucuuauaaa

SEQ ID NO: 230900 - RNA, 32 nt, Homo Sapiens
ugacuuccucaaugccaaggccacguucaaga

SEQ ID NO: 230901 - RNA, 32 nt, Homo Sapiens
ccaggcucuuuccccuucagugucucagagga

SEQ ID NO: 230902 - RNA, 32 nt, Homo Sapiens
ccgcagcagcgggccuugccgucgagugacag

SEQ ID NO: 230903 - RNA, 32 nt, Homo Sapiens
cccuuccgucuucuccacuggaugccuguguc

SEQ ID NO: 230904 - RNA, 32 nt, Homo Sapiens
agaccccccacccaccuccacagccaggaugu

SEQ ID NO: 230905 - RNA, 32 nt, Homo Sapiens
uuugagguuuuauuuaacguuucgauaccacu

SEQ ID NO: 230906 - RNA, 32 nt, Homo Sapiens
cgccaccguggcggccgccccgcgcugucugu

SEQ ID NO: 230907 - RNA, 32 nt, Homo Sapiens
gggggucgccgggaggagcccgggggagaggg

SEQ ID NO: 230908 - RNA, 30 nt, Homo Sapiens
aggaggagcgggcgcgcggcgggcgaggcu

SEQ ID NO: 230909 - RNA, 32 nt, Homo Sapiens
uccuagaaguuugcugggcgcgggcgcacgac

SEQ ID NO: 230910 - RNA, 30 nt, Homo Sapiens
gagagggcaguggcgcaccagucuccauga

SEQ ID NO: 230911 - RNA, 32 nt, Homo Sapiens
gagguccucugccccaggacccccacaccacc

SEQ ID NO: 230912 - RNA, 32 nt, Homo Sapiens
ugaacgcgcgccgggcgggaugggccggcgcc

SEQ ID NO: 230913 - RNA, 32 nt, Homo Sapiens
uucuuccccccgcugucagccauuccuguucc

SEQ ID NO: 230914 - RNA, 32 nt, Homo Sapiens
uucugaauaaauugaacuaaauccaaacuauu

SEQ ID NO: 230915 - RNA, 32 nt, Homo Sapiens
ucuggagcaaggaaaagagcccuggaauauga

SEQ ID NO: 230916 - RNA, 30 nt, Homo Sapiens
cggggaccugcucgcuguccgcucgggugc

SEQ ID NO: 230917 - RNA, 32 nt, Homo Sapiens
agaagggccuggggcuuuuccucagggaucca

SEQ ID NO: 230918 - RNA, 32 nt, Homo Sapiens
agggugguggggguguauuagcagccaaauaa

SEQ ID NO: 230919 - RNA, 32 nt, Homo Sapiens
uuauuucuuuugcuauuaaaacuacuguucau

SEQ ID NO: 230920 - RNA, 32 nt, Homo Sapiens
ccggucccccagccggcccccaccuccgcuuc

SEQ ID NO: 230921 - RNA, 32 nt, Homo Sapiens
ucaguaucucuuaagaacaauggcugaaccaa

SEQ ID NO: 230922 - RNA, 32 nt, Homo Sapiens
cuuguuauggcugcuuuuuuugugcuaauaaa

SEQ ID NO: 230923 - RNA, 32 nt, Homo Sapiens
aagaguuaaaagucauugcucuggagaauuag

SEQ ID NO: 230924 - RNA, 32 nt, Homo Sapiens
gggaggggagcuggcgggagggugggaggugg

SEQ ID NO: 230925 - RNA, 32 nt, Homo Sapiens
cagagaacacugggugguuugaagggugucuu

SEQ ID NO: 230926 - RNA, 32 nt, Homo Sapiens
auguuuccugggugcccuggcuccuugcagca

SEQ ID NO: 230927 - RNA, 32 nt, Homo Sapiens
cagcagcacaugccacguucuaagcagauggg

SEQ ID NO: 230928 - RNA, 32 nt, Homo Sapiens
cccacuucugggguccaguuucccuccucuua

SEQ ID NO: 230929 - RNA, 32 nt, Homo Sapiens
aaaaaacaggcaaaaacuaaggaaauaugaua

SEQ ID NO: 230930 - RNA, 32 nt, Homo Sapiens
ggggcggcgugggucccggcgucucagccucg

SEQ ID NO: 230931 - RNA, 32 nt, Homo Sapiens
aaaugagaaaaaauaggaugcugauauaaauu

SEQ ID NO: 230932 - RNA, 32 nt, Homo Sapiens
gcacaaauaguuuuugucgcuaacuuaguuau

SEQ ID NO: 230933 - RNA, 31 nt, Homo Sapiens
uaccaccagccccaggccugcggaggcgcua

SEQ ID NO: 230934 - RNA, 32 nt, Homo Sapiens
aauucccgguggaaaacuccuguugccguuuc

SEQ ID NO: 230935 - RNA, 32 nt, Homo Sapiens
uacuaccggcccagccccucuuccuccuccag

SEQ ID NO: 230936 - RNA, 32 nt, Homo Sapiens
agaaucugucuccugaccaccccgccccagac

SEQ ID NO: 230937 - RNA, 32 nt, Homo Sapiens
ugccucuuugaccaccugugaacucuguuggg

SEQ ID NO: 230938 - RNA, 32 nt, Homo Sapiens
ggggcgggugacgggcgggcggagggcuugcc

SEQ ID NO: 230939 - RNA, 32 nt, Homo Sapiens
acuuccuuuccacaagauucugugacgggaaa

SEQ ID NO: 230940 - RNA, 32 nt, Homo Sapiens
augugcuacacugaacccaacuucugcauguu

SEQ ID NO: 230941 - RNA, 32 nt, Homo Sapiens
cccgcaacaaggugggcuggacacccgcccac

SEQ ID NO: 230942 - RNA, 29 nt, Homo Sapiens
ucuuuggaugggaggaggacgaggacuuc

SEQ ID NO: 230943 - RNA, 32 nt, Homo Sapiens
ggacuuccaguuccccagccagauggggucac

SEQ ID NO: 230944 - RNA, 32 nt, Homo Sapiens
cauggugggcacugaggcacagaggaggccaa

SEQ ID NO: 230945 - RNA, 32 nt, Homo Sapiens
ggagagccugucaccugggggaccaccuggcc

SEQ ID NO: 230946 - RNA, 32 nt, Homo Sapiens
aguccgcucccucccgcuccgcucgccccugc

SEQ ID NO: 230947 - RNA, 32 nt, Homo Sapiens
agaggauuuuuuuuuucuucaaacuuguaugu

SEQ ID NO: 230948 - RNA, 32 nt, Homo Sapiens
ggucucaaacuccugagcucaagcagucuucc

SEQ ID NO: 230949 - RNA, 32 nt, Homo Sapiens
cuacaguuugguuuuucuuuaaguauuguaau

SEQ ID NO: 230950 - RNA, 32 nt, Homo Sapiens
acuccucacaucuggaggauuccagcaggagg

SEQ ID NO: 230951 - RNA, 32 nt, Homo Sapiens
cuagaacacaggaugcuucugcucucccugcu

SEQ ID NO: 230952 - RNA, 32 nt, Homo Sapiens
gaguguuuuuaaaaaauaucaaaguucuguua

SEQ ID NO: 230953 - RNA, 32 nt, Homo Sapiens
cagcccuccaugaaccguuggguugagguucu

SEQ ID NO: 230954 - RNA, 32 nt, Homo Sapiens
gcgggguacggucuuaggaccucgaucuccuu

SEQ ID NO: 230955 - RNA, 32 nt, Homo Sapiens
guuuccugguagcagugccacuuucaggauac

SEQ ID NO: 230956 - RNA, 32 nt, Homo Sapiens
uaaaagcccuggaaacaaggucauacuagaga

SEQ ID NO: 230957 - RNA, 32 nt, Homo Sapiens
aggaacaguaaagccagggugcugacgugugu

SEQ ID NO: 230958 - RNA, 32 nt, Homo Sapiens
acggccuguaccgugcgcuccggcacaaucgc

SEQ ID NO: 230959 - RNA, 32 nt, Homo Sapiens
ggggagugucauaaguuauuguuuugcauauc

SEQ ID NO: 230960 - RNA, 32 nt, Homo Sapiens
ccccgaucuccccagcagcagcaacagcagcg

SEQ ID NO: 230961 - RNA, 32 nt, Homo Sapiens
cgggcacucgccccacgccuccccucagcccc

SEQ ID NO: 230962 - RNA, 32 nt, Homo Sapiens
aaaaguuccucaggaacaacuuuaagauuuau

SEQ ID NO: 230963 - RNA, 32 nt, Homo Sapiens
uuguaaaugcuguugagcuuuauucuauuuua

SEQ ID NO: 230964 - RNA, 32 nt, Homo Sapiens
acagcgugugagggacugcugcugcggaguca

SEQ ID NO: 230965 - RNA, 32 nt, Homo Sapiens
gugauuucugugucuaaaaucugcucuuuugu

SEQ ID NO: 230966 - RNA, 32 nt, Homo Sapiens
gaagccucccgaacacgcacagaaggaaggag

SEQ ID NO: 230967 - RNA, 32 nt, Homo Sapiens
aaugccugcuguccagcaggugucacaggccu

SEQ ID NO: 230968 - RNA, 32 nt, Homo Sapiens
ugauuugauaauuguuuccuaugcagauagau

SEQ ID NO: 230969 - RNA, 32 nt, Homo Sapiens
gucauuuguuucagugugacugaaacaaaaug

SEQ ID NO: 230970 - RNA, 32 nt, Homo Sapiens
uaaugaaagagauuuuaauauauggcgugguu

SEQ ID NO: 230971 - RNA, 32 nt, Homo Sapiens
ugugcuucagaccgggcacuguggcucaugcc

SEQ ID NO: 230972 - RNA, 32 nt, Homo Sapiens
uccaggaggcagcugggaaaagggcaaagcuc

SEQ ID NO: 230973 - RNA, 32 nt, Homo Sapiens
accauaggaacacacugaugcucaaauccuaa

SEQ ID NO: 230974 - RNA, 32 nt, Homo Sapiens
ugcggagaggggcugugagcucuggcgggggg

SEQ ID NO: 230975 - RNA, 32 nt, Homo Sapiens
auuauucugugcuaaaaaauagaagggauuaa

SEQ ID NO: 230976 - RNA, 32 nt, Homo Sapiens
ugacaucuaaucugauuuuuaaaaauucauau

SEQ ID NO: 230977 - RNA, 32 nt, Homo Sapiens
uauacaaaguuaggaagaaagucaacaugaug

SEQ ID NO: 230978 - RNA, 32 nt, Homo Sapiens
ggaggcugggagaggggaacgugggaauagca

SEQ ID NO: 230979 - RNA, 32 nt, Homo Sapiens
acagcagcgugcggggcagagccccgggaggg

SEQ ID NO: 230980 - RNA, 32 nt, Homo Sapiens
agcgaggucaguguuaggcuugcaauagggau

SEQ ID NO: 230981 - RNA, 32 nt, Homo Sapiens
aucauuguuuccucugacacucacaauauucc

SEQ ID NO: 230982 - RNA, 32 nt, Homo Sapiens
acuucucauaguacuuuuuuuuccuuuuuuua

SEQ ID NO: 230983 - RNA, 32 nt, Homo Sapiens
agcugagcagcccagccagagcccccugggga

SEQ ID NO: 230984 - RNA, 32 nt, Homo Sapiens
ucuaaugugagcuauggacuuuaguuaauagu

SEQ ID NO: 230985 - RNA, 32 nt, Homo Sapiens
cugguuuucacagaugcuccacauggcugucu

SEQ ID NO: 230986 - RNA, 32 nt, Homo Sapiens
ugucaaauggagcugaauuugauaaaaaccca

SEQ ID NO: 230987 - RNA, 32 nt, Homo Sapiens
cagguggaaaucaaccgcccgcgggguugcgg

SEQ ID NO: 230988 - RNA, 32 nt, Homo Sapiens
cggaaaaugcaaagggacaaguauguguugau

SEQ ID NO: 230989 - RNA, 32 nt, Homo Sapiens
cugaggggcuggggaggggguaccucaugagg

SEQ ID NO: 230990 - RNA, 32 nt, Homo Sapiens
aggccauggccugggaugcgggcccuucuucc

SEQ ID NO: 230991 - RNA, 32 nt, Homo Sapiens
gcuugggagacgucccggggccaggcuacgga

SEQ ID NO: 230992 - RNA, 32 nt, Homo Sapiens
acugguuacuuugaacaaauaaauaaaagcuu

SEQ ID NO: 230993 - RNA, 32 nt, Homo Sapiens
uauaccuuucaaucggccacuggccauuuuuu

SEQ ID NO: 230994 - RNA, 32 nt, Homo Sapiens
aggacugacaccuacagcaucagguacacagc

SEQ ID NO: 230995 - RNA, 32 nt, Homo Sapiens
acaaucugcauaagucugauucuauuucuaug

SEQ ID NO: 230996 - RNA, 32 nt, Homo Sapiens
aggggcacacgcuuauggauguguguaccauu

SEQ ID NO: 230997 - RNA, 32 nt, Homo Sapiens
uacuuuguauauuauuuccucuucaaagucuu

SEQ ID NO: 230998 - RNA, 32 nt, Homo Sapiens
ugauuugauaaucacuuaaauuuuauauaucu

SEQ ID NO: 230999 - RNA, 32 nt, Homo Sapiens
aaugauuuuuaaaguuuacacuguaaaauuca

SEQ ID NO: 231000 - RNA, 32 nt, Homo Sapiens
gacagcgacccagccacccccggagcgcaguc

SEQ ID NO: 231001 - RNA, 32 nt, Homo Sapiens
gcaggaccccuugauuuacauugaauuccauc

SEQ ID NO: 231002 - RNA, 32 nt, Homo Sapiens
gcccagauccugagaaaccuggagaaaaucaa

SEQ ID NO: 231003 - RNA, 32 nt, Homo Sapiens
ugugccaggcacccucgacuugccuagaggcc

SEQ ID NO: 231004 - RNA, 32 nt, Homo Sapiens
cugcgcuugcaagcgccacgcugcccacagga

SEQ ID NO: 231005 - RNA, 32 nt, Homo Sapiens
gcggggccaugcagccaacgcugcuucucagc

SEQ ID NO: 231006 - RNA, 32 nt, Homo Sapiens
uacacuugggcuccuuuuuuugugcucgacuu

SEQ ID NO: 231007 - RNA, 32 nt, Homo Sapiens
uggcugagguaacaguaaucugcccauuuagu

SEQ ID NO: 231008 - RNA, 32 nt, Homo Sapiens
auuuuuagaaaagaaagagccaggagaacuug

SEQ ID NO: 231009 - RNA, 32 nt, Homo Sapiens
caggacagagaaacuuuuguuucugaggcuuc

SEQ ID NO: 231010 - RNA, 32 nt, Homo Sapiens
gacuugugguuuuguugugguuguaauaucca

SEQ ID NO: 231011 - RNA, 32 nt, Homo Sapiens
ggcgaagaggacccgcaggcugcaaggagcaa

SEQ ID NO: 231012 - RNA, 32 nt, Homo Sapiens
guugaaggugggggcgggacagggucucucuc

SEQ ID NO: 231013 - RNA, 32 nt, Homo Sapiens
uuucuuuuuccauuuuagucuguuauauaaaa

SEQ ID NO: 231014 - RNA, 32 nt, Homo Sapiens
gagggggcgccggcugccggaguggacauggc

SEQ ID NO: 231015 - RNA, 32 nt, Homo Sapiens
guacuguauugauuugcccaaguuuuguaacu

SEQ ID NO: 231016 - RNA, 32 nt, Homo Sapiens
gcccguuccagguggccggaccgcccgccgcg

SEQ ID NO: 231017 - RNA, 32 nt, Homo Sapiens
caucugggcuccuguggauaggaggggcuggg

SEQ ID NO: 231018 - RNA, 32 nt, Homo Sapiens
gcacaugccaggugcugggauucgcugcuuuc

SEQ ID NO: 231019 - RNA, 32 nt, Homo Sapiens
aucacucccuugauggaccccuuacaaauggu

SEQ ID NO: 231020 - RNA, 32 nt, Homo Sapiens
uguuuuuaugaaagaaaaaauauugucauauu

SEQ ID NO: 231021 - RNA, 32 nt, Homo Sapiens
cuaaaaugaaauguauuucaauaagcagugua

SEQ ID NO: 231022 - RNA, 32 nt, Homo Sapiens
cuggagguguugcggcagagguuugagugaac

SEQ ID NO: 231023 - RNA, 32 nt, Homo Sapiens
acucccagcuccacauccuccuccuauucucc

SEQ ID NO: 231024 - RNA, 32 nt, Homo Sapiens
auugcucuauuaacaucguaucaggaauggug

SEQ ID NO: 231025 - RNA, 32 nt, Homo Sapiens
aaugucaggaccaggauuuucuacccagagac

SEQ ID NO: 231026 - RNA, 32 nt, Homo Sapiens
auucuacuuuuguguauuuaaaauuuuccaug

SEQ ID NO: 231027 - RNA, 32 nt, Homo Sapiens
ucuggcugccucagccuucucugauuucccac

SEQ ID NO: 231028 - RNA, 32 nt, Homo Sapiens
aaagcauuguuugugauauuucguguacugca

SEQ ID NO: 231029 - RNA, 32 nt, Homo Sapiens
ggggugcccucccucccaccuucucccgccau

SEQ ID NO: 231030 - RNA, 32 nt, Homo Sapiens
aaagccaaguucaaaucaaaauggugcuuggu

SEQ ID NO: 231031 - RNA, 32 nt, Homo Sapiens
ggcaugguaggcuacuuuucagggccuugaca

SEQ ID NO: 231032 - RNA, 32 nt, Homo Sapiens
cccaugaaccccguaaaguucuacacaaaguc

SEQ ID NO: 231033 - RNA, 32 nt, Homo Sapiens
ccuaaggugucuauuagugcgccugcgcugug

SEQ ID NO: 231034 - RNA, 32 nt, Homo Sapiens
aucuuauaaagucuuuaacauucauuuguauu

SEQ ID NO: 231035 - RNA, 32 nt, Homo Sapiens
gcagagguucugagggacccaggcucuuccuc

SEQ ID NO: 231036 - RNA, 32 nt, Homo Sapiens
ucugucuccaaaacaaaacaaacaaacaaaaa

SEQ ID NO: 231037 - RNA, 32 nt, Homo Sapiens
aauguagucuguaaguaacaaacauuuuguuu

SEQ ID NO: 231038 - RNA, 32 nt, Homo Sapiens
gguaaaaugagccuuuuguguacacacagagg

SEQ ID NO: 231039 - RNA, 32 nt, Homo Sapiens
caggucugcccuccccauucaagccccuucuc

SEQ ID NO: 231040 - RNA, 32 nt, Homo Sapiens
auugagcccuccccgcccgggcucccgacgcg

SEQ ID NO: 231041 - RNA, 32 nt, Homo Sapiens
auggcccaguucccguguaagcacgggacgga

SEQ ID NO: 231042 - RNA, 32 nt, Homo Sapiens
gggcacugacccacagccuccgggccaggcuc

SEQ ID NO: 231043 - RNA, 32 nt, Homo Sapiens
ggucuuggaagacagaggggagcugcuuuaga

SEQ ID NO: 231044 - RNA, 32 nt, Homo Sapiens
acuaagaaauguuaagaaauaggccaagugcg

SEQ ID NO: 231045 - RNA, 32 nt, Homo Sapiens
aaagguuugaucuuguaauaugucacuguguu

SEQ ID NO: 231046 - RNA, 32 nt, Homo Sapiens
uuuuuuagaugagugaugcauaaaaaggaaug

SEQ ID NO: 231047 - RNA, 32 nt, Homo Sapiens
uaugagaaauugaacuuugaaauauuuugaag

SEQ ID NO: 231048 - RNA, 32 nt, Homo Sapiens
acugggaggugggggugagccccucacagccu

SEQ ID NO: 231049 - RNA, 32 nt, Homo Sapiens
gcgauccuccggccgccccgcaguaaggcuuc

SEQ ID NO: 231050 - RNA, 32 nt, Homo Sapiens
aaacuagagaaggagcuuguuauucuuuaaau

SEQ ID NO: 231051 - RNA, 32 nt, Homo Sapiens
aagcacauuuaaaaugagaaacuaagaccaau

SEQ ID NO: 231052 - RNA, 32 nt, Homo Sapiens
ggacauaaauggugcugguaggagguuaucag

SEQ ID NO: 231053 - RNA, 32 nt, Homo Sapiens
uuguuccugggcccuuuccccaucgcgccugg

SEQ ID NO: 231054 - RNA, 32 nt, Homo Sapiens
ggacuaaaaagccuccacggacaucgauaauc

SEQ ID NO: 231055 - RNA, 32 nt, Homo Sapiens
ugugauugagagagggguuagaggcggguccc

SEQ ID NO: 231056 - RNA, 32 nt, Homo Sapiens
uguucccaggaagaagcaggaguuacccacag

SEQ ID NO: 231057 - RNA, 32 nt, Homo Sapiens
cucucuccuuugcugaggccuccagcuucagg

SEQ ID NO: 231058 - RNA, 32 nt, Homo Sapiens
gcagggguggugguggaguugcuggagguaga

SEQ ID NO: 231059 - RNA, 32 nt, Homo Sapiens
uuagacuccgcucuuguucuccagguuuucac

SEQ ID NO: 231060 - RNA, 32 nt, Homo Sapiens
uuuauacacucaacuacaaaauguugaugaga

SEQ ID NO: 231061 - RNA, 31 nt, Homo Sapiens
cagcagcagcgcaccuuggacugggacgaag

SEQ ID NO: 231062 - RNA, 32 nt, Homo Sapiens
acuuguuuguuucuuucuuucuuucacaugac

SEQ ID NO: 231063 - RNA, 32 nt, Homo Sapiens
gagaggccgggcgagcgcgggcggcccucacc

SEQ ID NO: 231064 - RNA, 32 nt, Homo Sapiens
ccugagcuauauauuuuuuuaaagcaacuaac

SEQ ID NO: 231065 - RNA, 32 nt, Homo Sapiens
gugaaaucacuuucauggauuauuaauggauu

SEQ ID NO: 231066 - RNA, 32 nt, Homo Sapiens
cuugcguuugaaaaggaauuagagggucagaa

SEQ ID NO: 231067 - RNA, 32 nt, Homo Sapiens
guucugauagaaaaucuggaaauauuuagaaa

SEQ ID NO: 231068 - RNA, 32 nt, Homo Sapiens
ugccgucgguuccuuaacugggccguggcugc

SEQ ID NO: 231069 - RNA, 32 nt, Homo Sapiens
cugcaggcucugcugcccugaggugccaugcc

SEQ ID NO: 231070 - RNA, 32 nt, Homo Sapiens
uccccuuuccgggcagccgccggggcucgggg

SEQ ID NO: 231071 - RNA, 32 nt, Homo Sapiens
uagguuuagauauauaacuuuagaaauaagaa

SEQ ID NO: 231072 - RNA, 32 nt, Homo Sapiens
uggcccgcgcugcccccaccgcgcucuuccgc

SEQ ID NO: 231073 - RNA, 30 nt, Homo Sapiens
gggcaaccacuuguauacccucugguggcc

SEQ ID NO: 231074 - RNA, 32 nt, Homo Sapiens
aucacuuguaugcacaaagcugcuguggaucu

SEQ ID NO: 231075 - RNA, 32 nt, Homo Sapiens
ucaacucaacucccuuuuuuuugucuuaaugu

SEQ ID NO: 231076 - RNA, 32 nt, Homo Sapiens
accagcggccuccgcccucccccauucacacu

SEQ ID NO: 231077 - RNA, 27 nt, Homo Sapiens
caucucgaccacuucagcccccugauu

SEQ ID NO: 231078 - RNA, 32 nt, Homo Sapiens
cgccacgcgucgccgcgcccagcuccagucuc

SEQ ID NO: 231079 - RNA, 32 nt, Homo Sapiens
ggugcccagcccagcccuccguggcugcgucc

SEQ ID NO: 231080 - RNA, 32 nt, Homo Sapiens
gggaaauaauuucuagguugaagcugguaacg

SEQ ID NO: 231081 - RNA, 32 nt, Homo Sapiens
ucccaugugaccaaguucugcuguuuggguga

SEQ ID NO: 231082 - RNA, 32 nt, Homo Sapiens
ugcugcugccccagccuucccgcagacuuggc

SEQ ID NO: 231083 - RNA, 32 nt, Homo Sapiens
cauccgcacacuguccuuuggccaccggacau

SEQ ID NO: 231084 - RNA, 32 nt, Homo Sapiens
gagccuucuaauaagagggaagagacugcuug

SEQ ID NO: 231085 - RNA, 32 nt, Homo Sapiens
ccuacaaagacuccuccaaaucuuaaaaugaa

SEQ ID NO: 231086 - RNA, 32 nt, Homo Sapiens
gagcucuggaagcugaucuccucccacugcac

SEQ ID NO: 231087 - RNA, 32 nt, Homo Sapiens
gcgagcggcuggagcgcacgcagggcuggagc

SEQ ID NO: 231088 - RNA, 32 nt, Homo Sapiens
gaguggcgguguccaggggcgccccgccccug

SEQ ID NO: 231089 - RNA, 32 nt, Homo Sapiens
ucuccccaaggugaguuugaugcugaagugca

SEQ ID NO: 231090 - RNA, 32 nt, Homo Sapiens
uccacacccacccccucuggagaaggccugga

SEQ ID NO: 231091 - RNA, 32 nt, Homo Sapiens
auacuaguccaggaaaggaacaugacagauuu

SEQ ID NO: 231092 - RNA, 32 nt, Homo Sapiens
gcggugcagcggggcucggccgacaacgucac

SEQ ID NO: 231093 - RNA, 32 nt, Homo Sapiens
gcccagagcucugaaagcaucuguggaaugau

SEQ ID NO: 231094 - RNA, 32 nt, Homo Sapiens
ccgagcguccccgcccucagagagcagccucc

SEQ ID NO: 231095 - RNA, 32 nt, Homo Sapiens
aggccucuaaucuucuguuucuguuuaccagc

SEQ ID NO: 231096 - RNA, 32 nt, Homo Sapiens
cagcuucccagagugcacaucugaaggugccu

SEQ ID NO: 231097 - RNA, 32 nt, Homo Sapiens
ggcguuuucgaggaagaaccugucccaggucu

SEQ ID NO: 231098 - RNA, 32 nt, Homo Sapiens
aaagaaauacucaaacacagacugauauuaac

SEQ ID NO: 231099 - RNA, 32 nt, Homo Sapiens
aagucaucaguuccuuugggucacccccaccc

SEQ ID NO: 231100 - RNA, 32 nt, Homo Sapiens
ccccaccugccagcgggcucggcccuguccuc

SEQ ID NO: 231101 - RNA, 32 nt, Homo Sapiens
ugaguauagaguacgggcaacuguagccauca

SEQ ID NO: 231102 - RNA, 32 nt, Homo Sapiens
cagaguccaagcauaacccguguagcauaaaa

SEQ ID NO: 231103 - RNA, 32 nt, Homo Sapiens
caggcccccuucgaaccccgccggcggcccgg

SEQ ID NO: 231104 - RNA, 30 nt, Homo Sapiens
ggggcaugaaccuggagggcggcggccgag

SEQ ID NO: 231105 - RNA, 32 nt, Homo Sapiens
aggugagcgggcccuggagccugcggucggag

SEQ ID NO: 231106 - RNA, 32 nt, Homo Sapiens
agggccugguggaugcccuccucccucagagc

SEQ ID NO: 231107 - RNA, 32 nt, Homo Sapiens
ggcugccagcagauggcaaggguguguugagg

SEQ ID NO: 231108 - RNA, 32 nt, Homo Sapiens
cggaccaccggccccaggccccggcaagaucc

SEQ ID NO: 231109 - RNA, 32 nt, Homo Sapiens
uuacuagcauauaaaauaaguaugaucauuau

SEQ ID NO: 231110 - RNA, 32 nt, Homo Sapiens
gggagccaacgcgcuugaggaccagcccagcc

SEQ ID NO: 231111 - RNA, 32 nt, Homo Sapiens
uggccugccgagacauggagaagugugaggcg

SEQ ID NO: 231112 - RNA, 32 nt, Homo Sapiens
aguccccaaacacaucauugccacacucugaa

SEQ ID NO: 231113 - RNA, 32 nt, Homo Sapiens
cgcagugagugaagaacaugcagcgauugcua

SEQ ID NO: 231114 - RNA, 32 nt, Homo Sapiens
agagcuuucgcaccagcggccuccgcccuccc

SEQ ID NO: 231115 - RNA, 32 nt, Homo Sapiens
cacuauccuguaauucauuuucucaggcuaug

SEQ ID NO: 231116 - RNA, 32 nt, Homo Sapiens
gaauaauugcacaacuaaaaagacauuagaac

SEQ ID NO: 231117 - RNA, 32 nt, Homo Sapiens
cggcgucggccgcgggcaagaaggcuggucgg

SEQ ID NO: 231118 - RNA, 32 nt, Homo Sapiens
cuagaaacauuacuuuuagauuccuagaauga

SEQ ID NO: 231119 - RNA, 32 nt, Homo Sapiens
guagaggaauccauguaaauugcaaauaaacc

SEQ ID NO: 231120 - RNA, 32 nt, Homo Sapiens
acuuuuuauuugcucuguuuccucagauuuau

SEQ ID NO: 231121 - RNA, 32 nt, Homo Sapiens
cuccggcggcccggcugcuguucccaugucca

SEQ ID NO: 231122 - RNA, 32 nt, Homo Sapiens
cuuauuauuuuaucgcccuugcugccaccgcu

SEQ ID NO: 231123 - RNA, 31 nt, Homo Sapiens
guacauuuauaaaaacaggaucauauacugu

SEQ ID NO: 231124 - RNA, 32 nt, Homo Sapiens
cggggcccucgcgagccucucccggccccugc

SEQ ID NO: 231125 - RNA, 31 nt, Homo Sapiens
ccucagagaaguaaacagguucuuugucuua

SEQ ID NO: 231126 - RNA, 32 nt, Homo Sapiens
augauuugucuuccuuaccuucguccauuuca

SEQ ID NO: 231127 - RNA, 32 nt, Homo Sapiens
guacuggaacuaaauaagcuucauugugccuu

SEQ ID NO: 231128 - RNA, 32 nt, Homo Sapiens
uuuccuuaagggauugguagaauucacauaug

SEQ ID NO: 231129 - RNA, 32 nt, Homo Sapiens
aacucuguguugggaggaaaaauguccuucuu

SEQ ID NO: 231130 - RNA, 32 nt, Homo Sapiens
guagccaaaaauaucagguugcuauucugccu

SEQ ID NO: 231131 - RNA, 32 nt, Homo Sapiens
cgcaugccgccccgcccuccccccaccuccac

SEQ ID NO: 231132 - RNA, 32 nt, Homo Sapiens
ucagcguccuaccaagaccccagcccaacuca

SEQ ID NO: 231133 - RNA, 32 nt, Homo Sapiens
uuccuucccuucccugugcagcauucaaaauc

SEQ ID NO: 231134 - RNA, 32 nt, Homo Sapiens
cuuuaaucaguucuuaucuuucaucuguuucc

SEQ ID NO: 231135 - RNA, 32 nt, Homo Sapiens
uuguugcugggcgggguggcucagaccuguaa

SEQ ID NO: 231136 - RNA, 32 nt, Homo Sapiens
ggagaccauggaagaaucaugguggauccaga

SEQ ID NO: 231137 - RNA, 32 nt, Homo Sapiens
accacacagcagcaguuacaaaaaccuucccc

SEQ ID NO: 231138 - RNA, 32 nt, Homo Sapiens
cugcugugcuuaguaagcaagugagaagccug

SEQ ID NO: 231139 - RNA, 32 nt, Homo Sapiens
guuugguaaaaauaauguacuugaucaaugua

SEQ ID NO: 231140 - RNA, 32 nt, Homo Sapiens
cugcccuugcuugccucauaccucugugcucc

SEQ ID NO: 231141 - RNA, 32 nt, Homo Sapiens
agucaaauuuacguaacauuaagcaaauaauu

SEQ ID NO: 231142 - RNA, 32 nt, Homo Sapiens
guguaguuugggguguauacuucuauuucucu

SEQ ID NO: 231143 - RNA, 32 nt, Homo Sapiens
ggcacaggggagacuaaaaaggccagggaagu

SEQ ID NO: 231144 - RNA, 32 nt, Homo Sapiens
aucgcagcccaccguguauagagauauaaaua

SEQ ID NO: 231145 - RNA, 32 nt, Homo Sapiens
gggcguggggaagagggcaggagcugaaguuc

SEQ ID NO: 231146 - RNA, 32 nt, Homo Sapiens
acaggcuuuucugcaaagaagaaauacaaaug

SEQ ID NO: 231147 - RNA, 32 nt, Homo Sapiens
uaucauacuuuuuucuuuaagacuuuuuaaga

SEQ ID NO: 231148 - RNA, 30 nt, Homo Sapiens
ucggguggaggugguguucuauaccuaaag

SEQ ID NO: 231149 - RNA, 32 nt, Homo Sapiens
aucucuggguggaagcgaugaguucuccaggg

SEQ ID NO: 231150 - RNA, 32 nt, Homo Sapiens
cagagcagggcugaggccuggggguaggagca

SEQ ID NO: 231151 - RNA, 32 nt, Homo Sapiens
ccccgccucagccccagcugcccuggcguggc

SEQ ID NO: 231152 - RNA, 32 nt, Homo Sapiens
accccuagccagcagcucccagucagacaaca

SEQ ID NO: 231153 - RNA, 31 nt, Homo Sapiens
caagcgacgccccaccugccccgagcucacc

SEQ ID NO: 231154 - RNA, 32 nt, Homo Sapiens
gcuugugcugguuuuuagauuuuuuuguuuuc

SEQ ID NO: 231155 - RNA, 32 nt, Homo Sapiens
gaaaauagcauauauuuaugaaguaaagguac

SEQ ID NO: 231156 - RNA, 32 nt, Homo Sapiens
auuuuucuauauauuuauuucacgacagaguu

SEQ ID NO: 231157 - RNA, 32 nt, Homo Sapiens
aggacucacacccacccuaccuagaaguacug

SEQ ID NO: 231158 - RNA, 31 nt, Homo Sapiens
ccagccucacggagaaggcgcagucccuguc

SEQ ID NO: 231159 - RNA, 31 nt, Homo Sapiens
ccaguuuguauuuagcugccaaauaagauuc

SEQ ID NO: 231160 - RNA, 32 nt, Homo Sapiens
aauuagcaauauauuauccaaucuucugaacu

SEQ ID NO: 231161 - RNA, 32 nt, Homo Sapiens
uaggugccuggcuggcccagggcuugcucucc

SEQ ID NO: 231162 - RNA, 32 nt, Homo Sapiens
ccccguggccccgaccccggccaugaagcgua

SEQ ID NO: 231163 - RNA, 32 nt, Homo Sapiens
gucuuuucaguuugccucuuuuuacggaacug

SEQ ID NO: 231164 - RNA, 32 nt, Homo Sapiens
aauaaacugcauuugaaauucuccaugucucg

SEQ ID NO: 231165 - RNA, 32 nt, Homo Sapiens
uccgcgcccccggccguccccccucaucgccc

SEQ ID NO: 231166 - RNA, 32 nt, Homo Sapiens
cuuccugccugagcaccgcagcgggagccagc

SEQ ID NO: 231167 - RNA, 32 nt, Homo Sapiens
cugagguuuaaacuaaaaaauguuuccuuggg

SEQ ID NO: 231168 - RNA, 32 nt, Homo Sapiens
aaacaaacaaacaaaaaauuagcugggcgugg

SEQ ID NO: 231169 - RNA, 32 nt, Homo Sapiens
ugagcuucgucuagucaucagucugucuccua

SEQ ID NO: 231170 - RNA, 32 nt, Homo Sapiens
gaaaauggacaaagacgccgcccuccggggua

SEQ ID NO: 231171 - RNA, 32 nt, Homo Sapiens
aagacugauaacuuccccacuccacccuacaa

SEQ ID NO: 231172 - RNA, 32 nt, Homo Sapiens
uucaucuagcuaaauuguauuucuuuauagag

SEQ ID NO: 231173 - RNA, 32 nt, Homo Sapiens
ucagaccccgucccagaugggucugaggaaag

SEQ ID NO: 231174 - RNA, 32 nt, Homo Sapiens
cugcccucuccucuccucucuacguggccgcc

SEQ ID NO: 231175 - RNA, 32 nt, Homo Sapiens
uagugaacagagcugggauuccaugcgacagc

SEQ ID NO: 231176 - RNA, 32 nt, Homo Sapiens
aaaguagcacaccaaaaaggcgacaggguuuc

SEQ ID NO: 231177 - RNA, 32 nt, Homo Sapiens
ccccacagaccucgggaaggcgcugggccgag

SEQ ID NO: 231178 - RNA, 32 nt, Homo Sapiens
gaaacagggaccccauuugucuucccauaucu

SEQ ID NO: 231179 - RNA, 32 nt, Homo Sapiens
aggcuccuccccaccacagccaucucguuuau

SEQ ID NO: 231180 - RNA, 32 nt, Homo Sapiens
ucucuggcuccuuagugcagagcagggucuac

SEQ ID NO: 231181 - RNA, 32 nt, Homo Sapiens
cuaagucuugauuuuuaacuuucuauuguaaa

SEQ ID NO: 231182 - RNA, 32 nt, Homo Sapiens
guacuuauuagcauauuguaaauauugauuuu

SEQ ID NO: 231183 - RNA, 32 nt, Homo Sapiens
ugcuacaggaccaguucugugcaaugaacuug

SEQ ID NO: 231184 - RNA, 32 nt, Homo Sapiens
cuugugggagaugccauacagaggcuucuugu

SEQ ID NO: 231185 - RNA, 32 nt, Homo Sapiens
cucagcgucugacucucggccaggcgccagca

SEQ ID NO: 231186 - RNA, 32 nt, Homo Sapiens
gcugcguggcaauuuccacaccugugcaccag

SEQ ID NO: 231187 - RNA, 32 nt, Homo Sapiens
aauuugcuccagcacuucacggacugcaagcg

SEQ ID NO: 231188 - RNA, 32 nt, Homo Sapiens
auuaugcagaaucuucugccagggcacgaugc

SEQ ID NO: 231189 - RNA, 32 nt, Homo Sapiens
gucuggcacaaagggagcacaguugaccugug

SEQ ID NO: 231190 - RNA, 32 nt, Homo Sapiens
cucuucucgacacuaucccacagaccaggacu

SEQ ID NO: 231191 - RNA, 32 nt, Homo Sapiens
cccagccuacccuuguaccccaucccuuccuc

SEQ ID NO: 231192 - RNA, 32 nt, Homo Sapiens
cuagagagggagggggaagagcagaaguuaga

SEQ ID NO: 231193 - RNA, 32 nt, Homo Sapiens
uuugcguccuucccguccacccagugcagcuc

SEQ ID NO: 231194 - RNA, 32 nt, Homo Sapiens
cuccugcaaccucucacccgaacaccagugau

SEQ ID NO: 231195 - RNA, 32 nt, Homo Sapiens
gaagcagugccuuggucuuguuucugugguug

SEQ ID NO: 231196 - RNA, 32 nt, Homo Sapiens
acccaucuuccccggaugugugucucaccccu

SEQ ID NO: 231197 - RNA, 32 nt, Homo Sapiens
aaugaaaacugcuuaugaagagguuacaaccg

SEQ ID NO: 231198 - RNA, 32 nt, Homo Sapiens
uucguccccccaggccccggccccacuccugg

SEQ ID NO: 231199 - RNA, 32 nt, Homo Sapiens
cugaucaucuucucuauauucauuucacaaga

SEQ ID NO: 231200 - RNA, 32 nt, Homo Sapiens
aaccagcuguggaauuugggggugaagggugu

SEQ ID NO: 231201 - RNA, 32 nt, Homo Sapiens
guucuucaaguacuuucucaccaagcgccagc

SEQ ID NO: 231202 - RNA, 27 nt, Homo Sapiens
ugaguuucaugcuucagccccucugua

SEQ ID NO: 231203 - RNA, 32 nt, Homo Sapiens
uugacauugucaacaccuccaguuaucaggaa

SEQ ID NO: 231204 - RNA, 32 nt, Homo Sapiens
uacauuuaauguuacuuuccuguccuaaaauu

SEQ ID NO: 231205 - RNA, 32 nt, Homo Sapiens
cucacuggccuggccuugugggggcuccagaa

SEQ ID NO: 231206 - RNA, 32 nt, Homo Sapiens
cucugccucuugcuccuccagggcagcaccau

SEQ ID NO: 231207 - RNA, 32 nt, Homo Sapiens
gcgcacgcacgcgcugagcgggcccagccugg

SEQ ID NO: 231208 - RNA, 32 nt, Homo Sapiens
cccacaccuccucagacacucagacaccacuc

SEQ ID NO: 231209 - RNA, 32 nt, Homo Sapiens
auuucaaauagauucaacaauuacauuacuug

SEQ ID NO: 231210 - RNA, 32 nt, Homo Sapiens
augccauccaacacucaccacucccaccgugc

SEQ ID NO: 231211 - RNA, 32 nt, Homo Sapiens
gggcagugggcacaggcuccccggugcccgcc

SEQ ID NO: 231212 - RNA, 32 nt, Homo Sapiens
ggcuccuugcucggccgggccgcggccauggg

SEQ ID NO: 231213 - RNA, 32 nt, Homo Sapiens
cuaaugacugguuugcuguuaauaaauacgug

SEQ ID NO: 231214 - RNA, 32 nt, Homo Sapiens
cuagucaggcugugaugaaaugugcuacaaua

SEQ ID NO: 231215 - RNA, 32 nt, Homo Sapiens
aauuuggguuuccuggccccagaacuucccaa

SEQ ID NO: 231216 - RNA, 32 nt, Homo Sapiens
gugaauagauuagauaaacauaaaaggaggag

SEQ ID NO: 231217 - RNA, 32 nt, Homo Sapiens
gaucaaguguggcuguaggccuuuguuuucca

SEQ ID NO: 231218 - RNA, 32 nt, Homo Sapiens
ugcuauugccagcauuaggggagaaggcacaa

SEQ ID NO: 231219 - RNA, 32 nt, Homo Sapiens
gauugaucagaauuauaaccauggagaauuuu

SEQ ID NO: 231220 - RNA, 32 nt, Homo Sapiens
ccggcgccgcggcuguuccgggcggagaccgc

SEQ ID NO: 231221 - RNA, 32 nt, Homo Sapiens
gguucgaccaggcggccgcgggcuccgguucc

SEQ ID NO: 231222 - RNA, 32 nt, Homo Sapiens
auugcuaaaaaauaaauaaaagcuagauacug

SEQ ID NO: 231223 - RNA, 32 nt, Homo Sapiens
cucucucaaaugcccaggauacucuacccacu

SEQ ID NO: 231224 - RNA, 32 nt, Homo Sapiens
agcucacugccagcugcggccugggcaccgcg

SEQ ID NO: 231225 - RNA, 32 nt, Homo Sapiens
aaucaugaaaaacacuucaacguguccuuuca

SEQ ID NO: 231226 - RNA, 32 nt, Homo Sapiens
agcacagcccccuccgcccccucuggaggcug

SEQ ID NO: 231227 - RNA, 32 nt, Homo Sapiens
cguuguucgcccgacgccucgcugccgguggg

SEQ ID NO: 231228 - RNA, 32 nt, Homo Sapiens
gaaaaggcuuaaaaagcagagacaaggagugg

SEQ ID NO: 231229 - RNA, 32 nt, Homo Sapiens
ggacgucuagaauuggucuaccaguuacuaug

SEQ ID NO: 231230 - RNA, 32 nt, Homo Sapiens
ccgcgagucauugccuggccgccccguacccc

SEQ ID NO: 231231 - RNA, 32 nt, Homo Sapiens
cuccaucaacauguggauggaacccucugcua

SEQ ID NO: 231232 - RNA, 32 nt, Homo Sapiens
cggaugcccacuuuuaccacuucuauucagca

SEQ ID NO: 231233 - RNA, 32 nt, Homo Sapiens
ggcugccacuucccucucuccccuggcccgca

SEQ ID NO: 231234 - RNA, 32 nt, Homo Sapiens
aaaauucuguggcugugcaguacuuugaaguu

SEQ ID NO: 231235 - RNA, 32 nt, Homo Sapiens
cggauccaaacacagaagaacaaagacccagu

SEQ ID NO: 231236 - RNA, 32 nt, Homo Sapiens
cacugaauauaaaaaucuuguuaaaugccauu

SEQ ID NO: 231237 - RNA, 32 nt, Homo Sapiens
uccaucagggcacgugggcggcuuccucaagc

SEQ ID NO: 231238 - RNA, 28 nt, Homo Sapiens
aauuacacaaggauucauuugaaggccu

SEQ ID NO: 231239 - RNA, 32 nt, Homo Sapiens
ccagggcucggcccgcgccgccccaugugacc

SEQ ID NO: 231240 - RNA, 32 nt, Homo Sapiens
aaaauccaguguuauucacuaggaugaaugcu

SEQ ID NO: 231241 - RNA, 32 nt, Homo Sapiens
aaaaugcugcaguuugugcuuggaaagaucau

SEQ ID NO: 231242 - RNA, 28 nt, Homo Sapiens
uccauggcugugauaagccugcuguucu

SEQ ID NO: 231243 - RNA, 32 nt, Homo Sapiens
agcggaugccgcggcgggccugugggagcggg

SEQ ID NO: 231244 - RNA, 32 nt, Homo Sapiens
agagaaaguggaagaaacugaagauggacucu

SEQ ID NO: 231245 - RNA, 32 nt, Homo Sapiens
caugaggaggaugugaccgggacugagucagg

SEQ ID NO: 231246 - RNA, 32 nt, Homo Sapiens
gcauuuucauguuuaucuuuaauagcauugcu

SEQ ID NO: 231247 - RNA, 32 nt, Homo Sapiens
uuggggccuggggcugcagaacacaccugcgu

SEQ ID NO: 231248 - RNA, 32 nt, Homo Sapiens
gacgcagcgacagacucggggugcuggcagcg

SEQ ID NO: 231249 - RNA, 32 nt, Homo Sapiens
aaaauguaucuaucacauccgcaaaaaaaaaa

SEQ ID NO: 231250 - RNA, 32 nt, Homo Sapiens
cucuagauugguucuuuuugcuuaguuuugcu

SEQ ID NO: 231251 - RNA, 32 nt, Homo Sapiens
ccauuagauguaugugaaggcacagugaaaau

SEQ ID NO: 231252 - RNA, 32 nt, Homo Sapiens
gauggggagccucugcuccccccaugcuccca

SEQ ID NO: 231253 - RNA, 32 nt, Homo Sapiens
ggugggaagggaggcgggaggugggcuggggc

SEQ ID NO: 231254 - RNA, 32 nt, Homo Sapiens
gggccgcaggagcggaggcaagaggggcacua

SEQ ID NO: 231255 - RNA, 32 nt, Homo Sapiens
acagauggaguuaaaaagagcuuuuguugaga

SEQ ID NO: 231256 - RNA, 32 nt, Homo Sapiens
ccucucccugaagucuuggcccgggagccugu

SEQ ID NO: 231257 - RNA, 32 nt, Homo Sapiens
cacuuacuggcuauuacuuaaucuguguguua

SEQ ID NO: 231258 - RNA, 32 nt, Homo Sapiens
aucaaaaaaccaccuguaaauuaccaauguca

SEQ ID NO: 231259 - RNA, 29 nt, Homo Sapiens
guggaucauguggagugaaaggcaaaucu

SEQ ID NO: 231260 - RNA, 32 nt, Homo Sapiens
cccugccccccgccaaccccagcuggcccacc

SEQ ID NO: 231261 - RNA, 32 nt, Homo Sapiens
uaaaauaucauucgucagggaaauauaguugu

SEQ ID NO: 231262 - RNA, 32 nt, Homo Sapiens
ccacagaagacauguggagcaguuguggggau

SEQ ID NO: 231263 - RNA, 32 nt, Homo Sapiens
gugacguaagcagcugcagcagccuuggaugu

SEQ ID NO: 231264 - RNA, 32 nt, Homo Sapiens
gacuuugauguacauuaauguugggauaugga

SEQ ID NO: 231265 - RNA, 32 nt, Homo Sapiens
cugucagaaaugccuccacggcuguguacgcc

SEQ ID NO: 231266 - RNA, 32 nt, Homo Sapiens
uccagauuuuaaaaaauaauuugagugcuugg

SEQ ID NO: 231267 - RNA, 32 nt, Homo Sapiens
gacgagggacgccggccccaggguaacaggag

SEQ ID NO: 231268 - RNA, 32 nt, Homo Sapiens
aaauuuuaaaauaaguuuuaugaaauggugaa

SEQ ID NO: 231269 - RNA, 32 nt, Homo Sapiens
agggguugccccaguugcucauacaaacagau

SEQ ID NO: 231270 - RNA, 32 nt, Homo Sapiens
gcaggaauaauaagcaauacuacacaacuugc

SEQ ID NO: 231271 - RNA, 32 nt, Homo Sapiens
aaaauaaaaauaaucacucccuaugaucuagu

SEQ ID NO: 231272 - RNA, 32 nt, Homo Sapiens
gaauugaggggagguggccagcccgcagaggu

SEQ ID NO: 231273 - RNA, 32 nt, Homo Sapiens
acucaauguucccuuuuauaacaaguauuuua

SEQ ID NO: 231274 - RNA, 32 nt, Homo Sapiens
uccuuuuagucuuuuucauccucuucucuuuc

SEQ ID NO: 231275 - RNA, 32 nt, Homo Sapiens
ccagaaacaaaaugagucaguucguagguggc

SEQ ID NO: 231276 - RNA, 32 nt, Homo Sapiens
ggcccgccacgcugcuggcgcugugcgugcag

SEQ ID NO: 231277 - RNA, 32 nt, Homo Sapiens
accaagaacguuauucuuaaucuggaaauuug

SEQ ID NO: 231278 - RNA, 32 nt, Homo Sapiens
gagaggauuguuuauuugauuuuuauccucau

SEQ ID NO: 231279 - RNA, 32 nt, Homo Sapiens
caucucuucuaaaaauacaaaaauuacccagg

SEQ ID NO: 231280 - RNA, 32 nt, Homo Sapiens
ugauucuuaaaauggaucucugaauuauggau

SEQ ID NO: 231281 - RNA, 32 nt, Homo Sapiens
gugguccuagggagggcggaaagggaggcacu

SEQ ID NO: 231282 - RNA, 32 nt, Homo Sapiens
uggguugcgucugagauguggggcaggcgcca

SEQ ID NO: 231283 - RNA, 32 nt, Homo Sapiens
acauggcggcugcggcacuggcgguggcuacg

SEQ ID NO: 231284 - RNA, 32 nt, Homo Sapiens
ggaggaaugggccgggcccggcugggaaggca

SEQ ID NO: 231285 - RNA, 32 nt, Homo Sapiens
agucuuaaucucuauuugaagaaaaaguagag

SEQ ID NO: 231286 - RNA, 32 nt, Homo Sapiens
uguuguuuucccuugacccugggcuuuccuau

SEQ ID NO: 231287 - RNA, 32 nt, Homo Sapiens
ugauggccagcuuggggacauuugcuuuaaau

SEQ ID NO: 231288 - RNA, 32 nt, Homo Sapiens
aauugaauauuuucuuguuuaaggggagcaug

SEQ ID NO: 231289 - RNA, 32 nt, Homo Sapiens
caugucaauuuaauguacuuaauguuuaauac

SEQ ID NO: 231290 - RNA, 32 nt, Homo Sapiens
ggucccuucaaauacauaguggauagcucauc

SEQ ID NO: 231291 - RNA, 32 nt, Homo Sapiens
uccaugaagggagaggagcccaguacugagaa

SEQ ID NO: 231292 - RNA, 32 nt, Homo Sapiens
gcuaagaaauguuuuaaaucugugcaaaagcc

SEQ ID NO: 231293 - RNA, 32 nt, Homo Sapiens
accccagcccccagccucagccccgguccggg

SEQ ID NO: 231294 - RNA, 32 nt, Homo Sapiens
aagcuuagcuggaagccuucagguugcugugc

SEQ ID NO: 231295 - RNA, 32 nt, Homo Sapiens
aaacauuuaaacauucuucaguuguuucauua

SEQ ID NO: 231296 - RNA, 32 nt, Homo Sapiens
guuuuucaacugagacacuacagucuuuacua

SEQ ID NO: 231297 - RNA, 32 nt, Homo Sapiens
ugucccuucugccccaggggcuugccuggcuu

SEQ ID NO: 231298 - RNA, 32 nt, Homo Sapiens
caugguaauauuugcaaaaggucuggccauac

SEQ ID NO: 231299 - RNA, 32 nt, Homo Sapiens
auuugccugauaaaguaauugaaaguguauuu

SEQ ID NO: 231300 - RNA, 32 nt, Homo Sapiens
auccucauagcucugcucuuauucccaauuua

SEQ ID NO: 231301 - RNA, 32 nt, Homo Sapiens
ugcaagggcgcuguggcccccgggugaucucc

SEQ ID NO: 231302 - RNA, 32 nt, Homo Sapiens
cgccgugugggucagagauggagaaggcugag

SEQ ID NO: 231303 - RNA, 32 nt, Homo Sapiens
uccuguccugcuuucacccaugacccaucuag

SEQ ID NO: 231304 - RNA, 32 nt, Homo Sapiens
ugagcaaagaccuguuguuaaucuucaagcua

SEQ ID NO: 231305 - RNA, 32 nt, Homo Sapiens
agcuuccugucagcugcaaccugguguaaaaa

SEQ ID NO: 231306 - RNA, 32 nt, Homo Sapiens
cagauggagcagcuuagucucacaguuugcuu

SEQ ID NO: 231307 - RNA, 32 nt, Homo Sapiens
cguuuuccugaacaaccuccuaaaguccuggg

SEQ ID NO: 231308 - RNA, 32 nt, Homo Sapiens
cuacuggagagaaaggaggaaaaaagaaauaa

SEQ ID NO: 231309 - RNA, 32 nt, Homo Sapiens
uuacauagccccacucagcugcuucggaaagc

SEQ ID NO: 231310 - RNA, 32 nt, Homo Sapiens
uggccugaggugggcagagggguguggagcag

SEQ ID NO: 231311 - RNA, 32 nt, Homo Sapiens
ugggagagaagaugaaguuuauugcaguuuug

SEQ ID NO: 231312 - RNA, 32 nt, Homo Sapiens
gggcagaguggccagcacaccucucauccgcc

SEQ ID NO: 231313 - RNA, 32 nt, Homo Sapiens
caauauucaacagcucaccaacuacagaaaga

SEQ ID NO: 231314 - RNA, 32 nt, Homo Sapiens
gggcagaacaaggcuggugcuuccuucuaguc

SEQ ID NO: 231315 - RNA, 32 nt, Homo Sapiens
ugcuccggccuccgcguccgcgcccagcgcgc

SEQ ID NO: 231316 - RNA, 32 nt, Homo Sapiens
gaaggaguggcuuuuccuccaggaaggggcuu

SEQ ID NO: 231317 - RNA, 32 nt, Homo Sapiens
gguugcuccuggaugcugucugggaggcuugc

SEQ ID NO: 231318 - RNA, 32 nt, Homo Sapiens
ccuaauacagcaugcauugagaugcaggagaa

SEQ ID NO: 231319 - RNA, 32 nt, Homo Sapiens
gggcggcguugaccaugacccagcagggcgcg

SEQ ID NO: 231320 - RNA, 30 nt, Homo Sapiens
gcuagaggcaggcggugggcccggguggag

SEQ ID NO: 231321 - RNA, 32 nt, Homo Sapiens
ugucuuuggaggucccccuucuccagaccucc

SEQ ID NO: 231322 - RNA, 32 nt, Homo Sapiens
ggcaugagccaccgugcccagccaaauguuua

SEQ ID NO: 231323 - RNA, 32 nt, Homo Sapiens
gggaggugcucgugcuggcccugggugggagc

SEQ ID NO: 231324 - RNA, 32 nt, Homo Sapiens
ccugccccuccucauuacaguaugaagggagc

SEQ ID NO: 231325 - RNA, 32 nt, Homo Sapiens
gcgugagcgcugauucucaaccuaccauaacu

SEQ ID NO: 231326 - RNA, 32 nt, Homo Sapiens
ccagcaagagccuugccuccccugccuccccu

SEQ ID NO: 231327 - RNA, 32 nt, Homo Sapiens
caacagaaguugaaugucccaauauagaaagc

SEQ ID NO: 231328 - RNA, 31 nt, Homo Sapiens
ccaggcaggcucggccaaccaggcucugagu

SEQ ID NO: 231329 - RNA, 32 nt, Homo Sapiens
cuuugggaagguuugugcaugaacuauacaag

SEQ ID NO: 231330 - RNA, 32 nt, Homo Sapiens
acagucaugugucuuaauuuuauuuucucuau

SEQ ID NO: 231331 - RNA, 32 nt, Homo Sapiens
uaaagacuaauaggagaugagcaauggcagcu

SEQ ID NO: 231332 - RNA, 32 nt, Homo Sapiens
acucgggcugcaaaaggugaaaagcaccaaga

SEQ ID NO: 231333 - RNA, 32 nt, Homo Sapiens
ugagggaacuuggaggccugugccgguucaga

SEQ ID NO: 231334 - RNA, 32 nt, Homo Sapiens
gggcagcuagcuauaaagcaagagggacagga

SEQ ID NO: 231335 - RNA, 32 nt, Homo Sapiens
gaggucaagaucagcucuggcuaguucucaca

SEQ ID NO: 231336 - RNA, 32 nt, Homo Sapiens
cuauauuauuuggagucaauucuuacguaauu

SEQ ID NO: 231337 - RNA, 32 nt, Homo Sapiens
aagcagagcaaaugcauggacaguggggccuu

SEQ ID NO: 231338 - RNA, 32 nt, Homo Sapiens
agcaguugucuccuaauauuaucccauaugcu

SEQ ID NO: 231339 - RNA, 32 nt, Homo Sapiens
ggguaaauauuaucauccuguuugacucauga

SEQ ID NO: 231340 - RNA, 32 nt, Homo Sapiens
uaauuucuaguaggaagagaauaauuacauuu

SEQ ID NO: 231341 - RNA, 32 nt, Homo Sapiens
auuaaaacucuagcaccuuuugaaagaucuga

SEQ ID NO: 231342 - RNA, 32 nt, Homo Sapiens
cuucgcagcuccccggacccgcagccauggcc

SEQ ID NO: 231343 - RNA, 32 nt, Homo Sapiens
gcaacuuaaauauuugcuagacuuugaaucau

SEQ ID NO: 231344 - RNA, 32 nt, Homo Sapiens
gcuagccugcccugggaccccgccuggacucc

SEQ ID NO: 231345 - RNA, 32 nt, Homo Sapiens
cucuugcauggcacaucucagcuccucauuga

SEQ ID NO: 231346 - RNA, 32 nt, Homo Sapiens
aacaaaagaacaaaaacgaauaagcaaagaag

SEQ ID NO: 231347 - RNA, 29 nt, Homo Sapiens
cagcauggguccuggggagggacaggcaa

SEQ ID NO: 231348 - RNA, 32 nt, Homo Sapiens
uagcaaaaacgcggcgucuuugaaaguuaaca

SEQ ID NO: 231349 - RNA, 32 nt, Homo Sapiens
uauggaaaucucuguuauuaagucauuucaag

SEQ ID NO: 231350 - RNA, 29 nt, Homo Sapiens
agucauggcggacggcagcggcuggcagc

SEQ ID NO: 231351 - RNA, 32 nt, Homo Sapiens
uaucacgauaguaccaauauagauaaaauuaa

SEQ ID NO: 231352 - RNA, 32 nt, Homo Sapiens
ucuagagggaagcucacagcaugaugggcaag

SEQ ID NO: 231353 - RNA, 32 nt, Homo Sapiens
uucugaaguugaaaacaaggauauaucauugg

SEQ ID NO: 231354 - RNA, 32 nt, Homo Sapiens
cucuaccuggcggagguuauauguaaagucag

SEQ ID NO: 231355 - RNA, 32 nt, Homo Sapiens
uuacaggugugagccacagcacccaaccuuuu

SEQ ID NO: 231356 - RNA, 32 nt, Homo Sapiens
ggcucccggccgcggccccggcugcgagaaag

SEQ ID NO: 231357 - RNA, 32 nt, Homo Sapiens
ggauuaggaaaacagguguuccuccuccccuc

SEQ ID NO: 231358 - RNA, 32 nt, Homo Sapiens
guguguguaugcggucuguaacuauugccaua

SEQ ID NO: 231359 - RNA, 32 nt, Homo Sapiens
uggagaaggggucagagccauaucaaguuaaa

SEQ ID NO: 231360 - RNA, 32 nt, Homo Sapiens
ucauauucucauggcuuuguuaaacuuauuuc

SEQ ID NO: 231361 - RNA, 32 nt, Homo Sapiens
aauugauagaacauuuaaagauauaucugaca

SEQ ID NO: 231362 - RNA, 32 nt, Homo Sapiens
ucucacuggagcuuaguuccaaugcauuuggc

SEQ ID NO: 231363 - RNA, 32 nt, Homo Sapiens
ggcgccauuuugcgguacggaagcuacacagc

SEQ ID NO: 231364 - RNA, 32 nt, Homo Sapiens
aagucagugaggaggaggaauaguaauuguca

SEQ ID NO: 231365 - RNA, 32 nt, Homo Sapiens
acaaaugguucaacuguauuaaaauuaagugc

SEQ ID NO: 231366 - RNA, 32 nt, Homo Sapiens
guccuccgcccgguggcccagagggaagcggg

SEQ ID NO: 231367 - RNA, 32 nt, Homo Sapiens
gcggggcgucugagcccuccauuucccgguuc

SEQ ID NO: 231368 - RNA, 32 nt, Homo Sapiens
gggaggggggacugcgagaggaccccggcguc

SEQ ID NO: 231369 - RNA, 32 nt, Homo Sapiens
gcuacaaggcgcggcguucagacgccauggac

SEQ ID NO: 231370 - RNA, 32 nt, Homo Sapiens
acauuuccuugagagucuucuacauucaugcu

SEQ ID NO: 231371 - RNA, 32 nt, Homo Sapiens
aauuauuauuauuuuccuuccaugcucccaac

SEQ ID NO: 231372 - RNA, 32 nt, Homo Sapiens
cauugggccaggccuggcauucaagggaguca

SEQ ID NO: 231373 - RNA, 32 nt, Homo Sapiens
auucaguugucuuuuuccauccugucuguuuc

SEQ ID NO: 231374 - RNA, 32 nt, Homo Sapiens
caaaagucaagagcuucauucucuucacuuaa

SEQ ID NO: 231375 - RNA, 32 nt, Homo Sapiens
uguucucagaaucugaugcuuucugaucaaca

SEQ ID NO: 231376 - RNA, 32 nt, Homo Sapiens
aaauuauaagacauggacuaguccucauuagc

SEQ ID NO: 231377 - RNA, 30 nt, Homo Sapiens
auugggaauuuaucugccuaaucagacuua

SEQ ID NO: 231378 - RNA, 32 nt, Homo Sapiens
gauuguggaaaacacgugaaucuauugcgcgc

SEQ ID NO: 231379 - RNA, 32 nt, Homo Sapiens
ucuuuuaauguuuuuauuuguuaugucccccu

SEQ ID NO: 231380 - RNA, 32 nt, Homo Sapiens
auggcuuugcaaauuuuuuuuaccuuuagcua

SEQ ID NO: 231381 - RNA, 32 nt, Homo Sapiens
accugauuggaccguguccaaugugcggaaga

SEQ ID NO: 231382 - RNA, 32 nt, Homo Sapiens
cccugccgcgcgcacauguaggcguuccgagc

SEQ ID NO: 231383 - RNA, 32 nt, Homo Sapiens
gaagaggguaguaucuguggguccuggccuuu

SEQ ID NO: 231384 - RNA, 32 nt, Homo Sapiens
cgcccagcaccaaguccgcuuccaggcuuucg

SEQ ID NO: 231385 - RNA, 32 nt, Homo Sapiens
aggcacgaauggaaccgcacuggcuccaauga

SEQ ID NO: 231386 - RNA, 32 nt, Homo Sapiens
caugggaucagcuaccuguuucugccucaacc

SEQ ID NO: 231387 - RNA, 32 nt, Homo Sapiens
guuggcagaaaagaguuaaagugaaaauugga

SEQ ID NO: 231388 - RNA, 32 nt, Homo Sapiens
aagucucaggccugucagcagcuccuguggac

SEQ ID NO: 231389 - RNA, 31 nt, Homo Sapiens
cuggguggaacccagaaccaggcuaaggcau

SEQ ID NO: 231390 - RNA, 32 nt, Homo Sapiens
ugguuaaaaaauaggugguagauauugaggcc

SEQ ID NO: 231391 - RNA, 31 nt, Homo Sapiens
ggcucggaacgagacugcacggauuguuuua

SEQ ID NO: 231392 - RNA, 32 nt, Homo Sapiens
cuaguaaucucaagaaagauuauucauucuau

SEQ ID NO: 231393 - RNA, 32 nt, Homo Sapiens
uccuacauguaucucugguauuuagaauuguc

SEQ ID NO: 231394 - RNA, 32 nt, Homo Sapiens
ccuccacagcucauuucuuuguaauauaauca

SEQ ID NO: 231395 - RNA, 32 nt, Homo Sapiens
aaaugauguaaugaaaaauuguaccaugaauu

SEQ ID NO: 231396 - RNA, 32 nt, Homo Sapiens
cauuccaggaguuuuuggucuuuucugucuca

SEQ ID NO: 231397 - RNA, 32 nt, Homo Sapiens
acuauuaaccaccuagauuuuaguauuguggg

SEQ ID NO: 231398 - RNA, 30 nt, Homo Sapiens
agggggccagcgagggcgggucccaggugc

SEQ ID NO: 231399 - RNA, 32 nt, Homo Sapiens
aauuggaauauauuuuagcaucaguuuacaaa

SEQ ID NO: 231400 - RNA, 31 nt, Homo Sapiens
aaucagaagccccagaugucagaggguuaag

SEQ ID NO: 231401 - RNA, 32 nt, Homo Sapiens
ucccuccugaccuccuucuacuucugcaucgu

SEQ ID NO: 231402 - RNA, 32 nt, Homo Sapiens
acauuucaguguagucauucauuucuagcugu

SEQ ID NO: 231403 - RNA, 32 nt, Homo Sapiens
gcacugccccucagcagggaugacucagcacu

SEQ ID NO: 231404 - RNA, 32 nt, Homo Sapiens
uguaaggcauaaauaugccuuuugcaaauuau

SEQ ID NO: 231405 - RNA, 32 nt, Homo Sapiens
ugguucccggcuccccgcaccaucauggcuuu

SEQ ID NO: 231406 - RNA, 29 nt, Homo Sapiens
auacacacauguauguacacaugcuucag

SEQ ID NO: 231407 - RNA, 32 nt, Homo Sapiens
aaccagaagacguggaggggagccaccacccc

SEQ ID NO: 231408 - RNA, 32 nt, Homo Sapiens
cuggaagugaaggagggaaagugcagaggcuu

SEQ ID NO: 231409 - RNA, 32 nt, Homo Sapiens
cuagagcuccagggaccggggaggccugaggu

SEQ ID NO: 231410 - RNA, 32 nt, Homo Sapiens
uagcugcuccucucacaggcuggggacagagg

SEQ ID NO: 231411 - RNA, 32 nt, Homo Sapiens
aucguucuagauuuauacagggagguggauau

SEQ ID NO: 231412 - RNA, 32 nt, Homo Sapiens
ccaguggccuccuggccggcccgacacggccu

SEQ ID NO: 231413 - RNA, 32 nt, Homo Sapiens
cugggguggugugaacccucaguguccugugg

SEQ ID NO: 231414 - RNA, 32 nt, Homo Sapiens
ccaaauauuuaagcucacuucuucccagagag

SEQ ID NO: 231415 - RNA, 32 nt, Homo Sapiens
accaagaugggaaaugugccuggggcuuucug

SEQ ID NO: 231416 - RNA, 32 nt, Homo Sapiens
caucguugcuacauccugaggaggcuggaacu

SEQ ID NO: 231417 - RNA, 32 nt, Homo Sapiens
cugcugggcucagcaccggcgcccugcuugcc

SEQ ID NO: 231418 - RNA, 32 nt, Homo Sapiens
gccugguaaacccagcugggagguuucuaggc

SEQ ID NO: 231419 - RNA, 32 nt, Homo Sapiens
uggauggagaagagacccuucuccaagcaccu

SEQ ID NO: 231420 - RNA, 32 nt, Homo Sapiens
uccaauauaaauuggcuuauuuuuuaaaauaa

SEQ ID NO: 231421 - RNA, 32 nt, Homo Sapiens
guguuccccuuuguggguggguuccuaugaua

SEQ ID NO: 231422 - RNA, 32 nt, Homo Sapiens
acccagaagugaauucuuuuguaaaguaaagc

SEQ ID NO: 231423 - RNA, 32 nt, Homo Sapiens
gccaggcgcccguccagggacacacacagucu

SEQ ID NO: 231424 - RNA, 32 nt, Homo Sapiens
gauuuuauacccuugacuuaacuuuuuaacca

SEQ ID NO: 231425 - RNA, 32 nt, Homo Sapiens
cuccccugccagcccacccaccuuccccccac

SEQ ID NO: 231426 - RNA, 32 nt, Homo Sapiens
cucccgacgcgcgggccgcagcggccaagccc

SEQ ID NO: 231427 - RNA, 30 nt, Homo Sapiens
ugcugcgaaccacgugggucccgggcgcgu

SEQ ID NO: 231428 - RNA, 32 nt, Homo Sapiens
gccagccacccccacaccucucugcucaggcc

SEQ ID NO: 231429 - RNA, 32 nt, Homo Sapiens
ggucucuuugccagcccuccccuuucccaaug

SEQ ID NO: 231430 - RNA, 32 nt, Homo Sapiens
ucuuuguuuuuuuuuucuuuucuuuuuuuuuu

SEQ ID NO: 231431 - RNA, 32 nt, Homo Sapiens
aaagauaaaccagccucaaucccggcugcugc

SEQ ID NO: 231432 - RNA, 32 nt, Homo Sapiens
guggccacucugggugguucuaagccaggagc

SEQ ID NO: 231433 - RNA, 32 nt, Homo Sapiens
gggacagcaagcccccgaauagccccggcugc

SEQ ID NO: 231434 - RNA, 32 nt, Homo Sapiens
uuuuugcacuuguaagucauuuuauuaaggaa

SEQ ID NO: 231435 - RNA, 32 nt, Homo Sapiens
acgcuucucauuuuaugugaucuccuaauugg

SEQ ID NO: 231436 - RNA, 32 nt, Homo Sapiens
agguuggugcaaaaaguaacugugguuuucgc

SEQ ID NO: 231437 - RNA, 32 nt, Homo Sapiens
aggucauguacauuuucauauuagacuuuuug

SEQ ID NO: 231438 - RNA, 32 nt, Homo Sapiens
gagagguauguuuauuuguuaauccuaaccag

SEQ ID NO: 231439 - RNA, 32 nt, Homo Sapiens
cagcauucugguuuuuauguuuuuuaugaucu

SEQ ID NO: 231440 - RNA, 32 nt, Homo Sapiens
uucuguucuguaaagugauaucuuucauacuu

SEQ ID NO: 231441 - RNA, 32 nt, Homo Sapiens
agcacccacagugggguauucuucauaaguuu

SEQ ID NO: 231442 - RNA, 32 nt, Homo Sapiens
cuuucuccagagaugucuuccuccccuguguu

SEQ ID NO: 231443 - RNA, 32 nt, Homo Sapiens
aauaauauccaugcguuucuuccacugagucu

SEQ ID NO: 231444 - RNA, 32 nt, Homo Sapiens
aguuacguucagcacaugaacacuggacccug

SEQ ID NO: 231445 - RNA, 32 nt, Homo Sapiens
gcuuccuguuccuggggacccgcugggccuuu

SEQ ID NO: 231446 - RNA, 32 nt, Homo Sapiens
uaaggggcaguggugugaagggaccaaaaggg

SEQ ID NO: 231447 - RNA, 32 nt, Homo Sapiens
ccguccgagguguggggcaggggcagggaguc

SEQ ID NO: 231448 - RNA, 32 nt, Homo Sapiens
auuuuuauguaaacagaaggucuucaauaagu

SEQ ID NO: 231449 - RNA, 32 nt, Homo Sapiens
gagugcaguggugcaaucuuggcucacugcag

SEQ ID NO: 231450 - RNA, 32 nt, Homo Sapiens
gugugugccugcccugggggugaugucagagg

SEQ ID NO: 231451 - RNA, 32 nt, Homo Sapiens
agcguguuugaaaagcaucuaauggaacggau

SEQ ID NO: 231452 - RNA, 32 nt, Homo Sapiens
cgcucgauccugaagaucgugugaaggaagcg

SEQ ID NO: 231453 - RNA, 32 nt, Homo Sapiens
gagcaaaaauuugcaagucaaauagaaaugua

SEQ ID NO: 231454 - RNA, 32 nt, Homo Sapiens
ucuguugucgauguggaaaaauauauggugug

SEQ ID NO: 231455 - RNA, 32 nt, Homo Sapiens
cgaggggcgcuagccuggcccgacugggcgag

SEQ ID NO: 231456 - RNA, 32 nt, Homo Sapiens
ugcagcuucuauuucaccugaauccuucucuu

SEQ ID NO: 231457 - RNA, 32 nt, Homo Sapiens
uuaaauuuucuuuccuguaaaaugguuaaaau

SEQ ID NO: 231458 - RNA, 32 nt, Homo Sapiens
ugagcucagccaccuacacaccaccguggccg

SEQ ID NO: 231459 - RNA, 30 nt, Homo Sapiens
guaaugugagcgcagcacuucagaguucag

SEQ ID NO: 231460 - RNA, 32 nt, Homo Sapiens
uccuuggagagccaucgaggagaaugugcaau

SEQ ID NO: 231461 - RNA, 32 nt, Homo Sapiens
aggcccacacuuaauaggccucaugggccaga

SEQ ID NO: 231462 - RNA, 32 nt, Homo Sapiens
guagaagcuaaggugugagcugggagguugcu

SEQ ID NO: 231463 - RNA, 32 nt, Homo Sapiens
gcugaccucacagaucaacguauuaacaagac

SEQ ID NO: 231464 - RNA, 32 nt, Homo Sapiens
ggcgggcuaggcugcgcggugcggaccccggc

SEQ ID NO: 231465 - RNA, 28 nt, Homo Sapiens
agauguaggguuuaacauugaaauaaaa

SEQ ID NO: 231466 - RNA, 32 nt, Homo Sapiens
gcaaagaaggcacccugacuuccacaagacac

SEQ ID NO: 231467 - RNA, 32 nt, Homo Sapiens
cucuguguggagaucaaggaggaaagaggcaa

SEQ ID NO: 231468 - RNA, 32 nt, Homo Sapiens
agugauugugguuuuucucgugguuuuuauug

SEQ ID NO: 231469 - RNA, 32 nt, Homo Sapiens
ggucaguucugccuauauagaaacccacacag

SEQ ID NO: 231470 - RNA, 32 nt, Homo Sapiens
ggacccggaaguaaucacauaggaaaugauaa

SEQ ID NO: 231471 - RNA, 32 nt, Homo Sapiens
uuuuauauacuccuuuaaaaugaugaauguua

SEQ ID NO: 231472 - RNA, 32 nt, Homo Sapiens
cauugcugucuuuuuauuuuugaaauaguaca

SEQ ID NO: 231473 - RNA, 32 nt, Homo Sapiens
cccccaucugcacugcugaccauguugaggac

SEQ ID NO: 231474 - RNA, 32 nt, Homo Sapiens
cacugcacuccagccugggugacagggcaaga

SEQ ID NO: 231475 - RNA, 32 nt, Homo Sapiens
ggccucaagugauucuaucgccucugccuccc

SEQ ID NO: 231476 - RNA, 32 nt, Homo Sapiens
acccaugaggcccugccuggucucgucuggga

SEQ ID NO: 231477 - RNA, 32 nt, Homo Sapiens
gacagagcgagacuaucucagaaacaaaacaa

SEQ ID NO: 231478 - RNA, 32 nt, Homo Sapiens
gccaaaccaaaauaaagaaaagcaucuucucc

SEQ ID NO: 231479 - RNA, 32 nt, Homo Sapiens
gcuuggagcauagaagacugcccuucacaaag

SEQ ID NO: 231480 - RNA, 31 nt, Homo Sapiens
uucuuauccaaauaaauguuucuuaaugaaa

SEQ ID NO: 231481 - RNA, 32 nt, Homo Sapiens
gggagcccugcgccugagcugcgaggcgggag

SEQ ID NO: 231482 - RNA, 32 nt, Homo Sapiens
cggaguuauagcuaccccggccgcggagccgg

SEQ ID NO: 231483 - RNA, 32 nt, Homo Sapiens
ccccacagcgccagggacccccuggcagcggg

SEQ ID NO: 231484 - RNA, 32 nt, Homo Sapiens
gggguaaaggacuuagaugcccagaugaagag

SEQ ID NO: 231485 - RNA, 32 nt, Homo Sapiens
aaggguuuuggaaccacuauuuucucaucacg

SEQ ID NO: 231486 - RNA, 32 nt, Homo Sapiens
ccaccuguaggccacaccccauccagcuccca

SEQ ID NO: 231487 - RNA, 32 nt, Homo Sapiens
caucuuaucauggacaaggacaguguuuucua

SEQ ID NO: 231488 - RNA, 32 nt, Homo Sapiens
gcacugggccccagcccuccugcuccuuaggg

SEQ ID NO: 231489 - RNA, 32 nt, Homo Sapiens
aguugcagucucauuuugauaaucauuugcuu

SEQ ID NO: 231490 - RNA, 32 nt, Homo Sapiens
ucuuccugccagcaggaagccucugccugugc

SEQ ID NO: 231491 - RNA, 32 nt, Homo Sapiens
uccuguuccuuccucugcacggcugcagcucg

SEQ ID NO: 231492 - RNA, 32 nt, Homo Sapiens
gccgccuccuccgcgccgcgcuccgcccggau

SEQ ID NO: 231493 - RNA, 32 nt, Homo Sapiens
uucuauauacauacaauuuaguuuaaaaaugu

SEQ ID NO: 231494 - RNA, 32 nt, Homo Sapiens
gguguacugucaacggaagugcacagucucac

SEQ ID NO: 231495 - RNA, 32 nt, Homo Sapiens
ucccgcccugccugcccggccccaccgaggcc

SEQ ID NO: 231496 - RNA, 32 nt, Homo Sapiens
ccggagggggccgaggccccgcggcgggguua

SEQ ID NO: 231497 - RNA, 32 nt, Homo Sapiens
aagcccaaaguugccucacuuccacuauucuc

SEQ ID NO: 231498 - RNA, 32 nt, Homo Sapiens
ucacuucugugccuuccuucaaagguggugcu

SEQ ID NO: 231499 - RNA, 32 nt, Homo Sapiens
gaagcgcuuccgugaacacccccguccuccgu

SEQ ID NO: 231500 - RNA, 32 nt, Homo Sapiens
ccuguuuuauugcugaguugcauuccauggua

SEQ ID NO: 231501 - RNA, 32 nt, Homo Sapiens
gaagauuaggaaaaagauaguaguuauuuuuc

SEQ ID NO: 231502 - RNA, 32 nt, Homo Sapiens
aucauuugcacuuuaaaacuggaagauuaagc

SEQ ID NO: 231503 - RNA, 32 nt, Homo Sapiens
gagaggagucaggccgcgacugugcaggagau

SEQ ID NO: 231504 - RNA, 32 nt, Homo Sapiens
agaguggcaguaucccuuuuucaauuuaacau

SEQ ID NO: 231505 - RNA, 32 nt, Homo Sapiens
cuuugcugaauucuaacauuaaaucacagccc

SEQ ID NO: 231506 - RNA, 32 nt, Homo Sapiens
guagaagacaauuagaggaaaacaaacagaac

SEQ ID NO: 231507 - RNA, 32 nt, Homo Sapiens
ugcaacuuaggcggauugggucucucugcugu

SEQ ID NO: 231508 - RNA, 32 nt, Homo Sapiens
aauaccagucuccucacucuccacacaaaggu

SEQ ID NO: 231509 - RNA, 32 nt, Homo Sapiens
aagcuuuagucaggcuccuggaucuucuaggc

SEQ ID NO: 231510 - RNA, 32 nt, Homo Sapiens
ccacgcguccgggaagcauggagguccauggc

SEQ ID NO: 231511 - RNA, 32 nt, Homo Sapiens
acgcccgccaauggggcagcauggauaaaugg

SEQ ID NO: 231512 - RNA, 32 nt, Homo Sapiens
aaaggaaaaugguucaucucaagaguucaucu

SEQ ID NO: 231513 - RNA, 31 nt, Homo Sapiens
agccaacugggaaacaugguauaucaugaag

SEQ ID NO: 231514 - RNA, 28 nt, Homo Sapiens
cggggcggcaccgagaagcugaaacgga

SEQ ID NO: 231515 - RNA, 32 nt, Homo Sapiens
cggccagcggcugaauauggugaaggcaaaaa

SEQ ID NO: 231516 - RNA, 32 nt, Homo Sapiens
uuguguugugaacaaaggaauuuucaauauuu

SEQ ID NO: 231517 - RNA, 28 nt, Homo Sapiens
uccccggugggggccaggaugcugaaga

SEQ ID NO: 231518 - RNA, 32 nt, Homo Sapiens
ggcaccaggauucuggcccagggcgccuccuc

SEQ ID NO: 231519 - RNA, 32 nt, Homo Sapiens
cuagauaguggaugaagaaagaaggacgagga

SEQ ID NO: 231520 - RNA, 32 nt, Homo Sapiens
uucuugcauggaagagcaaaacaaauucaagu

SEQ ID NO: 231521 - RNA, 32 nt, Homo Sapiens
cagcuucuguuguuuucaugguugugguucuc

SEQ ID NO: 231522 - RNA, 29 nt, Homo Sapiens
cgagaugcagcaccgaggcuuccuccucc

SEQ ID NO: 231523 - RNA, 32 nt, Homo Sapiens
ccugagggacugugggggcucaaggguaaugc

SEQ ID NO: 231524 - RNA, 32 nt, Homo Sapiens
agauaguagucuuuuucacuauugcaaacaau

SEQ ID NO: 231525 - RNA, 32 nt, Homo Sapiens
gguucacugggccagggcuggucucuguuccc

SEQ ID NO: 231526 - RNA, 32 nt, Homo Sapiens
gccugccaugaccgcgcuccccggcccgcucu

SEQ ID NO: 231527 - RNA, 32 nt, Homo Sapiens
ccguuauccugccugcauuuggggagucccuu

SEQ ID NO: 231528 - RNA, 32 nt, Homo Sapiens
caagugaagaacucugugaaggauggaacuuu

SEQ ID NO: 231529 - RNA, 32 nt, Homo Sapiens
gggacauggagaaagcuguuuaugauaucuuu

SEQ ID NO: 231530 - RNA, 32 nt, Homo Sapiens
uguaaaguuugaccuuuuuaaaacgaaaagag

SEQ ID NO: 231531 - RNA, 32 nt, Homo Sapiens
aaaauuaguuuaaugagcuguuucugacauga

SEQ ID NO: 231532 - RNA, 32 nt, Homo Sapiens
gggcgucgccccagcccgaacccccggcccag

SEQ ID NO: 231533 - RNA, 32 nt, Homo Sapiens
ggcgcaugugccaguuggggccccgcggguag

SEQ ID NO: 231534 - RNA, 30 nt, Homo Sapiens
accaagccauucaugggggaaucugccccc

SEQ ID NO: 231535 - RNA, 32 nt, Homo Sapiens
ccccaaccaaggaaaccaggucuuacaguggg

SEQ ID NO: 231536 - RNA, 32 nt, Homo Sapiens
cucaauaaaaauuguaauaaaggccgggcgcg

SEQ ID NO: 231537 - RNA, 32 nt, Homo Sapiens
cccgagacaaccacauccuccuccuccuacac

SEQ ID NO: 231538 - RNA, 32 nt, Homo Sapiens
ugcugguuuguuucucaaccacugcuuggcca

SEQ ID NO: 231539 - RNA, 32 nt, Homo Sapiens
cauccauuuuuggggaaaugugauuucucucu

SEQ ID NO: 231540 - RNA, 30 nt, Homo Sapiens
uaagcaugagagaacacacaauggagagaa

SEQ ID NO: 231541 - RNA, 31 nt, Homo Sapiens
uagucacaagaggucuaaucuguguauggca

SEQ ID NO: 231542 - RNA, 32 nt, Homo Sapiens
uauuaaagacaaaguagugaacaucaaugaac

SEQ ID NO: 231543 - RNA, 31 nt, Homo Sapiens
gguaggauggagaggaagcugcccaucggcu

SEQ ID NO: 231544 - RNA, 32 nt, Homo Sapiens
cugacgagaaaagaccaaacauaggacuguua

SEQ ID NO: 231545 - RNA, 32 nt, Homo Sapiens
cgucgucccgcacucggaguccgcgauggcuu

SEQ ID NO: 231546 - RNA, 32 nt, Homo Sapiens
aaguaaggcugggauuggaucagcagaaaucc

SEQ ID NO: 231547 - RNA, 32 nt, Homo Sapiens
acuagggugcagcgccagguccgguguugggg

SEQ ID NO: 231548 - RNA, 32 nt, Homo Sapiens
cgucccugugcagcugggcucagacgugucuc

SEQ ID NO: 231549 - RNA, 32 nt, Homo Sapiens
ggacacgcuccuugguguuacacuugcaggag

SEQ ID NO: 231550 - RNA, 32 nt, Homo Sapiens
cgcccuuggccaugggucccauucuuggccca

SEQ ID NO: 231551 - RNA, 32 nt, Homo Sapiens
uggugucuuguuucuauuguguggcuuuauaa

SEQ ID NO: 231552 - RNA, 32 nt, Homo Sapiens
agggagagcuucugccaccaccuccuacuugg

SEQ ID NO: 231553 - RNA, 32 nt, Homo Sapiens
gugaccccauccccauccccaggauucccacc

SEQ ID NO: 231554 - RNA, 32 nt, Homo Sapiens
agacuaggguucaugucuuuuuacccuuuaaa

SEQ ID NO: 231555 - RNA, 32 nt, Homo Sapiens
ugauaaggaaguuucaagugcaagaucgaggc

SEQ ID NO: 231556 - RNA, 32 nt, Homo Sapiens
gagucaucuuccugcccuugccccaugcccaa

SEQ ID NO: 231557 - RNA, 32 nt, Homo Sapiens
cuccccgaguugccuccuuucuccgggugccg

SEQ ID NO: 231558 - RNA, 32 nt, Homo Sapiens
augacaaaguugaaaggaccaauacagccccu

SEQ ID NO: 231559 - RNA, 32 nt, Homo Sapiens
uggaucucccauagcuucuccuuugcuuccag

SEQ ID NO: 231560 - RNA, 32 nt, Homo Sapiens
cacauauuucuccaggucuccuccccaccccc

SEQ ID NO: 231561 - RNA, 32 nt, Homo Sapiens
ucauugcugcuucucagcauuuucuuucucuc

SEQ ID NO: 231562 - RNA, 32 nt, Homo Sapiens
ggugccuccaaccucaucuccucccucuucuc

SEQ ID NO: 231563 - RNA, 32 nt, Homo Sapiens
uugacaguuaggacuuaguucuccuugaagac

SEQ ID NO: 231564 - RNA, 32 nt, Homo Sapiens
caccaguccauucauuugaauucugugaaucu

SEQ ID NO: 231565 - RNA, 32 nt, Homo Sapiens
ggcaagugugucggggcuggggugugaaugcc

SEQ ID NO: 231566 - RNA, 32 nt, Homo Sapiens
agcuguucccaggucuggcccgccugccacaa

SEQ ID NO: 231567 - RNA, 32 nt, Homo Sapiens
agauggagggcuugacgucgugggucauguuu

SEQ ID NO: 231568 - RNA, 32 nt, Homo Sapiens
ugcaucuguaauuuaauuuuaaguauaauguu

SEQ ID NO: 231569 - RNA, 32 nt, Homo Sapiens
cacgagaaaagaaccuggggauaccucucagc

SEQ ID NO: 231570 - RNA, 32 nt, Homo Sapiens
aggagcagauugggggcgcuaucuggggcugu

SEQ ID NO: 231571 - RNA, 32 nt, Homo Sapiens
ggggcagucauaagcucuguuucccccucucc

SEQ ID NO: 231572 - RNA, 32 nt, Homo Sapiens
uccaagcacuguacagaauacuuugugguucc

SEQ ID NO: 231573 - RNA, 30 nt, Homo Sapiens
aauagaccacuuggccccauguguaauugc

SEQ ID NO: 231574 - RNA, 30 nt, Homo Sapiens
aggcugguguugccugcagaagcaucuugu

SEQ ID NO: 231575 - RNA, 32 nt, Homo Sapiens
uauuauauuuuugguucuauuaggauuuacuu

SEQ ID NO: 231576 - RNA, 32 nt, Homo Sapiens
gcagccggcccgcuccggcuuccuccacugcu

SEQ ID NO: 231577 - RNA, 32 nt, Homo Sapiens
cugcagcccucccuugcagggagccuucccuu

SEQ ID NO: 231578 - RNA, 32 nt, Homo Sapiens
uuguggaguuaccauggugaccgcagccccuu

SEQ ID NO: 231579 - RNA, 31 nt, Homo Sapiens
cugagacagcacagccaaccuagcuagcaac

SEQ ID NO: 231580 - RNA, 27 nt, Homo Sapiens
gugcugucucuguucagcccaacagcu

SEQ ID NO: 231581 - RNA, 32 nt, Homo Sapiens
agggcugaggggccgccucuugaggguacacg

SEQ ID NO: 231582 - RNA, 32 nt, Homo Sapiens
ggucucaaacuccugacuucaaaugauccacc

SEQ ID NO: 231583 - RNA, 32 nt, Homo Sapiens
cuggagcaggacuuggguucuucuggccagau

SEQ ID NO: 231584 - RNA, 32 nt, Homo Sapiens
uguggacaugaugucacccaccccuugucaag

SEQ ID NO: 231585 - RNA, 32 nt, Homo Sapiens
aguucuuuguaccucccuccucucccucacuc

SEQ ID NO: 231586 - RNA, 32 nt, Homo Sapiens
gggugggggugucugccucuucccuccaccuc

SEQ ID NO: 231587 - RNA, 32 nt, Homo Sapiens
uucuggaaaaggaacgcguuguuaaaguuugu

SEQ ID NO: 231588 - RNA, 32 nt, Homo Sapiens
cuucagaacuguaggaauauugggagcuagga

SEQ ID NO: 231589 - RNA, 32 nt, Homo Sapiens
gacagauacuucuagugacuuccccgguaucc

SEQ ID NO: 231590 - RNA, 32 nt, Homo Sapiens
aaucauuuauuacaugcaaaaauagaaaauua

SEQ ID NO: 231591 - RNA, 32 nt, Homo Sapiens
gagcccgaggccuuccccucucccagagcgca

SEQ ID NO: 231592 - RNA, 32 nt, Homo Sapiens
ccacguuugucaaaagguggugcuggcccacc

SEQ ID NO: 231593 - RNA, 32 nt, Homo Sapiens
cgauguuugggguuguauauuuuguuaaaaag

SEQ ID NO: 231594 - RNA, 32 nt, Homo Sapiens
cuguuacacagugucauuguugauguuaaauu

SEQ ID NO: 231595 - RNA, 32 nt, Homo Sapiens
cuuuuguccaauugggugcucuuucuuugcga

SEQ ID NO: 231596 - RNA, 32 nt, Homo Sapiens
caggugaggggggugcugggggucugcagcag

SEQ ID NO: 231597 - RNA, 32 nt, Homo Sapiens
gguuggcggugcaggggcaaccccucgaaagc

SEQ ID NO: 231598 - RNA, 32 nt, Homo Sapiens
gaguggccugagucugugaucuucuucauggc

SEQ ID NO: 231599 - RNA, 32 nt, Homo Sapiens
gacacaggaaaacacacacacacacacacaca

SEQ ID NO: 231600 - RNA, 32 nt, Homo Sapiens
caacuagacaccuuuuaaagugccucuaaauu

SEQ ID NO: 231601 - RNA, 32 nt, Homo Sapiens
ccccugaacuccccgguggugaccccucaccc

SEQ ID NO: 231602 - RNA, 32 nt, Homo Sapiens
ucacugaaggcucgaaggcacugcacaccuug

SEQ ID NO: 231603 - RNA, 32 nt, Homo Sapiens
uauggccuccagcagagcugaucugccucuca

SEQ ID NO: 231604 - RNA, 32 nt, Homo Sapiens
aaaguagcaaauaaagauuaaguaaaaguaag

SEQ ID NO: 231605 - RNA, 32 nt, Homo Sapiens
cgugaaucauuuccauucccauaaaacuucua

SEQ ID NO: 231606 - RNA, 32 nt, Homo Sapiens
uuugccuguucauuuucuuaauggugucuuuu

SEQ ID NO: 231607 - RNA, 32 nt, Homo Sapiens
uaacuaucuuaauagaauaguacaauaaaaca

SEQ ID NO: 231608 - RNA, 30 nt, Homo Sapiens
accccagccucguguacccaucuucccacc

SEQ ID NO: 231609 - RNA, 32 nt, Homo Sapiens
acagcccucgcucgcucucggcgccuccucug

SEQ ID NO: 231610 - RNA, 32 nt, Homo Sapiens
accguuuccgugcuguggucccggguucuggc

SEQ ID NO: 231611 - RNA, 32 nt, Homo Sapiens
aaaaagaaaaagaaaaucugucuuucuaauau

SEQ ID NO: 231612 - RNA, 32 nt, Homo Sapiens
ugugguuauaucaaacuuuuacgacuuuuaca

SEQ ID NO: 231613 - RNA, 32 nt, Homo Sapiens
accguguauuucccacccacucagggucacag

SEQ ID NO: 231614 - RNA, 32 nt, Homo Sapiens
uucugcacuuacccuugguccuggaccaacuc

SEQ ID NO: 231615 - RNA, 32 nt, Homo Sapiens
ggagcuugcugucuuggccuucuuugugcuuc

SEQ ID NO: 231616 - RNA, 32 nt, Homo Sapiens
ugauucccugaaaguccaucugcugcaucggu

SEQ ID NO: 231617 - RNA, 32 nt, Homo Sapiens
uguucuguauucugacccaugggagauuugga

SEQ ID NO: 231618 - RNA, 32 nt, Homo Sapiens
uucagagaggggcuuucuggccuugugcuuua

SEQ ID NO: 231619 - RNA, 32 nt, Homo Sapiens
gcacgcuguggcugacaagggcuacaggcagc

SEQ ID NO: 231620 - RNA, 32 nt, Homo Sapiens
uuugcuguagcugggcaugucuccaggaacca

SEQ ID NO: 231621 - RNA, 32 nt, Homo Sapiens
aagccaggguagugaguagaguccucaggcac

SEQ ID NO: 231622 - RNA, 32 nt, Homo Sapiens
auggaacaggcguuggaggguaccucaguucg

SEQ ID NO: 231623 - RNA, 32 nt, Homo Sapiens
gaaauuuacauucaaagccucauuugcuuauc

SEQ ID NO: 231624 - RNA, 32 nt, Homo Sapiens
auuucagagguaucucgaaacuacaauauaaa

SEQ ID NO: 231625 - RNA, 32 nt, Homo Sapiens
aauuacaaggaccugcccuacagccagaauca

SEQ ID NO: 231626 - RNA, 32 nt, Homo Sapiens
cuucuaagcucuucuucuuccuucauuggccu

SEQ ID NO: 231627 - RNA, 32 nt, Homo Sapiens
ccgaggaggagaaguagcuacaugagugacug

SEQ ID NO: 231628 - RNA, 32 nt, Homo Sapiens
guugguauuacccuaaacuguuuaaauaaaga

SEQ ID NO: 231629 - RNA, 32 nt, Homo Sapiens
uuuaggagaaaguaaguugcuuugcaccgccu

SEQ ID NO: 231630 - RNA, 32 nt, Homo Sapiens
ggggcuguggaggauguaguuguauuuauugc

SEQ ID NO: 231631 - RNA, 32 nt, Homo Sapiens
ucacuugaggccaaaaguuugagaccagccug

SEQ ID NO: 231632 - RNA, 32 nt, Homo Sapiens
uuggucgcagugacugugguguccuugagaug

SEQ ID NO: 231633 - RNA, 32 nt, Homo Sapiens
ccucauuaauaaugauaguaacuuuuuucaca

SEQ ID NO: 231634 - RNA, 31 nt, Homo Sapiens
auguuuguaagguccgguggggccaugagga

SEQ ID NO: 231635 - RNA, 32 nt, Homo Sapiens
ccaccccaccccacccucugaaaugugaaaag

SEQ ID NO: 231636 - RNA, 32 nt, Homo Sapiens
ggagcuggagagaacagucugccaagucuuac

SEQ ID NO: 231637 - RNA, 32 nt, Homo Sapiens
guaauagaaaucaagauguguugaugaaauaa

SEQ ID NO: 231638 - RNA, 32 nt, Homo Sapiens
cuccuuugugagcucuugggguucucuggagc

SEQ ID NO: 231639 - RNA, 32 nt, Homo Sapiens
gcuuacucaagacuggacuaagauuuagaaua

SEQ ID NO: 231640 - RNA, 32 nt, Homo Sapiens
ggcccaucacaccagcauccgugacgccagcu

SEQ ID NO: 231641 - RNA, 32 nt, Homo Sapiens
ggcaguugcugccaaggcccucaaacagggug

SEQ ID NO: 231642 - RNA, 32 nt, Homo Sapiens
cuguggagggucaccagguugggaacaugcug

SEQ ID NO: 231643 - RNA, 32 nt, Homo Sapiens
guuucaguccagguggagguugguuuuguagu

SEQ ID NO: 231644 - RNA, 32 nt, Homo Sapiens
auaaauucaauguuauacuaauuuauaguacu

SEQ ID NO: 231645 - RNA, 32 nt, Homo Sapiens
ugugugcucaccucugggaaaagcgggugagc

SEQ ID NO: 231646 - RNA, 29 nt, Homo Sapiens
augccauguguucuguaccaucauguguc

SEQ ID NO: 231647 - RNA, 32 nt, Homo Sapiens
gugugcaugugaacugugugugaaugugugua

SEQ ID NO: 231648 - RNA, 32 nt, Homo Sapiens
uuaaugagaagguggccuucaguguccaccug

SEQ ID NO: 231649 - RNA, 32 nt, Homo Sapiens
augauucugucucauccaaucaagacuugagu

SEQ ID NO: 231650 - RNA, 32 nt, Homo Sapiens
gaaaauuuccucaugcugaauuguaauuuucu

SEQ ID NO: 231651 - RNA, 32 nt, Homo Sapiens
cauggcucaccaaaaugugcucaauuuuguga

SEQ ID NO: 231652 - RNA, 32 nt, Homo Sapiens
ccgcuuccggugcgggccgcgcgcgagcgcag

SEQ ID NO: 231653 - RNA, 32 nt, Homo Sapiens
uuaaauuuugaaaaugguugugaugagccacg

SEQ ID NO: 231654 - RNA, 32 nt, Homo Sapiens
uagaacuggaucccaacaccaaacucuuaauu

SEQ ID NO: 231655 - RNA, 32 nt, Homo Sapiens
ggaggcgggaggaggagacaccagggguggcc

SEQ ID NO: 231656 - RNA, 32 nt, Homo Sapiens
ucaauguaaccucaggggccaguuuuagcauu

SEQ ID NO: 231657 - RNA, 32 nt, Homo Sapiens
ggucauuugaaagaucauuuccaggucuaaaa

SEQ ID NO: 231658 - RNA, 32 nt, Homo Sapiens
ugccagccuggggucugcuagcaaggggacac

SEQ ID NO: 231659 - RNA, 32 nt, Homo Sapiens
uucuucgcucgcgacugcggcucuuccucggg

SEQ ID NO: 231660 - RNA, 32 nt, Homo Sapiens
cugaaagcagugcugugcuuugaaaugcagcc

SEQ ID NO: 231661 - RNA, 32 nt, Homo Sapiens
uuuaaggaauuccuuggcaauaaacagaaacu

SEQ ID NO: 231662 - RNA, 32 nt, Homo Sapiens
auggugaaggaaacucagaaacuuacugcagu

SEQ ID NO: 231663 - RNA, 32 nt, Homo Sapiens
aaugguccuacgcagggcugggguuuugcuac

SEQ ID NO: 231664 - RNA, 32 nt, Homo Sapiens
ugaaguauagaugaagcagaagugguacauga

SEQ ID NO: 231665 - RNA, 32 nt, Homo Sapiens
ccggagccccgaagacucggagggagcugcuc

SEQ ID NO: 231666 - RNA, 32 nt, Homo Sapiens
gugaguggcucccagcacuuugagaggccgag

SEQ ID NO: 231667 - RNA, 32 nt, Homo Sapiens
cuccaaggaaaguuuugcagaaugauuuccuu

SEQ ID NO: 231668 - RNA, 32 nt, Homo Sapiens
cuauacaggaaucucuggaaaacuaucagaag

SEQ ID NO: 231669 - RNA, 32 nt, Homo Sapiens
uccccuccccaucagacccaucccccacggag

SEQ ID NO: 231670 - RNA, 32 nt, Homo Sapiens
gugcagggccuucucugaccccugccugagcu

SEQ ID NO: 231671 - RNA, 32 nt, Homo Sapiens
guguguauguacauauucaaacacauuuuuua

SEQ ID NO: 231672 - RNA, 32 nt, Homo Sapiens
aauugacuuuaauaagcuccaacagcacugaa

SEQ ID NO: 231673 - RNA, 32 nt, Homo Sapiens
uaacucagaagucacuguacuccacagagccu

SEQ ID NO: 231674 - RNA, 32 nt, Homo Sapiens
uagucaugucucuuggccucuuccucucucaa

SEQ ID NO: 231675 - RNA, 32 nt, Homo Sapiens
ggaaaucccagccucaagucuuucucaucccu

SEQ ID NO: 231676 - RNA, 32 nt, Homo Sapiens
caccuuuuauucuccuuuacaugcaacccucu

SEQ ID NO: 231677 - RNA, 32 nt, Homo Sapiens
aaugugguuggauauagagaggagagugcuga

SEQ ID NO: 231678 - RNA, 32 nt, Homo Sapiens
auugcaaggugaauucaaaugcauccuuuuau

SEQ ID NO: 231679 - RNA, 31 nt, Homo Sapiens
ggaugggagcccccugagagcagggcuuuug

SEQ ID NO: 231680 - RNA, 32 nt, Homo Sapiens
cucaguuuugugaaagguaaaaaacuacuaug

SEQ ID NO: 231681 - RNA, 32 nt, Homo Sapiens
ggagaacacacguguuggcgcuucuuggcagc

SEQ ID NO: 231682 - RNA, 32 nt, Homo Sapiens
guaccaagggcaaaaacuagaaacuguaacug

SEQ ID NO: 231683 - RNA, 32 nt, Homo Sapiens
guuuuaaaggauuguuauuuacuacuuuggau

SEQ ID NO: 231684 - RNA, 32 nt, Homo Sapiens
caaaguuguggaauuuuugugauuaauugcug

SEQ ID NO: 231685 - RNA, 32 nt, Homo Sapiens
acucuucugaaauugcuaggaccauugggggu

SEQ ID NO: 231686 - RNA, 32 nt, Homo Sapiens
agacguggccagcucccuggccugcugcccgc

SEQ ID NO: 231687 - RNA, 32 nt, Homo Sapiens
caggaaggaauuugggucuggaguucuggcua

SEQ ID NO: 231688 - RNA, 32 nt, Homo Sapiens
guauccccacccaaaucucagguagaauugga

SEQ ID NO: 231689 - RNA, 32 nt, Homo Sapiens
ucauuaaggguaacaccaaaccacuaaacagc

SEQ ID NO: 231690 - RNA, 32 nt, Homo Sapiens
caaauacgaagaggguuguaguaccuuuacuu

SEQ ID NO: 231691 - RNA, 32 nt, Homo Sapiens
uugguggcaaccccagacccaacccaugcccc

SEQ ID NO: 231692 - RNA, 32 nt, Homo Sapiens
uuuugcuaaaagaaacacaauauaugacugac

SEQ ID NO: 231693 - RNA, 32 nt, Homo Sapiens
guccccugccccccucuucccccaccccaugc

SEQ ID NO: 231694 - RNA, 32 nt, Homo Sapiens
ggggacauggagggccguuguugccucucccg

SEQ ID NO: 231695 - RNA, 32 nt, Homo Sapiens
acaaagugccccaagauguccugcaaaaauug

SEQ ID NO: 231696 - RNA, 32 nt, Homo Sapiens
gcggaggaacgcuggguccccggcgccgcggg

SEQ ID NO: 231697 - RNA, 32 nt, Homo Sapiens
aaguauaguuugggggguuggggagaguuuac

SEQ ID NO: 231698 - RNA, 32 nt, Homo Sapiens
acuuuuuccuuccacggacugcguuccgcagc

SEQ ID NO: 231699 - RNA, 29 nt, Homo Sapiens
guuagaaggaguugaaauuuucuaaaaga

SEQ ID NO: 231700 - RNA, 32 nt, Homo Sapiens
gguaugggcagggcuucaccugacauuaugga

SEQ ID NO: 231701 - RNA, 32 nt, Homo Sapiens
ggcugccuuggagauuuggagaucugaugcca

SEQ ID NO: 231702 - RNA, 32 nt, Homo Sapiens
ccucccugccagcaucccagucaccaccaggu

SEQ ID NO: 231703 - RNA, 32 nt, Homo Sapiens
ccucccguccagccagcccgggcccgcgggau

SEQ ID NO: 231704 - RNA, 32 nt, Homo Sapiens
uguagaugaaaauaauggaaggaauguggagc

SEQ ID NO: 231705 - RNA, 32 nt, Homo Sapiens
aggaucaggacaccccagaucuucucaacugg

SEQ ID NO: 231706 - RNA, 30 nt, Homo Sapiens
uuuggugucugugcucaaaagacugccuuc

SEQ ID NO: 231707 - RNA, 32 nt, Homo Sapiens
auuccaggugggugcuggcagcucugaaggug

SEQ ID NO: 231708 - RNA, 32 nt, Homo Sapiens
uaucagcagacacuccaguuugcccaccacaa

SEQ ID NO: 231709 - RNA, 32 nt, Homo Sapiens
uggcauaaguguuuaaagcaauauuuucugga

SEQ ID NO: 231710 - RNA, 32 nt, Homo Sapiens
acaugcuuaaaagucgaucgccaggcaagugc

SEQ ID NO: 231711 - RNA, 32 nt, Homo Sapiens
cuauaaaucuuauuaaguucaagcauuguccg

SEQ ID NO: 231712 - RNA, 32 nt, Homo Sapiens
aaaaaacaaaacuggauacaugugcagaacau

SEQ ID NO: 231713 - RNA, 32 nt, Homo Sapiens
acauggguguaaacuggcuggggagaaaauga

SEQ ID NO: 231714 - RNA, 32 nt, Homo Sapiens
gguggaaggaccgcgggugucgcaggugucgu

SEQ ID NO: 231715 - RNA, 32 nt, Homo Sapiens
uuauaaacauuuccagugaauguaaaggaaga

SEQ ID NO: 231716 - RNA, 32 nt, Homo Sapiens
accggaucgcggcuacccgccagcguguccgc

SEQ ID NO: 231717 - RNA, 32 nt, Homo Sapiens
aauuuuguuggucugaauacaaacauuucacu

SEQ ID NO: 231718 - RNA, 32 nt, Homo Sapiens
uuucauugaaagauuauuuauauuuaaucuua

SEQ ID NO: 231719 - RNA, 32 nt, Homo Sapiens
gauggggguagagaagacuuugaaggaaaaga

SEQ ID NO: 231720 - RNA, 32 nt, Homo Sapiens
ugcaaaaugaauuuggaaucaagaauaaauug

SEQ ID NO: 231721 - RNA, 32 nt, Homo Sapiens
aaagaagaggugggauaguuggagagcagaac

SEQ ID NO: 231722 - RNA, 32 nt, Homo Sapiens
agccuggccuggcucuggcccgguccuaagcu

SEQ ID NO: 231723 - RNA, 32 nt, Homo Sapiens
ccucagaagacaucgagcgguccuggagccuc

SEQ ID NO: 231724 - RNA, 32 nt, Homo Sapiens
uuacaaauuuuuccugcaaaaguggaaucacu

SEQ ID NO: 231725 - RNA, 32 nt, Homo Sapiens
ggcuucugggucuuugaacagccgcgaugucg

SEQ ID NO: 231726 - RNA, 32 nt, Homo Sapiens
ccagcagcauuuggguaucugaggugucacac

SEQ ID NO: 231727 - RNA, 32 nt, Homo Sapiens
ggcuuaaaggauuaaggggguuucugcuggca

SEQ ID NO: 231728 - RNA, 32 nt, Homo Sapiens
ccguguacacacucaaggaggcuuacgacaac

SEQ ID NO: 231729 - RNA, 32 nt, Homo Sapiens
uccugccuuucugaaccaaaccaauguauuuc

SEQ ID NO: 231730 - RNA, 32 nt, Homo Sapiens
agugggcccugcccuccgccccacgcaggagc

SEQ ID NO: 231731 - RNA, 32 nt, Homo Sapiens
cccggagagcgaagggcgggcgggucccggag

SEQ ID NO: 231732 - RNA, 32 nt, Homo Sapiens
uccugaggagauuuccacaggaacucaaucca

SEQ ID NO: 231733 - RNA, 32 nt, Homo Sapiens
ucugcccccucagccuggcccgcccuuccuaa

SEQ ID NO: 231734 - RNA, 32 nt, Homo Sapiens
ucagauuuuugaguaccaaugaucaugcuucc

SEQ ID NO: 231735 - RNA, 29 nt, Homo Sapiens
agaaggauagugaucaugucuaguaaauu

SEQ ID NO: 231736 - RNA, 32 nt, Homo Sapiens
uuuaaagagcauuucaguuaacuuuuucagcu

SEQ ID NO: 231737 - RNA, 32 nt, Homo Sapiens
cccgaggcucugcggccgcgccgcgcgucccu

SEQ ID NO: 231738 - RNA, 32 nt, Homo Sapiens
cccucucuggggauggacuggguaaauguuga

SEQ ID NO: 231739 - RNA, 32 nt, Homo Sapiens
aagcgggcacugugcacgcagcccuugagggg

SEQ ID NO: 231740 - RNA, 31 nt, Homo Sapiens
uguuuaauaaauuguaauuauuuuguguaca

SEQ ID NO: 231741 - RNA, 31 nt, Homo Sapiens
gcacacuggccaguucuaccauagacuugac

SEQ ID NO: 231742 - RNA, 32 nt, Homo Sapiens
aagacugugucugcccuuuagaagcuaagaau

SEQ ID NO: 231743 - RNA, 32 nt, Homo Sapiens
cccagcggauggcagaugcccuugaagcagaa

SEQ ID NO: 231744 - RNA, 32 nt, Homo Sapiens
ggaucagcuccaagcagugaaaauaguaauca

SEQ ID NO: 231745 - RNA, 32 nt, Homo Sapiens
uuacacacacacagcuucauggagcagagagc

SEQ ID NO: 231746 - RNA, 32 nt, Homo Sapiens
ucuaauaguuuaucauccaauugcaaguaacc

SEQ ID NO: 231747 - RNA, 32 nt, Homo Sapiens
caacagccuuugcgguccuuagacagcuuggc

SEQ ID NO: 231748 - RNA, 29 nt, Homo Sapiens
auauguauauguauauguggagaaacaug

SEQ ID NO: 231749 - RNA, 32 nt, Homo Sapiens
ccuuugccaaacuuggaugcauuuuucucuuu

SEQ ID NO: 231750 - RNA, 32 nt, Homo Sapiens
caugccccuccagcguggccccgccccuagcc

SEQ ID NO: 231751 - RNA, 32 nt, Homo Sapiens
cagggccugguacucuagcagcagccacaggg

SEQ ID NO: 231752 - RNA, 32 nt, Homo Sapiens
gcugagggcuggccgccucccgcgugcucugg

SEQ ID NO: 231753 - RNA, 28 nt, Homo Sapiens
gggggagugccagacaggaugaaagcgu

SEQ ID NO: 231754 - RNA, 32 nt, Homo Sapiens
acgaggaguagaggaggccgcagccagagccu

SEQ ID NO: 231755 - RNA, 32 nt, Homo Sapiens
gacccuuccuuccuagucgcggggagucugag

SEQ ID NO: 231756 - RNA, 32 nt, Homo Sapiens
ggagacccucacgcgccgcggccgaucccccc

SEQ ID NO: 231757 - RNA, 32 nt, Homo Sapiens
ccgccauggcccccaaccaauguacaagcuau

SEQ ID NO: 231758 - RNA, 29 nt, Homo Sapiens
auguccuggggacagggaguccuugggac

SEQ ID NO: 231759 - RNA, 32 nt, Homo Sapiens
accacagggcuuuugggcacugccuccuuggg

SEQ ID NO: 231760 - RNA, 32 nt, Homo Sapiens
uaauuaaaguagauuauggccuuuuuaaguau

SEQ ID NO: 231761 - RNA, 32 nt, Homo Sapiens
gugccaaaaugaacugcucucagcugauggcu

SEQ ID NO: 231762 - RNA, 32 nt, Homo Sapiens
acugugggcugggaaacuguaccuaccucucu

SEQ ID NO: 231763 - RNA, 32 nt, Homo Sapiens
uuuggagauucagcacaaaaccauugcuacuu

SEQ ID NO: 231764 - RNA, 32 nt, Homo Sapiens
auuucuucggaagaggaagagggcuuggugug

SEQ ID NO: 231765 - RNA, 32 nt, Homo Sapiens
uuuuucuuauggcuguugaaaaguauagagcu

SEQ ID NO: 231766 - RNA, 32 nt, Homo Sapiens
aggaucccugucaccuucuccucucuucacgg

SEQ ID NO: 231767 - RNA, 32 nt, Homo Sapiens
uuccaaaugagggccuuaaaugaugcucagcu

SEQ ID NO: 231768 - RNA, 32 nt, Homo Sapiens
ccugcuuuugggauuacuuaugcuguggaacu

SEQ ID NO: 231769 - RNA, 32 nt, Homo Sapiens
gcugacgcaucuucuuuuucugccuguagaga

SEQ ID NO: 231770 - RNA, 32 nt, Homo Sapiens
aguguaugucuuguauccgauaucuaacgcuu

SEQ ID NO: 231771 - RNA, 32 nt, Homo Sapiens
cccucagugacuuccuugggugauccugacuu

SEQ ID NO: 231772 - RNA, 32 nt, Homo Sapiens
agaauuuggaauucuaucagauaaauuuaaca

SEQ ID NO: 231773 - RNA, 32 nt, Homo Sapiens
agugaccuucuagccuucuccugcccuccugu

SEQ ID NO: 231774 - RNA, 32 nt, Homo Sapiens
caucaucuaaaggguggguggugcuggaccaa

SEQ ID NO: 231775 - RNA, 32 nt, Homo Sapiens
uuccagaagcgccagcagcagcagagcgcccu

SEQ ID NO: 231776 - RNA, 32 nt, Homo Sapiens
cgcggagcccagaucgccccccugccaggccu

SEQ ID NO: 231777 - RNA, 32 nt, Homo Sapiens
gcuucagagaggagagauuugcuggggcaaaa

SEQ ID NO: 231778 - RNA, 32 nt, Homo Sapiens
cgagggcuucgacgaggagggccgcaacauua

SEQ ID NO: 231779 - RNA, 29 nt, Homo Sapiens
gugggcacuggcuggguacggugcccucc

SEQ ID NO: 231780 - RNA, 30 nt, Homo Sapiens
ccauuaugggaaaucagcuugcuggcauug

SEQ ID NO: 231781 - RNA, 32 nt, Homo Sapiens
gaaagggacaccuuccggcccuccccaguagc

SEQ ID NO: 231782 - RNA, 32 nt, Homo Sapiens
caaugcuguuucacuggaggacacggcuaaga

SEQ ID NO: 231783 - RNA, 32 nt, Homo Sapiens
cgguguaccagcucaacggccuggccggcuac

SEQ ID NO: 231784 - RNA, 32 nt, Homo Sapiens
agaagccagaccuggguuggguccuggcgaaa

SEQ ID NO: 231785 - RNA, 32 nt, Homo Sapiens
uguuauucuuugcacuuuuucuuaaucauuuu

SEQ ID NO: 231786 - RNA, 32 nt, Homo Sapiens
cagggcugcuuuucuuuuuggaggcucuaggg

SEQ ID NO: 231787 - RNA, 32 nt, Homo Sapiens
aucugcuucuucuggggugugaggcggguggg

SEQ ID NO: 231788 - RNA, 32 nt, Homo Sapiens
uauaaaucaaaguuuuaaaaagauguuuggau

SEQ ID NO: 231789 - RNA, 32 nt, Homo Sapiens
caaaaguuugaaaaaugcauuguucauaugaa

SEQ ID NO: 231790 - RNA, 32 nt, Homo Sapiens
aaauacaaaccgccccguggccugcaggccug

SEQ ID NO: 231791 - RNA, 32 nt, Homo Sapiens
uccccuuuuccacaucccagccccaccucugu

SEQ ID NO: 231792 - RNA, 32 nt, Homo Sapiens
gcaggauugcuuuacacauggaugcacaaaug

SEQ ID NO: 231793 - RNA, 32 nt, Homo Sapiens
aguuagcuaauagaaaaacagguaagaauaaa

SEQ ID NO: 231794 - RNA, 32 nt, Homo Sapiens
gccugcccagcugccgcccccggacucugauc

SEQ ID NO: 231795 - RNA, 32 nt, Homo Sapiens
gagcggcggggccagcugcguucugagccugg

SEQ ID NO: 231796 - RNA, 32 nt, Homo Sapiens
uuguggggaugaaaugucauuguguauggaag

SEQ ID NO: 231797 - RNA, 32 nt, Homo Sapiens
ugguuuaguucuugggauacugcgagugaaca

SEQ ID NO: 231798 - RNA, 32 nt, Homo Sapiens
ccagguggugaggagggaaaggcagucagauu

SEQ ID NO: 231799 - RNA, 32 nt, Homo Sapiens
cuucccggccccaccaacacucugagauccga

SEQ ID NO: 231800 - RNA, 32 nt, Homo Sapiens
aacgaaggugacucacuuugcuuuuucagucc

SEQ ID NO: 231801 - RNA, 32 nt, Homo Sapiens
acccccucauuuccccagugaccauagccagu

SEQ ID NO: 231802 - RNA, 32 nt, Homo Sapiens
ccggagcaguggccgcgccacgccggccccag

SEQ ID NO: 231803 - RNA, 32 nt, Homo Sapiens
gagaugcuuaucuauuuuaaaaaaaaaaaaaa

SEQ ID NO: 231804 - RNA, 32 nt, Homo Sapiens
ucaaaguguguacagauuuuugaaguguuggu

SEQ ID NO: 231805 - RNA, 32 nt, Homo Sapiens
caucucuccugauuuucaaacauccuagacug

SEQ ID NO: 231806 - RNA, 32 nt, Homo Sapiens
aaaggaguuaauacuaaucuuguacauacaca

SEQ ID NO: 231807 - RNA, 32 nt, Homo Sapiens
gacuucaucuccaugugaagggcucacuguuu

SEQ ID NO: 231808 - RNA, 32 nt, Homo Sapiens
cuggauggagcuuggcacccaagccccucaug

SEQ ID NO: 231809 - RNA, 32 nt, Homo Sapiens
aaacccugucuccaugacuucauuugcacuuu

SEQ ID NO: 231810 - RNA, 32 nt, Homo Sapiens
cugaggcuccggaugauucagauggacuguga

SEQ ID NO: 231811 - RNA, 32 nt, Homo Sapiens
augaaaaacacuauaauuuacuguauacucuu

SEQ ID NO: 231812 - RNA, 32 nt, Homo Sapiens
aauuaccaggugguauuauacucuacuuugag

SEQ ID NO: 231813 - RNA, 32 nt, Homo Sapiens
aacgucuucuaaauuuccccaucuucuaaacc

SEQ ID NO: 231814 - RNA, 32 nt, Homo Sapiens
uccugagcuaagcccaggaugccgcccaagcc

SEQ ID NO: 231815 - RNA, 32 nt, Homo Sapiens
ccacucgcuggcuuuguccccaucccacuguu

SEQ ID NO: 231816 - RNA, 32 nt, Homo Sapiens
uccgccgccucuuuucugcugggucugggagg

SEQ ID NO: 231817 - RNA, 32 nt, Homo Sapiens
uggcucgcucagcuccuccaccgcagcccagc

SEQ ID NO: 231818 - RNA, 32 nt, Homo Sapiens
uauuuuaaagcacuggugaggggaccucuugg

SEQ ID NO: 231819 - RNA, 32 nt, Homo Sapiens
gagcggggcgggaagcgcuucagggcagcgga

SEQ ID NO: 231820 - RNA, 29 nt, Homo Sapiens
ucuaucugauagagguauuuucuguggcc

SEQ ID NO: 231821 - RNA, 32 nt, Homo Sapiens
acagcagaggaauuguuauguauuuuguaguc

SEQ ID NO: 231822 - RNA, 32 nt, Homo Sapiens
ggagacuaggcgagccgaggcgggcgaagggc

SEQ ID NO: 231823 - RNA, 32 nt, Homo Sapiens
uuucuccugguuaccuccuccuccccuacgug

SEQ ID NO: 231824 - RNA, 32 nt, Homo Sapiens
uuuccgaggaagauuaucuacugcaaaacacc

SEQ ID NO: 231825 - RNA, 32 nt, Homo Sapiens
ucaauguuuugaaaauaaugaucucagacuuu

SEQ ID NO: 231826 - RNA, 32 nt, Homo Sapiens
ugccaaaaaaauuuauaaacuaauuuuguacg

SEQ ID NO: 231827 - RNA, 32 nt, Homo Sapiens
ucccaggucuucccucuccucagcgccuaaga

SEQ ID NO: 231828 - RNA, 32 nt, Homo Sapiens
cuuuuuuuuuucugccugagauucuuuaagga

SEQ ID NO: 231829 - RNA, 32 nt, Homo Sapiens
gagaaggccgagagggggcgcuccaggucugg

SEQ ID NO: 231830 - RNA, 32 nt, Homo Sapiens
aguauuucugccccacccaccuaccccccaaa

SEQ ID NO: 231831 - RNA, 32 nt, Homo Sapiens
cuauauuaaaugaggguuucugaucuguacuu

SEQ ID NO: 231832 - RNA, 31 nt, Homo Sapiens
gggucuauccuaccaaccugaguugggggaa

SEQ ID NO: 231833 - RNA, 32 nt, Homo Sapiens
ggaagaaaaauguaaucguaaauauuaauuuu

SEQ ID NO: 231834 - RNA, 32 nt, Homo Sapiens
caguauccuaggacagagagccauaaguagcc

SEQ ID NO: 231835 - RNA, 32 nt, Homo Sapiens
agaaauaacuaccuuaaacccauaaucuuuaa

SEQ ID NO: 231836 - RNA, 32 nt, Homo Sapiens
cuguuuauuaaacaucauccauaugcugaccc

SEQ ID NO: 231837 - RNA, 32 nt, Homo Sapiens
aaucauaguuuguagguauaauuauauagugc

SEQ ID NO: 231838 - RNA, 29 nt, Homo Sapiens
agcagcauagugagaauuauuuaaaaucc

SEQ ID NO: 231839 - RNA, 32 nt, Homo Sapiens
uuuuuuguguacaagaugugggugauggaggg

SEQ ID NO: 231840 - RNA, 32 nt, Homo Sapiens
agcugccggccgccccgcuccgccgaacccag

SEQ ID NO: 231841 - RNA, 32 nt, Homo Sapiens
agggugugacuggcccgaggucacggugagug

SEQ ID NO: 231842 - RNA, 32 nt, Homo Sapiens
aagauuggccucuuuccuuucucuaagacaaa

SEQ ID NO: 231843 - RNA, 32 nt, Homo Sapiens
aagcuccggccgcggagugaugguggccucag

SEQ ID NO: 231844 - RNA, 32 nt, Homo Sapiens
ucucugcgucgcaggccggcccggcggccgug

SEQ ID NO: 231845 - RNA, 32 nt, Homo Sapiens
gucaucaauggcugccaaaaccauuaagugga

SEQ ID NO: 231846 - RNA, 32 nt, Homo Sapiens
ugccaacacuaguggaauaugucacaucccag

SEQ ID NO: 231847 - RNA, 32 nt, Homo Sapiens
caacucucuaaaacguagacucugugcagcuu

SEQ ID NO: 231848 - RNA, 32 nt, Homo Sapiens
cacaaugauuuuuugcaaaauuuuacaguaau

SEQ ID NO: 231849 - RNA, 32 nt, Homo Sapiens
gcaaaaagaacaaaacuguaggaaucguauua

SEQ ID NO: 231850 - RNA, 32 nt, Homo Sapiens
gaauuuggauccaggggugcuggcagaaagaa

SEQ ID NO: 231851 - RNA, 32 nt, Homo Sapiens
aaaggggccugaggaaauuuucuggggugauu

SEQ ID NO: 231852 - RNA, 32 nt, Homo Sapiens
guuauuggcuguuguuacuggaugcaucuuga

SEQ ID NO: 231853 - RNA, 32 nt, Homo Sapiens
gcucacugcagccuccuucuccuggguccaag

SEQ ID NO: 231854 - RNA, 32 nt, Homo Sapiens
aauggggcuuaggaaccgaagcugaugaaguu

SEQ ID NO: 231855 - RNA, 32 nt, Homo Sapiens
aggucccccucuacaggggcuucgugaggccc

SEQ ID NO: 231856 - RNA, 32 nt, Homo Sapiens
auaaaaucaaccaacauaucugaaaaggauca

SEQ ID NO: 231857 - RNA, 32 nt, Homo Sapiens
caucaaagucuccaggcuuaugcugcaaagag

SEQ ID NO: 231858 - RNA, 32 nt, Homo Sapiens
augggagucucgaucuguuacccaggcuggag

SEQ ID NO: 231859 - RNA, 32 nt, Homo Sapiens
gugcgcuggcugucgggggcugggcaugucuc

SEQ ID NO: 231860 - RNA, 32 nt, Homo Sapiens
ugaaaguugcugucuuucuccuccagaggguc

SEQ ID NO: 231861 - RNA, 32 nt, Homo Sapiens
ccucagcuagggccacgcggccccacauugca

SEQ ID NO: 231862 - RNA, 32 nt, Homo Sapiens
uccgccucgggcagcccaaagcuccucugccc

SEQ ID NO: 231863 - RNA, 32 nt, Homo Sapiens
auauugaagaacuucaaucugaagaaacugcc

SEQ ID NO: 231864 - RNA, 32 nt, Homo Sapiens
augugaaaauuauuuuuguuaaaacaggauuu

SEQ ID NO: 231865 - RNA, 32 nt, Homo Sapiens
cuaguaaaaauaucucuaaguaaacuugugaa

SEQ ID NO: 231866 - RNA, 32 nt, Homo Sapiens
gaggcagccugccuggcuaggguuggcuggga

SEQ ID NO: 231867 - RNA, 32 nt, Homo Sapiens
acacguucaugugcacccaagaaccuaugacu

SEQ ID NO: 231868 - RNA, 32 nt, Homo Sapiens
uucuuugucagaacaaauauauguaacaggcu

SEQ ID NO: 231869 - RNA, 32 nt, Homo Sapiens
cagcugccgcgcugcgcaccgggacuggcgag

SEQ ID NO: 231870 - RNA, 32 nt, Homo Sapiens
cagcgcgcuuggcgcuucuccccuccccccga

SEQ ID NO: 231871 - RNA, 32 nt, Homo Sapiens
uaaaaggcauuaaggaggcauuuacucacaaa

SEQ ID NO: 231872 - RNA, 32 nt, Homo Sapiens
auuucaugcccucagcucugggaggccaaucc

SEQ ID NO: 231873 - RNA, 32 nt, Homo Sapiens
caaacucaucagagaauccacacuggagagaa

SEQ ID NO: 231874 - RNA, 32 nt, Homo Sapiens
guagcccgcgcgcggagcguacccugcugcgg

SEQ ID NO: 231875 - RNA, 32 nt, Homo Sapiens
uucuauaugaaguauuugauguuuuguuugaa

SEQ ID NO: 231876 - RNA, 32 nt, Homo Sapiens
accggcaucaucacugcuaucaucauuaacag

SEQ ID NO: 231877 - RNA, 32 nt, Homo Sapiens
uugcaauaauuuccuucugauuucucugugga

SEQ ID NO: 231878 - RNA, 32 nt, Homo Sapiens
caguauacauaaauuucaaacuuuugaauauu

SEQ ID NO: 231879 - RNA, 32 nt, Homo Sapiens
ucagcuagauacugagcuuugauagaauaauu

SEQ ID NO: 231880 - RNA, 32 nt, Homo Sapiens
gugcaccccgaggugccccccuggaccacugc

SEQ ID NO: 231881 - RNA, 32 nt, Homo Sapiens
agcuccugcccccgccuucccucacugaggca

SEQ ID NO: 231882 - RNA, 32 nt, Homo Sapiens
augcugcgaguugccuaacccucccccuaccu

SEQ ID NO: 231883 - RNA, 32 nt, Homo Sapiens
cuaggucugaccaaaaccagagggcagucuag

SEQ ID NO: 231884 - RNA, 32 nt, Homo Sapiens
acuuuuguucuuccuaccggacccuggaaugu

SEQ ID NO: 231885 - RNA, 32 nt, Homo Sapiens
aguccgcugccuguuugcacucagcgugccca

SEQ ID NO: 231886 - RNA, 32 nt, Homo Sapiens
gguugcuccuguacgcguacgggccgcucggc

SEQ ID NO: 231887 - RNA, 32 nt, Homo Sapiens
gggcguggggagugguuuuaggcggcgaagcc

SEQ ID NO: 231888 - RNA, 32 nt, Homo Sapiens
uucuuuuucuggagaugaaccuuuaaauaagu

SEQ ID NO: 231889 - RNA, 32 nt, Homo Sapiens
gcgggcgugaagcggcccgaggugauaccaca

SEQ ID NO: 231890 - RNA, 30 nt, Homo Sapiens
cccagcgccugugcugaggacucccgccau

SEQ ID NO: 231891 - RNA, 28 nt, Homo Sapiens
uggagggaaggaaagcauuugaauccug

SEQ ID NO: 231892 - RNA, 32 nt, Homo Sapiens
uuuucucaugcaaucugucacugauggacaug

SEQ ID NO: 231893 - RNA, 32 nt, Homo Sapiens
augaaaggaaaagagggaugaggaaggggcuu

SEQ ID NO: 231894 - RNA, 32 nt, Homo Sapiens
aucaccuggauccccaggaucuccaggcucuc

SEQ ID NO: 231895 - RNA, 32 nt, Homo Sapiens
gugcaucagaggaggcugagcggcaccagaag

SEQ ID NO: 231896 - RNA, 32 nt, Homo Sapiens
cacggacgugggggguuagguggggcacguaa

SEQ ID NO: 231897 - RNA, 32 nt, Homo Sapiens
aggccuucucucugccuaccagcccucaccag

SEQ ID NO: 231898 - RNA, 32 nt, Homo Sapiens
agugagucgagauaacacuacugcauuccagc

SEQ ID NO: 231899 - RNA, 32 nt, Homo Sapiens
gaacuugguaguguguaaaaaucuugacuagu

SEQ ID NO: 231900 - RNA, 32 nt, Homo Sapiens
ugacgugccuaccucuuagacauguugugagg

SEQ ID NO: 231901 - RNA, 32 nt, Homo Sapiens
gcuggugcugcugcauuuuuuaucaccuauga

SEQ ID NO: 231902 - RNA, 32 nt, Homo Sapiens
cagcuuuaauaaaaccaggcgcaaacaaaaac

SEQ ID NO: 231903 - RNA, 32 nt, Homo Sapiens
caaggaaugugaaucuuggagcucccagcuau

SEQ ID NO: 231904 - RNA, 30 nt, Homo Sapiens
ccucguuuucaggcgccgccggcggcgcug

SEQ ID NO: 231905 - RNA, 32 nt, Homo Sapiens
ugaggaaaugcuucagaugaggcuccaccuug

SEQ ID NO: 231906 - RNA, 32 nt, Homo Sapiens
cugagaaaagguccuagcuggagucagucccc

SEQ ID NO: 231907 - RNA, 32 nt, Homo Sapiens
uuuauacauaaccauggauguagugggaaaca

SEQ ID NO: 231908 - RNA, 32 nt, Homo Sapiens
agauggccaggacauuuguccacuuaaacucu

SEQ ID NO: 231909 - RNA, 32 nt, Homo Sapiens
uucgggguggauuuucguuguccguggaagaa

SEQ ID NO: 231910 - RNA, 29 nt, Homo Sapiens
ucguuuauaaaggguuauuuucucaugag

SEQ ID NO: 231911 - RNA, 32 nt, Homo Sapiens
gaggggcugcugcggcagcugcaggagccgag

SEQ ID NO: 231912 - RNA, 32 nt, Homo Sapiens
ccuuggcaccauguccugugugcauuauaaau

SEQ ID NO: 231913 - RNA, 32 nt, Homo Sapiens
uaggugagggcagaggaggagaucagaaaauc

SEQ ID NO: 231914 - RNA, 32 nt, Homo Sapiens
aauguuacuuuuugugaugaaaaugcaaagga

SEQ ID NO: 231915 - RNA, 32 nt, Homo Sapiens
ucucucucugcuccagcgugccuccgggaauc

SEQ ID NO: 231916 - RNA, 32 nt, Homo Sapiens
agcccagguguuggugugucccuuuaaugcua

SEQ ID NO: 231917 - RNA, 32 nt, Homo Sapiens
aaguagauauuugguguuuuuaucuugucaaa

SEQ ID NO: 231918 - RNA, 32 nt, Homo Sapiens
cuccugggcugccagggaccuucagcucccag

SEQ ID NO: 231919 - RNA, 32 nt, Homo Sapiens
agggagaacuggggugggcgggggguggggcu

SEQ ID NO: 231920 - RNA, 32 nt, Homo Sapiens
auucugccaccuuccuggcccgacgccauggg

SEQ ID NO: 231921 - RNA, 32 nt, Homo Sapiens
ggguccugcagcuuguccuuucuggcuggaag

SEQ ID NO: 231922 - RNA, 32 nt, Homo Sapiens
ugucauguuucaucuuucuagaauucauuuuu

SEQ ID NO: 231923 - RNA, 32 nt, Homo Sapiens
acagggugcuucggcgggaggugggggaacaa

SEQ ID NO: 231924 - RNA, 32 nt, Homo Sapiens
cugauuauuuuugauuucuguuugugugguau

SEQ ID NO: 231925 - RNA, 32 nt, Homo Sapiens
cugaggucaggaguucgagaccauccuggcca

SEQ ID NO: 231926 - RNA, 32 nt, Homo Sapiens
cuguggccgcggugagguggguucucaggacc

SEQ ID NO: 231927 - RNA, 31 nt, Homo Sapiens
cggaugaauaaagcuuccuguguugugugau

SEQ ID NO: 231928 - RNA, 32 nt, Homo Sapiens
caggucgcagggccagcguccgcgaggacggc

SEQ ID NO: 231929 - RNA, 32 nt, Homo Sapiens
caucuuuuuugcacuuuuuuuauaagcaaaaa

SEQ ID NO: 231930 - RNA, 32 nt, Homo Sapiens
cggcggaggaggagugaaggcggcggcggcgg

SEQ ID NO: 231931 - RNA, 32 nt, Homo Sapiens
gcuguggguggaagagggaguagcugauuucu

SEQ ID NO: 231932 - RNA, 32 nt, Homo Sapiens
acagaaaagaaaguaccaucaaagacugugga

SEQ ID NO: 231933 - RNA, 32 nt, Homo Sapiens
gcacugucaggagauuuuggacucucugaaga

SEQ ID NO: 231934 - RNA, 32 nt, Homo Sapiens
uuaaguuaauacaauugagauacauuuagcag

SEQ ID NO: 231935 - RNA, 32 nt, Homo Sapiens
gccagccagugucagcucauguuccauuggcu

SEQ ID NO: 231936 - RNA, 32 nt, Homo Sapiens
uauuaaucauucaguauuacuaauggaauaga

SEQ ID NO: 231937 - RNA, 32 nt, Homo Sapiens
agguggaguggccaacgcuuguaaacaaaggg

SEQ ID NO: 231938 - RNA, 32 nt, Homo Sapiens
uuuucuugagagauuuuaaaacaaggaauacu

SEQ ID NO: 231939 - RNA, 32 nt, Homo Sapiens
cacugucucaccccucacgggcaggugcuuca

SEQ ID NO: 231940 - RNA, 32 nt, Homo Sapiens
gcuuggcuguguucucugaucuaggccuuccc

SEQ ID NO: 231941 - RNA, 32 nt, Homo Sapiens
guaauucgucacauggcaacagcuggcuaaua

SEQ ID NO: 231942 - RNA, 32 nt, Homo Sapiens
aacagagaagacugugauucuagcauauuauc

SEQ ID NO: 231943 - RNA, 32 nt, Homo Sapiens
gucugguguuugucauggugaaauuauaacua

SEQ ID NO: 231944 - RNA, 32 nt, Homo Sapiens
cacaugcacacacuaaccuuggagccgauggg

SEQ ID NO: 231945 - RNA, 32 nt, Homo Sapiens
ugacccauuuccccagccgugucgucuccagg

SEQ ID NO: 231946 - RNA, 32 nt, Homo Sapiens
ugugugccugagcuccucccuuuucaauaaga

SEQ ID NO: 231947 - RNA, 32 nt, Homo Sapiens
caccagcggggagaggugccgagaaacgggcg

SEQ ID NO: 231948 - RNA, 32 nt, Homo Sapiens
aaaaccacaacacaauacagccacuaauugcc

SEQ ID NO: 231949 - RNA, 32 nt, Homo Sapiens
caaauaacaagauuuucuuaccucucaguugu

SEQ ID NO: 231950 - RNA, 32 nt, Homo Sapiens
ucccccauuuaauuuuuuuuuaauuuugugua

SEQ ID NO: 231951 - RNA, 32 nt, Homo Sapiens
cugauuuauguucauauauuuaugauaauaaa

SEQ ID NO: 231952 - RNA, 32 nt, Homo Sapiens
ccuccccccugagcccgaggugcugacgucgc

SEQ ID NO: 231953 - RNA, 32 nt, Homo Sapiens
aaaggcuggacucagcagcaacaccaaauccu

SEQ ID NO: 231954 - RNA, 32 nt, Homo Sapiens
ucccagggcugugaaggcagaggggucucugg

SEQ ID NO: 231955 - RNA, 32 nt, Homo Sapiens
cagaccaacaacacugaggaagauagaguggu

SEQ ID NO: 231956 - RNA, 32 nt, Homo Sapiens
uuuuuccuuuuggaauauggcuguaagaagca

SEQ ID NO: 231957 - RNA, 32 nt, Homo Sapiens
agaguggagucuccgguguguaccucagacug

SEQ ID NO: 231958 - RNA, 32 nt, Homo Sapiens
aaggagcuaaagaguagaaauaaauguuuguc

SEQ ID NO: 231959 - RNA, 32 nt, Homo Sapiens
uggcuguccucccagccuaguuuuuaaauauc

SEQ ID NO: 231960 - RNA, 32 nt, Homo Sapiens
ugccauaaugccuaugaagacuucuuuaacaa

SEQ ID NO: 231961 - RNA, 32 nt, Homo Sapiens
aacauacaagauaaccaagaagcuggagucug

SEQ ID NO: 231962 - RNA, 32 nt, Homo Sapiens
ccacgcggccccagcuccugaaccagcgcagu

SEQ ID NO: 231963 - RNA, 32 nt, Homo Sapiens
caccucgccgcccagcucacgccgcgcccgcg

SEQ ID NO: 231964 - RNA, 32 nt, Homo Sapiens
gcaggcggagagcggcggugcccccgagcccc

SEQ ID NO: 231965 - RNA, 32 nt, Homo Sapiens
uaugucuaacuguaugucaaccccagaggccc

SEQ ID NO: 231966 - RNA, 32 nt, Homo Sapiens
gaggcaggugagaggaggaaggaagcggcggc

SEQ ID NO: 231967 - RNA, 32 nt, Homo Sapiens
aaauuagccaggcauaguagugugugccuaua

SEQ ID NO: 231968 - RNA, 32 nt, Homo Sapiens
caggcugcuuaccuuaccguguagugguaacu

SEQ ID NO: 231969 - RNA, 32 nt, Homo Sapiens
auggccgacuccucuguaaaacaucggaugcu

SEQ ID NO: 231970 - RNA, 32 nt, Homo Sapiens
uacaucauuccacaguacaaauaugcuucagg

SEQ ID NO: 231971 - RNA, 32 nt, Homo Sapiens
auaagcacaaaauuucugacuaucuugcggua

SEQ ID NO: 231972 - RNA, 32 nt, Homo Sapiens
cccagcuacugaagaggcugaggugggaggau

SEQ ID NO: 231973 - RNA, 32 nt, Homo Sapiens
guguccuucgccguguugggguuauuugucug

SEQ ID NO: 231974 - RNA, 31 nt, Homo Sapiens
auuguggcaaggucuucagucuagcuucauc

SEQ ID NO: 231975 - RNA, 32 nt, Homo Sapiens
guuauucaguuauaaguaauacaggauuauuu

SEQ ID NO: 231976 - RNA, 32 nt, Homo Sapiens
aggcaggggaggcuuggacgccgguggggaau

SEQ ID NO: 231977 - RNA, 32 nt, Homo Sapiens
ggcugccccuuccacaccccaucuugcucuaa

SEQ ID NO: 231978 - RNA, 32 nt, Homo Sapiens
agcacuuucacauauguuuucuuauuuaacuu

SEQ ID NO: 231979 - RNA, 31 nt, Homo Sapiens
guggggcacaagaaaaaauaguauagcugaa

SEQ ID NO: 231980 - RNA, 32 nt, Homo Sapiens
cugcccuguggccacacccauccuccuuuccu

SEQ ID NO: 231981 - RNA, 32 nt, Homo Sapiens
uaacuuacaaauaaguuuugcuuaccuuuugu

SEQ ID NO: 231982 - RNA, 32 nt, Homo Sapiens
cuuccuugcccauacacaugcucugugucugu

SEQ ID NO: 231983 - RNA, 32 nt, Homo Sapiens
auuuuugcacuucauauuuguuuacuuucucc

SEQ ID NO: 231984 - RNA, 32 nt, Homo Sapiens
gagucugcagugaggggagaugcugggauagc

SEQ ID NO: 231985 - RNA, 32 nt, Homo Sapiens
acaccuuauuuuuaucuucuucagugagccaa

SEQ ID NO: 231986 - RNA, 32 nt, Homo Sapiens
cucccucuggggaugaagugggaguauuuggc

SEQ ID NO: 231987 - RNA, 30 nt, Homo Sapiens
gaauggggagguggcagccacagaagccua

SEQ ID NO: 231988 - RNA, 32 nt, Homo Sapiens
cugcugugcagggcaggaaagcuccacacaca

SEQ ID NO: 231989 - RNA, 32 nt, Homo Sapiens
gagcuccuuaucugucugagaauggggaccag

SEQ ID NO: 231990 - RNA, 32 nt, Homo Sapiens
caccacucagcccuucccagcacuuguccaga

SEQ ID NO: 231991 - RNA, 32 nt, Homo Sapiens
gagcagcagacguuugccauuucucacgccug

SEQ ID NO: 231992 - RNA, 32 nt, Homo Sapiens
aggcugauacaccagcucccaaaggucccgga

SEQ ID NO: 231993 - RNA, 32 nt, Homo Sapiens
aagugacuaggauaaaauaaaagaugaagguc

SEQ ID NO: 231994 - RNA, 27 nt, Homo Sapiens
cugccguccuucucuugcacugccuuc

SEQ ID NO: 231995 - RNA, 32 nt, Homo Sapiens
ucaauucgacuucuuuccaugggcguguucua

SEQ ID NO: 231996 - RNA, 32 nt, Homo Sapiens
gcaaacggagagccacagagugggaagaaaca

SEQ ID NO: 231997 - RNA, 32 nt, Homo Sapiens
gccggcccgcggcuccugggccucccaggcuc

SEQ ID NO: 231998 - RNA, 32 nt, Homo Sapiens
ggggauaaauuaaaugaaaaagaucagaacgu

SEQ ID NO: 231999 - RNA, 32 nt, Homo Sapiens
ugcucuuaaugauuuacagacugaugccagac

SEQ ID NO: 232000 - RNA, 32 nt, Homo Sapiens
ucacaugugaaugcaugauaugaagagccugg

SEQ ID NO: 232001 - RNA, 32 nt, Homo Sapiens
uuugaaagcaggcagccuggcuccagacccug

SEQ ID NO: 232002 - RNA, 32 nt, Homo Sapiens
cuuuucccggagccgcacccaggucccccacc

SEQ ID NO: 232003 - RNA, 32 nt, Homo Sapiens
uaaauggaaaauuccagaaauaaagaauuuua

SEQ ID NO: 232004 - RNA, 32 nt, Homo Sapiens
uucucugagagaacagcugauugagaauuucc

SEQ ID NO: 232005 - RNA, 32 nt, Homo Sapiens
ucccagcuacucuggaggcugaggcggaacga

SEQ ID NO: 232006 - RNA, 32 nt, Homo Sapiens
aguccuguccagcagagcuuuuuggagaagac

SEQ ID NO: 232007 - RNA, 32 nt, Homo Sapiens
cuugggaguggcaggagaagugagaaaaccac

SEQ ID NO: 232008 - RNA, 32 nt, Homo Sapiens
gccacugcacuccagccugggcgacagcgaga

SEQ ID NO: 232009 - RNA, 32 nt, Homo Sapiens
cgagcgccggagaggggcuggaggcggggcga

SEQ ID NO: 232010 - RNA, 32 nt, Homo Sapiens
guauaaucggguuuauuaauucuucuguguuu

SEQ ID NO: 232011 - RNA, 27 nt, Homo Sapiens
accucccccuucuucugucacccaagc

SEQ ID NO: 232012 - RNA, 32 nt, Homo Sapiens
uagaaaaauggcagccaccuuuccaagaaaaa

SEQ ID NO: 232013 - RNA, 27 nt, Homo Sapiens
ccaugcgcggccucgggcucuggcugc

SEQ ID NO: 232014 - RNA, 32 nt, Homo Sapiens
acucacuaucaugagaacagcaaggagggagu

SEQ ID NO: 232015 - RNA, 32 nt, Homo Sapiens
ggggaagcugaauaaacucuaggcccagggcu

SEQ ID NO: 232016 - RNA, 32 nt, Homo Sapiens
cuuucuugauuucauuuucugauauuuuauuu

SEQ ID NO: 232017 - RNA, 32 nt, Homo Sapiens
agaggcgagaguggaggcucuucuucugcccc

SEQ ID NO: 232018 - RNA, 32 nt, Homo Sapiens
gcaaggauaggaugagaugugcaugugagcaa

SEQ ID NO: 232019 - RNA, 32 nt, Homo Sapiens
gaccaagcaagcaugcacauuaugggcaguua

SEQ ID NO: 232020 - RNA, 31 nt, Homo Sapiens
agaagaucuaccucagcuuaaagaacagugc

SEQ ID NO: 232021 - RNA, 32 nt, Homo Sapiens
uccacuuguucagggcuuuucuuaauacugaa

SEQ ID NO: 232022 - RNA, 32 nt, Homo Sapiens
gggugagccccggcuccacacccugccccauc

SEQ ID NO: 232023 - RNA, 32 nt, Homo Sapiens
gaggggaggaggaggacuaaaugaaaaguugu

SEQ ID NO: 232024 - RNA, 32 nt, Homo Sapiens
gaaucacaguacuuuccagcagucagucccug

SEQ ID NO: 232025 - RNA, 32 nt, Homo Sapiens
aaaaagcaaccucagaccaauacccagagauu

SEQ ID NO: 232026 - RNA, 32 nt, Homo Sapiens
ccaucucgcucuugggucaugccuggccagca

SEQ ID NO: 232027 - RNA, 32 nt, Homo Sapiens
ugugugcccauggggagcccagcccccacccc

SEQ ID NO: 232028 - RNA, 32 nt, Homo Sapiens
cuuauaccuuagcugauucuuaauuuucagga

SEQ ID NO: 232029 - RNA, 32 nt, Homo Sapiens
ucuuguuccuguauuucuuuucguacuuuuaa

SEQ ID NO: 232030 - RNA, 32 nt, Homo Sapiens
uagccuggcagccacacccucaguaaucccgc

SEQ ID NO: 232031 - RNA, 32 nt, Homo Sapiens
uacccuguucuucccaacucuccucccuagcu

SEQ ID NO: 232032 - RNA, 32 nt, Homo Sapiens
uccugccucccucuccccucuccaccaugggc

SEQ ID NO: 232033 - RNA, 32 nt, Homo Sapiens
caugcuguuuugggggguggggggguauuugc

SEQ ID NO: 232034 - RNA, 32 nt, Homo Sapiens
ugcuugaaaauauuguugucccggauuuuugu

SEQ ID NO: 232035 - RNA, 32 nt, Homo Sapiens
uuuuauucgguaauaaggaacuuugcaugugu

SEQ ID NO: 232036 - RNA, 32 nt, Homo Sapiens
agugaggaaaauuucuguguuuucagaauuuc

SEQ ID NO: 232037 - RNA, 32 nt, Homo Sapiens
guacugagugguuuuucugaauaaauuccaua

SEQ ID NO: 232038 - RNA, 32 nt, Homo Sapiens
ucaaaauagugucauuguuucccuuaguuucu

SEQ ID NO: 232039 - RNA, 32 nt, Homo Sapiens
gacggcagcuauuacuacaaagggaggccucg

SEQ ID NO: 232040 - RNA, 32 nt, Homo Sapiens
uggcuuacaccuguaaucccaacacuuuggga

SEQ ID NO: 232041 - RNA, 32 nt, Homo Sapiens
ggggaguggggagcccugagcugggguguucc

SEQ ID NO: 232042 - RNA, 32 nt, Homo Sapiens
cuguuccauucucuccaccaccagcguaacug

SEQ ID NO: 232043 - RNA, 32 nt, Homo Sapiens
auuucucauuagauugucuccugguauguuua

SEQ ID NO: 232044 - RNA, 32 nt, Homo Sapiens
gcaagugcaaccucgcugagggcagacugggg

SEQ ID NO: 232045 - RNA, 32 nt, Homo Sapiens
uccuccugccucagccucccaagcagcuggga

SEQ ID NO: 232046 - RNA, 32 nt, Homo Sapiens
ggcguuguccauugucagugugcucgugggcu

SEQ ID NO: 232047 - RNA, 32 nt, Homo Sapiens
gauaaaguuuuaaaugguugucacacuugauu

SEQ ID NO: 232048 - RNA, 32 nt, Homo Sapiens
cagucucccagcugaauccucccugcucucug

SEQ ID NO: 232049 - RNA, 32 nt, Homo Sapiens
uccaccuucccaugcuacaacuucuaaccaca

SEQ ID NO: 232050 - RNA, 32 nt, Homo Sapiens
aauaaaguuaaccaagcaggccaggcacggug

SEQ ID NO: 232051 - RNA, 32 nt, Homo Sapiens
aaguugcuacgguucagugagagaggcagaca

SEQ ID NO: 232052 - RNA, 32 nt, Homo Sapiens
ccucaaccuccggaagagcgcgggaaguuugu

SEQ ID NO: 232053 - RNA, 32 nt, Homo Sapiens
gugcggagggagccgccuagggaccagggacu

SEQ ID NO: 232054 - RNA, 32 nt, Homo Sapiens
acuuaaucuugugggccuggaauuucaacuau

SEQ ID NO: 232055 - RNA, 32 nt, Homo Sapiens
uguauuuaagauuuuuuuuuuaaaucucuuug

SEQ ID NO: 232056 - RNA, 32 nt, Homo Sapiens
acagugaaaauucucggaguugugagaacaug

SEQ ID NO: 232057 - RNA, 28 nt, Homo Sapiens
gggcaggguggcuccaggauguuaggaa

SEQ ID NO: 232058 - RNA, 32 nt, Homo Sapiens
ccuaaaucuauuuuaaaauuguuuucuuucuu

SEQ ID NO: 232059 - RNA, 32 nt, Homo Sapiens
augcauuguuuuuauacaucacuguugaucua

SEQ ID NO: 232060 - RNA, 28 nt, Homo Sapiens
gaaaaguugucacaaauguguuuaaaca

SEQ ID NO: 232061 - RNA, 32 nt, Homo Sapiens
aaggucuuagacugcaaaucuaaccauauuua

SEQ ID NO: 232062 - RNA, 32 nt, Homo Sapiens
uugccacagagaugugaauauuaaacuaaacu

SEQ ID NO: 232063 - RNA, 32 nt, Homo Sapiens
uuuugaauguauauuucuauuuaugauaccaa

SEQ ID NO: 232064 - RNA, 32 nt, Homo Sapiens
aagaugucaaacuuaaggcugaucagcagaug

SEQ ID NO: 232065 - RNA, 32 nt, Homo Sapiens
uauaaaaaucuccaagcuugugcuuacacaug

SEQ ID NO: 232066 - RNA, 32 nt, Homo Sapiens
uaagcaccccuuucccugggaaugcgcagaac

SEQ ID NO: 232067 - RNA, 32 nt, Homo Sapiens
uuaguacccaagugaagucuucugacgaucca

SEQ ID NO: 232068 - RNA, 32 nt, Homo Sapiens
uucccucccucccagauaccaucauaccugcu

SEQ ID NO: 232069 - RNA, 32 nt, Homo Sapiens
aaagggccgccucgucuccgcuccugggggac

SEQ ID NO: 232070 - RNA, 32 nt, Homo Sapiens
ugauuugagcacuuuuuuuuuauuuuuauuuu

SEQ ID NO: 232071 - RNA, 32 nt, Homo Sapiens
ugggcuggggcagagccuggggucuggguggg

SEQ ID NO: 232072 - RNA, 32 nt, Homo Sapiens
aggagcaauuagauauuguauaaggugcaaug

SEQ ID NO: 232073 - RNA, 32 nt, Homo Sapiens
gcugcaaaaccugaaauugaccacuaggugac

SEQ ID NO: 232074 - RNA, 32 nt, Homo Sapiens
cugcccguuccaauauauaaucuccuccuuua

SEQ ID NO: 232075 - RNA, 32 nt, Homo Sapiens
ucucucuuuacagauagcuauagacaucauuu

SEQ ID NO: 232076 - RNA, 32 nt, Homo Sapiens
cccaauguccccuggguccacagugggucccc

SEQ ID NO: 232077 - RNA, 32 nt, Homo Sapiens
agccccggccccaacccuaccuccaagccccg

SEQ ID NO: 232078 - RNA, 32 nt, Homo Sapiens
aguacagugucugccgauuccacauuagcuuu

SEQ ID NO: 232079 - RNA, 32 nt, Homo Sapiens
ggauucaacauguugguuaggcuggucuugaa

SEQ ID NO: 232080 - RNA, 32 nt, Homo Sapiens
uggauucugcgaugcugucuggacuuugcugu

SEQ ID NO: 232081 - RNA, 32 nt, Homo Sapiens
ucccacugcccccugagauguacacccugauu

SEQ ID NO: 232082 - RNA, 32 nt, Homo Sapiens
cuucucucuaauguggagauacacaggagcuu

SEQ ID NO: 232083 - RNA, 32 nt, Homo Sapiens
ccaagcaggcccauuccuaccggagcauccca

SEQ ID NO: 232084 - RNA, 32 nt, Homo Sapiens
uuucuaguuguaauguguaugucugguaaaua

SEQ ID NO: 232085 - RNA, 32 nt, Homo Sapiens
ucccccgaguccccaaaucagcagccugugcu

SEQ ID NO: 232086 - RNA, 32 nt, Homo Sapiens
ccucuuguuuuuccucagcugacuccauauuu

SEQ ID NO: 232087 - RNA, 32 nt, Homo Sapiens
cagggcugggcagguccuggggaggcugagac

SEQ ID NO: 232088 - RNA, 30 nt, Homo Sapiens
acgggguuucaccauguuagccaggcuagu

SEQ ID NO: 232089 - RNA, 32 nt, Homo Sapiens
cauagacaugcgccaccuccacgugagaacaa

SEQ ID NO: 232090 - RNA, 32 nt, Homo Sapiens
agcagcccacccagcagaaauacaauccgagc

SEQ ID NO: 232091 - RNA, 32 nt, Homo Sapiens
acauauuguaaauguucuuuuuuccauguaaa

SEQ ID NO: 232092 - RNA, 32 nt, Homo Sapiens
augggacugacgcuacauggggcucacucagg

SEQ ID NO: 232093 - RNA, 32 nt, Homo Sapiens
agcucgcgcucgccccgccggcguccccagcc

SEQ ID NO: 232094 - RNA, 31 nt, Homo Sapiens
aagcugaaauaaagaacgaagucaauaauaa

SEQ ID NO: 232095 - RNA, 32 nt, Homo Sapiens
cauuucuagagcugaggggcggugguguuuag

SEQ ID NO: 232096 - RNA, 32 nt, Homo Sapiens
aucccauccccucccgcacagcccugggcccc

SEQ ID NO: 232097 - RNA, 32 nt, Homo Sapiens
cgugcgcccgucuguggccaagcagccagcag

SEQ ID NO: 232098 - RNA, 32 nt, Homo Sapiens
uucugcuuaaacacacggcagauccagaaauu

SEQ ID NO: 232099 - RNA, 27 nt, Homo Sapiens
ccaugccggcccggcggcugcugcugc

SEQ ID NO: 232100 - RNA, 32 nt, Homo Sapiens
aaagguaggaagaaagcagagggaaauauuuc

SEQ ID NO: 232101 - RNA, 32 nt, Homo Sapiens
acacagaacaggaaaagucaugauaggcaccc

SEQ ID NO: 232102 - RNA, 32 nt, Homo Sapiens
gacuuucuggauccagacccaggcagcgcaca

SEQ ID NO: 232103 - RNA, 30 nt, Homo Sapiens
ucaguaauaauaaacagguaacauaauugc

SEQ ID NO: 232104 - RNA, 32 nt, Homo Sapiens
guaaaacaaaacaaaaacgacaguaauaccaa

SEQ ID NO: 232105 - RNA, 32 nt, Homo Sapiens
aggaggucgggcggggcagaggggcuucaccu

SEQ ID NO: 232106 - RNA, 32 nt, Homo Sapiens
uuuuguuuggguuuucugaaacuuaaaaugcu

SEQ ID NO: 232107 - RNA, 32 nt, Homo Sapiens
uggggcccugccaccucuccucauggggccag

SEQ ID NO: 232108 - RNA, 32 nt, Homo Sapiens
gugaaaugaugauaagaagcuggauuaggugu

SEQ ID NO: 232109 - RNA, 32 nt, Homo Sapiens
gagcagcgcuauaagggacuuugcacuuuaaa

SEQ ID NO: 232110 - RNA, 32 nt, Homo Sapiens
aaaguuccuuaagcuggugauuccuaaucaag

SEQ ID NO: 232111 - RNA, 32 nt, Homo Sapiens
aaacccccgcggcugcuuccugggaaggucgu

SEQ ID NO: 232112 - RNA, 32 nt, Homo Sapiens
uguuuuuauuuucaggcuuagccugagcacac

SEQ ID NO: 232113 - RNA, 32 nt, Homo Sapiens
ccaagcuuuggguuggagcuguuccauugggu

SEQ ID NO: 232114 - RNA, 32 nt, Homo Sapiens
caaaaaacacguguguucugguaaauuccaag

SEQ ID NO: 232115 - RNA, 32 nt, Homo Sapiens
gcuaugcccaaccaucuguggagaguggagug

SEQ ID NO: 232116 - RNA, 32 nt, Homo Sapiens
acaaguaaaaaauugacuuuacuaguaaaaaa

SEQ ID NO: 232117 - RNA, 32 nt, Homo Sapiens
uuuggacuuggacuuuugaguuaagacuuugg

SEQ ID NO: 232118 - RNA, 32 nt, Homo Sapiens
ggaagggggaaagguguaggcugggggauuga

SEQ ID NO: 232119 - RNA, 32 nt, Homo Sapiens
auccaaugugacuggugucugugaaaagggga

SEQ ID NO: 232120 - RNA, 32 nt, Homo Sapiens
acugagcagcugcuguguccucacgaugguaa

SEQ ID NO: 232121 - RNA, 32 nt, Homo Sapiens
ccaucuggcugccaauggaacucaaaacuugg

SEQ ID NO: 232122 - RNA, 32 nt, Homo Sapiens
ggcccuugaagaagcgaccaaaguggaagagg

SEQ ID NO: 232123 - RNA, 32 nt, Homo Sapiens
cggcagccgggcaggccggccugaccucgacc

SEQ ID NO: 232124 - RNA, 32 nt, Homo Sapiens
ugcggguuucggcggcggcugaggaagaagcg

SEQ ID NO: 232125 - RNA, 32 nt, Homo Sapiens
ggcgcaucgccggcccggggcccuuggugcgg

SEQ ID NO: 232126 - RNA, 32 nt, Homo Sapiens
caugaauaccauagagaaaauauuuuagaauu

SEQ ID NO: 232127 - RNA, 32 nt, Homo Sapiens
ucauucagugauuuuuauuuuggucauuauuu

SEQ ID NO: 232128 - RNA, 32 nt, Homo Sapiens
gcaggccaggagucgugcgcgcgggcggcgag

SEQ ID NO: 232129 - RNA, 32 nt, Homo Sapiens
uuaaaaagcacucaggugauaauuauguagga

SEQ ID NO: 232130 - RNA, 32 nt, Homo Sapiens
aaggcccugggcuggaggaagacaucccagau

SEQ ID NO: 232131 - RNA, 32 nt, Homo Sapiens
ggcccugcagauguggaagccagacccacaga

SEQ ID NO: 232132 - RNA, 32 nt, Homo Sapiens
agacgcuuagcggcggcgcuuccagaacgcug

SEQ ID NO: 232133 - RNA, 32 nt, Homo Sapiens
aaaauaguuauagugccuuguuuucugaacug

SEQ ID NO: 232134 - RNA, 32 nt, Homo Sapiens
uccccuuggcagugucccagggcccuggaugg

SEQ ID NO: 232135 - RNA, 31 nt, Homo Sapiens
aucuucaaaauugacagacuaacugacauag

SEQ ID NO: 232136 - RNA, 32 nt, Homo Sapiens
aacaaggauuucaguguagauuuugucuuucu

SEQ ID NO: 232137 - RNA, 32 nt, Homo Sapiens
gccgggacucggagcugugggguguggggagg

SEQ ID NO: 232138 - RNA, 32 nt, Homo Sapiens
ucaggccugggguggggccccgggugggugcg

SEQ ID NO: 232139 - RNA, 32 nt, Homo Sapiens
uacuguuuauaaaauaaauacaaugaauguug

SEQ ID NO: 232140 - RNA, 32 nt, Homo Sapiens
ucuccuuugacuguaccgggagccagauucua

SEQ ID NO: 232141 - RNA, 32 nt, Homo Sapiens
agcaaaaucuucggaagguguuucuuguaccu

SEQ ID NO: 232142 - RNA, 32 nt, Homo Sapiens
ucuggcaguugugccaagggaggagggaggag

SEQ ID NO: 232143 - RNA, 32 nt, Homo Sapiens
gcucuguuacagcccacuguguccuuuagaag

SEQ ID NO: 232144 - RNA, 32 nt, Homo Sapiens
auugaaaaauuuaagaaugaggcugcugagau

SEQ ID NO: 232145 - RNA, 30 nt, Homo Sapiens
cuuucacuguaauaaaucauggccgugagc

SEQ ID NO: 232146 - RNA, 32 nt, Homo Sapiens
uuuuuuuuccagccgauuuccucuuaguggcu

SEQ ID NO: 232147 - RNA, 32 nt, Homo Sapiens
cacagaucuuucccuuuccuuacuagaccucu

SEQ ID NO: 232148 - RNA, 32 nt, Homo Sapiens
caaggagcaagugcugagcuugugaaaaaaca

SEQ ID NO: 232149 - RNA, 32 nt, Homo Sapiens
ggacugguucgcuugguuaauaaacagauaaa

SEQ ID NO: 232150 - RNA, 32 nt, Homo Sapiens
uaccauaggaagacauaaaacuuuaaaaggca

SEQ ID NO: 232151 - RNA, 32 nt, Homo Sapiens
uuucuaggggcuaaagacaacuucuaagauga

SEQ ID NO: 232152 - RNA, 32 nt, Homo Sapiens
cgggagagggucgcugacguggaggcguccga

SEQ ID NO: 232153 - RNA, 30 nt, Homo Sapiens
cagucugucuguguuaggggagaggggagu

SEQ ID NO: 232154 - RNA, 32 nt, Homo Sapiens
gugaguguccagaccauugucuuccaacccca

SEQ ID NO: 232155 - RNA, 29 nt, Homo Sapiens
caagaugucuuaucagaaaaagcagccca

SEQ ID NO: 232156 - RNA, 32 nt, Homo Sapiens
cauccugcugaugaaugaccgagucucgcagc

SEQ ID NO: 232157 - RNA, 32 nt, Homo Sapiens
ucguggcuguggccaugggagaggaggggccu

SEQ ID NO: 232158 - RNA, 32 nt, Homo Sapiens
cgugcccugugugccagacggcggagcuccgc

SEQ ID NO: 232159 - RNA, 32 nt, Homo Sapiens
ucuuucccaugguuaaaacaggaguuguguuc

SEQ ID NO: 232160 - RNA, 32 nt, Homo Sapiens
cugguguagagcuuguguucuuggcccauccu

SEQ ID NO: 232161 - RNA, 32 nt, Homo Sapiens
gguaggcgggccuaacaagggcuccgugcuag

SEQ ID NO: 232162 - RNA, 32 nt, Homo Sapiens
auucucagccucagccucccgaguagcuggga

SEQ ID NO: 232163 - RNA, 32 nt, Homo Sapiens
uagcugggaggcugcagagggugcugggagcc

SEQ ID NO: 232164 - RNA, 32 nt, Homo Sapiens
ugcugucacaccuauauuauuaaacuuaucac

SEQ ID NO: 232165 - RNA, 32 nt, Homo Sapiens
uccgagacugagcggcggcugcggcuccgggg

SEQ ID NO: 232166 - RNA, 32 nt, Homo Sapiens
auuuaccccuccccuaucccuaggcacuuaac

SEQ ID NO: 232167 - RNA, 32 nt, Homo Sapiens
aaggaagcuggguuuuuacaggggcagguccu

SEQ ID NO: 232168 - RNA, 32 nt, Homo Sapiens
ucaagaagguuaacauuuucugauucauguua

SEQ ID NO: 232169 - RNA, 32 nt, Homo Sapiens
cccugggcaaaugauuuauguuuugugauccu

SEQ ID NO: 232170 - RNA, 32 nt, Homo Sapiens
gaaccaggucagcagguaugcccgcccguagg

SEQ ID NO: 232171 - RNA, 32 nt, Homo Sapiens
uaaggggauaucuauuuaaauaauuacuuaua

SEQ ID NO: 232172 - RNA, 31 nt, Homo Sapiens
cugguccggcaugagaccgugagacgagaga

SEQ ID NO: 232173 - RNA, 32 nt, Homo Sapiens
cgugcgcgucggcggcgccgggggccugagga

SEQ ID NO: 232174 - RNA, 32 nt, Homo Sapiens
cugaugugcaggguuccucgcuccccuuccuc

SEQ ID NO: 232175 - RNA, 32 nt, Homo Sapiens
caaaugugugaaauauaauccuaaaaaagaaa

SEQ ID NO: 232176 - RNA, 32 nt, Homo Sapiens
guuaguguuguaaucagguuaaacccacuucc

SEQ ID NO: 232177 - RNA, 32 nt, Homo Sapiens
gcucaguucagcgcacgccggagccgagcgca

SEQ ID NO: 232178 - RNA, 32 nt, Homo Sapiens
uggcaggcccucgcgaugagcagugggucagc

SEQ ID NO: 232179 - RNA, 32 nt, Homo Sapiens
auuauccaggugguccucauccuccgcuugcc

SEQ ID NO: 232180 - RNA, 32 nt, Homo Sapiens
aaaauggcggcugccguuggugcggggugcgg

SEQ ID NO: 232181 - RNA, 32 nt, Homo Sapiens
ugauaauaaauugaaauugugaacucauugcu

SEQ ID NO: 232182 - RNA, 32 nt, Homo Sapiens
cugcagcgcaacgccugaggcagugggcgcgc

SEQ ID NO: 232183 - RNA, 32 nt, Homo Sapiens
gggcagaaaggguggggcaggcaugugagauc

SEQ ID NO: 232184 - RNA, 30 nt, Homo Sapiens
cuggaucaggaacugggggaagugagcgag

SEQ ID NO: 232185 - RNA, 32 nt, Homo Sapiens
ccuggaauuguaauaaauacaucuaaauaaaa

SEQ ID NO: 232186 - RNA, 32 nt, Homo Sapiens
aaccugcaaccuccugauauggccauugcagu

SEQ ID NO: 232187 - RNA, 32 nt, Homo Sapiens
uguaucuaugucucauccuguuuauggucaau

SEQ ID NO: 232188 - RNA, 28 nt, Homo Sapiens
auggauaggaguuuucauuugaagcaua

SEQ ID NO: 232189 - RNA, 32 nt, Homo Sapiens
cccagcuggaagccaccugagggugucccccg

SEQ ID NO: 232190 - RNA, 32 nt, Homo Sapiens
ccggggccuggucggcagcugggccgccaugg

SEQ ID NO: 232191 - RNA, 32 nt, Homo Sapiens
gacauuuugugucaaggauagggcugaggacc

SEQ ID NO: 232192 - RNA, 32 nt, Homo Sapiens
gggcacuggaaguacauaaagaagaagacaua

SEQ ID NO: 232193 - RNA, 32 nt, Homo Sapiens
uaccauagugauuuaaaucuaucaucaauuua

SEQ ID NO: 232194 - RNA, 32 nt, Homo Sapiens
caugguaccugcucaugguuaugaagcuuuca

SEQ ID NO: 232195 - RNA, 32 nt, Homo Sapiens
aucucacuuucucugcagaaaucaaucuuuac

SEQ ID NO: 232196 - RNA, 32 nt, Homo Sapiens
cauguaaguggaaucauacaguauuuguccuu

SEQ ID NO: 232197 - RNA, 32 nt, Homo Sapiens
aagcgacuuuugucaaagaaauuacauaccaa

SEQ ID NO: 232198 - RNA, 32 nt, Homo Sapiens
caccugugucuuggcuggggccccagacgauu

SEQ ID NO: 232199 - RNA, 32 nt, Homo Sapiens
guaauaggcuuuuuuauuuuuauuuuuauacc

SEQ ID NO: 232200 - RNA, 32 nt, Homo Sapiens
uccuuugugauggcccaaaaugucucuaggua

SEQ ID NO: 232201 - RNA, 32 nt, Homo Sapiens
gcuggcuuuccacaccugccuggcccccuccu

SEQ ID NO: 232202 - RNA, 32 nt, Homo Sapiens
gaaggucacuguggaauauagacccauaaucg

SEQ ID NO: 232203 - RNA, 32 nt, Homo Sapiens
uucaggcuccugguuuauucucugauugacug

SEQ ID NO: 232204 - RNA, 32 nt, Homo Sapiens
ugaaacaggaacaaaaucuucugaaagcucgg

SEQ ID NO: 232205 - RNA, 32 nt, Homo Sapiens
guauauucugguuuuaagugcuuuucguauga

SEQ ID NO: 232206 - RNA, 32 nt, Homo Sapiens
ugcuguuuacacacacacacacacacacaccc

SEQ ID NO: 232207 - RNA, 32 nt, Homo Sapiens
acuuccugaggauuucuggccucccccugggu

SEQ ID NO: 232208 - RNA, 32 nt, Homo Sapiens
gucaaggacauuuggauuuacuuuuacagaau

SEQ ID NO: 232209 - RNA, 32 nt, Homo Sapiens
gacagccaggacuccagcuuuugcugagcuuu

SEQ ID NO: 232210 - RNA, 32 nt, Homo Sapiens
cacauguacaguacaguuucuaugauaaugug

SEQ ID NO: 232211 - RNA, 32 nt, Homo Sapiens
uggggugaugggcuucuuucugcacuggaguc

SEQ ID NO: 232212 - RNA, 32 nt, Homo Sapiens
acagugcccuuuucaucuccagugugaauaua

SEQ ID NO: 232213 - RNA, 32 nt, Homo Sapiens
cuuugaguggguuugcuaucaaugaaaugcua

SEQ ID NO: 232214 - RNA, 32 nt, Homo Sapiens
uuugcuuguuuuuucuuuuugcuuaagaucug

SEQ ID NO: 232215 - RNA, 32 nt, Homo Sapiens
gccuucugcgcucgccgccgccgcccucagcc

SEQ ID NO: 232216 - RNA, 32 nt, Homo Sapiens
uauguaccccugucuuucuccuccugacuggu

SEQ ID NO: 232217 - RNA, 32 nt, Homo Sapiens
gaauggauuaagggcggugcaagaugugcuuu

SEQ ID NO: 232218 - RNA, 32 nt, Homo Sapiens
uuguaacagccauuguucccaacagcaucacu

SEQ ID NO: 232219 - RNA, 32 nt, Homo Sapiens
ccgcuuggccccagaaaguuucgguucugccc

SEQ ID NO: 232220 - RNA, 32 nt, Homo Sapiens
ggcaggaggccgcggcgccgggaccucgccug

SEQ ID NO: 232221 - RNA, 32 nt, Homo Sapiens
auuucaguggaaauacaaaaccacuucagaga

SEQ ID NO: 232222 - RNA, 32 nt, Homo Sapiens
cuaucauuuauuuacaucuauguaucuaccau

SEQ ID NO: 232223 - RNA, 32 nt, Homo Sapiens
cugggccuguggauccagaugugugggggccu

SEQ ID NO: 232224 - RNA, 32 nt, Homo Sapiens
cuuuaccccccauuuuuccuauuauucgcucc

SEQ ID NO: 232225 - RNA, 32 nt, Homo Sapiens
aaauaauuaaaggaaacuuaugcugaccaaaa

SEQ ID NO: 232226 - RNA, 32 nt, Homo Sapiens
auugucuggggaaauauugaucugcaguccaa

SEQ ID NO: 232227 - RNA, 32 nt, Homo Sapiens
aacgcgucugccugggccguggcacagcuggg

SEQ ID NO: 232228 - RNA, 32 nt, Homo Sapiens
gccagggggaaggagcugcucucguuugagga

SEQ ID NO: 232229 - RNA, 32 nt, Homo Sapiens
ucucagccucccucaccccagccccuuccccu

SEQ ID NO: 232230 - RNA, 32 nt, Homo Sapiens
cggcguugcaccggcucugugagcaccucccc

SEQ ID NO: 232231 - RNA, 32 nt, Homo Sapiens
acaaggcaacugaguucaagagaucuguugua

SEQ ID NO: 232232 - RNA, 32 nt, Homo Sapiens
ccuacucugggucuucuauccugguguuccuu

SEQ ID NO: 232233 - RNA, 32 nt, Homo Sapiens
uccaucuuggaagcggccgccggcgccuagaa

SEQ ID NO: 232234 - RNA, 32 nt, Homo Sapiens
uuucuauuaagccuuuaaugcuuacagaagua

SEQ ID NO: 232235 - RNA, 32 nt, Homo Sapiens
caauaacuuugucaaggaaagcucuaauauau

SEQ ID NO: 232236 - RNA, 32 nt, Homo Sapiens
cacaacaaggacccuguguggagccagguguu

SEQ ID NO: 232237 - RNA, 32 nt, Homo Sapiens
ucaggcacagaaagcugaaggugcuggagaug

SEQ ID NO: 232238 - RNA, 32 nt, Homo Sapiens
gcagagacccccucgacauccuggacaccaca

SEQ ID NO: 232239 - RNA, 32 nt, Homo Sapiens
guguaccucgcugggaacgcacuuccugggac

SEQ ID NO: 232240 - RNA, 29 nt, Homo Sapiens
gaggaggugaagauuuagguugcagaauc

SEQ ID NO: 232241 - RNA, 32 nt, Homo Sapiens
cugaagcucugcugcuggcuucuccugccagg

SEQ ID NO: 232242 - RNA, 32 nt, Homo Sapiens
ugagcagacaccuucacagcuuccucgcugcu

SEQ ID NO: 232243 - RNA, 32 nt, Homo Sapiens
cagaaaugaugugaguugaugaagaagaaaua

SEQ ID NO: 232244 - RNA, 32 nt, Homo Sapiens
aaugugcccauauuuugcucuuucuuugacuu

SEQ ID NO: 232245 - RNA, 32 nt, Homo Sapiens
agugugaugacacacucugugcuuuuccuacu

SEQ ID NO: 232246 - RNA, 32 nt, Homo Sapiens
caggacauugaccaccugaccuccccuaacua

SEQ ID NO: 232247 - RNA, 32 nt, Homo Sapiens
ccacggaaggucggccugggauguggccuggg

SEQ ID NO: 232248 - RNA, 32 nt, Homo Sapiens
agccuggggcgugcuucaggcuccucccucua

SEQ ID NO: 232249 - RNA, 32 nt, Homo Sapiens
uucagcuccucauaggguuggacucaucucag

SEQ ID NO: 232250 - RNA, 32 nt, Homo Sapiens
ucaaggaccugccugucaggaccagggcuggg

SEQ ID NO: 232251 - RNA, 32 nt, Homo Sapiens
caggcaggggagagagacagacauguguucaa

SEQ ID NO: 232252 - RNA, 32 nt, Homo Sapiens
gugagaauacagauguaauuuuuuaccuuguu

SEQ ID NO: 232253 - RNA, 32 nt, Homo Sapiens
gaaccgggucugacucccgagccaccgccgcu

SEQ ID NO: 232254 - RNA, 32 nt, Homo Sapiens
augauguguaaguccaaaggacaggaccagac

SEQ ID NO: 232255 - RNA, 32 nt, Homo Sapiens
uaaauggaagacuguucuaaaaucacuuuuuu

SEQ ID NO: 232256 - RNA, 32 nt, Homo Sapiens
gacagacugugcugaggccaccuugucacgcc

SEQ ID NO: 232257 - RNA, 32 nt, Homo Sapiens
uugccuacuuagggaguaaacccugugaaguc

SEQ ID NO: 232258 - RNA, 32 nt, Homo Sapiens
acuggugucauccauccugaugcuucagacca

SEQ ID NO: 232259 - RNA, 32 nt, Homo Sapiens
agcagcgccagaagcacucauuucugaccacc

SEQ ID NO: 232260 - RNA, 32 nt, Homo Sapiens
uuuaucagguguaaacaaaaagcugaacaguu

SEQ ID NO: 232261 - RNA, 32 nt, Homo Sapiens
ccccucuaucaggaagaccuaccccagcacua

SEQ ID NO: 232262 - RNA, 32 nt, Homo Sapiens
accaccccuccucauuccagaacgaacagccu

SEQ ID NO: 232263 - RNA, 32 nt, Homo Sapiens
aaugcugcuucuugugcaugucugcucugaua

SEQ ID NO: 232264 - RNA, 32 nt, Homo Sapiens
uccagcccagucggcccggcccgggggccaug

SEQ ID NO: 232265 - RNA, 32 nt, Homo Sapiens
uaaacccgcgcgcccgccaggcgcugcggccg

SEQ ID NO: 232266 - RNA, 32 nt, Homo Sapiens
acugaaaggaauuuuuccacaccuugaaguca

SEQ ID NO: 232267 - RNA, 32 nt, Homo Sapiens
uguccucagaaugaaucuucugaugggcuggg

SEQ ID NO: 232268 - RNA, 32 nt, Homo Sapiens
ccaucucugacucagcucccagcagagcagua

SEQ ID NO: 232269 - RNA, 32 nt, Homo Sapiens
gcccccgcgggccccgccuucuccgcaucgcc

SEQ ID NO: 232270 - RNA, 32 nt, Homo Sapiens
guuuugaaaaggauaaucauggguuagaagga

SEQ ID NO: 232271 - RNA, 32 nt, Homo Sapiens
aaaaaguuguuggugugugugcagguuugcau

SEQ ID NO: 232272 - RNA, 32 nt, Homo Sapiens
gaccagggacacagcuaacuaacuuauucagc

SEQ ID NO: 232273 - RNA, 32 nt, Homo Sapiens
gcacagaugaggaggacugcccaggcugccca

SEQ ID NO: 232274 - RNA, 32 nt, Homo Sapiens
ggugggcagaaugcuuuuuuuucuuucugaag

SEQ ID NO: 232275 - RNA, 32 nt, Homo Sapiens
cguaaccaauaaauugugccuuucucacucaa

SEQ ID NO: 232276 - RNA, 32 nt, Homo Sapiens
ccuuuuugcccccacuuuuagacauaccccag

SEQ ID NO: 232277 - RNA, 32 nt, Homo Sapiens
uuaauacaccaauuaaaauauuucuacauaug

SEQ ID NO: 232278 - RNA, 31 nt, Homo Sapiens
uaucuugggugguguuaauagauuaaaggua

SEQ ID NO: 232279 - RNA, 32 nt, Homo Sapiens
cgcucguccgcaaccucugcuguccuccgcgg

SEQ ID NO: 232280 - RNA, 32 nt, Homo Sapiens
cccccugaaggacacaaaaucuaggguggcuu

SEQ ID NO: 232281 - RNA, 32 nt, Homo Sapiens
gaauauacugaauguauaacacucucuaauaa

SEQ ID NO: 232282 - RNA, 31 nt, Homo Sapiens
acccaggcaggcagccaaccccagcuccgug

SEQ ID NO: 232283 - RNA, 32 nt, Homo Sapiens
uaauuuaaauaauacuuuuuuauuaauuaugc

SEQ ID NO: 232284 - RNA, 32 nt, Homo Sapiens
gaugagucaggaggccuggaggcuuggggaga

SEQ ID NO: 232285 - RNA, 32 nt, Homo Sapiens
ucagcuaaucauuaaaaguaaguuacagucau

SEQ ID NO: 232286 - RNA, 32 nt, Homo Sapiens
ugcucaccucugggaaaagcgggugagcagga

SEQ ID NO: 232287 - RNA, 32 nt, Homo Sapiens
agcccuuaaguucugagaaaauuugagccccc

SEQ ID NO: 232288 - RNA, 32 nt, Homo Sapiens
ugcuucugucuccacucggcuuucccaaaagg

SEQ ID NO: 232289 - RNA, 32 nt, Homo Sapiens
gagugacgaugauguacagauucuuucaguuc

SEQ ID NO: 232290 - RNA, 32 nt, Homo Sapiens
cuuuuggguuuuaccacacuuuauucuuaagg

SEQ ID NO: 232291 - RNA, 32 nt, Homo Sapiens
accugacaccugcucuccccagccuguuuucu

SEQ ID NO: 232292 - RNA, 32 nt, Homo Sapiens
aaauuuuaaaagauuaucaggauaacaugacc

SEQ ID NO: 232293 - RNA, 32 nt, Homo Sapiens
aaggauuccuucccucauccuauugaaguugu

SEQ ID NO: 232294 - RNA, 32 nt, Homo Sapiens
ugggggagggagagggagcuuuguguuaagug

SEQ ID NO: 232295 - RNA, 32 nt, Homo Sapiens
auaauuucaaggaacuguguacgccauuuaug

SEQ ID NO: 232296 - RNA, 29 nt, Homo Sapiens
aacaaaaagaaggugcguuacuauuuuuu

SEQ ID NO: 232297 - RNA, 32 nt, Homo Sapiens
cuggucccaucccaccccugccuccuccagac

SEQ ID NO: 232298 - RNA, 32 nt, Homo Sapiens
auugcuauuucuguauuuuuuguuuguauugu

SEQ ID NO: 232299 - RNA, 32 nt, Homo Sapiens
agccguggaacccccuccuccucccuggaguc

SEQ ID NO: 232300 - RNA, 32 nt, Homo Sapiens
guucugcuugugggcgggccugucuuucacca

SEQ ID NO: 232301 - RNA, 28 nt, Homo Sapiens
gcgaugagcuggcuucuguuccuggccc

SEQ ID NO: 232302 - RNA, 32 nt, Homo Sapiens
uaccugggugggcaauggccaccaugucugca

SEQ ID NO: 232303 - RNA, 32 nt, Homo Sapiens
ggggguuccaguuugcugaacuuugccgucuu

SEQ ID NO: 232304 - RNA, 32 nt, Homo Sapiens
gcgaacccaagcaaugggggcgcccacagagc

SEQ ID NO: 232305 - RNA, 32 nt, Homo Sapiens
gguauuuuuuucuguuggauuucuuugguuuu

SEQ ID NO: 232306 - RNA, 32 nt, Homo Sapiens
gcccuaugacucucuugguuauaaugccccgc

SEQ ID NO: 232307 - RNA, 32 nt, Homo Sapiens
ggagcaugcgacugacggcagaugaacguuug

SEQ ID NO: 232308 - RNA, 32 nt, Homo Sapiens
ucuaggguuaaauuugcaaaauccauuucagc

SEQ ID NO: 232309 - RNA, 32 nt, Homo Sapiens
cguguuauaacccaucugagcccgcugcaacc

SEQ ID NO: 232310 - RNA, 32 nt, Homo Sapiens
gggguuugauaaaacagcaccacauaacgcac

SEQ ID NO: 232311 - RNA, 32 nt, Homo Sapiens
cccaccgccucccagauguacuaugcgguuuc

SEQ ID NO: 232312 - RNA, 32 nt, Homo Sapiens
uauuugguuuuggguaucuguuacuuuggcac

SEQ ID NO: 232313 - RNA, 32 nt, Homo Sapiens
accugccacugggaucaggaagaauaaagacc

SEQ ID NO: 232314 - RNA, 32 nt, Homo Sapiens
gaauuuucuauuuauuugauauugguauguuu

SEQ ID NO: 232315 - RNA, 32 nt, Homo Sapiens
aaagggagcuagagggucaaauccagagauug

SEQ ID NO: 232316 - RNA, 32 nt, Homo Sapiens
cugcugcuccuccuccuuucccagcccgccgc

SEQ ID NO: 232317 - RNA, 30 nt, Homo Sapiens
ccggagcccagacacaucgcccugggaagg

SEQ ID NO: 232318 - RNA, 31 nt, Homo Sapiens
ccgcagcguuacugccuguguauaguauaaa

SEQ ID NO: 232319 - RNA, 32 nt, Homo Sapiens
gugguaaugcccagaguccuggcucuaucugg

SEQ ID NO: 232320 - RNA, 32 nt, Homo Sapiens
guggcuggccuggccacggccugcccuccccg

SEQ ID NO: 232321 - RNA, 29 nt, Homo Sapiens
aguuuagguggaguauauuuuuaaaacuc

SEQ ID NO: 232322 - RNA, 32 nt, Homo Sapiens
gggcuaucagcagccagaaaaacuagaggaau

SEQ ID NO: 232323 - RNA, 32 nt, Homo Sapiens
uuuccuugauuuuuuucuuccuguuuaugugg

SEQ ID NO: 232324 - RNA, 32 nt, Homo Sapiens
ccagaggggagauacccaacccugcccucacc

SEQ ID NO: 232325 - RNA, 32 nt, Homo Sapiens
aggaaauagaaagagaagaaaaauucagcccu

SEQ ID NO: 232326 - RNA, 32 nt, Homo Sapiens
aagugaauugcccagagcugccuuuuucuuuu

SEQ ID NO: 232327 - RNA, 32 nt, Homo Sapiens
ucuuaagggggccuuggaaucuauaguauaga

SEQ ID NO: 232328 - RNA, 32 nt, Homo Sapiens
uaaacaaaacauuauuugcaaaacagagggua

SEQ ID NO: 232329 - RNA, 32 nt, Homo Sapiens
cagcuggccucacugacaccccggccucccug

SEQ ID NO: 232330 - RNA, 32 nt, Homo Sapiens
gccuucugcgcgccugggaucccggagccugc

SEQ ID NO: 232331 - RNA, 32 nt, Homo Sapiens
ugggaggacucacucugugcuccccgacccug

SEQ ID NO: 232332 - RNA, 27 nt, Homo Sapiens
ugcccacccagcgucagcccccagaaa

SEQ ID NO: 232333 - RNA, 32 nt, Homo Sapiens
ggauuauucuaaaaaggucuuauacucaagag

SEQ ID NO: 232334 - RNA, 32 nt, Homo Sapiens
uagauuuucuaaaacacagauuuaugaaagca

SEQ ID NO: 232335 - RNA, 32 nt, Homo Sapiens
ucuuuuuuuuuuuuuuuuuuuaauuagccagg

SEQ ID NO: 232336 - RNA, 32 nt, Homo Sapiens
ucugucauugacuuuuugaacaauaggcauuc

SEQ ID NO: 232337 - RNA, 32 nt, Homo Sapiens
aaaucuaguagaaacccgugggacauacacau

SEQ ID NO: 232338 - RNA, 32 nt, Homo Sapiens
uccuucagggaagaugggaggcgaggagaagc

SEQ ID NO: 232339 - RNA, 32 nt, Homo Sapiens
uuuucuuuugcgaucccuuccauugcuuuuag

SEQ ID NO: 232340 - RNA, 32 nt, Homo Sapiens
ggugugagccacugugcccagcccaucaaugu

SEQ ID NO: 232341 - RNA, 32 nt, Homo Sapiens
cgcagggggagcgaggcccagggucccccgga

SEQ ID NO: 232342 - RNA, 32 nt, Homo Sapiens
aaaaaauaaaaacgaauacauaaaaauuaaaa

SEQ ID NO: 232343 - RNA, 32 nt, Homo Sapiens
gcagagggggacgacuucacacucacugccuc

SEQ ID NO: 232344 - RNA, 32 nt, Homo Sapiens
uguucuggauuuuuguuuuuuacuucaugggu

SEQ ID NO: 232345 - RNA, 32 nt, Homo Sapiens
gccagguucaggugcaggagcuagaugcgugg

SEQ ID NO: 232346 - RNA, 32 nt, Homo Sapiens
cuagcauuuggcugagcagagcccucuuccuu

SEQ ID NO: 232347 - RNA, 32 nt, Homo Sapiens
aaccagccacuaccucucugacguucaaaauu

SEQ ID NO: 232348 - RNA, 32 nt, Homo Sapiens
cauugcuacuaaaaauacaaaaauuacccggg

SEQ ID NO: 232349 - RNA, 32 nt, Homo Sapiens
acaggacugcccgugcuuuguggggaaucaga

SEQ ID NO: 232350 - RNA, 32 nt, Homo Sapiens
aaaaauacaguuccuaguguuuauagaaguca

SEQ ID NO: 232351 - RNA, 32 nt, Homo Sapiens
uaaauauguucuacuuugaucauuucauuuug

SEQ ID NO: 232352 - RNA, 32 nt, Homo Sapiens
aggacccgcucccggccccggccgucgcugcg

SEQ ID NO: 232353 - RNA, 32 nt, Homo Sapiens
ucuacuaaaaauacaaaaaauuagcugagugu

SEQ ID NO: 232354 - RNA, 32 nt, Homo Sapiens
uaaagcagcuacagcucugaccucucugaccu

SEQ ID NO: 232355 - RNA, 32 nt, Homo Sapiens
aaagaguacagcauuuacucuuaucaucuaga

SEQ ID NO: 232356 - RNA, 32 nt, Homo Sapiens
gccacuucccccucuucuucugaagaucagaa

SEQ ID NO: 232357 - RNA, 32 nt, Homo Sapiens
uggauaugaaaaacagaagagagaaaaauaua

SEQ ID NO: 232358 - RNA, 32 nt, Homo Sapiens
cccaacccacgccaugccccagccaacucuac

SEQ ID NO: 232359 - RNA, 32 nt, Homo Sapiens
gcccagaagccaucgugucgcuggucgggguc

SEQ ID NO: 232360 - RNA, 32 nt, Homo Sapiens
uauuauuuagucaacauauacuauuuagucuc

SEQ ID NO: 232361 - RNA, 32 nt, Homo Sapiens
augugacucuauaaccuuucucuucuuccugg

SEQ ID NO: 232362 - RNA, 32 nt, Homo Sapiens
uccggccucccaacaaggucuuuggacucagc

SEQ ID NO: 232363 - RNA, 32 nt, Homo Sapiens
cucauagagauaaaauucuuugaaagaaaugu

SEQ ID NO: 232364 - RNA, 32 nt, Homo Sapiens
uuucccguucgccagauggaaccaucaguauu

SEQ ID NO: 232365 - RNA, 32 nt, Homo Sapiens
uggcuguaaucccagcacuuugggaggccaag

SEQ ID NO: 232366 - RNA, 32 nt, Homo Sapiens
gcgcgggccggcgcgggagcaagcggcauggc

SEQ ID NO: 232367 - RNA, 32 nt, Homo Sapiens
aaggaagaggaugguauuacaucagcuccauu

SEQ ID NO: 232368 - RNA, 32 nt, Homo Sapiens
cacauuauuaagaauggaaaaauauuuuuuga

SEQ ID NO: 232369 - RNA, 32 nt, Homo Sapiens
cugucucugaggggugggggugccgcucuaaa

SEQ ID NO: 232370 - RNA, 32 nt, Homo Sapiens
aucucccggacgggguggcuggccgggcgggg

SEQ ID NO: 232371 - RNA, 32 nt, Homo Sapiens
gggggccugaggauagagagaggcaaggcuag

SEQ ID NO: 232372 - RNA, 32 nt, Homo Sapiens
gggacccacugguugaaguuugcaauagaaac

SEQ ID NO: 232373 - RNA, 32 nt, Homo Sapiens
ccuuuggccucccacacaccugccccuuccca

SEQ ID NO: 232374 - RNA, 32 nt, Homo Sapiens
cucccucccagccccagcgccucagccccagc

SEQ ID NO: 232375 - RNA, 32 nt, Homo Sapiens
ggacaacggaacccccuuucccugcccuccag

SEQ ID NO: 232376 - RNA, 32 nt, Homo Sapiens
cuagguuuuuaaaacugaaguugaaauuaucu

SEQ ID NO: 232377 - RNA, 32 nt, Homo Sapiens
gacuaaggggagagggagaagcccugcuccuc

SEQ ID NO: 232378 - RNA, 32 nt, Homo Sapiens
acgcgggauacagggaggggccaugugcgaac

SEQ ID NO: 232379 - RNA, 32 nt, Homo Sapiens
uaugucaaaaccuaacccucaaugcaaggugg

SEQ ID NO: 232380 - RNA, 32 nt, Homo Sapiens
cgagcugucuggccucaguuucccuccgacuu

SEQ ID NO: 232381 - RNA, 32 nt, Homo Sapiens
uugggggagaucuggggggaguugguacagcu

SEQ ID NO: 232382 - RNA, 32 nt, Homo Sapiens
auaucuugacauugcucuguaggugagagagg

SEQ ID NO: 232383 - RNA, 32 nt, Homo Sapiens
ccagcuuuucccuccgaccgaggcccagagca

SEQ ID NO: 232384 - RNA, 32 nt, Homo Sapiens
gcacagaggaagagugaugguggcaugcuggu

SEQ ID NO: 232385 - RNA, 32 nt, Homo Sapiens
acgaauuugucaauuacuccaacgcggugacu

SEQ ID NO: 232386 - RNA, 32 nt, Homo Sapiens
aaugcagucuuacugguuugcagcaauuucau

SEQ ID NO: 232387 - RNA, 32 nt, Homo Sapiens
aaagcaagcugauagauuagccuccuaacuag

SEQ ID NO: 232388 - RNA, 32 nt, Homo Sapiens
auuaguaacauguguuaaguauuuucauaagu

SEQ ID NO: 232389 - RNA, 32 nt, Homo Sapiens
gccaagugcuuggccuggucgacggucuuugc

SEQ ID NO: 232390 - RNA, 32 nt, Homo Sapiens
agucugcacggccucggcacggcggccccgga

SEQ ID NO: 232391 - RNA, 32 nt, Homo Sapiens
cuucggucucccuggcuaacaccacaccugug

SEQ ID NO: 232392 - RNA, 32 nt, Homo Sapiens
ucuuccgucuuacuuuaugaaacugcacuuga

SEQ ID NO: 232393 - RNA, 32 nt, Homo Sapiens
acaguuucuaacugucuguugccaugguuacc

SEQ ID NO: 232394 - RNA, 32 nt, Homo Sapiens
ccguccugcucgccgcgcauggccgggaacgc

SEQ ID NO: 232395 - RNA, 32 nt, Homo Sapiens
agacuuuauuaaaaauacauauguaucuauau

SEQ ID NO: 232396 - RNA, 32 nt, Homo Sapiens
uacacauuaucuccagagguuauuucuacccc

SEQ ID NO: 232397 - RNA, 31 nt, Homo Sapiens
uauugauuauaaaauggaugaaacuuuggau

SEQ ID NO: 232398 - RNA, 32 nt, Homo Sapiens
ugaacuuuauacuguccagcucuguugauuuu

SEQ ID NO: 232399 - RNA, 29 nt, Homo Sapiens
guguacauauguauguuuauguaugugug

SEQ ID NO: 232400 - RNA, 32 nt, Homo Sapiens
auauuuguccccacccaaauccauguugaaau

SEQ ID NO: 232401 - RNA, 32 nt, Homo Sapiens
ugccuggccggcccggcccaugccuguucuuu

SEQ ID NO: 232402 - RNA, 32 nt, Homo Sapiens
cggagcaaggccaggcggccccugcucgaguc

SEQ ID NO: 232403 - RNA, 32 nt, Homo Sapiens
cgaaaaacagagccuccuagauguaacauucc

SEQ ID NO: 232404 - RNA, 32 nt, Homo Sapiens
ccagucccaaaauggaacauaaggaagugguu

SEQ ID NO: 232405 - RNA, 32 nt, Homo Sapiens
uugggaagaugaacccgcaugcaguccaguuu

SEQ ID NO: 232406 - RNA, 32 nt, Homo Sapiens
gagauguguuuaucuuuugcauaagcugggga

SEQ ID NO: 232407 - RNA, 32 nt, Homo Sapiens
ccugguggugauggaccuccccgcucccucaa

SEQ ID NO: 232408 - RNA, 32 nt, Homo Sapiens
cuauuaaaaaucacugcccuaacuauacuucc

SEQ ID NO: 232409 - RNA, 32 nt, Homo Sapiens
cuuugcacauaaaauauagcaagcuuacauau

SEQ ID NO: 232410 - RNA, 32 nt, Homo Sapiens
gcagccucccagagccgagcaagagcucaagg

SEQ ID NO: 232411 - RNA, 28 nt, Homo Sapiens
agccaggaaggggaacauuugggcaguu

SEQ ID NO: 232412 - RNA, 32 nt, Homo Sapiens
augaugccaaccccagaugcagcauguccuga

SEQ ID NO: 232413 - RNA, 32 nt, Homo Sapiens
uuuggucuauauauuuuuuuaaaguuuugaau

SEQ ID NO: 232414 - RNA, 32 nt, Homo Sapiens
ugacagugaaaaguauggcagaugagcaagaa

SEQ ID NO: 232415 - RNA, 29 nt, Homo Sapiens
acacccuugaagauuuggccugggccagu

SEQ ID NO: 232416 - RNA, 32 nt, Homo Sapiens
uggauuuagggcugugcaggaugugccuuguu

SEQ ID NO: 232417 - RNA, 32 nt, Homo Sapiens
aguaaaggaguaguauccaaaauacauaaaga

SEQ ID NO: 232418 - RNA, 32 nt, Homo Sapiens
uaauggcauuuaaugaaaaauuuaugcuuaag

SEQ ID NO: 232419 - RNA, 32 nt, Homo Sapiens
uccaccauuccuguuacuuucauuucauuuug

SEQ ID NO: 232420 - RNA, 32 nt, Homo Sapiens
caggagggccgcgcucgggcucggcccgcgca

SEQ ID NO: 232421 - RNA, 32 nt, Homo Sapiens
gcuuagguuuggugugcagagccuggccugcu

SEQ ID NO: 232422 - RNA, 32 nt, Homo Sapiens
ucugggaccccgagcggcgcugccggagccca

SEQ ID NO: 232423 - RNA, 32 nt, Homo Sapiens
uuggauaccuauuuaaauguguguucuguuuu

SEQ ID NO: 232424 - RNA, 30 nt, Homo Sapiens
cucuuuucugugcagaagguuuuuaucuga

SEQ ID NO: 232425 - RNA, 28 nt, Homo Sapiens
aagauggucgccgccugccgcucgguag

SEQ ID NO: 232426 - RNA, 32 nt, Homo Sapiens
auuucauuugcaacuucauuuuguuuuuuaua

SEQ ID NO: 232427 - RNA, 32 nt, Homo Sapiens
ggccgcacauugugggggcgcacgccgggagg

SEQ ID NO: 232428 - RNA, 32 nt, Homo Sapiens
cauguuagaucaacaaaccacuuccauucuga

SEQ ID NO: 232429 - RNA, 32 nt, Homo Sapiens
ucuuuuauuauuauacuuuaaguuuuagggua

SEQ ID NO: 232430 - RNA, 32 nt, Homo Sapiens
uucugagccaaauaugagugaccguggccugu

SEQ ID NO: 232431 - RNA, 28 nt, Homo Sapiens
gccuggcgccgcgagccgaggugucucc

SEQ ID NO: 232432 - RNA, 32 nt, Homo Sapiens
aagccuauuauguaauuuuuacauucauaauu

SEQ ID NO: 232433 - RNA, 32 nt, Homo Sapiens
ccaggucauaaggaugagauauauuuggggua

SEQ ID NO: 232434 - RNA, 32 nt, Homo Sapiens
ggaacaauguuuauagucguguguacaguggg

SEQ ID NO: 232435 - RNA, 32 nt, Homo Sapiens
ggucaaucaaggaaaauuucuuaaugaaauaa

SEQ ID NO: 232436 - RNA, 32 nt, Homo Sapiens
cgcccagcuaauuuuuguuuuguuuuguuugg

SEQ ID NO: 232437 - RNA, 32 nt, Homo Sapiens
gagggcaggaacagaggacguugggcgacagg

SEQ ID NO: 232438 - RNA, 32 nt, Homo Sapiens
cggcuacgacauuuugcaugauguguccugug

SEQ ID NO: 232439 - RNA, 32 nt, Homo Sapiens
uugcucugagcuacaaucauggcuuuucaugu

SEQ ID NO: 232440 - RNA, 32 nt, Homo Sapiens
ggacuuugauucaucuguccaucuguccgacc

SEQ ID NO: 232441 - RNA, 32 nt, Homo Sapiens
auaauuccuguauuaaaugugaaacacacagu

SEQ ID NO: 232442 - RNA, 32 nt, Homo Sapiens
acuucugaauaauugguaucuauuauuuucau

SEQ ID NO: 232443 - RNA, 32 nt, Homo Sapiens
uuucaaauuggaaguaaugauauguauugccc

SEQ ID NO: 232444 - RNA, 32 nt, Homo Sapiens
cguucuucuaaagauuaguccaucaucauuag

SEQ ID NO: 232445 - RNA, 32 nt, Homo Sapiens
ccccauggagaucuucagggagcccagcuacu

SEQ ID NO: 232446 - RNA, 32 nt, Homo Sapiens
gagccgggccccaggcccgccggacaccauga

SEQ ID NO: 232447 - RNA, 32 nt, Homo Sapiens
uuuacugcuucuuucugucuguguguuuuaau

SEQ ID NO: 232448 - RNA, 32 nt, Homo Sapiens
ggagacacagcgccccccaccggagccacugc

SEQ ID NO: 232449 - RNA, 32 nt, Homo Sapiens
auauuacaucaacuggaaccagcagugaaucu

SEQ ID NO: 232450 - RNA, 32 nt, Homo Sapiens
agcccuccccguccccgcauuuccaggccacc

SEQ ID NO: 232451 - RNA, 32 nt, Homo Sapiens
cccccagucuccugccgccccucccccaggca

SEQ ID NO: 232452 - RNA, 32 nt, Homo Sapiens
ugguggaagacuucauguguaguuguuaugcu

SEQ ID NO: 232453 - RNA, 32 nt, Homo Sapiens
cuggcuuguuuccaucacuggaaaucacuuag

SEQ ID NO: 232454 - RNA, 32 nt, Homo Sapiens
uugugaacuuucuaggaaauauucauuaaaac

SEQ ID NO: 232455 - RNA, 32 nt, Homo Sapiens
ggacacacugaauaauaauucucugggcaaaa

SEQ ID NO: 232456 - RNA, 32 nt, Homo Sapiens
aguaaaaauaaaaauggaauuuuuuacccaua

SEQ ID NO: 232457 - RNA, 32 nt, Homo Sapiens
agaugaaaugcugccgcaauggcugugggaag

SEQ ID NO: 232458 - RNA, 32 nt, Homo Sapiens
gcccagugcaugugcuggcugcaccgugacgu

SEQ ID NO: 232459 - RNA, 30 nt, Homo Sapiens
cgcccucagcugcugccgccggggccgcuc

SEQ ID NO: 232460 - RNA, 32 nt, Homo Sapiens
caccuggaaugggaaggaugucagcugaccuc

SEQ ID NO: 232461 - RNA, 32 nt, Homo Sapiens
ggaggucagagaggaagaaacaaaggcagcug

SEQ ID NO: 232462 - RNA, 32 nt, Homo Sapiens
gagcuggggcgacgaggcgauugcgggggccu

SEQ ID NO: 232463 - RNA, 32 nt, Homo Sapiens
ugaagccacucuggggaggguccggccaccag

SEQ ID NO: 232464 - RNA, 32 nt, Homo Sapiens
uaguugccgguggacagcauggccgugccagc

SEQ ID NO: 232465 - RNA, 32 nt, Homo Sapiens
cgggaucagcacagcccggcccgcggccccgg

SEQ ID NO: 232466 - RNA, 32 nt, Homo Sapiens
cgccagcccccuccucccccgggaagucggcc

SEQ ID NO: 232467 - RNA, 32 nt, Homo Sapiens
aaagcagccagcagcccuccagcccucuugug

SEQ ID NO: 232468 - RNA, 32 nt, Homo Sapiens
ccaguuuuucuuuuucccucucauauauuugu

SEQ ID NO: 232469 - RNA, 27 nt, Homo Sapiens
augguuuccuucuuucucucuuuucaa

SEQ ID NO: 232470 - RNA, 32 nt, Homo Sapiens
guguugcucugucuuguggugcuuuuccuuca

SEQ ID NO: 232471 - RNA, 32 nt, Homo Sapiens
aacagaggcagacagaauccagagggcuacag

SEQ ID NO: 232472 - RNA, 32 nt, Homo Sapiens
aggagugacugggggagggaagauuauuuuag

SEQ ID NO: 232473 - RNA, 32 nt, Homo Sapiens
ggauauucugagaagcagcuuuaugagguuuu

SEQ ID NO: 232474 - RNA, 32 nt, Homo Sapiens
aucagaagacaauuagcagucucugccucccu

SEQ ID NO: 232475 - RNA, 32 nt, Homo Sapiens
cgcuggacccgcgagugugagaaucuggcggc

SEQ ID NO: 232476 - RNA, 32 nt, Homo Sapiens
uuccuggcccagcagagcccccuuuccaugag

SEQ ID NO: 232477 - RNA, 32 nt, Homo Sapiens
cagcaugagaacuucgugaagcauacagaaga

SEQ ID NO: 232478 - RNA, 32 nt, Homo Sapiens
uuuguuccuuuccucaugcacaaaacauaaag

SEQ ID NO: 232479 - RNA, 30 nt, Homo Sapiens
cuggaggaggucccugccuaugcugacauu

SEQ ID NO: 232480 - RNA, 32 nt, Homo Sapiens
uggggcuuucaugggaaugaugaagaugauaa

SEQ ID NO: 232481 - RNA, 31 nt, Homo Sapiens
ccgaggcagcacugcccucugcuaggaacag

SEQ ID NO: 232482 - RNA, 32 nt, Homo Sapiens
gcuggaagggauauuucuuuucuguacgaugu

SEQ ID NO: 232483 - RNA, 32 nt, Homo Sapiens
gagagagucggguuacaagauggcggaucugu

SEQ ID NO: 232484 - RNA, 29 nt, Homo Sapiens
ggccauggcugagacggaggagcggagcc

SEQ ID NO: 232485 - RNA, 32 nt, Homo Sapiens
caauuugugggaacaggaggggagaggaaaca

SEQ ID NO: 232486 - RNA, 32 nt, Homo Sapiens
guuuucuuaacuucauuuuuuauuugcucaua

SEQ ID NO: 232487 - RNA, 32 nt, Homo Sapiens
gcggcuccaccugccagugggucagcaggcac

SEQ ID NO: 232488 - RNA, 32 nt, Homo Sapiens
ugaaauguuagagaugcuauuugauacaacug

SEQ ID NO: 232489 - RNA, 32 nt, Homo Sapiens
acgacgcuugccccggcccacccuccaucccc

SEQ ID NO: 232490 - RNA, 32 nt, Homo Sapiens
aaguuaagugcuuacauaaacauggaacauau

SEQ ID NO: 232491 - RNA, 32 nt, Homo Sapiens
ugguuuuauucauauauuuuagacauuugguu

SEQ ID NO: 232492 - RNA, 32 nt, Homo Sapiens
ucuaucuggggcccggguguccuccugugguc

SEQ ID NO: 232493 - RNA, 32 nt, Homo Sapiens
ugucucaaaacaaacaaacaaacaaacaaaca

SEQ ID NO: 232494 - RNA, 32 nt, Homo Sapiens
ggcuccggccccacagguuuccccaaggccuc

SEQ ID NO: 232495 - RNA, 32 nt, Homo Sapiens
ucaccucuuuauucuguggucuuuucugaaua

SEQ ID NO: 232496 - RNA, 32 nt, Homo Sapiens
ccuccguccccugcugccccccgccagcccuc

SEQ ID NO: 232497 - RNA, 32 nt, Homo Sapiens
ccugcaagacugaugcuuaauacacagucugu

SEQ ID NO: 232498 - RNA, 32 nt, Homo Sapiens
accugccuuaauuauuuaucuuuaguuccuua

SEQ ID NO: 232499 - RNA, 32 nt, Homo Sapiens
acuacuuacaguguuaugacuuguauacacau

SEQ ID NO: 232500 - RNA, 32 nt, Homo Sapiens
cgugcacuggagaggcuggggaggcaggggcc

SEQ ID NO: 232501 - RNA, 32 nt, Homo Sapiens
ggaguucaagaacuggacuguugugaagaagu

SEQ ID NO: 232502 - RNA, 32 nt, Homo Sapiens
ugaacaggggagauggagguugcagugagcug

SEQ ID NO: 232503 - RNA, 32 nt, Homo Sapiens
cgcugacccagcuggaaagccagcgcccugcc

SEQ ID NO: 232504 - RNA, 32 nt, Homo Sapiens
gcgggggccuggccagcucauggcguucccug

SEQ ID NO: 232505 - RNA, 29 nt, Homo Sapiens
gugauuauguguuaugaccauaggugguu

SEQ ID NO: 232506 - RNA, 32 nt, Homo Sapiens
gaaacugaaagcugagacaaccaagaggcuua

SEQ ID NO: 232507 - RNA, 32 nt, Homo Sapiens
guuuucacaaaacuauuugaguagaauaaaug

SEQ ID NO: 232508 - RNA, 32 nt, Homo Sapiens
uuuuaaagaacaacauugccagaguaugcuug

SEQ ID NO: 232509 - RNA, 32 nt, Homo Sapiens
uugggagacucugcauuuuuuauugugguuuu

SEQ ID NO: 232510 - RNA, 32 nt, Homo Sapiens
gugucugcucuuucccuccccauccucuggca

SEQ ID NO: 232511 - RNA, 32 nt, Homo Sapiens
caggcaaggcuguggaccauggaguggcagcc

SEQ ID NO: 232512 - RNA, 32 nt, Homo Sapiens
uuuccuccugcugcugcagaaacccggccauc

SEQ ID NO: 232513 - RNA, 32 nt, Homo Sapiens
cuccagcuggugccggccaccuccacuccccu

SEQ ID NO: 232514 - RNA, 32 nt, Homo Sapiens
gcuguuuuuuaguuauugcucucaugagauga

SEQ ID NO: 232515 - RNA, 32 nt, Homo Sapiens
acaugccgacucaggacaggugggugaggauc

SEQ ID NO: 232516 - RNA, 32 nt, Homo Sapiens
ucccuuaguuucuccuucucccccacaaauaa

SEQ ID NO: 232517 - RNA, 32 nt, Homo Sapiens
cccuccuccaugagaggggacugaaaugcugc

SEQ ID NO: 232518 - RNA, 32 nt, Homo Sapiens
gggcacacuguuauaugggaauuaaaauaugu

SEQ ID NO: 232519 - RNA, 32 nt, Homo Sapiens
uucuuuuucugcuuucauuuuaauuuugggaa

SEQ ID NO: 232520 - RNA, 32 nt, Homo Sapiens
acacuuccugcagcugugccuggaggcagucg

SEQ ID NO: 232521 - RNA, 32 nt, Homo Sapiens
uaauuaagucauauuucuuauccaggugguua

SEQ ID NO: 232522 - RNA, 32 nt, Homo Sapiens
agccggggccugcggcaccugcggcgccugag

SEQ ID NO: 232523 - RNA, 32 nt, Homo Sapiens
gcccggcgcuggcggagacgcgcucucccugc

SEQ ID NO: 232524 - RNA, 32 nt, Homo Sapiens
gaaacugacuguaucugacagcuuuauacauu

SEQ ID NO: 232525 - RNA, 32 nt, Homo Sapiens
uagcugcuauuaacagaagagagaacuuucug

SEQ ID NO: 232526 - RNA, 32 nt, Homo Sapiens
agagugucugguaucugauguucauuuauucc

SEQ ID NO: 232527 - RNA, 32 nt, Homo Sapiens
aguugccaggacuuuaaaagaugguacugguu

SEQ ID NO: 232528 - RNA, 32 nt, Homo Sapiens
aaaaacaaacaaaaagcaagccugugaauaua

SEQ ID NO: 232529 - RNA, 32 nt, Homo Sapiens
guguauaguuuccuuacaaaacuaccccgcau

SEQ ID NO: 232530 - RNA, 32 nt, Homo Sapiens
ucaaaauguaauggauuuuuaaaggcugagaa

SEQ ID NO: 232531 - RNA, 32 nt, Homo Sapiens
gaguagcugagauuacaggugugugccaccca

SEQ ID NO: 232532 - RNA, 32 nt, Homo Sapiens
gugauuuugugauugauuauaugucacuuugc

SEQ ID NO: 232533 - RNA, 32 nt, Homo Sapiens
agacagcacccaccggccccacccaucaagcc

SEQ ID NO: 232534 - RNA, 32 nt, Homo Sapiens
uaauaguuuguauauucaacauuugaaguaua

SEQ ID NO: 232535 - RNA, 32 nt, Homo Sapiens
aguaaucaaauuagguaccuggaaacauagcu

SEQ ID NO: 232536 - RNA, 32 nt, Homo Sapiens
cggaagccgcgguuccuaccaaccguucuuau

SEQ ID NO: 232537 - RNA, 32 nt, Homo Sapiens
aaauauuaaacuaaacuguauuguuauuagua

SEQ ID NO: 232538 - RNA, 32 nt, Homo Sapiens
gcggggucccgauguggggcccggggccgcgu

SEQ ID NO: 232539 - RNA, 32 nt, Homo Sapiens
cauuccggccagcccccuccccacgacccccc

SEQ ID NO: 232540 - RNA, 32 nt, Homo Sapiens
gacauccuguguuugcuccuccccucauacaa

SEQ ID NO: 232541 - RNA, 29 nt, Homo Sapiens
uaacauggaggauugucuucauaccucau

SEQ ID NO: 232542 - RNA, 32 nt, Homo Sapiens
agugccccuuuccauacagggauuuuuuucuc

SEQ ID NO: 232543 - RNA, 32 nt, Homo Sapiens
ggaaaaagaagcaacuaacaaaacacugugau

SEQ ID NO: 232544 - RNA, 32 nt, Homo Sapiens
gcugaugguuggaagacggauuugcuuuggua

SEQ ID NO: 232545 - RNA, 32 nt, Homo Sapiens
acgacgucaggagaucgaaaucagccuggcca

SEQ ID NO: 232546 - RNA, 30 nt, Homo Sapiens
cccccugcgcccguggccgcugucacacgc

SEQ ID NO: 232547 - RNA, 31 nt, Homo Sapiens
ggcccgcagccccuccugccccuccugccag

SEQ ID NO: 232548 - RNA, 32 nt, Homo Sapiens
ucagguuuguuaauagaguuaauagcuggaau

SEQ ID NO: 232549 - RNA, 32 nt, Homo Sapiens
aggaccagcagcaaacaaaacguuuggucuuc

SEQ ID NO: 232550 - RNA, 32 nt, Homo Sapiens
gaacgucccggagagcuagauuccuagaggcc

SEQ ID NO: 232551 - RNA, 32 nt, Homo Sapiens
uaaagacaaauauggaugauauuuacaagaga

SEQ ID NO: 232552 - RNA, 32 nt, Homo Sapiens
accuucacagaaacccaugagaugaacuuaaa

SEQ ID NO: 232553 - RNA, 31 nt, Homo Sapiens
agccauuuguuuggcaugugaguuaaaggca

SEQ ID NO: 232554 - RNA, 32 nt, Homo Sapiens
caggguguggggcauccgguacagguggcucc

SEQ ID NO: 232555 - RNA, 32 nt, Homo Sapiens
gcuccaaauaucaugcacaaaugagcagggcc

SEQ ID NO: 232556 - RNA, 32 nt, Homo Sapiens
gccacagaagccuaggcagaccaagaagaaag

SEQ ID NO: 232557 - RNA, 32 nt, Homo Sapiens
agggucgggcggagcaggcggcugcuugacag

SEQ ID NO: 232558 - RNA, 32 nt, Homo Sapiens
cagagggaugacugcuggggguagacugggug

SEQ ID NO: 232559 - RNA, 32 nt, Homo Sapiens
agggugauccugaaacaguguaaaaggagggg

SEQ ID NO: 232560 - RNA, 32 nt, Homo Sapiens
ucccucgcccccagccccggggccugagccgu

SEQ ID NO: 232561 - RNA, 32 nt, Homo Sapiens
uuuccugcgccccagacuccaggccgccugca

SEQ ID NO: 232562 - RNA, 32 nt, Homo Sapiens
ucuuuugcaauaauaauaaauuaaacaugcug

SEQ ID NO: 232563 - RNA, 32 nt, Homo Sapiens
gcgaggucggaugggacuuccggccucacccc

SEQ ID NO: 232564 - RNA, 32 nt, Homo Sapiens
gugauggcgugccaaaaguauuuucagugggc

SEQ ID NO: 232565 - RNA, 32 nt, Homo Sapiens
aaaacaaaauuuguguuuggcuaagaguaagc

SEQ ID NO: 232566 - RNA, 32 nt, Homo Sapiens
gacuuccgccggggaacgugugaggcugggac

SEQ ID NO: 232567 - RNA, 32 nt, Homo Sapiens
uguuuccagcuuuaucaaagacauguuugaaa

SEQ ID NO: 232568 - RNA, 28 nt, Homo Sapiens
uuuacucuuucugaaauuaugacuccag

SEQ ID NO: 232569 - RNA, 32 nt, Homo Sapiens
agcacagacucccccuccccccggccccucag

SEQ ID NO: 232570 - RNA, 30 nt, Homo Sapiens
ggaggaggcggcggcggcggccgggaagug

SEQ ID NO: 232571 - RNA, 32 nt, Homo Sapiens
uguucuuaaaauuuauuucagggagaagaauu

SEQ ID NO: 232572 - RNA, 32 nt, Homo Sapiens
gcucucccuucccgaugccgccgcccggcugc

SEQ ID NO: 232573 - RNA, 32 nt, Homo Sapiens
cucauauuucuuuucuuucucaucuugaugau

SEQ ID NO: 232574 - RNA, 32 nt, Homo Sapiens
uuuugaagggaagaauggagaccuccucccaa

SEQ ID NO: 232575 - RNA, 32 nt, Homo Sapiens
gcgacguggcgugggggcagggggacgguggg

SEQ ID NO: 232576 - RNA, 32 nt, Homo Sapiens
aauuguucccaccuuugguuugccaguaagug

SEQ ID NO: 232577 - RNA, 32 nt, Homo Sapiens
cccggcuuccccaccccuuguacucuaaacuc

SEQ ID NO: 232578 - RNA, 32 nt, Homo Sapiens
augaugugaaagauuaugccuaugugucuugc

SEQ ID NO: 232579 - RNA, 32 nt, Homo Sapiens
caggagagaacaaauacuuaagacaaaauggg

SEQ ID NO: 232580 - RNA, 31 nt, Homo Sapiens
ucuccuuggcugaggcacagagccuggcuga

SEQ ID NO: 232581 - RNA, 32 nt, Homo Sapiens
aucuggauuuuuccuuaugacuuggaauccau

SEQ ID NO: 232582 - RNA, 32 nt, Homo Sapiens
uggaauuguguucuucguaaagacugaggcaa

SEQ ID NO: 232583 - RNA, 32 nt, Homo Sapiens
accugaaaguuccuucuguagccugaagaguu

SEQ ID NO: 232584 - RNA, 32 nt, Homo Sapiens
uaugguaaaggaccagguuuuuuguuuuccag

SEQ ID NO: 232585 - RNA, 32 nt, Homo Sapiens
gcuaggaccccucugccuuccuccccaauccu

SEQ ID NO: 232586 - RNA, 32 nt, Homo Sapiens
uugcgucaccaaaaacagacaggaucagugau

SEQ ID NO: 232587 - RNA, 32 nt, Homo Sapiens
agugaccgugcuccuacccagcucugcuucac

SEQ ID NO: 232588 - RNA, 32 nt, Homo Sapiens
gccucuuggagccagggcugguuuuguggucu

SEQ ID NO: 232589 - RNA, 32 nt, Homo Sapiens
cgguggagggguuguugcuuucuggggaggag

SEQ ID NO: 232590 - RNA, 32 nt, Homo Sapiens
cugcccugccuugcuuggcacccgcuccggcg

SEQ ID NO: 232591 - RNA, 32 nt, Homo Sapiens
acaguuaaagaugcaacugaaaaggaaaccug

SEQ ID NO: 232592 - RNA, 32 nt, Homo Sapiens
auagauucauaauguuacauuuaauugaaaac

SEQ ID NO: 232593 - RNA, 32 nt, Homo Sapiens
aacuggagccagccuucagacucagugguugu

SEQ ID NO: 232594 - RNA, 32 nt, Homo Sapiens
cgccaugcuguaaaaaccccaagcuaccuacc

SEQ ID NO: 232595 - RNA, 30 nt, Homo Sapiens
gguggagguggucugggugagucugaaggc

SEQ ID NO: 232596 - RNA, 32 nt, Homo Sapiens
uuuacugucguccccagauccauccacuccac

SEQ ID NO: 232597 - RNA, 27 nt, Homo Sapiens
accauauuuuaauucuguuauagaggg

SEQ ID NO: 232598 - RNA, 32 nt, Homo Sapiens
uuauuucgagggcagggcaggggaaagaaacg

SEQ ID NO: 232599 - RNA, 32 nt, Homo Sapiens
cagccgcccgcagcugcagagagucccgcugc

SEQ ID NO: 232600 - RNA, 32 nt, Homo Sapiens
ucggggaccaaauuagccuuuaacucauaaag

SEQ ID NO: 232601 - RNA, 32 nt, Homo Sapiens
cuaccucccacagauagcauaaugugccugcc

SEQ ID NO: 232602 - RNA, 31 nt, Homo Sapiens
cugaggcugccggggggcugugggcuaccgg

SEQ ID NO: 232603 - RNA, 32 nt, Homo Sapiens
cauccuuuucaaugcggauggugucacccucc

SEQ ID NO: 232604 - RNA, 32 nt, Homo Sapiens
guugagggcggccgagcuagccaggcagccgu

SEQ ID NO: 232605 - RNA, 32 nt, Homo Sapiens
aguccauaauaaaucuuggaaauuuuuucugg

SEQ ID NO: 232606 - RNA, 32 nt, Homo Sapiens
cugaauguaaaaagugcuuuuucaaaucuguu

SEQ ID NO: 232607 - RNA, 32 nt, Homo Sapiens
cagguucauuggcuuuugcuggaugauccacc

SEQ ID NO: 232608 - RNA, 31 nt, Homo Sapiens
gcgcagugacccugccugcgcuccacacucg

SEQ ID NO: 232609 - RNA, 32 nt, Homo Sapiens
augccaagaugccucgaaaaagaaagacaaga

SEQ ID NO: 232610 - RNA, 32 nt, Homo Sapiens
auccagaucgguuugaugaugaauuaguaaug

SEQ ID NO: 232611 - RNA, 32 nt, Homo Sapiens
guuuuggaugaagaguugaugagauauugggc

SEQ ID NO: 232612 - RNA, 32 nt, Homo Sapiens
guguguacaagacuucuguucucaauaaaugu

SEQ ID NO: 232613 - RNA, 32 nt, Homo Sapiens
cucucucccacccuaagggcagcccuccaugg

SEQ ID NO: 232614 - RNA, 32 nt, Homo Sapiens
caagccuccagcgucgcggagcacuagacauc

SEQ ID NO: 232615 - RNA, 32 nt, Homo Sapiens
gaaggucacuguggaauauagacccauaauug

SEQ ID NO: 232616 - RNA, 32 nt, Homo Sapiens
aguugaagaaugcucgcuugaggagcuucaga

SEQ ID NO: 232617 - RNA, 32 nt, Homo Sapiens
gcgggaagcgcacgcgcaaacgcggggcuucg

SEQ ID NO: 232618 - RNA, 32 nt, Homo Sapiens
cagcgucacagcaacugaacuuacuacgaacu

SEQ ID NO: 232619 - RNA, 32 nt, Homo Sapiens
gaggagaugcccuuuaccuugccaggccccua

SEQ ID NO: 232620 - RNA, 32 nt, Homo Sapiens
augccacgugcccucacccagcccggccccca

SEQ ID NO: 232621 - RNA, 32 nt, Homo Sapiens
cgcgccugccuugcccucaccugcuccugcuc

SEQ ID NO: 232622 - RNA, 32 nt, Homo Sapiens
guuauaaagauaaguuaggcagcuagacccug

SEQ ID NO: 232623 - RNA, 32 nt, Homo Sapiens
acacgcgcagccccggccucucggccucugcc

SEQ ID NO: 232624 - RNA, 32 nt, Homo Sapiens
ccuggacuaugaagcuggagaugucuccuucu

SEQ ID NO: 232625 - RNA, 32 nt, Homo Sapiens
gaugcaccuuuagaacuauuaauagcaaccug

SEQ ID NO: 232626 - RNA, 32 nt, Homo Sapiens
accccuuugaaaaugggcucugcacaaacaca

SEQ ID NO: 232627 - RNA, 32 nt, Homo Sapiens
caacuggauauaucuacuguaacuggugaaac

SEQ ID NO: 232628 - RNA, 32 nt, Homo Sapiens
agauccgccucccggguucauggcauucuccu

SEQ ID NO: 232629 - RNA, 32 nt, Homo Sapiens
acaaggcgcugaugaaccauggagcggauggc

SEQ ID NO: 232630 - RNA, 32 nt, Homo Sapiens
uauauuuucagcaaagaauuuugggggguuuu

SEQ ID NO: 232631 - RNA, 32 nt, Homo Sapiens
acccuggcuccuucagacacgugcuugaugcu

SEQ ID NO: 232632 - RNA, 32 nt, Homo Sapiens
ucugauuuuuaaaaauguuuuauugugggccg

SEQ ID NO: 232633 - RNA, 32 nt, Homo Sapiens
ucccugacugagcaccucccccgccucccugc

SEQ ID NO: 232634 - RNA, 32 nt, Homo Sapiens
agcuaucgcgaaaagcacuugggagauuugga

SEQ ID NO: 232635 - RNA, 32 nt, Homo Sapiens
ggcgugagaaggggcaugugucgggcuacgcu

SEQ ID NO: 232636 - RNA, 32 nt, Homo Sapiens
cugcuucaccaguauuggggucagacuggcca

SEQ ID NO: 232637 - RNA, 32 nt, Homo Sapiens
aggacuacggguuggacgagauaugcaccuaa

SEQ ID NO: 232638 - RNA, 32 nt, Homo Sapiens
caaaauucauuauuuaauaaaguuuuacuuga

SEQ ID NO: 232639 - RNA, 32 nt, Homo Sapiens
agcugcccauacuacuuucuuaugagcaugcu

SEQ ID NO: 232640 - RNA, 32 nt, Homo Sapiens
uucccagcucuggcuuacuggaugccauaaga

SEQ ID NO: 232641 - RNA, 32 nt, Homo Sapiens
ugaagccuggaacaucaucaaggcacugccug

SEQ ID NO: 232642 - RNA, 32 nt, Homo Sapiens
caaauaauuaaaccuuuuuuuucccaacuaaa

SEQ ID NO: 232643 - RNA, 32 nt, Homo Sapiens
ucagcucccacaaaaacaaagauaauggccua

SEQ ID NO: 232644 - RNA, 31 nt, Homo Sapiens
cugaagauggcggcugcuguaggacgguugc

SEQ ID NO: 232645 - RNA, 32 nt, Homo Sapiens
cgguuuaucauuuuggaccccucacaaacaca

SEQ ID NO: 232646 - RNA, 32 nt, Homo Sapiens
guuccuuuuuuguuuguguaaacucuaauuuc

SEQ ID NO: 232647 - RNA, 31 nt, Homo Sapiens
agggagagggcgguugagaccaggcccugaa

SEQ ID NO: 232648 - RNA, 32 nt, Homo Sapiens
ggagucaccuccuggggggacggcugcgggga

SEQ ID NO: 232649 - RNA, 32 nt, Homo Sapiens
ucugagugaggaaaaaauuaaaaggaaaaacu

SEQ ID NO: 232650 - RNA, 32 nt, Homo Sapiens
uggagagaauaaaauguuucuugucaaacgaa

SEQ ID NO: 232651 - RNA, 32 nt, Homo Sapiens
gauccgcggcggcggcagcggcgcuuccugcu

SEQ ID NO: 232652 - RNA, 32 nt, Homo Sapiens
uggaaauugcuauauuuggggaugucauacau

SEQ ID NO: 232653 - RNA, 32 nt, Homo Sapiens
cauggucugccugccuggggcauuccaggcuu

SEQ ID NO: 232654 - RNA, 32 nt, Homo Sapiens
guggagucgggacuggagcugcugccgcggcg

SEQ ID NO: 232655 - RNA, 32 nt, Homo Sapiens
gcuuccacauauauuuagagcaaagaaggauc

SEQ ID NO: 232656 - RNA, 32 nt, Homo Sapiens
auucuggaccucuggguugggaucagggguag

SEQ ID NO: 232657 - RNA, 32 nt, Homo Sapiens
guuucugagucuccuauggaccaucugucuuc

SEQ ID NO: 232658 - RNA, 32 nt, Homo Sapiens
gcacgagggcggagccgagcgggcguccgucg

SEQ ID NO: 232659 - RNA, 32 nt, Homo Sapiens
aguuuagaaauuacaaguuucaguaauagcug

SEQ ID NO: 232660 - RNA, 32 nt, Homo Sapiens
auauuuacagcuuuauaagucuuucaucagau

SEQ ID NO: 232661 - RNA, 32 nt, Homo Sapiens
gcuggaaaugucaagcaaauuaugaauacaug

SEQ ID NO: 232662 - RNA, 31 nt, Homo Sapiens
uacuugcagcgcaccggaggagaggcucucu

SEQ ID NO: 232663 - RNA, 32 nt, Homo Sapiens
gguggaggaaccggugcucagagacaagaacc

SEQ ID NO: 232664 - RNA, 32 nt, Homo Sapiens
ucacugagcuuaauuauuauuagcaaacauua

SEQ ID NO: 232665 - RNA, 32 nt, Homo Sapiens
aguuccuuaauuacuuacaauguaguaaggcu

SEQ ID NO: 232666 - RNA, 32 nt, Homo Sapiens
uuuuuacuuuugucauuuuucaucaagcaaca

SEQ ID NO: 232667 - RNA, 32 nt, Homo Sapiens
ggaauugugcaaauacguuguuaguagaaggu

SEQ ID NO: 232668 - RNA, 32 nt, Homo Sapiens
caggagaugaaguaaagaagauuugcauucag

SEQ ID NO: 232669 - RNA, 32 nt, Homo Sapiens
ucggccaccuguccccgcagaugcugcaggug

SEQ ID NO: 232670 - RNA, 32 nt, Homo Sapiens
gucauugucuuugucuuugagagcagcaguuu

SEQ ID NO: 232671 - RNA, 32 nt, Homo Sapiens
ucagggcagguauaaacaucaaacauagugac

SEQ ID NO: 232672 - RNA, 29 nt, Homo Sapiens
cuggagggacguuucagaggcgaguccug

SEQ ID NO: 232673 - RNA, 32 nt, Homo Sapiens
cccugcgcccgcgccaugucaaagaaaaaagg

SEQ ID NO: 232674 - RNA, 32 nt, Homo Sapiens
aagauccuaguccugcguuacaucaguuucag

SEQ ID NO: 232675 - RNA, 32 nt, Homo Sapiens
ugauacgaucaucaagugugcaucacuucucc

SEQ ID NO: 232676 - RNA, 31 nt, Homo Sapiens
guagcugcacugccuuuccuugucugcaaag

SEQ ID NO: 232677 - RNA, 32 nt, Homo Sapiens
gauuucagaaaaucaaaugaugaccuaaauuu

SEQ ID NO: 232678 - RNA, 32 nt, Homo Sapiens
ggucucaaacuccuaaccuugugauucgcccg

SEQ ID NO: 232679 - RNA, 32 nt, Homo Sapiens
gccuggugcagggcugcgugcauugaggccgc

SEQ ID NO: 232680 - RNA, 32 nt, Homo Sapiens
uuucuuguuucaucguaaacauacuucuaaaa

SEQ ID NO: 232681 - RNA, 32 nt, Homo Sapiens
guuaauucacagaauagcacaaacuacaauua

SEQ ID NO: 232682 - RNA, 32 nt, Homo Sapiens
caaaaacccaaguuuucugugcuacaugugca

SEQ ID NO: 232683 - RNA, 32 nt, Homo Sapiens
cuuuaggccuuuagcucuguuccuccaguaau

SEQ ID NO: 232684 - RNA, 32 nt, Homo Sapiens
ucgaauuuuuauguguauuguaaaauguucua

SEQ ID NO: 232685 - RNA, 32 nt, Homo Sapiens
ccccggcugcgcacagcucggcgcuccuuccc

SEQ ID NO: 232686 - RNA, 32 nt, Homo Sapiens
ggaccguccauccccuucccccggccccucuc

SEQ ID NO: 232687 - RNA, 32 nt, Homo Sapiens
uuggaaggaaauauuucuuucauaauacucaa

SEQ ID NO: 232688 - RNA, 32 nt, Homo Sapiens
gucucauauuggauucuuucugucauccuaua

SEQ ID NO: 232689 - RNA, 32 nt, Homo Sapiens
gcagagcagcggggcuggggccgguggggggc

SEQ ID NO: 232690 - RNA, 32 nt, Homo Sapiens
agggcugagcgcggggacccuguguccucaau

SEQ ID NO: 232691 - RNA, 32 nt, Homo Sapiens
caagcuugauuucagugcuuauugugucuuca

SEQ ID NO: 232692 - RNA, 32 nt, Homo Sapiens
gcguguggccgcgggcaggcggcuccgugcgg

SEQ ID NO: 232693 - RNA, 32 nt, Homo Sapiens
auucucugucuaggucccacuguacucaaguc

SEQ ID NO: 232694 - RNA, 32 nt, Homo Sapiens
cugcuggaaguguuaaaacacacacaccccgg

SEQ ID NO: 232695 - RNA, 32 nt, Homo Sapiens
cugggccucgucuccccuucaagcccccggcc

SEQ ID NO: 232696 - RNA, 32 nt, Homo Sapiens
uuuaugauuugaaacuuuacaaaccaaaauua

SEQ ID NO: 232697 - RNA, 32 nt, Homo Sapiens
auuuuauuggggggcggggauuuuaaaaacag

SEQ ID NO: 232698 - RNA, 32 nt, Homo Sapiens
agacaguucuuugccuucacuucccugcuagc

SEQ ID NO: 232699 - RNA, 32 nt, Homo Sapiens
accugaagccagcaggaaagagucaucagaag

SEQ ID NO: 232700 - RNA, 32 nt, Homo Sapiens
agacuccccaagacguaugagaugaaaggcuu

SEQ ID NO: 232701 - RNA, 32 nt, Homo Sapiens
gauuucccucgguuaaacuauuugcucaaugu

SEQ ID NO: 232702 - RNA, 30 nt, Homo Sapiens
gcgagagccagacggaguggacagggaugg

SEQ ID NO: 232703 - RNA, 32 nt, Homo Sapiens
guuuaaugaagaucuaaauaaaaugcuagguu

SEQ ID NO: 232704 - RNA, 32 nt, Homo Sapiens
ccuacugagagaacucaaauuuauaaacucug

SEQ ID NO: 232705 - RNA, 32 nt, Homo Sapiens
ucccugcgccuacuccaacaaucuggaauguc

SEQ ID NO: 232706 - RNA, 31 nt, Homo Sapiens
uggccccggugcugccugcaugccaagcgcu

SEQ ID NO: 232707 - RNA, 32 nt, Homo Sapiens
gucuguggggacgagggacacugaggagaggu

SEQ ID NO: 232708 - RNA, 32 nt, Homo Sapiens
cacuaaaagggcucuuaccaagaucaaaucua

SEQ ID NO: 232709 - RNA, 32 nt, Homo Sapiens
acagaucacaugccccucuuagaagaaauaug

SEQ ID NO: 232710 - RNA, 32 nt, Homo Sapiens
uaggauagguuuuuuagcaauguaucugggau

SEQ ID NO: 232711 - RNA, 32 nt, Homo Sapiens
uggauuucggauuuuucuuuuuuggauuuugg

SEQ ID NO: 232712 - RNA, 32 nt, Homo Sapiens
acacgcugccuccucagcagccucacugcauc

SEQ ID NO: 232713 - RNA, 32 nt, Homo Sapiens
agccagcccgggggugggagggggugugucug

SEQ ID NO: 232714 - RNA, 32 nt, Homo Sapiens
aggaagccuccuugcuguaguugguuuuauug

SEQ ID NO: 232715 - RNA, 32 nt, Homo Sapiens
ugcuuuguuaaugaaaaugauaaaacagaaua

SEQ ID NO: 232716 - RNA, 32 nt, Homo Sapiens
uacauuggaagaaaacgcuugccaaguauaaa

SEQ ID NO: 232717 - RNA, 32 nt, Homo Sapiens
auccaccgccccacauuccuccuucucaguga

SEQ ID NO: 232718 - RNA, 32 nt, Homo Sapiens
accuccccaucccacuucacuaccaucccaga

SEQ ID NO: 232719 - RNA, 32 nt, Homo Sapiens
gcaagccccccucccacgacagggcugcuccg

SEQ ID NO: 232720 - RNA, 32 nt, Homo Sapiens
aaagugugcgugaaaacuuuugaaacugaagc

SEQ ID NO: 232721 - RNA, 32 nt, Homo Sapiens
ucagaaugaaauuuuucuugguuuucuugguu

SEQ ID NO: 232722 - RNA, 32 nt, Homo Sapiens
ccuagcuagugucauuuaaccuuaaaugcaau

SEQ ID NO: 232723 - RNA, 32 nt, Homo Sapiens
agaugcugcagcagaacagucuccagguguuu

SEQ ID NO: 232724 - RNA, 32 nt, Homo Sapiens
guacuaacucagcaguuuuucuguaaaucuga

SEQ ID NO: 232725 - RNA, 32 nt, Homo Sapiens
uaggggcagggauggggguggcugggacuccu

SEQ ID NO: 232726 - RNA, 32 nt, Homo Sapiens
aagaagacauucuauccuauauggaaaaauua

SEQ ID NO: 232727 - RNA, 32 nt, Homo Sapiens
ucgaucgccucgcgccggcugcucuuuccggg

SEQ ID NO: 232728 - RNA, 32 nt, Homo Sapiens
uuggacucugcccuuccaaauaaaccuugcua

SEQ ID NO: 232729 - RNA, 32 nt, Homo Sapiens
cguaaaauaaaagcacagaacagauguggugg

SEQ ID NO: 232730 - RNA, 32 nt, Homo Sapiens
acaucuguguuaggggaggucaccuuacccuu

SEQ ID NO: 232731 - RNA, 32 nt, Homo Sapiens
ggagggagugggcuacuguagugugugugauu

SEQ ID NO: 232732 - RNA, 32 nt, Homo Sapiens
uacuuuugcuuguuuuucaguuuccccaacac

SEQ ID NO: 232733 - RNA, 32 nt, Homo Sapiens
uugcuccuggcugcaggcccaggccccaaggu

SEQ ID NO: 232734 - RNA, 32 nt, Homo Sapiens
gccccaacuuccaggcugacccggcccuacug

SEQ ID NO: 232735 - RNA, 32 nt, Homo Sapiens
uauuuguagaaguauuagaaaaauauucuauu

SEQ ID NO: 232736 - RNA, 32 nt, Homo Sapiens
agaugagaaugcaauuaaaccugaugagaauc

SEQ ID NO: 232737 - RNA, 32 nt, Homo Sapiens
agaccauuguugcaaggagugaaucuuacuaa

SEQ ID NO: 232738 - RNA, 32 nt, Homo Sapiens
gacuggaaacugccuucaaggccacggcuggu

SEQ ID NO: 232739 - RNA, 32 nt, Homo Sapiens
uuuguggugccugagauggccgagggcacagg

SEQ ID NO: 232740 - RNA, 32 nt, Homo Sapiens
uguggaggggcgagacuuggggugcugagagg

SEQ ID NO: 232741 - RNA, 32 nt, Homo Sapiens
gcucuggcagguggccagggcuccacgggggc

SEQ ID NO: 232742 - RNA, 32 nt, Homo Sapiens
aaauuuaaagcuguacuauguuagaauaaaaa

SEQ ID NO: 232743 - RNA, 32 nt, Homo Sapiens
ugaaauggcugagggagggggcuaagagagga

SEQ ID NO: 232744 - RNA, 32 nt, Homo Sapiens
uuuauguugcauaagugaaaauuuagaaaauu

SEQ ID NO: 232745 - RNA, 32 nt, Homo Sapiens
cauaccuguuuaucaggcucaccuggaagagc

SEQ ID NO: 232746 - RNA, 32 nt, Homo Sapiens
caucugcaauuuggcuucccuaacuuaacauu

SEQ ID NO: 232747 - RNA, 32 nt, Homo Sapiens
uaagcaaccccuccuccugcucccagauacgg

SEQ ID NO: 232748 - RNA, 32 nt, Homo Sapiens
ggacgugggacggagcgaggaugugguggggg

SEQ ID NO: 232749 - RNA, 32 nt, Homo Sapiens
ugcagucggaugcacagugcaguagguuuugg

SEQ ID NO: 232750 - RNA, 32 nt, Homo Sapiens
gggguggauuccagggaggucaggaagaggua

SEQ ID NO: 232751 - RNA, 32 nt, Homo Sapiens
uccuugcgccucagcccucaguuccuucauuu

SEQ ID NO: 232752 - RNA, 32 nt, Homo Sapiens
agggcccccuggccaugggcccggcccagccc

SEQ ID NO: 232753 - RNA, 32 nt, Homo Sapiens
auaaaaauguuauuuuaauagcaucaugaaug

SEQ ID NO: 232754 - RNA, 32 nt, Homo Sapiens
gcacggccggcgacuccccaacggcuacuacc

SEQ ID NO: 232755 - RNA, 32 nt, Homo Sapiens
ugagccggccggggcggcggggaccagcgcca

SEQ ID NO: 232756 - RNA, 32 nt, Homo Sapiens
uuguuguaaaccuuuaccugucacuuguuuac

SEQ ID NO: 232757 - RNA, 32 nt, Homo Sapiens
uauccgccgccuccacccgccggccucccgca

SEQ ID NO: 232758 - RNA, 32 nt, Homo Sapiens
ccuguuugaaaccaagcuuucaaacauguuga

SEQ ID NO: 232759 - RNA, 32 nt, Homo Sapiens
ccgccgccgccgccuggccgcuauggaucuau

SEQ ID NO: 232760 - RNA, 32 nt, Homo Sapiens
aaaaguugaaauguauauuuguauagcaaaua

SEQ ID NO: 232761 - RNA, 32 nt, Homo Sapiens
caugcauacuucugccucuauccugaacucua

SEQ ID NO: 232762 - RNA, 32 nt, Homo Sapiens
gguaacaugcagcuuuuuccucucauagcauu

SEQ ID NO: 232763 - RNA, 32 nt, Homo Sapiens
uggggcugggaaagaacgaaaagggagucgcg

SEQ ID NO: 232764 - RNA, 29 nt, Homo Sapiens
guguaaguguuguuauauuuucuggauag

SEQ ID NO: 232765 - RNA, 31 nt, Homo Sapiens
gugagcaugguugggcagcgggugcugcuuc

SEQ ID NO: 232766 - RNA, 32 nt, Homo Sapiens
gagaaugggaugcagagguagagacaagaagg

SEQ ID NO: 232767 - RNA, 32 nt, Homo Sapiens
ccucgcaggacgggacgcuacgcaccugggac

SEQ ID NO: 232768 - RNA, 32 nt, Homo Sapiens
uggcagugacuaguuuuucuagaucuugacuc

SEQ ID NO: 232769 - RNA, 32 nt, Homo Sapiens
ugguagacuuuggcagugccaccuuugaccau

SEQ ID NO: 232770 - RNA, 32 nt, Homo Sapiens
gcccccucccugucuggaccccggccccaccu

SEQ ID NO: 232771 - RNA, 32 nt, Homo Sapiens
ucgugcacucugggguauggccgucaaugugu

SEQ ID NO: 232772 - RNA, 32 nt, Homo Sapiens
gcggcgcccccuccggggcggauggaacgcgg

SEQ ID NO: 232773 - RNA, 32 nt, Homo Sapiens
uugcuaacaacaagaaaauguacaguuagucc

SEQ ID NO: 232774 - RNA, 32 nt, Homo Sapiens
uuccccugaggacccagcuuuaaggcacaucc

SEQ ID NO: 232775 - RNA, 32 nt, Homo Sapiens
gguguugagggcggagaaaugcaaguuucauu

SEQ ID NO: 232776 - RNA, 32 nt, Homo Sapiens
gaaagccuuucagaucuuugauauaucauagu

SEQ ID NO: 232777 - RNA, 32 nt, Homo Sapiens
uucacuggaauucugugaaauaccaaaauuac

SEQ ID NO: 232778 - RNA, 32 nt, Homo Sapiens
cccugcgcggcugcuggaccgacgggcgcacc

SEQ ID NO: 232779 - RNA, 32 nt, Homo Sapiens
aaaauaugcagaccuuugggaauauaaaaaua

SEQ ID NO: 232780 - RNA, 32 nt, Homo Sapiens
agagaacaaaagaaacagaaucaauauauaaa

SEQ ID NO: 232781 - RNA, 32 nt, Homo Sapiens
aaaugccucauuguuagaacuacuacucacag

SEQ ID NO: 232782 - RNA, 28 nt, Homo Sapiens
gcaacaguuacaguaagugaucaaucag

SEQ ID NO: 232783 - RNA, 32 nt, Homo Sapiens
gaccuaccgcgugcggagccugcgcagagccc

SEQ ID NO: 232784 - RNA, 32 nt, Homo Sapiens
ccaaagccaauuaagaucuuaaaaccaaacau

SEQ ID NO: 232785 - RNA, 32 nt, Homo Sapiens
cauuuccaacaccacagacacacacacgcaca

SEQ ID NO: 232786 - RNA, 32 nt, Homo Sapiens
uugaaggaccuccuucccccagccucaucacc

SEQ ID NO: 232787 - RNA, 32 nt, Homo Sapiens
caaggucaggguggccagagcucgggguuguu

SEQ ID NO: 232788 - RNA, 32 nt, Homo Sapiens
aaaaaccgcugcugcuggcuguggcuagagcc

SEQ ID NO: 232789 - RNA, 32 nt, Homo Sapiens
ugaggaggggagaggugggccguaacgggcac

SEQ ID NO: 232790 - RNA, 32 nt, Homo Sapiens
cccagccagaagcugugaaaccucaaguccua

SEQ ID NO: 232791 - RNA, 32 nt, Homo Sapiens
gacgggguuucacucugucacccaggcuggga

SEQ ID NO: 232792 - RNA, 32 nt, Homo Sapiens
uuggauaagccuggggagccccgcauggaccg

SEQ ID NO: 232793 - RNA, 32 nt, Homo Sapiens
ccuucaaaaauauuuauauugucacucauuua

SEQ ID NO: 232794 - RNA, 32 nt, Homo Sapiens
uguccccgccgggguccagauggugucggagg

SEQ ID NO: 232795 - RNA, 32 nt, Homo Sapiens
uacgccaucagccggcgccgcgccgccgggug

SEQ ID NO: 232796 - RNA, 32 nt, Homo Sapiens
uauagcuuugauguaauuaaacuggaaacucu

SEQ ID NO: 232797 - RNA, 32 nt, Homo Sapiens
uccagucgcgcccuccaagcccuucaggccgc

SEQ ID NO: 232798 - RNA, 32 nt, Homo Sapiens
aauuaaauuaugagaauuaaaaagacaacauu

SEQ ID NO: 232799 - RNA, 32 nt, Homo Sapiens
agggcagccgccggccugucagagcaaaucag

SEQ ID NO: 232800 - RNA, 32 nt, Homo Sapiens
gcagagaggaggagggaggcugucaggaugga

SEQ ID NO: 232801 - RNA, 32 nt, Homo Sapiens
acaaaagaugacugaagaacaaacuuaccaag

SEQ ID NO: 232802 - RNA, 32 nt, Homo Sapiens
guucuugcaauaacaaugacauaaguuugccu

SEQ ID NO: 232803 - RNA, 32 nt, Homo Sapiens
cuucucugcaguaucugacuuguccaucuggu

SEQ ID NO: 232804 - RNA, 32 nt, Homo Sapiens
acacauuguuacaacuaacacaaauuccuauu

SEQ ID NO: 232805 - RNA, 32 nt, Homo Sapiens
ucaugugucuuagaauaugaaaauaguaaggu

SEQ ID NO: 232806 - RNA, 32 nt, Homo Sapiens
uuguccuccuuccacauucuuaaagaaacuuu

SEQ ID NO: 232807 - RNA, 32 nt, Homo Sapiens
ucugcccuggcaugagcagagcccaggauggg

SEQ ID NO: 232808 - RNA, 32 nt, Homo Sapiens
uuugcaauuguacuucauuugaauuaaaauuu

SEQ ID NO: 232809 - RNA, 32 nt, Homo Sapiens
cagccuuuugcuuuuucuuuuuucuucccucc

SEQ ID NO: 232810 - RNA, 32 nt, Homo Sapiens
gcccaugucuucugcuguucuucacuucuggg

SEQ ID NO: 232811 - RNA, 32 nt, Homo Sapiens
ugccagacggcggagcuccgcggccggacccc

SEQ ID NO: 232812 - RNA, 32 nt, Homo Sapiens
gggcagcggaggaggaaauggcagguccuaau

SEQ ID NO: 232813 - RNA, 32 nt, Homo Sapiens
cccgggucccccagcccgucucgccgccgcca

SEQ ID NO: 232814 - RNA, 32 nt, Homo Sapiens
ggcuuggacuuccugggagcuccuccaaguac

SEQ ID NO: 232815 - RNA, 32 nt, Homo Sapiens
ucuuuacauaaauauugauauauucuuuuucu

SEQ ID NO: 232816 - RNA, 32 nt, Homo Sapiens
gagccccgcccgagcucaccgccccugcuccc

SEQ ID NO: 232817 - RNA, 32 nt, Homo Sapiens
auuuuucaaugagaaggagaaguuaggcagcu

SEQ ID NO: 232818 - RNA, 32 nt, Homo Sapiens
ugugagaggacacgcgggugaugugucuuggg

SEQ ID NO: 232819 - RNA, 32 nt, Homo Sapiens
uggcggccgccggcgucgccgccauggaccua

SEQ ID NO: 232820 - RNA, 32 nt, Homo Sapiens
cuuaacacagagccuuauuuaauagcaugaug

SEQ ID NO: 232821 - RNA, 32 nt, Homo Sapiens
auuacaacuuacaacuaauugaaugagauguu

SEQ ID NO: 232822 - RNA, 32 nt, Homo Sapiens
aacuuauuugaagcugcaauagaguguagcau

SEQ ID NO: 232823 - RNA, 32 nt, Homo Sapiens
aggggcagggacaguggccaggcggcccgagg

SEQ ID NO: 232824 - RNA, 32 nt, Homo Sapiens
cugcugcccucccccuccucuccaccaucguc

SEQ ID NO: 232825 - RNA, 32 nt, Homo Sapiens
ccucugccaagcccccaggggagcccucccug

SEQ ID NO: 232826 - RNA, 32 nt, Homo Sapiens
cagcaugcccugggcugagaugagaugguggu

SEQ ID NO: 232827 - RNA, 32 nt, Homo Sapiens
ggccaaugaugcucugcgucuguguuggauca

SEQ ID NO: 232828 - RNA, 32 nt, Homo Sapiens
ugaggagcgggcgggccagcgccgcggaguuu

SEQ ID NO: 232829 - RNA, 32 nt, Homo Sapiens
gcauuagaggcacggcggccccgggcucccgu

SEQ ID NO: 232830 - RNA, 32 nt, Homo Sapiens
caccggguguagagggcggucgcggcgggcag

SEQ ID NO: 232831 - RNA, 29 nt, Homo Sapiens
aaggguauauguauauauuugcaggcaug

SEQ ID NO: 232832 - RNA, 32 nt, Homo Sapiens
acaugaaacaaaugaaaguucuugcuauaaug

SEQ ID NO: 232833 - RNA, 32 nt, Homo Sapiens
ggagaccccagggccucucaggagacagugag

SEQ ID NO: 232834 - RNA, 32 nt, Homo Sapiens
gucagcaccaaguaacaccacacacacgcagc

SEQ ID NO: 232835 - RNA, 30 nt, Homo Sapiens
cucguuauaucuccugccuaucucuuuugc

SEQ ID NO: 232836 - RNA, 32 nt, Homo Sapiens
ggugccuuuuucuccuuugcuuucugccauga

SEQ ID NO: 232837 - RNA, 32 nt, Homo Sapiens
caaggagaauacacagcagcgaggggcugcag

SEQ ID NO: 232838 - RNA, 32 nt, Homo Sapiens
cuucagugaugcuuccucuccucuccccuccc

SEQ ID NO: 232839 - RNA, 32 nt, Homo Sapiens
agacgagcagcagcuugaugaucugcaccgcg

SEQ ID NO: 232840 - RNA, 32 nt, Homo Sapiens
agggcugcggggcagcagcugcugcgacccac

SEQ ID NO: 232841 - RNA, 32 nt, Homo Sapiens
caggcaacacacuuauacaaucauuuccuacu

SEQ ID NO: 232842 - RNA, 32 nt, Homo Sapiens
gucauguauuuucaacuugucuucccugguau

SEQ ID NO: 232843 - RNA, 32 nt, Homo Sapiens
aacuucaaggaucugggacauuuuggugugcc

SEQ ID NO: 232844 - RNA, 32 nt, Homo Sapiens
cuaaggggagucaucacagggcuucagggcug

SEQ ID NO: 232845 - RNA, 32 nt, Homo Sapiens
aggcaccugacauauguucucuaggccuuuua

SEQ ID NO: 232846 - RNA, 32 nt, Homo Sapiens
ugccugcagcauagagcgcaggcuggcagagc

SEQ ID NO: 232847 - RNA, 32 nt, Homo Sapiens
uguucuuaauggggacgagcagacacacugau

SEQ ID NO: 232848 - RNA, 32 nt, Homo Sapiens
ccuaguuccuuccuucccgagugauacccaug

SEQ ID NO: 232849 - RNA, 32 nt, Homo Sapiens
cucccaccgcagccuuccccccugccccagca

SEQ ID NO: 232850 - RNA, 32 nt, Homo Sapiens
gcccgcgccuucccugcccgccugcgucaccg

SEQ ID NO: 232851 - RNA, 32 nt, Homo Sapiens
uccccgauccugagcgguuggggugggguccc

SEQ ID NO: 232852 - RNA, 32 nt, Homo Sapiens
aauuagggagcauuuuccuucuagucuauuuc

SEQ ID NO: 232853 - RNA, 32 nt, Homo Sapiens
cgagcgcgcacccaccgcgccggagccuugcc

SEQ ID NO: 232854 - RNA, 31 nt, Homo Sapiens
ccccaucuccccucagcucggcucagcucgg

SEQ ID NO: 232855 - RNA, 32 nt, Homo Sapiens
uucaucuucagaugaaguuuuaaagcacuuug

SEQ ID NO: 232856 - RNA, 32 nt, Homo Sapiens
cucgcgcgcuggccaucaggcgcugcugacgc

SEQ ID NO: 232857 - RNA, 32 nt, Homo Sapiens
ggaguagacgguuuccuccacccaggguugac

SEQ ID NO: 232858 - RNA, 32 nt, Homo Sapiens
aucagcagcucuucuguuccugugucuucugu

SEQ ID NO: 232859 - RNA, 32 nt, Homo Sapiens
uuuuguaacagugugaucuuuaccgaugcacu

SEQ ID NO: 232860 - RNA, 32 nt, Homo Sapiens
cgcgcuggggacgggaggccggcgagccucgg

SEQ ID NO: 232861 - RNA, 32 nt, Homo Sapiens
acgccagggcuuuauuuauuuauuuuuaccac

SEQ ID NO: 232862 - RNA, 32 nt, Homo Sapiens
agcauuuagcauaccauguaaauauggaccuu

SEQ ID NO: 232863 - RNA, 32 nt, Homo Sapiens
auuauuucucauagcaggaaauguagagguag

SEQ ID NO: 232864 - RNA, 32 nt, Homo Sapiens
guugaacaaaaauuauggcauuuaagaauuua

SEQ ID NO: 232865 - RNA, 32 nt, Homo Sapiens
uaaaacgcgcguggcguccguggaccaaaaaa

SEQ ID NO: 232866 - RNA, 32 nt, Homo Sapiens
cgcaggcagucgcgcgcacacacgcacgcagg

SEQ ID NO: 232867 - RNA, 32 nt, Homo Sapiens
gggcugcccuccccuccuccgggacugcucug

SEQ ID NO: 232868 - RNA, 32 nt, Homo Sapiens
aacugagaaaucauguucuuuguggacuauuu

SEQ ID NO: 232869 - RNA, 31 nt, Homo Sapiens
cccacccgacucuugcucugaguuagagcug

SEQ ID NO: 232870 - RNA, 32 nt, Homo Sapiens
aguauguagucuuuuugaauuggcuucuuuca

SEQ ID NO: 232871 - RNA, 32 nt, Homo Sapiens
gucauacaucuucccugguuugagguuacagu

SEQ ID NO: 232872 - RNA, 32 nt, Homo Sapiens
gacugcccgcccagccccccugugccccacag

SEQ ID NO: 232873 - RNA, 32 nt, Homo Sapiens
uccauguuuucugagugcucuaugauaaauca

SEQ ID NO: 232874 - RNA, 32 nt, Homo Sapiens
ggacuccccccgcgcccccgcugccaacguua

SEQ ID NO: 232875 - RNA, 32 nt, Homo Sapiens
ugaagcacaugaugauuuugugguccuuuaug

SEQ ID NO: 232876 - RNA, 32 nt, Homo Sapiens
cugaaaaaacaaaaagaaguagcaauauuuca

SEQ ID NO: 232877 - RNA, 32 nt, Homo Sapiens
uuauagucaaaguaagauacucugccaaguuu

SEQ ID NO: 232878 - RNA, 32 nt, Homo Sapiens
uggaggugaacagccucuuuugccgguauuca

SEQ ID NO: 232879 - RNA, 32 nt, Homo Sapiens
uaucuuucaauuccgaaaaauucugugggugg

SEQ ID NO: 232880 - RNA, 32 nt, Homo Sapiens
ccauacgcagccuccuuggagugacgggccga

SEQ ID NO: 232881 - RNA, 32 nt, Homo Sapiens
gcgggcaguugcugcgcagaccgccccacccu

SEQ ID NO: 232882 - RNA, 29 nt, Homo Sapiens
ccauuuuccuguuucagcauguuauauuc

SEQ ID NO: 232883 - RNA, 32 nt, Homo Sapiens
uuguauauucuguuagauuaauuccuauuucu

SEQ ID NO: 232884 - RNA, 32 nt, Homo Sapiens
uacgccucaccccuccucccucucacagguuc

SEQ ID NO: 232885 - RNA, 32 nt, Homo Sapiens
gcagggccgggcgcccggcagcuacguggggg

SEQ ID NO: 232886 - RNA, 28 nt, Homo Sapiens
cgucgggcagggccgccgggauuggugu

SEQ ID NO: 232887 - RNA, 32 nt, Homo Sapiens
ucuaccugcccccagagcugaggccaucugca

SEQ ID NO: 232888 - RNA, 32 nt, Homo Sapiens
ucccauggggaggugaugguggggagaugaug

SEQ ID NO: 232889 - RNA, 32 nt, Homo Sapiens
ucccgccggcugggcguccgguggccggugua

SEQ ID NO: 232890 - RNA, 32 nt, Homo Sapiens
gcauugacauauuuuucuaugauuuuuuaaaa

SEQ ID NO: 232891 - RNA, 32 nt, Homo Sapiens
aaaucucacguugaaguguaauccccaauguu

SEQ ID NO: 232892 - RNA, 32 nt, Homo Sapiens
aacugaagagcuucugcacagcagaagaaacu

SEQ ID NO: 232893 - RNA, 32 nt, Homo Sapiens
cuagucccaggguggggguggggcaccccagc

SEQ ID NO: 232894 - RNA, 32 nt, Homo Sapiens
cgucccauccagcuaccaccacggccaccacu

SEQ ID NO: 232895 - RNA, 32 nt, Homo Sapiens
guugguuccuggagaauucacucauugauuca

SEQ ID NO: 232896 - RNA, 32 nt, Homo Sapiens
ugcccuggggccagcucugccccagcccugag

SEQ ID NO: 232897 - RNA, 32 nt, Homo Sapiens
uggguccaguguucaucugagcauaacuguac

SEQ ID NO: 232898 - RNA, 31 nt, Homo Sapiens
ccgagggugggccccauggagagcccuguga

SEQ ID NO: 232899 - RNA, 32 nt, Homo Sapiens
aaaguuuaauuccaacacaaaaaaaaaaaaaa

SEQ ID NO: 232900 - RNA, 32 nt, Homo Sapiens
cucagcucccugcucuacggcuccauccccaa

SEQ ID NO: 232901 - RNA, 32 nt, Homo Sapiens
ucagcauucuaccuucuuccugauucugugag

SEQ ID NO: 232902 - RNA, 32 nt, Homo Sapiens
cgcaacccgagcucggcgagucgucgucuucu

SEQ ID NO: 232903 - RNA, 32 nt, Homo Sapiens
cgggcccaaggcgugaggcgccgcccgggugu

SEQ ID NO: 232904 - RNA, 29 nt, Homo Sapiens
acugcuguggauuugagaggcaaaguugg

SEQ ID NO: 232905 - RNA, 32 nt, Homo Sapiens
acccgcaucgccauucuguagucuucaggguc

SEQ ID NO: 232906 - RNA, 32 nt, Homo Sapiens
caguuuauuauuauuuaucugggcaauuauug

SEQ ID NO: 232907 - RNA, 32 nt, Homo Sapiens
gcuugcccaggccgcccugcugcugcaggcug

SEQ ID NO: 232908 - RNA, 32 nt, Homo Sapiens
cugggcaggggugguggguaccagagaaugcu

SEQ ID NO: 232909 - RNA, 32 nt, Homo Sapiens
gcagccgggcccagcucuucuguccuuggcca

SEQ ID NO: 232910 - RNA, 32 nt, Homo Sapiens
uaaauaccgcguuuuggugccgcuuuauaaga

SEQ ID NO: 232911 - RNA, 32 nt, Homo Sapiens
cuuggcugugaugagcagacauccucuguccc

SEQ ID NO: 232912 - RNA, 32 nt, Homo Sapiens
cauuggcuggaacauggauuggggauuugaua

SEQ ID NO: 232913 - RNA, 32 nt, Homo Sapiens
accuuuauuucuguugaauaucuuuaauuucu

SEQ ID NO: 232914 - RNA, 32 nt, Homo Sapiens
uuuucagaguguugcagauuugccauuucucc

SEQ ID NO: 232915 - RNA, 32 nt, Homo Sapiens
ugcccacuucccuccacccccacaccccagcc

SEQ ID NO: 232916 - RNA, 32 nt, Homo Sapiens
agggauucaaaaaaacaaaaacaaaagaauag

SEQ ID NO: 232917 - RNA, 32 nt, Homo Sapiens
cuucagcuguacacauuuuuaaauaaaaucau

SEQ ID NO: 232918 - RNA, 32 nt, Homo Sapiens
cuauuugagcaaauaaugauagggcauacuca

SEQ ID NO: 232919 - RNA, 32 nt, Homo Sapiens
uugcccuugagaguauauggggaccagucuuc

SEQ ID NO: 232920 - RNA, 32 nt, Homo Sapiens
ggcccuucacacaacuuuugaaucucuaaaaa

SEQ ID NO: 232921 - RNA, 32 nt, Homo Sapiens
augguugaaaauacauauauucauuucuuuau

SEQ ID NO: 232922 - RNA, 32 nt, Homo Sapiens
gaggagcagggccagccguuccugccagaagc

SEQ ID NO: 232923 - RNA, 32 nt, Homo Sapiens
agaauccaguuugcaauuacuuucucgauugg

SEQ ID NO: 232924 - RNA, 32 nt, Homo Sapiens
ggggaugugaugucaggcuugauugugggcau

SEQ ID NO: 232925 - RNA, 32 nt, Homo Sapiens
gaggauauagaccuuuuuaacuuuauaguuag

SEQ ID NO: 232926 - RNA, 32 nt, Homo Sapiens
gagcgagacuccaucucaaaaaaaaaaaaaaa

SEQ ID NO: 232927 - RNA, 32 nt, Homo Sapiens
agaugcuagaaagccuuggagaguggaggcag

SEQ ID NO: 232928 - RNA, 32 nt, Homo Sapiens
ugaaggcggaccgcggagcggcgggcggcggg

SEQ ID NO: 232929 - RNA, 31 nt, Homo Sapiens
cuuuuuaaaaacacucuuaucagccugggca

SEQ ID NO: 232930 - RNA, 32 nt, Homo Sapiens
uuuguuuucuaagauguaaaucacucaaagua

SEQ ID NO: 232931 - RNA, 32 nt, Homo Sapiens
caauuugccugccuuguacaaaagcucaggug

SEQ ID NO: 232932 - RNA, 32 nt, Homo Sapiens
aaagaucgccuggcucagucagacauggccaa

SEQ ID NO: 232933 - RNA, 32 nt, Homo Sapiens
cagcugcucgccugaggccgccgggggugcgg

SEQ ID NO: 232934 - RNA, 32 nt, Homo Sapiens
aaagccucugaucuggcagacucauugcagca

SEQ ID NO: 232935 - RNA, 32 nt, Homo Sapiens
gaacaccuucucaagcacuuugagugaccacg

SEQ ID NO: 232936 - RNA, 32 nt, Homo Sapiens
cucaugccgggcgugguggcacgcgccuguaa

SEQ ID NO: 232937 - RNA, 32 nt, Homo Sapiens
ccuaggaggaauguccaagugugucuuguacu

SEQ ID NO: 232938 - RNA, 32 nt, Homo Sapiens
cucaaggaucuagaaccagaaauaucauuuga

SEQ ID NO: 232939 - RNA, 32 nt, Homo Sapiens
aaauauguccaugggacaaaagagggaauaug

SEQ ID NO: 232940 - RNA, 32 nt, Homo Sapiens
cugacggcgcggcuaccauggcggcggcauuu

SEQ ID NO: 232941 - RNA, 32 nt, Homo Sapiens
gcggcgggaggcgcgucuccccggcccagucc

SEQ ID NO: 232942 - RNA, 32 nt, Homo Sapiens
gguguauuuuucuuuucuuuuuuuaaugaauc

SEQ ID NO: 232943 - RNA, 32 nt, Homo Sapiens
acaucagggcuugauuuauuguuuguugauuu

SEQ ID NO: 232944 - RNA, 32 nt, Homo Sapiens
aaaacauguucucccugcagucucacgaacug

SEQ ID NO: 232945 - RNA, 32 nt, Homo Sapiens
caugcaccuaccucagaaaacaaguauuguca

SEQ ID NO: 232946 - RNA, 32 nt, Homo Sapiens
acgaggucaggagauagagaccauccugguua

SEQ ID NO: 232947 - RNA, 31 nt, Homo Sapiens
uuugcuuccguaggaggcaaguuccuugaug

SEQ ID NO: 232948 - RNA, 32 nt, Homo Sapiens
caauuguccgccccgccagcgcugcaaauaaa

SEQ ID NO: 232949 - RNA, 32 nt, Homo Sapiens
gagugcacggaaggaccacgccggcaaggaaa

SEQ ID NO: 232950 - RNA, 31 nt, Homo Sapiens
gaugggcggcacugugcggcucuggggagcu

SEQ ID NO: 232951 - RNA, 32 nt, Homo Sapiens
uuauucuugcaccuuuuuuucuugguaguaau

SEQ ID NO: 232952 - RNA, 32 nt, Homo Sapiens
cuccuccuucccuccccuccccguccacaggg

SEQ ID NO: 232953 - RNA, 32 nt, Homo Sapiens
cucugacccaucuggaggaaaaccagaucgga

SEQ ID NO: 232954 - RNA, 32 nt, Homo Sapiens
ccuuuuaaguaccccacaaauccuucaugagg

SEQ ID NO: 232955 - RNA, 32 nt, Homo Sapiens
gguacuaaagcaugcauggaggcucuucaggc

SEQ ID NO: 232956 - RNA, 32 nt, Homo Sapiens
ucccugccaacccccaccccccauaaucugac

SEQ ID NO: 232957 - RNA, 32 nt, Homo Sapiens
ggaggcugugggagguguuggcggcggcggcg

SEQ ID NO: 232958 - RNA, 32 nt, Homo Sapiens
caguucuuuucucucccuuccauuucuaaguc

SEQ ID NO: 232959 - RNA, 32 nt, Homo Sapiens
agcuggaaggggaaaagucagggccuucccgg

SEQ ID NO: 232960 - RNA, 32 nt, Homo Sapiens
acugauagguggccuagugguuaugcccugua

SEQ ID NO: 232961 - RNA, 32 nt, Homo Sapiens
ggcuacgcggagcccgccgcaggccgcgagcu

SEQ ID NO: 232962 - RNA, 32 nt, Homo Sapiens
uacccccagggucagaggagaacuaaaaggag

SEQ ID NO: 232963 - RNA, 32 nt, Homo Sapiens
ucaaaggaguucaguucucaccauggagugag

SEQ ID NO: 232964 - RNA, 29 nt, Homo Sapiens
acuucugugacuuucuuucauuuuuauug

SEQ ID NO: 232965 - RNA, 32 nt, Homo Sapiens
gcagggacagccagcgcccagcccaucaccac

SEQ ID NO: 232966 - RNA, 32 nt, Homo Sapiens
uuuaauccuuuucaaaagaugguuuauaauaa

SEQ ID NO: 232967 - RNA, 32 nt, Homo Sapiens
uuuuuguuuacuaugagaaaaagguagacuaa

SEQ ID NO: 232968 - RNA, 32 nt, Homo Sapiens
accugcaggcuggccuggggucgggcaggggg

SEQ ID NO: 232969 - RNA, 32 nt, Homo Sapiens
cuuacguagagcuuuugugagauuuuuaaguu

SEQ ID NO: 232970 - RNA, 32 nt, Homo Sapiens
gugcaggggaggggcgggagguggagcagggu

SEQ ID NO: 232971 - RNA, 32 nt, Homo Sapiens
cuccuuccugucaugcucccuccagcccauga

SEQ ID NO: 232972 - RNA, 32 nt, Homo Sapiens
uugugccuacaccacagaaaccucugaaugua

SEQ ID NO: 232973 - RNA, 32 nt, Homo Sapiens
cccugggguucugggauuccagcccuccugga

SEQ ID NO: 232974 - RNA, 32 nt, Homo Sapiens
gagugcccggugugugcgcgccggcgagagca

SEQ ID NO: 232975 - RNA, 32 nt, Homo Sapiens
ccuggaaucugauuucuguaaguuucaguccu

SEQ ID NO: 232976 - RNA, 32 nt, Homo Sapiens
ccggcccggucccaggugggcagcucggcuug

SEQ ID NO: 232977 - RNA, 32 nt, Homo Sapiens
cuggcggcccggccggccccggcucaccgacu

SEQ ID NO: 232978 - RNA, 32 nt, Homo Sapiens
aaccgcagcuccgcacuuguccaucccccugc

SEQ ID NO: 232979 - RNA, 32 nt, Homo Sapiens
uaugaggaugaaaugaagaucuauguaaagcc

SEQ ID NO: 232980 - RNA, 32 nt, Homo Sapiens
auuugucugaauguggauguucgcgcgggaac

SEQ ID NO: 232981 - RNA, 32 nt, Homo Sapiens
uuguagcugggguauaauugggaaauguucac

SEQ ID NO: 232982 - RNA, 32 nt, Homo Sapiens
ccugccgccccgcgaccccgaccgccagcaug

SEQ ID NO: 232983 - RNA, 32 nt, Homo Sapiens
aaggggccccuacaagcggccacaaggauggc

SEQ ID NO: 232984 - RNA, 32 nt, Homo Sapiens
ccagcuucacggugaugauauggcaucugcca

SEQ ID NO: 232985 - RNA, 32 nt, Homo Sapiens
guaaaagagagucacagguaccccaaggagua

SEQ ID NO: 232986 - RNA, 32 nt, Homo Sapiens
ugcugcugucuccagcgagucauugcuucucu

SEQ ID NO: 232987 - RNA, 32 nt, Homo Sapiens
ggcggcgggcgcgcucagucuggcggcggcug

SEQ ID NO: 232988 - RNA, 32 nt, Homo Sapiens
agcugcugucucuggcacaucuccacaauuaa

SEQ ID NO: 232989 - RNA, 32 nt, Homo Sapiens
uugaauagcucuuuacugucuuacuugggguu

SEQ ID NO: 232990 - RNA, 32 nt, Homo Sapiens
cugcugacucugccguuucuccaggccuccgc

SEQ ID NO: 232991 - RNA, 30 nt, Homo Sapiens
gauuuucucugugcucuugaguuuuuuauu

SEQ ID NO: 232992 - RNA, 32 nt, Homo Sapiens
augacuuauuucucauucucuuuccuuccuga

SEQ ID NO: 232993 - RNA, 32 nt, Homo Sapiens
uucuuccuaccuucuuccuuuuugacuaaaua

SEQ ID NO: 232994 - RNA, 32 nt, Homo Sapiens
cuuauguuauaacuucagucaauuaauguaag

SEQ ID NO: 232995 - RNA, 32 nt, Homo Sapiens
ggggaagaagaaggccucacuuuugcugcugc

SEQ ID NO: 232996 - RNA, 32 nt, Homo Sapiens
gagccugagggcugaggcccagcgugaacaug

SEQ ID NO: 232997 - RNA, 32 nt, Homo Sapiens
uccgagccccugcggcgggcggacgauggugu

SEQ ID NO: 232998 - RNA, 32 nt, Homo Sapiens
agacaaagagguuaucacaaaaauuccuccca

SEQ ID NO: 232999 - RNA, 32 nt, Homo Sapiens
gaagcugacaauaccuguguuaugagcaguau

SEQ ID NO: 233000 - RNA, 27 nt, Homo Sapiens
cccccaucugucuucagcacauuccac

SEQ ID NO: 233001 - RNA, 32 nt, Homo Sapiens
gagggcugggggaagggcagggguguggagag

SEQ ID NO: 233002 - RNA, 32 nt, Homo Sapiens
uguggauaauuucauguuccaggggcgcuugg

SEQ ID NO: 233003 - RNA, 32 nt, Homo Sapiens
ggggaggcgggggcgccuccggcggcgagaug

SEQ ID NO: 233004 - RNA, 32 nt, Homo Sapiens
aggcccgcggguaaccaccuccuccugagcgc

SEQ ID NO: 233005 - RNA, 32 nt, Homo Sapiens
cacuauccauuuggaaaacuuaaaagaauaau

SEQ ID NO: 233006 - RNA, 32 nt, Homo Sapiens
agcugacucaaaacguaacggcccaauugucc

SEQ ID NO: 233007 - RNA, 32 nt, Homo Sapiens
cuuaaaacaucguguggugcuaaucucugcac

SEQ ID NO: 233008 - RNA, 32 nt, Homo Sapiens
uucacagguucugugcaucaccacagugcuca

SEQ ID NO: 233009 - RNA, 32 nt, Homo Sapiens
ccccuccccaggagcuccccaggccgcagggg

SEQ ID NO: 233010 - RNA, 32 nt, Homo Sapiens
ggcagaucaagaaagcacucugagcuccagaa

SEQ ID NO: 233011 - RNA, 32 nt, Homo Sapiens
cuuaugauugcucuccucccgcuucaggccua

SEQ ID NO: 233012 - RNA, 32 nt, Homo Sapiens
cuauuuuuuuucugccaggguauguuacaaca

SEQ ID NO: 233013 - RNA, 32 nt, Homo Sapiens
cagccuccccaguagcugggaauacaggcacc

SEQ ID NO: 233014 - RNA, 32 nt, Homo Sapiens
uagcgcuggccgcgaccccggcgccuuugaaa

SEQ ID NO: 233015 - RNA, 28 nt, Homo Sapiens
ccucccuccagaaggguuucuaaaaaca

SEQ ID NO: 233016 - RNA, 30 nt, Homo Sapiens
caucuggaccagggcauccgucgggcuauu

SEQ ID NO: 233017 - RNA, 31 nt, Homo Sapiens
aguucagguacugccugggccacugggcagu

SEQ ID NO: 233018 - RNA, 32 nt, Homo Sapiens
cuauuuauauaacauuagauaauuaaauagug

SEQ ID NO: 233019 - RNA, 32 nt, Homo Sapiens
acucuccgagccgcauccugggcuugugggaa

SEQ ID NO: 233020 - RNA, 32 nt, Homo Sapiens
cuuaaacacuuucaaggauuugcaaugcuucu

SEQ ID NO: 233021 - RNA, 32 nt, Homo Sapiens
ucccauaauauuuuuucuuuuucaucuacaau

SEQ ID NO: 233022 - RNA, 32 nt, Homo Sapiens
gaccaggaguaccuuacccagucugggauagg

SEQ ID NO: 233023 - RNA, 32 nt, Homo Sapiens
auagaagaaaauaaaugcacuuuauccacucc

SEQ ID NO: 233024 - RNA, 32 nt, Homo Sapiens
cuucuagcacaucaaaaauauuucagucauua

SEQ ID NO: 233025 - RNA, 32 nt, Homo Sapiens
ugagaucauuaacgugaaacuauuacuaguau

SEQ ID NO: 233026 - RNA, 32 nt, Homo Sapiens
uggggggacuucccaaagggucccaggcuguc

SEQ ID NO: 233027 - RNA, 32 nt, Homo Sapiens
uauuaguuauuuacaucaaaaagcuuuuagaa

SEQ ID NO: 233028 - RNA, 32 nt, Homo Sapiens
ugcugugguuccuggggugcccuccacugccc

SEQ ID NO: 233029 - RNA, 32 nt, Homo Sapiens
uucucgaccacccaccuaccauucuuggaacc

SEQ ID NO: 233030 - RNA, 32 nt, Homo Sapiens
gaugaaccuugaaugcaugauacugaaugaaa

SEQ ID NO: 233031 - RNA, 32 nt, Homo Sapiens
uagucugaagucuggaacacuuuccucuucua

SEQ ID NO: 233032 - RNA, 32 nt, Homo Sapiens
cagaagcugagccaagcagaggcgggcagcuc

SEQ ID NO: 233033 - RNA, 32 nt, Homo Sapiens
cuaguucagagagauuuuuagagcuguggugg

SEQ ID NO: 233034 - RNA, 32 nt, Homo Sapiens
cugcacuggggguggggugcgguagguuucgc

SEQ ID NO: 233035 - RNA, 32 nt, Homo Sapiens
uaauuaaaaauuaagaauaaauaaacgaguug

SEQ ID NO: 233036 - RNA, 32 nt, Homo Sapiens
aacauuccugugguuuuaguaguaaugagaug

SEQ ID NO: 233037 - RNA, 32 nt, Homo Sapiens
agguuggaacuauugaagcccgcuuucagguu

SEQ ID NO: 233038 - RNA, 32 nt, Homo Sapiens
uuaguucauauaucaagaagucuugaaguugg

SEQ ID NO: 233039 - RNA, 32 nt, Homo Sapiens
uccugccucacaguuguuaaagucuguuccaa

SEQ ID NO: 233040 - RNA, 32 nt, Homo Sapiens
acaugaaaugacuauaaacgguuuuuuaauga

SEQ ID NO: 233041 - RNA, 32 nt, Homo Sapiens
ggcccucaccaggguccuucccugccccacuu

SEQ ID NO: 233042 - RNA, 32 nt, Homo Sapiens
cucuuuucuccuauguuuuaucugucuacuuu

SEQ ID NO: 233043 - RNA, 32 nt, Homo Sapiens
uccccagucccuaucucccccauccccucccg

SEQ ID NO: 233044 - RNA, 30 nt, Homo Sapiens
ucacugugcaggcgcuugggugacgcgacg

SEQ ID NO: 233045 - RNA, 32 nt, Homo Sapiens
uagccuuaacauguaccugucaauguuaugga

SEQ ID NO: 233046 - RNA, 32 nt, Homo Sapiens
caagaacugauaauucauuauaucaucagaua

SEQ ID NO: 233047 - RNA, 32 nt, Homo Sapiens
uuuaaaguauauagagagcaaaaacuggcagg

SEQ ID NO: 233048 - RNA, 32 nt, Homo Sapiens
accuugugauccacccaccucggcuuccccca

SEQ ID NO: 233049 - RNA, 32 nt, Homo Sapiens
accuccgccucccggauucaggcgauucucau

SEQ ID NO: 233050 - RNA, 32 nt, Homo Sapiens
aggaagaggguggauugcgggugcggcugccc

SEQ ID NO: 233051 - RNA, 32 nt, Homo Sapiens
accucugggucccagugggcauuuuuuccccu

SEQ ID NO: 233052 - RNA, 32 nt, Homo Sapiens
gcuuccaggaggaggaccccccuggggagaag

SEQ ID NO: 233053 - RNA, 32 nt, Homo Sapiens
ucccagcuguuccaagacugggccguagaauu

SEQ ID NO: 233054 - RNA, 32 nt, Homo Sapiens
ucagagagaaaagaaaaucugcagaggaagcu

SEQ ID NO: 233055 - RNA, 32 nt, Homo Sapiens
guaugugugcauuuuccacacuuuuuaauuuu

SEQ ID NO: 233056 - RNA, 32 nt, Homo Sapiens
uauaaaagaaaaacuuuauucuccucuuuuga

SEQ ID NO: 233057 - RNA, 32 nt, Homo Sapiens
acuuucgguuuaaaacaugcuauauguacugu

SEQ ID NO: 233058 - RNA, 32 nt, Homo Sapiens
ggucacaggcaggggcugcccuggacgggggg

SEQ ID NO: 233059 - RNA, 32 nt, Homo Sapiens
cacacauggggguccuccaggaccucagcugc

SEQ ID NO: 233060 - RNA, 32 nt, Homo Sapiens
ugcaaacacacacacacacacacacacacaca

SEQ ID NO: 233061 - RNA, 32 nt, Homo Sapiens
agguggggcaggcagauugccucacuuaacuu

SEQ ID NO: 233062 - RNA, 32 nt, Homo Sapiens
cuuuggcagaaauuaagaaggaaauaucucca

SEQ ID NO: 233063 - RNA, 32 nt, Homo Sapiens
uuggaauguacaaaauaaaaucauucucuuca

SEQ ID NO: 233064 - RNA, 29 nt, Homo Sapiens
aaagauguuugucuugcucuauguuacaa

SEQ ID NO: 233065 - RNA, 32 nt, Homo Sapiens
cuccgcgcuccacguuuugcaggcugccaccg

SEQ ID NO: 233066 - RNA, 32 nt, Homo Sapiens
ucucugucuccauggcagccuuccuaucugcu

SEQ ID NO: 233067 - RNA, 32 nt, Homo Sapiens
aacacaucagaauugaauacgaauaaucuauu

SEQ ID NO: 233068 - RNA, 32 nt, Homo Sapiens
auauauuuuaugggugggaauaaaauuucuac

SEQ ID NO: 233069 - RNA, 32 nt, Homo Sapiens
uagagacaguggaguguaaaucuguggcuaau

SEQ ID NO: 233070 - RNA, 32 nt, Homo Sapiens
ggcugcuggaccugcgcacgcagcccaggaau

SEQ ID NO: 233071 - RNA, 32 nt, Homo Sapiens
aacacagcucuuagcugggagcuccuucugcc

SEQ ID NO: 233072 - RNA, 32 nt, Homo Sapiens
gcggcgcgcggacacccgccgguggaagaaga

SEQ ID NO: 233073 - RNA, 32 nt, Homo Sapiens
gaaacugcaggaccaguuucucugccaagggg

SEQ ID NO: 233074 - RNA, 32 nt, Homo Sapiens
uuaugcaaaagucagcgugacaauauacuuca

SEQ ID NO: 233075 - RNA, 32 nt, Homo Sapiens
uguaggagagaauuaagaaucuguuaauuaaa

SEQ ID NO: 233076 - RNA, 32 nt, Homo Sapiens
gccagggucagcaaacauuuucuguaaagggc

SEQ ID NO: 233077 - RNA, 32 nt, Homo Sapiens
cacuugaccuaggugcccuuucugcuacaugc

SEQ ID NO: 233078 - RNA, 32 nt, Homo Sapiens
gugugcucgggagcaaccggcgcgggugccac

SEQ ID NO: 233079 - RNA, 32 nt, Homo Sapiens
ggcugcugcgaaggccgcgggcccgugacugg

SEQ ID NO: 233080 - RNA, 32 nt, Homo Sapiens
gcuaaauaugcaaguacugaaguaagagaaga

SEQ ID NO: 233081 - RNA, 32 nt, Homo Sapiens
aucgucugugaaugccaagugauggcaacugc

SEQ ID NO: 233082 - RNA, 32 nt, Homo Sapiens
cuucggcugugccuagggcaacagccaaccua

SEQ ID NO: 233083 - RNA, 32 nt, Homo Sapiens
cgcccuccuuuguguaucaagugucgcucaca

SEQ ID NO: 233084 - RNA, 32 nt, Homo Sapiens
ucuggggaaggggggucuguagacacauccca

SEQ ID NO: 233085 - RNA, 32 nt, Homo Sapiens
auuuccuauugguuuuguuucucuacagaauc

SEQ ID NO: 233086 - RNA, 31 nt, Homo Sapiens
cugcugcuuggggaggccccaagggccccuu

SEQ ID NO: 233087 - RNA, 32 nt, Homo Sapiens
ggcacuaagcugguuuccuccuccccaggguu

SEQ ID NO: 233088 - RNA, 32 nt, Homo Sapiens
ucauacucugugcuuuacagaaugggaaacug

SEQ ID NO: 233089 - RNA, 32 nt, Homo Sapiens
ugacucauuucccuuguccagggcccgaggag

SEQ ID NO: 233090 - RNA, 32 nt, Homo Sapiens
uaaagcagcuguuuuggggucugugagaguac

SEQ ID NO: 233091 - RNA, 32 nt, Homo Sapiens
ggagcccgccgggagggccggggucucgggcu

SEQ ID NO: 233092 - RNA, 32 nt, Homo Sapiens
ucauccuaacccuccuucugccuucuggucuc

SEQ ID NO: 233093 - RNA, 32 nt, Homo Sapiens
gcugagaugaaaauuucuuuuauuggaggaag

SEQ ID NO: 233094 - RNA, 32 nt, Homo Sapiens
uuuuugccucuaaugcagaaaucaacagaauc

SEQ ID NO: 233095 - RNA, 32 nt, Homo Sapiens
gcacuggcggcaccuucuccugcgcccaguga

SEQ ID NO: 233096 - RNA, 32 nt, Homo Sapiens
ugcuuucccuccccugucaggucucuccuguc

SEQ ID NO: 233097 - RNA, 32 nt, Homo Sapiens
uaaaauguuaacuggcaguaagucuuuuuuga

SEQ ID NO: 233098 - RNA, 32 nt, Homo Sapiens
auuuauauagggaugugauguuagagaacuac

SEQ ID NO: 233099 - RNA, 32 nt, Homo Sapiens
aggggccagugacgcgaggagcaagaaaagag

SEQ ID NO: 233100 - RNA, 32 nt, Homo Sapiens
caggccugccagcaucccugaugccgacuuuc

SEQ ID NO: 233101 - RNA, 32 nt, Homo Sapiens
gguuucaccauguuggccaggcuggucucaac

SEQ ID NO: 233102 - RNA, 32 nt, Homo Sapiens
uauaggcucgguguguguaacacacacacccc

SEQ ID NO: 233103 - RNA, 32 nt, Homo Sapiens
ccuccaccugcucuccucccuacccagagcuc

SEQ ID NO: 233104 - RNA, 32 nt, Homo Sapiens
uuuacuaaaaauacaaaaauuagucaggcaug

SEQ ID NO: 233105 - RNA, 32 nt, Homo Sapiens
caugaaggugcuggaauugugaaaaguguugg

SEQ ID NO: 233106 - RNA, 32 nt, Homo Sapiens
ggcacgaggcauggaggcgcugcugcugggcg

SEQ ID NO: 233107 - RNA, 32 nt, Homo Sapiens
gagcugggagagaauauauuucuguuguuuua

SEQ ID NO: 233108 - RNA, 32 nt, Homo Sapiens
uccccgguuccucauuacuuacgagagaaaaa

SEQ ID NO: 233109 - RNA, 32 nt, Homo Sapiens
cccaccucuaaagauauuuguuucugugaccu

SEQ ID NO: 233110 - RNA, 32 nt, Homo Sapiens
gaccaucuguaugcccugcucccuuugcuggg

SEQ ID NO: 233111 - RNA, 32 nt, Homo Sapiens
uuucuccuaagcagcacccuccccuccuccug

SEQ ID NO: 233112 - RNA, 32 nt, Homo Sapiens
guaccugacaguaagaaaauacucuggcuggu

SEQ ID NO: 233113 - RNA, 32 nt, Homo Sapiens
aaauucauauggugucccaccuuauuuaauga

SEQ ID NO: 233114 - RNA, 28 nt, Homo Sapiens
aaauauccaagguaacauuugggggcaa

SEQ ID NO: 233115 - RNA, 32 nt, Homo Sapiens
guucaauccagauggaagcuggacacaugaga

SEQ ID NO: 233116 - RNA, 32 nt, Homo Sapiens
ggcucggagauuacaggcggcccgcgaggccg

SEQ ID NO: 233117 - RNA, 32 nt, Homo Sapiens
ugcucccccugucccuuccccauccacccaac

SEQ ID NO: 233118 - RNA, 32 nt, Homo Sapiens
uucuagaaggauguuacuccuaaugucacggg

SEQ ID NO: 233119 - RNA, 32 nt, Homo Sapiens
ugccauugcugcuggagcccaccaggcaagag

SEQ ID NO: 233120 - RNA, 32 nt, Homo Sapiens
cccgcugucaauguuccccauccacacccugc

SEQ ID NO: 233121 - RNA, 32 nt, Homo Sapiens
uccuagagcuccuggggggcuuggaaacacua

SEQ ID NO: 233122 - RNA, 32 nt, Homo Sapiens
cagggaguggccucucccuucuccauggacuu

SEQ ID NO: 233123 - RNA, 32 nt, Homo Sapiens
cugauugguccguuuugacagacugcugauug

SEQ ID NO: 233124 - RNA, 32 nt, Homo Sapiens
augagugccaccugguacagguagguggcgcu

SEQ ID NO: 233125 - RNA, 32 nt, Homo Sapiens
aaacaagugaucugguuuuagcccagaugaug

SEQ ID NO: 233126 - RNA, 32 nt, Homo Sapiens
gacauaauccucgaauguuccacacguggaaa

SEQ ID NO: 233127 - RNA, 32 nt, Homo Sapiens
guguggaguucuggcagaucucaccagucuac

SEQ ID NO: 233128 - RNA, 32 nt, Homo Sapiens
cucgcuuucccucucgcgucucuggcugcagg

SEQ ID NO: 233129 - RNA, 32 nt, Homo Sapiens
cuuugauuuuuauguuugauaauuucuacuga

SEQ ID NO: 233130 - RNA, 32 nt, Homo Sapiens
ccuucuugccagccacauaugagagcucuagu

SEQ ID NO: 233131 - RNA, 32 nt, Homo Sapiens
gaaaguaggucacaagugacuggccaucccug

SEQ ID NO: 233132 - RNA, 32 nt, Homo Sapiens
uaccuuugaaaaaacuaaacuaucagucauuu

SEQ ID NO: 233133 - RNA, 32 nt, Homo Sapiens
gacacacccagcugucugcucgcauuugcucc

SEQ ID NO: 233134 - RNA, 32 nt, Homo Sapiens
guauuucggaagcucagcagagguugaacccu

SEQ ID NO: 233135 - RNA, 32 nt, Homo Sapiens
gcuucuccucucugcuggcugagucugugguc

SEQ ID NO: 233136 - RNA, 32 nt, Homo Sapiens
ccaugggguagggugagaagggcagggguguc

SEQ ID NO: 233137 - RNA, 32 nt, Homo Sapiens
augaucugcuuagccauugaugaugaugacaa

SEQ ID NO: 233138 - RNA, 32 nt, Homo Sapiens
gcugaaaagggaggagcaagaugggaugaaag

SEQ ID NO: 233139 - RNA, 32 nt, Homo Sapiens
gaauuuuaccuauuaugaaacauauuacauuu

SEQ ID NO: 233140 - RNA, 32 nt, Homo Sapiens
ccacuuccacuuaauaggauggcugcucuuuu

SEQ ID NO: 233141 - RNA, 32 nt, Homo Sapiens
uaagaacuugguuuuucaugacuggaugugaa

SEQ ID NO: 233142 - RNA, 32 nt, Homo Sapiens
auuucgggcagucaggugggcgacccgcguag

SEQ ID NO: 233143 - RNA, 32 nt, Homo Sapiens
auuuaucuagucauauguaauuuuaugcuaac

SEQ ID NO: 233144 - RNA, 31 nt, Homo Sapiens
ggcgacugcaggguccugccccuugcccagc

SEQ ID NO: 233145 - RNA, 32 nt, Homo Sapiens
aaucuggguagcaacagcaucuuccacaguuu

SEQ ID NO: 233146 - RNA, 32 nt, Homo Sapiens
agaaaaauaaauaacaagauaauugagaaaaa

SEQ ID NO: 233147 - RNA, 32 nt, Homo Sapiens
uggauauuuaaaccucuauuauuuuagacaag

SEQ ID NO: 233148 - RNA, 32 nt, Homo Sapiens
caggcccaaagagggaggggauccauucccgc

SEQ ID NO: 233149 - RNA, 32 nt, Homo Sapiens
cuggagagaggguggcggggcugcgggcuccc

SEQ ID NO: 233150 - RNA, 32 nt, Homo Sapiens
agcuugcaaugggucagcacuuuaccuuuuuu

SEQ ID NO: 233151 - RNA, 32 nt, Homo Sapiens
uuuuauggggagaaacaaacucuuugaagcca

SEQ ID NO: 233152 - RNA, 32 nt, Homo Sapiens
aaauacaccaaaaccucugucagaacacaaag

SEQ ID NO: 233153 - RNA, 32 nt, Homo Sapiens
uuaacuaaaaugaugaaauauuuuauguagac

SEQ ID NO: 233154 - RNA, 32 nt, Homo Sapiens
gaacuaccaaaauaaugcuuuaauuuucauuu

SEQ ID NO: 233155 - RNA, 32 nt, Homo Sapiens
ucuggucugaauuuugucaacauauuuagaau

SEQ ID NO: 233156 - RNA, 32 nt, Homo Sapiens
gggagcaggcaucacccaagucucuguggaua

SEQ ID NO: 233157 - RNA, 32 nt, Homo Sapiens
ggagaugugaaugugcgucaggugauggaugg

SEQ ID NO: 233158 - RNA, 32 nt, Homo Sapiens
cuucuaguguaugucaaagcuaaauuagguca

SEQ ID NO: 233159 - RNA, 31 nt, Homo Sapiens
uccgacggccacccccugccccugcccagcc

SEQ ID NO: 233160 - RNA, 32 nt, Homo Sapiens
ccagccagggaaaccauucuagucuuuauucu

SEQ ID NO: 233161 - RNA, 32 nt, Homo Sapiens
uaccacuguuuuuauccaauaaacuaagucgg

SEQ ID NO: 233162 - RNA, 32 nt, Homo Sapiens
cagccuggcgggguccacggccccacaguccc

SEQ ID NO: 233163 - RNA, 32 nt, Homo Sapiens
caggcaggcacccagcugggcauuucaccugc

SEQ ID NO: 233164 - RNA, 32 nt, Homo Sapiens
auguagaaugcuuuauucuacugccaucuuuc

SEQ ID NO: 233165 - RNA, 31 nt, Homo Sapiens
ucagggcuagccugccugcuuacgcgcgcug

SEQ ID NO: 233166 - RNA, 32 nt, Homo Sapiens
ggggagagaggaaaacaaaaccaaccaacccc

SEQ ID NO: 233167 - RNA, 32 nt, Homo Sapiens
accgcgugggcucgccucccugggacuagguu

SEQ ID NO: 233168 - RNA, 30 nt, Homo Sapiens
gcccuccuggacugcuucuuuuggcucucc

SEQ ID NO: 233169 - RNA, 32 nt, Homo Sapiens
uuuugccacagacuuugaagaaacuuuuggau

SEQ ID NO: 233170 - RNA, 32 nt, Homo Sapiens
uaaucuaaauguuuaaggaacugguuugcuaa

SEQ ID NO: 233171 - RNA, 31 nt, Homo Sapiens
agaaaucauuugacugaauaaauguauaaag

SEQ ID NO: 233172 - RNA, 32 nt, Homo Sapiens
auguuuguuauauuucuuuucuuuuuucuuuu

SEQ ID NO: 233173 - RNA, 32 nt, Homo Sapiens
acaggcagagucaggccgcacuggccugcccc

SEQ ID NO: 233174 - RNA, 32 nt, Homo Sapiens
cucaguugaagcagagaaaugccacugugcua

SEQ ID NO: 233175 - RNA, 32 nt, Homo Sapiens
ucaccauugguaguguuugcuaaaauuguauu

SEQ ID NO: 233176 - RNA, 32 nt, Homo Sapiens
guuuacauuuuucccuuucaguuaguauacac

SEQ ID NO: 233177 - RNA, 32 nt, Homo Sapiens
ucguguuuuauuguuuuuuuuauggcuuagcc

SEQ ID NO: 233178 - RNA, 32 nt, Homo Sapiens
cagcgagccgacgggucacgccaggggccggc

SEQ ID NO: 233179 - RNA, 32 nt, Homo Sapiens
gcgaacauaaaccccaguugcuuagguaugaa

SEQ ID NO: 233180 - RNA, 32 nt, Homo Sapiens
uaaaaucccacccaccugggacuugguaauuu

SEQ ID NO: 233181 - RNA, 32 nt, Homo Sapiens
gcucugcccagcugucagcuuccccugggcau

SEQ ID NO: 233182 - RNA, 32 nt, Homo Sapiens
gucauacaugaaaaguacacugcuuagaaauu

SEQ ID NO: 233183 - RNA, 32 nt, Homo Sapiens
cuacaggaggauguuugggagcaucucucucu

SEQ ID NO: 233184 - RNA, 32 nt, Homo Sapiens
aacccucgugcagcugagcuggggccgccaaa

SEQ ID NO: 233185 - RNA, 32 nt, Homo Sapiens
agccuguaaucccagcacuuugggaggccaag

SEQ ID NO: 233186 - RNA, 32 nt, Homo Sapiens
caucuaauaaaaucauuuuguauaucaaaaaa

SEQ ID NO: 233187 - RNA, 32 nt, Homo Sapiens
gccaggguuuggggagcagagagagccaagaa

SEQ ID NO: 233188 - RNA, 32 nt, Homo Sapiens
ucuuuaaggugcugugugauguguuaagagca

SEQ ID NO: 233189 - RNA, 32 nt, Homo Sapiens
ccucccccacucccaaccacguugggacaggg

SEQ ID NO: 233190 - RNA, 32 nt, Homo Sapiens
cgccuguaaucccagcacuuugggaggcgagg

SEQ ID NO: 233191 - RNA, 32 nt, Homo Sapiens
caguucugccccccgguugacuuuuaugccac

SEQ ID NO: 233192 - RNA, 32 nt, Homo Sapiens
uaaagggguugccguccagauguuagaucaaa

SEQ ID NO: 233193 - RNA, 32 nt, Homo Sapiens
uggucaaacgguuguuauuauuagcuucuaac

SEQ ID NO: 233194 - RNA, 32 nt, Homo Sapiens
gggcgcuacccugcagggugccaggcaggagu

SEQ ID NO: 233195 - RNA, 32 nt, Homo Sapiens
guggcgccuugugaccccgggccccugccgcc

SEQ ID NO: 233196 - RNA, 32 nt, Homo Sapiens
uuacagagaaggaugcugaggaccuagaugag

SEQ ID NO: 233197 - RNA, 32 nt, Homo Sapiens
aggcacagcugucguagcguugccauaaagag

SEQ ID NO: 233198 - RNA, 32 nt, Homo Sapiens
ugucuugcugcccagagcugcuggcuccccug

SEQ ID NO: 233199 - RNA, 32 nt, Homo Sapiens
cgcuuugcccuggccuggugggagaggacggc

SEQ ID NO: 233200 - RNA, 32 nt, Homo Sapiens
uuuagugauacuguuagccugauucuacugua

SEQ ID NO: 233201 - RNA, 32 nt, Homo Sapiens
auuaauucccucccuuucuuuuucuuacuagu

SEQ ID NO: 233202 - RNA, 32 nt, Homo Sapiens
aaucuuggcucauugcaacuuccacuucccag

SEQ ID NO: 233203 - RNA, 32 nt, Homo Sapiens
ugcauuucuaacaagcucccagguaaggcgga

SEQ ID NO: 233204 - RNA, 30 nt, Homo Sapiens
aggaggggagguggaagaauuauaauggua

SEQ ID NO: 233205 - RNA, 32 nt, Homo Sapiens
uagcugggauuacaggcacgcgccaccacgcc

SEQ ID NO: 233206 - RNA, 32 nt, Homo Sapiens
aaaauacaauguaaaacaaagugaagaacaaa

SEQ ID NO: 233207 - RNA, 32 nt, Homo Sapiens
ccugcagaccccgccuggcccccgcuggcuuc

SEQ ID NO: 233208 - RNA, 32 nt, Homo Sapiens
ugaaauucaaucaacauaauucaccauagaau

SEQ ID NO: 233209 - RNA, 32 nt, Homo Sapiens
caacccccuuuggguccccucccuuuguaugg

SEQ ID NO: 233210 - RNA, 32 nt, Homo Sapiens
gaaauuuauuagaugccuggagguuuuggcau

SEQ ID NO: 233211 - RNA, 32 nt, Homo Sapiens
ugaggggcaacguggaggaagggccagggaug

SEQ ID NO: 233212 - RNA, 32 nt, Homo Sapiens
uugagaaugcaaauuuagagagaguuaucauu

SEQ ID NO: 233213 - RNA, 32 nt, Homo Sapiens
uguugcuggcuuugaggauggaggaaggaggc

SEQ ID NO: 233214 - RNA, 32 nt, Homo Sapiens
cagcaccuccaagacugucuccuuuuggccaa

SEQ ID NO: 233215 - RNA, 32 nt, Homo Sapiens
ugccccagccucaggacugcaggagccauccg

SEQ ID NO: 233216 - RNA, 32 nt, Homo Sapiens
cucuggcccucuccaggguguuuuccacuagu

SEQ ID NO: 233217 - RNA, 32 nt, Homo Sapiens
cguuucacagagggugauauuuuucugaggca

SEQ ID NO: 233218 - RNA, 32 nt, Homo Sapiens
aagagagcgggaagccgagcugggcgagaagu

SEQ ID NO: 233219 - RNA, 32 nt, Homo Sapiens
gaaauuaaaugauagccuacaaacacacacac

SEQ ID NO: 233220 - RNA, 32 nt, Homo Sapiens
ggcagcggaaggcggcagaggcugggaggcgg

SEQ ID NO: 233221 - RNA, 32 nt, Homo Sapiens
aagaagcaaaaauuuuugaaauuucaaaugag

SEQ ID NO: 233222 - RNA, 32 nt, Homo Sapiens
gguacggcagagcccggggccggcgcuggcgc

SEQ ID NO: 233223 - RNA, 32 nt, Homo Sapiens
cagggacagaucugaugaucccaggaggcucu

SEQ ID NO: 233224 - RNA, 32 nt, Homo Sapiens
ggaaucuugacauguggggucugucuuugaga

SEQ ID NO: 233225 - RNA, 32 nt, Homo Sapiens
aacaugguacccacaacuuugguuucuuauca

SEQ ID NO: 233226 - RNA, 32 nt, Homo Sapiens
gauaggacaaaggcccuggcugugcccaaaag

SEQ ID NO: 233227 - RNA, 32 nt, Homo Sapiens
caagauggaagacauugucugcuugaacucug

SEQ ID NO: 233228 - RNA, 32 nt, Homo Sapiens
caugcuuuucuuuuucuaauaaaccagggucc

SEQ ID NO: 233229 - RNA, 32 nt, Homo Sapiens
gcccccugcuuguggugcaggggggugccauu

SEQ ID NO: 233230 - RNA, 32 nt, Homo Sapiens
auacauucagacguuuuuucugcacaauaaua

SEQ ID NO: 233231 - RNA, 32 nt, Homo Sapiens
gguauauccuguguacuaauucuuugucauuu

SEQ ID NO: 233232 - RNA, 32 nt, Homo Sapiens
cacucgccccuggccucgcgggccgugucucc

SEQ ID NO: 233233 - RNA, 32 nt, Homo Sapiens
ugugaagaaauaaguauccaguacuuuauaac

SEQ ID NO: 233234 - RNA, 32 nt, Homo Sapiens
cucaaccuaccaccccuuccugucccaccucu

SEQ ID NO: 233235 - RNA, 32 nt, Homo Sapiens
ucaaguuggagaaaauagugggaaauagaaaa

SEQ ID NO: 233236 - RNA, 32 nt, Homo Sapiens
cauaaggagucagauuaucuuuaauuuaaaau

SEQ ID NO: 233237 - RNA, 32 nt, Homo Sapiens
gcuacggucaacauggaucuagcucaggucau

SEQ ID NO: 233238 - RNA, 32 nt, Homo Sapiens
guuuugcacugggaagaaaauauuuuguaaaa

SEQ ID NO: 233239 - RNA, 32 nt, Homo Sapiens
cggcugcagcgggcugcguggggccacucuga

SEQ ID NO: 233240 - RNA, 32 nt, Homo Sapiens
uggcuaauaauguugguggugaaaauaaauaa

SEQ ID NO: 233241 - RNA, 32 nt, Homo Sapiens
ucgggcgcccucugcccgcccccucccacacc

SEQ ID NO: 233242 - RNA, 32 nt, Homo Sapiens
auccaacucugacuucggaggcauucccagcc

SEQ ID NO: 233243 - RNA, 32 nt, Homo Sapiens
caauucaggaccaaauuuuuucucagugugug

SEQ ID NO: 233244 - RNA, 32 nt, Homo Sapiens
uuccuaguucccuucuaaaacuuagaaggacc

SEQ ID NO: 233245 - RNA, 32 nt, Homo Sapiens
gccugcggcaggcugccagccauccaugacaa

SEQ ID NO: 233246 - RNA, 32 nt, Homo Sapiens
ugcugauaucucuggaaccagagcagcccugg

SEQ ID NO: 233247 - RNA, 32 nt, Homo Sapiens
cuuuuaaauuaccugggaaaucuuaacagaaa

SEQ ID NO: 233248 - RNA, 32 nt, Homo Sapiens
agaaaucuauagaacugaaugagaaccaacaa

SEQ ID NO: 233249 - RNA, 32 nt, Homo Sapiens
gcguucagggaaagucuacuguaucugaacaa

SEQ ID NO: 233250 - RNA, 32 nt, Homo Sapiens
agcgccgcgccaagccgcgcccggcuccgcuc

SEQ ID NO: 233251 - RNA, 32 nt, Homo Sapiens
gagacauggaccagcaucuggucuuguuucca

SEQ ID NO: 233252 - RNA, 32 nt, Homo Sapiens
ccuggaaacaaauccgccuauguaugaagcua

SEQ ID NO: 233253 - RNA, 32 nt, Homo Sapiens
caccuccugccagcaccuugccuggccccucc

SEQ ID NO: 233254 - RNA, 32 nt, Homo Sapiens
accaucuuuccucuccuuuccaaagcucuuuc

SEQ ID NO: 233255 - RNA, 32 nt, Homo Sapiens
uucaucauagggauaagauuuuuuguaggcac

SEQ ID NO: 233256 - RNA, 32 nt, Homo Sapiens
acaacccaaacuggaugucaagcaaaaugcac

SEQ ID NO: 233257 - RNA, 32 nt, Homo Sapiens
aagcauuugauuauuuuuuuuaaauacacucu

SEQ ID NO: 233258 - RNA, 32 nt, Homo Sapiens
uuacucaaacuccuaacagcaagucgcuucaa

SEQ ID NO: 233259 - RNA, 32 nt, Homo Sapiens
gaagagaggguggccucgacaucaaacugccu

SEQ ID NO: 233260 - RNA, 32 nt, Homo Sapiens
cuguuggaugucuagaacuucucuauuuaaaa

SEQ ID NO: 233261 - RNA, 32 nt, Homo Sapiens
ggggccugucuccagggcucaugauagcagau

SEQ ID NO: 233262 - RNA, 32 nt, Homo Sapiens
ccacccccguuugcugggggcuccuccagccg

SEQ ID NO: 233263 - RNA, 32 nt, Homo Sapiens
gcacauucacugacaugauauuauuugcagau

SEQ ID NO: 233264 - RNA, 32 nt, Homo Sapiens
uccucuccgccucuccuccccagccggccccg

SEQ ID NO: 233265 - RNA, 32 nt, Homo Sapiens
gcauugauauugugaaaauaagugcaauuugg

SEQ ID NO: 233266 - RNA, 32 nt, Homo Sapiens
gagaagguugucagcuucccacugcuaggugg

SEQ ID NO: 233267 - RNA, 32 nt, Homo Sapiens
auauggaaacuucuuuccuuuuuguagggcca

SEQ ID NO: 233268 - RNA, 32 nt, Homo Sapiens
aacagguauuuuguuucuuuuaaagcaagcaa

SEQ ID NO: 233269 - RNA, 32 nt, Homo Sapiens
caauuuugucgcacucuccuuguuuuugacaa

SEQ ID NO: 233270 - RNA, 32 nt, Homo Sapiens
aaggcucgguccagcccaguaccgcuggaagu

SEQ ID NO: 233271 - RNA, 32 nt, Homo Sapiens
aacauuggguccugggucuuucauggggugau

SEQ ID NO: 233272 - RNA, 32 nt, Homo Sapiens
ccccucccucgucccacccccacccaggcagg

SEQ ID NO: 233273 - RNA, 30 nt, Homo Sapiens
uuuggaggagguggcagcccagcucccagu

SEQ ID NO: 233274 - RNA, 32 nt, Homo Sapiens
aauacaaaacaaaagcgauaaaauaaaagcga

SEQ ID NO: 233275 - RNA, 32 nt, Homo Sapiens
gcaccccacccuccccaccagugcaacagaaa

SEQ ID NO: 233276 - RNA, 32 nt, Homo Sapiens
uaaaauauaugcaacuauaaaauaucagagaa

SEQ ID NO: 233277 - RNA, 32 nt, Homo Sapiens
caccguggugcacgcaaaccacuuccuggcca

SEQ ID NO: 233278 - RNA, 32 nt, Homo Sapiens
uugugaaucaaagauagcacagaaaugaacua

SEQ ID NO: 233279 - RNA, 32 nt, Homo Sapiens
gcucccaccccuccccucucacgggcucuccc

SEQ ID NO: 233280 - RNA, 32 nt, Homo Sapiens
gacuuuugauaaaugauuuaaccauugcccuc

SEQ ID NO: 233281 - RNA, 32 nt, Homo Sapiens
acugagggcuacuuuuggaaagagggacugau

SEQ ID NO: 233282 - RNA, 32 nt, Homo Sapiens
auuuuacuuaaauuuuauuuuaucuuauuuuu

SEQ ID NO: 233283 - RNA, 32 nt, Homo Sapiens
uuucacacacucauuuugaggaccccagguuc

SEQ ID NO: 233284 - RNA, 32 nt, Homo Sapiens
gcguucucagcuugcuuaaccauuccucuacc

SEQ ID NO: 233285 - RNA, 32 nt, Homo Sapiens
uuaccaagugcuuagaacuugcuggcuuuccc

SEQ ID NO: 233286 - RNA, 32 nt, Homo Sapiens
gcuuguggcaguggaaauauggcugaaugagu

SEQ ID NO: 233287 - RNA, 32 nt, Homo Sapiens
auugacaaugaaaguuagaugaacaagguccg

SEQ ID NO: 233288 - RNA, 32 nt, Homo Sapiens
accacugccuucccuucuagcccaggagaaug

SEQ ID NO: 233289 - RNA, 32 nt, Homo Sapiens
aacggucacuauuuauucuuuguuccuuuuuc

SEQ ID NO: 233290 - RNA, 32 nt, Homo Sapiens
acuugcagcucaccuauuaccaaaaacugacu

SEQ ID NO: 233291 - RNA, 32 nt, Homo Sapiens
cggaggcgugggggccucgaggggcuggcgcg

SEQ ID NO: 233292 - RNA, 32 nt, Homo Sapiens
uuuaauuuguugcuaaagaaauaaugcccugg

SEQ ID NO: 233293 - RNA, 29 nt, Homo Sapiens
uaauuuauaugggagugaaacccuacaaa

SEQ ID NO: 233294 - RNA, 32 nt, Homo Sapiens
uuggguuuguaaaauaaagugagauagcaucc

SEQ ID NO: 233295 - RNA, 32 nt, Homo Sapiens
uagagaacgagcgggucaggcucagcgucggc

SEQ ID NO: 233296 - RNA, 31 nt, Homo Sapiens
gcgaccggggcggugguuggcggcuacggac

SEQ ID NO: 233297 - RNA, 32 nt, Homo Sapiens
cgacagccuccgagcgcccccggaucauggcc

SEQ ID NO: 233298 - RNA, 32 nt, Homo Sapiens
gcuccaacgauccuccugccccggccuccuga

SEQ ID NO: 233299 - RNA, 32 nt, Homo Sapiens
cuauggagaagucagcagcaggaggcccaucc

SEQ ID NO: 233300 - RNA, 32 nt, Homo Sapiens
uuaaauuuggacuauaauguccuugcuuuauu

SEQ ID NO: 233301 - RNA, 32 nt, Homo Sapiens
guugcuuccgugcugcuucucuaagggcgcuu

SEQ ID NO: 233302 - RNA, 32 nt, Homo Sapiens
uuuacauagauaaacuuauuuaccaaaguaaa

SEQ ID NO: 233303 - RNA, 30 nt, Homo Sapiens
ggauagcgcaggaaggugggucccggcaac

SEQ ID NO: 233304 - RNA, 32 nt, Homo Sapiens
gguuccccacagugacagucacuuccuucagc

SEQ ID NO: 233305 - RNA, 32 nt, Homo Sapiens
gugccuggauacaaaaucacacuguguaccaa

SEQ ID NO: 233306 - RNA, 32 nt, Homo Sapiens
auccuucccuuugcccucccccagugggagag

SEQ ID NO: 233307 - RNA, 32 nt, Homo Sapiens
caaugcaucuucuacccugcuaccucagugau

SEQ ID NO: 233308 - RNA, 32 nt, Homo Sapiens
gccacgcccagcugauuuuuuauauuuuagua

SEQ ID NO: 233309 - RNA, 32 nt, Homo Sapiens
ugaauaacccaguuuaaaaagaguccaguuag

SEQ ID NO: 233310 - RNA, 32 nt, Homo Sapiens
cgagguucccccugugucgucccccauccccc

SEQ ID NO: 233311 - RNA, 32 nt, Homo Sapiens
gaguacauuugaauugaauauauaauaaauau

SEQ ID NO: 233312 - RNA, 32 nt, Homo Sapiens
uucuuuaacaaaaaugaaauaaaccagguguc

SEQ ID NO: 233313 - RNA, 31 nt, Homo Sapiens
caucacuggcacugccugccuugggacccgc

SEQ ID NO: 233314 - RNA, 32 nt, Homo Sapiens
aaacagcagacaccuccacgcuuuguuuucca

SEQ ID NO: 233315 - RNA, 32 nt, Homo Sapiens
auaauagaaauucuguuuuguuuucugugguu

SEQ ID NO: 233316 - RNA, 32 nt, Homo Sapiens
gaagagaaacaguacaaaugugaugaaugugg

SEQ ID NO: 233317 - RNA, 32 nt, Homo Sapiens
cgaucuuucuaaaauacaguucugaauaugcu

SEQ ID NO: 233318 - RNA, 32 nt, Homo Sapiens
uucagaaacccggcuuccugugcuaagucuuu

SEQ ID NO: 233319 - RNA, 32 nt, Homo Sapiens
ugcggcagccucuggugacgugcuguccacca

SEQ ID NO: 233320 - RNA, 32 nt, Homo Sapiens
gaaaagcaagauacaaaauagcguauggaguc

SEQ ID NO: 233321 - RNA, 32 nt, Homo Sapiens
agcaguguccccagccuagcccugugagaccc

SEQ ID NO: 233322 - RNA, 32 nt, Homo Sapiens
cgggugggagggacagggagggaccaauaaau

SEQ ID NO: 233323 - RNA, 32 nt, Homo Sapiens
ggaaggaguuugggguucuuccuggugcaggg

SEQ ID NO: 233324 - RNA, 32 nt, Homo Sapiens
cuccucauaaaaauaaaugaaaaaaugggaua

SEQ ID NO: 233325 - RNA, 32 nt, Homo Sapiens
caggaagaguuuucaaaaagcuuauugcucaa

SEQ ID NO: 233326 - RNA, 32 nt, Homo Sapiens
ggaaccugcacauauccaggauauguguaacc

SEQ ID NO: 233327 - RNA, 32 nt, Homo Sapiens
gagagguuccggagccccggcgcgggcggguu

SEQ ID NO: 233328 - RNA, 32 nt, Homo Sapiens
acucugaccugaacugugucucuucuuaguuc

SEQ ID NO: 233329 - RNA, 32 nt, Homo Sapiens
accgaccggggcgucaggaucccuggcccccg

SEQ ID NO: 233330 - RNA, 32 nt, Homo Sapiens
auccaggacguggcccggggccaccagucccc

SEQ ID NO: 233331 - RNA, 32 nt, Homo Sapiens
gaguccugcccugggagggaagcuggauucua

SEQ ID NO: 233332 - RNA, 32 nt, Homo Sapiens
cugcucucaggcgcuucuccaaugcucuggag

SEQ ID NO: 233333 - RNA, 32 nt, Homo Sapiens
gugucauauuuuacuaagauuuugugccucau

SEQ ID NO: 233334 - RNA, 32 nt, Homo Sapiens
cgcgagcgucuggccuguguuggcuguaggca

SEQ ID NO: 233335 - RNA, 32 nt, Homo Sapiens
auguuaaaacaauuuuaaaaucuuaaaauggc

SEQ ID NO: 233336 - RNA, 32 nt, Homo Sapiens
ucccccaacucuuuucagcagugguggcugcc

SEQ ID NO: 233337 - RNA, 32 nt, Homo Sapiens
cuuuguacgcaucggaugucucuccguguagu

SEQ ID NO: 233338 - RNA, 32 nt, Homo Sapiens
gucaugugagauuugucuuacuuauuuuucuu

SEQ ID NO: 233339 - RNA, 32 nt, Homo Sapiens
gaguucccgcacgccgcagagccauggagauc

SEQ ID NO: 233340 - RNA, 32 nt, Homo Sapiens
ucaaagugggguacaguaaagaggcuuccaag

SEQ ID NO: 233341 - RNA, 32 nt, Homo Sapiens
uugguuuccuuccugugucccuuugcaagcuu

SEQ ID NO: 233342 - RNA, 32 nt, Homo Sapiens
ugccggcugggggcggagaggcggcggugggc

SEQ ID NO: 233343 - RNA, 32 nt, Homo Sapiens
aaaagaucacugaaacaucacgucaaguugaa

SEQ ID NO: 233344 - RNA, 32 nt, Homo Sapiens
aaagugcaagcacuuuuccauuuuacaguauu

SEQ ID NO: 233345 - RNA, 32 nt, Homo Sapiens
gugccugcccugggcucuggaccccgggcaca

SEQ ID NO: 233346 - RNA, 32 nt, Homo Sapiens
ugcggagggucccccagugcagugccauccac

SEQ ID NO: 233347 - RNA, 32 nt, Homo Sapiens
uguugaaauuuuuguuuuuuuaccuuuauuga

SEQ ID NO: 233348 - RNA, 32 nt, Homo Sapiens
gcccgacucggcagcagcggcggaguccagga

SEQ ID NO: 233349 - RNA, 32 nt, Homo Sapiens
cacugcacuccagcccaggugacagagcgaga

SEQ ID NO: 233350 - RNA, 32 nt, Homo Sapiens
guacagguggcaguugcagagccgugggcugu

SEQ ID NO: 233351 - RNA, 32 nt, Homo Sapiens
ccaaaugaucuucccaccccagccuucugagu

SEQ ID NO: 233352 - RNA, 32 nt, Homo Sapiens
gcgccgguccugcggcagcuggcccaagaccc

SEQ ID NO: 233353 - RNA, 32 nt, Homo Sapiens
aaagggaagcagaacugagggcugggauauuc

SEQ ID NO: 233354 - RNA, 32 nt, Homo Sapiens
acuuagaauggaggccaaaaccauucccucgg

SEQ ID NO: 233355 - RNA, 32 nt, Homo Sapiens
gcugcuguccagugagcagccgggccagagcu

SEQ ID NO: 233356 - RNA, 32 nt, Homo Sapiens
gaugggaggauacuugaauccaggcauuugag

SEQ ID NO: 233357 - RNA, 32 nt, Homo Sapiens
gauacccgaccuggucucugucuucaaagcca

SEQ ID NO: 233358 - RNA, 32 nt, Homo Sapiens
ccucugggacacggcaccccccugggccugga

SEQ ID NO: 233359 - RNA, 32 nt, Homo Sapiens
accuguuacucggccucccagaaagauggaua

SEQ ID NO: 233360 - RNA, 32 nt, Homo Sapiens
uucuccuaugucagccucccaaguagcuggga

SEQ ID NO: 233361 - RNA, 32 nt, Homo Sapiens
aagauguuccacgcugccuccuccucgaguuu

SEQ ID NO: 233362 - RNA, 32 nt, Homo Sapiens
uuaauuugaagaaugaauauuuaaauucucuc

SEQ ID NO: 233363 - RNA, 32 nt, Homo Sapiens
guuuuggaaccuuaccucuccuccuuagccca

SEQ ID NO: 233364 - RNA, 32 nt, Homo Sapiens
acgcgcggcgcauucagguucuccuggaccgu

SEQ ID NO: 233365 - RNA, 32 nt, Homo Sapiens
acuugaaaacaguaaaucugcagauacuguga

SEQ ID NO: 233366 - RNA, 32 nt, Homo Sapiens
cuucuagcagaaaaaugcagggagagucaagu

SEQ ID NO: 233367 - RNA, 32 nt, Homo Sapiens
ccccaccuaaaaagaccaagcauugugcccaa

SEQ ID NO: 233368 - RNA, 32 nt, Homo Sapiens
gcacauucuccugccauuuguaaaaugggaau

SEQ ID NO: 233369 - RNA, 32 nt, Homo Sapiens
aguaaacucagcagauagagccaggcugcauc

SEQ ID NO: 233370 - RNA, 32 nt, Homo Sapiens
gccccacccgcaccccaucuggaccgcaucgc

SEQ ID NO: 233371 - RNA, 32 nt, Homo Sapiens
augccuucccagacuggccuguugcuguuucc

SEQ ID NO: 233372 - RNA, 32 nt, Homo Sapiens
ugucccacuuggcaucagcuggcgucaugcaa

SEQ ID NO: 233373 - RNA, 32 nt, Homo Sapiens
uagcuuccaaauaaaguauauuuuguucugaa

SEQ ID NO: 233374 - RNA, 32 nt, Homo Sapiens
ggcccccaggaugccccuccccagucacagcc

SEQ ID NO: 233375 - RNA, 32 nt, Homo Sapiens
uccagaaaagcccaccacagggcugcaucaac

SEQ ID NO: 233376 - RNA, 32 nt, Homo Sapiens
ccaugcugggucaaugaacagcaucaaaggga

SEQ ID NO: 233377 - RNA, 32 nt, Homo Sapiens
uccucuuguuugucaucuuauuuugggugcug

SEQ ID NO: 233378 - RNA, 32 nt, Homo Sapiens
gguaauggaagcuguaaugaccaaguccccua

SEQ ID NO: 233379 - RNA, 32 nt, Homo Sapiens
cccagcccgccccuccucccggcacucccuaa

SEQ ID NO: 233380 - RNA, 32 nt, Homo Sapiens
acacuggaaaacaguaagagaggagagaaaga

SEQ ID NO: 233381 - RNA, 32 nt, Homo Sapiens
ccucuagcuuucaugucuuguuuuugcuuucc

SEQ ID NO: 233382 - RNA, 29 nt, Homo Sapiens
uagaggcguguucucaguuuagcaggcug

SEQ ID NO: 233383 - RNA, 32 nt, Homo Sapiens
gcucuuuccuuccucacugguacugccugcug

SEQ ID NO: 233384 - RNA, 32 nt, Homo Sapiens
uacaugaaaauauuguuuucuuuuuugcuucc

SEQ ID NO: 233385 - RNA, 32 nt, Homo Sapiens
acuacacuuuguagaauugauuagauuaccuu

SEQ ID NO: 233386 - RNA, 32 nt, Homo Sapiens
gaguacugcauuucuucuuacucucaaagcau

SEQ ID NO: 233387 - RNA, 32 nt, Homo Sapiens
ccuccucuucuccucaccgcauuccaccugca

SEQ ID NO: 233388 - RNA, 26 nt, Homo Sapiens
gauggaggagguggaccugcaggacc

SEQ ID NO: 233389 - RNA, 32 nt, Homo Sapiens
gacgugcggccgcggacugggacuuggcuuuc

SEQ ID NO: 233390 - RNA, 32 nt, Homo Sapiens
uccccaaauauuagagugagaccaucuggaau

SEQ ID NO: 233391 - RNA, 32 nt, Homo Sapiens
aguaacauucuucaccgaaauagaaaaaauaa

SEQ ID NO: 233392 - RNA, 32 nt, Homo Sapiens
auucuccugugcuagaugugcaaaugcaagcu

SEQ ID NO: 233393 - RNA, 32 nt, Homo Sapiens
guuucaguccagaaagaacuucauauuuagag

SEQ ID NO: 233394 - RNA, 32 nt, Homo Sapiens
ucugguccgccgagcaggccggagcuauuggg

SEQ ID NO: 233395 - RNA, 32 nt, Homo Sapiens
ucgcaccagguggacgcggaucugucaacaug

SEQ ID NO: 233396 - RNA, 32 nt, Homo Sapiens
cgugacccagcugcggccggccagccauggag

SEQ ID NO: 233397 - RNA, 32 nt, Homo Sapiens
agaaauuuucccuuuuuaauugccucuauagc

SEQ ID NO: 233398 - RNA, 32 nt, Homo Sapiens
agccggggcagcucgggaaggcccugacaagc

SEQ ID NO: 233399 - RNA, 32 nt, Homo Sapiens
cgccgcgcuugucgucgccgcagccgggaucc

SEQ ID NO: 233400 - RNA, 32 nt, Homo Sapiens
gucaacuccccuccccuugcccaaguaugaaa

SEQ ID NO: 233401 - RNA, 32 nt, Homo Sapiens
aggcugcugcucguugcggagaugaacagcag

SEQ ID NO: 233402 - RNA, 32 nt, Homo Sapiens
aguuuggguucaauagcauuuuaugauucuac

SEQ ID NO: 233403 - RNA, 32 nt, Homo Sapiens
ccccagaagcaaacagcagagguagaagauau

SEQ ID NO: 233404 - RNA, 32 nt, Homo Sapiens
caucugggacaaagcgccaccugccugucacc

SEQ ID NO: 233405 - RNA, 32 nt, Homo Sapiens
aaauagcuuugaccuuauagacuuccugauag

SEQ ID NO: 233406 - RNA, 32 nt, Homo Sapiens
gaaauguaugauauuuuaaccaauugaagaaa

SEQ ID NO: 233407 - RNA, 32 nt, Homo Sapiens
cauacuagugagaaaccacgugaauguaauga

SEQ ID NO: 233408 - RNA, 30 nt, Homo Sapiens
aggccucuggacuggccugucuggccccug

SEQ ID NO: 233409 - RNA, 32 nt, Homo Sapiens
cuuucuuuggucacauaauauuaaauuuuaca

SEQ ID NO: 233410 - RNA, 32 nt, Homo Sapiens
cccuauuucaugguauuguuuaaacuuuaaaa

SEQ ID NO: 233411 - RNA, 32 nt, Homo Sapiens
ccaggacccuaugauauuucucuucuuucguu

SEQ ID NO: 233412 - RNA, 32 nt, Homo Sapiens
gaugugucacccaaauaccaguggggacgguc

SEQ ID NO: 233413 - RNA, 32 nt, Homo Sapiens
ggguccucugcgcguucccgggcccggaaccg

SEQ ID NO: 233414 - RNA, 32 nt, Homo Sapiens
gagcccuggagaccccaccagccucaccagcg

SEQ ID NO: 233415 - RNA, 32 nt, Homo Sapiens
accaggcuuugcugaggugcugcccaaccuga

SEQ ID NO: 233416 - RNA, 32 nt, Homo Sapiens
uuugggggaacaaaauagucagggauauuggu

SEQ ID NO: 233417 - RNA, 32 nt, Homo Sapiens
agggcacucgccuucugccuucugguuccuca

SEQ ID NO: 233418 - RNA, 32 nt, Homo Sapiens
uauguuauaggccuuugaaauggauacaugaa

SEQ ID NO: 233419 - RNA, 32 nt, Homo Sapiens
accacucggacccccaccccugcccgccaagc

SEQ ID NO: 233420 - RNA, 32 nt, Homo Sapiens
gaaagaaggaagaaugucuucgaauauugugu

SEQ ID NO: 233421 - RNA, 32 nt, Homo Sapiens
ugcccgcggagagagcgcggcgcgggaggccg

SEQ ID NO: 233422 - RNA, 32 nt, Homo Sapiens
aaaauagagauggggucucaccauguuaccca

SEQ ID NO: 233423 - RNA, 32 nt, Homo Sapiens
gccucuugcauucggcuuccuuggagcagccu

SEQ ID NO: 233424 - RNA, 32 nt, Homo Sapiens
aaauggggaagaauuaggaaauaaucauguug

SEQ ID NO: 233425 - RNA, 32 nt, Homo Sapiens
uggggagaacagagaguagcuguguuugaauc

SEQ ID NO: 233426 - RNA, 32 nt, Homo Sapiens
ucuugacuuuugugcaucuucaugcucaacac

SEQ ID NO: 233427 - RNA, 32 nt, Homo Sapiens
ugcugcaggugcuggcuggaccccgcugggcc

SEQ ID NO: 233428 - RNA, 32 nt, Homo Sapiens
ucugaugauauuaaaaguugaagauauuucug

SEQ ID NO: 233429 - RNA, 32 nt, Homo Sapiens
cuggcuuuacguguugucauuauuagcauuau

SEQ ID NO: 233430 - RNA, 32 nt, Homo Sapiens
uguagagggacugaaaauauuuauuuuguuau

SEQ ID NO: 233431 - RNA, 32 nt, Homo Sapiens
aauaauuuguuuaaaauaaccaaagaguuguu

SEQ ID NO: 233432 - RNA, 32 nt, Homo Sapiens
gcuuucaucaacuaaauaaccacagaaaauau

SEQ ID NO: 233433 - RNA, 32 nt, Homo Sapiens
acucgcagggugaacaaaaugugauaucagaa

SEQ ID NO: 233434 - RNA, 30 nt, Homo Sapiens
augcccucagccaugggggaaucugucccg

SEQ ID NO: 233435 - RNA, 32 nt, Homo Sapiens
cgaggguguccgccggccccagcacccagggg

SEQ ID NO: 233436 - RNA, 32 nt, Homo Sapiens
uggucuuggggauuggccagagggaaagguuu

SEQ ID NO: 233437 - RNA, 32 nt, Homo Sapiens
gggcaccuacacgugugcacuccaccacucug

SEQ ID NO: 233438 - RNA, 32 nt, Homo Sapiens
gcagcaucaaucgcagaccugcccugccucag

SEQ ID NO: 233439 - RNA, 32 nt, Homo Sapiens
guaauguguacuuuucuuaugauaagaucacu

SEQ ID NO: 233440 - RNA, 32 nt, Homo Sapiens
cugcuuguauuugugauauuucauuugcuuaa

SEQ ID NO: 233441 - RNA, 32 nt, Homo Sapiens
agaaaucuuuuuuauagguuaguuuuacugaa

SEQ ID NO: 233442 - RNA, 29 nt, Homo Sapiens
augccugugacuuuuuaacuuggggggug

SEQ ID NO: 233443 - RNA, 29 nt, Homo Sapiens
cauguggggaccagaacacacugauggag

SEQ ID NO: 233444 - RNA, 32 nt, Homo Sapiens
ugaguggacuguaucauuugcuauucuaaacc

SEQ ID NO: 233445 - RNA, 32 nt, Homo Sapiens
cugccgccaccgccgugccgccgccauccgcc

SEQ ID NO: 233446 - RNA, 32 nt, Homo Sapiens
aggggggaaggguaaaccaguagggaauacag

SEQ ID NO: 233447 - RNA, 32 nt, Homo Sapiens
cugcuaagcuaaagaaacugcuuacaguuuau

SEQ ID NO: 233448 - RNA, 31 nt, Homo Sapiens
aacaauucuuuuuggggguagauuagaaaac

SEQ ID NO: 233449 - RNA, 32 nt, Homo Sapiens
gcccccagaaaagaaagggaagaacugccuuc

SEQ ID NO: 233450 - RNA, 32 nt, Homo Sapiens
uggucugcacuuagccucucccuuccuaauuu

SEQ ID NO: 233451 - RNA, 32 nt, Homo Sapiens
gcccacugcggaagagggcagcccggcaagcc

SEQ ID NO: 233452 - RNA, 32 nt, Homo Sapiens
cuguccuucauugugucuuuucugccucuguc

SEQ ID NO: 233453 - RNA, 32 nt, Homo Sapiens
ggugccugucuucgcccaccugagcauccucc

SEQ ID NO: 233454 - RNA, 32 nt, Homo Sapiens
ugaggccggcgccgagccggacuucaggcgga

SEQ ID NO: 233455 - RNA, 31 nt, Homo Sapiens
gccugggagccccacaccaccgggccagugc

SEQ ID NO: 233456 - RNA, 32 nt, Homo Sapiens
auuguaugugucaagaauuacucuguuguuca

SEQ ID NO: 233457 - RNA, 32 nt, Homo Sapiens
uaagacguccacuagaaauagcuuguccuguc

SEQ ID NO: 233458 - RNA, 32 nt, Homo Sapiens
cuguuuccaaaaaccaguguaguaggauaggg

SEQ ID NO: 233459 - RNA, 32 nt, Homo Sapiens
guuggcaccauuauaagcuauaagguucagaa

SEQ ID NO: 233460 - RNA, 32 nt, Homo Sapiens
gaagugcccgugguuccuggggccuggaagug

SEQ ID NO: 233461 - RNA, 32 nt, Homo Sapiens
cuuuucauuacaucagguauauugcccuguaa

SEQ ID NO: 233462 - RNA, 32 nt, Homo Sapiens
gggaugguguggcgcuccugccguggguguug

SEQ ID NO: 233463 - RNA, 32 nt, Homo Sapiens
aagagcuucucuccagaguagaaagauuuauu

SEQ ID NO: 233464 - RNA, 32 nt, Homo Sapiens
ggccuggcgggggcauccggcggagcuggggu

SEQ ID NO: 233465 - RNA, 32 nt, Homo Sapiens
uucccccgcaugcugaucccccugcccaggug

SEQ ID NO: 233466 - RNA, 32 nt, Homo Sapiens
aauacacaagguguaaaaaugauaaaauacua

SEQ ID NO: 233467 - RNA, 32 nt, Homo Sapiens
acuuuggagucuuuucucugaagucaccaggc

SEQ ID NO: 233468 - RNA, 32 nt, Homo Sapiens
acauucucucuaaauguauggaaugugggaaa

SEQ ID NO: 233469 - RNA, 32 nt, Homo Sapiens
uccugaccucaggugaucugcccgccucagcc

SEQ ID NO: 233470 - RNA, 32 nt, Homo Sapiens
ccuucucuugaccccugagaacauacccacuu

SEQ ID NO: 233471 - RNA, 32 nt, Homo Sapiens
acucacuugggguggggaaaggagguaaagag

SEQ ID NO: 233472 - RNA, 32 nt, Homo Sapiens
gccagcucagccuuggcuuuuaacucaauauu

SEQ ID NO: 233473 - RNA, 31 nt, Homo Sapiens
cccgggaagccccagagcuuuccugaggcug

SEQ ID NO: 233474 - RNA, 32 nt, Homo Sapiens
augucacuacauaugaaaaaacaucaaaaaac

SEQ ID NO: 233475 - RNA, 32 nt, Homo Sapiens
agcuacaguggacaggcauuugugacagcacu

SEQ ID NO: 233476 - RNA, 32 nt, Homo Sapiens
guacugccccucagcagggaugacucaguacu

SEQ ID NO: 233477 - RNA, 32 nt, Homo Sapiens
cagcgcacccuccuccacggcucuggccacac

SEQ ID NO: 233478 - RNA, 32 nt, Homo Sapiens
cuguuacugugcaucucugggcauggccugug

SEQ ID NO: 233479 - RNA, 32 nt, Homo Sapiens
uuguuugacaguguuauuuauguuauuuauau

SEQ ID NO: 233480 - RNA, 32 nt, Homo Sapiens
augaaaaugcccaugaauccucuugcuuuuuu

SEQ ID NO: 233481 - RNA, 32 nt, Homo Sapiens
guaagcagcuccgaauuuuuaccuggaauauu

SEQ ID NO: 233482 - RNA, 32 nt, Homo Sapiens
gucugagcgugcgggcgacgcgggucucacuc

SEQ ID NO: 233483 - RNA, 32 nt, Homo Sapiens
caaacugggugccugcccuucuaggaaugggg

SEQ ID NO: 233484 - RNA, 32 nt, Homo Sapiens
cucgcucgccucccagcccgcggcccgagccg

SEQ ID NO: 233485 - RNA, 32 nt, Homo Sapiens
cggcuguccccuccccagcccagccgcccagc

SEQ ID NO: 233486 - RNA, 32 nt, Homo Sapiens
cuucccuauuucgcuuucuccucggcucacuu

SEQ ID NO: 233487 - RNA, 32 nt, Homo Sapiens
aagauguacuauaacauagaauugcaaucuau

SEQ ID NO: 233488 - RNA, 32 nt, Homo Sapiens
gcgggcagcccaggcuccugcuguucuugggc

SEQ ID NO: 233489 - RNA, 32 nt, Homo Sapiens
cccugcacuccucuucucccagcccaucccuc

SEQ ID NO: 233490 - RNA, 32 nt, Homo Sapiens
cucagagcugcuuucgggcgcagcuccugcug

SEQ ID NO: 233491 - RNA, 32 nt, Homo Sapiens
aacguuuuuuaaaaaacuacuuuuaauccaga

SEQ ID NO: 233492 - RNA, 32 nt, Homo Sapiens
ucagggccaagcgggggcguggcuggccuuuc

SEQ ID NO: 233493 - RNA, 32 nt, Homo Sapiens
guauauugagcagaaacugaauuaauaugcuu

SEQ ID NO: 233494 - RNA, 32 nt, Homo Sapiens
ucuguuugcauucuaagucuucaaagucuugu

SEQ ID NO: 233495 - RNA, 32 nt, Homo Sapiens
auccucugcacggcguucagggccgcggccuc

SEQ ID NO: 233496 - RNA, 32 nt, Homo Sapiens
uggguagcccaacuccucccucuccuugcucc

SEQ ID NO: 233497 - RNA, 32 nt, Homo Sapiens
auacaguacacuacaauuuagacuucuaguga

SEQ ID NO: 233498 - RNA, 32 nt, Homo Sapiens
ggcaguggcggcccggccugcaggagcccgac

SEQ ID NO: 233499 - RNA, 32 nt, Homo Sapiens
ggcagcaaggacccugugggcagccgggggca

SEQ ID NO: 233500 - RNA, 32 nt, Homo Sapiens
uccccuuugccaggcuuucucagaccaggccu

SEQ ID NO: 233501 - RNA, 32 nt, Homo Sapiens
cuucccuucucgcuugggaacucuagucucgc

SEQ ID NO: 233502 - RNA, 32 nt, Homo Sapiens
cuuaggucgcagcucacgcauugaaugcacac

SEQ ID NO: 233503 - RNA, 32 nt, Homo Sapiens
guggugaggauuagagauguauguaaaagugc

SEQ ID NO: 233504 - RNA, 32 nt, Homo Sapiens
acuauaacuuggauguuaauaauccugucacu

SEQ ID NO: 233505 - RNA, 32 nt, Homo Sapiens
cgcugcacuccagccugggugauagagcaaga

SEQ ID NO: 233506 - RNA, 32 nt, Homo Sapiens
guuggcaagagcugguauucccugcccagccg

SEQ ID NO: 233507 - RNA, 32 nt, Homo Sapiens
cacugcacuccagccugggugaaagagcuaga

SEQ ID NO: 233508 - RNA, 32 nt, Homo Sapiens
cacugcacuccagcgugggcuacagagugaaa

SEQ ID NO: 233509 - RNA, 32 nt, Homo Sapiens
uuuaaaagggauuguuucuggauuuguguuuu

SEQ ID NO: 233510 - RNA, 32 nt, Homo Sapiens
aaagaggaaaaauaaagauguugagcuaccaa

SEQ ID NO: 233511 - RNA, 32 nt, Homo Sapiens
uguuugguaguuguaacugcuaauaaaaccag

SEQ ID NO: 233512 - RNA, 32 nt, Homo Sapiens
aaaugcagaaguugaacagcuugcuugacaac

SEQ ID NO: 233513 - RNA, 32 nt, Homo Sapiens
agcuguggaugggguggugccuuggucucucu

SEQ ID NO: 233514 - RNA, 32 nt, Homo Sapiens
cuugguacagaaaauacaaagacaggacuaau

SEQ ID NO: 233515 - RNA, 32 nt, Homo Sapiens
aaaucagcagccugugcuagggaccagagcac

SEQ ID NO: 233516 - RNA, 32 nt, Homo Sapiens
guucauacugaaugaccacuugauaugacuaa

SEQ ID NO: 233517 - RNA, 32 nt, Homo Sapiens
cgucagccuuggagaugccaaagugaccagcc

SEQ ID NO: 233518 - RNA, 29 nt, Homo Sapiens
ugggcugaauguauguaaauagguuucua

SEQ ID NO: 233519 - RNA, 32 nt, Homo Sapiens
gggugcuggggucagacugccugaguguguac

SEQ ID NO: 233520 - RNA, 27 nt, Homo Sapiens
ugaaaauccucuagcagcccccgacuu

SEQ ID NO: 233521 - RNA, 32 nt, Homo Sapiens
acagaugcguucuuauuuuuugaaguugugug

SEQ ID NO: 233522 - RNA, 32 nt, Homo Sapiens
ccucgcgcugauucucacgggcccggcugccg

SEQ ID NO: 233523 - RNA, 32 nt, Homo Sapiens
uggcaacuuugaaaaugucuguacagccaaag

SEQ ID NO: 233524 - RNA, 32 nt, Homo Sapiens
auauuuauuuuuguuuuuguuggauagcuuuu

SEQ ID NO: 233525 - RNA, 32 nt, Homo Sapiens
ugauuuucuagauacacagucuaugcauuauu

SEQ ID NO: 233526 - RNA, 32 nt, Homo Sapiens
gagucuagcagucucagaauguucuccaggau

SEQ ID NO: 233527 - RNA, 32 nt, Homo Sapiens
cugaaauucuaguaaaaauaucucuaaguaaa

SEQ ID NO: 233528 - RNA, 32 nt, Homo Sapiens
aaccacaaaaagcaacagaaaauaucagaaga

SEQ ID NO: 233529 - RNA, 32 nt, Homo Sapiens
gacucuuuggagaaagaagauauuuuaaaaca

SEQ ID NO: 233530 - RNA, 32 nt, Homo Sapiens
gcaucgccgccgccagaggagaaaugucugaa

SEQ ID NO: 233531 - RNA, 32 nt, Homo Sapiens
auuuuaacauguuuuucugaaugaccagaugu

SEQ ID NO: 233532 - RNA, 32 nt, Homo Sapiens
gaagagcuaauagauacauaggccguaagcac

SEQ ID NO: 233533 - RNA, 32 nt, Homo Sapiens
acauugauucuauggaugaucauuuguaucau

SEQ ID NO: 233534 - RNA, 32 nt, Homo Sapiens
ucccccuucggucccgcuaggaccccguccgg

SEQ ID NO: 233535 - RNA, 32 nt, Homo Sapiens
uucugugugaagaucacguuccuucccccgca

SEQ ID NO: 233536 - RNA, 32 nt, Homo Sapiens
cuggaagauuuugguaaugauguugauaauuu

SEQ ID NO: 233537 - RNA, 32 nt, Homo Sapiens
gaaaugaagaauaccuaucuuaaaagguucuu

SEQ ID NO: 233538 - RNA, 27 nt, Homo Sapiens
gaggagucguauuucagccccacugag

SEQ ID NO: 233539 - RNA, 32 nt, Homo Sapiens
gggggcuggcuucgaggacgccgccugcucgc

SEQ ID NO: 233540 - RNA, 32 nt, Homo Sapiens
aaauucccaggagggucagagaagaccacggg

SEQ ID NO: 233541 - RNA, 32 nt, Homo Sapiens
augggaugcuccgacagcgucuccaauuauga

SEQ ID NO: 233542 - RNA, 32 nt, Homo Sapiens
agccaggccccggccccgucugggaagcucau

SEQ ID NO: 233543 - RNA, 32 nt, Homo Sapiens
auagggaauuuggaaguguaucaauaaaacag

SEQ ID NO: 233544 - RNA, 30 nt, Homo Sapiens
aacgaguuccucggcggcugcaggaugggg

SEQ ID NO: 233545 - RNA, 32 nt, Homo Sapiens
aggggcagaauaacccaaaguaacccuacaug

SEQ ID NO: 233546 - RNA, 32 nt, Homo Sapiens
auaaagccaaacuugcuggguuacauuccuug

SEQ ID NO: 233547 - RNA, 32 nt, Homo Sapiens
cuuaauaaauaaauuuggaacuauuauucaua

SEQ ID NO: 233548 - RNA, 32 nt, Homo Sapiens
auauauauguauauauugcauauucacuuuuu

SEQ ID NO: 233549 - RNA, 32 nt, Homo Sapiens
guucaagcgauucucccgccucaguagcuggg

SEQ ID NO: 233550 - RNA, 32 nt, Homo Sapiens
ggcucccuaccuuuuuuagggcucugcugguc

SEQ ID NO: 233551 - RNA, 32 nt, Homo Sapiens
ucacgcaucuggaagcuaaauugccuccugcc

SEQ ID NO: 233552 - RNA, 32 nt, Homo Sapiens
gaaagccacagcacguacacccacuccaggga

SEQ ID NO: 233553 - RNA, 32 nt, Homo Sapiens
cagugcagacacagaacauaucaucacugcag

SEQ ID NO: 233554 - RNA, 32 nt, Homo Sapiens
uauaaauugacauuguaauuguguacauaauu

SEQ ID NO: 233555 - RNA, 29 nt, Homo Sapiens
cucacuaugaagauuugaauaacuagaca

SEQ ID NO: 233556 - RNA, 32 nt, Homo Sapiens
ucuucauuuagugcuuugauaaugauuuacuu

SEQ ID NO: 233557 - RNA, 32 nt, Homo Sapiens
ccuuucaauguagcaaagcauuccuaguuaac

SEQ ID NO: 233558 - RNA, 32 nt, Homo Sapiens
gggaccagcccagcaagggucuuuggaccugg

SEQ ID NO: 233559 - RNA, 32 nt, Homo Sapiens
caggcaggagaugcugcaggcagguguccgua

SEQ ID NO: 233560 - RNA, 32 nt, Homo Sapiens
aagagcacccaccagcagaagacuuugcagaa

SEQ ID NO: 233561 - RNA, 32 nt, Homo Sapiens
aaguuaugcauuauuauaucaucaagauuaca

SEQ ID NO: 233562 - RNA, 32 nt, Homo Sapiens
gacagggcacgcuguggagccaggcagccucc

SEQ ID NO: 233563 - RNA, 32 nt, Homo Sapiens
gagcucuccccguucccccgccggccaugaac

SEQ ID NO: 233564 - RNA, 32 nt, Homo Sapiens
cacauauagagguacacaaacacaccgucaug

SEQ ID NO: 233565 - RNA, 32 nt, Homo Sapiens
gccuccugcccccgaggcccuacugcugcccc

SEQ ID NO: 233566 - RNA, 32 nt, Homo Sapiens
gggacggcucaguggcugcaccgacgguccug

SEQ ID NO: 233567 - RNA, 32 nt, Homo Sapiens
uacagaaacugagguucagagaagugaaguaa

SEQ ID NO: 233568 - RNA, 29 nt, Homo Sapiens
aguggggaauaaaaagccaaucauaauga

SEQ ID NO: 233569 - RNA, 32 nt, Homo Sapiens
ugguggugaugaugaugaugaugauggcagcu

SEQ ID NO: 233570 - RNA, 32 nt, Homo Sapiens
aacaaagaugcuauuuacccuuuacauuuuug

SEQ ID NO: 233571 - RNA, 32 nt, Homo Sapiens
acauuacuggagguuuuccggaggaagcuggg

SEQ ID NO: 233572 - RNA, 32 nt, Homo Sapiens
acccuaucccccagccuccccccugcccugaa

SEQ ID NO: 233573 - RNA, 32 nt, Homo Sapiens
uguguaacaccuuuuuuggcccauugggugcu

SEQ ID NO: 233574 - RNA, 32 nt, Homo Sapiens
ucaugaaaggacacaaacacacauaugcacuc

SEQ ID NO: 233575 - RNA, 32 nt, Homo Sapiens
ucuaggggcugcccggcccggcagagcggggu

SEQ ID NO: 233576 - RNA, 32 nt, Homo Sapiens
uaugaagaggaagaggcaccagaggguacaca

SEQ ID NO: 233577 - RNA, 32 nt, Homo Sapiens
uucuuuuuucuuucuuuuuuuuuuuuuuuuuu

SEQ ID NO: 233578 - RNA, 32 nt, Homo Sapiens
uguaauuuuuucugcaggaugaauuaagagaa

SEQ ID NO: 233579 - RNA, 32 nt, Homo Sapiens
cuugacucuucagaguucguaccucaaaagaa

SEQ ID NO: 233580 - RNA, 32 nt, Homo Sapiens
cuccgcccggguucccuacuccccucggguca

SEQ ID NO: 233581 - RNA, 32 nt, Homo Sapiens
cagggcuccccccaagccuacagggggcagcg

SEQ ID NO: 233582 - RNA, 32 nt, Homo Sapiens
uugauaagaacaagaacugcaguaguaacucc

SEQ ID NO: 233583 - RNA, 31 nt, Homo Sapiens
ugaggucauuaaaauuacauugagguuccua

SEQ ID NO: 233584 - RNA, 32 nt, Homo Sapiens
uaaaaauuugaaauauuagaauggccgaccau

SEQ ID NO: 233585 - RNA, 32 nt, Homo Sapiens
cucaacaucaaaugcucugaugugcuauagau

SEQ ID NO: 233586 - RNA, 32 nt, Homo Sapiens
uggaauuauaaauuauuuuuggauugcugagc

SEQ ID NO: 233587 - RNA, 32 nt, Homo Sapiens
gggagaugauccagagacauguggcagcaggc

SEQ ID NO: 233588 - RNA, 32 nt, Homo Sapiens
ucuucagcccuccccuucccagccccaaacug

SEQ ID NO: 233589 - RNA, 32 nt, Homo Sapiens
aagcacucuaauggauaacaauccaagaauaa

SEQ ID NO: 233590 - RNA, 32 nt, Homo Sapiens
gcccucucaauuccugauggaccuccuagugc

SEQ ID NO: 233591 - RNA, 32 nt, Homo Sapiens
gugcugcccgucugcaaccucaaggccucggc

SEQ ID NO: 233592 - RNA, 30 nt, Homo Sapiens
guacugcuaugucagaugcaaaaugucacc

SEQ ID NO: 233593 - RNA, 32 nt, Homo Sapiens
ugacacucaauugucugcaugcacuuuucaac

SEQ ID NO: 233594 - RNA, 32 nt, Homo Sapiens
ccccgccgcgcgccgcugaguugucuggcccc

SEQ ID NO: 233595 - RNA, 32 nt, Homo Sapiens
ugccccugaguucugacacuguguguuuggga

SEQ ID NO: 233596 - RNA, 32 nt, Homo Sapiens
cuguggucggccuggggucuccuugugagccu

SEQ ID NO: 233597 - RNA, 32 nt, Homo Sapiens
uaugaaaagacccuuaguaccaaauacacuca

SEQ ID NO: 233598 - RNA, 32 nt, Homo Sapiens
agaacuugucacuuuauauaaaagaauaguau

SEQ ID NO: 233599 - RNA, 32 nt, Homo Sapiens
auuuauagcuaauuuuagcuaucuguaaccaa

SEQ ID NO: 233600 - RNA, 32 nt, Homo Sapiens
gaugucacagaaauuaacagggcagccaauuc

SEQ ID NO: 233601 - RNA, 32 nt, Homo Sapiens
gauggacagacggaagguugguuagauuauga

SEQ ID NO: 233602 - RNA, 32 nt, Homo Sapiens
aauuacugaacauggacaaugugcaugucauu

SEQ ID NO: 233603 - RNA, 32 nt, Homo Sapiens
ucugcaucuaaauauugauuucacguuuuaaa

SEQ ID NO: 233604 - RNA, 32 nt, Homo Sapiens
uuggccccaucccccaccaccauuccuuuccu

SEQ ID NO: 233605 - RNA, 32 nt, Homo Sapiens
cucacccgcucccgaggaagggcagugggccc

SEQ ID NO: 233606 - RNA, 32 nt, Homo Sapiens
ccgcgggagaggaggagcaggcaacugaaccc

SEQ ID NO: 233607 - RNA, 32 nt, Homo Sapiens
gcuguggcucuucuggaucucuaggauauaac

SEQ ID NO: 233608 - RNA, 32 nt, Homo Sapiens
acagaugagucuuucaugcugugauuugggau

SEQ ID NO: 233609 - RNA, 32 nt, Homo Sapiens
cauagaaagaauuuauaugaaugucuauauuu

SEQ ID NO: 233610 - RNA, 27 nt, Homo Sapiens
ccugccuccugcuucagccucccgagg

SEQ ID NO: 233611 - RNA, 32 nt, Homo Sapiens
ugaagcugaggagagcacguugaucugaacuu

SEQ ID NO: 233612 - RNA, 32 nt, Homo Sapiens
accuaccugccagccuacagguggggccacua

SEQ ID NO: 233613 - RNA, 32 nt, Homo Sapiens
agaacguuguacauuuaagaagugauuccuuc

SEQ ID NO: 233614 - RNA, 32 nt, Homo Sapiens
accucucgccucuacguggcaccuggaauugg

SEQ ID NO: 233615 - RNA, 32 nt, Homo Sapiens
acggcggcggcaguggggcuccuccuucuguu

SEQ ID NO: 233616 - RNA, 30 nt, Homo Sapiens
cgugaucgagcgcagcacagacgggagcag

SEQ ID NO: 233617 - RNA, 32 nt, Homo Sapiens
gaaauaaaucauaccauugaauguagauaucc

SEQ ID NO: 233618 - RNA, 32 nt, Homo Sapiens
agagcucgaggggacaguguguuugagcugga

SEQ ID NO: 233619 - RNA, 32 nt, Homo Sapiens
auuuugcauuucaugcuaucagaaacaguauu

SEQ ID NO: 233620 - RNA, 32 nt, Homo Sapiens
uggugaggagauccuguuggacacccagugcc

SEQ ID NO: 233621 - RNA, 32 nt, Homo Sapiens
cuuccccccuccccaggcuucaguuccuuccc

SEQ ID NO: 233622 - RNA, 32 nt, Homo Sapiens
guaaauuucuuacuuucucugaaccuugaucc

SEQ ID NO: 233623 - RNA, 32 nt, Homo Sapiens
gaagaaagacaaagguuuaaaggucauagccu

SEQ ID NO: 233624 - RNA, 32 nt, Homo Sapiens
uugggaagggaagacaggguuaaggaacuuua

SEQ ID NO: 233625 - RNA, 32 nt, Homo Sapiens
auguccugcccuuugaacgcggcggcccggac

SEQ ID NO: 233626 - RNA, 32 nt, Homo Sapiens
ugcaucgcaccuauuuaagagggaacuuagca

SEQ ID NO: 233627 - RNA, 32 nt, Homo Sapiens
aaaccuggcuccuggggacggaugaggaagga

SEQ ID NO: 233628 - RNA, 32 nt, Homo Sapiens
ccauccugugcagcugacacacagcuaaggag

SEQ ID NO: 233629 - RNA, 32 nt, Homo Sapiens
ggccaggugcgguggcucacgcuugcaauccc

SEQ ID NO: 233630 - RNA, 32 nt, Homo Sapiens
ucuaaaacuaaauagcauguauugugucuuuu

SEQ ID NO: 233631 - RNA, 29 nt, Homo Sapiens
ccagcccggggacagagcaagacacuguc

SEQ ID NO: 233632 - RNA, 32 nt, Homo Sapiens
gaaaguggcugcagacaaaaucaauaaaacua

SEQ ID NO: 233633 - RNA, 32 nt, Homo Sapiens
uguugaaaaaucauuaccuguggaauggcuag

SEQ ID NO: 233634 - RNA, 32 nt, Homo Sapiens
agucgggggaacugaggcagagcaagguagug

SEQ ID NO: 233635 - RNA, 32 nt, Homo Sapiens
gccacaaaaugaaaccauuaaagacccuuaag

SEQ ID NO: 233636 - RNA, 32 nt, Homo Sapiens
auuucauuuuauucccaucuguuuucaaacuc

SEQ ID NO: 233637 - RNA, 32 nt, Homo Sapiens
ccagccccugguacucccccagcccucaguuu

SEQ ID NO: 233638 - RNA, 32 nt, Homo Sapiens
gcagacgggaggggaaaggcugccgaggaccc

SEQ ID NO: 233639 - RNA, 32 nt, Homo Sapiens
uggaacuuuuuccguuaucacccaggccugau

SEQ ID NO: 233640 - RNA, 32 nt, Homo Sapiens
ucaagccaaaagcugggaauggccaucugaga

SEQ ID NO: 233641 - RNA, 32 nt, Homo Sapiens
cuacccccuguugcgaagacggugacuuuuuu

SEQ ID NO: 233642 - RNA, 31 nt, Homo Sapiens
cggccgggggcgguggcucaugccuguaguc

SEQ ID NO: 233643 - RNA, 32 nt, Homo Sapiens
cccucccucccucuucugccauguaacuggag

SEQ ID NO: 233644 - RNA, 32 nt, Homo Sapiens
uccugccuuucugucugggaggaaacagagau

SEQ ID NO: 233645 - RNA, 32 nt, Homo Sapiens
agggaugugugcucuaaaaaugcagguacuca

SEQ ID NO: 233646 - RNA, 32 nt, Homo Sapiens
gaaucauuguaauuuaauuuuauuuuacaagc

SEQ ID NO: 233647 - RNA, 32 nt, Homo Sapiens
ucuuuccccggggcugcugcagauggggagga

SEQ ID NO: 233648 - RNA, 32 nt, Homo Sapiens
ucccacgccucccugagcacugacuggaaguu

SEQ ID NO: 233649 - RNA, 32 nt, Homo Sapiens
acuuugggaggcugaggauggaaaaucacuug

SEQ ID NO: 233650 - RNA, 32 nt, Homo Sapiens
cagcacugacagggucagcucuccucggaggc

SEQ ID NO: 233651 - RNA, 32 nt, Homo Sapiens
cagaggggcuccucacaucccaguaggggcgg

SEQ ID NO: 233652 - RNA, 32 nt, Homo Sapiens
ggagacgcccccuuuacccaggaggucuucag

SEQ ID NO: 233653 - RNA, 32 nt, Homo Sapiens
ugccaguuuuggaauaccgggaccacaguauc

SEQ ID NO: 233654 - RNA, 32 nt, Homo Sapiens
ucuuaaaugcuguaugguuuauuauuuaaaug

SEQ ID NO: 233655 - RNA, 32 nt, Homo Sapiens
uaugucaagcaucuggcacagcugaaggcaga

SEQ ID NO: 233656 - RNA, 32 nt, Homo Sapiens
ugcccucccgcaccuuccuccuccccgcuccg

SEQ ID NO: 233657 - RNA, 32 nt, Homo Sapiens
ugggcugcuuccuucuggccagauggcagagg

SEQ ID NO: 233658 - RNA, 32 nt, Homo Sapiens
uggggugagcagccuuguauuggccacaggug

SEQ ID NO: 233659 - RNA, 32 nt, Homo Sapiens
augcaauaguuucuuuuuugggacauauuucu

SEQ ID NO: 233660 - RNA, 32 nt, Homo Sapiens
cggcaccgcagccaccugcucccggcccagag

SEQ ID NO: 233661 - RNA, 32 nt, Homo Sapiens
caaagucugcaccucgguggcugagcauggcg

SEQ ID NO: 233662 - RNA, 32 nt, Homo Sapiens
acuuuuuugauaccccacccuccuccacccuc

SEQ ID NO: 233663 - RNA, 32 nt, Homo Sapiens
gcccgcacgucccaggaugcgcugcgauuaag

SEQ ID NO: 233664 - RNA, 32 nt, Homo Sapiens
cuaccauuugaaaaacucaauuggauguauau

SEQ ID NO: 233665 - RNA, 32 nt, Homo Sapiens
auuuccuuugguuuuuaagacuucuacauugc

SEQ ID NO: 233666 - RNA, 32 nt, Homo Sapiens
auauucuaauuuauugccauguuuccuaacac

SEQ ID NO: 233667 - RNA, 32 nt, Homo Sapiens
gagcagcgcgcccgcggcugccgcgggacugc

SEQ ID NO: 233668 - RNA, 32 nt, Homo Sapiens
agcauguugaauuuccaaauccuaaauaagcc

SEQ ID NO: 233669 - RNA, 32 nt, Homo Sapiens
cuugcucucggguccaugcugcacuugucuac

SEQ ID NO: 233670 - RNA, 32 nt, Homo Sapiens
augagacucacagaucuacacaaacuacaaaa

SEQ ID NO: 233671 - RNA, 32 nt, Homo Sapiens
guuaagauccacgcccccauagcaaucugacu

SEQ ID NO: 233672 - RNA, 32 nt, Homo Sapiens
acauaaaugaauuaggcacccagaagaaguug

SEQ ID NO: 233673 - RNA, 32 nt, Homo Sapiens
gccaguuucuccagccccuccuccccacaacc

SEQ ID NO: 233674 - RNA, 32 nt, Homo Sapiens
accucuggcaaaccgagagaugugcuagaucc

SEQ ID NO: 233675 - RNA, 32 nt, Homo Sapiens
uagccaguuguaauauacaugcauuccuauac

SEQ ID NO: 233676 - RNA, 32 nt, Homo Sapiens
ucagcaggcagacaguccgaagccuucccgca

SEQ ID NO: 233677 - RNA, 32 nt, Homo Sapiens
uauauuugauauauuuuuaauuuuguagcgug

SEQ ID NO: 233678 - RNA, 32 nt, Homo Sapiens
ccccuuccuuccaggcacaucucacauugcca

SEQ ID NO: 233679 - RNA, 32 nt, Homo Sapiens
ugcccgggcuuggggcgccgcgcuggggaaag

SEQ ID NO: 233680 - RNA, 32 nt, Homo Sapiens
cgcccuccagcaugcagcagacugcuggccca

SEQ ID NO: 233681 - RNA, 32 nt, Homo Sapiens
gcaggccccggguggggggcagaggcgcccag

SEQ ID NO: 233682 - RNA, 32 nt, Homo Sapiens
uaugaucauacuuggccaauagauguuccugc

SEQ ID NO: 233683 - RNA, 32 nt, Homo Sapiens
ucaguuuccuuccaacccuucccaccuuuccc

SEQ ID NO: 233684 - RNA, 31 nt, Homo Sapiens
ccuguugauuugacuuccccuuggaaaugag

SEQ ID NO: 233685 - RNA, 32 nt, Homo Sapiens
cugugcagucgcggcccgggcggacgguggcu

SEQ ID NO: 233686 - RNA, 32 nt, Homo Sapiens
cguuugcauguguuuuaccagcccuaucauuu

SEQ ID NO: 233687 - RNA, 32 nt, Homo Sapiens
ucacguucaagcgguucucaugucucagccuc

SEQ ID NO: 233688 - RNA, 32 nt, Homo Sapiens
gaguuugcuucucagaaccaagaggggcuggc

SEQ ID NO: 233689 - RNA, 32 nt, Homo Sapiens
cuaaccagcugugguuaagacacacacggcaa

SEQ ID NO: 233690 - RNA, 32 nt, Homo Sapiens
cucugauuuguaaugagcaccuggacauguca

SEQ ID NO: 233691 - RNA, 32 nt, Homo Sapiens
uguuggaaacaaaagacguuuuauaugugcag

SEQ ID NO: 233692 - RNA, 32 nt, Homo Sapiens
gcuauuagugggugcuuccaugucuuaaucuu

SEQ ID NO: 233693 - RNA, 32 nt, Homo Sapiens
ugggccuggauugcagacagugccgcugcuga

SEQ ID NO: 233694 - RNA, 32 nt, Homo Sapiens
caacgguugccggccauugcuaacuccucugc

SEQ ID NO: 233695 - RNA, 32 nt, Homo Sapiens
auuuuuuuuuuucuuuuuuuuauugguguagu

SEQ ID NO: 233696 - RNA, 32 nt, Homo Sapiens
uuccagccugagugcuggcccaauuacugcug

SEQ ID NO: 233697 - RNA, 32 nt, Homo Sapiens
uuuuaggcugggugcaguggcucacaccugua

SEQ ID NO: 233698 - RNA, 32 nt, Homo Sapiens
cuucugaaaauauuaaaaggagacuuacaccc

SEQ ID NO: 233699 - RNA, 32 nt, Homo Sapiens
caauaaagauauauuucuuuagaaaaugggga

SEQ ID NO: 233700 - RNA, 31 nt, Homo Sapiens
gggccaagaagguccgggagcccacggcggu

SEQ ID NO: 233701 - RNA, 32 nt, Homo Sapiens
aaggagccuccagccugcccuguggcacauac

SEQ ID NO: 233702 - RNA, 32 nt, Homo Sapiens
cccaggauauucucuggugagaagaaugucuu

SEQ ID NO: 233703 - RNA, 32 nt, Homo Sapiens
cccucagcgcccccagcacgccgccgaguccc

SEQ ID NO: 233704 - RNA, 32 nt, Homo Sapiens
ccugcacucacccacagcagcuccauccacug

SEQ ID NO: 233705 - RNA, 32 nt, Homo Sapiens
ggagggcggcgguggcugcagcggcuggagcg

SEQ ID NO: 233706 - RNA, 32 nt, Homo Sapiens
cucaguuuacacguacagaaaucauucuuuuu

SEQ ID NO: 233707 - RNA, 32 nt, Homo Sapiens
gugguccugugaacagaagaacaacaacucca

SEQ ID NO: 233708 - RNA, 32 nt, Homo Sapiens
cuuuuuucuuugacucauuuggacugaauuug

SEQ ID NO: 233709 - RNA, 32 nt, Homo Sapiens
cugugaagacugccaggccuaggcucucugua

SEQ ID NO: 233710 - RNA, 32 nt, Homo Sapiens
ugaaacuaagcuuuaaaauauuuuauaacaga

SEQ ID NO: 233711 - RNA, 32 nt, Homo Sapiens
auaggguauauacucagaaaugguggugcugg

SEQ ID NO: 233712 - RNA, 32 nt, Homo Sapiens
uugaaaaaccaucuguaaaagacugagguggg

SEQ ID NO: 233713 - RNA, 32 nt, Homo Sapiens
uccccgugggccauggcaauuuuuacacaaac

SEQ ID NO: 233714 - RNA, 32 nt, Homo Sapiens
ccgagagcccagagccgagauggaaacggucc

SEQ ID NO: 233715 - RNA, 32 nt, Homo Sapiens
aggaagcuuccacuucuucccccagacagccc

SEQ ID NO: 233716 - RNA, 32 nt, Homo Sapiens
ggugggaucugcaugccugggaucuuccgcug

SEQ ID NO: 233717 - RNA, 32 nt, Homo Sapiens
caccugcccucccaugugaccaggcccuuccc

SEQ ID NO: 233718 - RNA, 32 nt, Homo Sapiens
auauccaguauuucagagggccaggcaagagc

SEQ ID NO: 233719 - RNA, 32 nt, Homo Sapiens
cucgcccgcccucccugggcacaugugcacac

SEQ ID NO: 233720 - RNA, 32 nt, Homo Sapiens
acucagaauuguagggauaauaugaaugcagg

SEQ ID NO: 233721 - RNA, 32 nt, Homo Sapiens
caaaaaauucuaucucugugauagauuauauu

SEQ ID NO: 233722 - RNA, 32 nt, Homo Sapiens
ccgccucccuccccaauguccucggccaucga

SEQ ID NO: 233723 - RNA, 32 nt, Homo Sapiens
uacuuuaguuuaauguauaaagauccucuaga

SEQ ID NO: 233724 - RNA, 32 nt, Homo Sapiens
gagaugcucuccccggucuucugcugcaauuu

SEQ ID NO: 233725 - RNA, 30 nt, Homo Sapiens
cgggcugcauucgucggggaaaccucuccu

SEQ ID NO: 233726 - RNA, 32 nt, Homo Sapiens
gcgaguggcuguaagaaauuguccaugccacc

SEQ ID NO: 233727 - RNA, 32 nt, Homo Sapiens
auaaagaagaaaaacuguaguuguguagcugg

SEQ ID NO: 233728 - RNA, 32 nt, Homo Sapiens
agaaugauccugagaagugauguuugauggaa

SEQ ID NO: 233729 - RNA, 32 nt, Homo Sapiens
augccuggagaacaucuagaaaaccuucagcc

SEQ ID NO: 233730 - RNA, 32 nt, Homo Sapiens
ccucuccuccccucugcccccggcucuuagcu

SEQ ID NO: 233731 - RNA, 32 nt, Homo Sapiens
aggacagugucugcgccucuccgucuacaccc

SEQ ID NO: 233732 - RNA, 32 nt, Homo Sapiens
gauguguaaggguccaacuuuauucuuuugca

SEQ ID NO: 233733 - RNA, 32 nt, Homo Sapiens
aucuaaagccccuuccuccccagccccugcuu

SEQ ID NO: 233734 - RNA, 32 nt, Homo Sapiens
uauauccaagagaaacaaagcauagguguggg

SEQ ID NO: 233735 - RNA, 32 nt, Homo Sapiens
ugggacccucgggcagccccuccagcuuccug

SEQ ID NO: 233736 - RNA, 32 nt, Homo Sapiens
uuauaucuuuaccaauaaaaccacuguccaga

SEQ ID NO: 233737 - RNA, 32 nt, Homo Sapiens
gggggcggcaagggggcgcccgggccaucccg

SEQ ID NO: 233738 - RNA, 32 nt, Homo Sapiens
auaagucagucacucauguuugacucuguucu

SEQ ID NO: 233739 - RNA, 32 nt, Homo Sapiens
uugcagcgucugggagaaucuuucggucuccg

SEQ ID NO: 233740 - RNA, 32 nt, Homo Sapiens
cuaaccucugaacauaaauuuggucaaauaau

SEQ ID NO: 233741 - RNA, 32 nt, Homo Sapiens
ggcuccgguccggcccgccgccgcacccagga

SEQ ID NO: 233742 - RNA, 32 nt, Homo Sapiens
uccccgaagcuuccugcagcuccaccuuguaa

SEQ ID NO: 233743 - RNA, 32 nt, Homo Sapiens
gaacggcaccaccagcagccccaugaccaggu

SEQ ID NO: 233744 - RNA, 32 nt, Homo Sapiens
gagaaaaacacuuuuagaaucacgaauauuca

SEQ ID NO: 233745 - RNA, 32 nt, Homo Sapiens
ccaagaagagaguaccaaguagucuuuuguuc

SEQ ID NO: 233746 - RNA, 32 nt, Homo Sapiens
gcaaaauguaauggaaacuucacaugaaugcu

SEQ ID NO: 233747 - RNA, 32 nt, Homo Sapiens
guguguggacauuuuucaucccuuaagccaua

SEQ ID NO: 233748 - RNA, 32 nt, Homo Sapiens
cggaauguccccggggcgcccggcgcgcugac

SEQ ID NO: 233749 - RNA, 32 nt, Homo Sapiens
agccugggcgaggcccucggagggcagcagcu

SEQ ID NO: 233750 - RNA, 32 nt, Homo Sapiens
aaaucuagaaauaaaaaugaaugugaaauuug

SEQ ID NO: 233751 - RNA, 32 nt, Homo Sapiens
ugagcuucaguuucuucaucugcaaaaugggc

SEQ ID NO: 233752 - RNA, 32 nt, Homo Sapiens
ugauuuauaaauuugaaauccaaacuacuuuc

SEQ ID NO: 233753 - RNA, 32 nt, Homo Sapiens
uuaauuuuaagagcuucccuuucuugcagaga

SEQ ID NO: 233754 - RNA, 32 nt, Homo Sapiens
ugagccugcccccaagcccccucucauuggaa

SEQ ID NO: 233755 - RNA, 32 nt, Homo Sapiens
aauaaucugagcaaagguaugaaacagccuaa

SEQ ID NO: 233756 - RNA, 32 nt, Homo Sapiens
ggcacaagggauggggacgcgagggggagggg

SEQ ID NO: 233757 - RNA, 32 nt, Homo Sapiens
cugcggggccagcagcagcuccagccaccagu

SEQ ID NO: 233758 - RNA, 32 nt, Homo Sapiens
gugcucaaacuaaaaguaggucaucacuuccc

SEQ ID NO: 233759 - RNA, 32 nt, Homo Sapiens
cugcccccgggaagauggcucggccugggcag

SEQ ID NO: 233760 - RNA, 30 nt, Homo Sapiens
cccuuucccaggcgcgcguucuccgcugaa

SEQ ID NO: 233761 - RNA, 32 nt, Homo Sapiens
gccaaugcccccgacuuacuauauggugggga

SEQ ID NO: 233762 - RNA, 32 nt, Homo Sapiens
uacuguggaaaacuccugccagaacucuucaa

SEQ ID NO: 233763 - RNA, 32 nt, Homo Sapiens
gcugaguucagcauuugcuuauuuaaccacua

SEQ ID NO: 233764 - RNA, 32 nt, Homo Sapiens
gaggaagggccugaguccgagcagaagaagaa

SEQ ID NO: 233765 - RNA, 32 nt, Homo Sapiens
aggcuuuaaaauguaaaugucuggauuuuaau

SEQ ID NO: 233766 - RNA, 32 nt, Homo Sapiens
aauaaaauguauguuggagauacuguuaaaaa

SEQ ID NO: 233767 - RNA, 32 nt, Homo Sapiens
uuaauagguuuaggacacaagucauauuccca

SEQ ID NO: 233768 - RNA, 32 nt, Homo Sapiens
uacucaugucauuguaaugauuucacuccuaa

SEQ ID NO: 233769 - RNA, 32 nt, Homo Sapiens
guguuucaugacauguggacuucuuuugaaau

SEQ ID NO: 233770 - RNA, 32 nt, Homo Sapiens
aguugagaacagacuccaccuuguaggacagu

SEQ ID NO: 233771 - RNA, 32 nt, Homo Sapiens
ccaaacccgagcugaaggaucccauccggaag

SEQ ID NO: 233772 - RNA, 32 nt, Homo Sapiens
ucuuguuuuucugaagggaaaugccaccggcc

SEQ ID NO: 233773 - RNA, 32 nt, Homo Sapiens
uuuccgcuuggcaauuuccuuuccugaggcac

SEQ ID NO: 233774 - RNA, 32 nt, Homo Sapiens
gauuuauuuuggacuauuuugaugccaaguga

SEQ ID NO: 233775 - RNA, 32 nt, Homo Sapiens
uuacugugcagggucaacuccacacgcagggg

SEQ ID NO: 233776 - RNA, 32 nt, Homo Sapiens
acccggaggagcuuuugggggugcgucaagcc

SEQ ID NO: 233777 - RNA, 32 nt, Homo Sapiens
agcugucaugugagaaagaaagcaggcuaggc

SEQ ID NO: 233778 - RNA, 32 nt, Homo Sapiens
cccaugccccagcacccuccccacugggacca

SEQ ID NO: 233779 - RNA, 32 nt, Homo Sapiens
gcagacaggcccggggggcgucgugggucugg

SEQ ID NO: 233780 - RNA, 32 nt, Homo Sapiens
gcccuagaugacuagggugcugagcucuggcg

SEQ ID NO: 233781 - RNA, 32 nt, Homo Sapiens
gagcggauccccagccgucccugggcguucuc

SEQ ID NO: 233782 - RNA, 32 nt, Homo Sapiens
agaggccugggccugcacugccugcagccgac

SEQ ID NO: 233783 - RNA, 32 nt, Homo Sapiens
agcaaucagggaagcuggccuacaugcuaccu

SEQ ID NO: 233784 - RNA, 32 nt, Homo Sapiens
caggaaacccaauaaccugaaaaaguuugacu

SEQ ID NO: 233785 - RNA, 32 nt, Homo Sapiens
auccuuuggaacaauuauuuuauugucuaaua

SEQ ID NO: 233786 - RNA, 32 nt, Homo Sapiens
aggguggaaaugccucuucuugguuuaaugag

SEQ ID NO: 233787 - RNA, 32 nt, Homo Sapiens
gcuauuugauaaaugaucacaauguguaaaac

SEQ ID NO: 233788 - RNA, 32 nt, Homo Sapiens
gccaccugggguagaagcaagcaggggcgucu

SEQ ID NO: 233789 - RNA, 32 nt, Homo Sapiens
agccuuuucuuuucuuuuuuuuuuuuuugaga

SEQ ID NO: 233790 - RNA, 32 nt, Homo Sapiens
ucgguuuaaauauguuuguaaaugauguaaua

SEQ ID NO: 233791 - RNA, 32 nt, Homo Sapiens
ucagguugaagacccugguucuuccaguuccu

SEQ ID NO: 233792 - RNA, 32 nt, Homo Sapiens
agaaauggagggcgcccaggauccaggcagcc

SEQ ID NO: 233793 - RNA, 32 nt, Homo Sapiens
cgugccucgaaacaggcaguguuguaagcacg

SEQ ID NO: 233794 - RNA, 32 nt, Homo Sapiens
ccuaagggagcuuuuaggugacugcugcacau

SEQ ID NO: 233795 - RNA, 32 nt, Homo Sapiens
cccuuccccguccugaaccccucuccugguca

SEQ ID NO: 233796 - RNA, 32 nt, Homo Sapiens
aaacacuuaaagacauaaaucacaggugcaaa

SEQ ID NO: 233797 - RNA, 32 nt, Homo Sapiens
acucaaaacuacucagaauaagaucaguuucu

SEQ ID NO: 233798 - RNA, 32 nt, Homo Sapiens
uuggcuccgcugucgggugcgcggcguggagc

SEQ ID NO: 233799 - RNA, 32 nt, Homo Sapiens
agaccacaguuucuaacagacuuucaacagag

SEQ ID NO: 233800 - RNA, 32 nt, Homo Sapiens
aaggcaugaaugugguuauccaaacaucaagg

SEQ ID NO: 233801 - RNA, 31 nt, Homo Sapiens
ccugcccaugucucaaaacaaacacauguac

SEQ ID NO: 233802 - RNA, 32 nt, Homo Sapiens
augcugcccagcuguccaugccuucagaagcc

SEQ ID NO: 233803 - RNA, 32 nt, Homo Sapiens
cgcucggguggcgggggcgggucugaguggua

SEQ ID NO: 233804 - RNA, 32 nt, Homo Sapiens
gcggccgcggggacccucggcgugguccucug

SEQ ID NO: 233805 - RNA, 32 nt, Homo Sapiens
ugugugucuccaugcacaugcacgccaggauu

SEQ ID NO: 233806 - RNA, 32 nt, Homo Sapiens
gcucaugccucccggcggccuucccaggcccc

SEQ ID NO: 233807 - RNA, 32 nt, Homo Sapiens
ugccauagaaacugaggccauuauuucaaccg

SEQ ID NO: 233808 - RNA, 32 nt, Homo Sapiens
uuuguugugacuucuuggcauaaacaguuuca

SEQ ID NO: 233809 - RNA, 32 nt, Homo Sapiens
cacuaucugcuuaaugagcaaaucugugucca

SEQ ID NO: 233810 - RNA, 32 nt, Homo Sapiens
agcucaaacauuaaggguacccgggcacaacc

SEQ ID NO: 233811 - RNA, 32 nt, Homo Sapiens
aucuuugcuuuugaguuccucacgcucucuga

SEQ ID NO: 233812 - RNA, 32 nt, Homo Sapiens
uguagauuguguguuuguguccggguggcagu

SEQ ID NO: 233813 - RNA, 32 nt, Homo Sapiens
uaaauuaauguuuuauucuuugcaaauaaaac

SEQ ID NO: 233814 - RNA, 32 nt, Homo Sapiens
gcacggcuucuccuuucgguucccauggaccc

SEQ ID NO: 233815 - RNA, 32 nt, Homo Sapiens
uccugcccggccugcggcccagcccuugcgcc

SEQ ID NO: 233816 - RNA, 32 nt, Homo Sapiens
cucuccugagcccacuauuccacucugguccc

SEQ ID NO: 233817 - RNA, 32 nt, Homo Sapiens
cuucauugaugauagagaaccuugcuucucaa

SEQ ID NO: 233818 - RNA, 32 nt, Homo Sapiens
gggaccuugagccccccugcccuuggcaucug

SEQ ID NO: 233819 - RNA, 32 nt, Homo Sapiens
ggcaacuggggaccacuacucuggccaccuuu

SEQ ID NO: 233820 - RNA, 32 nt, Homo Sapiens
agcccgggcuuggccugggcgacacugagcgg

SEQ ID NO: 233821 - RNA, 32 nt, Homo Sapiens
ggaaaugcuguaaaaugcaaacuaaguuauua

SEQ ID NO: 233822 - RNA, 32 nt, Homo Sapiens
ccuagaggccggacuggcugggaccagggcgg

SEQ ID NO: 233823 - RNA, 32 nt, Homo Sapiens
gacggcgcggguuccuagcggcagccucagcu

SEQ ID NO: 233824 - RNA, 32 nt, Homo Sapiens
gcugggcaugguggugggacgucuguaauccc

SEQ ID NO: 233825 - RNA, 32 nt, Homo Sapiens
gccugcuccugguaccucccccaugaucaugc

SEQ ID NO: 233826 - RNA, 32 nt, Homo Sapiens
gcggcuguggcggcgccggcggauccagccuu

SEQ ID NO: 233827 - RNA, 32 nt, Homo Sapiens
ccuccaccaagcucagcccuugggacaagagc

SEQ ID NO: 233828 - RNA, 29 nt, Homo Sapiens
uaaacugcauaugagguugggcuaaaccu

SEQ ID NO: 233829 - RNA, 32 nt, Homo Sapiens
cccaaaucucaaaagaucuccugugcaccuga

SEQ ID NO: 233830 - RNA, 32 nt, Homo Sapiens
gacccuuccggcacccucccgccccgucucgu

SEQ ID NO: 233831 - RNA, 27 nt, Homo Sapiens
ccccuagccuucuucaaggccuccagg

SEQ ID NO: 233832 - RNA, 32 nt, Homo Sapiens
ggcugcaagaguuguaacacuaaccaaaggcu

SEQ ID NO: 233833 - RNA, 32 nt, Homo Sapiens
guguaagcugucuuguugcuuaguugcaauau

SEQ ID NO: 233834 - RNA, 32 nt, Homo Sapiens
gucguuagacuuaugauagaaguucauuucag

SEQ ID NO: 233835 - RNA, 32 nt, Homo Sapiens
cccagcuuaaagccgaggcugcggcugacaaa

SEQ ID NO: 233836 - RNA, 32 nt, Homo Sapiens
uuuuugacgucacuuuuuggccauguaaacua

SEQ ID NO: 233837 - RNA, 32 nt, Homo Sapiens
ccugccuuuuaacguagauauaugccuucccc

SEQ ID NO: 233838 - RNA, 29 nt, Homo Sapiens
cauauuccagauuuauauuuucuggaguu

SEQ ID NO: 233839 - RNA, 32 nt, Homo Sapiens
uccuaugagcccacgcccggccccacucccac

SEQ ID NO: 233840 - RNA, 32 nt, Homo Sapiens
acagacuucuaaaauaacgucuguauauuuua

SEQ ID NO: 233841 - RNA, 32 nt, Homo Sapiens
aguaucugauuugucugaauaaagguguccca

SEQ ID NO: 233842 - RNA, 32 nt, Homo Sapiens
gcuuggcccuaccgcccuccccgauggcgggg

SEQ ID NO: 233843 - RNA, 32 nt, Homo Sapiens
uggccuucccagcuagggacaguguucauuua

SEQ ID NO: 233844 - RNA, 32 nt, Homo Sapiens
uuaacaaagcauuaauaauucuaaggauaauc

SEQ ID NO: 233845 - RNA, 32 nt, Homo Sapiens
uaguaauaaaaugaaccgggcauaguagcaug

SEQ ID NO: 233846 - RNA, 32 nt, Homo Sapiens
ccgagcucuuucgucugccugccaguuuccug

SEQ ID NO: 233847 - RNA, 32 nt, Homo Sapiens
gcccaaugccaaguggacuuggagcugcacaa

SEQ ID NO: 233848 - RNA, 32 nt, Homo Sapiens
aggcacggacggcgggcgcccgguaccucugc

SEQ ID NO: 233849 - RNA, 32 nt, Homo Sapiens
uacagaauauauuucauauauauuuuacacau

SEQ ID NO: 233850 - RNA, 32 nt, Homo Sapiens
uuugggcgucgacgaggccugguucuggguag

SEQ ID NO: 233851 - RNA, 32 nt, Homo Sapiens
ucccgcugcccccaucgcgcucacgcaauaac

SEQ ID NO: 233852 - RNA, 32 nt, Homo Sapiens
caugugggaggcugaggauggagcugggaaca

SEQ ID NO: 233853 - RNA, 32 nt, Homo Sapiens
ucuuacauaaucaaugucaaguuuugucuuau

SEQ ID NO: 233854 - RNA, 32 nt, Homo Sapiens
acagcuuggcagagaaaauaaauaucaucaaa

SEQ ID NO: 233855 - RNA, 32 nt, Homo Sapiens
uuccuuucccccuuuuaacaaaagagaagaac

SEQ ID NO: 233856 - RNA, 32 nt, Homo Sapiens
ccgcuccccgucccgcgcuccacgcgcgcccc

SEQ ID NO: 233857 - RNA, 32 nt, Homo Sapiens
gauuuaaaaguuagaauauauuugaaugcaua

SEQ ID NO: 233858 - RNA, 32 nt, Homo Sapiens
ucacugugcaguggagauggaaggccagggag

SEQ ID NO: 233859 - RNA, 32 nt, Homo Sapiens
gauaaucucaaguuagaaaacaguagguccug

SEQ ID NO: 233860 - RNA, 32 nt, Homo Sapiens
acuguggagguagaugcccccaaaucucauga

SEQ ID NO: 233861 - RNA, 32 nt, Homo Sapiens
aaauucuuucuuuucagaaucuagguggugaa

SEQ ID NO: 233862 - RNA, 25 nt, Homo Sapiens
auggacgccccgaggcacgugguca

SEQ ID NO: 233863 - RNA, 32 nt, Homo Sapiens
cccacuuuucccaaacaaagcucccggcaacu

SEQ ID NO: 233864 - RNA, 32 nt, Homo Sapiens
ucguuugggcuuuaggaguggagcacguuucu

SEQ ID NO: 233865 - RNA, 32 nt, Homo Sapiens
guaacuccuuccuguucccccagccaugagug

SEQ ID NO: 233866 - RNA, 32 nt, Homo Sapiens
ccuuaaugguuacagaaauuguggaccagggc

SEQ ID NO: 233867 - RNA, 32 nt, Homo Sapiens
ccacgcguccgcucggcuccgccccggcgcuc

SEQ ID NO: 233868 - RNA, 32 nt, Homo Sapiens
uagaguuuaugggucuuagucuuaaggguaac

SEQ ID NO: 233869 - RNA, 32 nt, Homo Sapiens
gcucaugucuuccccacaucucuucuugccag

SEQ ID NO: 233870 - RNA, 32 nt, Homo Sapiens
auccuucugggauucaguuuugucgauuacga

SEQ ID NO: 233871 - RNA, 32 nt, Homo Sapiens
uaacucuuuauucuuggauguauaaagugaac

SEQ ID NO: 233872 - RNA, 32 nt, Homo Sapiens
ucccaauuccccagcaauuaagauuucgagca

SEQ ID NO: 233873 - RNA, 32 nt, Homo Sapiens
aauagcggggguaccccuccacagcgaccgag

SEQ ID NO: 233874 - RNA, 32 nt, Homo Sapiens
uuuuccaauuggcaguugauugaaagaguuau

SEQ ID NO: 233875 - RNA, 32 nt, Homo Sapiens
gcuaccuaggacuuaagcugaugaagcuuggc

SEQ ID NO: 233876 - RNA, 32 nt, Homo Sapiens
uccuccagagccuccaggagccaggccuuugg

SEQ ID NO: 233877 - RNA, 32 nt, Homo Sapiens
aacuuucacuggauuucuuuagacauugaagc

SEQ ID NO: 233878 - RNA, 32 nt, Homo Sapiens
aaauuccuuugguuuuuauauuuuaagaaaaa

SEQ ID NO: 233879 - RNA, 32 nt, Homo Sapiens
caggugccggugccuguccccgggggcgccau

SEQ ID NO: 233880 - RNA, 30 nt, Homo Sapiens
aaccaggggaagcuugcuuaguuuuggguu

SEQ ID NO: 233881 - RNA, 32 nt, Homo Sapiens
cuaacauuuuaaauaaaagaaaaaauaucuug

SEQ ID NO: 233882 - RNA, 32 nt, Homo Sapiens
gaggcaggagcaguaugugcugauugccaaac

SEQ ID NO: 233883 - RNA, 32 nt, Homo Sapiens
auucccaacagccccaggguggaagccacccc

SEQ ID NO: 233884 - RNA, 32 nt, Homo Sapiens
uuccugcagacaccagcucuccuuccugccuu

SEQ ID NO: 233885 - RNA, 32 nt, Homo Sapiens
acaaacaaauuuuauuuuuuuacucccaugac

SEQ ID NO: 233886 - RNA, 32 nt, Homo Sapiens
agggugaagccaccucuagaagggacuuuggc

SEQ ID NO: 233887 - RNA, 32 nt, Homo Sapiens
aaucaagacauaagaacaaaacauuagcauuu

SEQ ID NO: 233888 - RNA, 32 nt, Homo Sapiens
ccuuuugccauccucccugagauuguuugcca

SEQ ID NO: 233889 - RNA, 32 nt, Homo Sapiens
ccguccugagaccgagggaagggcucagcuga

SEQ ID NO: 233890 - RNA, 32 nt, Homo Sapiens
aagcuggaaugggaugggaaccccuccgccgu

SEQ ID NO: 233891 - RNA, 32 nt, Homo Sapiens
uucauacacccauuuugucccuuuauugaaaa

SEQ ID NO: 233892 - RNA, 32 nt, Homo Sapiens
agguguccaaauacauaguaaucuuuuccagu

SEQ ID NO: 233893 - RNA, 32 nt, Homo Sapiens
aucaaaaauguauugaaucaucaaauaaaaga

SEQ ID NO: 233894 - RNA, 32 nt, Homo Sapiens
cgccucugcucgaggagagcggcggccuggau

SEQ ID NO: 233895 - RNA, 32 nt, Homo Sapiens
aauguaaacaucauaucaaaaaacagauguga

SEQ ID NO: 233896 - RNA, 32 nt, Homo Sapiens
agugcacguccuccccuucccacccaccucug

SEQ ID NO: 233897 - RNA, 32 nt, Homo Sapiens
uuuugugugugugugcagaaauuaagggucca

SEQ ID NO: 233898 - RNA, 32 nt, Homo Sapiens
ccccugucuacccacacccccaaucccaaaca

SEQ ID NO: 233899 - RNA, 31 nt, Homo Sapiens
cagcacugagacuugaaccagggaauugugu

SEQ ID NO: 233900 - RNA, 32 nt, Homo Sapiens
caaacugcaaacaagcagcaucacucaaguuu

SEQ ID NO: 233901 - RNA, 32 nt, Homo Sapiens
ugaaucuuuuggccuuuccccaaugcuugaaa

SEQ ID NO: 233902 - RNA, 32 nt, Homo Sapiens
cucgcguucggcggcccgggcccggccaagga

SEQ ID NO: 233903 - RNA, 32 nt, Homo Sapiens
aauaauguucaaggaaaagaaaacgaaaacag

SEQ ID NO: 233904 - RNA, 32 nt, Homo Sapiens
gaauugcauuaguccaaggccuuuuucauaaa

SEQ ID NO: 233905 - RNA, 32 nt, Homo Sapiens
aggaaguguagaucgugaaaagagacuucaag

SEQ ID NO: 233906 - RNA, 32 nt, Homo Sapiens
aggggacaaauggauggugggaugcugagguc

SEQ ID NO: 233907 - RNA, 32 nt, Homo Sapiens
ggcugccaggaaagccaucugcucucccggga

SEQ ID NO: 233908 - RNA, 32 nt, Homo Sapiens
aucaagaaaaggaaauguuagaaguuauuuuu

SEQ ID NO: 233909 - RNA, 32 nt, Homo Sapiens
gcagcgcgcgccccgcugccagcccauuuucc

SEQ ID NO: 233910 - RNA, 32 nt, Homo Sapiens
ggagaaaagccuagaucagggauguauacgcu

SEQ ID NO: 233911 - RNA, 31 nt, Homo Sapiens
uuagccaggaaagaauucagagccugaagca

SEQ ID NO: 233912 - RNA, 32 nt, Homo Sapiens
accucauaggcgcccaggaucaaggucuccgg

SEQ ID NO: 233913 - RNA, 32 nt, Homo Sapiens
ccuacucugcugucugggugacccccaugcgu

SEQ ID NO: 233914 - RNA, 32 nt, Homo Sapiens
ugagcuccagcauggggugagguacagaagag

SEQ ID NO: 233915 - RNA, 32 nt, Homo Sapiens
ugauaugugcucugccccuguuugaagacagg

SEQ ID NO: 233916 - RNA, 32 nt, Homo Sapiens
cuacuccgugcagcucaaguuccugccgcggu

SEQ ID NO: 233917 - RNA, 32 nt, Homo Sapiens
uucugggauaaauuuccacuuuacuugucauc

SEQ ID NO: 233918 - RNA, 32 nt, Homo Sapiens
cacaauugauucaagcauuauacaggaacacc

SEQ ID NO: 233919 - RNA, 32 nt, Homo Sapiens
aucccuuuauuucagcccaucccuuuauuucc

SEQ ID NO: 233920 - RNA, 31 nt, Homo Sapiens
acaguggacaauucgaacucugaccugagag

SEQ ID NO: 233921 - RNA, 32 nt, Homo Sapiens
gcgcacuguggaagagcagugguuguccagca

SEQ ID NO: 233922 - RNA, 32 nt, Homo Sapiens
auugacagauaaugacugauauuuuuucuuau

SEQ ID NO: 233923 - RNA, 32 nt, Homo Sapiens
cccaggaaaaagaaaccagaaaguauugaaaa

SEQ ID NO: 233924 - RNA, 32 nt, Homo Sapiens
gacagaaagguaaaaaucacguguagcaagaa

SEQ ID NO: 233925 - RNA, 32 nt, Homo Sapiens
aaauguagaucaguuaauaaacaugaguagcu

SEQ ID NO: 233926 - RNA, 32 nt, Homo Sapiens
aucuuguggaauuggaauaaacggaagaagcg

SEQ ID NO: 233927 - RNA, 32 nt, Homo Sapiens
cgcggggucaagacguccggccucgggggccc

SEQ ID NO: 233928 - RNA, 27 nt, Homo Sapiens
uuguauccuauuuucugguauauuucu

SEQ ID NO: 233929 - RNA, 32 nt, Homo Sapiens
gaacaccuaaaauagaaccagagaaacgaaag

SEQ ID NO: 233930 - RNA, 32 nt, Homo Sapiens
uggcguggcuuuauuuguuuucuuguuucauu

SEQ ID NO: 233931 - RNA, 32 nt, Homo Sapiens
uaggugugcaauuacaagagcauuccuaucuu

SEQ ID NO: 233932 - RNA, 32 nt, Homo Sapiens
gguuucuuuuaaagggguugguuugggauagg

SEQ ID NO: 233933 - RNA, 32 nt, Homo Sapiens
aaaucgggucauugcagauaugaucagguuaa

SEQ ID NO: 233934 - RNA, 32 nt, Homo Sapiens
caaagauucugugguggaaaagaaguuagaaa

SEQ ID NO: 233935 - RNA, 32 nt, Homo Sapiens
accucaaccacacuccacgccggcagccaacg

SEQ ID NO: 233936 - RNA, 32 nt, Homo Sapiens
ggggcgacggcugagccguggguggagccgcu

SEQ ID NO: 233937 - RNA, 32 nt, Homo Sapiens
gagcagacguaccccugccccaccucagcccg

SEQ ID NO: 233938 - RNA, 32 nt, Homo Sapiens
ccuagcuuuccccagacacccuguuuuauuuu

SEQ ID NO: 233939 - RNA, 32 nt, Homo Sapiens
ucuuagaauuguagaagcugcucaauacggaa

SEQ ID NO: 233940 - RNA, 32 nt, Homo Sapiens
cacauuuaaagagaagcaucuaccacggcuuu

SEQ ID NO: 233941 - RNA, 32 nt, Homo Sapiens
gauggcugaaaaaauaccacaucgucuguuuu

SEQ ID NO: 233942 - RNA, 32 nt, Homo Sapiens
uuguccuaggaacugauguggagaaguuacag

SEQ ID NO: 233943 - RNA, 32 nt, Homo Sapiens
gccugugugggggcgggcccaggcccuagacc

SEQ ID NO: 233944 - RNA, 32 nt, Homo Sapiens
ggaucugccgccccccucuccucccaaaccaa

SEQ ID NO: 233945 - RNA, 32 nt, Homo Sapiens
ccuucgcggcguccacgucccucccccgcugc

SEQ ID NO: 233946 - RNA, 32 nt, Homo Sapiens
auuguauucagacuuuuuuccuguucuagucu

SEQ ID NO: 233947 - RNA, 32 nt, Homo Sapiens
uaaguugcagaugcuucuuuuauuguacucuu

SEQ ID NO: 233948 - RNA, 32 nt, Homo Sapiens
cuuugggcguccccggauaccgccugacguag

SEQ ID NO: 233949 - RNA, 32 nt, Homo Sapiens
ccacacuuuguacagaccgagaggccaguuga

SEQ ID NO: 233950 - RNA, 32 nt, Homo Sapiens
ugcugcagggagaugaaaggcuuugcagaaag

SEQ ID NO: 233951 - RNA, 32 nt, Homo Sapiens
uagauaagcugaggagugagaaguaaucagac

SEQ ID NO: 233952 - RNA, 32 nt, Homo Sapiens
cgagggucgacgagcucgagggcgcgcgcccg

SEQ ID NO: 233953 - RNA, 32 nt, Homo Sapiens
guauaauguaucuaucucauuauauuaccuau

SEQ ID NO: 233954 - RNA, 32 nt, Homo Sapiens
gaggcguuccucaaaacaaaggaugaugccau

SEQ ID NO: 233955 - RNA, 32 nt, Homo Sapiens
uucuucaucaugccacugaagccacucaccac

SEQ ID NO: 233956 - RNA, 32 nt, Homo Sapiens
ggccaucuguccgugcgccacgucugcugaag

SEQ ID NO: 233957 - RNA, 32 nt, Homo Sapiens
cuggccauacugugucccaucggagugcggac

SEQ ID NO: 233958 - RNA, 32 nt, Homo Sapiens
uuguucugagggugggaccuagguucuuucca

SEQ ID NO: 233959 - RNA, 32 nt, Homo Sapiens
gucggguauuguuccuuaacugucccaucugu

SEQ ID NO: 233960 - RNA, 32 nt, Homo Sapiens
uuuuuuuuuaaaaaacaaaaaccacaaaaauu

SEQ ID NO: 233961 - RNA, 32 nt, Homo Sapiens
gauccccuugcuuccuggcccaggagccacca

SEQ ID NO: 233962 - RNA, 32 nt, Homo Sapiens
cugagccaauguccggccgcggcucgggacgu

SEQ ID NO: 233963 - RNA, 32 nt, Homo Sapiens
guaaaagagaaauuauuuuuaaagguaccaaa

SEQ ID NO: 233964 - RNA, 32 nt, Homo Sapiens
gaccagcugaccuugcugggaagccucacccu

SEQ ID NO: 233965 - RNA, 31 nt, Homo Sapiens
aagguggaggacaggcagccccgcgccccug

SEQ ID NO: 233966 - RNA, 32 nt, Homo Sapiens
augguguuagugagggccucaaguccaaggcu

SEQ ID NO: 233967 - RNA, 32 nt, Homo Sapiens
gaaucaccuuguaucugaaagucucugcuuua

SEQ ID NO: 233968 - RNA, 32 nt, Homo Sapiens
aagaggcccuccccaggagccaggucugccca

SEQ ID NO: 233969 - RNA, 32 nt, Homo Sapiens
aaguguaaaauaaaacagauuauauuguaaaa

SEQ ID NO: 233970 - RNA, 32 nt, Homo Sapiens
accagccgaggguggagggccaauuuuucuaa

SEQ ID NO: 233971 - RNA, 32 nt, Homo Sapiens
uuaaagauuuuuaucuuugccugucuacugua

SEQ ID NO: 233972 - RNA, 32 nt, Homo Sapiens
guggaguuuacaaaaccagugucuguuaaaac

SEQ ID NO: 233973 - RNA, 32 nt, Homo Sapiens
gaggcgggauggccggccggguagggggcgcg

SEQ ID NO: 233974 - RNA, 32 nt, Homo Sapiens
ucccaggcagagggaccuugcugcugugugau

SEQ ID NO: 233975 - RNA, 32 nt, Homo Sapiens
uggauggcgccagugacuccggcagcggcgau

SEQ ID NO: 233976 - RNA, 32 nt, Homo Sapiens
ccacuuccccaauugcagaaacauuacuucac

SEQ ID NO: 233977 - RNA, 32 nt, Homo Sapiens
caucacccaagguuccuucucuuaaacuaagg

SEQ ID NO: 233978 - RNA, 32 nt, Homo Sapiens
uccccaacuacaccccgccuccccucaucugc

SEQ ID NO: 233979 - RNA, 32 nt, Homo Sapiens
cuuguaucuauuuguggugaauguguuuuuua

SEQ ID NO: 233980 - RNA, 32 nt, Homo Sapiens
auuaugguugguuuuucuuaauacauucucag

SEQ ID NO: 233981 - RNA, 32 nt, Homo Sapiens
uuggacuguugcuucuuugccuguuccugcuu

SEQ ID NO: 233982 - RNA, 32 nt, Homo Sapiens
cccugguggcaugacagcgucugccuagaccc

SEQ ID NO: 233983 - RNA, 32 nt, Homo Sapiens
augggagagguucugugcaaaacuaccacauu

SEQ ID NO: 233984 - RNA, 32 nt, Homo Sapiens
aggggauaauuucugguucucagguuauaacu

SEQ ID NO: 233985 - RNA, 32 nt, Homo Sapiens
gcugcccaggucucucacuuuacaauggcugc

SEQ ID NO: 233986 - RNA, 32 nt, Homo Sapiens
acauaggguucagugcaugugagcagacacug

SEQ ID NO: 233987 - RNA, 32 nt, Homo Sapiens
agggggcgggucgaggcugcguggugaugggg

SEQ ID NO: 233988 - RNA, 32 nt, Homo Sapiens
uucacaaaaucuguuuagcagcagccuuuaau

SEQ ID NO: 233989 - RNA, 32 nt, Homo Sapiens
ccuaccccacuuuucauuuuguuccaaaauag

SEQ ID NO: 233990 - RNA, 32 nt, Homo Sapiens
gccgggccgaggaugcggcgcagcgccucggc

SEQ ID NO: 233991 - RNA, 32 nt, Homo Sapiens
uuauccaaauuguuuaaauucacaauugaauu

SEQ ID NO: 233992 - RNA, 30 nt, Homo Sapiens
gcaccauggcuuuccucuggcuccucuccu

SEQ ID NO: 233993 - RNA, 32 nt, Homo Sapiens
auguauacugaauuauaggaauccaauuacaa

SEQ ID NO: 233994 - RNA, 29 nt, Homo Sapiens
uaaggauggaggugauauuuuccucaaug

SEQ ID NO: 233995 - RNA, 32 nt, Homo Sapiens
ccccugaccauaaggccgucccggcccuucug

SEQ ID NO: 233996 - RNA, 32 nt, Homo Sapiens
uggcucacaccuguaaccccagcacuguggga

SEQ ID NO: 233997 - RNA, 32 nt, Homo Sapiens
ggaggcaagguucucaggggacaggcugacca

SEQ ID NO: 233998 - RNA, 32 nt, Homo Sapiens
uacggugaacugaguccagucccaccaggacc

SEQ ID NO: 233999 - RNA, 32 nt, Homo Sapiens
acacacacaaaacuggccuuuacaggaugcac

SEQ ID NO: 234000 - RNA, 31 nt, Homo Sapiens
ucugccccagggagaaagaauccugcuucca

SEQ ID NO: 234001 - RNA, 32 nt, Homo Sapiens
gguaaagguuuuauuuuuuucacuauacaaua

SEQ ID NO: 234002 - RNA, 32 nt, Homo Sapiens
uuaaggucaggaguuugagaccagccuggcca

SEQ ID NO: 234003 - RNA, 32 nt, Homo Sapiens
auguaacuuuaaauuggauaugugcuaaugaa

SEQ ID NO: 234004 - RNA, 32 nt, Homo Sapiens
uacucagaagacugaggccggaggaucacuug

SEQ ID NO: 234005 - RNA, 32 nt, Homo Sapiens
aguuggucuuuuuaucuuuucuuucuuuuucu

SEQ ID NO: 234006 - RNA, 29 nt, Homo Sapiens
aauacguaggaauuauauuucuaaaguuu

SEQ ID NO: 234007 - RNA, 32 nt, Homo Sapiens
cuucacccccgcagcccuccgcccggguccgu

SEQ ID NO: 234008 - RNA, 32 nt, Homo Sapiens
ucggcgggggcaggggcggggaggugaaaagg

SEQ ID NO: 234009 - RNA, 32 nt, Homo Sapiens
uuacaaaaucaucuacauugcugucuacaaaa

SEQ ID NO: 234010 - RNA, 32 nt, Homo Sapiens
ccugcaugaccaggcugcccccugccccgcac

SEQ ID NO: 234011 - RNA, 32 nt, Homo Sapiens
aacagacugaagaucauaaaccaguuuuauca

SEQ ID NO: 234012 - RNA, 32 nt, Homo Sapiens
gaaauaauuuaaaaauaguguuuguucugaau

SEQ ID NO: 234013 - RNA, 27 nt, Homo Sapiens
cugauucuccucuucagccucucaucu

SEQ ID NO: 234014 - RNA, 32 nt, Homo Sapiens
agcacuggacugaguuuuaagacagcugcuaa

SEQ ID NO: 234015 - RNA, 32 nt, Homo Sapiens
ccacccugccccaccccuaggucucuuuauug

SEQ ID NO: 234016 - RNA, 30 nt, Homo Sapiens
ccugcuguuuucccugccuggaacuuuccc

SEQ ID NO: 234017 - RNA, 32 nt, Homo Sapiens
accccugcuggggcuccacgacccugagagaa

SEQ ID NO: 234018 - RNA, 32 nt, Homo Sapiens
gauguauccaacaagccagaaucagcacagau

SEQ ID NO: 234019 - RNA, 32 nt, Homo Sapiens
gcacacagcugggucuuacagaauauggaaaa

SEQ ID NO: 234020 - RNA, 32 nt, Homo Sapiens
cuccaaagugcaccaccuccagugagcuuccg

SEQ ID NO: 234021 - RNA, 32 nt, Homo Sapiens
ggcccaggucccuuugggcccgcggaggagga

SEQ ID NO: 234022 - RNA, 32 nt, Homo Sapiens
cuaccuucccucacugucucaggugccgagag

SEQ ID NO: 234023 - RNA, 32 nt, Homo Sapiens
uuucuuuucuguugcaucaucaggcuacaaau

SEQ ID NO: 234024 - RNA, 32 nt, Homo Sapiens
uuuuugagucaggaucuuucucgcacaggcuu

SEQ ID NO: 234025 - RNA, 32 nt, Homo Sapiens
gauggguuuacaaugucuucuaaacaauauaa

SEQ ID NO: 234026 - RNA, 32 nt, Homo Sapiens
gugagggagccugugcccucccugcccagucg

SEQ ID NO: 234027 - RNA, 29 nt, Homo Sapiens
aaaagcaggauccaauacccaaaagaaau

SEQ ID NO: 234028 - RNA, 32 nt, Homo Sapiens
aagccugcauucuuaacaaacucuucaguuaa

SEQ ID NO: 234029 - RNA, 32 nt, Homo Sapiens
gcaugcuggguccagagccuucuguuucaccg

SEQ ID NO: 234030 - RNA, 32 nt, Homo Sapiens
ucugaacuuggucugcagaccauccagaggaa

SEQ ID NO: 234031 - RNA, 32 nt, Homo Sapiens
auuccagccaggggccacuuggaccaagcucc

SEQ ID NO: 234032 - RNA, 32 nt, Homo Sapiens
cuugaaccaaaggaucuauacauugaucgucc

SEQ ID NO: 234033 - RNA, 32 nt, Homo Sapiens
cucucucuccucccaccuuccauccucaagua

SEQ ID NO: 234034 - RNA, 32 nt, Homo Sapiens
uaaaaacuuaggauaacuuagaaaggcuaguu

SEQ ID NO: 234035 - RNA, 32 nt, Homo Sapiens
cacacauuccccagccucucugcccaguaugc

SEQ ID NO: 234036 - RNA, 32 nt, Homo Sapiens
caacaacaucuucuuugaguucuuuauucaaa

SEQ ID NO: 234037 - RNA, 32 nt, Homo Sapiens
gcucugcgccuggcacagagacaggcucagug

SEQ ID NO: 234038 - RNA, 32 nt, Homo Sapiens
uuuucuaaacauuuuuucaucuauuguccaga

SEQ ID NO: 234039 - RNA, 32 nt, Homo Sapiens
aggaguucgagaccagcagccuggccaauaug

SEQ ID NO: 234040 - RNA, 32 nt, Homo Sapiens
ggcccuggagagagcugcuuggaccguggcug

SEQ ID NO: 234041 - RNA, 32 nt, Homo Sapiens
uucuuuggagagguggaaucagaagccccaga

SEQ ID NO: 234042 - RNA, 32 nt, Homo Sapiens
auccuaaguggaagaacuaguuguuuuaguuu

SEQ ID NO: 234043 - RNA, 32 nt, Homo Sapiens
uaucaggaggcugaggcagagaaucacuugaa

SEQ ID NO: 234044 - RNA, 32 nt, Homo Sapiens
uugucaaaugcuuuuucuucaucuaaugagau

SEQ ID NO: 234045 - RNA, 27 nt, Homo Sapiens
cgauccucccacuucagccuuucaagu

SEQ ID NO: 234046 - RNA, 30 nt, Homo Sapiens
cacaaaggcaggcgggaugcgggagcaggc

SEQ ID NO: 234047 - RNA, 32 nt, Homo Sapiens
cacagagaggaugagaaugcagcaucaaucgc

SEQ ID NO: 234048 - RNA, 32 nt, Homo Sapiens
cccgauggagggcuccaggacugaugcucucc

SEQ ID NO: 234049 - RNA, 32 nt, Homo Sapiens
agcuuguacuguaucuuauuugaugauauuua

SEQ ID NO: 234050 - RNA, 32 nt, Homo Sapiens
ccugugauuuuuccuucuucucuauagaauaa

SEQ ID NO: 234051 - RNA, 32 nt, Homo Sapiens
caucuaagguccucuguaaacagugaauuagc

SEQ ID NO: 234052 - RNA, 32 nt, Homo Sapiens
gaggcacagcgacagcagcugcaucuaggggc

SEQ ID NO: 234053 - RNA, 32 nt, Homo Sapiens
aguacccguucccucccagaggugggaguaac

SEQ ID NO: 234054 - RNA, 32 nt, Homo Sapiens
ucuaaaucucuuaaaaauuuuggguugggggu

SEQ ID NO: 234055 - RNA, 32 nt, Homo Sapiens
ucaguagguuaguuuagagcugugauauugug

SEQ ID NO: 234056 - RNA, 32 nt, Homo Sapiens
ugcuuuucgcagccuuccuguguuggaugaaa

SEQ ID NO: 234057 - RNA, 29 nt, Homo Sapiens
agaucuagugggagguaccauagguagau

SEQ ID NO: 234058 - RNA, 32 nt, Homo Sapiens
ccgagguauaccaugaacauguggguacaccu

SEQ ID NO: 234059 - RNA, 32 nt, Homo Sapiens
ucauaauggagaagucagacuuuggucaagaa

SEQ ID NO: 234060 - RNA, 32 nt, Homo Sapiens
acaagaagaaaaaugaccaccuuaaugaaauu

SEQ ID NO: 234061 - RNA, 32 nt, Homo Sapiens
gcuggcaucgccugcuuucucuccaguggcug

SEQ ID NO: 234062 - RNA, 32 nt, Homo Sapiens
cauuugaauuauuuauuguauauccuaaauau

SEQ ID NO: 234063 - RNA, 32 nt, Homo Sapiens
caacuuuuguuuaugauucaaauaugggaauu

SEQ ID NO: 234064 - RNA, 32 nt, Homo Sapiens
gcugcgcucccuggggccccaggauccaccua

SEQ ID NO: 234065 - RNA, 32 nt, Homo Sapiens
ccuuuguugaauugugguagcuuaggaggaug

SEQ ID NO: 234066 - RNA, 32 nt, Homo Sapiens
gguccugaaacacauggccugauuguuggcaa

SEQ ID NO: 234067 - RNA, 32 nt, Homo Sapiens
caaagaggaagccauuagucuccacgaguucc

SEQ ID NO: 234068 - RNA, 32 nt, Homo Sapiens
agcucuguucuuccucagccagccucgcccau

SEQ ID NO: 234069 - RNA, 32 nt, Homo Sapiens
caaugugcaauaacuuguguauuagauaucaa

SEQ ID NO: 234070 - RNA, 32 nt, Homo Sapiens
agagcggcggccccggcccgcggccccaccau

SEQ ID NO: 234071 - RNA, 32 nt, Homo Sapiens
cugcaccuucgggugggagcggggacugaucu

SEQ ID NO: 234072 - RNA, 32 nt, Homo Sapiens
aauucagaaggcagcucugcauucuaccuugc

SEQ ID NO: 234073 - RNA, 32 nt, Homo Sapiens
cuuuccaggagccccaggauuagcaucugaaa

SEQ ID NO: 234074 - RNA, 32 nt, Homo Sapiens
gggcacccacccagcacccccaucuaccaaca

SEQ ID NO: 234075 - RNA, 32 nt, Homo Sapiens
agccggcuguggagccccgcccgccccccacc

SEQ ID NO: 234076 - RNA, 32 nt, Homo Sapiens
uaauaucuaccuugugugauuccuggaagaau

SEQ ID NO: 234077 - RNA, 32 nt, Homo Sapiens
agccaggcgggggucugcuggaggauuccaac

SEQ ID NO: 234078 - RNA, 32 nt, Homo Sapiens
ucauguguaucuaucccucaauguuuuuaaca

SEQ ID NO: 234079 - RNA, 32 nt, Homo Sapiens
aaaaaaacauucaaaugugggcuuuagcuugu

SEQ ID NO: 234080 - RNA, 32 nt, Homo Sapiens
aaaggggcagaaaaacucugggaaauaagaga

SEQ ID NO: 234081 - RNA, 32 nt, Homo Sapiens
gugacuaaacuccccucucaaccacaaccucc

SEQ ID NO: 234082 - RNA, 32 nt, Homo Sapiens
gugucuguggacgugcguggcugcugagcgga

SEQ ID NO: 234083 - RNA, 32 nt, Homo Sapiens
acacaaacccucaaagcagacgugagagggac

SEQ ID NO: 234084 - RNA, 32 nt, Homo Sapiens
gugguauucucuuuuuuuucucucccuuuuuu

SEQ ID NO: 234085 - RNA, 32 nt, Homo Sapiens
uauguauagaaagaaugcuaaugacuggcuug

SEQ ID NO: 234086 - RNA, 32 nt, Homo Sapiens
ccugagauaaaccaccugucauucuuggagaa

SEQ ID NO: 234087 - RNA, 32 nt, Homo Sapiens
cgugaccuccaugugggagcuccagcucuaua

SEQ ID NO: 234088 - RNA, 32 nt, Homo Sapiens
aaagcaaaucuuucuguaaacagaauaaaagu

SEQ ID NO: 234089 - RNA, 32 nt, Homo Sapiens
uucaugggcccacuggggcucuuuggccuauu

SEQ ID NO: 234090 - RNA, 32 nt, Homo Sapiens
uucaggugugccuguucuccccggggugaugg

SEQ ID NO: 234091 - RNA, 32 nt, Homo Sapiens
cccuccguccugcccucagcccggcccuggcc

SEQ ID NO: 234092 - RNA, 32 nt, Homo Sapiens
cuggccuccgucuccaucgccuccucauggcc

SEQ ID NO: 234093 - RNA, 32 nt, Homo Sapiens
ccggccaguggcuuggaaauggucacccacaa

SEQ ID NO: 234094 - RNA, 32 nt, Homo Sapiens
cgagucguaaacagugaucacuuuuuguacua

SEQ ID NO: 234095 - RNA, 32 nt, Homo Sapiens
aaucucaaugauucuagaugacuucuuguggu

SEQ ID NO: 234096 - RNA, 32 nt, Homo Sapiens
uucuuuaauguuuucaguugguuuguauuuug

SEQ ID NO: 234097 - RNA, 32 nt, Homo Sapiens
ggggagacagguaacgucuguaagcugaaguu

SEQ ID NO: 234098 - RNA, 32 nt, Homo Sapiens
cccaaggcacccaacucgcaccaagagcugcu

SEQ ID NO: 234099 - RNA, 32 nt, Homo Sapiens
aaccaguggggccucaucuccucccugugcug

SEQ ID NO: 234100 - RNA, 32 nt, Homo Sapiens
agccgccaggcgagcaggcugcuuucccugcc

SEQ ID NO: 234101 - RNA, 32 nt, Homo Sapiens
cccgcuaagagaacagaagucaaaaacaguug

SEQ ID NO: 234102 - RNA, 32 nt, Homo Sapiens
gccauguugugagcacauaccacauagcucca

SEQ ID NO: 234103 - RNA, 32 nt, Homo Sapiens
ucgcggcgauccccccggcagcucuuugcaaa

SEQ ID NO: 234104 - RNA, 31 nt, Homo Sapiens
aauaagaaauaaagggaagugucugcuacuu

SEQ ID NO: 234105 - RNA, 32 nt, Homo Sapiens
agcucugcagcccagggaccgaaaaguuggug

SEQ ID NO: 234106 - RNA, 32 nt, Homo Sapiens
uuuuaugcaauaaauuguuuaaaaugcaaggu

SEQ ID NO: 234107 - RNA, 32 nt, Homo Sapiens
gucgcgaggaggaggaggauguggcgcgcgga

SEQ ID NO: 234108 - RNA, 32 nt, Homo Sapiens
auucuuggugccuuugggaucgacuggguuuu

SEQ ID NO: 234109 - RNA, 32 nt, Homo Sapiens
uuuacagauaaaacugcugugguucaagugcu

SEQ ID NO: 234110 - RNA, 32 nt, Homo Sapiens
ccggagcuguauuugcaguuuuguguuggguu

SEQ ID NO: 234111 - RNA, 32 nt, Homo Sapiens
gcagcaucuucagcucuuggguuuagcaaaag

SEQ ID NO: 234112 - RNA, 32 nt, Homo Sapiens
uggcugucugcacuuuuguucaugcuccaaag

SEQ ID NO: 234113 - RNA, 32 nt, Homo Sapiens
aacaugagaaaauagagauaaguaaaaagaau

SEQ ID NO: 234114 - RNA, 32 nt, Homo Sapiens
gauguccccacuccccgcagaauggcguuucc

SEQ ID NO: 234115 - RNA, 32 nt, Homo Sapiens
uccagugcggaguagcggaggcgugggggccu

SEQ ID NO: 234116 - RNA, 31 nt, Homo Sapiens
cccguccugcccggaggguccacucucccga

SEQ ID NO: 234117 - RNA, 32 nt, Homo Sapiens
gcaguggcugcugcguuuucgugucugagucc

SEQ ID NO: 234118 - RNA, 32 nt, Homo Sapiens
gugacccccucuaagauuucguuuuaaaugau

SEQ ID NO: 234119 - RNA, 27 nt, Homo Sapiens
uuauucucuuucuucagucuuuuucag

SEQ ID NO: 234120 - RNA, 32 nt, Homo Sapiens
ggcugggacugggaacagaacucggugucccc

SEQ ID NO: 234121 - RNA, 32 nt, Homo Sapiens
cgcaauaaacaaugacgaaggggauaucacca

SEQ ID NO: 234122 - RNA, 32 nt, Homo Sapiens
acagcaccacuuuauuacuuuguuuaagcugu

SEQ ID NO: 234123 - RNA, 32 nt, Homo Sapiens
uuguuauggcauuugacccauggcauucauca

SEQ ID NO: 234124 - RNA, 32 nt, Homo Sapiens
cagucuccauucucuuuuugcugaaucacguc

SEQ ID NO: 234125 - RNA, 32 nt, Homo Sapiens
ugcuuucugcucgcgccagcagagcacuaccu

SEQ ID NO: 234126 - RNA, 32 nt, Homo Sapiens
aaggaagggaaaaggaagcagaugaaaggcuu

SEQ ID NO: 234127 - RNA, 32 nt, Homo Sapiens
uugcuccuugguauccagagccaggccggaac

SEQ ID NO: 234128 - RNA, 32 nt, Homo Sapiens
guucaaaaaaaauuauaugaagagauaaacca

SEQ ID NO: 234129 - RNA, 32 nt, Homo Sapiens
gauuuaauuguguauccucauuacuguaucau

SEQ ID NO: 234130 - RNA, 32 nt, Homo Sapiens
cugcacaggcaaaauuaggaagguuauuuuau

SEQ ID NO: 234131 - RNA, 32 nt, Homo Sapiens
uugaucggucauuggggugcugcagccccgcc

SEQ ID NO: 234132 - RNA, 26 nt, Homo Sapiens
uaaaagaaaaagaaggagauauaagc

SEQ ID NO: 234133 - RNA, 32 nt, Homo Sapiens
aaaaugcaaaaauuagcugggugugguggcgg

SEQ ID NO: 234134 - RNA, 32 nt, Homo Sapiens
agcuccccccgcccacccacgcauacacacau

SEQ ID NO: 234135 - RNA, 32 nt, Homo Sapiens
cuaacccaggacuaaaaauggacaggcugacc

SEQ ID NO: 234136 - RNA, 32 nt, Homo Sapiens
gguuugucuuccuuuuuuuuuauuuuuauuuu

SEQ ID NO: 234137 - RNA, 32 nt, Homo Sapiens
gcagagguggggcaggccgucuggcuagcuag

SEQ ID NO: 234138 - RNA, 32 nt, Homo Sapiens
cuccugccucagccuccuggguagcugggauu

SEQ ID NO: 234139 - RNA, 32 nt, Homo Sapiens
cuaaccccuuaauggugcaaccacugaggcaa

SEQ ID NO: 234140 - RNA, 32 nt, Homo Sapiens
aagcguucaugaauuuagagcauuccacccaa

SEQ ID NO: 234141 - RNA, 32 nt, Homo Sapiens
caacucucacccugugaauccacugacugggg

SEQ ID NO: 234142 - RNA, 32 nt, Homo Sapiens
cguuaggcagguggcuugagggugcugcuaaa

SEQ ID NO: 234143 - RNA, 32 nt, Homo Sapiens
acacacacaaccugucucuuccacugaacuuc

SEQ ID NO: 234144 - RNA, 32 nt, Homo Sapiens
gcagguugaccuccuccagccccuucagccuc

SEQ ID NO: 234145 - RNA, 32 nt, Homo Sapiens
agaaaacacucaacaaaaccaaucuacauguu

SEQ ID NO: 234146 - RNA, 32 nt, Homo Sapiens
ggcugccuggggauugggagggacagggcuug

SEQ ID NO: 234147 - RNA, 32 nt, Homo Sapiens
gccgcugggcaggcugacccccugcccuccug

SEQ ID NO: 234148 - RNA, 32 nt, Homo Sapiens
acugaacaucugguuucuuuuuggaaguuuuc

SEQ ID NO: 234149 - RNA, 32 nt, Homo Sapiens
ccuuguuccuguccucaccacacggacugaga

SEQ ID NO: 234150 - RNA, 32 nt, Homo Sapiens
ccaagccccacuuccucccugaccuccccaug

SEQ ID NO: 234151 - RNA, 32 nt, Homo Sapiens
cuuaagcuauuaugauccuaauuuuacagaug

SEQ ID NO: 234152 - RNA, 32 nt, Homo Sapiens
ugccgccgccggggcacuuggagcgcaccggc

SEQ ID NO: 234153 - RNA, 32 nt, Homo Sapiens
uucuugccacuaccagaguucucuagcaaauc

SEQ ID NO: 234154 - RNA, 32 nt, Homo Sapiens
cagauguuccacguaauaaugcuggaguuaag

SEQ ID NO: 234155 - RNA, 32 nt, Homo Sapiens
gggccggcccuggcugcccucagcuuucgcug

SEQ ID NO: 234156 - RNA, 30 nt, Homo Sapiens
caugagaacagcaugggggacacugccccc

SEQ ID NO: 234157 - RNA, 32 nt, Homo Sapiens
ccagcuccaagccccagaccaugggagcuguc

SEQ ID NO: 234158 - RNA, 32 nt, Homo Sapiens
uagcgccgccugcucccgcgggcccgcggacc

SEQ ID NO: 234159 - RNA, 32 nt, Homo Sapiens
ugaggaugcaguggugucuuccgcugacgugg

SEQ ID NO: 234160 - RNA, 32 nt, Homo Sapiens
acuaccuucuauuuagaggaagaaugagagcu

SEQ ID NO: 234161 - RNA, 32 nt, Homo Sapiens
uacaaacuccugggcuuucuggggagggguuc

SEQ ID NO: 234162 - RNA, 32 nt, Homo Sapiens
gggcuggugauaguuuuucagugacugugaga

SEQ ID NO: 234163 - RNA, 32 nt, Homo Sapiens
gaugaagagaaaacuuuuucuuuauuccaugu

SEQ ID NO: 234164 - RNA, 32 nt, Homo Sapiens
uaguuauacuuauuuguauaugguauuuauuu

SEQ ID NO: 234165 - RNA, 27 nt, Homo Sapiens
aaauguuaguucuucagauuccugucu

SEQ ID NO: 234166 - RNA, 32 nt, Homo Sapiens
uuaauugcaauaacacagacaaguaguuaaug

SEQ ID NO: 234167 - RNA, 32 nt, Homo Sapiens
gaugccagaaaaccucugucagacgcccacug

SEQ ID NO: 234168 - RNA, 31 nt, Homo Sapiens
cugcguuuccucugccugcgccgggcaucac

SEQ ID NO: 234169 - RNA, 32 nt, Homo Sapiens
cagcuggccccgggcugggcagagccuccucc

SEQ ID NO: 234170 - RNA, 32 nt, Homo Sapiens
ggucacacagccaagcccugcugcugagaucu

SEQ ID NO: 234171 - RNA, 32 nt, Homo Sapiens
cauccuuuuggccagcucuaaagcagcagugg

SEQ ID NO: 234172 - RNA, 30 nt, Homo Sapiens
uugccacuaucugccacccacguuguuccc

SEQ ID NO: 234173 - RNA, 32 nt, Homo Sapiens
uuauugaucagugcauugaacaguguuuauua

SEQ ID NO: 234174 - RNA, 32 nt, Homo Sapiens
ucaagugagucugggaaacacuaugucuguac

SEQ ID NO: 234175 - RNA, 32 nt, Homo Sapiens
ccugcguagagcucaccuaguggcuuccauag

SEQ ID NO: 234176 - RNA, 32 nt, Homo Sapiens
caacugcacucaacugcagcucuuacauuaac

SEQ ID NO: 234177 - RNA, 32 nt, Homo Sapiens
cccagaccuggaagagcuuuaucccuuugcau

SEQ ID NO: 234178 - RNA, 32 nt, Homo Sapiens
uguggaggccauggggcgcgucgucgcggagc

SEQ ID NO: 234179 - RNA, 32 nt, Homo Sapiens
uguugaagguuuggggggaggggaaacggguu

SEQ ID NO: 234180 - RNA, 32 nt, Homo Sapiens
guaguuuugcugucacaucucaaauacaaaag

SEQ ID NO: 234181 - RNA, 32 nt, Homo Sapiens
cuggggucaggagaggagaauaggagugacug

SEQ ID NO: 234182 - RNA, 32 nt, Homo Sapiens
cuagaggcugaccagcagcguuuauuuagcaa

SEQ ID NO: 234183 - RNA, 32 nt, Homo Sapiens
aggcaggauccuggucccugcuacguuucugg

SEQ ID NO: 234184 - RNA, 32 nt, Homo Sapiens
gccucagacaccuuuuaauugcuuaggagaaa

SEQ ID NO: 234185 - RNA, 32 nt, Homo Sapiens
ggaagaggccccauggggaucaccuugagucc

SEQ ID NO: 234186 - RNA, 32 nt, Homo Sapiens
ugggggccugaagaggauaagguagagcuccc

SEQ ID NO: 234187 - RNA, 32 nt, Homo Sapiens
ugagccaucuucugauuuuucauugcucuaua

SEQ ID NO: 234188 - RNA, 32 nt, Homo Sapiens
ggcuccccucacagccucuccuuugcuugaag

SEQ ID NO: 234189 - RNA, 32 nt, Homo Sapiens
gggggagaucggggagcgcccgaugccgggcg

SEQ ID NO: 234190 - RNA, 32 nt, Homo Sapiens
uuuucucacaugccagauagguaucucucauc

SEQ ID NO: 234191 - RNA, 32 nt, Homo Sapiens
uuuuauuugucaaauaaagaacaucuauaaau

SEQ ID NO: 234192 - RNA, 32 nt, Homo Sapiens
caguucugcccgaggcucaacucucaagggcc

SEQ ID NO: 234193 - RNA, 32 nt, Homo Sapiens
aauuuuaaaaauacagauagauauaugcucug

SEQ ID NO: 234194 - RNA, 32 nt, Homo Sapiens
cuugcccacugucuccccauccuuccaccuac

SEQ ID NO: 234195 - RNA, 32 nt, Homo Sapiens
auaaugcugggcccaacaccugggugauggaa

SEQ ID NO: 234196 - RNA, 32 nt, Homo Sapiens
ccacuguaauuuccaacuucagccuuccugug

SEQ ID NO: 234197 - RNA, 32 nt, Homo Sapiens
cuauccauuccucccgccccagccaccucccu

SEQ ID NO: 234198 - RNA, 32 nt, Homo Sapiens
aaccucaccugccccggugggaugccaacucc

SEQ ID NO: 234199 - RNA, 32 nt, Homo Sapiens
ucaaaugacaacagcugcagcggugggagcag

SEQ ID NO: 234200 - RNA, 32 nt, Homo Sapiens
ucuggauuccaagaggaguaacgccaucaaua

SEQ ID NO: 234201 - RNA, 32 nt, Homo Sapiens
gguaauuaugcgcuuuuuuuuaauuuuuagaa

SEQ ID NO: 234202 - RNA, 32 nt, Homo Sapiens
ccugcaguugaaggaagaauaccugcagagag

SEQ ID NO: 234203 - RNA, 32 nt, Homo Sapiens
gucccucccucauagaguuuacauucuaaaag

SEQ ID NO: 234204 - RNA, 32 nt, Homo Sapiens
cuuuaucugcuguuguugaugcauccguccaa

SEQ ID NO: 234205 - RNA, 32 nt, Homo Sapiens
cuccgccuuggaccagacaauuccuggacaga

SEQ ID NO: 234206 - RNA, 32 nt, Homo Sapiens
ugcagacugaagccagcagagaggaaggacug

SEQ ID NO: 234207 - RNA, 32 nt, Homo Sapiens
aaauuaugaagaucccaaaucuuauguaaaua

SEQ ID NO: 234208 - RNA, 32 nt, Homo Sapiens
gcucacaguacagcaugugccuuaaugcuuca

SEQ ID NO: 234209 - RNA, 32 nt, Homo Sapiens
uauuccauauuguauccacaauuuaugauauc

SEQ ID NO: 234210 - RNA, 30 nt, Homo Sapiens
cuugcugugcccgugcagcuggcaccaaca

SEQ ID NO: 234211 - RNA, 31 nt, Homo Sapiens
uuuccuggcagcccugcuccaaggcuagaug

SEQ ID NO: 234212 - RNA, 32 nt, Homo Sapiens
uucucaauuuaucaauggauacgugcauguua

SEQ ID NO: 234213 - RNA, 32 nt, Homo Sapiens
augcgugccugagccagggcuaccuccugucu

SEQ ID NO: 234214 - RNA, 30 nt, Homo Sapiens
gaggcggcgcccgcccucgccguguccgug

SEQ ID NO: 234215 - RNA, 32 nt, Homo Sapiens
auccuagccaaggggauuucguguaaauguga

SEQ ID NO: 234216 - RNA, 32 nt, Homo Sapiens
aaccaaaacacaucugaucugcucuuaaagga

SEQ ID NO: 234217 - RNA, 32 nt, Homo Sapiens
ucuauuauucauuuuuaaauggucauuucuua

SEQ ID NO: 234218 - RNA, 32 nt, Homo Sapiens
ugaauggaugaccuccugggaauaguuccugu

SEQ ID NO: 234219 - RNA, 32 nt, Homo Sapiens
cacaguggacauuuggggagcguuguggguga

SEQ ID NO: 234220 - RNA, 32 nt, Homo Sapiens
guugcuacuucugaauuaaaacuaguugagau

SEQ ID NO: 234221 - RNA, 32 nt, Homo Sapiens
ggugggcacagcggccguuggcagcugcuguu

SEQ ID NO: 234222 - RNA, 32 nt, Homo Sapiens
gaggucaggagauugagacgguccuggcuaac

SEQ ID NO: 234223 - RNA, 31 nt, Homo Sapiens
aaaagugaugaaauauaagugcuguucuauc

SEQ ID NO: 234224 - RNA, 32 nt, Homo Sapiens
ccagagcccgguggguccgcaucccugcuucu

SEQ ID NO: 234225 - RNA, 32 nt, Homo Sapiens
agguuuuucagacaauuuugcagaaaggugca

SEQ ID NO: 234226 - RNA, 32 nt, Homo Sapiens
ccugggugacggagcgagacuccaucucaaaa

SEQ ID NO: 234227 - RNA, 28 nt, Homo Sapiens
cagugguacgcagccaggauggcuggcu

SEQ ID NO: 234228 - RNA, 32 nt, Homo Sapiens
uacaaacaagauuguguaagauauauuugaag

SEQ ID NO: 234229 - RNA, 32 nt, Homo Sapiens
uauuuaaaaucguguucugccuuaugaguaaa

SEQ ID NO: 234230 - RNA, 32 nt, Homo Sapiens
ccagccccucugucacaacuucagaguaaagg

SEQ ID NO: 234231 - RNA, 32 nt, Homo Sapiens
caccagcagagggacuugguccuccuugucug

SEQ ID NO: 234232 - RNA, 32 nt, Homo Sapiens
uuggccucggcgggcuuuucuggggcccagga

SEQ ID NO: 234233 - RNA, 32 nt, Homo Sapiens
gagugugugucuuugcacacacagugcagugg

SEQ ID NO: 234234 - RNA, 32 nt, Homo Sapiens
cgaggagcggggccaccgcgacguugcagggu

SEQ ID NO: 234235 - RNA, 32 nt, Homo Sapiens
gccccagccugagcggggacggcggccgggag

SEQ ID NO: 234236 - RNA, 32 nt, Homo Sapiens
ccccuacaccuucccccagccacagccauccc

SEQ ID NO: 234237 - RNA, 32 nt, Homo Sapiens
ggaggagggaaccuggcgggggugucugaggc

SEQ ID NO: 234238 - RNA, 32 nt, Homo Sapiens
uggauuuauugguuuuggaacaucucagagug

SEQ ID NO: 234239 - RNA, 32 nt, Homo Sapiens
acgcacgcaccuccgcgcucugcgccgacucc

SEQ ID NO: 234240 - RNA, 32 nt, Homo Sapiens
uuauuuucaugcuuuuucagccauguaucaau

SEQ ID NO: 234241 - RNA, 31 nt, Homo Sapiens
acucccaucaaugaugccagcuggguucccu

SEQ ID NO: 234242 - RNA, 32 nt, Homo Sapiens
aucauuauuauauaaauagaaacuucugaaca

SEQ ID NO: 234243 - RNA, 32 nt, Homo Sapiens
accacaaagcgcccggcugugugugcugcugu

SEQ ID NO: 234244 - RNA, 32 nt, Homo Sapiens
ggcggcgagauggucgcgcgcgucggccuccu

SEQ ID NO: 234245 - RNA, 31 nt, Homo Sapiens
uagcucccggcccuucugccccgccgccuuc

SEQ ID NO: 234246 - RNA, 32 nt, Homo Sapiens
ccaaaguacugggauuacaggugagagucacu

SEQ ID NO: 234247 - RNA, 32 nt, Homo Sapiens
gaggccacagccagcccuuccucugcaccugc

SEQ ID NO: 234248 - RNA, 32 nt, Homo Sapiens
cuucgccucguuccggccuccgcggcccagca

SEQ ID NO: 234249 - RNA, 32 nt, Homo Sapiens
cugagggaugaaaguuccagagcauuauuuga

SEQ ID NO: 234250 - RNA, 32 nt, Homo Sapiens
gcuugcaauagggauuuuaaaauacacuaacu

SEQ ID NO: 234251 - RNA, 32 nt, Homo Sapiens
caacaggaggguggagaggccgggucucacaa

SEQ ID NO: 234252 - RNA, 32 nt, Homo Sapiens
uaccgccgccccaccagcucggcuuuggacug

SEQ ID NO: 234253 - RNA, 32 nt, Homo Sapiens
uaacuccccccgcccccacuugcaaaguucag

SEQ ID NO: 234254 - RNA, 32 nt, Homo Sapiens
auuacauauggacuuuggaagauugcuccuau

SEQ ID NO: 234255 - RNA, 30 nt, Homo Sapiens
uaugggcugggaggcauccguguggaauug

SEQ ID NO: 234256 - RNA, 32 nt, Homo Sapiens
caauucuccgucucuuuuuuuucaucacugau

SEQ ID NO: 234257 - RNA, 32 nt, Homo Sapiens
cagucccggccccucucccgccccacacccac

SEQ ID NO: 234258 - RNA, 32 nt, Homo Sapiens
cugcaauaccacuguuuauaagugacaaaauu

SEQ ID NO: 234259 - RNA, 32 nt, Homo Sapiens
aauacuagugugauuauaucuuuggaguuugc

SEQ ID NO: 234260 - RNA, 32 nt, Homo Sapiens
cuauggcuuccagcacugucccggugagcgcu

SEQ ID NO: 234261 - RNA, 32 nt, Homo Sapiens
cccaccugcagaagcuugagguccugaacgug

SEQ ID NO: 234262 - RNA, 32 nt, Homo Sapiens
ggcuugggaaagaucugucagaggagccuuuc

SEQ ID NO: 234263 - RNA, 32 nt, Homo Sapiens
aaaaggagccccacacagugccuucccccaac

SEQ ID NO: 234264 - RNA, 32 nt, Homo Sapiens
uuaucugguuuuuaaaagcugguuucaugugc

SEQ ID NO: 234265 - RNA, 29 nt, Homo Sapiens
aaaaccuaaaguuuaaauguuuuaaucug

SEQ ID NO: 234266 - RNA, 32 nt, Homo Sapiens
acucuauuugaccugacagccauacguauucc

SEQ ID NO: 234267 - RNA, 32 nt, Homo Sapiens
aucccggucugaaucccuggaacuugugaauc

SEQ ID NO: 234268 - RNA, 32 nt, Homo Sapiens
uaaaagggugguuuuuuuaagauuuuaaaguu

SEQ ID NO: 234269 - RNA, 32 nt, Homo Sapiens
gcccgcaaggccugcggagccgcggccucguc

SEQ ID NO: 234270 - RNA, 32 nt, Homo Sapiens
gaggaugaugcaaggcauuuauguaaaaaaga

SEQ ID NO: 234271 - RNA, 32 nt, Homo Sapiens
acaccuuuuguccagacagcucccuuagcguu

SEQ ID NO: 234272 - RNA, 32 nt, Homo Sapiens
uaucuaaguuuaaguaguuuaaguauguuaaa

SEQ ID NO: 234273 - RNA, 32 nt, Homo Sapiens
uggggacuugguggagagggacuacguggaag

SEQ ID NO: 234274 - RNA, 32 nt, Homo Sapiens
cuguuuuugaucuacaagauccaaauaauuau

SEQ ID NO: 234275 - RNA, 32 nt, Homo Sapiens
gauguacuguauuauauaacauguaaaguuga

SEQ ID NO: 234276 - RNA, 32 nt, Homo Sapiens
uuaagagaaugaauucugaauguacacuuucu

SEQ ID NO: 234277 - RNA, 32 nt, Homo Sapiens
gacacaccuacugcuuccucagaugggccccu

SEQ ID NO: 234278 - RNA, 32 nt, Homo Sapiens
acuuucguuuuggcagauauuuuuugacacug

SEQ ID NO: 234279 - RNA, 32 nt, Homo Sapiens
guaaccaucuucuuucuccagguuuuaagaac

SEQ ID NO: 234280 - RNA, 32 nt, Homo Sapiens
gaguaauggagaguacaaagguccuucuuggc

SEQ ID NO: 234281 - RNA, 32 nt, Homo Sapiens
auggaguccgccagcaggcauggggcuacauu

SEQ ID NO: 234282 - RNA, 30 nt, Homo Sapiens
cuggaaggcaggcccgugccugguuuugcg

SEQ ID NO: 234283 - RNA, 32 nt, Homo Sapiens
caaggcugggcuucuuuuuuuaagugacuuca

SEQ ID NO: 234284 - RNA, 32 nt, Homo Sapiens
guggugcagagauaaggcaacuccucugugaa

SEQ ID NO: 234285 - RNA, 31 nt, Homo Sapiens
aacaagauggccgacgcggcggccacagcug

SEQ ID NO: 234286 - RNA, 32 nt, Homo Sapiens
uucuugcccucucccuaacggggagaaaucga

SEQ ID NO: 234287 - RNA, 32 nt, Homo Sapiens
ccucuuccugaugggcaaccacaccacugccu

SEQ ID NO: 234288 - RNA, 32 nt, Homo Sapiens
auccaaaaaauauucuuaaacuguguauggug

SEQ ID NO: 234289 - RNA, 30 nt, Homo Sapiens
ccgcgccgcgcgcagugucugcagugccgg

SEQ ID NO: 234290 - RNA, 32 nt, Homo Sapiens
gguagguuggccuuuuauccacaggauacaga

SEQ ID NO: 234291 - RNA, 32 nt, Homo Sapiens
cuuccagcgagcaucauucggcuguuaccaaa

SEQ ID NO: 234292 - RNA, 32 nt, Homo Sapiens
gaucagggacugggcugcuugcuuucuauuua

SEQ ID NO: 234293 - RNA, 32 nt, Homo Sapiens
ccaguucugguuuucuagauuguacuuaugca

SEQ ID NO: 234294 - RNA, 32 nt, Homo Sapiens
cccuaguggaagauuauaugauaaacuuucag

SEQ ID NO: 234295 - RNA, 32 nt, Homo Sapiens
aucagaauaaaaagacaaaaccaucauuaaca

SEQ ID NO: 234296 - RNA, 32 nt, Homo Sapiens
guggagcuggucacgcugggcgcccaggagga

SEQ ID NO: 234297 - RNA, 32 nt, Homo Sapiens
uauagcgccucaucccuguauuagaguaaaua

SEQ ID NO: 234298 - RNA, 32 nt, Homo Sapiens
ugcuccacccuccauuccuccuccccugggcc

SEQ ID NO: 234299 - RNA, 32 nt, Homo Sapiens
guuuacauuuuaggaaggaaaauaguuuuguu

SEQ ID NO: 234300 - RNA, 32 nt, Homo Sapiens
cucuuucuuugcaacagcaguguucuggguga

SEQ ID NO: 234301 - RNA, 32 nt, Homo Sapiens
ucuucaugcuuuugcccuucucaaguugaagu

SEQ ID NO: 234302 - RNA, 32 nt, Homo Sapiens
guuuuaaaacaaauuacaguuuuguauggauu

SEQ ID NO: 234303 - RNA, 32 nt, Homo Sapiens
uggaucccuggggcaggccucuccucggccug

SEQ ID NO: 234304 - RNA, 32 nt, Homo Sapiens
ucgggguucuaaggagugacuccugucccggc

SEQ ID NO: 234305 - RNA, 32 nt, Homo Sapiens
cacgggguucccuccuagcucucccagugaac

SEQ ID NO: 234306 - RNA, 32 nt, Homo Sapiens
gucccuuggccauaaauuccuacuuguacuug

SEQ ID NO: 234307 - RNA, 32 nt, Homo Sapiens
aggugguuggagggccaacaguucacaucugu

SEQ ID NO: 234308 - RNA, 32 nt, Homo Sapiens
gaauauuacaguguuaacugccauauauguaa

SEQ ID NO: 234309 - RNA, 32 nt, Homo Sapiens
cuuuagagaguaguaagcauggcugccuaugc

SEQ ID NO: 234310 - RNA, 30 nt, Homo Sapiens
ccuggagccaccccuuccugcccuggcgcc

SEQ ID NO: 234311 - RNA, 32 nt, Homo Sapiens
gcauuacaaagauggauguucuucaguuccua

SEQ ID NO: 234312 - RNA, 32 nt, Homo Sapiens
ggucucucucccuccuucuccuuccucuguga

SEQ ID NO: 234313 - RNA, 32 nt, Homo Sapiens
uccugcggacauucucugcuuaaauucuggag

SEQ ID NO: 234314 - RNA, 32 nt, Homo Sapiens
uuuggugcucuggaaauguugaggguggguuu

SEQ ID NO: 234315 - RNA, 32 nt, Homo Sapiens
augaaauuuaaagacaagaaugucuagaguua

SEQ ID NO: 234316 - RNA, 32 nt, Homo Sapiens
uguuuccacaugucugucucauucuucacugg

SEQ ID NO: 234317 - RNA, 32 nt, Homo Sapiens
ccccgcggcccucggcgagcagcucggcuccc

SEQ ID NO: 234318 - RNA, 32 nt, Homo Sapiens
cgccacauuucccccaaguuacauucccagga

SEQ ID NO: 234319 - RNA, 32 nt, Homo Sapiens
cuccccguucccuucacccccaccccgcaccc

SEQ ID NO: 234320 - RNA, 32 nt, Homo Sapiens
ggaguucaagaccaccuggccaacauggugaa

SEQ ID NO: 234321 - RNA, 32 nt, Homo Sapiens
guggucuccauggcaauggguguccaugguaa

SEQ ID NO: 234322 - RNA, 32 nt, Homo Sapiens
gcggagcagccucggcggcggcggccgaacca

SEQ ID NO: 234323 - RNA, 32 nt, Homo Sapiens
ggcacacaggaguugggacuggcugccacaaa

SEQ ID NO: 234324 - RNA, 32 nt, Homo Sapiens
cgggucuggggccccaggcuuuccccugccuc

SEQ ID NO: 234325 - RNA, 32 nt, Homo Sapiens
uaggaauuugugcuuacaaagcaggagaauua

SEQ ID NO: 234326 - RNA, 32 nt, Homo Sapiens
uccuacuuccuccucuccuggaugcucaucag

SEQ ID NO: 234327 - RNA, 32 nt, Homo Sapiens
acuuguaggugugcuuggugccacuagauugu

SEQ ID NO: 234328 - RNA, 32 nt, Homo Sapiens
cgcugcgggcccagcugagucuauguagguga

SEQ ID NO: 234329 - RNA, 32 nt, Homo Sapiens
cuaaaggcucugccccagcaacccacaagcag

SEQ ID NO: 234330 - RNA, 32 nt, Homo Sapiens
gauuccacauucauauuacuuacuuauacuau

SEQ ID NO: 234331 - RNA, 32 nt, Homo Sapiens
gguacuggggccacugugggccugcugccacc

SEQ ID NO: 234332 - RNA, 32 nt, Homo Sapiens
guccgcccgagcugugguugugggcgccggac

SEQ ID NO: 234333 - RNA, 32 nt, Homo Sapiens
augagccagugccccaggucugcuggccaaca

SEQ ID NO: 234334 - RNA, 32 nt, Homo Sapiens
acauuuugcauucaggcuguuucuucuaucac

SEQ ID NO: 234335 - RNA, 32 nt, Homo Sapiens
uucauuuguaaaacuuuguauuaguguaacau

SEQ ID NO: 234336 - RNA, 32 nt, Homo Sapiens
cuaacacacacacacacacacacacacacaca

SEQ ID NO: 234337 - RNA, 30 nt, Homo Sapiens
accgagcccgugacggacuauaggacagcg

SEQ ID NO: 234338 - RNA, 32 nt, Homo Sapiens
ggaaccaauuuaaacucuuacaugccuuucag

SEQ ID NO: 234339 - RNA, 32 nt, Homo Sapiens
accgcuuuauguacauaacauaugcaguuuac

SEQ ID NO: 234340 - RNA, 32 nt, Homo Sapiens
acuucuaaauuuuggaaagauaacucucguuc

SEQ ID NO: 234341 - RNA, 30 nt, Homo Sapiens
cuaucaugggcugcucugaggacccuccuu

SEQ ID NO: 234342 - RNA, 32 nt, Homo Sapiens
ugaagaacucuggccaagaggacgaggaucug

SEQ ID NO: 234343 - RNA, 32 nt, Homo Sapiens
ggcggccaguaaccaaaccagccagcugggcu

SEQ ID NO: 234344 - RNA, 32 nt, Homo Sapiens
acagagaauguuucacaguucuggcauuuaaa

SEQ ID NO: 234345 - RNA, 32 nt, Homo Sapiens
uguacauuuuuacuguauuugagacauuuuuu

SEQ ID NO: 234346 - RNA, 32 nt, Homo Sapiens
gagaaaacccacccugcucaccuaaacccugg

SEQ ID NO: 234347 - RNA, 32 nt, Homo Sapiens
agccccuucccucucugggacuugucuucugg

SEQ ID NO: 234348 - RNA, 32 nt, Homo Sapiens
ugugggaaggauuuauuuacaguguguuguaa

SEQ ID NO: 234349 - RNA, 32 nt, Homo Sapiens
cgucugucuacccccagcaugagcggccugcg

SEQ ID NO: 234350 - RNA, 31 nt, Homo Sapiens
uuugucguguacaagcucagagcuuggacag

SEQ ID NO: 234351 - RNA, 32 nt, Homo Sapiens
uucacucugcugucugaucuugggaggguggg

SEQ ID NO: 234352 - RNA, 32 nt, Homo Sapiens
ggguagccagcuugggcuguccccuugagacc

SEQ ID NO: 234353 - RNA, 30 nt, Homo Sapiens
gaagcagagaagcugucagcagccuaccca

SEQ ID NO: 234354 - RNA, 32 nt, Homo Sapiens
gaagucugacuauccggagauggcggugagua

SEQ ID NO: 234355 - RNA, 32 nt, Homo Sapiens
uuucccuuccgccggaaguagggcgacuuucc

SEQ ID NO: 234356 - RNA, 32 nt, Homo Sapiens
cuuggaaauggcagagcugacagcucaaaucu

SEQ ID NO: 234357 - RNA, 32 nt, Homo Sapiens
uaaugccuuggaaguuauucucuuuucuauag

SEQ ID NO: 234358 - RNA, 32 nt, Homo Sapiens
ugaggguuuucuuuuucuuuuuccuuuuuuuu

SEQ ID NO: 234359 - RNA, 32 nt, Homo Sapiens
uccgugcgcgucgggcccgagcccacagaguc

SEQ ID NO: 234360 - RNA, 32 nt, Homo Sapiens
uccaggaaaaaauaaaaagaguaugagucuuc

SEQ ID NO: 234361 - RNA, 32 nt, Homo Sapiens
agauuugagcucaaaggcaaccgugguuacug

SEQ ID NO: 234362 - RNA, 32 nt, Homo Sapiens
uaaucacgauuuuaaagaaaaauguuucaucu

SEQ ID NO: 234363 - RNA, 28 nt, Homo Sapiens
aggagggggcggccauggggcugcuguc

SEQ ID NO: 234364 - RNA, 32 nt, Homo Sapiens
ugugcuuugauacuaaaaaucuguaaaauguu

SEQ ID NO: 234365 - RNA, 32 nt, Homo Sapiens
ggaggguggggaagaagaagaagaacuucuag

SEQ ID NO: 234366 - RNA, 32 nt, Homo Sapiens
gggccugacacccaccaaggaugaccugugga

SEQ ID NO: 234367 - RNA, 32 nt, Homo Sapiens
ugcgcucccgccggcgaguucuccccgcgcgc

SEQ ID NO: 234368 - RNA, 32 nt, Homo Sapiens
ucacugaaaccugugccuccccgguucgagcg

SEQ ID NO: 234369 - RNA, 32 nt, Homo Sapiens
cuauagaaaaggaaagcuccagcuaaauagga

SEQ ID NO: 234370 - RNA, 32 nt, Homo Sapiens
accucucagagguauugugagguuacugugau

SEQ ID NO: 234371 - RNA, 32 nt, Homo Sapiens
aagccgcgcccguccgcggcgccgccagccag

SEQ ID NO: 234372 - RNA, 32 nt, Homo Sapiens
aagguggacacuagccccugcugcugcaggca

SEQ ID NO: 234373 - RNA, 32 nt, Homo Sapiens
uuuggggguauacauuucacacauucuuuugc

SEQ ID NO: 234374 - RNA, 31 nt, Homo Sapiens
guccuccucgguaaugaguccacucgguccc

SEQ ID NO: 234375 - RNA, 32 nt, Homo Sapiens
cuugccugagggauuaaaauggcagcuugcca

SEQ ID NO: 234376 - RNA, 32 nt, Homo Sapiens
uuugagcuucagugcuuuauuucaguaugagg

SEQ ID NO: 234377 - RNA, 32 nt, Homo Sapiens
agauaaaauucuuugaaagaaauguacuguuu

SEQ ID NO: 234378 - RNA, 32 nt, Homo Sapiens
auccuugaugauugacaacacccauuuuuccu

SEQ ID NO: 234379 - RNA, 32 nt, Homo Sapiens
cugaauacugaauaaccaugaaugacugaaua

SEQ ID NO: 234380 - RNA, 32 nt, Homo Sapiens
uugguggaaagagcaaagacuuugaaguucuc

SEQ ID NO: 234381 - RNA, 32 nt, Homo Sapiens
gccucuuuuuuuuuuuuuuuuauuuuuuuuuu

SEQ ID NO: 234382 - RNA, 32 nt, Homo Sapiens
uugggucaagggggcugcucugcaagcccacu

SEQ ID NO: 234383 - RNA, 32 nt, Homo Sapiens
ggaccccugugccuugucacagaugggugcug

SEQ ID NO: 234384 - RNA, 32 nt, Homo Sapiens
ucgaggcccagcugagaaggaucccaaugcga

SEQ ID NO: 234385 - RNA, 32 nt, Homo Sapiens
cccuggcccccucuccaucucuccugaccucc

SEQ ID NO: 234386 - RNA, 32 nt, Homo Sapiens
uuucauagaaagaauuuuuucuugaucuguuu

SEQ ID NO: 234387 - RNA, 32 nt, Homo Sapiens
ggcgacccuguggcccggggaagcgcgggagg

SEQ ID NO: 234388 - RNA, 32 nt, Homo Sapiens
uguggcacccucagccagaagcaguaggggac

SEQ ID NO: 234389 - RNA, 32 nt, Homo Sapiens
agccuuuuaauacuaaguaugaaacaaccuau

SEQ ID NO: 234390 - RNA, 32 nt, Homo Sapiens
aauacacauuuuauuauguaaucauguucugg

SEQ ID NO: 234391 - RNA, 32 nt, Homo Sapiens
uagauuugauguuuuuuuuuuagauuuauuuu

SEQ ID NO: 234392 - RNA, 32 nt, Homo Sapiens
gagcugccaggguggggacgcugcccuagcgg

SEQ ID NO: 234393 - RNA, 32 nt, Homo Sapiens
aaguuggggggacugugaugacaauuaaauca

SEQ ID NO: 234394 - RNA, 32 nt, Homo Sapiens
ggcgaucgagaccauccuggcuaacaugguga

SEQ ID NO: 234395 - RNA, 32 nt, Homo Sapiens
agccccugccccaccagccccuugacgcucuu

SEQ ID NO: 234396 - RNA, 32 nt, Homo Sapiens
uuaugauuuuguacuucuguaccuguuuccua

SEQ ID NO: 234397 - RNA, 32 nt, Homo Sapiens
cagguggaucauuugaggucaggaguucgaga

SEQ ID NO: 234398 - RNA, 28 nt, Homo Sapiens
ccuguguugucuaaacaugaguuucagc

SEQ ID NO: 234399 - RNA, 32 nt, Homo Sapiens
uggauauagaaaggagaccuguaucaaacugc

SEQ ID NO: 234400 - RNA, 32 nt, Homo Sapiens
cccagucccucauuucugucgcucacgugccc

SEQ ID NO: 234401 - RNA, 32 nt, Homo Sapiens
cgccacggcuccugugacgcugucaccugcgc

SEQ ID NO: 234402 - RNA, 32 nt, Homo Sapiens
gaaaagggcaugucuugcuugcgucucuaggc

SEQ ID NO: 234403 - RNA, 32 nt, Homo Sapiens
uaaaggcauauaugggaaugggguagguaacu

SEQ ID NO: 234404 - RNA, 32 nt, Homo Sapiens
auuguauguauuuguuauaauaaaauggcuug

SEQ ID NO: 234405 - RNA, 32 nt, Homo Sapiens
gcaaauaaauguuauagaucguaauaguugua

SEQ ID NO: 234406 - RNA, 32 nt, Homo Sapiens
cucuaauuucaucuucaacucugcucaucguu

SEQ ID NO: 234407 - RNA, 32 nt, Homo Sapiens
gcuucauuucuuccucaccacaacuaauucgg

SEQ ID NO: 234408 - RNA, 32 nt, Homo Sapiens
ccaggaagugacaggauggaccacguggccau

SEQ ID NO: 234409 - RNA, 32 nt, Homo Sapiens
agcccaggaaaugacucugguuuugaguggcc

SEQ ID NO: 234410 - RNA, 32 nt, Homo Sapiens
uacaggcgcccgucaccacacccagguaauuu

SEQ ID NO: 234411 - RNA, 32 nt, Homo Sapiens
agggacacguggggugugcugcugcugcuccc

SEQ ID NO: 234412 - RNA, 32 nt, Homo Sapiens
ggacuccgcuuccuucccuccccuccccugcg

SEQ ID NO: 234413 - RNA, 32 nt, Homo Sapiens
agacccccaagccaccggcucagaccugcuuc

SEQ ID NO: 234414 - RNA, 32 nt, Homo Sapiens
ucuuuauguucuuuaaauuugauucauuagug

SEQ ID NO: 234415 - RNA, 28 nt, Homo Sapiens
gcgagcgggcggccggcuaggguggaag

SEQ ID NO: 234416 - RNA, 32 nt, Homo Sapiens
ugcucauccagccacaccccuggcuugagaug

SEQ ID NO: 234417 - RNA, 32 nt, Homo Sapiens
cgcccggauccccugagcugcccgccauccca

SEQ ID NO: 234418 - RNA, 32 nt, Homo Sapiens
aaugggacuuaaugcuuuuuuauuuuauagga

SEQ ID NO: 234419 - RNA, 32 nt, Homo Sapiens
ucgcagccacuccagcgccuccccuccgcucc

SEQ ID NO: 234420 - RNA, 32 nt, Homo Sapiens
gucuugggcgcuggagggccuguccugaccau

SEQ ID NO: 234421 - RNA, 32 nt, Homo Sapiens
gcauuccuaggcugcccgccucacuggaagaa

SEQ ID NO: 234422 - RNA, 32 nt, Homo Sapiens
agaaugguggauaauuacaacugcacaaaaau

SEQ ID NO: 234423 - RNA, 32 nt, Homo Sapiens
cuucaauaaggucacacacauaaaaagagcca

SEQ ID NO: 234424 - RNA, 32 nt, Homo Sapiens
ccccacugcauuccagccugggugacagagcg

SEQ ID NO: 234425 - RNA, 32 nt, Homo Sapiens
guuuucacacucauuuuuccuuacaacaauuc

SEQ ID NO: 234426 - RNA, 32 nt, Homo Sapiens
ccccuggauaaguguuauuaggugauucagaa

SEQ ID NO: 234427 - RNA, 32 nt, Homo Sapiens
gcuuuuaaaaauuuuuaaauaaaugauacuau

SEQ ID NO: 234428 - RNA, 32 nt, Homo Sapiens
ucaucaggaacucaucaguuuggccuuuugaa

SEQ ID NO: 234429 - RNA, 32 nt, Homo Sapiens
gagcuuuugcucugggucuccaguggauagga

SEQ ID NO: 234430 - RNA, 32 nt, Homo Sapiens
ggcuuuggaguccuuugcaaaaauauuuuggg

SEQ ID NO: 234431 - RNA, 32 nt, Homo Sapiens
agaguuccauuaggugauacauagauaagggc

SEQ ID NO: 234432 - RNA, 32 nt, Homo Sapiens
cacagggcaucucgggcuuggcuggucugcga

SEQ ID NO: 234433 - RNA, 32 nt, Homo Sapiens
uaacuuagggguaguuccugcugugagugguu

SEQ ID NO: 234434 - RNA, 32 nt, Homo Sapiens
acucauuacuugaagacagaaacuaaugugaa

SEQ ID NO: 234435 - RNA, 32 nt, Homo Sapiens
uuuacauucaaguuuaauugugcaacuuuuaa

SEQ ID NO: 234436 - RNA, 32 nt, Homo Sapiens
ucuuauuacuuauaguuuaucuauauuaaaca

SEQ ID NO: 234437 - RNA, 32 nt, Homo Sapiens
cccugggauggcgugagcacucccccagcgau

SEQ ID NO: 234438 - RNA, 32 nt, Homo Sapiens
accaaauaaaaauuacaaguauauggaauuua

SEQ ID NO: 234439 - RNA, 32 nt, Homo Sapiens
accauuuuuaaagugcacaaaaauauuauaua

SEQ ID NO: 234440 - RNA, 32 nt, Homo Sapiens
auagcagugaugaugauggcuucugccagucc

SEQ ID NO: 234441 - RNA, 32 nt, Homo Sapiens
ccgcugccuuucccaggcuccccucacccagc

SEQ ID NO: 234442 - RNA, 32 nt, Homo Sapiens
gaaacagucucucucugucacccaggcuggcg

SEQ ID NO: 234443 - RNA, 28 nt, Homo Sapiens
gggugggaggguaccaggagugggcggg

SEQ ID NO: 234444 - RNA, 32 nt, Homo Sapiens
ccaugcuccaugccgccccgccgcccguggga

SEQ ID NO: 234445 - RNA, 32 nt, Homo Sapiens
aggccuguggugcugcagacaaccgucuccug

SEQ ID NO: 234446 - RNA, 32 nt, Homo Sapiens
cuggcgcagcggggcccuucuucccuccgcau

SEQ ID NO: 234447 - RNA, 32 nt, Homo Sapiens
caccugcagccagcuggccucgggcugcaaac

SEQ ID NO: 234448 - RNA, 30 nt, Homo Sapiens
ggaggugggucgcagcaccagauggggagc

SEQ ID NO: 234449 - RNA, 32 nt, Homo Sapiens
uacuuuaaaaauuuacuacaauauguacauuu

SEQ ID NO: 234450 - RNA, 32 nt, Homo Sapiens
ccaugagaacagccaccuuguuuaccuuguuc

SEQ ID NO: 234451 - RNA, 32 nt, Homo Sapiens
gcuuagaggaccaggagaagggggagcuggag

SEQ ID NO: 234452 - RNA, 32 nt, Homo Sapiens
uuuccuuuuuagaaguuuuuuuccuuaaugug

SEQ ID NO: 234453 - RNA, 32 nt, Homo Sapiens
aaaauguuuauaguuuacuuugaaaguaaaau

SEQ ID NO: 234454 - RNA, 32 nt, Homo Sapiens
cuuccugcauuuuuccucugccacaggcauuc

SEQ ID NO: 234455 - RNA, 32 nt, Homo Sapiens
gcagcggcucuccuuuccacagccggcgcucc

SEQ ID NO: 234456 - RNA, 32 nt, Homo Sapiens
ccuauacccagcugggguugcugcccugaacg

SEQ ID NO: 234457 - RNA, 32 nt, Homo Sapiens
ccgggccgagggcgccagagggggccaugucg

SEQ ID NO: 234458 - RNA, 32 nt, Homo Sapiens
uccuauuuuucuucuuuuugcuuuuuuugcac

SEQ ID NO: 234459 - RNA, 32 nt, Homo Sapiens
ccacaccugcccagcucuggcuucucuguuga

SEQ ID NO: 234460 - RNA, 32 nt, Homo Sapiens
cagcagguguaguagucuucauuuucauggua

SEQ ID NO: 234461 - RNA, 32 nt, Homo Sapiens
ccucugaaacaguagggauugcgggaagaagg

SEQ ID NO: 234462 - RNA, 32 nt, Homo Sapiens
agcaggagccuggccugggaggacgauuuauu

SEQ ID NO: 234463 - RNA, 32 nt, Homo Sapiens
cucgguuuaaucuugucucaugaauuuccaga

SEQ ID NO: 234464 - RNA, 32 nt, Homo Sapiens
ccaagcccgagcaccggaccacguugcugccc

SEQ ID NO: 234465 - RNA, 32 nt, Homo Sapiens
uacaguggcuuauguuuuucauaguaauucaa

SEQ ID NO: 234466 - RNA, 32 nt, Homo Sapiens
aacuccuauucccauuuuugcuaaacucaauu

SEQ ID NO: 234467 - RNA, 32 nt, Homo Sapiens
aaagcugggccugggagcguuuagcugguggg

SEQ ID NO: 234468 - RNA, 32 nt, Homo Sapiens
cucgcucccccgccccagucccgcaguccggg

SEQ ID NO: 234469 - RNA, 32 nt, Homo Sapiens
aacacuauguaaauaaaccuuuaguaauaaag

SEQ ID NO: 234470 - RNA, 31 nt, Homo Sapiens
ugcugguugcgcagccaccucgggauacugc

SEQ ID NO: 234471 - RNA, 32 nt, Homo Sapiens
ccuggguucgaacacggcacccgcacugcgcg

SEQ ID NO: 234472 - RNA, 32 nt, Homo Sapiens
aauuggggaaacagaauagauauuuuaugaua

SEQ ID NO: 234473 - RNA, 30 nt, Homo Sapiens
ccgaggggcgagcgcgcgggcucgcacgga

SEQ ID NO: 234474 - RNA, 32 nt, Homo Sapiens
gagaugcugcgcaugcaccacgugcugaaaga

SEQ ID NO: 234475 - RNA, 32 nt, Homo Sapiens
cagcggggagaaugggagugcggggcgccaga

SEQ ID NO: 234476 - RNA, 32 nt, Homo Sapiens
cccucuccaucaccugcucugcucuuacaagg

SEQ ID NO: 234477 - RNA, 32 nt, Homo Sapiens
gucagccaaggugccugaaacgauacgugugc

SEQ ID NO: 234478 - RNA, 32 nt, Homo Sapiens
gauuaaggauacuguugaccugucacuguuua

SEQ ID NO: 234479 - RNA, 32 nt, Homo Sapiens
ugcauucuuucuuccugugcuguggccuggaa

SEQ ID NO: 234480 - RNA, 32 nt, Homo Sapiens
acacuggcagggugggauuugcugccccuugc

SEQ ID NO: 234481 - RNA, 32 nt, Homo Sapiens
cgcucggccugcucgcccacuuccucccggcc

SEQ ID NO: 234482 - RNA, 32 nt, Homo Sapiens
uuucagaaaaggagagguugacagucauccac

SEQ ID NO: 234483 - RNA, 32 nt, Homo Sapiens
cucgcucuccccacccagugcaguggccgccg

SEQ ID NO: 234484 - RNA, 32 nt, Homo Sapiens
auguuauauauuuauuuuuuuauaaaucaaga

SEQ ID NO: 234485 - RNA, 32 nt, Homo Sapiens
uguaaaaaaaagacagugguuuugaaauuguu

SEQ ID NO: 234486 - RNA, 32 nt, Homo Sapiens
gagcagagggucaugcgggccccacaggagaa

SEQ ID NO: 234487 - RNA, 32 nt, Homo Sapiens
ucuuagcugucacguuggcuccuuccagggug

SEQ ID NO: 234488 - RNA, 32 nt, Homo Sapiens
cugugccgugcagcucagcaugcauagguggg

SEQ ID NO: 234489 - RNA, 32 nt, Homo Sapiens
uggcaugcaccuguagucccagcugcuuggga

SEQ ID NO: 234490 - RNA, 32 nt, Homo Sapiens
uccagcaggccaggaagaaggcacaguccagg

SEQ ID NO: 234491 - RNA, 32 nt, Homo Sapiens
cauuauucuuugauuccagcuuuuagaauggg

SEQ ID NO: 234492 - RNA, 32 nt, Homo Sapiens
cucacucucuaggcccccagccccacacugcc

SEQ ID NO: 234493 - RNA, 32 nt, Homo Sapiens
uaaauaaaaauauugaaugcuuucuaacaaaa

SEQ ID NO: 234494 - RNA, 32 nt, Homo Sapiens
aaaacugaaaacuaccugggaucauaguguuu

SEQ ID NO: 234495 - RNA, 32 nt, Homo Sapiens
gaccugcaagugccgccucccuccggaggugc

SEQ ID NO: 234496 - RNA, 32 nt, Homo Sapiens
cugucuuucgggauccucuuuggaccacagau

SEQ ID NO: 234497 - RNA, 32 nt, Homo Sapiens
ccucauauuuucuguccagucaauguugguua

SEQ ID NO: 234498 - RNA, 32 nt, Homo Sapiens
auuuuguugugauuuuguacagaauuuuuaau

SEQ ID NO: 234499 - RNA, 32 nt, Homo Sapiens
uuauccgcagcuuuuauuuugaagacagugcc

SEQ ID NO: 234500 - RNA, 32 nt, Homo Sapiens
gguuccgcgccgggcguggacgguguggggcg

SEQ ID NO: 234501 - RNA, 32 nt, Homo Sapiens
aggaguugucaaggcagagaagagaguguuug

SEQ ID NO: 234502 - RNA, 32 nt, Homo Sapiens
cacauguguaccuauguaacaaaccugcacau

SEQ ID NO: 234503 - RNA, 32 nt, Homo Sapiens
aaauguggugacugagguacaggaaacuacua

SEQ ID NO: 234504 - RNA, 32 nt, Homo Sapiens
gcccuuuucacagagguggccuuggagucugg

SEQ ID NO: 234505 - RNA, 32 nt, Homo Sapiens
cuguaaugccagcacucugggaggccaaggug

SEQ ID NO: 234506 - RNA, 32 nt, Homo Sapiens
cuguaggugaccucagagcgucggggaugggc

SEQ ID NO: 234507 - RNA, 32 nt, Homo Sapiens
agauguugugucuuguguuuuugucuuauuuu

SEQ ID NO: 234508 - RNA, 32 nt, Homo Sapiens
cauggagccaagagggugcagguuggcagugg

SEQ ID NO: 234509 - RNA, 32 nt, Homo Sapiens
uuccuuuuguuguuuaauucuuuagaaucuua

SEQ ID NO: 234510 - RNA, 32 nt, Homo Sapiens
uauauggcugcuacauuuccauuuucauuuuc

SEQ ID NO: 234511 - RNA, 30 nt, Homo Sapiens
uggcuugucuacugcauccucgggacaguc

SEQ ID NO: 234512 - RNA, 32 nt, Homo Sapiens
ccagaucuucucagagcuuuagcuuuucuagc

SEQ ID NO: 234513 - RNA, 32 nt, Homo Sapiens
acaggcugccggagcgagccugccgcgcgccg

SEQ ID NO: 234514 - RNA, 32 nt, Homo Sapiens
ucccaggacagcuccaggaucgagaucacugu

SEQ ID NO: 234515 - RNA, 32 nt, Homo Sapiens
gcuggcucccggcuccucccgacgucuccuac

SEQ ID NO: 234516 - RNA, 32 nt, Homo Sapiens
ccgcuccucccuccccccacugugggcugggg

SEQ ID NO: 234517 - RNA, 32 nt, Homo Sapiens
uacuuacacuguauugaagucacgucauuugu

SEQ ID NO: 234518 - RNA, 32 nt, Homo Sapiens
ccccagccaggucagagucggcccguaaauca

SEQ ID NO: 234519 - RNA, 32 nt, Homo Sapiens
cuauuuaaaaauuacaaaaaugaacccaaguc

SEQ ID NO: 234520 - RNA, 32 nt, Homo Sapiens
caugauuauuaaggauauguaugugaauuuuu

SEQ ID NO: 234521 - RNA, 32 nt, Homo Sapiens
caaaucuacaacaugucccagcccauucuccg

SEQ ID NO: 234522 - RNA, 32 nt, Homo Sapiens
ugcugccccuccccaucuccaugcccucuccu

SEQ ID NO: 234523 - RNA, 32 nt, Homo Sapiens
aaaauguuuucaaagguugagaaccugaaaau

SEQ ID NO: 234524 - RNA, 32 nt, Homo Sapiens
caaggggacaggcauuugugggccuaaccucc

SEQ ID NO: 234525 - RNA, 32 nt, Homo Sapiens
gcuggccuagcggccuggccccagugacggcc

SEQ ID NO: 234526 - RNA, 29 nt, Homo Sapiens
auguacauguguauguacauauauauuuu

SEQ ID NO: 234527 - RNA, 32 nt, Homo Sapiens
cauuucagauuccuaaagaaauagacauuuua

SEQ ID NO: 234528 - RNA, 32 nt, Homo Sapiens
gcugcgcggaggaagcgcuggggucccggagg

SEQ ID NO: 234529 - RNA, 32 nt, Homo Sapiens
cagucugacccacacagcgaaaccccgucucu

SEQ ID NO: 234530 - RNA, 32 nt, Homo Sapiens
cggacuccccccacccacgcacaccucggccu

SEQ ID NO: 234531 - RNA, 32 nt, Homo Sapiens
auuauuugaaguuuucuuuauuacggauucaa

SEQ ID NO: 234532 - RNA, 32 nt, Homo Sapiens
aauauuuaauaaauacucucgaauuuggaauu

SEQ ID NO: 234533 - RNA, 32 nt, Homo Sapiens
aauuauauuaaaucugggauuaugacgguauc

SEQ ID NO: 234534 - RNA, 32 nt, Homo Sapiens
auaauuaaaaaauaaaaaggaccaauguggau

SEQ ID NO: 234535 - RNA, 32 nt, Homo Sapiens
uuugccauuagguuugccauuaggguauucau

SEQ ID NO: 234536 - RNA, 32 nt, Homo Sapiens
caguugagaaugagccugugugguagcugaug

SEQ ID NO: 234537 - RNA, 32 nt, Homo Sapiens
agccauguuaaaagucacugugcauuuauucu

SEQ ID NO: 234538 - RNA, 32 nt, Homo Sapiens
uccaccacagaauuggaugggcaucaggaagu

SEQ ID NO: 234539 - RNA, 32 nt, Homo Sapiens
aacagcccugcccaugcaaaguguccuguacg

SEQ ID NO: 234540 - RNA, 31 nt, Homo Sapiens
gauugugggagcaguuuaggaguccauggaa

SEQ ID NO: 234541 - RNA, 32 nt, Homo Sapiens
uuuggcuguaaaucugucugguccugggcuuu

SEQ ID NO: 234542 - RNA, 32 nt, Homo Sapiens
cauugagaugagaauggguagauggaacggag

SEQ ID NO: 234543 - RNA, 32 nt, Homo Sapiens
gggcgcgggcagccuucugacugggucggagg

SEQ ID NO: 234544 - RNA, 32 nt, Homo Sapiens
gccuaggucugugcuguaaauccuaagauuaa

SEQ ID NO: 234545 - RNA, 32 nt, Homo Sapiens
guauggggaaaagaaucaagagaccugacugc

SEQ ID NO: 234546 - RNA, 32 nt, Homo Sapiens
aucaccagccauuccuuggagggggcuuucuc

SEQ ID NO: 234547 - RNA, 32 nt, Homo Sapiens
auugagucugaagaggaugugcugugguguau

SEQ ID NO: 234548 - RNA, 32 nt, Homo Sapiens
uucaaaaacaaaucagaagcagaugcugauug

SEQ ID NO: 234549 - RNA, 32 nt, Homo Sapiens
uuuuuucugaaucauaauuaaacuuuaugaua

SEQ ID NO: 234550 - RNA, 32 nt, Homo Sapiens
ggggguucuuugacccaggauagucuugcuuc

SEQ ID NO: 234551 - RNA, 32 nt, Homo Sapiens
gcugggaaauggugaugugacucuucuucagc

SEQ ID NO: 234552 - RNA, 30 nt, Homo Sapiens
acuaaggaccugaccacccauuucagcauc

SEQ ID NO: 234553 - RNA, 32 nt, Homo Sapiens
gggggaggguggcagugggaggggcuguaugg

SEQ ID NO: 234554 - RNA, 32 nt, Homo Sapiens
gaaacucaaauauuuucauuuuggauauucuc

SEQ ID NO: 234555 - RNA, 32 nt, Homo Sapiens
aaggggcggaggacugcccaccccaccucugc

SEQ ID NO: 234556 - RNA, 32 nt, Homo Sapiens
aucaucuccccuuuccucuccacgucccgccc

SEQ ID NO: 234557 - RNA, 32 nt, Homo Sapiens
uccuaguuuccucuccuucguaucccgagucu

SEQ ID NO: 234558 - RNA, 32 nt, Homo Sapiens
gaagcaggagauguugaugaggcuguauuuuu

SEQ ID NO: 234559 - RNA, 32 nt, Homo Sapiens
cgcugcacuccagccugggugacagagugaga

SEQ ID NO: 234560 - RNA, 29 nt, Homo Sapiens
cauaaaguuagaaucuauuuucuauguac

SEQ ID NO: 234561 - RNA, 32 nt, Homo Sapiens
aggggcuuguugcaggcuguggguuuuggugu

SEQ ID NO: 234562 - RNA, 32 nt, Homo Sapiens
cugauuuccagaauaguaaucuuuuuccagcg

SEQ ID NO: 234563 - RNA, 32 nt, Homo Sapiens
uuuaucaauaaaaaaaucauagcaauaagauc

SEQ ID NO: 234564 - RNA, 32 nt, Homo Sapiens
agagugccuugcuuuuauuucagacagcagag

SEQ ID NO: 234565 - RNA, 32 nt, Homo Sapiens
uuucugggucucagcccucucugcgguugagg

SEQ ID NO: 234566 - RNA, 32 nt, Homo Sapiens
ugcuguccccuucgacccucagcccucuggug

SEQ ID NO: 234567 - RNA, 32 nt, Homo Sapiens
uccuacuaauagaaacaaaauacuaaggauuu

SEQ ID NO: 234568 - RNA, 32 nt, Homo Sapiens
ugcaagguaaagaaagaaaaaagggaaauaac

SEQ ID NO: 234569 - RNA, 32 nt, Homo Sapiens
ucugugacgcgcggcccgaggcgcacgcaggg

SEQ ID NO: 234570 - RNA, 32 nt, Homo Sapiens
aucagcagugguucuccuacuuucucaguggg

SEQ ID NO: 234571 - RNA, 32 nt, Homo Sapiens
cauaaauaccucacuauccuggaaaacagggc

SEQ ID NO: 234572 - RNA, 32 nt, Homo Sapiens
uucuuccgcgagagaaggcuaugcagagggga

SEQ ID NO: 234573 - RNA, 32 nt, Homo Sapiens
cauuuuacugaaugaaaaaaucauuacuauuc

SEQ ID NO: 234574 - RNA, 32 nt, Homo Sapiens
uguuggccagcguggucuugaacgccugaccu

SEQ ID NO: 234575 - RNA, 32 nt, Homo Sapiens
uuaggggccaaggggagggaauguuuaaaaag

SEQ ID NO: 234576 - RNA, 32 nt, Homo Sapiens
gcacaaucgccucccuggcccugagccuucuu

SEQ ID NO: 234577 - RNA, 32 nt, Homo Sapiens
guguuaaauaaaugucauugucauagaacaua

SEQ ID NO: 234578 - RNA, 32 nt, Homo Sapiens
gcgggaaggggaggggaagaagagucucagac

SEQ ID NO: 234579 - RNA, 32 nt, Homo Sapiens
ucauggcucucguuuuuggggucauggggagg

SEQ ID NO: 234580 - RNA, 32 nt, Homo Sapiens
uccccacugccccugcccugcccgcccguguc

SEQ ID NO: 234581 - RNA, 32 nt, Homo Sapiens
cccuguucccaauucuucuccuacccccaccu

SEQ ID NO: 234582 - RNA, 32 nt, Homo Sapiens
gaaggucgggcccugcugccccgccccguccu

SEQ ID NO: 234583 - RNA, 32 nt, Homo Sapiens
uccaggcggacgggguggaagguucagagcag

SEQ ID NO: 234584 - RNA, 32 nt, Homo Sapiens
ucuuuaagauaaaaaugcauacgauuuuuaca

SEQ ID NO: 234585 - RNA, 32 nt, Homo Sapiens
acuuauuuccauggauuccccuggacauauuc

SEQ ID NO: 234586 - RNA, 32 nt, Homo Sapiens
agacugaacuaauucagaguaacagugcucuu

SEQ ID NO: 234587 - RNA, 32 nt, Homo Sapiens
gaggguuggguguccauggugcccugggcugu

SEQ ID NO: 234588 - RNA, 32 nt, Homo Sapiens
agcugcucauuucacuauucuguuucugagug

SEQ ID NO: 234589 - RNA, 32 nt, Homo Sapiens
gagaagggcgccagcaggcccgcggcuguuuc

SEQ ID NO: 234590 - RNA, 29 nt, Homo Sapiens
cagccugggcgacagagggagacacuguc

SEQ ID NO: 234591 - RNA, 32 nt, Homo Sapiens
caaaguacuuuggguagcuauaaagaagacug

SEQ ID NO: 234592 - RNA, 32 nt, Homo Sapiens
uaugcaugaagauaauguaaagguuuuuauua

SEQ ID NO: 234593 - RNA, 32 nt, Homo Sapiens
cacagaggcagagcccuuggggccugugggcu

SEQ ID NO: 234594 - RNA, 32 nt, Homo Sapiens
aaauuucuaaaagauuugagagcaucucaauu

SEQ ID NO: 234595 - RNA, 32 nt, Homo Sapiens
gauggagcgcaagcgaagcaucagugcccagc

SEQ ID NO: 234596 - RNA, 27 nt, Homo Sapiens
gucaccgucuucuucagcuuccuagua

SEQ ID NO: 234597 - RNA, 32 nt, Homo Sapiens
uuuagccccccgccccacccucgcugaccuaa

SEQ ID NO: 234598 - RNA, 32 nt, Homo Sapiens
ggcaauacaaauauuaucacauagcgucaauu

SEQ ID NO: 234599 - RNA, 32 nt, Homo Sapiens
gcagccucagucccgccgccgcccgcugcguc

SEQ ID NO: 234600 - RNA, 32 nt, Homo Sapiens
uuccuaaguauuuuauagcagccaucaaaauu

SEQ ID NO: 234601 - RNA, 32 nt, Homo Sapiens
cagacacauugggacaaacccuggacagccau

SEQ ID NO: 234602 - RNA, 32 nt, Homo Sapiens
guucagcugcugucacagucucauuuguucuu

SEQ ID NO: 234603 - RNA, 32 nt, Homo Sapiens
gcccggagcuuaucuccgcccacagccagccc

SEQ ID NO: 234604 - RNA, 32 nt, Homo Sapiens
ggggcagggaagggugggaggggccccaucca

SEQ ID NO: 234605 - RNA, 32 nt, Homo Sapiens
ucuccuaguuuauauacagugugcaaaauaua

SEQ ID NO: 234606 - RNA, 32 nt, Homo Sapiens
ugggaggcagugccccucccagccuccucccu

SEQ ID NO: 234607 - RNA, 32 nt, Homo Sapiens
augaugaagacauugaugauaucuaauugaac

SEQ ID NO: 234608 - RNA, 32 nt, Homo Sapiens
gaucaggcauccaacugguuaagggaugccag

SEQ ID NO: 234609 - RNA, 32 nt, Homo Sapiens
uaugucugguaguuuuccuguguuuauggauu

SEQ ID NO: 234610 - RNA, 32 nt, Homo Sapiens
cuuugcuccgauccucauuugcuggugugggu

SEQ ID NO: 234611 - RNA, 32 nt, Homo Sapiens
ggacuuagaagccggaggaaaaucagcagccc

SEQ ID NO: 234612 - RNA, 32 nt, Homo Sapiens
cuggggugaagcugcgugauugagaacguagc

SEQ ID NO: 234613 - RNA, 32 nt, Homo Sapiens
uaggggggaggggacaugaagguagguaaaua

SEQ ID NO: 234614 - RNA, 32 nt, Homo Sapiens
aaacagccagagauuuucaaaguuauagaaaa

SEQ ID NO: 234615 - RNA, 32 nt, Homo Sapiens
acucuugaucccuugcuucccucccccagugc

SEQ ID NO: 234616 - RNA, 32 nt, Homo Sapiens
ccuguucauuguaagcacuuuuacggggcggg

SEQ ID NO: 234617 - RNA, 32 nt, Homo Sapiens
gcacugccacuggggaaaacuccaccuuccca

SEQ ID NO: 234618 - RNA, 32 nt, Homo Sapiens
ugagaguaauuuccuucauucuccugucagca

SEQ ID NO: 234619 - RNA, 32 nt, Homo Sapiens
gcagcaaaaaugaguucuuacuucugggcaca

SEQ ID NO: 234620 - RNA, 32 nt, Homo Sapiens
uugacaucuucaguccugugugcuuucagaaa

SEQ ID NO: 234621 - RNA, 32 nt, Homo Sapiens
ugcuggcgcuggugcuggugcuggugcuagug

SEQ ID NO: 234622 - RNA, 28 nt, Homo Sapiens
guucgggugaggacgaugacuucaagag

SEQ ID NO: 234623 - RNA, 32 nt, Homo Sapiens
cugagcaaacagccccuucucucgcuuugggu

SEQ ID NO: 234624 - RNA, 32 nt, Homo Sapiens
aacuggguccaugaugaaguguguguaugucc

SEQ ID NO: 234625 - RNA, 32 nt, Homo Sapiens
auuuaagcacaaucauuuuaaacgaauuuauc

SEQ ID NO: 234626 - RNA, 32 nt, Homo Sapiens
agaccagccugggcaacauagcaagauccugu

SEQ ID NO: 234627 - RNA, 32 nt, Homo Sapiens
ccucaccuucccucccuuaccccaagcaaggc

SEQ ID NO: 234628 - RNA, 32 nt, Homo Sapiens
ugagcuuuuccgugccucuccuccaccucucc

SEQ ID NO: 234629 - RNA, 32 nt, Homo Sapiens
ccagccuuguauauuucugaagagguggaucc

SEQ ID NO: 234630 - RNA, 32 nt, Homo Sapiens
ccaagaaggaagccgucuaucuuguggcgauc

SEQ ID NO: 234631 - RNA, 32 nt, Homo Sapiens
agcugcugaugcggcggcagggccuggucacu

SEQ ID NO: 234632 - RNA, 32 nt, Homo Sapiens
uuaaaaaauuuuaagauuuacacaauguuucu

SEQ ID NO: 234633 - RNA, 32 nt, Homo Sapiens
cgguuucggggaggaucucggacccagagacu

SEQ ID NO: 234634 - RNA, 32 nt, Homo Sapiens
auguaaaugacaauuacugaaaaaaugucaga

SEQ ID NO: 234635 - RNA, 32 nt, Homo Sapiens
uauuucauuuuggcucugucauuuucagaggc

SEQ ID NO: 234636 - RNA, 32 nt, Homo Sapiens
ugcuggcugaggccggaggaucgagcggcggc

SEQ ID NO: 234637 - RNA, 32 nt, Homo Sapiens
ccgggcacggccccagcuccguggggcucuca

SEQ ID NO: 234638 - RNA, 32 nt, Homo Sapiens
gaugaggucuugccauguuacccaggcugguc

SEQ ID NO: 234639 - RNA, 32 nt, Homo Sapiens
agcccugaagugccggccgcggaggguccugg

SEQ ID NO: 234640 - RNA, 32 nt, Homo Sapiens
gcaucuacuuuuuaguguaacuaaugucaaac

SEQ ID NO: 234641 - RNA, 32 nt, Homo Sapiens
ugauauaaaaucagccacucuuaagcuugcug

SEQ ID NO: 234642 - RNA, 32 nt, Homo Sapiens
ccuagcugcuuccucaucuaccugugguguug

SEQ ID NO: 234643 - RNA, 31 nt, Homo Sapiens
uguuguacaaagaaaucagaauuacauuuuu

SEQ ID NO: 234644 - RNA, 32 nt, Homo Sapiens
aaauuuucaagaagggaagguguaagcuuccu

SEQ ID NO: 234645 - RNA, 32 nt, Homo Sapiens
augcgcgaguguacgcguugccggcgaagagg

SEQ ID NO: 234646 - RNA, 32 nt, Homo Sapiens
cuaagccuuuauugucccugguaaauguuucc

SEQ ID NO: 234647 - RNA, 32 nt, Homo Sapiens
aauugccugaagauuuaggcacauucaguguu

SEQ ID NO: 234648 - RNA, 32 nt, Homo Sapiens
uaacugcaaccuccagcuccuggguucaggug

SEQ ID NO: 234649 - RNA, 32 nt, Homo Sapiens
cagaccugggaggggacgccugugucacgagc

SEQ ID NO: 234650 - RNA, 32 nt, Homo Sapiens
gggacauugauugagccuuguuuucuaguggg

SEQ ID NO: 234651 - RNA, 32 nt, Homo Sapiens
auguuguuuguugcaaauaccaacauuguuau

SEQ ID NO: 234652 - RNA, 32 nt, Homo Sapiens
aaaacaaugaucauaagugcuggaauauauaa

SEQ ID NO: 234653 - RNA, 32 nt, Homo Sapiens
ggagggugcagucaggcgacaggcuuaucagg

SEQ ID NO: 234654 - RNA, 32 nt, Homo Sapiens
caugguggcgagcacagcaaccccaggugucc

SEQ ID NO: 234655 - RNA, 32 nt, Homo Sapiens
cugcucucggcacaagcauguacggcaaaggc

SEQ ID NO: 234656 - RNA, 32 nt, Homo Sapiens
cuccagcuuucccugcagcugcaaccugcccu

SEQ ID NO: 234657 - RNA, 32 nt, Homo Sapiens
cagaugguguccaggaccgaggagggcgacac

SEQ ID NO: 234658 - RNA, 32 nt, Homo Sapiens
acgugcaacaucuuaauuuuuguuuuucagca

SEQ ID NO: 234659 - RNA, 32 nt, Homo Sapiens
gggaggcuuggccacaucccucauggccccau

SEQ ID NO: 234660 - RNA, 32 nt, Homo Sapiens
uggguauuacaaucccuuccugccuuguuucg

SEQ ID NO: 234661 - RNA, 32 nt, Homo Sapiens
gucagugcguggggggcgcagggcccccucgu

SEQ ID NO: 234662 - RNA, 32 nt, Homo Sapiens
auagcauuuacuauauuuguuuagugaacaaa

SEQ ID NO: 234663 - RNA, 30 nt, Homo Sapiens
caggaggcccccgugccguggcugagucag

SEQ ID NO: 234664 - RNA, 32 nt, Homo Sapiens
cuggaaaaggauugcugugugcuagacuuucc

SEQ ID NO: 234665 - RNA, 32 nt, Homo Sapiens
agagggguccagccggaguuuauuuaaugaug

SEQ ID NO: 234666 - RNA, 32 nt, Homo Sapiens
ucaaggaacuaaauuccuucuccaccucaacc

SEQ ID NO: 234667 - RNA, 32 nt, Homo Sapiens
auaaugcaauguaacauaguacuucaaaguau

SEQ ID NO: 234668 - RNA, 32 nt, Homo Sapiens
guuaacccaccucggcugccucccccacucca

SEQ ID NO: 234669 - RNA, 27 nt, Homo Sapiens
agcagccccugcuucagccccaccgca

SEQ ID NO: 234670 - RNA, 32 nt, Homo Sapiens
uaguguggugauggcuuggagagagaaaucaa

SEQ ID NO: 234671 - RNA, 32 nt, Homo Sapiens
uugggggcccuuccgcggcagccccgggggcc

SEQ ID NO: 234672 - RNA, 32 nt, Homo Sapiens
acgggcugggcuggcacucacccacgaccccc

SEQ ID NO: 234673 - RNA, 32 nt, Homo Sapiens
agcuggugcaggugggguucgaggggaaagga

SEQ ID NO: 234674 - RNA, 32 nt, Homo Sapiens
aaugacaucaucuaagaagcugauuuugcuaa

SEQ ID NO: 234675 - RNA, 32 nt, Homo Sapiens
guucuagcguuccuugggucccgcuggcgagc

SEQ ID NO: 234676 - RNA, 32 nt, Homo Sapiens
gauacaaugaauucauaggccuaagaaaauaa

SEQ ID NO: 234677 - RNA, 32 nt, Homo Sapiens
aagggaggcuccuguggacaggccaggcaggu

SEQ ID NO: 234678 - RNA, 32 nt, Homo Sapiens
cucaacaaacaaacaaaaagagccaguggggg

SEQ ID NO: 234679 - RNA, 32 nt, Homo Sapiens
cccggacucgucugccgccgccgucgucgccg

SEQ ID NO: 234680 - RNA, 32 nt, Homo Sapiens
guaauaaccugccuggguugggagggaagugg

SEQ ID NO: 234681 - RNA, 32 nt, Homo Sapiens
gcgcugggauuacaggcgcgcgccaccacgcg

SEQ ID NO: 234682 - RNA, 32 nt, Homo Sapiens
ugagucucggaacgcuccagcucucagacccu

SEQ ID NO: 234683 - RNA, 32 nt, Homo Sapiens
caaguuagugauugcauuugaucccaaaacaa

SEQ ID NO: 234684 - RNA, 32 nt, Homo Sapiens
gugagaaugcuguuauugggguugugugugag

SEQ ID NO: 234685 - RNA, 32 nt, Homo Sapiens
cucugcuccgugugucucaugccagcagcacg

SEQ ID NO: 234686 - RNA, 32 nt, Homo Sapiens
cggagggagcugucgcggggucgggaggucgu

SEQ ID NO: 234687 - RNA, 32 nt, Homo Sapiens
caaauauuacuuuguuauuaacacaaaaagug

SEQ ID NO: 234688 - RNA, 32 nt, Homo Sapiens
cguucugucgcccaagcuggagcgcaauggug

SEQ ID NO: 234689 - RNA, 32 nt, Homo Sapiens
gggaccaucuucucggccaucuccugcuucug

SEQ ID NO: 234690 - RNA, 32 nt, Homo Sapiens
gagcugagggcaagcucagagcccagggugag

SEQ ID NO: 234691 - RNA, 32 nt, Homo Sapiens
aaccaggcacaggcagaagagacauuagagcu

SEQ ID NO: 234692 - RNA, 26 nt, Homo Sapiens
gaugcugaucccauuuucaaugaaga

SEQ ID NO: 234693 - RNA, 32 nt, Homo Sapiens
aggcccugccccaccucuggacagugcccaag

SEQ ID NO: 234694 - RNA, 32 nt, Homo Sapiens
aaugacuuaaauauuugucuccagucuccacu

SEQ ID NO: 234695 - RNA, 32 nt, Homo Sapiens
cguggugauggaggcgcacgcucgcuucccac

SEQ ID NO: 234696 - RNA, 32 nt, Homo Sapiens
ggugggcucucgucauccuguccccacuccag

SEQ ID NO: 234697 - RNA, 32 nt, Homo Sapiens
ggaucucggaagcccugcggugcaucaugaag

SEQ ID NO: 234698 - RNA, 32 nt, Homo Sapiens
auguguauauuguaaaaugauuagcacaauua

SEQ ID NO: 234699 - RNA, 32 nt, Homo Sapiens
uuaggagaugaccuuacuggguacaccccucu

SEQ ID NO: 234700 - RNA, 32 nt, Homo Sapiens
cuaucccuuucugugucuaguuacaguauuca

SEQ ID NO: 234701 - RNA, 32 nt, Homo Sapiens
aagccuucaaggaaacaacauaaauauaaaua

SEQ ID NO: 234702 - RNA, 32 nt, Homo Sapiens
cuggugaggaggggcugcucugaugucccucc

SEQ ID NO: 234703 - RNA, 32 nt, Homo Sapiens
ccggggagaaaguuuuuggaaagauucuucca

SEQ ID NO: 234704 - RNA, 32 nt, Homo Sapiens
uuuucugcaaaauaaacgcaauaugcaaaaug

SEQ ID NO: 234705 - RNA, 32 nt, Homo Sapiens
gaggcggccgaccuucggcccgaggcaccggg

SEQ ID NO: 234706 - RNA, 32 nt, Homo Sapiens
agguaguaucuaggauugaacuucauuccaag

SEQ ID NO: 234707 - RNA, 32 nt, Homo Sapiens
cucugucuucucucuucaguuuucuuuaacag

SEQ ID NO: 234708 - RNA, 32 nt, Homo Sapiens
caucagcuucuuauuuaguauuucauaugccc

SEQ ID NO: 234709 - RNA, 32 nt, Homo Sapiens
cugaagggcugaagauguggacaggcucuagc

SEQ ID NO: 234710 - RNA, 32 nt, Homo Sapiens
uagauggaaaauuuaugaacuugaucuucggc

SEQ ID NO: 234711 - RNA, 32 nt, Homo Sapiens
uaaaggaaaaaguuuucuucucacaaaaacac

SEQ ID NO: 234712 - RNA, 32 nt, Homo Sapiens
aaggggagaugaguuugucuguccucugcuga

SEQ ID NO: 234713 - RNA, 32 nt, Homo Sapiens
aaaaaggaaaaggaaauucaccgaucuguccg

SEQ ID NO: 234714 - RNA, 32 nt, Homo Sapiens
gggguugugggcuggcggggcugugggaaggg

SEQ ID NO: 234715 - RNA, 32 nt, Homo Sapiens
gaaggagugcuaaauauaaccugccuuacagg

SEQ ID NO: 234716 - RNA, 32 nt, Homo Sapiens
cuuuaaaugcaaacguaagaagguauaugugu

SEQ ID NO: 234717 - RNA, 32 nt, Homo Sapiens
ggggccaggacacccagugagcccauacuugc

SEQ ID NO: 234718 - RNA, 32 nt, Homo Sapiens
ucccuuuaucccuccacuacuccaccucagag

SEQ ID NO: 234719 - RNA, 32 nt, Homo Sapiens
ugcccccugcgccuggccuccgagggcuuucc

SEQ ID NO: 234720 - RNA, 32 nt, Homo Sapiens
uguuugcuccacgugccugcuucuugcuacug

SEQ ID NO: 234721 - RNA, 32 nt, Homo Sapiens
cccccggccccucccccauggaggaggaggag

SEQ ID NO: 234722 - RNA, 32 nt, Homo Sapiens
gaacccucaaguuaccaucaaacuacuucucu

SEQ ID NO: 234723 - RNA, 32 nt, Homo Sapiens
uuguauuuuuugauauuuaacaaugcuuaaca

SEQ ID NO: 234724 - RNA, 32 nt, Homo Sapiens
uuugaaaaacaagcuucuuuuacagaauauaa

SEQ ID NO: 234725 - RNA, 32 nt, Homo Sapiens
aucaugaauggauaaacaaaugugcuauaaua

SEQ ID NO: 234726 - RNA, 32 nt, Homo Sapiens
aucucgauacgaacaacgaguuuugugguguu

SEQ ID NO: 234727 - RNA, 32 nt, Homo Sapiens
cuacauguuuuugucuuacugaccucugauaa

SEQ ID NO: 234728 - RNA, 32 nt, Homo Sapiens
ccaagcccaccccuccucccaccaucaccucc

SEQ ID NO: 234729 - RNA, 32 nt, Homo Sapiens
aguuuaacuauauuccaaguacaaaaacauac

SEQ ID NO: 234730 - RNA, 32 nt, Homo Sapiens
gcaccacauacuuauucggaggaggcgccccc

SEQ ID NO: 234731 - RNA, 32 nt, Homo Sapiens
gguugugucugcaagcuccaaggaggccuggg

SEQ ID NO: 234732 - RNA, 32 nt, Homo Sapiens
uaaacaauacacguucagacucggcgcggugg

SEQ ID NO: 234733 - RNA, 32 nt, Homo Sapiens
ucacauuuucagucuguaaauuuuucaaacuu

SEQ ID NO: 234734 - RNA, 32 nt, Homo Sapiens
guguuaaaaaauuuuugaaaaggcgguacuag

SEQ ID NO: 234735 - RNA, 32 nt, Homo Sapiens
ucugcucagaggucaggaacggcaugcggucc

SEQ ID NO: 234736 - RNA, 32 nt, Homo Sapiens
gggggccugugaccucccauggagcccagccc

SEQ ID NO: 234737 - RNA, 32 nt, Homo Sapiens
uaguagacccuagaaggauacuauuuaaguug

SEQ ID NO: 234738 - RNA, 32 nt, Homo Sapiens
gccugcguagccccggccauggcucuguagcc

SEQ ID NO: 234739 - RNA, 32 nt, Homo Sapiens
aaccuacuagucuuucguugaaagggaguagu

SEQ ID NO: 234740 - RNA, 32 nt, Homo Sapiens
aaugccaucaucuccugccuuccuccugggcc

SEQ ID NO: 234741 - RNA, 32 nt, Homo Sapiens
aaugcucacuacacaguuuagaauagacguuc

SEQ ID NO: 234742 - RNA, 32 nt, Homo Sapiens
ggcgccccaagccaguucaucucggaguccag

SEQ ID NO: 234743 - RNA, 32 nt, Homo Sapiens
aauucucuaucagcuauucagucuuaauuuca

SEQ ID NO: 234744 - RNA, 32 nt, Homo Sapiens
gaguugcagcuagggccaguggggcagguugu

SEQ ID NO: 234745 - RNA, 32 nt, Homo Sapiens
guguuucuauuccacagaguauuguuaaugua

SEQ ID NO: 234746 - RNA, 32 nt, Homo Sapiens
cccgagguuaaaacuuuucaccccuugaagac

SEQ ID NO: 234747 - RNA, 32 nt, Homo Sapiens
aauuuuuacaaccauuuugaagggcaguuuga

SEQ ID NO: 234748 - RNA, 32 nt, Homo Sapiens
uaaaauugacauuuaauuuucaaaucacuguu

SEQ ID NO: 234749 - RNA, 32 nt, Homo Sapiens
ugcaggaugcucagcccucaugugucaguccc

SEQ ID NO: 234750 - RNA, 32 nt, Homo Sapiens
uuacaauggaaauuuaaacauuuuuauguggg

SEQ ID NO: 234751 - RNA, 30 nt, Homo Sapiens
gagggcggcugggcaggcggcaggaaugcu

SEQ ID NO: 234752 - RNA, 32 nt, Homo Sapiens
gcggcuugcuuucaggacacgggucgcuggcg

SEQ ID NO: 234753 - RNA, 32 nt, Homo Sapiens
accucagaagaccaaaucauggacuguacaag

SEQ ID NO: 234754 - RNA, 32 nt, Homo Sapiens
ugaacucugagcucaguugcaguacucgggaa

SEQ ID NO: 234755 - RNA, 32 nt, Homo Sapiens
ugaguucccagacguguaaacacacgugcaca

SEQ ID NO: 234756 - RNA, 32 nt, Homo Sapiens
augggauuaugcugucacaaaaaacaaagaaa

SEQ ID NO: 234757 - RNA, 32 nt, Homo Sapiens
uuggucuuuagggaaaauaaacaggaagccaa

SEQ ID NO: 234758 - RNA, 32 nt, Homo Sapiens
uucgcuccuacugugagacaagauguggugau

SEQ ID NO: 234759 - RNA, 32 nt, Homo Sapiens
gcaaacuugaguuuuucaggaaaacaguuuac

SEQ ID NO: 234760 - RNA, 32 nt, Homo Sapiens
acugaauuagauguauuuuaugggaauuuggu

SEQ ID NO: 234761 - RNA, 32 nt, Homo Sapiens
aucuaauucaagaaacaaagcaacacaucuaa

SEQ ID NO: 234762 - RNA, 32 nt, Homo Sapiens
ccuuucccuguccaaugugcucuugagacugc

SEQ ID NO: 234763 - RNA, 32 nt, Homo Sapiens
gcgcuuccaguuccgaaaagcagauguuuaag

SEQ ID NO: 234764 - RNA, 32 nt, Homo Sapiens
cugauccccugagugcuccccucccccugcag

SEQ ID NO: 234765 - RNA, 32 nt, Homo Sapiens
cagcccaggacccaccacugaggagaggaucu

SEQ ID NO: 234766 - RNA, 32 nt, Homo Sapiens
aagaaaaaaugaaaaugaaauaacaggaugau

SEQ ID NO: 234767 - RNA, 32 nt, Homo Sapiens
ggaccugagccgcgaccacgcgggcugcagcc

SEQ ID NO: 234768 - RNA, 32 nt, Homo Sapiens
augaagugggauuuuucccccgcugucaugaa

SEQ ID NO: 234769 - RNA, 32 nt, Homo Sapiens
cggccaccgccaccugccggccucgagagggg

SEQ ID NO: 234770 - RNA, 32 nt, Homo Sapiens
gccagcccgucuccgcggcgggggaccgggcu

SEQ ID NO: 234771 - RNA, 32 nt, Homo Sapiens
gaaauacuuuugucccaagcauuucagauaaa

SEQ ID NO: 234772 - RNA, 32 nt, Homo Sapiens
gauggagucucacugugucacccaggcuggag

SEQ ID NO: 234773 - RNA, 32 nt, Homo Sapiens
gaagccgcgacgugccccagaagugcagccgu

SEQ ID NO: 234774 - RNA, 32 nt, Homo Sapiens
auuuuuccaaggaaauacauaugcagauacuu

SEQ ID NO: 234775 - RNA, 32 nt, Homo Sapiens
cgcacacacgcacgcaggcacacacacacaca

SEQ ID NO: 234776 - RNA, 32 nt, Homo Sapiens
cuuuuccccaguucuuacgaucaaaaaguggc

SEQ ID NO: 234777 - RNA, 32 nt, Homo Sapiens
acuaucucuuuucuccuacaaaacagacagcu

SEQ ID NO: 234778 - RNA, 32 nt, Homo Sapiens
agauuaucuuagacgaauuuuacaaugugaag

SEQ ID NO: 234779 - RNA, 32 nt, Homo Sapiens
guauccuggaacaauauuuuaugguuauguuu

SEQ ID NO: 234780 - RNA, 32 nt, Homo Sapiens
aaugcugcagcaaagaugagaggugaaguaaa

SEQ ID NO: 234781 - RNA, 32 nt, Homo Sapiens
cagagggaauaauaacucuacguaaagcaugc

SEQ ID NO: 234782 - RNA, 32 nt, Homo Sapiens
caggaauuugcugccccccaccaguggcuucu

SEQ ID NO: 234783 - RNA, 32 nt, Homo Sapiens
uaugcuguuuuaaaggugacuugucaggaguu

SEQ ID NO: 234784 - RNA, 32 nt, Homo Sapiens
aaauauugacauugaauggaucaauacacaca

SEQ ID NO: 234785 - RNA, 32 nt, Homo Sapiens
ggacggcgccugugcccacgcugcugccugcu

SEQ ID NO: 234786 - RNA, 32 nt, Homo Sapiens
ugcugcucuccuugcuuggcauagccuccugg

SEQ ID NO: 234787 - RNA, 32 nt, Homo Sapiens
cuccggaucaguacaugcaugucacauuaaca

SEQ ID NO: 234788 - RNA, 32 nt, Homo Sapiens
acgucagacaccugucgacagcccagaugacg

SEQ ID NO: 234789 - RNA, 32 nt, Homo Sapiens
ugauagaggggccugugcaaucuccuaaggcc

SEQ ID NO: 234790 - RNA, 32 nt, Homo Sapiens
auacagucugauucaaauauuaaucucaucca

SEQ ID NO: 234791 - RNA, 32 nt, Homo Sapiens
gugggaauuacgggagcuacaauucaagauga

SEQ ID NO: 234792 - RNA, 32 nt, Homo Sapiens
ggugggaaguguggcugguaaccuggcagccg

SEQ ID NO: 234793 - RNA, 32 nt, Homo Sapiens
agcugacagcuucuccugcuguuuccuuccuc

SEQ ID NO: 234794 - RNA, 32 nt, Homo Sapiens
cauguuugaaagagguauugguguucuggagu

SEQ ID NO: 234795 - RNA, 32 nt, Homo Sapiens
cgucuagucaauaacauggcacuucagcagag

SEQ ID NO: 234796 - RNA, 32 nt, Homo Sapiens
cccugggcuuucacgggccccauuccaccgcc

SEQ ID NO: 234797 - RNA, 32 nt, Homo Sapiens
gaggcaccgaugcccgcagagcccgcaccccc

SEQ ID NO: 234798 - RNA, 32 nt, Homo Sapiens
uaaaggauuaugcugauggaaauguaccaaaa

SEQ ID NO: 234799 - RNA, 32 nt, Homo Sapiens
aaaaauucacugauuaaucugugauuccagua

SEQ ID NO: 234800 - RNA, 32 nt, Homo Sapiens
cgccgagacuccuggugacagguggcaccugu

SEQ ID NO: 234801 - RNA, 32 nt, Homo Sapiens
cugaggucacugcugugagcugggagaacugc

SEQ ID NO: 234802 - RNA, 32 nt, Homo Sapiens
aaugaggaaacacuugaggcuucugcugugug

SEQ ID NO: 234803 - RNA, 30 nt, Homo Sapiens
cgcacaggaucgcgcgcgggaucgcaggua

SEQ ID NO: 234804 - RNA, 32 nt, Homo Sapiens
agcuuccuucguacucgggggccggacuugua

SEQ ID NO: 234805 - RNA, 32 nt, Homo Sapiens
caaacuuuuaucauuuauuuguguugagaaca

SEQ ID NO: 234806 - RNA, 32 nt, Homo Sapiens
cgcagccugggcgcuuggggagccgcccacuu

SEQ ID NO: 234807 - RNA, 31 nt, Homo Sapiens
accagaaaauaaaauccauauauuaauuaaa

SEQ ID NO: 234808 - RNA, 32 nt, Homo Sapiens
cucaguugugcagcuuuuggucaucaagggug

SEQ ID NO: 234809 - RNA, 32 nt, Homo Sapiens
auccucacuguaaacaguaaugcuauaugcau

SEQ ID NO: 234810 - RNA, 32 nt, Homo Sapiens
uuuucuuguuuccaugaauuauaucaguauuc

SEQ ID NO: 234811 - RNA, 32 nt, Homo Sapiens
ggccuguaagguuugguguuucccuuucaaga

SEQ ID NO: 234812 - RNA, 32 nt, Homo Sapiens
uuaaaauaacuauuuuaacccuugaguggcuu

SEQ ID NO: 234813 - RNA, 32 nt, Homo Sapiens
uuucugagagcaugguuaagaacaucuuaacc

SEQ ID NO: 234814 - RNA, 32 nt, Homo Sapiens
ugauucaaaagugaacuugauuuuaaaaacca

SEQ ID NO: 234815 - RNA, 32 nt, Homo Sapiens
aaguucccugucuuccccguccuuuuccacca

SEQ ID NO: 234816 - RNA, 32 nt, Homo Sapiens
gacaucaaggaccugggcagaugggccggcug

SEQ ID NO: 234817 - RNA, 32 nt, Homo Sapiens
cucccaagucggcuuccuccccgccggggccg

SEQ ID NO: 234818 - RNA, 32 nt, Homo Sapiens
ggcacauccgcagugcgcaugugugugcgugc

SEQ ID NO: 234819 - RNA, 32 nt, Homo Sapiens
gcugggcucagcuuggacccaggcagcagcca

SEQ ID NO: 234820 - RNA, 32 nt, Homo Sapiens
cugaacaaucuuugagccaucuagaggggaaa

SEQ ID NO: 234821 - RNA, 32 nt, Homo Sapiens
gagggcgaggcagggagggagcaagcggggcu

SEQ ID NO: 234822 - RNA, 32 nt, Homo Sapiens
aggccgcgggagaggaggccaugggcgcgcgc

SEQ ID NO: 234823 - RNA, 32 nt, Homo Sapiens
uaagggaguauucuaggcaaggaacuaaggaa

SEQ ID NO: 234824 - RNA, 32 nt, Homo Sapiens
aaggcuggagggcaggggugaggagggagcag

SEQ ID NO: 234825 - RNA, 32 nt, Homo Sapiens
gauaggaggugcuccagaagcacgggacugug

SEQ ID NO: 234826 - RNA, 32 nt, Homo Sapiens
gggccccaguccccggcagcucuugucccgcg

SEQ ID NO: 234827 - RNA, 32 nt, Homo Sapiens
acacuggggggucugagccaccccccucagcc

SEQ ID NO: 234828 - RNA, 32 nt, Homo Sapiens
auguguaguuuaugguuggcagaauggagaga

SEQ ID NO: 234829 - RNA, 32 nt, Homo Sapiens
uuuugacuuggggucuuauauauuggcguacu

SEQ ID NO: 234830 - RNA, 32 nt, Homo Sapiens
gaagaggagacaguuuaccauccucaagauca

SEQ ID NO: 234831 - RNA, 32 nt, Homo Sapiens
ugaagauggcacagcucugugauucaucuccu

SEQ ID NO: 234832 - RNA, 32 nt, Homo Sapiens
auugguuaucccaaagcugauaaucuuaaugg

SEQ ID NO: 234833 - RNA, 32 nt, Homo Sapiens
cagcagggucugucugggggccuggaguuugu

SEQ ID NO: 234834 - RNA, 32 nt, Homo Sapiens
aaaaucuuuuuaucuuuuuuuaaacuauguca

SEQ ID NO: 234835 - RNA, 32 nt, Homo Sapiens
cuuccguacuuaauaaagugcgcgugggagug

SEQ ID NO: 234836 - RNA, 32 nt, Homo Sapiens
uguuaguacucuauucacauucuuauuguaac

SEQ ID NO: 234837 - RNA, 32 nt, Homo Sapiens
uuacaccuaaaauucaugcaggagagaaacac

SEQ ID NO: 234838 - RNA, 32 nt, Homo Sapiens
ugcugaauagaguggaauauagaaccagggac

SEQ ID NO: 234839 - RNA, 32 nt, Homo Sapiens
gcuggagagggagaggcugcuggacgaggugg

SEQ ID NO: 234840 - RNA, 32 nt, Homo Sapiens
cuggcgccaaccucgcuggaggaggcugucgg

SEQ ID NO: 234841 - RNA, 32 nt, Homo Sapiens
ucuggccagagcuucuccauggagcguuccuu

SEQ ID NO: 234842 - RNA, 32 nt, Homo Sapiens
auagucagagcauuuucuuuuaaauugugcac

SEQ ID NO: 234843 - RNA, 32 nt, Homo Sapiens
uggauuuaguggugacugauaagauuuuauuu

SEQ ID NO: 234844 - RNA, 32 nt, Homo Sapiens
agaagcgggcagccuugcaucucagggcugag

SEQ ID NO: 234845 - RNA, 31 nt, Homo Sapiens
cacauaaaacuuuguauaucaacgaaaaaaa

SEQ ID NO: 234846 - RNA, 32 nt, Homo Sapiens
gggcgcagcacgcuccucagccgcccgcccac

SEQ ID NO: 234847 - RNA, 32 nt, Homo Sapiens
ggccggcggcagagcuguccggcugcgcggug

SEQ ID NO: 234848 - RNA, 32 nt, Homo Sapiens
auagaaauauuuuuacugguucuucugaauug

SEQ ID NO: 234849 - RNA, 32 nt, Homo Sapiens
gggacucauuccuggggcucgcugggaccucc

SEQ ID NO: 234850 - RNA, 32 nt, Homo Sapiens
ggagagacugccugugcaccuaaccaacaccu

SEQ ID NO: 234851 - RNA, 32 nt, Homo Sapiens
uuucacucuccucccuucuccagccucagggg

SEQ ID NO: 234852 - RNA, 32 nt, Homo Sapiens
ugacuguuauuuacaaagguguuaaaucugag

SEQ ID NO: 234853 - RNA, 32 nt, Homo Sapiens
acauacacagaugccagucagcuccugggguu

SEQ ID NO: 234854 - RNA, 32 nt, Homo Sapiens
ucuuaaaggaugggagugucgaugacagcacc

SEQ ID NO: 234855 - RNA, 32 nt, Homo Sapiens
ucagacuccaugagucuugcugccaggggaua

SEQ ID NO: 234856 - RNA, 32 nt, Homo Sapiens
cccaucauauuuccuauuauaauuacaucuca

SEQ ID NO: 234857 - RNA, 32 nt, Homo Sapiens
caggaggagcagcugcuuuggucgggguggag

SEQ ID NO: 234858 - RNA, 32 nt, Homo Sapiens
aacauguacugaugaaggggaguugguucaac

SEQ ID NO: 234859 - RNA, 32 nt, Homo Sapiens
ugccaaaaauagagaacuuaugaucuauucau

SEQ ID NO: 234860 - RNA, 32 nt, Homo Sapiens
augauuuguaaauagcuacuggaaauauuaua

SEQ ID NO: 234861 - RNA, 32 nt, Homo Sapiens
ccugcccccucuaucuccugauggguucuuca

SEQ ID NO: 234862 - RNA, 32 nt, Homo Sapiens
agggcagaaccagugcccggccccacacugcc

SEQ ID NO: 234863 - RNA, 32 nt, Homo Sapiens
uuuccuuuaagugaugcugaucacucaaauaa

SEQ ID NO: 234864 - RNA, 32 nt, Homo Sapiens
acaugggaaggucaaggcaacaucccugguac

SEQ ID NO: 234865 - RNA, 32 nt, Homo Sapiens
guguggugucagcacagcggcaggucaccguu

SEQ ID NO: 234866 - RNA, 32 nt, Homo Sapiens
gaggugaaggcacagugcaggccgcacaccaa

SEQ ID NO: 234867 - RNA, 32 nt, Homo Sapiens
gagcacagccgguggcucgcggcgcggcagcc

SEQ ID NO: 234868 - RNA, 32 nt, Homo Sapiens
caaugaagcuccgaccguccucuccuguuuua

SEQ ID NO: 234869 - RNA, 32 nt, Homo Sapiens
cuggaggguguggcuuuuuuucucuccuuuuu

SEQ ID NO: 234870 - RNA, 32 nt, Homo Sapiens
aguagggcacagucuuguuggaccacagaggc

SEQ ID NO: 234871 - RNA, 32 nt, Homo Sapiens
cgaccauguggccacaauccacgcuucuccgg

SEQ ID NO: 234872 - RNA, 32 nt, Homo Sapiens
ugucauaacgguccccgccggagugaggcgag

SEQ ID NO: 234873 - RNA, 32 nt, Homo Sapiens
auaaguuugacaaagaaaagaaaaucaauguu

SEQ ID NO: 234874 - RNA, 32 nt, Homo Sapiens
guccuccaaaugcagugagguuaggaaggacg

SEQ ID NO: 234875 - RNA, 32 nt, Homo Sapiens
aagaagcggggacgaaagccccugcccccaga

SEQ ID NO: 234876 - RNA, 32 nt, Homo Sapiens
ucaaauugugaacuuuuaauucuugcauugua

SEQ ID NO: 234877 - RNA, 32 nt, Homo Sapiens
cgagggaugcuggggcggggcuuggccagugc

SEQ ID NO: 234878 - RNA, 32 nt, Homo Sapiens
cuaaacauuuuucuuaguacauggaguaacgu

SEQ ID NO: 234879 - RNA, 32 nt, Homo Sapiens
cuuccuagaauauuuuucuaacaauuuuuauu

SEQ ID NO: 234880 - RNA, 32 nt, Homo Sapiens
agcccucugggaacugaauccaacacguccaa

SEQ ID NO: 234881 - RNA, 32 nt, Homo Sapiens
agaaaggagaacagaggaguggcugccagagu

SEQ ID NO: 234882 - RNA, 28 nt, Homo Sapiens
ugaucaguuacagcaauagcugaagaaa

SEQ ID NO: 234883 - RNA, 32 nt, Homo Sapiens
uguccugacuucaggggcugcccgcucccagu

SEQ ID NO: 234884 - RNA, 32 nt, Homo Sapiens
gagaggaggguucugggcaggggggccuugcc

SEQ ID NO: 234885 - RNA, 32 nt, Homo Sapiens
gcagcuaagcuggagcuuuggccaggguccag

SEQ ID NO: 234886 - RNA, 32 nt, Homo Sapiens
gugcuggguaggccuuccuggucucuggccgc

SEQ ID NO: 234887 - RNA, 32 nt, Homo Sapiens
aaccaaagcucaaauaaaaauaaaauaauuuu

SEQ ID NO: 234888 - RNA, 32 nt, Homo Sapiens
gggcgcgcgcugcuucccgggagagggcgggc

SEQ ID NO: 234889 - RNA, 32 nt, Homo Sapiens
cuaccuaaaggauauaaagaaauacuauugcu

SEQ ID NO: 234890 - RNA, 32 nt, Homo Sapiens
aggagaagcucccagagugaccaagauagaau

SEQ ID NO: 234891 - RNA, 32 nt, Homo Sapiens
gagucacccacccagccuuggagcuggaugcc

SEQ ID NO: 234892 - RNA, 32 nt, Homo Sapiens
guuggucuaucucugcaguccuugaaggugaa

SEQ ID NO: 234893 - RNA, 32 nt, Homo Sapiens
uaauuuguggaggacuuugaauaauggaaucu

SEQ ID NO: 234894 - RNA, 28 nt, Homo Sapiens
aggaugaaagcucagggggaaaccgagg

SEQ ID NO: 234895 - RNA, 32 nt, Homo Sapiens
auuacaaaaaaguucaagaaugauguccacug

SEQ ID NO: 234896 - RNA, 32 nt, Homo Sapiens
gucugggccucugcagagagaccuccaugccc

SEQ ID NO: 234897 - RNA, 32 nt, Homo Sapiens
aguucgguggcggcccggggcggauuucaugg

SEQ ID NO: 234898 - RNA, 32 nt, Homo Sapiens
uuuaagucucggguaccccuccccuuacuuuc

SEQ ID NO: 234899 - RNA, 32 nt, Homo Sapiens
ucuggggggcuaaaugugacaaaccgagaaga

SEQ ID NO: 234900 - RNA, 32 nt, Homo Sapiens
uccuucucccugacugcaagggcucacucccu

SEQ ID NO: 234901 - RNA, 32 nt, Homo Sapiens
agccgcggcgagcgcgcaccgccuucaccuac

SEQ ID NO: 234902 - RNA, 32 nt, Homo Sapiens
cccucccacccccauucccggccaacucucca

SEQ ID NO: 234903 - RNA, 32 nt, Homo Sapiens
gagcgccgcucgccggccgccgccacccucuc

SEQ ID NO: 234904 - RNA, 32 nt, Homo Sapiens
guggugccagcuucugagggccugcuuggccu

SEQ ID NO: 234905 - RNA, 32 nt, Homo Sapiens
uggagacuccgucucuacagaagguuuugaaa

SEQ ID NO: 234906 - RNA, 32 nt, Homo Sapiens
uuuagugcacaaaacuaauuuuguucaucuug

SEQ ID NO: 234907 - RNA, 32 nt, Homo Sapiens
cagcggauuucggccuggcccgggccuauggu

SEQ ID NO: 234908 - RNA, 32 nt, Homo Sapiens
gcagggcugccagauggagaucuuggaacuga

SEQ ID NO: 234909 - RNA, 32 nt, Homo Sapiens
caggccucugguugccucccccgccuccaguc

SEQ ID NO: 234910 - RNA, 32 nt, Homo Sapiens
ccaugcagccagcagguccuccggaucacugu

SEQ ID NO: 234911 - RNA, 32 nt, Homo Sapiens
augagguuauuuaagguauaguuuugucuuca

SEQ ID NO: 234912 - RNA, 32 nt, Homo Sapiens
ggaaggacaguaaccacugucaauuguguuua

SEQ ID NO: 234913 - RNA, 32 nt, Homo Sapiens
uacaggcagaggccccaccuaccugauguuua

SEQ ID NO: 234914 - RNA, 32 nt, Homo Sapiens
cccuuucuggacaguucaaaucaauggaauca

SEQ ID NO: 234915 - RNA, 32 nt, Homo Sapiens
uuuuuguacuuuuaccuccaauaaagggaaaa

SEQ ID NO: 234916 - RNA, 32 nt, Homo Sapiens
gugucuccgggcuggggugcugcuggugcagc

SEQ ID NO: 234917 - RNA, 32 nt, Homo Sapiens
agucugagaaugagugugugugagugaggcgg

SEQ ID NO: 234918 - RNA, 32 nt, Homo Sapiens
auucauuuacucuauuugaugauaaacuauaa

SEQ ID NO: 234919 - RNA, 32 nt, Homo Sapiens
auugcauauagauuuuuuuucuuaaauauuug

SEQ ID NO: 234920 - RNA, 32 nt, Homo Sapiens
cucacuguguggaagaugcgacuucucccaag

SEQ ID NO: 234921 - RNA, 32 nt, Homo Sapiens
aagaaaaguauuuaaguggcuuucugccccuc

SEQ ID NO: 234922 - RNA, 32 nt, Homo Sapiens
aggaaggccuugauuugugaugugcuaggaga

SEQ ID NO: 234923 - RNA, 32 nt, Homo Sapiens
cauucacuuuugucuuauuuucuuuuaaggug

SEQ ID NO: 234924 - RNA, 32 nt, Homo Sapiens
gacuuugagccaaggggaaaauacuaaauucu

SEQ ID NO: 234925 - RNA, 32 nt, Homo Sapiens
agcuuuagaacacaaggauguuagaaaugucu

SEQ ID NO: 234926 - RNA, 32 nt, Homo Sapiens
ucaccuauaaaacagggaaauugaauaaccau

SEQ ID NO: 234927 - RNA, 32 nt, Homo Sapiens
uuuccaccuuauauuucuuuuacacauuuugc

SEQ ID NO: 234928 - RNA, 32 nt, Homo Sapiens
ggccgcuccugcugcugcuacugccgccgccg

SEQ ID NO: 234929 - RNA, 32 nt, Homo Sapiens
auuguugaaaauauaauguaugcuauguuaaa

SEQ ID NO: 234930 - RNA, 32 nt, Homo Sapiens
agagagaaggauucuuuuuucaauguacugua

SEQ ID NO: 234931 - RNA, 32 nt, Homo Sapiens
uguuuucaaaggucuggacuaagcaaaacaac

SEQ ID NO: 234932 - RNA, 32 nt, Homo Sapiens
acuuuuuauuuuuauggggguggguggugcuu

SEQ ID NO: 234933 - RNA, 32 nt, Homo Sapiens
guuuuaaaugagccagagaugauccacaaagu

SEQ ID NO: 234934 - RNA, 32 nt, Homo Sapiens
auagcugcaacccaagcuggcccauaaucagc

SEQ ID NO: 234935 - RNA, 32 nt, Homo Sapiens
cuucuucagagauaaugacauuuuaucuucuc

SEQ ID NO: 234936 - RNA, 32 nt, Homo Sapiens
ggggaauaggagcacaguacugggaaauggga

SEQ ID NO: 234937 - RNA, 32 nt, Homo Sapiens
ugacuauguuguguaaaaccaagcagguuaac

SEQ ID NO: 234938 - RNA, 30 nt, Homo Sapiens
ggcggaggcacucgcgcgggggauggccca

SEQ ID NO: 234939 - RNA, 32 nt, Homo Sapiens
aacuauuuugcuuaauuuuuuauuugaaaaaa

SEQ ID NO: 234940 - RNA, 32 nt, Homo Sapiens
uuaugccuaaucacagguauuaggcaugaggu

SEQ ID NO: 234941 - RNA, 32 nt, Homo Sapiens
ugaggagcugggugagcgccaccagccugcag

SEQ ID NO: 234942 - RNA, 32 nt, Homo Sapiens
augccuuuuuaaaauaaagcuucuguggucuu

SEQ ID NO: 234943 - RNA, 32 nt, Homo Sapiens
caucagcuccaggucaggcauucucaggcagu

SEQ ID NO: 234944 - RNA, 32 nt, Homo Sapiens
gcuggccgguggggagcggggaggggcacuga

SEQ ID NO: 234945 - RNA, 32 nt, Homo Sapiens
ugcaccacugggaaauaaauagacuugcggug

SEQ ID NO: 234946 - RNA, 32 nt, Homo Sapiens
ugaauacaugaaucggcugugaugugugaacu

SEQ ID NO: 234947 - RNA, 32 nt, Homo Sapiens
ggcaggcuaggggcucuguuucccccggcucu

SEQ ID NO: 234948 - RNA, 32 nt, Homo Sapiens
uguguaauaccuucuuuuucuauuauguuugu

SEQ ID NO: 234949 - RNA, 32 nt, Homo Sapiens
ggacagacaacauggaauauaauaacauuuuu

SEQ ID NO: 234950 - RNA, 32 nt, Homo Sapiens
gucuuguuucagaaaccagaccacugaggaga

SEQ ID NO: 234951 - RNA, 32 nt, Homo Sapiens
cuuugggaaaauaccaaguagcuccucuccug

SEQ ID NO: 234952 - RNA, 32 nt, Homo Sapiens
uggccucucuacauccagcuuaugccucacgg

SEQ ID NO: 234953 - RNA, 32 nt, Homo Sapiens
ucauaagccaugugaauuccuacuucaggacg

SEQ ID NO: 234954 - RNA, 32 nt, Homo Sapiens
uaccagaucugugcacuggggcgauguggaag

SEQ ID NO: 234955 - RNA, 32 nt, Homo Sapiens
cagaugggccugcagggcagugcucagcauuu

SEQ ID NO: 234956 - RNA, 29 nt, Homo Sapiens
uagcuggggccucucaguuugguucuaua

SEQ ID NO: 234957 - RNA, 32 nt, Homo Sapiens
ggagccugaggaaauacccagucaguccuccc

SEQ ID NO: 234958 - RNA, 32 nt, Homo Sapiens
aggacaaggggacaggcauuugugggccuaac

SEQ ID NO: 234959 - RNA, 32 nt, Homo Sapiens
caggcugcagagcgcgcacggcucgcuggagc

SEQ ID NO: 234960 - RNA, 32 nt, Homo Sapiens
uugggcagagauguuucuuuuuaauguuaauc

SEQ ID NO: 234961 - RNA, 32 nt, Homo Sapiens
uauuugugccuggucauguuuuccuuugguau

SEQ ID NO: 234962 - RNA, 32 nt, Homo Sapiens
ccuucagcggcuucuuccagcaaugggacaga

SEQ ID NO: 234963 - RNA, 32 nt, Homo Sapiens
aggcccuucagccccagggccaugucuggguu

SEQ ID NO: 234964 - RNA, 32 nt, Homo Sapiens
auuuuggaaaauuguauacugucaauuaaagu

SEQ ID NO: 234965 - RNA, 32 nt, Homo Sapiens
aucagaaaacaaaauagaggcagcuuuuguag

SEQ ID NO: 234966 - RNA, 32 nt, Homo Sapiens
guacuacacagaagcuguguuuucuaguucug

SEQ ID NO: 234967 - RNA, 32 nt, Homo Sapiens
aacauauguauuaagccaaacaugagugaaua

SEQ ID NO: 234968 - RNA, 32 nt, Homo Sapiens
auaaacaaaauugcugcaccaaugcacugagu

SEQ ID NO: 234969 - RNA, 32 nt, Homo Sapiens
cccuuacggcggcuggggagggaccaggccca

SEQ ID NO: 234970 - RNA, 29 nt, Homo Sapiens
uugagggugacuuuuccugcugccuggcc

SEQ ID NO: 234971 - RNA, 32 nt, Homo Sapiens
aauaguccaggguggggccuggccucccugcc

SEQ ID NO: 234972 - RNA, 32 nt, Homo Sapiens
cugcaggaggagaccuugugggacaucugagg

SEQ ID NO: 234973 - RNA, 32 nt, Homo Sapiens
aucucccuaagucagaguggcugcuggcccug

SEQ ID NO: 234974 - RNA, 29 nt, Homo Sapiens
gcuggguggggacagaagcugcaggggag

SEQ ID NO: 234975 - RNA, 32 nt, Homo Sapiens
uacuguguaauaaaagaaaaaauacuuguuca

SEQ ID NO: 234976 - RNA, 28 nt, Homo Sapiens
ggcggggcgcggccgcuggccguauuug

SEQ ID NO: 234977 - RNA, 30 nt, Homo Sapiens
ugugaggauaaaacaaggccguauucuaaa

SEQ ID NO: 234978 - RNA, 32 nt, Homo Sapiens
guggccugggggugggggugggcaaggcugac

SEQ ID NO: 234979 - RNA, 32 nt, Homo Sapiens
augcauaauuuucccauuuuaaaaucuaaacu

SEQ ID NO: 234980 - RNA, 32 nt, Homo Sapiens
cauguacuaaaauuauuucuguauugcuuuua

SEQ ID NO: 234981 - RNA, 32 nt, Homo Sapiens
cgagccagccucgguucccgcggcccgccgag

SEQ ID NO: 234982 - RNA, 32 nt, Homo Sapiens
guuuccauaucauuaaaaccaaggauccauga

SEQ ID NO: 234983 - RNA, 30 nt, Homo Sapiens
cgugcugagccccggccgccggcccggcau

SEQ ID NO: 234984 - RNA, 32 nt, Homo Sapiens
cauguccuucccucccccaccccgccucauuc

SEQ ID NO: 234985 - RNA, 32 nt, Homo Sapiens
guucccacugaucccuuguuuaucucacuggg

SEQ ID NO: 234986 - RNA, 32 nt, Homo Sapiens
cacugagauaaaauaggucuuuguuauuuuca

SEQ ID NO: 234987 - RNA, 31 nt, Homo Sapiens
gccguggccuacugccugccgcgcgaggcgc

SEQ ID NO: 234988 - RNA, 32 nt, Homo Sapiens
cagacuccuccgggucgcgcuccagcugcuuc

SEQ ID NO: 234989 - RNA, 32 nt, Homo Sapiens
cugucacauuuuucuuguuuuguccuuuuauu

SEQ ID NO: 234990 - RNA, 32 nt, Homo Sapiens
uucacagauaaauuauuuaauuuucaauaaca

SEQ ID NO: 234991 - RNA, 32 nt, Homo Sapiens
aagacaaguguuuauuaaaauacuguuuugga

SEQ ID NO: 234992 - RNA, 32 nt, Homo Sapiens
cagucugucaguuacacuguacauuagggaua

SEQ ID NO: 234993 - RNA, 32 nt, Homo Sapiens
aacugagucucacucugucacccaggcuggag

SEQ ID NO: 234994 - RNA, 32 nt, Homo Sapiens
cagccugugucccaugggcacaagcaaauccc

SEQ ID NO: 234995 - RNA, 32 nt, Homo Sapiens
ugggacaugaacaauuuucauguguaagguag

SEQ ID NO: 234996 - RNA, 32 nt, Homo Sapiens
ugggaaaguggaacaaugcgucgguuguagga

SEQ ID NO: 234997 - RNA, 32 nt, Homo Sapiens
agaguccggagccaugagcggguuuaauuuug

SEQ ID NO: 234998 - RNA, 32 nt, Homo Sapiens
aagucagcccucgacacaaggguuuguaaaaa

SEQ ID NO: 234999 - RNA, 32 nt, Homo Sapiens
uuauaaguaaaguuuacccaggcauggaccag

SEQ ID NO: 235000 - RNA, 32 nt, Homo Sapiens
uaauuuuaauagcuaugcaguacuccauccug

SEQ ID NO: 235001 - RNA, 32 nt, Homo Sapiens
uuagacauugagcuaccacaggacccaggauu

SEQ ID NO: 235002 - RNA, 32 nt, Homo Sapiens
agcccaacacugggugcucucuuccacuacag

SEQ ID NO: 235003 - RNA, 32 nt, Homo Sapiens
gagggcucaaaagaagacaggaagacguggga

SEQ ID NO: 235004 - RNA, 32 nt, Homo Sapiens
uacauccucuuauuuaguguuaccacauaaau

SEQ ID NO: 235005 - RNA, 32 nt, Homo Sapiens
aggcucccugggacuuaagggcccucagggcc

SEQ ID NO: 235006 - RNA, 32 nt, Homo Sapiens
ggaaggcccagggcagggagggggcauguggu

SEQ ID NO: 235007 - RNA, 32 nt, Homo Sapiens
ggcugaaguggcaacccuggggucuuugaugu

SEQ ID NO: 235008 - RNA, 32 nt, Homo Sapiens
ggauuuuuuguuuuuguagcuaacuuauggau

SEQ ID NO: 235009 - RNA, 32 nt, Homo Sapiens
gcacgcgucccggcucacgcguccgcccgccc

SEQ ID NO: 235010 - RNA, 32 nt, Homo Sapiens
auaaaaaacucuuaaggcaacucacugauuua

SEQ ID NO: 235011 - RNA, 32 nt, Homo Sapiens
gaaaucuuugcauuucuuucugguucucacac

SEQ ID NO: 235012 - RNA, 30 nt, Homo Sapiens
cccauggcgcccgggguccccgcugcacgg

SEQ ID NO: 235013 - RNA, 32 nt, Homo Sapiens
ucaccucauuucuuuugguuucaauuacuccu

SEQ ID NO: 235014 - RNA, 32 nt, Homo Sapiens
ugccgggccgcggcgccggcucccaggaugca

SEQ ID NO: 235015 - RNA, 32 nt, Homo Sapiens
uuuuuaaaaaauaaagguugugaggaaaagac

SEQ ID NO: 235016 - RNA, 32 nt, Homo Sapiens
uaagaaacaaaaaacaaacaaacaaacaaaaa

SEQ ID NO: 235017 - RNA, 32 nt, Homo Sapiens
uuuuaugaccggaaucccgcuuccucccucac

SEQ ID NO: 235018 - RNA, 32 nt, Homo Sapiens
uucucagaccucugagagggccuugagggcag

SEQ ID NO: 235019 - RNA, 32 nt, Homo Sapiens
ccuucccuggaggucucucccucccccagagc

SEQ ID NO: 235020 - RNA, 32 nt, Homo Sapiens
ggagacuugguggucugagcugucccaagucc

SEQ ID NO: 235021 - RNA, 32 nt, Homo Sapiens
uuuguucuuuaacaguguauaccagaggguua

SEQ ID NO: 235022 - RNA, 32 nt, Homo Sapiens
gagaaauaggacuuaauuccacuaggggcucu

SEQ ID NO: 235023 - RNA, 32 nt, Homo Sapiens
ugauugagauggaaucccacucugucguccag

SEQ ID NO: 235024 - RNA, 32 nt, Homo Sapiens
cuggcuugggguggugggaggcggggagcugc

SEQ ID NO: 235025 - RNA, 32 nt, Homo Sapiens
augacaggugcuuuuauugucauuccagagcu

SEQ ID NO: 235026 - RNA, 32 nt, Homo Sapiens
guugaaguccuacaacaucaccucugagaaua

SEQ ID NO: 235027 - RNA, 32 nt, Homo Sapiens
guggccggagccggagcagagccuggguuugg

SEQ ID NO: 235028 - RNA, 32 nt, Homo Sapiens
agaagauauuguacaguauauuuuaaaucuau

SEQ ID NO: 235029 - RNA, 32 nt, Homo Sapiens
uauuucuccuaaugcuuucccucccccacucc

SEQ ID NO: 235030 - RNA, 32 nt, Homo Sapiens
ucaaacucaaggugcccacgggccuccggggc

SEQ ID NO: 235031 - RNA, 32 nt, Homo Sapiens
ccccucccuggcccuucucaguuuucucccac

SEQ ID NO: 235032 - RNA, 32 nt, Homo Sapiens
cuaggucguggcgucgggcuuccggagcuuug

SEQ ID NO: 235033 - RNA, 32 nt, Homo Sapiens
uucauucuuguucaaaaagauuuuagcuacau

SEQ ID NO: 235034 - RNA, 32 nt, Homo Sapiens
guccagggcuuggccuggcuccugagccagcg

SEQ ID NO: 235035 - RNA, 32 nt, Homo Sapiens
uccucagcuccuuaacccuccuccuucugccc

SEQ ID NO: 235036 - RNA, 32 nt, Homo Sapiens
aguacaaacaauuucaacugauauucccaaaa

SEQ ID NO: 235037 - RNA, 32 nt, Homo Sapiens
ggccugagaaaugugcuacugauaagaccguu

SEQ ID NO: 235038 - RNA, 32 nt, Homo Sapiens
gaauacagaauuagauguuugcugguuuucug

SEQ ID NO: 235039 - RNA, 32 nt, Homo Sapiens
gaccauaaaauauuuuuacacgcagccugagc

SEQ ID NO: 235040 - RNA, 32 nt, Homo Sapiens
cccgccuccaggguucaagugauucuccugcc

SEQ ID NO: 235041 - RNA, 32 nt, Homo Sapiens
ugggcuccacugggccccuggccucgggagcg

SEQ ID NO: 235042 - RNA, 32 nt, Homo Sapiens
acucuuguucuucuagcuuuuagacuauauga

SEQ ID NO: 235043 - RNA, 32 nt, Homo Sapiens
uccaaguugucaacuuaagcgucuguuuacca

SEQ ID NO: 235044 - RNA, 32 nt, Homo Sapiens
gcuuguaaauacugagagauuggugauuuaua

SEQ ID NO: 235045 - RNA, 32 nt, Homo Sapiens
uggugggugcggaucagcuuggagcucugcuu

SEQ ID NO: 235046 - RNA, 32 nt, Homo Sapiens
acacagugucauuguugauguuaaauuaaagu

SEQ ID NO: 235047 - RNA, 32 nt, Homo Sapiens
uggaggaaggggagguugaggggggugcccug

SEQ ID NO: 235048 - RNA, 32 nt, Homo Sapiens
uaguuucuagugucacugaugaacuagugaug

SEQ ID NO: 235049 - RNA, 32 nt, Homo Sapiens
ccucauagacgccgaagcuggacuuggagugg

SEQ ID NO: 235050 - RNA, 32 nt, Homo Sapiens
guuaauaucucaaacaacaguguuaugcucug

SEQ ID NO: 235051 - RNA, 32 nt, Homo Sapiens
gagcucucucuggaucagcuuuacuuggguag

SEQ ID NO: 235052 - RNA, 32 nt, Homo Sapiens
ggugagagaaaacuaauguuuacuuucugcug

SEQ ID NO: 235053 - RNA, 32 nt, Homo Sapiens
ucccauauuuauaggcuauuaaggcaagggau

SEQ ID NO: 235054 - RNA, 32 nt, Homo Sapiens
gagcuugcagugagccgagaucgcgccacugc

SEQ ID NO: 235055 - RNA, 32 nt, Homo Sapiens
ucgcgcgcaccccgaggcgccgcgcccagcuc

SEQ ID NO: 235056 - RNA, 32 nt, Homo Sapiens
cugcccuccagauggguucuuuuaaacaauuu

SEQ ID NO: 235057 - RNA, 32 nt, Homo Sapiens
uacuucaccuagaguaaugaccuccaguucca

SEQ ID NO: 235058 - RNA, 32 nt, Homo Sapiens
aaguaggucaguagguugggguugcugacacc

SEQ ID NO: 235059 - RNA, 32 nt, Homo Sapiens
auuugccuacucuuugccccagcaauuccucg

SEQ ID NO: 235060 - RNA, 32 nt, Homo Sapiens
cauguuuccugguuuuaaguauaauacuuaac

SEQ ID NO: 235061 - RNA, 32 nt, Homo Sapiens
ggguuuucaguaaaauguuuugccucaucgug

SEQ ID NO: 235062 - RNA, 32 nt, Homo Sapiens
guggggaguccucccuccauucuuguccagaa

SEQ ID NO: 235063 - RNA, 31 nt, Homo Sapiens
agaggccccgcggucgcucaggggccccggg

SEQ ID NO: 235064 - RNA, 32 nt, Homo Sapiens
gcagagcgggcugggcggcugucuggaccucg

SEQ ID NO: 235065 - RNA, 29 nt, Homo Sapiens
augaacauagugaauacuaaagaaaacgc

SEQ ID NO: 235066 - RNA, 32 nt, Homo Sapiens
aaaguuccacauggaagcuggguugccuccca

SEQ ID NO: 235067 - RNA, 32 nt, Homo Sapiens
cgaguugccugccgaccgaggacccccgggag

SEQ ID NO: 235068 - RNA, 32 nt, Homo Sapiens
cuccuccucggcguacgguccuccccugaccc

SEQ ID NO: 235069 - RNA, 32 nt, Homo Sapiens
caauggcagcuagacuggagugaggcuuccag

SEQ ID NO: 235070 - RNA, 32 nt, Homo Sapiens
gagaaggagagccaggugugccgagaccaucc

SEQ ID NO: 235071 - RNA, 32 nt, Homo Sapiens
gguuuugucaaauauaugauaaccuguauccu

SEQ ID NO: 235072 - RNA, 32 nt, Homo Sapiens
gagauuuucuuaccuucauuugcuuuuaugcu

SEQ ID NO: 235073 - RNA, 32 nt, Homo Sapiens
gugauuuuuuuuucuuuuuucuuuuuuuuuuu

SEQ ID NO: 235074 - RNA, 32 nt, Homo Sapiens
aaauaaaauaaucaaaauguuuccucuuucua

SEQ ID NO: 235075 - RNA, 32 nt, Homo Sapiens
acuucccgugcagacucagaugccaacucaaa

SEQ ID NO: 235076 - RNA, 32 nt, Homo Sapiens
auauaaaaaauauaaccaaaacuugggaauuc

SEQ ID NO: 235077 - RNA, 32 nt, Homo Sapiens
aaagcaagagcaaaaacucaguuaaaugcguu

SEQ ID NO: 235078 - RNA, 32 nt, Homo Sapiens
aauauuaaaaauuuugccauuauaaaaaaaaa

SEQ ID NO: 235079 - RNA, 32 nt, Homo Sapiens
aaagccgcgcgcccggccggugacugggugaa

SEQ ID NO: 235080 - RNA, 32 nt, Homo Sapiens
ucuaaaugcuguaauuugaagccauuuccaua

SEQ ID NO: 235081 - RNA, 32 nt, Homo Sapiens
cuggugccggagaggacuggcucccacacuca

SEQ ID NO: 235082 - RNA, 31 nt, Homo Sapiens
augcauuucuguggaauuccaaauaaguaaa

SEQ ID NO: 235083 - RNA, 32 nt, Homo Sapiens
ugaaaugcaauguguccccucucaccuuauua

SEQ ID NO: 235084 - RNA, 32 nt, Homo Sapiens
auguauaaaaauuuguaagcguuagcggcauu

SEQ ID NO: 235085 - RNA, 32 nt, Homo Sapiens
gaagacccguguuuccuggaccgcgaaucagu

SEQ ID NO: 235086 - RNA, 32 nt, Homo Sapiens
cugagccaggucugaagaacuguugcccaauu

SEQ ID NO: 235087 - RNA, 32 nt, Homo Sapiens
agaccaagugugugaacguacaugacugaccg

SEQ ID NO: 235088 - RNA, 32 nt, Homo Sapiens
uggccaggccacucccggagggggucgauccu

SEQ ID NO: 235089 - RNA, 32 nt, Homo Sapiens
gccgucagacaucaggcuccccggccaccaug

SEQ ID NO: 235090 - RNA, 32 nt, Homo Sapiens
ccugagaggacgccucuggagccgcgacugcc

SEQ ID NO: 235091 - RNA, 32 nt, Homo Sapiens
uccugccaccuggcugcccacagagcucucca

SEQ ID NO: 235092 - RNA, 32 nt, Homo Sapiens
gcggccuccugggugcucacggcagcgcacug

SEQ ID NO: 235093 - RNA, 32 nt, Homo Sapiens
gaucauagcucacuaacaccugggcucaagug

SEQ ID NO: 235094 - RNA, 27 nt, Homo Sapiens
uagaguuccauauucugguauugugau

SEQ ID NO: 235095 - RNA, 32 nt, Homo Sapiens
gcccagccgucccucucauccuccccauuccu

SEQ ID NO: 235096 - RNA, 32 nt, Homo Sapiens
ggugccaucaggaggcggcugcugcugaccgg

SEQ ID NO: 235097 - RNA, 30 nt, Homo Sapiens
uccaggcaguaaugggcgggucccugcgcg

SEQ ID NO: 235098 - RNA, 32 nt, Homo Sapiens
gaggagccccaagucuuggggaccacagaaga

SEQ ID NO: 235099 - RNA, 32 nt, Homo Sapiens
cacugcugggcucaccauggaccgccggaugu

SEQ ID NO: 235100 - RNA, 32 nt, Homo Sapiens
ucucucuguauuauuucuuuuauagcugcaug

SEQ ID NO: 235101 - RNA, 32 nt, Homo Sapiens
gggccaggccccagcauuguucaggcccuggg

SEQ ID NO: 235102 - RNA, 32 nt, Homo Sapiens
agagggaaauaaguaaaaugucuugaggcugu

SEQ ID NO: 235103 - RNA, 32 nt, Homo Sapiens
cccucuccuuccccggcucgcaggagagcaga

SEQ ID NO: 235104 - RNA, 32 nt, Homo Sapiens
cuagggaccuggggggaggagacccauggacu

SEQ ID NO: 235105 - RNA, 32 nt, Homo Sapiens
cacuagacacuggguuucaggaggagggagac

SEQ ID NO: 235106 - RNA, 32 nt, Homo Sapiens
auaaaacacccauuuuuaacaaaacaacuuua

SEQ ID NO: 235107 - RNA, 32 nt, Homo Sapiens
agguuuucucugaagcuucucagcugcuguua

SEQ ID NO: 235108 - RNA, 32 nt, Homo Sapiens
aaauguauuuguaaugauacaauuguuuauaa

SEQ ID NO: 235109 - RNA, 32 nt, Homo Sapiens
gcaggagcagugcguuuuaccucagccaguca

SEQ ID NO: 235110 - RNA, 32 nt, Homo Sapiens
gaaucaccugggaggagaaggaauuguggcgg

SEQ ID NO: 235111 - RNA, 32 nt, Homo Sapiens
acuagucaucacaacagcaguucuuuguaaua

SEQ ID NO: 235112 - RNA, 32 nt, Homo Sapiens
ggagggcaggcgccugggcugggggcggggac

SEQ ID NO: 235113 - RNA, 27 nt, Homo Sapiens
ggcuuuuccucccucagccccuucuca

SEQ ID NO: 235114 - RNA, 32 nt, Homo Sapiens
cugaguagcugagacuacaggcacgcaccacc

SEQ ID NO: 235115 - RNA, 26 nt, Homo Sapiens
aauggagaagacucaagaaacagucc

SEQ ID NO: 235116 - RNA, 32 nt, Homo Sapiens
gacuuuaaaaauacuagugaagccucuugugu

SEQ ID NO: 235117 - RNA, 32 nt, Homo Sapiens
uauaugcugaagcucacagaaugggcuucuug

SEQ ID NO: 235118 - RNA, 32 nt, Homo Sapiens
uggcccugucuugccugcuguccaucaccaug

SEQ ID NO: 235119 - RNA, 29 nt, Homo Sapiens
ugggaagcguggaucaguuuaaugacucu

SEQ ID NO: 235120 - RNA, 32 nt, Homo Sapiens
gggcuugugguggucagcgaucccauccaugg

SEQ ID NO: 235121 - RNA, 32 nt, Homo Sapiens
uuggagggucccaagcugggccccagcccacc

SEQ ID NO: 235122 - RNA, 32 nt, Homo Sapiens
cggccgcguagcccgcgcgcggagcguacccu

SEQ ID NO: 235123 - RNA, 32 nt, Homo Sapiens
uuuccugguuuuuuuuaccaccuuauuuaaau

SEQ ID NO: 235124 - RNA, 32 nt, Homo Sapiens
aagaaggugacauggcgguugggccugguagc

SEQ ID NO: 235125 - RNA, 32 nt, Homo Sapiens
ugggcaaggagggcccugcugcuggcuguccu

SEQ ID NO: 235126 - RNA, 32 nt, Homo Sapiens
agucagucaggcgccuggagaagugcucagcu

SEQ ID NO: 235127 - RNA, 32 nt, Homo Sapiens
ugcgccagacucuggagcaagcgcgaaaugaa

SEQ ID NO: 235128 - RNA, 32 nt, Homo Sapiens
gguggagcuacuccccaccucccaccaacaua

SEQ ID NO: 235129 - RNA, 32 nt, Homo Sapiens
ccacaaggcuccugggccuccgggaagacggg

SEQ ID NO: 235130 - RNA, 32 nt, Homo Sapiens
ggggccuucagaggauuuuaugcuggaaauau

SEQ ID NO: 235131 - RNA, 32 nt, Homo Sapiens
caucaccagagguuaaaaaugaucacugggaa

SEQ ID NO: 235132 - RNA, 32 nt, Homo Sapiens
ggggagcaaaccucgaaacuacaugaugugcu

SEQ ID NO: 235133 - RNA, 32 nt, Homo Sapiens
gagaaagugguccccagguaagagggaagagc

SEQ ID NO: 235134 - RNA, 32 nt, Homo Sapiens
cgcuucuugacaaaguuacugauuucaccuuu

SEQ ID NO: 235135 - RNA, 32 nt, Homo Sapiens
aauguuacacuuuaaaggacagcaaauaagaa

SEQ ID NO: 235136 - RNA, 32 nt, Homo Sapiens
auuauuuagugucagaggccgagcacaguggc

SEQ ID NO: 235137 - RNA, 32 nt, Homo Sapiens
augauaggcaacuuuacccauuuugaaugccu

SEQ ID NO: 235138 - RNA, 32 nt, Homo Sapiens
gaaggugacugggauucagcgagagagagguc

SEQ ID NO: 235139 - RNA, 32 nt, Homo Sapiens
uggaaacgcgcgcccaggcuccgucgucgccu

SEQ ID NO: 235140 - RNA, 32 nt, Homo Sapiens
uuauuuguuuuugugcuucaguuuguccagug

SEQ ID NO: 235141 - RNA, 32 nt, Homo Sapiens
acguuguccagcagcacgugucauuucauuag

SEQ ID NO: 235142 - RNA, 32 nt, Homo Sapiens
guggccugaagaagcacuucugcugcaucgcu

SEQ ID NO: 235143 - RNA, 32 nt, Homo Sapiens
guccguggugccuuccuggugggcugcagaca

SEQ ID NO: 235144 - RNA, 32 nt, Homo Sapiens
uuuaacagugaaaucuuaaaaguaacuguuuc

SEQ ID NO: 235145 - RNA, 32 nt, Homo Sapiens
uauuauuuucuauagcucuucuauuuaaaaaa

SEQ ID NO: 235146 - RNA, 32 nt, Homo Sapiens
guguguaacggcgggggcgugucggcgggaag

SEQ ID NO: 235147 - RNA, 32 nt, Homo Sapiens
agcauuccaagcccccaccccaccccuagaac

SEQ ID NO: 235148 - RNA, 32 nt, Homo Sapiens
acaagcccaggccccuccacccugcccgcguu

SEQ ID NO: 235149 - RNA, 32 nt, Homo Sapiens
auauagaggucccagugcagucuguccagaau

SEQ ID NO: 235150 - RNA, 32 nt, Homo Sapiens
uacagaguuagaaauucgaaaacuauuccagg

SEQ ID NO: 235151 - RNA, 32 nt, Homo Sapiens
ucagauuguaaauucuaacuccaauuccccua

SEQ ID NO: 235152 - RNA, 32 nt, Homo Sapiens
cagagcuugucggaccgcaguguguucucugc

SEQ ID NO: 235153 - RNA, 32 nt, Homo Sapiens
guauugagugccuacucugugcaaggcacuau

SEQ ID NO: 235154 - RNA, 32 nt, Homo Sapiens
uacacaugccugcauacaggcauacacaugca

SEQ ID NO: 235155 - RNA, 32 nt, Homo Sapiens
agagaaaacuggggucgcgaagaaaucacagc

SEQ ID NO: 235156 - RNA, 32 nt, Homo Sapiens
gggcuagaaaggaggcuacauaaaaaggggca

SEQ ID NO: 235157 - RNA, 32 nt, Homo Sapiens
cccgugauuagaagggugaagagugaggggca

SEQ ID NO: 235158 - RNA, 32 nt, Homo Sapiens
gaucaucaggauuucaucugaguguggagucc

SEQ ID NO: 235159 - RNA, 32 nt, Homo Sapiens
uguucauuaugaauuuaaauuguaagguauga

SEQ ID NO: 235160 - RNA, 32 nt, Homo Sapiens
cccgcuggcgaccgcugccuccgggaaguuua

SEQ ID NO: 235161 - RNA, 32 nt, Homo Sapiens
cugaagaugaaucaaugggaaauacuacuccu

SEQ ID NO: 235162 - RNA, 32 nt, Homo Sapiens
cuucccugacccccacccacauuucccuccuu

SEQ ID NO: 235163 - RNA, 32 nt, Homo Sapiens
uugcccacgcaccccacucggcgucgcgcggc

SEQ ID NO: 235164 - RNA, 32 nt, Homo Sapiens
cugggaaaaagguggggggaccaggggaagac

SEQ ID NO: 235165 - RNA, 32 nt, Homo Sapiens
cuuucaggaaacaaaauuaaacucuaucuggc

SEQ ID NO: 235166 - RNA, 32 nt, Homo Sapiens
ggcuggagccgcggcugacgggcccgcggucu

SEQ ID NO: 235167 - RNA, 32 nt, Homo Sapiens
aaguuaagcaaguggaauuuagaaaauguuua

SEQ ID NO: 235168 - RNA, 32 nt, Homo Sapiens
aaagccccuggcuuuaaaucaugccaggauca

SEQ ID NO: 235169 - RNA, 32 nt, Homo Sapiens
ggaaacugggugccggcuccgcgcgcgaccuc

SEQ ID NO: 235170 - RNA, 30 nt, Homo Sapiens
ucugcuaaaguuuggggggaaauguuacgc

SEQ ID NO: 235171 - RNA, 32 nt, Homo Sapiens
agaucaacuguguaaucuuuuacuauucaagc

SEQ ID NO: 235172 - RNA, 32 nt, Homo Sapiens
gaaagaguuuaauggaauauuuuuguacccga

SEQ ID NO: 235173 - RNA, 32 nt, Homo Sapiens
aucgggagcugccugcucacaggcacuuuggg

SEQ ID NO: 235174 - RNA, 32 nt, Homo Sapiens
uuaagugcuuagauuauagaaaugaucacuuu

SEQ ID NO: 235175 - RNA, 32 nt, Homo Sapiens
agccaggccggcgaccaccaggggccugagga

SEQ ID NO: 235176 - RNA, 32 nt, Homo Sapiens
cugggucugcaaacaugacaaagaaaaaaguc

SEQ ID NO: 235177 - RNA, 32 nt, Homo Sapiens
augugggggaugcaguggggcuggccgagccc

SEQ ID NO: 235178 - RNA, 32 nt, Homo Sapiens
agacccuccaugaacugugcucccagccuucc

SEQ ID NO: 235179 - RNA, 32 nt, Homo Sapiens
ggauggugaguugggaucccccaguccuuagc

SEQ ID NO: 235180 - RNA, 32 nt, Homo Sapiens
ucuguugcugaauaauaacucuuucaaagcau

SEQ ID NO: 235181 - RNA, 29 nt, Homo Sapiens
ggagccugugaauucagaggcaagucugc

SEQ ID NO: 235182 - RNA, 32 nt, Homo Sapiens
gccaccugcuccaggcacagugcaggucucag

SEQ ID NO: 235183 - RNA, 32 nt, Homo Sapiens
uaucuugcacaaaauuaccucuguuaaggaau

SEQ ID NO: 235184 - RNA, 32 nt, Homo Sapiens
ccugcccuguggggugcccccgaugggaggcu

SEQ ID NO: 235185 - RNA, 32 nt, Homo Sapiens
uuggaugugcuggagaucuucacagccacaga

SEQ ID NO: 235186 - RNA, 32 nt, Homo Sapiens
cugcuaaagauggcagaaauuacucuacacag

SEQ ID NO: 235187 - RNA, 32 nt, Homo Sapiens
acaaggauggacuguagcagugaguuggcaaa

SEQ ID NO: 235188 - RNA, 32 nt, Homo Sapiens
gagugaccaacccaaagaggacagccucggcc

SEQ ID NO: 235189 - RNA, 32 nt, Homo Sapiens
ccugggagaucugggacuucagagcaucccgg

SEQ ID NO: 235190 - RNA, 32 nt, Homo Sapiens
cacggcggcggcccggccagagacucggcgcc

SEQ ID NO: 235191 - RNA, 32 nt, Homo Sapiens
uuaccuggggaagguggaaaagaucgaccuuu

SEQ ID NO: 235192 - RNA, 32 nt, Homo Sapiens
guauaaaaauuuguaagcguuagcggcauuaa

SEQ ID NO: 235193 - RNA, 32 nt, Homo Sapiens
gcuauuagugaauauuaagguaguuauucaca

SEQ ID NO: 235194 - RNA, 32 nt, Homo Sapiens
ucauuucccccuccuuugcuggaugggguuuu

SEQ ID NO: 235195 - RNA, 32 nt, Homo Sapiens
aggagccugaauccuucgcuuaccaggcugag

SEQ ID NO: 235196 - RNA, 32 nt, Homo Sapiens
gugcuaccucaucuugccacugcagugacuuu

SEQ ID NO: 235197 - RNA, 32 nt, Homo Sapiens
uuauccccugcggcaggaggggcccgcugggc

SEQ ID NO: 235198 - RNA, 32 nt, Homo Sapiens
cugauuuuuucccccuuuaccuagcugugccc

SEQ ID NO: 235199 - RNA, 32 nt, Homo Sapiens
acaacccguuugcugcagagccggacccagug

SEQ ID NO: 235200 - RNA, 32 nt, Homo Sapiens
gguuccccccaugccucuccagcccuccugcu

SEQ ID NO: 235201 - RNA, 32 nt, Homo Sapiens
cgcccgccgcgugagaggacgggcuccgcgcg

SEQ ID NO: 235202 - RNA, 32 nt, Homo Sapiens
gagccagccccuccccuacccggagcagcccg

SEQ ID NO: 235203 - RNA, 32 nt, Homo Sapiens
uuuuuuuuuuuuuuuuuuuuuaaagaaugagc

SEQ ID NO: 235204 - RNA, 32 nt, Homo Sapiens
caacagcagggccuucuucuuuuugacgugca

SEQ ID NO: 235205 - RNA, 30 nt, Homo Sapiens
uuggagagcaagcuguuugagucugaugca

SEQ ID NO: 235206 - RNA, 32 nt, Homo Sapiens
aggcagaagaugugugugucuaugagugaguu

SEQ ID NO: 235207 - RNA, 32 nt, Homo Sapiens
cuucauuucuagcaauuauuuaccaaguacca

SEQ ID NO: 235208 - RNA, 32 nt, Homo Sapiens
ugaaaauucacuggauaugaaaauaguuaauc

SEQ ID NO: 235209 - RNA, 27 nt, Homo Sapiens
uccccccauuaauauguauacugaaaa

SEQ ID NO: 235210 - RNA, 32 nt, Homo Sapiens
caggccuggcaccucccugccuuguguccuga

SEQ ID NO: 235211 - RNA, 32 nt, Homo Sapiens
cucaagcgcccagcucugcccgaggagcccag

SEQ ID NO: 235212 - RNA, 32 nt, Homo Sapiens
aggaccacgggguggggucggcgccagccacu

SEQ ID NO: 235213 - RNA, 32 nt, Homo Sapiens
cacuuuccaguuuggccuuaugcuucaugcag

SEQ ID NO: 235214 - RNA, 32 nt, Homo Sapiens
ggaguaggcuggggacaucagaggaggauggg

SEQ ID NO: 235215 - RNA, 32 nt, Homo Sapiens
ugaauuuguguguuuuuuccugaguuucagau

SEQ ID NO: 235216 - RNA, 32 nt, Homo Sapiens
cgagugcguggccuccuaauccggauccuagu

SEQ ID NO: 235217 - RNA, 32 nt, Homo Sapiens
acggcccuggguacccggggcggcucggcggc

SEQ ID NO: 235218 - RNA, 32 nt, Homo Sapiens
aggagucugaauguagagaugaaaaauacaga

SEQ ID NO: 235219 - RNA, 32 nt, Homo Sapiens
uagaaaaaaaauuuauauauauauauaaacau

SEQ ID NO: 235220 - RNA, 32 nt, Homo Sapiens
ucucuucaggacaacacugcacaauggcaucc

SEQ ID NO: 235221 - RNA, 32 nt, Homo Sapiens
gggaccucacuuucuucaucuguagacugacg

SEQ ID NO: 235222 - RNA, 32 nt, Homo Sapiens
gcugacauggagcagcccugcugcugaggccg

SEQ ID NO: 235223 - RNA, 32 nt, Homo Sapiens
aaauucuaaacacaaagucaaaauaaaccuau

SEQ ID NO: 235224 - RNA, 32 nt, Homo Sapiens
cggguuuucugacaguugguguuuccugggcc

SEQ ID NO: 235225 - RNA, 32 nt, Homo Sapiens
auggcuuuacacaaggaaauguguggcuuuug

SEQ ID NO: 235226 - RNA, 32 nt, Homo Sapiens
cuguagaagggggacaugccacauguauuaga

SEQ ID NO: 235227 - RNA, 32 nt, Homo Sapiens
ggagcuuuacgacuucccguccugcgggaagu

SEQ ID NO: 235228 - RNA, 32 nt, Homo Sapiens
ccaaagauacguaugugacagaagcacauaag

SEQ ID NO: 235229 - RNA, 32 nt, Homo Sapiens
aacaugaagauaaaucggcagucagaaaagaa

SEQ ID NO: 235230 - RNA, 32 nt, Homo Sapiens
aaaggaaaaaaguauaacaaaauguuuuauuu

SEQ ID NO: 235231 - RNA, 32 nt, Homo Sapiens
uaauuaacaacaauguauuuugaaagucacug

SEQ ID NO: 235232 - RNA, 32 nt, Homo Sapiens
ccacacccacccagaugacuuaguccauggga

SEQ ID NO: 235233 - RNA, 32 nt, Homo Sapiens
agcgucaucucgcgccuggagccgggucgccg

SEQ ID NO: 235234 - RNA, 32 nt, Homo Sapiens
auguugaauguggcuccgcccggggagcugcu

SEQ ID NO: 235235 - RNA, 32 nt, Homo Sapiens
cugguaacuuuggagaugguaacauuggaaua

SEQ ID NO: 235236 - RNA, 32 nt, Homo Sapiens
uacaggaggaggagaagaaucauccacaccac

SEQ ID NO: 235237 - RNA, 32 nt, Homo Sapiens
cagcucccaaccccgcagcuagccaacccaga

SEQ ID NO: 235238 - RNA, 32 nt, Homo Sapiens
uauuuccucucacccuuuauuuaugaagcugc

SEQ ID NO: 235239 - RNA, 32 nt, Homo Sapiens
uggcacuuuacagacuccauggagaugucagg

SEQ ID NO: 235240 - RNA, 32 nt, Homo Sapiens
cuugaaggaaauguuuccaauuuuauauuuaa

SEQ ID NO: 235241 - RNA, 32 nt, Homo Sapiens
ucccuucccuaaguagagagccauugcuguug

SEQ ID NO: 235242 - RNA, 32 nt, Homo Sapiens
auuuuuaaaaauuucuguuuguacauauucug

SEQ ID NO: 235243 - RNA, 32 nt, Homo Sapiens
ucuuuaaagaagaauguuaauauuuuacuuuu

SEQ ID NO: 235244 - RNA, 32 nt, Homo Sapiens
gggccccuaggaugacccaacuacccccauaa

SEQ ID NO: 235245 - RNA, 32 nt, Homo Sapiens
cuguggcauguugguuuugucuuucuuuucuc

SEQ ID NO: 235246 - RNA, 32 nt, Homo Sapiens
aagaauauguagauauagcaaaaagaaugagc

SEQ ID NO: 235247 - RNA, 32 nt, Homo Sapiens
gccgggccacugggccacaggccacgcggcca

SEQ ID NO: 235248 - RNA, 32 nt, Homo Sapiens
gcugcugagcagccuccgccucucccggcugu

SEQ ID NO: 235249 - RNA, 31 nt, Homo Sapiens
ggcgcggagccccggcccgccgcggucccgu

SEQ ID NO: 235250 - RNA, 32 nt, Homo Sapiens
auaacuguacacaacuuagaacagacugaauu

SEQ ID NO: 235251 - RNA, 32 nt, Homo Sapiens
gaccugggcuccugccacacgugggaccacca

SEQ ID NO: 235252 - RNA, 32 nt, Homo Sapiens
ugccccuuggguuggcugggguuguuuccuga

SEQ ID NO: 235253 - RNA, 32 nt, Homo Sapiens
accccaucuccagaggcaccuuccacuagcaa

SEQ ID NO: 235254 - RNA, 32 nt, Homo Sapiens
ccgccaaaaccaucaacuuaugggauauaagc

SEQ ID NO: 235255 - RNA, 32 nt, Homo Sapiens
uuauuugguaaaguauacuaaaagccuuaaaa

SEQ ID NO: 235256 - RNA, 32 nt, Homo Sapiens
uuuuuuguucuggccgaaauuuuuaugagaua

SEQ ID NO: 235257 - RNA, 32 nt, Homo Sapiens
ucuacuugaaagauuagaauauguauccaaau

SEQ ID NO: 235258 - RNA, 32 nt, Homo Sapiens
uacuaugaacaauuuguaaaugucuuaauuug

SEQ ID NO: 235259 - RNA, 32 nt, Homo Sapiens
aggucugagugguggucuuugggauaaccuuu

SEQ ID NO: 235260 - RNA, 32 nt, Homo Sapiens
gcccgcuguaauuauuuucuauuuuuguaaac

SEQ ID NO: 235261 - RNA, 32 nt, Homo Sapiens
gaaaauuaacguauuucuuuacuauggaaaac

SEQ ID NO: 235262 - RNA, 32 nt, Homo Sapiens
uuuccaauugguuuaagugggugaagccaggg

SEQ ID NO: 235263 - RNA, 32 nt, Homo Sapiens
ggacggggcgggcggcgcggacaggccauggg

SEQ ID NO: 235264 - RNA, 32 nt, Homo Sapiens
uucccgggcgagugggcugugcgugcugacgu

SEQ ID NO: 235265 - RNA, 32 nt, Homo Sapiens
auucuuacuuggauggcugcaacuaaacugaa

SEQ ID NO: 235266 - RNA, 32 nt, Homo Sapiens
aagcaaaggcaaauagugcaucugaaauuuuc

SEQ ID NO: 235267 - RNA, 32 nt, Homo Sapiens
acucaagccccucucauuuuuaucugucuacc

SEQ ID NO: 235268 - RNA, 32 nt, Homo Sapiens
gacauucuaaaauuauaauuaucugacuguga

SEQ ID NO: 235269 - RNA, 32 nt, Homo Sapiens
cacacgcccagcugcgucgcagccccagaugg

SEQ ID NO: 235270 - RNA, 32 nt, Homo Sapiens
cacugaagcugauguuauuuuaagauuacaga

SEQ ID NO: 235271 - RNA, 32 nt, Homo Sapiens
ugcuuuugcuuuugauuuuuaaucacaauucc

SEQ ID NO: 235272 - RNA, 32 nt, Homo Sapiens
agaauguauguuuacuuauauagaauuuauga

SEQ ID NO: 235273 - RNA, 32 nt, Homo Sapiens
cuugcuucuuugaugugauaguuuugagaugg

SEQ ID NO: 235274 - RNA, 32 nt, Homo Sapiens
cccaccugugcugaucaccaccaccugcuugc

SEQ ID NO: 235275 - RNA, 32 nt, Homo Sapiens
aaguucaucacgugacuguuaauguaaaccug

SEQ ID NO: 235276 - RNA, 32 nt, Homo Sapiens
uuuaucccugaacagaagcuuccagcacuggu

SEQ ID NO: 235277 - RNA, 32 nt, Homo Sapiens
gucggugguguuggguguacucagagauccag

SEQ ID NO: 235278 - RNA, 32 nt, Homo Sapiens
guucuguuaggaccaagguggaucucaguaag

SEQ ID NO: 235279 - RNA, 32 nt, Homo Sapiens
ggaccugugucugcccuaaguguccugccucc

SEQ ID NO: 235280 - RNA, 32 nt, Homo Sapiens
ggccaggaugccuggguuggccgugagaggac

SEQ ID NO: 235281 - RNA, 32 nt, Homo Sapiens
agaaccacgagguguccaugacugcccugagg

SEQ ID NO: 235282 - RNA, 32 nt, Homo Sapiens
acacauagacaugcagauacacacacacacac

SEQ ID NO: 235283 - RNA, 32 nt, Homo Sapiens
gcgccgcccgucucgggccccggacccagucc

SEQ ID NO: 235284 - RNA, 32 nt, Homo Sapiens
uagggaauugguuuuuuuguuuuagcuaucca

SEQ ID NO: 235285 - RNA, 32 nt, Homo Sapiens
acuggacagaucugggagccagcagcuggaug

SEQ ID NO: 235286 - RNA, 32 nt, Homo Sapiens
gaugaauaaauguuauacauuguuauguccag

SEQ ID NO: 235287 - RNA, 32 nt, Homo Sapiens
gacagcguucccucccccgcgugccuagccgg

SEQ ID NO: 235288 - RNA, 28 nt, Homo Sapiens
ucuggugauuuguauauguguuugaaau

SEQ ID NO: 235289 - RNA, 32 nt, Homo Sapiens
aagaaaugugauuugucuucccuucuuugcac

SEQ ID NO: 235290 - RNA, 32 nt, Homo Sapiens
ugucccugucguggagcuggggugcgugaucu

SEQ ID NO: 235291 - RNA, 32 nt, Homo Sapiens
gugccccgcuggcgagcuguaguugcggcuug

SEQ ID NO: 235292 - RNA, 32 nt, Homo Sapiens
cugagauaacgaauucuugaguuuguuuucua

SEQ ID NO: 235293 - RNA, 32 nt, Homo Sapiens
gcugcgguugccuggguugguugggggaggaa

SEQ ID NO: 235294 - RNA, 32 nt, Homo Sapiens
cauucggggccgggcgggacccgccccacaga

SEQ ID NO: 235295 - RNA, 32 nt, Homo Sapiens
auggccuuuucucuguggagagggacagagag

SEQ ID NO: 235296 - RNA, 32 nt, Homo Sapiens
ccgggacagcauggagcgcccggagcccgagc

SEQ ID NO: 235297 - RNA, 32 nt, Homo Sapiens
uuauuuucuaccuggauaaacuucuggaacuu

SEQ ID NO: 235298 - RNA, 32 nt, Homo Sapiens
ugcaagaggggaggguggggccacgugaaagg

SEQ ID NO: 235299 - RNA, 32 nt, Homo Sapiens
auggccaggugguggcuccugcagccuggaaa

SEQ ID NO: 235300 - RNA, 30 nt, Homo Sapiens
gagaguggcggcggcggcggcagcggcacc

SEQ ID NO: 235301 - RNA, 32 nt, Homo Sapiens
uguaguucuggauaaacuauuucauccgcugu

SEQ ID NO: 235302 - RNA, 32 nt, Homo Sapiens
agucauugccuguggcaaauguguguaugaga

SEQ ID NO: 235303 - RNA, 32 nt, Homo Sapiens
auauaaacugcuuuugagcaguuuagucaggg

SEQ ID NO: 235304 - RNA, 32 nt, Homo Sapiens
aaaaacaucccaugcuccuguguagaaacagu

SEQ ID NO: 235305 - RNA, 32 nt, Homo Sapiens
gaacggggccccagggcuccuagcuugagugu

SEQ ID NO: 235306 - RNA, 32 nt, Homo Sapiens
guguuucuguauaacaucgaugacgagcugaa

SEQ ID NO: 235307 - RNA, 32 nt, Homo Sapiens
uccuccuucccuccccacccuucauggcuugc

SEQ ID NO: 235308 - RNA, 32 nt, Homo Sapiens
auuccacccuccccgaccucagacugcgccuc

SEQ ID NO: 235309 - RNA, 32 nt, Homo Sapiens
caaaggcuaugaaauaguaaccucaagccacc

SEQ ID NO: 235310 - RNA, 32 nt, Homo Sapiens
aacuggccaggcauaguggugcaugccaguaa

SEQ ID NO: 235311 - RNA, 32 nt, Homo Sapiens
cuacacagaguacaauuaaaccauauugggaa

SEQ ID NO: 235312 - RNA, 32 nt, Homo Sapiens
aaccccaaacgcaaccgggucuggagggaucc

SEQ ID NO: 235313 - RNA, 32 nt, Homo Sapiens
cuggccuccgcuuuccucucucccccuuguua

SEQ ID NO: 235314 - RNA, 32 nt, Homo Sapiens
agacugaucugugccaaagucacagguuuuuc

SEQ ID NO: 235315 - RNA, 32 nt, Homo Sapiens
gaugugugcagguuuuccugauuuucuaauuu

SEQ ID NO: 235316 - RNA, 32 nt, Homo Sapiens
cgagagggccaccauggaugacaugggccugg

SEQ ID NO: 235317 - RNA, 32 nt, Homo Sapiens
aucaguauaugaugaauuucagugugugccug

SEQ ID NO: 235318 - RNA, 32 nt, Homo Sapiens
gagagauaugcacugugauauuaaauuagaaa

SEQ ID NO: 235319 - RNA, 32 nt, Homo Sapiens
uucaucuuccaguucgucaacuucuacuccuc

SEQ ID NO: 235320 - RNA, 32 nt, Homo Sapiens
ccaaauggauuuuauuuuuucauuuuauugau

SEQ ID NO: 235321 - RNA, 32 nt, Homo Sapiens
uaaccccuuuauuugcaguugaagacguugag

SEQ ID NO: 235322 - RNA, 32 nt, Homo Sapiens
cucgguuugaguuuugugucaaagaagauuuc

SEQ ID NO: 235323 - RNA, 32 nt, Homo Sapiens
uucaggauaugaacacagguacagucauucuu

SEQ ID NO: 235324 - RNA, 32 nt, Homo Sapiens
cacuuggagaacacuugaguugugaagguuuu

SEQ ID NO: 235325 - RNA, 32 nt, Homo Sapiens
gacuucccgcccuccuucuccaccuucuagug

SEQ ID NO: 235326 - RNA, 32 nt, Homo Sapiens
gcugugucccucaaacccagaguggugggcgc

SEQ ID NO: 235327 - RNA, 32 nt, Homo Sapiens
uaauacauuuuucaucucauggcuacaaugga

SEQ ID NO: 235328 - RNA, 32 nt, Homo Sapiens
agccagcgcaggagcuggccuggggugccaga

SEQ ID NO: 235329 - RNA, 32 nt, Homo Sapiens
caguuugguccuccucccagcuaccccuuuau

SEQ ID NO: 235330 - RNA, 32 nt, Homo Sapiens
uaacuagcgaauguaugaaugaaaaugcaucu

SEQ ID NO: 235331 - RNA, 31 nt, Homo Sapiens
cgcuggaaggcacugcucagagccugaaggg

SEQ ID NO: 235332 - RNA, 32 nt, Homo Sapiens
acuacugccaccugccacaguaaagcaucugc

SEQ ID NO: 235333 - RNA, 32 nt, Homo Sapiens
cuauccagcagacuuuucauuaugacuuacau

SEQ ID NO: 235334 - RNA, 32 nt, Homo Sapiens
gucugccgguuucaacacacacagacaaacac

SEQ ID NO: 235335 - RNA, 32 nt, Homo Sapiens
guuucuguuucuaauaaaauagaagggauucc

SEQ ID NO: 235336 - RNA, 32 nt, Homo Sapiens
agggagagagggcgggguuauuggaagaagaa

SEQ ID NO: 235337 - RNA, 32 nt, Homo Sapiens
cuccccgcugcucggcggcggcaucuggcccg

SEQ ID NO: 235338 - RNA, 32 nt, Homo Sapiens
ugaaacaagagaaaaaauauugcaguauaaaa

SEQ ID NO: 235339 - RNA, 32 nt, Homo Sapiens
aagcugaggcggaggccagaaacucugaaguu

SEQ ID NO: 235340 - RNA, 32 nt, Homo Sapiens
ggcccggcccggugcuuguccucccccuccca

SEQ ID NO: 235341 - RNA, 32 nt, Homo Sapiens
ucugggucugucuacacuggccgagucuccga

SEQ ID NO: 235342 - RNA, 32 nt, Homo Sapiens
agguuaucauugugaagaaguagcucaaagga

SEQ ID NO: 235343 - RNA, 32 nt, Homo Sapiens
ucacugucaccauccugccugucaauggccaa

SEQ ID NO: 235344 - RNA, 32 nt, Homo Sapiens
auaauggguauguucuaaauuugaacuuugag

SEQ ID NO: 235345 - RNA, 32 nt, Homo Sapiens
aaaagugauccaaucuaagaaaaugguaaaac

SEQ ID NO: 235346 - RNA, 32 nt, Homo Sapiens
uggggguaggcacuucugugagucccugcugc

SEQ ID NO: 235347 - RNA, 32 nt, Homo Sapiens
agguagaggaaaaauagugaaaacuuugggau

SEQ ID NO: 235348 - RNA, 32 nt, Homo Sapiens
caacaaaaauugguuaaaaacaauauaugcca

SEQ ID NO: 235349 - RNA, 32 nt, Homo Sapiens
agugggaggugauuggaucaugggggugguuu

SEQ ID NO: 235350 - RNA, 32 nt, Homo Sapiens
gugccugucauucucggauggcugugaggcau

SEQ ID NO: 235351 - RNA, 32 nt, Homo Sapiens
gugaacaagaagaugacagugauucaaaugau

SEQ ID NO: 235352 - RNA, 32 nt, Homo Sapiens
gggaaccguaauugaaacauuuacuuuugcuu

SEQ ID NO: 235353 - RNA, 32 nt, Homo Sapiens
ucuaguccgagucuuuucuccucccuucuccu

SEQ ID NO: 235354 - RNA, 32 nt, Homo Sapiens
ugguaguuucugcuuacaaauguaauacaaug

SEQ ID NO: 235355 - RNA, 32 nt, Homo Sapiens
ccaagcuccagaaacucccaacucgucugccg

SEQ ID NO: 235356 - RNA, 32 nt, Homo Sapiens
agcacggucagggucuucuugcgacccggccc

SEQ ID NO: 235357 - RNA, 32 nt, Homo Sapiens
aaauauaagguaagguaaauuucaugcaucuu

SEQ ID NO: 235358 - RNA, 32 nt, Homo Sapiens
cucccuucuuccuuuccaaccccuuccuuccu

SEQ ID NO: 235359 - RNA, 32 nt, Homo Sapiens
gaaguacuugguuuuuuuuuucuuaaauaugu

SEQ ID NO: 235360 - RNA, 32 nt, Homo Sapiens
gcaccucaguauguuaaacagguaauguaaga

SEQ ID NO: 235361 - RNA, 32 nt, Homo Sapiens
gaaaaacccagcugccuucucugcccugugcc

SEQ ID NO: 235362 - RNA, 32 nt, Homo Sapiens
uuguuuuuaaagaucuccucagggucggacuu

SEQ ID NO: 235363 - RNA, 32 nt, Homo Sapiens
ccuugcucgccaagcggucccggagcaggcuu

SEQ ID NO: 235364 - RNA, 32 nt, Homo Sapiens
ucugcucuuuacauuucuuuuaaaauaagcau

SEQ ID NO: 235365 - RNA, 32 nt, Homo Sapiens
ugaaaaccuguaguuucuuaauuuaaguccau

SEQ ID NO: 235366 - RNA, 32 nt, Homo Sapiens
agugugggaaggaaaauauugagcuaggcaca

SEQ ID NO: 235367 - RNA, 32 nt, Homo Sapiens
uagacuuguauguacauuuuucuggggagaag

SEQ ID NO: 235368 - RNA, 32 nt, Homo Sapiens
uaccaguccccaguuccccagcccugcuguga

SEQ ID NO: 235369 - RNA, 28 nt, Homo Sapiens
gucuauguugcauacauguguuuuucca

SEQ ID NO: 235370 - RNA, 32 nt, Homo Sapiens
uuuauuuuaaccaucuuuuacuauuuuuagaa

SEQ ID NO: 235371 - RNA, 32 nt, Homo Sapiens
ccuucuuuauaaugcuaaaucuauaugaguac

SEQ ID NO: 235372 - RNA, 32 nt, Homo Sapiens
auuggugccauggauuaucuuuuccauguuga

SEQ ID NO: 235373 - RNA, 32 nt, Homo Sapiens
aagcaggaguguuuuccaugggauaaaggaca

SEQ ID NO: 235374 - RNA, 32 nt, Homo Sapiens
ggugugagccaccacacccagccucuauaucc

SEQ ID NO: 235375 - RNA, 32 nt, Homo Sapiens
cuucuccaccaaagugcugaaugccaccucug

SEQ ID NO: 235376 - RNA, 32 nt, Homo Sapiens
cuuaacucuuuaaauuuuuauuucaugugaag

SEQ ID NO: 235377 - RNA, 32 nt, Homo Sapiens
cucggcgcucugcuccuggagcucccgcggga

SEQ ID NO: 235378 - RNA, 32 nt, Homo Sapiens
uuucaaaugaauauauauacauggguaaaauu

SEQ ID NO: 235379 - RNA, 32 nt, Homo Sapiens
cccggggcccccagccaugucggccgaggaga

SEQ ID NO: 235380 - RNA, 32 nt, Homo Sapiens
agcugggugagcgccaccagccugcagcccag

SEQ ID NO: 235381 - RNA, 32 nt, Homo Sapiens
cggccugcugccccggccgcacacucgacuuu

SEQ ID NO: 235382 - RNA, 32 nt, Homo Sapiens
auuuuguagagcugccagcgcucucccagguu

SEQ ID NO: 235383 - RNA, 32 nt, Homo Sapiens
agcuggcccuucccccagcccacagccagcuc

SEQ ID NO: 235384 - RNA, 32 nt, Homo Sapiens
cauguuuugugauuuucaguauacaaaucuug

SEQ ID NO: 235385 - RNA, 32 nt, Homo Sapiens
agucugaaaaggaaguaguuauuuuagcagaa

SEQ ID NO: 235386 - RNA, 32 nt, Homo Sapiens
gccccccgcuguugcuuggagaggggcgggac

SEQ ID NO: 235387 - RNA, 32 nt, Homo Sapiens
accaccuggugccagcuauauaaggaauaaag

SEQ ID NO: 235388 - RNA, 32 nt, Homo Sapiens
gcccaucaucucagaggccccuggauguccuu

SEQ ID NO: 235389 - RNA, 32 nt, Homo Sapiens
cccgcaggccccgcccaccucuuggcugaauu

SEQ ID NO: 235390 - RNA, 32 nt, Homo Sapiens
uggcucacaccuguaaucuuaacacuguggga

SEQ ID NO: 235391 - RNA, 32 nt, Homo Sapiens
aagggugggaaugcuuuuuuacauugauugau

SEQ ID NO: 235392 - RNA, 32 nt, Homo Sapiens
acaccucccuggucacauccauggaaucagag

SEQ ID NO: 235393 - RNA, 32 nt, Homo Sapiens
uuaagaacugcacuuuauugacuucgauagug

SEQ ID NO: 235394 - RNA, 32 nt, Homo Sapiens
aauuagccauuuaaaauauuuucugugacuuc

SEQ ID NO: 235395 - RNA, 32 nt, Homo Sapiens
ggggaggggaagcuugagcugcugcugucacu

SEQ ID NO: 235396 - RNA, 32 nt, Homo Sapiens
ccaacccucacagccaguagacgagcuggagc

SEQ ID NO: 235397 - RNA, 32 nt, Homo Sapiens
aaagaauucuguuguuauugcaucauuuaaua

SEQ ID NO: 235398 - RNA, 32 nt, Homo Sapiens
uaguucauauauauuuagagcaauacauguga

SEQ ID NO: 235399 - RNA, 32 nt, Homo Sapiens
gaaacgguggaagcccugggggcccuggccug

SEQ ID NO: 235400 - RNA, 32 nt, Homo Sapiens
gcgccuuguaguccagguugcccgccacaucg

SEQ ID NO: 235401 - RNA, 32 nt, Homo Sapiens
ccucauaaaggguucaaagaucaucaauuuuu

SEQ ID NO: 235402 - RNA, 32 nt, Homo Sapiens
cugauaggaugaauucuuggcauguuuuugug

SEQ ID NO: 235403 - RNA, 32 nt, Homo Sapiens
cuuuuuaaauggaugcuaaauuccugaaguuc

SEQ ID NO: 235404 - RNA, 32 nt, Homo Sapiens
aagauguguccugaugacuauagugcagcuaa

SEQ ID NO: 235405 - RNA, 32 nt, Homo Sapiens
ggaccccgccuggacuccccagccuucccacc

SEQ ID NO: 235406 - RNA, 32 nt, Homo Sapiens
aguauccuaaccuguuauguccugacagcaau

SEQ ID NO: 235407 - RNA, 30 nt, Homo Sapiens
guggguuucugauuguggcaacguuugcaa

SEQ ID NO: 235408 - RNA, 32 nt, Homo Sapiens
uggcgggguauucuuuggggacacccgacaug

SEQ ID NO: 235409 - RNA, 32 nt, Homo Sapiens
auaauggucuauuugaagagcucacuucaacc

SEQ ID NO: 235410 - RNA, 32 nt, Homo Sapiens
ccgcgcaccuacugccauggagacgcggccuc

SEQ ID NO: 235411 - RNA, 32 nt, Homo Sapiens
uucggcacccaccggucgccgccccgcccgcg

SEQ ID NO: 235412 - RNA, 32 nt, Homo Sapiens
gggcgccguggcguugggcaggaggcgaagcc

SEQ ID NO: 235413 - RNA, 32 nt, Homo Sapiens
ggaauacccagcuuccuccccgcaacccggug

SEQ ID NO: 235414 - RNA, 32 nt, Homo Sapiens
cuccuaaccuggguuuuuuacacgcccgcgug

SEQ ID NO: 235415 - RNA, 32 nt, Homo Sapiens
gacuuaaaaauaucgaaauaaacuuuugcagc

SEQ ID NO: 235416 - RNA, 32 nt, Homo Sapiens
auucucccucccgcuucccccagccgcggccu

SEQ ID NO: 235417 - RNA, 32 nt, Homo Sapiens
gauccggccccgguccccguccccuucccucc

SEQ ID NO: 235418 - RNA, 32 nt, Homo Sapiens
cuccgcucuggacugcgcgccacgcucugggg

SEQ ID NO: 235419 - RNA, 32 nt, Homo Sapiens
cggggaagcagccgccauuguccgcggcugag

SEQ ID NO: 235420 - RNA, 32 nt, Homo Sapiens
uccucccccguccccaagccccgccuucucca

SEQ ID NO: 235421 - RNA, 32 nt, Homo Sapiens
ccaaggcucuccuggaggaauacaacaagacu

SEQ ID NO: 235422 - RNA, 32 nt, Homo Sapiens
caggcagggaggacacggggcuuuuggccacc

SEQ ID NO: 235423 - RNA, 31 nt, Homo Sapiens
ggaggugaguggaagucgacggccuuauaaa

SEQ ID NO: 235424 - RNA, 32 nt, Homo Sapiens
augagaagucagcagucugcaaccuggaagag

SEQ ID NO: 235425 - RNA, 32 nt, Homo Sapiens
cuaaacaucuucuaguuauauucucauuucuc

SEQ ID NO: 235426 - RNA, 32 nt, Homo Sapiens
gcauuucugggaagaggaagggaacuacugug

SEQ ID NO: 235427 - RNA, 32 nt, Homo Sapiens
uuuuguuuuuuaauguuuggaacauaaaugaa

SEQ ID NO: 235428 - RNA, 32 nt, Homo Sapiens
uuuuauuucuuuaaguuuuucuuugcuuuaag

SEQ ID NO: 235429 - RNA, 32 nt, Homo Sapiens
auaacacuauaaauauugcaguauuucaagau

SEQ ID NO: 235430 - RNA, 32 nt, Homo Sapiens
cagugaugucuccauccuugaucuucaucaac

SEQ ID NO: 235431 - RNA, 32 nt, Homo Sapiens
cuccgccuggcuuacgaacacacacauguguu

SEQ ID NO: 235432 - RNA, 32 nt, Homo Sapiens
cucuggaugucaacagacaccaucuacuuaua

SEQ ID NO: 235433 - RNA, 32 nt, Homo Sapiens
uccucuggggcagcugcaccucgggccagcuu

SEQ ID NO: 235434 - RNA, 32 nt, Homo Sapiens
gcugcuuucuccucccagagaccuccaagacc

SEQ ID NO: 235435 - RNA, 32 nt, Homo Sapiens
ucuaacuaacuaugaaugacuuugaaacuacu

SEQ ID NO: 235436 - RNA, 32 nt, Homo Sapiens
aacaaaccauccaguuauucuugaacuaacau

SEQ ID NO: 235437 - RNA, 32 nt, Homo Sapiens
gggacagugugggaagaaaucuucuugugaug

SEQ ID NO: 235438 - RNA, 32 nt, Homo Sapiens
gcagaggguggagaauggaaacugagucaccu

SEQ ID NO: 235439 - RNA, 32 nt, Homo Sapiens
gcacggcagggccaguacccuuggagggucag

SEQ ID NO: 235440 - RNA, 32 nt, Homo Sapiens
gccccgccccgaaugacgccugcccggaggca

SEQ ID NO: 235441 - RNA, 32 nt, Homo Sapiens
ccagggggagacgaggggcuggcucucagucc

SEQ ID NO: 235442 - RNA, 32 nt, Homo Sapiens
ugugaggaaaccgaggcucagagaagcuuguu

SEQ ID NO: 235443 - RNA, 32 nt, Homo Sapiens
gugguguagguggggguggggaggcccaaaug

SEQ ID NO: 235444 - RNA, 32 nt, Homo Sapiens
ucuuugaguuugcaggcccugauuccagaaua

SEQ ID NO: 235445 - RNA, 32 nt, Homo Sapiens
guauauauauauauuuuuuuaaaucacauuaa

SEQ ID NO: 235446 - RNA, 32 nt, Homo Sapiens
ucuuagcucccauuuaaguuaugcuucugacc

SEQ ID NO: 235447 - RNA, 32 nt, Homo Sapiens
uccucaaaucacauuugugccuggugacuucc

SEQ ID NO: 235448 - RNA, 32 nt, Homo Sapiens
cauucucaguuuccuuguuucuuuugauuuuu

SEQ ID NO: 235449 - RNA, 32 nt, Homo Sapiens
agauguggguggggagaagacacaaggcaguu

SEQ ID NO: 235450 - RNA, 32 nt, Homo Sapiens
ucugcacuuccacauucugucugucuuccccg

SEQ ID NO: 235451 - RNA, 32 nt, Homo Sapiens
ucccgcggguccuggcggcugcgagcgcgagg

SEQ ID NO: 235452 - RNA, 32 nt, Homo Sapiens
uggcagcuggccgggcgcucgcagugggagcu

SEQ ID NO: 235453 - RNA, 30 nt, Homo Sapiens
acaucggauaaaagaggaucaagaagaacg

SEQ ID NO: 235454 - RNA, 32 nt, Homo Sapiens
accucacugcugcgcgcacagucucccgggac

SEQ ID NO: 235455 - RNA, 32 nt, Homo Sapiens
aaauuaccaauauaugaacucuaggcaucaug

SEQ ID NO: 235456 - RNA, 32 nt, Homo Sapiens
cuggccgcggaccccucccaccccugccuuug

SEQ ID NO: 235457 - RNA, 32 nt, Homo Sapiens
ggaaggccaugcugcccgccucgggccggggc

SEQ ID NO: 235458 - RNA, 32 nt, Homo Sapiens
aacacccucacagacacacccaggaacaaguu

SEQ ID NO: 235459 - RNA, 32 nt, Homo Sapiens
cacccuuccccuccccgcaccgcccggagagg

SEQ ID NO: 235460 - RNA, 32 nt, Homo Sapiens
caccccuuagcuaucacccugauuccucuauc

SEQ ID NO: 235461 - RNA, 30 nt, Homo Sapiens
auuccaaugcuaauggcagacaucaggaag

SEQ ID NO: 235462 - RNA, 32 nt, Homo Sapiens
aaugauucuaaagagauuaaagaaaacagagu

SEQ ID NO: 235463 - RNA, 32 nt, Homo Sapiens
gugcugggagagaggggagaugugggcaggac

SEQ ID NO: 235464 - RNA, 32 nt, Homo Sapiens
ucccaucugcacccuugccccaucccucccac

SEQ ID NO: 235465 - RNA, 32 nt, Homo Sapiens
gaauaacugauauucacccaccaaacagaaaa

SEQ ID NO: 235466 - RNA, 32 nt, Homo Sapiens
ccggcccuggagaugguccccggcgccgcggg

SEQ ID NO: 235467 - RNA, 32 nt, Homo Sapiens
agcgagcauggacggccgcggggcuuucugga

SEQ ID NO: 235468 - RNA, 32 nt, Homo Sapiens
acuuguggugcagcugcagacacagagcacag

SEQ ID NO: 235469 - RNA, 32 nt, Homo Sapiens
acagaggugacagaagcagagggaucccaggg

SEQ ID NO: 235470 - RNA, 32 nt, Homo Sapiens
cuuugcaccgccuacuuaauucuuuuccauau

SEQ ID NO: 235471 - RNA, 32 nt, Homo Sapiens
aguucgcgccgcccucucaccccucccuucac

SEQ ID NO: 235472 - RNA, 32 nt, Homo Sapiens
aggccaaagauccugugucgccggcggaaagc

SEQ ID NO: 235473 - RNA, 32 nt, Homo Sapiens
augacugggccauggacacagaugucuccaac

SEQ ID NO: 235474 - RNA, 32 nt, Homo Sapiens
agccuggagcagccucuuccggggccucgauu

SEQ ID NO: 235475 - RNA, 32 nt, Homo Sapiens
gcugcugcccccucugcccccacagcucagcu

SEQ ID NO: 235476 - RNA, 32 nt, Homo Sapiens
uucacaauacaguggauagcuugauaucuucu

SEQ ID NO: 235477 - RNA, 32 nt, Homo Sapiens
acacacccaucccauccaccacuucccccgug

SEQ ID NO: 235478 - RNA, 32 nt, Homo Sapiens
accucugaacugaaaugugucaggggcagcug

SEQ ID NO: 235479 - RNA, 32 nt, Homo Sapiens
gcgaagccuccucagcucggggggccggggac

SEQ ID NO: 235480 - RNA, 32 nt, Homo Sapiens
uccgggcuggggcggaggagcgggcggggacc

SEQ ID NO: 235481 - RNA, 32 nt, Homo Sapiens
aggggauccauaucacauucuuucuuguggac

SEQ ID NO: 235482 - RNA, 32 nt, Homo Sapiens
ccguguccuggccccucacgggcccccacacu

SEQ ID NO: 235483 - RNA, 32 nt, Homo Sapiens
uuaaaguccaaauagagaaauacuuagguuuu

SEQ ID NO: 235484 - RNA, 32 nt, Homo Sapiens
gucgcgggcggggguccucaggcggccgccuu

SEQ ID NO: 235485 - RNA, 32 nt, Homo Sapiens
ccuucacucaccuucacugcugcuguugcaac

SEQ ID NO: 235486 - RNA, 32 nt, Homo Sapiens
aagaaaaguccucuccucaacuuaccaagaaa

SEQ ID NO: 235487 - RNA, 32 nt, Homo Sapiens
aucuaaaaauuccauaguucucaguuauuaaa

SEQ ID NO: 235488 - RNA, 30 nt, Homo Sapiens
aauagcagaaauggcaugcaaauuuauuaa

SEQ ID NO: 235489 - RNA, 27 nt, Homo Sapiens
aucagagcuuuucacagccccccgaaa

SEQ ID NO: 235490 - RNA, 32 nt, Homo Sapiens
aaggugccggaacugucagaaccaucaugggc

SEQ ID NO: 235491 - RNA, 32 nt, Homo Sapiens
cccacuccacuacucucuuccuccacuucauu

SEQ ID NO: 235492 - RNA, 32 nt, Homo Sapiens
caccaagugcagcgcccucccgccccggcccu

SEQ ID NO: 235493 - RNA, 32 nt, Homo Sapiens
cccguggacccggccccaccccgaauaccccg

SEQ ID NO: 235494 - RNA, 32 nt, Homo Sapiens
ugagcuccgugcagaagcuggugacggaugag

SEQ ID NO: 235495 - RNA, 32 nt, Homo Sapiens
uauauguuugaaaaaugcaauuauaugaaaaa

SEQ ID NO: 235496 - RNA, 32 nt, Homo Sapiens
agugaccagaaaggcucucggugcaaagcguu

SEQ ID NO: 235497 - RNA, 32 nt, Homo Sapiens
agcaccuucuaaaucuaagauucugcugagga

SEQ ID NO: 235498 - RNA, 32 nt, Homo Sapiens
ccucgacggagcuucucagccucuuggagccu

SEQ ID NO: 235499 - RNA, 32 nt, Homo Sapiens
gccagauucuguguguuucucuaaccucuuug

SEQ ID NO: 235500 - RNA, 30 nt, Homo Sapiens
agaggaguccgaggcggcggcgaggggcga

SEQ ID NO: 235501 - RNA, 32 nt, Homo Sapiens
uuuccccucucgcgcccagcauuugguuuuac

SEQ ID NO: 235502 - RNA, 32 nt, Homo Sapiens
cuagaaguccccacaaaggcuucugagaccac

SEQ ID NO: 235503 - RNA, 32 nt, Homo Sapiens
ugcgggugcagcggacuugcuccagccugggu

SEQ ID NO: 235504 - RNA, 32 nt, Homo Sapiens
cauucauacuuaugcauauuuuaguaucccau

SEQ ID NO: 235505 - RNA, 32 nt, Homo Sapiens
cagaccuacugucaagguauugcaguacuuau

SEQ ID NO: 235506 - RNA, 32 nt, Homo Sapiens
cuccuccugcgcggggugcugaaacagcccgg

SEQ ID NO: 235507 - RNA, 32 nt, Homo Sapiens
uucuuuaaaguucuccuuccgucuuuucuccc

SEQ ID NO: 235508 - RNA, 32 nt, Homo Sapiens
aguaagaaaauauuuugucuaaaaugccucag

SEQ ID NO: 235509 - RNA, 32 nt, Homo Sapiens
accugcaaucccagcuacaugggaggcugagg

SEQ ID NO: 235510 - RNA, 32 nt, Homo Sapiens
ccaaaggaggucgacucgccggcgcuuccuau

SEQ ID NO: 235511 - RNA, 32 nt, Homo Sapiens
uuucccccaagccucauucauucuugggauug

SEQ ID NO: 235512 - RNA, 32 nt, Homo Sapiens
guguaaucucaaccaaaacccacagcccugca

SEQ ID NO: 235513 - RNA, 32 nt, Homo Sapiens
aagaacgugcggugcugcgggcgagggccccg

SEQ ID NO: 235514 - RNA, 32 nt, Homo Sapiens
guuggcacuguaaauaaaccagcuugcaaaaa

SEQ ID NO: 235515 - RNA, 32 nt, Homo Sapiens
cagaggccauugcaggaugaaucacuugucac

SEQ ID NO: 235516 - RNA, 30 nt, Homo Sapiens
cacccgcccccacuucuccaucuuagaaac

SEQ ID NO: 235517 - RNA, 32 nt, Homo Sapiens
ucaccacaggguuucguuuugcuggcuugaag

SEQ ID NO: 235518 - RNA, 32 nt, Homo Sapiens
guacucuuuuuauucuauuaauuaaaaaguug

SEQ ID NO: 235519 - RNA, 30 nt, Homo Sapiens
uccagugagaagcugcugaugagagugaga

SEQ ID NO: 235520 - RNA, 32 nt, Homo Sapiens
gaugccaaauguuggauguccaggcuagcacc

SEQ ID NO: 235521 - RNA, 32 nt, Homo Sapiens
cugaaagagauugggaacaaaaauaucuaauu

SEQ ID NO: 235522 - RNA, 32 nt, Homo Sapiens
cuuuggccaaaauaaaggaaccugaaacauua

SEQ ID NO: 235523 - RNA, 32 nt, Homo Sapiens
cuucaagcuuucaagccuuuauagaaaagcuu

SEQ ID NO: 235524 - RNA, 32 nt, Homo Sapiens
gaagugccgggugcuccugggcccugccuggc

SEQ ID NO: 235525 - RNA, 32 nt, Homo Sapiens
uauuccucagaauauuaaacauugaucacaua

SEQ ID NO: 235526 - RNA, 32 nt, Homo Sapiens
ggcggucgggaacucggugggaggcggcaaca

SEQ ID NO: 235527 - RNA, 32 nt, Homo Sapiens
gccugcgcagccggagcagcuugucccaaugc

SEQ ID NO: 235528 - RNA, 32 nt, Homo Sapiens
ggagagggcuaccauggggaaaaucgcgcugc

SEQ ID NO: 235529 - RNA, 32 nt, Homo Sapiens
ucaacugauuuccaugagacaaugacagaaac

SEQ ID NO: 235530 - RNA, 32 nt, Homo Sapiens
cgccccgccagccccagcccugcagccuuggg

SEQ ID NO: 235531 - RNA, 32 nt, Homo Sapiens
uuuauaguugaauuuuugcacaaaauauaugu

SEQ ID NO: 235532 - RNA, 32 nt, Homo Sapiens
cacccaucucaacagggucacuugguaauuaa

SEQ ID NO: 235533 - RNA, 32 nt, Homo Sapiens
cgcagaggaggggcgauggggguggcggcugu

SEQ ID NO: 235534 - RNA, 32 nt, Homo Sapiens
ggaggaagacucuugggaccccuggguguucu

SEQ ID NO: 235535 - RNA, 32 nt, Homo Sapiens
ucuuaacaaaaauauggauaugaauucaguag

SEQ ID NO: 235536 - RNA, 32 nt, Homo Sapiens
auugcuucauccaaaaaucaucugaugguaua

SEQ ID NO: 235537 - RNA, 32 nt, Homo Sapiens
cuuggcucugacgcggcgccccagcccggcug

SEQ ID NO: 235538 - RNA, 32 nt, Homo Sapiens
gcccuuagcacauaaugaccauuacauguuag

SEQ ID NO: 235539 - RNA, 32 nt, Homo Sapiens
uccuccccgcggcgcgcagccugcccaagcau

SEQ ID NO: 235540 - RNA, 32 nt, Homo Sapiens
gcuggaguuuucugccugagauguuaggagag

SEQ ID NO: 235541 - RNA, 32 nt, Homo Sapiens
acaucuugaaacaaacagauguaccuaaugag

SEQ ID NO: 235542 - RNA, 32 nt, Homo Sapiens
ggugcggacgagggcugcugaggcccugggcc

SEQ ID NO: 235543 - RNA, 32 nt, Homo Sapiens
aggcguguauauuaucuuuguauuagaaccaa

SEQ ID NO: 235544 - RNA, 32 nt, Homo Sapiens
acauuguuuugacuaagcacaauuagaugaca

SEQ ID NO: 235545 - RNA, 29 nt, Homo Sapiens
acccuuucuaaauaugcaggccauuaaua

SEQ ID NO: 235546 - RNA, 32 nt, Homo Sapiens
ucugggaaauuuuaucuguccaaauacaugug

SEQ ID NO: 235547 - RNA, 32 nt, Homo Sapiens
cauuaucagggugaaggucuuuccugauucuu

SEQ ID NO: 235548 - RNA, 32 nt, Homo Sapiens
caaaccuggaagcagcagcaggugccugaacu

SEQ ID NO: 235549 - RNA, 32 nt, Homo Sapiens
guagcgggugugggggcgcgagcagcgcaggg

SEQ ID NO: 235550 - RNA, 32 nt, Homo Sapiens
guucuugaaacacuucagcuuugcaacuaaaa

SEQ ID NO: 235551 - RNA, 30 nt, Homo Sapiens
uccuaaaugagaucaauaaauuuuauaacc

SEQ ID NO: 235552 - RNA, 32 nt, Homo Sapiens
cugcauaauauuuggaaggcuuccauuuccau

SEQ ID NO: 235553 - RNA, 32 nt, Homo Sapiens
uccuugaggggagggugccaggaacuacccca

SEQ ID NO: 235554 - RNA, 32 nt, Homo Sapiens
ugagaaaacugggugaaggaauagaauuuuaa

SEQ ID NO: 235555 - RNA, 32 nt, Homo Sapiens
gucucaaaaaauaaaggaaauuggcuuugacu

SEQ ID NO: 235556 - RNA, 32 nt, Homo Sapiens
cagcaagcugucugcggcucaucggaggcccc

SEQ ID NO: 235557 - RNA, 32 nt, Homo Sapiens
gcgaccuggugcccgcuagccugcccugugag

SEQ ID NO: 235558 - RNA, 32 nt, Homo Sapiens
gugaccucccccagggccuccuugcccagccc

SEQ ID NO: 235559 - RNA, 32 nt, Homo Sapiens
ggugaggucuuuaaaguuucaaugaaaguuuc

SEQ ID NO: 235560 - RNA, 32 nt, Homo Sapiens
agccgagaaccuggucugcaugacauggaaac

SEQ ID NO: 235561 - RNA, 32 nt, Homo Sapiens
ccgggcugugccagcccucccagccccaggcc

SEQ ID NO: 235562 - RNA, 32 nt, Homo Sapiens
uccugcccuugcaguccugagguccugcagcc

SEQ ID NO: 235563 - RNA, 32 nt, Homo Sapiens
aaaaaacaguggagcucuguauuagaaagccc

SEQ ID NO: 235564 - RNA, 32 nt, Homo Sapiens
uccauuuaugugaaauacuguaucauggaauc

SEQ ID NO: 235565 - RNA, 32 nt, Homo Sapiens
uggcgacccgguuuguuuucgguccguuucca

SEQ ID NO: 235566 - RNA, 32 nt, Homo Sapiens
cacgagcccgauuccgcgcccgccauggccga

SEQ ID NO: 235567 - RNA, 32 nt, Homo Sapiens
aaugauggucugggugccaccuguuuuuaaac

SEQ ID NO: 235568 - RNA, 32 nt, Homo Sapiens
aaacaaugcugauuuuugaauucaugauuagu

SEQ ID NO: 235569 - RNA, 32 nt, Homo Sapiens
aaacuuuguucaauaucagggaauguauaaua

SEQ ID NO: 235570 - RNA, 32 nt, Homo Sapiens
ucccucccaccuaagauguguuuaccaaaaug

SEQ ID NO: 235571 - RNA, 30 nt, Homo Sapiens
agccccggucccggcggcggcagcuucgcc

SEQ ID NO: 235572 - RNA, 32 nt, Homo Sapiens
gggauggugcccccuccucugaauaggggaga

SEQ ID NO: 235573 - RNA, 31 nt, Homo Sapiens
accaacaugucugacaaaagugacuuaaaag

SEQ ID NO: 235574 - RNA, 32 nt, Homo Sapiens
uuaucuaagaaaacaagaaaacaaaggcagca

SEQ ID NO: 235575 - RNA, 32 nt, Homo Sapiens
agauaauaaaagacauucuaaaggauaaagga

SEQ ID NO: 235576 - RNA, 32 nt, Homo Sapiens
uuuuccugauuuccucuucucuugcccaguuu

SEQ ID NO: 235577 - RNA, 32 nt, Homo Sapiens
gggcgcuauguacuuguaguguccuuauaagu

SEQ ID NO: 235578 - RNA, 32 nt, Homo Sapiens
agauuguacuuugugaucccaaucagagggau

SEQ ID NO: 235579 - RNA, 32 nt, Homo Sapiens
ugaugcauagagccucuuucaugugacuugug

SEQ ID NO: 235580 - RNA, 32 nt, Homo Sapiens
aacaaacccugaagaguacugaagauuuagaa

SEQ ID NO: 235581 - RNA, 32 nt, Homo Sapiens
gcaugcccugucacaguucccucgacucuuuc

SEQ ID NO: 235582 - RNA, 32 nt, Homo Sapiens
aucuggaaguauuuuuaaauggcauaccaaaa

SEQ ID NO: 235583 - RNA, 32 nt, Homo Sapiens
ccgcuucgugcagcagcaaguucagccugaga

SEQ ID NO: 235584 - RNA, 32 nt, Homo Sapiens
ugaaaugagaaguaaaggcagaugaaaagaaa

SEQ ID NO: 235585 - RNA, 32 nt, Homo Sapiens
cuuuaaguagggauaaauuacucuaaaacaaa

SEQ ID NO: 235586 - RNA, 32 nt, Homo Sapiens
cgagcgggccccaggcuccagcagccccaccu

SEQ ID NO: 235587 - RNA, 32 nt, Homo Sapiens
auuagugauccuucucuggagagaagggauac

SEQ ID NO: 235588 - RNA, 32 nt, Homo Sapiens
gauccaaaauuuguauugcuguagaauuggug

SEQ ID NO: 235589 - RNA, 32 nt, Homo Sapiens
guugccgugugagcccagcagucgcgggcaac

SEQ ID NO: 235590 - RNA, 32 nt, Homo Sapiens
uacuccaguugcucuguguugcauacucuccc

SEQ ID NO: 235591 - RNA, 32 nt, Homo Sapiens
agcuuuauucaggacacacuucuugccuucac

SEQ ID NO: 235592 - RNA, 32 nt, Homo Sapiens
uaccuaacagguuuuucuccgugaaucuuaug

SEQ ID NO: 235593 - RNA, 32 nt, Homo Sapiens
caucgcagcgcuaggaggaaggcggccggggc

SEQ ID NO: 235594 - RNA, 32 nt, Homo Sapiens
gaggcuuagggguagucauuccaucuuuagau

SEQ ID NO: 235595 - RNA, 32 nt, Homo Sapiens
gagcgagagaaaucagaguucccuuuauugcc

SEQ ID NO: 235596 - RNA, 30 nt, Homo Sapiens
gccuuuuuacacaaaaaaaaaaaaaaaaaa

SEQ ID NO: 235597 - RNA, 32 nt, Homo Sapiens
cgguucauggcuuuggccgccgcgccaccauc

SEQ ID NO: 235598 - RNA, 31 nt, Homo Sapiens
agacgguggaaugcucucagaggagccccau

SEQ ID NO: 235599 - RNA, 32 nt, Homo Sapiens
guguguaugcggucuguaacuauugccauaua

SEQ ID NO: 235600 - RNA, 32 nt, Homo Sapiens
cccaucagcugggaaagcccaggccgcaggag

SEQ ID NO: 235601 - RNA, 32 nt, Homo Sapiens
ucuuucccacccagccugggauaggggcagag

SEQ ID NO: 235602 - RNA, 32 nt, Homo Sapiens
ugcuguuccauaucagcccucugcucucugag

SEQ ID NO: 235603 - RNA, 32 nt, Homo Sapiens
acgagacccccgcgcgcaggcaugagccccgc

SEQ ID NO: 235604 - RNA, 32 nt, Homo Sapiens
cuagaagaugaugaagacaugacaaaagaugg

SEQ ID NO: 235605 - RNA, 32 nt, Homo Sapiens
auuauuuccucaucuuuuuuucuuuuuuuuga

SEQ ID NO: 235606 - RNA, 32 nt, Homo Sapiens
cggcaacaagguggugaucagcggcuuuggag

SEQ ID NO: 235607 - RNA, 32 nt, Homo Sapiens
aauaacugugccccaagaagugcuccagauuu

SEQ ID NO: 235608 - RNA, 32 nt, Homo Sapiens
ucuuggcuuuggagcccucaccacuuuuuccu

SEQ ID NO: 235609 - RNA, 32 nt, Homo Sapiens
gagcugggagucccgcuggucucccugaggac

SEQ ID NO: 235610 - RNA, 32 nt, Homo Sapiens
aggaggcaaugggaaccucccuggcccggccc

SEQ ID NO: 235611 - RNA, 32 nt, Homo Sapiens
gggagacgggauggggaaaaauacugauucug

SEQ ID NO: 235612 - RNA, 32 nt, Homo Sapiens
uuuuaggauucuuuuucucccccucccaucuu

SEQ ID NO: 235613 - RNA, 32 nt, Homo Sapiens
gaagccauugaauguucauuaaggggggauuc

SEQ ID NO: 235614 - RNA, 30 nt, Homo Sapiens
uggaacacugcucgcugcuugaggccacca

SEQ ID NO: 235615 - RNA, 32 nt, Homo Sapiens
uuagcugggcgugguggcgcgcgccuguaauc

SEQ ID NO: 235616 - RNA, 32 nt, Homo Sapiens
uuggcaccuggccagccuuuuuucuauuucau

SEQ ID NO: 235617 - RNA, 32 nt, Homo Sapiens
ggccagguguuccuugcccucauuccaguaaa

SEQ ID NO: 235618 - RNA, 32 nt, Homo Sapiens
ccggggccagggcgcuggcccucgugcuggaa

SEQ ID NO: 235619 - RNA, 32 nt, Homo Sapiens
uguaaacauguguuuuaauuccaauaugauga

SEQ ID NO: 235620 - RNA, 32 nt, Homo Sapiens
cacccugcuggccccaggacuucugaucucag

SEQ ID NO: 235621 - RNA, 32 nt, Homo Sapiens
caaacaaaaaacaaaacccuggaguguuagga

SEQ ID NO: 235622 - RNA, 32 nt, Homo Sapiens
gcacgaggggaccccggcggcagacgcagguu

SEQ ID NO: 235623 - RNA, 32 nt, Homo Sapiens
gaaggauuaaaauuaaacuuuuuuaaaauacc

SEQ ID NO: 235624 - RNA, 32 nt, Homo Sapiens
gcugauggcaagcuguugaauccaguguccag

SEQ ID NO: 235625 - RNA, 31 nt, Homo Sapiens
ccuuaagcccuggcccccugaguuuccuuuu

SEQ ID NO: 235626 - RNA, 32 nt, Homo Sapiens
uauuuaaaauagagaauacuuuccaagcaaua

SEQ ID NO: 235627 - RNA, 32 nt, Homo Sapiens
gcucggugcgcugagcuccgcggcuccgcgag

SEQ ID NO: 235628 - RNA, 32 nt, Homo Sapiens
cgccuguaaucccagcacuuugggaugccaug

SEQ ID NO: 235629 - RNA, 32 nt, Homo Sapiens
ccugccacugaacacgucagugcugugugcug

SEQ ID NO: 235630 - RNA, 32 nt, Homo Sapiens
uuuuuaaaaugaaaucuauauauugacuuucu

SEQ ID NO: 235631 - RNA, 32 nt, Homo Sapiens
ccauccucaaggcccuuccccaguggcggcag

SEQ ID NO: 235632 - RNA, 32 nt, Homo Sapiens
aaggacuccauccagacaagcaucauaaaccg

SEQ ID NO: 235633 - RNA, 32 nt, Homo Sapiens
aaucaaucaaaauaaaaauuuuuacuuucaca

SEQ ID NO: 235634 - RNA, 32 nt, Homo Sapiens
guauaauggggccuguuacacaugacacucuu

SEQ ID NO: 235635 - RNA, 32 nt, Homo Sapiens
auauaacaagauacaguggaauggcccauaca

SEQ ID NO: 235636 - RNA, 32 nt, Homo Sapiens
cugauaaugacggauaucaacaauuaaacgcu

SEQ ID NO: 235637 - RNA, 32 nt, Homo Sapiens
cacauuuuucaugucagacuaguuacuuuguu

SEQ ID NO: 235638 - RNA, 32 nt, Homo Sapiens
guacaaaggaauuuauacagauuggguuuacc

SEQ ID NO: 235639 - RNA, 32 nt, Homo Sapiens
uggggucggacaccccagcccuuucucccuca

SEQ ID NO: 235640 - RNA, 32 nt, Homo Sapiens
gcgcccgggccgggcucugcauucuuguugcc

SEQ ID NO: 235641 - RNA, 32 nt, Homo Sapiens
guacauauuggaaaggucauuguggcuaucug

SEQ ID NO: 235642 - RNA, 32 nt, Homo Sapiens
ggaaacugcccccucguucugacagaaucccc

SEQ ID NO: 235643 - RNA, 32 nt, Homo Sapiens
ucugcuguguauuaaaugucaaaaucugaaua

SEQ ID NO: 235644 - RNA, 32 nt, Homo Sapiens
ccaccgcccccggcugcaguuggauuuuuaaa

SEQ ID NO: 235645 - RNA, 32 nt, Homo Sapiens
ucgcgugggaccgcaucuucucccucgcagcu

SEQ ID NO: 235646 - RNA, 32 nt, Homo Sapiens
gauccgaccgacuucucgccccggggccacgg

SEQ ID NO: 235647 - RNA, 32 nt, Homo Sapiens
ugcucucccacccaggggcccuggguguggau

SEQ ID NO: 235648 - RNA, 32 nt, Homo Sapiens
gcuucuagguggcuccauuguuuucugccacc

SEQ ID NO: 235649 - RNA, 32 nt, Homo Sapiens
ucucagguuggcggcagacacauugucaucag

SEQ ID NO: 235650 - RNA, 32 nt, Homo Sapiens
acuauuagugaagaaaaauguagaaucuguau

SEQ ID NO: 235651 - RNA, 32 nt, Homo Sapiens
uacucauaaaaauuauuguguguugcuaauuu

SEQ ID NO: 235652 - RNA, 32 nt, Homo Sapiens
auaacacaucagguaguuuucuuuuuucugua

SEQ ID NO: 235653 - RNA, 30 nt, Homo Sapiens
ccggccaugggcgaucgcgagcgcaacaag

SEQ ID NO: 235654 - RNA, 32 nt, Homo Sapiens
gucuuccccuggauuugcuuaguacucagcca

SEQ ID NO: 235655 - RNA, 32 nt, Homo Sapiens
uaccgcgaggaugagcucggccucggucaccg

SEQ ID NO: 235656 - RNA, 32 nt, Homo Sapiens
ugugaugccaucuucucccccauccccuucuc

SEQ ID NO: 235657 - RNA, 32 nt, Homo Sapiens
aaaggccgagugggguaaaaccacgaagggag

SEQ ID NO: 235658 - RNA, 32 nt, Homo Sapiens
acuggguuguuuugacaagcuaccacacgucu

SEQ ID NO: 235659 - RNA, 32 nt, Homo Sapiens
cccacgcguccgcccacgcguccgcccacgcg

SEQ ID NO: 235660 - RNA, 29 nt, Homo Sapiens
cugcaguggggcagucauggcaaauagaa

SEQ ID NO: 235661 - RNA, 32 nt, Homo Sapiens
uuuagguuauuuauguuaaauuuuucucauaa

SEQ ID NO: 235662 - RNA, 32 nt, Homo Sapiens
uuuugucuuuaaaauuguuguaaaucucugua

SEQ ID NO: 235663 - RNA, 32 nt, Homo Sapiens
cccagccccuuggcccucuccugucugcccua

SEQ ID NO: 235664 - RNA, 32 nt, Homo Sapiens
ucuuuauauaaucguuugcauuuuguuacuug

SEQ ID NO: 235665 - RNA, 32 nt, Homo Sapiens
uccagccuucuguggucgcugcggccuguguu

SEQ ID NO: 235666 - RNA, 32 nt, Homo Sapiens
gggaaaaauaaaugaaaauuuucuuuauguac

SEQ ID NO: 235667 - RNA, 32 nt, Homo Sapiens
agcgcugccugcgccgccgccgccgccugauu

SEQ ID NO: 235668 - RNA, 32 nt, Homo Sapiens
accccagcucugcguucacugccccguccgga

SEQ ID NO: 235669 - RNA, 32 nt, Homo Sapiens
cuacauguaaagugaacuuuuuccuguauaaa

SEQ ID NO: 235670 - RNA, 32 nt, Homo Sapiens
aaugugagcuggugcugggcugugcccggcgg

SEQ ID NO: 235671 - RNA, 32 nt, Homo Sapiens
ccugggccugacgggcccuucucagcccguuu

SEQ ID NO: 235672 - RNA, 32 nt, Homo Sapiens
agggcgaaaaggaaacccuguauuccgucgcg

SEQ ID NO: 235673 - RNA, 32 nt, Homo Sapiens
uugcugauuacaguuagcacaaaagaaaaauu

SEQ ID NO: 235674 - RNA, 32 nt, Homo Sapiens
caggguggccagcugcuggcucccagagcgca

SEQ ID NO: 235675 - RNA, 32 nt, Homo Sapiens
gugggccagggaggaaaaccagagcacacagu

SEQ ID NO: 235676 - RNA, 32 nt, Homo Sapiens
aaaauggugaaggggggaaauauuuugaacca

SEQ ID NO: 235677 - RNA, 32 nt, Homo Sapiens
gcucuggagaauaauuaguauuugaaagugac

SEQ ID NO: 235678 - RNA, 32 nt, Homo Sapiens
ggagaaccagccacccugaggaccaccuggcc

SEQ ID NO: 235679 - RNA, 32 nt, Homo Sapiens
gucggcgccccucuccguguggagcccaccug

SEQ ID NO: 235680 - RNA, 27 nt, Homo Sapiens
ccaugcgcgggaaguugcugccgcugg

SEQ ID NO: 235681 - RNA, 32 nt, Homo Sapiens
cugccucuguucucagcgucagugccgccacu

SEQ ID NO: 235682 - RNA, 32 nt, Homo Sapiens
aggaggcagcuaggcguggcucucauuccuuc

SEQ ID NO: 235683 - RNA, 31 nt, Homo Sapiens
acucggauggccucccugccccucugcuggc

SEQ ID NO: 235684 - RNA, 32 nt, Homo Sapiens
agaguaugagaggagcauuccagcagccaggc

SEQ ID NO: 235685 - RNA, 32 nt, Homo Sapiens
agacacacccccacccagccccuauuuggacc

SEQ ID NO: 235686 - RNA, 32 nt, Homo Sapiens
ccagggcccgugugucaucguacuggaguaga

SEQ ID NO: 235687 - RNA, 32 nt, Homo Sapiens
agggaacaggcucccggcagcccccgcggccc

SEQ ID NO: 235688 - RNA, 32 nt, Homo Sapiens
ucguugcauugaaaauaacaaacaauaucaau

SEQ ID NO: 235689 - RNA, 32 nt, Homo Sapiens
uuuucaaaaucguuuuuaauuuaaacuguguu

SEQ ID NO: 235690 - RNA, 32 nt, Homo Sapiens
acauaaacuguuuucuuuuucuuucuuaaaaa

SEQ ID NO: 235691 - RNA, 32 nt, Homo Sapiens
ccacggcaccucugggagcugggaugauaaag

SEQ ID NO: 235692 - RNA, 32 nt, Homo Sapiens
accagccugaccaauauagugaaacacugucu

SEQ ID NO: 235693 - RNA, 32 nt, Homo Sapiens
aucauuccaaauaagaacuagucuguuaauga

SEQ ID NO: 235694 - RNA, 32 nt, Homo Sapiens
gagcucuggcggggaccacgggccacugcuca

SEQ ID NO: 235695 - RNA, 32 nt, Homo Sapiens
uggcugcccacccagccgcagaggaagugcgc

SEQ ID NO: 235696 - RNA, 32 nt, Homo Sapiens
acagcccggggcggggcucguuggacgagggg

SEQ ID NO: 235697 - RNA, 32 nt, Homo Sapiens
cgccaagcucugcgauguggcucagcagcgca

SEQ ID NO: 235698 - RNA, 32 nt, Homo Sapiens
cgcggggaugagccggccauggagcggccuug

SEQ ID NO: 235699 - RNA, 32 nt, Homo Sapiens
uaaagcuucccucucagcugcugggacgaucg

SEQ ID NO: 235700 - RNA, 32 nt, Homo Sapiens
ugucccuucuauucagauuuauucuagucgag

SEQ ID NO: 235701 - RNA, 32 nt, Homo Sapiens
cugcacaugaguggaaauacacucauggggaa

SEQ ID NO: 235702 - RNA, 32 nt, Homo Sapiens
cauugugugcacccacccacccaccacacugg

SEQ ID NO: 235703 - RNA, 32 nt, Homo Sapiens
uccugcaggaccagacuccccugucuccccgc

SEQ ID NO: 235704 - RNA, 31 nt, Homo Sapiens
aggagacucaaugauuuuaauugaucuagac

SEQ ID NO: 235705 - RNA, 32 nt, Homo Sapiens
gacugaagacuguguccaaauucagcagaagu

SEQ ID NO: 235706 - RNA, 32 nt, Homo Sapiens
ccugagucucucuuuccuuccuccucgaucuu

SEQ ID NO: 235707 - RNA, 32 nt, Homo Sapiens
ccuagcugcuccaggggcagcaggggaggcgc

SEQ ID NO: 235708 - RNA, 32 nt, Homo Sapiens
ccccccgccccuccccugcagaguggccagau

SEQ ID NO: 235709 - RNA, 32 nt, Homo Sapiens
cuaauuauaucgaaauacaguuauuaaaaugu

SEQ ID NO: 235710 - RNA, 32 nt, Homo Sapiens
uuucagcuuuguuuauccuuccuguuaagagc

SEQ ID NO: 235711 - RNA, 29 nt, Homo Sapiens
gaggaagagggacagaugaaugccgugga

SEQ ID NO: 235712 - RNA, 30 nt, Homo Sapiens
auaguugucugugcuuccuugguucaugcu

SEQ ID NO: 235713 - RNA, 32 nt, Homo Sapiens
cuguuguuuugucuuucccauggacacggcuc

SEQ ID NO: 235714 - RNA, 32 nt, Homo Sapiens
uuuaaauuuuuguaggaaacuuucaauuguuu

SEQ ID NO: 235715 - RNA, 32 nt, Homo Sapiens
ugaccucgaugcucagaaaccaucuauugagu

SEQ ID NO: 235716 - RNA, 32 nt, Homo Sapiens
auaauaccuagagauacacaauaaaaauuagc

SEQ ID NO: 235717 - RNA, 29 nt, Homo Sapiens
ugacauucguguuacaggaaugacugcca

SEQ ID NO: 235718 - RNA, 32 nt, Homo Sapiens
auuuuuccuuuuuguauuuucuuagcagagcu

SEQ ID NO: 235719 - RNA, 32 nt, Homo Sapiens
ggaagucggggagcagcaccccugcccccggu

SEQ ID NO: 235720 - RNA, 32 nt, Homo Sapiens
ccuuccuccuucccuagggcugcagagccugu

SEQ ID NO: 235721 - RNA, 32 nt, Homo Sapiens
uuguaaaauaucuauuccguauuagaaauagc

SEQ ID NO: 235722 - RNA, 32 nt, Homo Sapiens
cugaaauaaucauaucuuucugaugucuauug

SEQ ID NO: 235723 - RNA, 32 nt, Homo Sapiens
gcauuggcacugggcugugcugaccuagccau

SEQ ID NO: 235724 - RNA, 32 nt, Homo Sapiens
ugaccaacaugaugaaaugcugucucuacuaa

SEQ ID NO: 235725 - RNA, 32 nt, Homo Sapiens
gggguggggaggggcgguguuaacucuuucug

SEQ ID NO: 235726 - RNA, 32 nt, Homo Sapiens
accaagcuugggagccagccugccaacagcca

SEQ ID NO: 235727 - RNA, 32 nt, Homo Sapiens
aaguacaaacaugaaaaacaaacaaaaaaauu

SEQ ID NO: 235728 - RNA, 30 nt, Homo Sapiens
cagccugucugugcucagacauagagaagu

SEQ ID NO: 235729 - RNA, 32 nt, Homo Sapiens
ggggaaaauucaguaaguuagcguuaaaugga

SEQ ID NO: 235730 - RNA, 32 nt, Homo Sapiens
ggcuaaucaguauacaagauuauacaaucucu

SEQ ID NO: 235731 - RNA, 32 nt, Homo Sapiens
aagcaauaacaacagcagcagaagcaaucccg

SEQ ID NO: 235732 - RNA, 32 nt, Homo Sapiens
cauuuaacagcauggguaguaagcaugguuuc

SEQ ID NO: 235733 - RNA, 32 nt, Homo Sapiens
uuugauggggggauuucugguuaugucaaggc

SEQ ID NO: 235734 - RNA, 30 nt, Homo Sapiens
ugcggcagagcacagcaccaguagacccca

SEQ ID NO: 235735 - RNA, 32 nt, Homo Sapiens
uguuuuuuauuuuuauauauuuuuucugacuc

SEQ ID NO: 235736 - RNA, 32 nt, Homo Sapiens
auccagaugaacugagaaggucagauuagggc

SEQ ID NO: 235737 - RNA, 30 nt, Homo Sapiens
uuccucccucaccucccccaucuuagcagg

SEQ ID NO: 235738 - RNA, 32 nt, Homo Sapiens
gaacuugggugggaaaccccacccaaaagccc

SEQ ID NO: 235739 - RNA, 32 nt, Homo Sapiens
agucuacauugaaguguaugcauuguauuaua

SEQ ID NO: 235740 - RNA, 32 nt, Homo Sapiens
guaggcagcucuuccugggagcuccaggcuau

SEQ ID NO: 235741 - RNA, 32 nt, Homo Sapiens
agggguuuguuuuuguuuuucucagucuauaa

SEQ ID NO: 235742 - RNA, 32 nt, Homo Sapiens
gauggccgccccaaguaccacguaccugccuu

SEQ ID NO: 235743 - RNA, 32 nt, Homo Sapiens
uuucggcuaugguggggguagguaggucacuu

SEQ ID NO: 235744 - RNA, 32 nt, Homo Sapiens
auucaacaugcgcuagccagacacuggucuag

SEQ ID NO: 235745 - RNA, 32 nt, Homo Sapiens
caaggcaauggcuuuuuaaaucuuggcuaucu

SEQ ID NO: 235746 - RNA, 32 nt, Homo Sapiens
uuuuguggcucauugcuugauuugagugggag

SEQ ID NO: 235747 - RNA, 32 nt, Homo Sapiens
aguagacaucuccccaccucuacccuaucagg

SEQ ID NO: 235748 - RNA, 32 nt, Homo Sapiens
gaccuucgccagaggggccgggacaucaugac

SEQ ID NO: 235749 - RNA, 32 nt, Homo Sapiens
ucuuucggaagauaacugaaguucacaguuac

SEQ ID NO: 235750 - RNA, 32 nt, Homo Sapiens
ucaguccuguaucauccauacuuguacuaccu

SEQ ID NO: 235751 - RNA, 32 nt, Homo Sapiens
caauggauggugcugucuaugcacagguguga

SEQ ID NO: 235752 - RNA, 32 nt, Homo Sapiens
cccacccagcggggcuucccaacccaccacac

SEQ ID NO: 235753 - RNA, 32 nt, Homo Sapiens
gaggggcgcuauucaaagcugcacugcaaagg

SEQ ID NO: 235754 - RNA, 32 nt, Homo Sapiens
guggcgcguugccugggugcucauggacacca

SEQ ID NO: 235755 - RNA, 32 nt, Homo Sapiens
ccuaaggucaagcagcugaguagauauacaac

SEQ ID NO: 235756 - RNA, 32 nt, Homo Sapiens
acagaggagauauaacucauuuagaucuucug

SEQ ID NO: 235757 - RNA, 32 nt, Homo Sapiens
uuggucuucuaaagucaccuauuucuugugug

SEQ ID NO: 235758 - RNA, 31 nt, Homo Sapiens
ccaauggagccccaaucagucagucaggagu

SEQ ID NO: 235759 - RNA, 32 nt, Homo Sapiens
ugacggacgggcccgugcuucugccgcggcug

SEQ ID NO: 235760 - RNA, 32 nt, Homo Sapiens
agaaggacagaaaaucaaggcaaagagggugg

SEQ ID NO: 235761 - RNA, 32 nt, Homo Sapiens
cuuuuaaaauuuuauaagcagcuuacacaugu

SEQ ID NO: 235762 - RNA, 32 nt, Homo Sapiens
ugagucacccucgaggccccggguaauaaggc

SEQ ID NO: 235763 - RNA, 32 nt, Homo Sapiens
ccaagaacccaccggaaggaacaaacuccgga

SEQ ID NO: 235764 - RNA, 31 nt, Homo Sapiens
uaagaaaaagagguuucaguuggcugauaga

SEQ ID NO: 235765 - RNA, 32 nt, Homo Sapiens
augccggcgugacgggcgcccccggcugcccg

SEQ ID NO: 235766 - RNA, 32 nt, Homo Sapiens
uuccuauggucuuuucuggauucaucauucac

SEQ ID NO: 235767 - RNA, 32 nt, Homo Sapiens
caugaccucacagagcugagaugaggggaucc

SEQ ID NO: 235768 - RNA, 32 nt, Homo Sapiens
ucuuuuauuucugggauauaaaacaggcuuua

SEQ ID NO: 235769 - RNA, 32 nt, Homo Sapiens
cucccuugaccugcugcauccuccucggcaau

SEQ ID NO: 235770 - RNA, 32 nt, Homo Sapiens
uuaagauaauuaaguuuaaaccagagaauuug

SEQ ID NO: 235771 - RNA, 32 nt, Homo Sapiens
uuaaugggaccucagggaccaacaugagacaa

SEQ ID NO: 235772 - RNA, 32 nt, Homo Sapiens
cucaguguggcccugcggggccccuucaccac

SEQ ID NO: 235773 - RNA, 32 nt, Homo Sapiens
caucgagccaaggcaccugugccgucagacgu

SEQ ID NO: 235774 - RNA, 32 nt, Homo Sapiens
aagcaggcaugagccagagggaggaaguugaa

SEQ ID NO: 235775 - RNA, 32 nt, Homo Sapiens
uuuuuauauauucauauguuacaaagucagca

SEQ ID NO: 235776 - RNA, 32 nt, Homo Sapiens
aggggguugggaggggggaaagagaccagccu

SEQ ID NO: 235777 - RNA, 32 nt, Homo Sapiens
gucacaggauggugggggcggggcagaagucu

SEQ ID NO: 235778 - RNA, 32 nt, Homo Sapiens
ccaaauuucacuuuccuucucaggucucaccu

SEQ ID NO: 235779 - RNA, 32 nt, Homo Sapiens
ugccggcucgcggagagcuagcggggcucccu

SEQ ID NO: 235780 - RNA, 32 nt, Homo Sapiens
uguuagucaucucgugacaaauggccaugugg

SEQ ID NO: 235781 - RNA, 30 nt, Homo Sapiens
agccggcccugcucacuaccgcgcccacgu

SEQ ID NO: 235782 - RNA, 32 nt, Homo Sapiens
cucaauuuucuuuuuaaaaauacuucuacaug

SEQ ID NO: 235783 - RNA, 32 nt, Homo Sapiens
ccugagcucaggugaucugcccaccucggccu

SEQ ID NO: 235784 - RNA, 32 nt, Homo Sapiens
gugugguuuugguugggugcugccagguggca

SEQ ID NO: 235785 - RNA, 32 nt, Homo Sapiens
aggccccggcccuccaaauccaaauccagacg

SEQ ID NO: 235786 - RNA, 32 nt, Homo Sapiens
uuuccugacaauggcagagucucuagagguag

SEQ ID NO: 235787 - RNA, 32 nt, Homo Sapiens
uuuauacguucauucuauuuguuauugcuacu

SEQ ID NO: 235788 - RNA, 32 nt, Homo Sapiens
agauuuuccagaaguaaaaucugaugguucua

SEQ ID NO: 235789 - RNA, 32 nt, Homo Sapiens
uguauuuuagugccacccacuggccauaggua

SEQ ID NO: 235790 - RNA, 32 nt, Homo Sapiens
cugagcccugguugcuggccccggccggucac

SEQ ID NO: 235791 - RNA, 32 nt, Homo Sapiens
agaugguucugugacuccaugugacugucuga

SEQ ID NO: 235792 - RNA, 32 nt, Homo Sapiens
gauacauuuuugguuugaagacuuugucuaag

SEQ ID NO: 235793 - RNA, 32 nt, Homo Sapiens
ccacucggccggcggaggcggcuggugccgcc

SEQ ID NO: 235794 - RNA, 32 nt, Homo Sapiens
ugggcugcagaagaacuagagaaggaccaagc

SEQ ID NO: 235795 - RNA, 32 nt, Homo Sapiens
gggcaggacaaggggaccccucucacuccugc

SEQ ID NO: 235796 - RNA, 32 nt, Homo Sapiens
caguauuuuuguguguuaauuaauuuugcaaa

SEQ ID NO: 235797 - RNA, 32 nt, Homo Sapiens
uuuguagccaucuggccagucgcugggugcac

SEQ ID NO: 235798 - RNA, 32 nt, Homo Sapiens
ccugggugucccgccuggaggggcauguccac

SEQ ID NO: 235799 - RNA, 32 nt, Homo Sapiens
caagagggaggggacagaggcccugccacguc

SEQ ID NO: 235800 - RNA, 32 nt, Homo Sapiens
gcagacacauauauuuuugaggcugggugacg

SEQ ID NO: 235801 - RNA, 32 nt, Homo Sapiens
augauaaauuuauguaauauuugacugacuug

SEQ ID NO: 235802 - RNA, 32 nt, Homo Sapiens
aagcauggagucguaauuuaaagaacucaaua

SEQ ID NO: 235803 - RNA, 32 nt, Homo Sapiens
cagggaagggcaggcagggucuguuggggucu

SEQ ID NO: 235804 - RNA, 32 nt, Homo Sapiens
aaggccgggaggaggcgcgcgacgcgaccuuu

SEQ ID NO: 235805 - RNA, 32 nt, Homo Sapiens
gaaaacaugcuucagcuguggagggcacaugc

SEQ ID NO: 235806 - RNA, 32 nt, Homo Sapiens
uugccuguugcagcuguggccacugccucccg

SEQ ID NO: 235807 - RNA, 32 nt, Homo Sapiens
cggcccgccaggacccggccccggugaacggg

SEQ ID NO: 235808 - RNA, 32 nt, Homo Sapiens
cucccagcagugccgcagcguuucgaggggcg

SEQ ID NO: 235809 - RNA, 32 nt, Homo Sapiens
aaacaacaguaagcuuaaaauuccuucauagu

SEQ ID NO: 235810 - RNA, 30 nt, Homo Sapiens
ggaggagccugcggcggcggcgguggcagc

SEQ ID NO: 235811 - RNA, 32 nt, Homo Sapiens
ccccugcugcgggucucaccauggguuuagaa

SEQ ID NO: 235812 - RNA, 32 nt, Homo Sapiens
ggccaggcgggcgggcagcagcugcaggaagg

SEQ ID NO: 235813 - RNA, 32 nt, Homo Sapiens
acagauaaaaacagagguucugggaagauaca

SEQ ID NO: 235814 - RNA, 32 nt, Homo Sapiens
cgucuguguuggggagcgccuggccaggaccg

SEQ ID NO: 235815 - RNA, 32 nt, Homo Sapiens
gaaacucuggaaagauuuuguccagaagaauu

SEQ ID NO: 235816 - RNA, 32 nt, Homo Sapiens
ugaugcccagccccaaaccuagacccucuccu

SEQ ID NO: 235817 - RNA, 29 nt, Homo Sapiens
uucacuucuaaaugcauauccugagccau

SEQ ID NO: 235818 - RNA, 32 nt, Homo Sapiens
auucauuuuaucacuuucauugguaaaacuuu

SEQ ID NO: 235819 - RNA, 32 nt, Homo Sapiens
gaauuuuuuugacagccacaaacaagaauaca

SEQ ID NO: 235820 - RNA, 27 nt, Homo Sapiens
augugguauuccuucagccaaccuccu

SEQ ID NO: 235821 - RNA, 32 nt, Homo Sapiens
agugcuacuuugccauuaaggcagacuagggu

SEQ ID NO: 235822 - RNA, 32 nt, Homo Sapiens
uccacguucccucuccucucacccacaccccu

SEQ ID NO: 235823 - RNA, 32 nt, Homo Sapiens
uauucucaugcaguauuuuaaauaauuucaaa

SEQ ID NO: 235824 - RNA, 32 nt, Homo Sapiens
ggagggcagagggcagagcucuggccacuucu

SEQ ID NO: 235825 - RNA, 32 nt, Homo Sapiens
gccuccuucagcgcugucugcuagcugcuuuu

SEQ ID NO: 235826 - RNA, 32 nt, Homo Sapiens
guuacgucgcgguuuucuuaacuuuagagccu

SEQ ID NO: 235827 - RNA, 32 nt, Homo Sapiens
uacccagccugccuaacaagggagaauuugua

SEQ ID NO: 235828 - RNA, 32 nt, Homo Sapiens
uauauuuuccacuuuuuuuuuaccuuauuuuu

SEQ ID NO: 235829 - RNA, 32 nt, Homo Sapiens
ggaaaguaggaagugaauuugcugugugauug

SEQ ID NO: 235830 - RNA, 32 nt, Homo Sapiens
aaucacuguguauauuugauuuauuaacuuaa

SEQ ID NO: 235831 - RNA, 32 nt, Homo Sapiens
acgaguauccaccagcaacgagaggggccucc

SEQ ID NO: 235832 - RNA, 32 nt, Homo Sapiens
aaaggggaagggggagugugacacuuucuuuc

SEQ ID NO: 235833 - RNA, 32 nt, Homo Sapiens
gugcuuuaaaagacauauaaagaauugggaaa

SEQ ID NO: 235834 - RNA, 32 nt, Homo Sapiens
uacccaguuuuuccuuuguaggaugggaaagu

SEQ ID NO: 235835 - RNA, 32 nt, Homo Sapiens
aguuuagugauaucuaggaguauaaaguuguc

SEQ ID NO: 235836 - RNA, 32 nt, Homo Sapiens
aaaggugguuuuuuggggggagaagcagggga

SEQ ID NO: 235837 - RNA, 32 nt, Homo Sapiens
gaccugagcuucaacagccuggagacacugcc

SEQ ID NO: 235838 - RNA, 32 nt, Homo Sapiens
agagacugagcugcacccuuucuuuggacaga

SEQ ID NO: 235839 - RNA, 32 nt, Homo Sapiens
uucagagguaggcagccaaagggcacagaacc

SEQ ID NO: 235840 - RNA, 32 nt, Homo Sapiens
aaggcaauuuaaaaaucaugucaagcucaguu

SEQ ID NO: 235841 - RNA, 32 nt, Homo Sapiens
cuauuugauuaucaucaucauuauuauuacac

SEQ ID NO: 235842 - RNA, 32 nt, Homo Sapiens
acaucuuccuucucuaccaucacuccuguggc

SEQ ID NO: 235843 - RNA, 32 nt, Homo Sapiens
aagauucaaaauuuuucccaaauauaaagaaa

SEQ ID NO: 235844 - RNA, 32 nt, Homo Sapiens
uuauuguuucacagagauuaauauucuauagc

SEQ ID NO: 235845 - RNA, 32 nt, Homo Sapiens
agaccugauuuaugaaauuuuguacuaaaauc

SEQ ID NO: 235846 - RNA, 32 nt, Homo Sapiens
aagaaacacauccugguauccaccacauucgg

SEQ ID NO: 235847 - RNA, 32 nt, Homo Sapiens
uauaaaaaagcuuuuuccuuuacaauuucaug

SEQ ID NO: 235848 - RNA, 32 nt, Homo Sapiens
agcgcuuccgugaacacccccguccuccguag

SEQ ID NO: 235849 - RNA, 32 nt, Homo Sapiens
ggggugggggugggcaugagcggugggaacug

SEQ ID NO: 235850 - RNA, 32 nt, Homo Sapiens
uuccuccaugaauuuuauauauuguguacaaa

SEQ ID NO: 235851 - RNA, 32 nt, Homo Sapiens
uucugaaggcgagagggaagccugggugacuc

SEQ ID NO: 235852 - RNA, 32 nt, Homo Sapiens
uuuugcaaaaugagaaucauggugugacacuc

SEQ ID NO: 235853 - RNA, 32 nt, Homo Sapiens
uuucagaagauaaauaaauaucauugcauuua

SEQ ID NO: 235854 - RNA, 32 nt, Homo Sapiens
cgccgacccagcugagcccagcccacgggacg

SEQ ID NO: 235855 - RNA, 32 nt, Homo Sapiens
ccggccuugggguacgcgugccuucggggccu

SEQ ID NO: 235856 - RNA, 32 nt, Homo Sapiens
auuugcaaacaaaaauguaguuaauguaauuu

SEQ ID NO: 235857 - RNA, 32 nt, Homo Sapiens
cuuguacccacccccgaauggugacgguagag

SEQ ID NO: 235858 - RNA, 32 nt, Homo Sapiens
cuauaaaauguuucuucaguacuuuuuaaaug

SEQ ID NO: 235859 - RNA, 32 nt, Homo Sapiens
uuggaaagggaagacucuagggaugacauaag

SEQ ID NO: 235860 - RNA, 32 nt, Homo Sapiens
ccuuagccgucugagugagcuguguaugaaca

SEQ ID NO: 235861 - RNA, 32 nt, Homo Sapiens
gggauaugagaggcugacaaacaucaggggac

SEQ ID NO: 235862 - RNA, 32 nt, Homo Sapiens
uguaucuucuccucagacacggcuuuuggauu

SEQ ID NO: 235863 - RNA, 32 nt, Homo Sapiens
guaaaacaaaaauuacaaaaaaauuuguuuac

SEQ ID NO: 235864 - RNA, 32 nt, Homo Sapiens
uugccaaaaauauuaauauaagaagcuuucau

SEQ ID NO: 235865 - RNA, 32 nt, Homo Sapiens
ccucuuuccucuauuugucuccagggcacccc

SEQ ID NO: 235866 - RNA, 32 nt, Homo Sapiens
ccuacaggggguggagagaccagccuuucuuc

SEQ ID NO: 235867 - RNA, 32 nt, Homo Sapiens
gcgggcuguguccgcugcaucauuuauugaac

SEQ ID NO: 235868 - RNA, 32 nt, Homo Sapiens
aucaaaucuugaugaaggauuguagauuuuug

SEQ ID NO: 235869 - RNA, 32 nt, Homo Sapiens
gagagcagagggagcccucccuccucagcccc

SEQ ID NO: 235870 - RNA, 32 nt, Homo Sapiens
guuggugaaggcagccacucucuugcuugucc

SEQ ID NO: 235871 - RNA, 32 nt, Homo Sapiens
ccagccuuacucccggccccccagcccagucu

SEQ ID NO: 235872 - RNA, 32 nt, Homo Sapiens
ggccucaggaagcgcaugcgcaaccgguucuc

SEQ ID NO: 235873 - RNA, 32 nt, Homo Sapiens
cgcgcuccagacaagauggcgcggccgguccg

SEQ ID NO: 235874 - RNA, 32 nt, Homo Sapiens
gacaacgaccccaacaucuacuuccugaucca

SEQ ID NO: 235875 - RNA, 32 nt, Homo Sapiens
cacaccucucgcgucucggcgccucggaggcu

SEQ ID NO: 235876 - RNA, 32 nt, Homo Sapiens
aaaaaaaugaggaaacaaccacuggcccaggg

SEQ ID NO: 235877 - RNA, 32 nt, Homo Sapiens
cccugcccaucccuggccgcuggcccgggacc

SEQ ID NO: 235878 - RNA, 32 nt, Homo Sapiens
gccugcgucccgcuccacggagucuuccagaa

SEQ ID NO: 235879 - RNA, 32 nt, Homo Sapiens
cucaaucugaccgagguccuccaggucaagga

SEQ ID NO: 235880 - RNA, 32 nt, Homo Sapiens
ugugacuuuauucucauaccccagaggcauau

SEQ ID NO: 235881 - RNA, 32 nt, Homo Sapiens
auucaacacauuuauugggaaccaaucauugu

SEQ ID NO: 235882 - RNA, 32 nt, Homo Sapiens
ugguucaaugaaaaacuauagcuaaaauaugu

SEQ ID NO: 235883 - RNA, 32 nt, Homo Sapiens
uaccaaaugaagacugccuaucaucauaucaa

SEQ ID NO: 235884 - RNA, 32 nt, Homo Sapiens
cuaggcuuccggggcucugcaguccucggcgu

SEQ ID NO: 235885 - RNA, 32 nt, Homo Sapiens
gccucugccacccugugaccugcgaguauugg

SEQ ID NO: 235886 - RNA, 32 nt, Homo Sapiens
ggcggccgcagaacggucaauuugagccgcgu

SEQ ID NO: 235887 - RNA, 30 nt, Homo Sapiens
caugcaccaggagcaucugagucuggccca

SEQ ID NO: 235888 - RNA, 32 nt, Homo Sapiens
ugggaugaauggcaggcccaccucccccacau

SEQ ID NO: 235889 - RNA, 32 nt, Homo Sapiens
ggggcuacaggucugucacuaugcucucuugc

SEQ ID NO: 235890 - RNA, 32 nt, Homo Sapiens
gggucagaccucugaagacuucucagauggau

SEQ ID NO: 235891 - RNA, 32 nt, Homo Sapiens
cuauauaagcuauauuuuuagggaggcuaagc

SEQ ID NO: 235892 - RNA, 32 nt, Homo Sapiens
auaaagaucgcccccaccuccacccucaaaaa

SEQ ID NO: 235893 - RNA, 32 nt, Homo Sapiens
aaaaagccaaggagaaguugugguuugauuuu

SEQ ID NO: 235894 - RNA, 32 nt, Homo Sapiens
cauaggggucauuggggcauagaggcauagag

SEQ ID NO: 235895 - RNA, 32 nt, Homo Sapiens
caguuguaacaagacagcuuucuuagucauuu

SEQ ID NO: 235896 - RNA, 32 nt, Homo Sapiens
cacaagcacaucacaccucccagugagagagc

SEQ ID NO: 235897 - RNA, 32 nt, Homo Sapiens
ccggugcucugcaacgcugcggcgggcggcau

SEQ ID NO: 235898 - RNA, 32 nt, Homo Sapiens
cucaaucaugggaauuuuaacuuuugggauuu

SEQ ID NO: 235899 - RNA, 32 nt, Homo Sapiens
auaaaaaaucccaauuacagaacaggagauau

SEQ ID NO: 235900 - RNA, 32 nt, Homo Sapiens
gggagaguucuguauuuuguuguacaaagaca

SEQ ID NO: 235901 - RNA, 32 nt, Homo Sapiens
ggaucuuccauguuccuccccauauuccugga

SEQ ID NO: 235902 - RNA, 32 nt, Homo Sapiens
gggagacucacagaaaaaucugcccagagccu

SEQ ID NO: 235903 - RNA, 32 nt, Homo Sapiens
auacauuuauaacuggcaauguuuaaaaagag

SEQ ID NO: 235904 - RNA, 32 nt, Homo Sapiens
gugcucacaaaggauacuuuuacagguuaaga

SEQ ID NO: 235905 - RNA, 32 nt, Homo Sapiens
cggccaggccaggcccggggucuccgcaugcu

SEQ ID NO: 235906 - RNA, 32 nt, Homo Sapiens
uacugaaguugacgccuugugcuugagaaugc

SEQ ID NO: 235907 - RNA, 32 nt, Homo Sapiens
uggggcggguggcggcgguggcaguccgaggu

SEQ ID NO: 235908 - RNA, 32 nt, Homo Sapiens
aaagguugaaguucugcuguuuuguuauaaug

SEQ ID NO: 235909 - RNA, 32 nt, Homo Sapiens
cgagggcuauucuccuggguuccuuccggggu

SEQ ID NO: 235910 - RNA, 32 nt, Homo Sapiens
uuauuucuugagccuggcuuggaccuuggcau

SEQ ID NO: 235911 - RNA, 32 nt, Homo Sapiens
aguggaugacaaaugggaaaagaaaugccaga

SEQ ID NO: 235912 - RNA, 32 nt, Homo Sapiens
aagucgagcagcacccaccuccaaccucgggc

SEQ ID NO: 235913 - RNA, 32 nt, Homo Sapiens
gguauaugcuuucucucugcugugaaauuauu

SEQ ID NO: 235914 - RNA, 32 nt, Homo Sapiens
uuucucaugcuuccuuguguuucuguuuuucc

SEQ ID NO: 235915 - RNA, 32 nt, Homo Sapiens
gaagcuucuggccugugcaggcauggagggcg

SEQ ID NO: 235916 - RNA, 32 nt, Homo Sapiens
aaggccauuggguuuggggccaugguggaggg

SEQ ID NO: 235917 - RNA, 32 nt, Homo Sapiens
cacucaggccccacucagcacucugccagcca

SEQ ID NO: 235918 - RNA, 32 nt, Homo Sapiens
cugugugacaauggcgugggguguggcuggga

SEQ ID NO: 235919 - RNA, 32 nt, Homo Sapiens
cccuccaagcuggguucuuuguggaagaagga

SEQ ID NO: 235920 - RNA, 32 nt, Homo Sapiens
uggaacugcauucuucugagcacuguuuauac

SEQ ID NO: 235921 - RNA, 32 nt, Homo Sapiens
ugguuauucugguuagccaaauuuacugguua

SEQ ID NO: 235922 - RNA, 32 nt, Homo Sapiens
aggcuguuuucccccugauucccacuuugcac

SEQ ID NO: 235923 - RNA, 32 nt, Homo Sapiens
gcgcugacgggaccgggcugcggcaaucguua

SEQ ID NO: 235924 - RNA, 32 nt, Homo Sapiens
aauaugucaacacaaaccagauccucaaauag

SEQ ID NO: 235925 - RNA, 32 nt, Homo Sapiens
uaugugggaaaggguuuuuccuuagcacacga

SEQ ID NO: 235926 - RNA, 32 nt, Homo Sapiens
gcaagaaaacgauagugugcuuugaaaaugcc

SEQ ID NO: 235927 - RNA, 32 nt, Homo Sapiens
cgaugugacugccaucaucuucgugguggcca

SEQ ID NO: 235928 - RNA, 32 nt, Homo Sapiens
uggcuggcuucuacgcucucgccgccacgcug

SEQ ID NO: 235929 - RNA, 32 nt, Homo Sapiens
aagaucuucagccaggccuuucugaaggaguu

SEQ ID NO: 235930 - RNA, 32 nt, Homo Sapiens
cagguuacgaagacaaagucccagaauuguau

SEQ ID NO: 235931 - RNA, 32 nt, Homo Sapiens
ucggcucgcaccacucugggccugcugcccac

SEQ ID NO: 235932 - RNA, 32 nt, Homo Sapiens
aacucuagaaaugcggaccaaacuacuucauu

SEQ ID NO: 235933 - RNA, 32 nt, Homo Sapiens
gugcaggagcugaugcaugacucucaguucca

SEQ ID NO: 235934 - RNA, 32 nt, Homo Sapiens
gcggcggaggccggcgguggcgcugguuuggu

SEQ ID NO: 235935 - RNA, 32 nt, Homo Sapiens
aaacauaaacacauuggaggcacuuaauaaag

SEQ ID NO: 235936 - RNA, 32 nt, Homo Sapiens
uggaauaugauacaauuguuauuuucagaaca

SEQ ID NO: 235937 - RNA, 28 nt, Homo Sapiens
ugggaagggcggccuugcuggggacugc

SEQ ID NO: 235938 - RNA, 32 nt, Homo Sapiens
cgggcagcccccagcccuccuccuuacccaac

SEQ ID NO: 235939 - RNA, 32 nt, Homo Sapiens
aaaugaauauuuuaaugccacaaucuuuccug

SEQ ID NO: 235940 - RNA, 32 nt, Homo Sapiens
gggagcucuucgccgccaacccuggcuuugcc

SEQ ID NO: 235941 - RNA, 32 nt, Homo Sapiens
aggaaaaagcaucuuugucaugaaaugcuaug

SEQ ID NO: 235942 - RNA, 32 nt, Homo Sapiens
uucccgccagcgccuggagcuuguagcccuug

SEQ ID NO: 235943 - RNA, 32 nt, Homo Sapiens
guccggggggcggccuuugagcuucccggaua

SEQ ID NO: 235944 - RNA, 28 nt, Homo Sapiens
uuucaugaaaauucacauuugaaaauga

SEQ ID NO: 235945 - RNA, 32 nt, Homo Sapiens
uugucauuguauuugcagugagccuccuuagg

SEQ ID NO: 235946 - RNA, 32 nt, Homo Sapiens
gcugaguuggagggcaagggcuggggcuggga

SEQ ID NO: 235947 - RNA, 32 nt, Homo Sapiens
aaaugagauaaugcaguugcaacugugugucc

SEQ ID NO: 235948 - RNA, 32 nt, Homo Sapiens
gagcgcugcugcgccgcggcaggagaaacagc

SEQ ID NO: 235949 - RNA, 31 nt, Homo Sapiens
gucucccugaagccccucagagccugcccug

SEQ ID NO: 235950 - RNA, 32 nt, Homo Sapiens
gcacagugguuaggaacacacacucuagagcc

SEQ ID NO: 235951 - RNA, 32 nt, Homo Sapiens
caauccacagaaagagaagagccuuaauuuuu

SEQ ID NO: 235952 - RNA, 32 nt, Homo Sapiens
cccagcccugcucccaccuggacuggcucagu

SEQ ID NO: 235953 - RNA, 32 nt, Homo Sapiens
ugggcaacaguccagaagcaucaggggcuccg

SEQ ID NO: 235954 - RNA, 32 nt, Homo Sapiens
acagaacagcugggcuuugccagguguccccc

SEQ ID NO: 235955 - RNA, 32 nt, Homo Sapiens
aggaggacgagcuggaggaagacgagcugggg

SEQ ID NO: 235956 - RNA, 32 nt, Homo Sapiens
gcacgguaagaccccugacccgccuugcacug

SEQ ID NO: 235957 - RNA, 32 nt, Homo Sapiens
cccgcuacccgcggcccacgcugaugaagaca

SEQ ID NO: 235958 - RNA, 31 nt, Homo Sapiens
ugccucaggugacgggccgugagaggggacg

SEQ ID NO: 235959 - RNA, 32 nt, Homo Sapiens
uuauuuagauucacuuaacaaacaaauuuuuc

SEQ ID NO: 235960 - RNA, 32 nt, Homo Sapiens
ugaaccuaaaguagguuguucuuuuaacaaag

SEQ ID NO: 235961 - RNA, 32 nt, Homo Sapiens
cucuucaggcgaggccugggcuccacaagggg

SEQ ID NO: 235962 - RNA, 32 nt, Homo Sapiens
gggauguggcgggacaggguugcuggguacag

SEQ ID NO: 235963 - RNA, 32 nt, Homo Sapiens
gacauccgcgcgcuggagccaggccguaggag

SEQ ID NO: 235964 - RNA, 32 nt, Homo Sapiens
uguguuuccuuugccacccagcccccaugucc

SEQ ID NO: 235965 - RNA, 32 nt, Homo Sapiens
ugggauguggagguugcagugaacugaggucg

SEQ ID NO: 235966 - RNA, 32 nt, Homo Sapiens
cgcacggugcgcgcacccacugaccugcgccc

SEQ ID NO: 235967 - RNA, 32 nt, Homo Sapiens
ugcugcuaaaagacacaagaauuauacaguuu

SEQ ID NO: 235968 - RNA, 32 nt, Homo Sapiens
aagacaauaggugaccugaggacaugcaagcu

SEQ ID NO: 235969 - RNA, 32 nt, Homo Sapiens
ccgggucggcaaaucggagcgcggccggggcg

SEQ ID NO: 235970 - RNA, 32 nt, Homo Sapiens
gacauggguauuuuauaauguuguauuuaauu

SEQ ID NO: 235971 - RNA, 31 nt, Homo Sapiens
cgguggugcccaagccaacccugugacugac

SEQ ID NO: 235972 - RNA, 32 nt, Homo Sapiens
ucuccaaaaauaugauuuugcacacacuuuug

SEQ ID NO: 235973 - RNA, 32 nt, Homo Sapiens
aauaaacuugaauaaacugaaaauggaccuuu

SEQ ID NO: 235974 - RNA, 32 nt, Homo Sapiens
ccugaaguaaagacauaauacgcagaucacau

SEQ ID NO: 235975 - RNA, 32 nt, Homo Sapiens
gaagugaaggcacauuucccuccuucgucgcu

SEQ ID NO: 235976 - RNA, 32 nt, Homo Sapiens
ggaguauaucacggucccagccuauuuugcaa

SEQ ID NO: 235977 - RNA, 32 nt, Homo Sapiens
ugccucuuggcccagggccaggcagucguggu

SEQ ID NO: 235978 - RNA, 32 nt, Homo Sapiens
guagcggggacucaucucuggagaaggaguuc

SEQ ID NO: 235979 - RNA, 32 nt, Homo Sapiens
aaacuccgguguccccgaggugucgguguggu

SEQ ID NO: 235980 - RNA, 32 nt, Homo Sapiens
uauucucuccaaagcuggucuuucugacuauc

SEQ ID NO: 235981 - RNA, 32 nt, Homo Sapiens
guccgggccccgaggcgcagcagggcaccagg

SEQ ID NO: 235982 - RNA, 32 nt, Homo Sapiens
gaccccuucucagacuccaguugggccggacu

SEQ ID NO: 235983 - RNA, 32 nt, Homo Sapiens
ggacaccaggcugagcccggcgcagcaccugg

SEQ ID NO: 235984 - RNA, 32 nt, Homo Sapiens
aucauagccuccugaggccaagcuccugccuu

SEQ ID NO: 235985 - RNA, 32 nt, Homo Sapiens
gcacuucugcugugaugcuaguguugauuuug

SEQ ID NO: 235986 - RNA, 32 nt, Homo Sapiens
ccauagcugcagaaaccaacccugcccuaggc

SEQ ID NO: 235987 - RNA, 32 nt, Homo Sapiens
ucaccccacagcucagcccaugagggugcgca

SEQ ID NO: 235988 - RNA, 32 nt, Homo Sapiens
uggugauaaucgucuucaaauuaaagugcugu

SEQ ID NO: 235989 - RNA, 32 nt, Homo Sapiens
gacgguccgggcggggccggggggaaggaaaa

SEQ ID NO: 235990 - RNA, 32 nt, Homo Sapiens
uugucuagagccccuucuccaauuguaagucc

SEQ ID NO: 235991 - RNA, 32 nt, Homo Sapiens
cguucuucucugggugcuuuauucucuucuuu

SEQ ID NO: 235992 - RNA, 32 nt, Homo Sapiens
gccggccauggagcgcacagcaggcaaagagc

SEQ ID NO: 235993 - RNA, 32 nt, Homo Sapiens
auagcaccacacgcaaaccaaccuuucugaca

SEQ ID NO: 235994 - RNA, 32 nt, Homo Sapiens
gucuguauuuuauauuugauuauuugggcuug

SEQ ID NO: 235995 - RNA, 32 nt, Homo Sapiens
auauguaaacacacaaaauacuaaagauugaa

SEQ ID NO: 235996 - RNA, 32 nt, Homo Sapiens
uucaacuaaaagaucaacuacauuagaugcug

SEQ ID NO: 235997 - RNA, 32 nt, Homo Sapiens
auguaaaaucaaaaacauuuucauauauacca

SEQ ID NO: 235998 - RNA, 32 nt, Homo Sapiens
gccuaaaguccucaaucagccucuccaacugc

SEQ ID NO: 235999 - RNA, 32 nt, Homo Sapiens
auggcgugaugaugacagccucuucaucuaug

SEQ ID NO: 236000 - RNA, 32 nt, Homo Sapiens
gcggcugccugcgccugagcagugcugaggag

SEQ ID NO: 236001 - RNA, 32 nt, Homo Sapiens
ccaaaacacacacacacauuuacaauggacug

SEQ ID NO: 236002 - RNA, 32 nt, Homo Sapiens
guuuaucugaaauuuuaauugaacuaacaauc

SEQ ID NO: 236003 - RNA, 32 nt, Homo Sapiens
caaggcgauggcccgcgccccgagcgcaggcu

SEQ ID NO: 236004 - RNA, 32 nt, Homo Sapiens
uguaaucaggugguacguuuacaugcucauua

SEQ ID NO: 236005 - RNA, 32 nt, Homo Sapiens
ggagacaaccaccucaacugggucauguggca

SEQ ID NO: 236006 - RNA, 32 nt, Homo Sapiens
ugggcaaggugucccacccuccccuccugacc

SEQ ID NO: 236007 - RNA, 31 nt, Homo Sapiens
uaaauacugaagaaaaaauuggcauugacau

SEQ ID NO: 236008 - RNA, 32 nt, Homo Sapiens
gcuguaccaguucgcuccgagccccggccgcc

SEQ ID NO: 236009 - RNA, 28 nt, Homo Sapiens
aucaugcucagcggccggcugcgcucug

SEQ ID NO: 236010 - RNA, 32 nt, Homo Sapiens
aaaauucuucucugcccuucucacacuucgau

SEQ ID NO: 236011 - RNA, 32 nt, Homo Sapiens
caaaauggcagagcuagcccccugccccguuc

SEQ ID NO: 236012 - RNA, 32 nt, Homo Sapiens
agcaucuccgcccggcagccgccccgucugag

SEQ ID NO: 236013 - RNA, 32 nt, Homo Sapiens
ugugacuuggugcacaacuucagacaccauca

SEQ ID NO: 236014 - RNA, 32 nt, Homo Sapiens
ccacugcgcuucggcccgguggcccgggcgcc

SEQ ID NO: 236015 - RNA, 31 nt, Homo Sapiens
ggguccaagcaucaggagcaggcaaggagaa

SEQ ID NO: 236016 - RNA, 32 nt, Homo Sapiens
aaaaauaugaaaaacaaacuugugaaaaugua

SEQ ID NO: 236017 - RNA, 32 nt, Homo Sapiens
aagccauaccuuaaagauaacuuuuuaaauuc

SEQ ID NO: 236018 - RNA, 32 nt, Homo Sapiens
accagggcuccagccccucuuggagaagucuc

SEQ ID NO: 236019 - RNA, 31 nt, Homo Sapiens
acugaggagccccgagagagcucagccuugc

SEQ ID NO: 236020 - RNA, 32 nt, Homo Sapiens
auacauuauguagaacuacuuuucugcaacac

SEQ ID NO: 236021 - RNA, 32 nt, Homo Sapiens
uuugaauggcauaugccauuucugggaaaugc

SEQ ID NO: 236022 - RNA, 32 nt, Homo Sapiens
aaaugcagugacuuauacuaagacaauuuauu

SEQ ID NO: 236023 - RNA, 32 nt, Homo Sapiens
aagggaucaaaacuuuuucaauugcgauaaaa

SEQ ID NO: 236024 - RNA, 32 nt, Homo Sapiens
cgcauggcgggccccgcgcggggauccggcug

SEQ ID NO: 236025 - RNA, 32 nt, Homo Sapiens
aaauuuccaagacacaaacaugaccuauccaa

SEQ ID NO: 236026 - RNA, 32 nt, Homo Sapiens
uccggaagcauuaagguaacccauugccaagu

SEQ ID NO: 236027 - RNA, 32 nt, Homo Sapiens
uaccugcucaggucuggguuccggcugacucc

SEQ ID NO: 236028 - RNA, 32 nt, Homo Sapiens
uuuuucaaaagauccaacuuuuucucuaugcc

SEQ ID NO: 236029 - RNA, 32 nt, Homo Sapiens
cccggccgaggcgccuuuccacguucaguccg

SEQ ID NO: 236030 - RNA, 32 nt, Homo Sapiens
guccacuggauguuggagagccaggcuuccua

SEQ ID NO: 236031 - RNA, 32 nt, Homo Sapiens
cgagugagcugccccagcccccucccagcccu

SEQ ID NO: 236032 - RNA, 32 nt, Homo Sapiens
uuuuuacaaccuggccagaggcauuuuuuaaa

SEQ ID NO: 236033 - RNA, 32 nt, Homo Sapiens
ugcaauacaucauggacuuaaacaucuuauuu

SEQ ID NO: 236034 - RNA, 32 nt, Homo Sapiens
aaaacuguuuaguaaaggggaucuauuuugug

SEQ ID NO: 236035 - RNA, 32 nt, Homo Sapiens
ugaggugugcauguaauugugaauuuggaauu

SEQ ID NO: 236036 - RNA, 32 nt, Homo Sapiens
ugacguugccagagucugugggacauguuauc

SEQ ID NO: 236037 - RNA, 32 nt, Homo Sapiens
aucagucggacauuuuaauuugaaccacguau

SEQ ID NO: 236038 - RNA, 32 nt, Homo Sapiens
gcggcccggccgcggcgcgccggcuuugucau

SEQ ID NO: 236039 - RNA, 32 nt, Homo Sapiens
cuuugauuauaugugauugacaauguguauuu

SEQ ID NO: 236040 - RNA, 32 nt, Homo Sapiens
cauaguguuaggggcggugguggaggugggau

SEQ ID NO: 236041 - RNA, 32 nt, Homo Sapiens
ccaaaucccgucgcccccuuggcaccgacacc

SEQ ID NO: 236042 - RNA, 32 nt, Homo Sapiens
uggcauacagacuggggacccuggacaugcgg

SEQ ID NO: 236043 - RNA, 32 nt, Homo Sapiens
cucuaggcaggaaauccacagcuccuccugca

SEQ ID NO: 236044 - RNA, 32 nt, Homo Sapiens
ccaaauugcuucaucuguacguggugauacca

SEQ ID NO: 236045 - RNA, 32 nt, Homo Sapiens
ggauggcaccuggcccucuccucucaccacgu

SEQ ID NO: 236046 - RNA, 32 nt, Homo Sapiens
ccucaaauagauuauuauuccuccuccucucu

SEQ ID NO: 236047 - RNA, 32 nt, Homo Sapiens
ucucuuugcacuggggcucagaauaauggggg

SEQ ID NO: 236048 - RNA, 32 nt, Homo Sapiens
uauuccugugaguagcuacggcacugcagcau

SEQ ID NO: 236049 - RNA, 32 nt, Homo Sapiens
acgugccagacuuuuucuuaauuacaaacuga

SEQ ID NO: 236050 - RNA, 32 nt, Homo Sapiens
cgaagacgccagccgcgccacgcacugccugc

SEQ ID NO: 236051 - RNA, 32 nt, Homo Sapiens
ucuuuagcaucauauugcucuucuucuuuuag

SEQ ID NO: 236052 - RNA, 32 nt, Homo Sapiens
uacauugugucaucaagcauuccuugagcgcc

SEQ ID NO: 236053 - RNA, 32 nt, Homo Sapiens
ggaguaggggguagcggcuugggucugacaca

SEQ ID NO: 236054 - RNA, 30 nt, Homo Sapiens
acccauugugcagauggggaaacugagguu

SEQ ID NO: 236055 - RNA, 32 nt, Homo Sapiens
agaguggcaggccuggagaucacaucuuccau

SEQ ID NO: 236056 - RNA, 32 nt, Homo Sapiens
ggaggauccaacaauaaauauuaauuuauaaa

SEQ ID NO: 236057 - RNA, 32 nt, Homo Sapiens
aucaugccguaaugucauuaugcuguauugcc

SEQ ID NO: 236058 - RNA, 32 nt, Homo Sapiens
cgcgccccgaccagcccggccucgggcagcca

SEQ ID NO: 236059 - RNA, 32 nt, Homo Sapiens
acuugaaauacuagaucaguagacauucacua

SEQ ID NO: 236060 - RNA, 32 nt, Homo Sapiens
gugauccuggagcugcagccugccuggguggc

SEQ ID NO: 236061 - RNA, 32 nt, Homo Sapiens
uuaauuacacgcuuucuguuucucuccgugcu

SEQ ID NO: 236062 - RNA, 32 nt, Homo Sapiens
gccuucacagccauggcuggugacaacagagg

SEQ ID NO: 236063 - RNA, 32 nt, Homo Sapiens
uguuuuuguauccauggcuggcacuuuacuca

SEQ ID NO: 236064 - RNA, 32 nt, Homo Sapiens
gaaagccuuucugacugucucagcauuaccuc

SEQ ID NO: 236065 - RNA, 32 nt, Homo Sapiens
agaugggaacgcagcccuccucaguggcaccu

SEQ ID NO: 236066 - RNA, 32 nt, Homo Sapiens
cacgcccggggcccgcgucgcaaucgcgacag

SEQ ID NO: 236067 - RNA, 32 nt, Homo Sapiens
ccaagaccuucccauuccuccuccccacaugg

SEQ ID NO: 236068 - RNA, 30 nt, Homo Sapiens
uggaggggagguggaaaaucagugcuacgg

SEQ ID NO: 236069 - RNA, 32 nt, Homo Sapiens
agaugauuugcaguuaguguggagcacagggg

SEQ ID NO: 236070 - RNA, 32 nt, Homo Sapiens
cgcccccgcucgccccgccccuggauuugcuc

SEQ ID NO: 236071 - RNA, 32 nt, Homo Sapiens
caauccuuuugaugaucucaccacuuuaagag

SEQ ID NO: 236072 - RNA, 32 nt, Homo Sapiens
gucggacggcgcccggagcgcggaucucgccu

SEQ ID NO: 236073 - RNA, 32 nt, Homo Sapiens
cccaacuccugccugcccacacugugacuccg

SEQ ID NO: 236074 - RNA, 32 nt, Homo Sapiens
caaaggacugugagccgggagaucugggcugg

SEQ ID NO: 236075 - RNA, 32 nt, Homo Sapiens
aagugggagagcccccauuggaccaguguuug

SEQ ID NO: 236076 - RNA, 32 nt, Homo Sapiens
gcagucaccgcgcagggcggccgcccggaggu

SEQ ID NO: 236077 - RNA, 32 nt, Homo Sapiens
ugaacucagcgaagacccccucgccuuguuua

SEQ ID NO: 236078 - RNA, 32 nt, Homo Sapiens
ucccuggccgcuggcccgggaccgaagccacu

SEQ ID NO: 236079 - RNA, 32 nt, Homo Sapiens
ccagggccggaggagccgcggggcguccgggu

SEQ ID NO: 236080 - RNA, 32 nt, Homo Sapiens
agccccuacauaucuuuccauauauccuauua

SEQ ID NO: 236081 - RNA, 32 nt, Homo Sapiens
uucagauaaccgaauguaaauccuuuaucaga

SEQ ID NO: 236082 - RNA, 32 nt, Homo Sapiens
gaggauaauuaauugacacaucugaaaucccc

SEQ ID NO: 236083 - RNA, 32 nt, Homo Sapiens
uuccaucaaagucuuuaaaagaagaguauacu

SEQ ID NO: 236084 - RNA, 32 nt, Homo Sapiens
aguaaaguuuaaaagacauucuagcucauagu

SEQ ID NO: 236085 - RNA, 32 nt, Homo Sapiens
agcaugguauuugaauuuuaaauuaaagcaaa

SEQ ID NO: 236086 - RNA, 32 nt, Homo Sapiens
aagaagguuuuuggcagcaucacuuuccaaaa

SEQ ID NO: 236087 - RNA, 32 nt, Homo Sapiens
uaauaccuccaagagcauccuuugaacagcuu

SEQ ID NO: 236088 - RNA, 32 nt, Homo Sapiens
caggugcucaccagcuccugugcucucgaccu

SEQ ID NO: 236089 - RNA, 32 nt, Homo Sapiens
uucuccuguaaguucauuacaaacacgggcgg

SEQ ID NO: 236090 - RNA, 32 nt, Homo Sapiens
uaacugggcagcccaacccuccccugcaaguu

SEQ ID NO: 236091 - RNA, 32 nt, Homo Sapiens
ggaggugaaguaccagaggcugcgugagaaga

SEQ ID NO: 236092 - RNA, 29 nt, Homo Sapiens
accucaugaccuaggugaaagcugugaaa

SEQ ID NO: 236093 - RNA, 31 nt, Homo Sapiens
ccaugguuucucagccugcccccgcauggca

SEQ ID NO: 236094 - RNA, 32 nt, Homo Sapiens
gccucagggagcugcugaggggugcugagccu

SEQ ID NO: 236095 - RNA, 32 nt, Homo Sapiens
aaaagcugacccacccaauaacugguuggagg

SEQ ID NO: 236096 - RNA, 32 nt, Homo Sapiens
gagucugucuugagaucugauuuuuucccccu

SEQ ID NO: 236097 - RNA, 32 nt, Homo Sapiens
cagacuguuuguuuucuuucugggaagaaaag

SEQ ID NO: 236098 - RNA, 32 nt, Homo Sapiens
cuaugauggaauuaauauuguauuuuaaaaau

SEQ ID NO: 236099 - RNA, 32 nt, Homo Sapiens
cggccuggagcuuggggugcucugccaacccc

SEQ ID NO: 236100 - RNA, 32 nt, Homo Sapiens
agccagaggaaggacuucauggagcgcgcgcu

SEQ ID NO: 236101 - RNA, 32 nt, Homo Sapiens
ugauuugcucuaggcccagcucugccauaaac

SEQ ID NO: 236102 - RNA, 32 nt, Homo Sapiens
accacugccucccucccucccccuggcaccgg

SEQ ID NO: 236103 - RNA, 32 nt, Homo Sapiens
cgcagcugucagagccgcggcggcgaacgagg

SEQ ID NO: 236104 - RNA, 32 nt, Homo Sapiens
cccuucaacugccugccuuuuggggaaagacc

SEQ ID NO: 236105 - RNA, 32 nt, Homo Sapiens
gcaucucccggcccggccgcagcagccgccgc

SEQ ID NO: 236106 - RNA, 32 nt, Homo Sapiens
aacauagaaguuuccaaagagcuucaaauccc

SEQ ID NO: 236107 - RNA, 32 nt, Homo Sapiens
aaaauuaauagauuguugucauccucuuaagg

SEQ ID NO: 236108 - RNA, 32 nt, Homo Sapiens
guuuacgguucuuccuugcccuugcuaauuac

SEQ ID NO: 236109 - RNA, 32 nt, Homo Sapiens
uucucuucuaaccaaugaaguguuugucagua

SEQ ID NO: 236110 - RNA, 32 nt, Homo Sapiens
gacauuucaaccagacgcacaaaggagaucuc

SEQ ID NO: 236111 - RNA, 32 nt, Homo Sapiens
agauacaaucugggauaguuugggggaacuug

SEQ ID NO: 236112 - RNA, 32 nt, Homo Sapiens
uuuuuuguccacucagucauaacuuucauugc

SEQ ID NO: 236113 - RNA, 32 nt, Homo Sapiens
uggucacauggugagggugggggugagggggc

SEQ ID NO: 236114 - RNA, 32 nt, Homo Sapiens
cuuuuuucauaauucaggaauaaaguagucca

SEQ ID NO: 236115 - RNA, 32 nt, Homo Sapiens
uagcuugucuauuugccauaucuauuuuuuua

SEQ ID NO: 236116 - RNA, 32 nt, Homo Sapiens
gcaaacccuugacucuggcaggauuugcaggc

SEQ ID NO: 236117 - RNA, 32 nt, Homo Sapiens
gcugggcuaugguguggugccucggccuggcc

SEQ ID NO: 236118 - RNA, 32 nt, Homo Sapiens
ccguccgcauacgaaucuagcccgggaaccga

SEQ ID NO: 236119 - RNA, 32 nt, Homo Sapiens
auuuggaaugcaagagagguugaaagaggauu

SEQ ID NO: 236120 - RNA, 32 nt, Homo Sapiens
acaaguacaaauaacaaugaauguuuaaugcu

SEQ ID NO: 236121 - RNA, 32 nt, Homo Sapiens
ugggaaacaagcugauuucuugccaagagguc

SEQ ID NO: 236122 - RNA, 32 nt, Homo Sapiens
cugggggaaugggacagcuggucggcucagag

SEQ ID NO: 236123 - RNA, 32 nt, Homo Sapiens
ugcgaggccaguuccuuggagggacaugacua

SEQ ID NO: 236124 - RNA, 32 nt, Homo Sapiens
aacuaggcaugcuuucuggcaaugcacucacc

SEQ ID NO: 236125 - RNA, 32 nt, Homo Sapiens
auuaacauaaaauaaacugaacauauuuaaag

SEQ ID NO: 236126 - RNA, 32 nt, Homo Sapiens
ucguuggcgaaguguuucggcuccacgccuua

SEQ ID NO: 236127 - RNA, 32 nt, Homo Sapiens
ccgccaaagcugccgcggaaccccgcuagugc

SEQ ID NO: 236128 - RNA, 32 nt, Homo Sapiens
ucuuugaugacagacuuuuuauuacugauuca

SEQ ID NO: 236129 - RNA, 32 nt, Homo Sapiens
uacuaccaacuccucagcuccacagcccgcuu

SEQ ID NO: 236130 - RNA, 32 nt, Homo Sapiens
ccccaagcaccacgccgccacacuggacuggc

SEQ ID NO: 236131 - RNA, 32 nt, Homo Sapiens
aguuuuuucuuacuuuuaaauuccaacuuaaa

SEQ ID NO: 236132 - RNA, 32 nt, Homo Sapiens
aaguuauuaccuuuacauauuaucaugucuau

SEQ ID NO: 236133 - RNA, 32 nt, Homo Sapiens
ccccaggacuccugggcccugcuucccugaac

SEQ ID NO: 236134 - RNA, 32 nt, Homo Sapiens
aagaugaagaggaguuccagauauauuuuggu

SEQ ID NO: 236135 - RNA, 32 nt, Homo Sapiens
uucauuggucagcacuccucaaugaaagacag

SEQ ID NO: 236136 - RNA, 32 nt, Homo Sapiens
ugaaccgugugaggcacacgucuucuauauug

SEQ ID NO: 236137 - RNA, 32 nt, Homo Sapiens
cucuguccauucuuagagcauaccuucaucca

SEQ ID NO: 236138 - RNA, 32 nt, Homo Sapiens
agauuaaauuaguguuggcaaaauaaaguucu

SEQ ID NO: 236139 - RNA, 32 nt, Homo Sapiens
uaugaacauuuuuucuugagcaauugguaaag

SEQ ID NO: 236140 - RNA, 32 nt, Homo Sapiens
cugguggccccggagcagggcugugacauugg

SEQ ID NO: 236141 - RNA, 32 nt, Homo Sapiens
uagggccuucugcucgcccaccucccaccccu

SEQ ID NO: 236142 - RNA, 32 nt, Homo Sapiens
auggggaacagguugggagguggccagugcuc

SEQ ID NO: 236143 - RNA, 32 nt, Homo Sapiens
aaacugucagggugcuggccccucugcagaug

SEQ ID NO: 236144 - RNA, 32 nt, Homo Sapiens
ugcacccacgaugcugcacgggcccgcccugg

SEQ ID NO: 236145 - RNA, 32 nt, Homo Sapiens
cagaaccccagguagguagagcaagaagaugg

SEQ ID NO: 236146 - RNA, 32 nt, Homo Sapiens
agauggagaaaguaacacaaacaucauuuuac

SEQ ID NO: 236147 - RNA, 32 nt, Homo Sapiens
gucuaugaaugggcucgcgaccaccgugccca

SEQ ID NO: 236148 - RNA, 32 nt, Homo Sapiens
cuggugaacagauuguccagcaauauauuaug

SEQ ID NO: 236149 - RNA, 32 nt, Homo Sapiens
aagugagggugcagcgugucagacacaacauu

SEQ ID NO: 236150 - RNA, 32 nt, Homo Sapiens
aguggcggccgcgaggggagggggagucccgu

SEQ ID NO: 236151 - RNA, 32 nt, Homo Sapiens
cauucacccacccacccacccagagccgggac

SEQ ID NO: 236152 - RNA, 32 nt, Homo Sapiens
caagcuauauccacaauucccaggaauucguc

SEQ ID NO: 236153 - RNA, 32 nt, Homo Sapiens
cugacuauuaaaccuauucuucauaaacacaa

SEQ ID NO: 236154 - RNA, 32 nt, Homo Sapiens
cuccuaagauuuuucucuuuucugggagcggg

SEQ ID NO: 236155 - RNA, 32 nt, Homo Sapiens
aacugcucacaccagcuccagaagcacguccu

SEQ ID NO: 236156 - RNA, 32 nt, Homo Sapiens
uuaaaauauaauuuauaacauagauugaagcc

SEQ ID NO: 236157 - RNA, 32 nt, Homo Sapiens
caauccaccucuagaaucuacucugaaaguaa

SEQ ID NO: 236158 - RNA, 32 nt, Homo Sapiens
uucuuugauuaugguaugcuuauuuggaaagu

SEQ ID NO: 236159 - RNA, 32 nt, Homo Sapiens
uugcaaggugccagcccugggagccccucuuc

SEQ ID NO: 236160 - RNA, 32 nt, Homo Sapiens
gcagccuccgcggcucacuccagccaucccuu

SEQ ID NO: 236161 - RNA, 32 nt, Homo Sapiens
aaggcacuaaggaauggugagaaggaugacuu

SEQ ID NO: 236162 - RNA, 32 nt, Homo Sapiens
ggcucugagcagccaugcuucccggggugggc

SEQ ID NO: 236163 - RNA, 32 nt, Homo Sapiens
uuacuugcacaaaacugaucaguuuugagaga

SEQ ID NO: 236164 - RNA, 32 nt, Homo Sapiens
ugguuuuugaaauucuuucuccguauuaaaca

SEQ ID NO: 236165 - RNA, 32 nt, Homo Sapiens
cucauggugguuuugauuugccuguccugaag

SEQ ID NO: 236166 - RNA, 32 nt, Homo Sapiens
ugucuucugugccuuucguucuagguuaaucu

SEQ ID NO: 236167 - RNA, 32 nt, Homo Sapiens
uagguuuccuucuguuuguuaaaagggacaau

SEQ ID NO: 236168 - RNA, 32 nt, Homo Sapiens
gccuaucuggaguuuaaaugcguaauacacca

SEQ ID NO: 236169 - RNA, 32 nt, Homo Sapiens
gcaggagggaccaggcggggcuccaggccacu

SEQ ID NO: 236170 - RNA, 32 nt, Homo Sapiens
uguaugcaagcaccauuuuauuucauguagua

SEQ ID NO: 236171 - RNA, 32 nt, Homo Sapiens
aaucccggagcaccccacccccagcgaguccc

SEQ ID NO: 236172 - RNA, 32 nt, Homo Sapiens
aaaacccuuucugccccugcugacacagacau

SEQ ID NO: 236173 - RNA, 32 nt, Homo Sapiens
uagauauaugcuauuucuuucauucuugcugg

SEQ ID NO: 236174 - RNA, 32 nt, Homo Sapiens
ggccuccgcgcgcgcacgaugcccucggccac

SEQ ID NO: 236175 - RNA, 32 nt, Homo Sapiens
ccaaccacaagcauaccuauuaagagaagccc

SEQ ID NO: 236176 - RNA, 32 nt, Homo Sapiens
cauuacccgcccucggggggucgggcuguggg

SEQ ID NO: 236177 - RNA, 32 nt, Homo Sapiens
ggaaacaaugccagcucuguggcuucugcccu

SEQ ID NO: 236178 - RNA, 32 nt, Homo Sapiens
gcgaaugcgagggaggccggccuugagugaaa

SEQ ID NO: 236179 - RNA, 32 nt, Homo Sapiens
aguaaacgagcacuucaucuagcgccgggcgg

SEQ ID NO: 236180 - RNA, 32 nt, Homo Sapiens
gcagcucccgcaccugugccugccccgggaau

SEQ ID NO: 236181 - RNA, 32 nt, Homo Sapiens
ggguugcagcgccccaggacccaagagccccc

SEQ ID NO: 236182 - RNA, 32 nt, Homo Sapiens
ggagugcgguggcacgaucugggcucauugca

SEQ ID NO: 236183 - RNA, 32 nt, Homo Sapiens
gccauugcacuccagccugggcgacagaguga

SEQ ID NO: 236184 - RNA, 32 nt, Homo Sapiens
ugcagcagccccagcguguguccuggcacccu

SEQ ID NO: 236185 - RNA, 32 nt, Homo Sapiens
ugucggauagugaugacugacugcacaaagug

SEQ ID NO: 236186 - RNA, 32 nt, Homo Sapiens
cgaggcuucgggggcgcaaacuaaugggacug

SEQ ID NO: 236187 - RNA, 29 nt, Homo Sapiens
ccuuacggacgucucaggggugacaggac

SEQ ID NO: 236188 - RNA, 32 nt, Homo Sapiens
uugccuuguguggucagcacuuaacuguuuac

SEQ ID NO: 236189 - RNA, 32 nt, Homo Sapiens
uccuccgcggugccggucgcccgcgaugcccg

SEQ ID NO: 236190 - RNA, 32 nt, Homo Sapiens
cggugccagaacgccggggcccggggcaacuc

SEQ ID NO: 236191 - RNA, 32 nt, Homo Sapiens
gacucugauauugaaguuaauggaucaaguag

SEQ ID NO: 236192 - RNA, 32 nt, Homo Sapiens
uuugcuuuuuaaaaauugugguaaaauacaua

SEQ ID NO: 236193 - RNA, 32 nt, Homo Sapiens
cugucugguaauagaaaguaaaaaucuagaca

SEQ ID NO: 236194 - RNA, 29 nt, Homo Sapiens
uccaugauauguauguggacacaggcugg

SEQ ID NO: 236195 - RNA, 32 nt, Homo Sapiens
uggggcggggcuccuuggagggggcucaguca

SEQ ID NO: 236196 - RNA, 32 nt, Homo Sapiens
ucacuucgcuccugggcagcugcgcggagaac

SEQ ID NO: 236197 - RNA, 32 nt, Homo Sapiens
ugaaauuuuaccauuuugcgauguguuuuauu

SEQ ID NO: 236198 - RNA, 32 nt, Homo Sapiens
aacaucuagacuaucucuagagcuguuuccua

SEQ ID NO: 236199 - RNA, 32 nt, Homo Sapiens
ccugaggccuccugggagaucugccaaccacg

SEQ ID NO: 236200 - RNA, 32 nt, Homo Sapiens
uuaagccaaaaugaaucugaaaaaagacaaaa

SEQ ID NO: 236201 - RNA, 32 nt, Homo Sapiens
ccugacuaaaauuuggaauugugucuuuuuau

SEQ ID NO: 236202 - RNA, 32 nt, Homo Sapiens
gagacauuuuaauacuacaaaacuaggaaaau

SEQ ID NO: 236203 - RNA, 32 nt, Homo Sapiens
cuggaaacaaaagaggaaaaagauaacauggg

SEQ ID NO: 236204 - RNA, 32 nt, Homo Sapiens
gggaugggagaagagggaaggggccucagagu

SEQ ID NO: 236205 - RNA, 32 nt, Homo Sapiens
cucuucuugccguuggccuuucugacucugga

SEQ ID NO: 236206 - RNA, 32 nt, Homo Sapiens
auuuagcuucacuugagagagaucuggaaugg

SEQ ID NO: 236207 - RNA, 32 nt, Homo Sapiens
auuuccuuugcuucuuuuauuagacuaguguu

SEQ ID NO: 236208 - RNA, 32 nt, Homo Sapiens
cuucucugggcccuccucuccuccucacagcu

SEQ ID NO: 236209 - RNA, 32 nt, Homo Sapiens
aguaccuggggagguuagauguguguuucagg

SEQ ID NO: 236210 - RNA, 32 nt, Homo Sapiens
gaaaacuuugggccauuucagaauuuagagag

SEQ ID NO: 236211 - RNA, 32 nt, Homo Sapiens
uacuaguuauauuuuucuacuuguuaaaugga

SEQ ID NO: 236212 - RNA, 32 nt, Homo Sapiens
uccaccugugacugaggauugugacuccaugg

SEQ ID NO: 236213 - RNA, 31 nt, Homo Sapiens
ccgauucagcccaccaccccagugguuaaca

SEQ ID NO: 236214 - RNA, 32 nt, Homo Sapiens
guguacagccagcagggcccaggcagccacca

SEQ ID NO: 236215 - RNA, 32 nt, Homo Sapiens
guccccauuugcccuuccacuccaccccaccc

SEQ ID NO: 236216 - RNA, 32 nt, Homo Sapiens
ccagagugggucuuggaccagggcaagugcau

SEQ ID NO: 236217 - RNA, 32 nt, Homo Sapiens
gguuuucacucaaucuuuccuguuacaguaac

SEQ ID NO: 236218 - RNA, 32 nt, Homo Sapiens
uuuuauaaaaauucaugucuguauuucaggag

SEQ ID NO: 236219 - RNA, 32 nt, Homo Sapiens
aaugguuuuuaaaucuugcuaaucuucccugg

SEQ ID NO: 236220 - RNA, 32 nt, Homo Sapiens
agagaagaacagaguguucgauucugcccuau

SEQ ID NO: 236221 - RNA, 32 nt, Homo Sapiens
ggauccauugaacagcucuuccauugcagguc

SEQ ID NO: 236222 - RNA, 32 nt, Homo Sapiens
cacauguguucaggacccucccugcccacccc

SEQ ID NO: 236223 - RNA, 32 nt, Homo Sapiens
cuggagugcagcaguugaucagagcucacugc

SEQ ID NO: 236224 - RNA, 32 nt, Homo Sapiens
gcaguucucucuucuuuuccucagguaggaca

SEQ ID NO: 236225 - RNA, 32 nt, Homo Sapiens
cagccgccccgcgggucguccaggauguccaa

SEQ ID NO: 236226 - RNA, 32 nt, Homo Sapiens
ccaaaagaaaugccucauaguucuuaaccuca

SEQ ID NO: 236227 - RNA, 32 nt, Homo Sapiens
gauucggaaaucuauacugaccaaggauuaau

SEQ ID NO: 236228 - RNA, 32 nt, Homo Sapiens
uuggcuuugacagagugcuuugaaauuaugac

SEQ ID NO: 236229 - RNA, 32 nt, Homo Sapiens
agcauuuaugaaggcuuaauaaauuguaaaua

SEQ ID NO: 236230 - RNA, 32 nt, Homo Sapiens
gagcggagcggaucccggggcugggauugcgc

SEQ ID NO: 236231 - RNA, 32 nt, Homo Sapiens
gaagguucgguuucuuuuuucaacacaauuuu

SEQ ID NO: 236232 - RNA, 32 nt, Homo Sapiens
auuuaccaacugugugaccuuacuucaccucu

SEQ ID NO: 236233 - RNA, 32 nt, Homo Sapiens
ucauccuuccuuuggacccaucggggaaaaag

SEQ ID NO: 236234 - RNA, 32 nt, Homo Sapiens
gcucggcuccucgcacgcugcugggguaaguu

SEQ ID NO: 236235 - RNA, 32 nt, Homo Sapiens
acuggcccagaauaaaaaacguggugauucug

SEQ ID NO: 236236 - RNA, 32 nt, Homo Sapiens
gagucuucaggagacggagacauauggaaugu

SEQ ID NO: 236237 - RNA, 32 nt, Homo Sapiens
gggugugcugguacuguaaaucaguguucucu

SEQ ID NO: 236238 - RNA, 32 nt, Homo Sapiens
agcaguguguuuucuuuuuuuguuguuuucuu

SEQ ID NO: 236239 - RNA, 32 nt, Homo Sapiens
acuggccuaauuucucuuuucucugcauugaa

SEQ ID NO: 236240 - RNA, 32 nt, Homo Sapiens
ccauuuuccaaauaugugugaaaucuguuucu

SEQ ID NO: 236241 - RNA, 32 nt, Homo Sapiens
cgagggagucccgcaccacggggccucgcuca

SEQ ID NO: 236242 - RNA, 32 nt, Homo Sapiens
cacugacaauacugaauaaacaucucaccgga

SEQ ID NO: 236243 - RNA, 29 nt, Homo Sapiens
cucgucguugugaugucccuggaaagcac

SEQ ID NO: 236244 - RNA, 32 nt, Homo Sapiens
aaaaaacaucagaaauaauaaaaaauuucaga

SEQ ID NO: 236245 - RNA, 32 nt, Homo Sapiens
uuuuccauuucccggcccccucuucuugagua

SEQ ID NO: 236246 - RNA, 32 nt, Homo Sapiens
gucugccaaauauuaaauugaaaucuucauuu

SEQ ID NO: 236247 - RNA, 32 nt, Homo Sapiens
uuggccucgggggcgcgccgccgcggagacug

SEQ ID NO: 236248 - RNA, 32 nt, Homo Sapiens
aaccccggacggcagaugccuuccucagucuc

SEQ ID NO: 236249 - RNA, 32 nt, Homo Sapiens
ugugagcgccagcggaugggugucacaaaugc

SEQ ID NO: 236250 - RNA, 32 nt, Homo Sapiens
cauaaagccaaggaacuacccugcucccugcg

SEQ ID NO: 236251 - RNA, 31 nt, Homo Sapiens
cuacacuucaaugaucucuuacuugaauuug

SEQ ID NO: 236252 - RNA, 32 nt, Homo Sapiens
cagcccugccuugcgccacccugcgcugucca

SEQ ID NO: 236253 - RNA, 32 nt, Homo Sapiens
guuugaagugaacugugacuuuuuugaauauu

SEQ ID NO: 236254 - RNA, 32 nt, Homo Sapiens
uuggugaaauacugaguuguucuguugacuuu

SEQ ID NO: 236255 - RNA, 32 nt, Homo Sapiens
cucacuggaauccaugagggacacagagagag

SEQ ID NO: 236256 - RNA, 30 nt, Homo Sapiens
ugugcccaugcucaucuuugucggggcuug

SEQ ID NO: 236257 - RNA, 32 nt, Homo Sapiens
ggagcugugcuacggccgcgggcccugguucu

SEQ ID NO: 236258 - RNA, 32 nt, Homo Sapiens
caucagcggauguucacucuggccugccguuc

SEQ ID NO: 236259 - RNA, 32 nt, Homo Sapiens
guggagugcccugcugcccccagcuggagggg

SEQ ID NO: 236260 - RNA, 32 nt, Homo Sapiens
cacugucugaagaucuucauuuacauuuugcu

SEQ ID NO: 236261 - RNA, 32 nt, Homo Sapiens
guguggggugcagaccccccucauggaguaug

SEQ ID NO: 236262 - RNA, 32 nt, Homo Sapiens
uguucucucccucucucuccuggcucugggac

SEQ ID NO: 236263 - RNA, 32 nt, Homo Sapiens
ggcugcucauuagaucuuuugauacuuuacca

SEQ ID NO: 236264 - RNA, 32 nt, Homo Sapiens
acuucuaaggacucuugguacaugaggaagaa

SEQ ID NO: 236265 - RNA, 32 nt, Homo Sapiens
uaucaauuacaaucugaauuucuaagaagcau

SEQ ID NO: 236266 - RNA, 32 nt, Homo Sapiens
augaauggggaggugauaaguagugacuuaaa

SEQ ID NO: 236267 - RNA, 32 nt, Homo Sapiens
uugcgccguaccucaccuggccugcaggauga

SEQ ID NO: 236268 - RNA, 32 nt, Homo Sapiens
gagccagcaaaggccauagaaacaacaauuua

SEQ ID NO: 236269 - RNA, 32 nt, Homo Sapiens
uaaucuaguccagccgcugaggugacuuucaa

SEQ ID NO: 236270 - RNA, 32 nt, Homo Sapiens
agugcauucccuguucccgucuccaacccaac

SEQ ID NO: 236271 - RNA, 32 nt, Homo Sapiens
caguccuugccugcucauggaccuccuucaga

SEQ ID NO: 236272 - RNA, 32 nt, Homo Sapiens
aauuagauguggauuucuuuuuauguauucag

SEQ ID NO: 236273 - RNA, 32 nt, Homo Sapiens
guuauuccaucucccaggauauucucugguga

SEQ ID NO: 236274 - RNA, 32 nt, Homo Sapiens
ccuccagccagcuucuuaauucauuuguucuc

SEQ ID NO: 236275 - RNA, 32 nt, Homo Sapiens
ucaucuaguggcuccaauuugcuccagggaaa

SEQ ID NO: 236276 - RNA, 32 nt, Homo Sapiens
cacuacaccagcugccagaaacccuguucuag

SEQ ID NO: 236277 - RNA, 32 nt, Homo Sapiens
agcuggagaaacagguuaagagaucacuuguu

SEQ ID NO: 236278 - RNA, 32 nt, Homo Sapiens
agcuccugcccccaaaaugcugucuccagcuc

SEQ ID NO: 236279 - RNA, 30 nt, Homo Sapiens
augggguuucaccauguuagccaggauggu

SEQ ID NO: 236280 - RNA, 32 nt, Homo Sapiens
ucuucugccgcuucuggugcugcuugugugcu

SEQ ID NO: 236281 - RNA, 32 nt, Homo Sapiens
aaaacaaaacaaaaaacauaucaaugcugaug

SEQ ID NO: 236282 - RNA, 32 nt, Homo Sapiens
aauacaacugcuccuuuuuuuuuuaaacugag

SEQ ID NO: 236283 - RNA, 32 nt, Homo Sapiens
cgggcuggccccagcaccuucugcccuuccca

SEQ ID NO: 236284 - RNA, 32 nt, Homo Sapiens
caucuuacauuccaauacauuaucaagcaagc

SEQ ID NO: 236285 - RNA, 32 nt, Homo Sapiens
gauuauguuaauuuaaagaaccaaauuauaaa

SEQ ID NO: 236286 - RNA, 32 nt, Homo Sapiens
aaauaccuaauguagaugacagguugaugggu

SEQ ID NO: 236287 - RNA, 32 nt, Homo Sapiens
ucgugccugcagccuggcaucuuccuguucua

SEQ ID NO: 236288 - RNA, 32 nt, Homo Sapiens
ucaccguccagcugucucuccccuguccccac

SEQ ID NO: 236289 - RNA, 32 nt, Homo Sapiens
uuacuguaauauuugcaaguauccaaaauggu

SEQ ID NO: 236290 - RNA, 32 nt, Homo Sapiens
aaucacuugcccacaguuccacagcuagugag

SEQ ID NO: 236291 - RNA, 32 nt, Homo Sapiens
ggucuuaguuuuucuuuuuucucauuucuuuu

SEQ ID NO: 236292 - RNA, 32 nt, Homo Sapiens
uccuggguagaugcccugguguagggcugagu

SEQ ID NO: 236293 - RNA, 32 nt, Homo Sapiens
cgccccacucccaccccgccccgccccgcccg

SEQ ID NO: 236294 - RNA, 31 nt, Homo Sapiens
ugagaaaugagaucagcuaggauacuagcau

SEQ ID NO: 236295 - RNA, 32 nt, Homo Sapiens
aaaagaacaaggaaacaaaaguaacaaagcuu

SEQ ID NO: 236296 - RNA, 32 nt, Homo Sapiens
gcucugaggauggagaggagggcgcggagcuc

SEQ ID NO: 236297 - RNA, 32 nt, Homo Sapiens
auaaggaggagcuuuggcacugguccaagaaa

SEQ ID NO: 236298 - RNA, 32 nt, Homo Sapiens
uccggacgccacccgcgggcacugccgacgcc

SEQ ID NO: 236299 - RNA, 32 nt, Homo Sapiens
cagauuuaaaauauuaauuugcugcuaauuaa

SEQ ID NO: 236300 - RNA, 32 nt, Homo Sapiens
auguggcuuuguuccaccuggcucaccggcgg

SEQ ID NO: 236301 - RNA, 26 nt, Homo Sapiens
auuacaauaaaauuaugguaaacuuu

SEQ ID NO: 236302 - RNA, 32 nt, Homo Sapiens
uggacauuuuuaguguaguacuguuggcucgu

SEQ ID NO: 236303 - RNA, 32 nt, Homo Sapiens
uuugaacuacugagguaucuuuuguauugaau

SEQ ID NO: 236304 - RNA, 32 nt, Homo Sapiens
ccgaccuggaagcguuaaacugcugcauguca

SEQ ID NO: 236305 - RNA, 32 nt, Homo Sapiens
accccucuuuguguugggcagugucaucuugc

SEQ ID NO: 236306 - RNA, 32 nt, Homo Sapiens
gaaccggaggccccggacuucucuggaaaacc

SEQ ID NO: 236307 - RNA, 32 nt, Homo Sapiens
ggggaaaacaccuuucccuucuaguuuuuaga

SEQ ID NO: 236308 - RNA, 32 nt, Homo Sapiens
guuuggacccgccgggccgccgucguuuccag

SEQ ID NO: 236309 - RNA, 32 nt, Homo Sapiens
gauggguagagcuuuccagaaccuucuccauu

SEQ ID NO: 236310 - RNA, 32 nt, Homo Sapiens
auaaaugaguaucaccugagaaaauuaggcau

SEQ ID NO: 236311 - RNA, 32 nt, Homo Sapiens
aaauaaagcugauaguacauguguuguucaaa

SEQ ID NO: 236312 - RNA, 32 nt, Homo Sapiens
ucagcccuacccagccccgcagccccuagccc

SEQ ID NO: 236313 - RNA, 32 nt, Homo Sapiens
uugggcucaagcacuccucccuccucagccuc

SEQ ID NO: 236314 - RNA, 32 nt, Homo Sapiens
cggcgggcgaggggcagggcagggcggacccu

SEQ ID NO: 236315 - RNA, 32 nt, Homo Sapiens
uacccgauguuuacagaugcuguugggaaguu

SEQ ID NO: 236316 - RNA, 32 nt, Homo Sapiens
cugguccuuuugcugcuggggaucuuggcccc

SEQ ID NO: 236317 - RNA, 32 nt, Homo Sapiens
cccccaacccucaaauuaaaacuagaacuaua

SEQ ID NO: 236318 - RNA, 32 nt, Homo Sapiens
guuuggaaagacuggacucuaaauucuguuga

SEQ ID NO: 236319 - RNA, 30 nt, Homo Sapiens
uacgaggcgcgcgcucggggucccggucgc

SEQ ID NO: 236320 - RNA, 32 nt, Homo Sapiens
gacucggagguacugggcgcgcgcggcuccgg

SEQ ID NO: 236321 - RNA, 32 nt, Homo Sapiens
gaaauaggcaggagguacaaaaauaucucugc

SEQ ID NO: 236322 - RNA, 32 nt, Homo Sapiens
gucugggcugcagggccgcggguucacguccc

SEQ ID NO: 236323 - RNA, 32 nt, Homo Sapiens
ggcaaggaucaucuugguucgguuaagcaaca

SEQ ID NO: 236324 - RNA, 32 nt, Homo Sapiens
aacgucugccucacagcagauucuucacgccc

SEQ ID NO: 236325 - RNA, 31 nt, Homo Sapiens
gacccgagggcggccuggagagcuuggucug

SEQ ID NO: 236326 - RNA, 32 nt, Homo Sapiens
cgcucgcccgggggcgcgcuugcgcgccagcg

SEQ ID NO: 236327 - RNA, 32 nt, Homo Sapiens
gaaagcugcuggguuccuuaaucucacugaag

SEQ ID NO: 236328 - RNA, 32 nt, Homo Sapiens
aaccacgguguuguuuuagaugccuuuauaag

SEQ ID NO: 236329 - RNA, 32 nt, Homo Sapiens
aagccuuuacuuuguuaauaaaaguguccauu

SEQ ID NO: 236330 - RNA, 32 nt, Homo Sapiens
uguuuauuuugcaugaucuuuaacaaauguuu

SEQ ID NO: 236331 - RNA, 32 nt, Homo Sapiens
uacaggugugugccaccacaccuggcuaguuu

SEQ ID NO: 236332 - RNA, 32 nt, Homo Sapiens
cgccccuccccuccccccugaccgcauggacc

SEQ ID NO: 236333 - RNA, 32 nt, Homo Sapiens
ugugaauaugugaaacaguaaauaugaaagaa

SEQ ID NO: 236334 - RNA, 32 nt, Homo Sapiens
uuggugcccgucugcugaugugcccagccugu

SEQ ID NO: 236335 - RNA, 32 nt, Homo Sapiens
uuccuggcgccgauguaauggaugcugauuac

SEQ ID NO: 236336 - RNA, 32 nt, Homo Sapiens
cuaauaucugcugugcuucucugacagguagu

SEQ ID NO: 236337 - RNA, 32 nt, Homo Sapiens
cauccuauccccagccucuuccugucuucaga

SEQ ID NO: 236338 - RNA, 32 nt, Homo Sapiens
caguggacaugccccaccuccagacuugcuca

SEQ ID NO: 236339 - RNA, 32 nt, Homo Sapiens
ccgcucgcugcuccccggcccgcgccaugccc

SEQ ID NO: 236340 - RNA, 32 nt, Homo Sapiens
agguauuauacaugugauacauuuuuuaagcu

SEQ ID NO: 236341 - RNA, 32 nt, Homo Sapiens
guggccacaaucgugcuguggauuguggaguu

SEQ ID NO: 236342 - RNA, 32 nt, Homo Sapiens
cucuagcccagcccaacaccaucucuuccuac

SEQ ID NO: 236343 - RNA, 31 nt, Homo Sapiens
acuuguccugccaccaccaugaguucugaau

SEQ ID NO: 236344 - RNA, 32 nt, Homo Sapiens
ccuuccuuccgcccgcccgccggcccgcccua

SEQ ID NO: 236345 - RNA, 32 nt, Homo Sapiens
acgauaucaaacaugaaacuuauuugaagucc

SEQ ID NO: 236346 - RNA, 32 nt, Homo Sapiens
accagugguggccugauugucagucuucuccc

SEQ ID NO: 236347 - RNA, 32 nt, Homo Sapiens
ucuacugcucguggugcucccgcgcccagacu

SEQ ID NO: 236348 - RNA, 32 nt, Homo Sapiens
gaugcagaauugggcuuuuuuauuuuuuacag

SEQ ID NO: 236349 - RNA, 32 nt, Homo Sapiens
uuggucagcuucucuuucuuuaucuuucuuuc

SEQ ID NO: 236350 - RNA, 32 nt, Homo Sapiens
aacuaauuuaucuauuuuauagacacuauuga

SEQ ID NO: 236351 - RNA, 32 nt, Homo Sapiens
cuaaagccgcccgccagcccaggccgcugcuc

SEQ ID NO: 236352 - RNA, 32 nt, Homo Sapiens
uugcugucuuucucacuguguuuuuguugcug

SEQ ID NO: 236353 - RNA, 32 nt, Homo Sapiens
gaccuaauaugacuuucuuuuaguguucuuag

SEQ ID NO: 236354 - RNA, 32 nt, Homo Sapiens
uuucagguggagaggagagaguggagggagau

SEQ ID NO: 236355 - RNA, 32 nt, Homo Sapiens
ggugcugagcccuggugaggagcugaggggga

SEQ ID NO: 236356 - RNA, 32 nt, Homo Sapiens
cccugccagcuuucccagagacgcccagcugu

SEQ ID NO: 236357 - RNA, 32 nt, Homo Sapiens
ugaaguucuuuuucuuuuuuugagacaggguc

SEQ ID NO: 236358 - RNA, 32 nt, Homo Sapiens
ucuuucuggaaaaaguuuuuuuucuucucagu

SEQ ID NO: 236359 - RNA, 32 nt, Homo Sapiens
guuuucuguauaugauauauauuaucuuauac

SEQ ID NO: 236360 - RNA, 29 nt, Homo Sapiens
cuccauggccauggagauagacagcaggc

SEQ ID NO: 236361 - RNA, 32 nt, Homo Sapiens
gaaaaccaucugaguucuaacuccuugguugc

SEQ ID NO: 236362 - RNA, 32 nt, Homo Sapiens
gcuaaaaaugaagguuuuucuuugaaacugaa

SEQ ID NO: 236363 - RNA, 31 nt, Homo Sapiens
gcuccgcuaagccccucgccccgcgcggacc

SEQ ID NO: 236364 - RNA, 32 nt, Homo Sapiens
cuugagagaaacaaaaacacugagagugggaa

SEQ ID NO: 236365 - RNA, 32 nt, Homo Sapiens
cugggccguggagcuuccccagggagccaggg

SEQ ID NO: 236366 - RNA, 30 nt, Homo Sapiens
ggccugguacccgugccgggcagccuuaca

SEQ ID NO: 236367 - RNA, 32 nt, Homo Sapiens
cuugccuauuucugccuaaucauguacauuau

SEQ ID NO: 236368 - RNA, 32 nt, Homo Sapiens
ccugcgggacaaagagcuccuguggggcucgu

SEQ ID NO: 236369 - RNA, 32 nt, Homo Sapiens
uuugguuuuuguuuguauaucuuaauaguucg

SEQ ID NO: 236370 - RNA, 32 nt, Homo Sapiens
uuauuguaauauauuucuguuauuuauagaug

SEQ ID NO: 236371 - RNA, 32 nt, Homo Sapiens
auauauacauauauauuuguuaauauauuaaa

SEQ ID NO: 236372 - RNA, 31 nt, Homo Sapiens
uccucucaugacucaaaguccacugcagccu

SEQ ID NO: 236373 - RNA, 32 nt, Homo Sapiens
auucauauauugcuauuucuguauuuuuuguu

SEQ ID NO: 236374 - RNA, 32 nt, Homo Sapiens
acgguggggcggggcgggagaaaguggccgcc

SEQ ID NO: 236375 - RNA, 32 nt, Homo Sapiens
aggaccccuggggccugggugcccugaguggu

SEQ ID NO: 236376 - RNA, 32 nt, Homo Sapiens
uucccacgugcggcugccggggcgugcacagu

SEQ ID NO: 236377 - RNA, 32 nt, Homo Sapiens
cgccuguaauuccagcacuuugggaggccgag

SEQ ID NO: 236378 - RNA, 32 nt, Homo Sapiens
cgucuguaaucccagcacuuugggaggccgag

SEQ ID NO: 236379 - RNA, 32 nt, Homo Sapiens
uuuccuuuucuuuucccacaaaccuucaguau

SEQ ID NO: 236380 - RNA, 32 nt, Homo Sapiens
gaaggcggcggcuggcucuccgggacggucac

SEQ ID NO: 236381 - RNA, 32 nt, Homo Sapiens
uuuauuauagcguaacaugauacaucuaguac

SEQ ID NO: 236382 - RNA, 32 nt, Homo Sapiens
uuuccugaaccugguccagugcauucagaaca

SEQ ID NO: 236383 - RNA, 32 nt, Homo Sapiens
ucuccagcgcgcggcaggccggggcgggacga

SEQ ID NO: 236384 - RNA, 32 nt, Homo Sapiens
aggaaguaaaguaggaacuguugugugagcga

SEQ ID NO: 236385 - RNA, 32 nt, Homo Sapiens
cagcuguagggcgggggcgggcagggagguau

SEQ ID NO: 236386 - RNA, 31 nt, Homo Sapiens
gcgcaggcgggacuaucaggaguccacugcc

SEQ ID NO: 236387 - RNA, 32 nt, Homo Sapiens
gacuuugaccacuuaaaauacuaaguggccaa

SEQ ID NO: 236388 - RNA, 32 nt, Homo Sapiens
aaggagcccucccucucucccuugucccucca

SEQ ID NO: 236389 - RNA, 32 nt, Homo Sapiens
guccccggccucuggaugcagcagggacugug

SEQ ID NO: 236390 - RNA, 32 nt, Homo Sapiens
ggguggagccucagcucuguuucuuucucugg

SEQ ID NO: 236391 - RNA, 32 nt, Homo Sapiens
agccgaauucagcaaccucguaccucagcaug

SEQ ID NO: 236392 - RNA, 32 nt, Homo Sapiens
ccccggcccucgccucagccccggccccuggu

SEQ ID NO: 236393 - RNA, 32 nt, Homo Sapiens
aucuugccauaguggaugcucuuccaguuucu

SEQ ID NO: 236394 - RNA, 29 nt, Homo Sapiens
uguaaaaugaagauucgggacuggcucau

SEQ ID NO: 236395 - RNA, 32 nt, Homo Sapiens
cgccgcggacuccggcagcuuuaucgccagag

SEQ ID NO: 236396 - RNA, 27 nt, Homo Sapiens
gccagggucagcugcagcccccacucu

SEQ ID NO: 236397 - RNA, 32 nt, Homo Sapiens
uuugacagcuggaaagagcgcggagccagcgc

SEQ ID NO: 236398 - RNA, 32 nt, Homo Sapiens
aaggaaagaagggaaaaagggauuauuauauc

SEQ ID NO: 236399 - RNA, 32 nt, Homo Sapiens
aaugcgucauauuuuugcuguuguuuguauuu

SEQ ID NO: 236400 - RNA, 32 nt, Homo Sapiens
gagccccuucuuuuauacaaauccuaccccua

SEQ ID NO: 236401 - RNA, 32 nt, Homo Sapiens
aagagccagagacuugcugugcaggugaggca

SEQ ID NO: 236402 - RNA, 32 nt, Homo Sapiens
ucucucuccucaccuauccauccacaugaccu

SEQ ID NO: 236403 - RNA, 32 nt, Homo Sapiens
caagcuaauaauaaauauauaacuuaaaaagc

SEQ ID NO: 236404 - RNA, 32 nt, Homo Sapiens
caagagcccucccugaaccccugcaacccucc

SEQ ID NO: 236405 - RNA, 32 nt, Homo Sapiens
uggcuaauuuuuuaaauuuuuuguagagauga

SEQ ID NO: 236406 - RNA, 32 nt, Homo Sapiens
caagagaaagcagaguuaaauuauggcagaga

SEQ ID NO: 236407 - RNA, 32 nt, Homo Sapiens
agagcagcggggccgggcgcgcagggccuggc

SEQ ID NO: 236408 - RNA, 32 nt, Homo Sapiens
agccacauauccucgcacagauuucgcacuuc

SEQ ID NO: 236409 - RNA, 32 nt, Homo Sapiens
ccugugcuuuugcucauggccuugacagugcu

SEQ ID NO: 236410 - RNA, 32 nt, Homo Sapiens
caccccuuacugcuagcccccgggggugccag

SEQ ID NO: 236411 - RNA, 32 nt, Homo Sapiens
cucucagacacacaacucagcuauaaacagca

SEQ ID NO: 236412 - RNA, 32 nt, Homo Sapiens
cugacaccaaccccgugcguccacccagccuu

SEQ ID NO: 236413 - RNA, 32 nt, Homo Sapiens
gcuuucccugggagugugcaguaucucauuaa

SEQ ID NO: 236414 - RNA, 32 nt, Homo Sapiens
uucaguucuuugagauuuuugaaaagaguauu

SEQ ID NO: 236415 - RNA, 32 nt, Homo Sapiens
uuccaaagggucagcucugagacugcccucca

SEQ ID NO: 236416 - RNA, 32 nt, Homo Sapiens
uaggcuuuuacacagcacaugaagcaguaauc

SEQ ID NO: 236417 - RNA, 32 nt, Homo Sapiens
ucugcgucgucacugcuucccggcgccauucc

SEQ ID NO: 236418 - RNA, 32 nt, Homo Sapiens
auccauaauaugcaugugaggaccaauucugu

SEQ ID NO: 236419 - RNA, 32 nt, Homo Sapiens
ccuauaaccucuuuucucaccaaaaaggagau

SEQ ID NO: 236420 - RNA, 32 nt, Homo Sapiens
uuaucuauacauaucuuuauuaaucacuauug

SEQ ID NO: 236421 - RNA, 32 nt, Homo Sapiens
gaggaccaggccuucuccugugccugggugaa

SEQ ID NO: 236422 - RNA, 32 nt, Homo Sapiens
ccagcccuggcuuuuccugagguaguuucucc

SEQ ID NO: 236423 - RNA, 32 nt, Homo Sapiens
agggaaacccucacacgugggaauagggacaa

SEQ ID NO: 236424 - RNA, 32 nt, Homo Sapiens
uagcaaagggcuugguggccaagccuggcccu

SEQ ID NO: 236425 - RNA, 32 nt, Homo Sapiens
uugaggaguauuuuuccauuauguauucauaa

SEQ ID NO: 236426 - RNA, 31 nt, Homo Sapiens
ggaaagagucuacagaaccaaggacauguau

SEQ ID NO: 236427 - RNA, 32 nt, Homo Sapiens
uuauaugagauguauguguucuuaauagagaa

SEQ ID NO: 236428 - RNA, 32 nt, Homo Sapiens
gagaagggcuggggccggggcugagggugccc

SEQ ID NO: 236429 - RNA, 32 nt, Homo Sapiens
gggaggacgaggaggaaaggcggccucgccgg

SEQ ID NO: 236430 - RNA, 32 nt, Homo Sapiens
aguauaguaugccguuaacaaacagcccagca

SEQ ID NO: 236431 - RNA, 32 nt, Homo Sapiens
cuucucguugcagggaggcggcugggauagag

SEQ ID NO: 236432 - RNA, 32 nt, Homo Sapiens
agacccugcccggcuccucccugaccgguccu

SEQ ID NO: 236433 - RNA, 32 nt, Homo Sapiens
agucuuggcugcugggcagagccggguuucuc

SEQ ID NO: 236434 - RNA, 32 nt, Homo Sapiens
uuauaaaaucaagauguauauuucauacucag

SEQ ID NO: 236435 - RNA, 29 nt, Homo Sapiens
auuugcauauguauuuuguauuugcauau

SEQ ID NO: 236436 - RNA, 32 nt, Homo Sapiens
aaaagcuuuuucuuccaaagccacuugccaug

SEQ ID NO: 236437 - RNA, 32 nt, Homo Sapiens
uugaaccacccauuuuccuuucuuagccaaau

SEQ ID NO: 236438 - RNA, 32 nt, Homo Sapiens
ccggggcugggcggggcgccggugcuagugga

SEQ ID NO: 236439 - RNA, 32 nt, Homo Sapiens
uaaaagcccccgagaccucccagaagccaagc

SEQ ID NO: 236440 - RNA, 32 nt, Homo Sapiens
ugaugaccucguugccaagcuccuccuguccc

SEQ ID NO: 236441 - RNA, 32 nt, Homo Sapiens
aaucagagggaaccagcuccggccucagccag

SEQ ID NO: 236442 - RNA, 32 nt, Homo Sapiens
auuaggauguggacaugcuauuaggguuaucu

SEQ ID NO: 236443 - RNA, 32 nt, Homo Sapiens
cuucuaugggucugagcuguggaaaagggaga

SEQ ID NO: 236444 - RNA, 32 nt, Homo Sapiens
gcggugccaggagaggguuuggaaugaggaaa

SEQ ID NO: 236445 - RNA, 32 nt, Homo Sapiens
cccuagucauuuccaaacuugaaaacagaauc

SEQ ID NO: 236446 - RNA, 32 nt, Homo Sapiens
uaauggcggcuuuggcucaagcauggauucua

SEQ ID NO: 236447 - RNA, 32 nt, Homo Sapiens
ggugggaaaugcuggcgcgcgcggcgcggggc

SEQ ID NO: 236448 - RNA, 32 nt, Homo Sapiens
uuuccaaaaaaagaaaguaauaaaaacuuaaa

SEQ ID NO: 236449 - RNA, 31 nt, Homo Sapiens
caagagaaucacuugaaccagggaggcggag

SEQ ID NO: 236450 - RNA, 31 nt, Homo Sapiens
cagcccgaggcgccccgaccccgcgccacuc

SEQ ID NO: 236451 - RNA, 32 nt, Homo Sapiens
gcaacuggacaugccacuccccggccucgugg

SEQ ID NO: 236452 - RNA, 32 nt, Homo Sapiens
gucauggaggugcugaacacagggaaggucug

SEQ ID NO: 236453 - RNA, 32 nt, Homo Sapiens
ccaccuguugccccaguugaaaagcauccauu

SEQ ID NO: 236454 - RNA, 32 nt, Homo Sapiens
uucacuauaaccucgaacuccuggcucaagug

SEQ ID NO: 236455 - RNA, 32 nt, Homo Sapiens
caccacacacccagcccugcccugggccaagu

SEQ ID NO: 236456 - RNA, 32 nt, Homo Sapiens
augcccaggacaaaauaaaacaauauaccaga

SEQ ID NO: 236457 - RNA, 32 nt, Homo Sapiens
gaagcagggucacuggccagccgugcgucgcg

SEQ ID NO: 236458 - RNA, 32 nt, Homo Sapiens
acccauuuuuuauaaauguccauccuccugca

SEQ ID NO: 236459 - RNA, 32 nt, Homo Sapiens
ccccaugggaugcagcgugggggcugucugaa

SEQ ID NO: 236460 - RNA, 32 nt, Homo Sapiens
uguacuauugguuuucuuauuauuaaacauug

SEQ ID NO: 236461 - RNA, 32 nt, Homo Sapiens
aguggggccgguggagauccuuggccccagga

SEQ ID NO: 236462 - RNA, 32 nt, Homo Sapiens
cgcagcuguggcucgggugcuggcaggugcug

SEQ ID NO: 236463 - RNA, 32 nt, Homo Sapiens
uuuauuuuucuuuucaacacaguagguucaag

SEQ ID NO: 236464 - RNA, 32 nt, Homo Sapiens
ccaucuuccuccuucacccccaauccccaugc

SEQ ID NO: 236465 - RNA, 32 nt, Homo Sapiens
cuccagacgcacccgcagggccugagguaggc

SEQ ID NO: 236466 - RNA, 32 nt, Homo Sapiens
auccuggcgggcgggcugcgcggaggcucggg

SEQ ID NO: 236467 - RNA, 32 nt, Homo Sapiens
gcagcccaguuucgcgaaggcugucggcgcgc

SEQ ID NO: 236468 - RNA, 32 nt, Homo Sapiens
uccagaaggaggaggacaaaaugacgaagucu

SEQ ID NO: 236469 - RNA, 32 nt, Homo Sapiens
cguggggccugcuggugacuggagcccugccc

SEQ ID NO: 236470 - RNA, 32 nt, Homo Sapiens
gccccucgccccagcccaguccaacccggccc

SEQ ID NO: 236471 - RNA, 32 nt, Homo Sapiens
cugggcaagcccuagggaccaacacgcacuug

SEQ ID NO: 236472 - RNA, 32 nt, Homo Sapiens
aaguugguguuuauuuucugguaaaaaaaaaa

SEQ ID NO: 236473 - RNA, 32 nt, Homo Sapiens
guuugugcauguauauuacugauuuacaagac

SEQ ID NO: 236474 - RNA, 32 nt, Homo Sapiens
uagacaccauggaggcaccuccagucaccaug

SEQ ID NO: 236475 - RNA, 32 nt, Homo Sapiens
ggauugaaauucaaaugggauugauuagucaa

SEQ ID NO: 236476 - RNA, 32 nt, Homo Sapiens
ccuauuaauuuucauccaucuuuuggucguag

SEQ ID NO: 236477 - RNA, 32 nt, Homo Sapiens
auauuacuacaaaaaacuuauuuuuauauauu

SEQ ID NO: 236478 - RNA, 32 nt, Homo Sapiens
agggccggccccacguccucugcgcaccaccc

SEQ ID NO: 236479 - RNA, 32 nt, Homo Sapiens
agguuaaaagucaggaagaaaacuaugaucaa

SEQ ID NO: 236480 - RNA, 32 nt, Homo Sapiens
cacgaaaggagcaucgaagggcaccgaggaaa

SEQ ID NO: 236481 - RNA, 32 nt, Homo Sapiens
cacccucccuccugggaccccccagcaguaga

SEQ ID NO: 236482 - RNA, 32 nt, Homo Sapiens
uucugccggguucggggcgcgcggggcagguu

SEQ ID NO: 236483 - RNA, 30 nt, Homo Sapiens
gcugaggcacccgugccaguggcagaggcc

SEQ ID NO: 236484 - RNA, 32 nt, Homo Sapiens
acagugccuuaccuuccuaucagacacaguga

SEQ ID NO: 236485 - RNA, 32 nt, Homo Sapiens
aaggcagaggggcuccagguccuguuuccagc

SEQ ID NO: 236486 - RNA, 32 nt, Homo Sapiens
uaaaggccacugugucgcagcccuccaguccc

SEQ ID NO: 236487 - RNA, 32 nt, Homo Sapiens
cuguggauauuucaugucuguuuggcuaaugu

SEQ ID NO: 236488 - RNA, 32 nt, Homo Sapiens
aucacguacaagagugagauuaucauguacaa

SEQ ID NO: 236489 - RNA, 32 nt, Homo Sapiens
acacuccucuugccaccccccaucccugcuua

SEQ ID NO: 236490 - RNA, 32 nt, Homo Sapiens
ugucuacugagucuucaugacccuucaacccu

SEQ ID NO: 236491 - RNA, 32 nt, Homo Sapiens
uauuaacgccacauuuuuuaaauagacaaaaa

SEQ ID NO: 236492 - RNA, 32 nt, Homo Sapiens
cugcugcagcuaggaaugaugugggugacggg

SEQ ID NO: 236493 - RNA, 32 nt, Homo Sapiens
ccacuggaggggcugcuguggccagggugcac

SEQ ID NO: 236494 - RNA, 32 nt, Homo Sapiens
ggagaaauaaucaaaaucauguauaccaucuu

SEQ ID NO: 236495 - RNA, 28 nt, Homo Sapiens
uuuuauaaacagaagcauuugaagucau

SEQ ID NO: 236496 - RNA, 32 nt, Homo Sapiens
aaauuguuaaaauaaacuuuaauaaacccaug

SEQ ID NO: 236497 - RNA, 32 nt, Homo Sapiens
ggagaccgugaagaagcagcaaggcgagcaga

SEQ ID NO: 236498 - RNA, 32 nt, Homo Sapiens
auauacuuuuucuccucuagaauuuuaguuua

SEQ ID NO: 236499 - RNA, 32 nt, Homo Sapiens
cuccucccgcgcgcuccgcggcugcaccggcc

SEQ ID NO: 236500 - RNA, 32 nt, Homo Sapiens
aucuacuccagauauggguuugccuauccugc

SEQ ID NO: 236501 - RNA, 32 nt, Homo Sapiens
auggaugcugucuaacagucucugauuucaac

SEQ ID NO: 236502 - RNA, 32 nt, Homo Sapiens
aaacaaacauaaauuuauuagcggguauaugu

SEQ ID NO: 236503 - RNA, 30 nt, Homo Sapiens
cggccggggaggcgcgcggaggcuggagcu

SEQ ID NO: 236504 - RNA, 32 nt, Homo Sapiens
aucuaguaugaauuauuuuacaaguguugucc

SEQ ID NO: 236505 - RNA, 32 nt, Homo Sapiens
ucaucuguuuauauuucuaauaaaggagcaaa

SEQ ID NO: 236506 - RNA, 32 nt, Homo Sapiens
cagaaguacuaagauagaaaugcugaauucug

SEQ ID NO: 236507 - RNA, 32 nt, Homo Sapiens
auugggaguaaaugcaaacauguaucuauauu

SEQ ID NO: 236508 - RNA, 32 nt, Homo Sapiens
ggcccgcugcggggcguuccugggggguagcc

SEQ ID NO: 236509 - RNA, 32 nt, Homo Sapiens
aaacuuaaaaauuaauaugguguauuuuucca

SEQ ID NO: 236510 - RNA, 28 nt, Homo Sapiens
gagaugucggauauuucuuuaucaaauu

SEQ ID NO: 236511 - RNA, 32 nt, Homo Sapiens
auauaguuauuuaaaaaaggcaacugaaagua

SEQ ID NO: 236512 - RNA, 32 nt, Homo Sapiens
aggaagggcucccugcccuugggguuuugauc

SEQ ID NO: 236513 - RNA, 32 nt, Homo Sapiens
acugcuggugccugugguggucguacuacugg

SEQ ID NO: 236514 - RNA, 32 nt, Homo Sapiens
ggaccuagcucugucuucccagccccuugagg

SEQ ID NO: 236515 - RNA, 32 nt, Homo Sapiens
caagagaacccccugcccuguccaggugggaa

SEQ ID NO: 236516 - RNA, 28 nt, Homo Sapiens
aacacaguggcuauuaaugaagaggccc

SEQ ID NO: 236517 - RNA, 32 nt, Homo Sapiens
agaccagagaagccgcucaacauccugcaaug

SEQ ID NO: 236518 - RNA, 32 nt, Homo Sapiens
caggaugggcuuuguuuacacucauuuucacc

SEQ ID NO: 236519 - RNA, 32 nt, Homo Sapiens
gauuguuauuuaaauacauauuaguuuuaacu

SEQ ID NO: 236520 - RNA, 32 nt, Homo Sapiens
uccggccucccagccgccccggggacgaugaa

SEQ ID NO: 236521 - RNA, 32 nt, Homo Sapiens
ugugcagcaacaccccacucccccggcaggau

SEQ ID NO: 236522 - RNA, 32 nt, Homo Sapiens
ggaagcuggccgcgaauucggccucugggccu

SEQ ID NO: 236523 - RNA, 32 nt, Homo Sapiens
gacuuuuggauucuuugcaguacuuugaauuu

SEQ ID NO: 236524 - RNA, 32 nt, Homo Sapiens
ggguuccccccgccccggccuccugccaguca

SEQ ID NO: 236525 - RNA, 32 nt, Homo Sapiens
aguggggaggaugcacugcugcugggcaggug

SEQ ID NO: 236526 - RNA, 32 nt, Homo Sapiens
ucagccacacugggccuggagcccugggcgga

SEQ ID NO: 236527 - RNA, 32 nt, Homo Sapiens
uccagacguggcuccuucuccuuucucagugc

SEQ ID NO: 236528 - RNA, 32 nt, Homo Sapiens
aguagcauuguuaauuucuucaauuucuucua

SEQ ID NO: 236529 - RNA, 32 nt, Homo Sapiens
cuaauuauauauacauauuuauacauguguau

SEQ ID NO: 236530 - RNA, 32 nt, Homo Sapiens
aagcaaguaccuuuaacccagacgggcccggc

SEQ ID NO: 236531 - RNA, 32 nt, Homo Sapiens
cgcaaggaucuugauuucuuuagguuuggagg

SEQ ID NO: 236532 - RNA, 32 nt, Homo Sapiens
cagcagauaccagagcuuauucuuaugaccau

SEQ ID NO: 236533 - RNA, 32 nt, Homo Sapiens
cagaguccaagcccuaggcagugccacccuua

SEQ ID NO: 236534 - RNA, 32 nt, Homo Sapiens
uuccuguucugccaguacccagcccuguucag

SEQ ID NO: 236535 - RNA, 32 nt, Homo Sapiens
gcaugaacuuacagaauucucauccuuccacu

SEQ ID NO: 236536 - RNA, 32 nt, Homo Sapiens
cugcacugaagggcccucugguggccggcacg

SEQ ID NO: 236537 - RNA, 32 nt, Homo Sapiens
aggcaguggcagcuggcgaaaaaucccccucc

SEQ ID NO: 236538 - RNA, 32 nt, Homo Sapiens
aucucucuuuugcaacauuuuacccauuuccc

SEQ ID NO: 236539 - RNA, 32 nt, Homo Sapiens
gggccucucccuaaugucuccuccuucccccc

SEQ ID NO: 236540 - RNA, 32 nt, Homo Sapiens
gugacaggguccaacagggccugguccguguc

SEQ ID NO: 236541 - RNA, 32 nt, Homo Sapiens
uccagcauggacacagggguagccuggggcuu

SEQ ID NO: 236542 - RNA, 32 nt, Homo Sapiens
ugcauuuucuuacuguugauguuuccugccca

SEQ ID NO: 236543 - RNA, 30 nt, Homo Sapiens
aaaagauguucucaaugcaaaaagcacuaa

SEQ ID NO: 236544 - RNA, 32 nt, Homo Sapiens
ugucuguccagccacccuuccacagacugagg

SEQ ID NO: 236545 - RNA, 32 nt, Homo Sapiens
uacucaauuacuuaucugcuuaccuggaccuu

SEQ ID NO: 236546 - RNA, 32 nt, Homo Sapiens
guuagcagcgaggccuuccucacucaggagug

SEQ ID NO: 236547 - RNA, 32 nt, Homo Sapiens
caagcccagaaagugauaagugcagggaggaa

SEQ ID NO: 236548 - RNA, 32 nt, Homo Sapiens
gacauuaagcauucucacaauuagaaauaaga

SEQ ID NO: 236549 - RNA, 31 nt, Homo Sapiens
gccaggguggggguagccgugagacuuggga

SEQ ID NO: 236550 - RNA, 32 nt, Homo Sapiens
gacugggcgaggggugggacugguggggguuc

SEQ ID NO: 236551 - RNA, 32 nt, Homo Sapiens
gauuaaaauuuaucuuuuuuauuaucuuacau

SEQ ID NO: 236552 - RNA, 32 nt, Homo Sapiens
uguuucugauuuaaagagaaggugauauuuua

SEQ ID NO: 236553 - RNA, 32 nt, Homo Sapiens
uggcccggugcagcugcccucagggacagggu

SEQ ID NO: 236554 - RNA, 32 nt, Homo Sapiens
cgaggcgcuuggcggcuuggcuccugggaggg

SEQ ID NO: 236555 - RNA, 32 nt, Homo Sapiens
uuccguguagggagcgggcggcggcgggggag

SEQ ID NO: 236556 - RNA, 32 nt, Homo Sapiens
cuguccugaauggcccguugucaucccagggg

SEQ ID NO: 236557 - RNA, 32 nt, Homo Sapiens
cuuucugggcaagacuccuauaaggcuagaaa

SEQ ID NO: 236558 - RNA, 32 nt, Homo Sapiens
accuugcccagguggcagagccagcuuuggac

SEQ ID NO: 236559 - RNA, 32 nt, Homo Sapiens
agucuccccuccccggggucucgccagccccu

SEQ ID NO: 236560 - RNA, 32 nt, Homo Sapiens
gccugcaccgugguuggaaggucguccccugu

SEQ ID NO: 236561 - RNA, 32 nt, Homo Sapiens
gguaauucauggcugcuucucuaagaugugcc

SEQ ID NO: 236562 - RNA, 32 nt, Homo Sapiens
accaggcugcagauccaaggacacggugccca

SEQ ID NO: 236563 - RNA, 32 nt, Homo Sapiens
ugccuugaaaauaaaugaaagugagaauccaa

SEQ ID NO: 236564 - RNA, 32 nt, Homo Sapiens
aggggcggagagagggggccggaggagcugcu

SEQ ID NO: 236565 - RNA, 32 nt, Homo Sapiens
gguggcugucuccuagugucuacauccguguc

SEQ ID NO: 236566 - RNA, 32 nt, Homo Sapiens
uaugucuuaauuggcucggaugaugaacuugu

SEQ ID NO: 236567 - RNA, 32 nt, Homo Sapiens
uucugagaggcagcugcagcucaggcccuaau

SEQ ID NO: 236568 - RNA, 32 nt, Homo Sapiens
ccagccccuaacuacccuccccagccuccagg

SEQ ID NO: 236569 - RNA, 32 nt, Homo Sapiens
uugguagaaaaauuauuuuuuuuuaauuucag

SEQ ID NO: 236570 - RNA, 32 nt, Homo Sapiens
cacuaaggaaauggggaagguuuuagugaugg

SEQ ID NO: 236571 - RNA, 32 nt, Homo Sapiens
gcgggguccuuccccccucacagcuuuggccc

SEQ ID NO: 236572 - RNA, 32 nt, Homo Sapiens
caacacagucccacccaucuguggguaacaag

SEQ ID NO: 236573 - RNA, 32 nt, Homo Sapiens
acuacaacuaaauguuuaucauuguuuagugu

SEQ ID NO: 236574 - RNA, 32 nt, Homo Sapiens
uuucaacagagcuuggagaaaauuagccuaag

SEQ ID NO: 236575 - RNA, 32 nt, Homo Sapiens
ugggcgcaggacuuuuugccgggguaaacgca

SEQ ID NO: 236576 - RNA, 32 nt, Homo Sapiens
aggccgcgcgaagggggacgccgugccguggg

SEQ ID NO: 236577 - RNA, 32 nt, Homo Sapiens
ggcagccugcguacuccaguccugcuaacccc

SEQ ID NO: 236578 - RNA, 32 nt, Homo Sapiens
ccagauuccagcccuccucccugaggaauguu

SEQ ID NO: 236579 - RNA, 32 nt, Homo Sapiens
agaaacauuagucuuaggaauucuucaaaaaa

SEQ ID NO: 236580 - RNA, 32 nt, Homo Sapiens
cuaagagggaguggaggcucggggccacucug

SEQ ID NO: 236581 - RNA, 32 nt, Homo Sapiens
uacuucauccuccaaugacuggacaacugcga

SEQ ID NO: 236582 - RNA, 32 nt, Homo Sapiens
aaaacaucuucagccuugaauuccucaugacu

SEQ ID NO: 236583 - RNA, 26 nt, Homo Sapiens
ugccccaacugccacacccccauucc

SEQ ID NO: 236584 - RNA, 32 nt, Homo Sapiens
guuaaacuuuaaucaguucuuaucuuucaucu

SEQ ID NO: 236585 - RNA, 32 nt, Homo Sapiens
cauucacuuucaggaaggggugucaguacuuu

SEQ ID NO: 236586 - RNA, 32 nt, Homo Sapiens
gaucucuuccccuguuuucacaauggaggacu

SEQ ID NO: 236587 - RNA, 32 nt, Homo Sapiens
uauuuccaaaucccaaccucccucgcacaucu

SEQ ID NO: 236588 - RNA, 32 nt, Homo Sapiens
ucagcuguuuaacuuauguaauggauguuuug

SEQ ID NO: 236589 - RNA, 32 nt, Homo Sapiens
cacguccaucaggccuggccucaguggccagc

SEQ ID NO: 236590 - RNA, 32 nt, Homo Sapiens
uacaggcgugagccaccacaccuggccuguuu

SEQ ID NO: 236591 - RNA, 32 nt, Homo Sapiens
agaacauguuucccccuuugguuuccuguauu

SEQ ID NO: 236592 - RNA, 32 nt, Homo Sapiens
uugaugacaguaguaccaaaugcuuuaaaaac

SEQ ID NO: 236593 - RNA, 29 nt, Homo Sapiens
aggaaguucacaauguauuuucuacuucu

SEQ ID NO: 236594 - RNA, 32 nt, Homo Sapiens
uugucaauuaaaccucucuucuuuacagauua

SEQ ID NO: 236595 - RNA, 32 nt, Homo Sapiens
gggaucuaucuaauguggaggcacgaaaggau

SEQ ID NO: 236596 - RNA, 32 nt, Homo Sapiens
ucagugucaggagggugagugaagacaucugc

SEQ ID NO: 236597 - RNA, 32 nt, Homo Sapiens
ugaaaagcccgguuagaacauaaagaacgguc

SEQ ID NO: 236598 - RNA, 32 nt, Homo Sapiens
ucaaaagguucagaacguagucucuacucuuc

SEQ ID NO: 236599 - RNA, 32 nt, Homo Sapiens
uuucauuuacacaaauagugauuuacuuuugg

SEQ ID NO: 236600 - RNA, 32 nt, Homo Sapiens
gauagaccccuggaugugacucuucuuuuuaa

SEQ ID NO: 236601 - RNA, 32 nt, Homo Sapiens
ucuuccagcgcuugggccacggcggcggcccu

SEQ ID NO: 236602 - RNA, 32 nt, Homo Sapiens
guguuagucugagguacacaucauauugccua

SEQ ID NO: 236603 - RNA, 32 nt, Homo Sapiens
gguuccuucugguccucccauccacugccacc

SEQ ID NO: 236604 - RNA, 32 nt, Homo Sapiens
ccuugccuguggaacauugucugguccuagcu

SEQ ID NO: 236605 - RNA, 32 nt, Homo Sapiens
aauauaucuacuacauuguuuauauuauugaa

SEQ ID NO: 236606 - RNA, 32 nt, Homo Sapiens
gcucucggugucucgggccaccauccgcccac

SEQ ID NO: 236607 - RNA, 32 nt, Homo Sapiens
uaaauguuuguccuuggguccauuuucuaugc

SEQ ID NO: 236608 - RNA, 32 nt, Homo Sapiens
ucugcguggcucugcuggucgugggcaucguc

SEQ ID NO: 236609 - RNA, 32 nt, Homo Sapiens
ucccaagcuguuugugaagcuacauuacugug

SEQ ID NO: 236610 - RNA, 32 nt, Homo Sapiens
aauccuguggccacauggcacaaaacaccaaa

SEQ ID NO: 236611 - RNA, 32 nt, Homo Sapiens
uucagacccacuuuuucauacacuugcuauau

SEQ ID NO: 236612 - RNA, 32 nt, Homo Sapiens
uuccuuauuucugaaaucuguuuuaauauuuu

SEQ ID NO: 236613 - RNA, 32 nt, Homo Sapiens
ccggagccaugcugaggagcugcgccgcgcgc

SEQ ID NO: 236614 - RNA, 32 nt, Homo Sapiens
agccgccgcgccgagcauggccaucguggcua

SEQ ID NO: 236615 - RNA, 32 nt, Homo Sapiens
gccugcgcucucuagggcugggacgcccauuu

SEQ ID NO: 236616 - RNA, 32 nt, Homo Sapiens
gggcagacaccuccggcccacacagccguuca

SEQ ID NO: 236617 - RNA, 31 nt, Homo Sapiens
ucacagccaggcagccaaauggacagcucua

SEQ ID NO: 236618 - RNA, 32 nt, Homo Sapiens
uccauagguccugguuuaaagcaagcggaaac

SEQ ID NO: 236619 - RNA, 32 nt, Homo Sapiens
uugaagaaaucaaaauggcugaagauaaagag

SEQ ID NO: 236620 - RNA, 32 nt, Homo Sapiens
ccccuuccaucccauucacagcaucgcacucc

SEQ ID NO: 236621 - RNA, 32 nt, Homo Sapiens
auccggcgccacgcgccgugcgguggccagga

SEQ ID NO: 236622 - RNA, 32 nt, Homo Sapiens
ugccaggcgugguggcucaugccugcgguccc

SEQ ID NO: 236623 - RNA, 32 nt, Homo Sapiens
auuguauucagcuguuuuccugucagccauuu

SEQ ID NO: 236624 - RNA, 32 nt, Homo Sapiens
aucuagcaguuauauugcuugauauauugaua

SEQ ID NO: 236625 - RNA, 32 nt, Homo Sapiens
ugagacaucuucauucaguauuuuucccaaua

SEQ ID NO: 236626 - RNA, 32 nt, Homo Sapiens
gccuccuuggaauaaaugguuauuguuacuag

SEQ ID NO: 236627 - RNA, 32 nt, Homo Sapiens
guuaaaacgucaaacuaaaguguuauugaccc

SEQ ID NO: 236628 - RNA, 32 nt, Homo Sapiens
uauugaaacaauuggagaaauucuaaagaaaa

SEQ ID NO: 236629 - RNA, 32 nt, Homo Sapiens
gccccuuaguugucccgaaaccccaagaaaaa

SEQ ID NO: 236630 - RNA, 32 nt, Homo Sapiens
uggagcugcuggaggugcuccaggcgcgggug

SEQ ID NO: 236631 - RNA, 32 nt, Homo Sapiens
gcccacuucuugacaaggccuuggaaacuugg

SEQ ID NO: 236632 - RNA, 32 nt, Homo Sapiens
ccaaccccgccucccuccccgccccgcgaugu

SEQ ID NO: 236633 - RNA, 32 nt, Homo Sapiens
uuaaaagaugacugaggauggagacaagugag

SEQ ID NO: 236634 - RNA, 32 nt, Homo Sapiens
auaguuucugguaaacaaaaggauuauagauu

SEQ ID NO: 236635 - RNA, 32 nt, Homo Sapiens
agaugugccugcuccacccccaguugacauca

SEQ ID NO: 236636 - RNA, 32 nt, Homo Sapiens
ugaaaaucaaggaaaaggguaauccugaggac

SEQ ID NO: 236637 - RNA, 31 nt, Homo Sapiens
gagggagcgggccagccuuacagagcacccc

SEQ ID NO: 236638 - RNA, 32 nt, Homo Sapiens
ucaagcccucacucacccacgcacucacacac

SEQ ID NO: 236639 - RNA, 32 nt, Homo Sapiens
gccggcgcccagcccagccuggcgacugggga

SEQ ID NO: 236640 - RNA, 32 nt, Homo Sapiens
cagcggacgugagcuuccacugcggcugcaga

SEQ ID NO: 236641 - RNA, 32 nt, Homo Sapiens
cuuccuccaccugcaccacuagguuuaugcua

SEQ ID NO: 236642 - RNA, 32 nt, Homo Sapiens
cgucgggccuccgcgccgcugacuucccccgc

SEQ ID NO: 236643 - RNA, 32 nt, Homo Sapiens
caggagauaguucuaggaguugugaaacuuca

SEQ ID NO: 236644 - RNA, 32 nt, Homo Sapiens
ugaaacggacauuuauuugcaucgcucuaauu

SEQ ID NO: 236645 - RNA, 32 nt, Homo Sapiens
uuuuacacaguugugaagauccacagcaauga

SEQ ID NO: 236646 - RNA, 32 nt, Homo Sapiens
uguccuucuuucccuuuucacuucauaugcuu

SEQ ID NO: 236647 - RNA, 32 nt, Homo Sapiens
gacggugcuucuuucuauuaaagugcuccauc

SEQ ID NO: 236648 - RNA, 32 nt, Homo Sapiens
cuccugggaugagacucugggggcccuagccg

SEQ ID NO: 236649 - RNA, 32 nt, Homo Sapiens
uucggcuggggccagcggcgcuuuggaacccg

SEQ ID NO: 236650 - RNA, 32 nt, Homo Sapiens
gguguuggaaauaugaucuugcgacccuagau

SEQ ID NO: 236651 - RNA, 32 nt, Homo Sapiens
uaccaaccauugccuuuuuuuuuuuugagaug

SEQ ID NO: 236652 - RNA, 32 nt, Homo Sapiens
caacuugaugguuuuuuuuaauacugagugca

SEQ ID NO: 236653 - RNA, 32 nt, Homo Sapiens
auuuguucaaagcuguuggcccucugcaaagg

SEQ ID NO: 236654 - RNA, 32 nt, Homo Sapiens
uuuccuccggugccugacguggugggcugggg

SEQ ID NO: 236655 - RNA, 32 nt, Homo Sapiens
cggaggguggcaagcagcuugagugggaugaa

SEQ ID NO: 236656 - RNA, 32 nt, Homo Sapiens
ucccaaugaagaaacguuuauauccugugauu

SEQ ID NO: 236657 - RNA, 32 nt, Homo Sapiens
uauugcuggaaauaaacuaauuuguauggguu

SEQ ID NO: 236658 - RNA, 32 nt, Homo Sapiens
cccaacugaaacaaaauguugcuuuaaaacaa

SEQ ID NO: 236659 - RNA, 31 nt, Homo Sapiens
agagcgcgcgccccgcagccccgcgccuagc

SEQ ID NO: 236660 - RNA, 32 nt, Homo Sapiens
augaccguauuguagggacuugccauaguaug

SEQ ID NO: 236661 - RNA, 32 nt, Homo Sapiens
gccuuuccaagugaccucuccucuucuuuuaa

SEQ ID NO: 236662 - RNA, 32 nt, Homo Sapiens
ugaagauggaagggauggaaacagggccacuu

SEQ ID NO: 236663 - RNA, 32 nt, Homo Sapiens
cagccgugcugccugcccucagggaccuauaa

SEQ ID NO: 236664 - RNA, 32 nt, Homo Sapiens
guauuuauucuauuuggauagccauuagauag

SEQ ID NO: 236665 - RNA, 32 nt, Homo Sapiens
accagccuggggaacauagagagaccuguguc

SEQ ID NO: 236666 - RNA, 32 nt, Homo Sapiens
aggacucgccaccacucugugcaccuucuuga

SEQ ID NO: 236667 - RNA, 32 nt, Homo Sapiens
uugaggggcugccuggcccgcuccauccuacu

SEQ ID NO: 236668 - RNA, 32 nt, Homo Sapiens
caccucagcccuguuugcuauuucaugucugc

SEQ ID NO: 236669 - RNA, 32 nt, Homo Sapiens
cugggugucacguuuucagccaaacaucuaaa

SEQ ID NO: 236670 - RNA, 32 nt, Homo Sapiens
auuuuaagaggggaaaacaaaaauaucuugca

SEQ ID NO: 236671 - RNA, 32 nt, Homo Sapiens
ccaccagccccagcccccggcgcguggccuac

SEQ ID NO: 236672 - RNA, 30 nt, Homo Sapiens
uuugggaaugagaacaugcaaaaucaggaa

SEQ ID NO: 236673 - RNA, 32 nt, Homo Sapiens
gagcuuuggccauauauuuuuuagcaugcauu

SEQ ID NO: 236674 - RNA, 32 nt, Homo Sapiens
agcagacaaaacaaaauauuuucacaaacauu

SEQ ID NO: 236675 - RNA, 32 nt, Homo Sapiens
ucccuaacuccaucuuuuauuaaugcuuaagu

SEQ ID NO: 236676 - RNA, 32 nt, Homo Sapiens
uguucaagugagcaacaaaacauuaugaugua

SEQ ID NO: 236677 - RNA, 32 nt, Homo Sapiens
cacagggaccucugccuaggaaagccggauau

SEQ ID NO: 236678 - RNA, 32 nt, Homo Sapiens
aaccucucccaccugcccuucuuuucagggac

SEQ ID NO: 236679 - RNA, 32 nt, Homo Sapiens
agaggccacgagggcgggagggggcgagagug

SEQ ID NO: 236680 - RNA, 32 nt, Homo Sapiens
ugucagaaggcacuaacucucuggugauuggg

SEQ ID NO: 236681 - RNA, 32 nt, Homo Sapiens
auugugccugguuuuaucaccuguucagauga

SEQ ID NO: 236682 - RNA, 32 nt, Homo Sapiens
aauacgauuuucaggauggaauguagaaaaug

SEQ ID NO: 236683 - RNA, 32 nt, Homo Sapiens
uuuuccuaguuaacauauuuuguacaauauua

SEQ ID NO: 236684 - RNA, 32 nt, Homo Sapiens
aaaugccuggagagccgaguugcagugcugga

SEQ ID NO: 236685 - RNA, 32 nt, Homo Sapiens
acgccaaacuaaacugaccugaaacaguuuug

SEQ ID NO: 236686 - RNA, 32 nt, Homo Sapiens
acugggggaccuucuugaggcuuuuuuccuuc

SEQ ID NO: 236687 - RNA, 32 nt, Homo Sapiens
cuaucgaaauaacauuuuuaaaacuuuacuau

SEQ ID NO: 236688 - RNA, 32 nt, Homo Sapiens
gugccucuaaccuuggauuggccugugugugu

SEQ ID NO: 236689 - RNA, 32 nt, Homo Sapiens
cccccgagccccgauagugcugccuggcccuc

SEQ ID NO: 236690 - RNA, 32 nt, Homo Sapiens
ugauggagaagcuguagaaguuacacagaaga

SEQ ID NO: 236691 - RNA, 32 nt, Homo Sapiens
cccaccugucucacaagaacuucacucaaccc

SEQ ID NO: 236692 - RNA, 32 nt, Homo Sapiens
uuguauuuuaaagauugagagggcuaagaaag

SEQ ID NO: 236693 - RNA, 32 nt, Homo Sapiens
uguccuguugccggcucuggccuuccugugac

SEQ ID NO: 236694 - RNA, 32 nt, Homo Sapiens
uguggccagcuguccagcccagcccugugugu

SEQ ID NO: 236695 - RNA, 32 nt, Homo Sapiens
gcaggcugcagaacuuucccucuuccucucau

SEQ ID NO: 236696 - RNA, 32 nt, Homo Sapiens
gccuuguucuaacccggaauaaaggugauuga

SEQ ID NO: 236697 - RNA, 32 nt, Homo Sapiens
caaaacaggagcuuaucuccaucuugcacauu

SEQ ID NO: 236698 - RNA, 32 nt, Homo Sapiens
gggaugcaauuccauguggaugucaccaaacc

SEQ ID NO: 236699 - RNA, 32 nt, Homo Sapiens
ccacugugccuggccugagggcuggugaaaag

SEQ ID NO: 236700 - RNA, 32 nt, Homo Sapiens
guguggccaggguggggcuccgagccccgggu

SEQ ID NO: 236701 - RNA, 32 nt, Homo Sapiens
ucugacuggccgcgaaccccuacccgaagcuu

SEQ ID NO: 236702 - RNA, 32 nt, Homo Sapiens
ugacuuauauucaaaucuguauuuguuucuuu

SEQ ID NO: 236703 - RNA, 32 nt, Homo Sapiens
ugggcguggaacacguugaugagggucuccau

SEQ ID NO: 236704 - RNA, 32 nt, Homo Sapiens
gcaggcaguugauguauguuuauauuuuaagu

SEQ ID NO: 236705 - RNA, 32 nt, Homo Sapiens
aguacuucuucuguaauauuuacaauguauua

SEQ ID NO: 236706 - RNA, 32 nt, Homo Sapiens
gcaugaucacaagcuuucuuugacgguuucuc

SEQ ID NO: 236707 - RNA, 32 nt, Homo Sapiens
cgaugguuaccuagaccacgauuauuuggauu

SEQ ID NO: 236708 - RNA, 32 nt, Homo Sapiens
agauuagaguguuucuuaauucauuucaaacu

SEQ ID NO: 236709 - RNA, 32 nt, Homo Sapiens
uaguauguggaggcggcggcgggagugcgggc

SEQ ID NO: 236710 - RNA, 32 nt, Homo Sapiens
uaagccugucacucaacagguacgacaagguu

SEQ ID NO: 236711 - RNA, 32 nt, Homo Sapiens
gcacacaguggguagcaggagaaggaccggug

SEQ ID NO: 236712 - RNA, 32 nt, Homo Sapiens
ccaggagcucuuugguuuggcuucuuuugaug

SEQ ID NO: 236713 - RNA, 32 nt, Homo Sapiens
uuuaaaaacuaaaaagccaucugauuucucau

SEQ ID NO: 236714 - RNA, 32 nt, Homo Sapiens
cacacacuuucugacugcaacuucugucccuu

SEQ ID NO: 236715 - RNA, 32 nt, Homo Sapiens
cggagggagagugcuguuugcuuuuguucucc

SEQ ID NO: 236716 - RNA, 32 nt, Homo Sapiens
aucaguaaguguuugcuaaagguccaacaaug

SEQ ID NO: 236717 - RNA, 30 nt, Homo Sapiens
gccauuuugccaccaugggaaaccugggac

SEQ ID NO: 236718 - RNA, 32 nt, Homo Sapiens
caguaagauuucucucaaaacacgugaaaacc

SEQ ID NO: 236719 - RNA, 32 nt, Homo Sapiens
agagacccauccccaaauaccaucauccucau

SEQ ID NO: 236720 - RNA, 32 nt, Homo Sapiens
ucacagggauuaggaggcucaguccccaacgg

SEQ ID NO: 236721 - RNA, 32 nt, Homo Sapiens
uguucucauuggccaaaaacauccuuuugcuc

SEQ ID NO: 236722 - RNA, 32 nt, Homo Sapiens
ccuugguuugguaguucuuguuuuuaauaagg

SEQ ID NO: 236723 - RNA, 32 nt, Homo Sapiens
aaaaaacaaaacaaaaccuugcugccuaugga

SEQ ID NO: 236724 - RNA, 32 nt, Homo Sapiens
cuccaggcgacagcauugcagacgccauuauc

SEQ ID NO: 236725 - RNA, 32 nt, Homo Sapiens
ugugcguggggagagggugaagaagggcuuuu

SEQ ID NO: 236726 - RNA, 32 nt, Homo Sapiens
ggccgccuuuguaaccuucucuaaacgucagg

SEQ ID NO: 236727 - RNA, 32 nt, Homo Sapiens
agcagcacaagaacugugaaaacuuuuauucc

SEQ ID NO: 236728 - RNA, 32 nt, Homo Sapiens
aggguauucauucaaauaauguuuuccuacua

SEQ ID NO: 236729 - RNA, 32 nt, Homo Sapiens
uucuugauccagaugaaaucugauugagcagu

SEQ ID NO: 236730 - RNA, 32 nt, Homo Sapiens
cagcaguaggauuuuuucaaguuuaguucaac

SEQ ID NO: 236731 - RNA, 32 nt, Homo Sapiens
ucccugccacuccagggcuccuccucauccag

SEQ ID NO: 236732 - RNA, 32 nt, Homo Sapiens
aaaugcuucccguucuucuggauggcauccua

SEQ ID NO: 236733 - RNA, 31 nt, Homo Sapiens
ugcccuugcaugucacucccaagggccccug

SEQ ID NO: 236734 - RNA, 32 nt, Homo Sapiens
aaguuucuuuaauguuuuuauguuagaaguga

SEQ ID NO: 236735 - RNA, 32 nt, Homo Sapiens
ccaggauugcugcugcugcugcuacuccugcc

SEQ ID NO: 236736 - RNA, 32 nt, Homo Sapiens
augccacaccggguaagagcucugagucuuag

SEQ ID NO: 236737 - RNA, 32 nt, Homo Sapiens
cugcucaggagguauugagaucaaugaacacu

SEQ ID NO: 236738 - RNA, 32 nt, Homo Sapiens
aauugaaucaccguugucauucagcgagcaac

SEQ ID NO: 236739 - RNA, 32 nt, Homo Sapiens
ggccgggcgcgguggcucacgccuguaauucc

SEQ ID NO: 236740 - RNA, 32 nt, Homo Sapiens
ggccgggcgcgguggcucacgucuguaauccc

SEQ ID NO: 236741 - RNA, 32 nt, Homo Sapiens
agaagaauugggucuuuuuauuauuauuauua

SEQ ID NO: 236742 - RNA, 32 nt, Homo Sapiens
ccggggaagggagaggacugacuuaguggaag

SEQ ID NO: 236743 - RNA, 32 nt, Homo Sapiens
guccgggcaacgcccccugcucccggacagac

SEQ ID NO: 236744 - RNA, 32 nt, Homo Sapiens
caugaaagguguucuuuuuuaaaguguucaga

SEQ ID NO: 236745 - RNA, 32 nt, Homo Sapiens
cuccccggcucgccgcaggccugaccgcccag

SEQ ID NO: 236746 - RNA, 32 nt, Homo Sapiens
gcaggccgcaaagggcucucgcggccgagagg

SEQ ID NO: 236747 - RNA, 32 nt, Homo Sapiens
accgaggggcaggccuggcugcgcagggcgcg

SEQ ID NO: 236748 - RNA, 32 nt, Homo Sapiens
gcccuccaguguugcggagaggcaagagcagc

SEQ ID NO: 236749 - RNA, 32 nt, Homo Sapiens
uaucucuuuucuucuuuuuucuauaauauauu

SEQ ID NO: 236750 - RNA, 32 nt, Homo Sapiens
uauucgcgucuccccgucuccuccuuaacugu

SEQ ID NO: 236751 - RNA, 32 nt, Homo Sapiens
uugaugaaacagcaaacacaacaaagaacaac

SEQ ID NO: 236752 - RNA, 29 nt, Homo Sapiens
aaaucaaggaugcucaguuuaagguacac

SEQ ID NO: 236753 - RNA, 32 nt, Homo Sapiens
uugagauaauucauguuguguuugucuucagu

SEQ ID NO: 236754 - RNA, 32 nt, Homo Sapiens
uggaaagguacugaaauaauggcuggggccuc

SEQ ID NO: 236755 - RNA, 32 nt, Homo Sapiens
uuauuuuguguaaucuuucuuaauuuaaaaac

SEQ ID NO: 236756 - RNA, 32 nt, Homo Sapiens
cugggagaacaggugggaggcuuuuguggcuu

SEQ ID NO: 236757 - RNA, 32 nt, Homo Sapiens
cagaucaugcaaauguuucucaucugcugggu

SEQ ID NO: 236758 - RNA, 32 nt, Homo Sapiens
aaaaaaucuauuaacaauuacauaaggcuuua

SEQ ID NO: 236759 - RNA, 32 nt, Homo Sapiens
caaaaacaacuuuucuuaauuugcauuauagu

SEQ ID NO: 236760 - RNA, 32 nt, Homo Sapiens
cgccagggugaacacacgccacuucccagcua

SEQ ID NO: 236761 - RNA, 32 nt, Homo Sapiens
cggcgaccacgugacgcgggcugccuuugacc

SEQ ID NO: 236762 - RNA, 32 nt, Homo Sapiens
ccuccugauguauuuuuuuucuuggcuuaaag

SEQ ID NO: 236763 - RNA, 32 nt, Homo Sapiens
ggaggcagaacaggcuucggacagugcccaug

SEQ ID NO: 236764 - RNA, 32 nt, Homo Sapiens
cuuagguggcagcuggagacugggccaggaga

SEQ ID NO: 236765 - RNA, 32 nt, Homo Sapiens
gcauggaggguggagugggccucggguccccc

SEQ ID NO: 236766 - RNA, 32 nt, Homo Sapiens
cucccggugcgguggcgcugugcagcgagugg

SEQ ID NO: 236767 - RNA, 32 nt, Homo Sapiens
gguaacuguuguaacuaugaaaugcuuaucug

SEQ ID NO: 236768 - RNA, 32 nt, Homo Sapiens
auuaaauggcaucauaaagaugacuuugcuaa

SEQ ID NO: 236769 - RNA, 32 nt, Homo Sapiens
agcaguucaaggaucuaaagagcaucaaggag

SEQ ID NO: 236770 - RNA, 32 nt, Homo Sapiens
cuaggcuggucccgaacgcuuggacccgagcg

SEQ ID NO: 236771 - RNA, 32 nt, Homo Sapiens
ucauuuccagcauuuuuauaaacuaccaaauu

SEQ ID NO: 236772 - RNA, 32 nt, Homo Sapiens
gccgcccuccgccaagccccagcgcccgcucc

SEQ ID NO: 236773 - RNA, 32 nt, Homo Sapiens
ugaccaagaaugccgcgugcuuggccuacuga

SEQ ID NO: 236774 - RNA, 32 nt, Homo Sapiens
cggcuacuggcacucccagcccggggccugcu

SEQ ID NO: 236775 - RNA, 32 nt, Homo Sapiens
ucagaagugggaagagugagccaggcaagaaa

SEQ ID NO: 236776 - RNA, 32 nt, Homo Sapiens
cuuaucuuuccacagagcuauuuacauccugg

SEQ ID NO: 236777 - RNA, 32 nt, Homo Sapiens
aggugggggaggggcgacaguagugagcgccu

SEQ ID NO: 236778 - RNA, 32 nt, Homo Sapiens
uguuaacauuuuuauaguuuguacuaaauuua

SEQ ID NO: 236779 - RNA, 32 nt, Homo Sapiens
cccaccuucuuuggagcaaggagaugcagcug

SEQ ID NO: 236780 - RNA, 32 nt, Homo Sapiens
aguuaccuguggucauuuuggaggaaguggaa

SEQ ID NO: 236781 - RNA, 32 nt, Homo Sapiens
uuaacucggcgcccgacagccgccgcgugcug

SEQ ID NO: 236782 - RNA, 32 nt, Homo Sapiens
ucgcccgggcucuggggcggcccgcuaggcca

SEQ ID NO: 236783 - RNA, 32 nt, Homo Sapiens
ugggucggagacgggcucgcauuguucccgca

SEQ ID NO: 236784 - RNA, 32 nt, Homo Sapiens
augugucuacuaguaguuaauuggauaaacug

SEQ ID NO: 236785 - RNA, 32 nt, Homo Sapiens
caguggacaaacuaccacagcuauaauugagg

SEQ ID NO: 236786 - RNA, 32 nt, Homo Sapiens
ucaagauuuugacuagugagcuuaauugucca

SEQ ID NO: 236787 - RNA, 32 nt, Homo Sapiens
gcagaguggaaggguugggggaggcgauaaag

SEQ ID NO: 236788 - RNA, 32 nt, Homo Sapiens
acgugguuucgcacuugucacccaggcuggag

SEQ ID NO: 236789 - RNA, 32 nt, Homo Sapiens
ugugaggaucccggggccgccgcgucgcucgg

SEQ ID NO: 236790 - RNA, 32 nt, Homo Sapiens
guauuuucuauuauuaugugcauauuggagua

SEQ ID NO: 236791 - RNA, 30 nt, Homo Sapiens
ugagaugucugugguuguggggguguucca

SEQ ID NO: 236792 - RNA, 32 nt, Homo Sapiens
ucccucccuaucacuccauacuggggugggcu

SEQ ID NO: 236793 - RNA, 32 nt, Homo Sapiens
ggaccacacacacacacacacacacacacaca

SEQ ID NO: 236794 - RNA, 32 nt, Homo Sapiens
agcuucauuucucacguucuuaaaagagagca

SEQ ID NO: 236795 - RNA, 32 nt, Homo Sapiens
ucccuuucucaauaaucaacuuauagugcuga

SEQ ID NO: 236796 - RNA, 32 nt, Homo Sapiens
ggcaggggcuccuguucaccugggccaggguc

SEQ ID NO: 236797 - RNA, 32 nt, Homo Sapiens
caccccugagcagcccggggggccacagcaag

SEQ ID NO: 236798 - RNA, 32 nt, Homo Sapiens
gggaucugccccaccaaagcugcugggugcag

SEQ ID NO: 236799 - RNA, 32 nt, Homo Sapiens
uggguuuugagaaagaaaaauaacuucucugc

SEQ ID NO: 236800 - RNA, 32 nt, Homo Sapiens
auccgcgagggacaggcugugcccuuggcggc

SEQ ID NO: 236801 - RNA, 32 nt, Homo Sapiens
ugacauggcgcugaggguuuuucuaaguaaga

SEQ ID NO: 236802 - RNA, 32 nt, Homo Sapiens
auaauuggacccaacaggaccauuccgaauca

SEQ ID NO: 236803 - RNA, 32 nt, Homo Sapiens
cuauggauguggaacugucaagcagaaguuuu

SEQ ID NO: 236804 - RNA, 32 nt, Homo Sapiens
cugauaaaacaaaaacaaaaguauguuuuaaa

SEQ ID NO: 236805 - RNA, 32 nt, Homo Sapiens
ccaguggaaaaucauccccuccccuugugugu

SEQ ID NO: 236806 - RNA, 32 nt, Homo Sapiens
gccgcgggugacgguggcucucgcugcucgcg

SEQ ID NO: 236807 - RNA, 32 nt, Homo Sapiens
auccuaauacuaggauucuugcuuaaguaugu

SEQ ID NO: 236808 - RNA, 32 nt, Homo Sapiens
gcuuuuccugagccagugcccaucacccaggu

SEQ ID NO: 236809 - RNA, 32 nt, Homo Sapiens
ugacuugugugugaugagagaauggagacaga

SEQ ID NO: 236810 - RNA, 32 nt, Homo Sapiens
aaagggagauuagaucaguuuucucuuaauau

SEQ ID NO: 236811 - RNA, 32 nt, Homo Sapiens
ggcaaaauauaucuuuccuuuggaugacaagg

SEQ ID NO: 236812 - RNA, 32 nt, Homo Sapiens
aucgagauagagaacagcgucuuaccccagaa

SEQ ID NO: 236813 - RNA, 30 nt, Homo Sapiens
caaaaauggcuggggcaauuauagaaaaca

SEQ ID NO: 236814 - RNA, 32 nt, Homo Sapiens
gucucaguuuuugucagcaucuccaccccgag

SEQ ID NO: 236815 - RNA, 32 nt, Homo Sapiens
acuuaguucauggcuuuucucuuugacuuuac

SEQ ID NO: 236816 - RNA, 32 nt, Homo Sapiens
aggaaaccucacuguuuccuccuuccagggac

SEQ ID NO: 236817 - RNA, 31 nt, Homo Sapiens
ucagagaugcuaccgcugcugcugccccugc

SEQ ID NO: 236818 - RNA, 32 nt, Homo Sapiens
gcagguggagagaacagaaggugggcagggcg

SEQ ID NO: 236819 - RNA, 32 nt, Homo Sapiens
uugaacaauuuaauugggaaaguuugucauca

SEQ ID NO: 236820 - RNA, 32 nt, Homo Sapiens
gaagagagaaacuaacagaacaauaacaaugg

SEQ ID NO: 236821 - RNA, 32 nt, Homo Sapiens
guuggccaggauggucucaaucuccuaaccuu

SEQ ID NO: 236822 - RNA, 32 nt, Homo Sapiens
gaggggccgcagugcgcagaacccaccccacc

SEQ ID NO: 236823 - RNA, 32 nt, Homo Sapiens
cuuugauguuuaauaaaguagaaagcacuguc

SEQ ID NO: 236824 - RNA, 32 nt, Homo Sapiens
uuuucacuaugugcuuccuguccccagagggc

SEQ ID NO: 236825 - RNA, 32 nt, Homo Sapiens
ugugcuuaauucaaauccaugugugugccugc

SEQ ID NO: 236826 - RNA, 32 nt, Homo Sapiens
acccaccgccuggccagguguucgggacgcga

SEQ ID NO: 236827 - RNA, 32 nt, Homo Sapiens
uacguguccgaagauaagcuccaggucuuauc

SEQ ID NO: 236828 - RNA, 32 nt, Homo Sapiens
gaacuugugcuuucccaguggcguauguguau

SEQ ID NO: 236829 - RNA, 32 nt, Homo Sapiens
ucguccggaggagccgcggaggcgcuguccug

SEQ ID NO: 236830 - RNA, 32 nt, Homo Sapiens
ggggaaagacgccccuuaccccugccuucgac

SEQ ID NO: 236831 - RNA, 32 nt, Homo Sapiens
aaaucauuucagucuccugaggucucaugcua

SEQ ID NO: 236832 - RNA, 32 nt, Homo Sapiens
aucccaaccucuuuuuccuccuggacacauug

SEQ ID NO: 236833 - RNA, 32 nt, Homo Sapiens
aagcccccgucucccugucaggaggcaucuug

SEQ ID NO: 236834 - RNA, 32 nt, Homo Sapiens
acguaucggcgaagguugggacucgacuggug

SEQ ID NO: 236835 - RNA, 32 nt, Homo Sapiens
aggacauuguggcagccaaagccacaacuugg

SEQ ID NO: 236836 - RNA, 32 nt, Homo Sapiens
gaacccugacuucucaaaaagcacugcacaga

SEQ ID NO: 236837 - RNA, 32 nt, Homo Sapiens
guuugcuuuuuguuuauuaacuacagugggua

SEQ ID NO: 236838 - RNA, 32 nt, Homo Sapiens
uucuccaaugauuguuuccuuugagcaucaca

SEQ ID NO: 236839 - RNA, 32 nt, Homo Sapiens
augagcuccacuuuuccuuuugcuugaacagc

SEQ ID NO: 236840 - RNA, 32 nt, Homo Sapiens
ggggaggucgggaugccugggaucccuuccug

SEQ ID NO: 236841 - RNA, 28 nt, Homo Sapiens
ggcagcagagggccgccgucggggucuc

SEQ ID NO: 236842 - RNA, 32 nt, Homo Sapiens
uuacagaauuaccccacuggauccuggaccca

SEQ ID NO: 236843 - RNA, 32 nt, Homo Sapiens
aguuggcugggaagaaagaugagugaaauaac

SEQ ID NO: 236844 - RNA, 32 nt, Homo Sapiens
ugcccaugguuccucacuccuaccagcaagca

SEQ ID NO: 236845 - RNA, 32 nt, Homo Sapiens
agcuguucccccacauggacagauggacacac

SEQ ID NO: 236846 - RNA, 32 nt, Homo Sapiens
guuuuccucuuaaaugaggaugaugaugacca

SEQ ID NO: 236847 - RNA, 32 nt, Homo Sapiens
caauugccagcaaccucugcuuguccggaaaa

SEQ ID NO: 236848 - RNA, 32 nt, Homo Sapiens
cccaucucagcccuuuauuuuaucuuucaugu

SEQ ID NO: 236849 - RNA, 32 nt, Homo Sapiens
aucucaaacaauuguaacuacuuuuucuaggg

SEQ ID NO: 236850 - RNA, 32 nt, Homo Sapiens
guggggugucuggggcagcugcaguggcuucu

SEQ ID NO: 236851 - RNA, 32 nt, Homo Sapiens
caauacuguauauugauuuaugcuguguacaa

SEQ ID NO: 236852 - RNA, 32 nt, Homo Sapiens
gaaaauugauaaauauuugugccuuccaacuc

SEQ ID NO: 236853 - RNA, 32 nt, Homo Sapiens
gauuacuccaggcuucuggacacacauaccca

SEQ ID NO: 236854 - RNA, 32 nt, Homo Sapiens
cguuucauggacuguuaccaacaaagaaaagu

SEQ ID NO: 236855 - RNA, 32 nt, Homo Sapiens
auuuucagaaauaaauuaaaugcugaaagugc

SEQ ID NO: 236856 - RNA, 32 nt, Homo Sapiens
cgcggguucuccugggcuggccagggcugccc

SEQ ID NO: 236857 - RNA, 32 nt, Homo Sapiens
gagcggccguccucaaggugcugcugcuucuc

SEQ ID NO: 236858 - RNA, 32 nt, Homo Sapiens
acccuuaaaaauguauuuuucuuaacauguua

SEQ ID NO: 236859 - RNA, 32 nt, Homo Sapiens
cucgagucgcccugcccagagcccuggcacca

SEQ ID NO: 236860 - RNA, 31 nt, Homo Sapiens
cugugaacugggcuuaaagugcuguuauuuu

SEQ ID NO: 236861 - RNA, 32 nt, Homo Sapiens
ucucccgauaacuggacacgugucucccacag

SEQ ID NO: 236862 - RNA, 32 nt, Homo Sapiens
cccuaaggcccugcccggggcaggaggaagau

SEQ ID NO: 236863 - RNA, 32 nt, Homo Sapiens
gggguggcggccaggaggaaaggcagaaaggg

SEQ ID NO: 236864 - RNA, 32 nt, Homo Sapiens
gaggccuuguggcuccuccccucgcuccucgc

SEQ ID NO: 236865 - RNA, 32 nt, Homo Sapiens
gucucuggcccagcccagucucuucucagggg

SEQ ID NO: 236866 - RNA, 32 nt, Homo Sapiens
uuagaagaauguucucuuggggcuuaaagaug

SEQ ID NO: 236867 - RNA, 32 nt, Homo Sapiens
uauaaagcguggccgccucccgcggcgcucgg

SEQ ID NO: 236868 - RNA, 32 nt, Homo Sapiens
ucacugugugaaauucccuccucccuccuucc

SEQ ID NO: 236869 - RNA, 32 nt, Homo Sapiens
caggcuccuacucuccuugcucagucugcccc

SEQ ID NO: 236870 - RNA, 32 nt, Homo Sapiens
caggccgcugaugccgcccgcggcgagguggc

SEQ ID NO: 236871 - RNA, 32 nt, Homo Sapiens
uuuaaaucagauaccaaauauuuuuuaggaaa

SEQ ID NO: 236872 - RNA, 32 nt, Homo Sapiens
cuuucuugcucaccucaccaguugcauguucu

SEQ ID NO: 236873 - RNA, 32 nt, Homo Sapiens
cagcacagcagcacucacaucccggcccagac

SEQ ID NO: 236874 - RNA, 32 nt, Homo Sapiens
uucagggaacacacuuucagaaccacugcuuu

SEQ ID NO: 236875 - RNA, 32 nt, Homo Sapiens
acagcaucacccaucccugggaaugccgugga

SEQ ID NO: 236876 - RNA, 32 nt, Homo Sapiens
cugauaacugucagugccugagguugugauug

SEQ ID NO: 236877 - RNA, 32 nt, Homo Sapiens
acaggcaccacauaucccuggggggaggcaag

SEQ ID NO: 236878 - RNA, 32 nt, Homo Sapiens
cagaugaagagcuaaaugaugaucuuuugcag

SEQ ID NO: 236879 - RNA, 32 nt, Homo Sapiens
gagugagaucacaucaguggguucgcgggcau

SEQ ID NO: 236880 - RNA, 32 nt, Homo Sapiens
aauugacauuuucucucuaaaauaugauuuau

SEQ ID NO: 236881 - RNA, 32 nt, Homo Sapiens
auauuguaccgcuaccccuuugaaaggcugaa

SEQ ID NO: 236882 - RNA, 32 nt, Homo Sapiens
ggaaacaagaauaaaaaauuauguauuaugca

SEQ ID NO: 236883 - RNA, 32 nt, Homo Sapiens
ccgccgccgucucugcagcccgcggguaacug

SEQ ID NO: 236884 - RNA, 31 nt, Homo Sapiens
uguauuuucaaugauaggcuguuucuuuuuu

SEQ ID NO: 236885 - RNA, 32 nt, Homo Sapiens
uuaugaaaucagcugguaauuccuccucauca

SEQ ID NO: 236886 - RNA, 32 nt, Homo Sapiens
ggucaaggcgaagcucgcggggggcgacagcg

SEQ ID NO: 236887 - RNA, 32 nt, Homo Sapiens
ugccauuuguuuuccuguuccuguucacuccu

SEQ ID NO: 236888 - RNA, 32 nt, Homo Sapiens
gagggucccagcugcagugugcaugcgggggg

SEQ ID NO: 236889 - RNA, 29 nt, Homo Sapiens
guguggcagauuuagugaaagcuagagau

SEQ ID NO: 236890 - RNA, 32 nt, Homo Sapiens
aguagguagugucaagccagagauucggggca

SEQ ID NO: 236891 - RNA, 32 nt, Homo Sapiens
uucauaaaugucaagcuguggaccaacauaua

SEQ ID NO: 236892 - RNA, 32 nt, Homo Sapiens
aagacugguuuacauucaguacucauccuuau

SEQ ID NO: 236893 - RNA, 32 nt, Homo Sapiens
ccugccggguguuccugggaagaugggcagaa

SEQ ID NO: 236894 - RNA, 32 nt, Homo Sapiens
gaccgcagauucugcagcuggugugggguuca

SEQ ID NO: 236895 - RNA, 32 nt, Homo Sapiens
agugucugggccgcagguguggcacuguggug

SEQ ID NO: 236896 - RNA, 32 nt, Homo Sapiens
aacuugaauuacacuugaauuuuuuaguagag

SEQ ID NO: 236897 - RNA, 31 nt, Homo Sapiens
acggcuccggccgaagcgacggccucugcua

SEQ ID NO: 236898 - RNA, 32 nt, Homo Sapiens
uaaaucccacucaucacccauaguccaggcau

SEQ ID NO: 236899 - RNA, 32 nt, Homo Sapiens
ggugggcagcugaggacacaccccacacccca

SEQ ID NO: 236900 - RNA, 32 nt, Homo Sapiens
cagacuucuguauaguuuauuuagucaaaaug

SEQ ID NO: 236901 - RNA, 32 nt, Homo Sapiens
cccuggugguggccagagcaguaaugcuuguu

SEQ ID NO: 236902 - RNA, 32 nt, Homo Sapiens
augaaauuaaucuauuuuauuaaaauuuaaaa

SEQ ID NO: 236903 - RNA, 32 nt, Homo Sapiens
ugguggaucuuugcuacugaauguguuugaac

SEQ ID NO: 236904 - RNA, 32 nt, Homo Sapiens
cuuauauuuauuauuuugccauguuuauuaaa

SEQ ID NO: 236905 - RNA, 32 nt, Homo Sapiens
uuugucuguccuguuuguucauuuggauguuu

SEQ ID NO: 236906 - RNA, 32 nt, Homo Sapiens
auacuuaaaaauuguaauggaagaaaugcaua

SEQ ID NO: 236907 - RNA, 32 nt, Homo Sapiens
gagagguccugguguuggauagaugccagggc

SEQ ID NO: 236908 - RNA, 32 nt, Homo Sapiens
gcgcugagggaaaggagaagggcagggccgcc

SEQ ID NO: 236909 - RNA, 32 nt, Homo Sapiens
ccaaggugggaggaucaccagagccugggaag

SEQ ID NO: 236910 - RNA, 32 nt, Homo Sapiens
cccuuuagguuccuagugauguggagguuuau

SEQ ID NO: 236911 - RNA, 32 nt, Homo Sapiens
cgcccgggccccgaugguuugagcuugcuucu

SEQ ID NO: 236912 - RNA, 32 nt, Homo Sapiens
ggcugguuugaaucagaaaugcuguuuccaua

SEQ ID NO: 236913 - RNA, 32 nt, Homo Sapiens
gguggccaguauccggccccagucaagacuca

SEQ ID NO: 236914 - RNA, 32 nt, Homo Sapiens
aagaauagggagacaaucuaaaaaauaucuua

SEQ ID NO: 236915 - RNA, 32 nt, Homo Sapiens
ucauuuuauguuuuuucuuaacuguuauauua

SEQ ID NO: 236916 - RNA, 32 nt, Homo Sapiens
agagauacaaacugaagcuagcccuuaagagc

SEQ ID NO: 236917 - RNA, 32 nt, Homo Sapiens
gacagaggauggauuuuuaaaccuguucagag

SEQ ID NO: 236918 - RNA, 32 nt, Homo Sapiens
gaauuuuccagaugauugaauaacagaagucc

SEQ ID NO: 236919 - RNA, 32 nt, Homo Sapiens
cgcuguuggggauaugguuucuugaagcauuu

SEQ ID NO: 236920 - RNA, 32 nt, Homo Sapiens
cuaaugaaaugguguuguugauaaaucuaaaa

SEQ ID NO: 236921 - RNA, 32 nt, Homo Sapiens
ugggaccuggggacccuggugucccugguucg

SEQ ID NO: 236922 - RNA, 32 nt, Homo Sapiens
ugagcucuauuaugaaugugaagccuuccccu

SEQ ID NO: 236923 - RNA, 32 nt, Homo Sapiens
uccuucuugaugcuuugggggcucaauuauuu

SEQ ID NO: 236924 - RNA, 32 nt, Homo Sapiens
ucccauuucuaagggcuucucuucaacucuaa

SEQ ID NO: 236925 - RNA, 32 nt, Homo Sapiens
agcauccaccgccggagccucgccuuccuuuc

SEQ ID NO: 236926 - RNA, 32 nt, Homo Sapiens
aagagucugucaaaaagaaguaccucagcacu

SEQ ID NO: 236927 - RNA, 32 nt, Homo Sapiens
auuucuuuuccacaguuaacaacacagcuguu

SEQ ID NO: 236928 - RNA, 28 nt, Homo Sapiens
ggaacaggggcgaauccgagguggagac

SEQ ID NO: 236929 - RNA, 32 nt, Homo Sapiens
gaacagcagaaagcgggugcuguagaggagca

SEQ ID NO: 236930 - RNA, 32 nt, Homo Sapiens
gguuuggucuggggaccacgggcuggagcagg

SEQ ID NO: 236931 - RNA, 32 nt, Homo Sapiens
cccuucacucccucccaccagcucugcagcca

SEQ ID NO: 236932 - RNA, 32 nt, Homo Sapiens
gggaacggaagccuuccccucccgcccccgau

SEQ ID NO: 236933 - RNA, 32 nt, Homo Sapiens
uuccaucugcgaugaauguaggccacaaacca

SEQ ID NO: 236934 - RNA, 32 nt, Homo Sapiens
aaacugcaggggcaauuuuggagacaauguuu

SEQ ID NO: 236935 - RNA, 32 nt, Homo Sapiens
gaugaucaugauacaguugauaaaauuguugu

SEQ ID NO: 236936 - RNA, 32 nt, Homo Sapiens
acagauaaagauaaauaugugacuauuauugg

SEQ ID NO: 236937 - RNA, 32 nt, Homo Sapiens
uacuucuggaaaaagaaucaaaaacuggaaua

SEQ ID NO: 236938 - RNA, 32 nt, Homo Sapiens
cacauucccccucccugggguaggggcaucau

SEQ ID NO: 236939 - RNA, 32 nt, Homo Sapiens
uaauacauauuacuccacaccuuuuaugaauc

SEQ ID NO: 236940 - RNA, 32 nt, Homo Sapiens
cuggcaaaaaaauuaaaaauaaacaaaaaugg

SEQ ID NO: 236941 - RNA, 32 nt, Homo Sapiens
uauacauaguuaugaacuguaaaauuaaaguc

SEQ ID NO: 236942 - RNA, 32 nt, Homo Sapiens
uucagcuugagaucuuuuuuuauucauuuccu

SEQ ID NO: 236943 - RNA, 32 nt, Homo Sapiens
aguguuguuuugugguaucauugucuuuccug

SEQ ID NO: 236944 - RNA, 32 nt, Homo Sapiens
cccaggccggagcccagauaccggcgggcugu

SEQ ID NO: 236945 - RNA, 32 nt, Homo Sapiens
cauuugauccucacaacagccaugucuuccuc

SEQ ID NO: 236946 - RNA, 32 nt, Homo Sapiens
uacccuacaccugggagcaguaucugccacug

SEQ ID NO: 236947 - RNA, 32 nt, Homo Sapiens
aacugcaugagcagcugaauguuccugugcag

SEQ ID NO: 236948 - RNA, 32 nt, Homo Sapiens
gcaaaacuagcuacagaagagaagcaaggcaa

SEQ ID NO: 236949 - RNA, 32 nt, Homo Sapiens
cccgacugccucaacucugucuccaggucuau

SEQ ID NO: 236950 - RNA, 32 nt, Homo Sapiens
ugugguccuugccccaccccagccucuuccua

SEQ ID NO: 236951 - RNA, 32 nt, Homo Sapiens
gccuuuauucuacuccauccacaucuaaacuu

SEQ ID NO: 236952 - RNA, 32 nt, Homo Sapiens
uucuuucaggauuuuucuucucacagcuccaa

SEQ ID NO: 236953 - RNA, 32 nt, Homo Sapiens
acauguaagugaacaaugcauuacuucuaccu

SEQ ID NO: 236954 - RNA, 32 nt, Homo Sapiens
gcugagacuggaacucuccucuucuuacucuc

SEQ ID NO: 236955 - RNA, 32 nt, Homo Sapiens
cacaauuguaauuucccaaauuuuaaaauauc

SEQ ID NO: 236956 - RNA, 32 nt, Homo Sapiens
gucgacccacgcguccggagcgguguagagcg

SEQ ID NO: 236957 - RNA, 32 nt, Homo Sapiens
caggguggccccagggcuucuaaaaccccacc

SEQ ID NO: 236958 - RNA, 32 nt, Homo Sapiens
aauguacuuguuuacauaguuaugugaauaga

SEQ ID NO: 236959 - RNA, 32 nt, Homo Sapiens
acucuccgccccacgccaaucccaaaggcaug

SEQ ID NO: 236960 - RNA, 32 nt, Homo Sapiens
augaggauaccagagaggcauuggucaaaaaa

SEQ ID NO: 236961 - RNA, 32 nt, Homo Sapiens
aguggcggcaucugcaaauuaaggggacagag

SEQ ID NO: 236962 - RNA, 32 nt, Homo Sapiens
aguacuguaguacugaauauuccuuuaaagga

SEQ ID NO: 236963 - RNA, 32 nt, Homo Sapiens
ugugauuugucaaucaaaaauaguaaauauuu

SEQ ID NO: 236964 - RNA, 32 nt, Homo Sapiens
uguagaauaaauaagagcuuugaaagcuguaa

SEQ ID NO: 236965 - RNA, 32 nt, Homo Sapiens
aaccccaguuuaggggaagguagcacagggca

SEQ ID NO: 236966 - RNA, 32 nt, Homo Sapiens
gccagauuagcggacggcugcccgcgguugca

SEQ ID NO: 236967 - RNA, 32 nt, Homo Sapiens
gcuggcuuucccugucuauugccuuuuccugu

SEQ ID NO: 236968 - RNA, 32 nt, Homo Sapiens
guuaaguucauucagacauaauuauauaaaaa

SEQ ID NO: 236969 - RNA, 27 nt, Homo Sapiens
ucauggccuugagaccugaggacccca

SEQ ID NO: 236970 - RNA, 32 nt, Homo Sapiens
uauauauuuuauuuuucauacauguuugaagu

SEQ ID NO: 236971 - RNA, 32 nt, Homo Sapiens
uccaugcuuuugcuguuuucuuuacucuuguc

SEQ ID NO: 236972 - RNA, 32 nt, Homo Sapiens
uagugacuaggauagaauuugauccccuaacu

SEQ ID NO: 236973 - RNA, 32 nt, Homo Sapiens
aucugugaauggaaagauuuuuuaagauuuug

SEQ ID NO: 236974 - RNA, 31 nt, Homo Sapiens
uggaaccggucacaggaacgcacagaucaug

SEQ ID NO: 236975 - RNA, 32 nt, Homo Sapiens
gagacgagagggugggaggucccggaguaacu

SEQ ID NO: 236976 - RNA, 32 nt, Homo Sapiens
aaaguaacacaaguuugccaagcggcauccag

SEQ ID NO: 236977 - RNA, 32 nt, Homo Sapiens
cucggcucaccucuuccuccaagccccgcccc

SEQ ID NO: 236978 - RNA, 32 nt, Homo Sapiens
ucagucuccucuguccucucccaggcaagagg

SEQ ID NO: 236979 - RNA, 32 nt, Homo Sapiens
gucgagggcgaccuggacgaggaccugccuaa

SEQ ID NO: 236980 - RNA, 32 nt, Homo Sapiens
ggaggcccugccgggaacccaggcugcagccc

SEQ ID NO: 236981 - RNA, 32 nt, Homo Sapiens
cacuggguauugagauuggcgaggggagaggc

SEQ ID NO: 236982 - RNA, 32 nt, Homo Sapiens
aaagaaacaaaauaaaguuuguacuuuguuuu

SEQ ID NO: 236983 - RNA, 32 nt, Homo Sapiens
agccagcauccugagccuccucaugcccugga

SEQ ID NO: 236984 - RNA, 32 nt, Homo Sapiens
aauaaaccaaaauuauuguuauuguguuaagg

SEQ ID NO: 236985 - RNA, 32 nt, Homo Sapiens
gaacuuguuugauuaagaauaaaggaggagga

SEQ ID NO: 236986 - RNA, 32 nt, Homo Sapiens
cccuccucugucaucacagcgccagggcagcu

SEQ ID NO: 236987 - RNA, 32 nt, Homo Sapiens
uucccuuaauuuccuuuccuaagcuuauguaa

SEQ ID NO: 236988 - RNA, 32 nt, Homo Sapiens
aguuuuccaggauguguguaaacuacacacau

SEQ ID NO: 236989 - RNA, 32 nt, Homo Sapiens
guauaguuuucuuuuuaucuuauuuuuacucg

SEQ ID NO: 236990 - RNA, 32 nt, Homo Sapiens
cauuugcuagugggacuacacauggcuuuaau

SEQ ID NO: 236991 - RNA, 32 nt, Homo Sapiens
aacccuuuuaucaucuccuccacuguuuccuu

SEQ ID NO: 236992 - RNA, 32 nt, Homo Sapiens
cuggacgcacccucacugucagggucccuggg

SEQ ID NO: 236993 - RNA, 29 nt, Homo Sapiens
aacuaugcauuacggagcagcaacccaca

SEQ ID NO: 236994 - RNA, 32 nt, Homo Sapiens
ggcauuguuuuuuccuuuuuuauuuuuuguau

SEQ ID NO: 236995 - RNA, 32 nt, Homo Sapiens
accguaguguuuaugucuuguuucuaaaucuc

SEQ ID NO: 236996 - RNA, 32 nt, Homo Sapiens
uagggcugggcagcugggagacaggcucaugg

SEQ ID NO: 236997 - RNA, 32 nt, Homo Sapiens
uugcuauguaaucgaauuuaaauaaugggcaa

SEQ ID NO: 236998 - RNA, 32 nt, Homo Sapiens
cagucgcgccucugccuucucaucccugcgca

SEQ ID NO: 236999 - RNA, 32 nt, Homo Sapiens
auucggggaauguuaaucugaccaucaccagu

SEQ ID NO: 237000 - RNA, 32 nt, Homo Sapiens
caacacgugucugcaguucuuuggcuuguguu

SEQ ID NO: 237001 - RNA, 32 nt, Homo Sapiens
auggugaaaauauuuaucuggaauuuauguug

SEQ ID NO: 237002 - RNA, 32 nt, Homo Sapiens
cugcgccgccgggaugcuggggagagaagccg

SEQ ID NO: 237003 - RNA, 32 nt, Homo Sapiens
aacugcagcaacccuguagggucuguuucgag

SEQ ID NO: 237004 - RNA, 32 nt, Homo Sapiens
aaauggcuuccucuuuccuuuuuuggaccauc

SEQ ID NO: 237005 - RNA, 32 nt, Homo Sapiens
gagugcagaggcggcucugguuccuccagcca

SEQ ID NO: 237006 - RNA, 32 nt, Homo Sapiens
guggaagcugaauaaauuagcuuuaaauacau

SEQ ID NO: 237007 - RNA, 32 nt, Homo Sapiens
gauuugaaauauuuaaaguggauacaaaacua

SEQ ID NO: 237008 - RNA, 32 nt, Homo Sapiens
aaagaaggcuggauucugagguccugggaagg

SEQ ID NO: 237009 - RNA, 32 nt, Homo Sapiens
cugcagcgagagcggccggcggugcaagcggc

SEQ ID NO: 237010 - RNA, 32 nt, Homo Sapiens
gcgcgcuccgcggggugcugaucugccucuuc

SEQ ID NO: 237011 - RNA, 32 nt, Homo Sapiens
gcggcggccccaaccggccggaccucagcaau

SEQ ID NO: 237012 - RNA, 32 nt, Homo Sapiens
gaccucaggugauccgcccaccucggccuccc

SEQ ID NO: 237013 - RNA, 27 nt, Homo Sapiens
guccucagugcauuggacgcgcugcuc

SEQ ID NO: 237014 - RNA, 32 nt, Homo Sapiens
ucaagugauccucccaccccagccuccugagu

SEQ ID NO: 237015 - RNA, 32 nt, Homo Sapiens
ugagggacccugccccgccccuccccccaggc

SEQ ID NO: 237016 - RNA, 32 nt, Homo Sapiens
gcaacaguaauaaaguuaaacaauuaaaaaga

SEQ ID NO: 237017 - RNA, 32 nt, Homo Sapiens
gcucuggggggaggagagaagguagagcuguu

SEQ ID NO: 237018 - RNA, 32 nt, Homo Sapiens
ccaauggaucaucaaaccacuccacaagcaca

SEQ ID NO: 237019 - RNA, 32 nt, Homo Sapiens
aauagugaauuccuuaaaauuuguucuaugua

SEQ ID NO: 237020 - RNA, 32 nt, Homo Sapiens
gcauaaugaugaugggaauugugugauguuua

SEQ ID NO: 237021 - RNA, 32 nt, Homo Sapiens
gcuggacaccuacagcagcacgcaugucccuc

SEQ ID NO: 237022 - RNA, 32 nt, Homo Sapiens
aggaaaaaucauaaccacccuagcuuuauauu

SEQ ID NO: 237023 - RNA, 32 nt, Homo Sapiens
uauuuggauggauuuuuaaauucuuuccugau

SEQ ID NO: 237024 - RNA, 32 nt, Homo Sapiens
aaagggccgggcgaguguuacucgcggucauc

SEQ ID NO: 237025 - RNA, 32 nt, Homo Sapiens
agagcggguguggauuugucuugacgguaauu

SEQ ID NO: 237026 - RNA, 32 nt, Homo Sapiens
uauacuauuuaguuuuuguaauuuauuuucga

SEQ ID NO: 237027 - RNA, 32 nt, Homo Sapiens
ccacugugggaugacagccagaggaauaagaa

SEQ ID NO: 237028 - RNA, 32 nt, Homo Sapiens
agcuuauaauacaacuaaagaaagaaaacaug

SEQ ID NO: 237029 - RNA, 32 nt, Homo Sapiens
aucgucccauccccacaucccgugcacccccc

SEQ ID NO: 237030 - RNA, 32 nt, Homo Sapiens
cugugugcuugaacuuugaauuccaugaauua

SEQ ID NO: 237031 - RNA, 32 nt, Homo Sapiens
ucuuuuucaaagccaugguuuuacaaaaacag

SEQ ID NO: 237032 - RNA, 32 nt, Homo Sapiens
gacuggcuccagcugauccuuaucaaggcagc

SEQ ID NO: 237033 - RNA, 32 nt, Homo Sapiens
auuuuuaauauagucuuaucuaccacacaucc

SEQ ID NO: 237034 - RNA, 32 nt, Homo Sapiens
agggaucacaugcaguggucuaaggaagaaga

SEQ ID NO: 237035 - RNA, 32 nt, Homo Sapiens
ugugcgagcgugccgggagaaugccacggggc

SEQ ID NO: 237036 - RNA, 32 nt, Homo Sapiens
cacauuuugcccaguugaaaggucuccuggca

SEQ ID NO: 237037 - RNA, 32 nt, Homo Sapiens
uauaaagaauucuguuucugccaccagcaguu

SEQ ID NO: 237038 - RNA, 32 nt, Homo Sapiens
ugagguuucaaacuuuccuucuggagaaugcc

SEQ ID NO: 237039 - RNA, 32 nt, Homo Sapiens
uaugagcuuuuccauuuuaacaagggaugaug

SEQ ID NO: 237040 - RNA, 32 nt, Homo Sapiens
uugcaucagguggcaaaauucauucuaugugc

SEQ ID NO: 237041 - RNA, 32 nt, Homo Sapiens
ugguaaaccucugaugugauugagaaagaaaa

SEQ ID NO: 237042 - RNA, 32 nt, Homo Sapiens
agaaccuucuuacugcaugauaacaaagcagc

SEQ ID NO: 237043 - RNA, 32 nt, Homo Sapiens
cuccuagauucauucucugugcucagaccauc

SEQ ID NO: 237044 - RNA, 32 nt, Homo Sapiens
uugaauguucuacuugcuaauuuugcaaguug

SEQ ID NO: 237045 - RNA, 32 nt, Homo Sapiens
aaagaucugguauuaucuaccuuuacagaacc

SEQ ID NO: 237046 - RNA, 32 nt, Homo Sapiens
gcacuuaauuuucacuggcucccaagugguca

SEQ ID NO: 237047 - RNA, 32 nt, Homo Sapiens
agggagggguguggcucccaccccuuccaguu

SEQ ID NO: 237048 - RNA, 32 nt, Homo Sapiens
accuagccaacauggugaaaccccgucucuuc

SEQ ID NO: 237049 - RNA, 32 nt, Homo Sapiens
cucauuuggauauaaaucuuacccuucaaugu

SEQ ID NO: 237050 - RNA, 30 nt, Homo Sapiens
ccagcacauuguuagacccaucuuaauuaa

SEQ ID NO: 237051 - RNA, 32 nt, Homo Sapiens
acccucugcuucccuccuccucgugauccugg

SEQ ID NO: 237052 - RNA, 32 nt, Homo Sapiens
gcuuuuacuuuuucuuuuuuuuaaaauuuuua

SEQ ID NO: 237053 - RNA, 32 nt, Homo Sapiens
cagagaagggcagagggaaaggggacccaguu

SEQ ID NO: 237054 - RNA, 32 nt, Homo Sapiens
cgcuuauguauuauguguaaucauggcacagu

SEQ ID NO: 237055 - RNA, 32 nt, Homo Sapiens
uaaugccuccauuuaccaacuugcucuuaaaa

SEQ ID NO: 237056 - RNA, 32 nt, Homo Sapiens
gugucgcgcggcgcgguggccucggucgguac

SEQ ID NO: 237057 - RNA, 32 nt, Homo Sapiens
uauccccaacuuuaaaggugugagaguauuag

SEQ ID NO: 237058 - RNA, 32 nt, Homo Sapiens
agcgagauggagguacagugggugugggccug

SEQ ID NO: 237059 - RNA, 32 nt, Homo Sapiens
gaaaaaacccucaccuuacucugaaagaagca

SEQ ID NO: 237060 - RNA, 32 nt, Homo Sapiens
auuuucuucugagacucccggagucuucucga

SEQ ID NO: 237061 - RNA, 32 nt, Homo Sapiens
cccuugggcuccucagagcuaguggggaagga

SEQ ID NO: 237062 - RNA, 32 nt, Homo Sapiens
aaacaugaggagaaacaaagcaaacucuauuu

SEQ ID NO: 237063 - RNA, 32 nt, Homo Sapiens
uccuauccugucauucaaucauucuuccucca

SEQ ID NO: 237064 - RNA, 32 nt, Homo Sapiens
agauucuuuccacaggagccagcauacuuccu

SEQ ID NO: 237065 - RNA, 32 nt, Homo Sapiens
gguacugauaucaaaaaauguuuauguuuuua

SEQ ID NO: 237066 - RNA, 32 nt, Homo Sapiens
gggguauuuuaggcagggauuugaggagcagc

SEQ ID NO: 237067 - RNA, 32 nt, Homo Sapiens
agcagcagcugcggcggcggcggcguuugagu

SEQ ID NO: 237068 - RNA, 32 nt, Homo Sapiens
gugccaccgagaagcgccggccucggggcugu

SEQ ID NO: 237069 - RNA, 32 nt, Homo Sapiens
uuugauaaaaacagguaauguugaugaacaag

SEQ ID NO: 237070 - RNA, 29 nt, Homo Sapiens
cuucugucauaugaauguugagcaaaacu

SEQ ID NO: 237071 - RNA, 32 nt, Homo Sapiens
uggcucugccuucuucaacauguuccuguaca

SEQ ID NO: 237072 - RNA, 32 nt, Homo Sapiens
ggccuugaaaauaacacuagggcauaacaauu

SEQ ID NO: 237073 - RNA, 32 nt, Homo Sapiens
acuauugcacuccagccugggcgacagggcaa

SEQ ID NO: 237074 - RNA, 32 nt, Homo Sapiens
cagcuugaugugaacgaaugggauaggauuuu

SEQ ID NO: 237075 - RNA, 32 nt, Homo Sapiens
ugacauucuuauaauaauauuaaacacaugau

SEQ ID NO: 237076 - RNA, 32 nt, Homo Sapiens
ucccgcgcugggcgcgcugaggcggcccccga

SEQ ID NO: 237077 - RNA, 32 nt, Homo Sapiens
ucuggcuuccucuccuucugguccuacaucau

SEQ ID NO: 237078 - RNA, 32 nt, Homo Sapiens
gcccuuuugugugacaucaaguaguucauuuc

SEQ ID NO: 237079 - RNA, 32 nt, Homo Sapiens
auguagcauucaugguaaacuuuuaagugcua

SEQ ID NO: 237080 - RNA, 32 nt, Homo Sapiens
ucaccuuuuaaaaaauaccuauuuugcaccua

SEQ ID NO: 237081 - RNA, 32 nt, Homo Sapiens
auuugcuauucaaaauuuuguaaauaugcaaa

SEQ ID NO: 237082 - RNA, 32 nt, Homo Sapiens
auugcuauaaaacuuuauucucugcuugauaa

SEQ ID NO: 237083 - RNA, 32 nt, Homo Sapiens
ugguagugaugcuggcuguucggauaugccaa

SEQ ID NO: 237084 - RNA, 32 nt, Homo Sapiens
ugcaaagagauugcuuuguccugaauuucacu

SEQ ID NO: 237085 - RNA, 32 nt, Homo Sapiens
cacuuccccagccagaaccggcgugcagcuag

SEQ ID NO: 237086 - RNA, 32 nt, Homo Sapiens
cucugccaggcaccccacuuucuccuaguaac

SEQ ID NO: 237087 - RNA, 32 nt, Homo Sapiens
ccaaguugauguucuuuccuggcaaaggaguu

SEQ ID NO: 237088 - RNA, 32 nt, Homo Sapiens
gcuggggcuaagggcugcucaguuuccuucag

SEQ ID NO: 237089 - RNA, 32 nt, Homo Sapiens
agguguggcuggaagcacugaaccuaccucau

SEQ ID NO: 237090 - RNA, 32 nt, Homo Sapiens
ggcuggucuuuaacuccugaccucaagugauc

SEQ ID NO: 237091 - RNA, 32 nt, Homo Sapiens
cugucccuuugucuguguaagaacgauauaaa

SEQ ID NO: 237092 - RNA, 32 nt, Homo Sapiens
aguugauaucaccucucaaaagcaucaccucu

SEQ ID NO: 237093 - RNA, 27 nt, Homo Sapiens
ucuuuccagggauucugguaaaggugg

SEQ ID NO: 237094 - RNA, 32 nt, Homo Sapiens
cacggcgacuacuccgagccuggaaaauggcc

SEQ ID NO: 237095 - RNA, 32 nt, Homo Sapiens
gugacagaccucagccuggaagacauuaucug

SEQ ID NO: 237096 - RNA, 32 nt, Homo Sapiens
gaugggaaagucuucacugccuugggcccagc

SEQ ID NO: 237097 - RNA, 32 nt, Homo Sapiens
ccuccgugggggauggggaggggucgugaccu

SEQ ID NO: 237098 - RNA, 32 nt, Homo Sapiens
uuuucaacugguuuuuaaauauucaauauugg

SEQ ID NO: 237099 - RNA, 32 nt, Homo Sapiens
cuguuaaauaucacaucacaauaaaaaucaaa

SEQ ID NO: 237100 - RNA, 27 nt, Homo Sapiens
caacugugcuucuucagcacuaauauu

SEQ ID NO: 237101 - RNA, 32 nt, Homo Sapiens
uuauuuccaagaagcugaaucuuugggacuga

SEQ ID NO: 237102 - RNA, 32 nt, Homo Sapiens
uaauauuugugaggaaaagugaaacaagugau

SEQ ID NO: 237103 - RNA, 28 nt, Homo Sapiens
auacugaaagauuaaaauggggagguug

SEQ ID NO: 237104 - RNA, 32 nt, Homo Sapiens
ugugaucuuggcucacaggggacgaugucaag

SEQ ID NO: 237105 - RNA, 32 nt, Homo Sapiens
uuaaaauuuuguguuucuuaagaucaaaucau

SEQ ID NO: 237106 - RNA, 32 nt, Homo Sapiens
uuguuguuguuuccuuuugagauggagucuug

SEQ ID NO: 237107 - RNA, 32 nt, Homo Sapiens
ugacgacagugacuuuaccauacccaccaucu

SEQ ID NO: 237108 - RNA, 32 nt, Homo Sapiens
ggcugugcuucuuugggggugaagagauuggg

SEQ ID NO: 237109 - RNA, 32 nt, Homo Sapiens
gcaguuggaacucuuuccucuccccagccccc

SEQ ID NO: 237110 - RNA, 32 nt, Homo Sapiens
auuucuucaaccaauuuacuuuaggguccuuu

SEQ ID NO: 237111 - RNA, 32 nt, Homo Sapiens
auaaaguauuucaagcauauuaaccaaagagu

SEQ ID NO: 237112 - RNA, 32 nt, Homo Sapiens
gggcggccgggcccggcauggagaagcgcgcg

SEQ ID NO: 237113 - RNA, 32 nt, Homo Sapiens
caguugaaugguuggagauugcuggcgaugug

SEQ ID NO: 237114 - RNA, 32 nt, Homo Sapiens
gcagccugccuugcccacuccugcucugcucg

SEQ ID NO: 237115 - RNA, 32 nt, Homo Sapiens
agcuugaagaagaucuaggacacaguuuguug

SEQ ID NO: 237116 - RNA, 32 nt, Homo Sapiens
caacucugugacacuggucauuauucuacugu

SEQ ID NO: 237117 - RNA, 32 nt, Homo Sapiens
ggccgggcgcgguggcucacgcuuguaauucc

SEQ ID NO: 237118 - RNA, 32 nt, Homo Sapiens
guuugagaagcacuguacuaagauuacugugu

SEQ ID NO: 237119 - RNA, 32 nt, Homo Sapiens
caccugacuuuggagacgaugcuuuagguaaa

SEQ ID NO: 237120 - RNA, 32 nt, Homo Sapiens
gaugucaccauguuuuccaggcuggucucgag

SEQ ID NO: 237121 - RNA, 32 nt, Homo Sapiens
aggucccaggacgcgccgcucccucaugcugc

SEQ ID NO: 237122 - RNA, 32 nt, Homo Sapiens
agccugccccaccaccaagaugauccugagcu

SEQ ID NO: 237123 - RNA, 32 nt, Homo Sapiens
uaccguggcagcgugucccagcccucaacccc

SEQ ID NO: 237124 - RNA, 32 nt, Homo Sapiens
cuaacagaugcuuucaaaguugugaaaauucc

SEQ ID NO: 237125 - RNA, 32 nt, Homo Sapiens
cugcuggcucagugcuggcugaacggggggua

SEQ ID NO: 237126 - RNA, 28 nt, Homo Sapiens
gugagggucugcaguccgagguggccuu

SEQ ID NO: 237127 - RNA, 32 nt, Homo Sapiens
auucguauccagcucuuuauuacauagcucug

SEQ ID NO: 237128 - RNA, 32 nt, Homo Sapiens
uuauguaaauaauaaacuaauuguggcuugua

SEQ ID NO: 237129 - RNA, 32 nt, Homo Sapiens
cuggaaaguuccaagugaggacauggaagagg

SEQ ID NO: 237130 - RNA, 32 nt, Homo Sapiens
gaggcaggcuuccuauggauguuggaguaccu

SEQ ID NO: 237131 - RNA, 32 nt, Homo Sapiens
guuuuuguucuuuuuuccuggaucuacccuca

SEQ ID NO: 237132 - RNA, 32 nt, Homo Sapiens
aagcggcugggcucuuggacaccugguucuca

SEQ ID NO: 237133 - RNA, 32 nt, Homo Sapiens
aaauguaauuuauuuuugauaacggcucuuaa

SEQ ID NO: 237134 - RNA, 32 nt, Homo Sapiens
ggcucguucuauuuuuguucaaaucauuugaa

SEQ ID NO: 237135 - RNA, 32 nt, Homo Sapiens
gacaagaagcaacaacucuguugaucagaacc

SEQ ID NO: 237136 - RNA, 31 nt, Homo Sapiens
uuuaucagagcuguuuuuaaugauguuauuc

SEQ ID NO: 237137 - RNA, 32 nt, Homo Sapiens
agcgagcaucauucggcuguuaccaaaacaaa

SEQ ID NO: 237138 - RNA, 32 nt, Homo Sapiens
acugacccacucaagaaagucaauugcaggcu

SEQ ID NO: 237139 - RNA, 32 nt, Homo Sapiens
uaaccugccacgggagggggcccccaaacuuu

SEQ ID NO: 237140 - RNA, 32 nt, Homo Sapiens
aggagaccuggggccuggccaggccaggguuu

SEQ ID NO: 237141 - RNA, 32 nt, Homo Sapiens
ucccguugcaggucuggaucuucuucacaacc

SEQ ID NO: 237142 - RNA, 32 nt, Homo Sapiens
ugccuagucucacaugucccugucccucucgc

SEQ ID NO: 237143 - RNA, 32 nt, Homo Sapiens
gcuggaucauaugguaauuuuauuuuuaguuu

SEQ ID NO: 237144 - RNA, 32 nt, Homo Sapiens
gcauuauuuccuuauccuucugcaucuccucc

SEQ ID NO: 237145 - RNA, 32 nt, Homo Sapiens
ugaagauugguguggagcuuucugccuuguag

SEQ ID NO: 237146 - RNA, 32 nt, Homo Sapiens
aauguguguugcaaauaccuucuggcuugugg

SEQ ID NO: 237147 - RNA, 32 nt, Homo Sapiens
cauaaaggacaaaaagugaaauacuuuauaca

SEQ ID NO: 237148 - RNA, 32 nt, Homo Sapiens
auugcagguugggagaggugggaaauagcagu

SEQ ID NO: 237149 - RNA, 28 nt, Homo Sapiens
ucgacggcgcggccgcgaggccgccaug

SEQ ID NO: 237150 - RNA, 31 nt, Homo Sapiens
gucgggauggcuaaaggugaccccaagaaac

SEQ ID NO: 237151 - RNA, 32 nt, Homo Sapiens
cauaguccccaucucuucuccuuuguaccugu

SEQ ID NO: 237152 - RNA, 32 nt, Homo Sapiens
ggaagacagagcaggcuuugugagagaggacc

SEQ ID NO: 237153 - RNA, 32 nt, Homo Sapiens
cugccucucccucugccucccucaacuugauc

SEQ ID NO: 237154 - RNA, 30 nt, Homo Sapiens
ccacccaguggcuccaccgcccugauggau

SEQ ID NO: 237155 - RNA, 32 nt, Homo Sapiens
gaauaaaugacuguaauguacauccuggcgcc

SEQ ID NO: 237156 - RNA, 32 nt, Homo Sapiens
ggugagaggugauuggaucaugggggcagacu

SEQ ID NO: 237157 - RNA, 32 nt, Homo Sapiens
ucaggcucuccauucaauuucaggcuccccag

SEQ ID NO: 237158 - RNA, 32 nt, Homo Sapiens
guauauacaggguggggggagugggcgguucu

SEQ ID NO: 237159 - RNA, 32 nt, Homo Sapiens
uuggauaaucccaauaguuuacuggugaacac

SEQ ID NO: 237160 - RNA, 32 nt, Homo Sapiens
ccuacagaugaagaagcaagacaguaccuuua

SEQ ID NO: 237161 - RNA, 32 nt, Homo Sapiens
cuauguuauuuuuauuuuguaugaauacauua

SEQ ID NO: 237162 - RNA, 32 nt, Homo Sapiens
uggggagauccgaggcuaugagcuggcacacc

SEQ ID NO: 237163 - RNA, 32 nt, Homo Sapiens
cgcggccacccgcuccucccgcuccggucccg

SEQ ID NO: 237164 - RNA, 32 nt, Homo Sapiens
cugaugcccagcuguuugcauccugcacagcu

SEQ ID NO: 237165 - RNA, 32 nt, Homo Sapiens
uagguuucuuugcauguacccuuucauucugc

SEQ ID NO: 237166 - RNA, 30 nt, Homo Sapiens
gaccuaccacuugaaaccauuagugagcug

SEQ ID NO: 237167 - RNA, 32 nt, Homo Sapiens
ucuguggaaauuucacauccaucggcaaguuc

SEQ ID NO: 237168 - RNA, 32 nt, Homo Sapiens
ccagcggcuacaggagucauggccgguucaac

SEQ ID NO: 237169 - RNA, 32 nt, Homo Sapiens
uauaaacuaaucuuugcuuguuuucuacucug

SEQ ID NO: 237170 - RNA, 32 nt, Homo Sapiens
gugguuagguggccagaauggauuuguggcca

SEQ ID NO: 237171 - RNA, 27 nt, Homo Sapiens
augggccauuaaucgugcuguaaaacg

SEQ ID NO: 237172 - RNA, 32 nt, Homo Sapiens
cagcaggaagcaguuaagcggucgucggccaa

SEQ ID NO: 237173 - RNA, 32 nt, Homo Sapiens
uuuuuuguacuggacuuuaccuugauauaugu

SEQ ID NO: 237174 - RNA, 32 nt, Homo Sapiens
uauaacacaguuuucccuuccauauuccucuc

SEQ ID NO: 237175 - RNA, 32 nt, Homo Sapiens
auuuuuuuuucccacuuuuucuugaaagauua

SEQ ID NO: 237176 - RNA, 32 nt, Homo Sapiens
ggaggggaauucucacuggggcgaaggagugg

SEQ ID NO: 237177 - RNA, 31 nt, Homo Sapiens
guugguagggagaaaaaacgcuauugcuuug

SEQ ID NO: 237178 - RNA, 32 nt, Homo Sapiens
auaauaaagaagguauugaaaaaacuaaaaaa

SEQ ID NO: 237179 - RNA, 32 nt, Homo Sapiens
uucuguucuuugugagaaauuuuacauauauu

SEQ ID NO: 237180 - RNA, 32 nt, Homo Sapiens
guuagacuuaacauucccuaagggcagguuug

SEQ ID NO: 237181 - RNA, 32 nt, Homo Sapiens
gugugaaugugcauaguucuuaaaguccaaca

SEQ ID NO: 237182 - RNA, 32 nt, Homo Sapiens
uacaaggaaggaggaguucuuacaucugcuuu

SEQ ID NO: 237183 - RNA, 32 nt, Homo Sapiens
gggucagacagucauuugcugcugcugcugcu

SEQ ID NO: 237184 - RNA, 32 nt, Homo Sapiens
uauauguaagugguuuuuauauuuucacauuu

SEQ ID NO: 237185 - RNA, 32 nt, Homo Sapiens
uggcccgggaaguggcucuugugugugcccac

SEQ ID NO: 237186 - RNA, 30 nt, Homo Sapiens
gaaagagaccauagcuauucuuggaugaga

SEQ ID NO: 237187 - RNA, 32 nt, Homo Sapiens
aauuuccugugcuaauuaagggaaauucuguu

SEQ ID NO: 237188 - RNA, 32 nt, Homo Sapiens
ugugaauaugcaaugggagucccaggcuguac

SEQ ID NO: 237189 - RNA, 32 nt, Homo Sapiens
cuuuuccccucuaaaccuguuucugagagugg

SEQ ID NO: 237190 - RNA, 32 nt, Homo Sapiens
cgaagaggccgcguccgccuucaguuguggcc

SEQ ID NO: 237191 - RNA, 32 nt, Homo Sapiens
ccugccauuauguaauuugguuucauuuuauu

SEQ ID NO: 237192 - RNA, 32 nt, Homo Sapiens
cgcgccccgggcggggauggggcggccagacu

SEQ ID NO: 237193 - RNA, 32 nt, Homo Sapiens
uuuuguggaggggggacggagaggaacaagga

SEQ ID NO: 237194 - RNA, 32 nt, Homo Sapiens
uuccucauugcuuuuacccagucugcuguuuu

SEQ ID NO: 237195 - RNA, 27 nt, Homo Sapiens
uggaguuccugcuucagccucccuagu

SEQ ID NO: 237196 - RNA, 32 nt, Homo Sapiens
cuggacauuugaggagccgucuuucuuggccu

SEQ ID NO: 237197 - RNA, 32 nt, Homo Sapiens
gagcugcuggagacagagucagagcagucaag

SEQ ID NO: 237198 - RNA, 32 nt, Homo Sapiens
gagcgccguggcgccugguguucggcgcgagc

SEQ ID NO: 237199 - RNA, 30 nt, Homo Sapiens
ucagugggcaggcgggacgcugcuccggga

SEQ ID NO: 237200 - RNA, 32 nt, Homo Sapiens
aggcccuuguccugauugucgcagcaggcccu

SEQ ID NO: 237201 - RNA, 32 nt, Homo Sapiens
guuggaaaugucagguauuugaacauuucauu

SEQ ID NO: 237202 - RNA, 32 nt, Homo Sapiens
cacggagccugccugccucugccguccucagu

SEQ ID NO: 237203 - RNA, 32 nt, Homo Sapiens
cuuuaaaaagaaacaguaaaaauacuaauaga

SEQ ID NO: 237204 - RNA, 29 nt, Homo Sapiens
uauauaugagacuuauauuuucauuaacu

SEQ ID NO: 237205 - RNA, 32 nt, Homo Sapiens
uaguucuggugcccaaaaucuuugguagaugg

SEQ ID NO: 237206 - RNA, 32 nt, Homo Sapiens
uuuaauugccuuuugucugaguucaaagaggu

SEQ ID NO: 237207 - RNA, 32 nt, Homo Sapiens
ugccuucuaaucuuggccuccaucauuucaga

SEQ ID NO: 237208 - RNA, 32 nt, Homo Sapiens
cuuggcaaaaauacuccauuugggaacucacu

SEQ ID NO: 237209 - RNA, 32 nt, Homo Sapiens
ucagggcucugcaacaaugauagcagaagcug

SEQ ID NO: 237210 - RNA, 32 nt, Homo Sapiens
guauaagcuacuuagaacuuugaagggcauua

SEQ ID NO: 237211 - RNA, 32 nt, Homo Sapiens
uaguaggugugauaugcaaccugguauacaga

SEQ ID NO: 237212 - RNA, 32 nt, Homo Sapiens
gggaagggccgcgccugacgucuggccgcagg

SEQ ID NO: 237213 - RNA, 32 nt, Homo Sapiens
acaaaaaugugacaauaugcuuugaaaacaua

SEQ ID NO: 237214 - RNA, 29 nt, Homo Sapiens
ggaacaugcuguauguaauagaagaaaga

SEQ ID NO: 237215 - RNA, 32 nt, Homo Sapiens
cagcugguggccggcccuccccagcccagagc

SEQ ID NO: 237216 - RNA, 32 nt, Homo Sapiens
guguuuguaaucgccaagcaccagcuauaggu

SEQ ID NO: 237217 - RNA, 32 nt, Homo Sapiens
uggaaaaauauuaaauuccaauagagggacau

SEQ ID NO: 237218 - RNA, 32 nt, Homo Sapiens
cagggccagcagcagcacaaccuugccagagc

SEQ ID NO: 237219 - RNA, 32 nt, Homo Sapiens
agaggaauuuaaaagaggacaucagaagagcu

SEQ ID NO: 237220 - RNA, 32 nt, Homo Sapiens
uagggaagggaaggguggaggcuuggaucuga

SEQ ID NO: 237221 - RNA, 32 nt, Homo Sapiens
ccuuggugcugccccagaucuguccagcaggg

SEQ ID NO: 237222 - RNA, 32 nt, Homo Sapiens
ucuuuacagauagcuauagacaucauuuuagg

SEQ ID NO: 237223 - RNA, 32 nt, Homo Sapiens
uccgauuccccucuaucagucacugccaguua

SEQ ID NO: 237224 - RNA, 32 nt, Homo Sapiens
acucugagucugaucaugaauuuuauguuuua

SEQ ID NO: 237225 - RNA, 32 nt, Homo Sapiens
ggcaaggugucccacccuccccuccugacccu

SEQ ID NO: 237226 - RNA, 32 nt, Homo Sapiens
gaccucucaucauagcugggaacuaagucuuu

SEQ ID NO: 237227 - RNA, 32 nt, Homo Sapiens
gacuagacaaagugcugaugaugaauuccccu

SEQ ID NO: 237228 - RNA, 32 nt, Homo Sapiens
ggcgguuuccugaauuuccccaucugccacag

SEQ ID NO: 237229 - RNA, 32 nt, Homo Sapiens
uggcaggaggggcucccccuguugcgggugag

SEQ ID NO: 237230 - RNA, 32 nt, Homo Sapiens
gccuagauuacagaggauguauggaaacgccu

SEQ ID NO: 237231 - RNA, 32 nt, Homo Sapiens
uugcaauuugaaauauauucugguuguuuuuc

SEQ ID NO: 237232 - RNA, 32 nt, Homo Sapiens
agcgugaggaagauggugcucacgugggaggc

SEQ ID NO: 237233 - RNA, 32 nt, Homo Sapiens
cugccuucaauauaugcugaugacugcacaca

SEQ ID NO: 237234 - RNA, 31 nt, Homo Sapiens
auuagggucucugccauucagaguugaugcu

SEQ ID NO: 237235 - RNA, 32 nt, Homo Sapiens
agcaagccaagcccaaggacaugguggccaca

SEQ ID NO: 237236 - RNA, 32 nt, Homo Sapiens
gaguacuguuccuguaccugacggaugcucca

SEQ ID NO: 237237 - RNA, 32 nt, Homo Sapiens
acucggggccgugggcucggcccggacccggc

SEQ ID NO: 237238 - RNA, 32 nt, Homo Sapiens
cugaagggcuuguccaaguucauugcccuguu

SEQ ID NO: 237239 - RNA, 32 nt, Homo Sapiens
gacugugaauuucuaggacccacaaaaguggu

SEQ ID NO: 237240 - RNA, 32 nt, Homo Sapiens
ggauuuccacuuauguaacuaguggugcuauu

SEQ ID NO: 237241 - RNA, 32 nt, Homo Sapiens
cuauauuuagccccaacaccauuucugggcuc

SEQ ID NO: 237242 - RNA, 32 nt, Homo Sapiens
cucauguaaaaucccuucuccuuuacacaucc

SEQ ID NO: 237243 - RNA, 32 nt, Homo Sapiens
uugucauugaacuggugacaggaugugagacg

SEQ ID NO: 237244 - RNA, 32 nt, Homo Sapiens
uggauguggaggaaaacuugcugcugggaagg

SEQ ID NO: 237245 - RNA, 32 nt, Homo Sapiens
gucucauacacacuuugaacaccuggccugaa

SEQ ID NO: 237246 - RNA, 32 nt, Homo Sapiens
gcaugugugugauguguacacacaguauacau

SEQ ID NO: 237247 - RNA, 32 nt, Homo Sapiens
gaaauaaaaaucaaaacuucuuuaagcuggua

SEQ ID NO: 237248 - RNA, 32 nt, Homo Sapiens
uuaaugcccauccuguggccaagcugagcuuc

SEQ ID NO: 237249 - RNA, 31 nt, Homo Sapiens
uuuuaaaauaaauguguguguguuucuuuaa

SEQ ID NO: 237250 - RNA, 32 nt, Homo Sapiens
cgcgccaacgcucgccacagcccucucaucuc

SEQ ID NO: 237251 - RNA, 32 nt, Homo Sapiens
cagccucucccacugaccucuuucucguuugu

SEQ ID NO: 237252 - RNA, 32 nt, Homo Sapiens
ucugaaaaaucucccucucuccuuccaugauu

SEQ ID NO: 237253 - RNA, 32 nt, Homo Sapiens
cuuuuuaauguuuucuguuguuaaacauuuca

SEQ ID NO: 237254 - RNA, 32 nt, Homo Sapiens
aauuagaaaaaagaacugaggacuagaaggac

SEQ ID NO: 237255 - RNA, 32 nt, Homo Sapiens
ugaucgaugaagcacuuuuuuauuaauauuuu

SEQ ID NO: 237256 - RNA, 32 nt, Homo Sapiens
ggaugcacagaaacgugagggcaggggggcag

SEQ ID NO: 237257 - RNA, 32 nt, Homo Sapiens
uauuuuucuuuuucuuuuuuuuuuuacauuuu

SEQ ID NO: 237258 - RNA, 30 nt, Homo Sapiens
uucucagcgucagugccgccacugcccccg

SEQ ID NO: 237259 - RNA, 32 nt, Homo Sapiens
auccacaaggacaaagauaaaccucccagcuu

SEQ ID NO: 237260 - RNA, 32 nt, Homo Sapiens
cugaggagaagcuggagcaggugcugaguucc

SEQ ID NO: 237261 - RNA, 32 nt, Homo Sapiens
ugcaagccggaggcagcagaucaggaguaggg

SEQ ID NO: 237262 - RNA, 32 nt, Homo Sapiens
gggcgcugggcggccgcggagcuccgggugcc

SEQ ID NO: 237263 - RNA, 32 nt, Homo Sapiens
uuucuauuugaaaaugugcugauucuuugaau

SEQ ID NO: 237264 - RNA, 32 nt, Homo Sapiens
aggcccagagaaacuuuuguucuucucuccuu

SEQ ID NO: 237265 - RNA, 32 nt, Homo Sapiens
ucugcuuuguguuuggaaauaaaaaucucuau

SEQ ID NO: 237266 - RNA, 32 nt, Homo Sapiens
cuuccucgauaaagggaaccacuuucuuauuu

SEQ ID NO: 237267 - RNA, 32 nt, Homo Sapiens
ucagucccuuucagaagaaaagaccacaggca

SEQ ID NO: 237268 - RNA, 32 nt, Homo Sapiens
acccccucaagccccagcagcccucaacaggc

SEQ ID NO: 237269 - RNA, 32 nt, Homo Sapiens
ggggaggguagugaagcucaccacuguccuuu

SEQ ID NO: 237270 - RNA, 32 nt, Homo Sapiens
gaagggucuggcaacuaugaaccuaauggugc

SEQ ID NO: 237271 - RNA, 28 nt, Homo Sapiens
cuaaggugcuuuauaauguguuuuaaag

SEQ ID NO: 237272 - RNA, 32 nt, Homo Sapiens
ucaugacaccagcuaccaauuuuagaauauua

SEQ ID NO: 237273 - RNA, 32 nt, Homo Sapiens
auugcaaaaucguggaaccaacccaaaugccc

SEQ ID NO: 237274 - RNA, 32 nt, Homo Sapiens
cuacuuugcuuuuggaggaaaaggaggaauuc

SEQ ID NO: 237275 - RNA, 32 nt, Homo Sapiens
aaaaaagacuccaucucaaaaaaaaaaaaaaa

SEQ ID NO: 237276 - RNA, 32 nt, Homo Sapiens
uacccccugccuugggagguguguggaauaaa

SEQ ID NO: 237277 - RNA, 32 nt, Homo Sapiens
ugccuguuccacuagagacaagggguagaguu

SEQ ID NO: 237278 - RNA, 32 nt, Homo Sapiens
caggaccuggaaacuuugugucuggggaagac

SEQ ID NO: 237279 - RNA, 32 nt, Homo Sapiens
uaugguggaaaacauuagcuuaugcuucuuua

SEQ ID NO: 237280 - RNA, 32 nt, Homo Sapiens
ucaagucccaggaguccugaccagagagcagg

SEQ ID NO: 237281 - RNA, 32 nt, Homo Sapiens
uguguuuguugaccacauucuuuggcaguucc

SEQ ID NO: 237282 - RNA, 32 nt, Homo Sapiens
cgcaggagggauccuuggcugaggauuguauu

SEQ ID NO: 237283 - RNA, 32 nt, Homo Sapiens
ggccagcuggaggugaucuuggaccggcggcu

SEQ ID NO: 237284 - RNA, 32 nt, Homo Sapiens
cccauguacacacagacacacacacacaugca

SEQ ID NO: 237285 - RNA, 32 nt, Homo Sapiens
acgcucgcacguggccccggcggccgccaugg

SEQ ID NO: 237286 - RNA, 32 nt, Homo Sapiens
uaagguaacuucucagaaagauaucaaaucuc

SEQ ID NO: 237287 - RNA, 32 nt, Homo Sapiens
cuggcauguuagcccuuccuccaauuauaaga

SEQ ID NO: 237288 - RNA, 32 nt, Homo Sapiens
uaagucgccccggcuggucccuccauggcacu

SEQ ID NO: 237289 - RNA, 32 nt, Homo Sapiens
aagagaaggaggagggggcagcuggcuaucuu

SEQ ID NO: 237290 - RNA, 32 nt, Homo Sapiens
gaccccuacuugcugaagacaggccgcuuuga

SEQ ID NO: 237291 - RNA, 32 nt, Homo Sapiens
aagccuggugccuuuccaaaggacuagcaggg

SEQ ID NO: 237292 - RNA, 32 nt, Homo Sapiens
auauuguguuuguguauuuacgcuuugauuca

SEQ ID NO: 237293 - RNA, 32 nt, Homo Sapiens
cuggguacugggcaugugccugucugagcccc

SEQ ID NO: 237294 - RNA, 32 nt, Homo Sapiens
cggaggcucaggucaagugcaucgugcugcag

SEQ ID NO: 237295 - RNA, 32 nt, Homo Sapiens
ccaacaccaaacaacagucacuuuagaaagug

SEQ ID NO: 237296 - RNA, 32 nt, Homo Sapiens
cccguucggcgugugcuuggcccggggaaccg

SEQ ID NO: 237297 - RNA, 32 nt, Homo Sapiens
agacugcacugaccucccucgccagcucggag

SEQ ID NO: 237298 - RNA, 32 nt, Homo Sapiens
ucucugcccucccugcugccguggcuuucaag

SEQ ID NO: 237299 - RNA, 32 nt, Homo Sapiens
agugauguuuuucaggcccuccauugagaacc

SEQ ID NO: 237300 - RNA, 32 nt, Homo Sapiens
ggagcuggaagaccgagccagugcccacccca

SEQ ID NO: 237301 - RNA, 32 nt, Homo Sapiens
cgguggauguccggcucuggaccucaguuuca

SEQ ID NO: 237302 - RNA, 32 nt, Homo Sapiens
caggaccggguggaagggauggggugccaguu

SEQ ID NO: 237303 - RNA, 32 nt, Homo Sapiens
gugguaacaggaacucuugggggcuucucccu

SEQ ID NO: 237304 - RNA, 32 nt, Homo Sapiens
gccgcccgccucaccuuaccuggcgccuccuc

SEQ ID NO: 237305 - RNA, 32 nt, Homo Sapiens
cuucgugcauaaacagauguauuuuugauuuc

SEQ ID NO: 237306 - RNA, 32 nt, Homo Sapiens
aauuugcccagcugucgucuaagcccucuuga

SEQ ID NO: 237307 - RNA, 32 nt, Homo Sapiens
cugaacaguuuuuucuuuuucuuaauggaaga

SEQ ID NO: 237308 - RNA, 32 nt, Homo Sapiens
gggcugggcagcugcuggccuggauccgaguc

SEQ ID NO: 237309 - RNA, 32 nt, Homo Sapiens
uuuauaauuucuuuccaaagauaccaaauaaa

SEQ ID NO: 237310 - RNA, 32 nt, Homo Sapiens
cccugggucugugccugggggucaggaccggg

SEQ ID NO: 237311 - RNA, 32 nt, Homo Sapiens
caguuuaggaaauuauuacuacuuugaacaca

SEQ ID NO: 237312 - RNA, 32 nt, Homo Sapiens
ucuuuuccucagaaucuggccuuuuuccaugg

SEQ ID NO: 237313 - RNA, 32 nt, Homo Sapiens
cacgagggagacggacucuugcuauguugccc

SEQ ID NO: 237314 - RNA, 32 nt, Homo Sapiens
aaaucuucaggcaggguacuauuuaaagugca

SEQ ID NO: 237315 - RNA, 32 nt, Homo Sapiens
cuaaauccaaacaaaagcaggcuagagccaga

SEQ ID NO: 237316 - RNA, 32 nt, Homo Sapiens
uggaggcacggcagaggaggcagggccgacgg

SEQ ID NO: 237317 - RNA, 32 nt, Homo Sapiens
aaguagcaagaauagagcaaaauaucaaaucc

SEQ ID NO: 237318 - RNA, 32 nt, Homo Sapiens
ucaccugaggcuagagcagcagcugccagcuu

SEQ ID NO: 237319 - RNA, 32 nt, Homo Sapiens
aggaagagacaucaguaaugcaugcacacaga

SEQ ID NO: 237320 - RNA, 32 nt, Homo Sapiens
aucuccuccccuccccugacgagaucugcccu

SEQ ID NO: 237321 - RNA, 32 nt, Homo Sapiens
uggacucccuccccuguauguaagcccucaau

SEQ ID NO: 237322 - RNA, 32 nt, Homo Sapiens
guaauauguauuacauuucaugguacauuagu

SEQ ID NO: 237323 - RNA, 32 nt, Homo Sapiens
cccgccaggaggaagacgcugccgaacaucag

SEQ ID NO: 237324 - RNA, 32 nt, Homo Sapiens
uugugacuugaauaauuucaccaaaugaauac

SEQ ID NO: 237325 - RNA, 32 nt, Homo Sapiens
cuggcuucaaaauaaaauuuuugagugcaaaa

SEQ ID NO: 237326 - RNA, 32 nt, Homo Sapiens
auggcgccccgcgcccggggggccccuuccug

SEQ ID NO: 237327 - RNA, 32 nt, Homo Sapiens
gagaggcgccugcaggaugaaagcucucuguc

SEQ ID NO: 237328 - RNA, 32 nt, Homo Sapiens
uauuaauacuaaaauaugucucgcuagugaug

SEQ ID NO: 237329 - RNA, 32 nt, Homo Sapiens
uauuuauagaaagaaucuauaaauucuugggg

SEQ ID NO: 237330 - RNA, 32 nt, Homo Sapiens
ugacaguguuuaagcuuuacuccaccuccuua

SEQ ID NO: 237331 - RNA, 32 nt, Homo Sapiens
guaaaugcaagacgucuggauaccuucaagcu

SEQ ID NO: 237332 - RNA, 32 nt, Homo Sapiens
uuggaaaauaaaucaaugaacaauauaaaaaa

SEQ ID NO: 237333 - RNA, 32 nt, Homo Sapiens
caccuucccaaccccaggaccaggcuuauggg

SEQ ID NO: 237334 - RNA, 32 nt, Homo Sapiens
cuuuaguauguuugucuuugagguggacuguu

SEQ ID NO: 237335 - RNA, 32 nt, Homo Sapiens
cagaacuugagccuuguguauagauuuuaaaa

SEQ ID NO: 237336 - RNA, 32 nt, Homo Sapiens
uccucucccucauaauucagcauuaaagaauu

SEQ ID NO: 237337 - RNA, 30 nt, Homo Sapiens
aggagggugggcgaucgcgugucggagggc

SEQ ID NO: 237338 - RNA, 32 nt, Homo Sapiens
ucuucucgucccgccagaggaggcgaccgagg

SEQ ID NO: 237339 - RNA, 32 nt, Homo Sapiens
ucugcucagagugcuggggucccauccuuucu

SEQ ID NO: 237340 - RNA, 32 nt, Homo Sapiens
accagaagucuguccaggaaaagagcaugaua

SEQ ID NO: 237341 - RNA, 32 nt, Homo Sapiens
ggguggguguguaagucacagauuuuguucau

SEQ ID NO: 237342 - RNA, 32 nt, Homo Sapiens
gaggauuucauuccaaaggaaauaccagcuug

SEQ ID NO: 237343 - RNA, 32 nt, Homo Sapiens
ggagcccgcgcgcgcauggaggcguugccggc

SEQ ID NO: 237344 - RNA, 32 nt, Homo Sapiens
ggaaagaaguagaucuguuuuuucucaauguu

SEQ ID NO: 237345 - RNA, 31 nt, Homo Sapiens
aacuggaaauaaaagauuguauagugcaugu

SEQ ID NO: 237346 - RNA, 32 nt, Homo Sapiens
caaagcagaagcugcugaagcacggggugaac

SEQ ID NO: 237347 - RNA, 32 nt, Homo Sapiens
gcuuaucugaaaugcuugaaaccagaauuguu

SEQ ID NO: 237348 - RNA, 32 nt, Homo Sapiens
cuaggcauauccuggaagaggcuugugaccca

SEQ ID NO: 237349 - RNA, 32 nt, Homo Sapiens
cacaaauucaaaucauuauacguguagccaga

SEQ ID NO: 237350 - RNA, 32 nt, Homo Sapiens
caaggcuucuucaucuucuuggucuacugccu

SEQ ID NO: 237351 - RNA, 32 nt, Homo Sapiens
acaucuucucccaacacugcuuuaauggaagu

SEQ ID NO: 237352 - RNA, 32 nt, Homo Sapiens
ccagagguuccucuuacccagcaaaaagugag

SEQ ID NO: 237353 - RNA, 32 nt, Homo Sapiens
ggaagaucaaggaggcaggccagaacuucgag

SEQ ID NO: 237354 - RNA, 32 nt, Homo Sapiens
ccaugugucuccaugguacagcaaaguaguuu

SEQ ID NO: 237355 - RNA, 32 nt, Homo Sapiens
augucuuauguuauugggauuaaacuugaaua

SEQ ID NO: 237356 - RNA, 27 nt, Homo Sapiens
ucaugccagauguguuucugguaaagc

SEQ ID NO: 237357 - RNA, 32 nt, Homo Sapiens
ugagcggccccggugccccguuccccacggag

SEQ ID NO: 237358 - RNA, 32 nt, Homo Sapiens
ggggauaugcucgucccgggcaccgguggcag

SEQ ID NO: 237359 - RNA, 32 nt, Homo Sapiens
ucuccuucccccuguaggggcggccggcgagu

SEQ ID NO: 237360 - RNA, 32 nt, Homo Sapiens
agagcgcagggcggggagaggcguggggagca

SEQ ID NO: 237361 - RNA, 32 nt, Homo Sapiens
guagccgcggagagcaggcgucgaugcuggcg

SEQ ID NO: 237362 - RNA, 32 nt, Homo Sapiens
aguggaaauauugucacaauggucaauaauga

SEQ ID NO: 237363 - RNA, 32 nt, Homo Sapiens
gccuguuuugaaaaacaguaauuuagaaauua

SEQ ID NO: 237364 - RNA, 32 nt, Homo Sapiens
auccuacacagaaaaugugugugaucccugcu

SEQ ID NO: 237365 - RNA, 32 nt, Homo Sapiens
uuuggauuuuuaaaaagaaugacuccauuuua

SEQ ID NO: 237366 - RNA, 32 nt, Homo Sapiens
gacucagacaccuuuugcccuccccacaggga

SEQ ID NO: 237367 - RNA, 32 nt, Homo Sapiens
caacaaaucucuaaaucgauugagaccugucu

SEQ ID NO: 237368 - RNA, 32 nt, Homo Sapiens
cgggcgcgccucggagcgcacggcugcgcugg

SEQ ID NO: 237369 - RNA, 32 nt, Homo Sapiens
cuagauaugcaaaugauuuucuuagaaaacuu

SEQ ID NO: 237370 - RNA, 32 nt, Homo Sapiens
gaaggcggugggggcggggaaggccgccugga

SEQ ID NO: 237371 - RNA, 31 nt, Homo Sapiens
uauagggagccccagguaauggcaugagaua

SEQ ID NO: 237372 - RNA, 32 nt, Homo Sapiens
cugaaucaccuccucccuguuggaggggguca

SEQ ID NO: 237373 - RNA, 32 nt, Homo Sapiens
gccuagguguuuuugggggagcccuguuuucc

SEQ ID NO: 237374 - RNA, 32 nt, Homo Sapiens
cuucugcccaugccugccccagcagccccucu

SEQ ID NO: 237375 - RNA, 32 nt, Homo Sapiens
acagaggcugcaccaucuccaauguggugucc

SEQ ID NO: 237376 - RNA, 32 nt, Homo Sapiens
gcgcuuggaaguuucucuucuaccugggcagc

SEQ ID NO: 237377 - RNA, 28 nt, Homo Sapiens
gcagagucugaggcgauggcuccugguc

SEQ ID NO: 237378 - RNA, 32 nt, Homo Sapiens
uacagagcacaccuaagcaauuaggauauaac

SEQ ID NO: 237379 - RNA, 32 nt, Homo Sapiens
gaggacuccggaaaagugacuaucucggaaga

SEQ ID NO: 237380 - RNA, 32 nt, Homo Sapiens
uggucuuggccaugauguccuuggauuccauc

SEQ ID NO: 237381 - RNA, 29 nt, Homo Sapiens
agcuguguagugaugauguauaagaaucc

SEQ ID NO: 237382 - RNA, 32 nt, Homo Sapiens
gaugacuguagaacaauagaaacuuuaauaau

SEQ ID NO: 237383 - RNA, 32 nt, Homo Sapiens
gacccguuucgccucgcggagccgguaggucc

SEQ ID NO: 237384 - RNA, 32 nt, Homo Sapiens
ugggcaguggguggagggcugccaggaaacau

SEQ ID NO: 237385 - RNA, 32 nt, Homo Sapiens
aacugcaaccucaaaggagcaagccuugaaac

SEQ ID NO: 237386 - RNA, 32 nt, Homo Sapiens
gcggagccgcgcagcccucggagcacgaauau

SEQ ID NO: 237387 - RNA, 32 nt, Homo Sapiens
agaacacagugacagaugacauccucugcacu

SEQ ID NO: 237388 - RNA, 32 nt, Homo Sapiens
ggugagaccugccgucuucuuuguacgguuug

SEQ ID NO: 237389 - RNA, 32 nt, Homo Sapiens
agguauauuucugaauaguuucagcagguuau

SEQ ID NO: 237390 - RNA, 32 nt, Homo Sapiens
auaaggcuguugcuagcgggaccuccacuaga

SEQ ID NO: 237391 - RNA, 32 nt, Homo Sapiens
ggucuugaaacacaaaugguuuuuggucuagg

SEQ ID NO: 237392 - RNA, 32 nt, Homo Sapiens
gagcagucaaggaaguuuuggaagugaguagc

SEQ ID NO: 237393 - RNA, 29 nt, Homo Sapiens
cgccauggccauggcccggcugggcucgu

SEQ ID NO: 237394 - RNA, 32 nt, Homo Sapiens
uaaaaauuuuuagggacaaguuuuguuugugg

SEQ ID NO: 237395 - RNA, 32 nt, Homo Sapiens
ugccucucaccgcuccuaaucuuuuuguuuua

SEQ ID NO: 237396 - RNA, 32 nt, Homo Sapiens
uaucccacagaaaaguugggaaaagaguacaa

SEQ ID NO: 237397 - RNA, 32 nt, Homo Sapiens
uccacagccuguguccuagaagagggaagagg

SEQ ID NO: 237398 - RNA, 32 nt, Homo Sapiens
auuuuaaaacgaagacucuuaugcucuagccu

SEQ ID NO: 237399 - RNA, 32 nt, Homo Sapiens
cugaccccaggggccucauccuccccauggaa

SEQ ID NO: 237400 - RNA, 32 nt, Homo Sapiens
augugugauacuaagguuugacugcuauaauu

SEQ ID NO: 237401 - RNA, 32 nt, Homo Sapiens
agucccugucuccuccaugagccguccagggc

SEQ ID NO: 237402 - RNA, 32 nt, Homo Sapiens
caauaagauaguguuaaauauugucuaaucag

SEQ ID NO: 237403 - RNA, 32 nt, Homo Sapiens
gauaucaaagcucagcucuuugaaacauccag

SEQ ID NO: 237404 - RNA, 32 nt, Homo Sapiens
gccuuaagaaugcacucuacuggggauuuccu

SEQ ID NO: 237405 - RNA, 32 nt, Homo Sapiens
ccagcgugguggccauagacaacaaguucgaa

SEQ ID NO: 237406 - RNA, 32 nt, Homo Sapiens
gguucuggggccugggcccuggguggguacca

SEQ ID NO: 237407 - RNA, 32 nt, Homo Sapiens
gcaggaucaaggaggugaugaugaagguuauu

SEQ ID NO: 237408 - RNA, 32 nt, Homo Sapiens
caaaacagaaaaacagaagacaaaaaauagag

SEQ ID NO: 237409 - RNA, 32 nt, Homo Sapiens
ccaggaggcggagguagcagugagccaagauu

SEQ ID NO: 237410 - RNA, 32 nt, Homo Sapiens
ccacaccggccggcugcccauagccagcccuc

SEQ ID NO: 237411 - RNA, 32 nt, Homo Sapiens
cucugaagggaagagagccuugaauagacuga

SEQ ID NO: 237412 - RNA, 32 nt, Homo Sapiens
gugcugggguuuugugggggcgggggguaguu

SEQ ID NO: 237413 - RNA, 32 nt, Homo Sapiens
ccagucaccguucaguaggagcuugucuuccc

SEQ ID NO: 237414 - RNA, 32 nt, Homo Sapiens
ggauaaaagaggaggagugagcacuggaaaua

SEQ ID NO: 237415 - RNA, 32 nt, Homo Sapiens
auuccaggauucagucuagaaacuuuuccuuu

SEQ ID NO: 237416 - RNA, 32 nt, Homo Sapiens
ggauggaauuuuuuuuuuuuuaucuccauuuu

SEQ ID NO: 237417 - RNA, 32 nt, Homo Sapiens
cccgcuuccuauuuucucccuccaccucuccu

SEQ ID NO: 237418 - RNA, 32 nt, Homo Sapiens
cuucuagaauuccacaugcaauucacucuggc

SEQ ID NO: 237419 - RNA, 32 nt, Homo Sapiens
acagggcucugacuuucaguacuuucucacac

SEQ ID NO: 237420 - RNA, 32 nt, Homo Sapiens
cgugaacugaagaaugguauccagucaucagc

SEQ ID NO: 237421 - RNA, 32 nt, Homo Sapiens
gcugcugagucacccacccagccuuggagcug

SEQ ID NO: 237422 - RNA, 32 nt, Homo Sapiens
cucuuggaauaaucuguaaaacguaguuauaa

SEQ ID NO: 237423 - RNA, 32 nt, Homo Sapiens
uuccugcugccaagguggccugacacugugcc

SEQ ID NO: 237424 - RNA, 32 nt, Homo Sapiens
aaugagaucuuaggugagaugugugugacacu

SEQ ID NO: 237425 - RNA, 32 nt, Homo Sapiens
aggaucuggggguggggagggacaagcuaguu

SEQ ID NO: 237426 - RNA, 32 nt, Homo Sapiens
ccgaaacaaaaccagacccagcccuacacuuu

SEQ ID NO: 237427 - RNA, 32 nt, Homo Sapiens
cuucaagaaaucagccaaacuauguuuauagu

SEQ ID NO: 237428 - RNA, 32 nt, Homo Sapiens
ggcaagagcaggucggggcuggauggcaccuc

SEQ ID NO: 237429 - RNA, 32 nt, Homo Sapiens
uccuguugucugaccuugguggugggagggga

SEQ ID NO: 237430 - RNA, 32 nt, Homo Sapiens
aggguaggggugguaauaaacuucuccaaacg

SEQ ID NO: 237431 - RNA, 32 nt, Homo Sapiens
gcagcccuggaugaccucugugccgcggaaac

SEQ ID NO: 237432 - RNA, 32 nt, Homo Sapiens
ccaugcugaucuccagggaaccauccuuccuc

SEQ ID NO: 237433 - RNA, 32 nt, Homo Sapiens
ucaaaagaacagaacuuugcccacugcacacu

SEQ ID NO: 237434 - RNA, 32 nt, Homo Sapiens
aggggccgccgggccgcgccaaggaccugcaa

SEQ ID NO: 237435 - RNA, 32 nt, Homo Sapiens
uaagaaaauuaaaagaauaaaacugggcaggg

SEQ ID NO: 237436 - RNA, 32 nt, Homo Sapiens
cccccuccccaacaugccccagcccaccccua

SEQ ID NO: 237437 - RNA, 32 nt, Homo Sapiens
cacacagggacuugcacgaucuauguuauuuc

SEQ ID NO: 237438 - RNA, 32 nt, Homo Sapiens
caaugcugagaaugagagcggcggagacaagc

SEQ ID NO: 237439 - RNA, 32 nt, Homo Sapiens
uguuuguguuuauaaguuuaugcugauagguu

SEQ ID NO: 237440 - RNA, 32 nt, Homo Sapiens
uuuuuguauuuuuuaguagagaugggguuuca

SEQ ID NO: 237441 - RNA, 32 nt, Homo Sapiens
acaagugaguuacuacagcgcugauuuggaaa

SEQ ID NO: 237442 - RNA, 32 nt, Homo Sapiens
guugggaggaggauaagcaaucaggaucucag

SEQ ID NO: 237443 - RNA, 32 nt, Homo Sapiens
gaguccuggggcuggacgagguuaccagggaa

SEQ ID NO: 237444 - RNA, 32 nt, Homo Sapiens
ggaaucaucagugaacaaaacaaagauccugc

SEQ ID NO: 237445 - RNA, 32 nt, Homo Sapiens
gaggccauggggguggaggccacaaaaacaaa

SEQ ID NO: 237446 - RNA, 32 nt, Homo Sapiens
gcccucuggaguugauacaagccugccugagc

SEQ ID NO: 237447 - RNA, 32 nt, Homo Sapiens
ggcgaggauuacccggggaagugguugucucc

SEQ ID NO: 237448 - RNA, 32 nt, Homo Sapiens
gaugaugacuuugauuggauaauuaguaaggu

SEQ ID NO: 237449 - RNA, 32 nt, Homo Sapiens
gauuuguguacuuguguuuuuuaaucagcauu

SEQ ID NO: 237450 - RNA, 32 nt, Homo Sapiens
gcccugccuuccaggaagguuggggugggagu

SEQ ID NO: 237451 - RNA, 32 nt, Homo Sapiens
ggcuccuucuucagcccuccccuucccagccc

SEQ ID NO: 237452 - RNA, 32 nt, Homo Sapiens
acacauugauaaagcaucauguucccuuugau

SEQ ID NO: 237453 - RNA, 32 nt, Homo Sapiens
cugccucuggggucgagggucuggguggaagg

SEQ ID NO: 237454 - RNA, 32 nt, Homo Sapiens
cguuuuuguuguuuucucaucauuccauugug

SEQ ID NO: 237455 - RNA, 32 nt, Homo Sapiens
gaagcggcauuguuaugagccuugaaggaaga

SEQ ID NO: 237456 - RNA, 32 nt, Homo Sapiens
acaggccucacagaaacagagaucccaucuug

SEQ ID NO: 237457 - RNA, 32 nt, Homo Sapiens
cuguggagggugcccagcagggggcugagcuc

SEQ ID NO: 237458 - RNA, 32 nt, Homo Sapiens
ugaaggaaaauauuucaggugccaaacuuccu

SEQ ID NO: 237459 - RNA, 32 nt, Homo Sapiens
ccuggcgcagggcauccaggccgcccgcuaag

SEQ ID NO: 237460 - RNA, 32 nt, Homo Sapiens
ccuccuggccaugccgggaggggucggauccu

SEQ ID NO: 237461 - RNA, 32 nt, Homo Sapiens
ccaccgucuccaucccggccccagcccagucg

SEQ ID NO: 237462 - RNA, 32 nt, Homo Sapiens
uaguguauauauauguauacauauacauauau

SEQ ID NO: 237463 - RNA, 32 nt, Homo Sapiens
gacccugauaaacaaccuaggcucucaaucag

SEQ ID NO: 237464 - RNA, 32 nt, Homo Sapiens
ccccuggcccucauguccccccggggcugggg

SEQ ID NO: 237465 - RNA, 32 nt, Homo Sapiens
ucauuaaaauagaucauuuaguuaagccccga

SEQ ID NO: 237466 - RNA, 32 nt, Homo Sapiens
aaggacaggguggaagagggugguauauaggg

SEQ ID NO: 237467 - RNA, 32 nt, Homo Sapiens
gccggaccgaaucggcucucuaggccguggag

SEQ ID NO: 237468 - RNA, 32 nt, Homo Sapiens
ccucucuagagcagguauguauaugguauaaa

SEQ ID NO: 237469 - RNA, 32 nt, Homo Sapiens
aaaaaagcaaaaaacaauuugaagauauccua

SEQ ID NO: 237470 - RNA, 32 nt, Homo Sapiens
ccugauggucuggggucccaccccugccccac

SEQ ID NO: 237471 - RNA, 32 nt, Homo Sapiens
gaugucccacccuguucacccagccgccaguc

SEQ ID NO: 237472 - RNA, 32 nt, Homo Sapiens
gucauggcucugcuguugcuuccagaaccaaa

SEQ ID NO: 237473 - RNA, 32 nt, Homo Sapiens
cgcagaggugagagucgcgcccgggaguccgc

SEQ ID NO: 237474 - RNA, 32 nt, Homo Sapiens
cuuuaaccuacucaacaguauuucauauccau

SEQ ID NO: 237475 - RNA, 32 nt, Homo Sapiens
ggccacagugacucaucaguaucugggggaac

SEQ ID NO: 237476 - RNA, 32 nt, Homo Sapiens
gcccguggugaccccuggcgacccgguuuguu

SEQ ID NO: 237477 - RNA, 32 nt, Homo Sapiens
cagggucacccuuguggggccuggacaugacg

SEQ ID NO: 237478 - RNA, 30 nt, Homo Sapiens
ccaaagagaugugcugcaggacuccggagg

SEQ ID NO: 237479 - RNA, 32 nt, Homo Sapiens
cauaacaggauguguuugaaccuaguagggga

SEQ ID NO: 237480 - RNA, 32 nt, Homo Sapiens
uggagucucccucugucaccaaggcuggagug

SEQ ID NO: 237481 - RNA, 32 nt, Homo Sapiens
cucggcugcgccccgaugcggcggcgaccucc

SEQ ID NO: 237482 - RNA, 32 nt, Homo Sapiens
ccacagacgcgguaccucuacugcguagaggc

SEQ ID NO: 237483 - RNA, 32 nt, Homo Sapiens
agccgcaaaaggcgccgaggcuccaccgcgca

SEQ ID NO: 237484 - RNA, 32 nt, Homo Sapiens
uucaagacacugggcuguggaucaacccaacc

SEQ ID NO: 237485 - RNA, 31 nt, Homo Sapiens
cuucggcagcacugccucugcccaccugccu

SEQ ID NO: 237486 - RNA, 32 nt, Homo Sapiens
guuaaugcauguccgugguugggugcaccugu

SEQ ID NO: 237487 - RNA, 32 nt, Homo Sapiens
ugcaauuuacuuuuaaagacaaacauaacuau

SEQ ID NO: 237488 - RNA, 32 nt, Homo Sapiens
ugcggccuggcaggcggcgcgcgguccaaggu

SEQ ID NO: 237489 - RNA, 32 nt, Homo Sapiens
ccaugguagccugauaaggcugagagagaaaa

SEQ ID NO: 237490 - RNA, 32 nt, Homo Sapiens
ccgacccgcccuggggugcugcgugcgcugcc

SEQ ID NO: 237491 - RNA, 32 nt, Homo Sapiens
caguucacaauuuucaccauuuaaacacaaau

SEQ ID NO: 237492 - RNA, 32 nt, Homo Sapiens
caucagcccugccuguuuugcaccugggaagu

SEQ ID NO: 237493 - RNA, 32 nt, Homo Sapiens
gugcccgaggcggcggggcucgcgcgggugga

SEQ ID NO: 237494 - RNA, 32 nt, Homo Sapiens
uuccgcaucuucuguucccugggaugccuuag

SEQ ID NO: 237495 - RNA, 32 nt, Homo Sapiens
cagcuggccugccuggacccugacuggaaaau

SEQ ID NO: 237496 - RNA, 32 nt, Homo Sapiens
uuccagcgauucuccugccucagccuuccgag

SEQ ID NO: 237497 - RNA, 32 nt, Homo Sapiens
uguuuuguuauuuugaaagaguuucuuuuacu

SEQ ID NO: 237498 - RNA, 32 nt, Homo Sapiens
uccucuccuggaggucgucuccuggcauccuc

SEQ ID NO: 237499 - RNA, 32 nt, Homo Sapiens
cgccucccaagccugcaaccccggcgaccccu

SEQ ID NO: 237500 - RNA, 31 nt, Homo Sapiens
ggaagucauuugauagaaagaugagaucgga

SEQ ID NO: 237501 - RNA, 32 nt, Homo Sapiens
ucagccccaagccucuagucuggguguguacg

SEQ ID NO: 237502 - RNA, 30 nt, Homo Sapiens
cuuccaggcaggccagcaaguggcgcuggg

SEQ ID NO: 237503 - RNA, 32 nt, Homo Sapiens
augucccaggaccccugacagggcugccuggc

SEQ ID NO: 237504 - RNA, 32 nt, Homo Sapiens
gacggucaugaaggagcggggguguggcaggc

SEQ ID NO: 237505 - RNA, 32 nt, Homo Sapiens
gugugaaauuuauacuaucccugcuuaaaaua

SEQ ID NO: 237506 - RNA, 32 nt, Homo Sapiens
ggccuccccagucucccucccccucgcgccug

SEQ ID NO: 237507 - RNA, 32 nt, Homo Sapiens
auugacacagaaacauccucagagaucagugg

SEQ ID NO: 237508 - RNA, 32 nt, Homo Sapiens
cuagaaccacauguacacaccaccacggucgg

SEQ ID NO: 237509 - RNA, 31 nt, Homo Sapiens
gucccgcagcguccgcucccccgcgccacug

SEQ ID NO: 237510 - RNA, 32 nt, Homo Sapiens
gccuccugacccauucuuuuuauucuucucua

SEQ ID NO: 237511 - RNA, 32 nt, Homo Sapiens
aacuugugcccucgccgaccgccccgcgggcc

SEQ ID NO: 237512 - RNA, 32 nt, Homo Sapiens
uacaauuuuguguucuugguauucuuagucua

SEQ ID NO: 237513 - RNA, 32 nt, Homo Sapiens
uuuuucugcuguugaccuuccauuauccucua

SEQ ID NO: 237514 - RNA, 32 nt, Homo Sapiens
aacacuuaaggcagauuaaaacauguauugga

SEQ ID NO: 237515 - RNA, 32 nt, Homo Sapiens
cagacgcaaaaauuacauuaaauuuuuguaua

SEQ ID NO: 237516 - RNA, 32 nt, Homo Sapiens
gggaugcggaguggcggccgcggcgguggcgg

SEQ ID NO: 237517 - RNA, 32 nt, Homo Sapiens
uggaguuggaggggcggggugcuggcggugug

SEQ ID NO: 237518 - RNA, 32 nt, Homo Sapiens
acuuauuucguuuuuggaaucaccuuacagau

SEQ ID NO: 237519 - RNA, 32 nt, Homo Sapiens
acuccaaaugaauggcuagagaauuacuauuu

SEQ ID NO: 237520 - RNA, 32 nt, Homo Sapiens
acccccgcuccagcccgcaggccggcugcccg

SEQ ID NO: 237521 - RNA, 32 nt, Homo Sapiens
caugccuaaauucuuuuaaaauguagagggau

SEQ ID NO: 237522 - RNA, 32 nt, Homo Sapiens
uaaagugguuaauucaggaaauugacagaauc

SEQ ID NO: 237523 - RNA, 32 nt, Homo Sapiens
aaccauuuccaaauuaaaucugaacaaaugga

SEQ ID NO: 237524 - RNA, 32 nt, Homo Sapiens
uuaaaaucgcuuugggucuauaacagccacuc

SEQ ID NO: 237525 - RNA, 32 nt, Homo Sapiens
accugauauuuggagauguaaauauugcucag

SEQ ID NO: 237526 - RNA, 32 nt, Homo Sapiens
auguuccaucauguuccaugcugcugacguca

SEQ ID NO: 237527 - RNA, 32 nt, Homo Sapiens
aauaugagcugauggagcugggcgcuaaauaa

SEQ ID NO: 237528 - RNA, 32 nt, Homo Sapiens
guggggccauggcugcccuucuccgagcugug

SEQ ID NO: 237529 - RNA, 32 nt, Homo Sapiens
guuuauaugcuuccuguacauuuccucaggaa

SEQ ID NO: 237530 - RNA, 32 nt, Homo Sapiens
uucagaguaacauuuauacaugucuuaaacau

SEQ ID NO: 237531 - RNA, 32 nt, Homo Sapiens
gcuuucaagcuacagcuguaacaucaacuuuu

SEQ ID NO: 237532 - RNA, 32 nt, Homo Sapiens
agcguggucacaggggccccccugugcccagg

SEQ ID NO: 237533 - RNA, 32 nt, Homo Sapiens
acuacugcacuccagccugggcgacaaagcaa

SEQ ID NO: 237534 - RNA, 32 nt, Homo Sapiens
uuaaggagcugauguugcaccuaaacauucca

SEQ ID NO: 237535 - RNA, 32 nt, Homo Sapiens
guuugauuugauucucagccugguagaugcug

SEQ ID NO: 237536 - RNA, 32 nt, Homo Sapiens
uccugcuuuguguuccucucccagcuccaucu

SEQ ID NO: 237537 - RNA, 28 nt, Homo Sapiens
ccucaugggcagaauauuauaaaaagag

SEQ ID NO: 237538 - RNA, 32 nt, Homo Sapiens
guuuauacagguucaucaguacugugucuuga

SEQ ID NO: 237539 - RNA, 32 nt, Homo Sapiens
ccccaguugcuaaucccggcucugccacucaa

SEQ ID NO: 237540 - RNA, 32 nt, Homo Sapiens
agcaguccuugacgaucguguuucugacguuu

SEQ ID NO: 237541 - RNA, 32 nt, Homo Sapiens
augggcuaugucuacagugaugcugcaaaugg

SEQ ID NO: 237542 - RNA, 32 nt, Homo Sapiens
acuuugugcaaagaauagauaguucugccucu

SEQ ID NO: 237543 - RNA, 32 nt, Homo Sapiens
cagagcgcccgaguccacggaccucgcaggca

SEQ ID NO: 237544 - RNA, 32 nt, Homo Sapiens
cuugucugcaaaguugguuuuguccacucuga

SEQ ID NO: 237545 - RNA, 32 nt, Homo Sapiens
auagcaaaggauuaguaauauagccugaaaac

SEQ ID NO: 237546 - RNA, 32 nt, Homo Sapiens
ccucugcauaaugggauuugggcuuugguaca

SEQ ID NO: 237547 - RNA, 32 nt, Homo Sapiens
uuaguccuuuuuccuuucuuuggguagaccua

SEQ ID NO: 237548 - RNA, 32 nt, Homo Sapiens
ucucaagaggggcugcugugggggccuggcuc

SEQ ID NO: 237549 - RNA, 32 nt, Homo Sapiens
auaauaugacacuuagagaaaaaggaagguuu

SEQ ID NO: 237550 - RNA, 32 nt, Homo Sapiens
uaccucuuaaaauuauuauuuuaaguaaaagc

SEQ ID NO: 237551 - RNA, 32 nt, Homo Sapiens
ucuauaaggaaauaauacuuuuuuaaacaaca

SEQ ID NO: 237552 - RNA, 32 nt, Homo Sapiens
gccagggcaccgugagccuggugguuggcagc

SEQ ID NO: 237553 - RNA, 32 nt, Homo Sapiens
agauauaaguuccagcucugaaauuaauuagg

SEQ ID NO: 237554 - RNA, 32 nt, Homo Sapiens
aacgagaaagagaacgugaaagauuugagucu

SEQ ID NO: 237555 - RNA, 32 nt, Homo Sapiens
uuggcggcgggggcggggggucgaugucucac

SEQ ID NO: 237556 - RNA, 32 nt, Homo Sapiens
augccguccuuuccccgcagagacuggucuug

SEQ ID NO: 237557 - RNA, 32 nt, Homo Sapiens
ggcgggcagcgaaguggugccuccugcguccc

SEQ ID NO: 237558 - RNA, 32 nt, Homo Sapiens
uaccuuagaaaacaaguauugucaguuaccuc

SEQ ID NO: 237559 - RNA, 32 nt, Homo Sapiens
gcagagggagagaaccucuacugaucagagca

SEQ ID NO: 237560 - RNA, 32 nt, Homo Sapiens
agucccgcucccucacccagcuccucagacau

SEQ ID NO: 237561 - RNA, 32 nt, Homo Sapiens
caugucacagaaaacgaacgaaggacaacaag

SEQ ID NO: 237562 - RNA, 32 nt, Homo Sapiens
uguccuuuacuuugacaaaguaauguaauuuu

SEQ ID NO: 237563 - RNA, 32 nt, Homo Sapiens
uucuguauagaaagguugagauauaucaacac

SEQ ID NO: 237564 - RNA, 32 nt, Homo Sapiens
ggucgacaaaacauucuuaauucauuuuacau

SEQ ID NO: 237565 - RNA, 32 nt, Homo Sapiens
ugaagagacaggcuuuacauaagccuucauuc

SEQ ID NO: 237566 - RNA, 32 nt, Homo Sapiens
gaggccucuggacucagugcuuccugucccaa

SEQ ID NO: 237567 - RNA, 27 nt, Homo Sapiens
cuccuguccuucuugucuccugcagca

SEQ ID NO: 237568 - RNA, 32 nt, Homo Sapiens
uaaugccucuuaaaccacuuacauucaaaggg

SEQ ID NO: 237569 - RNA, 32 nt, Homo Sapiens
guuucuauagaauaauaacauacccacacaau

SEQ ID NO: 237570 - RNA, 28 nt, Homo Sapiens
cauugagggccaccgccgagguuucucc

SEQ ID NO: 237571 - RNA, 32 nt, Homo Sapiens
uauucauaaaaugaaauguccaguauggaaaa

SEQ ID NO: 237572 - RNA, 27 nt, Homo Sapiens
ugcauuuccuucuuaacucucuguuac

SEQ ID NO: 237573 - RNA, 32 nt, Homo Sapiens
gugucccauggcuggucagagcccugggucaa

SEQ ID NO: 237574 - RNA, 32 nt, Homo Sapiens
ccucuuugcccccaggcuuuuuugcugugagg

SEQ ID NO: 237575 - RNA, 32 nt, Homo Sapiens
cggggagaccccaagaggacaugggcagcugg

SEQ ID NO: 237576 - RNA, 32 nt, Homo Sapiens
agcuuuugauucauagaagaaagccagagguu

SEQ ID NO: 237577 - RNA, 32 nt, Homo Sapiens
ucaaaauacuuauggaagaaggugcccaaaag

SEQ ID NO: 237578 - RNA, 32 nt, Homo Sapiens
uuccagcuguaaaauucaauaauccugugacu

SEQ ID NO: 237579 - RNA, 32 nt, Homo Sapiens
uuagagcaaugggaagcauauuuuggccuacc

SEQ ID NO: 237580 - RNA, 32 nt, Homo Sapiens
gaggggcugccugggguaucugggggugguga

SEQ ID NO: 237581 - RNA, 32 nt, Homo Sapiens
auaguuuuacuuugguacaaauaaaaacugua

SEQ ID NO: 237582 - RNA, 32 nt, Homo Sapiens
gacuucgagagggacuuagagaaggcagacgc

SEQ ID NO: 237583 - RNA, 32 nt, Homo Sapiens
cguccaguccuggcccccuaggaggcagcaug

SEQ ID NO: 237584 - RNA, 32 nt, Homo Sapiens
gccaguauuucugauuaacuaaguugaaacuc

SEQ ID NO: 237585 - RNA, 32 nt, Homo Sapiens
cacacuuuccuuucugugcuccuuccaaguua

SEQ ID NO: 237586 - RNA, 32 nt, Homo Sapiens
ccaggcucuuugagggcagggauugugucugg

SEQ ID NO: 237587 - RNA, 32 nt, Homo Sapiens
aguagggggcggcgcggcacccgugccccggc

SEQ ID NO: 237588 - RNA, 30 nt, Homo Sapiens
ccgcgccccuccccagcccaucuuacugca

SEQ ID NO: 237589 - RNA, 32 nt, Homo Sapiens
cagcacgcuccagcccucugggaacugaaucc

SEQ ID NO: 237590 - RNA, 32 nt, Homo Sapiens
ggcggcgccauggcccgagguagcgcgcggcu

SEQ ID NO: 237591 - RNA, 32 nt, Homo Sapiens
uaccaaaacuuccacagaugugagauuuaaca

SEQ ID NO: 237592 - RNA, 32 nt, Homo Sapiens
uugccagugucuagaugaaaaagaggagagau

SEQ ID NO: 237593 - RNA, 32 nt, Homo Sapiens
cagaggaggaggaggcaugagugaggcgggcg

SEQ ID NO: 237594 - RNA, 32 nt, Homo Sapiens
ugacuuaacaauaaaaaugauguaugguuuuu

SEQ ID NO: 237595 - RNA, 32 nt, Homo Sapiens
uuggggguggggugggggcagaggagaggcgg

SEQ ID NO: 237596 - RNA, 31 nt, Homo Sapiens
aagaauuuuuguaauuaauagguugcuaauu

SEQ ID NO: 237597 - RNA, 32 nt, Homo Sapiens
uggagcccugcaccccaacacggcuggccaug

SEQ ID NO: 237598 - RNA, 32 nt, Homo Sapiens
agcuaucaacaaaaacugaauauuauaagcaa

SEQ ID NO: 237599 - RNA, 32 nt, Homo Sapiens
ggcaccgagugcuccuuccucaucuaccucag

SEQ ID NO: 237600 - RNA, 32 nt, Homo Sapiens
uaauguuucuuacuugcuaugugaccuugggc

SEQ ID NO: 237601 - RNA, 32 nt, Homo Sapiens
gagcaucucuguucuuuuuaauaauuucagaa

SEQ ID NO: 237602 - RNA, 32 nt, Homo Sapiens
gacaccgggcccagcccaggcccaucaggacu

SEQ ID NO: 237603 - RNA, 32 nt, Homo Sapiens
agagucagccugagacucucagagcacgacgg

SEQ ID NO: 237604 - RNA, 32 nt, Homo Sapiens
caugugauccucaaaacaccagucagaaaggu

SEQ ID NO: 237605 - RNA, 32 nt, Homo Sapiens
cacuggcaaggaguaaucuuggagacaggaag

SEQ ID NO: 237606 - RNA, 32 nt, Homo Sapiens
ggagacuggguguuuaccacacagcaguggau

SEQ ID NO: 237607 - RNA, 32 nt, Homo Sapiens
ugccuguaaucccugcacuuugggaggcugcg

SEQ ID NO: 237608 - RNA, 32 nt, Homo Sapiens
agggcagaguguuugcccaccagcugcuagcc

SEQ ID NO: 237609 - RNA, 32 nt, Homo Sapiens
gcguguccuccccuccacugccugcauggggg

SEQ ID NO: 237610 - RNA, 32 nt, Homo Sapiens
ugcccuguggacucagcccagcuggggaggac

SEQ ID NO: 237611 - RNA, 32 nt, Homo Sapiens
gggguuuacacggccccaauaaagccugcucu

SEQ ID NO: 237612 - RNA, 32 nt, Homo Sapiens
uucaggugggccgcuuccuuggcuaccugguu

SEQ ID NO: 237613 - RNA, 32 nt, Homo Sapiens
ugacuagguucaagagacauuugcuuuuggug

SEQ ID NO: 237614 - RNA, 32 nt, Homo Sapiens
gaccuauagcaucugaggcaucugagagcaaa

SEQ ID NO: 237615 - RNA, 32 nt, Homo Sapiens
gacauuucaaaaaaacaaaacuggcuagccug

SEQ ID NO: 237616 - RNA, 32 nt, Homo Sapiens
auccugggaaggccuggaugaccaagcuuggu

SEQ ID NO: 237617 - RNA, 32 nt, Homo Sapiens
cauuacauuuucagugcuuuuacaaggaaaaa

SEQ ID NO: 237618 - RNA, 32 nt, Homo Sapiens
ggcucguccgacgcgcccuccgccagccgaca

SEQ ID NO: 237619 - RNA, 32 nt, Homo Sapiens
aaugcagaaaaaauggaaccacuaacuacuaa

SEQ ID NO: 237620 - RNA, 32 nt, Homo Sapiens
ucaaguucaaggacaagcuucucauuauggca

SEQ ID NO: 237621 - RNA, 32 nt, Homo Sapiens
auauuucuuaggauguuuuuucuugucuuuuu

SEQ ID NO: 237622 - RNA, 32 nt, Homo Sapiens
ggcagggcccuuagcauggccacacauguccc

SEQ ID NO: 237623 - RNA, 32 nt, Homo Sapiens
uggacauucagagagaugaauugugagaacag

SEQ ID NO: 237624 - RNA, 32 nt, Homo Sapiens
aaagcccacucuucuuucauagucacauuuug

SEQ ID NO: 237625 - RNA, 32 nt, Homo Sapiens
ggcuggcgcuggcugugauugugcuggcugug

SEQ ID NO: 237626 - RNA, 32 nt, Homo Sapiens
gccaugccucccccugccccagccgcuccuuc

SEQ ID NO: 237627 - RNA, 32 nt, Homo Sapiens
ugggagucuauuauauauuauuuugcaaaagu

SEQ ID NO: 237628 - RNA, 32 nt, Homo Sapiens
uaaacuuucuuuugugguuuuuuguuuuguuu

SEQ ID NO: 237629 - RNA, 32 nt, Homo Sapiens
agaaauaaaaauacugggaucaaacuggccug

SEQ ID NO: 237630 - RNA, 29 nt, Homo Sapiens
gaauuucugcuguggucuauaaaauaaac

SEQ ID NO: 237631 - RNA, 27 nt, Homo Sapiens
ugucuccacuucuucaccucucaccca

SEQ ID NO: 237632 - RNA, 32 nt, Homo Sapiens
ugucccgcgggccgugggcccggcacacuggg

SEQ ID NO: 237633 - RNA, 32 nt, Homo Sapiens
ugcugcuccaugacuuuguguacaaaacuuuu

SEQ ID NO: 237634 - RNA, 32 nt, Homo Sapiens
auuuuuguauuuuuuguagacacgggguuuca

SEQ ID NO: 237635 - RNA, 32 nt, Homo Sapiens
uuauucaaaaauaacaucugacuacuauaaaa

SEQ ID NO: 237636 - RNA, 32 nt, Homo Sapiens
cuguauccagaguggaacccaggcuggugucc

SEQ ID NO: 237637 - RNA, 32 nt, Homo Sapiens
gggaccagagggugggacggccagguaucacu

SEQ ID NO: 237638 - RNA, 32 nt, Homo Sapiens
gaagagacaaaguggguguguggccucccugg

SEQ ID NO: 237639 - RNA, 32 nt, Homo Sapiens
uuaucuucugguuuccuaauccuaucuucugc

SEQ ID NO: 237640 - RNA, 32 nt, Homo Sapiens
ugaggaccggguggaggcgguggggacccagc

SEQ ID NO: 237641 - RNA, 32 nt, Homo Sapiens
ccaugggcaagcugcaccuugcaugagggaca

SEQ ID NO: 237642 - RNA, 29 nt, Homo Sapiens
gcaauuuagguggcaucuauaaaauaaaa

SEQ ID NO: 237643 - RNA, 32 nt, Homo Sapiens
uguuaauguacaaagcuuuucuuuuggcacug

SEQ ID NO: 237644 - RNA, 32 nt, Homo Sapiens
uguggccucuugcuccuccuuccagauccccg

SEQ ID NO: 237645 - RNA, 32 nt, Homo Sapiens
uuguugaaaaauaaauuucauccucacuuaug

SEQ ID NO: 237646 - RNA, 32 nt, Homo Sapiens
gccguccuggcgccuggcaguccgugggacgg

SEQ ID NO: 237647 - RNA, 32 nt, Homo Sapiens
cacguagaagcaccuugaaaucuguaaaacca

SEQ ID NO: 237648 - RNA, 32 nt, Homo Sapiens
uccucaccugucucagccccucuagaaccccc

SEQ ID NO: 237649 - RNA, 32 nt, Homo Sapiens
uacaccccacuuugacccucgaccacaccuga

SEQ ID NO: 237650 - RNA, 32 nt, Homo Sapiens
uuuuuuauuauuaaaagcaaguuucuuuguau

SEQ ID NO: 237651 - RNA, 32 nt, Homo Sapiens
aaagaugguugcagcuggagggggcggaaaaa

SEQ ID NO: 237652 - RNA, 32 nt, Homo Sapiens
gaaaauagugggaaauagaaaagugugugcaa

SEQ ID NO: 237653 - RNA, 32 nt, Homo Sapiens
gaacuuguuuuaauuuuugugguccuucuguu

SEQ ID NO: 237654 - RNA, 32 nt, Homo Sapiens
aaagaggauuugggaauacaguagcaaaacau

SEQ ID NO: 237655 - RNA, 32 nt, Homo Sapiens
acggcagggcccggcacccaugguugcguucg

SEQ ID NO: 237656 - RNA, 32 nt, Homo Sapiens
agcagaggcuccuggccuucuucaagugcugc

SEQ ID NO: 237657 - RNA, 32 nt, Homo Sapiens
uggcguccggguggaggggccggagggcgggc

SEQ ID NO: 237658 - RNA, 32 nt, Homo Sapiens
uucuagacagaaaaucaagggaagcucaagac

SEQ ID NO: 237659 - RNA, 32 nt, Homo Sapiens
ugagaaagcagaucaucuccaaaucuugccau

SEQ ID NO: 237660 - RNA, 32 nt, Homo Sapiens
ccuuuggaagaccaccuguguugaacauugcc

SEQ ID NO: 237661 - RNA, 32 nt, Homo Sapiens
uggucacuucucugaccuuccauuuucucagc

SEQ ID NO: 237662 - RNA, 32 nt, Homo Sapiens
gaccaagugcaauucagggccuuuuucuccac

SEQ ID NO: 237663 - RNA, 32 nt, Homo Sapiens
cccugcugcaugugggggccgaugggcagggg

SEQ ID NO: 237664 - RNA, 32 nt, Homo Sapiens
ugucaccaauuccaccaagacagugcugagau

SEQ ID NO: 237665 - RNA, 32 nt, Homo Sapiens
uaaaauaaaauaucuuuuuuugccuugaaaaa

SEQ ID NO: 237666 - RNA, 32 nt, Homo Sapiens
uacaguucaguuccucuuugcauggaauuugu

SEQ ID NO: 237667 - RNA, 32 nt, Homo Sapiens
uauccuagucaucaaagauaacaguucaucag

SEQ ID NO: 237668 - RNA, 32 nt, Homo Sapiens
ggauugcagaaagaaaaauguaggugauuaag

SEQ ID NO: 237669 - RNA, 32 nt, Homo Sapiens
guaauaugaaagauuuuaaaugaaaaaaauuu

SEQ ID NO: 237670 - RNA, 32 nt, Homo Sapiens
caccuguaccuccucccccuucaucauacaag

SEQ ID NO: 237671 - RNA, 32 nt, Homo Sapiens
acacacgcuccagcccaaauccuccugguggc

SEQ ID NO: 237672 - RNA, 32 nt, Homo Sapiens
gauagaaacaaucauauauaaagagaaacucu

SEQ ID NO: 237673 - RNA, 32 nt, Homo Sapiens
cuuagugaucuucgauuuuacucuguaauugu

SEQ ID NO: 237674 - RNA, 28 nt, Homo Sapiens
accauggcgggggaugugggcggucgca

SEQ ID NO: 237675 - RNA, 32 nt, Homo Sapiens
auuaugugcaauuaaguuguuaugacauaauu

SEQ ID NO: 237676 - RNA, 32 nt, Homo Sapiens
gcuggaucagggccuuccugccucccgcuggg

SEQ ID NO: 237677 - RNA, 32 nt, Homo Sapiens
guaagaauggacuuaaaaguacugcuggacag

SEQ ID NO: 237678 - RNA, 32 nt, Homo Sapiens
auggauguaaguuuuucuuuugucuaaaguaa

SEQ ID NO: 237679 - RNA, 32 nt, Homo Sapiens
gauggagucucgcuccgucacccaggcuggag

SEQ ID NO: 237680 - RNA, 32 nt, Homo Sapiens
aucuugcaggaagagauuguauuagauauuau

SEQ ID NO: 237681 - RNA, 32 nt, Homo Sapiens
cagagugugcccgugcgccgccgccgucguac

SEQ ID NO: 237682 - RNA, 32 nt, Homo Sapiens
cugguuuccuauuugcaguuacuugaauuaaa

SEQ ID NO: 237683 - RNA, 31 nt, Homo Sapiens
cacaggcagccgucugugccccgcacacauu

SEQ ID NO: 237684 - RNA, 32 nt, Homo Sapiens
ccacggcagacacaccacguucuagcgggugg

SEQ ID NO: 237685 - RNA, 32 nt, Homo Sapiens
uuaauacuuucauuuuaagaauugcauagcag

SEQ ID NO: 237686 - RNA, 32 nt, Homo Sapiens
uagcgcacccagagaaaauuaauuauauuucu

SEQ ID NO: 237687 - RNA, 32 nt, Homo Sapiens
acccaggagguagaggcugcagugagcaggga

SEQ ID NO: 237688 - RNA, 32 nt, Homo Sapiens
aaagauguguucugaugucuuauauuaagacc

SEQ ID NO: 237689 - RNA, 32 nt, Homo Sapiens
accucagcuuauuacagaagugccaaggggau

SEQ ID NO: 237690 - RNA, 32 nt, Homo Sapiens
augauuacaauuuuuuccuuugcagaugccuu

SEQ ID NO: 237691 - RNA, 32 nt, Homo Sapiens
ccagggucccgcacgaccuccucgggggcucc

SEQ ID NO: 237692 - RNA, 32 nt, Homo Sapiens
aucccaugaucacuucaaccacaggccuuuga

SEQ ID NO: 237693 - RNA, 32 nt, Homo Sapiens
acagaaauucuaguaauggcagcacaggcaac

SEQ ID NO: 237694 - RNA, 32 nt, Homo Sapiens
ccucagaucuccuaccucuccuuaagucuugu

SEQ ID NO: 237695 - RNA, 32 nt, Homo Sapiens
cccgugggagcgucgcgccgcggaggcagccg

SEQ ID NO: 237696 - RNA, 32 nt, Homo Sapiens
guccugacuuggaugccuauguuguaauacca

SEQ ID NO: 237697 - RNA, 32 nt, Homo Sapiens
agaugugugacggcugcagaccagguguuuuu

SEQ ID NO: 237698 - RNA, 32 nt, Homo Sapiens
auuaauuuggagcacaaaauucaaagcaugga

SEQ ID NO: 237699 - RNA, 32 nt, Homo Sapiens
gggcucaauacaaaauaaaaauguaggggcuc

SEQ ID NO: 237700 - RNA, 32 nt, Homo Sapiens
ccagcccauggcgaaccccgggcuggggcugc

SEQ ID NO: 237701 - RNA, 32 nt, Homo Sapiens
ugcaacauuucuugauacugcacuauagagaa

SEQ ID NO: 237702 - RNA, 32 nt, Homo Sapiens
acuuuucuuuuggcagguacuuggaugcauuu

SEQ ID NO: 237703 - RNA, 32 nt, Homo Sapiens
aaccagugcaucccgcuuuuguauaaugaaga

SEQ ID NO: 237704 - RNA, 32 nt, Homo Sapiens
agauuuuugaggagaaauauuuucaugauguc

SEQ ID NO: 237705 - RNA, 32 nt, Homo Sapiens
agguaugugggaggaguggugagaucauagcu

SEQ ID NO: 237706 - RNA, 32 nt, Homo Sapiens
uaguaacucacuuuuccauauauuuugaaugu

SEQ ID NO: 237707 - RNA, 32 nt, Homo Sapiens
acauuguuaauugucugcuuugcaauagcaaa

SEQ ID NO: 237708 - RNA, 32 nt, Homo Sapiens
gcuggcuuuucuccaaugaacauugaaaucuu

SEQ ID NO: 237709 - RNA, 32 nt, Homo Sapiens
caggugcugugaugaaacuaugcugagugcau

SEQ ID NO: 237710 - RNA, 32 nt, Homo Sapiens
auggguauugguuaaaggggacuucagcuuuu

SEQ ID NO: 237711 - RNA, 32 nt, Homo Sapiens
aaagaaauuauaauaaaagggauacuuugcuu

SEQ ID NO: 237712 - RNA, 32 nt, Homo Sapiens
ugacguggaucagggcuaugggugcugaugcu

SEQ ID NO: 237713 - RNA, 32 nt, Homo Sapiens
gcagaggagaggaacuccauuauccuuacagu

SEQ ID NO: 237714 - RNA, 32 nt, Homo Sapiens
ugugccauauaaaaauacaaagccucuuguca

SEQ ID NO: 237715 - RNA, 32 nt, Homo Sapiens
ccugggccagacuccccucccccucauguacu

SEQ ID NO: 237716 - RNA, 32 nt, Homo Sapiens
acacaggugcugucagcccagggugggagcag

SEQ ID NO: 237717 - RNA, 32 nt, Homo Sapiens
cuaaugaaacaauguuuuuauagauggugugg

SEQ ID NO: 237718 - RNA, 32 nt, Homo Sapiens
ucugcuggugacuggaggagggaccagaauga

SEQ ID NO: 237719 - RNA, 32 nt, Homo Sapiens
acugccccaugccccagggugcggaccccuug

SEQ ID NO: 237720 - RNA, 32 nt, Homo Sapiens
uaaguguaaaaugcaaguggcaaaacacuaug

SEQ ID NO: 237721 - RNA, 32 nt, Homo Sapiens
acguuaacagcacauuugaaugccuuauucua

SEQ ID NO: 237722 - RNA, 32 nt, Homo Sapiens
uuccugaccgccuucugccgcggccggguuug

SEQ ID NO: 237723 - RNA, 30 nt, Homo Sapiens
cuccgcccguagcugucgggucccggcccc

SEQ ID NO: 237724 - RNA, 32 nt, Homo Sapiens
ucuugaaacaggacguccgcucgggggcggcc

SEQ ID NO: 237725 - RNA, 32 nt, Homo Sapiens
uggggaggggacgaguucuacccaccucccca

SEQ ID NO: 237726 - RNA, 32 nt, Homo Sapiens
cagcuugagaaacacaaugauauuugugccau

SEQ ID NO: 237727 - RNA, 32 nt, Homo Sapiens
uuaccaucaauauauguuuugacaucccgcca

SEQ ID NO: 237728 - RNA, 32 nt, Homo Sapiens
ccaugcacagugaguacagaguauugauaugc

SEQ ID NO: 237729 - RNA, 32 nt, Homo Sapiens
uuuaaauuauauauuucuaggauaguuauauu

SEQ ID NO: 237730 - RNA, 32 nt, Homo Sapiens
ugccaagcggcugcagggugguaggaucccag

SEQ ID NO: 237731 - RNA, 32 nt, Homo Sapiens
gaaauguuugcaagauaggccaaaaugaguac

SEQ ID NO: 237732 - RNA, 31 nt, Homo Sapiens
gcugggcagcgcauuuuaacuuuuacuagac

SEQ ID NO: 237733 - RNA, 32 nt, Homo Sapiens
gcccgagccgcgggacaccgucgcuccugcuc

SEQ ID NO: 237734 - RNA, 32 nt, Homo Sapiens
aaaauacaaaaauuagcccgacaugguggcgc

SEQ ID NO: 237735 - RNA, 32 nt, Homo Sapiens
gggccaaggugggauuuguaaagcuuuacaau

SEQ ID NO: 237736 - RNA, 32 nt, Homo Sapiens
uaaaauuaaucucuuccgaaaauauccacuag

SEQ ID NO: 237737 - RNA, 32 nt, Homo Sapiens
aguuaguguugcaucugauuuucagguguaca

SEQ ID NO: 237738 - RNA, 32 nt, Homo Sapiens
uacaggcgcuggccacacacccagcugauugu

SEQ ID NO: 237739 - RNA, 32 nt, Homo Sapiens
uaagaauaaagucuuguuaauuacuauauuuu

SEQ ID NO: 237740 - RNA, 32 nt, Homo Sapiens
caccacugcccugacaggaaccucaagagcaa

SEQ ID NO: 237741 - RNA, 32 nt, Homo Sapiens
cugccggcaaugaaauaggggugcuguuugca

SEQ ID NO: 237742 - RNA, 32 nt, Homo Sapiens
ggcuguauuucugcaguuucgguuuucauuug

SEQ ID NO: 237743 - RNA, 32 nt, Homo Sapiens
cgacuggucuaauuacucuuucugccugaugc

SEQ ID NO: 237744 - RNA, 32 nt, Homo Sapiens
caagacccuggcccucuccucugcccagccgg

SEQ ID NO: 237745 - RNA, 32 nt, Homo Sapiens
cucuucaucccucauucucuuguauggcaaac

SEQ ID NO: 237746 - RNA, 32 nt, Homo Sapiens
uuuugaacuuuuauuucuuuuuaaauuugccu

SEQ ID NO: 237747 - RNA, 32 nt, Homo Sapiens
gaaagaaucugugguccaggaggaaaauuccu

SEQ ID NO: 237748 - RNA, 32 nt, Homo Sapiens
auaacagaauguuuauuuaaugugcuguccau

SEQ ID NO: 237749 - RNA, 32 nt, Homo Sapiens
cauaaaacccucauucacacgagaaaacaccc

SEQ ID NO: 237750 - RNA, 32 nt, Homo Sapiens
uucugugaagcuaauacaauggucauuuccag

SEQ ID NO: 237751 - RNA, 32 nt, Homo Sapiens
cccucuggaaggaaacaaaacaaaacaaaacu

SEQ ID NO: 237752 - RNA, 32 nt, Homo Sapiens
cugggagagaauaaauuugucauacgugguua

SEQ ID NO: 237753 - RNA, 32 nt, Homo Sapiens
guuugacaaacacagccaaggggauauuuacu

SEQ ID NO: 237754 - RNA, 32 nt, Homo Sapiens
ucucaaaacaaaacaaaacaaaacacuguauc

SEQ ID NO: 237755 - RNA, 32 nt, Homo Sapiens
gagcccccgccuugcacugcgccugccccacg

SEQ ID NO: 237756 - RNA, 32 nt, Homo Sapiens
gccugggcacucccuccucccugcgcccacag

SEQ ID NO: 237757 - RNA, 32 nt, Homo Sapiens
cuauaguucacugacacaguaaaauuaacucu

SEQ ID NO: 237758 - RNA, 32 nt, Homo Sapiens
gccugcugauccugaggccuggacaaauggga

SEQ ID NO: 237759 - RNA, 32 nt, Homo Sapiens
auauaugucugcacuuuuaaugcuccucuuaa

SEQ ID NO: 237760 - RNA, 32 nt, Homo Sapiens
ugguaggucucucauuacgcagcuaauacuca

SEQ ID NO: 237761 - RNA, 31 nt, Homo Sapiens
gagcaggagccccaagggaggcuuggcggcu

SEQ ID NO: 237762 - RNA, 32 nt, Homo Sapiens
auuuuuguauaaauuacuuucaggcuauaugu

SEQ ID NO: 237763 - RNA, 32 nt, Homo Sapiens
cguccggugggacagugucuccagguagugag

SEQ ID NO: 237764 - RNA, 32 nt, Homo Sapiens
uaaauuuuacuuuucaugcuuauauaguuuca

SEQ ID NO: 237765 - RNA, 32 nt, Homo Sapiens
ccagugccagaugugcccccacuuccugccuc

SEQ ID NO: 237766 - RNA, 32 nt, Homo Sapiens
ugugauaauguuuugcacuuuuucguacaggg

SEQ ID NO: 237767 - RNA, 32 nt, Homo Sapiens
ccauucuuucagcagcacaugccacguucuaa

SEQ ID NO: 237768 - RNA, 32 nt, Homo Sapiens
uugaaagauaaaauguuuuaccucacuguugg

SEQ ID NO: 237769 - RNA, 32 nt, Homo Sapiens
ccacccgccugcgcuccgccgacgcccuugga

SEQ ID NO: 237770 - RNA, 32 nt, Homo Sapiens
ccacugcucugcgggcggguggucuuagcucc

SEQ ID NO: 237771 - RNA, 32 nt, Homo Sapiens
cgcacacaggagggaggccuagcugcucagag

SEQ ID NO: 237772 - RNA, 32 nt, Homo Sapiens
ccccucaggaucacuccccagcccuuuccuca

SEQ ID NO: 237773 - RNA, 32 nt, Homo Sapiens
ucauggauauuguagguuuccuuaugcuguuu

SEQ ID NO: 237774 - RNA, 32 nt, Homo Sapiens
ucauaaagaaccugcugauaaaacagguugca

SEQ ID NO: 237775 - RNA, 32 nt, Homo Sapiens
acugccucaagggcuacgucaaccacagccug

SEQ ID NO: 237776 - RNA, 32 nt, Homo Sapiens
agagacagccugggccgguccucacucacugu

SEQ ID NO: 237777 - RNA, 32 nt, Homo Sapiens
ggcaaaucuucagcuugcagcacucacuuugc

SEQ ID NO: 237778 - RNA, 32 nt, Homo Sapiens
agcgggcuccggcgucccacucucccuuccau

SEQ ID NO: 237779 - RNA, 32 nt, Homo Sapiens
guucacugucuccucccagguucaacagacau

SEQ ID NO: 237780 - RNA, 32 nt, Homo Sapiens
cccuggcagcaggaggcccagcuccgcaggca

SEQ ID NO: 237781 - RNA, 32 nt, Homo Sapiens
cauguucgcucuuuauuuccuauguaauucuc

SEQ ID NO: 237782 - RNA, 32 nt, Homo Sapiens
agauaaagaacaaugugcugaagagaacauac

SEQ ID NO: 237783 - RNA, 29 nt, Homo Sapiens
uaugggggcaucugggcccagggcagcug

SEQ ID NO: 237784 - RNA, 32 nt, Homo Sapiens
caccuuucuaauuauuaacuuguuuucaugga

SEQ ID NO: 237785 - RNA, 32 nt, Homo Sapiens
ccugguauuuauagguaugucuauuguuuuau

SEQ ID NO: 237786 - RNA, 32 nt, Homo Sapiens
ggaccgcaggcacacaucacugugccuggcua

SEQ ID NO: 237787 - RNA, 32 nt, Homo Sapiens
gacaaccuuucuguagccuaaaacgaaugguc

SEQ ID NO: 237788 - RNA, 29 nt, Homo Sapiens
caucauggcggagccgagcggcucgcccg

SEQ ID NO: 237789 - RNA, 32 nt, Homo Sapiens
caacaccccucccccacccaacugcucucuua

SEQ ID NO: 237790 - RNA, 32 nt, Homo Sapiens
gcugaaugaagaucagagccgggagcccccug

SEQ ID NO: 237791 - RNA, 32 nt, Homo Sapiens
ccuggcaucugugagcagcugccaggcuccgg

SEQ ID NO: 237792 - RNA, 32 nt, Homo Sapiens
ugcauuuuucuuuuugauuacaaaauuuauaa

SEQ ID NO: 237793 - RNA, 32 nt, Homo Sapiens
aucugcauuuuuuauucuuuuauaugacuuuu

SEQ ID NO: 237794 - RNA, 32 nt, Homo Sapiens
ccuccccaccucagccuggggaggagaagcug

SEQ ID NO: 237795 - RNA, 32 nt, Homo Sapiens
acaacuguccuuuucuccccaccaccccuccu

SEQ ID NO: 237796 - RNA, 32 nt, Homo Sapiens
gcaggggccuccuccgccccugcccagcgcau

SEQ ID NO: 237797 - RNA, 32 nt, Homo Sapiens
cucuagcuccuccagcaguucauccuggauag

SEQ ID NO: 237798 - RNA, 32 nt, Homo Sapiens
gcuucguguucaugcuggccaugcaugucauc

SEQ ID NO: 237799 - RNA, 32 nt, Homo Sapiens
acuggcagccagccucuguuucugggaggaug

SEQ ID NO: 237800 - RNA, 32 nt, Homo Sapiens
agugacgucaaccugaagucguggugaagagc

SEQ ID NO: 237801 - RNA, 32 nt, Homo Sapiens
guaauaauacaguguuuauaugugugugagag

SEQ ID NO: 237802 - RNA, 32 nt, Homo Sapiens
aacaaacugaaaucuuugagaucacacagguu

SEQ ID NO: 237803 - RNA, 32 nt, Homo Sapiens
cagcauggaggaucauaagauagcaaaaccau

SEQ ID NO: 237804 - RNA, 32 nt, Homo Sapiens
uauauaaaaacccaaauaaauaaaauggacag

SEQ ID NO: 237805 - RNA, 32 nt, Homo Sapiens
uaagaaggccccacuuggcuauuucauaucua

SEQ ID NO: 237806 - RNA, 32 nt, Homo Sapiens
ccgagucccgcacucccccacuguaaacuauu

SEQ ID NO: 237807 - RNA, 32 nt, Homo Sapiens
uuuugucaucccaagagcuguguuacacuuua

SEQ ID NO: 237808 - RNA, 32 nt, Homo Sapiens
auucuucaaugagaguuucauguuccaacaag

SEQ ID NO: 237809 - RNA, 32 nt, Homo Sapiens
gcugagaggcugccuccgcaccugacugcugc

SEQ ID NO: 237810 - RNA, 32 nt, Homo Sapiens
uugugccugcagcagagccugcagaagcuaau

SEQ ID NO: 237811 - RNA, 32 nt, Homo Sapiens
ccuggucaccaggccuggcccccaagugcccu

SEQ ID NO: 237812 - RNA, 32 nt, Homo Sapiens
uaaacaaaaaauacuauaaaaccccugaccac

SEQ ID NO: 237813 - RNA, 32 nt, Homo Sapiens
ccaaagcacagaguggcaaacaaaacccgagc

SEQ ID NO: 237814 - RNA, 32 nt, Homo Sapiens
gcucauuuuccacagccuagauuuuccaaucu

SEQ ID NO: 237815 - RNA, 32 nt, Homo Sapiens
cugcugcugcuacugcugcugcugcugccgcc

SEQ ID NO: 237816 - RNA, 32 nt, Homo Sapiens
auguuauuaaugcuauccuuaagcaacauaca

SEQ ID NO: 237817 - RNA, 32 nt, Homo Sapiens
ccgccggcguucggcgcugcgcagagccaugg

SEQ ID NO: 237818 - RNA, 32 nt, Homo Sapiens
gcgcagaggagaaaaaucucugcucuugggcg

SEQ ID NO: 237819 - RNA, 32 nt, Homo Sapiens
gagugccccaaccccaccucacaaucuucaca

SEQ ID NO: 237820 - RNA, 32 nt, Homo Sapiens
aucuugaaacgugacaguaaccaagagauaaa

SEQ ID NO: 237821 - RNA, 32 nt, Homo Sapiens
caggcccugccaucgugucucaucuugcuguu

SEQ ID NO: 237822 - RNA, 32 nt, Homo Sapiens
aggaaggggucccgcccucccgccagaggccu

SEQ ID NO: 237823 - RNA, 32 nt, Homo Sapiens
gagagcagcaaccuaaacgaagaggacacugg

SEQ ID NO: 237824 - RNA, 32 nt, Homo Sapiens
aucaaaauuucuauuucuuuugcuuaaggaau

SEQ ID NO: 237825 - RNA, 32 nt, Homo Sapiens
ucucgguggccguccgcccacuccgcggcguu

SEQ ID NO: 237826 - RNA, 32 nt, Homo Sapiens
gggaguucagcaguaacagccaggugaagcga

SEQ ID NO: 237827 - RNA, 32 nt, Homo Sapiens
gcucaacaccuuuugcccuccuccccugccac

SEQ ID NO: 237828 - RNA, 32 nt, Homo Sapiens
aucccaaggugaugguauuugaagguagggcc

SEQ ID NO: 237829 - RNA, 32 nt, Homo Sapiens
agaaggagcaagagaagaagaucucaaaauac

SEQ ID NO: 237830 - RNA, 32 nt, Homo Sapiens
gcuucuugagcuagggaccauuccuccagggc

SEQ ID NO: 237831 - RNA, 32 nt, Homo Sapiens
ugaauaaucagucagacuaaaaccaaaauugu

SEQ ID NO: 237832 - RNA, 32 nt, Homo Sapiens
agagaucaugagguaaauaauuuuaauaagcu

SEQ ID NO: 237833 - RNA, 32 nt, Homo Sapiens
agcagcccugccaggggugcuguuucaggcug

SEQ ID NO: 237834 - RNA, 32 nt, Homo Sapiens
uauaauauguaauauuugauaucuauaaagag

SEQ ID NO: 237835 - RNA, 32 nt, Homo Sapiens
uagucuuagucuuuuuaggagugauuuugcua

SEQ ID NO: 237836 - RNA, 32 nt, Homo Sapiens
gacagcagcccuggugccccagccugcuaggg

SEQ ID NO: 237837 - RNA, 32 nt, Homo Sapiens
agucaccagacaaggccagcccugcccacagc

SEQ ID NO: 237838 - RNA, 32 nt, Homo Sapiens
aauguacuauauuguagucauuuuaaaguaca

SEQ ID NO: 237839 - RNA, 32 nt, Homo Sapiens
cagccgugggccccgccccggcguccggagca

SEQ ID NO: 237840 - RNA, 32 nt, Homo Sapiens
uagagacauugugaaaucaaaucuuguguuau

SEQ ID NO: 237841 - RNA, 32 nt, Homo Sapiens
gacccaccagugcgcuugggugcaccagcccc

SEQ ID NO: 237842 - RNA, 32 nt, Homo Sapiens
gagaggacaaugaaaucagcaugaaaacaucc

SEQ ID NO: 237843 - RNA, 32 nt, Homo Sapiens
cagggccgccgugcuggucaccacguggccug

SEQ ID NO: 237844 - RNA, 32 nt, Homo Sapiens
ugccaggcggugcgggacgugccucccgugug

SEQ ID NO: 237845 - RNA, 32 nt, Homo Sapiens
ccacacuacauaucaguauuuucuaucuguau

SEQ ID NO: 237846 - RNA, 32 nt, Homo Sapiens
uuuuccguguuguuugaaagugccgaacaguu

SEQ ID NO: 237847 - RNA, 32 nt, Homo Sapiens
ccccuggcugucagcagcacuguguccaggcu

SEQ ID NO: 237848 - RNA, 32 nt, Homo Sapiens
gggccaggugccgaggauggccaggcagccac

SEQ ID NO: 237849 - RNA, 32 nt, Homo Sapiens
cucugugagcucugaaauauauuuuuggguua

SEQ ID NO: 237850 - RNA, 32 nt, Homo Sapiens
auauuuuggccauguuucucccuacccucuuu

SEQ ID NO: 237851 - RNA, 32 nt, Homo Sapiens
uauguuggaaaacauuuuuguaaaauguacaa

SEQ ID NO: 237852 - RNA, 32 nt, Homo Sapiens
guggggguguuccaucccucuguucaguugug

SEQ ID NO: 237853 - RNA, 32 nt, Homo Sapiens
gaugauagacacaaguccagaucucggauuuu

SEQ ID NO: 237854 - RNA, 32 nt, Homo Sapiens
acacuccauauuucuuuuuuuuggaaaugaaa

SEQ ID NO: 237855 - RNA, 32 nt, Homo Sapiens
ggcgccugccugugcuggcccauggaacggag

SEQ ID NO: 237856 - RNA, 32 nt, Homo Sapiens
agugggaggagucuuaaagaauuuauagacau

SEQ ID NO: 237857 - RNA, 32 nt, Homo Sapiens
uuucuguaaguucaaaucaauguuuaaauuau

SEQ ID NO: 237858 - RNA, 32 nt, Homo Sapiens
cgaucgcccacucgggcgcccggccgggccug

SEQ ID NO: 237859 - RNA, 32 nt, Homo Sapiens
cagcggcggaagcggcgagggcggcgggcguc

SEQ ID NO: 237860 - RNA, 32 nt, Homo Sapiens
ucacuucugcuccgcccucccugcuccccaua

SEQ ID NO: 237861 - RNA, 32 nt, Homo Sapiens
ccgaaaauuaugaaaugaaaguugcaucacac

SEQ ID NO: 237862 - RNA, 32 nt, Homo Sapiens
ccacucugagccucucucuccuccuauuuuac

SEQ ID NO: 237863 - RNA, 32 nt, Homo Sapiens
ucucugagcguucgcacugucaugcuucccag

SEQ ID NO: 237864 - RNA, 32 nt, Homo Sapiens
uaaccacuauacauaguuucuuuuguacuuga

SEQ ID NO: 237865 - RNA, 32 nt, Homo Sapiens
cauaccauuucccuugcagauuugcagaaaca

SEQ ID NO: 237866 - RNA, 32 nt, Homo Sapiens
ucuggcagaggccgaccuccaaggcucuguuc

SEQ ID NO: 237867 - RNA, 32 nt, Homo Sapiens
agaguuucuuucugaagugcucuuugauuacc

SEQ ID NO: 237868 - RNA, 32 nt, Homo Sapiens
cccaguuauaaacugaaaacagcuauuuacaa

SEQ ID NO: 237869 - RNA, 32 nt, Homo Sapiens
uggagaguuucuguuaggaaaagccauacauu

SEQ ID NO: 237870 - RNA, 32 nt, Homo Sapiens
ugcuggaaggcacggguccacuucuuaaccuu

SEQ ID NO: 237871 - RNA, 32 nt, Homo Sapiens
ucaccuccagcaucaugcaggccaugcgcuca

SEQ ID NO: 237872 - RNA, 32 nt, Homo Sapiens
gcgcuccgaccucggccgggaggcuccugggg

SEQ ID NO: 237873 - RNA, 32 nt, Homo Sapiens
gccaugcgcaggugcuugcgcccguucuucag

SEQ ID NO: 237874 - RNA, 32 nt, Homo Sapiens
gauuuuuauuuucucugucugaagaaccagcc

SEQ ID NO: 237875 - RNA, 32 nt, Homo Sapiens
ugcaaaggggaacugaggaaguaggaggccac

SEQ ID NO: 237876 - RNA, 32 nt, Homo Sapiens
ucggccgcuugcacccgcucucuguuguacac

SEQ ID NO: 237877 - RNA, 32 nt, Homo Sapiens
ucagaaaaacaucagggaguaaacaaugccaa

SEQ ID NO: 237878 - RNA, 32 nt, Homo Sapiens
auaaggacuuuaaaaguggacugcuuuucaaa

SEQ ID NO: 237879 - RNA, 32 nt, Homo Sapiens
cccccaggcagugcugcagagcaguuggugua

SEQ ID NO: 237880 - RNA, 29 nt, Homo Sapiens
ccccuuucuaucccaaucaccaauagaaa

SEQ ID NO: 237881 - RNA, 30 nt, Homo Sapiens
gggugaggagguggaugaggauugaacggg

SEQ ID NO: 237882 - RNA, 32 nt, Homo Sapiens
aauagccgugcacucuugaccccgucaacguc

SEQ ID NO: 237883 - RNA, 32 nt, Homo Sapiens
aagugauugugaaaaugaugucuacccgccuu

SEQ ID NO: 237884 - RNA, 32 nt, Homo Sapiens
uugaguucguuccacacagcaagaugugggaa

SEQ ID NO: 237885 - RNA, 32 nt, Homo Sapiens
acccucccaagccuccccacucugugccuugg

SEQ ID NO: 237886 - RNA, 31 nt, Homo Sapiens
ggucaugcgggccccacaggagaagcggcca

SEQ ID NO: 237887 - RNA, 32 nt, Homo Sapiens
uaucagcuacaaaauauauucaacuuugacuu

SEQ ID NO: 237888 - RNA, 32 nt, Homo Sapiens
uaaaagaaagcuuuuuuguagaauuuuugaaa

SEQ ID NO: 237889 - RNA, 32 nt, Homo Sapiens
gaugacgaugauauuuaucccuuaaacuugcu

SEQ ID NO: 237890 - RNA, 32 nt, Homo Sapiens
uuuucuggaagacacugcugcuuuuaccauca

SEQ ID NO: 237891 - RNA, 32 nt, Homo Sapiens
ccggccucauuuccucggaaaaucccugcuuu

SEQ ID NO: 237892 - RNA, 32 nt, Homo Sapiens
uccaggucccgccgcgccaguucgccuccgca

SEQ ID NO: 237893 - RNA, 32 nt, Homo Sapiens
gauuuaaaacaauaauaaacauaauauggaac

SEQ ID NO: 237894 - RNA, 32 nt, Homo Sapiens
ggcuugcagcgggcggugucguucacgcuccu

SEQ ID NO: 237895 - RNA, 32 nt, Homo Sapiens
aauuuguuucugaagaaauuugccgagaguua

SEQ ID NO: 237896 - RNA, 32 nt, Homo Sapiens
ucggauacaggaagaaaagggagaggugagcu

SEQ ID NO: 237897 - RNA, 32 nt, Homo Sapiens
uuggcccaauuucucucacuucugcaugaagu

SEQ ID NO: 237898 - RNA, 32 nt, Homo Sapiens
ugugaaaugaauuuggaaauaaugcaagaagg

SEQ ID NO: 237899 - RNA, 32 nt, Homo Sapiens
agccuuuuuuuuuuuuuuuuuaaauaccauau

SEQ ID NO: 237900 - RNA, 32 nt, Homo Sapiens
uacuacugcacagcugacaauggcuuuggucc

SEQ ID NO: 237901 - RNA, 32 nt, Homo Sapiens
uuguaugauuaauugauuuaaauaaugcuuag

SEQ ID NO: 237902 - RNA, 32 nt, Homo Sapiens
uguggagcugucugauuccugauccuguccgu

SEQ ID NO: 237903 - RNA, 32 nt, Homo Sapiens
gccccagaauggcgcuggcccgcggcgcugcg

SEQ ID NO: 237904 - RNA, 32 nt, Homo Sapiens
uuugcauauaaaagguagacagcugauauguu

SEQ ID NO: 237905 - RNA, 32 nt, Homo Sapiens
uacacuggaccuaggcaaaaccacugaagaac

SEQ ID NO: 237906 - RNA, 32 nt, Homo Sapiens
ggcauggccccgggguccugguggccacucgu

SEQ ID NO: 237907 - RNA, 32 nt, Homo Sapiens
cuacugaaaugguuuaaaaugaugccuuguau

SEQ ID NO: 237908 - RNA, 32 nt, Homo Sapiens
uugcaauaaaggaaagguuuguggcgccuguc

SEQ ID NO: 237909 - RNA, 32 nt, Homo Sapiens
uggcccuggagaauguaguccuuuuucucauu

SEQ ID NO: 237910 - RNA, 32 nt, Homo Sapiens
gaagaggggagcacgugcccccugcauccauu

SEQ ID NO: 237911 - RNA, 32 nt, Homo Sapiens
caccauccugguuuuucugacuguacagaauc

SEQ ID NO: 237912 - RNA, 32 nt, Homo Sapiens
aauuuaaaaaagauauaaggcaguacuguaaa

SEQ ID NO: 237913 - RNA, 32 nt, Homo Sapiens
caugggggcaggagcagagcagacacagcagc

SEQ ID NO: 237914 - RNA, 32 nt, Homo Sapiens
cagcacucugugccgccaccucuaccuguucc

SEQ ID NO: 237915 - RNA, 32 nt, Homo Sapiens
uggacauggccuauguaccuaacguggccuuc

SEQ ID NO: 237916 - RNA, 32 nt, Homo Sapiens
uugacaaauuuuacuaccauauguuauguaau

SEQ ID NO: 237917 - RNA, 32 nt, Homo Sapiens
ggagagugcacuagucacuggaggaagaggua

SEQ ID NO: 237918 - RNA, 32 nt, Homo Sapiens
gguguguggacgccgcuuuguugccugagaug

SEQ ID NO: 237919 - RNA, 32 nt, Homo Sapiens
uguuccggacagugggacagcucuacaaggag

SEQ ID NO: 237920 - RNA, 32 nt, Homo Sapiens
aguuaaagggcugaggguugaggugagaggca

SEQ ID NO: 237921 - RNA, 32 nt, Homo Sapiens
cguguauuacuuggucacuggaugcagaagua

SEQ ID NO: 237922 - RNA, 32 nt, Homo Sapiens
guuuuuauuucuguaacaauugcuuccaaaua

SEQ ID NO: 237923 - RNA, 32 nt, Homo Sapiens
ucuagucauuggcuucacauuagaagcaccag

SEQ ID NO: 237924 - RNA, 32 nt, Homo Sapiens
gacgcuggggaauauacgugcuuggcggguaa

SEQ ID NO: 237925 - RNA, 32 nt, Homo Sapiens
aucaccugggcgguucagagccagucaugggc

SEQ ID NO: 237926 - RNA, 32 nt, Homo Sapiens
guugaagggggaggaauagaaaaagacaaacu

SEQ ID NO: 237927 - RNA, 32 nt, Homo Sapiens
cucuccccaucugccuucuccucccccagaaa

SEQ ID NO: 237928 - RNA, 32 nt, Homo Sapiens
auauaagacaaagaagaaaauaaaaugagcua

SEQ ID NO: 237929 - RNA, 32 nt, Homo Sapiens
uaugauauuugcugccgagauguuauaacaag

SEQ ID NO: 237930 - RNA, 32 nt, Homo Sapiens
uuucaacccuccccgacucugcggcuccccuc

SEQ ID NO: 237931 - RNA, 32 nt, Homo Sapiens
ccaagccgcugccgggugcccgagggccgucg

SEQ ID NO: 237932 - RNA, 32 nt, Homo Sapiens
aagauucuacgaaaguuuuuuaacuauuaaag

SEQ ID NO: 237933 - RNA, 32 nt, Homo Sapiens
ccccagccuggggagaggucgcggcggcgggu

SEQ ID NO: 237934 - RNA, 32 nt, Homo Sapiens
auaaaaaacaaaugauggcaggauggcaggaa

SEQ ID NO: 237935 - RNA, 32 nt, Homo Sapiens
aaugacuugggucuugcuggccccugggugug

SEQ ID NO: 237936 - RNA, 32 nt, Homo Sapiens
ugggggaucccgggugaggaguguugccccau

SEQ ID NO: 237937 - RNA, 32 nt, Homo Sapiens
aacuauacaacuugagccagugaggcagauug

SEQ ID NO: 237938 - RNA, 32 nt, Homo Sapiens
acaucugggcgucccagucaguccucagugcu

SEQ ID NO: 237939 - RNA, 32 nt, Homo Sapiens
gugacucccucaugcucugguggugaggcuuc

SEQ ID NO: 237940 - RNA, 32 nt, Homo Sapiens
cugccccucccccuggcuucuuucucuuggga

SEQ ID NO: 237941 - RNA, 32 nt, Homo Sapiens
uuuugauuccugccuuuccccagccucagccc

SEQ ID NO: 237942 - RNA, 32 nt, Homo Sapiens
gccugcguccagccgcgccccauccccgaggc

SEQ ID NO: 237943 - RNA, 32 nt, Homo Sapiens
agcuggugcuuauugagauuugcuguauuuau

SEQ ID NO: 237944 - RNA, 32 nt, Homo Sapiens
uuuaaagaaccucaauacuacugcaguuacca

SEQ ID NO: 237945 - RNA, 32 nt, Homo Sapiens
acaauugacaaucuggacuaccccaagauggc

SEQ ID NO: 237946 - RNA, 32 nt, Homo Sapiens
acucaugcccacaugcacuuugauggagagcg

SEQ ID NO: 237947 - RNA, 32 nt, Homo Sapiens
ccgacccggggcgccucccgccaggcaccaug

SEQ ID NO: 237948 - RNA, 32 nt, Homo Sapiens
uccugugcagcagccccagcguguguccuggc

SEQ ID NO: 237949 - RNA, 32 nt, Homo Sapiens
aaaccuugugcuacuuaguaaaaauugauuac

SEQ ID NO: 237950 - RNA, 32 nt, Homo Sapiens
ccaugccggcccggcggcugcugcugcugcug

SEQ ID NO: 237951 - RNA, 32 nt, Homo Sapiens
aauucuuguauuaaguuuuuuccuuucaguuu

SEQ ID NO: 237952 - RNA, 32 nt, Homo Sapiens
cccuuucccagcccuccaccacuuccacccug

SEQ ID NO: 237953 - RNA, 27 nt, Homo Sapiens
uucauaugcuucuucaucucuccugcc

SEQ ID NO: 237954 - RNA, 32 nt, Homo Sapiens
aaccaaagccucuggggugcccccccgcccgc

SEQ ID NO: 237955 - RNA, 32 nt, Homo Sapiens
acugcagugggaaggugggagggagacggugg

SEQ ID NO: 237956 - RNA, 32 nt, Homo Sapiens
aaaauaaugcaauugggucacaguguuaaaaa

SEQ ID NO: 237957 - RNA, 32 nt, Homo Sapiens
cucagagcucccagcccuucuccuccugcuaa

SEQ ID NO: 237958 - RNA, 32 nt, Homo Sapiens
uccuacauaauacccaggauucccccaacaca

SEQ ID NO: 237959 - RNA, 32 nt, Homo Sapiens
acagcgggccccagggcuacccucccccagga

SEQ ID NO: 237960 - RNA, 32 nt, Homo Sapiens
acugcccacccccgugugcuggcucccucacu

SEQ ID NO: 237961 - RNA, 32 nt, Homo Sapiens
uuugcuuuuuccuuuuucuuucagguugaucu

SEQ ID NO: 237962 - RNA, 32 nt, Homo Sapiens
agggagcccaaggggacccugacaccgggccc

SEQ ID NO: 237963 - RNA, 32 nt, Homo Sapiens
aaugucacagaugaagaauauuaaaauuaggg

SEQ ID NO: 237964 - RNA, 32 nt, Homo Sapiens
guuucuguuucauaaauuguucucauaguuac

SEQ ID NO: 237965 - RNA, 32 nt, Homo Sapiens
gaguucacuccaggaacggccagugaccgaga

SEQ ID NO: 237966 - RNA, 32 nt, Homo Sapiens
ggccuuuuuuuuuuuuuuuuuaaacgagaaca

SEQ ID NO: 237967 - RNA, 32 nt, Homo Sapiens
gagagagagccgccgcgccggagccuccuucu

SEQ ID NO: 237968 - RNA, 32 nt, Homo Sapiens
auuccuuggaucccuugagaccaggaauucaa

SEQ ID NO: 237969 - RNA, 32 nt, Homo Sapiens
cuuccuucccuccuuuacuguauuagcaacaa

SEQ ID NO: 237970 - RNA, 31 nt, Homo Sapiens
cgagcgcugccgguggccgcagcggcgcacc

SEQ ID NO: 237971 - RNA, 32 nt, Homo Sapiens
gaggggcugccauggcggcggcgggccggcuc

SEQ ID NO: 237972 - RNA, 26 nt, Homo Sapiens
cauggggccccggcucagcgucuggc

SEQ ID NO: 237973 - RNA, 32 nt, Homo Sapiens
uuugaacuaugaaaagacccuguuugugaaua

SEQ ID NO: 237974 - RNA, 32 nt, Homo Sapiens
cuguacgcauucaauuuccuccccuccaaaca

SEQ ID NO: 237975 - RNA, 31 nt, Homo Sapiens
ccaggggagccccgacgccggcggggaggca

SEQ ID NO: 237976 - RNA, 32 nt, Homo Sapiens
caggggugcucccggugcugccugcagggcca

SEQ ID NO: 237977 - RNA, 32 nt, Homo Sapiens
uucccuucaacuuugcccuggaugcucagggg

SEQ ID NO: 237978 - RNA, 32 nt, Homo Sapiens
agaaaaaaaaauuuauuuaaaaauauuuuucg

SEQ ID NO: 237979 - RNA, 32 nt, Homo Sapiens
auucuacaagcucugaugucuagaccaggacc

SEQ ID NO: 237980 - RNA, 32 nt, Homo Sapiens
cgcagcuccgcacgggacccaggccgccggac

SEQ ID NO: 237981 - RNA, 32 nt, Homo Sapiens
gcaauggggugguaaggcaggcacgaagaguc

SEQ ID NO: 237982 - RNA, 32 nt, Homo Sapiens
auuauguuauuuauuuugauaguagcugaaac

SEQ ID NO: 237983 - RNA, 32 nt, Homo Sapiens
uucucuucugacuuuggcuacaucucauagua

SEQ ID NO: 237984 - RNA, 32 nt, Homo Sapiens
gagaaaugccuuugaagaucuacauuaagacu

SEQ ID NO: 237985 - RNA, 32 nt, Homo Sapiens
ucccuuuacugucaaucuucugucccaguagu

SEQ ID NO: 237986 - RNA, 31 nt, Homo Sapiens
aaggggacggcaacuccuccccgcgcccgcc

SEQ ID NO: 237987 - RNA, 32 nt, Homo Sapiens
ccagagaaugacaugaauccagcaaauaggau

SEQ ID NO: 237988 - RNA, 32 nt, Homo Sapiens
ugcccaaauccucgcaggcagcucaucaacgc

SEQ ID NO: 237989 - RNA, 32 nt, Homo Sapiens
accagugaugccucaaagacaguguccccucc

SEQ ID NO: 237990 - RNA, 32 nt, Homo Sapiens
uauugggagaaaugacuugugcccuaaacaac

SEQ ID NO: 237991 - RNA, 32 nt, Homo Sapiens
gugcagugggaacgguggggcuggcuggugcu

SEQ ID NO: 237992 - RNA, 32 nt, Homo Sapiens
caagacgagcgcggucgcggaaguaucgcggc

SEQ ID NO: 237993 - RNA, 32 nt, Homo Sapiens
cccgagcccccuccccuccccuccagggugcc

SEQ ID NO: 237994 - RNA, 31 nt, Homo Sapiens
ucuucuggugcuacagcuccaagggcccuuc

SEQ ID NO: 237995 - RNA, 32 nt, Homo Sapiens
ggauccccaagcccaggaguuugaggcugcag

SEQ ID NO: 237996 - RNA, 27 nt, Homo Sapiens
aagaaacauuaauuuuauguauaguga

SEQ ID NO: 237997 - RNA, 27 nt, Homo Sapiens
ugcauuuguuaauucugaauguauuuu

SEQ ID NO: 237998 - RNA, 32 nt, Homo Sapiens
ggcugggaggagccccuggacaugccuguccu

SEQ ID NO: 237999 - RNA, 32 nt, Homo Sapiens
accagccuggcuaacacagugaaaccccgucu

SEQ ID NO: 238000 - RNA, 32 nt, Homo Sapiens
gaacaccuuccguaucagacaccuggcacaca

SEQ ID NO: 238001 - RNA, 32 nt, Homo Sapiens
auccaguguugggaagcuuuugccauauguuu

SEQ ID NO: 238002 - RNA, 30 nt, Homo Sapiens
cuugaacauuuuaauauuuguggugaguaa

SEQ ID NO: 238003 - RNA, 32 nt, Homo Sapiens
aggcggccugcgcggcggagugcugagucccg

SEQ ID NO: 238004 - RNA, 32 nt, Homo Sapiens
agucuuuugugucagugucuuaaaggggccug

SEQ ID NO: 238005 - RNA, 32 nt, Homo Sapiens
aaaaaacgaugaugauguuaaccuaucuaucu

SEQ ID NO: 238006 - RNA, 32 nt, Homo Sapiens
ccccucaaugccauccugacacacuuuaugca

SEQ ID NO: 238007 - RNA, 32 nt, Homo Sapiens
ggcugagcacugugaggccuggaugugaagac

SEQ ID NO: 238008 - RNA, 32 nt, Homo Sapiens
gaguggcggugcgaccccagggcgugggcccg

SEQ ID NO: 238009 - RNA, 32 nt, Homo Sapiens
gguuuuaucuguucuuuuugucacuguuaauu

SEQ ID NO: 238010 - RNA, 32 nt, Homo Sapiens
gaacaagccuauuuccauuuugaaaguagauu

SEQ ID NO: 238011 - RNA, 32 nt, Homo Sapiens
gagcugagcaggguacaggacaacacaggaga

SEQ ID NO: 238012 - RNA, 32 nt, Homo Sapiens
guaaauguggaggccauagaaauaguaauaag

SEQ ID NO: 238013 - RNA, 32 nt, Homo Sapiens
guuuuaaguauuuuaagagguauugagacuaa

SEQ ID NO: 238014 - RNA, 32 nt, Homo Sapiens
auaucaaacuauauuucauguugcauagauuu

SEQ ID NO: 238015 - RNA, 32 nt, Homo Sapiens
agagccgagccgcugcagcugcggcggcggca

SEQ ID NO: 238016 - RNA, 32 nt, Homo Sapiens
gugaggaaaaacucccauaucauauaaaauuu

SEQ ID NO: 238017 - RNA, 32 nt, Homo Sapiens
ugagcacccacagugggguauucuucauaagu

SEQ ID NO: 238018 - RNA, 32 nt, Homo Sapiens
cccaguguuggccuuacgcauggucggcagga

SEQ ID NO: 238019 - RNA, 31 nt, Homo Sapiens
auggacaaagaaaacagcgauguuucagccg

SEQ ID NO: 238020 - RNA, 32 nt, Homo Sapiens
gacccgggcccggcccgugugcguccucgacg

SEQ ID NO: 238021 - RNA, 32 nt, Homo Sapiens
auuauaaguucuauguauaauuuuaacuguuc

SEQ ID NO: 238022 - RNA, 32 nt, Homo Sapiens
gagcuuuccagaacaggcagagcucuagagac

SEQ ID NO: 238023 - RNA, 32 nt, Homo Sapiens
gccacucuaaccagcgcaaaaugucccuggaa

SEQ ID NO: 238024 - RNA, 32 nt, Homo Sapiens
ucaucuugcugagucaucaucaucaucaucau

SEQ ID NO: 238025 - RNA, 30 nt, Homo Sapiens
agaagaugcgcagcuccacgcugcaggacc

SEQ ID NO: 238026 - RNA, 32 nt, Homo Sapiens
acuaaugugaggaaacaaacacguucaggccc

SEQ ID NO: 238027 - RNA, 32 nt, Homo Sapiens
cagaggaugaucuggaggaagagugugagcca

SEQ ID NO: 238028 - RNA, 32 nt, Homo Sapiens
gguaccacauucauuguuaaggaauggcugau

SEQ ID NO: 238029 - RNA, 32 nt, Homo Sapiens
cugcccaaggaccgcggagucggacgcaggca

SEQ ID NO: 238030 - RNA, 32 nt, Homo Sapiens
ugccucccacugacugcccuuuuccauguguc

SEQ ID NO: 238031 - RNA, 32 nt, Homo Sapiens
aggugugggcgcggggccacgcagcccgacgg

SEQ ID NO: 238032 - RNA, 32 nt, Homo Sapiens
acagcucaaacacagacagaucuucuagagcc

SEQ ID NO: 238033 - RNA, 32 nt, Homo Sapiens
cucaggaauaugcuuugauuuacuucuaaucc

SEQ ID NO: 238034 - RNA, 32 nt, Homo Sapiens
gggcugccuccgccgcgccgccggcccggauu

SEQ ID NO: 238035 - RNA, 30 nt, Homo Sapiens
cuuugccgacuugccauguuuuugccaaaa

SEQ ID NO: 238036 - RNA, 32 nt, Homo Sapiens
ccccauugccccagcuuagccucuucucccag

SEQ ID NO: 238037 - RNA, 32 nt, Homo Sapiens
gcaaaagggcuuuggaacgguugcuugucuuu

SEQ ID NO: 238038 - RNA, 32 nt, Homo Sapiens
cuggcagcggcuuuuguggaagacucacuagc

SEQ ID NO: 238039 - RNA, 32 nt, Homo Sapiens
cuagggcucuuuccccggggcugcugcagaug

SEQ ID NO: 238040 - RNA, 32 nt, Homo Sapiens
cugccccuaccccacccuggcuccucacccug

SEQ ID NO: 238041 - RNA, 32 nt, Homo Sapiens
gucaaauaugaaauacaaaaccacgaaccaau

SEQ ID NO: 238042 - RNA, 32 nt, Homo Sapiens
ggagcuaccaaaaccauccuccuggagcagga

SEQ ID NO: 238043 - RNA, 32 nt, Homo Sapiens
ugccuggaggggcugacugcucucuuaacagg

SEQ ID NO: 238044 - RNA, 32 nt, Homo Sapiens
gcuuccuccgcggggcccccaggcccgagggc

SEQ ID NO: 238045 - RNA, 32 nt, Homo Sapiens
aaaaaauacaaaaaaacuuauccgggcguggu

SEQ ID NO: 238046 - RNA, 32 nt, Homo Sapiens
aaggaucugccagcugcccugcagccaacuga

SEQ ID NO: 238047 - RNA, 32 nt, Homo Sapiens
cacgucugcagcucagccagggcgcgcagggc

SEQ ID NO: 238048 - RNA, 32 nt, Homo Sapiens
cucccagggcuuugcagccugcagaugccacc

SEQ ID NO: 238049 - RNA, 32 nt, Homo Sapiens
gaccucgggaugcugcagcggcgcaaugcugc

SEQ ID NO: 238050 - RNA, 32 nt, Homo Sapiens
cccccuggagccugcccucccuugggaccagg

SEQ ID NO: 238051 - RNA, 32 nt, Homo Sapiens
ccagaugcuucucauguuccuacuggcaaccu

SEQ ID NO: 238052 - RNA, 32 nt, Homo Sapiens
cagcagcaacaccagcagcagcagcagccccg

SEQ ID NO: 238053 - RNA, 32 nt, Homo Sapiens
ccccuaggggagauggugcagugggcggacau

SEQ ID NO: 238054 - RNA, 28 nt, Homo Sapiens
uuaaaauaaagcuuauauuucaaauguc

SEQ ID NO: 238055 - RNA, 32 nt, Homo Sapiens
ggaagucaggugggggucugucuucugcaagg

SEQ ID NO: 238056 - RNA, 32 nt, Homo Sapiens
gauagagacagagaggcagagaagagaccccu

SEQ ID NO: 238057 - RNA, 32 nt, Homo Sapiens
gaguuauuuuauuucuucuguauuugcagugu

SEQ ID NO: 238058 - RNA, 32 nt, Homo Sapiens
aauuuugcaauaaucucuuuucccuugucaug

SEQ ID NO: 238059 - RNA, 32 nt, Homo Sapiens
gugcucugucauuuuccuaguuucauuucaau

SEQ ID NO: 238060 - RNA, 32 nt, Homo Sapiens
cccuuaggcccggcccgggccccucgggagca

SEQ ID NO: 238061 - RNA, 32 nt, Homo Sapiens
ugagaucucggcacggcaagcccagcaucgcc

SEQ ID NO: 238062 - RNA, 29 nt, Homo Sapiens
uuacaauaaaguuucaggcuuuuuuaaaa

SEQ ID NO: 238063 - RNA, 32 nt, Homo Sapiens
aucgaaguuuuucaaauccauugcuuagcuaa

SEQ ID NO: 238064 - RNA, 32 nt, Homo Sapiens
aggccucgcccggcuccaaggcccccagcagg

SEQ ID NO: 238065 - RNA, 32 nt, Homo Sapiens
agggaugaccucaugcccuuucuggccagccc

SEQ ID NO: 238066 - RNA, 32 nt, Homo Sapiens
agggagagggcaggcggcugcugcuguugcac

SEQ ID NO: 238067 - RNA, 32 nt, Homo Sapiens
caagagauccucugaacacauccaccaggucu

SEQ ID NO: 238068 - RNA, 32 nt, Homo Sapiens
ggagggaaaaauuuuguaaauuagauugucua

SEQ ID NO: 238069 - RNA, 32 nt, Homo Sapiens
uugcaaacaggcuuuugaaauuccuucacgac

SEQ ID NO: 238070 - RNA, 32 nt, Homo Sapiens
gcgagacaaaacaaaaaaugaucccaguaaaa

SEQ ID NO: 238071 - RNA, 32 nt, Homo Sapiens
auuguagaaagagcucuuucugagcagauuaa

SEQ ID NO: 238072 - RNA, 32 nt, Homo Sapiens
ucuccaggaaaacagggaccgcucuccgccua

SEQ ID NO: 238073 - RNA, 32 nt, Homo Sapiens
caaaauucaaucaacaauucugucuuauugaa

SEQ ID NO: 238074 - RNA, 32 nt, Homo Sapiens
uuauuuccaaauaagauaauauuuggagguau

SEQ ID NO: 238075 - RNA, 32 nt, Homo Sapiens
cugagccuggggcgucucggagcuggaucccc

SEQ ID NO: 238076 - RNA, 30 nt, Homo Sapiens
ucagcagugaucaugggggaaauguuuaca

SEQ ID NO: 238077 - RNA, 32 nt, Homo Sapiens
gcucugauuggugaggguguguaaauuagcca

SEQ ID NO: 238078 - RNA, 32 nt, Homo Sapiens
acuuuuguaaacagcuaauagcaugguuccaa

SEQ ID NO: 238079 - RNA, 32 nt, Homo Sapiens
cuaggugccugcugccuccacagugggguuca

SEQ ID NO: 238080 - RNA, 28 nt, Homo Sapiens
caacuguugucuaaauaagugaaacaca

SEQ ID NO: 238081 - RNA, 32 nt, Homo Sapiens
guacucuguaguuccccagacucuucagggaa

SEQ ID NO: 238082 - RNA, 32 nt, Homo Sapiens
auacuguauauauaaaaaucuugagaugguag

SEQ ID NO: 238083 - RNA, 32 nt, Homo Sapiens
uuuguagauugugaaagcagcuuuuaguuuaa

SEQ ID NO: 238084 - RNA, 32 nt, Homo Sapiens
uucuguuaccucagcugucaucagcauuugcu

SEQ ID NO: 238085 - RNA, 32 nt, Homo Sapiens
uguggaaaauguuuacccaaaggucugcucuc

SEQ ID NO: 238086 - RNA, 32 nt, Homo Sapiens
agcagauggucccauuauucuagggucuuacu

SEQ ID NO: 238087 - RNA, 32 nt, Homo Sapiens
auuuuccccccucaucuguugggugaaauacu

SEQ ID NO: 238088 - RNA, 31 nt, Homo Sapiens
auucugaaauaaaaguguaugauguguucug

SEQ ID NO: 238089 - RNA, 32 nt, Homo Sapiens
uauuuuuauauucucuugauaauuaaagugcu

SEQ ID NO: 238090 - RNA, 32 nt, Homo Sapiens
aucaaaaauguauguuaagagaauuuuuucua

SEQ ID NO: 238091 - RNA, 32 nt, Homo Sapiens
auuaacugauuaaugcacuuugaaguucucug

SEQ ID NO: 238092 - RNA, 32 nt, Homo Sapiens
gcacgaggacggagaacacaaacuccgcaucu

SEQ ID NO: 238093 - RNA, 32 nt, Homo Sapiens
uuggcgaggguggagggaggagugucauuucu

SEQ ID NO: 238094 - RNA, 32 nt, Homo Sapiens
gaacccuccaaggcaggcuucccuuuacagag

SEQ ID NO: 238095 - RNA, 32 nt, Homo Sapiens
aaacugugccccaggcagcagcuccuccuccu

SEQ ID NO: 238096 - RNA, 32 nt, Homo Sapiens
ccuccuccccucucccucccccuggagacccu

SEQ ID NO: 238097 - RNA, 32 nt, Homo Sapiens
uagauucaugcaaguggagcugucugucucua

SEQ ID NO: 238098 - RNA, 27 nt, Homo Sapiens
gaacuccaucuuaacagcccccauggu

SEQ ID NO: 238099 - RNA, 32 nt, Homo Sapiens
agacuggagaggguggggaggggcccagcggc

SEQ ID NO: 238100 - RNA, 32 nt, Homo Sapiens
cauggaggacaaaagaggagaugugaaaacca

SEQ ID NO: 238101 - RNA, 32 nt, Homo Sapiens
gauaggcaaugggaaacugcagucucagagga

SEQ ID NO: 238102 - RNA, 32 nt, Homo Sapiens
agcucggguucccacaccucacuuuucacagc

SEQ ID NO: 238103 - RNA, 32 nt, Homo Sapiens
cuugcuucagaauucaguaaaucuuaugaagg

SEQ ID NO: 238104 - RNA, 32 nt, Homo Sapiens
uuucugguucugaaacaacaaggagagagucu

SEQ ID NO: 238105 - RNA, 32 nt, Homo Sapiens
uuguuacucuugcuuuuugugcucuuaaaugg

SEQ ID NO: 238106 - RNA, 32 nt, Homo Sapiens
gacgguuacccagcgggccgccggcggucgug

SEQ ID NO: 238107 - RNA, 31 nt, Homo Sapiens
aguggcaaauaaaaacauuugcaucaaaaaa

SEQ ID NO: 238108 - RNA, 32 nt, Homo Sapiens
guugauuggaauggcaaguuuaaaccuuuguu

SEQ ID NO: 238109 - RNA, 32 nt, Homo Sapiens
cagacacuucgggaacccgaggcggaccgggc

SEQ ID NO: 238110 - RNA, 32 nt, Homo Sapiens
cuaucuccugucaucacgaucaauuaauguuu

SEQ ID NO: 238111 - RNA, 32 nt, Homo Sapiens
ggguggggaccccaaggcuuucuggggcagac

SEQ ID NO: 238112 - RNA, 32 nt, Homo Sapiens
ccaaauugcucuauguauuauuauucugugag

SEQ ID NO: 238113 - RNA, 32 nt, Homo Sapiens
aaggggcgggaugaggcccccggggcggggcu

SEQ ID NO: 238114 - RNA, 32 nt, Homo Sapiens
gaaaccgggccccaugcugaggcuacaaggga

SEQ ID NO: 238115 - RNA, 32 nt, Homo Sapiens
ccgauggccuucgggucaccaaggcugucugg

SEQ ID NO: 238116 - RNA, 32 nt, Homo Sapiens
cuuacccccuccccagaccuguucccuuucuu

SEQ ID NO: 238117 - RNA, 32 nt, Homo Sapiens
cagcugccagcuucauuuucucugccuuuugg

SEQ ID NO: 238118 - RNA, 32 nt, Homo Sapiens
uaacuggugccuggaaaucaccaugguccuca

SEQ ID NO: 238119 - RNA, 32 nt, Homo Sapiens
ucuucacuaugaaagacucacugucuacacca

SEQ ID NO: 238120 - RNA, 32 nt, Homo Sapiens
gccuuuaagaaaccagaagauugauuuccugg

SEQ ID NO: 238121 - RNA, 32 nt, Homo Sapiens
ccguccucuccuaucacccccaaacacucacu

SEQ ID NO: 238122 - RNA, 32 nt, Homo Sapiens
uggaagccauccugcccuucugacccaaagca

SEQ ID NO: 238123 - RNA, 32 nt, Homo Sapiens
gcagggucaccauuugcagcgcaacauggcag

SEQ ID NO: 238124 - RNA, 32 nt, Homo Sapiens
ggaggcuaaagcgcucauguccuggcucuuca

SEQ ID NO: 238125 - RNA, 31 nt, Homo Sapiens
gacagaacauuguugggaggaguccaggcau

SEQ ID NO: 238126 - RNA, 32 nt, Homo Sapiens
aagaggaagaaccggauugaaagagagccagg

SEQ ID NO: 238127 - RNA, 32 nt, Homo Sapiens
ugucaccccgcaggaccgcgggccugccccaa

SEQ ID NO: 238128 - RNA, 32 nt, Homo Sapiens
ucccacccagaaaccuuggauacuggucuccu

SEQ ID NO: 238129 - RNA, 32 nt, Homo Sapiens
ugaacaagcauguacagcuacugcacacgugc

SEQ ID NO: 238130 - RNA, 32 nt, Homo Sapiens
aagacauuuuuccccaauuucagaggguggcg

SEQ ID NO: 238131 - RNA, 32 nt, Homo Sapiens
cggcagcggcagcggcagcagcauccugucca

SEQ ID NO: 238132 - RNA, 32 nt, Homo Sapiens
aagguguggaagcaugauauguacuauaguga

SEQ ID NO: 238133 - RNA, 32 nt, Homo Sapiens
uauuguuuuuauucuguauuaaauauuuucag

SEQ ID NO: 238134 - RNA, 32 nt, Homo Sapiens
uuauguucauucuccuuaauuccuuaacaauc

SEQ ID NO: 238135 - RNA, 32 nt, Homo Sapiens
cuucugccucugccccguuggaugcccugacu

SEQ ID NO: 238136 - RNA, 32 nt, Homo Sapiens
aaauucuaaaagauaaguguguuugcaaaaaa

SEQ ID NO: 238137 - RNA, 32 nt, Homo Sapiens
uggggagggcuugaacacaggaggaagcagga

SEQ ID NO: 238138 - RNA, 32 nt, Homo Sapiens
gguuuugccauguuggccaggcuggucuagaa

SEQ ID NO: 238139 - RNA, 32 nt, Homo Sapiens
gcucaugggggacucagcaagcaagcguggca

SEQ ID NO: 238140 - RNA, 32 nt, Homo Sapiens
ucaucgagagggcucccaaacaucugcagcug

SEQ ID NO: 238141 - RNA, 32 nt, Homo Sapiens
cugcucccugggcaucuuuggccaggcuucug

SEQ ID NO: 238142 - RNA, 32 nt, Homo Sapiens
guccgcucacccagcccaguccguccgguccu

SEQ ID NO: 238143 - RNA, 32 nt, Homo Sapiens
gugccaucuguaaagcacucagaaggcagcca

SEQ ID NO: 238144 - RNA, 29 nt, Homo Sapiens
ucuucauaugugauguccuuagucacuaa

SEQ ID NO: 238145 - RNA, 32 nt, Homo Sapiens
uuuucuuucauuagcuaggaucuacuagaugc

SEQ ID NO: 238146 - RNA, 32 nt, Homo Sapiens
cuuucuuugggguucucuguaccugaggaaac

SEQ ID NO: 238147 - RNA, 32 nt, Homo Sapiens
aacaaggggaagcucacaacaggaacucacac

SEQ ID NO: 238148 - RNA, 32 nt, Homo Sapiens
guaucgucaggagccugucagguuugggaaca

SEQ ID NO: 238149 - RNA, 32 nt, Homo Sapiens
cucgugaucugccugccuuggcccucccaaag

SEQ ID NO: 238150 - RNA, 32 nt, Homo Sapiens
uuaggauccaaugaguggagaauggggacuuc

SEQ ID NO: 238151 - RNA, 32 nt, Homo Sapiens
auaccacacaucucuuguuuucauguaggaga

SEQ ID NO: 238152 - RNA, 32 nt, Homo Sapiens
cgacaacacagcagccuucagcuccuccuucg

SEQ ID NO: 238153 - RNA, 32 nt, Homo Sapiens
ccguccugccuggccgcaggugcccuggauga

SEQ ID NO: 238154 - RNA, 32 nt, Homo Sapiens
cuuauauuuaacuuuuuuuuuauuuuuuuuuu

SEQ ID NO: 238155 - RNA, 32 nt, Homo Sapiens
cgagccucggucccggcccccauccuccccgc

SEQ ID NO: 238156 - RNA, 32 nt, Homo Sapiens
uucaaaauauuuuacuauuucuuguggaguuu

SEQ ID NO: 238157 - RNA, 32 nt, Homo Sapiens
ucccuggccccgcccugcacuccagcucgccc

SEQ ID NO: 238158 - RNA, 32 nt, Homo Sapiens
cccgguuucugagggagggaaauugcuacuug

SEQ ID NO: 238159 - RNA, 32 nt, Homo Sapiens
aaaacaacaaaacacagcagcugcggacuugu

SEQ ID NO: 238160 - RNA, 32 nt, Homo Sapiens
gcuauguuuaaaaagaaaauugguguuuggca

SEQ ID NO: 238161 - RNA, 32 nt, Homo Sapiens
gccauguucuuugauuuaggcugguaguaaac

SEQ ID NO: 238162 - RNA, 32 nt, Homo Sapiens
uuuaauuugcuccuuuuaauucuguauaaaca

SEQ ID NO: 238163 - RNA, 32 nt, Homo Sapiens
acagaaggcacuuuaauguuuagacaucaaga

SEQ ID NO: 238164 - RNA, 32 nt, Homo Sapiens
uguucacaugacugcugucuagcugaugcauu

SEQ ID NO: 238165 - RNA, 32 nt, Homo Sapiens
uucaacacuuauuuucugaauucauaaaaaua

SEQ ID NO: 238166 - RNA, 32 nt, Homo Sapiens
ucgcucuggcuccggugcgcgcggcugagcgc

SEQ ID NO: 238167 - RNA, 32 nt, Homo Sapiens
cugggaccggaguggggagcgcggcguggagg

SEQ ID NO: 238168 - RNA, 31 nt, Homo Sapiens
cugauuuuuccauaaggaaaaugcuucuuuu

SEQ ID NO: 238169 - RNA, 32 nt, Homo Sapiens
cucuuuucagcuuuuaugacaauggagacaga

SEQ ID NO: 238170 - RNA, 32 nt, Homo Sapiens
aggaaucuaugucagagugucagcuggaaaaa

SEQ ID NO: 238171 - RNA, 32 nt, Homo Sapiens
ucagccgcugcuagaucaguauguguccauga

SEQ ID NO: 238172 - RNA, 32 nt, Homo Sapiens
aauuauuuuuaaucuuuuuuuuuuuuugagau

SEQ ID NO: 238173 - RNA, 32 nt, Homo Sapiens
agaaggcuugucucaccuccaccggcauccac

SEQ ID NO: 238174 - RNA, 32 nt, Homo Sapiens
aaauugaggcaaacaguuaaguuuuauuuuua

SEQ ID NO: 238175 - RNA, 32 nt, Homo Sapiens
cccgucaccccuccccuccugagcagggaucc

SEQ ID NO: 238176 - RNA, 32 nt, Homo Sapiens
caccaggaggaagaagcaugcagggcacuccu

SEQ ID NO: 238177 - RNA, 32 nt, Homo Sapiens
ccaugaauuuaaacuaaauuuuuagaaaucaa

SEQ ID NO: 238178 - RNA, 32 nt, Homo Sapiens
uuccccgcaccuccgcgccguaguugcgcgca

SEQ ID NO: 238179 - RNA, 32 nt, Homo Sapiens
ugugggcugagggcaucuccaaagcuggccug

SEQ ID NO: 238180 - RNA, 32 nt, Homo Sapiens
ggacgggccuggccgccucuuccgcucccugc

SEQ ID NO: 238181 - RNA, 32 nt, Homo Sapiens
acuucaaugaacaaagggauucuccaggauuc

SEQ ID NO: 238182 - RNA, 32 nt, Homo Sapiens
uuauagcuggaauaaacuuuaaauuacuguuu

SEQ ID NO: 238183 - RNA, 32 nt, Homo Sapiens
ccccugcccacuuuugucagccuguacugugu

SEQ ID NO: 238184 - RNA, 32 nt, Homo Sapiens
ucacacuccugggcucugaacacacacgccag

SEQ ID NO: 238185 - RNA, 32 nt, Homo Sapiens
ccccgaccaccccagccucucaucuaaggccc

SEQ ID NO: 238186 - RNA, 32 nt, Homo Sapiens
gaggcaguaacuggccugggaauccagacaag

SEQ ID NO: 238187 - RNA, 32 nt, Homo Sapiens
uccuaaaacaacagauguacgacuugcauacc

SEQ ID NO: 238188 - RNA, 32 nt, Homo Sapiens
acuuugcugcuucuuucuggguuguggccgau

SEQ ID NO: 238189 - RNA, 32 nt, Homo Sapiens
agcgaaaucuguacgguucugugcaaagaggu

SEQ ID NO: 238190 - RNA, 32 nt, Homo Sapiens
gcuuccugccuugcaggaccugccuggagguu

SEQ ID NO: 238191 - RNA, 32 nt, Homo Sapiens
auaauuggaccuugaaucgauaaguguaaaua

SEQ ID NO: 238192 - RNA, 32 nt, Homo Sapiens
aaacuugaacucuuaugguugggacauucuuu

SEQ ID NO: 238193 - RNA, 32 nt, Homo Sapiens
cccggagcugggugggggugccccacgcugaa

SEQ ID NO: 238194 - RNA, 32 nt, Homo Sapiens
cuugaucuccacguguauaguuuucaagacug

SEQ ID NO: 238195 - RNA, 32 nt, Homo Sapiens
ggguuccucgcugccuucuccucccuaacugg

SEQ ID NO: 238196 - RNA, 32 nt, Homo Sapiens
gcccccugcccucgaauccccccuccccgacu

SEQ ID NO: 238197 - RNA, 32 nt, Homo Sapiens
uuguggaaauuugaacuugagagagaugauuu

SEQ ID NO: 238198 - RNA, 32 nt, Homo Sapiens
aacagcgucucccaggccgucuuccugcccua

SEQ ID NO: 238199 - RNA, 32 nt, Homo Sapiens
cgggggaggaggagggucugaaggugggaggg

SEQ ID NO: 238200 - RNA, 32 nt, Homo Sapiens
agacucccugcugauauuagucaccggaaacc

SEQ ID NO: 238201 - RNA, 27 nt, Homo Sapiens
gccuuuguccaucucagcccccagagu

SEQ ID NO: 238202 - RNA, 32 nt, Homo Sapiens
gucuacggcucccagacuguguccccaugagu

SEQ ID NO: 238203 - RNA, 32 nt, Homo Sapiens
ugcaggucuaccccgagccccggagcgagagc

SEQ ID NO: 238204 - RNA, 32 nt, Homo Sapiens
cagggccccccgcccccuccucugccugcugc

SEQ ID NO: 238205 - RNA, 32 nt, Homo Sapiens
guaugaugacuagccgcaccuccggggaggug

SEQ ID NO: 238206 - RNA, 32 nt, Homo Sapiens
ugaccugccugccugcucuugagaaaccugga

SEQ ID NO: 238207 - RNA, 32 nt, Homo Sapiens
aauuacuagcuaaggcucuuggaauuuugcac

SEQ ID NO: 238208 - RNA, 32 nt, Homo Sapiens
acuggucugcugcugcaggcuucaucuaaaac

SEQ ID NO: 238209 - RNA, 32 nt, Homo Sapiens
acccgguggcagcuggcaggguuuugcucagc

SEQ ID NO: 238210 - RNA, 32 nt, Homo Sapiens
agcaagguaagaaaauguaccacucaacaagc

SEQ ID NO: 238211 - RNA, 32 nt, Homo Sapiens
gguuugaagggagaccuggccggccugagggc

SEQ ID NO: 238212 - RNA, 32 nt, Homo Sapiens
uuaucauagagcaacaaaauagaguggacucu

SEQ ID NO: 238213 - RNA, 32 nt, Homo Sapiens
acuaauuuggaguagcccguguguggaauucu

SEQ ID NO: 238214 - RNA, 32 nt, Homo Sapiens
auacugagaaagugcagcaggcagugugccua

SEQ ID NO: 238215 - RNA, 32 nt, Homo Sapiens
cccugucuucgccgccgccgcugcuggaguca

SEQ ID NO: 238216 - RNA, 32 nt, Homo Sapiens
aacaaaaauagcgcccuuuggaaagaagcuac

SEQ ID NO: 238217 - RNA, 32 nt, Homo Sapiens
cccacaggacgcccgggguuggguaggcagga

SEQ ID NO: 238218 - RNA, 32 nt, Homo Sapiens
uauccaucagaaaaaugacacacaaaacaaaa

SEQ ID NO: 238219 - RNA, 32 nt, Homo Sapiens
auuguugauugauaaguagagauacauuuuuu

SEQ ID NO: 238220 - RNA, 32 nt, Homo Sapiens
gggaacuaccagcagagccccuccuaccgcag

SEQ ID NO: 238221 - RNA, 32 nt, Homo Sapiens
acaagaacugacgcuccuugggugcugcugcu

SEQ ID NO: 238222 - RNA, 32 nt, Homo Sapiens
agaaaacgaaaauguuauugcacauguaaaau

SEQ ID NO: 238223 - RNA, 32 nt, Homo Sapiens
auuucaauaacauuaauuuacaauugacaaau

SEQ ID NO: 238224 - RNA, 32 nt, Homo Sapiens
uugaaguaaaaaggagaucacuuuuuaccaaa

SEQ ID NO: 238225 - RNA, 32 nt, Homo Sapiens
agcauuucauguuagaaaccccauuuaaagca

SEQ ID NO: 238226 - RNA, 32 nt, Homo Sapiens
ugaucagggcccggcccacggcccugagcggc

SEQ ID NO: 238227 - RNA, 32 nt, Homo Sapiens
caauuuccacaagaaaauuaauucauuccaau

SEQ ID NO: 238228 - RNA, 32 nt, Homo Sapiens
acucacuccccucccaccagcuggaugcccau

SEQ ID NO: 238229 - RNA, 32 nt, Homo Sapiens
acacuuacaaacgauuagaaggguuuaauuuu

SEQ ID NO: 238230 - RNA, 32 nt, Homo Sapiens
ggaggggcgcgcuggggcuucgaccuggcugc

SEQ ID NO: 238231 - RNA, 32 nt, Homo Sapiens
cccccugcagaaugucuucagaaucggggccc

SEQ ID NO: 238232 - RNA, 32 nt, Homo Sapiens
ucuacaaaaaauacaaaaauuagccagacaug

SEQ ID NO: 238233 - RNA, 32 nt, Homo Sapiens
ugagacugaaggaaacccaaagccguaccacc

SEQ ID NO: 238234 - RNA, 32 nt, Homo Sapiens
uauauaguugcuuacuuaauucugauaguuug

SEQ ID NO: 238235 - RNA, 32 nt, Homo Sapiens
gaguauuaauacuacugccucuccuugucuua

SEQ ID NO: 238236 - RNA, 32 nt, Homo Sapiens
gaguugucuugacaccacugaugucgagugug

SEQ ID NO: 238237 - RNA, 31 nt, Homo Sapiens
cguucguucuucaaaacccaggcaaaacacc

SEQ ID NO: 238238 - RNA, 32 nt, Homo Sapiens
uauuuauaaaauuuauaccuggaaaauguucc

SEQ ID NO: 238239 - RNA, 32 nt, Homo Sapiens
auguauaauguuuggaaaaagacauuuggcaa

SEQ ID NO: 238240 - RNA, 32 nt, Homo Sapiens
gcacagcuuugggccucgugagggaucugccu

SEQ ID NO: 238241 - RNA, 32 nt, Homo Sapiens
uuguuaacuguaaaguaauauaaaguuauauu

SEQ ID NO: 238242 - RNA, 32 nt, Homo Sapiens
acauagugagguucaucagggagaguauuggc

SEQ ID NO: 238243 - RNA, 32 nt, Homo Sapiens
uaugaaaauauuaagcuauucugagggagagg

SEQ ID NO: 238244 - RNA, 32 nt, Homo Sapiens
gcacacaucacaaagaaguucucagaaugcuu

SEQ ID NO: 238245 - RNA, 32 nt, Homo Sapiens
ugaaaggugcuaagacaaaugguuagccgucu

SEQ ID NO: 238246 - RNA, 32 nt, Homo Sapiens
aaagacuggacacccccagugcccaucagugg

SEQ ID NO: 238247 - RNA, 32 nt, Homo Sapiens
cacaccauacaugcgugugugcaugcgcgcgc

SEQ ID NO: 238248 - RNA, 32 nt, Homo Sapiens
guuagcggcagagccugcacucgaauucaggu

SEQ ID NO: 238249 - RNA, 32 nt, Homo Sapiens
ugagcgggguugugggggccugguggcacuug

SEQ ID NO: 238250 - RNA, 32 nt, Homo Sapiens
agcaaagcagcucucaagggcuugucaguaaa

SEQ ID NO: 238251 - RNA, 32 nt, Homo Sapiens
ggggcggucguguccacgcccgagggcgcccg

SEQ ID NO: 238252 - RNA, 32 nt, Homo Sapiens
uguauuucuaacugauuguauugaaaaaauuc

SEQ ID NO: 238253 - RNA, 27 nt, Homo Sapiens
auaugucgcucuugggacccaaggugc

SEQ ID NO: 238254 - RNA, 32 nt, Homo Sapiens
uuaaucucauugauuuguuugguauaaguuug

SEQ ID NO: 238255 - RNA, 32 nt, Homo Sapiens
gccaggagaggaaggaggaacuguggcgccca

SEQ ID NO: 238256 - RNA, 32 nt, Homo Sapiens
auucuucauccuguucuucccauugggacugu

SEQ ID NO: 238257 - RNA, 32 nt, Homo Sapiens
aucccauuuuguacuaguaccuguggauuaca

SEQ ID NO: 238258 - RNA, 32 nt, Homo Sapiens
agauuaccauuagaagcaaaauuaaaaguaca

SEQ ID NO: 238259 - RNA, 32 nt, Homo Sapiens
aaauagugggucuguuucacaugugcaguuug

SEQ ID NO: 238260 - RNA, 32 nt, Homo Sapiens
ccaauuucugagguccagccaccaccaggcug

SEQ ID NO: 238261 - RNA, 32 nt, Homo Sapiens
caaaugaaagagaugauguagauuuuucggau

SEQ ID NO: 238262 - RNA, 32 nt, Homo Sapiens
acuggguaugcccuuccugaucuaacauucug

SEQ ID NO: 238263 - RNA, 32 nt, Homo Sapiens
uuauguauguuuacacugucaaacaucuggaa

SEQ ID NO: 238264 - RNA, 32 nt, Homo Sapiens
aaaugcuauuaaagaauuuugauucaaguauu

SEQ ID NO: 238265 - RNA, 32 nt, Homo Sapiens
gcuuucuaggaaugaggauauucuucaaggaa

SEQ ID NO: 238266 - RNA, 32 nt, Homo Sapiens
gccugcccugaggcugcccugcgauggccugg

SEQ ID NO: 238267 - RNA, 32 nt, Homo Sapiens
uaaacccagcugacuuguuuccugggacaguu

SEQ ID NO: 238268 - RNA, 32 nt, Homo Sapiens
caccuggcgcauuuaggaccaagccccuuaac

SEQ ID NO: 238269 - RNA, 32 nt, Homo Sapiens
ggguccucgcccccggccugccuaccugaaaa

SEQ ID NO: 238270 - RNA, 32 nt, Homo Sapiens
gcccucgccucugcacugcgggacgccagcgc

SEQ ID NO: 238271 - RNA, 32 nt, Homo Sapiens
cuugaggggaggaggugguggccguggguucc

SEQ ID NO: 238272 - RNA, 32 nt, Homo Sapiens
agucaaugaauauaugaccaaauaucaccagg

SEQ ID NO: 238273 - RNA, 32 nt, Homo Sapiens
ugcuugccuugcaacagugccugcgggaccug

SEQ ID NO: 238274 - RNA, 32 nt, Homo Sapiens
guuugacuuuugcuuucuaccugacccuaguc

SEQ ID NO: 238275 - RNA, 32 nt, Homo Sapiens
auauuuggggacguagccuaacauuuuaccaa

SEQ ID NO: 238276 - RNA, 32 nt, Homo Sapiens
uuuguguucccauuuuaaauugaccaauuuug

SEQ ID NO: 238277 - RNA, 32 nt, Homo Sapiens
caguguguaaauuguauucucauaauacugaa

SEQ ID NO: 238278 - RNA, 32 nt, Homo Sapiens
ggacccuccucgcgcacuggagcuguggccuc

SEQ ID NO: 238279 - RNA, 30 nt, Homo Sapiens
cuggccuggccugugccgccccugccccca

SEQ ID NO: 238280 - RNA, 32 nt, Homo Sapiens
uccccaaccccucuccaggccugucaagaggg

SEQ ID NO: 238281 - RNA, 32 nt, Homo Sapiens
uagugaaagcuacugcagugcuuuggacacuu

SEQ ID NO: 238282 - RNA, 32 nt, Homo Sapiens
uccccgcccuccgcccggcccggagcuuaucu

SEQ ID NO: 238283 - RNA, 32 nt, Homo Sapiens
uuccugucgccgucguugcccgggccauggcg

SEQ ID NO: 238284 - RNA, 30 nt, Homo Sapiens
ugagaggcgcccgcggucugcggccagugg

SEQ ID NO: 238285 - RNA, 32 nt, Homo Sapiens
cagccugagcagcagagcgggaccucgucucu

SEQ ID NO: 238286 - RNA, 32 nt, Homo Sapiens
ugagguggccccaggcccugguccugccccug

SEQ ID NO: 238287 - RNA, 32 nt, Homo Sapiens
gguucauauaaaagggcaaaugaaaaccuuuc

SEQ ID NO: 238288 - RNA, 32 nt, Homo Sapiens
acugcuguuuguuacuauaaauuaaaugaacc

SEQ ID NO: 238289 - RNA, 32 nt, Homo Sapiens
auuguuugugauugcauguuuccuuccuucaa

SEQ ID NO: 238290 - RNA, 32 nt, Homo Sapiens
aauccucgggcccccacuuucuucccaaacuc

SEQ ID NO: 238291 - RNA, 32 nt, Homo Sapiens
uucagcugcugucacagucucauuuguucuuc

SEQ ID NO: 238292 - RNA, 32 nt, Homo Sapiens
auugcucgggagaucaacgauguagcaggaga

SEQ ID NO: 238293 - RNA, 32 nt, Homo Sapiens
uuguuuuaagaauuauuuuauaaagucaacaa

SEQ ID NO: 238294 - RNA, 32 nt, Homo Sapiens
guaaccugcugucccgggucccagagugcacu

SEQ ID NO: 238295 - RNA, 32 nt, Homo Sapiens
augcauacugguuuuuuuuucuugauuugccc

SEQ ID NO: 238296 - RNA, 32 nt, Homo Sapiens
uggcuggcgcugucggccggccggggaggucg

SEQ ID NO: 238297 - RNA, 32 nt, Homo Sapiens
uuccauuccucucuacuucuguuuccuagcuu

SEQ ID NO: 238298 - RNA, 32 nt, Homo Sapiens
cuaacucgucuggccagggagaucugaauugg

SEQ ID NO: 238299 - RNA, 32 nt, Homo Sapiens
uaagguaggcauguaaagcgccaggcacauac

SEQ ID NO: 238300 - RNA, 32 nt, Homo Sapiens
aaauucugcccccaccuagaucauauuuaaag

SEQ ID NO: 238301 - RNA, 32 nt, Homo Sapiens
gaaaagcggaagauuaugacuagauauggaaa

SEQ ID NO: 238302 - RNA, 32 nt, Homo Sapiens
cucgcacuuuuaggauacaacuuuuggugaaa

SEQ ID NO: 238303 - RNA, 32 nt, Homo Sapiens
ccaccauguugcaccuaaagcuuuggaguuuu

SEQ ID NO: 238304 - RNA, 32 nt, Homo Sapiens
guacggcugcuggguccuggggagaugcaggc

SEQ ID NO: 238305 - RNA, 32 nt, Homo Sapiens
ccagccaccuucugguucuaaagcagagggag

SEQ ID NO: 238306 - RNA, 32 nt, Homo Sapiens
caggcgcaauguucagcguauuugaggaaauc

SEQ ID NO: 238307 - RNA, 32 nt, Homo Sapiens
aaagauuuguaucucugugcuugaacuugaau

SEQ ID NO: 238308 - RNA, 32 nt, Homo Sapiens
ggacuacuucggauacaaucacagcaacccug

SEQ ID NO: 238309 - RNA, 32 nt, Homo Sapiens
ucacuugggaagagccuugugcucuccacuuu

SEQ ID NO: 238310 - RNA, 32 nt, Homo Sapiens
uggauuuuacuuugaagccuauuguuauaauu

SEQ ID NO: 238311 - RNA, 32 nt, Homo Sapiens
ggagucugagaagaaaggguguagauggagag

SEQ ID NO: 238312 - RNA, 32 nt, Homo Sapiens
guccugccacugagcagcuguugguaggcucu

SEQ ID NO: 238313 - RNA, 32 nt, Homo Sapiens
gccucuggccuccacccucccccaacagcagg

SEQ ID NO: 238314 - RNA, 32 nt, Homo Sapiens
guguuuggaagacaacucugcuugcucaucca

SEQ ID NO: 238315 - RNA, 32 nt, Homo Sapiens
cuuguugagguuagcguaaccugguauaugca

SEQ ID NO: 238316 - RNA, 32 nt, Homo Sapiens
acagcaaccuaaaccgaagaccaagaauggca

SEQ ID NO: 238317 - RNA, 32 nt, Homo Sapiens
cugaagguaauuuuauacaauauuuuaaauaa

SEQ ID NO: 238318 - RNA, 32 nt, Homo Sapiens
cgaugccccccggugugggaaccagcaccucc

SEQ ID NO: 238319 - RNA, 29 nt, Homo Sapiens
aagcagaugaagacucuuaagaugacaga

SEQ ID NO: 238320 - RNA, 32 nt, Homo Sapiens
cucgaccagacccaucaggggcgaggagggca

SEQ ID NO: 238321 - RNA, 32 nt, Homo Sapiens
guguuuuugucaaagcagguuauucagugauu

SEQ ID NO: 238322 - RNA, 32 nt, Homo Sapiens
acuccccauggccaccaagaugggcguucacu

SEQ ID NO: 238323 - RNA, 32 nt, Homo Sapiens
cacgcccucccucuccagugcaggaucauuac

SEQ ID NO: 238324 - RNA, 32 nt, Homo Sapiens
uucaaccucagucagcucccaggguugcuaga

SEQ ID NO: 238325 - RNA, 32 nt, Homo Sapiens
uucagcuuaaaauaaacaguugugaaccaaga

SEQ ID NO: 238326 - RNA, 32 nt, Homo Sapiens
gucuccugcccccgacuccaacucccuccugg

SEQ ID NO: 238327 - RNA, 32 nt, Homo Sapiens
agcggggcaaugcagagcaucuccaggagggg

SEQ ID NO: 238328 - RNA, 32 nt, Homo Sapiens
ucgcauggagagcgcugggcgcugggcugugc

SEQ ID NO: 238329 - RNA, 32 nt, Homo Sapiens
caacucacaaaacguuuuacuagaccagcaag

SEQ ID NO: 238330 - RNA, 29 nt, Homo Sapiens
gaaaaggcugugugaugaaagcugaagac

SEQ ID NO: 238331 - RNA, 32 nt, Homo Sapiens
uugagacuuccuucuuuuugcacucaacguug

SEQ ID NO: 238332 - RNA, 32 nt, Homo Sapiens
cuuuguuaccuguuugauccugucccguuccu

SEQ ID NO: 238333 - RNA, 32 nt, Homo Sapiens
cuugacuggaccugguggcuacgaaucuuccg

SEQ ID NO: 238334 - RNA, 32 nt, Homo Sapiens
uggcuuuuguugguccuucucuuaggccugcu

SEQ ID NO: 238335 - RNA, 32 nt, Homo Sapiens
gcacagcuggagaugcagagccagcagcugcg

SEQ ID NO: 238336 - RNA, 30 nt, Homo Sapiens
ggaggcacguggcgcgcgugggcccgcugc

SEQ ID NO: 238337 - RNA, 32 nt, Homo Sapiens
acuugccggcauuuggccugcugcuggugaag

SEQ ID NO: 238338 - RNA, 32 nt, Homo Sapiens
gugugucuuuaaccacccaguaccauacuuuu

SEQ ID NO: 238339 - RNA, 32 nt, Homo Sapiens
gaaguaaaaaauuuaaaaagcccaaccucuuc

SEQ ID NO: 238340 - RNA, 32 nt, Homo Sapiens
gugcugccggcugagagggggaggcagccucg

SEQ ID NO: 238341 - RNA, 32 nt, Homo Sapiens
ugaggcgagccgggcguugugagcggacugcu

SEQ ID NO: 238342 - RNA, 32 nt, Homo Sapiens
auggcugucaggagggcuuccugggagguguc

SEQ ID NO: 238343 - RNA, 32 nt, Homo Sapiens
uggggaauguauugaaugucugaugguaucuc

SEQ ID NO: 238344 - RNA, 32 nt, Homo Sapiens
agccagcccagcugccuaaagcgacaugagac

SEQ ID NO: 238345 - RNA, 32 nt, Homo Sapiens
uucgacugcuagagccgagcgaagcgaugccu

SEQ ID NO: 238346 - RNA, 32 nt, Homo Sapiens
aggaacaaacucccuggccugcaggauaggga

SEQ ID NO: 238347 - RNA, 32 nt, Homo Sapiens
ccccugcgcccucuccucuccccgcgccccaa

SEQ ID NO: 238348 - RNA, 32 nt, Homo Sapiens
uuguuaagacuggacgaucuacaggagugaua

SEQ ID NO: 238349 - RNA, 32 nt, Homo Sapiens
ugugugccccuccuccucccaacucaucuuuc

SEQ ID NO: 238350 - RNA, 32 nt, Homo Sapiens
aaguggccgccgcgcccuccccggggaagccg

SEQ ID NO: 238351 - RNA, 32 nt, Homo Sapiens
caggugcccuccccagcgucacuucugcuaag

SEQ ID NO: 238352 - RNA, 32 nt, Homo Sapiens
ugguuuucuuuuucuuuuucuucuuuuuuuuu

SEQ ID NO: 238353 - RNA, 32 nt, Homo Sapiens
cuggcagcuguggcagcuccggcucagcccug

SEQ ID NO: 238354 - RNA, 32 nt, Homo Sapiens
uuccucucaggauccugcucuuucccugaaag

SEQ ID NO: 238355 - RNA, 32 nt, Homo Sapiens
ccuuggguuugugcauguuuucugcugggugg

SEQ ID NO: 238356 - RNA, 32 nt, Homo Sapiens
aucgaagaauuaaugauuguucaccaagcagc

SEQ ID NO: 238357 - RNA, 32 nt, Homo Sapiens
cgcugguggaccacaggcaucuacacagccug

SEQ ID NO: 238358 - RNA, 32 nt, Homo Sapiens
gccuuggcgaacucggccacuccaguuccuca

SEQ ID NO: 238359 - RNA, 32 nt, Homo Sapiens
ggcgugacuguugugugcuccucggugacagg

SEQ ID NO: 238360 - RNA, 32 nt, Homo Sapiens
cuggagccuguguccugcccugcuacaguagu

SEQ ID NO: 238361 - RNA, 32 nt, Homo Sapiens
uggugcuccucgccucuuggggccuggggcag

SEQ ID NO: 238362 - RNA, 32 nt, Homo Sapiens
acaucucggagcaacugaggcgccgggaccgg

SEQ ID NO: 238363 - RNA, 32 nt, Homo Sapiens
uuaaaaaucuguaagagccugauuuuagaauu

SEQ ID NO: 238364 - RNA, 32 nt, Homo Sapiens
aucuaagaaaucaggcaagugcuuaaaaggcc

SEQ ID NO: 238365 - RNA, 32 nt, Homo Sapiens
uccaauuccaaauguaauuagacaaaaaucau

SEQ ID NO: 238366 - RNA, 32 nt, Homo Sapiens
gaccugguggaauauuauuuucaacuguaguc

SEQ ID NO: 238367 - RNA, 32 nt, Homo Sapiens
aaaagcaauaaugauccauacauacuauaagg

SEQ ID NO: 238368 - RNA, 32 nt, Homo Sapiens
cagccagaccagcagagcagggagccacuugc

SEQ ID NO: 238369 - RNA, 32 nt, Homo Sapiens
acaaggccaacgcguacaaguaccucaggcuu

SEQ ID NO: 238370 - RNA, 32 nt, Homo Sapiens
gacuucacuccagaguuaccauuaugagugug

SEQ ID NO: 238371 - RNA, 32 nt, Homo Sapiens
gggcuggcaggcgggggaggcugcaggcucau

SEQ ID NO: 238372 - RNA, 32 nt, Homo Sapiens
uuuuacaucuuuuuuucuuuuuauuuucgaag

SEQ ID NO: 238373 - RNA, 32 nt, Homo Sapiens
agcuucagugcucuccuuucuuuggccuuaau

SEQ ID NO: 238374 - RNA, 32 nt, Homo Sapiens
ugugccauuucccaacgucuuuugggauuuac

SEQ ID NO: 238375 - RNA, 32 nt, Homo Sapiens
gaccugcucugggggucccggucgccgcccag

SEQ ID NO: 238376 - RNA, 32 nt, Homo Sapiens
gccuguuaugaaugaaaaauccauccacucug

SEQ ID NO: 238377 - RNA, 32 nt, Homo Sapiens
guggacuugcgcuggcccuuggaccacacuuc

SEQ ID NO: 238378 - RNA, 32 nt, Homo Sapiens
uaccaaugccguggcaacagcucuacaguuac

SEQ ID NO: 238379 - RNA, 32 nt, Homo Sapiens
cugaaacuaggaugcaugcaauuguguuggaa

SEQ ID NO: 238380 - RNA, 32 nt, Homo Sapiens
gcaucggcucugcugaagagccugcggguugg

SEQ ID NO: 238381 - RNA, 32 nt, Homo Sapiens
aguuaaagauacuuuuccuguuggauucucuu

SEQ ID NO: 238382 - RNA, 32 nt, Homo Sapiens
aaacgccgcggagcccucggccgcccgagcag

SEQ ID NO: 238383 - RNA, 32 nt, Homo Sapiens
uagcaaagguuggaggugucuugagugcacug

SEQ ID NO: 238384 - RNA, 32 nt, Homo Sapiens
uggaguggggccgaggccccagaugcucugcu

SEQ ID NO: 238385 - RNA, 32 nt, Homo Sapiens
aaugccuuugcuagugcaguguauuuuuucaa

SEQ ID NO: 238386 - RNA, 32 nt, Homo Sapiens
acccugcgccuggcuguucugagaggccaaga

SEQ ID NO: 238387 - RNA, 32 nt, Homo Sapiens
ugacccagaggccuuggugcugccggcguggg

SEQ ID NO: 238388 - RNA, 32 nt, Homo Sapiens
gccccucucugcugccagacacccccugcugc

SEQ ID NO: 238389 - RNA, 32 nt, Homo Sapiens
acuucauuuuuccuuuuagagucaaaggauau

SEQ ID NO: 238390 - RNA, 32 nt, Homo Sapiens
ggccacaggagcagaagcugggugggcugaag

SEQ ID NO: 238391 - RNA, 32 nt, Homo Sapiens
guaggggaggccauggaaaugacucuaaagau

SEQ ID NO: 238392 - RNA, 32 nt, Homo Sapiens
guagcccugugcuguaucauggccauaguaua

SEQ ID NO: 238393 - RNA, 32 nt, Homo Sapiens
cuggggcugggaaagaacgaaaagggagucgc

SEQ ID NO: 238394 - RNA, 32 nt, Homo Sapiens
agcagcgggggagaggguaaacuggggcgcgc

SEQ ID NO: 238395 - RNA, 32 nt, Homo Sapiens
agaaagaggugauuauggagggaaucaaaaau

SEQ ID NO: 238396 - RNA, 32 nt, Homo Sapiens
ccauuugucugugcaaagagaauuaggagaga

SEQ ID NO: 238397 - RNA, 32 nt, Homo Sapiens
uugagguggguaguuucuuuuggaaaguacug

SEQ ID NO: 238398 - RNA, 32 nt, Homo Sapiens
aaaccucugagaacugccugucaccaucagcu

SEQ ID NO: 238399 - RNA, 32 nt, Homo Sapiens
gggcugaccugcccgcgaaguugcggacagug

SEQ ID NO: 238400 - RNA, 32 nt, Homo Sapiens
uggagguggggccgaggcagcggccgccugag

SEQ ID NO: 238401 - RNA, 32 nt, Homo Sapiens
gccugagacagagagggccaggcaccaaccac

SEQ ID NO: 238402 - RNA, 32 nt, Homo Sapiens
auagguugauucaaugucuuugcuaauaugaa

SEQ ID NO: 238403 - RNA, 32 nt, Homo Sapiens
cauuaaccugcucuccuuugucaccugggcug

SEQ ID NO: 238404 - RNA, 32 nt, Homo Sapiens
auacuuaaguagcguauccccugguauguuuu

SEQ ID NO: 238405 - RNA, 32 nt, Homo Sapiens
cugcuugugucuuuuuaugaccuguuugccuu

SEQ ID NO: 238406 - RNA, 32 nt, Homo Sapiens
ggcaauacaccucugaacaugugugugauaaa

SEQ ID NO: 238407 - RNA, 32 nt, Homo Sapiens
acuuuggauuuaaagccugaaaaugaguccca

SEQ ID NO: 238408 - RNA, 32 nt, Homo Sapiens
uuuuccaggcccagcucuugccucauggcagc

SEQ ID NO: 238409 - RNA, 32 nt, Homo Sapiens
guggcugucucuaucaucgugacuguggacuu

SEQ ID NO: 238410 - RNA, 32 nt, Homo Sapiens
ugauauguuccuuuuuucaguucaccaaguug

SEQ ID NO: 238411 - RNA, 32 nt, Homo Sapiens
cagagaacuuucccauucuguuuggaucuaua

SEQ ID NO: 238412 - RNA, 29 nt, Homo Sapiens
gugugaacguguauguaccuaggauaugu

SEQ ID NO: 238413 - RNA, 32 nt, Homo Sapiens
uauuaagaguauaaaaacaagauacagauuuu

SEQ ID NO: 238414 - RNA, 32 nt, Homo Sapiens
accuguuuuuuuucuuuuucuuuuucuuuuuu

SEQ ID NO: 238415 - RNA, 32 nt, Homo Sapiens
uuuugcugcagacucauccuuuuuaaaugaga

SEQ ID NO: 238416 - RNA, 32 nt, Homo Sapiens
ccgaggaaaaagauccacuggaaacuaggccg

SEQ ID NO: 238417 - RNA, 32 nt, Homo Sapiens
ccaagcaaauuauaugaauuuauuuuacuauu

SEQ ID NO: 238418 - RNA, 32 nt, Homo Sapiens
gauagaaaaaucaacauucucucacugacacc

SEQ ID NO: 238419 - RNA, 32 nt, Homo Sapiens
guccccacugcuuuuccaggcccagccccugu

SEQ ID NO: 238420 - RNA, 32 nt, Homo Sapiens
gaaaaguagauauagauauugugaaaauaggc

SEQ ID NO: 238421 - RNA, 32 nt, Homo Sapiens
ugagacaauguugaggacucaaaugaaucaaa

SEQ ID NO: 238422 - RNA, 32 nt, Homo Sapiens
ucuauuuguguaauuuguuuccuccaaacuua

SEQ ID NO: 238423 - RNA, 32 nt, Homo Sapiens
gaaguuggccuccuuucacuggggauugaaaa

SEQ ID NO: 238424 - RNA, 32 nt, Homo Sapiens
gucuccuacugcuccuucuccccuugcacagg

SEQ ID NO: 238425 - RNA, 32 nt, Homo Sapiens
ggaggguaauacacucugauccccucagucug

SEQ ID NO: 238426 - RNA, 32 nt, Homo Sapiens
ugugugcuagugagccggagccggcgacggcg

SEQ ID NO: 238427 - RNA, 32 nt, Homo Sapiens
gauuaaauaaaacuuaaaucucacucuaggag

SEQ ID NO: 238428 - RNA, 32 nt, Homo Sapiens
gguagaggcgcuccuggccgggcccgcgcuuc

SEQ ID NO: 238429 - RNA, 32 nt, Homo Sapiens
gggagaagaugaugacuaaguggaauaaccua

SEQ ID NO: 238430 - RNA, 32 nt, Homo Sapiens
ggccgccggcgcccagccgucccggaggcuga

SEQ ID NO: 238431 - RNA, 32 nt, Homo Sapiens
caagcucuccuaccucugcccagccgucccuc

SEQ ID NO: 238432 - RNA, 32 nt, Homo Sapiens
ggaaggguuagauguggguggguguggccgcc

SEQ ID NO: 238433 - RNA, 32 nt, Homo Sapiens
uuccaauggggaggaggaaagaugcaauaugu

SEQ ID NO: 238434 - RNA, 32 nt, Homo Sapiens
uaucuccaggagguagcaaggagaucaguagu

SEQ ID NO: 238435 - RNA, 32 nt, Homo Sapiens
guuccccaaguguacuuaaucaccuuagugcc

SEQ ID NO: 238436 - RNA, 32 nt, Homo Sapiens
acuggcagcggugagcuccaauaaaagaugga

SEQ ID NO: 238437 - RNA, 32 nt, Homo Sapiens
guuucuuuuuuuuuuucuuaaggggucaguuu

SEQ ID NO: 238438 - RNA, 32 nt, Homo Sapiens
aaggcgcggcguucagacgccauggacaccga

SEQ ID NO: 238439 - RNA, 32 nt, Homo Sapiens
uuguuccaaggucaaggcagccuccuuauuuu

SEQ ID NO: 238440 - RNA, 32 nt, Homo Sapiens
acgggggcggccugggcucucuucccauccau

SEQ ID NO: 238441 - RNA, 32 nt, Homo Sapiens
ccgccccugccagccaccauggggcugccacu

SEQ ID NO: 238442 - RNA, 32 nt, Homo Sapiens
uauaauaauaauaaugcagaugauguuauaua

SEQ ID NO: 238443 - RNA, 32 nt, Homo Sapiens
uuguuuucauuuuaaauccuagcugauuguug

SEQ ID NO: 238444 - RNA, 32 nt, Homo Sapiens
cggauggucuugaaacacaaaugguuuuuggu

SEQ ID NO: 238445 - RNA, 32 nt, Homo Sapiens
cccuuuucugacuuaaaacauuccuuguaccu

SEQ ID NO: 238446 - RNA, 32 nt, Homo Sapiens
cucggcaccuccccggccucucucuucccagc

SEQ ID NO: 238447 - RNA, 32 nt, Homo Sapiens
ugaggaaugugcaaaauccuuuugcucaaguu

SEQ ID NO: 238448 - RNA, 32 nt, Homo Sapiens
cugggcugccuggcagagagccuugcuguuua

SEQ ID NO: 238449 - RNA, 30 nt, Homo Sapiens
agcagcauggacugcgugccucuccgccgg

SEQ ID NO: 238450 - RNA, 32 nt, Homo Sapiens
ucucagaaccccagccuugaaaauaguggggg

SEQ ID NO: 238451 - RNA, 32 nt, Homo Sapiens
uauucugaaugauagcuuauggucauauaguu

SEQ ID NO: 238452 - RNA, 32 nt, Homo Sapiens
aaguuuuucuuagaaccaaccaaaaaacaauc

SEQ ID NO: 238453 - RNA, 32 nt, Homo Sapiens
auuuaagauacaauuccaaugaguauucugau

SEQ ID NO: 238454 - RNA, 32 nt, Homo Sapiens
ccugggugcugugggaggagggggcugguauc

SEQ ID NO: 238455 - RNA, 32 nt, Homo Sapiens
gacucugugucacucucaacacacacagcucc

SEQ ID NO: 238456 - RNA, 32 nt, Homo Sapiens
cuuggugacucgccccaccacccccagcccug

SEQ ID NO: 238457 - RNA, 32 nt, Homo Sapiens
caauuuucuuugaaaauucuggcagaccaagg

SEQ ID NO: 238458 - RNA, 32 nt, Homo Sapiens
ccaaggcuuggcacacugccagugucuuagca

SEQ ID NO: 238459 - RNA, 30 nt, Homo Sapiens
gcgcgcgguagcgucccggguccccuagca

SEQ ID NO: 238460 - RNA, 32 nt, Homo Sapiens
gccucaggccuauaccaccuccgucccucauc

SEQ ID NO: 238461 - RNA, 32 nt, Homo Sapiens
uaccugggacuucaggcacgcgccacuacacc

SEQ ID NO: 238462 - RNA, 32 nt, Homo Sapiens
ucucuccuuuugcuuagauaaucccagaucau

SEQ ID NO: 238463 - RNA, 32 nt, Homo Sapiens
accaucauucagaauaacucuuccaauuucug

SEQ ID NO: 238464 - RNA, 32 nt, Homo Sapiens
acacagggacucugagcacccccgucaccaca

SEQ ID NO: 238465 - RNA, 32 nt, Homo Sapiens
uuucuuuucagaaauugcuaccauaguaauua

SEQ ID NO: 238466 - RNA, 32 nt, Homo Sapiens
auccagacaagacugaaccauaccuucagcca

SEQ ID NO: 238467 - RNA, 32 nt, Homo Sapiens
uuuguagaaauuauauguuuuguaguauucau

SEQ ID NO: 238468 - RNA, 32 nt, Homo Sapiens
agaaagauauuuuuauauuacuucucagcagu

SEQ ID NO: 238469 - RNA, 32 nt, Homo Sapiens
aaccaaggucugaccuaggguucccucccagu

SEQ ID NO: 238470 - RNA, 32 nt, Homo Sapiens
gagucuggaauuguuuucaaagugauggucag

SEQ ID NO: 238471 - RNA, 32 nt, Homo Sapiens
aaagucagcuggaccucauggggccuggggcu

SEQ ID NO: 238472 - RNA, 32 nt, Homo Sapiens
agggauaguuagucuuuuuuuugagacagaau

SEQ ID NO: 238473 - RNA, 32 nt, Homo Sapiens
acucagaccugccagcucucggaguccuuggu

SEQ ID NO: 238474 - RNA, 32 nt, Homo Sapiens
auuagaggaaucaacccauuccaacuucaaag

SEQ ID NO: 238475 - RNA, 32 nt, Homo Sapiens
ccauacgucuccagggaacccccguggggugu

SEQ ID NO: 238476 - RNA, 32 nt, Homo Sapiens
uuuauauuuucagugaucucauuugaaugauu

SEQ ID NO: 238477 - RNA, 32 nt, Homo Sapiens
ccgccagagcagccucgacgcuauggaggagc

SEQ ID NO: 238478 - RNA, 32 nt, Homo Sapiens
aucauaguaauaauuguucaaacacaagucau

SEQ ID NO: 238479 - RNA, 32 nt, Homo Sapiens
caagcagugaauuaauaaccagcaggugccua

SEQ ID NO: 238480 - RNA, 32 nt, Homo Sapiens
uguuccucggccaguuaacaagaagauggugu

SEQ ID NO: 238481 - RNA, 32 nt, Homo Sapiens
guggcauaucacggccauggggucucagcauu

SEQ ID NO: 238482 - RNA, 32 nt, Homo Sapiens
cgcugucguuugcggucucggcagggcgcccc

SEQ ID NO: 238483 - RNA, 31 nt, Homo Sapiens
ugggugagcuguaugaacucgaggucugcgg

SEQ ID NO: 238484 - RNA, 32 nt, Homo Sapiens
aagcggugguggcuguggaggaagccgaucug

SEQ ID NO: 238485 - RNA, 32 nt, Homo Sapiens
gugauccgcccgccucggccucccagagugcu

SEQ ID NO: 238486 - RNA, 32 nt, Homo Sapiens
cucccagguucaagagauuuuccugccucagc

SEQ ID NO: 238487 - RNA, 32 nt, Homo Sapiens
agacuaugaugaugcuggaguggacuucuguu

SEQ ID NO: 238488 - RNA, 32 nt, Homo Sapiens
acuuuagcugaagaggagggggaugugcugug

SEQ ID NO: 238489 - RNA, 32 nt, Homo Sapiens
cuccuugacucauucuuucaugugucaccaag

SEQ ID NO: 238490 - RNA, 32 nt, Homo Sapiens
auugacaaacuuaugauagagauggauggaac

SEQ ID NO: 238491 - RNA, 32 nt, Homo Sapiens
ucagcgugccccuggaucccccgcaguggccu

SEQ ID NO: 238492 - RNA, 30 nt, Homo Sapiens
cggggcgcucucggaugcggcaggacaagc

SEQ ID NO: 238493 - RNA, 32 nt, Homo Sapiens
gugugaugggacguuaaaaauaccaaaacaga

SEQ ID NO: 238494 - RNA, 32 nt, Homo Sapiens
aggaggggauucaacagcuuuauugucuggaa

SEQ ID NO: 238495 - RNA, 32 nt, Homo Sapiens
ccuuaauuaggaugaagugacuauuucuggga

SEQ ID NO: 238496 - RNA, 32 nt, Homo Sapiens
gggaguggggagagaggaggaaagcgcugcgc

SEQ ID NO: 238497 - RNA, 32 nt, Homo Sapiens
aaaccagucugcugguuaaauggaaacuuaaa

SEQ ID NO: 238498 - RNA, 32 nt, Homo Sapiens
cacaucaaaguuagcaaagccauccacuaugu

SEQ ID NO: 238499 - RNA, 32 nt, Homo Sapiens
ugucccugcccccgggggcuucacaugccacu

SEQ ID NO: 238500 - RNA, 32 nt, Homo Sapiens
gcaggcacucaaauauugauugguuuacugua

SEQ ID NO: 238501 - RNA, 32 nt, Homo Sapiens
gggcccagugacaaaaucauugggguuuguag

SEQ ID NO: 238502 - RNA, 32 nt, Homo Sapiens
ugcuuguuggguccuagacccagggacccagc

SEQ ID NO: 238503 - RNA, 32 nt, Homo Sapiens
augaggagccgggguugcugcugcugcuuccg

SEQ ID NO: 238504 - RNA, 32 nt, Homo Sapiens
aauacuaauaguccggccaggcgcuguggcuc

SEQ ID NO: 238505 - RNA, 32 nt, Homo Sapiens
uggaugucacuuuggaaaccaagcccuuggaa

SEQ ID NO: 238506 - RNA, 32 nt, Homo Sapiens
uuaugagaccuuuuagacccaguuggauggcu

SEQ ID NO: 238507 - RNA, 32 nt, Homo Sapiens
uaaacuuaugagucaagaagggucucuuccuu

SEQ ID NO: 238508 - RNA, 30 nt, Homo Sapiens
uugcgauaucaccaccaagagccugauaac

SEQ ID NO: 238509 - RNA, 32 nt, Homo Sapiens
cauuucuaaaugccagaagagagaugagacag

SEQ ID NO: 238510 - RNA, 32 nt, Homo Sapiens
cccaccuccgcggcccugggcgccgugguguc

SEQ ID NO: 238511 - RNA, 32 nt, Homo Sapiens
auccagcccucccaaacucuugccuuucuugu

SEQ ID NO: 238512 - RNA, 32 nt, Homo Sapiens
gggcagcacccucccccgcagcgggguaggga

SEQ ID NO: 238513 - RNA, 32 nt, Homo Sapiens
ccgcccacagagcucuuagccaauccuaugca

SEQ ID NO: 238514 - RNA, 32 nt, Homo Sapiens
caguauggcucuuuuccagguggcuuuccugg

SEQ ID NO: 238515 - RNA, 32 nt, Homo Sapiens
cuccacuaaaaauacaacaguuagucgggcau

SEQ ID NO: 238516 - RNA, 32 nt, Homo Sapiens
uccgaaaaggauuaagcaucacuagggcucca

SEQ ID NO: 238517 - RNA, 32 nt, Homo Sapiens
gaguaucugugcuacgaccugucucagaaccc

SEQ ID NO: 238518 - RNA, 32 nt, Homo Sapiens
accagcuucaucucccagagaaugggauccuu

SEQ ID NO: 238519 - RNA, 27 nt, Homo Sapiens
uugauuucuuucuucagcuuucugaca

SEQ ID NO: 238520 - RNA, 32 nt, Homo Sapiens
aauuauucaaagccaucacaaaacacuauaag

SEQ ID NO: 238521 - RNA, 32 nt, Homo Sapiens
guguagcagaaaaaggcugugcugcccugaag

SEQ ID NO: 238522 - RNA, 32 nt, Homo Sapiens
ggccauuaauucucauuagaaaauuacuuaau

SEQ ID NO: 238523 - RNA, 32 nt, Homo Sapiens
ggcuccugguuguuccucucaaaccugugcug

SEQ ID NO: 238524 - RNA, 32 nt, Homo Sapiens
cuuagauagagaagggcuauagaucacauacg

SEQ ID NO: 238525 - RNA, 32 nt, Homo Sapiens
gaauauuuaaacaguagcuuagcaucagaggu

SEQ ID NO: 238526 - RNA, 30 nt, Homo Sapiens
ugaaaaagcggcggcggcgggagagaggag

SEQ ID NO: 238527 - RNA, 32 nt, Homo Sapiens
cagugucauagaaaagcaauucaccaacgacu

SEQ ID NO: 238528 - RNA, 32 nt, Homo Sapiens
agcuccacccucucgucaagcucauccucccg

SEQ ID NO: 238529 - RNA, 32 nt, Homo Sapiens
ccaccgccgcgaugcucgcccgcggguugggg

SEQ ID NO: 238530 - RNA, 32 nt, Homo Sapiens
aguggcugcggcuccgcgggacuccagggcgc

SEQ ID NO: 238531 - RNA, 32 nt, Homo Sapiens
guuucaggaguccagccccaggaggcaaaguc

SEQ ID NO: 238532 - RNA, 32 nt, Homo Sapiens
uguuuucuccaauuuccuuucagacuuaaaau

SEQ ID NO: 238533 - RNA, 30 nt, Homo Sapiens
uuuggaggcaggcagguuggugccugacag

SEQ ID NO: 238534 - RNA, 32 nt, Homo Sapiens
uaacaagggcaccacuaacaaggacaaagcca

SEQ ID NO: 238535 - RNA, 32 nt, Homo Sapiens
cuauguucugcagccucccagaguagaaaacu

SEQ ID NO: 238536 - RNA, 32 nt, Homo Sapiens
cacccggcucccggugucuccucccggccgcu

SEQ ID NO: 238537 - RNA, 32 nt, Homo Sapiens
cccgccaggagagacggugccucgcucuguug

SEQ ID NO: 238538 - RNA, 32 nt, Homo Sapiens
uaucaugcagcuuuugaggagucuuuuacacu

SEQ ID NO: 238539 - RNA, 32 nt, Homo Sapiens
ggucacugccagcauuguuggggcaagccugc

SEQ ID NO: 238540 - RNA, 32 nt, Homo Sapiens
gguauuuuucccuuugcauuuuuaaaaauacg

SEQ ID NO: 238541 - RNA, 32 nt, Homo Sapiens
auggggccagucauuguagaaacugccugucu

SEQ ID NO: 238542 - RNA, 32 nt, Homo Sapiens
ugucaguuucuuaauguagacacuaugucuuc

SEQ ID NO: 238543 - RNA, 32 nt, Homo Sapiens
uuaccacaauaaauaaagaaguugauauuucu

SEQ ID NO: 238544 - RNA, 28 nt, Homo Sapiens
aaaaaacuuguguacauguguuuggaac

SEQ ID NO: 238545 - RNA, 31 nt, Homo Sapiens
uuuaagaaaaugggcagucagaauuagggac

SEQ ID NO: 238546 - RNA, 32 nt, Homo Sapiens
acaucccugucauuguucugccuaaagagaca

SEQ ID NO: 238547 - RNA, 32 nt, Homo Sapiens
accaaaaguaucuaagguaacaacaacaauuu

SEQ ID NO: 238548 - RNA, 32 nt, Homo Sapiens
ucuccuccugguuuuuaguuguuuuucuuagu

SEQ ID NO: 238549 - RNA, 30 nt, Homo Sapiens
ccgugagccaccccuguuuugugaaacaca

SEQ ID NO: 238550 - RNA, 32 nt, Homo Sapiens
acucuucccaccucagugcccacagccaaggu

SEQ ID NO: 238551 - RNA, 32 nt, Homo Sapiens
gcgcgcccgcggcccgcgcgauuucccgccga

SEQ ID NO: 238552 - RNA, 32 nt, Homo Sapiens
uugggaggaugcugaggccugagaucucauca

SEQ ID NO: 238553 - RNA, 32 nt, Homo Sapiens
cucaguuguuuuagaaacgaaaaaguuaagca

SEQ ID NO: 238554 - RNA, 32 nt, Homo Sapiens
cugggggaacagagacuggagauguuugugaa

SEQ ID NO: 238555 - RNA, 32 nt, Homo Sapiens
ugcuuggccguggugugguccugcaacuccag

SEQ ID NO: 238556 - RNA, 32 nt, Homo Sapiens
cugaaauccagaagcuucaaaaucugaaucuu

SEQ ID NO: 238557 - RNA, 32 nt, Homo Sapiens
ucucccaaaguaccuugaacucuuagugauug

SEQ ID NO: 238558 - RNA, 32 nt, Homo Sapiens
guaaacaacugaaagaauaauuagaucauauu

SEQ ID NO: 238559 - RNA, 32 nt, Homo Sapiens
acaucucgcugcccccggggcucagcauucac

SEQ ID NO: 238560 - RNA, 32 nt, Homo Sapiens
cuggcuuucugcaccugauaugaaugagacca

SEQ ID NO: 238561 - RNA, 32 nt, Homo Sapiens
cguauauguuuuuccccuuccaagcucuuuug

SEQ ID NO: 238562 - RNA, 32 nt, Homo Sapiens
gguagaugcugggacagcauuagaagaggguc

SEQ ID NO: 238563 - RNA, 32 nt, Homo Sapiens
ucugucauauuaugaaaguucugggcuaucuu

SEQ ID NO: 238564 - RNA, 28 nt, Homo Sapiens
uuaaacuggagaugucauuugaaauuuu

SEQ ID NO: 238565 - RNA, 32 nt, Homo Sapiens
gggucaucaaggaccuugccucucuggaaucu

SEQ ID NO: 238566 - RNA, 32 nt, Homo Sapiens
gagguugaccagcucugggguuuguaaggcag

SEQ ID NO: 238567 - RNA, 32 nt, Homo Sapiens
ugcaagaaaucacagcuguuuauuuucuguaa

SEQ ID NO: 238568 - RNA, 32 nt, Homo Sapiens
auauaugaugaaauucuuauguugaauauguu

SEQ ID NO: 238569 - RNA, 32 nt, Homo Sapiens
augucagauugugcugguucuagcucauaaua

SEQ ID NO: 238570 - RNA, 32 nt, Homo Sapiens
agccgguccgaauccagaaaccccgccugccc

SEQ ID NO: 238571 - RNA, 32 nt, Homo Sapiens
auguugauauaaaauaggaucuuaauuuaaca

SEQ ID NO: 238572 - RNA, 32 nt, Homo Sapiens
ccacugagaaggaaacaacaucacuguaacaa

SEQ ID NO: 238573 - RNA, 32 nt, Homo Sapiens
ggagguuuuuaaaggcacuguuaggcugagca

SEQ ID NO: 238574 - RNA, 32 nt, Homo Sapiens
agaacguaggugugacacuuuuuuguucggag

SEQ ID NO: 238575 - RNA, 32 nt, Homo Sapiens
ggauagggaaaggguggaugcucucaggcuga

SEQ ID NO: 238576 - RNA, 31 nt, Homo Sapiens
gcugcugcugccugccugcccacccgccugg

SEQ ID NO: 238577 - RNA, 32 nt, Homo Sapiens
gugcaguuaugaaaaugaaauaugcaaaugau

SEQ ID NO: 238578 - RNA, 32 nt, Homo Sapiens
gauuuauuuuucugaguucucuggaaaccaaa

SEQ ID NO: 238579 - RNA, 30 nt, Homo Sapiens
agggaagagaagcauuggugaaauggauuu

SEQ ID NO: 238580 - RNA, 32 nt, Homo Sapiens
ugacauuccugccugccugaggaagaaauggu

SEQ ID NO: 238581 - RNA, 32 nt, Homo Sapiens
uaagacacacauuuuucuuuuggcuccuugaa

SEQ ID NO: 238582 - RNA, 32 nt, Homo Sapiens
agguuaacagaaaaauugagaggaagauagag

SEQ ID NO: 238583 - RNA, 32 nt, Homo Sapiens
gggacguugugauucucugugaugcugaaaac

SEQ ID NO: 238584 - RNA, 32 nt, Homo Sapiens
cccaccaccugccugcuugcuucucuggcugc

SEQ ID NO: 238585 - RNA, 32 nt, Homo Sapiens
auucuuugacugacugaccucauuccacuggg

SEQ ID NO: 238586 - RNA, 32 nt, Homo Sapiens
aaucuucuguuggguggcaucauuccaggccc

SEQ ID NO: 238587 - RNA, 32 nt, Homo Sapiens
uuagacagaaaagcaaauagcaauugacuuga

SEQ ID NO: 238588 - RNA, 32 nt, Homo Sapiens
ggcugccacucugggacggguggccagcugcc

SEQ ID NO: 238589 - RNA, 32 nt, Homo Sapiens
gccgguacgcaggguggaccggguggugagug

SEQ ID NO: 238590 - RNA, 32 nt, Homo Sapiens
aaauccccaguacccauagaaacccuuaaaga

SEQ ID NO: 238591 - RNA, 32 nt, Homo Sapiens
uguagucacaguaaauacuaagauggcauuuc

SEQ ID NO: 238592 - RNA, 32 nt, Homo Sapiens
cuauugugaugaaaagauuugaaagaucuuuu

SEQ ID NO: 238593 - RNA, 32 nt, Homo Sapiens
gcugucuccggaagauucugucguugcccuug

SEQ ID NO: 238594 - RNA, 32 nt, Homo Sapiens
accccuguuacccccaggaucucuguuccuuu

SEQ ID NO: 238595 - RNA, 32 nt, Homo Sapiens
gguccuccccuucuccuccccugcucgcugca

SEQ ID NO: 238596 - RNA, 32 nt, Homo Sapiens
cuggagcaggguggggagucagagcagguccc

SEQ ID NO: 238597 - RNA, 32 nt, Homo Sapiens
auguuaaucacauaguaaguuauuuucuaguu

SEQ ID NO: 238598 - RNA, 32 nt, Homo Sapiens
gccgaggcggguggaucacaaggucagcaguu

SEQ ID NO: 238599 - RNA, 32 nt, Homo Sapiens
auauuuuuaagugucuuagauccugagaaaga

SEQ ID NO: 238600 - RNA, 32 nt, Homo Sapiens
gcugugagcuuguguuacaugguaauaaagcc

SEQ ID NO: 238601 - RNA, 32 nt, Homo Sapiens
agcuuuucacauguucuugccauccucuuucc

SEQ ID NO: 238602 - RNA, 32 nt, Homo Sapiens
gaacuuuccuggaugucugaacuuugggaagc

SEQ ID NO: 238603 - RNA, 32 nt, Homo Sapiens
ccucggagcugguuccucucucccacccuaag

SEQ ID NO: 238604 - RNA, 32 nt, Homo Sapiens
ggcacaugggcacaacgucuucugagaaggga

SEQ ID NO: 238605 - RNA, 28 nt, Homo Sapiens
uuuccuuguggcuccaggaugacccugu

SEQ ID NO: 238606 - RNA, 29 nt, Homo Sapiens
uaauaugugacuuuugucuugaaaaguag

SEQ ID NO: 238607 - RNA, 31 nt, Homo Sapiens
uuuucaacaaauuguaaauuauaagaaaaag

SEQ ID NO: 238608 - RNA, 32 nt, Homo Sapiens
gauuggaguguguccggagaugagaugaaaaa

SEQ ID NO: 238609 - RNA, 32 nt, Homo Sapiens
ggaacgccccgccgccagcaugccgugggacg

SEQ ID NO: 238610 - RNA, 32 nt, Homo Sapiens
auauuuaaagggaaugacuuugaaguaaaacc

SEQ ID NO: 238611 - RNA, 32 nt, Homo Sapiens
aagcagcccuccccucccuccccuuaugaggu

SEQ ID NO: 238612 - RNA, 28 nt, Homo Sapiens
cggaggaggggggcgccgagggggcugu

SEQ ID NO: 238613 - RNA, 32 nt, Homo Sapiens
gagaacugcagccaggaugcgcucagcagaca

SEQ ID NO: 238614 - RNA, 32 nt, Homo Sapiens
gcuccagcagcucaggcuccagcccuccagug

SEQ ID NO: 238615 - RNA, 32 nt, Homo Sapiens
uccgucucggugucuuucaucaucacaccacu

SEQ ID NO: 238616 - RNA, 32 nt, Homo Sapiens
uauauuuaacucucuuuaugucuguggauuuu

SEQ ID NO: 238617 - RNA, 32 nt, Homo Sapiens
uguaaggaaauauuuuuugauuuugcguaaga

SEQ ID NO: 238618 - RNA, 32 nt, Homo Sapiens
cgccccgcgggaagaugaauaagggcuggcug

SEQ ID NO: 238619 - RNA, 32 nt, Homo Sapiens
agcagggaaugguucauuuacucuuaaucuuu

SEQ ID NO: 238620 - RNA, 32 nt, Homo Sapiens
gggagauuccagccagacacccgccccccggc

SEQ ID NO: 238621 - RNA, 31 nt, Homo Sapiens
cguggacaagagguguugacggaccggaccg

SEQ ID NO: 238622 - RNA, 32 nt, Homo Sapiens
guuuuuauuuuuguuuuauuuuugacagacua

SEQ ID NO: 238623 - RNA, 32 nt, Homo Sapiens
uccuccaauuacugaggcauacguaacaguug

SEQ ID NO: 238624 - RNA, 32 nt, Homo Sapiens
cggacccccggucucgcccccggaaacaugac

SEQ ID NO: 238625 - RNA, 32 nt, Homo Sapiens
acugcacccccuccugcugcagaggggcaggc

SEQ ID NO: 238626 - RNA, 32 nt, Homo Sapiens
guguucuuauaaaggucuaauguauccacagg

SEQ ID NO: 238627 - RNA, 32 nt, Homo Sapiens
ucaagaaugacagcuucuauauuuuguaauuc

SEQ ID NO: 238628 - RNA, 32 nt, Homo Sapiens
acagcggaacagagagagcugccgacaaacag

SEQ ID NO: 238629 - RNA, 32 nt, Homo Sapiens
gcguuggcgcccuccgcgggaccagcgccucg

SEQ ID NO: 238630 - RNA, 32 nt, Homo Sapiens
cuguugacguagauauugaaagaauaaugaag

SEQ ID NO: 238631 - RNA, 32 nt, Homo Sapiens
ggucugugggccgcaggucccagcgccuuugg

SEQ ID NO: 238632 - RNA, 32 nt, Homo Sapiens
ucccuuuuauagaaccaucagaucucguaaca

SEQ ID NO: 238633 - RNA, 32 nt, Homo Sapiens
uguuuucuuuccauuuccuguuggacaggugg

SEQ ID NO: 238634 - RNA, 32 nt, Homo Sapiens
cucucagagauuuaugccaaaauugcauacaa

SEQ ID NO: 238635 - RNA, 32 nt, Homo Sapiens
cgccggcccagcggcccucccaaacuuccgaa

SEQ ID NO: 238636 - RNA, 32 nt, Homo Sapiens
ccuagaagugacugaaauauuuuugugcauau

SEQ ID NO: 238637 - RNA, 32 nt, Homo Sapiens
cacuguauucagaauacagguucuuuucuggu

SEQ ID NO: 238638 - RNA, 32 nt, Homo Sapiens
gguaauacugaagaaaaauaaaaauagauuuu

SEQ ID NO: 238639 - RNA, 32 nt, Homo Sapiens
acugguguugaaggcuuuugcucauauaaaca

SEQ ID NO: 238640 - RNA, 30 nt, Homo Sapiens
ugcaagggagguggaagggaaaagauuuuc

SEQ ID NO: 238641 - RNA, 32 nt, Homo Sapiens
acguuccggccgcuucgggcuggcggcuggag

SEQ ID NO: 238642 - RNA, 32 nt, Homo Sapiens
ugccugguucaucuuguagucuuccaaaacag

SEQ ID NO: 238643 - RNA, 32 nt, Homo Sapiens
ggccgauuuaauuaaacuuagguaagaagauu

SEQ ID NO: 238644 - RNA, 32 nt, Homo Sapiens
aucuaaguaucuuuaauaaaucuuucagcaga

SEQ ID NO: 238645 - RNA, 32 nt, Homo Sapiens
uggcuuaggacagagcaauacuuuacaauaaa

SEQ ID NO: 238646 - RNA, 32 nt, Homo Sapiens
gugggagugaacugggugggccaucugcccug

SEQ ID NO: 238647 - RNA, 32 nt, Homo Sapiens
ugcugggguaguggguguggucaaacagcuug

SEQ ID NO: 238648 - RNA, 32 nt, Homo Sapiens
cugggcugcgggcaccacgcgggguccggccu

SEQ ID NO: 238649 - RNA, 32 nt, Homo Sapiens
ugaaaugcugucagcccaaacuccaaagggau

SEQ ID NO: 238650 - RNA, 32 nt, Homo Sapiens
cggcucacuccagccaucccuucuguuucucc

SEQ ID NO: 238651 - RNA, 32 nt, Homo Sapiens
agccuacacccaacuggagauaauuauaaaaa

SEQ ID NO: 238652 - RNA, 32 nt, Homo Sapiens
uauagaggauacaugaaaaguaugagaucugg

SEQ ID NO: 238653 - RNA, 32 nt, Homo Sapiens
agguggggaaagggacaccuuccggcccuccc

SEQ ID NO: 238654 - RNA, 32 nt, Homo Sapiens
gggggugggggugggggcaggggcaggggcuu

SEQ ID NO: 238655 - RNA, 32 nt, Homo Sapiens
uuuguuucuaaagauguucagcucccuguaau

SEQ ID NO: 238656 - RNA, 32 nt, Homo Sapiens
ggaaaaauaguaucaaaggaaaugagaaaguu

SEQ ID NO: 238657 - RNA, 32 nt, Homo Sapiens
cagcagugaagaccaagcagcgugccuucagc

SEQ ID NO: 238658 - RNA, 31 nt, Homo Sapiens
cagacaacagccagggcuggaguccaggcca

SEQ ID NO: 238659 - RNA, 30 nt, Homo Sapiens
gucucugucugugcuguuggcgaccccucu

SEQ ID NO: 238660 - RNA, 31 nt, Homo Sapiens
aguuuuacagaaaauaaaaaagcaaaauguc

SEQ ID NO: 238661 - RNA, 32 nt, Homo Sapiens
ucucucuccuucccugcagcaguggccggugu

SEQ ID NO: 238662 - RNA, 32 nt, Homo Sapiens
acuucuuuccccgcccguuucccagcagugaa

SEQ ID NO: 238663 - RNA, 32 nt, Homo Sapiens
ugaugucucaagaccagacauaaaacuuuugg

SEQ ID NO: 238664 - RNA, 32 nt, Homo Sapiens
cucucuugaaucagaguaucauugucuuccuc

SEQ ID NO: 238665 - RNA, 27 nt, Homo Sapiens
uccuugggccgcaauuucaucaucucu

SEQ ID NO: 238666 - RNA, 32 nt, Homo Sapiens
ugagggauaaaaaaccauacauuggguacagu

SEQ ID NO: 238667 - RNA, 32 nt, Homo Sapiens
ucaacagucauuaauaaauguacauguacgau

SEQ ID NO: 238668 - RNA, 32 nt, Homo Sapiens
ccaggcccagcuccggccucucggcggccgcu

SEQ ID NO: 238669 - RNA, 32 nt, Homo Sapiens
ugaaauuugaguuuguuuuggaagcaugcuca

SEQ ID NO: 238670 - RNA, 32 nt, Homo Sapiens
cccugacacccuccccagcccccacagauaac

SEQ ID NO: 238671 - RNA, 32 nt, Homo Sapiens
cucagaacucaucaaaaagcacgaggcugucc

SEQ ID NO: 238672 - RNA, 28 nt, Homo Sapiens
ucuggaugagauuaacauugaaucagua

SEQ ID NO: 238673 - RNA, 32 nt, Homo Sapiens
uuauuuccggggcacuggagccaggcuggaag

SEQ ID NO: 238674 - RNA, 32 nt, Homo Sapiens
ccaggcacguugagaguggaggcacaauggaa

SEQ ID NO: 238675 - RNA, 32 nt, Homo Sapiens
ggugcacgcaugcauggacacacacacacaca

SEQ ID NO: 238676 - RNA, 32 nt, Homo Sapiens
acuuguuuuauuggacuugugaauuuuugagu

SEQ ID NO: 238677 - RNA, 32 nt, Homo Sapiens
cacacacacgcacauacacacacacacacaca

SEQ ID NO: 238678 - RNA, 32 nt, Homo Sapiens
ugugugcgcgucugugcaugugugugucugug

SEQ ID NO: 238679 - RNA, 32 nt, Homo Sapiens
agacauuccuuccuguuucugccaugggaagu

SEQ ID NO: 238680 - RNA, 32 nt, Homo Sapiens
gaaaucgucagaggguagcaaaaauuaauauu

SEQ ID NO: 238681 - RNA, 32 nt, Homo Sapiens
gcugugggagcuuuguucuuugcaauaaaucu

SEQ ID NO: 238682 - RNA, 32 nt, Homo Sapiens
ccccaagaaacagcuuccugagggugcugggg

SEQ ID NO: 238683 - RNA, 32 nt, Homo Sapiens
cugaucgucggccucccuccccgcuccccacc

SEQ ID NO: 238684 - RNA, 31 nt, Homo Sapiens
gcuuagaaauaaaacuuggcuguauuaggag

SEQ ID NO: 238685 - RNA, 31 nt, Homo Sapiens
caugagcagccucagccucagaauuaccagg

SEQ ID NO: 238686 - RNA, 32 nt, Homo Sapiens
caaucaaaaguacuaugcaauuuuaggacaau

SEQ ID NO: 238687 - RNA, 32 nt, Homo Sapiens
caguccccaagcccucagccuaguggguguca

SEQ ID NO: 238688 - RNA, 32 nt, Homo Sapiens
uccauguacuucugcccugccuccuccuuucg

SEQ ID NO: 238689 - RNA, 32 nt, Homo Sapiens
gguguauuucuuuuuuaacaaauaaaaggcau

SEQ ID NO: 238690 - RNA, 32 nt, Homo Sapiens
caguucuggagccucaucuggcugggaucucc

SEQ ID NO: 238691 - RNA, 32 nt, Homo Sapiens
cccuuggugggggacauaguguggugacaguu

SEQ ID NO: 238692 - RNA, 30 nt, Homo Sapiens
acaggagagugcccugccugucucagugga

SEQ ID NO: 238693 - RNA, 32 nt, Homo Sapiens
cagcuugcuugcuuccuccaccagucugaccu

SEQ ID NO: 238694 - RNA, 32 nt, Homo Sapiens
acuucugcuuugcagaaauuaucugcuugcag

SEQ ID NO: 238695 - RNA, 32 nt, Homo Sapiens
ucuggcccgucucccggacagguugaggaagc

SEQ ID NO: 238696 - RNA, 32 nt, Homo Sapiens
gcaggggccugggggcggcccuggacuggcgg

SEQ ID NO: 238697 - RNA, 32 nt, Homo Sapiens
guaccagccccgaggacgcacgcaccuccgcg

SEQ ID NO: 238698 - RNA, 32 nt, Homo Sapiens
auaaagcccgcggccaagucccggggccgaga

SEQ ID NO: 238699 - RNA, 32 nt, Homo Sapiens
cucucagacaaaggcugccuugccggcggggg

SEQ ID NO: 238700 - RNA, 32 nt, Homo Sapiens
aagaagcagcucaagggcaggaguaugaaacu

SEQ ID NO: 238701 - RNA, 32 nt, Homo Sapiens
cugguuguagacugccaccuccucauuguauc

SEQ ID NO: 238702 - RNA, 32 nt, Homo Sapiens
ugcuuggaagcaggcucccaauagggaggggg

SEQ ID NO: 238703 - RNA, 32 nt, Homo Sapiens
guaaggauagguggcugagacccacugcccug

SEQ ID NO: 238704 - RNA, 32 nt, Homo Sapiens
gcuaacaaaaggagagacuuuuuucaugcaua

SEQ ID NO: 238705 - RNA, 32 nt, Homo Sapiens
cccggcggcugaagaggagccgcggcgaggaa

SEQ ID NO: 238706 - RNA, 32 nt, Homo Sapiens
gccuguagcucuucuuucuuggacuauggauu

SEQ ID NO: 238707 - RNA, 32 nt, Homo Sapiens
auuuuccagaaaguuugugcaggguuuaaguu

SEQ ID NO: 238708 - RNA, 32 nt, Homo Sapiens
ugcuucaccuccagcucugcugcuccucuacu

SEQ ID NO: 238709 - RNA, 32 nt, Homo Sapiens
gauucauuuauccauucaguguuuccugggcc

SEQ ID NO: 238710 - RNA, 30 nt, Homo Sapiens
uuguucgcugucccugcccugcucugcuag

SEQ ID NO: 238711 - RNA, 32 nt, Homo Sapiens
uucaauuuguucugccgagauugaaauaugaa

SEQ ID NO: 238712 - RNA, 32 nt, Homo Sapiens
gaagugggcgaaaacaaucaaagggaaguaca

SEQ ID NO: 238713 - RNA, 32 nt, Homo Sapiens
acaaagacuccuaacuaauaaaacagugaaca

SEQ ID NO: 238714 - RNA, 32 nt, Homo Sapiens
agagccucggcacaggccuggcacuggcugua

SEQ ID NO: 238715 - RNA, 32 nt, Homo Sapiens
ggaagggcgagcagcgggaggugcgcgcucug

SEQ ID NO: 238716 - RNA, 32 nt, Homo Sapiens
ggaccuggccuucugcccgacccaggcagcca

SEQ ID NO: 238717 - RNA, 32 nt, Homo Sapiens
agcugcaccgcggcgcagguuugcgagccgac

SEQ ID NO: 238718 - RNA, 32 nt, Homo Sapiens
cacuggucucaaacuccugaccucaggcgauc

SEQ ID NO: 238719 - RNA, 32 nt, Homo Sapiens
uguguuuugcuaaaggaaaaaaccauccaggu

SEQ ID NO: 238720 - RNA, 32 nt, Homo Sapiens
uccuggucauccacccauuaaaauaguuagau

SEQ ID NO: 238721 - RNA, 32 nt, Homo Sapiens
acucugcccucccgucucagcccucguguugc

SEQ ID NO: 238722 - RNA, 32 nt, Homo Sapiens
aaauacuuggaagaggagaggggcucaguuga

SEQ ID NO: 238723 - RNA, 32 nt, Homo Sapiens
augaauggcaagggguacuuauggaaaacagu

SEQ ID NO: 238724 - RNA, 32 nt, Homo Sapiens
accacgcggaguccgcgccgccccuccccgcg

SEQ ID NO: 238725 - RNA, 32 nt, Homo Sapiens
uuaaguugaagaaagguaacucguguaugaac

SEQ ID NO: 238726 - RNA, 32 nt, Homo Sapiens
cgauccaccucagcugacuggcacgcgacgag

SEQ ID NO: 238727 - RNA, 32 nt, Homo Sapiens
uauucauguauuauuucacauguuuugacucu

SEQ ID NO: 238728 - RNA, 32 nt, Homo Sapiens
caauacuuuauguuuuuauagaucuucauaga

SEQ ID NO: 238729 - RNA, 32 nt, Homo Sapiens
cauucagaggaugccuuuuauccccacauuaa

SEQ ID NO: 238730 - RNA, 32 nt, Homo Sapiens
gaggggacauagugcgaaguggccagaagaca

SEQ ID NO: 238731 - RNA, 32 nt, Homo Sapiens
cuccaccuuccucuggaauccaaguauuccug

SEQ ID NO: 238732 - RNA, 32 nt, Homo Sapiens
gccggcuucacucgcgcacgccgaccucccgg

SEQ ID NO: 238733 - RNA, 32 nt, Homo Sapiens
uugacuaccccggcccagggcucaccuacaag

SEQ ID NO: 238734 - RNA, 32 nt, Homo Sapiens
ggcgcgcaggggggcgucacgcgcuugcagac

SEQ ID NO: 238735 - RNA, 32 nt, Homo Sapiens
ccagugaaagagacguugugaugaugcgacug

SEQ ID NO: 238736 - RNA, 32 nt, Homo Sapiens
caccaauuaauuuccuggucuuuaguauauaa

SEQ ID NO: 238737 - RNA, 32 nt, Homo Sapiens
ggggauccguuuuuuuuuuuuaauuuuuuguu

SEQ ID NO: 238738 - RNA, 32 nt, Homo Sapiens
gaggguuugcuccaccuucucugguuuugguc

SEQ ID NO: 238739 - RNA, 32 nt, Homo Sapiens
uaacacuaaaauuuuaggcacucuuaaaugau

SEQ ID NO: 238740 - RNA, 32 nt, Homo Sapiens
cccucccugugcuuuggaagggaagggaggug

SEQ ID NO: 238741 - RNA, 32 nt, Homo Sapiens
caauuaucacauuuaagaauuguuaucauuua

SEQ ID NO: 238742 - RNA, 32 nt, Homo Sapiens
gcacucuagauugggugacagagccuucucaa

SEQ ID NO: 238743 - RNA, 32 nt, Homo Sapiens
auauuuuuuucuucuuuuuugaguuagugcca

SEQ ID NO: 238744 - RNA, 32 nt, Homo Sapiens
gcaaauuuaucgcugggaaaugagaugaccac

SEQ ID NO: 238745 - RNA, 32 nt, Homo Sapiens
cugcagcgucccggcguccucuccgggcccag

SEQ ID NO: 238746 - RNA, 28 nt, Homo Sapiens
ugagaggaugguucacauuugaguaaag

SEQ ID NO: 238747 - RNA, 32 nt, Homo Sapiens
guuugauuccucccaccuugcugaucauucgu

SEQ ID NO: 238748 - RNA, 32 nt, Homo Sapiens
cuaauuuccccucuguccuccauccagcggcu

SEQ ID NO: 238749 - RNA, 32 nt, Homo Sapiens
ugauuguuuauuggcauugaucucacagucug

SEQ ID NO: 238750 - RNA, 32 nt, Homo Sapiens
uuccaugggggcccuuucugcagugacugugg

SEQ ID NO: 238751 - RNA, 32 nt, Homo Sapiens
aaaaacauuuuuauauauaaacugguauacuc

SEQ ID NO: 238752 - RNA, 32 nt, Homo Sapiens
gcucaccucccucucucuugcuucauuuggcu

SEQ ID NO: 238753 - RNA, 32 nt, Homo Sapiens
ggcggcggcugggggagacggcaccgcgugcc

SEQ ID NO: 238754 - RNA, 32 nt, Homo Sapiens
cuguuuuguaaauucuuuuuaacugcacaucu

SEQ ID NO: 238755 - RNA, 32 nt, Homo Sapiens
uaaucuggauuaacauucgaggaaaucaguug

SEQ ID NO: 238756 - RNA, 32 nt, Homo Sapiens
agagaugauuaggaagaaaaugucuuaaacgg

SEQ ID NO: 238757 - RNA, 30 nt, Homo Sapiens
cuacuucuggacugccucaauaucaagggc

SEQ ID NO: 238758 - RNA, 30 nt, Homo Sapiens
caaccaugucgccauuucuucggauuggcu

SEQ ID NO: 238759 - RNA, 32 nt, Homo Sapiens
gcagucucgacaugaugagcugcccgacuuuu

SEQ ID NO: 238760 - RNA, 32 nt, Homo Sapiens
ugucucccuaaaauuucuauguugaagucuua

SEQ ID NO: 238761 - RNA, 32 nt, Homo Sapiens
uaacccaaggaccacaccagugccugauuucu

SEQ ID NO: 238762 - RNA, 32 nt, Homo Sapiens
accagucgagccccgggcgccguacagaggcu

SEQ ID NO: 238763 - RNA, 32 nt, Homo Sapiens
ggcgauugaagcugcuggcccagcauguggug

SEQ ID NO: 238764 - RNA, 32 nt, Homo Sapiens
guaugaauauccaccuccuuuaaauacucuau

SEQ ID NO: 238765 - RNA, 32 nt, Homo Sapiens
ccuaaccgccacccccucccccugucucccuc

SEQ ID NO: 238766 - RNA, 32 nt, Homo Sapiens
gcugacaucaccauagcauccacacauccacu

SEQ ID NO: 238767 - RNA, 32 nt, Homo Sapiens
uggaugagcuugaauuugaaugaauugaguuu

SEQ ID NO: 238768 - RNA, 32 nt, Homo Sapiens
gccgcgguggcgaugcaccgggcccguuagcg

SEQ ID NO: 238769 - RNA, 32 nt, Homo Sapiens
gguggacgcucgcccguacgcggucgcuacug

SEQ ID NO: 238770 - RNA, 26 nt, Homo Sapiens
cugauggauuaaaguggaaccaagcg

SEQ ID NO: 238771 - RNA, 32 nt, Homo Sapiens
gaaaaggcccaagagggaagucagagguggcg

SEQ ID NO: 238772 - RNA, 31 nt, Homo Sapiens
uuccuugggcacugcaugguccuugcuuccc

SEQ ID NO: 238773 - RNA, 32 nt, Homo Sapiens
ucaaaugcccaaggagugccaagccccaagau

SEQ ID NO: 238774 - RNA, 32 nt, Homo Sapiens
caaugaggaggagaucugggcugggcgggcca

SEQ ID NO: 238775 - RNA, 32 nt, Homo Sapiens
aaccuaaauacugagagucuuaaaagccaggc

SEQ ID NO: 238776 - RNA, 32 nt, Homo Sapiens
gggagcagggcugaggguaggggcugaaugug

SEQ ID NO: 238777 - RNA, 32 nt, Homo Sapiens
uaaauuuguacuuuuuagaucaaaacaaauua

SEQ ID NO: 238778 - RNA, 32 nt, Homo Sapiens
gucauuuggcuccaccuucaucuugcagagcc

SEQ ID NO: 238779 - RNA, 32 nt, Homo Sapiens
ugcuggagggagcggggcgcggauccggccca

SEQ ID NO: 238780 - RNA, 32 nt, Homo Sapiens
auucauuucuguugggaccagacgcggagccu

SEQ ID NO: 238781 - RNA, 32 nt, Homo Sapiens
aaaauugcuaaaagaugagauuuuaaauguuc

SEQ ID NO: 238782 - RNA, 32 nt, Homo Sapiens
gggagacauugccaaggaauuuuacuggaaga

SEQ ID NO: 238783 - RNA, 32 nt, Homo Sapiens
ggcggagaaaggagaggccgagcggcucaacc

SEQ ID NO: 238784 - RNA, 32 nt, Homo Sapiens
cggcagaggcaaggcugcugcagcuccgcugg

SEQ ID NO: 238785 - RNA, 32 nt, Homo Sapiens
ggucgggcggugggggcgagcggaggggcuga

SEQ ID NO: 238786 - RNA, 32 nt, Homo Sapiens
guuuuuaugaugugcauggacucauugaagua

SEQ ID NO: 238787 - RNA, 32 nt, Homo Sapiens
ggccuguauucccucuccacccgcccugucug

SEQ ID NO: 238788 - RNA, 32 nt, Homo Sapiens
cuggagggacagucuauacgugcggagggagg

SEQ ID NO: 238789 - RNA, 32 nt, Homo Sapiens
uuaaaccccuuuagugcugugcaugugguguc

SEQ ID NO: 238790 - RNA, 32 nt, Homo Sapiens
uuuggauuuuuccuuaaguguaagaaacaaug

SEQ ID NO: 238791 - RNA, 32 nt, Homo Sapiens
uccccugcggugaccccaacuccagcccaucc

SEQ ID NO: 238792 - RNA, 32 nt, Homo Sapiens
aggcucuccgcggggccggcccggggacagug

SEQ ID NO: 238793 - RNA, 32 nt, Homo Sapiens
ucauuagccaucugggaaaugcaagucaaaac

SEQ ID NO: 238794 - RNA, 32 nt, Homo Sapiens
guauggcucaacauggaucagauuuagugaua

SEQ ID NO: 238795 - RNA, 32 nt, Homo Sapiens
cuaugaaaaaaauuauacgcuaugggauacug

SEQ ID NO: 238796 - RNA, 32 nt, Homo Sapiens
uugguuucugguuuuucuuuuuccuuuuuguu

SEQ ID NO: 238797 - RNA, 32 nt, Homo Sapiens
aggauguugugcucagaaaugucacugucaug

SEQ ID NO: 238798 - RNA, 32 nt, Homo Sapiens
ggcgcguggagacgaggcagccaacugaggag

SEQ ID NO: 238799 - RNA, 32 nt, Homo Sapiens
agccuguauguggagggccggucuacagaagg

SEQ ID NO: 238800 - RNA, 32 nt, Homo Sapiens
uugcagugggcugaauggaaacaccugguuug

SEQ ID NO: 238801 - RNA, 32 nt, Homo Sapiens
ccaagugcaccugccgcccaccuuccacgcug

SEQ ID NO: 238802 - RNA, 32 nt, Homo Sapiens
ugcauugcuuuuccuuuuaaaaaguauagguc

SEQ ID NO: 238803 - RNA, 32 nt, Homo Sapiens
cuaugcugacuucuuauuccuuuucauaacag

SEQ ID NO: 238804 - RNA, 32 nt, Homo Sapiens
ugucuuuuaagugaccaucaauucaauaggca

SEQ ID NO: 238805 - RNA, 32 nt, Homo Sapiens
ugcacagugguccaggguccagcccuccgcca

SEQ ID NO: 238806 - RNA, 32 nt, Homo Sapiens
cuguuuugccugaauacaugauuuaaacaaga

SEQ ID NO: 238807 - RNA, 32 nt, Homo Sapiens
cgaggaaaaaauacggaggauaaccacuauuu

SEQ ID NO: 238808 - RNA, 32 nt, Homo Sapiens
cuucucugagucagaccucauuuuauaucaga

SEQ ID NO: 238809 - RNA, 32 nt, Homo Sapiens
uacucaauugguugguugucggcuaagagccc

SEQ ID NO: 238810 - RNA, 32 nt, Homo Sapiens
ugugggucaguggcuccugauguucugucugc

SEQ ID NO: 238811 - RNA, 32 nt, Homo Sapiens
aauccccccucuucggccuguuuaccuuuuaa

SEQ ID NO: 238812 - RNA, 32 nt, Homo Sapiens
ccucuaaccccagacaugcugcugcugcugcu

SEQ ID NO: 238813 - RNA, 32 nt, Homo Sapiens
uuaaagcacuucugcuuaaacuccauguguga

SEQ ID NO: 238814 - RNA, 32 nt, Homo Sapiens
ggagggcaguggcgcgaucucggcucacugca

SEQ ID NO: 238815 - RNA, 32 nt, Homo Sapiens
aaaaagagggucacuuucagaaagggaccugg

SEQ ID NO: 238816 - RNA, 32 nt, Homo Sapiens
cauagaucgugacuuuguguuauuuuccgugu

SEQ ID NO: 238817 - RNA, 32 nt, Homo Sapiens
ucuaaacaaaaaugacuaaauaaaguguauuc

SEQ ID NO: 238818 - RNA, 32 nt, Homo Sapiens
augaccgaucucugcgccuuucugggggcggg

SEQ ID NO: 238819 - RNA, 32 nt, Homo Sapiens
acucuccgucccgcuccggggacaguggcucg

SEQ ID NO: 238820 - RNA, 32 nt, Homo Sapiens
cccgggccguugaucuucggccccacacgaac

SEQ ID NO: 238821 - RNA, 32 nt, Homo Sapiens
gggaaucucagagauagcaaaugccaccugac

SEQ ID NO: 238822 - RNA, 32 nt, Homo Sapiens
aguauuuguguggguucuuaauuuugaaggac

SEQ ID NO: 238823 - RNA, 32 nt, Homo Sapiens
ggugaaugguuccuuauugucuaggccacuug

SEQ ID NO: 238824 - RNA, 30 nt, Homo Sapiens
ggagguggcaggcgccagccuccgagcagu

SEQ ID NO: 238825 - RNA, 32 nt, Homo Sapiens
uaacaagaugagaacagauaaagauugugugg

SEQ ID NO: 238826 - RNA, 32 nt, Homo Sapiens
aauuuaccccacaagaggccuauucucaccuu

SEQ ID NO: 238827 - RNA, 32 nt, Homo Sapiens
uccgcuaauuugauuuugaauuguaaauguca

SEQ ID NO: 238828 - RNA, 27 nt, Homo Sapiens
caaucaacucaauacagcauucauuug

SEQ ID NO: 238829 - RNA, 32 nt, Homo Sapiens
cagucuuuacuuuuuauuuuauuuacugaaaa

SEQ ID NO: 238830 - RNA, 32 nt, Homo Sapiens
uggggaaaacgaagcacucagaacauacaagg

SEQ ID NO: 238831 - RNA, 32 nt, Homo Sapiens
ggagcggcucugggggccccaguccccggcag

SEQ ID NO: 238832 - RNA, 32 nt, Homo Sapiens
aacuuuuugagacgaggugagaucugaguaua

SEQ ID NO: 238833 - RNA, 32 nt, Homo Sapiens
gucccccgccccagccagcugauuggaugcug

SEQ ID NO: 238834 - RNA, 32 nt, Homo Sapiens
ccuucccagcuagaauucacuccacuuggaca

SEQ ID NO: 238835 - RNA, 30 nt, Homo Sapiens
gucccugucugugcucugggagagcucauu

SEQ ID NO: 238836 - RNA, 32 nt, Homo Sapiens
cucuuggaggauuuuucugccauguagaugcu

SEQ ID NO: 238837 - RNA, 31 nt, Homo Sapiens
cucuaggagccccaggguagguuucugcaug

SEQ ID NO: 238838 - RNA, 31 nt, Homo Sapiens
aacgagcagcgcacgcucaucaaggccuaug

SEQ ID NO: 238839 - RNA, 32 nt, Homo Sapiens
gaugaacaaaaauuuauuuggcucacaguucu

SEQ ID NO: 238840 - RNA, 32 nt, Homo Sapiens
cccgucagcuggaaaaggccuguggcccagag

SEQ ID NO: 238841 - RNA, 32 nt, Homo Sapiens
uuuaauuucuucccuuuugcaaggcuuuuugu

SEQ ID NO: 238842 - RNA, 32 nt, Homo Sapiens
cggaaggcccaccgugccagaggcugggcacc

SEQ ID NO: 238843 - RNA, 32 nt, Homo Sapiens
uuggacgccccgacccgugcgagggccagguc

SEQ ID NO: 238844 - RNA, 32 nt, Homo Sapiens
agcuccgcacagugcgccccagccccagcagg

SEQ ID NO: 238845 - RNA, 32 nt, Homo Sapiens
uggucuuuauuacaaaguauuagauuuuucuu

SEQ ID NO: 238846 - RNA, 32 nt, Homo Sapiens
uuuauccuuuguaucugaaauaccuuuaauuu

SEQ ID NO: 238847 - RNA, 32 nt, Homo Sapiens
agugacggccggcaggagcgugcucuuccccg

SEQ ID NO: 238848 - RNA, 32 nt, Homo Sapiens
gagccuuuauagauuauaugaaugccuauuug

SEQ ID NO: 238849 - RNA, 32 nt, Homo Sapiens
accccaugaagauauuuggugggaguuauauc

SEQ ID NO: 238850 - RNA, 32 nt, Homo Sapiens
uaaagcuuuuggauuguucuaacauagcuuaa

SEQ ID NO: 238851 - RNA, 32 nt, Homo Sapiens
auugacccaugccugcccucuucucaacagcu

SEQ ID NO: 238852 - RNA, 32 nt, Homo Sapiens
acaaugaugggacagugccacacuccuucaau

SEQ ID NO: 238853 - RNA, 32 nt, Homo Sapiens
cggccaggggagaguaggcugugcugucccuc

SEQ ID NO: 238854 - RNA, 32 nt, Homo Sapiens
ggcgcuaggcagcuucagccggaccggguagg

SEQ ID NO: 238855 - RNA, 32 nt, Homo Sapiens
uugaagguauacuguagaguuuuuauugcugu

SEQ ID NO: 238856 - RNA, 32 nt, Homo Sapiens
ucgggcagccccagccccucuccuuuuccugg

SEQ ID NO: 238857 - RNA, 32 nt, Homo Sapiens
augacaaugaauugaauaucuaauaaggagau

SEQ ID NO: 238858 - RNA, 32 nt, Homo Sapiens
gacgauacagaaaaugaagcauuggucauuau

SEQ ID NO: 238859 - RNA, 32 nt, Homo Sapiens
cagguggagcagcguuuccuauucuuuccaga

SEQ ID NO: 238860 - RNA, 32 nt, Homo Sapiens
auuugagagcugacuacaaacauuaaaucgca

SEQ ID NO: 238861 - RNA, 32 nt, Homo Sapiens
uggagaaagagcgggugaaauauuuucucagc

SEQ ID NO: 238862 - RNA, 32 nt, Homo Sapiens
aacaaauaaaaugagguauuaaaaagagaugg

SEQ ID NO: 238863 - RNA, 32 nt, Homo Sapiens
cggcuuuauuuauguaacauuugcuagcuuau

SEQ ID NO: 238864 - RNA, 32 nt, Homo Sapiens
gaguuggcgagggcggaggagugccgggaauc

SEQ ID NO: 238865 - RNA, 32 nt, Homo Sapiens
aucuuccuaguaguuuguuuucaccaaaauaa

SEQ ID NO: 238866 - RNA, 32 nt, Homo Sapiens
uugacucuuuuaucugaguuuuauugaccccu

SEQ ID NO: 238867 - RNA, 32 nt, Homo Sapiens
cuacggggagagcgaucugugugcugagcuuc

SEQ ID NO: 238868 - RNA, 32 nt, Homo Sapiens
aggugcgcggguggauauaauucccggcuucu

SEQ ID NO: 238869 - RNA, 32 nt, Homo Sapiens
gagaauaacccaucauaauccaaacaagugau

SEQ ID NO: 238870 - RNA, 32 nt, Homo Sapiens
aaagaaaaaguaagcagggcuggcuucgcccg

SEQ ID NO: 238871 - RNA, 32 nt, Homo Sapiens
uccugccaaccccacaccccuccacuuccagu

SEQ ID NO: 238872 - RNA, 32 nt, Homo Sapiens
ggaauuauuuggcauggggcauuuucacaaag

SEQ ID NO: 238873 - RNA, 32 nt, Homo Sapiens
agggccuuuggguggggagggcccgggccgga

SEQ ID NO: 238874 - RNA, 32 nt, Homo Sapiens
acauauuuuuauuuccugggccuguuuucuca

SEQ ID NO: 238875 - RNA, 32 nt, Homo Sapiens
guccucgggcuccagggugcugcugcgggggu

SEQ ID NO: 238876 - RNA, 32 nt, Homo Sapiens
aaaaaagccuuguccagccugaccaacauggu

SEQ ID NO: 238877 - RNA, 32 nt, Homo Sapiens
agggacugguagcuuggaugacauggcucaga

SEQ ID NO: 238878 - RNA, 32 nt, Homo Sapiens
gacaaggaagauacauagaaugggguggaaca

SEQ ID NO: 238879 - RNA, 32 nt, Homo Sapiens
aauagguugggaaguuuuagcguguuuuaugc

SEQ ID NO: 238880 - RNA, 32 nt, Homo Sapiens
auguguguuucaugaaaaugugcauuucaucg

SEQ ID NO: 238881 - RNA, 32 nt, Homo Sapiens
agggauggaaugcuccacggagcuccaggcuu

SEQ ID NO: 238882 - RNA, 32 nt, Homo Sapiens
ugucugagccggagccggcagcuccacuggag

SEQ ID NO: 238883 - RNA, 32 nt, Homo Sapiens
gacaagugaugguaaaggucaauauaauuauu

SEQ ID NO: 238884 - RNA, 32 nt, Homo Sapiens
uaggcugacccuccugcuggugacggaaguac

SEQ ID NO: 238885 - RNA, 32 nt, Homo Sapiens
cggaggaggaggaggguuugcuugagguuggg

SEQ ID NO: 238886 - RNA, 32 nt, Homo Sapiens
uguaucauuuaaaagaugaccugaccaaaaac

SEQ ID NO: 238887 - RNA, 32 nt, Homo Sapiens
gggguggggugggugggugcuggcggugggga

SEQ ID NO: 238888 - RNA, 32 nt, Homo Sapiens
cucugugagccuaaaccaauaauuauauauua

SEQ ID NO: 238889 - RNA, 32 nt, Homo Sapiens
cccaccugcccccaaugcacacacagacccac

SEQ ID NO: 238890 - RNA, 32 nt, Homo Sapiens
gcauauauauaauaguuauuuuccaagagcac

SEQ ID NO: 238891 - RNA, 32 nt, Homo Sapiens
ucucccugucucuaggucgcugagagaggugc

SEQ ID NO: 238892 - RNA, 32 nt, Homo Sapiens
caaaaucguuuuuaauuuaaacuguguuuuag

SEQ ID NO: 238893 - RNA, 32 nt, Homo Sapiens
cucuuggcccccagccugagcccugguggccc

SEQ ID NO: 238894 - RNA, 32 nt, Homo Sapiens
gccuucggcaccuccccuccccaacgccucug

SEQ ID NO: 238895 - RNA, 32 nt, Homo Sapiens
caagcgggcuccugaggucuacguggccuuua

SEQ ID NO: 238896 - RNA, 32 nt, Homo Sapiens
gcugagagagcuggacagacuccauuuuagcc

SEQ ID NO: 238897 - RNA, 32 nt, Homo Sapiens
aucacauagaaagugaccguacggguuuuuaa

SEQ ID NO: 238898 - RNA, 31 nt, Homo Sapiens
uagguuccaaauauagugagaucguagagug

SEQ ID NO: 238899 - RNA, 32 nt, Homo Sapiens
uagaaguauggacuuaauuuaauuguaaaauu

SEQ ID NO: 238900 - RNA, 32 nt, Homo Sapiens
cagugaguggcuuccaggggccccaggcccug

SEQ ID NO: 238901 - RNA, 32 nt, Homo Sapiens
auuacacagcuuaguacacauuugagcagugu

SEQ ID NO: 238902 - RNA, 32 nt, Homo Sapiens
uuuucccauggaucucuucccagcauucagac

SEQ ID NO: 238903 - RNA, 32 nt, Homo Sapiens
gcaugaggaucggagcagcauguagucugggu

SEQ ID NO: 238904 - RNA, 32 nt, Homo Sapiens
ucuguggguuuuuuuuuuuuuauuguuuuugu

SEQ ID NO: 238905 - RNA, 32 nt, Homo Sapiens
aagcagcgcaacgccgaggcccuggccgagcu

SEQ ID NO: 238906 - RNA, 32 nt, Homo Sapiens
aacuagccgggcgugguggcaggugccuguag

SEQ ID NO: 238907 - RNA, 32 nt, Homo Sapiens
ugucuuaccugccuuuuacuuucguguggaua

SEQ ID NO: 238908 - RNA, 32 nt, Homo Sapiens
ccuuucuuccaguuuucuggcuuacuguguua

SEQ ID NO: 238909 - RNA, 32 nt, Homo Sapiens
cgggcgccuguagucccaacuacuugggaggc

SEQ ID NO: 238910 - RNA, 32 nt, Homo Sapiens
gaagaggcucugcagagaagguccugggaaag

SEQ ID NO: 238911 - RNA, 32 nt, Homo Sapiens
gaacacagaaagaggaggagcaagugggaugu

SEQ ID NO: 238912 - RNA, 32 nt, Homo Sapiens
ucucuugaaauuuauuuuuuuaaugucauauu

SEQ ID NO: 238913 - RNA, 32 nt, Homo Sapiens
uucucugaagugugugacuaucuccuaguguu

SEQ ID NO: 238914 - RNA, 32 nt, Homo Sapiens
uugcaaauuuuaacagaagagucgaagcucug

SEQ ID NO: 238915 - RNA, 32 nt, Homo Sapiens
ggccugaauguggcggcugccucugcgaaugg

SEQ ID NO: 238916 - RNA, 32 nt, Homo Sapiens
uuguguggguggcacagaucugggcaguuaga

SEQ ID NO: 238917 - RNA, 32 nt, Homo Sapiens
aaagacauuuacuguauauucuagucauuuug

SEQ ID NO: 238918 - RNA, 32 nt, Homo Sapiens
cuguccugacuucaggggcugcccgcucccag

SEQ ID NO: 238919 - RNA, 32 nt, Homo Sapiens
cauuuaguuggucuuacuuaaucugcuuaaga

SEQ ID NO: 238920 - RNA, 32 nt, Homo Sapiens
uguuuuucccugguuuucugucacuggcacag

SEQ ID NO: 238921 - RNA, 32 nt, Homo Sapiens
cuuuuuucccccucuuaguacucuggagaaac

SEQ ID NO: 238922 - RNA, 32 nt, Homo Sapiens
uagugauuugaaaaauaauuuucuggauaacg

SEQ ID NO: 238923 - RNA, 32 nt, Homo Sapiens
gacaaauguuuccaugaccucucagcuuucca

SEQ ID NO: 238924 - RNA, 29 nt, Homo Sapiens
ucacauugcuguuucagagaaaaacuuaa

SEQ ID NO: 238925 - RNA, 32 nt, Homo Sapiens
aguugaugaugauguuuaugaugaagaaggug

SEQ ID NO: 238926 - RNA, 32 nt, Homo Sapiens
caacauggcugagacuaaguguccagggaguu

SEQ ID NO: 238927 - RNA, 32 nt, Homo Sapiens
uccuuaggguccugcccuuggcuguccucuac

SEQ ID NO: 238928 - RNA, 32 nt, Homo Sapiens
ccaucccgcggugcagccgccggcccgguagg

SEQ ID NO: 238929 - RNA, 32 nt, Homo Sapiens
aagaguuaaggguaaaaaguacaacucugacu

SEQ ID NO: 238930 - RNA, 32 nt, Homo Sapiens
gcucaagaauccaaaaugggucuguggacaua

SEQ ID NO: 238931 - RNA, 32 nt, Homo Sapiens
uguuuaguauguuguucuaaccaguccagaaa

SEQ ID NO: 238932 - RNA, 32 nt, Homo Sapiens
cugcagugaccuaugauggcaccacuguacuc

SEQ ID NO: 238933 - RNA, 32 nt, Homo Sapiens
ggaaaggaauuuuaaaaggaaauaccaaucuc

SEQ ID NO: 238934 - RNA, 32 nt, Homo Sapiens
gccucucuugggucuguguccuuuuucaagcc

SEQ ID NO: 238935 - RNA, 32 nt, Homo Sapiens
guuuuaaguuccguucuucguuuucuuccucc

SEQ ID NO: 238936 - RNA, 32 nt, Homo Sapiens
ccauuucugaacuguuacaacuuguauuucca

SEQ ID NO: 238937 - RNA, 32 nt, Homo Sapiens
ugucuaguauaaaacguucccacaaugcacaa

SEQ ID NO: 238938 - RNA, 32 nt, Homo Sapiens
aauacagauuuuggaagaaacgaauuauaucu

SEQ ID NO: 238939 - RNA, 32 nt, Homo Sapiens
gccggacccagguuccaggggcgcaggcagug

SEQ ID NO: 238940 - RNA, 32 nt, Homo Sapiens
caagcccuguguuccuugggacugguuuugcu

SEQ ID NO: 238941 - RNA, 32 nt, Homo Sapiens
cgagcgagcccugcggccgccggagcagcucc

SEQ ID NO: 238942 - RNA, 32 nt, Homo Sapiens
aaugauguaucuggggagagaaugagcuggag

SEQ ID NO: 238943 - RNA, 32 nt, Homo Sapiens
guuuucuuuaccuuuuuccuccaugcaccaug

SEQ ID NO: 238944 - RNA, 32 nt, Homo Sapiens
uguaccccaucccuuccuccccagucuacguu

SEQ ID NO: 238945 - RNA, 32 nt, Homo Sapiens
cggugaccaagccccugcuucccaaaccuaug

SEQ ID NO: 238946 - RNA, 32 nt, Homo Sapiens
uacaggagacagcaauggaaaccuggucaguu

SEQ ID NO: 238947 - RNA, 32 nt, Homo Sapiens
ugcgucuuugguuaaugagcugacuucaggac

SEQ ID NO: 238948 - RNA, 32 nt, Homo Sapiens
uggcccuucacuguccauuccaaauagcccac

SEQ ID NO: 238949 - RNA, 32 nt, Homo Sapiens
ggagaggagguggcagcggcccgggaggccgg

SEQ ID NO: 238950 - RNA, 32 nt, Homo Sapiens
uucuaccuccaagguuagauuuaauccuuagg

SEQ ID NO: 238951 - RNA, 32 nt, Homo Sapiens
ugagccuugacccuggccccagacggagccca

SEQ ID NO: 238952 - RNA, 32 nt, Homo Sapiens
cauuaguuuuuuaaauucaggguucuggauau

SEQ ID NO: 238953 - RNA, 28 nt, Homo Sapiens
aagacucaguguuuaaggaugacagaga

SEQ ID NO: 238954 - RNA, 32 nt, Homo Sapiens
cugugggcugcuucacauccaccccggcuccc

SEQ ID NO: 238955 - RNA, 32 nt, Homo Sapiens
ccacggggcuccugguggccggcgccuccuuc

SEQ ID NO: 238956 - RNA, 32 nt, Homo Sapiens
ucagcacccuccccucagcagccuccacgugg

SEQ ID NO: 238957 - RNA, 32 nt, Homo Sapiens
auccuaauucagacaaauccgcaacuucauga

SEQ ID NO: 238958 - RNA, 29 nt, Homo Sapiens
uugaccaugaaaaugucuauagaauuaug

SEQ ID NO: 238959 - RNA, 31 nt, Homo Sapiens
ugaauucauuugauguagaugaaccuguuca

SEQ ID NO: 238960 - RNA, 32 nt, Homo Sapiens
uuggccuggacaccugagccugcggccgguac

SEQ ID NO: 238961 - RNA, 32 nt, Homo Sapiens
cgagacggcccggcugcagcgagcgcuggacg

SEQ ID NO: 238962 - RNA, 32 nt, Homo Sapiens
aggaaaugagagaggaaugcucuugaaaggug

SEQ ID NO: 238963 - RNA, 32 nt, Homo Sapiens
aggcuggaagcagagcgaacugggagcagagc

SEQ ID NO: 238964 - RNA, 32 nt, Homo Sapiens
ccaugacuugcucugcauucugcacagagccg

SEQ ID NO: 238965 - RNA, 32 nt, Homo Sapiens
aaaacuaacugaaagcacaugaagaguuguaa

SEQ ID NO: 238966 - RNA, 32 nt, Homo Sapiens
aguggcuucagcucccugcccagcgcacgggc

SEQ ID NO: 238967 - RNA, 32 nt, Homo Sapiens
cuacacuauaaaaugagaauuaaauaucuggu

SEQ ID NO: 238968 - RNA, 32 nt, Homo Sapiens
cgugacccacccagagagcaaggccagggguc

SEQ ID NO: 238969 - RNA, 32 nt, Homo Sapiens
aaagaauaaaaaguagcaguaaaauuauauac

SEQ ID NO: 238970 - RNA, 32 nt, Homo Sapiens
ucaggcaguccucccaccugucucccaaagug

SEQ ID NO: 238971 - RNA, 32 nt, Homo Sapiens
gucucacugaguucuagaaugaagcugcagac

SEQ ID NO: 238972 - RNA, 32 nt, Homo Sapiens
cgggucaugaggaggcuguagccaaggacgag

SEQ ID NO: 238973 - RNA, 32 nt, Homo Sapiens
uuuccugcucuaugccugcaucuuuaacaaug

SEQ ID NO: 238974 - RNA, 32 nt, Homo Sapiens
gggcagggaaagggcuggccccccugcugaaa

SEQ ID NO: 238975 - RNA, 32 nt, Homo Sapiens
cucgguggccguccgcccacuccgcggcguuc

SEQ ID NO: 238976 - RNA, 32 nt, Homo Sapiens
uuagaaguaaggauuauaaacaaccuagacag

SEQ ID NO: 238977 - RNA, 32 nt, Homo Sapiens
cacaugugccccccacccccagccccucggca

SEQ ID NO: 238978 - RNA, 32 nt, Homo Sapiens
acaacuuuuuuuucuuuuuuucuuuuguuuuu

SEQ ID NO: 238979 - RNA, 32 nt, Homo Sapiens
ccauagcauccacacauccacuccuaucccuc

SEQ ID NO: 238980 - RNA, 31 nt, Homo Sapiens
aagugucugccggucgaccaaucugccugcc

SEQ ID NO: 238981 - RNA, 31 nt, Homo Sapiens
cugaggacuagagauauaguauaucagagau

SEQ ID NO: 238982 - RNA, 32 nt, Homo Sapiens
uacugcggggcuggggcggggagcgggcggga

SEQ ID NO: 238983 - RNA, 32 nt, Homo Sapiens
auccacugaggguggccaccacagccuuggcu

SEQ ID NO: 238984 - RNA, 32 nt, Homo Sapiens
ccuccucugcuccagggcuggccucugcagag

SEQ ID NO: 238985 - RNA, 32 nt, Homo Sapiens
ggcuuuuuuuuuucuuuuuuuuuuggacaucu

SEQ ID NO: 238986 - RNA, 32 nt, Homo Sapiens
acagaccucaguuuuaugccccauuggauuac

SEQ ID NO: 238987 - RNA, 32 nt, Homo Sapiens
uuucaaaaguuuuauguuuuuaucuggguuau

SEQ ID NO: 238988 - RNA, 32 nt, Homo Sapiens
ugaaccuucagggggucugugcucugaggagg

SEQ ID NO: 238989 - RNA, 32 nt, Homo Sapiens
uugucuucuaaagagauuggauggccucuaaa

SEQ ID NO: 238990 - RNA, 32 nt, Homo Sapiens
gccagucugaacgcccaccuuaauuuucauau

SEQ ID NO: 238991 - RNA, 32 nt, Homo Sapiens
acugaauuuggaugcaccuuguuuuauauaau

SEQ ID NO: 238992 - RNA, 32 nt, Homo Sapiens
cucggauccagcugcacagccccugcugggaa

SEQ ID NO: 238993 - RNA, 32 nt, Homo Sapiens
acucguaggccugggacgccggcugccggccg

SEQ ID NO: 238994 - RNA, 32 nt, Homo Sapiens
caguguaauguuuauuucuucauacuaagcag

SEQ ID NO: 238995 - RNA, 32 nt, Homo Sapiens
cuaauccccacuuccgacccucucaggccuuu

SEQ ID NO: 238996 - RNA, 32 nt, Homo Sapiens
gcggggcucuucagcccuccugggagcucagu

SEQ ID NO: 238997 - RNA, 32 nt, Homo Sapiens
auagguuuacacauacugauccacccagcuau

SEQ ID NO: 238998 - RNA, 32 nt, Homo Sapiens
uggaaagaacagagauuacccuuucaccuacc

SEQ ID NO: 238999 - RNA, 32 nt, Homo Sapiens
gcuagucuuggaacuacugaccucaggugauc

SEQ ID NO: 239000 - RNA, 32 nt, Homo Sapiens
aaauuaaaauaacuuuugauaauguuuacuuu

SEQ ID NO: 239001 - RNA, 32 nt, Homo Sapiens
cguagggucugccuaucaggagaacccccaga

SEQ ID NO: 239002 - RNA, 32 nt, Homo Sapiens
caggaggaaacauagcagggcuggggugcaga

SEQ ID NO: 239003 - RNA, 32 nt, Homo Sapiens
cuuggcgcugccugggguccuuuccgcccggu

SEQ ID NO: 239004 - RNA, 32 nt, Homo Sapiens
caucucucuuagcuuuaguuuaucucucugcc

SEQ ID NO: 239005 - RNA, 32 nt, Homo Sapiens
ucagagcgggggcuuuugcugucgcagugggu

SEQ ID NO: 239006 - RNA, 32 nt, Homo Sapiens
aaaucugugggaaaagaacagguuuguauuuu

SEQ ID NO: 239007 - RNA, 32 nt, Homo Sapiens
ucagcaacaucccaucuaagcauuccacacug

SEQ ID NO: 239008 - RNA, 32 nt, Homo Sapiens
aggggccccacuuagcccaacagaacugguuu

SEQ ID NO: 239009 - RNA, 32 nt, Homo Sapiens
ggccagccuguguuugcagaucacugggcugc

SEQ ID NO: 239010 - RNA, 32 nt, Homo Sapiens
auaguugguuucccuguccacccgccccacuu

SEQ ID NO: 239011 - RNA, 32 nt, Homo Sapiens
accgcuacuuggaggaggacaacucggacgag

SEQ ID NO: 239012 - RNA, 32 nt, Homo Sapiens
ggcuccgugcaagcugcagccugggguccuga

SEQ ID NO: 239013 - RNA, 32 nt, Homo Sapiens
aaguauccccacuuucaggguagcauccucuu

SEQ ID NO: 239014 - RNA, 32 nt, Homo Sapiens
gaccucuuucccugucccaauccccaggugcg

SEQ ID NO: 239015 - RNA, 32 nt, Homo Sapiens
ggguguggaagacauugccaguagccugcaau

SEQ ID NO: 239016 - RNA, 32 nt, Homo Sapiens
agccacggcgggccgccucuacuccccaucac

SEQ ID NO: 239017 - RNA, 32 nt, Homo Sapiens
gacguggcuccuucuccuuucucagugcagac

SEQ ID NO: 239018 - RNA, 32 nt, Homo Sapiens
gaccagaugaaccccaccugacucacaugagc

SEQ ID NO: 239019 - RNA, 32 nt, Homo Sapiens
acgcgucaucacgcgaggccaguguccgucgg

SEQ ID NO: 239020 - RNA, 32 nt, Homo Sapiens
gacguugacccggccgggcggcgcagccgcuc

SEQ ID NO: 239021 - RNA, 32 nt, Homo Sapiens
uuuuuguuauuuagaaauguauucaauauauc

SEQ ID NO: 239022 - RNA, 32 nt, Homo Sapiens
cuuagcuguauauuuaucuuucaaaauguauu

SEQ ID NO: 239023 - RNA, 32 nt, Homo Sapiens
cacuccggacagagcugggccuggggaagggg

SEQ ID NO: 239024 - RNA, 32 nt, Homo Sapiens
ccgcaccgggcacuucugucuccccggagcag

SEQ ID NO: 239025 - RNA, 32 nt, Homo Sapiens
cagccagaaccuucugguccccgcccccggau

SEQ ID NO: 239026 - RNA, 31 nt, Homo Sapiens
ggcaagaugacccaguuccugccgcccaacc

SEQ ID NO: 239027 - RNA, 32 nt, Homo Sapiens
gcacuggauaucuauauaucauuagguuuuug

SEQ ID NO: 239028 - RNA, 32 nt, Homo Sapiens
uaugucagaaaaggaugaguuuguggugacag

SEQ ID NO: 239029 - RNA, 32 nt, Homo Sapiens
cagcagcagcagagaccucuccacuuucccuu

SEQ ID NO: 239030 - RNA, 32 nt, Homo Sapiens
ucuuuuucuuuuuuuuuuuuuacgauuuggua

SEQ ID NO: 239031 - RNA, 30 nt, Homo Sapiens
uuguauguggacugcuguuuggucaaagaa

SEQ ID NO: 239032 - RNA, 32 nt, Homo Sapiens
uauaaaaauugggucuuagauuuugauuuacu

SEQ ID NO: 239033 - RNA, 32 nt, Homo Sapiens
cuucaaugagaaugauaaauuauccuagcaaa

SEQ ID NO: 239034 - RNA, 32 nt, Homo Sapiens
accuccucccccuguucuguuggggaggggua

SEQ ID NO: 239035 - RNA, 32 nt, Homo Sapiens
aacuaaucaauauauauguuuaacccauuacu

SEQ ID NO: 239036 - RNA, 32 nt, Homo Sapiens
aaaagcaaacgaagaacgcugaacccaagguc

SEQ ID NO: 239037 - RNA, 32 nt, Homo Sapiens
ccuuacuucaucuauuuuuuuaauaaauagag

SEQ ID NO: 239038 - RNA, 32 nt, Homo Sapiens
agaauguaaacuccaugaaggcacagacuuuu

SEQ ID NO: 239039 - RNA, 32 nt, Homo Sapiens
ugcauauaauuuucucuaaaauauguaacuau

SEQ ID NO: 239040 - RNA, 32 nt, Homo Sapiens
ucgcgucccguggagcguuccaggcgggcgcg

SEQ ID NO: 239041 - RNA, 32 nt, Homo Sapiens
accccuuugcccacguggugaccgcuggggag

SEQ ID NO: 239042 - RNA, 32 nt, Homo Sapiens
cgcccgugcgcgcgcucgcggccggguugcag

SEQ ID NO: 239043 - RNA, 32 nt, Homo Sapiens
augccccucacccccacgccccgccccuacaa

SEQ ID NO: 239044 - RNA, 32 nt, Homo Sapiens
cuggaagacgggcugucgcugcugcaccacca

SEQ ID NO: 239045 - RNA, 32 nt, Homo Sapiens
guaucuccuaaaugugauacagaagaacaucu

SEQ ID NO: 239046 - RNA, 32 nt, Homo Sapiens
aaaagacacucaaaaacaaaaaacgguagauu

SEQ ID NO: 239047 - RNA, 32 nt, Homo Sapiens
gcauguuuuaucauuaccauuaagaaguuaaa

SEQ ID NO: 239048 - RNA, 32 nt, Homo Sapiens
aaaaaaaagucgucuuuuuuuuuuuuuuuugu

SEQ ID NO: 239049 - RNA, 32 nt, Homo Sapiens
uuaccuuuagguuuuucuuucuauacauucag

SEQ ID NO: 239050 - RNA, 32 nt, Homo Sapiens
accucgccagucuucgucgccccuccccugcc

SEQ ID NO: 239051 - RNA, 32 nt, Homo Sapiens
cccugccugaacccacagugccaggcaacccu

SEQ ID NO: 239052 - RNA, 31 nt, Homo Sapiens
gcaguguuaaauuguaaauguguuuucuuaa

SEQ ID NO: 239053 - RNA, 32 nt, Homo Sapiens
ccagauacaaaacacuuauuuguguagcccag

SEQ ID NO: 239054 - RNA, 32 nt, Homo Sapiens
accaagccacagccuggcagcucugaucagga

SEQ ID NO: 239055 - RNA, 32 nt, Homo Sapiens
guggugccuuccaccccuccaacuaugcccuc

SEQ ID NO: 239056 - RNA, 32 nt, Homo Sapiens
cucgcgggaguguugguuaccauggugaagcu

SEQ ID NO: 239057 - RNA, 32 nt, Homo Sapiens
guauaaucuucaggaauuuuuagauucuuaaa

SEQ ID NO: 239058 - RNA, 32 nt, Homo Sapiens
cuaauuaaauacuuuaauguacaaacaucuuu

SEQ ID NO: 239059 - RNA, 32 nt, Homo Sapiens
cucgauugaugaaacuaacaaagagguuaaua

SEQ ID NO: 239060 - RNA, 32 nt, Homo Sapiens
acauuuuuaaaauuauuuuuaaaugaauaaaa

SEQ ID NO: 239061 - RNA, 32 nt, Homo Sapiens
cgaauccucuacuuguaugacccuaggaauag

SEQ ID NO: 239062 - RNA, 32 nt, Homo Sapiens
ggucugcguaggcggcagcgucugucccuccc

SEQ ID NO: 239063 - RNA, 32 nt, Homo Sapiens
ccuguccacucuggaugagaauuggccaccug

SEQ ID NO: 239064 - RNA, 32 nt, Homo Sapiens
gugaggccugacccagcaccacguucuucuug

SEQ ID NO: 239065 - RNA, 32 nt, Homo Sapiens
uucucauacuuagaaacaaaaagagcuuuccu

SEQ ID NO: 239066 - RNA, 32 nt, Homo Sapiens
gugccacugcucaaggucuccauggcugagcc

SEQ ID NO: 239067 - RNA, 29 nt, Homo Sapiens
ggggucuucugugagugaagcugagaaga

SEQ ID NO: 239068 - RNA, 32 nt, Homo Sapiens
ccuccagggaagaaugcagagaaaagcaagga

SEQ ID NO: 239069 - RNA, 32 nt, Homo Sapiens
uggagcuggagccggagcugccgccagccgcc

SEQ ID NO: 239070 - RNA, 32 nt, Homo Sapiens
ggaaagccucccgcccucccugcagcuccccg

SEQ ID NO: 239071 - RNA, 32 nt, Homo Sapiens
ugagugggccuugcacgagacacuggccccac

SEQ ID NO: 239072 - RNA, 32 nt, Homo Sapiens
gaggugcagcucggcuucccccggcaccccuc

SEQ ID NO: 239073 - RNA, 32 nt, Homo Sapiens
cccggccggguacgaggcgccucggguccccg

SEQ ID NO: 239074 - RNA, 32 nt, Homo Sapiens
ggagaccagaaacaaggcaaccacgaccuugc

SEQ ID NO: 239075 - RNA, 32 nt, Homo Sapiens
gcgagccgggcgcaggagggggcgcgcuuucu

SEQ ID NO: 239076 - RNA, 32 nt, Homo Sapiens
uaccucauaaaauaaauauauauaugaaacuu

SEQ ID NO: 239077 - RNA, 32 nt, Homo Sapiens
cagugauacggauacuauccaucauuuuguuu

SEQ ID NO: 239078 - RNA, 31 nt, Homo Sapiens
cagugcggguucccuaccagccagggguuuc

SEQ ID NO: 239079 - RNA, 32 nt, Homo Sapiens
cagcagcggaccggcgggagacggcggcuugc

SEQ ID NO: 239080 - RNA, 32 nt, Homo Sapiens
aauuguucuuugauuucccuguggauuuguaa

SEQ ID NO: 239081 - RNA, 32 nt, Homo Sapiens
gacacugauauuaaagugcuaaugagagggau

SEQ ID NO: 239082 - RNA, 32 nt, Homo Sapiens
cgggagggguggcgggagcgguccuggaaaua

SEQ ID NO: 239083 - RNA, 32 nt, Homo Sapiens
ccccaucaacuggcaaaagcuucuuuucugcc

SEQ ID NO: 239084 - RNA, 32 nt, Homo Sapiens
gggaaccggcugcagggcgugcaccgcgcggc

SEQ ID NO: 239085 - RNA, 32 nt, Homo Sapiens
cgagaaaaagaccgaccccccaccccugcuuu

SEQ ID NO: 239086 - RNA, 31 nt, Homo Sapiens
acagcgcugccggcucucuccgcgccgugga

SEQ ID NO: 239087 - RNA, 32 nt, Homo Sapiens
cuggcucacaugcaguagacuugggcaggcaa

SEQ ID NO: 239088 - RNA, 32 nt, Homo Sapiens
gaagauuucagcaaaugugucuuacagagaag

SEQ ID NO: 239089 - RNA, 32 nt, Homo Sapiens
uaccucaucuccugcccuuucccuccccuggu

SEQ ID NO: 239090 - RNA, 32 nt, Homo Sapiens
uuccucacguggcuuuuucuuccauguucccc

SEQ ID NO: 239091 - RNA, 32 nt, Homo Sapiens
cucuucagaacaucuuuuuucauaccacuuga

SEQ ID NO: 239092 - RNA, 32 nt, Homo Sapiens
gugucaguuacaagggcagagaagguaccagu

SEQ ID NO: 239093 - RNA, 32 nt, Homo Sapiens
aggugcagggcccaggugugcuggggugacaa

SEQ ID NO: 239094 - RNA, 32 nt, Homo Sapiens
cugcuugcccugcccucucaccucugacaccc

SEQ ID NO: 239095 - RNA, 32 nt, Homo Sapiens
gauuuauaugacuggugauacuggcuuuacag

SEQ ID NO: 239096 - RNA, 31 nt, Homo Sapiens
ugcaggagggcggcgugguggucuugcucuu

SEQ ID NO: 239097 - RNA, 32 nt, Homo Sapiens
caaguacaagcaccuggccuuccuggcagagu

SEQ ID NO: 239098 - RNA, 32 nt, Homo Sapiens
aauaaauguguacuacacuuugaaauauuuua

SEQ ID NO: 239099 - RNA, 32 nt, Homo Sapiens
gcaggaguguguguugggggcggugugggcuc

SEQ ID NO: 239100 - RNA, 32 nt, Homo Sapiens
gucauaaucuuguaucucuaaagauagaauac

SEQ ID NO: 239101 - RNA, 32 nt, Homo Sapiens
cuucuuuuaaaguggugacuagcuugguggua

SEQ ID NO: 239102 - RNA, 32 nt, Homo Sapiens
cuuccccaacuuucaguuauacgaaugccauc

SEQ ID NO: 239103 - RNA, 32 nt, Homo Sapiens
cugagcuugcugagcuccggggcccgcggagc

SEQ ID NO: 239104 - RNA, 32 nt, Homo Sapiens
ugcuucagccagauccugggguggggucuuua

SEQ ID NO: 239105 - RNA, 32 nt, Homo Sapiens
ccaggccuggcugaggcgccgcggccgggucc

SEQ ID NO: 239106 - RNA, 28 nt, Homo Sapiens
cuuuuguugucuaaaggugcugcaguua

SEQ ID NO: 239107 - RNA, 32 nt, Homo Sapiens
ggagcugcuuugaagauggaugagaugagggg

SEQ ID NO: 239108 - RNA, 32 nt, Homo Sapiens
cggcccuggagcuuuaaaaugcuugcccuucc

SEQ ID NO: 239109 - RNA, 32 nt, Homo Sapiens
cuuuauuucauccucauucuuaaaggauauuu

SEQ ID NO: 239110 - RNA, 32 nt, Homo Sapiens
cgccaugccggggguucauaggucacuggcuc

SEQ ID NO: 239111 - RNA, 32 nt, Homo Sapiens
uuaaaaguuucaaugugauucuaaugucuuca

SEQ ID NO: 239112 - RNA, 32 nt, Homo Sapiens
acaagcacacauuuuucuugcuucacugcugu

SEQ ID NO: 239113 - RNA, 32 nt, Homo Sapiens
ccuucugcagacaggaauuugcuggaccuccu

SEQ ID NO: 239114 - RNA, 32 nt, Homo Sapiens
ucucugugccucaguguucucaucuauaaaau

SEQ ID NO: 239115 - RNA, 32 nt, Homo Sapiens
agccagggccccagugggaccugacccaaagu

SEQ ID NO: 239116 - RNA, 32 nt, Homo Sapiens
uugucagaauaauacagggaaccauuucagau

SEQ ID NO: 239117 - RNA, 31 nt, Homo Sapiens
auguggacccuuuauugucuaacugauaaga

SEQ ID NO: 239118 - RNA, 32 nt, Homo Sapiens
cacccccggccgcugcugcccuccccgccgag

SEQ ID NO: 239119 - RNA, 32 nt, Homo Sapiens
agacccggguucaaaucugggcuccucagcuc

SEQ ID NO: 239120 - RNA, 32 nt, Homo Sapiens
guucugguagaagacagcuguuggugacugug

SEQ ID NO: 239121 - RNA, 32 nt, Homo Sapiens
uguuuaggaucuuugcaguuuuggacaauuac

SEQ ID NO: 239122 - RNA, 32 nt, Homo Sapiens
cuacuauuuacgaugcaagagaauaaauguga

SEQ ID NO: 239123 - RNA, 32 nt, Homo Sapiens
cuccucccuccccggcucuccucccagcauca

SEQ ID NO: 239124 - RNA, 32 nt, Homo Sapiens
ccuauggcaguucucccaggauguguggcgag

SEQ ID NO: 239125 - RNA, 32 nt, Homo Sapiens
cccaggagcugggcagugguaaaauuaaagau

SEQ ID NO: 239126 - RNA, 32 nt, Homo Sapiens
gccagggagacagcccugggggagaggcgccc

SEQ ID NO: 239127 - RNA, 32 nt, Homo Sapiens
cuauuuuuauuaaauuuggaaccauuuuguga

SEQ ID NO: 239128 - RNA, 32 nt, Homo Sapiens
uuuagcuuuuucugcuguucuuggcccaaguu

SEQ ID NO: 239129 - RNA, 32 nt, Homo Sapiens
auagcuuccuggaugacugccuguguuauuuu

SEQ ID NO: 239130 - RNA, 32 nt, Homo Sapiens
caauucugacauucgucaaaaguuaguaaaua

SEQ ID NO: 239131 - RNA, 32 nt, Homo Sapiens
ucucgcgcgcggugugguggcagcaggcgcag

SEQ ID NO: 239132 - RNA, 32 nt, Homo Sapiens
acaaagggagguugggcggggcggugcuggga

SEQ ID NO: 239133 - RNA, 32 nt, Homo Sapiens
aauggcccagaccccagccuccccuccucccu

SEQ ID NO: 239134 - RNA, 32 nt, Homo Sapiens
ccugagggguggccucugcugcuggauuucau

SEQ ID NO: 239135 - RNA, 32 nt, Homo Sapiens
cauuuuggcuccuggggcaagcuuggggaaug

SEQ ID NO: 239136 - RNA, 32 nt, Homo Sapiens
caaacaccaaaauauuuuagaauaaauucuua

SEQ ID NO: 239137 - RNA, 32 nt, Homo Sapiens
ggaagggaggggcugcugaguucccuuguucu

SEQ ID NO: 239138 - RNA, 28 nt, Homo Sapiens
ucuauuuuugcuaccagaugauagcuau

SEQ ID NO: 239139 - RNA, 32 nt, Homo Sapiens
ggucucaaacuccugagcucaggcagaucacu

SEQ ID NO: 239140 - RNA, 30 nt, Homo Sapiens
gaccccgugucaccacugccggcgccugcg

SEQ ID NO: 239141 - RNA, 30 nt, Homo Sapiens
gguccgugagaugccgcggguccuguuucc

SEQ ID NO: 239142 - RNA, 32 nt, Homo Sapiens
gguacccuuucugcacuccgugggcccugggu

SEQ ID NO: 239143 - RNA, 32 nt, Homo Sapiens
ccaggaaagagugguuucugcguguguauauu

SEQ ID NO: 239144 - RNA, 32 nt, Homo Sapiens
aucuuuugucugcaauuuagagaauguguaaa

SEQ ID NO: 239145 - RNA, 32 nt, Homo Sapiens
uggacugccuggguuaaaucugcauagcagaa

SEQ ID NO: 239146 - RNA, 32 nt, Homo Sapiens
uggccgcugaacuggugacuugucaugccauu

SEQ ID NO: 239147 - RNA, 32 nt, Homo Sapiens
gaacccaggaggcguagcuagcagugagccaa

SEQ ID NO: 239148 - RNA, 32 nt, Homo Sapiens
auggaagggagccgagucagaucgcgagguac

SEQ ID NO: 239149 - RNA, 32 nt, Homo Sapiens
ugagggcccaaagagggacaggggcuugccag

SEQ ID NO: 239150 - RNA, 32 nt, Homo Sapiens
ggcaggacucgcugcugcugcugcugcuugug

SEQ ID NO: 239151 - RNA, 32 nt, Homo Sapiens
cuaguugaaagagcuuacagcucgagucaccu

SEQ ID NO: 239152 - RNA, 32 nt, Homo Sapiens
cagcggggaagcuggaaggcgucguucuccuu

SEQ ID NO: 239153 - RNA, 32 nt, Homo Sapiens
caccaggccaggaggcagcuggcacagugcuc

SEQ ID NO: 239154 - RNA, 32 nt, Homo Sapiens
gcaagucccgauuuagggcaucggucuagccc

SEQ ID NO: 239155 - RNA, 32 nt, Homo Sapiens
uccaguggacuguaucucugugaaaaacacaa

SEQ ID NO: 239156 - RNA, 32 nt, Homo Sapiens
gauagucgcccacuccaccuccuacuuaaccu

SEQ ID NO: 239157 - RNA, 32 nt, Homo Sapiens
agccuuuugucugcggugcugcggccguggga

SEQ ID NO: 239158 - RNA, 32 nt, Homo Sapiens
aaugaaggauacaaguuguaaaacuagguuuu

SEQ ID NO: 239159 - RNA, 32 nt, Homo Sapiens
ugaggacagcagggguuuuucuucagagucua

SEQ ID NO: 239160 - RNA, 32 nt, Homo Sapiens
gaccuauagaaagcuagccaaagaucuugaag

SEQ ID NO: 239161 - RNA, 32 nt, Homo Sapiens
ccuucauaauucuagaaaguuauuuucaacug

SEQ ID NO: 239162 - RNA, 32 nt, Homo Sapiens
gugaaaguuucuugcuucuccuuuuuaauuuc

SEQ ID NO: 239163 - RNA, 32 nt, Homo Sapiens
aaaaaaaaaaaaacagaaaaggaaauaaaaaa

SEQ ID NO: 239164 - RNA, 32 nt, Homo Sapiens
accaguuuccacgggguuggguugccggucag

SEQ ID NO: 239165 - RNA, 32 nt, Homo Sapiens
cucagauuccuaccuuuuuuuauauuaaucuu

SEQ ID NO: 239166 - RNA, 32 nt, Homo Sapiens
cugcccaccguccaacaccucccagccccuga

SEQ ID NO: 239167 - RNA, 32 nt, Homo Sapiens
gcugagcaaaccgacucaugcccgcaaaccug

SEQ ID NO: 239168 - RNA, 32 nt, Homo Sapiens
uuggcugugggcuuugggagggguaagcugcu

SEQ ID NO: 239169 - RNA, 32 nt, Homo Sapiens
uguauccugccagguugaguggggcucacacg

SEQ ID NO: 239170 - RNA, 32 nt, Homo Sapiens
gaaguagagcccgggaccgccgggccaccacc

SEQ ID NO: 239171 - RNA, 30 nt, Homo Sapiens
aagccaugccuguucuugggguugccucaa

SEQ ID NO: 239172 - RNA, 32 nt, Homo Sapiens
cuugaggguguguggacacagaggcuuuccau

SEQ ID NO: 239173 - RNA, 32 nt, Homo Sapiens
aagugagagaaugucauagaaaauaaaugauu

SEQ ID NO: 239174 - RNA, 32 nt, Homo Sapiens
gcaggacccgcuggggcccagccccuacucau

SEQ ID NO: 239175 - RNA, 32 nt, Homo Sapiens
uucuggauagaguaaagaaaagggaaacaaaa

SEQ ID NO: 239176 - RNA, 32 nt, Homo Sapiens
cacaggaggcuguggcagcuguggcauccacu

SEQ ID NO: 239177 - RNA, 32 nt, Homo Sapiens
ucacuacugaacaaaauuguucccucuucugu

SEQ ID NO: 239178 - RNA, 32 nt, Homo Sapiens
uccacccaagagcaaccuggaacuaaguuauu

SEQ ID NO: 239179 - RNA, 32 nt, Homo Sapiens
gagcaagaugugucaccagcaguuggucaucu

SEQ ID NO: 239180 - RNA, 32 nt, Homo Sapiens
gugcagaagcagaagcaaaagaauuaaccagc

SEQ ID NO: 239181 - RNA, 32 nt, Homo Sapiens
agcagccaguguucccaagagagcggcccgua

SEQ ID NO: 239182 - RNA, 32 nt, Homo Sapiens
ugaggggcuuucucuuccccuuccuguuucag

SEQ ID NO: 239183 - RNA, 32 nt, Homo Sapiens
gaugccccguucccuggccgcggccgcuucuc

SEQ ID NO: 239184 - RNA, 32 nt, Homo Sapiens
uuccuccgccccguggucuggugcgugacaau

SEQ ID NO: 239185 - RNA, 32 nt, Homo Sapiens
ugaggaacggugccggcucugcacggagcuga

SEQ ID NO: 239186 - RNA, 32 nt, Homo Sapiens
uccccuggcugcugcccucccauucucccccu

SEQ ID NO: 239187 - RNA, 32 nt, Homo Sapiens
uucaguguuucaaauacaauuuguauuuaagg

SEQ ID NO: 239188 - RNA, 32 nt, Homo Sapiens
gugugcauuaaaauugguuucuguaaaacgug

SEQ ID NO: 239189 - RNA, 32 nt, Homo Sapiens
ggagcccccugagagcagggcuuuuguuaauu

SEQ ID NO: 239190 - RNA, 32 nt, Homo Sapiens
guaaucuacaaauggcucuauagcgaagacca

SEQ ID NO: 239191 - RNA, 32 nt, Homo Sapiens
auccugccccaucccuuccccagugcacucug

SEQ ID NO: 239192 - RNA, 32 nt, Homo Sapiens
cacacacauaaacguauacacacacacauaau

SEQ ID NO: 239193 - RNA, 32 nt, Homo Sapiens
uucaggaggugguuuuaaauauuggaugaaaa

SEQ ID NO: 239194 - RNA, 30 nt, Homo Sapiens
aggccauggguuauaccaagaagguauaug

SEQ ID NO: 239195 - RNA, 30 nt, Homo Sapiens
ccacucgucugugcagaggcugggccugag

SEQ ID NO: 239196 - RNA, 32 nt, Homo Sapiens
gggaaaggccccagcagccuucagcuccuucc

SEQ ID NO: 239197 - RNA, 32 nt, Homo Sapiens
acacucccuuucuccuucuggagaucaaccca

SEQ ID NO: 239198 - RNA, 32 nt, Homo Sapiens
aaaggagcagauuucauaaaaagcagggaauu

SEQ ID NO: 239199 - RNA, 32 nt, Homo Sapiens
uaguuuuggcacauuucuuuucugcuacagug

SEQ ID NO: 239200 - RNA, 32 nt, Homo Sapiens
gccguggcgacuggaggcgcgcgacgcgggcg

SEQ ID NO: 239201 - RNA, 32 nt, Homo Sapiens
gagugcccugucagcucuauucccaucaccug

SEQ ID NO: 239202 - RNA, 32 nt, Homo Sapiens
cucuggugguguuuguggugaacugaauugaa

SEQ ID NO: 239203 - RNA, 32 nt, Homo Sapiens
accccugucagaugaaaaugauucacagcucu

SEQ ID NO: 239204 - RNA, 32 nt, Homo Sapiens
auggaccuugcaacuuuguugcuagcuugagg

SEQ ID NO: 239205 - RNA, 32 nt, Homo Sapiens
uuuuccaucuccucugcaacccuaauuaaaug

SEQ ID NO: 239206 - RNA, 32 nt, Homo Sapiens
ucugaaaagacgcagaacaugaagggacucag

SEQ ID NO: 239207 - RNA, 32 nt, Homo Sapiens
ccagcgugucuacaacgucucccagaagcucu

SEQ ID NO: 239208 - RNA, 32 nt, Homo Sapiens
aaagaguguacaaaguguugcagggcugugac

SEQ ID NO: 239209 - RNA, 32 nt, Homo Sapiens
ggagcccgcagcggcccggagccggagcuggc

SEQ ID NO: 239210 - RNA, 32 nt, Homo Sapiens
gacaaagcaagaagcuggaaaucgaguucuga

SEQ ID NO: 239211 - RNA, 32 nt, Homo Sapiens
ucacaaauaucccccauccugggcuuuuccca

SEQ ID NO: 239212 - RNA, 32 nt, Homo Sapiens
gugguugcccccaagaccccuccuucaggcau

SEQ ID NO: 239213 - RNA, 32 nt, Homo Sapiens
agcucuaacuagcauguuuaaaacagauuuca

SEQ ID NO: 239214 - RNA, 32 nt, Homo Sapiens
aaucacaauuuaauaauuuaucaaugcaaaca

SEQ ID NO: 239215 - RNA, 32 nt, Homo Sapiens
cccaagaaggagcccauggaggcgcugaacac

SEQ ID NO: 239216 - RNA, 32 nt, Homo Sapiens
gcucccggcgagccacgguggugcuggcuaga

SEQ ID NO: 239217 - RNA, 32 nt, Homo Sapiens
uggcucacaccugugaucccaacacucgggga

SEQ ID NO: 239218 - RNA, 32 nt, Homo Sapiens
ccaagcaggggagaggaaugaggggagcagcu

SEQ ID NO: 239219 - RNA, 32 nt, Homo Sapiens
cggcaccgccgccgucgucucccggccccucg

SEQ ID NO: 239220 - RNA, 32 nt, Homo Sapiens
ccuuacuuuuaaaugugcugcucuucauuuca

SEQ ID NO: 239221 - RNA, 32 nt, Homo Sapiens
aggcagggggagaggggcagagggugugggua

SEQ ID NO: 239222 - RNA, 30 nt, Homo Sapiens
aggggugucugugaguucauuagcuucuuu

SEQ ID NO: 239223 - RNA, 32 nt, Homo Sapiens
auaaaaugaaagauuuuuacuaauauauauuu

SEQ ID NO: 239224 - RNA, 32 nt, Homo Sapiens
gccuuggggagggcuccuagugcugagcuugg

SEQ ID NO: 239225 - RNA, 32 nt, Homo Sapiens
caucacccuggcucaccuccaucuuucaaaau

SEQ ID NO: 239226 - RNA, 32 nt, Homo Sapiens
cauggcaccagggucuuaggccuaguccucuc

SEQ ID NO: 239227 - RNA, 32 nt, Homo Sapiens
uccuucagauccugcaugcugauaaaacuacu

SEQ ID NO: 239228 - RNA, 32 nt, Homo Sapiens
cuacuggccaucuuccucacagcccucagaua

SEQ ID NO: 239229 - RNA, 32 nt, Homo Sapiens
cccauccccaguuuauggauaugcugcuuuaa

SEQ ID NO: 239230 - RNA, 32 nt, Homo Sapiens
ucugaugucuuagugacuuaguucuuagaagc

SEQ ID NO: 239231 - RNA, 32 nt, Homo Sapiens
cuagaggcucuuaaaaguauugaaagacaaua

SEQ ID NO: 239232 - RNA, 32 nt, Homo Sapiens
uuauauguauucuauacuauauuguuacaaua

SEQ ID NO: 239233 - RNA, 32 nt, Homo Sapiens
guccuuuucaugaccuaggaggucuuauucaa

SEQ ID NO: 239234 - RNA, 32 nt, Homo Sapiens
cuccuuccccccuguacuugugacuagacaaa

SEQ ID NO: 239235 - RNA, 29 nt, Homo Sapiens
gcuuuuuaaaguuuauuuuuacuauuucu

SEQ ID NO: 239236 - RNA, 32 nt, Homo Sapiens
ugccucccuuuucuccucuccccaauccaugc

SEQ ID NO: 239237 - RNA, 32 nt, Homo Sapiens
gauaggacaacacugcuggguuuuacauccag

SEQ ID NO: 239238 - RNA, 32 nt, Homo Sapiens
agccucuucaggcgcagaacuugaucuccagu

SEQ ID NO: 239239 - RNA, 32 nt, Homo Sapiens
gcuuuggugucggagauccgagagucggagau

SEQ ID NO: 239240 - RNA, 32 nt, Homo Sapiens
uucccccuuggcucagcccccugaagguaagu

SEQ ID NO: 239241 - RNA, 32 nt, Homo Sapiens
gcuggcugcugucauacagggugucuaagcgc

SEQ ID NO: 239242 - RNA, 32 nt, Homo Sapiens
cacugugacaacaggaccuagaauggcugaca

SEQ ID NO: 239243 - RNA, 32 nt, Homo Sapiens
ucaaaaggaaauaggaucauggcagcagauga

SEQ ID NO: 239244 - RNA, 32 nt, Homo Sapiens
guucuggccugaccacacgucuggcugggggc

SEQ ID NO: 239245 - RNA, 32 nt, Homo Sapiens
aacacauauuauacacauaaugaugggaauua

SEQ ID NO: 239246 - RNA, 32 nt, Homo Sapiens
ggggauuuauacauauuuuuagauaaaauuaa

SEQ ID NO: 239247 - RNA, 32 nt, Homo Sapiens
uguggggcuugguggaggggccccaggauuug

SEQ ID NO: 239248 - RNA, 32 nt, Homo Sapiens
ucacuuuuguauucuucaguccuaugucuguc

SEQ ID NO: 239249 - RNA, 32 nt, Homo Sapiens
acuaugccauacauuuaauuguagaagguaug

SEQ ID NO: 239250 - RNA, 32 nt, Homo Sapiens
cgccccugccccccaaacuuagaagcccacug

SEQ ID NO: 239251 - RNA, 32 nt, Homo Sapiens
ggcggcggcagcgggcucggaggcagcgguug

SEQ ID NO: 239252 - RNA, 32 nt, Homo Sapiens
gccugcuaucuacagcacagugugucauuugc

SEQ ID NO: 239253 - RNA, 32 nt, Homo Sapiens
guaagcuccuugagggcaaggauuguguugga

SEQ ID NO: 239254 - RNA, 32 nt, Homo Sapiens
uuuuguuucuauuuguaguuucuugaguaagu

SEQ ID NO: 239255 - RNA, 32 nt, Homo Sapiens
cuguugggaagaaaaaauuuauguaagaugca

SEQ ID NO: 239256 - RNA, 32 nt, Homo Sapiens
cuguugcuugcugcuuuuuuuuuuuuuuuuuc

SEQ ID NO: 239257 - RNA, 32 nt, Homo Sapiens
cugaucuggggagagggccggggcucgggacu

SEQ ID NO: 239258 - RNA, 32 nt, Homo Sapiens
ccucuuuggcaccuccauucccuguugcugaa

SEQ ID NO: 239259 - RNA, 32 nt, Homo Sapiens
cuuccgaagaacuccugguuguuauuggauuu

SEQ ID NO: 239260 - RNA, 32 nt, Homo Sapiens
ccuguguccauaucaagccagguggagccuuc

SEQ ID NO: 239261 - RNA, 30 nt, Homo Sapiens
agacaaugucugggaaagaaaagucuaaau

SEQ ID NO: 239262 - RNA, 32 nt, Homo Sapiens
uaacauuuuuaaaacuuuacuauuucugaaua

SEQ ID NO: 239263 - RNA, 32 nt, Homo Sapiens
acguauagguggugaacuuauguguaaauaca

SEQ ID NO: 239264 - RNA, 32 nt, Homo Sapiens
agugugcgcccggcuaaugcagcgguguggac

SEQ ID NO: 239265 - RNA, 32 nt, Homo Sapiens
cacugacuuauuucccuaaacuauuuauaaaa

SEQ ID NO: 239266 - RNA, 32 nt, Homo Sapiens
agccuauucucuaucuauuuugaaagauuuug

SEQ ID NO: 239267 - RNA, 32 nt, Homo Sapiens
ucggccgaacccagcccgcgcugcuccccgga

SEQ ID NO: 239268 - RNA, 27 nt, Homo Sapiens
aagcaaucccacuucagccucuugaau

SEQ ID NO: 239269 - RNA, 32 nt, Homo Sapiens
gauuguaaugaaauacacuuccuguuuuuuaa

SEQ ID NO: 239270 - RNA, 32 nt, Homo Sapiens
cguucugugggugaccuuuuccgggauuucuu

SEQ ID NO: 239271 - RNA, 32 nt, Homo Sapiens
ggugaggagaagcggcuugaagcagggcucca

SEQ ID NO: 239272 - RNA, 32 nt, Homo Sapiens
uucguuucacuuugagccccaacugcuggacu

SEQ ID NO: 239273 - RNA, 32 nt, Homo Sapiens
ggacuuaacaacauaccaaggcagcucuggcc

SEQ ID NO: 239274 - RNA, 30 nt, Homo Sapiens
ggccuggaccgcgcguggccggcgccaaaa

SEQ ID NO: 239275 - RNA, 32 nt, Homo Sapiens
uccuuuaccaccucaccuuguugguaccuccc

SEQ ID NO: 239276 - RNA, 32 nt, Homo Sapiens
uucugaacacaauaaacuauuuugaugaucuu

SEQ ID NO: 239277 - RNA, 32 nt, Homo Sapiens
ccggccaaggaccggcggcuggaggagcggcg

SEQ ID NO: 239278 - RNA, 32 nt, Homo Sapiens
uaaugcuuauauuugcacaaguauguaaaaua

SEQ ID NO: 239279 - RNA, 32 nt, Homo Sapiens
cugguggcuguuggguggggcuccccaaggcg

SEQ ID NO: 239280 - RNA, 32 nt, Homo Sapiens
ccccugugccagauccuccccuaugcugaccu

SEQ ID NO: 239281 - RNA, 32 nt, Homo Sapiens
uaauuacuaucauuuuacagucaucucaacaa

SEQ ID NO: 239282 - RNA, 32 nt, Homo Sapiens
gucacuccugggaguggcuccuccccacccug

SEQ ID NO: 239283 - RNA, 31 nt, Homo Sapiens
gcaucuaucuccuuaaaguccacuccuuaca

SEQ ID NO: 239284 - RNA, 32 nt, Homo Sapiens
acaaugcaucugacugcaauaaugugcuaaua

SEQ ID NO: 239285 - RNA, 32 nt, Homo Sapiens
cugcuccugacaccccaccucuccccagaaga

SEQ ID NO: 239286 - RNA, 32 nt, Homo Sapiens
cgcgggggugagagggcgcgguggcugugggg

SEQ ID NO: 239287 - RNA, 32 nt, Homo Sapiens
cgagcacggcgcccgcaccuccccgcaccgcc

SEQ ID NO: 239288 - RNA, 32 nt, Homo Sapiens
gguuaaaagauuuuuuuuuuuaaucaugaaga

SEQ ID NO: 239289 - RNA, 32 nt, Homo Sapiens
uccuuugccucccacaucugugaaacagggag

SEQ ID NO: 239290 - RNA, 32 nt, Homo Sapiens
aauauucaguuaugguacuauguuugcaacuc

SEQ ID NO: 239291 - RNA, 30 nt, Homo Sapiens
aggaaaggagguggcuagugguaucaguuc

SEQ ID NO: 239292 - RNA, 32 nt, Homo Sapiens
agaaaaauggggucccuugguugcugauucuu

SEQ ID NO: 239293 - RNA, 32 nt, Homo Sapiens
caugguccauugggucaaggccccacugccgc

SEQ ID NO: 239294 - RNA, 32 nt, Homo Sapiens
ccugauguggaggggagaucccugccccacuu

SEQ ID NO: 239295 - RNA, 32 nt, Homo Sapiens
cugguggcuguuggguggggcuccccaaggug

SEQ ID NO: 239296 - RNA, 32 nt, Homo Sapiens
uucucagagaagugagcagagacuccacagac

SEQ ID NO: 239297 - RNA, 32 nt, Homo Sapiens
agauccgucagccccaggagaguccugagaug

SEQ ID NO: 239298 - RNA, 32 nt, Homo Sapiens
uuuagggcaguggaaggaaggcuggcaucaaa

SEQ ID NO: 239299 - RNA, 32 nt, Homo Sapiens
gucccgugcuucugcugcuccauccuuugagu

SEQ ID NO: 239300 - RNA, 32 nt, Homo Sapiens
ggcuggucacgguggcucaugccugugguccc

SEQ ID NO: 239301 - RNA, 32 nt, Homo Sapiens
gggccuguacauaccuaggagccaugaguugu

SEQ ID NO: 239302 - RNA, 32 nt, Homo Sapiens
uaagcuggccccagccuugucuugauauuaau

SEQ ID NO: 239303 - RNA, 32 nt, Homo Sapiens
aggugggacugggauaauuguucaaggaauug

SEQ ID NO: 239304 - RNA, 32 nt, Homo Sapiens
aaaauuuaaugcaugauagacacauaugaggg

SEQ ID NO: 239305 - RNA, 32 nt, Homo Sapiens
aauauguuguuuuucugucccuuuaaagucuu

SEQ ID NO: 239306 - RNA, 32 nt, Homo Sapiens
uaccucuuagcccugagguuuccuccuuccca

SEQ ID NO: 239307 - RNA, 32 nt, Homo Sapiens
uauacauauauuccagaacuuggaggaaaucu

SEQ ID NO: 239308 - RNA, 32 nt, Homo Sapiens
ccgugagagaauacauuuuuguuuucuucagc

SEQ ID NO: 239309 - RNA, 32 nt, Homo Sapiens
cuuuagggugucaauucugugcugcuuugcaa

SEQ ID NO: 239310 - RNA, 32 nt, Homo Sapiens
uguuauuugcuuuuaacaaccuuuaaaaaaua

SEQ ID NO: 239311 - RNA, 32 nt, Homo Sapiens
uguguacacacgcuuuucccguaugcuuucuu

SEQ ID NO: 239312 - RNA, 32 nt, Homo Sapiens
aguacuguaagaauccugaggaccuggagugc

SEQ ID NO: 239313 - RNA, 32 nt, Homo Sapiens
aguguuuagcuccaugagacacuucaguuuaa

SEQ ID NO: 239314 - RNA, 32 nt, Homo Sapiens
gugccaugauugcuagccagcauuccauauug

SEQ ID NO: 239315 - RNA, 32 nt, Homo Sapiens
gugcuuugacuucuugcuucagucaucagcca

SEQ ID NO: 239316 - RNA, 32 nt, Homo Sapiens
caggaauuucacuuuuucauccaccacccucc

SEQ ID NO: 239317 - RNA, 32 nt, Homo Sapiens
uccagggaucaccauggagaucaccagggauc

SEQ ID NO: 239318 - RNA, 32 nt, Homo Sapiens
acuaacuccaaguuuugaagguauaauuuaau

SEQ ID NO: 239319 - RNA, 32 nt, Homo Sapiens
aauacccuuugugcuagcccaggcccugggga

SEQ ID NO: 239320 - RNA, 32 nt, Homo Sapiens
agagcaaacgcaggaugaggaguacugcagag

SEQ ID NO: 239321 - RNA, 32 nt, Homo Sapiens
gccucagucaugccgaagcacgaguucucugu

SEQ ID NO: 239322 - RNA, 32 nt, Homo Sapiens
acuuggggggaagagugggaggugggcgaggg

SEQ ID NO: 239323 - RNA, 32 nt, Homo Sapiens
aggucaggcaggccagucgucuacacaccccc

SEQ ID NO: 239324 - RNA, 32 nt, Homo Sapiens
uaucuauagacaugguaaacuuuugguuuuca

SEQ ID NO: 239325 - RNA, 32 nt, Homo Sapiens
uccaggcaggagcacgaggucuggccaaggug

SEQ ID NO: 239326 - RNA, 32 nt, Homo Sapiens
uugaggcaggcacugccaaaacaucaaccugc

SEQ ID NO: 239327 - RNA, 32 nt, Homo Sapiens
augcuugcauauauuucaugaauacauuguac

SEQ ID NO: 239328 - RNA, 32 nt, Homo Sapiens
gggucugugugaggccauggcuccugggccac

SEQ ID NO: 239329 - RNA, 32 nt, Homo Sapiens
gucuucugagcuacgauaauuuuuuggaacgg

SEQ ID NO: 239330 - RNA, 32 nt, Homo Sapiens
cacccccaaagccccagcagauuuggcucucu

SEQ ID NO: 239331 - RNA, 32 nt, Homo Sapiens
ggggaggccaccccaaaccccagccccaacuc

SEQ ID NO: 239332 - RNA, 32 nt, Homo Sapiens
gcaguuuccuuccuuccuucucggcagcgcuc

SEQ ID NO: 239333 - RNA, 32 nt, Homo Sapiens
gucagcagcugccugcuuuucugugauguaug

SEQ ID NO: 239334 - RNA, 32 nt, Homo Sapiens
uauuuacagccuggccacucuagacauaugaa

SEQ ID NO: 239335 - RNA, 32 nt, Homo Sapiens
auuucaucagccaaacaaaaaccaacuaacuc

SEQ ID NO: 239336 - RNA, 32 nt, Homo Sapiens
aggaggccaaagggcugcagucaccccuugug

SEQ ID NO: 239337 - RNA, 32 nt, Homo Sapiens
augauccuggaaaaauuauuaucccucucaca

SEQ ID NO: 239338 - RNA, 32 nt, Homo Sapiens
uuaaaacauuuuagaaauauucuugagauggg

SEQ ID NO: 239339 - RNA, 32 nt, Homo Sapiens
ccccuaaagcuaugcacaccacaaggggcucu

SEQ ID NO: 239340 - RNA, 32 nt, Homo Sapiens
ggcgggacucagagaccccauuccucuucacg

SEQ ID NO: 239341 - RNA, 32 nt, Homo Sapiens
uuaaccuaaguguccaucaauagagaauuggg

SEQ ID NO: 239342 - RNA, 32 nt, Homo Sapiens
aaaacuucaacacaaaggguuguagcacuguc

SEQ ID NO: 239343 - RNA, 32 nt, Homo Sapiens
cacuuggcuuggaggcugccccugcccucccc

SEQ ID NO: 239344 - RNA, 32 nt, Homo Sapiens
guaagagggaaugcggugaggcaguguggaau

SEQ ID NO: 239345 - RNA, 32 nt, Homo Sapiens
guccugggcucggggacgcaggcgcugcugca

SEQ ID NO: 239346 - RNA, 32 nt, Homo Sapiens
uagccuagugacagcucuguauggcccacacc

SEQ ID NO: 239347 - RNA, 32 nt, Homo Sapiens
gccaacuggucagcugcugaucagggugucua

SEQ ID NO: 239348 - RNA, 32 nt, Homo Sapiens
cccccagcgcacccccgcacccgccccuccag

SEQ ID NO: 239349 - RNA, 32 nt, Homo Sapiens
uccuauuaaguacagccgcaagaaagaaaaaa

SEQ ID NO: 239350 - RNA, 32 nt, Homo Sapiens
aauauaugugcucugcucuccucccgcaaucc

SEQ ID NO: 239351 - RNA, 32 nt, Homo Sapiens
ggugugggagacuccgcccugccgggucccca

SEQ ID NO: 239352 - RNA, 32 nt, Homo Sapiens
cccgacccugccccggccccgcuuccaccuug

SEQ ID NO: 239353 - RNA, 32 nt, Homo Sapiens
ccagaaggagaugcugcugagguuuugaaaga

SEQ ID NO: 239354 - RNA, 32 nt, Homo Sapiens
gcccagaccuuaggccgccgccgccgcggaag

SEQ ID NO: 239355 - RNA, 32 nt, Homo Sapiens
aggguuccuggccaccuagccugcuccucugc

SEQ ID NO: 239356 - RNA, 32 nt, Homo Sapiens
ucaugcuguuuggaaaccuuuaaugaagguuu

SEQ ID NO: 239357 - RNA, 32 nt, Homo Sapiens
cagccucuuggaaagagggacacuggaggggu

SEQ ID NO: 239358 - RNA, 31 nt, Homo Sapiens
cugguaucauggagaaaguccaauaccucac

SEQ ID NO: 239359 - RNA, 32 nt, Homo Sapiens
cuguucugucagugaauggauaucuaaugugc

SEQ ID NO: 239360 - RNA, 32 nt, Homo Sapiens
ucuucaccccccagccuuccugaaccugccuc

SEQ ID NO: 239361 - RNA, 32 nt, Homo Sapiens
gcaguucccagcugucucccugcuccucuacu

SEQ ID NO: 239362 - RNA, 29 nt, Homo Sapiens
uuuuauauauguauauguggguguagguc

SEQ ID NO: 239363 - RNA, 32 nt, Homo Sapiens
cggccagcucccaaauggcccauuccagggcc

SEQ ID NO: 239364 - RNA, 32 nt, Homo Sapiens
uuuccacagugugaggauaaauguagaaucgu

SEQ ID NO: 239365 - RNA, 32 nt, Homo Sapiens
gugauuuguggcgcucuccguucgcgguggua

SEQ ID NO: 239366 - RNA, 32 nt, Homo Sapiens
gcuucccuccugggggcagcuacacucguccc

SEQ ID NO: 239367 - RNA, 32 nt, Homo Sapiens
gcagaaauuaaggguccaauugagauugggug

SEQ ID NO: 239368 - RNA, 32 nt, Homo Sapiens
caaaaagauuaccagggguaaaacaacuuuuu

SEQ ID NO: 239369 - RNA, 32 nt, Homo Sapiens
cgguuccuggggaauuggauccaacugggaga

SEQ ID NO: 239370 - RNA, 32 nt, Homo Sapiens
auaugaaaugaaaucuuuuauaucuguugccu

SEQ ID NO: 239371 - RNA, 32 nt, Homo Sapiens
uauaucuacauaucugucaucuaaauaaaugg

SEQ ID NO: 239372 - RNA, 32 nt, Homo Sapiens
ggauggugguggcuccuugcagggagaacggu

SEQ ID NO: 239373 - RNA, 32 nt, Homo Sapiens
gugcucagcucuuccaccgucauuuugaauug

SEQ ID NO: 239374 - RNA, 32 nt, Homo Sapiens
ccauuuccgccagcugccuguagccacguggc

SEQ ID NO: 239375 - RNA, 32 nt, Homo Sapiens
gagguauugauuucugaauauucauaauugug

SEQ ID NO: 239376 - RNA, 32 nt, Homo Sapiens
ccuuccacucugccucccaggacaggaggcua

SEQ ID NO: 239377 - RNA, 32 nt, Homo Sapiens
uaugugcaagcugcuuuguccuacauuucuuu

SEQ ID NO: 239378 - RNA, 32 nt, Homo Sapiens
uaauuuguagaauuauuuuuacgauuuccaaa

SEQ ID NO: 239379 - RNA, 32 nt, Homo Sapiens
aaagguaauaauacauaaucauuaaaaucuga

SEQ ID NO: 239380 - RNA, 32 nt, Homo Sapiens
uaccccaauaaucaacucguuuuuauauuaau

SEQ ID NO: 239381 - RNA, 32 nt, Homo Sapiens
gagaaagaacuguaacagaacugauauuacag

SEQ ID NO: 239382 - RNA, 32 nt, Homo Sapiens
ggccuuuuuucugcaaguaaugauguagguua

SEQ ID NO: 239383 - RNA, 32 nt, Homo Sapiens
aggguccuacagacaagguggcaucucaaccu

SEQ ID NO: 239384 - RNA, 32 nt, Homo Sapiens
ggcgccucccucugcgggccccgaggucugug

SEQ ID NO: 239385 - RNA, 32 nt, Homo Sapiens
ugcucuuaaauuuuggccccaacuccagggac

SEQ ID NO: 239386 - RNA, 32 nt, Homo Sapiens
aauauuacugggguuucuuuuauuacucagaa

SEQ ID NO: 239387 - RNA, 32 nt, Homo Sapiens
uucccuggaagauguuacauaauccuaucaug

SEQ ID NO: 239388 - RNA, 32 nt, Homo Sapiens
cagauuuaaaaauacacaguacugagauuggc

SEQ ID NO: 239389 - RNA, 32 nt, Homo Sapiens
guguucucuccauggguggggucggccagcgc

SEQ ID NO: 239390 - RNA, 32 nt, Homo Sapiens
gaaauauguacaacuucagcauuuuaaguaac

SEQ ID NO: 239391 - RNA, 32 nt, Homo Sapiens
ugcugcgugggggcccgggugcccccaggucc

SEQ ID NO: 239392 - RNA, 32 nt, Homo Sapiens
gaggcccggcgggaccccggcccgcgucucag

SEQ ID NO: 239393 - RNA, 32 nt, Homo Sapiens
gacacuuccccuccucccuuugaagugcauua

SEQ ID NO: 239394 - RNA, 32 nt, Homo Sapiens
gguauauuguauuccuagcuuauuuaaucuuc

SEQ ID NO: 239395 - RNA, 32 nt, Homo Sapiens
caagaggaaaauuguaauugauuaauuccauc

SEQ ID NO: 239396 - RNA, 32 nt, Homo Sapiens
cucuuuugaaagaggacacuagacggucccag

SEQ ID NO: 239397 - RNA, 32 nt, Homo Sapiens
cugagaaacuaaaaggacuuuugacuuuuauc

SEQ ID NO: 239398 - RNA, 32 nt, Homo Sapiens
ccuuucuugacaaaaccaaacuucucagaaaa

SEQ ID NO: 239399 - RNA, 28 nt, Homo Sapiens
cuccgggggcggccauacugaggaggca

SEQ ID NO: 239400 - RNA, 32 nt, Homo Sapiens
aaguaauuuuugauuuugaaaaucucaaaacu

SEQ ID NO: 239401 - RNA, 32 nt, Homo Sapiens
acacauuuuuaaagucuaaacuguuaaacaac

SEQ ID NO: 239402 - RNA, 32 nt, Homo Sapiens
gagccagaaaccggaaaacccugggcucaugg

SEQ ID NO: 239403 - RNA, 32 nt, Homo Sapiens
auguauauuaaaagguucaaaaauauuuguau

SEQ ID NO: 239404 - RNA, 32 nt, Homo Sapiens
gcauuucccuaauaaugaauguuauugagcac

SEQ ID NO: 239405 - RNA, 32 nt, Homo Sapiens
aauucaccugaaacguauuuugaccuaaaaga

SEQ ID NO: 239406 - RNA, 32 nt, Homo Sapiens
aguccucccugcccucucuccucuccccugca

SEQ ID NO: 239407 - RNA, 32 nt, Homo Sapiens
uauuacuagaucuggaggcaaccacaggacac

SEQ ID NO: 239408 - RNA, 32 nt, Homo Sapiens
accucaucaaggagacuaaaucuucccugguc

SEQ ID NO: 239409 - RNA, 32 nt, Homo Sapiens
uuuuauuuuaaccaaagguuaucagagccagu

SEQ ID NO: 239410 - RNA, 32 nt, Homo Sapiens
cugcgggccggcggcgggaggggaggcuccuc

SEQ ID NO: 239411 - RNA, 32 nt, Homo Sapiens
ccucgggacgaucugccuuccucccccgccug

SEQ ID NO: 239412 - RNA, 32 nt, Homo Sapiens
aggucuuaguccagcucugugaucugaaggca

SEQ ID NO: 239413 - RNA, 32 nt, Homo Sapiens
ugggugggacaaaguuagaauugccugaagau

SEQ ID NO: 239414 - RNA, 32 nt, Homo Sapiens
gagacguaucagauuauguaaaauuaaauuug

SEQ ID NO: 239415 - RNA, 30 nt, Homo Sapiens
gaugugagagaggguauugagucuggccug

SEQ ID NO: 239416 - RNA, 32 nt, Homo Sapiens
uaaauuagguauggaauccaucaguguuacgu

SEQ ID NO: 239417 - RNA, 32 nt, Homo Sapiens
uauacacacacacacacacacacacacacaua

SEQ ID NO: 239418 - RNA, 32 nt, Homo Sapiens
gagccacugcaccuagccucuauuuguuuuac

SEQ ID NO: 239419 - RNA, 32 nt, Homo Sapiens
gucaugcauccacuuuguuuuccuguuucagu

SEQ ID NO: 239420 - RNA, 32 nt, Homo Sapiens
caagcuggagcgcaauggugugaucuuggcuc

SEQ ID NO: 239421 - RNA, 32 nt, Homo Sapiens
ucaagugauccucccaccucagcccccugaau

SEQ ID NO: 239422 - RNA, 29 nt, Homo Sapiens
gugaagaaccauuuacauuuucuaagggc

SEQ ID NO: 239423 - RNA, 32 nt, Homo Sapiens
ugucagugagcgggcgggaggaagggcacagc

SEQ ID NO: 239424 - RNA, 32 nt, Homo Sapiens
caccaauugcccaauucaucuuucuucugcuu

SEQ ID NO: 239425 - RNA, 32 nt, Homo Sapiens
agaaaacuuuuguagaauuaucauauaaugaa

SEQ ID NO: 239426 - RNA, 32 nt, Homo Sapiens
ucccaugcgcgagggcgggcgcaagggcggcc

SEQ ID NO: 239427 - RNA, 32 nt, Homo Sapiens
cuuuuucuuuuuucuuuuucucgucacacagg

SEQ ID NO: 239428 - RNA, 32 nt, Homo Sapiens
aauauacauuuuauuuuugaaggugugguaca

SEQ ID NO: 239429 - RNA, 32 nt, Homo Sapiens
gggagggaggaacuuggggacaucagucaugg

SEQ ID NO: 239430 - RNA, 32 nt, Homo Sapiens
ccccucccucccucacuuccucccucuccccc

SEQ ID NO: 239431 - RNA, 32 nt, Homo Sapiens
augagguaccuuuacagauuugcaauaagaug

SEQ ID NO: 239432 - RNA, 32 nt, Homo Sapiens
gcugggcacgggggcucacgccugucacccca

SEQ ID NO: 239433 - RNA, 32 nt, Homo Sapiens
ucaaucuaacuguauuuuugugcccauuaacc

SEQ ID NO: 239434 - RNA, 32 nt, Homo Sapiens
uaaagcacuguccugucuuaaucuuacaugcu

SEQ ID NO: 239435 - RNA, 32 nt, Homo Sapiens
cacacgcaugcgccaccacgcccagcuaauuu

SEQ ID NO: 239436 - RNA, 32 nt, Homo Sapiens
uuucucuagagcagcuggcccuucuugcuaca

SEQ ID NO: 239437 - RNA, 32 nt, Homo Sapiens
auuauaagugaaaucuaaaaauugaucguuuu

SEQ ID NO: 239438 - RNA, 32 nt, Homo Sapiens
ggaaagugcacccgcagucacucgcagauggc

SEQ ID NO: 239439 - RNA, 31 nt, Homo Sapiens
gggggguuggagcacugcccccgcgcacagu

SEQ ID NO: 239440 - RNA, 32 nt, Homo Sapiens
aagcuuuauauuuauuugauuauccaaaauac

SEQ ID NO: 239441 - RNA, 32 nt, Homo Sapiens
aaagggagcaucccccaccuacucucagguuu

SEQ ID NO: 239442 - RNA, 32 nt, Homo Sapiens
agcgggcucagggucugugaggaggcaagguu

SEQ ID NO: 239443 - RNA, 32 nt, Homo Sapiens
caguauuguagauacuacacuaauuuccaaca

SEQ ID NO: 239444 - RNA, 32 nt, Homo Sapiens
uggcccucagccaugcguggacucagugggcc

SEQ ID NO: 239445 - RNA, 32 nt, Homo Sapiens
aguguggcccggagcuggcccgggacagccag

SEQ ID NO: 239446 - RNA, 32 nt, Homo Sapiens
uuuuagaaaaugguuguaaaucugacuucuuu

SEQ ID NO: 239447 - RNA, 32 nt, Homo Sapiens
caugugguuauuuggaaauugugacugagcgg

SEQ ID NO: 239448 - RNA, 32 nt, Homo Sapiens
aagugugaaaauauuguuauguaucauaucaa

SEQ ID NO: 239449 - RNA, 32 nt, Homo Sapiens
ggcggccgcgucggccggggccgggacgauga

SEQ ID NO: 239450 - RNA, 32 nt, Homo Sapiens
ccagcucuuuugcucacaucgcguaaccuugg

SEQ ID NO: 239451 - RNA, 32 nt, Homo Sapiens
aggcugaggcagagcugcuugaacccuggaag

SEQ ID NO: 239452 - RNA, 32 nt, Homo Sapiens
ggucaggggcuuuggaaccucaaagaccuccg

SEQ ID NO: 239453 - RNA, 32 nt, Homo Sapiens
agaacuuuguaauacuuuaaucaauaaaauua

SEQ ID NO: 239454 - RNA, 32 nt, Homo Sapiens
guggagggaaugccagccggccugcugagucc

SEQ ID NO: 239455 - RNA, 32 nt, Homo Sapiens
aauuguaguucauauguacaccagcuaguggc

SEQ ID NO: 239456 - RNA, 32 nt, Homo Sapiens
ggcugcuucccucggcgacgcgaccccucagc

SEQ ID NO: 239457 - RNA, 32 nt, Homo Sapiens
ugguggugucaauaaacgcucuguggccagug

SEQ ID NO: 239458 - RNA, 32 nt, Homo Sapiens
gcuggcccacugcccuggcucaucucucccuu

SEQ ID NO: 239459 - RNA, 32 nt, Homo Sapiens
uagaauuugcuuugacaccugaugccaggaca

SEQ ID NO: 239460 - RNA, 32 nt, Homo Sapiens
aaagcaaaaaauauaaaugaaguacuuguacc

SEQ ID NO: 239461 - RNA, 30 nt, Homo Sapiens
accccggcgcccgcgucuuccacgggcaca

SEQ ID NO: 239462 - RNA, 32 nt, Homo Sapiens
cccugucugcacaccagggaucaauaagagcc

SEQ ID NO: 239463 - RNA, 32 nt, Homo Sapiens
ggcacagacaccuggugagugaggcuucaagg

SEQ ID NO: 239464 - RNA, 32 nt, Homo Sapiens
aagggucacaugcccuggcaugggcagaaacu

SEQ ID NO: 239465 - RNA, 32 nt, Homo Sapiens
acaggggagggaagaaaggggguguuaguggg

SEQ ID NO: 239466 - RNA, 32 nt, Homo Sapiens
ccccgccccucgcucccuguguccuggcggau

SEQ ID NO: 239467 - RNA, 32 nt, Homo Sapiens
ucugaguagagcuuguaauaaauacugcagcu

SEQ ID NO: 239468 - RNA, 32 nt, Homo Sapiens
cgcaagcugucggugcugcugcugcugcuggg

SEQ ID NO: 239469 - RNA, 32 nt, Homo Sapiens
ucuuaaaaauauauuucauuaaacaccuaugc

SEQ ID NO: 239470 - RNA, 32 nt, Homo Sapiens
auguggagaagcuggggagaaggcgugggagg

SEQ ID NO: 239471 - RNA, 32 nt, Homo Sapiens
cucucgggcacccgcgcggcgccgguuggccu

SEQ ID NO: 239472 - RNA, 32 nt, Homo Sapiens
cacgcgguucccacccggggccaaccucucca

SEQ ID NO: 239473 - RNA, 32 nt, Homo Sapiens
ucucaggcucugccggcccgcggcccgcgggg

SEQ ID NO: 239474 - RNA, 32 nt, Homo Sapiens
aagguaaacgagcaagacuaauacuaaugaga

SEQ ID NO: 239475 - RNA, 32 nt, Homo Sapiens
agaacaacgaucuaaauuugcauagcaagugg

SEQ ID NO: 239476 - RNA, 32 nt, Homo Sapiens
ugaauaauuuugugagaugauaccuucuuguc

SEQ ID NO: 239477 - RNA, 32 nt, Homo Sapiens
guuugguaaccauaguuucacuuguucaaagc

SEQ ID NO: 239478 - RNA, 32 nt, Homo Sapiens
uaaaaacaaaaacacaguagucucauggaacu

SEQ ID NO: 239479 - RNA, 32 nt, Homo Sapiens
uacaguagcacuuuacaaauggcuccauguca

SEQ ID NO: 239480 - RNA, 32 nt, Homo Sapiens
cuuccuuuucucucuucuccgccccgcacucc

SEQ ID NO: 239481 - RNA, 32 nt, Homo Sapiens
cguccggguggguggggcgggcuggguaccug

SEQ ID NO: 239482 - RNA, 32 nt, Homo Sapiens
ucacugacuuccagaucagggacccugccaag

SEQ ID NO: 239483 - RNA, 30 nt, Homo Sapiens
gcaggauggccgggaccgugcgcaccgcgu

SEQ ID NO: 239484 - RNA, 32 nt, Homo Sapiens
acaaaaaaugaacacgaagcugggaccucaug

SEQ ID NO: 239485 - RNA, 32 nt, Homo Sapiens
aucagacuuccuccuccaccuggagccccuag

SEQ ID NO: 239486 - RNA, 32 nt, Homo Sapiens
ggauuggggaggaggggaugggcagcggaggg

SEQ ID NO: 239487 - RNA, 32 nt, Homo Sapiens
ggccggaggaaccgagguguugccagugcuaa

SEQ ID NO: 239488 - RNA, 32 nt, Homo Sapiens
gaauuuuuuaucugcauaaauuuuacaguaga

SEQ ID NO: 239489 - RNA, 32 nt, Homo Sapiens
aacauaaaucccacauauucuaaugacaacuu

SEQ ID NO: 239490 - RNA, 32 nt, Homo Sapiens
auaugaugcucuucugcuuuguuuuauucuaa

SEQ ID NO: 239491 - RNA, 32 nt, Homo Sapiens
uggaggucccagcaccuacaaguacauaucuc

SEQ ID NO: 239492 - RNA, 32 nt, Homo Sapiens
gccccggccccggguggcugcagggagguggg

SEQ ID NO: 239493 - RNA, 32 nt, Homo Sapiens
cagacucacugguagucagauacacgggaucu

SEQ ID NO: 239494 - RNA, 32 nt, Homo Sapiens
aaaacccugggguggacgauguuugaugauua

SEQ ID NO: 239495 - RNA, 32 nt, Homo Sapiens
acuagaaagugaaaagugaauaaauaagucac

SEQ ID NO: 239496 - RNA, 32 nt, Homo Sapiens
aaguuggucagggacauguggccacuuauuau

SEQ ID NO: 239497 - RNA, 32 nt, Homo Sapiens
cugguuacacuacuccacgaacuccuccaaag

SEQ ID NO: 239498 - RNA, 32 nt, Homo Sapiens
gauauuaaaggcauuggaucuaucuuggauau

SEQ ID NO: 239499 - RNA, 32 nt, Homo Sapiens
cacagccccguccucuuccuuucugcuagccu

SEQ ID NO: 239500 - RNA, 32 nt, Homo Sapiens
gaaggacuuacgguaucagauaccaauauuua

SEQ ID NO: 239501 - RNA, 32 nt, Homo Sapiens
ccuaucuucuuacuuuauuuccuaacagcacu

SEQ ID NO: 239502 - RNA, 32 nt, Homo Sapiens
ucgagggugcagcgagccgugaucgugcuacu

SEQ ID NO: 239503 - RNA, 32 nt, Homo Sapiens
ucuggaggacaauggacaaaaugucucuuaga

SEQ ID NO: 239504 - RNA, 32 nt, Homo Sapiens
acuuuggaagcagggugaucgcacaaccugca

SEQ ID NO: 239505 - RNA, 31 nt, Homo Sapiens
acccaacuccaucagcacugaguuaaauugc

SEQ ID NO: 239506 - RNA, 32 nt, Homo Sapiens
ggcucaugaagaaauguguaacucuccaagag

SEQ ID NO: 239507 - RNA, 32 nt, Homo Sapiens
aaauguucucagaugcugauguuuguaagguc

SEQ ID NO: 239508 - RNA, 32 nt, Homo Sapiens
uguguccccugagucugcuguuuaccucauug

SEQ ID NO: 239509 - RNA, 32 nt, Homo Sapiens
ucccccugcaucaggagcacagaugggggaaa

SEQ ID NO: 239510 - RNA, 32 nt, Homo Sapiens
cugcucgcucgcagccagagacgcugcuuuuu

SEQ ID NO: 239511 - RNA, 32 nt, Homo Sapiens
aggaacgcgcccucucgccgcgcgcgcccucg

SEQ ID NO: 239512 - RNA, 27 nt, Homo Sapiens
aagaagccauucucauuuuucucacuc

SEQ ID NO: 239513 - RNA, 32 nt, Homo Sapiens
aguaauuccuuuagcaauuaaguauuugguag

SEQ ID NO: 239514 - RNA, 32 nt, Homo Sapiens
gcuuucucuuccaacagugaucuguauucuua

SEQ ID NO: 239515 - RNA, 32 nt, Homo Sapiens
gcuccgggaucuucagcacccgcggccgccau

SEQ ID NO: 239516 - RNA, 32 nt, Homo Sapiens
agcuugcccucccugggccccccaccuuggug

SEQ ID NO: 239517 - RNA, 32 nt, Homo Sapiens
guguggaugugauuugucauccaguauuaagu

SEQ ID NO: 239518 - RNA, 32 nt, Homo Sapiens
cagggcccgcaccgaccacggggccgacauug

SEQ ID NO: 239519 - RNA, 30 nt, Homo Sapiens
ggucaccccacgcugccccaucuugccugc

SEQ ID NO: 239520 - RNA, 32 nt, Homo Sapiens
ucaguaguugucauuuauaugcacuaaauaaa

SEQ ID NO: 239521 - RNA, 28 nt, Homo Sapiens
cgaaugggcgaccugagccgaaccgcuc

SEQ ID NO: 239522 - RNA, 32 nt, Homo Sapiens
gcaauuaacugggucuuacuaucauuguagug

SEQ ID NO: 239523 - RNA, 32 nt, Homo Sapiens
ugagauauuaaaguuaauaaaggucaguccau

SEQ ID NO: 239524 - RNA, 32 nt, Homo Sapiens
uaaaugcuguacuuacuacaagaaucuuuuuu

SEQ ID NO: 239525 - RNA, 32 nt, Homo Sapiens
gacggggaaugugauggaaaagagaccgccug

SEQ ID NO: 239526 - RNA, 32 nt, Homo Sapiens
ggccaggggaggaggaagauggccaccacaac

SEQ ID NO: 239527 - RNA, 32 nt, Homo Sapiens
gugggucucugcggcacucuucugccugguga

SEQ ID NO: 239528 - RNA, 32 nt, Homo Sapiens
gcuggguuagaaaugucugucuggaaacagga

SEQ ID NO: 239529 - RNA, 32 nt, Homo Sapiens
aacuuguggcugcuuuugcugcugcugcuccu

SEQ ID NO: 239530 - RNA, 32 nt, Homo Sapiens
uguaagaaagcagagagcggaaaaucaauggc

SEQ ID NO: 239531 - RNA, 32 nt, Homo Sapiens
ccuaucauuuuucuuuuuagagacaaacguga

SEQ ID NO: 239532 - RNA, 32 nt, Homo Sapiens
ugguucuccuaaaacuauuaucugaaaccuac

SEQ ID NO: 239533 - RNA, 32 nt, Homo Sapiens
gcacaaugcaagaaccuaacuaacgugaugau

SEQ ID NO: 239534 - RNA, 32 nt, Homo Sapiens
acccacugacucuccuuccuuuacucuuaugc

SEQ ID NO: 239535 - RNA, 32 nt, Homo Sapiens
ggccaagguucaauuacuucagcgcagguauc

SEQ ID NO: 239536 - RNA, 32 nt, Homo Sapiens
ugacagcgugagccaccacaccuggccaagaa

SEQ ID NO: 239537 - RNA, 32 nt, Homo Sapiens
uugucucugaaacaucguggccucaggugcca

SEQ ID NO: 239538 - RNA, 32 nt, Homo Sapiens
gcugccccugcacgcgcugcggcggccgggca

SEQ ID NO: 239539 - RNA, 32 nt, Homo Sapiens
cgguagcagcagcgggcccggcuggggcgcga

SEQ ID NO: 239540 - RNA, 32 nt, Homo Sapiens
cugaggaagauaagggcccacgccccacucac

SEQ ID NO: 239541 - RNA, 32 nt, Homo Sapiens
aggacaaacaacagugaaaugcagcaucuguc

SEQ ID NO: 239542 - RNA, 32 nt, Homo Sapiens
ggguugagcugcugccgccgccgccucugucg

SEQ ID NO: 239543 - RNA, 32 nt, Homo Sapiens
acucuuacguugcuugagucuugguggcaggc

SEQ ID NO: 239544 - RNA, 32 nt, Homo Sapiens
ccagccccuccuccacucuccucuccccugug

SEQ ID NO: 239545 - RNA, 32 nt, Homo Sapiens
ucuggccgacgugggccgagggggccggcccg

SEQ ID NO: 239546 - RNA, 32 nt, Homo Sapiens
auguugcccuaguagccaaaaauaucagguug

SEQ ID NO: 239547 - RNA, 32 nt, Homo Sapiens
gacccuauugguauccuuuuugaaguacugga

SEQ ID NO: 239548 - RNA, 32 nt, Homo Sapiens
agaugcccaaaccacagacugacuuguaggcu

SEQ ID NO: 239549 - RNA, 30 nt, Homo Sapiens
acaaaugggaagcuugugaguggcccaucu

SEQ ID NO: 239550 - RNA, 32 nt, Homo Sapiens
augaaggucucagucucuuacccaggcuaggg

SEQ ID NO: 239551 - RNA, 32 nt, Homo Sapiens
gguuuuuaaaauuuauuauuauuauuauuauu

SEQ ID NO: 239552 - RNA, 32 nt, Homo Sapiens
ggauggcccucccccucuaccaagccacucca

SEQ ID NO: 239553 - RNA, 32 nt, Homo Sapiens
caauauuaauuauaauaaaggucacauaaacu

SEQ ID NO: 239554 - RNA, 32 nt, Homo Sapiens
guggacagcagugucccggcacaggcccaucg

SEQ ID NO: 239555 - RNA, 32 nt, Homo Sapiens
gggcucccccgacucacucucuaggcccccag

SEQ ID NO: 239556 - RNA, 30 nt, Homo Sapiens
ccucuuuuccacacgugggaaaccaaacuu

SEQ ID NO: 239557 - RNA, 32 nt, Homo Sapiens
ugaaacgucaggcacagcacaaaggcuuugcc

SEQ ID NO: 239558 - RNA, 32 nt, Homo Sapiens
aaucuuguuauuuuucuggauaauguuuaaga

SEQ ID NO: 239559 - RNA, 32 nt, Homo Sapiens
uaagcuuguauuccuuuuucucuccucucccc

SEQ ID NO: 239560 - RNA, 32 nt, Homo Sapiens
cuuaguuccugggugcaccccucccccucucc

SEQ ID NO: 239561 - RNA, 32 nt, Homo Sapiens
accucugcucuuuccuguuccuguaguguaca

SEQ ID NO: 239562 - RNA, 32 nt, Homo Sapiens
gcagaagagacgggaccagcugcuggccacau

SEQ ID NO: 239563 - RNA, 32 nt, Homo Sapiens
agaaccacaggucugcuguuaagggauuuuaa

SEQ ID NO: 239564 - RNA, 32 nt, Homo Sapiens
uuuuguugauuucuucauuuuguuuucuggua

SEQ ID NO: 239565 - RNA, 32 nt, Homo Sapiens
agaucaauauuuuuauuucccuuuuuugcuga

SEQ ID NO: 239566 - RNA, 32 nt, Homo Sapiens
uuuucaucuucggcgagcccaggggauggacu

SEQ ID NO: 239567 - RNA, 32 nt, Homo Sapiens
ugccaugaggauaaggacaggucccuauuggu

SEQ ID NO: 239568 - RNA, 32 nt, Homo Sapiens
gguauauauuguaggguacagaauagagcgug

SEQ ID NO: 239569 - RNA, 32 nt, Homo Sapiens
cugauagguucaagaucuguguucaaccagaa

SEQ ID NO: 239570 - RNA, 32 nt, Homo Sapiens
guaucaaagggagcauugcuagaagggcagcu

SEQ ID NO: 239571 - RNA, 32 nt, Homo Sapiens
caauaccccguccuauacugaaaagccgcaag

SEQ ID NO: 239572 - RNA, 32 nt, Homo Sapiens
aaccacuucaggugcagcuugugcgaggguag

SEQ ID NO: 239573 - RNA, 30 nt, Homo Sapiens
ugagagauuauacuucaugagucuuagcaa

SEQ ID NO: 239574 - RNA, 32 nt, Homo Sapiens
acugcucccucuaucucuuaucaugagacucc

SEQ ID NO: 239575 - RNA, 32 nt, Homo Sapiens
uaauuccgaaacaaaacugugacaaucuuuug

SEQ ID NO: 239576 - RNA, 32 nt, Homo Sapiens
agacaggacugacuugguaacgcacauggaaa

SEQ ID NO: 239577 - RNA, 32 nt, Homo Sapiens
aaaaucaaaauggauuuagagaaaaauuaucc

SEQ ID NO: 239578 - RNA, 29 nt, Homo Sapiens
uacuugaaaaaguuauauuucugcccugu

SEQ ID NO: 239579 - RNA, 32 nt, Homo Sapiens
caggcaccagcauggagaccucaugacaaagg

SEQ ID NO: 239580 - RNA, 32 nt, Homo Sapiens
acuaccugcucaggcccuccccucccaugcag

SEQ ID NO: 239581 - RNA, 32 nt, Homo Sapiens
ggacgugggaagcaagccgucuggcuucggcc

SEQ ID NO: 239582 - RNA, 32 nt, Homo Sapiens
gccacggugacuguauuacauguuguuauaga

SEQ ID NO: 239583 - RNA, 32 nt, Homo Sapiens
uccucccccagaccccucccagcccucuccuc

SEQ ID NO: 239584 - RNA, 32 nt, Homo Sapiens
uucauaccagaguuuaaagauacaggaaggcc

SEQ ID NO: 239585 - RNA, 32 nt, Homo Sapiens
caaaugguuccucuccuccuuccugaugucug

SEQ ID NO: 239586 - RNA, 32 nt, Homo Sapiens
gcaggcacuguguuugucaacacguacaacaa

SEQ ID NO: 239587 - RNA, 32 nt, Homo Sapiens
caacuacccuguaacaaggaagcaauucuaac

SEQ ID NO: 239588 - RNA, 32 nt, Homo Sapiens
gccugccccccuccccgcaagaggucuuuuca

SEQ ID NO: 239589 - RNA, 32 nt, Homo Sapiens
agaguaauuacauggugauuuuugcaauguaa

SEQ ID NO: 239590 - RNA, 32 nt, Homo Sapiens
cucuccagcgcagcucagcugcacugcguucc

SEQ ID NO: 239591 - RNA, 32 nt, Homo Sapiens
gacucaggugaacuaaccugcgagaagcuggu

SEQ ID NO: 239592 - RNA, 32 nt, Homo Sapiens
aaaugcccuaaaauguagugacccgugaaaag

SEQ ID NO: 239593 - RNA, 32 nt, Homo Sapiens
agaagguaaauucagcugcaucugaaggggcu

SEQ ID NO: 239594 - RNA, 32 nt, Homo Sapiens
cucgugaaaggccugccccgucuuucugccgc

SEQ ID NO: 239595 - RNA, 32 nt, Homo Sapiens
auccuuuugaacacguucgacaaaagcagugg

SEQ ID NO: 239596 - RNA, 32 nt, Homo Sapiens
ugguugcaauaaaacaugcugcugcugguggc

SEQ ID NO: 239597 - RNA, 32 nt, Homo Sapiens
ggguggugcuggcgcugcacugggcugacugc

SEQ ID NO: 239598 - RNA, 32 nt, Homo Sapiens
agccacuucccagccgccccaccccacuccau

SEQ ID NO: 239599 - RNA, 31 nt, Homo Sapiens
caggaggcgagguccgccggagcucugaacc

SEQ ID NO: 239600 - RNA, 32 nt, Homo Sapiens
agaguuuauuauuguacuuuauuuuggagcca

SEQ ID NO: 239601 - RNA, 32 nt, Homo Sapiens
acccuccaguguguguuguuucccucuaugug

SEQ ID NO: 239602 - RNA, 32 nt, Homo Sapiens
aagacagcaaaaaaacaaaaacauguucuaag

SEQ ID NO: 239603 - RNA, 32 nt, Homo Sapiens
gccuggcugcgcgucccgggcccggcggcuga

SEQ ID NO: 239604 - RNA, 32 nt, Homo Sapiens
cacuggugcagggagcccuccuugaacugacc

SEQ ID NO: 239605 - RNA, 32 nt, Homo Sapiens
uucgcuucaccgccccuccccccaccccaccc

SEQ ID NO: 239606 - RNA, 32 nt, Homo Sapiens
agguuuuuucagcauccauucaacaaauauuu

SEQ ID NO: 239607 - RNA, 32 nt, Homo Sapiens
agcguuuugugauuuuuaaguaacugugagug

SEQ ID NO: 239608 - RNA, 32 nt, Homo Sapiens
ugugucauugaaauaauaggcauaaaaauuaa

SEQ ID NO: 239609 - RNA, 32 nt, Homo Sapiens
uugcuguauggauuuguuugucuaaaucagcu

SEQ ID NO: 239610 - RNA, 32 nt, Homo Sapiens
ccaacacacacacaaacauacacacaccaaac

SEQ ID NO: 239611 - RNA, 32 nt, Homo Sapiens
uccggucauuggauccucucccuuuccccagg

SEQ ID NO: 239612 - RNA, 32 nt, Homo Sapiens
cagaaggcaagaaauaacuaagaucugagcag

SEQ ID NO: 239613 - RNA, 32 nt, Homo Sapiens
aaugcaguuaccuguggucauuuuggaggaag

SEQ ID NO: 239614 - RNA, 32 nt, Homo Sapiens
acuacacaauucuccuucgggaccucaauuuc

SEQ ID NO: 239615 - RNA, 32 nt, Homo Sapiens
auuacucugugcuaguguagucuuacuagaga

SEQ ID NO: 239616 - RNA, 32 nt, Homo Sapiens
ccgaguacuguaauguucacacuuguacaauc

SEQ ID NO: 239617 - RNA, 32 nt, Homo Sapiens
cccaucuagguccccucuccugcaucugucuc

SEQ ID NO: 239618 - RNA, 32 nt, Homo Sapiens
acuuguuuuguaauaaagauuauaauacccag

SEQ ID NO: 239619 - RNA, 32 nt, Homo Sapiens
uccagaaggaaaguauuuugcuaaacgccaag

SEQ ID NO: 239620 - RNA, 32 nt, Homo Sapiens
gaccuugcugaagcuccugggguguggggugu

SEQ ID NO: 239621 - RNA, 32 nt, Homo Sapiens
gccauauuguaugucuuaauauuuaacuuauu

SEQ ID NO: 239622 - RNA, 32 nt, Homo Sapiens
uuucuuccaagccccucccugccugacuuacc

SEQ ID NO: 239623 - RNA, 32 nt, Homo Sapiens
ucauguugguguauaucauuauagaaaucauu

SEQ ID NO: 239624 - RNA, 32 nt, Homo Sapiens
acaaaacauccaauuucucuguuuccucagga

SEQ ID NO: 239625 - RNA, 32 nt, Homo Sapiens
gcagugacauuccaugagacaagcaguccugu

SEQ ID NO: 239626 - RNA, 32 nt, Homo Sapiens
aaguggagccugacaguguguauuuuauucuu

SEQ ID NO: 239627 - RNA, 32 nt, Homo Sapiens
augacuuuuacuacugacucuuuacaaaugag

SEQ ID NO: 239628 - RNA, 32 nt, Homo Sapiens
agguugcaugaugcaaucauggcucacugcag

SEQ ID NO: 239629 - RNA, 32 nt, Homo Sapiens
cacaugagccccagcucccagccccacacgcc

SEQ ID NO: 239630 - RNA, 32 nt, Homo Sapiens
uggauugguuuuuucugagucaaagugguguu

SEQ ID NO: 239631 - RNA, 32 nt, Homo Sapiens
gugagugccuauucuaugucaaacacuguguu

SEQ ID NO: 239632 - RNA, 32 nt, Homo Sapiens
guguagaguagggcccuguucuccuuaggaug

SEQ ID NO: 239633 - RNA, 32 nt, Homo Sapiens
aggaaacccagcucagcaaacucccuuucaaa

SEQ ID NO: 239634 - RNA, 32 nt, Homo Sapiens
uuuuuuaaaaauuaaaaaaaauaaaaucuaaa

SEQ ID NO: 239635 - RNA, 32 nt, Homo Sapiens
uuuucccacaaguuuugaucagcaaauaaaca

SEQ ID NO: 239636 - RNA, 32 nt, Homo Sapiens
agguacagugauuguacagccagagccagugc

SEQ ID NO: 239637 - RNA, 32 nt, Homo Sapiens
cugggccaggucugcggcagugcugggguggc

SEQ ID NO: 239638 - RNA, 32 nt, Homo Sapiens
uaccaaauuguuacuuuaauucuuguguccug

SEQ ID NO: 239639 - RNA, 32 nt, Homo Sapiens
aaacuugacgccaugaagaucccgguccuucc

SEQ ID NO: 239640 - RNA, 32 nt, Homo Sapiens
gguccuccugucauuuuuaucuacucucguag

SEQ ID NO: 239641 - RNA, 32 nt, Homo Sapiens
caggccccucugccuccucuagcccaggaaug

SEQ ID NO: 239642 - RNA, 31 nt, Homo Sapiens
aggcaacugucugccccgccccgcgcccccg

SEQ ID NO: 239643 - RNA, 32 nt, Homo Sapiens
gcccacauugcccacaccugccucugaacugc

SEQ ID NO: 239644 - RNA, 32 nt, Homo Sapiens
cuucucgggggcccgccgcacgcccggcagcc

SEQ ID NO: 239645 - RNA, 32 nt, Homo Sapiens
uggaguggaaguggagagacacucucuucuua

SEQ ID NO: 239646 - RNA, 32 nt, Homo Sapiens
uaacugguucuaguuugcacacuacacacaua

SEQ ID NO: 239647 - RNA, 32 nt, Homo Sapiens
accccauguaggcacuaccuccccaauuaccc

SEQ ID NO: 239648 - RNA, 32 nt, Homo Sapiens
cgccuguuccucucucuuggggugcuggggca

SEQ ID NO: 239649 - RNA, 32 nt, Homo Sapiens
ccuugcacccccagccuccaccccggcucccc

SEQ ID NO: 239650 - RNA, 32 nt, Homo Sapiens
uugccuauaaaauuauuuucuguuuucucacu

SEQ ID NO: 239651 - RNA, 32 nt, Homo Sapiens
aagucuuuuguugcccucuccuauccucuugc

SEQ ID NO: 239652 - RNA, 32 nt, Homo Sapiens
gcggccagggcccugcaguccacggcugugga

SEQ ID NO: 239653 - RNA, 32 nt, Homo Sapiens
augaacccagaauggaacaguggggagcuaac

SEQ ID NO: 239654 - RNA, 31 nt, Homo Sapiens
gggcagggggcgguggcucagguuucuccgg

SEQ ID NO: 239655 - RNA, 32 nt, Homo Sapiens
ggccggccgggcggugacgacggcggaggcga

SEQ ID NO: 239656 - RNA, 32 nt, Homo Sapiens
ccagggggaaggagcugcucucguuugaggau

SEQ ID NO: 239657 - RNA, 32 nt, Homo Sapiens
ucuucaauaauaagcuauuaaauaacauaaag

SEQ ID NO: 239658 - RNA, 32 nt, Homo Sapiens
guacaaaacuaaaaauaucauguaucugaugu

SEQ ID NO: 239659 - RNA, 32 nt, Homo Sapiens
aacgccaaaugcuuugguuauuagaguuuaau

SEQ ID NO: 239660 - RNA, 32 nt, Homo Sapiens
agaugugcauuauuaugagaaaacaguucuau

SEQ ID NO: 239661 - RNA, 32 nt, Homo Sapiens
cgacucucugcuccuuucccgccccagaaguu

SEQ ID NO: 239662 - RNA, 32 nt, Homo Sapiens
cagugauaugguucaacaacaugaugaaccua

SEQ ID NO: 239663 - RNA, 32 nt, Homo Sapiens
cagcagcagcagcagcagcagcaagaguaacu

SEQ ID NO: 239664 - RNA, 32 nt, Homo Sapiens
cuugcacgccagggcacagcgaggaugggagg

SEQ ID NO: 239665 - RNA, 29 nt, Homo Sapiens
auguaugugacuucccucccccugccaga

SEQ ID NO: 239666 - RNA, 32 nt, Homo Sapiens
guugaugcaccuguagccuugccucgcgaggc

SEQ ID NO: 239667 - RNA, 32 nt, Homo Sapiens
acugggaaggaucuguggugcuauagaaguau

SEQ ID NO: 239668 - RNA, 30 nt, Homo Sapiens
ugggcaccacuugacuauccaaccugacca

SEQ ID NO: 239669 - RNA, 32 nt, Homo Sapiens
cgccugcgccgcgcgggauucgcgguccgagc

SEQ ID NO: 239670 - RNA, 32 nt, Homo Sapiens
ugggaaguugugacguugcagcuccaaccgac

SEQ ID NO: 239671 - RNA, 32 nt, Homo Sapiens
uguagagauagagcuagcuggugugguugcag

SEQ ID NO: 239672 - RNA, 32 nt, Homo Sapiens
ccucauguuacuuuacuauguuuggaucucua

SEQ ID NO: 239673 - RNA, 32 nt, Homo Sapiens
cgauguaauuuaaugcuaaagaguacuuacag

SEQ ID NO: 239674 - RNA, 32 nt, Homo Sapiens
gucccaugacaccgcuucuccucacaccccag

SEQ ID NO: 239675 - RNA, 32 nt, Homo Sapiens
uuuaacuggugccuucccuguacccgcagcag

SEQ ID NO: 239676 - RNA, 32 nt, Homo Sapiens
auagugcgccuguuacuaauggaauuuacuua

SEQ ID NO: 239677 - RNA, 32 nt, Homo Sapiens
gaccuggcaaauaagaucuugaauaggccaaa

SEQ ID NO: 239678 - RNA, 32 nt, Homo Sapiens
ucuccccugggaggccuauaccacugaauuaa

SEQ ID NO: 239679 - RNA, 32 nt, Homo Sapiens
ucuuuuugacaauuugucaagauuuagggaca

SEQ ID NO: 239680 - RNA, 32 nt, Homo Sapiens
cgagccgucucccagccucagacggcucugcg

SEQ ID NO: 239681 - RNA, 32 nt, Homo Sapiens
aagcagaggaugguggauggcagaacaaggac

SEQ ID NO: 239682 - RNA, 32 nt, Homo Sapiens
aagcggccugcguucccggcgucugcgugggg

SEQ ID NO: 239683 - RNA, 32 nt, Homo Sapiens
cuccacuuuugagcuuacuccuccuuugcccg

SEQ ID NO: 239684 - RNA, 32 nt, Homo Sapiens
cuuagcuucugccuauaggaacauaaguaaug

SEQ ID NO: 239685 - RNA, 32 nt, Homo Sapiens
uaauggagcaugcgagggucuuucucacagcc

SEQ ID NO: 239686 - RNA, 32 nt, Homo Sapiens
cuguggccggcggcagcuggugcggggggcag

SEQ ID NO: 239687 - RNA, 32 nt, Homo Sapiens
gcggaccgcccggcguccggccggacugagag

SEQ ID NO: 239688 - RNA, 32 nt, Homo Sapiens
ucgccccccuccccuuuagcucugugaugccu

SEQ ID NO: 239689 - RNA, 32 nt, Homo Sapiens
uaaauguccucaggucuuuguaauuuauauua

SEQ ID NO: 239690 - RNA, 32 nt, Homo Sapiens
ccugagcagacaccucacaucccgagccgcug

SEQ ID NO: 239691 - RNA, 32 nt, Homo Sapiens
ccgccagcccgcccgccugcccgccccccacg

SEQ ID NO: 239692 - RNA, 32 nt, Homo Sapiens
gggugauggccagggucugcugauugaugaau

SEQ ID NO: 239693 - RNA, 32 nt, Homo Sapiens
acagauugagccgaguugucgccccgcuggga

SEQ ID NO: 239694 - RNA, 32 nt, Homo Sapiens
caggugugaaaacaagugucaaaauuccucau

SEQ ID NO: 239695 - RNA, 32 nt, Homo Sapiens
ugcuagguagaugccugugacuuuuuaacuug

SEQ ID NO: 239696 - RNA, 32 nt, Homo Sapiens
aaaaaaauuugagcuuuaauucuuuaauuuua

SEQ ID NO: 239697 - RNA, 32 nt, Homo Sapiens
uaacacuuauuaugaaacaaaucuugaaauuu

SEQ ID NO: 239698 - RNA, 32 nt, Homo Sapiens
ugccuguuucuaaucgauacaaaguuaagcau

SEQ ID NO: 239699 - RNA, 32 nt, Homo Sapiens
caguacacaaucauuuaauauuucccugucuu

SEQ ID NO: 239700 - RNA, 32 nt, Homo Sapiens
ugauuuugaacacaacauacacugucaaacuu

SEQ ID NO: 239701 - RNA, 32 nt, Homo Sapiens
aacaaaaguauuuaguuaucuuuucaaaguaa

SEQ ID NO: 239702 - RNA, 32 nt, Homo Sapiens
aguauucccuguauuuccauuauucuuuaugg

SEQ ID NO: 239703 - RNA, 32 nt, Homo Sapiens
uuuuuaaauaauuuauaccaagagaguauaau

SEQ ID NO: 239704 - RNA, 32 nt, Homo Sapiens
augcagacacgaaaugagcaugugcuguugga

SEQ ID NO: 239705 - RNA, 32 nt, Homo Sapiens
gcagcuccucccugugcccccagccucagccc

SEQ ID NO: 239706 - RNA, 32 nt, Homo Sapiens
uauaccucauuuccuccaugauaaaaggaucc

SEQ ID NO: 239707 - RNA, 32 nt, Homo Sapiens
ggaggggugucuuuuugcuuuuggugaacuuu

SEQ ID NO: 239708 - RNA, 32 nt, Homo Sapiens
gccuugugucccucgggcaugacaggcagaaa

SEQ ID NO: 239709 - RNA, 32 nt, Homo Sapiens
aucacacacaggaagaguguguagaaguggaa

SEQ ID NO: 239710 - RNA, 32 nt, Homo Sapiens
uccucugucacaccccauucuugccccucacu

SEQ ID NO: 239711 - RNA, 32 nt, Homo Sapiens
uacagaauggaccccagagagcuccucacccu

SEQ ID NO: 239712 - RNA, 32 nt, Homo Sapiens
uuuuaggcuuuuagcagccugaagccaugguu

SEQ ID NO: 239713 - RNA, 32 nt, Homo Sapiens
agaagacuuaggauaccucucucacuuucugu

SEQ ID NO: 239714 - RNA, 32 nt, Homo Sapiens
agcuggaggaggagaaguaagcgguggggggu

SEQ ID NO: 239715 - RNA, 32 nt, Homo Sapiens
acucagagggagaggaaagggcuagagacacg

SEQ ID NO: 239716 - RNA, 32 nt, Homo Sapiens
uuugccuucuaaagucugcaacuucaagaaaa

SEQ ID NO: 239717 - RNA, 32 nt, Homo Sapiens
aaaagcucauaaaaguaauguacaauaauuug

SEQ ID NO: 239718 - RNA, 32 nt, Homo Sapiens
ggcaggggacauaauccauacuggccucuuuc

SEQ ID NO: 239719 - RNA, 32 nt, Homo Sapiens
aaguuuuuucuuuuauaucauccagaaauaaa

SEQ ID NO: 239720 - RNA, 32 nt, Homo Sapiens
agaccaaaaacacaaacaggauaaaaagcaaa

SEQ ID NO: 239721 - RNA, 32 nt, Homo Sapiens
uggguaagauuggccagagguaggaauguggg

SEQ ID NO: 239722 - RNA, 30 nt, Homo Sapiens
cgcucaauaaacuccggacugaagaugcac

SEQ ID NO: 239723 - RNA, 32 nt, Homo Sapiens
uaagagacaaaacaggcaaugcaguaucagug

SEQ ID NO: 239724 - RNA, 32 nt, Homo Sapiens
acaccacacacaccccacuggcagcuuugugg

SEQ ID NO: 239725 - RNA, 32 nt, Homo Sapiens
ugccuguuuguuuuuucagauuauagcaaaca

SEQ ID NO: 239726 - RNA, 32 nt, Homo Sapiens
gccauuugaggggagagggaacggaaauaaag

SEQ ID NO: 239727 - RNA, 32 nt, Homo Sapiens
ugcccggugcugucugccuaugcgcgucgcug

SEQ ID NO: 239728 - RNA, 32 nt, Homo Sapiens
aguuuggcuccacuauugaaaaagggaugcuu

SEQ ID NO: 239729 - RNA, 32 nt, Homo Sapiens
gguaaaggcccccaaagucuucaccaucgucc

SEQ ID NO: 239730 - RNA, 32 nt, Homo Sapiens
gaaagaggcgggggcgggugaggagacuggcc

SEQ ID NO: 239731 - RNA, 32 nt, Homo Sapiens
accuauggccccaggccuuugcgaucuugcuu

SEQ ID NO: 239732 - RNA, 32 nt, Homo Sapiens
agaggguucaauuaugagacaccuaguacagg

SEQ ID NO: 239733 - RNA, 31 nt, Homo Sapiens
ccagccccacccucagccagagccaggcccc

SEQ ID NO: 239734 - RNA, 31 nt, Homo Sapiens
cuccuaggaccucgcagccaggcaaggcugu

SEQ ID NO: 239735 - RNA, 32 nt, Homo Sapiens
ugaggcuucuaaaauuuucacauaacugccaa

SEQ ID NO: 239736 - RNA, 32 nt, Homo Sapiens
ccggggcggaccgcggaacccgaggccauguc

SEQ ID NO: 239737 - RNA, 32 nt, Homo Sapiens
acacccccaagccacagggaagcauguacugu

SEQ ID NO: 239738 - RNA, 32 nt, Homo Sapiens
aauccauggaaaucguuaauaucauugauauu

SEQ ID NO: 239739 - RNA, 32 nt, Homo Sapiens
caacugacuugccugccucugcuugcugcugu

SEQ ID NO: 239740 - RNA, 32 nt, Homo Sapiens
cggggcggcuggccaggcagggggcugauccc

SEQ ID NO: 239741 - RNA, 32 nt, Homo Sapiens
ccgcugagccugagcccgacccggggcgccuc

SEQ ID NO: 239742 - RNA, 32 nt, Homo Sapiens
acucaagcugcaguauacagcgggaaaaacug

SEQ ID NO: 239743 - RNA, 32 nt, Homo Sapiens
agccaagcaugguggcagacaccuguaguccc

SEQ ID NO: 239744 - RNA, 32 nt, Homo Sapiens
uaagcuuuguaauucagaaauccuuguauuua

SEQ ID NO: 239745 - RNA, 32 nt, Homo Sapiens
cccggcagcuggagaugaucgucuggcccccc

SEQ ID NO: 239746 - RNA, 32 nt, Homo Sapiens
gucacuauauaaaaccaauuauguuauguuau

SEQ ID NO: 239747 - RNA, 32 nt, Homo Sapiens
acaagagaccucuugauacaaacaauagaaaa

SEQ ID NO: 239748 - RNA, 32 nt, Homo Sapiens
acuugcaucucuaauagagauuaaaaacaaca

SEQ ID NO: 239749 - RNA, 32 nt, Homo Sapiens
ccuggcccuaccacauucuggugcuguccuca

SEQ ID NO: 239750 - RNA, 32 nt, Homo Sapiens
gggagaggccgcggccccuucccguugccugc

SEQ ID NO: 239751 - RNA, 32 nt, Homo Sapiens
gacagcaaauacuuccguaaaacagaccauca

SEQ ID NO: 239752 - RNA, 32 nt, Homo Sapiens
cucaucucugggucccuggaggcccugaugga

SEQ ID NO: 239753 - RNA, 32 nt, Homo Sapiens
auguauauauacacauaaaggcauauagcuau

SEQ ID NO: 239754 - RNA, 32 nt, Homo Sapiens
cuggcugggugucaaggagcaggcuccaggcc

SEQ ID NO: 239755 - RNA, 32 nt, Homo Sapiens
uaaauuaauaucuauuuauacuuuucucuuga

SEQ ID NO: 239756 - RNA, 32 nt, Homo Sapiens
uauaauaaugaggaagaaaugguaagacguaa

SEQ ID NO: 239757 - RNA, 32 nt, Homo Sapiens
cagcccacaucccacccccucguccaauccca

SEQ ID NO: 239758 - RNA, 32 nt, Homo Sapiens
cucaggaugucacggagaaucuaucuaauccc

SEQ ID NO: 239759 - RNA, 32 nt, Homo Sapiens
uuacagcuuagacacaucaaggauugucuggg

SEQ ID NO: 239760 - RNA, 32 nt, Homo Sapiens
gaagguuucugaaaauuaacacugcuuguguu

SEQ ID NO: 239761 - RNA, 32 nt, Homo Sapiens
aggggcgcgggcgaggcggcgcagccaucccc

SEQ ID NO: 239762 - RNA, 32 nt, Homo Sapiens
agauggccccgggaaccccagccugccacgcu

SEQ ID NO: 239763 - RNA, 32 nt, Homo Sapiens
cuuuuguuuagggaucuuucugauggucuuuu

SEQ ID NO: 239764 - RNA, 32 nt, Homo Sapiens
aaugaaaacacuuuaaaacagauugggaaaac

SEQ ID NO: 239765 - RNA, 32 nt, Homo Sapiens
ccccagcuuugaggaaaaugggcuuuggauga

SEQ ID NO: 239766 - RNA, 32 nt, Homo Sapiens
cugcaagaacuauggaauaaaacuacugaugc

SEQ ID NO: 239767 - RNA, 32 nt, Homo Sapiens
cuuccuaguucaucccuucucuuccaggcagc

SEQ ID NO: 239768 - RNA, 32 nt, Homo Sapiens
gcuucagaagcucgcuggccugggcccaccag

SEQ ID NO: 239769 - RNA, 32 nt, Homo Sapiens
gcuccgagaugaugaacuccggggucugagag

SEQ ID NO: 239770 - RNA, 32 nt, Homo Sapiens
acucauuguaaguugccacugccaacaugaga

SEQ ID NO: 239771 - RNA, 32 nt, Homo Sapiens
uguucugaggggcuuuggcauuugcuggaagc

SEQ ID NO: 239772 - RNA, 32 nt, Homo Sapiens
caagcaggaagagggacaggcaugcggggcgu

SEQ ID NO: 239773 - RNA, 32 nt, Homo Sapiens
acaauguauguacaauacaauguacaauuaug

SEQ ID NO: 239774 - RNA, 32 nt, Homo Sapiens
acgaggucaggaguuugagaccagccugacca

SEQ ID NO: 239775 - RNA, 32 nt, Homo Sapiens
acaugaucucguucuuuuuuauggcaguguag

SEQ ID NO: 239776 - RNA, 32 nt, Homo Sapiens
aagguuccgcgccgggcguggacggugugggg

SEQ ID NO: 239777 - RNA, 32 nt, Homo Sapiens
uaguucaaaaggaaaagaguaugcccaauucu

SEQ ID NO: 239778 - RNA, 32 nt, Homo Sapiens
gcuaccguuuuacaauaaaauuuugcaugugc

SEQ ID NO: 239779 - RNA, 32 nt, Homo Sapiens
ccggcgguucuacuacgucacuaccuggaagc

SEQ ID NO: 239780 - RNA, 32 nt, Homo Sapiens
aggaggaggaggaggaggacgcgggccuggug

SEQ ID NO: 239781 - RNA, 32 nt, Homo Sapiens
guugaaacccugcacauccucccagggccagc

SEQ ID NO: 239782 - RNA, 32 nt, Homo Sapiens
ggagguugaggcacaaggagugaggcaggagc

SEQ ID NO: 239783 - RNA, 32 nt, Homo Sapiens
uauugacucugguaaacuuauuuuauugaugu

SEQ ID NO: 239784 - RNA, 32 nt, Homo Sapiens
accgcccuggcuaacauggugaaacaugguga

SEQ ID NO: 239785 - RNA, 32 nt, Homo Sapiens
gugcagggccccggcgugucgugggugcaccc

SEQ ID NO: 239786 - RNA, 32 nt, Homo Sapiens
acaaggaucauacaggacuuugaaagugacac

SEQ ID NO: 239787 - RNA, 32 nt, Homo Sapiens
ucaaaacguaguugauaaaucuauucaaauuu

SEQ ID NO: 239788 - RNA, 32 nt, Homo Sapiens
cuugaaccaaaauaagacuuacuaaaggaaga

SEQ ID NO: 239789 - RNA, 32 nt, Homo Sapiens
uucauugcaccuaucucccccaucucauugcc

SEQ ID NO: 239790 - RNA, 32 nt, Homo Sapiens
gcugugacacggugccuuccccggcgggggac

SEQ ID NO: 239791 - RNA, 32 nt, Homo Sapiens
gagauagacaauggggaugaguugacugcaga

SEQ ID NO: 239792 - RNA, 32 nt, Homo Sapiens
cugggggcgcagggcugcgcaggacccuugga

SEQ ID NO: 239793 - RNA, 28 nt, Homo Sapiens
gcagguggggccgccgcggaacuccagg

SEQ ID NO: 239794 - RNA, 32 nt, Homo Sapiens
acacuuuucccuuccuggcccaagagagcauc

SEQ ID NO: 239795 - RNA, 32 nt, Homo Sapiens
cgggcggagagcgggggccgcacuggggagug

SEQ ID NO: 239796 - RNA, 32 nt, Homo Sapiens
gcugaggacaccugggcugcggugcuucuacu

SEQ ID NO: 239797 - RNA, 32 nt, Homo Sapiens
uggaauggaaccuucuuaggccuccuggugca

SEQ ID NO: 239798 - RNA, 30 nt, Homo Sapiens
agggggcggguccgcgcgggcuucggagga

SEQ ID NO: 239799 - RNA, 32 nt, Homo Sapiens
caaagugcuugaucucuucauauuucacacgc

SEQ ID NO: 239800 - RNA, 32 nt, Homo Sapiens
uauaucuguauauaaagguuucuguauauugu

SEQ ID NO: 239801 - RNA, 32 nt, Homo Sapiens
uuccaaaaacaucugccccgaugcucuagugu

SEQ ID NO: 239802 - RNA, 32 nt, Homo Sapiens
uauauaaauugguucuuguucuucuuaaaugu

SEQ ID NO: 239803 - RNA, 32 nt, Homo Sapiens
caaccuccacuacucgacaccccugccagccu

SEQ ID NO: 239804 - RNA, 32 nt, Homo Sapiens
ccugaccugggugugccucgcugcuggggcuc

SEQ ID NO: 239805 - RNA, 32 nt, Homo Sapiens
ucgaaggagcagccagccaucuccaacagcag

SEQ ID NO: 239806 - RNA, 32 nt, Homo Sapiens
ccccaagggccugccagggacccggcgcgucc

SEQ ID NO: 239807 - RNA, 32 nt, Homo Sapiens
agacuggcaugggaaacauggcaaaaccccau

SEQ ID NO: 239808 - RNA, 32 nt, Homo Sapiens
uuaaaugccagaaauggucaagcaauuauaca

SEQ ID NO: 239809 - RNA, 32 nt, Homo Sapiens
ccacgcccugucauuaggcugcauuuacucuu

SEQ ID NO: 239810 - RNA, 32 nt, Homo Sapiens
ugugugugguacuucauguuuucuugccaaga

SEQ ID NO: 239811 - RNA, 32 nt, Homo Sapiens
cuccgcgggaugcaccgugguagccgagggcg

SEQ ID NO: 239812 - RNA, 32 nt, Homo Sapiens
aacacuuuuuaaaaaauuguuugcuugaaaau

SEQ ID NO: 239813 - RNA, 32 nt, Homo Sapiens
gagugccccccuccuccacgaugggauuuuuc

SEQ ID NO: 239814 - RNA, 32 nt, Homo Sapiens
aauuauacuuuuuagugauuuacauguacauu

SEQ ID NO: 239815 - RNA, 32 nt, Homo Sapiens
accaucccacugauaucacgggcccgcucaac

SEQ ID NO: 239816 - RNA, 32 nt, Homo Sapiens
augggguggggggacaggagggggcccugggg

SEQ ID NO: 239817 - RNA, 32 nt, Homo Sapiens
acacuguuucugagagcagcuuuuguggcauc

SEQ ID NO: 239818 - RNA, 32 nt, Homo Sapiens
cguuccaaugagaggccuauggcugcucucca

SEQ ID NO: 239819 - RNA, 32 nt, Homo Sapiens
cccauaaggcacacucucuaaggccuuuuaag

SEQ ID NO: 239820 - RNA, 32 nt, Homo Sapiens
ggugggagggucaugacgcagcgaguuucagu

SEQ ID NO: 239821 - RNA, 32 nt, Homo Sapiens
ugaaaguaauuucaagaauguuucaguuauag

SEQ ID NO: 239822 - RNA, 32 nt, Homo Sapiens
gagccgcgcgcccccgugcccgcgucuguccg

SEQ ID NO: 239823 - RNA, 32 nt, Homo Sapiens
uuuguuuuuauuuuuuuuuuuauuuagaugac

SEQ ID NO: 239824 - RNA, 32 nt, Homo Sapiens
auuuagaauuuuacugcagcuuugaugugcau

SEQ ID NO: 239825 - RNA, 32 nt, Homo Sapiens
gccauuaacaaaucguccuuguccugaggggc

SEQ ID NO: 239826 - RNA, 32 nt, Homo Sapiens
uggguuccccuggccucgggcucggcgcaggg

SEQ ID NO: 239827 - RNA, 32 nt, Homo Sapiens
uugaggucaggaguucgagaccagccugacca

SEQ ID NO: 239828 - RNA, 32 nt, Homo Sapiens
guuacuuaauaaggcuaggcuggccaucaguu

SEQ ID NO: 239829 - RNA, 32 nt, Homo Sapiens
ggcauagaaggagaagacaaagugucacgcag

SEQ ID NO: 239830 - RNA, 32 nt, Homo Sapiens
aaagccaagagacugcuuuugagugcauuuau

SEQ ID NO: 239831 - RNA, 32 nt, Homo Sapiens
uggaacugaauucuuaaacauaaaacagauaa

SEQ ID NO: 239832 - RNA, 32 nt, Homo Sapiens
aaauaguguuugucaucagguugguacuaaac

SEQ ID NO: 239833 - RNA, 32 nt, Homo Sapiens
gggaggggccuggccuggguggggcagggccu

SEQ ID NO: 239834 - RNA, 32 nt, Homo Sapiens
ugugauuuuguuguuguuguuguuuugagaca

SEQ ID NO: 239835 - RNA, 32 nt, Homo Sapiens
aguucaagcacacaccaacuagcuguccagga

SEQ ID NO: 239836 - RNA, 32 nt, Homo Sapiens
cuuuugaccaccuugggcuggcacucuuagca

SEQ ID NO: 239837 - RNA, 32 nt, Homo Sapiens
uaguguugguaguuuuggcagcagcugccgag

SEQ ID NO: 239838 - RNA, 32 nt, Homo Sapiens
ccaagcacuauaaggguuuagcuguggcgcag

SEQ ID NO: 239839 - RNA, 32 nt, Homo Sapiens
cccgcagaauaaaaccgaucgcgcccccuccg

SEQ ID NO: 239840 - RNA, 32 nt, Homo Sapiens
ugauccccucucuuccuccccacccugaaaaa

SEQ ID NO: 239841 - RNA, 32 nt, Homo Sapiens
ccgcugccaaacccgcccggggcuggcgcacg

SEQ ID NO: 239842 - RNA, 32 nt, Homo Sapiens
cacuccucaaaaacgacauacccaggcaggag

SEQ ID NO: 239843 - RNA, 32 nt, Homo Sapiens
gcaagggcucugcuuccuggaucuccgugucc

SEQ ID NO: 239844 - RNA, 32 nt, Homo Sapiens
guguacauuaucuauuagaaaaugaaguaccu

SEQ ID NO: 239845 - RNA, 32 nt, Homo Sapiens
uugacugcaugaaugcgugugcgugcaagcau

SEQ ID NO: 239846 - RNA, 32 nt, Homo Sapiens
uaaaugacaaaauuauuuuauaaaauguuuau

SEQ ID NO: 239847 - RNA, 32 nt, Homo Sapiens
caaugcccagcauggcagaaccugcagcccuu

SEQ ID NO: 239848 - RNA, 32 nt, Homo Sapiens
uucuuacacauaauuucuuaauuuucaccgag

SEQ ID NO: 239849 - RNA, 32 nt, Homo Sapiens
gggacagggguugggaugggggugugggcagg

SEQ ID NO: 239850 - RNA, 32 nt, Homo Sapiens
gccggagcgcggcgccacugcgccugcgccac

SEQ ID NO: 239851 - RNA, 32 nt, Homo Sapiens
cagcagugagccuggggaaaucugcgucacau

SEQ ID NO: 239852 - RNA, 32 nt, Homo Sapiens
uauuauugggggugggggcagggaauuaaguu

SEQ ID NO: 239853 - RNA, 32 nt, Homo Sapiens
uacacacugcagcagagcuuguagcuggacag

SEQ ID NO: 239854 - RNA, 32 nt, Homo Sapiens
caacacaaagcccagucuuacuauuuauaugu

SEQ ID NO: 239855 - RNA, 32 nt, Homo Sapiens
cuuccccagguggccuggaggugggcaaaggg

SEQ ID NO: 239856 - RNA, 32 nt, Homo Sapiens
gggucggccgcuuucccucuggaccaccuccc

SEQ ID NO: 239857 - RNA, 32 nt, Homo Sapiens
cagcacuacgagccgcgccgccgagccggcuc

SEQ ID NO: 239858 - RNA, 32 nt, Homo Sapiens
ugucuguacuuagagcuaauucgcauauauac

SEQ ID NO: 239859 - RNA, 30 nt, Homo Sapiens
ucgagguggggcucggcggguccgaaggaa

SEQ ID NO: 239860 - RNA, 31 nt, Homo Sapiens
ugcaggccgcacugccaacugcugcauuugu

SEQ ID NO: 239861 - RNA, 32 nt, Homo Sapiens
ccuauaaagccuccugggguccccaggcaccc

SEQ ID NO: 239862 - RNA, 32 nt, Homo Sapiens
uauuguugauaaauuguaucauauuuaaguuc

SEQ ID NO: 239863 - RNA, 32 nt, Homo Sapiens
aguucacucaucucugggucccggugacccca

SEQ ID NO: 239864 - RNA, 32 nt, Homo Sapiens
gccauuccaagcccuuccgggcuggaacuggu

SEQ ID NO: 239865 - RNA, 32 nt, Homo Sapiens
ccuucugugcuaagguaagguauccacccucg

SEQ ID NO: 239866 - RNA, 32 nt, Homo Sapiens
ucguacgggaggagggggaggcgcccacgcau

SEQ ID NO: 239867 - RNA, 32 nt, Homo Sapiens
accgaugugaauggcaggcagauaacaugcac

SEQ ID NO: 239868 - RNA, 32 nt, Homo Sapiens
cacagccccagccccagcuccuagagccaggc

SEQ ID NO: 239869 - RNA, 32 nt, Homo Sapiens
aaagaggccagggcgggcggagggaggcugug

SEQ ID NO: 239870 - RNA, 32 nt, Homo Sapiens
gucuggagggugggcaaggcugggagggauau

SEQ ID NO: 239871 - RNA, 32 nt, Homo Sapiens
uguuacugauguucaauaaaagaauaguugcc

SEQ ID NO: 239872 - RNA, 32 nt, Homo Sapiens
aguggaacuguggaacaagugauguggaauua

SEQ ID NO: 239873 - RNA, 32 nt, Homo Sapiens
uacuccuuguauugaugcuacucuucucuaca

SEQ ID NO: 239874 - RNA, 32 nt, Homo Sapiens
aucaagcacaucacuguccuucugccauggcc

SEQ ID NO: 239875 - RNA, 32 nt, Homo Sapiens
ucgcuggacagcucuuuuuuugauuggcucaa

SEQ ID NO: 239876 - RNA, 32 nt, Homo Sapiens
gagauggacaaugaaauaucaguugguggaua

SEQ ID NO: 239877 - RNA, 32 nt, Homo Sapiens
aguccugccccgacccaccccaucccuuuucu

SEQ ID NO: 239878 - RNA, 32 nt, Homo Sapiens
aggcccggcucuugcugacagaauagguuccg

SEQ ID NO: 239879 - RNA, 32 nt, Homo Sapiens
uguacauagaauucagaacugaagauauuuau

SEQ ID NO: 239880 - RNA, 32 nt, Homo Sapiens
ucaucuacuuguauugugaaaaaccagaaauu

SEQ ID NO: 239881 - RNA, 32 nt, Homo Sapiens
cuaaagcacacacagccagggauccccggcag

SEQ ID NO: 239882 - RNA, 32 nt, Homo Sapiens
ugggugccaauggugcccagcccuggggcagg

SEQ ID NO: 239883 - RNA, 32 nt, Homo Sapiens
ggcgcccgagaccggcagcugcguggggcggg

SEQ ID NO: 239884 - RNA, 32 nt, Homo Sapiens
guaugugucugugugucugcguccgugucugu

SEQ ID NO: 239885 - RNA, 31 nt, Homo Sapiens
uccuggacaaauuguagcggcccuuccugca

SEQ ID NO: 239886 - RNA, 32 nt, Homo Sapiens
acuucgggaagccaagggccuccucccaagga

SEQ ID NO: 239887 - RNA, 32 nt, Homo Sapiens
caggaagcuucuguguaagcugcgaggauggc

SEQ ID NO: 239888 - RNA, 32 nt, Homo Sapiens
agcauggacugugccacacacccagugaucca

SEQ ID NO: 239889 - RNA, 32 nt, Homo Sapiens
uuauacaaggacuuaaauauauaaacaauaau

SEQ ID NO: 239890 - RNA, 32 nt, Homo Sapiens
agcagagaugaccagaaagcacaggggcaggg

SEQ ID NO: 239891 - RNA, 32 nt, Homo Sapiens
guuucuacuuuuuuuuuuuuuaacuauugcuu

SEQ ID NO: 239892 - RNA, 32 nt, Homo Sapiens
guuuccugauaacaagcaaggauaucagagcu

SEQ ID NO: 239893 - RNA, 32 nt, Homo Sapiens
uugugaggauaauaaauggaaugccauuagug

SEQ ID NO: 239894 - RNA, 32 nt, Homo Sapiens
gcaaggcugaacugcuggcuuuauuggguggg

SEQ ID NO: 239895 - RNA, 32 nt, Homo Sapiens
uguguuuuugcacugucuguaccuaaagcaau

SEQ ID NO: 239896 - RNA, 32 nt, Homo Sapiens
uuugcuuuguuuucuuuuuagauuuuguacau

SEQ ID NO: 239897 - RNA, 32 nt, Homo Sapiens
auuguccucggcuccccuccccggcacugcgc

SEQ ID NO: 239898 - RNA, 32 nt, Homo Sapiens
acagaauuucacucuucucacccaggcuggaa

SEQ ID NO: 239899 - RNA, 32 nt, Homo Sapiens
cacacuuucaaauauaguguccuucuacaggu

SEQ ID NO: 239900 - RNA, 32 nt, Homo Sapiens
ccccggccagccagcccucucacccgaggauc

SEQ ID NO: 239901 - RNA, 32 nt, Homo Sapiens
ccccucccagcacccccagccauccccccugu

SEQ ID NO: 239902 - RNA, 30 nt, Homo Sapiens
aggcaucuggacucuguaauguccuucccc

SEQ ID NO: 239903 - RNA, 32 nt, Homo Sapiens
aaggcucaggccuguaggcauucuccccucug

SEQ ID NO: 239904 - RNA, 32 nt, Homo Sapiens
ccuuggugcccuccuuuuuuuuuuauccuagu

SEQ ID NO: 239905 - RNA, 32 nt, Homo Sapiens
cacaauccccccaccccccaaacguccuggac

SEQ ID NO: 239906 - RNA, 32 nt, Homo Sapiens
cggcggcggcagcggcagcggagccgcuaguc

SEQ ID NO: 239907 - RNA, 32 nt, Homo Sapiens
uugcugugaugaugaucacuuuuaggcagaag

SEQ ID NO: 239908 - RNA, 32 nt, Homo Sapiens
acagcccagggccaugcuccuguucucagugu

SEQ ID NO: 239909 - RNA, 32 nt, Homo Sapiens
aguuuuucccaccccagugcuaacucuagaga

SEQ ID NO: 239910 - RNA, 32 nt, Homo Sapiens
augagugacaccugagauuagaggcuggggcu

SEQ ID NO: 239911 - RNA, 32 nt, Homo Sapiens
ggcuugggagaggggagagauguauggggauc

SEQ ID NO: 239912 - RNA, 32 nt, Homo Sapiens
uccauuauuucucuacuuuuccuuccagcaaa

SEQ ID NO: 239913 - RNA, 32 nt, Homo Sapiens
ccucacuggggacagggccaguguuggagaau

SEQ ID NO: 239914 - RNA, 32 nt, Homo Sapiens
uaaggccuuggugcccugaaccucugaugccu

SEQ ID NO: 239915 - RNA, 32 nt, Homo Sapiens
ucuucaggagaugauucuguuuuuucuccaga

SEQ ID NO: 239916 - RNA, 32 nt, Homo Sapiens
uggaccugcagaaugagcugcccaccucuuuu

SEQ ID NO: 239917 - RNA, 32 nt, Homo Sapiens
gcgcgcuccuaggcgcagcgggacgcggggcu

SEQ ID NO: 239918 - RNA, 32 nt, Homo Sapiens
agcaguaagcccuggaguggccccacacccua

SEQ ID NO: 239919 - RNA, 32 nt, Homo Sapiens
gaaugccccccgccuuccacaaauccuuuugc

SEQ ID NO: 239920 - RNA, 32 nt, Homo Sapiens
agagguguuugcugggauggaagaacuaccug

SEQ ID NO: 239921 - RNA, 32 nt, Homo Sapiens
aauacacuggcaaaggcaacacuuugcuugga

SEQ ID NO: 239922 - RNA, 32 nt, Homo Sapiens
cuuccaucuauuucugaaagguucuuugugga

SEQ ID NO: 239923 - RNA, 32 nt, Homo Sapiens
gugcggaaaaggaauaaaaguuggaaaggcug

SEQ ID NO: 239924 - RNA, 32 nt, Homo Sapiens
gucugaggaagacauaaccuugugccugccug

SEQ ID NO: 239925 - RNA, 32 nt, Homo Sapiens
ucccaggccgugugcuggcccugccccagccu

SEQ ID NO: 239926 - RNA, 32 nt, Homo Sapiens
ugguggauacuguagaagaagcccauaucaca

SEQ ID NO: 239927 - RNA, 32 nt, Homo Sapiens
ugaaugaacaccuuuucauccagccuuaauuu

SEQ ID NO: 239928 - RNA, 32 nt, Homo Sapiens
acaaaauuaaacaaacaaaaaaacucauggag

SEQ ID NO: 239929 - RNA, 32 nt, Homo Sapiens
guaagguaauauucagaaaacaucagauaaua

SEQ ID NO: 239930 - RNA, 32 nt, Homo Sapiens
gccccggagaccuggaggacagcagugcuggc

SEQ ID NO: 239931 - RNA, 32 nt, Homo Sapiens
aauguuucuccucuccuucccauggccccugu

SEQ ID NO: 239932 - RNA, 32 nt, Homo Sapiens
agacugaaggcacaaacuguuucaguauaaua

SEQ ID NO: 239933 - RNA, 32 nt, Homo Sapiens
uuagugguccuaggagacuugguuuugacuua

SEQ ID NO: 239934 - RNA, 31 nt, Homo Sapiens
cagaacuguuacuaauaaaaauuaaaaaugc

SEQ ID NO: 239935 - RNA, 32 nt, Homo Sapiens
ccuuuuucuucucauuuuuucuucuuugugca

SEQ ID NO: 239936 - RNA, 32 nt, Homo Sapiens
uauucuaaauuaaugcagaaccauauggaaaa

SEQ ID NO: 239937 - RNA, 32 nt, Homo Sapiens
uuuucccaguguucugauaugugacuuugagg

SEQ ID NO: 239938 - RNA, 32 nt, Homo Sapiens
uuauccagguucuuuuaaauuaucucaguaca

SEQ ID NO: 239939 - RNA, 32 nt, Homo Sapiens
gagugaaauaauauccuuuggauuaauguuua

SEQ ID NO: 239940 - RNA, 32 nt, Homo Sapiens
uuguuccccucuauguauccauauguuuucau

SEQ ID NO: 239941 - RNA, 32 nt, Homo Sapiens
acacugagauaaaauagucuuuguuauuuuca

SEQ ID NO: 239942 - RNA, 32 nt, Homo Sapiens
cauucaaaccgucugccagcccggggcagaca

SEQ ID NO: 239943 - RNA, 32 nt, Homo Sapiens
cuguaugugcauuuuuaaauguucacgaauga

SEQ ID NO: 239944 - RNA, 32 nt, Homo Sapiens
uucuuuaaaagcaaacagaaaaagauauauau

SEQ ID NO: 239945 - RNA, 32 nt, Homo Sapiens
cggcccugcuaagggagaagggaagccguuuc

SEQ ID NO: 239946 - RNA, 32 nt, Homo Sapiens
aagagaguccagcucaaaaacaacaacaagaa

SEQ ID NO: 239947 - RNA, 32 nt, Homo Sapiens
augugaggauaguuaugaaaauacugagcaga

SEQ ID NO: 239948 - RNA, 32 nt, Homo Sapiens
cuguaggauuugggugagacacuuuuccuugc

SEQ ID NO: 239949 - RNA, 32 nt, Homo Sapiens
gcgaguaaaggccacccccgccgugccccgcg

SEQ ID NO: 239950 - RNA, 32 nt, Homo Sapiens
ccagcuuaguuauaacuuuugguaauaauuaa

SEQ ID NO: 239951 - RNA, 32 nt, Homo Sapiens
cucagcccaugccauuaccuccugcuuccuua

SEQ ID NO: 239952 - RNA, 32 nt, Homo Sapiens
aucagacauuucggggacuacuggacacuggc

SEQ ID NO: 239953 - RNA, 32 nt, Homo Sapiens
cagagaacuaaagaaaaauaauguguaaagaa

SEQ ID NO: 239954 - RNA, 32 nt, Homo Sapiens
gggcccauccuuugugcccacccguucuggcc

SEQ ID NO: 239955 - RNA, 32 nt, Homo Sapiens
cuaaggugucagcagagcuguguucucucgga

SEQ ID NO: 239956 - RNA, 30 nt, Homo Sapiens
ggccgagggcccgugcgccagcugcucguc

SEQ ID NO: 239957 - RNA, 32 nt, Homo Sapiens
uuuagaauggacagcccuccccucaccacucc

SEQ ID NO: 239958 - RNA, 32 nt, Homo Sapiens
gcugugccugaagggugaguguggagcuugcc

SEQ ID NO: 239959 - RNA, 32 nt, Homo Sapiens
uaauuaaaaaauuuccagugagcuuaucaugc

SEQ ID NO: 239960 - RNA, 32 nt, Homo Sapiens
guaguagccugccucuuaacugguugcuucuc

SEQ ID NO: 239961 - RNA, 32 nt, Homo Sapiens
ugugcucaauuucagacacucauuuauaaaca

SEQ ID NO: 239962 - RNA, 32 nt, Homo Sapiens
ugaggcgggcguggaccgcgcgggaguuaaga

SEQ ID NO: 239963 - RNA, 32 nt, Homo Sapiens
gaggggcgaggggaagcccaccccugcaugcu

SEQ ID NO: 239964 - RNA, 32 nt, Homo Sapiens
caccagcacaccucaccuccaugccccacacu

SEQ ID NO: 239965 - RNA, 32 nt, Homo Sapiens
ccaguugggugcaucagggagcuccgucagca

SEQ ID NO: 239966 - RNA, 32 nt, Homo Sapiens
gggaaccugccagcuuggccguguggccaagg

SEQ ID NO: 239967 - RNA, 32 nt, Homo Sapiens
uggaacuccagcugccaccacccucugggucg

SEQ ID NO: 239968 - RNA, 32 nt, Homo Sapiens
gcagggucugcacagggccauguccuggcugu

SEQ ID NO: 239969 - RNA, 32 nt, Homo Sapiens
gguacggucuuaggaccucgaucuccuucucc

SEQ ID NO: 239970 - RNA, 32 nt, Homo Sapiens
uuugggaggggagagguccagaagcuguagag

SEQ ID NO: 239971 - RNA, 32 nt, Homo Sapiens
gaaucacucacuuuuccccaaaaaaaaaaaaa

SEQ ID NO: 239972 - RNA, 32 nt, Homo Sapiens
cccuuccugauuuugccaccagcccuaccgaa

SEQ ID NO: 239973 - RNA, 32 nt, Homo Sapiens
cauauguuuggaggggugaacaaaacucacca

SEQ ID NO: 239974 - RNA, 32 nt, Homo Sapiens
cggcgaugagagggggcgcagccgcagccccg

SEQ ID NO: 239975 - RNA, 32 nt, Homo Sapiens
ccaguggagacggcacacuggaaaucagagug

SEQ ID NO: 239976 - RNA, 32 nt, Homo Sapiens
gcgucucggggaagggaagauauuuuaaggcg

SEQ ID NO: 239977 - RNA, 32 nt, Homo Sapiens
agcggaagggaagggagaagugagauuugaac

SEQ ID NO: 239978 - RNA, 32 nt, Homo Sapiens
uuugugguccggggcugagacccacgaggaga

SEQ ID NO: 239979 - RNA, 32 nt, Homo Sapiens
ggacaagauuaccccaccuugcccuuuacgua

SEQ ID NO: 239980 - RNA, 32 nt, Homo Sapiens
gccucacucgcccuccucccucaccugguccc

SEQ ID NO: 239981 - RNA, 32 nt, Homo Sapiens
ucaaugcgaagggaaccaagacuuuguccagc

SEQ ID NO: 239982 - RNA, 32 nt, Homo Sapiens
agggaagaaugggcuguaaauccuaauuaaaa

SEQ ID NO: 239983 - RNA, 32 nt, Homo Sapiens
ccuaggaggugcacgggccaccauagucacac

SEQ ID NO: 239984 - RNA, 32 nt, Homo Sapiens
ccaacggggaccaacacgcagcagccgcugcc

SEQ ID NO: 239985 - RNA, 32 nt, Homo Sapiens
ccagguucaagcgauucuccuaccucagcccc

SEQ ID NO: 239986 - RNA, 32 nt, Homo Sapiens
ccacccggggguccucgcuucaugcucacaca

SEQ ID NO: 239987 - RNA, 32 nt, Homo Sapiens
uuccaucuuuugcaucaccaccacuccugaac

SEQ ID NO: 239988 - RNA, 32 nt, Homo Sapiens
auaguugggauuacaggcacccgccaccacgc

SEQ ID NO: 239989 - RNA, 32 nt, Homo Sapiens
uuuuuuaaaagcuauguuguuagcacacagaa

SEQ ID NO: 239990 - RNA, 32 nt, Homo Sapiens
gggcccauugugcgcccgcccgcggcagccag

SEQ ID NO: 239991 - RNA, 32 nt, Homo Sapiens
accuaaaacaaauguacauuuuccuuugugua

SEQ ID NO: 239992 - RNA, 32 nt, Homo Sapiens
auaagguuauuguaacaggaaauauucuauug

SEQ ID NO: 239993 - RNA, 32 nt, Homo Sapiens
acugagccuggggacgcccacccacacccacu

SEQ ID NO: 239994 - RNA, 32 nt, Homo Sapiens
guaccagucccacugcuaacaagccccacugg

SEQ ID NO: 239995 - RNA, 32 nt, Homo Sapiens
ugaucccucugccccaggccuggcugugcgcu

SEQ ID NO: 239996 - RNA, 32 nt, Homo Sapiens
gaaaugggagcauaguacugggaaaugggagc

SEQ ID NO: 239997 - RNA, 32 nt, Homo Sapiens
gugggccgagggugucuagggguucugccuag

SEQ ID NO: 239998 - RNA, 32 nt, Homo Sapiens
uuuccuuuaguguaaaaucaaggggcaaaaag

SEQ ID NO: 239999 - RNA, 32 nt, Homo Sapiens
cacagccagaaaggggcugcauuugugcccag

SEQ ID NO: 240000 - RNA, 32 nt, Homo Sapiens
agcuuccugggggcguggccaagcccuccucu

SEQ ID NO: 240001 - RNA, 32 nt, Homo Sapiens
auuagcaguuuagaauggaggaagaacaacaa

SEQ ID NO: 240002 - RNA, 32 nt, Homo Sapiens
uccacacacaagcucgcaaacacacauguccc

SEQ ID NO: 240003 - RNA, 32 nt, Homo Sapiens
gacccuccagacccagauggugucucacugug

SEQ ID NO: 240004 - RNA, 32 nt, Homo Sapiens
cuuucuggaaaacagcauugagugguuguuuu

SEQ ID NO: 240005 - RNA, 32 nt, Homo Sapiens
cuccagggacagccagcuccuccucugagcgc

SEQ ID NO: 240006 - RNA, 32 nt, Homo Sapiens
uggaccuggcgaggacgcugcccgccgagcgg

SEQ ID NO: 240007 - RNA, 32 nt, Homo Sapiens
cauuuccuaccuuccuuccuccucuguuuagc

SEQ ID NO: 240008 - RNA, 32 nt, Homo Sapiens
uguucucaauauuuccuguccccuccugagau

SEQ ID NO: 240009 - RNA, 32 nt, Homo Sapiens
cggaggcgcggggcgugucuccugucaaaagc

SEQ ID NO: 240010 - RNA, 32 nt, Homo Sapiens
cuccucggcacgccccccuuguuucgccccac

SEQ ID NO: 240011 - RNA, 32 nt, Homo Sapiens
cccucgggucuccucacucccuucuaccugcc

SEQ ID NO: 240012 - RNA, 32 nt, Homo Sapiens
agaagacccccucccccauaauucugggggcc

SEQ ID NO: 240013 - RNA, 32 nt, Homo Sapiens
aaugggcuaccucggcuuuaaaaguuaauuuc

SEQ ID NO: 240014 - RNA, 32 nt, Homo Sapiens
uacuggccacacuuacuauugacagucacccc

SEQ ID NO: 240015 - RNA, 32 nt, Homo Sapiens
gugcagcugauuugaccuccagugggauagau

SEQ ID NO: 240016 - RNA, 32 nt, Homo Sapiens
aucugccuccuuugaccuuguucaaucacuau

SEQ ID NO: 240017 - RNA, 32 nt, Homo Sapiens
aggaggacucagugcuggcagauggcagugga

SEQ ID NO: 240018 - RNA, 32 nt, Homo Sapiens
auucgugaagcaguugagugcugcagcggcag

SEQ ID NO: 240019 - RNA, 32 nt, Homo Sapiens
gggcuuugcaccuggagggaagcccaccugau

SEQ ID NO: 240020 - RNA, 32 nt, Homo Sapiens
aaacaaaaugucauauuuuuguauaugaaugu

SEQ ID NO: 240021 - RNA, 32 nt, Homo Sapiens
gcaagggggcggggcgggggcccgaaagcuga

SEQ ID NO: 240022 - RNA, 32 nt, Homo Sapiens
cuuuauauaugcuacaugguagaggagcagcg

SEQ ID NO: 240023 - RNA, 32 nt, Homo Sapiens
uauacuauacucucauguucuauaaauuucug

SEQ ID NO: 240024 - RNA, 32 nt, Homo Sapiens
cgcuacuagccgcgggggccaagccccuggcu

SEQ ID NO: 240025 - RNA, 32 nt, Homo Sapiens
caaaguauuuauugcacagacuugcggguucu

SEQ ID NO: 240026 - RNA, 32 nt, Homo Sapiens
uccucucaggugguugguuuucuccagagaag

SEQ ID NO: 240027 - RNA, 32 nt, Homo Sapiens
ccgcagucgagguccgcagucuccucgggguc

SEQ ID NO: 240028 - RNA, 32 nt, Homo Sapiens
aguccucccuccccaaccuccuccauuucccc

SEQ ID NO: 240029 - RNA, 32 nt, Homo Sapiens
ccugcuccuucuugcuuuccccgggggaggaa

SEQ ID NO: 240030 - RNA, 32 nt, Homo Sapiens
gcaugggcggcgugugacaucuccagggaggc

SEQ ID NO: 240031 - RNA, 32 nt, Homo Sapiens
uggacagcccagguccagagccaggccuggcg

SEQ ID NO: 240032 - RNA, 32 nt, Homo Sapiens
gaaguguguucugucuuuaaaauguaagugaa

SEQ ID NO: 240033 - RNA, 32 nt, Homo Sapiens
ugcugacugccagcgugguaccucccaugcug

SEQ ID NO: 240034 - RNA, 32 nt, Homo Sapiens
uacacuuucccacguugaggugguguguucug

SEQ ID NO: 240035 - RNA, 32 nt, Homo Sapiens
ugguagaauuauuuaaacacuuuagauuuuua

SEQ ID NO: 240036 - RNA, 32 nt, Homo Sapiens
gccagacccagacguccuggagaucucaaugc

SEQ ID NO: 240037 - RNA, 32 nt, Homo Sapiens
gacaccugccuugccucccucuuccauucucu

SEQ ID NO: 240038 - RNA, 32 nt, Homo Sapiens
uguucaccaaacuugacugcgcucuaucgagg

SEQ ID NO: 240039 - RNA, 32 nt, Homo Sapiens
acaauguggcaagcuuuggacaaaggacacag

SEQ ID NO: 240040 - RNA, 32 nt, Homo Sapiens
caggccugucuccaguuguuucagagcuuaau

SEQ ID NO: 240041 - RNA, 32 nt, Homo Sapiens
aaugagaguuccaguuaccaucuucagagaaa

SEQ ID NO: 240042 - RNA, 32 nt, Homo Sapiens
cugaacugucacuccagagauuuuagaaauuu

SEQ ID NO: 240043 - RNA, 32 nt, Homo Sapiens
gguuguuguagcugccgcugcggccgccgcgg

SEQ ID NO: 240044 - RNA, 32 nt, Homo Sapiens
cugaaauauaaaaaagguggugguggugguga

SEQ ID NO: 240045 - RNA, 32 nt, Homo Sapiens
auugagaaagaaacuaauauuuuaugugagag

SEQ ID NO: 240046 - RNA, 32 nt, Homo Sapiens
gaaggcuacccggcccggagccuggccgacgc

SEQ ID NO: 240047 - RNA, 32 nt, Homo Sapiens
uucugugccuaggcagccacuccagcuugucc

SEQ ID NO: 240048 - RNA, 32 nt, Homo Sapiens
acccccauccgugcugcccccuaggagcccgc

SEQ ID NO: 240049 - RNA, 32 nt, Homo Sapiens
gagagcucgcacccucccacggcagcagggua

SEQ ID NO: 240050 - RNA, 32 nt, Homo Sapiens
gaaccuuccucuggaagugcugauuuuaugga

SEQ ID NO: 240051 - RNA, 32 nt, Homo Sapiens
ccaggaagugaacagaggaacugaagcuuugg

SEQ ID NO: 240052 - RNA, 32 nt, Homo Sapiens
ugcugcauggguuaauugagaauagaaauuug

SEQ ID NO: 240053 - RNA, 32 nt, Homo Sapiens
uuccuacugaguuuuucugguauccagauuuc

SEQ ID NO: 240054 - RNA, 32 nt, Homo Sapiens
cuacagagcuaucauguaaaaacuacauaagg

SEQ ID NO: 240055 - RNA, 32 nt, Homo Sapiens
agacuguagugucaggacaaagcaacaacaaa

SEQ ID NO: 240056 - RNA, 32 nt, Homo Sapiens
cuuccuacaucauuucguuuaauccucacagu

SEQ ID NO: 240057 - RNA, 32 nt, Homo Sapiens
guugaugaucauuacuuuaaauuaaaagucuc

SEQ ID NO: 240058 - RNA, 32 nt, Homo Sapiens
cuccggggccgcggucggggcugcgcguuuga

SEQ ID NO: 240059 - RNA, 32 nt, Homo Sapiens
cagugcuucugggcccucugcugcuccugcuu

SEQ ID NO: 240060 - RNA, 32 nt, Homo Sapiens
cuuggagccaauggcuguauuuggcugugugu

SEQ ID NO: 240061 - RNA, 32 nt, Homo Sapiens
uugcaauuucuuuuucauuucaaauaaauauu

SEQ ID NO: 240062 - RNA, 32 nt, Homo Sapiens
gcuugggggagcuucucggccauccgcuguga

SEQ ID NO: 240063 - RNA, 30 nt, Homo Sapiens
agcagguggggcgcuggccucggugagggc

SEQ ID NO: 240064 - RNA, 32 nt, Homo Sapiens
gccuggcaugggggagcguggaggcggggccg

SEQ ID NO: 240065 - RNA, 32 nt, Homo Sapiens
accccuuccucauaguuguuuggcuauugcuu

SEQ ID NO: 240066 - RNA, 32 nt, Homo Sapiens
uggagccucagacucccacauucuucaguggg

SEQ ID NO: 240067 - RNA, 32 nt, Homo Sapiens
caccgugaguuagugaccaagucaggauaaga

SEQ ID NO: 240068 - RNA, 32 nt, Homo Sapiens
acagcugucccucaccugaggagccccccagc

SEQ ID NO: 240069 - RNA, 32 nt, Homo Sapiens
uugcauugauucagugccaaggucacuuccag

SEQ ID NO: 240070 - RNA, 32 nt, Homo Sapiens
gaagacgggggcaguccugggggugcugcggc

SEQ ID NO: 240071 - RNA, 32 nt, Homo Sapiens
aaacggaguuaaguaacauagcccugagcagg

SEQ ID NO: 240072 - RNA, 32 nt, Homo Sapiens
ugcccagggugagcgccacgaggcgcaggaaa

SEQ ID NO: 240073 - RNA, 32 nt, Homo Sapiens
accaccacuccagccugggugagaaagcaaga

SEQ ID NO: 240074 - RNA, 32 nt, Homo Sapiens
cugugcugcgcgcgcucaugcacgcggccgcc

SEQ ID NO: 240075 - RNA, 32 nt, Homo Sapiens
cccaaccuggagugcaguggugcggucucggc

SEQ ID NO: 240076 - RNA, 32 nt, Homo Sapiens
ucucucccucugccuuuccgcggccuccgcga

SEQ ID NO: 240077 - RNA, 32 nt, Homo Sapiens
auacuuaacaauauuaguguuuuaaaaugaug

SEQ ID NO: 240078 - RNA, 32 nt, Homo Sapiens
ccgcucuggaucuggucuagcuuccggauucg

SEQ ID NO: 240079 - RNA, 32 nt, Homo Sapiens
cggaauccugcuccgccgucgcagcagcagcg

SEQ ID NO: 240080 - RNA, 32 nt, Homo Sapiens
uuauuuaauuuucucaguguuugaauguuauu

SEQ ID NO: 240081 - RNA, 32 nt, Homo Sapiens
gugauggaugacagaagagugauucauuaaca

SEQ ID NO: 240082 - RNA, 32 nt, Homo Sapiens
uacaguacauagguuaucccucaguaaagcug

SEQ ID NO: 240083 - RNA, 32 nt, Homo Sapiens
guuaacagcuuuaaucaaaguuuaccuaaccu

SEQ ID NO: 240084 - RNA, 32 nt, Homo Sapiens
gggccaggaacacguggccugagagcugggca

SEQ ID NO: 240085 - RNA, 32 nt, Homo Sapiens
uuuauuuggauugucuucuguaauagguuuca

SEQ ID NO: 240086 - RNA, 32 nt, Homo Sapiens
ucacauuuucccuuggccaccuuaccagggac

SEQ ID NO: 240087 - RNA, 32 nt, Homo Sapiens
gcaaugggagggggcuccauggaggagguguc

SEQ ID NO: 240088 - RNA, 32 nt, Homo Sapiens
gagaaaugggagcacaguacugggaaaugggc

SEQ ID NO: 240089 - RNA, 32 nt, Homo Sapiens
auuugauuuuuauaagaaaauuuuacuauuau

SEQ ID NO: 240090 - RNA, 32 nt, Homo Sapiens
ggauucuuuguuaacuaacaaaguuaaaguug

SEQ ID NO: 240091 - RNA, 32 nt, Homo Sapiens
cuuuuugcauuaucuuguuuugguuuugugcu

SEQ ID NO: 240092 - RNA, 32 nt, Homo Sapiens
gucucaaguccguauguaaaucagaucucccc

SEQ ID NO: 240093 - RNA, 32 nt, Homo Sapiens
gggguccugggccccagggugugcagccacug

SEQ ID NO: 240094 - RNA, 32 nt, Homo Sapiens
aggugguuggacgagguccugcuugaggcucg

SEQ ID NO: 240095 - RNA, 32 nt, Homo Sapiens
acgguuccccucccuuucccugccaggcucau

SEQ ID NO: 240096 - RNA, 32 nt, Homo Sapiens
aauguauuuauaaaguuuuuccagauaaacua

SEQ ID NO: 240097 - RNA, 32 nt, Homo Sapiens
aaucagaggccuauuucuuucaugacggaagg

SEQ ID NO: 240098 - RNA, 32 nt, Homo Sapiens
gagcccggggccugccaggcccgggcugcagc

SEQ ID NO: 240099 - RNA, 32 nt, Homo Sapiens
agcugccguggcgucuggccacauggagcugc

SEQ ID NO: 240100 - RNA, 32 nt, Homo Sapiens
ucauuuagguagugaaggcuucccugaaagac

SEQ ID NO: 240101 - RNA, 32 nt, Homo Sapiens
uuuccugaaacacuaaagagaaaugucuuuug

SEQ ID NO: 240102 - RNA, 32 nt, Homo Sapiens
gcgccccaguccucgggcgguccaugcugccc

SEQ ID NO: 240103 - RNA, 32 nt, Homo Sapiens
ugugcaguacuaaagaaaaagcagucuaccau

SEQ ID NO: 240104 - RNA, 32 nt, Homo Sapiens
uaaagcagaaaggggucugugcugccucuaaa

SEQ ID NO: 240105 - RNA, 32 nt, Homo Sapiens
aaauccuugaagaaaaucaugaaugaacaaag

SEQ ID NO: 240106 - RNA, 32 nt, Homo Sapiens
ugcccggcuaauuuuucuuuugguauuuuuag

SEQ ID NO: 240107 - RNA, 32 nt, Homo Sapiens
ugggguugccagaagcugggguugccaucccg

SEQ ID NO: 240108 - RNA, 32 nt, Homo Sapiens
cgugcgggaaaaccaccugaccccuagggauu

SEQ ID NO: 240109 - RNA, 32 nt, Homo Sapiens
uaaggucuuagacugcaaaucuaaccauauuu

SEQ ID NO: 240110 - RNA, 32 nt, Homo Sapiens
uacuaggauacugcuuagaaaagcagaggguc

SEQ ID NO: 240111 - RNA, 32 nt, Homo Sapiens
acaggaaaauaggugaauaauuagauauauau

SEQ ID NO: 240112 - RNA, 32 nt, Homo Sapiens
guaaugugccagcauugugcccaggcuagggg

SEQ ID NO: 240113 - RNA, 32 nt, Homo Sapiens
agcgguucugcucuggccccagaagaucuuuu

SEQ ID NO: 240114 - RNA, 32 nt, Homo Sapiens
auacccuuuauuuccuucuccugcuugauugc

SEQ ID NO: 240115 - RNA, 32 nt, Homo Sapiens
cuaccugccucugccucccaaagugcuaggau

SEQ ID NO: 240116 - RNA, 32 nt, Homo Sapiens
uggugagccaagguugcgccacugcacuccag

SEQ ID NO: 240117 - RNA, 32 nt, Homo Sapiens
caucauacugaaugagcaaaagcuggagcauu

SEQ ID NO: 240118 - RNA, 32 nt, Homo Sapiens
gggacuggaagcccuuccacggcggccgcgag

SEQ ID NO: 240119 - RNA, 32 nt, Homo Sapiens
cuguauacuuuuaaaaaauacucugcuauuuc

SEQ ID NO: 240120 - RNA, 28 nt, Homo Sapiens
guggggcugcggccgcccauggugcccc

SEQ ID NO: 240121 - RNA, 32 nt, Homo Sapiens
augcuaaacaauuuucugugaacuauuuugac

SEQ ID NO: 240122 - RNA, 32 nt, Homo Sapiens
gguuagaaagagagagaaugucuuucauuuga

SEQ ID NO: 240123 - RNA, 31 nt, Homo Sapiens
agguguaguuacaucucagugcugucuugag

SEQ ID NO: 240124 - RNA, 32 nt, Homo Sapiens
ggagguggaggcgcgguaccccggggccgcag

SEQ ID NO: 240125 - RNA, 31 nt, Homo Sapiens
agccuugcacacccacugccccgugugaaug

SEQ ID NO: 240126 - RNA, 32 nt, Homo Sapiens
acucaagaguagccuuccucgaggaccugccu

SEQ ID NO: 240127 - RNA, 32 nt, Homo Sapiens
cugggguguuuuuugaggagggagagugcccc

SEQ ID NO: 240128 - RNA, 32 nt, Homo Sapiens
augagugcuaaaaauaaagaugauagcauguu

SEQ ID NO: 240129 - RNA, 32 nt, Homo Sapiens
agaggggaugaggcccggggcgccccgugucg

SEQ ID NO: 240130 - RNA, 31 nt, Homo Sapiens
cuccgcgggcagccaacauugauuuccuccg

SEQ ID NO: 240131 - RNA, 32 nt, Homo Sapiens
ccacaggccggucguggagcugcgaccccggc

SEQ ID NO: 240132 - RNA, 31 nt, Homo Sapiens
uugaaaauaaaauugaugaguuuuauuguca

SEQ ID NO: 240133 - RNA, 32 nt, Homo Sapiens
uucacauuuuuccacaguauaauggaaaauaa

SEQ ID NO: 240134 - RNA, 32 nt, Homo Sapiens
uuuaaaaagacaaaacagaaauguacguuccu

SEQ ID NO: 240135 - RNA, 32 nt, Homo Sapiens
ggagaggggagguggcucuccaguguaaaacu

SEQ ID NO: 240136 - RNA, 32 nt, Homo Sapiens
ucauuaucaaggacuugcggauaacugaugcu

SEQ ID NO: 240137 - RNA, 32 nt, Homo Sapiens
ccucucugccccacccagauaaucgcugcugc

SEQ ID NO: 240138 - RNA, 32 nt, Homo Sapiens
cguagacaauaggcgagcugucaugggaauua

SEQ ID NO: 240139 - RNA, 32 nt, Homo Sapiens
uccacaaagauuucugguaacuuugagcuaua

SEQ ID NO: 240140 - RNA, 32 nt, Homo Sapiens
uggacugguggauguacuacuccaccugcccu

SEQ ID NO: 240141 - RNA, 32 nt, Homo Sapiens
cauagauugaauuagcacuuugacucucacuu

SEQ ID NO: 240142 - RNA, 32 nt, Homo Sapiens
ccccgaggcagaggccggagggcgcgcgcacu

SEQ ID NO: 240143 - RNA, 32 nt, Homo Sapiens
gugaccugugccaagcucaucuccaggacagg

SEQ ID NO: 240144 - RNA, 32 nt, Homo Sapiens
cacaauauaugacugacuacuuugaagacaca

SEQ ID NO: 240145 - RNA, 32 nt, Homo Sapiens
caccugagagacggagccccggcucgcccgug

SEQ ID NO: 240146 - RNA, 32 nt, Homo Sapiens
gaauccauaaugagagauuuugaaaguguaau

SEQ ID NO: 240147 - RNA, 32 nt, Homo Sapiens
aagugcuuugcacuuuucaauauguuuugaau

SEQ ID NO: 240148 - RNA, 32 nt, Homo Sapiens
aucacaauguaauuuuugaacuuuuuauugac

SEQ ID NO: 240149 - RNA, 32 nt, Homo Sapiens
cugcgcuuaauccuaaaccaaccugugaaugg

SEQ ID NO: 240150 - RNA, 32 nt, Homo Sapiens
aggucugcuucuuaauucaguguuaugauauc

SEQ ID NO: 240151 - RNA, 32 nt, Homo Sapiens
cacaaggucaggaguugagaccagccuggcca

SEQ ID NO: 240152 - RNA, 32 nt, Homo Sapiens
ccuggagcgcccgcgcccaauccugcgccuag

SEQ ID NO: 240153 - RNA, 32 nt, Homo Sapiens
uaggugaaccccgggguaggggaaagauguua

SEQ ID NO: 240154 - RNA, 32 nt, Homo Sapiens
augcguguaacaguacugcaauaaucacagcu

SEQ ID NO: 240155 - RNA, 32 nt, Homo Sapiens
uuuaggaaggcuuucgcaaaccuagccuuuua

SEQ ID NO: 240156 - RNA, 32 nt, Homo Sapiens
cgaggagggcagaucaacugaggucaggaguu

SEQ ID NO: 240157 - RNA, 28 nt, Homo Sapiens
uuuguuuauuaaaagagaaaccugaagu

SEQ ID NO: 240158 - RNA, 32 nt, Homo Sapiens
uggaucuggcuucucucauacacauccuucuc

SEQ ID NO: 240159 - RNA, 32 nt, Homo Sapiens
cugccccgcaucuccugcuccuggacacccag

SEQ ID NO: 240160 - RNA, 32 nt, Homo Sapiens
acugaaagcauuuuaauggacuauuuauuaaa

SEQ ID NO: 240161 - RNA, 32 nt, Homo Sapiens
ucuggcccucgccccagggggcccgucgggga

SEQ ID NO: 240162 - RNA, 28 nt, Homo Sapiens
gcaauggaaaguaauauuauaaaacggu

SEQ ID NO: 240163 - RNA, 32 nt, Homo Sapiens
uccucucuguugcucaauguuaccacagcagg

SEQ ID NO: 240164 - RNA, 32 nt, Homo Sapiens
agucuccggcgaguuguugccugggcuggacg

SEQ ID NO: 240165 - RNA, 32 nt, Homo Sapiens
ccucugcaucagagcccuuccuuucuuggggg

SEQ ID NO: 240166 - RNA, 32 nt, Homo Sapiens
uuccacacaaacuuaaauuacuguuggcaaaa

SEQ ID NO: 240167 - RNA, 32 nt, Homo Sapiens
cuccagugcccucuccucgaugccucgcuccu

SEQ ID NO: 240168 - RNA, 32 nt, Homo Sapiens
cuuuuaauccucauaaacccaggcugcuggca

SEQ ID NO: 240169 - RNA, 32 nt, Homo Sapiens
agcaggguggagagggcggugggaggcgugug

SEQ ID NO: 240170 - RNA, 32 nt, Homo Sapiens
aauuguuguaccuuugaaaacaugcuguuccu

SEQ ID NO: 240171 - RNA, 32 nt, Homo Sapiens
cagaggccgucaacauggaaaagcagccccag

SEQ ID NO: 240172 - RNA, 32 nt, Homo Sapiens
ccugguggccccaggacguuccggucgcaugg

SEQ ID NO: 240173 - RNA, 32 nt, Homo Sapiens
uugcuguucuucgucagaaaugugucaaagca

SEQ ID NO: 240174 - RNA, 32 nt, Homo Sapiens
acgggcugcuggacgccgggcugcugguggac

SEQ ID NO: 240175 - RNA, 32 nt, Homo Sapiens
uaccuucauaugccacuaagaacaaaagcucu

SEQ ID NO: 240176 - RNA, 32 nt, Homo Sapiens
cagugaccucuacugcuucucugauaccagcu

SEQ ID NO: 240177 - RNA, 32 nt, Homo Sapiens
ccaugaauggugcccuuauuaacaacaguguu

SEQ ID NO: 240178 - RNA, 32 nt, Homo Sapiens
ucauuugguguuggagguggguuucucaccug

SEQ ID NO: 240179 - RNA, 32 nt, Homo Sapiens
cagaaauauaaaacuguagaacuggguauaug

SEQ ID NO: 240180 - RNA, 32 nt, Homo Sapiens
aguugcugaauuaucaauaaaguuuuaaagug

SEQ ID NO: 240181 - RNA, 32 nt, Homo Sapiens
ggcgccuuugguucucugaacaucuccuuucu

SEQ ID NO: 240182 - RNA, 32 nt, Homo Sapiens
auuuuugguaagaaugcuauagaagcaauacg

SEQ ID NO: 240183 - RNA, 32 nt, Homo Sapiens
uccugauacccuuuccuucuccaugucaguau

SEQ ID NO: 240184 - RNA, 32 nt, Homo Sapiens
ucucacucuagcuuggggagccaggguucuag

SEQ ID NO: 240185 - RNA, 32 nt, Homo Sapiens
aggugccaccggccauuguccaggcagcugug

SEQ ID NO: 240186 - RNA, 32 nt, Homo Sapiens
uauaagccaaaauauuaacuuuaaugaaacau

SEQ ID NO: 240187 - RNA, 32 nt, Homo Sapiens
uucuuuauauauuuauuuuuuauuagaaaaaa

SEQ ID NO: 240188 - RNA, 32 nt, Homo Sapiens
ggagauugcggugagccgagaucgcgacacug

SEQ ID NO: 240189 - RNA, 32 nt, Homo Sapiens
ugggacaggacacauggaaggccuaagaacug

SEQ ID NO: 240190 - RNA, 31 nt, Homo Sapiens
gaaaccauuuugaaugaauagauugguuucc

SEQ ID NO: 240191 - RNA, 32 nt, Homo Sapiens
ugaacaggggccugggggugccgggggccggc

SEQ ID NO: 240192 - RNA, 32 nt, Homo Sapiens
cuguaauccaaaugcaacauuguuauuauuaa

SEQ ID NO: 240193 - RNA, 32 nt, Homo Sapiens
ugugaaacuaacaggaagauauuuucagauaa

SEQ ID NO: 240194 - RNA, 32 nt, Homo Sapiens
ugucguuuuguuuguuuuucuaugauaauuua

SEQ ID NO: 240195 - RNA, 32 nt, Homo Sapiens
uauauguauauggauguaugcauaaaaucaua

SEQ ID NO: 240196 - RNA, 32 nt, Homo Sapiens
aguuucuggagggccaggugggaaaugcuuuc

SEQ ID NO: 240197 - RNA, 32 nt, Homo Sapiens
ugccugggaccgcuccagcugcacugcagcca

SEQ ID NO: 240198 - RNA, 32 nt, Homo Sapiens
gcccaagaggaagaggucacuggggcuagaug

SEQ ID NO: 240199 - RNA, 32 nt, Homo Sapiens
aagucuaaauguugaugugaaaaauuauugua

SEQ ID NO: 240200 - RNA, 32 nt, Homo Sapiens
acccugauuuccugcuucuccuuuucaugagu

SEQ ID NO: 240201 - RNA, 32 nt, Homo Sapiens
ccaaacgucccgcgccuuccaggccgcacucc

SEQ ID NO: 240202 - RNA, 32 nt, Homo Sapiens
cggggcuagagaccgagggccgggguccgggc

SEQ ID NO: 240203 - RNA, 32 nt, Homo Sapiens
agaugaccccgagccccuccccguggggcacc

SEQ ID NO: 240204 - RNA, 32 nt, Homo Sapiens
ucuucacaggaaccuauccucccugcuggugc

SEQ ID NO: 240205 - RNA, 32 nt, Homo Sapiens
ugaacugagaagcccauaucaaugcacaacgu

SEQ ID NO: 240206 - RNA, 32 nt, Homo Sapiens
aggucacacuagagaagcugcgcugguaucuu

SEQ ID NO: 240207 - RNA, 32 nt, Homo Sapiens
uaacuuuugccagcuugauggguauuaagugu

SEQ ID NO: 240208 - RNA, 32 nt, Homo Sapiens
acagacagacaccgcccccagccccagcuacc

SEQ ID NO: 240209 - RNA, 32 nt, Homo Sapiens
ucacuuuguaaaaauaauuuguauguguacca

SEQ ID NO: 240210 - RNA, 32 nt, Homo Sapiens
cgugcggcccguggcgaggcgagguccgggga

SEQ ID NO: 240211 - RNA, 32 nt, Homo Sapiens
ggccccagucccagccccaaccccagucccag

SEQ ID NO: 240212 - RNA, 32 nt, Homo Sapiens
gauuuuggcauucuuccccugcucguucacag

SEQ ID NO: 240213 - RNA, 32 nt, Homo Sapiens
cuucugucugcacaacucuucuuuuuuuaauu

SEQ ID NO: 240214 - RNA, 32 nt, Homo Sapiens
uuuguucuauagauaaagccauaagaauccuu

SEQ ID NO: 240215 - RNA, 32 nt, Homo Sapiens
ccuggggaccccaaggccccagcuucccucug

SEQ ID NO: 240216 - RNA, 32 nt, Homo Sapiens
cuauuucauaucuauaaugaauguagaacauc

SEQ ID NO: 240217 - RNA, 32 nt, Homo Sapiens
aguuucaggaaacuugguuuugauuguucaca

SEQ ID NO: 240218 - RNA, 31 nt, Homo Sapiens
uuauaagcaaauuguacaaaguauguaggau

SEQ ID NO: 240219 - RNA, 32 nt, Homo Sapiens
auguagaauuuuuguuguuguuuucugcaaag

SEQ ID NO: 240220 - RNA, 32 nt, Homo Sapiens
cugaaccaucuucuuggaguacucaugaagau

SEQ ID NO: 240221 - RNA, 32 nt, Homo Sapiens
gcuuaccacaguguuauagcugguucuagaaa

SEQ ID NO: 240222 - RNA, 32 nt, Homo Sapiens
aaggacugcuaagucaggaaaugggguaugca

SEQ ID NO: 240223 - RNA, 32 nt, Homo Sapiens
gaaaagauacugcuaccaaaggcauaggggag

SEQ ID NO: 240224 - RNA, 32 nt, Homo Sapiens
cagccucauuuucucagugccccagaggucua

SEQ ID NO: 240225 - RNA, 32 nt, Homo Sapiens
gcgaagaucgcaccacugcacgcacuccagcc

SEQ ID NO: 240226 - RNA, 32 nt, Homo Sapiens
cucugccugccagugcccauuccacugugagg

SEQ ID NO: 240227 - RNA, 32 nt, Homo Sapiens
uuggggcagucaggcauuuguaucuuugguag

SEQ ID NO: 240228 - RNA, 32 nt, Homo Sapiens
ggcaggaaauaccucacuaucccggcugcccu

SEQ ID NO: 240229 - RNA, 32 nt, Homo Sapiens
uuuugagcccagcgguucaccuggacagggga

SEQ ID NO: 240230 - RNA, 28 nt, Homo Sapiens
uggcuaguggcuacuguauugacauucu

SEQ ID NO: 240231 - RNA, 32 nt, Homo Sapiens
cucuaaugccugugucccuuacuuugguuaau

SEQ ID NO: 240232 - RNA, 32 nt, Homo Sapiens
aagagaauguccaaaaugauuuguuuuaccau

SEQ ID NO: 240233 - RNA, 32 nt, Homo Sapiens
uuccaaacagcauaagaagugauugagccaca

SEQ ID NO: 240234 - RNA, 32 nt, Homo Sapiens
cccuccucccaucuccuucccccagcccaaua

SEQ ID NO: 240235 - RNA, 32 nt, Homo Sapiens
acacaagagggcugagccagguccuagcuguu

SEQ ID NO: 240236 - RNA, 32 nt, Homo Sapiens
guugauccagcauuugagugacacuguugaau

SEQ ID NO: 240237 - RNA, 32 nt, Homo Sapiens
auugaaaacaggaggugacuagggagggauua

SEQ ID NO: 240238 - RNA, 32 nt, Homo Sapiens
cugcucccauccccaccccagaucgaaugaac

SEQ ID NO: 240239 - RNA, 32 nt, Homo Sapiens
cagaaaaaauaucuguaacaucuuauauguuc

SEQ ID NO: 240240 - RNA, 32 nt, Homo Sapiens
acacaggacuucccuuaacaguuuccggauca

SEQ ID NO: 240241 - RNA, 32 nt, Homo Sapiens
ucaaguuucagcaggcagcuuuaucucaaccu

SEQ ID NO: 240242 - RNA, 32 nt, Homo Sapiens
agcaugccuugcggccggcaccguaccguaga

SEQ ID NO: 240243 - RNA, 30 nt, Homo Sapiens
cacauuugggacugcauuucuggaaacaua

SEQ ID NO: 240244 - RNA, 32 nt, Homo Sapiens
uguuaguaaguugaaggauauuggacaggagg

SEQ ID NO: 240245 - RNA, 32 nt, Homo Sapiens
auugcaugaagauggcuggcagcugaguccuu

SEQ ID NO: 240246 - RNA, 32 nt, Homo Sapiens
uugcuugagcccaggaggucaaggcugcagug

SEQ ID NO: 240247 - RNA, 32 nt, Homo Sapiens
aguuuauuuuuccauacuauaugaagagaaug

SEQ ID NO: 240248 - RNA, 32 nt, Homo Sapiens
aggcccucagaacagcaugaaaagcacaagaa

SEQ ID NO: 240249 - RNA, 32 nt, Homo Sapiens
aaguuuucaguuuguacugccugguaugucug

SEQ ID NO: 240250 - RNA, 32 nt, Homo Sapiens
ucuaccuaauauuuuucuuuuaacauacucuu

SEQ ID NO: 240251 - RNA, 32 nt, Homo Sapiens
auuaaauuuggcauuuaaauagugguggaaau

SEQ ID NO: 240252 - RNA, 32 nt, Homo Sapiens
caauaauucuauuuggggcagugaaugcauag

SEQ ID NO: 240253 - RNA, 32 nt, Homo Sapiens
cuuggacucugauuauacaauuuaaaauccug

SEQ ID NO: 240254 - RNA, 32 nt, Homo Sapiens
uacuugggcgcucaggaacccuggacagcuac

SEQ ID NO: 240255 - RNA, 32 nt, Homo Sapiens
aggcgagggagaugagagacggcggcggccgc

SEQ ID NO: 240256 - RNA, 32 nt, Homo Sapiens
auuuuuaggcugaauuaauuugaaagcagcaa

SEQ ID NO: 240257 - RNA, 32 nt, Homo Sapiens
ccagccacuuucuucacagggauuaggaggcu

SEQ ID NO: 240258 - RNA, 32 nt, Homo Sapiens
uggcccugccccaccaugaccugggugcucug

SEQ ID NO: 240259 - RNA, 32 nt, Homo Sapiens
ugcacagcuacuucacaccuuaaacuugcuuu

SEQ ID NO: 240260 - RNA, 32 nt, Homo Sapiens
aagaagagaaaguggaaauuaacuguggcaaa

SEQ ID NO: 240261 - RNA, 32 nt, Homo Sapiens
ugacucagcccggcugaugccucugcagugcu

SEQ ID NO: 240262 - RNA, 32 nt, Homo Sapiens
guucgcgccccgaaggcugagagcuggcgcug

SEQ ID NO: 240263 - RNA, 31 nt, Homo Sapiens
gcagcugugaacuggccaccccgcgccuucc

SEQ ID NO: 240264 - RNA, 32 nt, Homo Sapiens
cugccgcccgcccagacgccagcaagcccccc

SEQ ID NO: 240265 - RNA, 32 nt, Homo Sapiens
gcgcagcgagccuagccuccccgcgcccuggg

SEQ ID NO: 240266 - RNA, 32 nt, Homo Sapiens
ggggguacaauuuuuaagcauuugcagcugca

SEQ ID NO: 240267 - RNA, 31 nt, Homo Sapiens
uguaauuuuacauuacauaaguuccuuuuac

SEQ ID NO: 240268 - RNA, 32 nt, Homo Sapiens
uaaccccacaguguauguauuccacauuaaau

SEQ ID NO: 240269 - RNA, 32 nt, Homo Sapiens
uaccccucauuucacgcucaaggagucauacc

SEQ ID NO: 240270 - RNA, 32 nt, Homo Sapiens
uaccaaggaugaauucuuucaauucuucaugc

SEQ ID NO: 240271 - RNA, 32 nt, Homo Sapiens
caggaagucccugagaagccucaugggaguca

SEQ ID NO: 240272 - RNA, 32 nt, Homo Sapiens
ucguacaucucuauguuacacagaauuugugu

SEQ ID NO: 240273 - RNA, 32 nt, Homo Sapiens
cuggcgagccgcgccaguucaucugcaacgag

SEQ ID NO: 240274 - RNA, 32 nt, Homo Sapiens
agauucagaguaacauuuauacaugucuuaaa

SEQ ID NO: 240275 - RNA, 32 nt, Homo Sapiens
cacguggcccaggcuggugcgccccgcugucu

SEQ ID NO: 240276 - RNA, 32 nt, Homo Sapiens
auuauaaaaaaauuaauuuaugaagaaagacc

SEQ ID NO: 240277 - RNA, 32 nt, Homo Sapiens
uggucagacaccuuuagguugcucuggggaag

SEQ ID NO: 240278 - RNA, 32 nt, Homo Sapiens
uuaccuuccucucuccucagcggccguacuuu

SEQ ID NO: 240279 - RNA, 32 nt, Homo Sapiens
auugugaauggaggcugguggagcagcacacu

SEQ ID NO: 240280 - RNA, 32 nt, Homo Sapiens
ccacaaauccagccucuuucuggagaccgcaa

SEQ ID NO: 240281 - RNA, 29 nt, Homo Sapiens
aucaaauaaaguuugcauguuuuuuauuc

SEQ ID NO: 240282 - RNA, 32 nt, Homo Sapiens
aauguagaauaaauuuuaccaacuuggaaaaa

SEQ ID NO: 240283 - RNA, 32 nt, Homo Sapiens
caaaacaaaacaaaacaaaaaaaccucuuaau

SEQ ID NO: 240284 - RNA, 32 nt, Homo Sapiens
uucugcaccuccccggaggcugaagcccuuaa

SEQ ID NO: 240285 - RNA, 32 nt, Homo Sapiens
agaaaguagaaagugagaggagguuccagcug

SEQ ID NO: 240286 - RNA, 32 nt, Homo Sapiens
uguuaaagacaugugauuuguauuuuagaugc

SEQ ID NO: 240287 - RNA, 32 nt, Homo Sapiens
gccaauaaaaacaggugaacuucuaggcuucc

SEQ ID NO: 240288 - RNA, 32 nt, Homo Sapiens
acucucuuuacuaguucuacugcuuccauuga

SEQ ID NO: 240289 - RNA, 32 nt, Homo Sapiens
gaguggaaaugaaugcgcagcguaugacuguu

SEQ ID NO: 240290 - RNA, 32 nt, Homo Sapiens
aaccauucaaagcuaaagacauggaccuucag

SEQ ID NO: 240291 - RNA, 32 nt, Homo Sapiens
uauuuauuuuuagagguacauguuuuaaguaa

SEQ ID NO: 240292 - RNA, 32 nt, Homo Sapiens
caaggaaagaacagcaguuguugugugggaau

SEQ ID NO: 240293 - RNA, 32 nt, Homo Sapiens
ggagcucagugcccucauaguguaacagcacc

SEQ ID NO: 240294 - RNA, 32 nt, Homo Sapiens
uuuucuuuuuauuuuuuuuuuaauuuuaaacg

SEQ ID NO: 240295 - RNA, 32 nt, Homo Sapiens
aggcuguguuagugaaagcacauggaaggugu

SEQ ID NO: 240296 - RNA, 32 nt, Homo Sapiens
cagauaccuucuauuuuaguugcuaacaaacg

SEQ ID NO: 240297 - RNA, 32 nt, Homo Sapiens
cuagccugccauguccacaguuccuugggcug

SEQ ID NO: 240298 - RNA, 32 nt, Homo Sapiens
uucuugaaugacuuuaugaaucucuggacuuc

SEQ ID NO: 240299 - RNA, 32 nt, Homo Sapiens
uucuaucaaacaaaugacuuucauauugcaac

SEQ ID NO: 240300 - RNA, 32 nt, Homo Sapiens
aaaccauuauuccugugacuggagaggcauca

SEQ ID NO: 240301 - RNA, 32 nt, Homo Sapiens
aacugcucacccugccuuuuucugggggcuga

SEQ ID NO: 240302 - RNA, 32 nt, Homo Sapiens
ugccucugacuuccuccuccccuggguucuga

SEQ ID NO: 240303 - RNA, 31 nt, Homo Sapiens
aguggaacaaagaaugauuuugaaagcucca

SEQ ID NO: 240304 - RNA, 32 nt, Homo Sapiens
uccuuccgccuccagagcugcccagccacggg

SEQ ID NO: 240305 - RNA, 32 nt, Homo Sapiens
uguuucuagaaucacagcucaagcauucuguu

SEQ ID NO: 240306 - RNA, 32 nt, Homo Sapiens
uucuccuuuuccccucuggauuuuaauaaaua

SEQ ID NO: 240307 - RNA, 32 nt, Homo Sapiens
gaggaaagagacugagggcacgagcuguucca

SEQ ID NO: 240308 - RNA, 29 nt, Homo Sapiens
ggacaguagaugaugucuggaaagcacaa

SEQ ID NO: 240309 - RNA, 32 nt, Homo Sapiens
gccuuccccgucccucauggcgcugcuccgac

SEQ ID NO: 240310 - RNA, 32 nt, Homo Sapiens
auggccauaguacuuuaccuguugaacucuug

SEQ ID NO: 240311 - RNA, 32 nt, Homo Sapiens
ucuuccaaacuccugggccuccgacacugguu

SEQ ID NO: 240312 - RNA, 31 nt, Homo Sapiens
ucgggauuucuaguaucaucauucuugugac

SEQ ID NO: 240313 - RNA, 32 nt, Homo Sapiens
auucaaucacuugccuuucucauucucuccug

SEQ ID NO: 240314 - RNA, 32 nt, Homo Sapiens
ucuuccccucacaccguuuucuucccaugucc

SEQ ID NO: 240315 - RNA, 30 nt, Homo Sapiens
ccuggugcagggcaagccgcagcgaccauu

SEQ ID NO: 240316 - RNA, 32 nt, Homo Sapiens
cgcuaggcccaccuccaacauugggaaucaca

SEQ ID NO: 240317 - RNA, 32 nt, Homo Sapiens
cgugugugcaggggugagaaucuggcagaugg

SEQ ID NO: 240318 - RNA, 32 nt, Homo Sapiens
cgagcucuagcuacauuuuucucuauacggaa

SEQ ID NO: 240319 - RNA, 32 nt, Homo Sapiens
aaaauguuguucugcuuuuucauuucuuaagg

SEQ ID NO: 240320 - RNA, 32 nt, Homo Sapiens
aaaucucaguguucucacuaugaccacucuga

SEQ ID NO: 240321 - RNA, 32 nt, Homo Sapiens
auaaaauaaccaauccagaugccagcagccug

SEQ ID NO: 240322 - RNA, 32 nt, Homo Sapiens
agaagugagaaacacgaugaguacauucagaa

SEQ ID NO: 240323 - RNA, 32 nt, Homo Sapiens
cauguuggggccauccuccaagagggaucucu

SEQ ID NO: 240324 - RNA, 32 nt, Homo Sapiens
uuuucaguucccuccugcccaggacugcauug

SEQ ID NO: 240325 - RNA, 32 nt, Homo Sapiens
cgccuucccacccauucgccaacgcgggaaag

SEQ ID NO: 240326 - RNA, 32 nt, Homo Sapiens
caccaaauuagccauuccauuuucuuuucugg

SEQ ID NO: 240327 - RNA, 32 nt, Homo Sapiens
cuugacuuuuauaaauaguauuuuacaucuua

SEQ ID NO: 240328 - RNA, 32 nt, Homo Sapiens
aggccucagucucccuucucccaugaggcacg

SEQ ID NO: 240329 - RNA, 32 nt, Homo Sapiens
gggcgcgcuucccggacaccccgguccccgca

SEQ ID NO: 240330 - RNA, 32 nt, Homo Sapiens
auguugccaaacuuuggaaauguuaauguuca

SEQ ID NO: 240331 - RNA, 32 nt, Homo Sapiens
guucccucuccucuccucauucccaacccaaa

SEQ ID NO: 240332 - RNA, 32 nt, Homo Sapiens
gcaaagaaaugccaccugacucaaaggcaaag

SEQ ID NO: 240333 - RNA, 32 nt, Homo Sapiens
cuccucucccacaucaggcuggcacucugcac

SEQ ID NO: 240334 - RNA, 32 nt, Homo Sapiens
auauccugucuggcagaguguuuugguagcua

SEQ ID NO: 240335 - RNA, 32 nt, Homo Sapiens
auuguccuacuaccugcuuuccagguccagau

SEQ ID NO: 240336 - RNA, 32 nt, Homo Sapiens
uggauaagccuguuuuaaccugcuaugauggg

SEQ ID NO: 240337 - RNA, 31 nt, Homo Sapiens
gcguugcugccggccuccccccgcgccuagu

SEQ ID NO: 240338 - RNA, 32 nt, Homo Sapiens
aacaucaucacuguucuuagaaauaucagccu

SEQ ID NO: 240339 - RNA, 32 nt, Homo Sapiens
gguaaaacaaaguggcacagucauccacacca

SEQ ID NO: 240340 - RNA, 32 nt, Homo Sapiens
ucugccuccuuuucuuuuuucuuucuuuuuug

SEQ ID NO: 240341 - RNA, 32 nt, Homo Sapiens
auauuaucacaguaugcacacacacacacaca

SEQ ID NO: 240342 - RNA, 32 nt, Homo Sapiens
gggggucugccagcuggggcccucccugucgc

SEQ ID NO: 240343 - RNA, 32 nt, Homo Sapiens
gugaaauaagauucauccauuuuggaagccag

SEQ ID NO: 240344 - RNA, 32 nt, Homo Sapiens
uuccggcgcuccgcggccccaagcgcccuccu

SEQ ID NO: 240345 - RNA, 32 nt, Homo Sapiens
accucugccgcgugugccugggcccccuccuu

SEQ ID NO: 240346 - RNA, 32 nt, Homo Sapiens
cauaaggagcccaguguuccuguucaugaaau

SEQ ID NO: 240347 - RNA, 32 nt, Homo Sapiens
aggagccggagccgcucaaacccggcgggggc

SEQ ID NO: 240348 - RNA, 32 nt, Homo Sapiens
uuaauaaagcaucuguaacauucuggauuaau

SEQ ID NO: 240349 - RNA, 32 nt, Homo Sapiens
cuguugucauuuccaaauuccuagaaaaguuu

SEQ ID NO: 240350 - RNA, 32 nt, Homo Sapiens
uacuggaacuauugaauaaaucuuuuauuuuc

SEQ ID NO: 240351 - RNA, 32 nt, Homo Sapiens
guugguguugaaugaaguguucagauggauaa

SEQ ID NO: 240352 - RNA, 32 nt, Homo Sapiens
augacaggacauuugacaugagucuccagaua

SEQ ID NO: 240353 - RNA, 32 nt, Homo Sapiens
uauuuuauagugauaaagauuugauaaugcaa

SEQ ID NO: 240354 - RNA, 32 nt, Homo Sapiens
ggaagcauaauuacgaacauuuaggaaccaau

SEQ ID NO: 240355 - RNA, 32 nt, Homo Sapiens
ucccuuuccuucccuucgucuucccuaagcua

SEQ ID NO: 240356 - RNA, 32 nt, Homo Sapiens
gacaucaugguguuuucuuaaugccucacauu

SEQ ID NO: 240357 - RNA, 32 nt, Homo Sapiens
ggaguucuaugccuauggagccacagugccuc

SEQ ID NO: 240358 - RNA, 32 nt, Homo Sapiens
auaacugaauaaaaaauaaauaaaauggauag

SEQ ID NO: 240359 - RNA, 32 nt, Homo Sapiens
augacuguucuaauaaaugaucuuaaaacagu

SEQ ID NO: 240360 - RNA, 32 nt, Homo Sapiens
ggagccuuuugcuggcuguagaccagucuaga

SEQ ID NO: 240361 - RNA, 32 nt, Homo Sapiens
uguaaagacuaaaaggcguuugcucugagacu

SEQ ID NO: 240362 - RNA, 32 nt, Homo Sapiens
ucuguuuaguagucauauuuuaaaagauaauc

SEQ ID NO: 240363 - RNA, 31 nt, Homo Sapiens
gucuccagggcccacaccugagucaugccuu

SEQ ID NO: 240364 - RNA, 32 nt, Homo Sapiens
gccacccaggacgaugagcggcugagauggag

SEQ ID NO: 240365 - RNA, 32 nt, Homo Sapiens
cccacccagucuccccgcccccaaggguccga

SEQ ID NO: 240366 - RNA, 32 nt, Homo Sapiens
agcggcccucggagguacccaggccccacggc

SEQ ID NO: 240367 - RNA, 32 nt, Homo Sapiens
uuacaggugugagccaccacacccggccccca

SEQ ID NO: 240368 - RNA, 32 nt, Homo Sapiens
guccagcgcucgccgacaggggccugggcugu

SEQ ID NO: 240369 - RNA, 29 nt, Homo Sapiens
ccgaggaggaggggcgggacgccguggag

SEQ ID NO: 240370 - RNA, 32 nt, Homo Sapiens
gccuuggccucccagauugcuggguuuacagg

SEQ ID NO: 240371 - RNA, 32 nt, Homo Sapiens
uaguacaccaauuuuccaacuuuuucaucuug

SEQ ID NO: 240372 - RNA, 32 nt, Homo Sapiens
uggggcugggguggagggcgggacagaggggc

SEQ ID NO: 240373 - RNA, 32 nt, Homo Sapiens
guauuugaaggaaggucuaaccaggggguuuu

SEQ ID NO: 240374 - RNA, 32 nt, Homo Sapiens
uccagugaagcacgaggucuugguuccagggu

SEQ ID NO: 240375 - RNA, 32 nt, Homo Sapiens
auagcugccgcuugcgcagaggacccggggag

SEQ ID NO: 240376 - RNA, 32 nt, Homo Sapiens
caucaaagaacaaagacagacuggaaaguaug

SEQ ID NO: 240377 - RNA, 32 nt, Homo Sapiens
gaccaagaugacugauggaaaacucuccaccu

SEQ ID NO: 240378 - RNA, 32 nt, Homo Sapiens
ggauacuaggggcuaacuuuuguguugacucu

SEQ ID NO: 240379 - RNA, 32 nt, Homo Sapiens
ggggggcugggacuggggagggggcagccacc

SEQ ID NO: 240380 - RNA, 32 nt, Homo Sapiens
cucaaaaaucagccccaaaaagguauuaucca

SEQ ID NO: 240381 - RNA, 32 nt, Homo Sapiens
gcaggauguugcacuagcuugggguagaugcu

SEQ ID NO: 240382 - RNA, 32 nt, Homo Sapiens
agauuuuuaauucugugauuguguguaugugu

SEQ ID NO: 240383 - RNA, 32 nt, Homo Sapiens
guaccagcucuuuguacgucugguagaauuug

SEQ ID NO: 240384 - RNA, 32 nt, Homo Sapiens
cuaggaaaacgaagcuuccacgacauaaaagu

SEQ ID NO: 240385 - RNA, 32 nt, Homo Sapiens
uagucccuggggauuucagaucuuaggcuguu

SEQ ID NO: 240386 - RNA, 32 nt, Homo Sapiens
cagacguccugggauugaaagaauguguguga

SEQ ID NO: 240387 - RNA, 32 nt, Homo Sapiens
aguggaagcugagccugcuagacuggugacug

SEQ ID NO: 240388 - RNA, 32 nt, Homo Sapiens
ggcucccuccggacgggccucauccaacuccg

SEQ ID NO: 240389 - RNA, 32 nt, Homo Sapiens
agguagcuguuagggucuuguucugugaagau

SEQ ID NO: 240390 - RNA, 32 nt, Homo Sapiens
uccaaacugccgcccagaugggcuuguucuuc

SEQ ID NO: 240391 - RNA, 32 nt, Homo Sapiens
gauuaauguauguaauuucugauaaaaguaag

SEQ ID NO: 240392 - RNA, 32 nt, Homo Sapiens
gaguuaccaaaggcuuguuuuuucuugagcag

SEQ ID NO: 240393 - RNA, 32 nt, Homo Sapiens
uguaucucagcaccacccucucccucugugcc

SEQ ID NO: 240394 - RNA, 32 nt, Homo Sapiens
ggagggauagagacgcagauuucagauguaag

SEQ ID NO: 240395 - RNA, 32 nt, Homo Sapiens
gucucucggaagcccucgugaggacucggacc

SEQ ID NO: 240396 - RNA, 30 nt, Homo Sapiens
agcacaccuuggaugggggaggcgggcagc

SEQ ID NO: 240397 - RNA, 31 nt, Homo Sapiens
ggagucauggucugccugccuggggcauucc

SEQ ID NO: 240398 - RNA, 32 nt, Homo Sapiens
gugagaaagaaugugccaagauaccuggcucc

SEQ ID NO: 240399 - RNA, 32 nt, Homo Sapiens
agaaagaugucuuuuuauuuuaaacuuuuguu

SEQ ID NO: 240400 - RNA, 32 nt, Homo Sapiens
ccgccgccacagcugcagucagcaccgucacc

SEQ ID NO: 240401 - RNA, 32 nt, Homo Sapiens
gcauccuggggaugugcugagagugugcgcga

SEQ ID NO: 240402 - RNA, 32 nt, Homo Sapiens
uccugaaacagcacguuggaaaacagaagcua

SEQ ID NO: 240403 - RNA, 32 nt, Homo Sapiens
agacagcagcugcuaugcacacuggaguccac

SEQ ID NO: 240404 - RNA, 32 nt, Homo Sapiens
uuccuccuguguacagggaagagagggguaca

SEQ ID NO: 240405 - RNA, 31 nt, Homo Sapiens
guagguccucaauaaauauuuauuaaaugau

SEQ ID NO: 240406 - RNA, 32 nt, Homo Sapiens
aaaggaccaaaauaaaagaaaaaugaauuaug

SEQ ID NO: 240407 - RNA, 32 nt, Homo Sapiens
ccucucuuccagggcugccguccacacucucc

SEQ ID NO: 240408 - RNA, 32 nt, Homo Sapiens
ugccuccuuggaacuggguguugguguccaug

SEQ ID NO: 240409 - RNA, 32 nt, Homo Sapiens
ccucggcuccauggugggagggggcucugguc

SEQ ID NO: 240410 - RNA, 32 nt, Homo Sapiens
aguuuuacagcuuugccuagcauagcgaauau

SEQ ID NO: 240411 - RNA, 32 nt, Homo Sapiens
ucagcagucuagccuuuggaugaccuauuuga

SEQ ID NO: 240412 - RNA, 32 nt, Homo Sapiens
uagacaugauaaaagaaacauuuguauguucu

SEQ ID NO: 240413 - RNA, 32 nt, Homo Sapiens
gcucuggugccccuccucccagcaugcucugg

SEQ ID NO: 240414 - RNA, 32 nt, Homo Sapiens
acagacuccuccccgaguccugcccuggaacc

SEQ ID NO: 240415 - RNA, 32 nt, Homo Sapiens
gacucgccggagcgcacaggggugugggcgga

SEQ ID NO: 240416 - RNA, 32 nt, Homo Sapiens
agggggcugucaugcgguuuccaaggugcaca

SEQ ID NO: 240417 - RNA, 32 nt, Homo Sapiens
cgcguccguccugcucgccgcgcauggccggg

SEQ ID NO: 240418 - RNA, 32 nt, Homo Sapiens
gucuauuucuaaaagccaaucuaugagcuucu

SEQ ID NO: 240419 - RNA, 32 nt, Homo Sapiens
guuccugaagcguccagcacuccggcgagucu

SEQ ID NO: 240420 - RNA, 32 nt, Homo Sapiens
ggauugguugguuuuucuuuuuuuuuucucuu

SEQ ID NO: 240421 - RNA, 32 nt, Homo Sapiens
gagcuuucacaauugcagcagaugaagaucca

SEQ ID NO: 240422 - RNA, 32 nt, Homo Sapiens
auugccccgggaaccguuucugcuguacuauc

SEQ ID NO: 240423 - RNA, 32 nt, Homo Sapiens
uuccuguuaggagagcugaggccagcugccca

SEQ ID NO: 240424 - RNA, 32 nt, Homo Sapiens
cuuuggagcagaagggcuggguccuggggcca

SEQ ID NO: 240425 - RNA, 32 nt, Homo Sapiens
cagcagcagcagcuggggagugucccuccaac

SEQ ID NO: 240426 - RNA, 32 nt, Homo Sapiens
aaaaaucaggauggugggaggggccgagucuu

SEQ ID NO: 240427 - RNA, 28 nt, Homo Sapiens
cagccggcggcgccgccgagugagggga

SEQ ID NO: 240428 - RNA, 32 nt, Homo Sapiens
ccugguccugauggcagaacccacccgauccc

SEQ ID NO: 240429 - RNA, 32 nt, Homo Sapiens
caugggagauacaauuccaaguucucgcuucc

SEQ ID NO: 240430 - RNA, 32 nt, Homo Sapiens
cggcagcugcucagcaucccccgggcgggcaa

SEQ ID NO: 240431 - RNA, 32 nt, Homo Sapiens
uaauuaccugaagaauauauuuuuuaguacug

SEQ ID NO: 240432 - RNA, 32 nt, Homo Sapiens
ggccgcggcguuccggaacccccgcacccacg

SEQ ID NO: 240433 - RNA, 32 nt, Homo Sapiens
cuggaaugagguuacuuuuuauggcuuaucaa

SEQ ID NO: 240434 - RNA, 32 nt, Homo Sapiens
ugcaccgcgugugcccgccgccgcccccugcg

SEQ ID NO: 240435 - RNA, 32 nt, Homo Sapiens
uaggcaagcuccuggggucugguuauguggaa

SEQ ID NO: 240436 - RNA, 32 nt, Homo Sapiens
cucuugaggauaucaaggaacuggagcccgug

SEQ ID NO: 240437 - RNA, 32 nt, Homo Sapiens
ggaucuuaacuguguucgcauuuuuuauccaa

SEQ ID NO: 240438 - RNA, 32 nt, Homo Sapiens
ccauggauuccuucuggccaagaaauuaaagc

SEQ ID NO: 240439 - RNA, 32 nt, Homo Sapiens
gggcucaggagggggcggggcaggagcuggug

SEQ ID NO: 240440 - RNA, 32 nt, Homo Sapiens
aggaggcugugaggcuggagggaccagaugga

SEQ ID NO: 240441 - RNA, 32 nt, Homo Sapiens
agcugccccacagguguguuucccaucccacu

SEQ ID NO: 240442 - RNA, 32 nt, Homo Sapiens
gcauaucuucaccaacguuaaaacagagcuga

SEQ ID NO: 240443 - RNA, 32 nt, Homo Sapiens
agugucuguuuccauuuauuucccuggaauuu

SEQ ID NO: 240444 - RNA, 32 nt, Homo Sapiens
uugcauuuuuucugcccacaaugagcggggaa

SEQ ID NO: 240445 - RNA, 32 nt, Homo Sapiens
ccccuucagaauuugcagaaucaacaaauauu

SEQ ID NO: 240446 - RNA, 32 nt, Homo Sapiens
uggauguuuucaucagaaaauuuucauguuuu

SEQ ID NO: 240447 - RNA, 32 nt, Homo Sapiens
acaauaugaagauagggaaugcaggaaaacau

SEQ ID NO: 240448 - RNA, 32 nt, Homo Sapiens
gcguuccauuuucacacuucacagucaugaaa

SEQ ID NO: 240449 - RNA, 32 nt, Homo Sapiens
cggggcuggaggcgguggcugcgguugcggga

SEQ ID NO: 240450 - RNA, 32 nt, Homo Sapiens
agggcaauauuuuuugaucuccucuucucgua

SEQ ID NO: 240451 - RNA, 32 nt, Homo Sapiens
ugguagggggacccggggggcuccuccccgcu

SEQ ID NO: 240452 - RNA, 32 nt, Homo Sapiens
acccccaaggacccugccagccacagaccucc

SEQ ID NO: 240453 - RNA, 32 nt, Homo Sapiens
ugccacuuucaucagguuugugucucaucucc

SEQ ID NO: 240454 - RNA, 32 nt, Homo Sapiens
uacaacuuauuuacucagcuuaccuuuuugag

SEQ ID NO: 240455 - RNA, 32 nt, Homo Sapiens
cagaggcgguggcuacugcugcggccacuggg

SEQ ID NO: 240456 - RNA, 32 nt, Homo Sapiens
gguaaggccaagcgcccgccucgcuggggcca

SEQ ID NO: 240457 - RNA, 32 nt, Homo Sapiens
uauuucacaaaacaggcauaugucuaggagug

SEQ ID NO: 240458 - RNA, 32 nt, Homo Sapiens
uauaccugucugacaaggucaagcuccaagga

SEQ ID NO: 240459 - RNA, 32 nt, Homo Sapiens
uuaguuuuccaaguccguuucagucccuuccu

SEQ ID NO: 240460 - RNA, 32 nt, Homo Sapiens
ucaaucuucuaaaaaauaaaaucuggaauccu

SEQ ID NO: 240461 - RNA, 32 nt, Homo Sapiens
cagcuuccugaaguugcucaucucuaaauugc

SEQ ID NO: 240462 - RNA, 32 nt, Homo Sapiens
ugcaugaguggcaaccaccaacaugugaacug

SEQ ID NO: 240463 - RNA, 32 nt, Homo Sapiens
auacuugaaacuuggaauaaaagaaagauuua

SEQ ID NO: 240464 - RNA, 32 nt, Homo Sapiens
uaaauaugucaaagucuuugguaaauuuucaa

SEQ ID NO: 240465 - RNA, 32 nt, Homo Sapiens
gagacauguucccaagccggggcucuuguuca

SEQ ID NO: 240466 - RNA, 32 nt, Homo Sapiens
uuucuugaauugcuagggacugauguuauguu

SEQ ID NO: 240467 - RNA, 32 nt, Homo Sapiens
cuugugccaaacugacagaaaccgucaccaca

SEQ ID NO: 240468 - RNA, 32 nt, Homo Sapiens
ccuuccagccccagccuuuggagcguucauuc

SEQ ID NO: 240469 - RNA, 32 nt, Homo Sapiens
ggcagcccaaaaauguguuucuacacauauuc

SEQ ID NO: 240470 - RNA, 32 nt, Homo Sapiens
ggcuggaggacgggacgugggacggagcgagg

SEQ ID NO: 240471 - RNA, 32 nt, Homo Sapiens
uugcaggugugagccaccgcacccagccucaa

SEQ ID NO: 240472 - RNA, 32 nt, Homo Sapiens
uggggacucuguggggacgcgccccgcgccgc

SEQ ID NO: 240473 - RNA, 32 nt, Homo Sapiens
aaaaagaauguuauauuaguuuucuaaaacuc

SEQ ID NO: 240474 - RNA, 32 nt, Homo Sapiens
uugaagaguauuuuauuucuguauugaaaaug

SEQ ID NO: 240475 - RNA, 32 nt, Homo Sapiens
aagcuaccaaagagaaagauguuguaaucaca

SEQ ID NO: 240476 - RNA, 32 nt, Homo Sapiens
uagcggggcccgagcggggcccggggccccua

SEQ ID NO: 240477 - RNA, 32 nt, Homo Sapiens
uguauuaucugaaaauauauaauuucugguca

SEQ ID NO: 240478 - RNA, 32 nt, Homo Sapiens
uuuccucucaggacauacuucuggagaucaaa

SEQ ID NO: 240479 - RNA, 32 nt, Homo Sapiens
ccuccguugaugcugccgcggcugccgcgccg

SEQ ID NO: 240480 - RNA, 32 nt, Homo Sapiens
gaccucucaauccucaccauccacagagcuaa

SEQ ID NO: 240481 - RNA, 32 nt, Homo Sapiens
uaccagcauaaauuagcagagaagcucacuau

SEQ ID NO: 240482 - RNA, 32 nt, Homo Sapiens
uaaugaaagucuuuuuccuuuuccaaaaccca

SEQ ID NO: 240483 - RNA, 32 nt, Homo Sapiens
uagaaauuucaagaguauauugccaaaauaua

SEQ ID NO: 240484 - RNA, 32 nt, Homo Sapiens
ucaggucugggcucagccaguccagaguacaa

SEQ ID NO: 240485 - RNA, 32 nt, Homo Sapiens
ucagccaggaggagcaaggacaagaugcgcac

SEQ ID NO: 240486 - RNA, 32 nt, Homo Sapiens
aaaaauggacugaguucaggacccuucaagca

SEQ ID NO: 240487 - RNA, 32 nt, Homo Sapiens
ucccaaauaaauuuauaacaauugauuuuccc

SEQ ID NO: 240488 - RNA, 32 nt, Homo Sapiens
uggauuuaauuuuuuuuuuuuauuguuagacc

SEQ ID NO: 240489 - RNA, 32 nt, Homo Sapiens
guguauguguuaaugauguacuuuuuaaaaag

SEQ ID NO: 240490 - RNA, 32 nt, Homo Sapiens
cuauuuuggugaauauuuuuugaaauaguuaa

SEQ ID NO: 240491 - RNA, 32 nt, Homo Sapiens
cagcacagcuggaauuguacgguagugagcuc

SEQ ID NO: 240492 - RNA, 32 nt, Homo Sapiens
uugugaucagagggaauaaacaucuuagaggc

SEQ ID NO: 240493 - RNA, 32 nt, Homo Sapiens
aaagcagggugagcacgcuuguugguuucaaa

SEQ ID NO: 240494 - RNA, 32 nt, Homo Sapiens
gacugaagucccagcccuuccauucagccugu

SEQ ID NO: 240495 - RNA, 32 nt, Homo Sapiens
gaggcagagagugagggaaagggccuggccgg

SEQ ID NO: 240496 - RNA, 32 nt, Homo Sapiens
ccagugaacagauaagagguggaggaggugac

SEQ ID NO: 240497 - RNA, 32 nt, Homo Sapiens
gggagguucuccugccucuccucggccaggag

SEQ ID NO: 240498 - RNA, 32 nt, Homo Sapiens
gcaggccuccgucuucccagcgguuccugugc

SEQ ID NO: 240499 - RNA, 32 nt, Homo Sapiens
uguguacuugagucuuuuuuaguuuacuuaga

SEQ ID NO: 240500 - RNA, 32 nt, Homo Sapiens
guuguagaaaguuguggcuagaucucauaaau

SEQ ID NO: 240501 - RNA, 32 nt, Homo Sapiens
aacccaguguugcauuuugucuuacucugaaa

SEQ ID NO: 240502 - RNA, 32 nt, Homo Sapiens
acaucagagcgccucuucuccuccaaaggaac

SEQ ID NO: 240503 - RNA, 32 nt, Homo Sapiens
ggcagacugagcucaggagcuugagaccagcc

SEQ ID NO: 240504 - RNA, 32 nt, Homo Sapiens
cgggggcuucucuggagcuuaacaaacuuuua

SEQ ID NO: 240505 - RNA, 32 nt, Homo Sapiens
gcugcccagacacccacccucacuucucaugg

SEQ ID NO: 240506 - RNA, 32 nt, Homo Sapiens
ugcccaggggcacuuaccguguccuuuaugaa

SEQ ID NO: 240507 - RNA, 32 nt, Homo Sapiens
cgcgccugggaagccuucuuggcaccgggacc

SEQ ID NO: 240508 - RNA, 32 nt, Homo Sapiens
auaagcuagaaaagaagaaugaggcccgggga

SEQ ID NO: 240509 - RNA, 32 nt, Homo Sapiens
caccuggcucugccucccccgugcucucgggc

SEQ ID NO: 240510 - RNA, 32 nt, Homo Sapiens
ugucuucaaaucuuuuguuuucuuccuuuuug

SEQ ID NO: 240511 - RNA, 32 nt, Homo Sapiens
cccagacccagcugcuggauaggacccagccc

SEQ ID NO: 240512 - RNA, 32 nt, Homo Sapiens
uuauuaagauuuuacagcgaaacccuuacaug

SEQ ID NO: 240513 - RNA, 31 nt, Homo Sapiens
aacucagcgaauuguaauggaaagcauaugg

SEQ ID NO: 240514 - RNA, 32 nt, Homo Sapiens
auauaacuauacaguaagcauuuguauuuucu

SEQ ID NO: 240515 - RNA, 32 nt, Homo Sapiens
gaauuuauucugugguaaaucuuuugaguugu

SEQ ID NO: 240516 - RNA, 31 nt, Homo Sapiens
aguagggugggccccaauucaaggacugggg

SEQ ID NO: 240517 - RNA, 32 nt, Homo Sapiens
auauguuuauucuuuaaaaaugaugaauacuc

SEQ ID NO: 240518 - RNA, 32 nt, Homo Sapiens
acaaaagaucacauuucugggaagaugagaac

SEQ ID NO: 240519 - RNA, 32 nt, Homo Sapiens
ccgcaucacucugcaucagcacugccggccca

SEQ ID NO: 240520 - RNA, 32 nt, Homo Sapiens
cggccuggaccggaccucuccuuucgccccca

SEQ ID NO: 240521 - RNA, 32 nt, Homo Sapiens
cgggcagcagugccaucuucaccugcguggcc

SEQ ID NO: 240522 - RNA, 32 nt, Homo Sapiens
gcucagccgcaagauggcggcgcuggcggagg

SEQ ID NO: 240523 - RNA, 32 nt, Homo Sapiens
ugcuuuauuuuuccuugaaagcuagguauuua

SEQ ID NO: 240524 - RNA, 32 nt, Homo Sapiens
cucacacccguaaccgaggaagagggaggcuc

SEQ ID NO: 240525 - RNA, 32 nt, Homo Sapiens
ggucucaguuugucacccaggcuggagugcag

SEQ ID NO: 240526 - RNA, 32 nt, Homo Sapiens
gaaucucuacacucacugcgucaaagggcugg

SEQ ID NO: 240527 - RNA, 32 nt, Homo Sapiens
gucguuuccuuccugcuccugcugcacagcug

SEQ ID NO: 240528 - RNA, 32 nt, Homo Sapiens
caaacaggaccugccuaauuaccuucaaaccu

SEQ ID NO: 240529 - RNA, 32 nt, Homo Sapiens
uagauauccaacagugaggguuaagcaacaug

SEQ ID NO: 240530 - RNA, 32 nt, Homo Sapiens
cgucgcccgcggcuucggggaccgcugcggca

SEQ ID NO: 240531 - RNA, 32 nt, Homo Sapiens
cuggcacccgcggcccucuccuguuuccuucc

SEQ ID NO: 240532 - RNA, 32 nt, Homo Sapiens
auuguaucagaggguuuucucuaaucauuuuu

SEQ ID NO: 240533 - RNA, 32 nt, Homo Sapiens
gcugaaggggcaggggcuaggcugggagacga

SEQ ID NO: 240534 - RNA, 32 nt, Homo Sapiens
ggugaggggccuugcccucccccucccagccc

SEQ ID NO: 240535 - RNA, 32 nt, Homo Sapiens
uuauugcaccacguuggugcgaugugcauaca

SEQ ID NO: 240536 - RNA, 32 nt, Homo Sapiens
ucugcagcucccagcccucaacuccuuacccc

SEQ ID NO: 240537 - RNA, 32 nt, Homo Sapiens
aauaugaucugaccuuucccugauggacaguu

SEQ ID NO: 240538 - RNA, 32 nt, Homo Sapiens
uacugcuguguggucuuaauuauuaagaaaca

SEQ ID NO: 240539 - RNA, 32 nt, Homo Sapiens
ggugcccauggauaguacguguguacacaugu

SEQ ID NO: 240540 - RNA, 32 nt, Homo Sapiens
gggguggugcagggcaggggugguauauccug

SEQ ID NO: 240541 - RNA, 30 nt, Homo Sapiens
agagaagagaagccucuucagggugaguga

SEQ ID NO: 240542 - RNA, 32 nt, Homo Sapiens
guugagggacauuuggauuguucccacuucuu

SEQ ID NO: 240543 - RNA, 32 nt, Homo Sapiens
cacaagucaaggaaggccgacaaccaccagaa

SEQ ID NO: 240544 - RNA, 32 nt, Homo Sapiens
aaguacaagaugccuucaugaccuacacaaug

SEQ ID NO: 240545 - RNA, 32 nt, Homo Sapiens
agaacuagagccaucaggggcugggcucacug

SEQ ID NO: 240546 - RNA, 32 nt, Homo Sapiens
uguauagaacaaguacagcauuuuacuacaua

SEQ ID NO: 240547 - RNA, 32 nt, Homo Sapiens
ucucugcgggaagugagccgccggccuccggc

SEQ ID NO: 240548 - RNA, 32 nt, Homo Sapiens
acaacacucccucuccugggaccuccuugccu

SEQ ID NO: 240549 - RNA, 30 nt, Homo Sapiens
acagguuugaaaucugcagaagcucgucuu

SEQ ID NO: 240550 - RNA, 32 nt, Homo Sapiens
aguuauuaaaauuguuguccgguuuacuuuaa

SEQ ID NO: 240551 - RNA, 32 nt, Homo Sapiens
ccuggccucuucuccccucucuucccagcagc

SEQ ID NO: 240552 - RNA, 32 nt, Homo Sapiens
augugagauagagucuaacaguucuuacuuca

SEQ ID NO: 240553 - RNA, 32 nt, Homo Sapiens
aauuauaucuuccccgcccaccucacaggcuu

SEQ ID NO: 240554 - RNA, 32 nt, Homo Sapiens
cacaugcacacacccauaaacacacacacagu

SEQ ID NO: 240555 - RNA, 32 nt, Homo Sapiens
gaaaugcuuacgcuugaaacacugcagucauu

SEQ ID NO: 240556 - RNA, 32 nt, Homo Sapiens
agcacccuuucugggggucugcaggucacugc

SEQ ID NO: 240557 - RNA, 32 nt, Homo Sapiens
aauaguauuuucauuacuuucaucugaaacau

SEQ ID NO: 240558 - RNA, 32 nt, Homo Sapiens
gcaugggucuccacaugcaacuucugccggaa

SEQ ID NO: 240559 - RNA, 32 nt, Homo Sapiens
guauuuaaugaaauacuaguucuauuuaaugu

SEQ ID NO: 240560 - RNA, 32 nt, Homo Sapiens
uauuauuucaaaagaauaugucuuaaaaggga

SEQ ID NO: 240561 - RNA, 32 nt, Homo Sapiens
ccucagugcccccuuuuggagagaugagcugu

SEQ ID NO: 240562 - RNA, 32 nt, Homo Sapiens
ugucugauagauaacuaacaaaauaguuuuag

SEQ ID NO: 240563 - RNA, 32 nt, Homo Sapiens
agaguagaacagauaaucagugugucuaaauu

SEQ ID NO: 240564 - RNA, 32 nt, Homo Sapiens
gcgggggcgcugcggcacagcugguuugagca

SEQ ID NO: 240565 - RNA, 32 nt, Homo Sapiens
augauuuuugucaucagccaccauccuauugc

SEQ ID NO: 240566 - RNA, 32 nt, Homo Sapiens
ucugccuuauggcuagggaacugucaugucua

SEQ ID NO: 240567 - RNA, 32 nt, Homo Sapiens
uuauuauggaaauguugucuuuuauacuuagu

SEQ ID NO: 240568 - RNA, 32 nt, Homo Sapiens
cuugggcaaacguccuuccucacggggcgccu

SEQ ID NO: 240569 - RNA, 32 nt, Homo Sapiens
cuugguggcaggagcccggggaggagauuaua

SEQ ID NO: 240570 - RNA, 30 nt, Homo Sapiens
cgcagcgccucgguccagccggcgcgcucc

SEQ ID NO: 240571 - RNA, 32 nt, Homo Sapiens
gcuuucucaaucggaaaagagcuuaggaaaca

SEQ ID NO: 240572 - RNA, 32 nt, Homo Sapiens
uuucuuaggcuuuaaaggaaaagaaggaagga

SEQ ID NO: 240573 - RNA, 32 nt, Homo Sapiens
uuucauacagcuuugucugauauuuagagaca

SEQ ID NO: 240574 - RNA, 32 nt, Homo Sapiens
ccaggacccguccagaccucacccugugugua

SEQ ID NO: 240575 - RNA, 32 nt, Homo Sapiens
gacaaaacugucagggucuagccaagccaggc

SEQ ID NO: 240576 - RNA, 32 nt, Homo Sapiens
uucugccuuuuuaaguuuuuguucaugaugga

SEQ ID NO: 240577 - RNA, 32 nt, Homo Sapiens
guauaccugacauauauaguagauauauauac

SEQ ID NO: 240578 - RNA, 32 nt, Homo Sapiens
agaaaacccgcgggagccucgcccggacccag

SEQ ID NO: 240579 - RNA, 32 nt, Homo Sapiens
cacgucccccacguccucuccuucucgccacu

SEQ ID NO: 240580 - RNA, 32 nt, Homo Sapiens
uacauuugcuccauccuccugggauuggcugu

SEQ ID NO: 240581 - RNA, 32 nt, Homo Sapiens
gguuacuccagauaagugggugaacuuauugu

SEQ ID NO: 240582 - RNA, 32 nt, Homo Sapiens
ucugggguccuccauggaaagcagcucccgaa

SEQ ID NO: 240583 - RNA, 31 nt, Homo Sapiens
gaaaacauaaagaaaagaugagcaaagaugg

SEQ ID NO: 240584 - RNA, 32 nt, Homo Sapiens
ccauaugaauguuuaaaaugugguaaggccug

SEQ ID NO: 240585 - RNA, 32 nt, Homo Sapiens
caauauggaaaacucagcaguuuuccucuccc

SEQ ID NO: 240586 - RNA, 32 nt, Homo Sapiens
cagagcacagcgccgccgcggcccucggcaag

SEQ ID NO: 240587 - RNA, 32 nt, Homo Sapiens
gaguuuuauugagguagcuacgugauuaaaug

SEQ ID NO: 240588 - RNA, 32 nt, Homo Sapiens
ucucugugaccugccccgcccagcugcaccug

SEQ ID NO: 240589 - RNA, 32 nt, Homo Sapiens
cgacuccgggccucccgccgggauccgacgcg

SEQ ID NO: 240590 - RNA, 32 nt, Homo Sapiens
aaggcaagccucuucccgugugaucuuuauaa

SEQ ID NO: 240591 - RNA, 32 nt, Homo Sapiens
gcuucugcauuuggcuuucuaccuguuccaag

SEQ ID NO: 240592 - RNA, 32 nt, Homo Sapiens
cgccccacucccuuacguguucagucccgaau

SEQ ID NO: 240593 - RNA, 32 nt, Homo Sapiens
ucugggcaggcagagcagucaaggcugcccag

SEQ ID NO: 240594 - RNA, 32 nt, Homo Sapiens
gaacuugucuugggucugaaaaagcugagaag

SEQ ID NO: 240595 - RNA, 32 nt, Homo Sapiens
cucagcaaggcuuuuccuguugggagucacag

SEQ ID NO: 240596 - RNA, 32 nt, Homo Sapiens
uuauuauuauugugaaaauauuauuaacacug

SEQ ID NO: 240597 - RNA, 32 nt, Homo Sapiens
ggggugaggauacaaagacauugucuugcaua

SEQ ID NO: 240598 - RNA, 32 nt, Homo Sapiens
agcuggagagguugaggccuacagcggggaaa

SEQ ID NO: 240599 - RNA, 32 nt, Homo Sapiens
aucggaauguuaaauuaauguaaagggacagc

SEQ ID NO: 240600 - RNA, 32 nt, Homo Sapiens
caugauaauuucugucccacugugucucauua

SEQ ID NO: 240601 - RNA, 32 nt, Homo Sapiens
uaauuuguaaucuuguuuuguaagaauuuauc

SEQ ID NO: 240602 - RNA, 32 nt, Homo Sapiens
uauaauaaaugggaaaugucgauuuucaauaa

SEQ ID NO: 240603 - RNA, 32 nt, Homo Sapiens
uuuuaaguuaggaugcuuuuuaacagccuuua

SEQ ID NO: 240604 - RNA, 32 nt, Homo Sapiens
cauuuguuuauuauuuacuuggauuagacuca

SEQ ID NO: 240605 - RNA, 32 nt, Homo Sapiens
aucaaggauuuuagcugaaauccuuuaagaga

SEQ ID NO: 240606 - RNA, 32 nt, Homo Sapiens
uugaugcuuuauaauccugacucucgacgugu

SEQ ID NO: 240607 - RNA, 32 nt, Homo Sapiens
gaaacauaucuuccuguuuucuguugucaaau

SEQ ID NO: 240608 - RNA, 32 nt, Homo Sapiens
uuuuaaccaaaaaaguuuuucuuauaaaauaa

SEQ ID NO: 240609 - RNA, 32 nt, Homo Sapiens
cccuuagcaaggaaauaaaaagcuagguauga

SEQ ID NO: 240610 - RNA, 32 nt, Homo Sapiens
acacccguggugaugggccucuggccaccccu

SEQ ID NO: 240611 - RNA, 32 nt, Homo Sapiens
uguugaagucuguuauggauauguaggguaag

SEQ ID NO: 240612 - RNA, 32 nt, Homo Sapiens
agcgugcagaccagcccugucccgccucccug

SEQ ID NO: 240613 - RNA, 32 nt, Homo Sapiens
gagaaaauauauuuacuguguuuaucaauacu

SEQ ID NO: 240614 - RNA, 32 nt, Homo Sapiens
ccguauuaaggguugacaauuacuacaucuuu

SEQ ID NO: 240615 - RNA, 32 nt, Homo Sapiens
gugggcccucuggaauugugcuccucacaaag

SEQ ID NO: 240616 - RNA, 32 nt, Homo Sapiens
uauuuaacaaaguagaagggaauccauugcua

SEQ ID NO: 240617 - RNA, 32 nt, Homo Sapiens
ccuucgguuucuuucuagcucaucucacucug

SEQ ID NO: 240618 - RNA, 28 nt, Homo Sapiens
uuaauguuguauuuuauguguuccuaag

SEQ ID NO: 240619 - RNA, 32 nt, Homo Sapiens
cgggccuuggcagcgccgccccugcccacacu

SEQ ID NO: 240620 - RNA, 32 nt, Homo Sapiens
gggucuaaaauaaucgcuaguguuaugucaaa

SEQ ID NO: 240621 - RNA, 32 nt, Homo Sapiens
ucauguuuuuauucccuuuauucuucuuuugc

SEQ ID NO: 240622 - RNA, 32 nt, Homo Sapiens
ugaaacucuuagccugcagaauuuaagacaau

SEQ ID NO: 240623 - RNA, 32 nt, Homo Sapiens
uggugcagcgucgagcauccucgccgaguccu

SEQ ID NO: 240624 - RNA, 32 nt, Homo Sapiens
gcggugcaagagagcugagggaggcgcgaggg

SEQ ID NO: 240625 - RNA, 27 nt, Homo Sapiens
agccuuuccuucuuuccuucagcccca

SEQ ID NO: 240626 - RNA, 32 nt, Homo Sapiens
cgggccuggcugcgcccccggaccucgcggga

SEQ ID NO: 240627 - RNA, 32 nt, Homo Sapiens
uccucucugaggaaacaaagucaacugagacu

SEQ ID NO: 240628 - RNA, 32 nt, Homo Sapiens
cugcaucgugguuuagcuuuuacuuucaagcu

SEQ ID NO: 240629 - RNA, 32 nt, Homo Sapiens
ccuaaauaauuucuuucuaccuccuguaucau

SEQ ID NO: 240630 - RNA, 32 nt, Homo Sapiens
auuaccuagguccaucaucauguaccaagcca

SEQ ID NO: 240631 - RNA, 32 nt, Homo Sapiens
acacagggucuggccuggcucacgugggugag

SEQ ID NO: 240632 - RNA, 32 nt, Homo Sapiens
guaaaggugacuuagagaaaagagacauuuug

SEQ ID NO: 240633 - RNA, 31 nt, Homo Sapiens
gccgccauggagcagcgccgcgucaccgacu

SEQ ID NO: 240634 - RNA, 32 nt, Homo Sapiens
aggcuuguucuuccacuucacccacccugacu

SEQ ID NO: 240635 - RNA, 32 nt, Homo Sapiens
gccacaaguccuuguuucuggaucugccccac

SEQ ID NO: 240636 - RNA, 32 nt, Homo Sapiens
agccugcaauuuuucuuucucuagaaaggcau

SEQ ID NO: 240637 - RNA, 32 nt, Homo Sapiens
ccagcaaggaucaacaccuguggauggagagg

SEQ ID NO: 240638 - RNA, 32 nt, Homo Sapiens
agaugggguuucacccuguuagccaggaaguu

SEQ ID NO: 240639 - RNA, 32 nt, Homo Sapiens
cacggacagcgccggcuugguggucaagcggu

SEQ ID NO: 240640 - RNA, 32 nt, Homo Sapiens
uguuugcugugaccagauuuucaugcaucaaa

SEQ ID NO: 240641 - RNA, 32 nt, Homo Sapiens
gcagcugaagauggaaagagccaggcgaaggg

SEQ ID NO: 240642 - RNA, 32 nt, Homo Sapiens
uugcuagccgugguccuuuuggcuaugguugc

SEQ ID NO: 240643 - RNA, 32 nt, Homo Sapiens
uuuaucacuauaucuucaguaauaauaaacag

SEQ ID NO: 240644 - RNA, 32 nt, Homo Sapiens
cccgugcccucccucccacuggcucuucgggc

SEQ ID NO: 240645 - RNA, 32 nt, Homo Sapiens
gaaggcugcagcccagcccgccugagacacga

SEQ ID NO: 240646 - RNA, 32 nt, Homo Sapiens
uuauuugaugcaaaaauaauauaugaaaagag

SEQ ID NO: 240647 - RNA, 32 nt, Homo Sapiens
ggagcagccaccccggcccgggacuggcgcaa

SEQ ID NO: 240648 - RNA, 32 nt, Homo Sapiens
uuuuucuugcugcuccuccccccaucaccuga

SEQ ID NO: 240649 - RNA, 32 nt, Homo Sapiens
agaugcgagcgcgccgggaagggcugcgaaga

SEQ ID NO: 240650 - RNA, 32 nt, Homo Sapiens
cgggaaccucgcggggcuggcgggcgccgcac

SEQ ID NO: 240651 - RNA, 32 nt, Homo Sapiens
uuugcagagaauaaaaagagaaguugcauguu

SEQ ID NO: 240652 - RNA, 32 nt, Homo Sapiens
guggguacagcuugagaggggggcagcucccu

SEQ ID NO: 240653 - RNA, 32 nt, Homo Sapiens
ccucaucacccgccucacagggcccgcccugc

SEQ ID NO: 240654 - RNA, 32 nt, Homo Sapiens
cugcgagacuggggccguggcugcuggucccg

SEQ ID NO: 240655 - RNA, 32 nt, Homo Sapiens
cccaagcugcaugauugcucuuucuccuucuu

SEQ ID NO: 240656 - RNA, 32 nt, Homo Sapiens
ugcggcuccgcgggacuccagggcgcggcugc

SEQ ID NO: 240657 - RNA, 32 nt, Homo Sapiens
ugugcaucucccuguuucagggccagaacugg

SEQ ID NO: 240658 - RNA, 32 nt, Homo Sapiens
acucacagaacuuaaagaaaacaaauaaucca

SEQ ID NO: 240659 - RNA, 32 nt, Homo Sapiens
cacauccacagcacaacugccccgcuggagag

SEQ ID NO: 240660 - RNA, 32 nt, Homo Sapiens
ucucaaaccccgcucugccccauuguucuccu

SEQ ID NO: 240661 - RNA, 32 nt, Homo Sapiens
ggaggggugacuguccguggaggggugacugu

SEQ ID NO: 240662 - RNA, 32 nt, Homo Sapiens
ucucggcugcacuaaagcuggcacucccccag

SEQ ID NO: 240663 - RNA, 30 nt, Homo Sapiens
cuuuaguaccuugccacucuuuuaaaacgc

SEQ ID NO: 240664 - RNA, 32 nt, Homo Sapiens
accagggagugaaggauagugauucuugagag

SEQ ID NO: 240665 - RNA, 32 nt, Homo Sapiens
gauggacuuuaaaagaugcuguguaacuaaac

SEQ ID NO: 240666 - RNA, 32 nt, Homo Sapiens
gacagguggcggccgggcaggcacucuuaagc

SEQ ID NO: 240667 - RNA, 32 nt, Homo Sapiens
cgaggugguggugaaagagguucuggcgggag

SEQ ID NO: 240668 - RNA, 32 nt, Homo Sapiens
acguucugucucccagcacacugauucuuucu

SEQ ID NO: 240669 - RNA, 32 nt, Homo Sapiens
ccugcccaugcagcugaagacaguggggcaac

SEQ ID NO: 240670 - RNA, 32 nt, Homo Sapiens
ugccagggacgccgagggccugaccaggggcc

SEQ ID NO: 240671 - RNA, 28 nt, Homo Sapiens
ccacagcugugccuuauguguuucaaga

SEQ ID NO: 240672 - RNA, 32 nt, Homo Sapiens
ccgggucauccucuccuauacuagggccuauu

SEQ ID NO: 240673 - RNA, 32 nt, Homo Sapiens
agaaggccgaggggcagagguggcucucggcc

SEQ ID NO: 240674 - RNA, 32 nt, Homo Sapiens
gcucguggugguggagagggcagcugguguua

SEQ ID NO: 240675 - RNA, 32 nt, Homo Sapiens
cuuggguguucgcgucgccacuucggcuucuc

SEQ ID NO: 240676 - RNA, 32 nt, Homo Sapiens
agaaagucuuaugauaaaagugaggcaaauuu

SEQ ID NO: 240677 - RNA, 32 nt, Homo Sapiens
acaauacaaaaagcccuaaaugaacuguuaac

SEQ ID NO: 240678 - RNA, 32 nt, Homo Sapiens
gaaaacaaaaauauaauugugucuaccuuccu

SEQ ID NO: 240679 - RNA, 32 nt, Homo Sapiens
cuuggccucugccuccuuggccccacauuucu

SEQ ID NO: 240680 - RNA, 32 nt, Homo Sapiens
gcacacagaauaguucuuucugcuggucuguu

SEQ ID NO: 240681 - RNA, 32 nt, Homo Sapiens
aguguuugaaagauguauggugaucuugaaac

SEQ ID NO: 240682 - RNA, 32 nt, Homo Sapiens
uuuccuucaugcacuuggugauaaacguuuuc

SEQ ID NO: 240683 - RNA, 32 nt, Homo Sapiens
augaaugauauuguuuuguaacuuuuuaaaaa

SEQ ID NO: 240684 - RNA, 32 nt, Homo Sapiens
guagcugccugccauggcugagaggugugccu

SEQ ID NO: 240685 - RNA, 28 nt, Homo Sapiens
cuggaagaagcugaacauuugcuucagg

SEQ ID NO: 240686 - RNA, 32 nt, Homo Sapiens
caagauaacgacccucaacagcggcggaaagg

SEQ ID NO: 240687 - RNA, 32 nt, Homo Sapiens
gcuccgugcccgagugggcguccccagcgagc

SEQ ID NO: 240688 - RNA, 32 nt, Homo Sapiens
gggugccagaacucaagguucaguggacacau

SEQ ID NO: 240689 - RNA, 32 nt, Homo Sapiens
gaaggaggcagacugggccuggggcaugugga

SEQ ID NO: 240690 - RNA, 32 nt, Homo Sapiens
ggaagugauggguugaggaaggaagacuagau

SEQ ID NO: 240691 - RNA, 32 nt, Homo Sapiens
gaauaaauuguuaauccaaucaccuacaaaaa

SEQ ID NO: 240692 - RNA, 32 nt, Homo Sapiens
uuuuugaccaaacaguagauauuuucuauuuu

SEQ ID NO: 240693 - RNA, 32 nt, Homo Sapiens
ccucuucuuuucccuuuuugucccagagcuca

SEQ ID NO: 240694 - RNA, 32 nt, Homo Sapiens
uugugacuuugcugaaugguauguaaacuugu

SEQ ID NO: 240695 - RNA, 32 nt, Homo Sapiens
gccccacuuuccuuuuucuuccuccuccagca

SEQ ID NO: 240696 - RNA, 32 nt, Homo Sapiens
cauucaguacagcacuagauauuguuaauuuc

SEQ ID NO: 240697 - RNA, 32 nt, Homo Sapiens
agaaguccacccaaaaguucuguguuauuuug

SEQ ID NO: 240698 - RNA, 32 nt, Homo Sapiens
aagggaaaugacuacaaacuuucaaagcaaau

SEQ ID NO: 240699 - RNA, 32 nt, Homo Sapiens
auaaaugauccauuuaacuauucaucagaggu

SEQ ID NO: 240700 - RNA, 31 nt, Homo Sapiens
agagagccgggccccggacggacguugguuc

SEQ ID NO: 240701 - RNA, 32 nt, Homo Sapiens
acuguggagcugucacaucuccauacugaaaa

SEQ ID NO: 240702 - RNA, 32 nt, Homo Sapiens
cccuggccuuggcggcuauuuuugccaccugc

SEQ ID NO: 240703 - RNA, 32 nt, Homo Sapiens
gaaaggcuaggaccauguccucauugacccag

SEQ ID NO: 240704 - RNA, 29 nt, Homo Sapiens
agaucugggggacagaggaaggccuccug

SEQ ID NO: 240705 - RNA, 32 nt, Homo Sapiens
gaaacauaugugagguuguuucccucuucagc

SEQ ID NO: 240706 - RNA, 32 nt, Homo Sapiens
uaaauuaucuuccguucauuuauccuucgucu

SEQ ID NO: 240707 - RNA, 32 nt, Homo Sapiens
gacagaaugugcauggaguggagcaugugugu

SEQ ID NO: 240708 - RNA, 32 nt, Homo Sapiens
aaagaaacuaaauacggaccuguaucacauga

SEQ ID NO: 240709 - RNA, 28 nt, Homo Sapiens
guggagcagggaugacauuugagagcca

SEQ ID NO: 240710 - RNA, 32 nt, Homo Sapiens
ugaguuggucgggggcagcggcagauuugagg

SEQ ID NO: 240711 - RNA, 32 nt, Homo Sapiens
caugcacaaccacagccucaaucuuguauuua

SEQ ID NO: 240712 - RNA, 31 nt, Homo Sapiens
ggccgccucccuaccgcuccaagcccagccc

SEQ ID NO: 240713 - RNA, 32 nt, Homo Sapiens
gccccgggacgcgggcuggaagcgacggagga

SEQ ID NO: 240714 - RNA, 32 nt, Homo Sapiens
aucgacaucuucuugguauugguuuucgcuuu

SEQ ID NO: 240715 - RNA, 32 nt, Homo Sapiens
gaacguguaauccucagcgugcuccagcccac

SEQ ID NO: 240716 - RNA, 32 nt, Homo Sapiens
aguugugcaugccuggcacaacaucaagccug

SEQ ID NO: 240717 - RNA, 32 nt, Homo Sapiens
cagacccuggugccgggcuaaggccuccgcuu

SEQ ID NO: 240718 - RNA, 32 nt, Homo Sapiens
uauuuggcaccggcccgucuguccacuguccu

SEQ ID NO: 240719 - RNA, 32 nt, Homo Sapiens
uuaguaauaaauuuaucuuuugaggucauuag

SEQ ID NO: 240720 - RNA, 32 nt, Homo Sapiens
ucauagcccaguagaccuuguuacuucugagg

SEQ ID NO: 240721 - RNA, 32 nt, Homo Sapiens
uucauuauauugccuccuaguuuuauuacuaa

SEQ ID NO: 240722 - RNA, 32 nt, Homo Sapiens
gcauggcacuugcaugagccagacuggggcua

SEQ ID NO: 240723 - RNA, 32 nt, Homo Sapiens
auuguuaccuuaaauuaguacagcacuuucuu

SEQ ID NO: 240724 - RNA, 32 nt, Homo Sapiens
uaucguccagacucacagaguggggcuccaga

SEQ ID NO: 240725 - RNA, 31 nt, Homo Sapiens
cagaaauauuuuguauuuggauauguuuguc

SEQ ID NO: 240726 - RNA, 32 nt, Homo Sapiens
cggacgggcgcgggcgggaggauggagcugaa

SEQ ID NO: 240727 - RNA, 32 nt, Homo Sapiens
uaaaauuggaggguugguuagauugauuucag

SEQ ID NO: 240728 - RNA, 32 nt, Homo Sapiens
ucucuguccuuacgaggcgucauacagaggca

SEQ ID NO: 240729 - RNA, 32 nt, Homo Sapiens
auccuugccgcccgccccggcccagccgcguc

SEQ ID NO: 240730 - RNA, 32 nt, Homo Sapiens
agcuuacugggcugaggcgucuguggagaggu

SEQ ID NO: 240731 - RNA, 32 nt, Homo Sapiens
ucuuaucugcugcuuugugucuuuggucagau

SEQ ID NO: 240732 - RNA, 32 nt, Homo Sapiens
caccgccucgcaggccuaacgccccggccggg

SEQ ID NO: 240733 - RNA, 32 nt, Homo Sapiens
uguugugaagaaagaggacuuggcagagcagg

SEQ ID NO: 240734 - RNA, 32 nt, Homo Sapiens
cauugaaggcugucucucuuuaauuuugucag

SEQ ID NO: 240735 - RNA, 32 nt, Homo Sapiens
caucagaauuucaaaaggcaucuaggagauuu

SEQ ID NO: 240736 - RNA, 31 nt, Homo Sapiens
ggagggacgcugggccugcccggugcgcacg

SEQ ID NO: 240737 - RNA, 32 nt, Homo Sapiens
auuauuuuauuuauugcaagucuaaauuuauc

SEQ ID NO: 240738 - RNA, 32 nt, Homo Sapiens
uucuugacagcucuucucuuuggacacauggg

SEQ ID NO: 240739 - RNA, 32 nt, Homo Sapiens
cucucugcuuggauucuggaccaccaccuggg

SEQ ID NO: 240740 - RNA, 32 nt, Homo Sapiens
cucugugcacagggcucuggccuuuaguaaac

SEQ ID NO: 240741 - RNA, 32 nt, Homo Sapiens
ucuacuccccuccaagcccaccccagugucuc

SEQ ID NO: 240742 - RNA, 32 nt, Homo Sapiens
uuuauguuauagcagccacaacagcaaaagaa

SEQ ID NO: 240743 - RNA, 32 nt, Homo Sapiens
ggauuucguuuuucuugggguacucuugaugu

SEQ ID NO: 240744 - RNA, 32 nt, Homo Sapiens
cgggacuuuacuaaugagcuuguuaaagaggu

SEQ ID NO: 240745 - RNA, 32 nt, Homo Sapiens
gcccgcaaagacgaggcucccgggccggggcc

SEQ ID NO: 240746 - RNA, 32 nt, Homo Sapiens
gaugcggagcgcggugcugccgguggagcuuc

SEQ ID NO: 240747 - RNA, 32 nt, Homo Sapiens
gccaccugcacuuuucccucacccaccacaca

SEQ ID NO: 240748 - RNA, 32 nt, Homo Sapiens
gggagagagaccagcugaggcgucucucucug

SEQ ID NO: 240749 - RNA, 32 nt, Homo Sapiens
gaccccccauggccccaugauuccuugacucc

SEQ ID NO: 240750 - RNA, 32 nt, Homo Sapiens
ucccagccuccauggccgcccucuagagccuc

SEQ ID NO: 240751 - RNA, 32 nt, Homo Sapiens
uuuuucucuaaaggacugguuaaaucaauucu

SEQ ID NO: 240752 - RNA, 32 nt, Homo Sapiens
uguuagacaucuucugugauuguuauggcaua

SEQ ID NO: 240753 - RNA, 30 nt, Homo Sapiens
gccgcccaugcucucagccuuucucccucc

SEQ ID NO: 240754 - RNA, 32 nt, Homo Sapiens
gauauacaucuucuuccuuuugguuucuugau

SEQ ID NO: 240755 - RNA, 32 nt, Homo Sapiens
uugaaauuauacauuauuuguagggaauugca

SEQ ID NO: 240756 - RNA, 32 nt, Homo Sapiens
ugaauuuuuccacaguaaagccgaacaguauu

SEQ ID NO: 240757 - RNA, 32 nt, Homo Sapiens
gcuuuuccacacuuacagucauagggccgguc

SEQ ID NO: 240758 - RNA, 32 nt, Homo Sapiens
gaguuggaaguacaccuuuaagaauguuucug

SEQ ID NO: 240759 - RNA, 32 nt, Homo Sapiens
cugcaugguuuuuuguuuaauguaauauagga

SEQ ID NO: 240760 - RNA, 32 nt, Homo Sapiens
ucauauggaaaauaauaaguggaauaugauac

SEQ ID NO: 240761 - RNA, 32 nt, Homo Sapiens
gaacagaucccggugacauucuauuuccagga

SEQ ID NO: 240762 - RNA, 32 nt, Homo Sapiens
auuuauuauccaaugcguaacagugguuacca

SEQ ID NO: 240763 - RNA, 32 nt, Homo Sapiens
gagcugagauguggccugaaccuucccuguau

SEQ ID NO: 240764 - RNA, 32 nt, Homo Sapiens
ugugagcagggugaccccucaucugaaaggcc

SEQ ID NO: 240765 - RNA, 32 nt, Homo Sapiens
agucuugguggcggcaggggccgcgggcccug

SEQ ID NO: 240766 - RNA, 32 nt, Homo Sapiens
uugauuaauuauguuuccuuuaauuuuuugga

SEQ ID NO: 240767 - RNA, 32 nt, Homo Sapiens
caugaacagaaaauggauuuguagcaagccaa

SEQ ID NO: 240768 - RNA, 32 nt, Homo Sapiens
aggugcagggauacccaccucugccuugacgg

SEQ ID NO: 240769 - RNA, 32 nt, Homo Sapiens
gaagauauuuacauuuauuguaaauuuugauu

SEQ ID NO: 240770 - RNA, 32 nt, Homo Sapiens
uuccucuugaguuugauuugacaagaugccuu

SEQ ID NO: 240771 - RNA, 32 nt, Homo Sapiens
ccaacacccagcuccgacgcagcuccucugcg

SEQ ID NO: 240772 - RNA, 32 nt, Homo Sapiens
ugggaucagucagauaaguuugugaaaaucua

SEQ ID NO: 240773 - RNA, 32 nt, Homo Sapiens
ugcccccuacagacaaccaagcacuaaucccc

SEQ ID NO: 240774 - RNA, 32 nt, Homo Sapiens
gggucaaaaaucaaacauuccucucauguuau

SEQ ID NO: 240775 - RNA, 32 nt, Homo Sapiens
cgcauaaagucuuuugacucccuuggaucaca

SEQ ID NO: 240776 - RNA, 32 nt, Homo Sapiens
acucccauuuugcugcaagacccccuuucaac

SEQ ID NO: 240777 - RNA, 32 nt, Homo Sapiens
guaaaacagaaguuuaagaccacaaguuagaa

SEQ ID NO: 240778 - RNA, 32 nt, Homo Sapiens
acauauucacugguuccagggauuugggcaug

SEQ ID NO: 240779 - RNA, 32 nt, Homo Sapiens
uacuugaauagcaauaaaagcguguuaacuuu

SEQ ID NO: 240780 - RNA, 32 nt, Homo Sapiens
ccgccgcccucucccggcauccgcagagccag

SEQ ID NO: 240781 - RNA, 31 nt, Homo Sapiens
agaaaucauuugauucaaguaaccauuggau

SEQ ID NO: 240782 - RNA, 32 nt, Homo Sapiens
ugcaaagcuuuaaggcuucucugacuguucug

SEQ ID NO: 240783 - RNA, 32 nt, Homo Sapiens
ggcaaaacuaucaagcaagaaaacuguaaguu

SEQ ID NO: 240784 - RNA, 32 nt, Homo Sapiens
uggaucuuuacuacuuuuaccagauuccuccc

SEQ ID NO: 240785 - RNA, 32 nt, Homo Sapiens
cuguuucuccacccaaaucucaucuugaauug

SEQ ID NO: 240786 - RNA, 32 nt, Homo Sapiens
gugugcuucccucucuuaugacugugucccug

SEQ ID NO: 240787 - RNA, 32 nt, Homo Sapiens
aaauggauucaguggucuuugaggauguagau

SEQ ID NO: 240788 - RNA, 32 nt, Homo Sapiens
agcccuccccgcggccggcucggcuccuuggc

SEQ ID NO: 240789 - RNA, 32 nt, Homo Sapiens
agcagaggcaacacuggaacauggcuagccuu

SEQ ID NO: 240790 - RNA, 32 nt, Homo Sapiens
gccccacccccucccagccccugcacggaggg

SEQ ID NO: 240791 - RNA, 32 nt, Homo Sapiens
acuccugccucaugcauacgucccacaaaugc

SEQ ID NO: 240792 - RNA, 32 nt, Homo Sapiens
gaaggaggccccagggccuuggcgaccgcagc

SEQ ID NO: 240793 - RNA, 32 nt, Homo Sapiens
cccggccccgucgcggagaucccggacgaccg

SEQ ID NO: 240794 - RNA, 32 nt, Homo Sapiens
uugcuagccaucucuccagcucugcaguuuuc

SEQ ID NO: 240795 - RNA, 32 nt, Homo Sapiens
augcuggauaggcuaccaaaguucccaagugg

SEQ ID NO: 240796 - RNA, 32 nt, Homo Sapiens
gucuaccagcgggagcuguucagacacaccuc

SEQ ID NO: 240797 - RNA, 32 nt, Homo Sapiens
ucauauaauuuaaugaaucuguuuauccuuuu

SEQ ID NO: 240798 - RNA, 32 nt, Homo Sapiens
guugaacgccucaggccaaaccccaaguugaa

SEQ ID NO: 240799 - RNA, 32 nt, Homo Sapiens
cuugguuuccuauuuccccuuaucuuucuaaa

SEQ ID NO: 240800 - RNA, 32 nt, Homo Sapiens
accccuuucuccccgauccacccaggccuuuc

SEQ ID NO: 240801 - RNA, 32 nt, Homo Sapiens
acugucauacauuuggaauauuaugaucccaa

SEQ ID NO: 240802 - RNA, 32 nt, Homo Sapiens
agcccuacagacaggcauguguagaaggcaau

SEQ ID NO: 240803 - RNA, 32 nt, Homo Sapiens
gcacauacgugaguguggguguguguagcgug

SEQ ID NO: 240804 - RNA, 32 nt, Homo Sapiens
accuuugagaaaaagaaacaaaaggaaguagu

SEQ ID NO: 240805 - RNA, 32 nt, Homo Sapiens
auguucuacuuugaucauuucauuuuguucua

SEQ ID NO: 240806 - RNA, 28 nt, Homo Sapiens
uaugcacaagugaccaggaugagucaua

SEQ ID NO: 240807 - RNA, 32 nt, Homo Sapiens
gacaugcgggagcggcuggaggaggaagaggg

SEQ ID NO: 240808 - RNA, 32 nt, Homo Sapiens
ugcuagggacaugggaaaaaccacugcuaugc

SEQ ID NO: 240809 - RNA, 32 nt, Homo Sapiens
caauugugugaccagggcuagucacuuuuuac

SEQ ID NO: 240810 - RNA, 32 nt, Homo Sapiens
ucauggccacagggccucggagggcaugaccc

SEQ ID NO: 240811 - RNA, 32 nt, Homo Sapiens
ucuguccugcgaccgacuugcggcggugagag

SEQ ID NO: 240812 - RNA, 32 nt, Homo Sapiens
uaaugucuugaguaugaguuauguuuagucac

SEQ ID NO: 240813 - RNA, 32 nt, Homo Sapiens
cucuguacccucuccuucuguuuuuauuuuag

SEQ ID NO: 240814 - RNA, 28 nt, Homo Sapiens
uucaugaagucuuuuauguguuuugaau

SEQ ID NO: 240815 - RNA, 32 nt, Homo Sapiens
agaagacgaggggaacaaaaccagcuggaucc

SEQ ID NO: 240816 - RNA, 32 nt, Homo Sapiens
aaauggauaaugcuggccauucugccuuucug

SEQ ID NO: 240817 - RNA, 32 nt, Homo Sapiens
gcauaaaacugggaagaaagagaagacaguug

SEQ ID NO: 240818 - RNA, 32 nt, Homo Sapiens
gagggaggggcgggggcuggaggcagcagcgc

SEQ ID NO: 240819 - RNA, 32 nt, Homo Sapiens
cggcuucgccgggauccucuuggaagggaaac

SEQ ID NO: 240820 - RNA, 32 nt, Homo Sapiens
cucgcggcgcuagggcgggcuggccuccgcgg

SEQ ID NO: 240821 - RNA, 32 nt, Homo Sapiens
aucccaaaggguggggggcgcuguuggcagga

SEQ ID NO: 240822 - RNA, 32 nt, Homo Sapiens
cuauaaagcgauauacagaugaaaauuugaga

SEQ ID NO: 240823 - RNA, 32 nt, Homo Sapiens
uuuuacuguauauugcuuuuacaauaaauaua

SEQ ID NO: 240824 - RNA, 32 nt, Homo Sapiens
cucccucgcuccgugcgcugcuacgagcggug

SEQ ID NO: 240825 - RNA, 32 nt, Homo Sapiens
acuaggccgucucccaaggagcagagcagagc

SEQ ID NO: 240826 - RNA, 32 nt, Homo Sapiens
ccccaaugagagaacucaacgugccggagcug

SEQ ID NO: 240827 - RNA, 32 nt, Homo Sapiens
ccaauagacuuugucaugaccaaaaagagaaa

SEQ ID NO: 240828 - RNA, 32 nt, Homo Sapiens
uuggacagcagggcugccugacaccaccaacc

SEQ ID NO: 240829 - RNA, 32 nt, Homo Sapiens
cacccgccccacuucgcuugccaucacagcac

SEQ ID NO: 240830 - RNA, 32 nt, Homo Sapiens
ugcagucaugcagaagcaaacacgucuucauu

SEQ ID NO: 240831 - RNA, 32 nt, Homo Sapiens
gagcaucagcagggaccccggcggacgugggc

SEQ ID NO: 240832 - RNA, 32 nt, Homo Sapiens
ggacugggucugaccuggugggagcaccugcc

SEQ ID NO: 240833 - RNA, 32 nt, Homo Sapiens
uuugaagcugacguccugugucuguacacugc

SEQ ID NO: 240834 - RNA, 32 nt, Homo Sapiens
ucagggaccccaucggggaucuccugcugccc

SEQ ID NO: 240835 - RNA, 32 nt, Homo Sapiens
auuugaacucauguagggaaugaaagaaagcu

SEQ ID NO: 240836 - RNA, 32 nt, Homo Sapiens
auuuucucagaaucuauucaguacccuaugga

SEQ ID NO: 240837 - RNA, 32 nt, Homo Sapiens
caggcuuccccucagcugggugaagacuacag

SEQ ID NO: 240838 - RNA, 32 nt, Homo Sapiens
uuaucuagaaaagaagcaaaagggaaauauga

SEQ ID NO: 240839 - RNA, 32 nt, Homo Sapiens
cacuggugugggaaggggcagcaccuggggag

SEQ ID NO: 240840 - RNA, 32 nt, Homo Sapiens
uuuauuaaauuuccuucaaacuguuuaucuuu

SEQ ID NO: 240841 - RNA, 32 nt, Homo Sapiens
ggugcugacuuuccgacucagaauaugaucac

SEQ ID NO: 240842 - RNA, 32 nt, Homo Sapiens
gcaggugucuucauccugauucugucuuuguu

SEQ ID NO: 240843 - RNA, 32 nt, Homo Sapiens
gauacugggggugccgcuccucacucaacccc

SEQ ID NO: 240844 - RNA, 32 nt, Homo Sapiens
uuucagccagugcggugguguguguagcccca

SEQ ID NO: 240845 - RNA, 32 nt, Homo Sapiens
uuccucgaacaugcaguacauaaaaaggggaa

SEQ ID NO: 240846 - RNA, 32 nt, Homo Sapiens
gaauaggaggcacauuuuuuaccuggugguua

SEQ ID NO: 240847 - RNA, 32 nt, Homo Sapiens
ggccaacaaccacuuauuugucuaaagcaaca

SEQ ID NO: 240848 - RNA, 32 nt, Homo Sapiens
gagcgagccgagccgagccucccgccgucgcc

SEQ ID NO: 240849 - RNA, 32 nt, Homo Sapiens
gagacugaauuuauucugauagacuucagcua

SEQ ID NO: 240850 - RNA, 32 nt, Homo Sapiens
aauaaagauaaaaguuauuguggccaucucug

SEQ ID NO: 240851 - RNA, 32 nt, Homo Sapiens
gccucagaggguggagugagggcggaccggcc

SEQ ID NO: 240852 - RNA, 32 nt, Homo Sapiens
ucaucagggacccauuguucucuucagaaccc

SEQ ID NO: 240853 - RNA, 32 nt, Homo Sapiens
gacuuuguuuguuuccuccucgucccucuuug

SEQ ID NO: 240854 - RNA, 32 nt, Homo Sapiens
acacuuacucuacccucuuggcaaauuggcau

SEQ ID NO: 240855 - RNA, 32 nt, Homo Sapiens
gccagaggauugcuugagucuagcaguuugag

SEQ ID NO: 240856 - RNA, 32 nt, Homo Sapiens
uuccuggggcaaacagaaagaaaucugcauga

SEQ ID NO: 240857 - RNA, 32 nt, Homo Sapiens
gaacuccagccugcgccaccacgucacgcaca

SEQ ID NO: 240858 - RNA, 32 nt, Homo Sapiens
ucccuucuuuguuuuuuuuuuaacccgguagu

SEQ ID NO: 240859 - RNA, 32 nt, Homo Sapiens
cccaggaguuccagcccucagguuccugaggg

SEQ ID NO: 240860 - RNA, 28 nt, Homo Sapiens
agacuuugggaugguauguguuucuggg

SEQ ID NO: 240861 - RNA, 32 nt, Homo Sapiens
gcuuaaaaaaacaaacaaaaaaaaccccauaa

SEQ ID NO: 240862 - RNA, 32 nt, Homo Sapiens
ggcggcugcuugaaccuuuggaugcaaauguc

SEQ ID NO: 240863 - RNA, 32 nt, Homo Sapiens
cagugaucugguguggggaggcggccgggcca

SEQ ID NO: 240864 - RNA, 32 nt, Homo Sapiens
uuuuauacguuuucuuuuuuauuuuugucuuu

SEQ ID NO: 240865 - RNA, 32 nt, Homo Sapiens
uuaugguagcucuggggugagcugugggggag

SEQ ID NO: 240866 - RNA, 29 nt, Homo Sapiens
uacuucucagugccaucuauaaaaugggg

SEQ ID NO: 240867 - RNA, 32 nt, Homo Sapiens
cauguauagaaucuuucuucaucaucuaaaug

SEQ ID NO: 240868 - RNA, 32 nt, Homo Sapiens
cgcuccagccucgcucuccgccgcccgcaccg

SEQ ID NO: 240869 - RNA, 32 nt, Homo Sapiens
gacaagauuccacaggccauaagauuuucuuc

SEQ ID NO: 240870 - RNA, 32 nt, Homo Sapiens
gucacugugaaugaggacugcaaugagaggau

SEQ ID NO: 240871 - RNA, 32 nt, Homo Sapiens
aguagagcauauagagauguaaauaauuugug

SEQ ID NO: 240872 - RNA, 32 nt, Homo Sapiens
gaccccaucgccaucccugugucucuacacgc

SEQ ID NO: 240873 - RNA, 32 nt, Homo Sapiens
agucaaagggcacauggaguauggaagggggc

SEQ ID NO: 240874 - RNA, 32 nt, Homo Sapiens
ggcaaccuccaagucccagaucaugucucugu

SEQ ID NO: 240875 - RNA, 32 nt, Homo Sapiens
cuuuccuguucuauaaccuuugucaucuguua

SEQ ID NO: 240876 - RNA, 32 nt, Homo Sapiens
uggguagagguggucggggcagccuccuagaa

SEQ ID NO: 240877 - RNA, 32 nt, Homo Sapiens
aaugcuccaucccaaccaggcaccucuuccuu

SEQ ID NO: 240878 - RNA, 32 nt, Homo Sapiens
ugaauugaucuaaauguaaaagcaaaugaaaa

SEQ ID NO: 240879 - RNA, 32 nt, Homo Sapiens
acuuuuuaugauauaauaaaugucuuaguacc

SEQ ID NO: 240880 - RNA, 32 nt, Homo Sapiens
cgccacuuggucauaaucauuuagaugguggu

SEQ ID NO: 240881 - RNA, 32 nt, Homo Sapiens
uuugacugacuucuucaggcuucuuagcugcu

SEQ ID NO: 240882 - RNA, 32 nt, Homo Sapiens
aaaaagaaacagaaaugaccacgugaaauuug

SEQ ID NO: 240883 - RNA, 32 nt, Homo Sapiens
ucugagcccauuucccuucucuggcuaccaua

SEQ ID NO: 240884 - RNA, 32 nt, Homo Sapiens
guucauucuauuuguauuauuuucauacauuu

SEQ ID NO: 240885 - RNA, 32 nt, Homo Sapiens
caaucucggcccgcugcagccucugccucuug

SEQ ID NO: 240886 - RNA, 32 nt, Homo Sapiens
gugcaggggcguaucugggcgccugagcgcgg

SEQ ID NO: 240887 - RNA, 32 nt, Homo Sapiens
guguuaccauguaucaucauggcgguacuauu

SEQ ID NO: 240888 - RNA, 32 nt, Homo Sapiens
cacccaguccccugggcccggcguccagcgcg

SEQ ID NO: 240889 - RNA, 32 nt, Homo Sapiens
acgaccgguucgucgccuccuugcccgugacc

SEQ ID NO: 240890 - RNA, 32 nt, Homo Sapiens
uggaaacucaauugucagaggacccaaaacaa

SEQ ID NO: 240891 - RNA, 32 nt, Homo Sapiens
cgggcggccccggcgggcaccaugagcccucu

SEQ ID NO: 240892 - RNA, 32 nt, Homo Sapiens
uagcaaucacuauuuaaaucuggcaagaacug

SEQ ID NO: 240893 - RNA, 32 nt, Homo Sapiens
uucuaaccauuguuauaaaggcuaauauaauu

SEQ ID NO: 240894 - RNA, 32 nt, Homo Sapiens
cugcaggaagaaacuuuuuuauuuuuuaaauc

SEQ ID NO: 240895 - RNA, 32 nt, Homo Sapiens
cugugcugcuccacaaggcaaaacaagagcaa

SEQ ID NO: 240896 - RNA, 32 nt, Homo Sapiens
aucccaggcccacugcuugucuagucagguca

SEQ ID NO: 240897 - RNA, 27 nt, Homo Sapiens
uugugcaccuucuucuauagcacuuuu

SEQ ID NO: 240898 - RNA, 29 nt, Homo Sapiens
gggucugugacuucuucccuguguggguc

SEQ ID NO: 240899 - RNA, 32 nt, Homo Sapiens
ugcagagccggacccaguggcuacacccacag

SEQ ID NO: 240900 - RNA, 32 nt, Homo Sapiens
acaacccugcgggcucuccgaugcggcgagcg

SEQ ID NO: 240901 - RNA, 32 nt, Homo Sapiens
uuacaggcugagcuaccacccugguuuggaga

SEQ ID NO: 240902 - RNA, 32 nt, Homo Sapiens
cacugacaaaaauaccaaaauaaaaguguauu

SEQ ID NO: 240903 - RNA, 32 nt, Homo Sapiens
aggucaaccccuaugcaaauuaccacagcaaa

SEQ ID NO: 240904 - RNA, 32 nt, Homo Sapiens
caggcuuccuuccuaggcuucaguucauuccc

SEQ ID NO: 240905 - RNA, 32 nt, Homo Sapiens
uucauauaaaucucuuacuaagacuacugacc

SEQ ID NO: 240906 - RNA, 32 nt, Homo Sapiens
cagacaaugaauuuggaaguggagaggggccu

SEQ ID NO: 240907 - RNA, 32 nt, Homo Sapiens
gauccuggcgcagcugcugcggcgcugccgcg

SEQ ID NO: 240908 - RNA, 32 nt, Homo Sapiens
aacauaagggacuauucauucuguaaauccag

SEQ ID NO: 240909 - RNA, 32 nt, Homo Sapiens
cacccagucaguguuauuugcuucauuuuuac

SEQ ID NO: 240910 - RNA, 32 nt, Homo Sapiens
guugagaaaaucaaauuuccuggguguguccu

SEQ ID NO: 240911 - RNA, 32 nt, Homo Sapiens
uucacucaacuuuccaagggaaauguuuuauu

SEQ ID NO: 240912 - RNA, 32 nt, Homo Sapiens
ggcuugugggucuuugagacccgaaaauugag

SEQ ID NO: 240913 - RNA, 32 nt, Homo Sapiens
gauuguaaaacugaaaaacuaagguuauuuga

SEQ ID NO: 240914 - RNA, 32 nt, Homo Sapiens
guuacagagugcugccaucaccaaguaugugg

SEQ ID NO: 240915 - RNA, 32 nt, Homo Sapiens
ccuggagacagagggcuagcaugcugucauuu

SEQ ID NO: 240916 - RNA, 32 nt, Homo Sapiens
guuggugauccauccagauguuguguguucug

SEQ ID NO: 240917 - RNA, 32 nt, Homo Sapiens
cucuccccagcuguccuccccuuggugcuccu

SEQ ID NO: 240918 - RNA, 32 nt, Homo Sapiens
ucuucucugcugucacacuggaaggcagccuc

SEQ ID NO: 240919 - RNA, 32 nt, Homo Sapiens
cgacugcccggcucgcgccgccucgcgcucug

SEQ ID NO: 240920 - RNA, 32 nt, Homo Sapiens
aagaaggugggggugagcaggggguuuaucug

SEQ ID NO: 240921 - RNA, 32 nt, Homo Sapiens
cuaauaacaacaauggaauauagaauacaaag

SEQ ID NO: 240922 - RNA, 32 nt, Homo Sapiens
gaagacuugguccguaacucaaggcuguugua

SEQ ID NO: 240923 - RNA, 32 nt, Homo Sapiens
guauuggaucagugugaguccugaagcacuuu

SEQ ID NO: 240924 - RNA, 32 nt, Homo Sapiens
aaacuuuugcuucuucguuuucgguugggauu

SEQ ID NO: 240925 - RNA, 32 nt, Homo Sapiens
agaacgaucguuagggcuggggugugugggcu

SEQ ID NO: 240926 - RNA, 32 nt, Homo Sapiens
uaguuaggcucuucaguguaauaaucaugaua

SEQ ID NO: 240927 - RNA, 32 nt, Homo Sapiens
auagauagacaagagugguguuuguuguuuuu

SEQ ID NO: 240928 - RNA, 32 nt, Homo Sapiens
caaugcucaacucccccggcuucccucuucug

SEQ ID NO: 240929 - RNA, 32 nt, Homo Sapiens
ggccccugcccggccccguccuccaaccucau

SEQ ID NO: 240930 - RNA, 27 nt, Homo Sapiens
uccccugaucccuucagccccuacccc

SEQ ID NO: 240931 - RNA, 32 nt, Homo Sapiens
accgaccuguuguucacuuugcuggugagcca

SEQ ID NO: 240932 - RNA, 32 nt, Homo Sapiens
ggagacauguaagcuuccugggugaagguuga

SEQ ID NO: 240933 - RNA, 32 nt, Homo Sapiens
ugcucccucccucucuugccucuuaaguuucc

SEQ ID NO: 240934 - RNA, 32 nt, Homo Sapiens
cuccgguguccuguaccaacucuucuauuuaa

SEQ ID NO: 240935 - RNA, 32 nt, Homo Sapiens
aggcgacacggggguacaccgaugggucacac

SEQ ID NO: 240936 - RNA, 32 nt, Homo Sapiens
caagacagagcaggggugaacuguagcuugau

SEQ ID NO: 240937 - RNA, 32 nt, Homo Sapiens
uaccuauuguagauuuguuguuuacuuuuuug

SEQ ID NO: 240938 - RNA, 32 nt, Homo Sapiens
cagcuaccacuuaugauucagagacuaggaau

SEQ ID NO: 240939 - RNA, 32 nt, Homo Sapiens
aguccccgcgcgcuccgggacccggcgcagcu

SEQ ID NO: 240940 - RNA, 32 nt, Homo Sapiens
agccuggcagaugagcagauaccccuggccac

SEQ ID NO: 240941 - RNA, 32 nt, Homo Sapiens
cuuccccgcccggccuccaacuggugggaacu

SEQ ID NO: 240942 - RNA, 32 nt, Homo Sapiens
aauacauacuacgucagguggcgacaaaugcu

SEQ ID NO: 240943 - RNA, 32 nt, Homo Sapiens
uggugcuuuuucuguggucuuuugcaucucag

SEQ ID NO: 240944 - RNA, 32 nt, Homo Sapiens
cucaguccuccaaaucaaggucaagaagauau

SEQ ID NO: 240945 - RNA, 32 nt, Homo Sapiens
gaugccuagcuaauuuuuuguauuuuuaguag

SEQ ID NO: 240946 - RNA, 32 nt, Homo Sapiens
guggcuucagaauucauggaaacagagccacu

SEQ ID NO: 240947 - RNA, 32 nt, Homo Sapiens
aucagcuggguugauuguauggguuagauaga

SEQ ID NO: 240948 - RNA, 31 nt, Homo Sapiens
guaguggagccccugcucugguggggcugcc

SEQ ID NO: 240949 - RNA, 32 nt, Homo Sapiens
ggauggcaguguggauggauagggacagaugu

SEQ ID NO: 240950 - RNA, 32 nt, Homo Sapiens
cuccuacaaccaagaaaaaggcacaaugccua

SEQ ID NO: 240951 - RNA, 32 nt, Homo Sapiens
ggaucaugaaauguauacaaaauaaauaaagu

SEQ ID NO: 240952 - RNA, 32 nt, Homo Sapiens
guggagcugggauguucucaccacuggggucu

SEQ ID NO: 240953 - RNA, 32 nt, Homo Sapiens
auaaaguucuuauuagauaaguaaauaacuaa

SEQ ID NO: 240954 - RNA, 31 nt, Homo Sapiens
ccugcuuaccccaguucccaaacacaggaag

SEQ ID NO: 240955 - RNA, 32 nt, Homo Sapiens
gccuguuugugaugaucagcucagcggcccag

SEQ ID NO: 240956 - RNA, 32 nt, Homo Sapiens
gauuccuguacaauuucaucccagaaacucca

SEQ ID NO: 240957 - RNA, 32 nt, Homo Sapiens
caaauuuuaagaacacaacaaaaaagauuuga

SEQ ID NO: 240958 - RNA, 32 nt, Homo Sapiens
ugagcggcaguucagcgcggccucgggccugg

SEQ ID NO: 240959 - RNA, 32 nt, Homo Sapiens
cccgccggccuggccaggacugagugcaggaa

SEQ ID NO: 240960 - RNA, 32 nt, Homo Sapiens
uucauaauucacaugucaauuuuuuauaguaa

SEQ ID NO: 240961 - RNA, 32 nt, Homo Sapiens
uggccgccuucaccuggaugcugcuggagggu

SEQ ID NO: 240962 - RNA, 32 nt, Homo Sapiens
uggcuguccugagguucuuuuacugaugugcc

SEQ ID NO: 240963 - RNA, 32 nt, Homo Sapiens
aaagggaagaaccacaaaggcuugcaaagaua

SEQ ID NO: 240964 - RNA, 32 nt, Homo Sapiens
ggaggagcaguguguggcgccacgucccgacu

SEQ ID NO: 240965 - RNA, 32 nt, Homo Sapiens
caguuugaauaauuuaguacaauuguuaaaaa

SEQ ID NO: 240966 - RNA, 31 nt, Homo Sapiens
auaacagcuggguucgcaggagccagccuug

SEQ ID NO: 240967 - RNA, 32 nt, Homo Sapiens
uucgguauucuauucaggacuuacgguaacua

SEQ ID NO: 240968 - RNA, 32 nt, Homo Sapiens
accgcgcggccgcgcagcggacaccgugcgua

SEQ ID NO: 240969 - RNA, 32 nt, Homo Sapiens
uagugaucccacuuauggauauagauccaaaa

SEQ ID NO: 240970 - RNA, 32 nt, Homo Sapiens
gugugcaaaugauucuuacggcauggacaagg

SEQ ID NO: 240971 - RNA, 32 nt, Homo Sapiens
uaucacaaaaacucauagaagauaucauguag

SEQ ID NO: 240972 - RNA, 32 nt, Homo Sapiens
gugauuauaauguugucauuuaugcauucaca

SEQ ID NO: 240973 - RNA, 32 nt, Homo Sapiens
ggcgcgggcagccacccaagccugcuggcugc

SEQ ID NO: 240974 - RNA, 32 nt, Homo Sapiens
gagcuuccugcagcugcagagcaucaaagacg

SEQ ID NO: 240975 - RNA, 32 nt, Homo Sapiens
aagaggaggaagagugggagaauggugcugaa

SEQ ID NO: 240976 - RNA, 29 nt, Homo Sapiens
gaagaugccgccggccacgggcggaggcc

SEQ ID NO: 240977 - RNA, 32 nt, Homo Sapiens
ggccgggacagcuucaggggccccagaaggac

SEQ ID NO: 240978 - RNA, 32 nt, Homo Sapiens
ugccaggugcuucaugggcucgccggcaucca

SEQ ID NO: 240979 - RNA, 32 nt, Homo Sapiens
uguucauuaaacauggucuugcugcaucaacu

SEQ ID NO: 240980 - RNA, 32 nt, Homo Sapiens
uuuacagaagccuuuacccauccugagacuca

SEQ ID NO: 240981 - RNA, 32 nt, Homo Sapiens
cccacacugcccucccugccccggcccaugcc

SEQ ID NO: 240982 - RNA, 32 nt, Homo Sapiens
aguguggugggaaggaagcucuggaagcugug

SEQ ID NO: 240983 - RNA, 32 nt, Homo Sapiens
caaaacaacucugagaugaacaauauguguua

SEQ ID NO: 240984 - RNA, 32 nt, Homo Sapiens
ugcuauuucuucauaacuguaauaugucuaau

SEQ ID NO: 240985 - RNA, 32 nt, Homo Sapiens
ucaucaugagauucauuuuucuuaaauuuugg

SEQ ID NO: 240986 - RNA, 32 nt, Homo Sapiens
cuguccgugggcagagcccgcgucugguccag

SEQ ID NO: 240987 - RNA, 29 nt, Homo Sapiens
ugacaauaaaguuagcuauuuuaaaaugc

SEQ ID NO: 240988 - RNA, 32 nt, Homo Sapiens
aggaucggcuccgaagccgacccggcgccccu

SEQ ID NO: 240989 - RNA, 28 nt, Homo Sapiens
accugagggcggccaggagggguggcac

SEQ ID NO: 240990 - RNA, 32 nt, Homo Sapiens
ucauuuagauuaacauuuggggccugauaggg

SEQ ID NO: 240991 - RNA, 32 nt, Homo Sapiens
gcugauuuuacacacacacacacacacacaca

SEQ ID NO: 240992 - RNA, 32 nt, Homo Sapiens
uugaacauaauggcucagaauacauauuugaa

SEQ ID NO: 240993 - RNA, 32 nt, Homo Sapiens
cagugugguuuggggauuugcuugggcucccc

SEQ ID NO: 240994 - RNA, 32 nt, Homo Sapiens
uacaggcgugauccaccacaccuggcccuugc

SEQ ID NO: 240995 - RNA, 32 nt, Homo Sapiens
gcacauccuggccagcaccccuggcuggagug

SEQ ID NO: 240996 - RNA, 32 nt, Homo Sapiens
cugcgcggccccggcccgggagcugccgaacc

SEQ ID NO: 240997 - RNA, 32 nt, Homo Sapiens
ccugugacccacucacagggagauagggcagc

SEQ ID NO: 240998 - RNA, 32 nt, Homo Sapiens
cagcuggccucggccagguccgagggccugga

SEQ ID NO: 240999 - RNA, 32 nt, Homo Sapiens
ugaaucuaaggauaaugaaauaaucagugacu

SEQ ID NO: 241000 - RNA, 32 nt, Homo Sapiens
gcagcuguugcucaugagcauccaccaggugg

SEQ ID NO: 241001 - RNA, 32 nt, Homo Sapiens
uccgcucucccucuccugcugcccacccaccu

SEQ ID NO: 241002 - RNA, 32 nt, Homo Sapiens
gcauuggggccugcuuccuucgccacggggac

SEQ ID NO: 241003 - RNA, 32 nt, Homo Sapiens
gguuuaugaaguuuuguugguuaacuguguuc

SEQ ID NO: 241004 - RNA, 32 nt, Homo Sapiens
cacagcucggcgcggagcguccugucaggcgg

SEQ ID NO: 241005 - RNA, 32 nt, Homo Sapiens
auggagcauuuuugguaaaugagaagugcugg

SEQ ID NO: 241006 - RNA, 32 nt, Homo Sapiens
ccaugcaguuccuggggguugcuguauuugua

SEQ ID NO: 241007 - RNA, 30 nt, Homo Sapiens
gaagcguggggcgcgcgugcggaggaccag

SEQ ID NO: 241008 - RNA, 32 nt, Homo Sapiens
ggcauccugggacauguagucuggccggggcu

SEQ ID NO: 241009 - RNA, 32 nt, Homo Sapiens
cuucccacccugcacuucugugcugcuugcag

SEQ ID NO: 241010 - RNA, 32 nt, Homo Sapiens
aucgaguaaccuggucccggcagccgggcccc

SEQ ID NO: 241011 - RNA, 32 nt, Homo Sapiens
gcccaaucccucccauaccccaccauguuggu

SEQ ID NO: 241012 - RNA, 32 nt, Homo Sapiens
cccggccaucucugugaucccagccgccgcau

SEQ ID NO: 241013 - RNA, 32 nt, Homo Sapiens
ggauguagagauuuggggugguugauuagacu

SEQ ID NO: 241014 - RNA, 29 nt, Homo Sapiens
gagguaaagugucucuauuuucucuuaaa

SEQ ID NO: 241015 - RNA, 32 nt, Homo Sapiens
guggauuccagaaauuuggaguguucuugggg

SEQ ID NO: 241016 - RNA, 32 nt, Homo Sapiens
gagccuggaagaaggagggaaguggcaccuca

SEQ ID NO: 241017 - RNA, 32 nt, Homo Sapiens
aguuaccugccaaacucuggacuugguuuaua

SEQ ID NO: 241018 - RNA, 32 nt, Homo Sapiens
uggccgacaagucuggagacgucuacuccuuu

SEQ ID NO: 241019 - RNA, 31 nt, Homo Sapiens
uacugugucaggccagccugaguucauuucu

SEQ ID NO: 241020 - RNA, 32 nt, Homo Sapiens
auaguuaauguuuuaugcuuccauuaaauaaa

SEQ ID NO: 241021 - RNA, 32 nt, Homo Sapiens
uugcuuuauuuuuucucauggauguucuucuu

SEQ ID NO: 241022 - RNA, 32 nt, Homo Sapiens
ugccaaccagggggcugcccccugcccugcgg

SEQ ID NO: 241023 - RNA, 32 nt, Homo Sapiens
uauuuaguuugugauaaauuuuucacugugug

SEQ ID NO: 241024 - RNA, 32 nt, Homo Sapiens
aggauuccauuuugaggaaaaacuacaguuug

SEQ ID NO: 241025 - RNA, 32 nt, Homo Sapiens
ccagauugguuacaguagaacucuguaagaug

SEQ ID NO: 241026 - RNA, 32 nt, Homo Sapiens
acgcaggaggcugaggcugcagugaguuguga

SEQ ID NO: 241027 - RNA, 32 nt, Homo Sapiens
cgucuuucuucuccucccuauuucgcagauau

SEQ ID NO: 241028 - RNA, 32 nt, Homo Sapiens
agccgguaccggcaaccacgggcagcucucag

SEQ ID NO: 241029 - RNA, 32 nt, Homo Sapiens
ccagagugugagccgcucuccucccccuaaaa

SEQ ID NO: 241030 - RNA, 32 nt, Homo Sapiens
aguaucuuuauugaauuagaaaacaaguggga

SEQ ID NO: 241031 - RNA, 32 nt, Homo Sapiens
uaaccucuguggauaaaaccaggcggguaaca

SEQ ID NO: 241032 - RNA, 32 nt, Homo Sapiens
aaacuauuuuuaaaauaugcauuugaagcauc

SEQ ID NO: 241033 - RNA, 32 nt, Homo Sapiens
uuugacaaagaaaagaaaaucaauguuaaacc

SEQ ID NO: 241034 - RNA, 32 nt, Homo Sapiens
caauggguaggagaucuggggaggcccugccc

SEQ ID NO: 241035 - RNA, 32 nt, Homo Sapiens
aaaauggaaagaagaacaaaauaugaugagag

SEQ ID NO: 241036 - RNA, 32 nt, Homo Sapiens
guaugcucagaaaacauugauuugagcauaga

SEQ ID NO: 241037 - RNA, 32 nt, Homo Sapiens
gggaugugggaguuuuuaaaugcuauagcccu

SEQ ID NO: 241038 - RNA, 32 nt, Homo Sapiens
ggcgcgcggccguuagcgcgcggccguuagcg

SEQ ID NO: 241039 - RNA, 31 nt, Homo Sapiens
aaaauccucaaugacguccaggaccgguuug

SEQ ID NO: 241040 - RNA, 32 nt, Homo Sapiens
auaaagcaggguacagauauaaacuacugcau

SEQ ID NO: 241041 - RNA, 32 nt, Homo Sapiens
cucagcugccccccaaccucucuauggcagag

SEQ ID NO: 241042 - RNA, 32 nt, Homo Sapiens
gggguuccuaagccgcggggccccucgcugcc

SEQ ID NO: 241043 - RNA, 32 nt, Homo Sapiens
cacacucagucucccuucuccggggccucucc

SEQ ID NO: 241044 - RNA, 32 nt, Homo Sapiens
ggagcuccuugccagcucuccuccucgcacag

SEQ ID NO: 241045 - RNA, 32 nt, Homo Sapiens
ugccuuugacauuuaauuuagugaucuuagca

SEQ ID NO: 241046 - RNA, 32 nt, Homo Sapiens
cucuaucgcucuuccccucuccucggccacuc

SEQ ID NO: 241047 - RNA, 32 nt, Homo Sapiens
uugugaggcucagggccugguacucuagcagc

SEQ ID NO: 241048 - RNA, 32 nt, Homo Sapiens
uaccaucaagacaccugaaaucuugucaugag

SEQ ID NO: 241049 - RNA, 32 nt, Homo Sapiens
ggcccaguaguggcuucuagcucuaaauguuu

SEQ ID NO: 241050 - RNA, 32 nt, Homo Sapiens
cauuucugccgggacggccgggugcugcuggg

SEQ ID NO: 241051 - RNA, 32 nt, Homo Sapiens
cuggcugggacuggcucggccgagggcacugc

SEQ ID NO: 241052 - RNA, 32 nt, Homo Sapiens
caaauacuuuaugcuaaaaauuuugucaccua

SEQ ID NO: 241053 - RNA, 32 nt, Homo Sapiens
cccgagcagcauuaccugcauacucuucguac

SEQ ID NO: 241054 - RNA, 32 nt, Homo Sapiens
auauauuuuuuaaaguuacuguaauuccuuuu

SEQ ID NO: 241055 - RNA, 32 nt, Homo Sapiens
cagagguaggaauguggggagaaggagaggcu

SEQ ID NO: 241056 - RNA, 29 nt, Homo Sapiens
uuugguuggggacaguggggugcguggga

SEQ ID NO: 241057 - RNA, 32 nt, Homo Sapiens
gcaaaauccaaauguuaauaauauuagccuga

SEQ ID NO: 241058 - RNA, 32 nt, Homo Sapiens
acuacuauaaaacuauuuuuuccuaaauggua

SEQ ID NO: 241059 - RNA, 32 nt, Homo Sapiens
ucacucuccucucuccuucuuuccaaacacug

SEQ ID NO: 241060 - RNA, 32 nt, Homo Sapiens
ggcauuauuaauuuauaaaaauccaugcuuua

SEQ ID NO: 241061 - RNA, 32 nt, Homo Sapiens
gacucgaccgaguggaauauuggugaacgaua

SEQ ID NO: 241062 - RNA, 32 nt, Homo Sapiens
uuuuggaaaaauaggugggaaaaguuacuguc

SEQ ID NO: 241063 - RNA, 32 nt, Homo Sapiens
gucccggcugccccugcccgccggcgccucca

SEQ ID NO: 241064 - RNA, 32 nt, Homo Sapiens
uuuaauccaugaauauacuuaaguauauccca

SEQ ID NO: 241065 - RNA, 32 nt, Homo Sapiens
ugguaccucaguauccucucccacagaaucug

SEQ ID NO: 241066 - RNA, 32 nt, Homo Sapiens
aaguuccuuuggcaaugaccacuuugcuguaa

SEQ ID NO: 241067 - RNA, 32 nt, Homo Sapiens
ugaccagaaucauggaauuugcuagaacugug

SEQ ID NO: 241068 - RNA, 32 nt, Homo Sapiens
gaaaggcucucgccggggcacagaaacauccc

SEQ ID NO: 241069 - RNA, 32 nt, Homo Sapiens
uccccggucuggaugcucccaaggacuuggcc

SEQ ID NO: 241070 - RNA, 32 nt, Homo Sapiens
aggagagcgcacacccaggcagcccucugcgg

SEQ ID NO: 241071 - RNA, 32 nt, Homo Sapiens
agaggcugugagggcaguucagggccagggcc

SEQ ID NO: 241072 - RNA, 30 nt, Homo Sapiens
ccauuuaauaaaagaauauguaaacugaac

SEQ ID NO: 241073 - RNA, 32 nt, Homo Sapiens
acccccagauucuccuguaccuccuggccugc

SEQ ID NO: 241074 - RNA, 32 nt, Homo Sapiens
ugcuaaagccuguucuuaauuuuaucucauuu

SEQ ID NO: 241075 - RNA, 29 nt, Homo Sapiens
uuaccuccauuuuucagagguggaaaugg

SEQ ID NO: 241076 - RNA, 32 nt, Homo Sapiens
cgcccucaccgcccggccuucuacggugucca

SEQ ID NO: 241077 - RNA, 32 nt, Homo Sapiens
ucgcuccgcccuggacgccgccggucccggcg

SEQ ID NO: 241078 - RNA, 32 nt, Homo Sapiens
gaaacuuaacuccuaauguagcaguacugaga

SEQ ID NO: 241079 - RNA, 32 nt, Homo Sapiens
gaccccucccgggaccccggagacagccggcc

SEQ ID NO: 241080 - RNA, 32 nt, Homo Sapiens
ccugccgcaggguaggagggccaggcaaaguu

SEQ ID NO: 241081 - RNA, 32 nt, Homo Sapiens
aguggaacgcaggugagaacgcagggaaagag

SEQ ID NO: 241082 - RNA, 32 nt, Homo Sapiens
cucugccauucagauagcacagauaccuuagg

SEQ ID NO: 241083 - RNA, 32 nt, Homo Sapiens
gcagagucuaaaggauaacauaucaaggcuua

SEQ ID NO: 241084 - RNA, 32 nt, Homo Sapiens
ggccuagccccgcgaugccgccggcgaguggc

SEQ ID NO: 241085 - RNA, 32 nt, Homo Sapiens
aacaaagcaaagugggcacauguagaaguuga

SEQ ID NO: 241086 - RNA, 32 nt, Homo Sapiens
ggccggacgggcgggcgcggaucccugcgucc

SEQ ID NO: 241087 - RNA, 32 nt, Homo Sapiens
agaacucgccgagcuccucccgggaaacccgg

SEQ ID NO: 241088 - RNA, 32 nt, Homo Sapiens
aggacacagugggacaaaguuggguugauagg

SEQ ID NO: 241089 - RNA, 32 nt, Homo Sapiens
gugcaauaaaaagcaggcugagguggucucag

SEQ ID NO: 241090 - RNA, 32 nt, Homo Sapiens
uggccauccuucuguguaccacuuccugaggc

SEQ ID NO: 241091 - RNA, 32 nt, Homo Sapiens
uuugauugaggcaaagggguccuacuguaagu

SEQ ID NO: 241092 - RNA, 32 nt, Homo Sapiens
caggauuagcuugugguuuaucaguugucaau

SEQ ID NO: 241093 - RNA, 32 nt, Homo Sapiens
ccgcccgccuccucgggagcucugaucucagc

SEQ ID NO: 241094 - RNA, 32 nt, Homo Sapiens
caugugccacccacccaacuaauuuuuguguu

SEQ ID NO: 241095 - RNA, 32 nt, Homo Sapiens
gcgggcggccgacgcuccucuucggcggcggc

SEQ ID NO: 241096 - RNA, 32 nt, Homo Sapiens
uuuacagagggugugacaaaacucaauuugac

SEQ ID NO: 241097 - RNA, 32 nt, Homo Sapiens
cuuuggggggucagugggcagcucaucgacuc

SEQ ID NO: 241098 - RNA, 32 nt, Homo Sapiens
gacgugccagcccccaccucaccggaaugcug

SEQ ID NO: 241099 - RNA, 32 nt, Homo Sapiens
ccacaggcaacgcagaccaacagaacuucaca

SEQ ID NO: 241100 - RNA, 32 nt, Homo Sapiens
aucaauagaauaaaagugaccgacugucaaaa

SEQ ID NO: 241101 - RNA, 32 nt, Homo Sapiens
ucacaccgagaaccacgggggcccguccaaga

SEQ ID NO: 241102 - RNA, 32 nt, Homo Sapiens
aaguaauaaacagauuaauaucaucauaaaau

SEQ ID NO: 241103 - RNA, 32 nt, Homo Sapiens
aguuccguucucguuuucuuccuccguuauug

SEQ ID NO: 241104 - RNA, 32 nt, Homo Sapiens
auccuccaauuuuuauacuaggcucuuugcca

SEQ ID NO: 241105 - RNA, 32 nt, Homo Sapiens
gucugcguggccauccuccccccaccauccaa

SEQ ID NO: 241106 - RNA, 32 nt, Homo Sapiens
aguauucaaauagaaaaauauaaacaauguaa

SEQ ID NO: 241107 - RNA, 32 nt, Homo Sapiens
ucuucaucucugcuccugugucauacucauua

SEQ ID NO: 241108 - RNA, 32 nt, Homo Sapiens
ugaaauaaaucuauaagguuaaguaugucccc

SEQ ID NO: 241109 - RNA, 32 nt, Homo Sapiens
uuauaacaaggggaaaaaacagacacagaggg

SEQ ID NO: 241110 - RNA, 32 nt, Homo Sapiens
ccccagcugggcccccggggcccaccacuuau

SEQ ID NO: 241111 - RNA, 32 nt, Homo Sapiens
ggucuagaaugggaacuggagaggacccugag

SEQ ID NO: 241112 - RNA, 32 nt, Homo Sapiens
uuugguaggucauaguuccuuauacacagaca

SEQ ID NO: 241113 - RNA, 32 nt, Homo Sapiens
acuguuugguguuuuaaauuuaaguguagaaa

SEQ ID NO: 241114 - RNA, 32 nt, Homo Sapiens
ugggcacuggagaggccagaagagacucagag

SEQ ID NO: 241115 - RNA, 32 nt, Homo Sapiens
aggucucuguauuguuccuguuucuacccuga

SEQ ID NO: 241116 - RNA, 32 nt, Homo Sapiens
agccuggccaacauagugaaaccccgucucuu

SEQ ID NO: 241117 - RNA, 32 nt, Homo Sapiens
gaugggcagcuacuugucugccuuggcccuuu

SEQ ID NO: 241118 - RNA, 32 nt, Homo Sapiens
accgagaguuccugcgcguggggaguuggaga

SEQ ID NO: 241119 - RNA, 32 nt, Homo Sapiens
agcccaaccuggacuccacuccagguuugccc

SEQ ID NO: 241120 - RNA, 32 nt, Homo Sapiens
uauauuucaugaagcugauccuuuugugugug

SEQ ID NO: 241121 - RNA, 32 nt, Homo Sapiens
agcccgaggggaaguugcugcagaggcaccaa

SEQ ID NO: 241122 - RNA, 32 nt, Homo Sapiens
ucuauauaaaaauuauauuaaauagaugcugc

SEQ ID NO: 241123 - RNA, 30 nt, Homo Sapiens
caacaugaaauuggaaugcaaaauuaauac

SEQ ID NO: 241124 - RNA, 32 nt, Homo Sapiens
ugggugggcagagguuuagaaaggugguucug

SEQ ID NO: 241125 - RNA, 32 nt, Homo Sapiens
gcacggguuuccugcccagcgacggcuuaagc

SEQ ID NO: 241126 - RNA, 32 nt, Homo Sapiens
gaaugcagaauguguaauagcucacaauaagu

SEQ ID NO: 241127 - RNA, 32 nt, Homo Sapiens
cgccggucacgacugcugaauaugagacgauc

SEQ ID NO: 241128 - RNA, 32 nt, Homo Sapiens
aauuauacaauuuuuccuguaaacaauaccaa

SEQ ID NO: 241129 - RNA, 32 nt, Homo Sapiens
aucccaauuauuucaugccccuugcuuaggca

SEQ ID NO: 241130 - RNA, 32 nt, Homo Sapiens
uauauuuuuuaaagucaguuuagguaauaaac

SEQ ID NO: 241131 - RNA, 32 nt, Homo Sapiens
auuaguaauaauaugaaauauacuuaaagagc

SEQ ID NO: 241132 - RNA, 32 nt, Homo Sapiens
acuacuagugucauuuaggagcuuagcucaaa

SEQ ID NO: 241133 - RNA, 32 nt, Homo Sapiens
gcgaggcagagcgggagcgcgcagccaggugg

SEQ ID NO: 241134 - RNA, 32 nt, Homo Sapiens
gcugcugcgucccacacccggugcccacaucc

SEQ ID NO: 241135 - RNA, 32 nt, Homo Sapiens
uccugagccugaggguuuauguguguccagcu

SEQ ID NO: 241136 - RNA, 32 nt, Homo Sapiens
aagccucaccagccauaucucaucucugagag

SEQ ID NO: 241137 - RNA, 31 nt, Homo Sapiens
uuaugauuccaauaaggaacgcuuuccuagu

SEQ ID NO: 241138 - RNA, 32 nt, Homo Sapiens
agccgccagucccaccgccgccgccgcgaugg

SEQ ID NO: 241139 - RNA, 32 nt, Homo Sapiens
ucccagcucugucaguggcccgcggggcccga

SEQ ID NO: 241140 - RNA, 32 nt, Homo Sapiens
ggccgauggggcggggaggccgcuggggauag

SEQ ID NO: 241141 - RNA, 32 nt, Homo Sapiens
cuggauuagaggugauggccacagcaaauggg

SEQ ID NO: 241142 - RNA, 32 nt, Homo Sapiens
guuucuagcaugaagacagagccccacccuca

SEQ ID NO: 241143 - RNA, 32 nt, Homo Sapiens
agccuuuacagagggugugacaaaacucaauu

SEQ ID NO: 241144 - RNA, 32 nt, Homo Sapiens
uagcucuaaaauuaagauucggaugcuuuauu

SEQ ID NO: 241145 - RNA, 32 nt, Homo Sapiens
gaacucaucugaaucaucaguuccuugaugga

SEQ ID NO: 241146 - RNA, 30 nt, Homo Sapiens
auagaugaaauucuugcuucucgaagauuu

SEQ ID NO: 241147 - RNA, 32 nt, Homo Sapiens
aaaagauaaaaaguuaacugaacuaaaggcag

SEQ ID NO: 241148 - RNA, 32 nt, Homo Sapiens
cuacccccuuccauggccccagcucugccuac

SEQ ID NO: 241149 - RNA, 32 nt, Homo Sapiens
guucuguucauaauucuuauuucucaaccugg

SEQ ID NO: 241150 - RNA, 30 nt, Homo Sapiens
cauuuuggaaugucugcagaaacuuaaaaa

SEQ ID NO: 241151 - RNA, 32 nt, Homo Sapiens
gguggccucguugcccggggacuucaagcagg

SEQ ID NO: 241152 - RNA, 32 nt, Homo Sapiens
gucggcugauuagcaaccuucauuccaucugc

SEQ ID NO: 241153 - RNA, 32 nt, Homo Sapiens
ggccugccacuggggguuccaggccgugguga

SEQ ID NO: 241154 - RNA, 32 nt, Homo Sapiens
ggaccagcgcaucagccaggacguggagcgau

SEQ ID NO: 241155 - RNA, 32 nt, Homo Sapiens
uaucuggccccugggcagcugcccggggaggc

SEQ ID NO: 241156 - RNA, 32 nt, Homo Sapiens
cuuucuuuucgagcugccgagaacagggagau

SEQ ID NO: 241157 - RNA, 32 nt, Homo Sapiens
cuuuuaaauauuugugacucuuuccuaaagcc

SEQ ID NO: 241158 - RNA, 32 nt, Homo Sapiens
cuguagcugcucuguuuagacagcggacagac

SEQ ID NO: 241159 - RNA, 32 nt, Homo Sapiens
aacuaguucuuauaguguacuccaccuuuuac

SEQ ID NO: 241160 - RNA, 32 nt, Homo Sapiens
ggcauuaaguuuauuuuagucuucccauuuuc

SEQ ID NO: 241161 - RNA, 32 nt, Homo Sapiens
gugcagcaaagagaagugucagagcaugagcg

SEQ ID NO: 241162 - RNA, 32 nt, Homo Sapiens
cugucccuugaccuuaacucugaugguucuuc

SEQ ID NO: 241163 - RNA, 32 nt, Homo Sapiens
uaagaacauggaaggggugcugauggacgugg

SEQ ID NO: 241164 - RNA, 32 nt, Homo Sapiens
ccugggcacacacguagacaagggcagcuauu

SEQ ID NO: 241165 - RNA, 32 nt, Homo Sapiens
gaccgcaagugaauucaugguauuuuacuuuu

SEQ ID NO: 241166 - RNA, 32 nt, Homo Sapiens
uuuucugcagcaggcccagaucagcuuugcac

SEQ ID NO: 241167 - RNA, 32 nt, Homo Sapiens
uuuauuugacauuuuacugcuucuuucugucu

SEQ ID NO: 241168 - RNA, 32 nt, Homo Sapiens
ucucuccaagcagcugcagaccccagcucgaa

SEQ ID NO: 241169 - RNA, 32 nt, Homo Sapiens
cugaacccaaaauaaauuugugaagaguaauu

SEQ ID NO: 241170 - RNA, 32 nt, Homo Sapiens
uuauguauauauauguauguuucuccaaaaag

SEQ ID NO: 241171 - RNA, 32 nt, Homo Sapiens
auacuguuuccauuuuaaggauaugauuaaua

SEQ ID NO: 241172 - RNA, 32 nt, Homo Sapiens
aagugcugugggcuuuucaaguauuauucaca

SEQ ID NO: 241173 - RNA, 32 nt, Homo Sapiens
aaauauuauuuuuaugccugguaaguggcuuu

SEQ ID NO: 241174 - RNA, 32 nt, Homo Sapiens
gccgagcgcccagucccggcccggggcugagu

SEQ ID NO: 241175 - RNA, 32 nt, Homo Sapiens
ucgauguccuagccuaggggcccccgggccgg

SEQ ID NO: 241176 - RNA, 32 nt, Homo Sapiens
cucucccugcagcuuucacugcucuugccuaa

SEQ ID NO: 241177 - RNA, 32 nt, Homo Sapiens
acuauuuuucaguaucucuguaccuguuaaag

SEQ ID NO: 241178 - RNA, 32 nt, Homo Sapiens
uccaaugaugaaauauaaucagaagaugaaaa

SEQ ID NO: 241179 - RNA, 32 nt, Homo Sapiens
uguuugcacagcuuugaugacaguggcuuaga

SEQ ID NO: 241180 - RNA, 32 nt, Homo Sapiens
cagacauuccuaacuugacuagugguuaacau

SEQ ID NO: 241181 - RNA, 32 nt, Homo Sapiens
caagggacgcagacaaucggcacauugugagc

SEQ ID NO: 241182 - RNA, 32 nt, Homo Sapiens
ggggaaggaaaauaaaagggugugaagaagga

SEQ ID NO: 241183 - RNA, 32 nt, Homo Sapiens
gccuccggacgucugugccgggacaaggccgc

SEQ ID NO: 241184 - RNA, 32 nt, Homo Sapiens
ugaagaugaagaugacacguugauuucuuguu

SEQ ID NO: 241185 - RNA, 32 nt, Homo Sapiens
guuuuacaaaaaaugaauuuugaaagggugug

SEQ ID NO: 241186 - RNA, 32 nt, Homo Sapiens
accuccucacccgaccccggggcaggucuuuu

SEQ ID NO: 241187 - RNA, 32 nt, Homo Sapiens
uuuuccaaguuuuguuucuacuucuauccauu

SEQ ID NO: 241188 - RNA, 32 nt, Homo Sapiens
guuaguuauagcagugauuucauuagagugua

SEQ ID NO: 241189 - RNA, 32 nt, Homo Sapiens
cugccgccgucacccgcgggaccccgggagca

SEQ ID NO: 241190 - RNA, 32 nt, Homo Sapiens
gccucgcauccauucucgcccuggugguuggu

SEQ ID NO: 241191 - RNA, 32 nt, Homo Sapiens
cacuguggagaggcacacgcugucccagugcu

SEQ ID NO: 241192 - RNA, 32 nt, Homo Sapiens
cccaucuagaacugccauuaucaguggaguag

SEQ ID NO: 241193 - RNA, 32 nt, Homo Sapiens
ugcagguuucauuacugaauagauauagccaa

SEQ ID NO: 241194 - RNA, 32 nt, Homo Sapiens
uuaaagaugcaguauauacuuuucucauuuuu

SEQ ID NO: 241195 - RNA, 32 nt, Homo Sapiens
agcacuuuucccuccuuuuuuaucuccuauuu

SEQ ID NO: 241196 - RNA, 32 nt, Homo Sapiens
guaugcuugaguuuugcgaauguucuccucuu

SEQ ID NO: 241197 - RNA, 32 nt, Homo Sapiens
caaaucuauuauuccacuggcgcaucauaugc

SEQ ID NO: 241198 - RNA, 32 nt, Homo Sapiens
cccgcggcacgcugccccugcacgcgcugcgg

SEQ ID NO: 241199 - RNA, 32 nt, Homo Sapiens
ugguguuggccauuuccccucacuuuaauuau

SEQ ID NO: 241200 - RNA, 32 nt, Homo Sapiens
ucgucgcgcgcccgcgacccaggucgcccuga

SEQ ID NO: 241201 - RNA, 32 nt, Homo Sapiens
ugaaauccaagcccuaaaaaugccagcuucuu

SEQ ID NO: 241202 - RNA, 32 nt, Homo Sapiens
ccacuaaucauccuuauaccgacggggaaacg

SEQ ID NO: 241203 - RNA, 32 nt, Homo Sapiens
caaggacuggggacggcgguguccuugucuug

SEQ ID NO: 241204 - RNA, 32 nt, Homo Sapiens
ccuaggcggcggugcaguccgucguagaagaa

SEQ ID NO: 241205 - RNA, 32 nt, Homo Sapiens
cccggcagacugccucugucaccgggucccuc

SEQ ID NO: 241206 - RNA, 32 nt, Homo Sapiens
ugcaaaaggggaagaaaggaauugcgaauaca

SEQ ID NO: 241207 - RNA, 32 nt, Homo Sapiens
gaucugaguucauguagcugguguuggcuuag

SEQ ID NO: 241208 - RNA, 32 nt, Homo Sapiens
gaaaaaaaguaguuuuccuuuacaaugaggcu

SEQ ID NO: 241209 - RNA, 32 nt, Homo Sapiens
uuaagauugagugucuuuaaucugcagaauaa

SEQ ID NO: 241210 - RNA, 32 nt, Homo Sapiens
gcacuugguccccuuugcuccucccugggacu

SEQ ID NO: 241211 - RNA, 32 nt, Homo Sapiens
ggacgcccgggcggcccugaaggggacggggc

SEQ ID NO: 241212 - RNA, 30 nt, Homo Sapiens
uguacagucugugcugcagucgauucuuau

SEQ ID NO: 241213 - RNA, 32 nt, Homo Sapiens
gacugcgccgacggcagcgacgagcgcggcug

SEQ ID NO: 241214 - RNA, 32 nt, Homo Sapiens
uccaacugucucccagcaaucgcaucccggcu

SEQ ID NO: 241215 - RNA, 32 nt, Homo Sapiens
agaauuuuuuaaaauuugccagaaugaaaaag

SEQ ID NO: 241216 - RNA, 32 nt, Homo Sapiens
aaugucugcaucugugcuguguguguagugug

SEQ ID NO: 241217 - RNA, 32 nt, Homo Sapiens
ucugcaaauauuaguuuguccuccuuuaauug

SEQ ID NO: 241218 - RNA, 30 nt, Homo Sapiens
auccugguugguguugcagaagguuuacuc

SEQ ID NO: 241219 - RNA, 32 nt, Homo Sapiens
cuuagguaccaguuagcgucaggggagcuggg

SEQ ID NO: 241220 - RNA, 32 nt, Homo Sapiens
gaaacauaccuuaaguuuuuuuuguuuuguuu

SEQ ID NO: 241221 - RNA, 32 nt, Homo Sapiens
gccacugucccaccuccauccacacacagacc

SEQ ID NO: 241222 - RNA, 32 nt, Homo Sapiens
ccuugauuuguuugacuccccuccccccauuu

SEQ ID NO: 241223 - RNA, 32 nt, Homo Sapiens
agaacucagugcugccuauuaguaguuaauuc

SEQ ID NO: 241224 - RNA, 32 nt, Homo Sapiens
aagauauaaaaauuagcuggaugugguggugc

SEQ ID NO: 241225 - RNA, 32 nt, Homo Sapiens
aaguuuuuaugcauaugugucuccauacaagu

SEQ ID NO: 241226 - RNA, 32 nt, Homo Sapiens
auuuugacuggggagaggcauggagaagaaac

SEQ ID NO: 241227 - RNA, 32 nt, Homo Sapiens
aauguaaaaauauuuguaaaaugaaaugccau

SEQ ID NO: 241228 - RNA, 32 nt, Homo Sapiens
agcgcugggcccucgcgucgcgggcguggcug

SEQ ID NO: 241229 - RNA, 32 nt, Homo Sapiens
aaauagguaguuguguucuuuauuuuuaaaau

SEQ ID NO: 241230 - RNA, 32 nt, Homo Sapiens
acuccgcggcccgccaggacccggccccggug

SEQ ID NO: 241231 - RNA, 32 nt, Homo Sapiens
ccuuuugguagaauugccacaaacaaggcuca

SEQ ID NO: 241232 - RNA, 32 nt, Homo Sapiens
uuccuuuccaggugcauagaacuucccacaag

SEQ ID NO: 241233 - RNA, 32 nt, Homo Sapiens
uauauucugaauaauugccauucagaaugcua

SEQ ID NO: 241234 - RNA, 32 nt, Homo Sapiens
cuucucucgaguuuauaaucugcaccagaaga

SEQ ID NO: 241235 - RNA, 32 nt, Homo Sapiens
gcguaaagaauauuuuuaaacuucguguuuug

SEQ ID NO: 241236 - RNA, 32 nt, Homo Sapiens
aggagaagcaagcaggcgaaucguaugaggcg

SEQ ID NO: 241237 - RNA, 32 nt, Homo Sapiens
uccuccucaguucuaccuaguuucacagagga

SEQ ID NO: 241238 - RNA, 32 nt, Homo Sapiens
uuccuguugaauguauuuuuaugagauuuuaa

SEQ ID NO: 241239 - RNA, 32 nt, Homo Sapiens
uuaaucacuuucagauguuagagcagcguauu

SEQ ID NO: 241240 - RNA, 32 nt, Homo Sapiens
uggauuuuuuuuucuuuuuuuuuuuucgccau

SEQ ID NO: 241241 - RNA, 32 nt, Homo Sapiens
uaagggaacgcugaggucccgcgcuccccgac

SEQ ID NO: 241242 - RNA, 32 nt, Homo Sapiens
ggaggaggagggacugagcggcggcggccccc

SEQ ID NO: 241243 - RNA, 32 nt, Homo Sapiens
cucaauuuugguuuuucucauuugaaauguuu

SEQ ID NO: 241244 - RNA, 32 nt, Homo Sapiens
uguuuaaguauuuaaacaucugagccaaagca

SEQ ID NO: 241245 - RNA, 32 nt, Homo Sapiens
cugaaagguucuacuauacaccaucuaaucug

SEQ ID NO: 241246 - RNA, 32 nt, Homo Sapiens
gcagugucccgccaccuuugcuucccgcuccu

SEQ ID NO: 241247 - RNA, 32 nt, Homo Sapiens
cuucugauuucgucugugaaugagggaaaugg

SEQ ID NO: 241248 - RNA, 32 nt, Homo Sapiens
ucccgccauucaaugucagggaucagcccuug

SEQ ID NO: 241249 - RNA, 32 nt, Homo Sapiens
guggucaugaggagaccucaccaccagucggu

SEQ ID NO: 241250 - RNA, 32 nt, Homo Sapiens
gagagggaaugggagacuugauauuuaagcag

SEQ ID NO: 241251 - RNA, 32 nt, Homo Sapiens
gggcggcaggaucagagugaaagcagaggcgu

SEQ ID NO: 241252 - RNA, 32 nt, Homo Sapiens
cuauuuuagagcauuauuagcauucucugaau

SEQ ID NO: 241253 - RNA, 32 nt, Homo Sapiens
acccgagggcuguaaucccucccgcgggugcg

SEQ ID NO: 241254 - RNA, 30 nt, Homo Sapiens
caccuuggcgcgcagcccgggagauccgcc

SEQ ID NO: 241255 - RNA, 32 nt, Homo Sapiens
uccucagcagagacucgggcucguccgccaug

SEQ ID NO: 241256 - RNA, 32 nt, Homo Sapiens
cucugccaucuacuccacuguucagacaccuc

SEQ ID NO: 241257 - RNA, 32 nt, Homo Sapiens
auguuagaugcauuguguguuuuagggaaaga

SEQ ID NO: 241258 - RNA, 32 nt, Homo Sapiens
uuauuuguauuuuacuacuguuuggucaauuu

SEQ ID NO: 241259 - RNA, 32 nt, Homo Sapiens
auuugugggaugguggcagggguguggggucc

SEQ ID NO: 241260 - RNA, 29 nt, Homo Sapiens
cgccgccggaccaggaggacgcugacgag

SEQ ID NO: 241261 - RNA, 32 nt, Homo Sapiens
guaaaaacgaaacuauuuaaaaaacaagaaua

SEQ ID NO: 241262 - RNA, 32 nt, Homo Sapiens
aaagcuuguucauccauucaccagcugaggga

SEQ ID NO: 241263 - RNA, 32 nt, Homo Sapiens
gucgccggggagcccgcgggcacuuggcgcgc

SEQ ID NO: 241264 - RNA, 31 nt, Homo Sapiens
agagauaccagugauguccuaacugagcucc

SEQ ID NO: 241265 - RNA, 32 nt, Homo Sapiens
uaaaggcccauaacauacuaaaacaggcaguu

SEQ ID NO: 241266 - RNA, 32 nt, Homo Sapiens
gaagucagaaggaaaaggaaaguagacaaguu

SEQ ID NO: 241267 - RNA, 32 nt, Homo Sapiens
uuuugcaguaaccagcagcauucucagcugga

SEQ ID NO: 241268 - RNA, 32 nt, Homo Sapiens
uauguaucaaccaaacuaauguuaaaucaggc

SEQ ID NO: 241269 - RNA, 32 nt, Homo Sapiens
cucagugaaaucauauuaauuauuuuccaaaa

SEQ ID NO: 241270 - RNA, 32 nt, Homo Sapiens
gauguugaaaauagguugugauuacagucauu

SEQ ID NO: 241271 - RNA, 32 nt, Homo Sapiens
uuggaaaggacacgugagagugagcucaagug

SEQ ID NO: 241272 - RNA, 32 nt, Homo Sapiens
uuuguauucacauucuguuacacucugccuau

SEQ ID NO: 241273 - RNA, 32 nt, Homo Sapiens
cucacgagacacagguaggcagcaaaugagau

SEQ ID NO: 241274 - RNA, 32 nt, Homo Sapiens
uauuuguuauuuaaguuuuucagauaauaugu

SEQ ID NO: 241275 - RNA, 32 nt, Homo Sapiens
aaaauaguagugaaaguauuagacagaagaca

SEQ ID NO: 241276 - RNA, 32 nt, Homo Sapiens
agcaugcaugaagagaugguguguucuaauaa

SEQ ID NO: 241277 - RNA, 32 nt, Homo Sapiens
uuccuuuaaaauuuauuuugugucaaaugauu

SEQ ID NO: 241278 - RNA, 32 nt, Homo Sapiens
ccucagcauuagaccagggggaccacacgggg

SEQ ID NO: 241279 - RNA, 32 nt, Homo Sapiens
accaggucuaauguuuacaaacggugccagcc

SEQ ID NO: 241280 - RNA, 30 nt, Homo Sapiens
cgccagggauccaguguuagccaggacagu

SEQ ID NO: 241281 - RNA, 32 nt, Homo Sapiens
gugguucuccaucauugggggaguggaaggga

SEQ ID NO: 241282 - RNA, 32 nt, Homo Sapiens
ucauuccuggguuuuucuuuuauuuucuaaga

SEQ ID NO: 241283 - RNA, 32 nt, Homo Sapiens
auagugggucuguaauggaaaucugucaauga

SEQ ID NO: 241284 - RNA, 32 nt, Homo Sapiens
ccacugucugcccaagcugccacccccuaauc

SEQ ID NO: 241285 - RNA, 32 nt, Homo Sapiens
acauuuugggcaugacauaagaugugucuuua

SEQ ID NO: 241286 - RNA, 32 nt, Homo Sapiens
ugaauguugcuaaggagggaagcuauacaugu

SEQ ID NO: 241287 - RNA, 32 nt, Homo Sapiens
cuaacacuuaguuuucucagagaaguggaggg

SEQ ID NO: 241288 - RNA, 32 nt, Homo Sapiens
aggaccgggcccagcccagcccuuccugaagc

SEQ ID NO: 241289 - RNA, 32 nt, Homo Sapiens
augagcuguuucuugggcgaugaauauucuca

SEQ ID NO: 241290 - RNA, 32 nt, Homo Sapiens
aggaugggaacaugggaaugauaauauauauu

SEQ ID NO: 241291 - RNA, 32 nt, Homo Sapiens
ugcugccuccuaauuagcuuggaccuucuccc

SEQ ID NO: 241292 - RNA, 32 nt, Homo Sapiens
ugcgccugucuccgcacguguugggccacagc

SEQ ID NO: 241293 - RNA, 32 nt, Homo Sapiens
gaaaaggcaacgccgcugacaaagaacauugc

SEQ ID NO: 241294 - RNA, 32 nt, Homo Sapiens
auuuuauguugcacuaagaagguggggucgag

SEQ ID NO: 241295 - RNA, 32 nt, Homo Sapiens
ccuguccucuggcuccaccugcaccgcccugc

SEQ ID NO: 241296 - RNA, 32 nt, Homo Sapiens
agccggagccgcgggugagcgcggcgagcggc

SEQ ID NO: 241297 - RNA, 32 nt, Homo Sapiens
uucauuugauucucuuuuuuuagucuuaaaau

SEQ ID NO: 241298 - RNA, 32 nt, Homo Sapiens
ccgcucccagugucuuccugugggggaagagc

SEQ ID NO: 241299 - RNA, 32 nt, Homo Sapiens
accuagaccugccugugacuugaggguuaaga

SEQ ID NO: 241300 - RNA, 32 nt, Homo Sapiens
ggcuuccgcacggucucccggcaacacugcgg

SEQ ID NO: 241301 - RNA, 32 nt, Homo Sapiens
gggagagaggccgggguuagggugaucugugu

SEQ ID NO: 241302 - RNA, 32 nt, Homo Sapiens
uuguguauauugcuuuauaacauuucagaucu

SEQ ID NO: 241303 - RNA, 32 nt, Homo Sapiens
uaaauaccuuaguagagaguaagauuuaauuu

SEQ ID NO: 241304 - RNA, 32 nt, Homo Sapiens
uccaugucccuacaaaggacaugaacugauca

SEQ ID NO: 241305 - RNA, 32 nt, Homo Sapiens
agcucccuuuuccccuuccccagcgccguuug

SEQ ID NO: 241306 - RNA, 32 nt, Homo Sapiens
aaacuuuggggcccgcgccgcgcgccggcggc

SEQ ID NO: 241307 - RNA, 32 nt, Homo Sapiens
agaaaggaaaaagggauuaguuaaaucugaga

SEQ ID NO: 241308 - RNA, 32 nt, Homo Sapiens
aaaacacugcagauauuuuuuaaaaguaauuu

SEQ ID NO: 241309 - RNA, 32 nt, Homo Sapiens
caaaacuucccagaauaccucccuuuccaguu

SEQ ID NO: 241310 - RNA, 32 nt, Homo Sapiens
agcaagugauaaaggauuaguauccaggauau

SEQ ID NO: 241311 - RNA, 32 nt, Homo Sapiens
cgcacucuccguccccgcggcuggcgcaggac

SEQ ID NO: 241312 - RNA, 32 nt, Homo Sapiens
gaggggaggcacguggcgcgcgugggcccgcu

SEQ ID NO: 241313 - RNA, 32 nt, Homo Sapiens
aguaggaagggagagccauuugaaaggcauca

SEQ ID NO: 241314 - RNA, 32 nt, Homo Sapiens
guugguucugggcuaguuuuauuguuaauuuu

SEQ ID NO: 241315 - RNA, 32 nt, Homo Sapiens
aauaaaaaucauaguacucuuuguagcaaaau

SEQ ID NO: 241316 - RNA, 32 nt, Homo Sapiens
uuguuacaugaauaauuuguggaccagggauu

SEQ ID NO: 241317 - RNA, 32 nt, Homo Sapiens
caagauagaaaagagcagagaaugacguggac

SEQ ID NO: 241318 - RNA, 32 nt, Homo Sapiens
cugccccaggcacccucugcccugcccggcca

SEQ ID NO: 241319 - RNA, 32 nt, Homo Sapiens
ggaaggugggcucuggccgccgggagccgggg

SEQ ID NO: 241320 - RNA, 32 nt, Homo Sapiens
aaaaauucucaaaaguuuuuuuuuuuuuuuug

SEQ ID NO: 241321 - RNA, 32 nt, Homo Sapiens
ugagaaccaaaaugaacgaaaaucuguucgcu

SEQ ID NO: 241322 - RNA, 32 nt, Homo Sapiens
uuuauaaaaaggaaaaguaguuuucauauuaa

SEQ ID NO: 241323 - RNA, 32 nt, Homo Sapiens
acuagcaacgaccucugugaaguuggagaggc

SEQ ID NO: 241324 - RNA, 32 nt, Homo Sapiens
cagcuucuuuagccucuugguaccucacacuc

SEQ ID NO: 241325 - RNA, 32 nt, Homo Sapiens
aaauguuagugucaaauuucauuuaaaaauau

SEQ ID NO: 241326 - RNA, 32 nt, Homo Sapiens
gcaguguacuuuucuuuuuguuguuuccccca

SEQ ID NO: 241327 - RNA, 32 nt, Homo Sapiens
ccaagaguggguccucuaggccugggcugggc

SEQ ID NO: 241328 - RNA, 32 nt, Homo Sapiens
gagguggcacuugugauuguguguagauuggc

SEQ ID NO: 241329 - RNA, 32 nt, Homo Sapiens
gcacuugauauuuauuagugguguauaugguc

SEQ ID NO: 241330 - RNA, 32 nt, Homo Sapiens
caucucacagaaagccagucacugagacaagu

SEQ ID NO: 241331 - RNA, 32 nt, Homo Sapiens
gaccauccaggcauauaguauuuucaagaaau

SEQ ID NO: 241332 - RNA, 32 nt, Homo Sapiens
ccaggcuuucccuuuuuucuuuuguucaacau

SEQ ID NO: 241333 - RNA, 32 nt, Homo Sapiens
uugggcucugcucuccucccugccauuacggg

SEQ ID NO: 241334 - RNA, 32 nt, Homo Sapiens
ggauccgagcgcgccggcggggcgcagagccc

SEQ ID NO: 241335 - RNA, 32 nt, Homo Sapiens
cuuccaucaccucggcgcucccggagccacua

SEQ ID NO: 241336 - RNA, 32 nt, Homo Sapiens
uggcuuccucugaugcugacaagguggggaac

SEQ ID NO: 241337 - RNA, 32 nt, Homo Sapiens
guggugaugauuucucugcucuucccacgggg

SEQ ID NO: 241338 - RNA, 31 nt, Homo Sapiens
ggcggauguugagccaggagguugggcaaag

SEQ ID NO: 241339 - RNA, 32 nt, Homo Sapiens
agaugaggaaacugaggcccagagaagcggaa

SEQ ID NO: 241340 - RNA, 32 nt, Homo Sapiens
ucguggugcuggacggcgcgggccgccugcac

SEQ ID NO: 241341 - RNA, 32 nt, Homo Sapiens
cccucccucccucugacucuuugcccagaccu

SEQ ID NO: 241342 - RNA, 32 nt, Homo Sapiens
ucucacucuccuguuuauucaccagacugggg

SEQ ID NO: 241343 - RNA, 32 nt, Homo Sapiens
ugcccagaggggcagccaggcugcucagggaa

SEQ ID NO: 241344 - RNA, 32 nt, Homo Sapiens
uuguucuuuuucuuuuuaguguguggagauug

SEQ ID NO: 241345 - RNA, 32 nt, Homo Sapiens
aggaggcgggcggcccgggccucaggccccuc

SEQ ID NO: 241346 - RNA, 32 nt, Homo Sapiens
cuccuuuucuucaccuuuuaugcugcacuccu

SEQ ID NO: 241347 - RNA, 32 nt, Homo Sapiens
agcauguuauuuauauuagcucauucauuccu

SEQ ID NO: 241348 - RNA, 32 nt, Homo Sapiens
ugucuacaguucuauuuguauauauaaaaaga

SEQ ID NO: 241349 - RNA, 32 nt, Homo Sapiens
agagccccgcuucuucccacuccacuuguugu

SEQ ID NO: 241350 - RNA, 32 nt, Homo Sapiens
ugauuuguuuuaauggguuaaugaauacuuug

SEQ ID NO: 241351 - RNA, 32 nt, Homo Sapiens
ggguccagaccucggcugccacgccccaggac

SEQ ID NO: 241352 - RNA, 32 nt, Homo Sapiens
aaggagcagcuaggggaaccugaggcuuguuc

SEQ ID NO: 241353 - RNA, 32 nt, Homo Sapiens
gaaguccuggggagccgugacccaugggaucg

SEQ ID NO: 241354 - RNA, 32 nt, Homo Sapiens
ugguuaguggucuuguauacuucucucaccau

SEQ ID NO: 241355 - RNA, 31 nt, Homo Sapiens
ugagaaacaaauuuugugagaauagguagug

SEQ ID NO: 241356 - RNA, 30 nt, Homo Sapiens
gaauugugucagguugacaagagugguuaa

SEQ ID NO: 241357 - RNA, 32 nt, Homo Sapiens
gguggcuggacgagagcagcucuuggcucagc

SEQ ID NO: 241358 - RNA, 32 nt, Homo Sapiens
auacacuccuucccugcugagccagccaccuu

SEQ ID NO: 241359 - RNA, 32 nt, Homo Sapiens
ugccaaaaaugaauuucaugaaugugagguca

SEQ ID NO: 241360 - RNA, 32 nt, Homo Sapiens
uucucgaccaaccugcccuuucuuaauaugac

SEQ ID NO: 241361 - RNA, 32 nt, Homo Sapiens
caacaaacccaccagaacugcuuaauacaguu

SEQ ID NO: 241362 - RNA, 32 nt, Homo Sapiens
auucuuugggucugacaguaacagaaaccuca

SEQ ID NO: 241363 - RNA, 32 nt, Homo Sapiens
gcaacagguucucuggccuccuggcuuccggg

SEQ ID NO: 241364 - RNA, 32 nt, Homo Sapiens
aaaccauauaaaugugaugagugugguaaaga

SEQ ID NO: 241365 - RNA, 32 nt, Homo Sapiens
cacggagcaaaauaaaauuuucuuagcuaauc

SEQ ID NO: 241366 - RNA, 32 nt, Homo Sapiens
uguauuccaagcccaauuuugacccugguuuu

SEQ ID NO: 241367 - RNA, 32 nt, Homo Sapiens
gagcagcgucugggagauguguccuuucugga

SEQ ID NO: 241368 - RNA, 32 nt, Homo Sapiens
caaagggaagucgacgaaauaaaauuaaagcc

SEQ ID NO: 241369 - RNA, 32 nt, Homo Sapiens
aggcgccgccggccguccgccucccccaagcc

SEQ ID NO: 241370 - RNA, 32 nt, Homo Sapiens
aguggggaggggcuuuccugagccuggagcug

SEQ ID NO: 241371 - RNA, 32 nt, Homo Sapiens
ucucacggcuucucuagggacuccauggucuu

SEQ ID NO: 241372 - RNA, 32 nt, Homo Sapiens
accugcagaaauugagagauccacagcuaaga

SEQ ID NO: 241373 - RNA, 32 nt, Homo Sapiens
cacuguaugagaaagcacuguaaaaacuuuuu

SEQ ID NO: 241374 - RNA, 32 nt, Homo Sapiens
ggaguccacuggcgucuucaccaccauguaga

SEQ ID NO: 241375 - RNA, 32 nt, Homo Sapiens
auuacugcuaaucugcuguuaagugaacgguu

SEQ ID NO: 241376 - RNA, 32 nt, Homo Sapiens
ucauuccauccagggcagcaucagggagagcu

SEQ ID NO: 241377 - RNA, 32 nt, Homo Sapiens
ggccauucccgggucuuaaucuaacucuccag

SEQ ID NO: 241378 - RNA, 29 nt, Homo Sapiens
ugacuucuucacuaaaaccacaaaguccu

SEQ ID NO: 241379 - RNA, 32 nt, Homo Sapiens
caaacucgcucuuggacuugguugucuuuggu

SEQ ID NO: 241380 - RNA, 32 nt, Homo Sapiens
aaacugucaccaucaucuuuugcaauguguug

SEQ ID NO: 241381 - RNA, 32 nt, Homo Sapiens
cccacacacaacaggguaaauuccuacuccuu

SEQ ID NO: 241382 - RNA, 32 nt, Homo Sapiens
aaaugguuucauaucucuauugugacuaauuu

SEQ ID NO: 241383 - RNA, 32 nt, Homo Sapiens
uaggcgugagaguuuauuuuuguacaaggggu

SEQ ID NO: 241384 - RNA, 32 nt, Homo Sapiens
gccccagcucccagcccugggcggccguauca

SEQ ID NO: 241385 - RNA, 32 nt, Homo Sapiens
agaguugccggggucugcugggggagaauuuc

SEQ ID NO: 241386 - RNA, 32 nt, Homo Sapiens
guuagccaacagcuucugauagcaauucauau

SEQ ID NO: 241387 - RNA, 32 nt, Homo Sapiens
cgugcuagagaacagcagcagcuucagccugg

SEQ ID NO: 241388 - RNA, 32 nt, Homo Sapiens
gagggcuugggaccccuaaucuauguaucagu

SEQ ID NO: 241389 - RNA, 32 nt, Homo Sapiens
aggagaugcgggcccuggcccuggaccugggc

SEQ ID NO: 241390 - RNA, 32 nt, Homo Sapiens
agcccuccccaguccuccccagccuucuucag

SEQ ID NO: 241391 - RNA, 32 nt, Homo Sapiens
uagugucuuaugcccuagauuuagucaucuug

SEQ ID NO: 241392 - RNA, 32 nt, Homo Sapiens
gcaaacuuuuucugcaaaggaucagcugggag

SEQ ID NO: 241393 - RNA, 32 nt, Homo Sapiens
gaacagcuccagcucccagguauuuucuacag

SEQ ID NO: 241394 - RNA, 32 nt, Homo Sapiens
cugcugcagccaccuggugccuuaguccuugg

SEQ ID NO: 241395 - RNA, 32 nt, Homo Sapiens
gcaagagaauccacgugaaacuggauggcagc

SEQ ID NO: 241396 - RNA, 32 nt, Homo Sapiens
uuuauugcugguuuuucauuuacacugauaaa

SEQ ID NO: 241397 - RNA, 32 nt, Homo Sapiens
cagcugggggcacguggacugguucugcuguu

SEQ ID NO: 241398 - RNA, 32 nt, Homo Sapiens
gcauccucuccgggcccagcucuucuuccugg

SEQ ID NO: 241399 - RNA, 32 nt, Homo Sapiens
gggcucagcuccacaagacuucagacaccagc

SEQ ID NO: 241400 - RNA, 32 nt, Homo Sapiens
cuaacuguguaaagaaagaaaaagggaaguac

SEQ ID NO: 241401 - RNA, 32 nt, Homo Sapiens
gggcauguagcaguaucuguccugccaguccc

SEQ ID NO: 241402 - RNA, 32 nt, Homo Sapiens
accucucuaucaggccucccccgccucagcug

SEQ ID NO: 241403 - RNA, 32 nt, Homo Sapiens
uugauuucuguguuggaaaugggauaauuaaa

SEQ ID NO: 241404 - RNA, 32 nt, Homo Sapiens
cugccuccgccccacaccagcguccccuccuu

SEQ ID NO: 241405 - RNA, 32 nt, Homo Sapiens
uagaccucaucuccaagauagcaucccaucuc

SEQ ID NO: 241406 - RNA, 32 nt, Homo Sapiens
cccucuagugucuacugguggcucuaauacug

SEQ ID NO: 241407 - RNA, 32 nt, Homo Sapiens
ggcaauacuuaguaucaacgggcuaacaaugg

SEQ ID NO: 241408 - RNA, 32 nt, Homo Sapiens
cucucucucucucucuccaaucgccugcucag

SEQ ID NO: 241409 - RNA, 32 nt, Homo Sapiens
uuaaccguuucuucuuuuuuacuugcuugcug

SEQ ID NO: 241410 - RNA, 32 nt, Homo Sapiens
caccaaccaaauaguugccucucucgucacca

SEQ ID NO: 241411 - RNA, 32 nt, Homo Sapiens
uucaccgcccccacccugagcgccugggucca

SEQ ID NO: 241412 - RNA, 32 nt, Homo Sapiens
gagaaccgagcaaagaucaaaauaaaaaguga

SEQ ID NO: 241413 - RNA, 32 nt, Homo Sapiens
aaaacacauagcauuuuuguccguggauggua

SEQ ID NO: 241414 - RNA, 32 nt, Homo Sapiens
acccgcgcccgggcuucugggguguuccccaa

SEQ ID NO: 241415 - RNA, 32 nt, Homo Sapiens
cuacucugaguacccccuccagugucccuccc

SEQ ID NO: 241416 - RNA, 32 nt, Homo Sapiens
uaugcagagcccaagaggcaggggaaaggcgg

SEQ ID NO: 241417 - RNA, 32 nt, Homo Sapiens
acgccacuccccacccaagagauugguggaau

SEQ ID NO: 241418 - RNA, 32 nt, Homo Sapiens
aaccuacuucaagggaagauugagaucuuuuu

SEQ ID NO: 241419 - RNA, 32 nt, Homo Sapiens
cugguucuacccuguuuguugugucuugcuau

SEQ ID NO: 241420 - RNA, 32 nt, Homo Sapiens
cccgacccucuggcugccccggugcuuccagu

SEQ ID NO: 241421 - RNA, 32 nt, Homo Sapiens
caggcgcggggaacaccaauggcgggguacuu

SEQ ID NO: 241422 - RNA, 32 nt, Homo Sapiens
acgcuccuuucugaucuucacuaagaacaaaa

SEQ ID NO: 241423 - RNA, 32 nt, Homo Sapiens
cgagcagaggggccgccuccgcccgcacccag

SEQ ID NO: 241424 - RNA, 32 nt, Homo Sapiens
uaguguaaacaucaguaacucaaucgagccuu

SEQ ID NO: 241425 - RNA, 32 nt, Homo Sapiens
ugggcauuaaaauaaaaauuugaacaaugaaa

SEQ ID NO: 241426 - RNA, 30 nt, Homo Sapiens
ggagaucuggacugcugccccuuagauaug

SEQ ID NO: 241427 - RNA, 31 nt, Homo Sapiens
cgcagccggcgcagccaggagaccgaggugc

SEQ ID NO: 241428 - RNA, 32 nt, Homo Sapiens
gaaguaaagcuguugcuuauucugggagccca

SEQ ID NO: 241429 - RNA, 32 nt, Homo Sapiens
uggucuucuuuauuacuccccuccccccgugg

SEQ ID NO: 241430 - RNA, 32 nt, Homo Sapiens
cgcggccgggauccggccccuccccucgccuc

SEQ ID NO: 241431 - RNA, 32 nt, Homo Sapiens
cucugcccugaacaucugggcuucuguucaaa

SEQ ID NO: 241432 - RNA, 32 nt, Homo Sapiens
aagauugccauugcuuuguauaaaauguuaua

SEQ ID NO: 241433 - RNA, 32 nt, Homo Sapiens
cugugucccgcacugugugugaguggaccgca

SEQ ID NO: 241434 - RNA, 32 nt, Homo Sapiens
ucacacccuaccuuccccagacuugcacuggg

SEQ ID NO: 241435 - RNA, 32 nt, Homo Sapiens
uuguaaguucaacauguaaauuuuaaagacau

SEQ ID NO: 241436 - RNA, 32 nt, Homo Sapiens
uuagagaagacaaucaaugucugugagaaaac

SEQ ID NO: 241437 - RNA, 32 nt, Homo Sapiens
gggaagcccagcugugcucaacucuccugccu

SEQ ID NO: 241438 - RNA, 32 nt, Homo Sapiens
ggcacgcuggccggggaccucugcgaggaccu

SEQ ID NO: 241439 - RNA, 32 nt, Homo Sapiens
gugacaagucaucaaauguuugucacauguga

SEQ ID NO: 241440 - RNA, 32 nt, Homo Sapiens
ugcagacugagcgguggaccgaauugggaccg

SEQ ID NO: 241441 - RNA, 32 nt, Homo Sapiens
ggcuaguccaaauaaaauaugggcuuggggau

SEQ ID NO: 241442 - RNA, 32 nt, Homo Sapiens
ugauuugacuuuaucucaguacuacucuugac

SEQ ID NO: 241443 - RNA, 32 nt, Homo Sapiens
uagcuugaaaauuuauuuuuauacugauauua

SEQ ID NO: 241444 - RNA, 32 nt, Homo Sapiens
acagcagauaaugcuuucuuuuccagucgucu

SEQ ID NO: 241445 - RNA, 32 nt, Homo Sapiens
uucugugaguuaccaccucaaguucuaugaag

SEQ ID NO: 241446 - RNA, 32 nt, Homo Sapiens
gaugcacgcagacccaucucccuugucaugcu

SEQ ID NO: 241447 - RNA, 32 nt, Homo Sapiens
gcgcagccgggcggagggcccacgagggcuca

SEQ ID NO: 241448 - RNA, 32 nt, Homo Sapiens
ggcagcauggcaccguggaaagggcaguagac

SEQ ID NO: 241449 - RNA, 32 nt, Homo Sapiens
ugcccagaggaguguguguggagcagcuggag

SEQ ID NO: 241450 - RNA, 32 nt, Homo Sapiens
gugugcacauaaagacacgcagauuacauuug

SEQ ID NO: 241451 - RNA, 32 nt, Homo Sapiens
uuucucuuguaguuucuuuucuuaauugucau

SEQ ID NO: 241452 - RNA, 32 nt, Homo Sapiens
uaguuuuguguauuggcuuugcuggaguauga

SEQ ID NO: 241453 - RNA, 31 nt, Homo Sapiens
auagguuugugcucugauucuaguuuaagag

SEQ ID NO: 241454 - RNA, 32 nt, Homo Sapiens
aaaaaacgaugaugaugaacacagaggacggg

SEQ ID NO: 241455 - RNA, 32 nt, Homo Sapiens
ccgggcgccgggcgccaugagggugcgcuagg

SEQ ID NO: 241456 - RNA, 32 nt, Homo Sapiens
aggcaucgagguccaucccaauaaaaaucagg

SEQ ID NO: 241457 - RNA, 32 nt, Homo Sapiens
gugcgcgaaaccgcggcgcgccgcccuccgcc

SEQ ID NO: 241458 - RNA, 32 nt, Homo Sapiens
auuuagauuacaucagaauaacaaugcaaauc

SEQ ID NO: 241459 - RNA, 32 nt, Homo Sapiens
gccaggaugcaguuuuccccuugaauggcgug

SEQ ID NO: 241460 - RNA, 32 nt, Homo Sapiens
ggaugggaaaagaauggaacugucccagcuac

SEQ ID NO: 241461 - RNA, 32 nt, Homo Sapiens
uuaaauaaaaauuuauauauauauuauauaua

SEQ ID NO: 241462 - RNA, 30 nt, Homo Sapiens
gcgaggcggcccgugcaguccgugcgcagg

SEQ ID NO: 241463 - RNA, 32 nt, Homo Sapiens
gggccagucaccccucccccagcccacccaaa

SEQ ID NO: 241464 - RNA, 32 nt, Homo Sapiens
uguauagcauggcugacaucagagcaguuuuu

SEQ ID NO: 241465 - RNA, 32 nt, Homo Sapiens
aaggcauccaccauuucuuuuuugaucucuca

SEQ ID NO: 241466 - RNA, 32 nt, Homo Sapiens
gcgagccuggagcucauuuccaggcgcccuuc

SEQ ID NO: 241467 - RNA, 32 nt, Homo Sapiens
acagaucuguuuauuucaguauguaguaaaca

SEQ ID NO: 241468 - RNA, 32 nt, Homo Sapiens
auugugcgcgcaccagcagcccggcccgggag

SEQ ID NO: 241469 - RNA, 32 nt, Homo Sapiens
accuguaacccccagcacuuugggaggccgag

SEQ ID NO: 241470 - RNA, 32 nt, Homo Sapiens
uggacugauauuaaaagucauauuuauucuuu

SEQ ID NO: 241471 - RNA, 32 nt, Homo Sapiens
cgucuuuaaaagacuugguguuauuuacagug

SEQ ID NO: 241472 - RNA, 32 nt, Homo Sapiens
auuugcucagaauugcacaucuaacaggaaaa

SEQ ID NO: 241473 - RNA, 32 nt, Homo Sapiens
ggaaagcggcgguggcuuugggccgggcucgg

SEQ ID NO: 241474 - RNA, 32 nt, Homo Sapiens
ucacuguaaaaucugcugaaaacuauuuuuag

SEQ ID NO: 241475 - RNA, 32 nt, Homo Sapiens
ugauggggaagcugcuggaggagcaggggugg

SEQ ID NO: 241476 - RNA, 32 nt, Homo Sapiens
ugguaaagcuccucucgcuuuccuccugaggc

SEQ ID NO: 241477 - RNA, 32 nt, Homo Sapiens
gaagcagggacaccccccgccccccaccuuug

SEQ ID NO: 241478 - RNA, 32 nt, Homo Sapiens
uucauugcuguccauuuuuguaaugaacgagu

SEQ ID NO: 241479 - RNA, 32 nt, Homo Sapiens
agccugccacccgacgcaaccccaggcucacu

SEQ ID NO: 241480 - RNA, 32 nt, Homo Sapiens
agacuccgugccacuccuuucuagugccaaac

SEQ ID NO: 241481 - RNA, 32 nt, Homo Sapiens
uccaucuccuuccccauuccucccccaguugg

SEQ ID NO: 241482 - RNA, 32 nt, Homo Sapiens
uaaaauaaaaaguggaaacaaucauuaaaaau

SEQ ID NO: 241483 - RNA, 32 nt, Homo Sapiens
cugugcuacugaugauacaucacccuggggaa

SEQ ID NO: 241484 - RNA, 32 nt, Homo Sapiens
uaacacucaccgcgaaggucugcacagcuuua

SEQ ID NO: 241485 - RNA, 32 nt, Homo Sapiens
gauucacugagcaaacagcacuuuacagaaga

SEQ ID NO: 241486 - RNA, 32 nt, Homo Sapiens
uaugcaguucacauugccauggagaauaauuu

SEQ ID NO: 241487 - RNA, 32 nt, Homo Sapiens
aaaccacaauuucagacaaaggccauugcaac

SEQ ID NO: 241488 - RNA, 32 nt, Homo Sapiens
ccgacagccgcgggugcguggucgugcggcaa

SEQ ID NO: 241489 - RNA, 32 nt, Homo Sapiens
gacuaguguucccuccaucuggccacagcuuu

SEQ ID NO: 241490 - RNA, 32 nt, Homo Sapiens
uggggaccuuggcaguguggacaugagcagag

SEQ ID NO: 241491 - RNA, 32 nt, Homo Sapiens
accacagucuuaagcagauuugaaauaaauuc

SEQ ID NO: 241492 - RNA, 32 nt, Homo Sapiens
caggagugguuaaaaagaaaaauguauauuua

SEQ ID NO: 241493 - RNA, 32 nt, Homo Sapiens
aaguggcaggacuuuaagugguugaaauacau

SEQ ID NO: 241494 - RNA, 32 nt, Homo Sapiens
aaucagccagcuugggaaggggauggcugcgc

SEQ ID NO: 241495 - RNA, 32 nt, Homo Sapiens
uccaagaguccaggucucauuaucauagggga

SEQ ID NO: 241496 - RNA, 32 nt, Homo Sapiens
agcgugggggagcguggaccgcggcgcugcuc

SEQ ID NO: 241497 - RNA, 32 nt, Homo Sapiens
uggacuucuuaguuguuucucuagcgcugagc

SEQ ID NO: 241498 - RNA, 32 nt, Homo Sapiens
agaggggcuccggcccgaucguucgcuuggcg

SEQ ID NO: 241499 - RNA, 32 nt, Homo Sapiens
ccacugcagucuuuucccaucucaggccucag

SEQ ID NO: 241500 - RNA, 32 nt, Homo Sapiens
cggcccauccaccucuugggguaccugccucu

SEQ ID NO: 241501 - RNA, 32 nt, Homo Sapiens
ggggccagcagcugcgcccgccccaccuuccu

SEQ ID NO: 241502 - RNA, 32 nt, Homo Sapiens
cuggcaaaugucuacaucuugaaacaaacaga

SEQ ID NO: 241503 - RNA, 32 nt, Homo Sapiens
agcaaggaacaacccauuucgucguuauggua

SEQ ID NO: 241504 - RNA, 32 nt, Homo Sapiens
uguguucuuuugcauguaaacugccauuuaua

SEQ ID NO: 241505 - RNA, 32 nt, Homo Sapiens
gccccugaggcuucacgccggagaagccaccu

SEQ ID NO: 241506 - RNA, 32 nt, Homo Sapiens
gagggagaacaagaccgaucggcggccacugc

SEQ ID NO: 241507 - RNA, 32 nt, Homo Sapiens
acgcuccaaggcuacagcaugugcuaggccuc

SEQ ID NO: 241508 - RNA, 30 nt, Homo Sapiens
gcccuguaucaccccuggcagugagguggc

SEQ ID NO: 241509 - RNA, 32 nt, Homo Sapiens
gaaacuugcccauuuucacaugucugcuuauu

SEQ ID NO: 241510 - RNA, 32 nt, Homo Sapiens
agggugccuggacccgugggguugcuucauug

SEQ ID NO: 241511 - RNA, 32 nt, Homo Sapiens
uuuuccagaugauugaauaacagaaguccuuu

SEQ ID NO: 241512 - RNA, 32 nt, Homo Sapiens
uuguccuuucuggccucuggcuagucaguuuu

SEQ ID NO: 241513 - RNA, 32 nt, Homo Sapiens
agcaaaacaaacagcaauaacaauauuauuau

SEQ ID NO: 241514 - RNA, 32 nt, Homo Sapiens
cugccaggcugcgguggcaggggguggagcug

SEQ ID NO: 241515 - RNA, 32 nt, Homo Sapiens
aaagauuuuauugaguuuuucauauaugccuu

SEQ ID NO: 241516 - RNA, 32 nt, Homo Sapiens
ggacuucugugaaaaauggggguuguaacccu

SEQ ID NO: 241517 - RNA, 32 nt, Homo Sapiens
cccuggauaacugccagucuccccucgaauuc

SEQ ID NO: 241518 - RNA, 32 nt, Homo Sapiens
gcagccacgagcauagacacgacagacacggu

SEQ ID NO: 241519 - RNA, 32 nt, Homo Sapiens
aucugcucccgccgccgccgccgccgccgucg

SEQ ID NO: 241520 - RNA, 29 nt, Homo Sapiens
ccacaugaaaggccuuccugucgagaacu

SEQ ID NO: 241521 - RNA, 32 nt, Homo Sapiens
cuuuacaccaaaauaaaguauugacacaagag

SEQ ID NO: 241522 - RNA, 32 nt, Homo Sapiens
agugguucaaggagaaaaacacagccagaucc

SEQ ID NO: 241523 - RNA, 32 nt, Homo Sapiens
aagagaaccauaucaagacucuuuggacacuc

SEQ ID NO: 241524 - RNA, 32 nt, Homo Sapiens
ucagcguuuaccuggaagucucuucuucccac

SEQ ID NO: 241525 - RNA, 32 nt, Homo Sapiens
cuggguucaagcgauucuccuaccucagcuuc

SEQ ID NO: 241526 - RNA, 32 nt, Homo Sapiens
cggcggcggcggugcgagcaugucguggcucu

SEQ ID NO: 241527 - RNA, 32 nt, Homo Sapiens
ggagugucuggaaggaucugugccuggacagu

SEQ ID NO: 241528 - RNA, 32 nt, Homo Sapiens
ucgcccuccgccccgcuguacccgcagagcgc

SEQ ID NO: 241529 - RNA, 32 nt, Homo Sapiens
gcccucuggcuuccugcugaggucagggcauu

SEQ ID NO: 241530 - RNA, 32 nt, Homo Sapiens
aaggucgcggccugugcccugcgggcagccgu

SEQ ID NO: 241531 - RNA, 32 nt, Homo Sapiens
uggccacguguuuccaguggcuggaccacgcc

SEQ ID NO: 241532 - RNA, 32 nt, Homo Sapiens
gguuuacauuaguuuuuuccugcccuuaagaa

SEQ ID NO: 241533 - RNA, 32 nt, Homo Sapiens
uuuucuuuucuggcuuaaagauuuugugucag

SEQ ID NO: 241534 - RNA, 32 nt, Homo Sapiens
auagaaagggaagacauaagagacuccauuuu

SEQ ID NO: 241535 - RNA, 32 nt, Homo Sapiens
guugguucagggaacacacuuucagaaccacu

SEQ ID NO: 241536 - RNA, 32 nt, Homo Sapiens
uaagggaguauuuucacuugugccaaagaggg

SEQ ID NO: 241537 - RNA, 32 nt, Homo Sapiens
cacgcgccggacgaggcucgcugcgcucccug

SEQ ID NO: 241538 - RNA, 32 nt, Homo Sapiens
gcccguggccgcucacagguguccuuaguggu

SEQ ID NO: 241539 - RNA, 32 nt, Homo Sapiens
aacagaaauggcaauauuuauguccugugauu

SEQ ID NO: 241540 - RNA, 32 nt, Homo Sapiens
uugugaaauuguaguuuaucauuaguuuguau

SEQ ID NO: 241541 - RNA, 32 nt, Homo Sapiens
cauauuugacuucugaaauuauuagaaaauaa

SEQ ID NO: 241542 - RNA, 32 nt, Homo Sapiens
cgaugaaggggagguucagauggcauacaccg

SEQ ID NO: 241543 - RNA, 32 nt, Homo Sapiens
gugcccacaccagccgccccuccugagcauca

SEQ ID NO: 241544 - RNA, 32 nt, Homo Sapiens
aauaauuaugcauuauacuaagacaccauuaa

SEQ ID NO: 241545 - RNA, 32 nt, Homo Sapiens
caauuuguauaaauauugaacaugucuauaua

SEQ ID NO: 241546 - RNA, 32 nt, Homo Sapiens
gaggggacucgcguccguccgcgucgcgucac

SEQ ID NO: 241547 - RNA, 32 nt, Homo Sapiens
aaaaagcacugcuguaccugugugguggagau

SEQ ID NO: 241548 - RNA, 32 nt, Homo Sapiens
agguugugcaggguguguacugcacaaggaca

SEQ ID NO: 241549 - RNA, 32 nt, Homo Sapiens
acuucagacugaaggacagagaaggcaacugc

SEQ ID NO: 241550 - RNA, 32 nt, Homo Sapiens
acgguuucuucccagacuuucucaagcuccuc

SEQ ID NO: 241551 - RNA, 32 nt, Homo Sapiens
ccgcggcagggagcgaucggccucgggcugcg

SEQ ID NO: 241552 - RNA, 32 nt, Homo Sapiens
augagaggggagagugugguguuagcuaguga

SEQ ID NO: 241553 - RNA, 32 nt, Homo Sapiens
guuuuguugcuguaacuaauaguuaauuggac

SEQ ID NO: 241554 - RNA, 32 nt, Homo Sapiens
uuuguaccacugaguucccaucaccuacauaa

SEQ ID NO: 241555 - RNA, 32 nt, Homo Sapiens
agaggccucugaggaggaaagccuccuaauug

SEQ ID NO: 241556 - RNA, 32 nt, Homo Sapiens
uggagagucaugaccuaggcccugugaaguca

SEQ ID NO: 241557 - RNA, 32 nt, Homo Sapiens
ugauaaauuggaaaacagucuuguuaagguga

SEQ ID NO: 241558 - RNA, 32 nt, Homo Sapiens
gcaacugaaggcuggaacacuugcuacuggau

SEQ ID NO: 241559 - RNA, 32 nt, Homo Sapiens
uggagcucuagaaacacuucugaugcaugaaa

SEQ ID NO: 241560 - RNA, 32 nt, Homo Sapiens
aucugcuaccagagccgggagagcugcucgga

SEQ ID NO: 241561 - RNA, 32 nt, Homo Sapiens
ucccucuguucccucccuggaaugugucuauu

SEQ ID NO: 241562 - RNA, 32 nt, Homo Sapiens
uuuuuucuuuugcuuuguuaccacuugucacu

SEQ ID NO: 241563 - RNA, 32 nt, Homo Sapiens
ggaggcagcgccggccuccggaggcggccugg

SEQ ID NO: 241564 - RNA, 32 nt, Homo Sapiens
aaaaagcagaacuuuuguaagucuguguaaca

SEQ ID NO: 241565 - RNA, 32 nt, Homo Sapiens
ccagccccaucccccacaguccagcuccgggg

SEQ ID NO: 241566 - RNA, 32 nt, Homo Sapiens
gcuccagcagucuccucagcccggccccgcgg

SEQ ID NO: 241567 - RNA, 32 nt, Homo Sapiens
gaccccccaaccccgggcccgccagcccuggc

SEQ ID NO: 241568 - RNA, 32 nt, Homo Sapiens
cuuauaggcaucauucaccagggucgaaugcu

SEQ ID NO: 241569 - RNA, 32 nt, Homo Sapiens
gaaaaauucuaccuucuuuuauggucaaacug

SEQ ID NO: 241570 - RNA, 32 nt, Homo Sapiens
uaacccaggacacuccuggacagugauccuga

SEQ ID NO: 241571 - RNA, 32 nt, Homo Sapiens
ggcggccuuucgaggcccuuucuggggggucu

SEQ ID NO: 241572 - RNA, 32 nt, Homo Sapiens
gaacuaucuuguugucauguccugguuugguu

SEQ ID NO: 241573 - RNA, 32 nt, Homo Sapiens
cagcccuccccuccccagggucauagaggggg

SEQ ID NO: 241574 - RNA, 32 nt, Homo Sapiens
uagcagacugucuggaggaggagccggcacug

SEQ ID NO: 241575 - RNA, 32 nt, Homo Sapiens
gacauguggugcccguugccacagggaaggug

SEQ ID NO: 241576 - RNA, 32 nt, Homo Sapiens
gcaacgcucgaccccaggauucccccggcucg

SEQ ID NO: 241577 - RNA, 32 nt, Homo Sapiens
aguucaaguggagcaagaacuguccagaauuu

SEQ ID NO: 241578 - RNA, 32 nt, Homo Sapiens
gggagcugcuccggcuucggcgcggaggggcg

SEQ ID NO: 241579 - RNA, 32 nt, Homo Sapiens
aacagcaauuuaauuguauauuuuaauaugac

SEQ ID NO: 241580 - RNA, 32 nt, Homo Sapiens
accugguucaacaucagcgaauucauaccagu

SEQ ID NO: 241581 - RNA, 32 nt, Homo Sapiens
gaagcuugacauggaaaaauagucuuaaucga

SEQ ID NO: 241582 - RNA, 32 nt, Homo Sapiens
uacgggcagcgggcgcggggcuggucccgggu

SEQ ID NO: 241583 - RNA, 32 nt, Homo Sapiens
cacuccugcgccccguuugccucccgcacccg

SEQ ID NO: 241584 - RNA, 32 nt, Homo Sapiens
uuuuguuuuuucugccggguguuguaugugug

SEQ ID NO: 241585 - RNA, 32 nt, Homo Sapiens
aggugcugugcagcugccaaggccagcuccgu

SEQ ID NO: 241586 - RNA, 32 nt, Homo Sapiens
uguagcaucugccuucaucucaucucagcgua

SEQ ID NO: 241587 - RNA, 32 nt, Homo Sapiens
cagcaccccucgcaggccaccugucugcauag

SEQ ID NO: 241588 - RNA, 32 nt, Homo Sapiens
gugcuauguuuauguauuaugcuugaaauuuu

SEQ ID NO: 241589 - RNA, 32 nt, Homo Sapiens
uuccuaaauuuguaaacauacauauugcugua

SEQ ID NO: 241590 - RNA, 32 nt, Homo Sapiens
aggauaagcuggccuuuaaauuuucaaagaac

SEQ ID NO: 241591 - RNA, 32 nt, Homo Sapiens
acgggcugguuggggcugugucugugggaggc

SEQ ID NO: 241592 - RNA, 32 nt, Homo Sapiens
caaagaugugcucuucuucaggacucaggcuu

SEQ ID NO: 241593 - RNA, 32 nt, Homo Sapiens
cugugccccugcuccaggcacccauuggcucc

SEQ ID NO: 241594 - RNA, 32 nt, Homo Sapiens
cgguaaugagccagacccuuguccuagugguc

SEQ ID NO: 241595 - RNA, 32 nt, Homo Sapiens
accucaauguuaccuuuuucugauaaauugga

SEQ ID NO: 241596 - RNA, 32 nt, Homo Sapiens
uucggagcccuugccucgcuccaggugggagc

SEQ ID NO: 241597 - RNA, 32 nt, Homo Sapiens
uuaucuccuauuccucuuucuuuuccccuucc

SEQ ID NO: 241598 - RNA, 32 nt, Homo Sapiens
gauggcagccaucagggaaggcugggucccag

SEQ ID NO: 241599 - RNA, 32 nt, Homo Sapiens
cccgcacccgcaccgcgguuacuggcuugcgg

SEQ ID NO: 241600 - RNA, 32 nt, Homo Sapiens
gcgggacuaugggaaacgggaugugcucccga

SEQ ID NO: 241601 - RNA, 32 nt, Homo Sapiens
guggcacuggaccuccugucuguccgugaggc

SEQ ID NO: 241602 - RNA, 32 nt, Homo Sapiens
ugggccugacuaucucagguggcaccgacaag

SEQ ID NO: 241603 - RNA, 32 nt, Homo Sapiens
agguggagcaacaugcgauucuggaggcacgg

SEQ ID NO: 241604 - RNA, 32 nt, Homo Sapiens
uuucccacccacuagcccucuuucucucugug

SEQ ID NO: 241605 - RNA, 32 nt, Homo Sapiens
gaguagaggauacaagugaugugaauaaaaug

SEQ ID NO: 241606 - RNA, 30 nt, Homo Sapiens
ggaagaugucacugaacaacucuuccaaug

SEQ ID NO: 241607 - RNA, 32 nt, Homo Sapiens
auaaacacauauaaaugcacuuacagcaguua

SEQ ID NO: 241608 - RNA, 32 nt, Homo Sapiens
ucucaacgccucccccucccccauucccucca

SEQ ID NO: 241609 - RNA, 31 nt, Homo Sapiens
aucuuguugggucuguguuccagcugcaguc

SEQ ID NO: 241610 - RNA, 32 nt, Homo Sapiens
aauggggaagggggacaagggucagucugucg

SEQ ID NO: 241611 - RNA, 32 nt, Homo Sapiens
aaaauacaaaaauuagccggguguggugucgg

SEQ ID NO: 241612 - RNA, 32 nt, Homo Sapiens
agcuucaggcuuuacaacguuuaucccuguag

SEQ ID NO: 241613 - RNA, 32 nt, Homo Sapiens
aggaggucgacucgccggcgcuuccuaucgcg

SEQ ID NO: 241614 - RNA, 32 nt, Homo Sapiens
aauaauugucauugauucauauuuaguaccug

SEQ ID NO: 241615 - RNA, 32 nt, Homo Sapiens
uguugagaauacugcgggccaccaugagggag

SEQ ID NO: 241616 - RNA, 32 nt, Homo Sapiens
cuccucaugaaauauauucaauccacuuaaau

SEQ ID NO: 241617 - RNA, 32 nt, Homo Sapiens
gcagaggcucuuccggggccagcccuggaaga

SEQ ID NO: 241618 - RNA, 32 nt, Homo Sapiens
gggauuugagcugcagcagagagggaugaggg

SEQ ID NO: 241619 - RNA, 32 nt, Homo Sapiens
agugauaaucucaaguuagaaaacaguagguc

SEQ ID NO: 241620 - RNA, 32 nt, Homo Sapiens
ucccggcaagcucggcggcgcuuuagcuccgc

SEQ ID NO: 241621 - RNA, 32 nt, Homo Sapiens
cauggccucccgcucccuguggccccacagcc

SEQ ID NO: 241622 - RNA, 32 nt, Homo Sapiens
caaacaaaaaauagagaaaaauuaauaaaguc

SEQ ID NO: 241623 - RNA, 32 nt, Homo Sapiens
guggggcagcagaaacuagagaaggcaagugg

SEQ ID NO: 241624 - RNA, 32 nt, Homo Sapiens
aggcuuagcagacuugcgcugcaccagcgaau

SEQ ID NO: 241625 - RNA, 32 nt, Homo Sapiens
uggucaucagcuugcuuuguggcacugagcaa

SEQ ID NO: 241626 - RNA, 31 nt, Homo Sapiens
auauggaacaguauucucagagccugagagu

SEQ ID NO: 241627 - RNA, 32 nt, Homo Sapiens
uauagcuuucauauuucuuuauuauuguaaau

SEQ ID NO: 241628 - RNA, 32 nt, Homo Sapiens
cccagcuccuccccgugcccgcuaacacagca

SEQ ID NO: 241629 - RNA, 32 nt, Homo Sapiens
uuuuuuguugauuuacauuuaacuuuaucagu

SEQ ID NO: 241630 - RNA, 32 nt, Homo Sapiens
ugagaauaacuggcuuauuuaucccuuuuagg

SEQ ID NO: 241631 - RNA, 32 nt, Homo Sapiens
gaccugcccccgcucugccaucagccccugcu

SEQ ID NO: 241632 - RNA, 32 nt, Homo Sapiens
ucaaacaaagauaagauaagauauacuggaga

SEQ ID NO: 241633 - RNA, 32 nt, Homo Sapiens
agauagaagucuuugcuacauguaauucaaaa

SEQ ID NO: 241634 - RNA, 32 nt, Homo Sapiens
acuacgcccuccccuccccagccuuuuccaga

SEQ ID NO: 241635 - RNA, 32 nt, Homo Sapiens
cacacguaguggcuuaaagcaacgaacauuca

SEQ ID NO: 241636 - RNA, 32 nt, Homo Sapiens
ugccgggccuccuggggagcagccuggggaca

SEQ ID NO: 241637 - RNA, 32 nt, Homo Sapiens
aaggguaguugcucgucggaguuccccagcaa

SEQ ID NO: 241638 - RNA, 28 nt, Homo Sapiens
agaaaaauggcgaauacaugaaacaacc

SEQ ID NO: 241639 - RNA, 32 nt, Homo Sapiens
gaaaccacuucgcaauuuauuaagauggcaaa

SEQ ID NO: 241640 - RNA, 32 nt, Homo Sapiens
ggacgcugguugcgcgcucccaggcgccgagc

SEQ ID NO: 241641 - RNA, 32 nt, Homo Sapiens
cugugcagcgcagcgcaccgcgggaagauggc

SEQ ID NO: 241642 - RNA, 32 nt, Homo Sapiens
ccagacugguaguccugcagucacugcuauga

SEQ ID NO: 241643 - RNA, 30 nt, Homo Sapiens
cccaacgccccggagccgccggccgcuagc

SEQ ID NO: 241644 - RNA, 32 nt, Homo Sapiens
aggcaugagccaccaugcccagcccucaaauu

SEQ ID NO: 241645 - RNA, 30 nt, Homo Sapiens
uagcaggcgcccggugccccggccggcgaa

SEQ ID NO: 241646 - RNA, 32 nt, Homo Sapiens
uuggcuauauuuacacaaagauuagcuugcag

SEQ ID NO: 241647 - RNA, 32 nt, Homo Sapiens
gugaucuacauaaacuaaaacaaaauuugucc

SEQ ID NO: 241648 - RNA, 32 nt, Homo Sapiens
uuuccaguaaugaaguuauaaauaucagcuug

SEQ ID NO: 241649 - RNA, 32 nt, Homo Sapiens
uaaauggcuucuuucugggguguggaaauggu

SEQ ID NO: 241650 - RNA, 32 nt, Homo Sapiens
ggaaggccgucggggcuuggugagcaggggcu

SEQ ID NO: 241651 - RNA, 32 nt, Homo Sapiens
uuaauugaguugucuuuuuuuuuuaaguuuuc

SEQ ID NO: 241652 - RNA, 32 nt, Homo Sapiens
ccuuguccugaagaacaaauggcuguccaguu

SEQ ID NO: 241653 - RNA, 32 nt, Homo Sapiens
ccucagaccugccccggggccagguggagaaa

SEQ ID NO: 241654 - RNA, 32 nt, Homo Sapiens
ccuugcaggaggagaagcugcagcaggacgcg

SEQ ID NO: 241655 - RNA, 32 nt, Homo Sapiens
uaucuagcuuccuuuaccccuguucugcuuaa

SEQ ID NO: 241656 - RNA, 32 nt, Homo Sapiens
cguuuacaugcugaaaaguaauuaucaguuuc

SEQ ID NO: 241657 - RNA, 32 nt, Homo Sapiens
ggcaguggugauggugguguuggcgggguuga

SEQ ID NO: 241658 - RNA, 32 nt, Homo Sapiens
agugguguagcuguaacuauuacucaguuuua

SEQ ID NO: 241659 - RNA, 32 nt, Homo Sapiens
ugguguggggggcugggggagguccaagcaga

SEQ ID NO: 241660 - RNA, 32 nt, Homo Sapiens
gguguuuggggaugggcauagaggaguuuuca

SEQ ID NO: 241661 - RNA, 32 nt, Homo Sapiens
ggaaaauugucacacuaacuuaaaagacaggg

SEQ ID NO: 241662 - RNA, 32 nt, Homo Sapiens
gaggagcuggccugcgguggagggaucaguug

SEQ ID NO: 241663 - RNA, 30 nt, Homo Sapiens
ccugggcggcccgugccaugggcaccgaca

SEQ ID NO: 241664 - RNA, 31 nt, Homo Sapiens
auagcuguugggcuggcaggagugaaaccga

SEQ ID NO: 241665 - RNA, 32 nt, Homo Sapiens
uaucaaguuguauucuuuccuguucuauaacc

SEQ ID NO: 241666 - RNA, 32 nt, Homo Sapiens
cuuuccuuccugcaguucccagcccucggagc

SEQ ID NO: 241667 - RNA, 32 nt, Homo Sapiens
uucagcugcucccgaacaacuuuucugccggc

SEQ ID NO: 241668 - RNA, 32 nt, Homo Sapiens
aggcaguggcuccuugcacagcagcugcacgc

SEQ ID NO: 241669 - RNA, 32 nt, Homo Sapiens
aagacaugaaaauuauauuauuaaaauguuca

SEQ ID NO: 241670 - RNA, 32 nt, Homo Sapiens
cuuguuuaaaaauaaauuguguuuuggucugu

SEQ ID NO: 241671 - RNA, 32 nt, Homo Sapiens
cccaguaggaggagagcaggcagagcuuguca

SEQ ID NO: 241672 - RNA, 32 nt, Homo Sapiens
uucugcccuuguaaucggugucccuguaaaac

SEQ ID NO: 241673 - RNA, 32 nt, Homo Sapiens
aggaaacaugucccucagguguagaagcugca

SEQ ID NO: 241674 - RNA, 32 nt, Homo Sapiens
ccacguugucauugugagucuauagcuugacu

SEQ ID NO: 241675 - RNA, 32 nt, Homo Sapiens
aaacaccacuggccuucuuucagacacauauc

SEQ ID NO: 241676 - RNA, 32 nt, Homo Sapiens
aauguuaaaaggaaaaaagugaaaauaacaaa

SEQ ID NO: 241677 - RNA, 32 nt, Homo Sapiens
gugaacuuaaaaaacugcuuccuucaagcacu

SEQ ID NO: 241678 - RNA, 32 nt, Homo Sapiens
uuccucaguuuuuaucaggcuuucucuggggg

SEQ ID NO: 241679 - RNA, 32 nt, Homo Sapiens
ccgggacggcgguggguggugcaugcgcucgc

SEQ ID NO: 241680 - RNA, 32 nt, Homo Sapiens
caccaagaaaucagagaauucuacacucaacu

SEQ ID NO: 241681 - RNA, 32 nt, Homo Sapiens
gcggccauuuccccaccaucuucuccaccaac

SEQ ID NO: 241682 - RNA, 31 nt, Homo Sapiens
gaguaaaaauaaaaaacagugucauuuucau

SEQ ID NO: 241683 - RNA, 32 nt, Homo Sapiens
cauauuuaauaaaauuuagucugaagugaaaa

SEQ ID NO: 241684 - RNA, 32 nt, Homo Sapiens
gagcaagccaggaagccagacaacaacagcau

SEQ ID NO: 241685 - RNA, 32 nt, Homo Sapiens
ggagaggugaucuccagagaugaugucugaga

SEQ ID NO: 241686 - RNA, 32 nt, Homo Sapiens
guaucccagaaggcccgaggugaagguguccc

SEQ ID NO: 241687 - RNA, 32 nt, Homo Sapiens
cccaggcccucccuccuguccaucccccacau

SEQ ID NO: 241688 - RNA, 32 nt, Homo Sapiens
cuggaggauuagucccugcccuuaaggagugc

SEQ ID NO: 241689 - RNA, 32 nt, Homo Sapiens
ggauuauacuaaaauaaguaaugccuauuuuu

SEQ ID NO: 241690 - RNA, 32 nt, Homo Sapiens
ccuggugccuccaucagacucucccuacuugu

SEQ ID NO: 241691 - RNA, 32 nt, Homo Sapiens
gguuugcagcuuuucuccaaucaaauggcucc

SEQ ID NO: 241692 - RNA, 32 nt, Homo Sapiens
ugggggcugcaggucagugcaaugaaaccuag

SEQ ID NO: 241693 - RNA, 32 nt, Homo Sapiens
cgguaagugcgcucggcggggaggcccuggcg

SEQ ID NO: 241694 - RNA, 32 nt, Homo Sapiens
uuuaaugcuuuuucaagaacuaacacaguuau

SEQ ID NO: 241695 - RNA, 32 nt, Homo Sapiens
gccccggcgcaucgcggcgcgcacagacccag

SEQ ID NO: 241696 - RNA, 32 nt, Homo Sapiens
cuuuuuucugguguuuuaugcaaguugacuac

SEQ ID NO: 241697 - RNA, 32 nt, Homo Sapiens
gcgccccacaguguguauuccuguccucuaug

SEQ ID NO: 241698 - RNA, 32 nt, Homo Sapiens
aaaagaacuaaauuaggguacuugugcuguac

SEQ ID NO: 241699 - RNA, 32 nt, Homo Sapiens
aauuacuuggcuguuggagauuuguacuugag

SEQ ID NO: 241700 - RNA, 32 nt, Homo Sapiens
caggcucuggggugggggcuuugcaggggaug

SEQ ID NO: 241701 - RNA, 31 nt, Homo Sapiens
ugauaagaaaugaauaaaugcauauuaaagc

SEQ ID NO: 241702 - RNA, 32 nt, Homo Sapiens
acaaagcagaaagggcauuucuaggugaauga

SEQ ID NO: 241703 - RNA, 32 nt, Homo Sapiens
cagcccugguagcaggcggggaagaggucgga

SEQ ID NO: 241704 - RNA, 32 nt, Homo Sapiens
cagcagccuggcagcccggccagcaugcagca

SEQ ID NO: 241705 - RNA, 32 nt, Homo Sapiens
uuggugauccugaugcacauccaugguggaga

SEQ ID NO: 241706 - RNA, 32 nt, Homo Sapiens
uaaucccagcccuaugggaggcuggucuugaa

SEQ ID NO: 241707 - RNA, 32 nt, Homo Sapiens
cagggccaguggggaggcagcggcaccagacu

SEQ ID NO: 241708 - RNA, 32 nt, Homo Sapiens
aauacaaaaauuagccagacgugguagcgugc

SEQ ID NO: 241709 - RNA, 32 nt, Homo Sapiens
cgucuccuccuccuucccacaggccggcuucu

SEQ ID NO: 241710 - RNA, 29 nt, Homo Sapiens
aacagauaaaguuuuuauuuuccucugaa

SEQ ID NO: 241711 - RNA, 32 nt, Homo Sapiens
cugucaaauggaaaauaaaauaaguuauaauu

SEQ ID NO: 241712 - RNA, 32 nt, Homo Sapiens
caugaguuccgccgcugccuaguuuccucccc

SEQ ID NO: 241713 - RNA, 32 nt, Homo Sapiens
uguagcuuaagacaaggcaauaccugagauau

SEQ ID NO: 241714 - RNA, 32 nt, Homo Sapiens
ggugucguucuuuuccaacaaaauagcaaucc

SEQ ID NO: 241715 - RNA, 32 nt, Homo Sapiens
uaaaaaagaaaugaaauugacaagcuaggaaa

SEQ ID NO: 241716 - RNA, 32 nt, Homo Sapiens
ccccucgguccgccggagccugcuggggcgag

SEQ ID NO: 241717 - RNA, 32 nt, Homo Sapiens
aaccccgguugccgcuuucuccucuccuaacc

SEQ ID NO: 241718 - RNA, 32 nt, Homo Sapiens
ggacccaaaggaugaaguggggagggaagaca

SEQ ID NO: 241719 - RNA, 32 nt, Homo Sapiens
ucgggccagccggcugcuggcggaggaggagg

SEQ ID NO: 241720 - RNA, 32 nt, Homo Sapiens
gccuuuuccugacugauuacuccaccugcuca

SEQ ID NO: 241721 - RNA, 32 nt, Homo Sapiens
uugaaggccaaggggagaugcucaggucuccc

SEQ ID NO: 241722 - RNA, 32 nt, Homo Sapiens
ugauauguuuuaaugcaucugacuuagaucuu

SEQ ID NO: 241723 - RNA, 32 nt, Homo Sapiens
agcugccuuuuuuuuucuuuuaaccagaaaau

SEQ ID NO: 241724 - RNA, 31 nt, Homo Sapiens
gggggcugccggucccggguaccauguguga

SEQ ID NO: 241725 - RNA, 32 nt, Homo Sapiens
agccgggcuggcucuccuuucugugguuuuau

SEQ ID NO: 241726 - RNA, 32 nt, Homo Sapiens
ggaauggguugggagaggcaucuguucauugg

SEQ ID NO: 241727 - RNA, 32 nt, Homo Sapiens
agcgcccgcucgccgccucccggacucucguc

SEQ ID NO: 241728 - RNA, 32 nt, Homo Sapiens
gaccagccgccgcgcccgccucggagucgcgg

SEQ ID NO: 241729 - RNA, 32 nt, Homo Sapiens
ggccgcggaccccucccaccccugccuuugcg

SEQ ID NO: 241730 - RNA, 32 nt, Homo Sapiens
ucaugcugagcauuuuuuuuuauaugcuuguu

SEQ ID NO: 241731 - RNA, 32 nt, Homo Sapiens
ucaagcgauccucccaccucaaccucuagaau

SEQ ID NO: 241732 - RNA, 32 nt, Homo Sapiens
ccuggggcguccuggggucugggaggaaggca

SEQ ID NO: 241733 - RNA, 32 nt, Homo Sapiens
uuggguuugggggaaagagauguuuuucuuag

SEQ ID NO: 241734 - RNA, 32 nt, Homo Sapiens
aacggugccucccaggcauucucagugccagg

SEQ ID NO: 241735 - RNA, 32 nt, Homo Sapiens
ggcgggcccucuccccaccucaccucuuaaua

SEQ ID NO: 241736 - RNA, 32 nt, Homo Sapiens
gaaaucccaguaagcuuucugauucaaguaca

SEQ ID NO: 241737 - RNA, 32 nt, Homo Sapiens
cugugucucacgggggcucugaguuuugaggu

SEQ ID NO: 241738 - RNA, 32 nt, Homo Sapiens
ccgugcggcugugcuccgcgggacuuuguuug

SEQ ID NO: 241739 - RNA, 32 nt, Homo Sapiens
aaaacccucacauuuuaauguuuaugcuaggg

SEQ ID NO: 241740 - RNA, 32 nt, Homo Sapiens
acaguguccucuaauuugaaauccauaaguua

SEQ ID NO: 241741 - RNA, 28 nt, Homo Sapiens
guaugguugucuacaauuuguuuuccug

SEQ ID NO: 241742 - RNA, 32 nt, Homo Sapiens
aaccuauaguccaguuuuuuuauuucuuguuu

SEQ ID NO: 241743 - RNA, 31 nt, Homo Sapiens
aauuugcacagcagccaauccuccugcggcg

SEQ ID NO: 241744 - RNA, 32 nt, Homo Sapiens
uuuguggguguaauugguaguguucugucccu

SEQ ID NO: 241745 - RNA, 32 nt, Homo Sapiens
ucuaccagucagaauaggcauuuuggagguca

SEQ ID NO: 241746 - RNA, 31 nt, Homo Sapiens
ccccagcgccacugccuguggaggcccgagc

SEQ ID NO: 241747 - RNA, 32 nt, Homo Sapiens
ugacuuguuuacaugugagugaaacugcacaa

SEQ ID NO: 241748 - RNA, 32 nt, Homo Sapiens
uucaagaauauuaaagucuuguaauguuugcu

SEQ ID NO: 241749 - RNA, 32 nt, Homo Sapiens
cccaagacgaccucacccaaagggcucccugg

SEQ ID NO: 241750 - RNA, 32 nt, Homo Sapiens
aagcuggccgaggguccuggcuccugaggggc

SEQ ID NO: 241751 - RNA, 32 nt, Homo Sapiens
ugccuccccaagcagagcucaagccaaacgcu

SEQ ID NO: 241752 - RNA, 32 nt, Homo Sapiens
aucaacagugacucagucucuaugaugguauu

SEQ ID NO: 241753 - RNA, 32 nt, Homo Sapiens
gguguggaauggccuuccucucuaggugccug

SEQ ID NO: 241754 - RNA, 32 nt, Homo Sapiens
uauagcaggcuuugucgucagaaguuuuuaua

SEQ ID NO: 241755 - RNA, 32 nt, Homo Sapiens
ccucgcccggacgcgccgcgcccccucggaac

SEQ ID NO: 241756 - RNA, 32 nt, Homo Sapiens
caauucauuuucagacuuuguacuucagaagc

SEQ ID NO: 241757 - RNA, 32 nt, Homo Sapiens
auggaaaaguugaagggaaaauacuggaaugc

SEQ ID NO: 241758 - RNA, 32 nt, Homo Sapiens
ucugagcccagaguugacggagggaguauuuc

SEQ ID NO: 241759 - RNA, 32 nt, Homo Sapiens
cuuugaugauuuuuuucuuaauuauuggcuga

SEQ ID NO: 241760 - RNA, 32 nt, Homo Sapiens
auggcagugggaagaguacgguaguccagcuu

SEQ ID NO: 241761 - RNA, 32 nt, Homo Sapiens
guuugcaaaacaaaccuuuaaaaacccauagc

SEQ ID NO: 241762 - RNA, 32 nt, Homo Sapiens
agagagaaggcacucuucuggacaucugaaau

SEQ ID NO: 241763 - RNA, 31 nt, Homo Sapiens
uugugaggguuggcucucagagcgcugaugg

SEQ ID NO: 241764 - RNA, 32 nt, Homo Sapiens
agagggccagagcuagggcugcugcuucugcu

SEQ ID NO: 241765 - RNA, 32 nt, Homo Sapiens
acguuccucuccucggucuccuccgccuccag

SEQ ID NO: 241766 - RNA, 32 nt, Homo Sapiens
ugggauugggagagguggggguggguucgcgg

SEQ ID NO: 241767 - RNA, 32 nt, Homo Sapiens
cuuuaggcgugguugagaaaaagcagaaacuu

SEQ ID NO: 241768 - RNA, 32 nt, Homo Sapiens
uucuuuguucugccagcuuccaggccuaagac

SEQ ID NO: 241769 - RNA, 32 nt, Homo Sapiens
uuaucguggccucucgcagcccggggagcacg

SEQ ID NO: 241770 - RNA, 32 nt, Homo Sapiens
guucuuugauucaauuaauauuuuguaaucac

SEQ ID NO: 241771 - RNA, 32 nt, Homo Sapiens
cuguaaggcaggagcaggcagcucagcuugag

SEQ ID NO: 241772 - RNA, 32 nt, Homo Sapiens
agcugggcuaggggcggggacugggggugcua

SEQ ID NO: 241773 - RNA, 32 nt, Homo Sapiens
gguauuaaaaauucauggugauggugcaaggg

SEQ ID NO: 241774 - RNA, 32 nt, Homo Sapiens
auguuggacaaagggaauaaaauuggggauau

SEQ ID NO: 241775 - RNA, 32 nt, Homo Sapiens
ucugauuuuuaaaggguauauguacagcugca

SEQ ID NO: 241776 - RNA, 32 nt, Homo Sapiens
ggccucuucacacccuucuccccuccuucuuc

SEQ ID NO: 241777 - RNA, 32 nt, Homo Sapiens
ugcauagagucuuuauguccauaagcuacggg

SEQ ID NO: 241778 - RNA, 30 nt, Homo Sapiens
cccugccgucuauccacccaucuguuccuc

SEQ ID NO: 241779 - RNA, 32 nt, Homo Sapiens
aucauagagacggagauccuaagguccaacaa

SEQ ID NO: 241780 - RNA, 31 nt, Homo Sapiens
ccucaggugaucugccugccuuggccucccg

SEQ ID NO: 241781 - RNA, 32 nt, Homo Sapiens
ugagugaaacugggcugaagugagguuugcag

SEQ ID NO: 241782 - RNA, 32 nt, Homo Sapiens
uggaguauuuugucacuucuccccuccguaua

SEQ ID NO: 241783 - RNA, 32 nt, Homo Sapiens
gcaugaauuuaccaccuauuaaggcacugguu

SEQ ID NO: 241784 - RNA, 32 nt, Homo Sapiens
ccuccgccgccgcagcagcagcugcgggcgcg

SEQ ID NO: 241785 - RNA, 32 nt, Homo Sapiens
ucagcuucuuuguuaauacacccauggucagc

SEQ ID NO: 241786 - RNA, 32 nt, Homo Sapiens
ggcaaaauguaaaggagucaaacuauaaauca

SEQ ID NO: 241787 - RNA, 32 nt, Homo Sapiens
ugcuuuuggggauggggaggguagaaaugaau

SEQ ID NO: 241788 - RNA, 32 nt, Homo Sapiens
cuauaaaugcccuuuagaacaugguguuucac

SEQ ID NO: 241789 - RNA, 32 nt, Homo Sapiens
ggccccagcccucuccugccuggccuggccug

SEQ ID NO: 241790 - RNA, 30 nt, Homo Sapiens
gauucauggaguuggcgaacugcuacacug

SEQ ID NO: 241791 - RNA, 32 nt, Homo Sapiens
agccaagugugucuuauugaucuguacaagcu

SEQ ID NO: 241792 - RNA, 32 nt, Homo Sapiens
ucuauagaaaauuugugaagucagaccagaau

SEQ ID NO: 241793 - RNA, 32 nt, Homo Sapiens
cagccugggcgacagggugagacugugucuca

SEQ ID NO: 241794 - RNA, 32 nt, Homo Sapiens
ucgccucuuuugcacuggaaggcccucccuuu

SEQ ID NO: 241795 - RNA, 32 nt, Homo Sapiens
uguggaguuugugauuuuuuuaucagaaauaa

SEQ ID NO: 241796 - RNA, 32 nt, Homo Sapiens
caaauggaacuaaaacacugguuaucuccagg

SEQ ID NO: 241797 - RNA, 32 nt, Homo Sapiens
ggaauuacuuaauugaaauuuaucuuucaccu

SEQ ID NO: 241798 - RNA, 32 nt, Homo Sapiens
acugcuauggaaugauacauuguauuuucugc

SEQ ID NO: 241799 - RNA, 32 nt, Homo Sapiens
aaucugccaaaauauaaagaacuuguguagau

SEQ ID NO: 241800 - RNA, 32 nt, Homo Sapiens
gccccgcccuccccagacuccgcgcaaucaca

SEQ ID NO: 241801 - RNA, 32 nt, Homo Sapiens
cgcauguacguacugccugcccggggcuuagg

SEQ ID NO: 241802 - RNA, 32 nt, Homo Sapiens
aaaaauuuucuuugaaagauaaaauacaugag

SEQ ID NO: 241803 - RNA, 32 nt, Homo Sapiens
uuguauaaucauuaccaauacuauuuauuaug

SEQ ID NO: 241804 - RNA, 27 nt, Homo Sapiens
ggaaucuuccuccccagcccccgggcu

SEQ ID NO: 241805 - RNA, 32 nt, Homo Sapiens
auugcacauuucagugaucagaauagauaucc

SEQ ID NO: 241806 - RNA, 32 nt, Homo Sapiens
caucuguguguuuuuaaggccagccacuuguc

SEQ ID NO: 241807 - RNA, 32 nt, Homo Sapiens
acgguccccguccagccugcgcuucgccgggg

SEQ ID NO: 241808 - RNA, 32 nt, Homo Sapiens
guauauuaucacaguaugcacacacacacaca

SEQ ID NO: 241809 - RNA, 32 nt, Homo Sapiens
ccuuuccaguguucuuuugguucugauuucau

SEQ ID NO: 241810 - RNA, 32 nt, Homo Sapiens
ugucuuagucgagacaucaucaucugagaagc

SEQ ID NO: 241811 - RNA, 32 nt, Homo Sapiens
aacagaauagaagcacagaacaaggacuauug

SEQ ID NO: 241812 - RNA, 32 nt, Homo Sapiens
uaacccucugagugcauagaauuuuauugaga

SEQ ID NO: 241813 - RNA, 32 nt, Homo Sapiens
ucccaaaaaccagagaccauuuucauuuacug

SEQ ID NO: 241814 - RNA, 32 nt, Homo Sapiens
auacaaagaaaguuauucaguaccuugcccau

SEQ ID NO: 241815 - RNA, 32 nt, Homo Sapiens
ccccgaggaugaguggugauguccucuagcca

SEQ ID NO: 241816 - RNA, 32 nt, Homo Sapiens
ucaggacuauuuuuaucucugacaucucucua

SEQ ID NO: 241817 - RNA, 32 nt, Homo Sapiens
ucaggaagagugagacugaggacccccaagug

SEQ ID NO: 241818 - RNA, 31 nt, Homo Sapiens
aagccuuauuugacuuaugcuugugauacug

SEQ ID NO: 241819 - RNA, 32 nt, Homo Sapiens
accagcuagaacacagcagggcugggacuggg

SEQ ID NO: 241820 - RNA, 32 nt, Homo Sapiens
agccuggaagaggccccuugggccuaagccuc

SEQ ID NO: 241821 - RNA, 28 nt, Homo Sapiens
gcgaugggcgacccggaaaggccggaag

SEQ ID NO: 241822 - RNA, 32 nt, Homo Sapiens
uacgugucaacacagcuggcuggaugauuggg

SEQ ID NO: 241823 - RNA, 32 nt, Homo Sapiens
ucugaguuaaaacuuaagugauuccugcuuuu

SEQ ID NO: 241824 - RNA, 32 nt, Homo Sapiens
cagcagccauaccuaugggacacacacuacga

SEQ ID NO: 241825 - RNA, 28 nt, Homo Sapiens
gggaaaguuacagauucaaacagcauuu

SEQ ID NO: 241826 - RNA, 32 nt, Homo Sapiens
acaaagagaagcuucuuuaaaagcugcuauug

SEQ ID NO: 241827 - RNA, 32 nt, Homo Sapiens
aaguauaacugagacuauuuuuggagcuuaag

SEQ ID NO: 241828 - RNA, 32 nt, Homo Sapiens
auggaauauuuuaaguuucaguaaaucagaac

SEQ ID NO: 241829 - RNA, 32 nt, Homo Sapiens
gcgcggagcgggugcgcagaagacuggaggag

SEQ ID NO: 241830 - RNA, 32 nt, Homo Sapiens
ccuguccucgccaugaggccgcagcaggcgcc

SEQ ID NO: 241831 - RNA, 32 nt, Homo Sapiens
guggagcaugcgggggaagagaacugacccag

SEQ ID NO: 241832 - RNA, 32 nt, Homo Sapiens
gggaagucauauccguggaccauuuguagguu

SEQ ID NO: 241833 - RNA, 32 nt, Homo Sapiens
ggccaaacuggcuuccucuccuccucucccca

SEQ ID NO: 241834 - RNA, 32 nt, Homo Sapiens
aacagaaaaaucaaccccuauaacuagugaac

SEQ ID NO: 241835 - RNA, 27 nt, Homo Sapiens
ucucaauaaaguuuuccaguuuucucc

SEQ ID NO: 241836 - RNA, 32 nt, Homo Sapiens
ccucuguacugacaucuccuccccugaaaugc

SEQ ID NO: 241837 - RNA, 32 nt, Homo Sapiens
cugcauggguuacgugccaaguaauugccugg

SEQ ID NO: 241838 - RNA, 32 nt, Homo Sapiens
uaauauuuucagaaagugaugggauaacccua

SEQ ID NO: 241839 - RNA, 32 nt, Homo Sapiens
gcccggaucguccaccgcucccggcccgcucc

SEQ ID NO: 241840 - RNA, 32 nt, Homo Sapiens
ggucagauuugaaaagaacagaaggacugaag

SEQ ID NO: 241841 - RNA, 28 nt, Homo Sapiens
uuauuauuuacaggagugacccaccaca

SEQ ID NO: 241842 - RNA, 32 nt, Homo Sapiens
aagauucauuuuucuuuuuuccauucuucagg

SEQ ID NO: 241843 - RNA, 32 nt, Homo Sapiens
auuguaacaaaguauaugaaagauaauguaua

SEQ ID NO: 241844 - RNA, 32 nt, Homo Sapiens
uggcuuuuuuucuguggcucccagugggucua

SEQ ID NO: 241845 - RNA, 32 nt, Homo Sapiens
ggaacaugaggggagcuuguggagagugcuug

SEQ ID NO: 241846 - RNA, 32 nt, Homo Sapiens
ccuccacccccuccccaaugcagacaaaaugg

SEQ ID NO: 241847 - RNA, 32 nt, Homo Sapiens
aucugcgcgcacccuaaugaccuggggacuga

SEQ ID NO: 241848 - RNA, 32 nt, Homo Sapiens
cccggcaugacagcccuuggcuugcuggggga

SEQ ID NO: 241849 - RNA, 32 nt, Homo Sapiens
guaccuguccccucacuagaacgaagcuccau

SEQ ID NO: 241850 - RNA, 32 nt, Homo Sapiens
ucacuuccuuuugauuuuuucuuauagcuucu

SEQ ID NO: 241851 - RNA, 32 nt, Homo Sapiens
auaaggaagaagaauauggugccaaguuguca

SEQ ID NO: 241852 - RNA, 32 nt, Homo Sapiens
cuguaccuuuugcugcccauccuguuacuuuu

SEQ ID NO: 241853 - RNA, 32 nt, Homo Sapiens
uucaguacuugguaauaagacaaaaucggucc

SEQ ID NO: 241854 - RNA, 32 nt, Homo Sapiens
ucuaaacugccuaguuuguauauuccuauaau

SEQ ID NO: 241855 - RNA, 32 nt, Homo Sapiens
ccccacgucaggugcugacuguccgcuguccg

SEQ ID NO: 241856 - RNA, 32 nt, Homo Sapiens
aaaauaccaaaaugaagcuaguuuccuaaaua

SEQ ID NO: 241857 - RNA, 32 nt, Homo Sapiens
agcgucucaauccacuuuuaaccauggaugag

SEQ ID NO: 241858 - RNA, 32 nt, Homo Sapiens
guucucacuucgcuuccuggaacuugcucuca

SEQ ID NO: 241859 - RNA, 32 nt, Homo Sapiens
ucaauguaaaauguuauauaugcaucaguaca

SEQ ID NO: 241860 - RNA, 32 nt, Homo Sapiens
aacugcaaaaauauccuauguaacaacuacca

SEQ ID NO: 241861 - RNA, 32 nt, Homo Sapiens
gggugcagaauuggggcggggggcucccuuca

SEQ ID NO: 241862 - RNA, 32 nt, Homo Sapiens
ucgcuaaugguguuuaaaaacacacuuugucu

SEQ ID NO: 241863 - RNA, 32 nt, Homo Sapiens
acggggcccccgucauccccacggccagucug

SEQ ID NO: 241864 - RNA, 32 nt, Homo Sapiens
aauguaagucauuugggaaaguuuuggaagag

SEQ ID NO: 241865 - RNA, 32 nt, Homo Sapiens
ugcauggcagggggcugcugcugggcucagug

SEQ ID NO: 241866 - RNA, 32 nt, Homo Sapiens
caucuccuugaugccuccaccaucaccgccug

SEQ ID NO: 241867 - RNA, 32 nt, Homo Sapiens
uuucuuguauaaauaggagucaugggcguuag

SEQ ID NO: 241868 - RNA, 32 nt, Homo Sapiens
guuauuucuuugacugaauagacagugguaua

SEQ ID NO: 241869 - RNA, 32 nt, Homo Sapiens
ucgggcgcacccccugcacgccgccuucaucc

SEQ ID NO: 241870 - RNA, 32 nt, Homo Sapiens
uccgcgucgggccggccccgcggccgcucaug

SEQ ID NO: 241871 - RNA, 32 nt, Homo Sapiens
gcugaggcggguggaucacaagcucaggaguu

SEQ ID NO: 241872 - RNA, 32 nt, Homo Sapiens
aucucaauaaauuuaugugaagagaaugagaa

SEQ ID NO: 241873 - RNA, 32 nt, Homo Sapiens
agauggccucugcugacucagaugaagaccca

SEQ ID NO: 241874 - RNA, 32 nt, Homo Sapiens
uuuaaugcauacacucuagcuuaagaaaacau

SEQ ID NO: 241875 - RNA, 32 nt, Homo Sapiens
auaaauuaaaguuauuauaacagugauucuuu

SEQ ID NO: 241876 - RNA, 31 nt, Homo Sapiens
gggucccagaacaagccccaggcaagcugga

SEQ ID NO: 241877 - RNA, 32 nt, Homo Sapiens
uagggaugaagcagcuggguauuuucauaaag

SEQ ID NO: 241878 - RNA, 32 nt, Homo Sapiens
uccccacucuguaccuucuccauccauauugg

SEQ ID NO: 241879 - RNA, 32 nt, Homo Sapiens
cucuuauguucccccacaugcaggugguuuuu

SEQ ID NO: 241880 - RNA, 32 nt, Homo Sapiens
cgucugugacaaaugguugaaaaggagucaac

SEQ ID NO: 241881 - RNA, 32 nt, Homo Sapiens
gacuggacacuugccaaugaugaacgaucagg

SEQ ID NO: 241882 - RNA, 32 nt, Homo Sapiens
aagcuucuugguucuacuucucuucuccacaa

SEQ ID NO: 241883 - RNA, 32 nt, Homo Sapiens
uacucagggggcugaggcaggggaauggcuug

SEQ ID NO: 241884 - RNA, 32 nt, Homo Sapiens
gcuuauuaaaaauaaacaacugcuaguucuau

SEQ ID NO: 241885 - RNA, 32 nt, Homo Sapiens
agucccucuucccaccccucucuucuagcuug

SEQ ID NO: 241886 - RNA, 32 nt, Homo Sapiens
gcacuacuggugccugaaacaccuggccugcu

SEQ ID NO: 241887 - RNA, 32 nt, Homo Sapiens
auaagaagcauacaaaaaauauaugugggugg

SEQ ID NO: 241888 - RNA, 32 nt, Homo Sapiens
gggagggccuggcuacugucucucugcacucu

SEQ ID NO: 241889 - RNA, 27 nt, Homo Sapiens
aaguaccauuaauucuggaauuaaaga

SEQ ID NO: 241890 - RNA, 32 nt, Homo Sapiens
gagcccggcccgggggacgggcggcgggauag

SEQ ID NO: 241891 - RNA, 32 nt, Homo Sapiens
cccucucucugggaugaugaggucuccuucca

SEQ ID NO: 241892 - RNA, 32 nt, Homo Sapiens
uuaggauuuuuuuuuucuuuuuugagacagag

SEQ ID NO: 241893 - RNA, 32 nt, Homo Sapiens
acuaaggauucugguaccuuuacccaaaccua

SEQ ID NO: 241894 - RNA, 32 nt, Homo Sapiens
cuggggugggguggguggggucggguggugga

SEQ ID NO: 241895 - RNA, 32 nt, Homo Sapiens
cagguccucccggcccggcccgaacaugcugg

SEQ ID NO: 241896 - RNA, 32 nt, Homo Sapiens
gaaggauuugguucuccuuccaggagugucug

SEQ ID NO: 241897 - RNA, 32 nt, Homo Sapiens
cauccuugaacugucagcccacagcagcaaua

SEQ ID NO: 241898 - RNA, 31 nt, Homo Sapiens
ccgcgcggacgaugccugccgugcccgccug

SEQ ID NO: 241899 - RNA, 32 nt, Homo Sapiens
ucugucuucucuuuccucugcccuucccacag

SEQ ID NO: 241900 - RNA, 32 nt, Homo Sapiens
uucuugggaagcugaggccggcuaaguucaag

SEQ ID NO: 241901 - RNA, 32 nt, Homo Sapiens
cgacccgccggggcuuucccgggcgcugcucu

SEQ ID NO: 241902 - RNA, 30 nt, Homo Sapiens
gaagggagagggaaccagauaugcagauca

SEQ ID NO: 241903 - RNA, 32 nt, Homo Sapiens
uuuguuacauagguaaacugcaugucaugggg

SEQ ID NO: 241904 - RNA, 32 nt, Homo Sapiens
uucccgcacgggggcgcugucaccugccugug

SEQ ID NO: 241905 - RNA, 32 nt, Homo Sapiens
agcaaggccaagugggugcagcugccccaacc

SEQ ID NO: 241906 - RNA, 32 nt, Homo Sapiens
ugguaauauuuuuuuucuuaaguuguacauuu

SEQ ID NO: 241907 - RNA, 32 nt, Homo Sapiens
gaaauaaaggauuuaguuuaagauucuaaauu

SEQ ID NO: 241908 - RNA, 32 nt, Homo Sapiens
uguaaccaucuauugaugaaauccaagucugg

SEQ ID NO: 241909 - RNA, 32 nt, Homo Sapiens
uaguacuucauucaauuaauuuuguuuucuau

SEQ ID NO: 241910 - RNA, 32 nt, Homo Sapiens
cagcagcauuggcaucaccugggacuugugag

SEQ ID NO: 241911 - RNA, 32 nt, Homo Sapiens
gcauuuccaagccccaccucccucuccaaguu

SEQ ID NO: 241912 - RNA, 32 nt, Homo Sapiens
cccacccccugcaaggucugugccucuccugc

SEQ ID NO: 241913 - RNA, 31 nt, Homo Sapiens
agugcuuguaggcagcaaccauaugcuacaa

SEQ ID NO: 241914 - RNA, 32 nt, Homo Sapiens
aaaaaaaaagaggaagaaaaucuuaagugauu

SEQ ID NO: 241915 - RNA, 32 nt, Homo Sapiens
gucucuucagcuucucugaugcuugaacucuc

SEQ ID NO: 241916 - RNA, 32 nt, Homo Sapiens
ggaaagcccuccccgcaucccagagccugguu

SEQ ID NO: 241917 - RNA, 32 nt, Homo Sapiens
gcugggcucgggcuauccuuccaucucagccu

SEQ ID NO: 241918 - RNA, 32 nt, Homo Sapiens
agaaaggauuccagaagaaguaauacuuuauu

SEQ ID NO: 241919 - RNA, 27 nt, Homo Sapiens
agaugcagcuggaagcccugaaccugc

SEQ ID NO: 241920 - RNA, 32 nt, Homo Sapiens
cucccuucaauccugucaauguuugcuuuaug

SEQ ID NO: 241921 - RNA, 32 nt, Homo Sapiens
ccucagaacggaagauaggacuguauauaauu

SEQ ID NO: 241922 - RNA, 32 nt, Homo Sapiens
gcgcgucuuucuccugucuccuccccaagaug

SEQ ID NO: 241923 - RNA, 32 nt, Homo Sapiens
guggcagggcuuuugggauuaaguucuucauu

SEQ ID NO: 241924 - RNA, 31 nt, Homo Sapiens
ggccugccugccugccugccugccucuccac

SEQ ID NO: 241925 - RNA, 32 nt, Homo Sapiens
aguggugagguaggggugggggugcuguaggc

SEQ ID NO: 241926 - RNA, 32 nt, Homo Sapiens
auacgggguuccaggaaaggggagggguagcg

SEQ ID NO: 241927 - RNA, 32 nt, Homo Sapiens
acacagccaaccccggccccuggucaggcccc

SEQ ID NO: 241928 - RNA, 32 nt, Homo Sapiens
agcaccagagaacucacacuggauaacccacu

SEQ ID NO: 241929 - RNA, 32 nt, Homo Sapiens
uucucccuccuuuuuguccccaucccccaagu

SEQ ID NO: 241930 - RNA, 30 nt, Homo Sapiens
uucacagccaggcgcgcgcgucgcugcugc

SEQ ID NO: 241931 - RNA, 32 nt, Homo Sapiens
agccccaaaaucggcccucccucaccccuuuc

SEQ ID NO: 241932 - RNA, 32 nt, Homo Sapiens
gcugcagguaagucagagcagcuuuaccacag

SEQ ID NO: 241933 - RNA, 32 nt, Homo Sapiens
cuauugaaaaggagacuaaauuguaugugauu

SEQ ID NO: 241934 - RNA, 32 nt, Homo Sapiens
acacauaggcaucaucacauuuuuuauagacc

SEQ ID NO: 241935 - RNA, 32 nt, Homo Sapiens
cagauaaacugggggaauauaaacagccucua

SEQ ID NO: 241936 - RNA, 32 nt, Homo Sapiens
aagagguuuacuauugaugcuuagggucaucu

SEQ ID NO: 241937 - RNA, 32 nt, Homo Sapiens
guacagcaguauagaauccaugccaauacaga

SEQ ID NO: 241938 - RNA, 32 nt, Homo Sapiens
caggguaaugaaaacuuggggaacugguaagu

SEQ ID NO: 241939 - RNA, 32 nt, Homo Sapiens
uggcagcccucccgggaugggcccacauccac

SEQ ID NO: 241940 - RNA, 32 nt, Homo Sapiens
aucuaagauguggauuauuguuagaaucugca

SEQ ID NO: 241941 - RNA, 32 nt, Homo Sapiens
accagcagaacagauauacuuucucucaagau

SEQ ID NO: 241942 - RNA, 32 nt, Homo Sapiens
auggaguuucgcuguugucacccaggcuggag

SEQ ID NO: 241943 - RNA, 32 nt, Homo Sapiens
cauguccaggccuguuugggguugccuagcga

SEQ ID NO: 241944 - RNA, 32 nt, Homo Sapiens
accaggggcugcgucccgcccgcgccgccucu

SEQ ID NO: 241945 - RNA, 32 nt, Homo Sapiens
uaaaauauaguacagcuacuauaaggcuuguu

SEQ ID NO: 241946 - RNA, 32 nt, Homo Sapiens
uaaaguucaaggacuaaccuuauuuauuuggg

SEQ ID NO: 241947 - RNA, 32 nt, Homo Sapiens
uuuugaaaggauuauaaagcauaguaaaggaa

SEQ ID NO: 241948 - RNA, 32 nt, Homo Sapiens
ccccugaucacaggugcaaacaucucaagcca

SEQ ID NO: 241949 - RNA, 32 nt, Homo Sapiens
gguucuugacauuuuaaaagccugguuaugau

SEQ ID NO: 241950 - RNA, 32 nt, Homo Sapiens
agugugucccucaguggacaccagcuagaguc

SEQ ID NO: 241951 - RNA, 32 nt, Homo Sapiens
ccucuucuuuguaacuaacaaaaccaccacca

SEQ ID NO: 241952 - RNA, 32 nt, Homo Sapiens
ugcucacuauauauuuaauauuuuauuauugu

SEQ ID NO: 241953 - RNA, 32 nt, Homo Sapiens
cagaugcucccuccuuccucaagccucccugg

SEQ ID NO: 241954 - RNA, 32 nt, Homo Sapiens
uuaaggggcacaagguccagaucacucuggag

SEQ ID NO: 241955 - RNA, 32 nt, Homo Sapiens
caauauucaaccacaguaaaagacucagugag

SEQ ID NO: 241956 - RNA, 32 nt, Homo Sapiens
augcauaugcaaauauaaccacuuccucaguu

SEQ ID NO: 241957 - RNA, 32 nt, Homo Sapiens
uuuacuucaaaauaaaagcauguagugacugu

SEQ ID NO: 241958 - RNA, 32 nt, Homo Sapiens
gcgggagcgcgcccgcuuuuccuaggccagcg

SEQ ID NO: 241959 - RNA, 32 nt, Homo Sapiens
gcauugaguaacauuucuuuugaguugucuau

SEQ ID NO: 241960 - RNA, 32 nt, Homo Sapiens
gcgagaagauggcugcgaagggcgcgcacggc

SEQ ID NO: 241961 - RNA, 32 nt, Homo Sapiens
agugccagcugacaccaggagcagggagaggc

SEQ ID NO: 241962 - RNA, 32 nt, Homo Sapiens
aggcucacgcgcccuugaaaucugccgguacu

SEQ ID NO: 241963 - RNA, 32 nt, Homo Sapiens
cggccggcggguggagacgguuggccccuaaa

SEQ ID NO: 241964 - RNA, 32 nt, Homo Sapiens
agaauuucaagagcuugucgguugggucaaga

SEQ ID NO: 241965 - RNA, 32 nt, Homo Sapiens
cuuaauuauccaucuaaauuuaaaagacgaua

SEQ ID NO: 241966 - RNA, 32 nt, Homo Sapiens
cuccagcccaccagcccuccaguccuucuccc

SEQ ID NO: 241967 - RNA, 32 nt, Homo Sapiens
cuucagccugcgcccgcagcucugugggcccc

SEQ ID NO: 241968 - RNA, 32 nt, Homo Sapiens
uuuuuacuucuuuccuuuuucuuaguuagaau

SEQ ID NO: 241969 - RNA, 28 nt, Homo Sapiens
gcuaaaguuacaggaacacgaucccuag

SEQ ID NO: 241970 - RNA, 32 nt, Homo Sapiens
ggaaguggugaucagucugcagcacagugcag

SEQ ID NO: 241971 - RNA, 30 nt, Homo Sapiens
uuccauuagaagcuuggugugcuguuaggu

SEQ ID NO: 241972 - RNA, 32 nt, Homo Sapiens
ucagcuuacuaggugacccggaugcugacauc

SEQ ID NO: 241973 - RNA, 32 nt, Homo Sapiens
uauaauauugucucuuuuuuaaguuuggcaaa

SEQ ID NO: 241974 - RNA, 32 nt, Homo Sapiens
cucuuaggcgaaagagaagagaaacaaauauu

SEQ ID NO: 241975 - RNA, 32 nt, Homo Sapiens
uauuugugaccucagcuuugggaauaaaggau

SEQ ID NO: 241976 - RNA, 32 nt, Homo Sapiens
uaacuuggugccugaguucucuccuaggcaag

SEQ ID NO: 241977 - RNA, 32 nt, Homo Sapiens
ccugcggcgucccguagccucgcguuaagccu

SEQ ID NO: 241978 - RNA, 32 nt, Homo Sapiens
ggucgcuguuucggggacucggggcggccagu

SEQ ID NO: 241979 - RNA, 32 nt, Homo Sapiens
guagccacgcacagccagacgcauccugccac

SEQ ID NO: 241980 - RNA, 32 nt, Homo Sapiens
guuuuguuuuguuuugaauuauaggaguuaua

SEQ ID NO: 241981 - RNA, 32 nt, Homo Sapiens
cuauuuacuguguacauagaaagcuuuauuau

SEQ ID NO: 241982 - RNA, 32 nt, Homo Sapiens
uaggagaaaaaaucagaaauggcugcugcaca

SEQ ID NO: 241983 - RNA, 30 nt, Homo Sapiens
gggagccgcggagagcaccagcugacgccg

SEQ ID NO: 241984 - RNA, 32 nt, Homo Sapiens
cucccugaccauuuacgacucccuuuugccca

SEQ ID NO: 241985 - RNA, 32 nt, Homo Sapiens
gcugcauuuuaauuuuaaccaaaacaugucuc

SEQ ID NO: 241986 - RNA, 32 nt, Homo Sapiens
cgauggacccaggcauccuggaccuuggcguu

SEQ ID NO: 241987 - RNA, 32 nt, Homo Sapiens
ucgcacagccucuggggugcuuggucucugca

SEQ ID NO: 241988 - RNA, 32 nt, Homo Sapiens
agauuugaccuccucccuguuauuuucaagua

SEQ ID NO: 241989 - RNA, 32 nt, Homo Sapiens
ugauccauagaguacaggggcugcaaaauauc

SEQ ID NO: 241990 - RNA, 32 nt, Homo Sapiens
ccauaccgagcuaguuuuuuuauuuuuaguag

SEQ ID NO: 241991 - RNA, 32 nt, Homo Sapiens
cugcugggcugagacucagaggacacugggca

SEQ ID NO: 241992 - RNA, 32 nt, Homo Sapiens
uuaucugaguaugggagaaaauacuaaugcug

SEQ ID NO: 241993 - RNA, 32 nt, Homo Sapiens
agaaccgcgccgccgccucggccccgcggaag

SEQ ID NO: 241994 - RNA, 32 nt, Homo Sapiens
agcacaauguauuugcaguuuucucuuuugau

SEQ ID NO: 241995 - RNA, 32 nt, Homo Sapiens
gcuugccacaaaaauucuuuggcgauuguuac

SEQ ID NO: 241996 - RNA, 32 nt, Homo Sapiens
gaaaccaaguuaucuuauuaauuauauguaau

SEQ ID NO: 241997 - RNA, 32 nt, Homo Sapiens
uaagcugcugguuuuggggguuuucuaugaca

SEQ ID NO: 241998 - RNA, 32 nt, Homo Sapiens
uuuuaaauguugaucuuguauuccgcaaucuu

SEQ ID NO: 241999 - RNA, 28 nt, Homo Sapiens
cuugcuuaguguugacauuugaauagga

SEQ ID NO: 242000 - RNA, 32 nt, Homo Sapiens
aagguaaauggcauaaauauggucgcacuaau

SEQ ID NO: 242001 - RNA, 32 nt, Homo Sapiens
auaucugaaaauaagcagugaucccagguaga

SEQ ID NO: 242002 - RNA, 32 nt, Homo Sapiens
augaugauggagacaaaagccuugcuuuccuc

SEQ ID NO: 242003 - RNA, 32 nt, Homo Sapiens
ugcagacccagcucguggaccggcugcagcag

SEQ ID NO: 242004 - RNA, 32 nt, Homo Sapiens
ccugugaugauuguguuaacugcacaaauugu

SEQ ID NO: 242005 - RNA, 32 nt, Homo Sapiens
auuggugggucucaauccuuaacauauuugca

SEQ ID NO: 242006 - RNA, 32 nt, Homo Sapiens
gguagcuaagcaccugcuccccggcucucuuc

SEQ ID NO: 242007 - RNA, 32 nt, Homo Sapiens
gcaaggaccccggucauuuuagguaaaacaac

SEQ ID NO: 242008 - RNA, 32 nt, Homo Sapiens
gggccgugcucuugcucccgccgccuggcagc

SEQ ID NO: 242009 - RNA, 32 nt, Homo Sapiens
uugguggccacauaagccauuauucacuagua

SEQ ID NO: 242010 - RNA, 32 nt, Homo Sapiens
aagcagguggugagcuccugccugcuggaggu

SEQ ID NO: 242011 - RNA, 32 nt, Homo Sapiens
cgccuuguuuccccaucccccgccauggccga

SEQ ID NO: 242012 - RNA, 32 nt, Homo Sapiens
ggucuggugcgugacaauccaaagcgccgaga

SEQ ID NO: 242013 - RNA, 32 nt, Homo Sapiens
uaauuuucuuauuugcauuauuccaauaaaug

SEQ ID NO: 242014 - RNA, 32 nt, Homo Sapiens
ccauucuugauccagagcuguugccugugaca

SEQ ID NO: 242015 - RNA, 32 nt, Homo Sapiens
aaccuagcuggcaugcugguguguaccuguag

SEQ ID NO: 242016 - RNA, 32 nt, Homo Sapiens
auucauacagcuuugguuuguauauucuguau

SEQ ID NO: 242017 - RNA, 32 nt, Homo Sapiens
gcagaagaugacccgggggcagcuucaggaug

SEQ ID NO: 242018 - RNA, 27 nt, Homo Sapiens
cacguggacuucuucaggacuccagag

SEQ ID NO: 242019 - RNA, 32 nt, Homo Sapiens
uccauccaaacauccauccauccacugaacaa

SEQ ID NO: 242020 - RNA, 32 nt, Homo Sapiens
aaaauucauaauguaaaaaucuagaaagucuu

SEQ ID NO: 242021 - RNA, 32 nt, Homo Sapiens
gcacucgccucccuaccaaugacucaccugaa

SEQ ID NO: 242022 - RNA, 32 nt, Homo Sapiens
agauuuuucacuggagcagcucucuuaaggag

SEQ ID NO: 242023 - RNA, 32 nt, Homo Sapiens
agagagcuccgucugcagcagcucuuucagcu

SEQ ID NO: 242024 - RNA, 31 nt, Homo Sapiens
gccggcccggcccgaaaaccauagaccuggu

SEQ ID NO: 242025 - RNA, 32 nt, Homo Sapiens
ccugccacucugcagaacccaggcacugcucc

SEQ ID NO: 242026 - RNA, 32 nt, Homo Sapiens
aagcauauuaaaccauugguuuugcaggaugg

SEQ ID NO: 242027 - RNA, 32 nt, Homo Sapiens
acauguagaacaaaaugcaaaagaaaagugag

SEQ ID NO: 242028 - RNA, 32 nt, Homo Sapiens
uaggugguggggggucgccagcagguucccuc

SEQ ID NO: 242029 - RNA, 32 nt, Homo Sapiens
ggcccagaauagacagaagagagagaacauac

SEQ ID NO: 242030 - RNA, 32 nt, Homo Sapiens
cagaugccaaccccaguucuggccacguacag

SEQ ID NO: 242031 - RNA, 32 nt, Homo Sapiens
auuuccacccucaccuccaaggguggaaacuu

SEQ ID NO: 242032 - RNA, 32 nt, Homo Sapiens
guuccagugucugccauggcucuuggccugcc

SEQ ID NO: 242033 - RNA, 32 nt, Homo Sapiens
agugcaucugaccacuaaggggcccccuuggu

SEQ ID NO: 242034 - RNA, 32 nt, Homo Sapiens
gugaucaaaggcuuuauuaaauuuguacuuca

SEQ ID NO: 242035 - RNA, 32 nt, Homo Sapiens
uuccaaagaaaaccuuacacuuuuauucagau

SEQ ID NO: 242036 - RNA, 31 nt, Homo Sapiens
gcucgggggcggugccugccuugcagccucc

SEQ ID NO: 242037 - RNA, 32 nt, Homo Sapiens
ugcuucaaguuccaugggacaaacuaaaagua

SEQ ID NO: 242038 - RNA, 32 nt, Homo Sapiens
caagcaggcugccagcagcaacucccagcccc

SEQ ID NO: 242039 - RNA, 32 nt, Homo Sapiens
uggggcucggcaggucacaagaugcagggucc

SEQ ID NO: 242040 - RNA, 32 nt, Homo Sapiens
cgccuguaaucucagcacuuugggaggcugag

SEQ ID NO: 242041 - RNA, 32 nt, Homo Sapiens
cgcuuguaaucccagcacuuugggaggcugag

SEQ ID NO: 242042 - RNA, 31 nt, Homo Sapiens
uggucgcugccggacggcgugggcgguggcc

SEQ ID NO: 242043 - RNA, 32 nt, Homo Sapiens
auaaaauuuuuccgcucuuaauuaaaaauuac

SEQ ID NO: 242044 - RNA, 32 nt, Homo Sapiens
gcccacaggacaccggccccuagauuccagcc

SEQ ID NO: 242045 - RNA, 32 nt, Homo Sapiens
guccgcgggacuccggccgguugccggcccca

SEQ ID NO: 242046 - RNA, 32 nt, Homo Sapiens
agcuucugccagcugcuuuugccaguagauua

SEQ ID NO: 242047 - RNA, 32 nt, Homo Sapiens
uuggaguauaguggugccgucaugacuuacug

SEQ ID NO: 242048 - RNA, 31 nt, Homo Sapiens
gagccugcgggacaugccccccgcgccggcu

SEQ ID NO: 242049 - RNA, 32 nt, Homo Sapiens
ggcggggggcuuugcaggccgccagugucgac

SEQ ID NO: 242050 - RNA, 32 nt, Homo Sapiens
aaggauucaugaugaaaucugcuuuuuguuuu

SEQ ID NO: 242051 - RNA, 29 nt, Homo Sapiens
gcccugcagugugagugaacgguuauuua

SEQ ID NO: 242052 - RNA, 32 nt, Homo Sapiens
ccugcuucuuugacaucuuaaaaaagaaaucc

SEQ ID NO: 242053 - RNA, 32 nt, Homo Sapiens
gggagcguuguccguguuggcggccgcagcgg

SEQ ID NO: 242054 - RNA, 32 nt, Homo Sapiens
gacucugccucccaggacacaagucuccaaag

SEQ ID NO: 242055 - RNA, 32 nt, Homo Sapiens
ucuccucuucuuugcuucuccuuuuccuaaga

SEQ ID NO: 242056 - RNA, 32 nt, Homo Sapiens
uagagauuguuuuuguuuuuuauucuccuccu

SEQ ID NO: 242057 - RNA, 32 nt, Homo Sapiens
cugcaccgcgcuccgccuccagccgcgcgcag

SEQ ID NO: 242058 - RNA, 32 nt, Homo Sapiens
cucuuucauuuucucaguguguuaugcagcaa

SEQ ID NO: 242059 - RNA, 29 nt, Homo Sapiens
auuuuuauauguauauagaugaggguucc

SEQ ID NO: 242060 - RNA, 32 nt, Homo Sapiens
guuucgagaagcugcucuggaauuugcaaguc

SEQ ID NO: 242061 - RNA, 32 nt, Homo Sapiens
cccugccaugguggucuguuucccccagacuc

SEQ ID NO: 242062 - RNA, 32 nt, Homo Sapiens
gugcucguggacugaggcugcgcugcccggga

SEQ ID NO: 242063 - RNA, 31 nt, Homo Sapiens
gacaagagggcggacuugaucucggaaaguu

SEQ ID NO: 242064 - RNA, 32 nt, Homo Sapiens
acccgaggucuuccuaucuggaaugacuagag

SEQ ID NO: 242065 - RNA, 32 nt, Homo Sapiens
cuuuauguuucaucaaacuuguuccagcuaau

SEQ ID NO: 242066 - RNA, 32 nt, Homo Sapiens
gccacugcccuccagccugggcgacagaauga

SEQ ID NO: 242067 - RNA, 32 nt, Homo Sapiens
aucugucaguuauagacaaagauaauaauuca

SEQ ID NO: 242068 - RNA, 32 nt, Homo Sapiens
caggucuugggucuuugucaucuuggugcugu

SEQ ID NO: 242069 - RNA, 32 nt, Homo Sapiens
uucacauaaccaagaaaucauauacugaggug

SEQ ID NO: 242070 - RNA, 32 nt, Homo Sapiens
aguauuaagggaagcgcaaacacauuuauuuu

SEQ ID NO: 242071 - RNA, 32 nt, Homo Sapiens
cugggguggguuccggugcuggugagaaccca

SEQ ID NO: 242072 - RNA, 32 nt, Homo Sapiens
auacgccccuccuccuucucucuuggcgaggc

SEQ ID NO: 242073 - RNA, 32 nt, Homo Sapiens
ucuucuccaaaggaucuuuguuccucugagcc

SEQ ID NO: 242074 - RNA, 32 nt, Homo Sapiens
acuucuucaaggagcucaaccaugaccaagug

SEQ ID NO: 242075 - RNA, 32 nt, Homo Sapiens
uacagauguuugugccuuuucuuuacuuugcu

SEQ ID NO: 242076 - RNA, 32 nt, Homo Sapiens
cuucagugucaguugugcugcagacaguauga

SEQ ID NO: 242077 - RNA, 32 nt, Homo Sapiens
ugaggcuugcagaaaaaaucagcuagaacagc

SEQ ID NO: 242078 - RNA, 32 nt, Homo Sapiens
uaagaaaguuuccaguuuaccauuccauaagu

SEQ ID NO: 242079 - RNA, 32 nt, Homo Sapiens
ccggcucugcccagccccuacccacggccccg

SEQ ID NO: 242080 - RNA, 32 nt, Homo Sapiens
gugaaaugcaacuggcuguaccucaaugaugu

SEQ ID NO: 242081 - RNA, 32 nt, Homo Sapiens
cccuugugcacuuuuccccuggcaguggacau

SEQ ID NO: 242082 - RNA, 32 nt, Homo Sapiens
ucuagcuuucauguuggaaaauuuucugcagu

SEQ ID NO: 242083 - RNA, 32 nt, Homo Sapiens
aaauuuucaaaaaaccgcaaaauuucaagaaa

SEQ ID NO: 242084 - RNA, 32 nt, Homo Sapiens
acucaccauauaaacuugcauuugagcuugug

SEQ ID NO: 242085 - RNA, 32 nt, Homo Sapiens
ugcagagcuggguuccuugggaggaaguugua

SEQ ID NO: 242086 - RNA, 32 nt, Homo Sapiens
uguaguauaaaccauggucauuuuuaggcaug

SEQ ID NO: 242087 - RNA, 32 nt, Homo Sapiens
ggucugggggacuccagcccgcgcucuuccgc

SEQ ID NO: 242088 - RNA, 32 nt, Homo Sapiens
ccaugggguggggaaggcaggcauggggugug

SEQ ID NO: 242089 - RNA, 32 nt, Homo Sapiens
guuacaggugccgacgugaugucgcuucucug

SEQ ID NO: 242090 - RNA, 32 nt, Homo Sapiens
cccugccucagccuccucccucagccgcuccc

SEQ ID NO: 242091 - RNA, 32 nt, Homo Sapiens
uucacuguuuugaaauaaaauauccuauuacc

SEQ ID NO: 242092 - RNA, 32 nt, Homo Sapiens
uacaaccaggauccuccuuugcaugcgacugu

SEQ ID NO: 242093 - RNA, 32 nt, Homo Sapiens
uuguuccaauguuccuucuaauggauggugua

SEQ ID NO: 242094 - RNA, 32 nt, Homo Sapiens
cauuaaugagaagaguuuucucagagauuaaa

SEQ ID NO: 242095 - RNA, 32 nt, Homo Sapiens
acaccuuucccuccacaccuccccgcaaucag

SEQ ID NO: 242096 - RNA, 32 nt, Homo Sapiens
gugcacaauagaauaucuuuuacuguaauccc

SEQ ID NO: 242097 - RNA, 32 nt, Homo Sapiens
gcucgccagaugcucgcccuggcugcccugac

SEQ ID NO: 242098 - RNA, 32 nt, Homo Sapiens
ugaaauguccacuaccugaggacgcagcaucu

SEQ ID NO: 242099 - RNA, 32 nt, Homo Sapiens
aaggagcagcaggccgccgucaccuccagcau

SEQ ID NO: 242100 - RNA, 32 nt, Homo Sapiens
cucgcgcagcgccauggcccccauuggccuca

SEQ ID NO: 242101 - RNA, 32 nt, Homo Sapiens
ugaauucuuucuugugugaaauccaagagccc

SEQ ID NO: 242102 - RNA, 30 nt, Homo Sapiens
cacugcaaccucccugccugauucuccugc

SEQ ID NO: 242103 - RNA, 32 nt, Homo Sapiens
ugaaguagcuaauguccagccuucuuccaaaa

SEQ ID NO: 242104 - RNA, 32 nt, Homo Sapiens
cagaugauaaaacuaauuuugaacuuuuuaau

SEQ ID NO: 242105 - RNA, 32 nt, Homo Sapiens
uggagacacgugaagguuggugcggaguucgu

SEQ ID NO: 242106 - RNA, 32 nt, Homo Sapiens
gggauaaauuuuacugguugcuguuguggaga

SEQ ID NO: 242107 - RNA, 32 nt, Homo Sapiens
aacugaagugcgcuuuccguccuuucaaagga

SEQ ID NO: 242108 - RNA, 32 nt, Homo Sapiens
ggacccugcggccacaccgcccggccccuccu

SEQ ID NO: 242109 - RNA, 32 nt, Homo Sapiens
gcacacagaccacauagcacacaugugcacug

SEQ ID NO: 242110 - RNA, 32 nt, Homo Sapiens
ggaggccccgccugcuggccagcuguggccgc

SEQ ID NO: 242111 - RNA, 32 nt, Homo Sapiens
gccucugguacccaccauucucuucucuacuu

SEQ ID NO: 242112 - RNA, 32 nt, Homo Sapiens
ccauuuuguaaaaauauaaacacauggggcua

SEQ ID NO: 242113 - RNA, 32 nt, Homo Sapiens
guuugcagaggcugaggaugagcuaguucagc

SEQ ID NO: 242114 - RNA, 32 nt, Homo Sapiens
auauaccuuacauuuuaaucuaauaugucaug

SEQ ID NO: 242115 - RNA, 32 nt, Homo Sapiens
ucuccuccugcagguucaagcuccucaguccc

SEQ ID NO: 242116 - RNA, 32 nt, Homo Sapiens
gcuauauuaauuguguuuugcauaaaauugcc

SEQ ID NO: 242117 - RNA, 32 nt, Homo Sapiens
ccuucucaaaguccuuauuaaguguaaacuuc

SEQ ID NO: 242118 - RNA, 30 nt, Homo Sapiens
gagucgcgggugcgcgcgggccgugagugu

SEQ ID NO: 242119 - RNA, 30 nt, Homo Sapiens
uugcuaaauaaagauucccauuccuagcgc

SEQ ID NO: 242120 - RNA, 32 nt, Homo Sapiens
gggccuugagcgccuggugugggagguggucg

SEQ ID NO: 242121 - RNA, 32 nt, Homo Sapiens
uggagaaaauguuuacaaaaaugguuuuguua

SEQ ID NO: 242122 - RNA, 32 nt, Homo Sapiens
gaaagaaucucgcucugucacccaggcuggag

SEQ ID NO: 242123 - RNA, 32 nt, Homo Sapiens
cuuuuuucuuuuaaaaacagacuuccuuuucu

SEQ ID NO: 242124 - RNA, 32 nt, Homo Sapiens
gacuucaacugggauacauuuggaaauguggu

SEQ ID NO: 242125 - RNA, 32 nt, Homo Sapiens
gcugguggauguuagcaguucuucccuuggaa

SEQ ID NO: 242126 - RNA, 32 nt, Homo Sapiens
cgccgcugccccgcgcccggcgcucggggcag

SEQ ID NO: 242127 - RNA, 32 nt, Homo Sapiens
ugcgugugugcaugugcugguguguaaggggg

SEQ ID NO: 242128 - RNA, 32 nt, Homo Sapiens
caucccagcagaauugagagccacugcuauag

SEQ ID NO: 242129 - RNA, 27 nt, Homo Sapiens
gauuguuucuucuucaugcuuuugcuu

SEQ ID NO: 242130 - RNA, 32 nt, Homo Sapiens
gugguugugcagccccacccccgggaggggcu

SEQ ID NO: 242131 - RNA, 32 nt, Homo Sapiens
ugagugaauggaugcauagucacuaaaucaga

SEQ ID NO: 242132 - RNA, 32 nt, Homo Sapiens
uaucgccgugacuccgggcgcgagccaguguc

SEQ ID NO: 242133 - RNA, 32 nt, Homo Sapiens
ugggcucuaucccacacccacccccaccccac

SEQ ID NO: 242134 - RNA, 32 nt, Homo Sapiens
cuacuacagggugaggugcuugcccccaugug

SEQ ID NO: 242135 - RNA, 32 nt, Homo Sapiens
aucccaucuccugcccucuccugaucuaacuc

SEQ ID NO: 242136 - RNA, 32 nt, Homo Sapiens
gccccucugccagcugagacagcccacacaca

SEQ ID NO: 242137 - RNA, 32 nt, Homo Sapiens
gagcccaugggcccucccgggacaucuggaug

SEQ ID NO: 242138 - RNA, 32 nt, Homo Sapiens
auaugagaacagaacaagagagauacucugca

SEQ ID NO: 242139 - RNA, 32 nt, Homo Sapiens
aggcucuagugucuaugauucugcucuccacg

SEQ ID NO: 242140 - RNA, 32 nt, Homo Sapiens
uagcuucugaucccuggguucugggagacugc

SEQ ID NO: 242141 - RNA, 31 nt, Homo Sapiens
uggaggagggcggugcguggcugacucaucc

SEQ ID NO: 242142 - RNA, 32 nt, Homo Sapiens
cggcugagggccuggcagcugcugcgcccucg

SEQ ID NO: 242143 - RNA, 32 nt, Homo Sapiens
ccccaagaauuaccauuaucccauuuuacuua

SEQ ID NO: 242144 - RNA, 32 nt, Homo Sapiens
cauuggcuuuaaagggauuuuagaauaucuua

SEQ ID NO: 242145 - RNA, 32 nt, Homo Sapiens
cucaggggauguagcuuuuuuaaaagauuugg

SEQ ID NO: 242146 - RNA, 32 nt, Homo Sapiens
cggcgcgggacuuucggcgggucccggccggc

SEQ ID NO: 242147 - RNA, 32 nt, Homo Sapiens
gaggguacacuuucuucacugucccuauuccu

SEQ ID NO: 242148 - RNA, 32 nt, Homo Sapiens
aauagacagagggcccuugguuuauuucacuc

SEQ ID NO: 242149 - RNA, 32 nt, Homo Sapiens
cucaagcagucaacguagaaugcuugggaaau

SEQ ID NO: 242150 - RNA, 32 nt, Homo Sapiens
ccuggccaggacauauuugaaauggggagauu

SEQ ID NO: 242151 - RNA, 32 nt, Homo Sapiens
aaucaagcaaccaaugcugauuuuaagaaaac

SEQ ID NO: 242152 - RNA, 32 nt, Homo Sapiens
auaguuuccaugaagguguguauguuuuauac

SEQ ID NO: 242153 - RNA, 32 nt, Homo Sapiens
gccacccguccccuugugaccuccccccucug

SEQ ID NO: 242154 - RNA, 32 nt, Homo Sapiens
uucagucagaaaacuuuaaaaaauauuuauua

SEQ ID NO: 242155 - RNA, 32 nt, Homo Sapiens
uagaggagggcuuguucuccaacaccuucucu

SEQ ID NO: 242156 - RNA, 32 nt, Homo Sapiens
aggguggucacggccccuccccagaugcccgg

SEQ ID NO: 242157 - RNA, 32 nt, Homo Sapiens
guucagagcuugaaauaugacacaauauaaaa

SEQ ID NO: 242158 - RNA, 32 nt, Homo Sapiens
gcugggcugggcuguuuuaccuaauccacuua

SEQ ID NO: 242159 - RNA, 32 nt, Homo Sapiens
gguccccacugccugcuggagagaagacacac

SEQ ID NO: 242160 - RNA, 32 nt, Homo Sapiens
ccucgcaaugcuccucucucugucccaccccg

SEQ ID NO: 242161 - RNA, 32 nt, Homo Sapiens
acgugggugggcgggugcugcagcuguggcug

SEQ ID NO: 242162 - RNA, 32 nt, Homo Sapiens
aaaucuauuuaaaauaucuaucauguaucuau

SEQ ID NO: 242163 - RNA, 32 nt, Homo Sapiens
ccccauugaaagacuccgacugcagugccugg

SEQ ID NO: 242164 - RNA, 32 nt, Homo Sapiens
ccugccccuccuccccgcugcagccagguugc

SEQ ID NO: 242165 - RNA, 32 nt, Homo Sapiens
ugaaugugaaggccaugauauuacugugcacu

SEQ ID NO: 242166 - RNA, 30 nt, Homo Sapiens
aacccaggagguggugguugcagugagccu

SEQ ID NO: 242167 - RNA, 32 nt, Homo Sapiens
gcauguuacccaaauuugagaagugcugcugu

SEQ ID NO: 242168 - RNA, 32 nt, Homo Sapiens
agugcugccaguuucccaaaacguaaucaagc

SEQ ID NO: 242169 - RNA, 32 nt, Homo Sapiens
agauuaacaagggcagaagagaauccaagucu

SEQ ID NO: 242170 - RNA, 32 nt, Homo Sapiens
acaggggacccucuccaccaugggcccaccag

SEQ ID NO: 242171 - RNA, 31 nt, Homo Sapiens
gccagcugacccucaguuccucaaacacaga

SEQ ID NO: 242172 - RNA, 32 nt, Homo Sapiens
cccccacucccggccccgguucccacaggaca

SEQ ID NO: 242173 - RNA, 32 nt, Homo Sapiens
cucuacuaaaaauaaauuuaaaaaaaauuagc

SEQ ID NO: 242174 - RNA, 32 nt, Homo Sapiens
uucccugccuucauuacaguuugcucugagaa

SEQ ID NO: 242175 - RNA, 32 nt, Homo Sapiens
ccagaaacuaggagcucagagaaggggccuuc

SEQ ID NO: 242176 - RNA, 32 nt, Homo Sapiens
gccugucuagaaugccgccgggaguccgggca

SEQ ID NO: 242177 - RNA, 30 nt, Homo Sapiens
ggcucaagagggcuugauggcuguccccug

SEQ ID NO: 242178 - RNA, 32 nt, Homo Sapiens
uuguggcaguuugcguuuacuaccucccucug

SEQ ID NO: 242179 - RNA, 32 nt, Homo Sapiens
gggcucuuggggauuagauaucccuuuaaucu

SEQ ID NO: 242180 - RNA, 32 nt, Homo Sapiens
acuagggacuuucuaagaagauaccuaccccc

SEQ ID NO: 242181 - RNA, 32 nt, Homo Sapiens
cucccucugaagauggacucggccccacauac

SEQ ID NO: 242182 - RNA, 32 nt, Homo Sapiens
cccccacucccggcuggagacggggucugggu

SEQ ID NO: 242183 - RNA, 32 nt, Homo Sapiens
ucuccaggcagagggaggacaagugauggagg

SEQ ID NO: 242184 - RNA, 32 nt, Homo Sapiens
caucugauucagaagcaucacuucuuggauaa

SEQ ID NO: 242185 - RNA, 32 nt, Homo Sapiens
cuaugaaaacaguggauugguuggguuuugug

SEQ ID NO: 242186 - RNA, 32 nt, Homo Sapiens
ggagcggcgucccggccgccccuccguuccca

SEQ ID NO: 242187 - RNA, 32 nt, Homo Sapiens
agccccagcacggcccggucccgcaugccacc

SEQ ID NO: 242188 - RNA, 32 nt, Homo Sapiens
agcaagcccagggcaaggauccugugcugcug

SEQ ID NO: 242189 - RNA, 32 nt, Homo Sapiens
ucuguggguggucacgggagggugugagucag

SEQ ID NO: 242190 - RNA, 32 nt, Homo Sapiens
cccugcccucugcucacccauguccaaucucu

SEQ ID NO: 242191 - RNA, 32 nt, Homo Sapiens
aauggauggggauaagaauaggucauuuucua

SEQ ID NO: 242192 - RNA, 32 nt, Homo Sapiens
cuccagaaauuuaccacaaaagcaaaauuuuu

SEQ ID NO: 242193 - RNA, 32 nt, Homo Sapiens
gaggcagcgcgcccggcucccgcgccaugggg

SEQ ID NO: 242194 - RNA, 32 nt, Homo Sapiens
cgggaauguuuaauaaagggccuggccaccuc

SEQ ID NO: 242195 - RNA, 32 nt, Homo Sapiens
aaauggugaaggaaacagaaaaaaggucccug

SEQ ID NO: 242196 - RNA, 32 nt, Homo Sapiens
cacccaggcauguggaauaugcucauaguggc

SEQ ID NO: 242197 - RNA, 32 nt, Homo Sapiens
gacauagccuaaucaauuagaucuagaauugg

SEQ ID NO: 242198 - RNA, 32 nt, Homo Sapiens
cgacgcucggcgggcucugaccgugccgccuu

SEQ ID NO: 242199 - RNA, 32 nt, Homo Sapiens
ccuggggguggagaggccaucccggggcgucc

SEQ ID NO: 242200 - RNA, 32 nt, Homo Sapiens
ccacuaccaccuguagcaguccugcccccguu

SEQ ID NO: 242201 - RNA, 32 nt, Homo Sapiens
uuuauaacuaaaaagguuuaagcugcuaaaac

SEQ ID NO: 242202 - RNA, 32 nt, Homo Sapiens
cucuucaaggucucuuuucauccuucaucuga

SEQ ID NO: 242203 - RNA, 32 nt, Homo Sapiens
ugaggcagggacaagucuuucuccucuuugag

SEQ ID NO: 242204 - RNA, 30 nt, Homo Sapiens
uugucuccgaguacugcagaacugacauuu

SEQ ID NO: 242205 - RNA, 32 nt, Homo Sapiens
cuacuaaaaaauacaaaaauuagccaggcgug

SEQ ID NO: 242206 - RNA, 32 nt, Homo Sapiens
cugggcggagagcgaugugggucaggacgacg

SEQ ID NO: 242207 - RNA, 32 nt, Homo Sapiens
cccgacuggucauuguggucuaauggagugug

SEQ ID NO: 242208 - RNA, 31 nt, Homo Sapiens
gacuccgagccggccugucaggcaagagccg

SEQ ID NO: 242209 - RNA, 32 nt, Homo Sapiens
cgugcggccgggccggccugugcguguggccu

SEQ ID NO: 242210 - RNA, 32 nt, Homo Sapiens
aggggggaggaaagaggacgcgugugggcaag

SEQ ID NO: 242211 - RNA, 32 nt, Homo Sapiens
ucauucuuacuguaauuuuucuugcugauggg

SEQ ID NO: 242212 - RNA, 32 nt, Homo Sapiens
ccaauuuuguuaucacaucccuaugaaguuga

SEQ ID NO: 242213 - RNA, 32 nt, Homo Sapiens
ucuccggcgggugaggcugcagcccaguuuca

SEQ ID NO: 242214 - RNA, 32 nt, Homo Sapiens
ugacauuagaaagccagcgagaaggaagauuc

SEQ ID NO: 242215 - RNA, 32 nt, Homo Sapiens
uauacauaguacuacauauauauaacuauaua

SEQ ID NO: 242216 - RNA, 32 nt, Homo Sapiens
agagagcuuguuccuccaaccccaggaggcca

SEQ ID NO: 242217 - RNA, 32 nt, Homo Sapiens
agccgggcuugguuggugggcgccuguaaucc

SEQ ID NO: 242218 - RNA, 32 nt, Homo Sapiens
uuuaagagugaacauuagacauauuaaaaaca

SEQ ID NO: 242219 - RNA, 32 nt, Homo Sapiens
uauaucccauugaaacaaaacauugauuauaa

SEQ ID NO: 242220 - RNA, 32 nt, Homo Sapiens
uaucuauauaucuaucuauauaaacuacuagc

SEQ ID NO: 242221 - RNA, 32 nt, Homo Sapiens
cugagggcuccucccgggcgcuuccuccucgc

SEQ ID NO: 242222 - RNA, 27 nt, Homo Sapiens
ucccaguccuucugucagucuccgaug

SEQ ID NO: 242223 - RNA, 32 nt, Homo Sapiens
ccaccucugucuguccuguugcuguagacaac

SEQ ID NO: 242224 - RNA, 32 nt, Homo Sapiens
agggguacgggagagggaaagacgaggccgag

SEQ ID NO: 242225 - RNA, 32 nt, Homo Sapiens
gaugacccacccaccaaggaagaaagcagaau

SEQ ID NO: 242226 - RNA, 32 nt, Homo Sapiens
cuuaaacuggaaagggacugugauuggcuggu

SEQ ID NO: 242227 - RNA, 32 nt, Homo Sapiens
cucuuaaaagauuuuuuuuuuauguaaacugu

SEQ ID NO: 242228 - RNA, 29 nt, Homo Sapiens
uucaugugagcuuuccugcugucaaccuu

SEQ ID NO: 242229 - RNA, 32 nt, Homo Sapiens
uagauaauaugcuggucagggcuggucuugaa

SEQ ID NO: 242230 - RNA, 32 nt, Homo Sapiens
uuauagcuuaaauuauucuaggaccaacucuu

SEQ ID NO: 242231 - RNA, 32 nt, Homo Sapiens
uaagacuguuuggagauguuggcuguauuucc

SEQ ID NO: 242232 - RNA, 32 nt, Homo Sapiens
auuugccaagaaaggaucucuggggcuuccgg

SEQ ID NO: 242233 - RNA, 32 nt, Homo Sapiens
agugauccuuguguauauugcuauagauuuuu

SEQ ID NO: 242234 - RNA, 32 nt, Homo Sapiens
ccaggggucccgccagcuccacucccaccuuc

SEQ ID NO: 242235 - RNA, 32 nt, Homo Sapiens
gucugcccacgcagaggacgcacgcucgcugc

SEQ ID NO: 242236 - RNA, 32 nt, Homo Sapiens
uuuaaagaaaugcacuugccuaugauacuguc

SEQ ID NO: 242237 - RNA, 31 nt, Homo Sapiens
aaaaauauggugcucauucucauccauccag

SEQ ID NO: 242238 - RNA, 32 nt, Homo Sapiens
acuccuggauccuaucugcccuggacaaggug

SEQ ID NO: 242239 - RNA, 32 nt, Homo Sapiens
cccgaccgagagcuggcgucaggagccgcagg

SEQ ID NO: 242240 - RNA, 32 nt, Homo Sapiens
cauccagaugacucagacgaggagaaugacuu

SEQ ID NO: 242241 - RNA, 32 nt, Homo Sapiens
gcugcgagcccugcugcagagccuccggcugg

SEQ ID NO: 242242 - RNA, 31 nt, Homo Sapiens
agaaguuccggcuucgcuccaagaagaggaa

SEQ ID NO: 242243 - RNA, 32 nt, Homo Sapiens
gauuaugccacuuuuuuuuaacuagacagggc

SEQ ID NO: 242244 - RNA, 32 nt, Homo Sapiens
uucuaaucauuucuuguaugcauguuuuuuga

SEQ ID NO: 242245 - RNA, 31 nt, Homo Sapiens
gagagcgcguugguggcgacggccgagucag

SEQ ID NO: 242246 - RNA, 32 nt, Homo Sapiens
gccacaugcccauuuccccacuugcaugaaug

SEQ ID NO: 242247 - RNA, 32 nt, Homo Sapiens
ugcuauggguuuucuuuuucuuuguuuuuuuc

SEQ ID NO: 242248 - RNA, 32 nt, Homo Sapiens
aaaaauguuugacauccuuugagauauuuuau

SEQ ID NO: 242249 - RNA, 31 nt, Homo Sapiens
cgauggacaaauugucucugaucguuggaug

SEQ ID NO: 242250 - RNA, 32 nt, Homo Sapiens
aacaggaaccccagcccuguucccgcgggcca

SEQ ID NO: 242251 - RNA, 32 nt, Homo Sapiens
aguaggaaaugggaaguauuuguaucuucuuu

SEQ ID NO: 242252 - RNA, 32 nt, Homo Sapiens
acugagagcuccugggcaggcucggcagggca

SEQ ID NO: 242253 - RNA, 29 nt, Homo Sapiens
gcguggggagcacagaggaggcuggcaga

SEQ ID NO: 242254 - RNA, 32 nt, Homo Sapiens
acugugcccuccccugcccaggagucugguug

SEQ ID NO: 242255 - RNA, 32 nt, Homo Sapiens
uuuuuaaaaucuuuuuaucuuuuuuuaaacua

SEQ ID NO: 242256 - RNA, 32 nt, Homo Sapiens
uaaucaauauaaucugaauuauuguuaucuuu

SEQ ID NO: 242257 - RNA, 32 nt, Homo Sapiens
aaguuaaaauaguuuuuagaacuuuuuguuua

SEQ ID NO: 242258 - RNA, 32 nt, Homo Sapiens
aggagcaugguggucuuggcuauuugcuuacc

SEQ ID NO: 242259 - RNA, 32 nt, Homo Sapiens
cuugucaccgacagggcgauugcagugcguuc

SEQ ID NO: 242260 - RNA, 32 nt, Homo Sapiens
auaaacagccaucuuaaauaagcaacguauug

SEQ ID NO: 242261 - RNA, 32 nt, Homo Sapiens
aagugaagaaucaagugagaauggaggaggug

SEQ ID NO: 242262 - RNA, 32 nt, Homo Sapiens
uugguaaaguucccuucuugggacuuauuccu

SEQ ID NO: 242263 - RNA, 32 nt, Homo Sapiens
acggagagcgcugagcgccgccgggaauucca

SEQ ID NO: 242264 - RNA, 32 nt, Homo Sapiens
cucaacacguauggagggauuuuucagguuuc

SEQ ID NO: 242265 - RNA, 32 nt, Homo Sapiens
gguugagggagguuggucacaaugagaaccuc

SEQ ID NO: 242266 - RNA, 32 nt, Homo Sapiens
ucuggagauuagccaguaccccaagcaugugc

SEQ ID NO: 242267 - RNA, 32 nt, Homo Sapiens
guagguaauguauuuaaauauuucauaugacc

SEQ ID NO: 242268 - RNA, 32 nt, Homo Sapiens
ucauauguuaaauuaacagagguggauguauu

SEQ ID NO: 242269 - RNA, 32 nt, Homo Sapiens
acccuccauucugcacucagaaaauggcacuu

SEQ ID NO: 242270 - RNA, 32 nt, Homo Sapiens
accagccuaaacaacauagugaaacccugucu

SEQ ID NO: 242271 - RNA, 32 nt, Homo Sapiens
cggcgccggcggugauccgagcgagcggccgc

SEQ ID NO: 242272 - RNA, 32 nt, Homo Sapiens
uccucugcuguguugacuggacccucaguucc

SEQ ID NO: 242273 - RNA, 32 nt, Homo Sapiens
gcucauuguaaaugcaccgacaugacagggaa

SEQ ID NO: 242274 - RNA, 32 nt, Homo Sapiens
auagaguucaggugcuggggaaugaccacggu

SEQ ID NO: 242275 - RNA, 32 nt, Homo Sapiens
ggaagagugucccgcagagacccggcgggagc

SEQ ID NO: 242276 - RNA, 32 nt, Homo Sapiens
ucuggggcgggauaacugugggugcugcgggc

SEQ ID NO: 242277 - RNA, 28 nt, Homo Sapiens
uaccaguuuggcaccauuauaaagaaac

SEQ ID NO: 242278 - RNA, 32 nt, Homo Sapiens
agcaaacaugauggccccuuuaugagagguaa

SEQ ID NO: 242279 - RNA, 32 nt, Homo Sapiens
uggaagaguuggggcccuggggugauagccuc

SEQ ID NO: 242280 - RNA, 32 nt, Homo Sapiens
cugugguuugggugugaggaagagggagauga

SEQ ID NO: 242281 - RNA, 32 nt, Homo Sapiens
ccuccagcaccauagagaggcgcuagagccca

SEQ ID NO: 242282 - RNA, 32 nt, Homo Sapiens
guggcucuauugcaauaauguuagggacauua

SEQ ID NO: 242283 - RNA, 32 nt, Homo Sapiens
ugcuagcggccugcccagcugccgcccccgga

SEQ ID NO: 242284 - RNA, 32 nt, Homo Sapiens
uggggcccaaaauaagaagguucuagguuguc

SEQ ID NO: 242285 - RNA, 32 nt, Homo Sapiens
ggagcagcagccacucgcgcgcggagccggag

SEQ ID NO: 242286 - RNA, 32 nt, Homo Sapiens
acagcaggugcauuccugcuucccucccauca

SEQ ID NO: 242287 - RNA, 32 nt, Homo Sapiens
gguuucacuauguuggcuaggcuggucuugaa

SEQ ID NO: 242288 - RNA, 32 nt, Homo Sapiens
agagaaaaaauaaagcaagaaauacuaacauc

SEQ ID NO: 242289 - RNA, 32 nt, Homo Sapiens
gguuucaccauguugguuaggcuggucuugaa

SEQ ID NO: 242290 - RNA, 32 nt, Homo Sapiens
ugggcgcccucgccugcccccgggguugucag

SEQ ID NO: 242291 - RNA, 32 nt, Homo Sapiens
cauagcacagaaacagagcagaaaguaguaca

SEQ ID NO: 242292 - RNA, 32 nt, Homo Sapiens
gacgccccacccauuugccaggcuggaucccc

SEQ ID NO: 242293 - RNA, 32 nt, Homo Sapiens
caauuuguuaaaaauuuuccgucuuauuucau

SEQ ID NO: 242294 - RNA, 32 nt, Homo Sapiens
cgaagagccccagaaacagaaaagcacacuua

SEQ ID NO: 242295 - RNA, 32 nt, Homo Sapiens
cugcaagcugagguggcagcucugaccaccuc

SEQ ID NO: 242296 - RNA, 32 nt, Homo Sapiens
ucgcgcaucccucgagccgccacgcgcucucg

SEQ ID NO: 242297 - RNA, 32 nt, Homo Sapiens
uuuuccaggaccaucucucauggcaccuggag

SEQ ID NO: 242298 - RNA, 32 nt, Homo Sapiens
cuuccuucuccuccuccauccccagaacaaac

SEQ ID NO: 242299 - RNA, 32 nt, Homo Sapiens
uaggcugaggaagaggagggguuggucuugcu

SEQ ID NO: 242300 - RNA, 32 nt, Homo Sapiens
uacaggccaguaagcuuugaccucaagugugc

SEQ ID NO: 242301 - RNA, 32 nt, Homo Sapiens
agccuggaccucugacacacucguaacauggc

SEQ ID NO: 242302 - RNA, 31 nt, Homo Sapiens
gccaccccacccucagcuguaggcaagcuug

SEQ ID NO: 242303 - RNA, 32 nt, Homo Sapiens
agccugggcuggaagaggcagcaaaagggaaa

SEQ ID NO: 242304 - RNA, 32 nt, Homo Sapiens
uuuucaaaacaaauuguuuuuacaauaccuau

SEQ ID NO: 242305 - RNA, 32 nt, Homo Sapiens
ucugccugggucugguauccagaaaccugagu

SEQ ID NO: 242306 - RNA, 32 nt, Homo Sapiens
ucuacgcgcuggccagccaugugacugccuuc

SEQ ID NO: 242307 - RNA, 32 nt, Homo Sapiens
auaaacauaagaaaaaucaugcuggagggaag

SEQ ID NO: 242308 - RNA, 32 nt, Homo Sapiens
gggaaagccgccgaccugugacucgcuugaga

SEQ ID NO: 242309 - RNA, 32 nt, Homo Sapiens
uuuguaaaaaugguuuccugugucaaguauuu

SEQ ID NO: 242310 - RNA, 32 nt, Homo Sapiens
gaagaccuauaccccacgccugggccuggcuu

SEQ ID NO: 242311 - RNA, 32 nt, Homo Sapiens
agaagacuggaaacauacaacuuugugcauuu

SEQ ID NO: 242312 - RNA, 32 nt, Homo Sapiens
ucuucccuccagagaccaccccgcuccuugcu

SEQ ID NO: 242313 - RNA, 32 nt, Homo Sapiens
uggggcugggcccuggccuccuaacggggcug

SEQ ID NO: 242314 - RNA, 32 nt, Homo Sapiens
cuaacagccugccugucccccgggaacguucu

SEQ ID NO: 242315 - RNA, 32 nt, Homo Sapiens
ucaguuuuugucagcaucuccaccccgaggug

SEQ ID NO: 242316 - RNA, 32 nt, Homo Sapiens
uugccugugagucagagcuggaggccgaggag

SEQ ID NO: 242317 - RNA, 32 nt, Homo Sapiens
gccaacucacugccauguucagugucccggcu

SEQ ID NO: 242318 - RNA, 32 nt, Homo Sapiens
ucuccacccccucuccaacacuggccccuucc

SEQ ID NO: 242319 - RNA, 32 nt, Homo Sapiens
ccgucccauucccauuuuuuccuuuacaauuu

SEQ ID NO: 242320 - RNA, 32 nt, Homo Sapiens
uaaauuugauaaagauuucauguccugaaucu

SEQ ID NO: 242321 - RNA, 32 nt, Homo Sapiens
ggucaggagggaggagacgcaaacacaauugg

SEQ ID NO: 242322 - RNA, 32 nt, Homo Sapiens
agaaugggucaucacccaggcucuggggcuga

SEQ ID NO: 242323 - RNA, 32 nt, Homo Sapiens
uucauguuuugcaauaaaaugacuuuuaaaaa

SEQ ID NO: 242324 - RNA, 32 nt, Homo Sapiens
uugcauuggggaaaauaucuuucauauuuguu

SEQ ID NO: 242325 - RNA, 32 nt, Homo Sapiens
ucagugucaacacucugguuuagcaauaaugg

SEQ ID NO: 242326 - RNA, 32 nt, Homo Sapiens
ugcacagugucugugggucagacauccaggcc

SEQ ID NO: 242327 - RNA, 32 nt, Homo Sapiens
ugaugacugccagcacagggcaucucgggcuu

SEQ ID NO: 242328 - RNA, 32 nt, Homo Sapiens
cuuaaagcccuagacagguaaaagcacacauu

SEQ ID NO: 242329 - RNA, 32 nt, Homo Sapiens
uugcuggcacggauauugccccugcccugggc

SEQ ID NO: 242330 - RNA, 32 nt, Homo Sapiens
uuccaaugucugccacacaaacguauguaaau

SEQ ID NO: 242331 - RNA, 32 nt, Homo Sapiens
agcagcgcacugcaaccuggaccuccugggcu

SEQ ID NO: 242332 - RNA, 32 nt, Homo Sapiens
auucucccguugcuccuccuacuguuuaucac

SEQ ID NO: 242333 - RNA, 32 nt, Homo Sapiens
uguuucaccauguuggucaggcuggucaugaa

SEQ ID NO: 242334 - RNA, 32 nt, Homo Sapiens
aggagcaucuuaaaauguaaauaugcugggac

SEQ ID NO: 242335 - RNA, 32 nt, Homo Sapiens
ugccuguacucccagcacuuugggaggcugag

SEQ ID NO: 242336 - RNA, 32 nt, Homo Sapiens
uguuucccuuggauguuuugacaaaaauaaac

SEQ ID NO: 242337 - RNA, 32 nt, Homo Sapiens
gccucuuguauucagcucuaccuuucugcuaa

SEQ ID NO: 242338 - RNA, 32 nt, Homo Sapiens
gacacacgccuugaaaaauggcaguaggcaua

SEQ ID NO: 242339 - RNA, 32 nt, Homo Sapiens
auugugcccuuuaaguguuguaaaaucguuuu

SEQ ID NO: 242340 - RNA, 32 nt, Homo Sapiens
uuauuauacucuaaguuuuaggguacaugugc

SEQ ID NO: 242341 - RNA, 32 nt, Homo Sapiens
gcccagcccggcugccugauaagauaggcuga

SEQ ID NO: 242342 - RNA, 32 nt, Homo Sapiens
guuugucccaccacgaggaucccguucauuug

SEQ ID NO: 242343 - RNA, 32 nt, Homo Sapiens
caggggcuuugugccuuucaucuuuaacuggg

SEQ ID NO: 242344 - RNA, 32 nt, Homo Sapiens
cucuuggcuuauauuucuaaggcacaugcugu

SEQ ID NO: 242345 - RNA, 27 nt, Homo Sapiens
auuaucacuuucuucagcccccuuaca

SEQ ID NO: 242346 - RNA, 32 nt, Homo Sapiens
agacaaaaaugaaaaguaggaugaaaauaaua

SEQ ID NO: 242347 - RNA, 32 nt, Homo Sapiens
auuuucuggacaugaaguaaauuuagagugcu

SEQ ID NO: 242348 - RNA, 32 nt, Homo Sapiens
gguagacuugguuuuuagaauucauaaaacug

SEQ ID NO: 242349 - RNA, 32 nt, Homo Sapiens
gcgaauucucucugccucgccucccccuaucu

SEQ ID NO: 242350 - RNA, 32 nt, Homo Sapiens
agaauaauaauaauauaauacaauagcucuau

SEQ ID NO: 242351 - RNA, 32 nt, Homo Sapiens
uaggaggcgggugcaggugugggugcugagcc

SEQ ID NO: 242352 - RNA, 32 nt, Homo Sapiens
uggcaaggggagauauugaugccgugugcccc

SEQ ID NO: 242353 - RNA, 29 nt, Homo Sapiens
cuguucaggggacagaugcaagcuguggg

SEQ ID NO: 242354 - RNA, 32 nt, Homo Sapiens
caaccgacguucuucagcguaccguguuguca

SEQ ID NO: 242355 - RNA, 32 nt, Homo Sapiens
cuggugcggaugugccgcugcccgccggagca

SEQ ID NO: 242356 - RNA, 32 nt, Homo Sapiens
cuaugcccagcuaauuuuuuuauuuuuaguag

SEQ ID NO: 242357 - RNA, 32 nt, Homo Sapiens
gccgagacugcuaaaaggaaaagcauccggcg

SEQ ID NO: 242358 - RNA, 32 nt, Homo Sapiens
gcccacccuggaggguccugugccgcgcacuu

SEQ ID NO: 242359 - RNA, 32 nt, Homo Sapiens
cugugcuguuuggaugggagccccacagaggc

SEQ ID NO: 242360 - RNA, 32 nt, Homo Sapiens
caaggccccucuauuugcuauuucucuuuacu

SEQ ID NO: 242361 - RNA, 32 nt, Homo Sapiens
gggaaugacacugacuaauguuaggaaucuug

SEQ ID NO: 242362 - RNA, 32 nt, Homo Sapiens
agagccaggguccuucaccacccagccgcugg

SEQ ID NO: 242363 - RNA, 32 nt, Homo Sapiens
aaauguguuuaaccauauuuugaaaugacccu

SEQ ID NO: 242364 - RNA, 32 nt, Homo Sapiens
aggccauccuucugcccuucagccuccuccag

SEQ ID NO: 242365 - RNA, 32 nt, Homo Sapiens
cacaccccuaaaacaucagacucaccauccag

SEQ ID NO: 242366 - RNA, 32 nt, Homo Sapiens
aaguuuucacuuuugugaaauguaauuuuucu

SEQ ID NO: 242367 - RNA, 32 nt, Homo Sapiens
uccuugcccucccaccaggucucugagcucag

SEQ ID NO: 242368 - RNA, 32 nt, Homo Sapiens
aauaugucuuaccaauuuccaaguagaaauua

SEQ ID NO: 242369 - RNA, 32 nt, Homo Sapiens
ggcagucaccuuucccauguguuucugcgucu

SEQ ID NO: 242370 - RNA, 32 nt, Homo Sapiens
aagggagggugcagcccucuugcccgcacccc

SEQ ID NO: 242371 - RNA, 32 nt, Homo Sapiens
cacagaaauauauauuuauaacugcauugaua

SEQ ID NO: 242372 - RNA, 32 nt, Homo Sapiens
cugggggcugguuggcauuugcuggccuggca

SEQ ID NO: 242373 - RNA, 32 nt, Homo Sapiens
ccucggcuuccacucucucuuccucacccuac

SEQ ID NO: 242374 - RNA, 32 nt, Homo Sapiens
aggcagcgggggaagauggcggcggccguucc

SEQ ID NO: 242375 - RNA, 32 nt, Homo Sapiens
uuccaggcccagcucuugccucauggcagcug

SEQ ID NO: 242376 - RNA, 32 nt, Homo Sapiens
cauaccaaaaauaguaagaaaauaugcaaaca

SEQ ID NO: 242377 - RNA, 32 nt, Homo Sapiens
gcaggcuggggcuccgcuccccggcgggagcc

SEQ ID NO: 242378 - RNA, 32 nt, Homo Sapiens
ugcuuuuguaaaaacaugcugggugaugaaag

SEQ ID NO: 242379 - RNA, 31 nt, Homo Sapiens
uguuccaaggcccagaaccauucuguaagaa

SEQ ID NO: 242380 - RNA, 32 nt, Homo Sapiens
uauugaccaaaauguccuugugugguucauaa

SEQ ID NO: 242381 - RNA, 32 nt, Homo Sapiens
cauugauaauuucaccuguggaaguuuauccu

SEQ ID NO: 242382 - RNA, 32 nt, Homo Sapiens
auuggugagcccgacuccccagccucggugcc

SEQ ID NO: 242383 - RNA, 32 nt, Homo Sapiens
acugcaagccccaaggagccagcugaagccuc

SEQ ID NO: 242384 - RNA, 32 nt, Homo Sapiens
gaugccaagaugucuguaaaaugauuuuuucu

SEQ ID NO: 242385 - RNA, 32 nt, Homo Sapiens
ugucuuggggauguuuccccugucagcaagua

SEQ ID NO: 242386 - RNA, 32 nt, Homo Sapiens
agcacagauugugcuaaucucucuguuugaau

SEQ ID NO: 242387 - RNA, 32 nt, Homo Sapiens
uauuccucuccauuuucacuccuuccagccuc

SEQ ID NO: 242388 - RNA, 32 nt, Homo Sapiens
gcaagugaauacugaagauuucuuagucaguu

SEQ ID NO: 242389 - RNA, 32 nt, Homo Sapiens
uuauccauuccacuaagugacaaaaucccacu

SEQ ID NO: 242390 - RNA, 32 nt, Homo Sapiens
ucacaucuguuuucuucaguauuacuuaagau

SEQ ID NO: 242391 - RNA, 32 nt, Homo Sapiens
ugaagcaaggaaauaaauuuguuugaaaugac

SEQ ID NO: 242392 - RNA, 32 nt, Homo Sapiens
uagacuucauaguggagagaaacccuacaagu

SEQ ID NO: 242393 - RNA, 32 nt, Homo Sapiens
caaaaaaccaaauggaucuuguuccgcauagg

SEQ ID NO: 242394 - RNA, 32 nt, Homo Sapiens
cucaaauacuggauuguaaccaugugaugaag

SEQ ID NO: 242395 - RNA, 32 nt, Homo Sapiens
acagcacugucaacacugggccuuaggagacc

SEQ ID NO: 242396 - RNA, 32 nt, Homo Sapiens
uauaaccacguguaauuuuguggaaaugauau

SEQ ID NO: 242397 - RNA, 31 nt, Homo Sapiens
ggcacuaugagcgggggcgucuacggcggag

SEQ ID NO: 242398 - RNA, 32 nt, Homo Sapiens
cuguaaaguccuccuuguaggcuuuuuuaaag

SEQ ID NO: 242399 - RNA, 32 nt, Homo Sapiens
acauaaccuguacgaccuucugaugggcuuuc

SEQ ID NO: 242400 - RNA, 32 nt, Homo Sapiens
gauuugcuggacaaauuccaauaaaaaaugua

SEQ ID NO: 242401 - RNA, 32 nt, Homo Sapiens
gucucagcaugggcuuccagggcagcgauuga

SEQ ID NO: 242402 - RNA, 32 nt, Homo Sapiens
uuuuagaaaauauuccuuuuguaauacugaau

SEQ ID NO: 242403 - RNA, 32 nt, Homo Sapiens
aaguccagaguugcagacgcccugccccaacc

SEQ ID NO: 242404 - RNA, 32 nt, Homo Sapiens
caguguguuucaucuguuccggugccaagaau

SEQ ID NO: 242405 - RNA, 32 nt, Homo Sapiens
gaaagucaauacugauggggaagcuggacacu

SEQ ID NO: 242406 - RNA, 32 nt, Homo Sapiens
cuauuuuauuuuuuggugcuaauguaaauggu

SEQ ID NO: 242407 - RNA, 32 nt, Homo Sapiens
uauccuaauauagcaaaacaaacaaagcaaaa

SEQ ID NO: 242408 - RNA, 32 nt, Homo Sapiens
ccggacccggggguggggaggggagcacauug

SEQ ID NO: 242409 - RNA, 32 nt, Homo Sapiens
ccauuuuuacuuuuuugaaagagaauauaugg

SEQ ID NO: 242410 - RNA, 32 nt, Homo Sapiens
cugcuacauaaauuauugaagcuuuucagaau

SEQ ID NO: 242411 - RNA, 32 nt, Homo Sapiens
auuuaaguaguucagaguuaaagcuaaaacac

SEQ ID NO: 242412 - RNA, 32 nt, Homo Sapiens
cuuuuuaaaaauucaaauuuuagacauaucag

SEQ ID NO: 242413 - RNA, 32 nt, Homo Sapiens
acugucagaaauaggagagaucaucaaagcua

SEQ ID NO: 242414 - RNA, 32 nt, Homo Sapiens
agagccgcggcccugaccacgaccacaccaca

SEQ ID NO: 242415 - RNA, 32 nt, Homo Sapiens
uggcuguuauccacauuauacaaagaacauaa

SEQ ID NO: 242416 - RNA, 32 nt, Homo Sapiens
ccauauguuguccucguaagcaaggagauauu

SEQ ID NO: 242417 - RNA, 32 nt, Homo Sapiens
cuaaccagccacugcagcccuccagcucuggc

SEQ ID NO: 242418 - RNA, 32 nt, Homo Sapiens
gccaaucuuuccagcccuccccuaccgaccuc

SEQ ID NO: 242419 - RNA, 32 nt, Homo Sapiens
cagccaggguccagcugcagcccccgccaccc

SEQ ID NO: 242420 - RNA, 32 nt, Homo Sapiens
ggaaaugggagcauaugcugggaaaugggagc

SEQ ID NO: 242421 - RNA, 32 nt, Homo Sapiens
ggccgugugucugacaucccauaaaugugugu

SEQ ID NO: 242422 - RNA, 32 nt, Homo Sapiens
ggggguugagggugggacgguguccguguugu

SEQ ID NO: 242423 - RNA, 32 nt, Homo Sapiens
cuucaguucuuuggcucugauuccgugucugg

SEQ ID NO: 242424 - RNA, 32 nt, Homo Sapiens
uuuuuuuguaauuuauaccaacaacacuuuua

SEQ ID NO: 242425 - RNA, 32 nt, Homo Sapiens
cagcggcagcagcagcagcagcagcaguuugu

SEQ ID NO: 242426 - RNA, 32 nt, Homo Sapiens
uagccaucugggggaggauguaccucacacca

SEQ ID NO: 242427 - RNA, 32 nt, Homo Sapiens
auccgcccaccucgggcugaccccaccuccuc

SEQ ID NO: 242428 - RNA, 32 nt, Homo Sapiens
cgcggcccaagcccggcaggagugcggaaccg

SEQ ID NO: 242429 - RNA, 32 nt, Homo Sapiens
augacaaggugaugcagaugugaccuaggaug

SEQ ID NO: 242430 - RNA, 32 nt, Homo Sapiens
agaaggggcuccugggugucuguauacacgcc

SEQ ID NO: 242431 - RNA, 32 nt, Homo Sapiens
acccaggcuggcugucucccaagccuguguuu

SEQ ID NO: 242432 - RNA, 32 nt, Homo Sapiens
agaaucacuugacgccaagaguucgagaccag

SEQ ID NO: 242433 - RNA, 32 nt, Homo Sapiens
gcgauggcucgagcucgggcgguggcggcggu

SEQ ID NO: 242434 - RNA, 32 nt, Homo Sapiens
agccgagauugugccacugcacuccagccuug

SEQ ID NO: 242435 - RNA, 31 nt, Homo Sapiens
ggaaagggaagcaggguaggaguccuucuga

SEQ ID NO: 242436 - RNA, 32 nt, Homo Sapiens
gccugcaggcccggcgcggggucgcccugcuc

SEQ ID NO: 242437 - RNA, 32 nt, Homo Sapiens
acaggucgccagugacuucacacacaccucau

SEQ ID NO: 242438 - RNA, 32 nt, Homo Sapiens
gaggugaugaagaucuuaauuuccuugauuug

SEQ ID NO: 242439 - RNA, 32 nt, Homo Sapiens
cagcgugcgagcucagaucagcguggggugga

SEQ ID NO: 242440 - RNA, 32 nt, Homo Sapiens
guaugugcagaucccggccccugccacccagc

SEQ ID NO: 242441 - RNA, 32 nt, Homo Sapiens
uacacauucccucuccuuggccgaagaauuaa

SEQ ID NO: 242442 - RNA, 31 nt, Homo Sapiens
cuugcucuugguaaaauauagaguggucagu

SEQ ID NO: 242443 - RNA, 32 nt, Homo Sapiens
cuaaccccgggcggguggcagguggagguguc

SEQ ID NO: 242444 - RNA, 32 nt, Homo Sapiens
aaggccuagucccagggaaaacauuuuguaga

SEQ ID NO: 242445 - RNA, 32 nt, Homo Sapiens
ggcucugaaguaccaugagccuguagaacuga

SEQ ID NO: 242446 - RNA, 32 nt, Homo Sapiens
gcaucucccacacaagacccaaguagcugcua

SEQ ID NO: 242447 - RNA, 32 nt, Homo Sapiens
gcaguucaucuuccucccuguguacuuuccau

SEQ ID NO: 242448 - RNA, 32 nt, Homo Sapiens
acaaucagccauccucgucugcucuccucucu

SEQ ID NO: 242449 - RNA, 32 nt, Homo Sapiens
auggguccuagguccaggauccaagaaccaca

SEQ ID NO: 242450 - RNA, 32 nt, Homo Sapiens
cccgaaggcguccuugaggagcauacggaacu

SEQ ID NO: 242451 - RNA, 32 nt, Homo Sapiens
ugugacuagacagaaggagagaaggcuggagg

SEQ ID NO: 242452 - RNA, 32 nt, Homo Sapiens
cuaaagagaaggaccugugaaacuacugaggc

SEQ ID NO: 242453 - RNA, 32 nt, Homo Sapiens
gugggcagugcuggaggcucugugugugcgug

SEQ ID NO: 242454 - RNA, 32 nt, Homo Sapiens
gccuggauccccagccucugccaacggccccg

SEQ ID NO: 242455 - RNA, 32 nt, Homo Sapiens
cccauguacaggagggagggccaggcacagcu

SEQ ID NO: 242456 - RNA, 32 nt, Homo Sapiens
guagcuuugauguggaacaggggcccugggca

SEQ ID NO: 242457 - RNA, 32 nt, Homo Sapiens
aaauagggguauagcuauauuuuuuguaauuu

SEQ ID NO: 242458 - RNA, 32 nt, Homo Sapiens
gugagcucccuccucacccccaggcagggaag

SEQ ID NO: 242459 - RNA, 32 nt, Homo Sapiens
gacaugaacgccgccucggcgccggcggugca

SEQ ID NO: 242460 - RNA, 32 nt, Homo Sapiens
ccuguuugcauccccaggacucauggaacuua

SEQ ID NO: 242461 - RNA, 32 nt, Homo Sapiens
agaucgaggcugccucccccucucagccggca

SEQ ID NO: 242462 - RNA, 32 nt, Homo Sapiens
uguucgccuccuuucuccuuccuuccaaaaua

SEQ ID NO: 242463 - RNA, 32 nt, Homo Sapiens
guccccagcacuguccccauggagcugguggc

SEQ ID NO: 242464 - RNA, 32 nt, Homo Sapiens
gccugggcuggcaagagcugccgccggugcug

SEQ ID NO: 242465 - RNA, 32 nt, Homo Sapiens
cagcagccgccuccugccccccgugcgcccua

SEQ ID NO: 242466 - RNA, 32 nt, Homo Sapiens
uuuuaagugucuguggaaaauguuuuguccuu

SEQ ID NO: 242467 - RNA, 32 nt, Homo Sapiens
gucacucucucggguuguuacucuguagcuuc

SEQ ID NO: 242468 - RNA, 31 nt, Homo Sapiens
ggcccccucaaugauuuucuuguuuguucug

SEQ ID NO: 242469 - RNA, 32 nt, Homo Sapiens
auguugucccacugccuauuaauagaacaagu

SEQ ID NO: 242470 - RNA, 32 nt, Homo Sapiens
caguagagggucaugcagacaaggaagaaaac

SEQ ID NO: 242471 - RNA, 32 nt, Homo Sapiens
aguugcacacugggcauuuucuuggcuggcaa

SEQ ID NO: 242472 - RNA, 32 nt, Homo Sapiens
cagcaauaaaagaaacaaaucauucgugcaac

SEQ ID NO: 242473 - RNA, 32 nt, Homo Sapiens
gguuugcuguucuucgggaacuugcuuccuuu

SEQ ID NO: 242474 - RNA, 32 nt, Homo Sapiens
cgcccccuuucugcccugggggcccaggaugu

SEQ ID NO: 242475 - RNA, 32 nt, Homo Sapiens
aguagaacuucauggaggaacacggagugacc

SEQ ID NO: 242476 - RNA, 32 nt, Homo Sapiens
ugcccaggccccacacagucuucaaaggucug

SEQ ID NO: 242477 - RNA, 32 nt, Homo Sapiens
cagaugccaaaauacauggaugcccaaguccu

SEQ ID NO: 242478 - RNA, 32 nt, Homo Sapiens
aucaucagccacucagcagcuugauucucucc

SEQ ID NO: 242479 - RNA, 32 nt, Homo Sapiens
caggggcggggacgaggcucgggcugugcugg

SEQ ID NO: 242480 - RNA, 32 nt, Homo Sapiens
aaaucugcaauauauaaagagcuccuacaaau

SEQ ID NO: 242481 - RNA, 32 nt, Homo Sapiens
gauuaaaaugaaggcuuuaaucagcauuguaa

SEQ ID NO: 242482 - RNA, 32 nt, Homo Sapiens
gguggggaggauaaagggagcgugccuccuug

SEQ ID NO: 242483 - RNA, 32 nt, Homo Sapiens
auugugcucuucugcuggcauuuccuguugac

SEQ ID NO: 242484 - RNA, 32 nt, Homo Sapiens
aucaccacaaaauaaaaguguagaaaaugcuu

SEQ ID NO: 242485 - RNA, 32 nt, Homo Sapiens
aagauggguauacguuguucuuuacguuguuc

SEQ ID NO: 242486 - RNA, 32 nt, Homo Sapiens
acagacaccuuuguauguuccuuguauguucc

SEQ ID NO: 242487 - RNA, 32 nt, Homo Sapiens
caucugcgauugcauuuuuccuguuuuaacaa

SEQ ID NO: 242488 - RNA, 32 nt, Homo Sapiens
guugcucgcccacagggcugccucagauuuug

SEQ ID NO: 242489 - RNA, 32 nt, Homo Sapiens
aaaugaaauauuagaaauggcuguauauucca

SEQ ID NO: 242490 - RNA, 32 nt, Homo Sapiens
gggcacuggugcccccagccucuccaaccccc

SEQ ID NO: 242491 - RNA, 32 nt, Homo Sapiens
uuugagaucuaaaaauaacuguaauuauuuga

SEQ ID NO: 242492 - RNA, 32 nt, Homo Sapiens
acuaagaggcccagcccucagaaacccuucag

SEQ ID NO: 242493 - RNA, 32 nt, Homo Sapiens
uugauuacugaaucccuacacucaaacuauag

SEQ ID NO: 242494 - RNA, 32 nt, Homo Sapiens
caagcccucaaggggaagcauuuucuccugga

SEQ ID NO: 242495 - RNA, 32 nt, Homo Sapiens
agguccccuccucuccuagcuucccgccucug

SEQ ID NO: 242496 - RNA, 32 nt, Homo Sapiens
auguucugagaaaagaucgaaaauauuuaaca

SEQ ID NO: 242497 - RNA, 32 nt, Homo Sapiens
gaaugaauauuuugugaaucuuucuuaaaagc

SEQ ID NO: 242498 - RNA, 32 nt, Homo Sapiens
gucucccugccagcggagugcugggccgagga

SEQ ID NO: 242499 - RNA, 32 nt, Homo Sapiens
uuuuuaaguucaauuuguuuuuauugagguaa

SEQ ID NO: 242500 - RNA, 32 nt, Homo Sapiens
ugggcugggggcggggaccaggcggggcaggg

SEQ ID NO: 242501 - RNA, 32 nt, Homo Sapiens
cccccucugaccaggcccucacugaccaggcc

SEQ ID NO: 242502 - RNA, 30 nt, Homo Sapiens
uguuaugucuguguaucagcuagcuguugc

SEQ ID NO: 242503 - RNA, 32 nt, Homo Sapiens
gggcuacuuuguaucuguaugugaucccucua

SEQ ID NO: 242504 - RNA, 32 nt, Homo Sapiens
uagaacugugcugaagacaucuguaagacuau

SEQ ID NO: 242505 - RNA, 32 nt, Homo Sapiens
aauaguaauacauuuagcauucuuuaaagagu

SEQ ID NO: 242506 - RNA, 32 nt, Homo Sapiens
gcgcgcacaguggggugacaggcggccuggcu

SEQ ID NO: 242507 - RNA, 32 nt, Homo Sapiens
gaccacccucugcuaccacaguaaccagcaga

SEQ ID NO: 242508 - RNA, 32 nt, Homo Sapiens
acuuuggaauugacugaaaaguaaaugggggu

SEQ ID NO: 242509 - RNA, 32 nt, Homo Sapiens
aaaaggguguauaguguucacaaacugugaaa

SEQ ID NO: 242510 - RNA, 32 nt, Homo Sapiens
auccgacagagcagcucuggcuuugccagccu

SEQ ID NO: 242511 - RNA, 32 nt, Homo Sapiens
accuugagguuccugaugugcgggcgguagac

SEQ ID NO: 242512 - RNA, 32 nt, Homo Sapiens
ccugagcugcaugcgccaccauuuuuggcagc

SEQ ID NO: 242513 - RNA, 32 nt, Homo Sapiens
ucaauagaauaaaagugaccgacugucaaaaa

SEQ ID NO: 242514 - RNA, 32 nt, Homo Sapiens
gccccagagagccugucugugcauccugaacc

SEQ ID NO: 242515 - RNA, 32 nt, Homo Sapiens
cuaguugaaaauaaaguauauuuuuucuaaaa

SEQ ID NO: 242516 - RNA, 32 nt, Homo Sapiens
uguucauuuuuacuuuuucuuccacaagccuc

SEQ ID NO: 242517 - RNA, 32 nt, Homo Sapiens
cuggaggagcugugggcagaccgaccccagcc

SEQ ID NO: 242518 - RNA, 32 nt, Homo Sapiens
uauauacaauaauaguuuuucuuacaacuaag

SEQ ID NO: 242519 - RNA, 31 nt, Homo Sapiens
aaucugcuugcugcugcuucagugugguggc

SEQ ID NO: 242520 - RNA, 32 nt, Homo Sapiens
uaucccucuuccaccaucuccucccaaugugu

SEQ ID NO: 242521 - RNA, 32 nt, Homo Sapiens
caucaggaggggcugcuguggacaguugcaca

SEQ ID NO: 242522 - RNA, 32 nt, Homo Sapiens
agccaaaauuuugagugcucauuugaaaacac

SEQ ID NO: 242523 - RNA, 32 nt, Homo Sapiens
gcaggcuccgccucccggguucccgccauucu

SEQ ID NO: 242524 - RNA, 32 nt, Homo Sapiens
aauuccacauaaaaucaggaaaaaagaaagaa

SEQ ID NO: 242525 - RNA, 32 nt, Homo Sapiens
uuuuaaagcacaccccacccccugcacccgag

SEQ ID NO: 242526 - RNA, 32 nt, Homo Sapiens
uacgguuguguguuuaaaaugucucucucuca

SEQ ID NO: 242527 - RNA, 32 nt, Homo Sapiens
ucugccucacacuggccucucuaggcccagcu

SEQ ID NO: 242528 - RNA, 32 nt, Homo Sapiens
ugcauggcacgggaugagucccugcccugugc

SEQ ID NO: 242529 - RNA, 32 nt, Homo Sapiens
gcuggggucagaaugucauacccaggcuaucc

SEQ ID NO: 242530 - RNA, 32 nt, Homo Sapiens
ccagcgcucugcaaccggcucuaguggucaag

SEQ ID NO: 242531 - RNA, 32 nt, Homo Sapiens
agaggcggaaauaccggagggcuuugccuugc

SEQ ID NO: 242532 - RNA, 32 nt, Homo Sapiens
gucagcugaggguggcagcucagaagcgaggc

SEQ ID NO: 242533 - RNA, 32 nt, Homo Sapiens
uauuaaauucuuuuccuauuaaaguacagauc

SEQ ID NO: 242534 - RNA, 32 nt, Homo Sapiens
uaaguacaaauaaacaauauauugacuaucaa

SEQ ID NO: 242535 - RNA, 32 nt, Homo Sapiens
uggaaacuuccacuuccccaaccucagagccu

SEQ ID NO: 242536 - RNA, 32 nt, Homo Sapiens
uuaucuuuucuuccuugguuuuguucucuugg

SEQ ID NO: 242537 - RNA, 32 nt, Homo Sapiens
cagcucccaagcccuguggcacccgcaguugu

SEQ ID NO: 242538 - RNA, 26 nt, Homo Sapiens
cauggccaccgcccccucuuaucccg

SEQ ID NO: 242539 - RNA, 32 nt, Homo Sapiens
gaagggaaaaagagagggaagaacuacacuaa

SEQ ID NO: 242540 - RNA, 32 nt, Homo Sapiens
cauggacacuugggaaaggaaacuugauuaua

SEQ ID NO: 242541 - RNA, 32 nt, Homo Sapiens
uccggagcuugacuucuuggaccuccuccccc

SEQ ID NO: 242542 - RNA, 32 nt, Homo Sapiens
uuuccggggcagccuuucagaugcggcagaca

SEQ ID NO: 242543 - RNA, 32 nt, Homo Sapiens
uugugugucugcucuggaccacuuccuugcuu

SEQ ID NO: 242544 - RNA, 32 nt, Homo Sapiens
uggguggccuuccgcagcucagcccucuuccu

SEQ ID NO: 242545 - RNA, 32 nt, Homo Sapiens
cucauuucucauguuauccggaccuugaagau

SEQ ID NO: 242546 - RNA, 32 nt, Homo Sapiens
gcgcucgggcucgagcuccgcgcacucccucc

SEQ ID NO: 242547 - RNA, 32 nt, Homo Sapiens
caugggauucuauuaaaagcugcaugauuccu

SEQ ID NO: 242548 - RNA, 32 nt, Homo Sapiens
cccagaccaacccugggaccuauacagaacag

SEQ ID NO: 242549 - RNA, 32 nt, Homo Sapiens
ccguggguguggcggagcgcgcggugcaugga

SEQ ID NO: 242550 - RNA, 32 nt, Homo Sapiens
cacucuguucuucacuccuaccaaauacuuuc

SEQ ID NO: 242551 - RNA, 32 nt, Homo Sapiens
cccaccugcuaagguagcugccccuaaucuaa

SEQ ID NO: 242552 - RNA, 32 nt, Homo Sapiens
ggagggggcgaccacaagauggcggaccucuc

SEQ ID NO: 242553 - RNA, 32 nt, Homo Sapiens
gaggcagcagcugcgcagccucauggaguuuu

SEQ ID NO: 242554 - RNA, 32 nt, Homo Sapiens
gugcuaaaaaauaccauguaaauucucccuac

SEQ ID NO: 242555 - RNA, 32 nt, Homo Sapiens
agugaacugaaugagugugugcagguucaacu

SEQ ID NO: 242556 - RNA, 32 nt, Homo Sapiens
ucuggcuagagagacuaucuccugucaucacg

SEQ ID NO: 242557 - RNA, 32 nt, Homo Sapiens
cgcaggcccgcggcgcccucugcaggccacag

SEQ ID NO: 242558 - RNA, 32 nt, Homo Sapiens
gguuuuauuucugaaacaauuaauugagcagc

SEQ ID NO: 242559 - RNA, 32 nt, Homo Sapiens
ggcgauuuucccuucugucagaucuugaugaa

SEQ ID NO: 242560 - RNA, 32 nt, Homo Sapiens
aaaugaaccuuuuuuuuuuuuacaaaaaacaa

SEQ ID NO: 242561 - RNA, 30 nt, Homo Sapiens
acucaccaacuugccacauguucuagguuu

SEQ ID NO: 242562 - RNA, 32 nt, Homo Sapiens
cugcuaauaaaauuauauugaaacuguuuuau

SEQ ID NO: 242563 - RNA, 32 nt, Homo Sapiens
agauuugaaaacagugacauugcuugaucucu

SEQ ID NO: 242564 - RNA, 32 nt, Homo Sapiens
aggaggaaggguggagugggcgcaggcacgcc

SEQ ID NO: 242565 - RNA, 32 nt, Homo Sapiens
cagagucuggucugggucucauccgcgucacc

SEQ ID NO: 242566 - RNA, 32 nt, Homo Sapiens
uagccagucaacagaaggaagcaaaagauucu

SEQ ID NO: 242567 - RNA, 32 nt, Homo Sapiens
ccagcccgccuggccugagucaccagugaaac

SEQ ID NO: 242568 - RNA, 30 nt, Homo Sapiens
ggugaucgguguggcggcggcggcggcggc

SEQ ID NO: 242569 - RNA, 32 nt, Homo Sapiens
guaacuggauuuauuucuuaauauauuggaag

SEQ ID NO: 242570 - RNA, 32 nt, Homo Sapiens
cauuuuaaaaagaaaagcaaacaaagaaacaa

SEQ ID NO: 242571 - RNA, 32 nt, Homo Sapiens
cucagccuuccauuagcaaggaugucacugcu

SEQ ID NO: 242572 - RNA, 32 nt, Homo Sapiens
uucccuuaaugguguuguuuucuauuuguucu

SEQ ID NO: 242573 - RNA, 32 nt, Homo Sapiens
ccgcagccuccacgcggcccaggccagccugc

SEQ ID NO: 242574 - RNA, 32 nt, Homo Sapiens
cuuugcaggcccagcccaccccgcaucacauc

SEQ ID NO: 242575 - RNA, 32 nt, Homo Sapiens
augcugaagcucacagaaugggcuucuugccu

SEQ ID NO: 242576 - RNA, 32 nt, Homo Sapiens
ucuggaaggaacaccgcaauggcugcgcaggg

SEQ ID NO: 242577 - RNA, 32 nt, Homo Sapiens
gacgcucgugaccaccaccucccucaaaccuu

SEQ ID NO: 242578 - RNA, 32 nt, Homo Sapiens
uuccuuuuaaagaaacaaaaaucaaacuuuac

SEQ ID NO: 242579 - RNA, 32 nt, Homo Sapiens
cagcuaauuuuuguauuuuuguagagaugggg

SEQ ID NO: 242580 - RNA, 32 nt, Homo Sapiens
acuucaaacacuggcaccuugggucucaccca

SEQ ID NO: 242581 - RNA, 32 nt, Homo Sapiens
ggccaaaaucugcaaguaaucucuagccacac

SEQ ID NO: 242582 - RNA, 32 nt, Homo Sapiens
aguggucuuacuauauacuucucuagaagaga

SEQ ID NO: 242583 - RNA, 32 nt, Homo Sapiens
cgugguuuuugugaagacacgugggcgggaug

SEQ ID NO: 242584 - RNA, 32 nt, Homo Sapiens
gacaccguggccugggcuuggcccgcggccug

SEQ ID NO: 242585 - RNA, 32 nt, Homo Sapiens
cuucaaaaaaucaauuuguucuuagaaccugg

SEQ ID NO: 242586 - RNA, 32 nt, Homo Sapiens
ugugcugcugcagcugcugauaagccucaaac

SEQ ID NO: 242587 - RNA, 32 nt, Homo Sapiens
guuuuuuuuuuuuuuucuuuuuauucuacuug

SEQ ID NO: 242588 - RNA, 32 nt, Homo Sapiens
cucucggguccugcccaugccucccccgcucc

SEQ ID NO: 242589 - RNA, 32 nt, Homo Sapiens
uauacuuaaugaugauaaguucaaaucagcug

SEQ ID NO: 242590 - RNA, 32 nt, Homo Sapiens
accuggaagcuugugcccagcccugcccugaa

SEQ ID NO: 242591 - RNA, 32 nt, Homo Sapiens
agucaggccuuugcacuucucauucucauagg

SEQ ID NO: 242592 - RNA, 32 nt, Homo Sapiens
guugggcugugacuuuuccuccugcccucagc

SEQ ID NO: 242593 - RNA, 32 nt, Homo Sapiens
aauuacauggauacuuuuagauauauuuaaaa

SEQ ID NO: 242594 - RNA, 32 nt, Homo Sapiens
gcccacucugaacaucuuccuauauuguuauu

SEQ ID NO: 242595 - RNA, 32 nt, Homo Sapiens
cucuccagaucuguuuaccaucauucaggaaa

SEQ ID NO: 242596 - RNA, 32 nt, Homo Sapiens
augccuaauugugagagaaucaauugcugaaa

SEQ ID NO: 242597 - RNA, 32 nt, Homo Sapiens
uaaacauugcuguucacuagauuaucuuaaca

SEQ ID NO: 242598 - RNA, 32 nt, Homo Sapiens
cagagagugcggggggcgacagucucggcuua

SEQ ID NO: 242599 - RNA, 25 nt, Homo Sapiens
uggggcugguuugacuuuaauuggu

SEQ ID NO: 242600 - RNA, 32 nt, Homo Sapiens
ggcgaguucccucgggccccagcuccgccucu

SEQ ID NO: 242601 - RNA, 32 nt, Homo Sapiens
cgcucaauaauagcuuuuauuaucauguucgg

SEQ ID NO: 242602 - RNA, 32 nt, Homo Sapiens
guuuauggggaaaauaccucauuagugugaau

SEQ ID NO: 242603 - RNA, 32 nt, Homo Sapiens
cugcugucuucagauuuucuuacacuuuugug

SEQ ID NO: 242604 - RNA, 32 nt, Homo Sapiens
ugaccaguugucuuagaaauggucaauuggau

SEQ ID NO: 242605 - RNA, 32 nt, Homo Sapiens
cccaaaacccauugucuuuacuccaugaaggg

SEQ ID NO: 242606 - RNA, 30 nt, Homo Sapiens
ggcggcucugguggcggcgguggaggcuga

SEQ ID NO: 242607 - RNA, 32 nt, Homo Sapiens
ugaaaugcugcauuuuaauuuuaaccaaaaca

SEQ ID NO: 242608 - RNA, 32 nt, Homo Sapiens
cuguccgcgggcccagcucccgccccgucccu

SEQ ID NO: 242609 - RNA, 32 nt, Homo Sapiens
cgagccagcgagagggcgcgagcggcggcgcu

SEQ ID NO: 242610 - RNA, 32 nt, Homo Sapiens
guauaaugaagaggaugauacugugucuagcu

SEQ ID NO: 242611 - RNA, 32 nt, Homo Sapiens
gcugugcacugacggccagucuccgagcugug

SEQ ID NO: 242612 - RNA, 32 nt, Homo Sapiens
gaauuaaauggcagugcaaaauuucugagucu

SEQ ID NO: 242613 - RNA, 32 nt, Homo Sapiens
cguggucgcucucuccuccccgccaccccacg

SEQ ID NO: 242614 - RNA, 32 nt, Homo Sapiens
uccggguccauaagccuuuauuucauacaguc

SEQ ID NO: 242615 - RNA, 32 nt, Homo Sapiens
ugagguccauuuguaugcacacaaagaaaaga

SEQ ID NO: 242616 - RNA, 32 nt, Homo Sapiens
cagccugccacggaagacuggucugcagcucc

SEQ ID NO: 242617 - RNA, 32 nt, Homo Sapiens
caaaugccuucuauguuguuugcucuguagac

SEQ ID NO: 242618 - RNA, 32 nt, Homo Sapiens
uaauuccuccagagcuguuugcuggcuucagg

SEQ ID NO: 242619 - RNA, 32 nt, Homo Sapiens
ucuguagguaaaacuuuuauuuauuuuuuccc

SEQ ID NO: 242620 - RNA, 32 nt, Homo Sapiens
aucugggaagggaagggcuacugcagcuuuac

SEQ ID NO: 242621 - RNA, 32 nt, Homo Sapiens
ugagccagggauacaacaaaauacuagguaag

SEQ ID NO: 242622 - RNA, 32 nt, Homo Sapiens
auuugaaaucaucuauuuuuucacauggagca

SEQ ID NO: 242623 - RNA, 32 nt, Homo Sapiens
cuacucccaagagccugacacccaucccucug

SEQ ID NO: 242624 - RNA, 32 nt, Homo Sapiens
ggucuucccauggugguucagaauagaugagc

SEQ ID NO: 242625 - RNA, 32 nt, Homo Sapiens
gcugcuggagagccggccgcugcccccucguc

SEQ ID NO: 242626 - RNA, 32 nt, Homo Sapiens
ugcucugugugcccucccucacuugugggccc

SEQ ID NO: 242627 - RNA, 27 nt, Homo Sapiens
auggagugguucuucagcuacuggaug

SEQ ID NO: 242628 - RNA, 32 nt, Homo Sapiens
gcucugagaagcuuggccuggacaccugagcc

SEQ ID NO: 242629 - RNA, 32 nt, Homo Sapiens
gguguacagcaagcugugauucuugggaaaac

SEQ ID NO: 242630 - RNA, 32 nt, Homo Sapiens
ugagcuggagagaacccagauguuguuuauug

SEQ ID NO: 242631 - RNA, 32 nt, Homo Sapiens
gccagagcaagcucacauccagcuggcacuuc

SEQ ID NO: 242632 - RNA, 32 nt, Homo Sapiens
aaccaaggggagaggagaacuguuacagauga

SEQ ID NO: 242633 - RNA, 32 nt, Homo Sapiens
gggaccagugacuuggccuggaccucccgguc

SEQ ID NO: 242634 - RNA, 32 nt, Homo Sapiens
gacuuuugugcuuucauuuucuuaaugacuuu

SEQ ID NO: 242635 - RNA, 32 nt, Homo Sapiens
gaaccuagaaagauuguacaaugaauggugau

SEQ ID NO: 242636 - RNA, 32 nt, Homo Sapiens
uccaguuccgucaucaccccagcccaaacuga

SEQ ID NO: 242637 - RNA, 32 nt, Homo Sapiens
aggcuugcccagcugggaggccccacacgaaa

SEQ ID NO: 242638 - RNA, 32 nt, Homo Sapiens
gagguucuauuugauuacuaagcaaaaucugu

SEQ ID NO: 242639 - RNA, 29 nt, Homo Sapiens
gguuuucagggucguaggacgccguuggg

SEQ ID NO: 242640 - RNA, 32 nt, Homo Sapiens
acacccgcggcggcgagcugagggagcagucu

SEQ ID NO: 242641 - RNA, 32 nt, Homo Sapiens
gcugcccugccagguggagggugagccgccug

SEQ ID NO: 242642 - RNA, 32 nt, Homo Sapiens
gggaaggcggcgggcuauccgguccucggcug

SEQ ID NO: 242643 - RNA, 31 nt, Homo Sapiens
cugcgcccguggucucauagagccuggccug

SEQ ID NO: 242644 - RNA, 32 nt, Homo Sapiens
cuggccccgcuccagauccccccagcucucgg

SEQ ID NO: 242645 - RNA, 32 nt, Homo Sapiens
aauauauauucauaccauuuauuaaaucagaa

SEQ ID NO: 242646 - RNA, 32 nt, Homo Sapiens
ucgugcccggugccaggccucgugccugccca

SEQ ID NO: 242647 - RNA, 32 nt, Homo Sapiens
uucuuuaauaauaaugaaacuggcgaguaaaa

SEQ ID NO: 242648 - RNA, 32 nt, Homo Sapiens
gugccguguggaccggcggcgucuaccuggug

SEQ ID NO: 242649 - RNA, 32 nt, Homo Sapiens
uccuuuagagaaaaaauauuagugaagaagcc

SEQ ID NO: 242650 - RNA, 32 nt, Homo Sapiens
gccuccaagcuccccaggaaagcaguggcagc

SEQ ID NO: 242651 - RNA, 32 nt, Homo Sapiens
aaacagcaaagagcuuugugauuggguuugaa

SEQ ID NO: 242652 - RNA, 32 nt, Homo Sapiens
aauagagcaaaggauggaagauaauauagacu

SEQ ID NO: 242653 - RNA, 32 nt, Homo Sapiens
cccugggugcgcugaggccuggaggcgucuac

SEQ ID NO: 242654 - RNA, 32 nt, Homo Sapiens
uuccuuguguauauauuaaacacacccauaca

SEQ ID NO: 242655 - RNA, 32 nt, Homo Sapiens
caccuguaaucucggcacuuuggggggcugag

SEQ ID NO: 242656 - RNA, 32 nt, Homo Sapiens
uggcuaacaccuguaaucccagcacuuuggga

SEQ ID NO: 242657 - RNA, 32 nt, Homo Sapiens
ccgcacgggcugucuggguguccgccauccag

SEQ ID NO: 242658 - RNA, 31 nt, Homo Sapiens
auuauaaaugcaaaacagguucagauuucau

SEQ ID NO: 242659 - RNA, 32 nt, Homo Sapiens
cagagaagugcagcugcugcgacugugccagg

SEQ ID NO: 242660 - RNA, 32 nt, Homo Sapiens
uccugcagcgaggaugggagggggugcugagc

SEQ ID NO: 242661 - RNA, 32 nt, Homo Sapiens
cugccccaggacaagagcaagaaggacaucag

SEQ ID NO: 242662 - RNA, 32 nt, Homo Sapiens
cugcagggagcccuggugccagagaccuucuc

SEQ ID NO: 242663 - RNA, 32 nt, Homo Sapiens
cauuuacaugcucaguaaauguuuaggaggau

SEQ ID NO: 242664 - RNA, 32 nt, Homo Sapiens
guggagcagcgggggagccuuggccgaagaga

SEQ ID NO: 242665 - RNA, 32 nt, Homo Sapiens
uccgccucucaguacgcggagcgccggcgguc

SEQ ID NO: 242666 - RNA, 32 nt, Homo Sapiens
gcuucuuagaaucuuuagcuugauuucuguca

SEQ ID NO: 242667 - RNA, 32 nt, Homo Sapiens
cucuuuauaaaccauuuccaauguuaguauau

SEQ ID NO: 242668 - RNA, 32 nt, Homo Sapiens
ggaggcuggggccagccuggucucccaggccu

SEQ ID NO: 242669 - RNA, 29 nt, Homo Sapiens
gaagaugagaaggugcucuuacucaguua

SEQ ID NO: 242670 - RNA, 32 nt, Homo Sapiens
ggaacugugaauguacauagcguugaguuaaa

SEQ ID NO: 242671 - RNA, 32 nt, Homo Sapiens
agacuucugugaugggggcgcggacaccaccc

SEQ ID NO: 242672 - RNA, 32 nt, Homo Sapiens
uguaguuuaagugcaaagaaacaguagugguu

SEQ ID NO: 242673 - RNA, 32 nt, Homo Sapiens
uucuuuuuuuuggggggggcggggcgggggag

SEQ ID NO: 242674 - RNA, 31 nt, Homo Sapiens
gcagccuauagguccgcaggccaguccuccc

SEQ ID NO: 242675 - RNA, 32 nt, Homo Sapiens
ggggccugucgacgggcccucgugugggaagc

SEQ ID NO: 242676 - RNA, 32 nt, Homo Sapiens
ccuuccugucuucgcagaggaguccucgcgug

SEQ ID NO: 242677 - RNA, 32 nt, Homo Sapiens
cacagcggguucuugaggaaggcaggggguac

SEQ ID NO: 242678 - RNA, 32 nt, Homo Sapiens
cacccuacuuugauuuccuggugcgaguuuug

SEQ ID NO: 242679 - RNA, 32 nt, Homo Sapiens
uugggagcugagccacaccuccccuuauaacu

SEQ ID NO: 242680 - RNA, 32 nt, Homo Sapiens
gguaauugcauucuucuucacuuuuugaagac

SEQ ID NO: 242681 - RNA, 31 nt, Homo Sapiens
ugccgcugcaccugccugccgcugcaggaaa

SEQ ID NO: 242682 - RNA, 32 nt, Homo Sapiens
uuuuuacuuaauaucacacaguuaaacugucc

SEQ ID NO: 242683 - RNA, 32 nt, Homo Sapiens
cccagaggccccagcugccccuuccuccaggc

SEQ ID NO: 242684 - RNA, 32 nt, Homo Sapiens
guagguggaaucaguuaauguuuugagaaacc

SEQ ID NO: 242685 - RNA, 32 nt, Homo Sapiens
ccaccaugaugaugacacagccauggacacac

SEQ ID NO: 242686 - RNA, 32 nt, Homo Sapiens
acagcuuauugauuuagguaacuauugugucu

SEQ ID NO: 242687 - RNA, 32 nt, Homo Sapiens
acugggcagcgggcauccuacuuccaaggcua

SEQ ID NO: 242688 - RNA, 32 nt, Homo Sapiens
agaaccacguuuuauguaaacauaccagacau

SEQ ID NO: 242689 - RNA, 32 nt, Homo Sapiens
ugaagaagaugaugacgaagaucacgaugaug

SEQ ID NO: 242690 - RNA, 32 nt, Homo Sapiens
ccgguugcuugcugucccagcggcgcccccuc

SEQ ID NO: 242691 - RNA, 32 nt, Homo Sapiens
uccccacacugucccuggccaagcccugccca

SEQ ID NO: 242692 - RNA, 32 nt, Homo Sapiens
guguucaacuauccucuuuugccuucuuuugg

SEQ ID NO: 242693 - RNA, 32 nt, Homo Sapiens
guaaauugauaaagacauuugugcauagcuca

SEQ ID NO: 242694 - RNA, 32 nt, Homo Sapiens
agucuuuaaguacaccucagcaggaacagccu

SEQ ID NO: 242695 - RNA, 32 nt, Homo Sapiens
gucaccucugccuugcccuuuaacucaacccg

SEQ ID NO: 242696 - RNA, 32 nt, Homo Sapiens
agcacccugcagggggacccuacggcagagcc

SEQ ID NO: 242697 - RNA, 32 nt, Homo Sapiens
auccuagacgucaucaccuacuacauccgcau

SEQ ID NO: 242698 - RNA, 32 nt, Homo Sapiens
cguccccgcccggcgccacgccgccuccucug

SEQ ID NO: 242699 - RNA, 32 nt, Homo Sapiens
cccuuaaggucuuuaagggaggaaguguaaua

SEQ ID NO: 242700 - RNA, 32 nt, Homo Sapiens
cgagagauacaugaaggacauaaaaacguuuu

SEQ ID NO: 242701 - RNA, 32 nt, Homo Sapiens
gcgggcaugggcgggggcccgagcaggggugg

SEQ ID NO: 242702 - RNA, 32 nt, Homo Sapiens
gagcuaggcuucaggaggcccgcguccuacgc

SEQ ID NO: 242703 - RNA, 32 nt, Homo Sapiens
ggcaagaggaagaaugugggggugaagaggua

SEQ ID NO: 242704 - RNA, 32 nt, Homo Sapiens
cauggguagcccccagggcagcucccuacagc

SEQ ID NO: 242705 - RNA, 32 nt, Homo Sapiens
cagaacuagugauucuagacauuuugcauggc

SEQ ID NO: 242706 - RNA, 32 nt, Homo Sapiens
ucucccgcggcgcuucugcaggaggcagcgac

SEQ ID NO: 242707 - RNA, 32 nt, Homo Sapiens
caguuggcgagggguggcuccugaggguuuuu

SEQ ID NO: 242708 - RNA, 32 nt, Homo Sapiens
gucagaggacccaaaacaaaacuuagagugau

SEQ ID NO: 242709 - RNA, 32 nt, Homo Sapiens
cuguggugcagggcauguuucaaaguuuaguc

SEQ ID NO: 242710 - RNA, 32 nt, Homo Sapiens
cacaacaucacgaugacaaacacacauuacac

SEQ ID NO: 242711 - RNA, 32 nt, Homo Sapiens
ugcuucauuuuuguuuaaaaagggauacugau

SEQ ID NO: 242712 - RNA, 32 nt, Homo Sapiens
gcacagcgacagguucuggagagagggugggu

SEQ ID NO: 242713 - RNA, 32 nt, Homo Sapiens
cuuuucauuacaucagauauauugcccuguaa

SEQ ID NO: 242714 - RNA, 32 nt, Homo Sapiens
accucuaugugauuauuuuucuuaauuguuau

SEQ ID NO: 242715 - RNA, 32 nt, Homo Sapiens
ugaacugaacagagccuguuccgugucuuggc

SEQ ID NO: 242716 - RNA, 32 nt, Homo Sapiens
cagaagaaaggaaacaaugugauucaagauau

SEQ ID NO: 242717 - RNA, 32 nt, Homo Sapiens
uuauuuucaguagacauagaaaacaaugugaa

SEQ ID NO: 242718 - RNA, 32 nt, Homo Sapiens
uuagcccuaaaaugugacaagagaauugguuu

SEQ ID NO: 242719 - RNA, 32 nt, Homo Sapiens
aaaaugauaaugcugauaaaacagacagaacu

SEQ ID NO: 242720 - RNA, 32 nt, Homo Sapiens
ggugaggcugggucugugcugcuggccgacau

SEQ ID NO: 242721 - RNA, 32 nt, Homo Sapiens
cuuugcaggcugaagcugacauuauuaccaaa

SEQ ID NO: 242722 - RNA, 32 nt, Homo Sapiens
uggggugcagagggcugcuugcaauccuguuu

SEQ ID NO: 242723 - RNA, 32 nt, Homo Sapiens
cuacuguagcaaccugaaauuaacucagacac

SEQ ID NO: 242724 - RNA, 32 nt, Homo Sapiens
cacuuagauccacuuccccauauacuuucaag

SEQ ID NO: 242725 - RNA, 32 nt, Homo Sapiens
gaaugguaauaaaauauuaaauagaccuuaua

SEQ ID NO: 242726 - RNA, 32 nt, Homo Sapiens
acaccugcaccuguguccuccccuccccggcc

SEQ ID NO: 242727 - RNA, 32 nt, Homo Sapiens
aucuucaaugaauacuggucucuuuccaaagc

SEQ ID NO: 242728 - RNA, 32 nt, Homo Sapiens
gauagauaucuauuuuuccccuguggauuagc

SEQ ID NO: 242729 - RNA, 32 nt, Homo Sapiens
uggaaggaaaacaaaaaacaaaaacuaaaaac

SEQ ID NO: 242730 - RNA, 32 nt, Homo Sapiens
aauauuauuaaaaauauagggccuuauuuaag

SEQ ID NO: 242731 - RNA, 32 nt, Homo Sapiens
ucaaccccuucgcuccugugucuugcaauggc

SEQ ID NO: 242732 - RNA, 32 nt, Homo Sapiens
uucggugccagcugcgugggcuccagcuucga

SEQ ID NO: 242733 - RNA, 32 nt, Homo Sapiens
cccggcccgucgccgucuccgcgcucgcagcg

SEQ ID NO: 242734 - RNA, 32 nt, Homo Sapiens
accuaaggugauggggaacuccauucagauaa

SEQ ID NO: 242735 - RNA, 32 nt, Homo Sapiens
uaucaguaucacgauuugcaggauucccuucu

SEQ ID NO: 242736 - RNA, 32 nt, Homo Sapiens
cucgauguagucauuccucauuuuauacacau

SEQ ID NO: 242737 - RNA, 30 nt, Homo Sapiens
gacgccgcugugacgccgccggcgggaagg

SEQ ID NO: 242738 - RNA, 32 nt, Homo Sapiens
uuauucacaacacuaaaggaaaguuucuucaa

SEQ ID NO: 242739 - RNA, 32 nt, Homo Sapiens
ucgcaccacucugggccugcugcccacacuga

SEQ ID NO: 242740 - RNA, 32 nt, Homo Sapiens
gcccuugccguggccggagccgagcggcgcau

SEQ ID NO: 242741 - RNA, 32 nt, Homo Sapiens
uucuuuggcauacuuuguagacuuugaccacu

SEQ ID NO: 242742 - RNA, 32 nt, Homo Sapiens
aaaugauaaagaacagaaaacauuucaauaua

SEQ ID NO: 242743 - RNA, 32 nt, Homo Sapiens
gacgucccuuuuuucucugaguaucuccucgc

SEQ ID NO: 242744 - RNA, 32 nt, Homo Sapiens
aucaccugccccaccugucacauuccucccug

SEQ ID NO: 242745 - RNA, 26 nt, Homo Sapiens
aguuuaauuaaaccucuuucuuuugu

SEQ ID NO: 242746 - RNA, 32 nt, Homo Sapiens
uuuacaguggacauuagccagaucauuuucuu

SEQ ID NO: 242747 - RNA, 32 nt, Homo Sapiens
gcuggagggauuaggccaggauggcccagcug

SEQ ID NO: 242748 - RNA, 32 nt, Homo Sapiens
gagucacccaaguucaggcaugggcgagccua

SEQ ID NO: 242749 - RNA, 32 nt, Homo Sapiens
ucauauguauaugucauaugacuuuauaaaau

SEQ ID NO: 242750 - RNA, 32 nt, Homo Sapiens
aacuguugauaaauuauugugauuguuuuaaa

SEQ ID NO: 242751 - RNA, 32 nt, Homo Sapiens
gcaugaagaguacugcauuaauuuaauuuaau

SEQ ID NO: 242752 - RNA, 32 nt, Homo Sapiens
auuguauuugaaaaugacagagcuggagaguu

SEQ ID NO: 242753 - RNA, 32 nt, Homo Sapiens
caugagaaaaacuguucuuuugcaauaauaau

SEQ ID NO: 242754 - RNA, 32 nt, Homo Sapiens
agcggccagggcccgcggggggcaccaccugu

SEQ ID NO: 242755 - RNA, 32 nt, Homo Sapiens
uuauugaaaaagacuuaagggaugauuagacu

SEQ ID NO: 242756 - RNA, 32 nt, Homo Sapiens
gacccauccccauccggcgucacuauggagga

SEQ ID NO: 242757 - RNA, 28 nt, Homo Sapiens
cauuggaaagauuuacagugauucugaa

SEQ ID NO: 242758 - RNA, 32 nt, Homo Sapiens
gagaggccaggccugguggcucacgccuguaa

SEQ ID NO: 242759 - RNA, 32 nt, Homo Sapiens
ugcuugugaaucaggacugaaugugaaaggga

SEQ ID NO: 242760 - RNA, 32 nt, Homo Sapiens
aauuaaucacuauguuuauaagguaguaucag

SEQ ID NO: 242761 - RNA, 32 nt, Homo Sapiens
guuuagguugguuuuuugaugucauaugucuc

SEQ ID NO: 242762 - RNA, 32 nt, Homo Sapiens
agcugcagggaagagcaguuccucaaccucgu

SEQ ID NO: 242763 - RNA, 32 nt, Homo Sapiens
gugaagauggagucauaacauaagacauccuu

SEQ ID NO: 242764 - RNA, 32 nt, Homo Sapiens
acucaugagucuuuucaucaugccacauuauc

SEQ ID NO: 242765 - RNA, 32 nt, Homo Sapiens
cucuguacagcuaaguuuucugauggaaucuu

SEQ ID NO: 242766 - RNA, 31 nt, Homo Sapiens
ggugagagggcggcgaggcgagggccaccag

SEQ ID NO: 242767 - RNA, 32 nt, Homo Sapiens
cgcgcccaccucucgcgccggggcccucgcga

SEQ ID NO: 242768 - RNA, 32 nt, Homo Sapiens
gacaggagggcccuggcugugcaccuggggaa

SEQ ID NO: 242769 - RNA, 32 nt, Homo Sapiens
ucaccguggaggcuguggcugcggccgggagc

SEQ ID NO: 242770 - RNA, 32 nt, Homo Sapiens
uccuuuccuuucccuuuccucugccaguacaa

SEQ ID NO: 242771 - RNA, 32 nt, Homo Sapiens
agugagccggagccggcgacggcggcaguggc

SEQ ID NO: 242772 - RNA, 32 nt, Homo Sapiens
gaagagucaaaauaagcuacacccagauuacu

SEQ ID NO: 242773 - RNA, 32 nt, Homo Sapiens
uuggauccaggccccaggugggcaccaucagc

SEQ ID NO: 242774 - RNA, 32 nt, Homo Sapiens
aucccucugugccucaguuucccauucuguaa

SEQ ID NO: 242775 - RNA, 32 nt, Homo Sapiens
cuacuaauauuuuccaauuugcugggauguca

SEQ ID NO: 242776 - RNA, 32 nt, Homo Sapiens
ccagccagggccagggcagagaagcagcacuc

SEQ ID NO: 242777 - RNA, 32 nt, Homo Sapiens
uugcaauauuuuaggugggcugcgagcugcag

SEQ ID NO: 242778 - RNA, 31 nt, Homo Sapiens
aaguagaaauaaagauccuaucucaccucuu

SEQ ID NO: 242779 - RNA, 31 nt, Homo Sapiens
agcugucauuugauuuugauuauguaguuca

SEQ ID NO: 242780 - RNA, 32 nt, Homo Sapiens
cgacuuacagcuuuagcugaagacagaccguu

SEQ ID NO: 242781 - RNA, 32 nt, Homo Sapiens
agcaggaggaggccggccggaggcggcaugag

SEQ ID NO: 242782 - RNA, 32 nt, Homo Sapiens
auuauuucccaaugcauagaguauggauauca

SEQ ID NO: 242783 - RNA, 32 nt, Homo Sapiens
uccucagcgggugggaaccucggggcccaggg

SEQ ID NO: 242784 - RNA, 31 nt, Homo Sapiens
ccccucuguaacauaaugcccuguuuuauuu

SEQ ID NO: 242785 - RNA, 32 nt, Homo Sapiens
gcccucaccugcauaccaaccccuccuuuacc

SEQ ID NO: 242786 - RNA, 32 nt, Homo Sapiens
cccggaccgggggccgggcgcgcacgagacuc

SEQ ID NO: 242787 - RNA, 32 nt, Homo Sapiens
aacuucacagaaaaacacacaaggcaaaguuc

SEQ ID NO: 242788 - RNA, 32 nt, Homo Sapiens
auuucaaauggcagcaguuccaugaagacacg

SEQ ID NO: 242789 - RNA, 32 nt, Homo Sapiens
aagaucagugcccuaaagagcuacugggauau

SEQ ID NO: 242790 - RNA, 32 nt, Homo Sapiens
auuccuugucuucccuggcccccugggggaag

SEQ ID NO: 242791 - RNA, 32 nt, Homo Sapiens
aagggguaaauuauauacuguugucuuucuaa

SEQ ID NO: 242792 - RNA, 32 nt, Homo Sapiens
uucaguuuuuaaauguguaauggcauuuuaau

SEQ ID NO: 242793 - RNA, 32 nt, Homo Sapiens
uuauuuuuuuucuguaacugugcuuguugaau

SEQ ID NO: 242794 - RNA, 32 nt, Homo Sapiens
cucgggcugagaggcugcuuuugauuuuagcc

SEQ ID NO: 242795 - RNA, 32 nt, Homo Sapiens
ucgggaggauauuugaggacaaaaacgaguuu

SEQ ID NO: 242796 - RNA, 32 nt, Homo Sapiens
ucuaaaaucaguuugcgugcaaugcuagaaaa

SEQ ID NO: 242797 - RNA, 32 nt, Homo Sapiens
uuguacuguuugcugcggagcuauuuaaagau

SEQ ID NO: 242798 - RNA, 32 nt, Homo Sapiens
ugaaauuugugaucugauccacauacaagcac

SEQ ID NO: 242799 - RNA, 32 nt, Homo Sapiens
gugacccagacaucaugggaacuucaggguuc

SEQ ID NO: 242800 - RNA, 32 nt, Homo Sapiens
gguauucuguucuggaggaaagggaggagugg

SEQ ID NO: 242801 - RNA, 32 nt, Homo Sapiens
ugccauucuuguagccucucuugacccaucaa

SEQ ID NO: 242802 - RNA, 32 nt, Homo Sapiens
cugggcacuccagcggcccuggcgcguggcuc

SEQ ID NO: 242803 - RNA, 32 nt, Homo Sapiens
auacuuugacauuuaaagagaaauuuagagaa

SEQ ID NO: 242804 - RNA, 32 nt, Homo Sapiens
gcuggaaggagggcgaggggcugggcucagag

SEQ ID NO: 242805 - RNA, 32 nt, Homo Sapiens
aacugagaucaaagcacucuuccacuuuacgu

SEQ ID NO: 242806 - RNA, 32 nt, Homo Sapiens
cugccagccccggcccuggcccccaccccaag

SEQ ID NO: 242807 - RNA, 32 nt, Homo Sapiens
cagaccaggaguugggggcguugagggccauc

SEQ ID NO: 242808 - RNA, 32 nt, Homo Sapiens
ugccccagcuggagcccgagccgccgccucug

SEQ ID NO: 242809 - RNA, 32 nt, Homo Sapiens
gaugcucaaugaauuuauauuaaaaugacaug

SEQ ID NO: 242810 - RNA, 32 nt, Homo Sapiens
caccacacuggccccaggucucaggaggggug

SEQ ID NO: 242811 - RNA, 32 nt, Homo Sapiens
agucucuagguaauugauuuaaguauaaaauc

SEQ ID NO: 242812 - RNA, 32 nt, Homo Sapiens
gguccaaaguguuuacauaaauuuauaaugaa

SEQ ID NO: 242813 - RNA, 32 nt, Homo Sapiens
agggcuguugugguugguugcuccaucauguc

SEQ ID NO: 242814 - RNA, 32 nt, Homo Sapiens
caguucuguggaugugcuggugcugagccuuu

SEQ ID NO: 242815 - RNA, 32 nt, Homo Sapiens
gaguuuuuuagugcgugcagauggugagagau

SEQ ID NO: 242816 - RNA, 32 nt, Homo Sapiens
guauauacaaauaaguguauuguuuugauuuu

SEQ ID NO: 242817 - RNA, 32 nt, Homo Sapiens
uuuauaucacggucuucauuuuuaaaaguaac

SEQ ID NO: 242818 - RNA, 32 nt, Homo Sapiens
ggcugcgccaauugcuugguccuucuuccuuu

SEQ ID NO: 242819 - RNA, 32 nt, Homo Sapiens
uaaaauaugcauuuuuaaaugaauggcuuuua

SEQ ID NO: 242820 - RNA, 32 nt, Homo Sapiens
cugggcugcuucgucuucuuuggaccuccuga

SEQ ID NO: 242821 - RNA, 31 nt, Homo Sapiens
gcugcaggaggaaaguuuaaucccccauucc

SEQ ID NO: 242822 - RNA, 32 nt, Homo Sapiens
cuuccggcgagcgggcaagcgggaaccaggug

SEQ ID NO: 242823 - RNA, 32 nt, Homo Sapiens
ccaggccacugugagggugggugcuggcugag

SEQ ID NO: 242824 - RNA, 32 nt, Homo Sapiens
aucagaaauaugaaacaaaaucucugcacaaa

SEQ ID NO: 242825 - RNA, 32 nt, Homo Sapiens
ucuguauguaggagguggaaugaaguuuuuca

SEQ ID NO: 242826 - RNA, 32 nt, Homo Sapiens
uuacaggugugugccaccaugcuuggcuaauu

SEQ ID NO: 242827 - RNA, 32 nt, Homo Sapiens
agcccaccuagagcuggccgcggccgcccagu

SEQ ID NO: 242828 - RNA, 32 nt, Homo Sapiens
cugggaaugcgaggggcacccgggccggccca

SEQ ID NO: 242829 - RNA, 32 nt, Homo Sapiens
aacucggaaggcuggucaggccucgaggacug

SEQ ID NO: 242830 - RNA, 31 nt, Homo Sapiens
accacaaugccggccagucccgggccagccu

SEQ ID NO: 242831 - RNA, 32 nt, Homo Sapiens
gguugccuuuuggaccuaccacuuugcucauu

SEQ ID NO: 242832 - RNA, 32 nt, Homo Sapiens
ggcuuuauggaacuguguaaggugauaggaac

SEQ ID NO: 242833 - RNA, 32 nt, Homo Sapiens
ccuggugcagggccaguggggaggcagcggca

SEQ ID NO: 242834 - RNA, 32 nt, Homo Sapiens
agacagauugaaaaaucaugaauggaaucuaa

SEQ ID NO: 242835 - RNA, 31 nt, Homo Sapiens
auccagaacauaugugguggggccaggccca

SEQ ID NO: 242836 - RNA, 32 nt, Homo Sapiens
cugcguggaagacuugcgcagccgccugcagc

SEQ ID NO: 242837 - RNA, 32 nt, Homo Sapiens
uagucuugaauauauuugaugacucugcagaa

SEQ ID NO: 242838 - RNA, 32 nt, Homo Sapiens
uugcugagaagacuacagcaaacuaaagaagg

SEQ ID NO: 242839 - RNA, 32 nt, Homo Sapiens
aagccgcagcggcuggugcccgggcuaccagg

SEQ ID NO: 242840 - RNA, 32 nt, Homo Sapiens
guuggccugaggugggggccacuuccuccacc

SEQ ID NO: 242841 - RNA, 32 nt, Homo Sapiens
acgagugccgugccguguaauaaagucccagu

SEQ ID NO: 242842 - RNA, 32 nt, Homo Sapiens
gauaggaggaggaggaacugcgugugccccug

SEQ ID NO: 242843 - RNA, 32 nt, Homo Sapiens
acuggugguccuccuccuccucacucuucuug

SEQ ID NO: 242844 - RNA, 32 nt, Homo Sapiens
aacgcucucugccugcuuuugggaguccuccc

SEQ ID NO: 242845 - RNA, 32 nt, Homo Sapiens
gucaauguuuuaaagguauugucagagaaaaa

SEQ ID NO: 242846 - RNA, 32 nt, Homo Sapiens
cccaggacugcccaaugacaagccccguacca

SEQ ID NO: 242847 - RNA, 32 nt, Homo Sapiens
ugccgcuaggcacguggaggaggagcccagag

SEQ ID NO: 242848 - RNA, 30 nt, Homo Sapiens
uggaucuggaucugcggcggccucgggcgg

SEQ ID NO: 242849 - RNA, 32 nt, Homo Sapiens
cacuguuuuaacaacaacaacaaaacaacaac

SEQ ID NO: 242850 - RNA, 32 nt, Homo Sapiens
aaccaaccaaccaaccaacaaacaaacacaga

SEQ ID NO: 242851 - RNA, 32 nt, Homo Sapiens
gcaccgaggagcaaaggggguggauggggggc

SEQ ID NO: 242852 - RNA, 31 nt, Homo Sapiens
gacgccaugacccccaucgucacaguccuga

SEQ ID NO: 242853 - RNA, 32 nt, Homo Sapiens
uugaaggagaaaaacuuuuugccugagacaua

SEQ ID NO: 242854 - RNA, 32 nt, Homo Sapiens
uuuuguaagcuauauuuuuguauauuuaauug

SEQ ID NO: 242855 - RNA, 31 nt, Homo Sapiens
cugcagcugccggcccgccuguggcuuuggc

SEQ ID NO: 242856 - RNA, 32 nt, Homo Sapiens
ugccaaacccucagcuuauguagcuagaaagg

SEQ ID NO: 242857 - RNA, 32 nt, Homo Sapiens
uagagauauaucuauuuucaauucaacuacag

SEQ ID NO: 242858 - RNA, 32 nt, Homo Sapiens
cauuuuugaaagaucacucagcuuuaacacac

SEQ ID NO: 242859 - RNA, 32 nt, Homo Sapiens
cguuuuuaaucccagcacuuugggaggccgag

SEQ ID NO: 242860 - RNA, 32 nt, Homo Sapiens
accucuggguaguccuggcaugccaacaucag

SEQ ID NO: 242861 - RNA, 32 nt, Homo Sapiens
cccauugacuagauggaccauugugccaguug

SEQ ID NO: 242862 - RNA, 32 nt, Homo Sapiens
cuguauuguuucauuaaguuccaauucuacac

SEQ ID NO: 242863 - RNA, 32 nt, Homo Sapiens
cagcuuugccgccucuccaucgucuugggccc

SEQ ID NO: 242864 - RNA, 32 nt, Homo Sapiens
gucagcgcuccugcaggcggcgcuugcgguac

SEQ ID NO: 242865 - RNA, 32 nt, Homo Sapiens
aacagaaguuauuucccuuccauucuuuauuu

SEQ ID NO: 242866 - RNA, 32 nt, Homo Sapiens
uugcuugcauuaaaaauauacacagggcuaug

SEQ ID NO: 242867 - RNA, 32 nt, Homo Sapiens
aguccaauuaaaccucuuucuuuuguaaauug

SEQ ID NO: 242868 - RNA, 32 nt, Homo Sapiens
augacuucugcacuuuuagcugguugaaaagu

SEQ ID NO: 242869 - RNA, 32 nt, Homo Sapiens
gguuggacagguccuucuguguccuugcaaaa

SEQ ID NO: 242870 - RNA, 32 nt, Homo Sapiens
cacacugcacuccauccugggcgacagucuga

SEQ ID NO: 242871 - RNA, 32 nt, Homo Sapiens
cagcgaauucagaaagaggucuuucagaagga

SEQ ID NO: 242872 - RNA, 32 nt, Homo Sapiens
cuaguuuuucaagaguuuuucagaacuuaggu

SEQ ID NO: 242873 - RNA, 32 nt, Homo Sapiens
ggcaaccacuaaucuacuuucucuauaaauuu

SEQ ID NO: 242874 - RNA, 32 nt, Homo Sapiens
agacuggcggguguacaggagggcuggguuga

SEQ ID NO: 242875 - RNA, 32 nt, Homo Sapiens
agucaaauccgaaaugugccuguugaucuacu

SEQ ID NO: 242876 - RNA, 32 nt, Homo Sapiens
gagaaccuaggccccagguaucacugcacuuu

SEQ ID NO: 242877 - RNA, 32 nt, Homo Sapiens
gguuaucgugagcguccgcgagucucugggag

SEQ ID NO: 242878 - RNA, 32 nt, Homo Sapiens
uuaaagaggcuuagaacaagcuaacaggcaau

SEQ ID NO: 242879 - RNA, 32 nt, Homo Sapiens
gaugcaaaacauccaguuguaauguauaagca

SEQ ID NO: 242880 - RNA, 32 nt, Homo Sapiens
uuguacucucuggcucaagacgggguggggaa

SEQ ID NO: 242881 - RNA, 31 nt, Homo Sapiens
gccacugcaggguccgcacugauccgcuccg

SEQ ID NO: 242882 - RNA, 32 nt, Homo Sapiens
ugaggacaaaaauauggacugauguauccucg

SEQ ID NO: 242883 - RNA, 32 nt, Homo Sapiens
gcuaaucucuacauccuugaggccucucuuuu

SEQ ID NO: 242884 - RNA, 32 nt, Homo Sapiens
cuaaacugaagcuauacagauaccuuuucaaa

SEQ ID NO: 242885 - RNA, 32 nt, Homo Sapiens
aguugaccucucccggcccagcuccugccucc

SEQ ID NO: 242886 - RNA, 32 nt, Homo Sapiens
gcuugggagcccacuuuuaauuucucaccccc

SEQ ID NO: 242887 - RNA, 32 nt, Homo Sapiens
ggcaggacccucuccuucccaucuuucuauac

SEQ ID NO: 242888 - RNA, 31 nt, Homo Sapiens
uauuggaacacacagaaccaaaccaggugug

SEQ ID NO: 242889 - RNA, 32 nt, Homo Sapiens
aguccagcagcccacaccugcaggcaggaugc

SEQ ID NO: 242890 - RNA, 32 nt, Homo Sapiens
ugucucccaggccacugggugcucucugcagu

SEQ ID NO: 242891 - RNA, 32 nt, Homo Sapiens
cucuaaauuaugucucuggcauauuuuaauca

SEQ ID NO: 242892 - RNA, 32 nt, Homo Sapiens
ucuuagaggggaggaauccuugauauucuuca

SEQ ID NO: 242893 - RNA, 32 nt, Homo Sapiens
auguaaugcuauuguacaggguuugguagaau

SEQ ID NO: 242894 - RNA, 32 nt, Homo Sapiens
ggaugaggugauggacaaaaccaucacaggga

SEQ ID NO: 242895 - RNA, 32 nt, Homo Sapiens
gccggagccggggcacccgccgcugcuggagc

SEQ ID NO: 242896 - RNA, 32 nt, Homo Sapiens
accuuuguucuuucacucuuugcaauaaaucu

SEQ ID NO: 242897 - RNA, 32 nt, Homo Sapiens
cccaugagaaaacaaucuauacuuaucuuccg

SEQ ID NO: 242898 - RNA, 32 nt, Homo Sapiens
ggaaggugcucccaucggaggggacccucaga

SEQ ID NO: 242899 - RNA, 32 nt, Homo Sapiens
aacaugucaaaaucaguaacuacuuuaaugga

SEQ ID NO: 242900 - RNA, 32 nt, Homo Sapiens
agauaguuggguggagaaacccacugaucagc

SEQ ID NO: 242901 - RNA, 32 nt, Homo Sapiens
uuccagccucccagccccucucuccgccccag

SEQ ID NO: 242902 - RNA, 32 nt, Homo Sapiens
ggauuaaagcuacaccucaauccauucuucug

SEQ ID NO: 242903 - RNA, 32 nt, Homo Sapiens
aucuuucugaugcuaauauaaaugaguuuuuu

SEQ ID NO: 242904 - RNA, 32 nt, Homo Sapiens
uggaucugggcgaagugucacuuuuuagugcc

SEQ ID NO: 242905 - RNA, 32 nt, Homo Sapiens
uacuuuaaaaucuguggcacccguucuacaug

SEQ ID NO: 242906 - RNA, 32 nt, Homo Sapiens
auacauuuuauaauuucuuuuggaauguaaau

SEQ ID NO: 242907 - RNA, 32 nt, Homo Sapiens
gguuuaggccucuggaugacugcgggcgggcc

SEQ ID NO: 242908 - RNA, 32 nt, Homo Sapiens
caaacuucaucccacgacucuugaccucuggg

SEQ ID NO: 242909 - RNA, 32 nt, Homo Sapiens
auccugugggaauaaacuggcacuguugauau

SEQ ID NO: 242910 - RNA, 32 nt, Homo Sapiens
cagcuagcgcugcgaagcccaggccgcgcgga

SEQ ID NO: 242911 - RNA, 32 nt, Homo Sapiens
gcccaggagagccagggguccagugcagcugc

SEQ ID NO: 242912 - RNA, 32 nt, Homo Sapiens
uuuauacucuaccugcuucugcaauuauauau

SEQ ID NO: 242913 - RNA, 32 nt, Homo Sapiens
agcguccucuuuuuuggugcugcugguuucuc

SEQ ID NO: 242914 - RNA, 32 nt, Homo Sapiens
uuaucguuuucacaaaacuauuugaguagaau

SEQ ID NO: 242915 - RNA, 32 nt, Homo Sapiens
ggaaguuguuuuaccuacuuuaaaaguuuuaa

SEQ ID NO: 242916 - RNA, 32 nt, Homo Sapiens
auucgucgcggcgccuucugaguggucggguc

SEQ ID NO: 242917 - RNA, 32 nt, Homo Sapiens
gcugcuuugaugaucaagggugucacaccacu

SEQ ID NO: 242918 - RNA, 32 nt, Homo Sapiens
aaauuucuggaaagagcauuggcuggcuuguu

SEQ ID NO: 242919 - RNA, 32 nt, Homo Sapiens
ugcuaaagaugaugaugauaacccauuccagu

SEQ ID NO: 242920 - RNA, 32 nt, Homo Sapiens
ucuucucuauaauaaugacaucccaguucaug

SEQ ID NO: 242921 - RNA, 32 nt, Homo Sapiens
acaagugaucagcagaguugcauuuccaaaga

SEQ ID NO: 242922 - RNA, 32 nt, Homo Sapiens
uuccucgugggggcuagaaaucucuuuccagu

SEQ ID NO: 242923 - RNA, 32 nt, Homo Sapiens
cccuuggugguuuuucagacaccugcagcaag

SEQ ID NO: 242924 - RNA, 32 nt, Homo Sapiens
aacuuaugaaaauuuccucaugcugaauugua

SEQ ID NO: 242925 - RNA, 32 nt, Homo Sapiens
uggcucacuccagccagcgccucacagguuca

SEQ ID NO: 242926 - RNA, 31 nt, Homo Sapiens
cccagaggccgcugccccugaguucugacac

SEQ ID NO: 242927 - RNA, 32 nt, Homo Sapiens
ugccuuccgggaacuguggugcugcuuucugu

SEQ ID NO: 242928 - RNA, 32 nt, Homo Sapiens
cugucggcgcgcacucgcucccggcccggccc

SEQ ID NO: 242929 - RNA, 32 nt, Homo Sapiens
uuauuuauuuauuuuugagacggagucucgcu

SEQ ID NO: 242930 - RNA, 32 nt, Homo Sapiens
gaagaagaacagagaugacaaaagaccacuug

SEQ ID NO: 242931 - RNA, 32 nt, Homo Sapiens
aaaaauggauacuggugcagucauuaugagag

SEQ ID NO: 242932 - RNA, 32 nt, Homo Sapiens
cuuugacucagucacauugaaguaaaaauauu

SEQ ID NO: 242933 - RNA, 32 nt, Homo Sapiens
agacauuuucuuuucuaaaaacaaucagcauc

SEQ ID NO: 242934 - RNA, 32 nt, Homo Sapiens
guaguuuuuuaaaaucuauucuagcugggcua

SEQ ID NO: 242935 - RNA, 32 nt, Homo Sapiens
caggacaggucacacguguguuuuccauuggg

SEQ ID NO: 242936 - RNA, 32 nt, Homo Sapiens
gggaaggugggaaaugucuugagugaggcgag

SEQ ID NO: 242937 - RNA, 32 nt, Homo Sapiens
caucggccagauuaagagaaucugaaauuguc

SEQ ID NO: 242938 - RNA, 32 nt, Homo Sapiens
guagugaggaucugcggucuccguggagagcu

SEQ ID NO: 242939 - RNA, 32 nt, Homo Sapiens
ccuauaccccauguauuuucauaaaggguugg

SEQ ID NO: 242940 - RNA, 32 nt, Homo Sapiens
caaugaggaaaauuauauuucacuguggucua

SEQ ID NO: 242941 - RNA, 32 nt, Homo Sapiens
ggguuggagcagcccuccugugccugaggcca

SEQ ID NO: 242942 - RNA, 32 nt, Homo Sapiens
cugguuuucuuacugguggcccugcuucuucc

SEQ ID NO: 242943 - RNA, 32 nt, Homo Sapiens
ugaaacugcacuaaauuuuucuuaacauucca

SEQ ID NO: 242944 - RNA, 32 nt, Homo Sapiens
uacugcaguucccucucguaaugauguaacuu

SEQ ID NO: 242945 - RNA, 32 nt, Homo Sapiens
gcgguaccgggcggcugcggggcuggcucgac

SEQ ID NO: 242946 - RNA, 32 nt, Homo Sapiens
cugcucccgagaccccgcacagggcuccaaaa

SEQ ID NO: 242947 - RNA, 32 nt, Homo Sapiens
ucacucaaauugaaacaaaccagcuggccaua

SEQ ID NO: 242948 - RNA, 32 nt, Homo Sapiens
gcaaauugagagugucuuggggucaguuuuga

SEQ ID NO: 242949 - RNA, 32 nt, Homo Sapiens
uuaguagaggggccccucugcaucugagcccc

SEQ ID NO: 242950 - RNA, 32 nt, Homo Sapiens
ugccccuuaggcccggcccgggccccucggga

SEQ ID NO: 242951 - RNA, 32 nt, Homo Sapiens
ggccccgggcagacccucugugccgcugcaaa

SEQ ID NO: 242952 - RNA, 32 nt, Homo Sapiens
gagcaucaaaaggggaaaugggcuggugggag

SEQ ID NO: 242953 - RNA, 32 nt, Homo Sapiens
aggggcagccagccacagcccgagggucucac

SEQ ID NO: 242954 - RNA, 32 nt, Homo Sapiens
gaacgaggcgguggcgggcggaggcggcgggc

SEQ ID NO: 242955 - RNA, 32 nt, Homo Sapiens
gccaucauccuccauugcucccggggacucaa

SEQ ID NO: 242956 - RNA, 32 nt, Homo Sapiens
ccaguaaacgcaggauggaauuuuccugggac

SEQ ID NO: 242957 - RNA, 32 nt, Homo Sapiens
ucauugaacaaauggugccauaguuauuuuuc

SEQ ID NO: 242958 - RNA, 32 nt, Homo Sapiens
uccucgugcgaccgcgcugggucggaagugag

SEQ ID NO: 242959 - RNA, 32 nt, Homo Sapiens
uuuccgacaaugccgaagaaggcucaucccuc

SEQ ID NO: 242960 - RNA, 32 nt, Homo Sapiens
gcccgggacgaguggaaugauuaaugauguuu

SEQ ID NO: 242961 - RNA, 32 nt, Homo Sapiens
acucgaaaaaucaaaccuucugaaaauuauga

SEQ ID NO: 242962 - RNA, 32 nt, Homo Sapiens
gacccgucguccuccccucguccuucagcgcc

SEQ ID NO: 242963 - RNA, 32 nt, Homo Sapiens
ggccagggcggggagcagacucgggggccaag

SEQ ID NO: 242964 - RNA, 32 nt, Homo Sapiens
aauccuauugguuccuuuauuuuauuugaguu

SEQ ID NO: 242965 - RNA, 32 nt, Homo Sapiens
cauaugaauggcaaaggcacuuuugauauaca

SEQ ID NO: 242966 - RNA, 32 nt, Homo Sapiens
aaccuucuaucccacagucaggccccagagag

SEQ ID NO: 242967 - RNA, 32 nt, Homo Sapiens
acucagaaucagaccugugucuggaggaggga

SEQ ID NO: 242968 - RNA, 32 nt, Homo Sapiens
ugggcaucuucagcccuucuuacucucugagg

SEQ ID NO: 242969 - RNA, 32 nt, Homo Sapiens
ccuugucaaaaauuaguugaaauuguucauua

SEQ ID NO: 242970 - RNA, 32 nt, Homo Sapiens
gaggcugucgccaucuuuaugugcuuccagug

SEQ ID NO: 242971 - RNA, 32 nt, Homo Sapiens
aaaggcuaagugauagugacucaucaauguug

SEQ ID NO: 242972 - RNA, 32 nt, Homo Sapiens
ucugguauacuuccuuacuuuuaaggauaaau

SEQ ID NO: 242973 - RNA, 32 nt, Homo Sapiens
gaucucuaucacuguuauggggugauaagagg

SEQ ID NO: 242974 - RNA, 32 nt, Homo Sapiens
ccaggaacugauguuucuuuuaacuggaggag

SEQ ID NO: 242975 - RNA, 31 nt, Homo Sapiens
gcaagaauggaauccguaaaacaaaggauuu

SEQ ID NO: 242976 - RNA, 32 nt, Homo Sapiens
ccagcgugagacugaggcccccuggugccuau

SEQ ID NO: 242977 - RNA, 32 nt, Homo Sapiens
cugccucauuuucucaaggugccguguuugcc

SEQ ID NO: 242978 - RNA, 32 nt, Homo Sapiens
guggcagcccaguccuuaccucauggcuguga

SEQ ID NO: 242979 - RNA, 32 nt, Homo Sapiens
guuaaacauuucauuuuuaaaaacacugaauu

SEQ ID NO: 242980 - RNA, 32 nt, Homo Sapiens
uacaccggcugccggggacugccucgacucug

SEQ ID NO: 242981 - RNA, 32 nt, Homo Sapiens
cggcggaggcggaacugcggaguugcuggguc

SEQ ID NO: 242982 - RNA, 32 nt, Homo Sapiens
cccaaccucucccaacuauaaaacuaggugcu

SEQ ID NO: 242983 - RNA, 32 nt, Homo Sapiens
aggcauuaugguuuuuaaucuugaaacuuaga

SEQ ID NO: 242984 - RNA, 32 nt, Homo Sapiens
cccuagcgauccagcccuccccuggacccuag

SEQ ID NO: 242985 - RNA, 32 nt, Homo Sapiens
cagauaaauucuaccauuuucauuucacuuuc

SEQ ID NO: 242986 - RNA, 32 nt, Homo Sapiens
ccucugaccaccugaaugggaugucauagcuu

SEQ ID NO: 242987 - RNA, 32 nt, Homo Sapiens
uuugagaaaaagacaugaaccugaaucuguua

SEQ ID NO: 242988 - RNA, 32 nt, Homo Sapiens
ggccuucucagccuacagcaguguggucucuu

SEQ ID NO: 242989 - RNA, 32 nt, Homo Sapiens
ccgcgguuugaguccaagcccagcgguguuug

SEQ ID NO: 242990 - RNA, 32 nt, Homo Sapiens
ccgccucccccuccucugccuggggccauuga

SEQ ID NO: 242991 - RNA, 32 nt, Homo Sapiens
ccucugccucccacccaggccacucuucaccu

SEQ ID NO: 242992 - RNA, 32 nt, Homo Sapiens
uuggauccucucccuuuccccaggcagcucgc

SEQ ID NO: 242993 - RNA, 32 nt, Homo Sapiens
augguagucacuaacauauauaagguaugugc

SEQ ID NO: 242994 - RNA, 32 nt, Homo Sapiens
cacaaaaaacacuauguuuucuggagagcugu

SEQ ID NO: 242995 - RNA, 30 nt, Homo Sapiens
uccccuccagucucugccuaauuuuuagug

SEQ ID NO: 242996 - RNA, 32 nt, Homo Sapiens
gaagaagaggaggacgugaggaccuggaaaaa

SEQ ID NO: 242997 - RNA, 32 nt, Homo Sapiens
ucagcuguggugcuuuguuguaaaaggcagcc

SEQ ID NO: 242998 - RNA, 32 nt, Homo Sapiens
gguaaauggguauaggauuugcuggauuuacu

SEQ ID NO: 242999 - RNA, 32 nt, Homo Sapiens
cgcagccuagccgagccgcgccgcccgggccu

SEQ ID NO: 243000 - RNA, 32 nt, Homo Sapiens
auuuaugaaaaacaaagaaaugucuauuuuuc

SEQ ID NO: 243001 - RNA, 32 nt, Homo Sapiens
acugguuuggaaaggggagaaaucagaggcuu

SEQ ID NO: 243002 - RNA, 30 nt, Homo Sapiens
gucacugucugugcccaggaugugcuacug

SEQ ID NO: 243003 - RNA, 32 nt, Homo Sapiens
acuguaaauagagaucaguuuguuucuuucug

SEQ ID NO: 243004 - RNA, 32 nt, Homo Sapiens
aagcccaguguccucagcuucauguccagugg

SEQ ID NO: 243005 - RNA, 32 nt, Homo Sapiens
ggccccagccuggcccgggucacccuggcaug

SEQ ID NO: 243006 - RNA, 32 nt, Homo Sapiens
uguaaagucuuacuugugauugugccaaacaa

SEQ ID NO: 243007 - RNA, 32 nt, Homo Sapiens
cacaguguauauauuuugccauuuauuuucua

SEQ ID NO: 243008 - RNA, 32 nt, Homo Sapiens
uuuagguguugcagguaacuauugggaaaucc

SEQ ID NO: 243009 - RNA, 32 nt, Homo Sapiens
gagacagggucucacugugucgcccagggcaa

SEQ ID NO: 243010 - RNA, 32 nt, Homo Sapiens
gguuuaucuggguauuacaugcguuuuaaaug

SEQ ID NO: 243011 - RNA, 32 nt, Homo Sapiens
auuccugucucugcaccugcuuagaacauggg

SEQ ID NO: 243012 - RNA, 32 nt, Homo Sapiens
aaaucauguaugcauuugauucucauccagau

SEQ ID NO: 243013 - RNA, 32 nt, Homo Sapiens
gcuuuuaaauuaauacauauauccaaggauau

SEQ ID NO: 243014 - RNA, 32 nt, Homo Sapiens
cgggagggacuucugacacgcgccacuguuuu

SEQ ID NO: 243015 - RNA, 32 nt, Homo Sapiens
ugcagggaaagaggugaucaacaaagaggacu

SEQ ID NO: 243016 - RNA, 32 nt, Homo Sapiens
gcugcaggcaaagcuggacaugugcccuggcc

SEQ ID NO: 243017 - RNA, 32 nt, Homo Sapiens
cugucuccguuuuuuucuuuuauuuaaaaaug

SEQ ID NO: 243018 - RNA, 32 nt, Homo Sapiens
ggccaggagugguggcucacgccugugguccc

SEQ ID NO: 243019 - RNA, 32 nt, Homo Sapiens
accaagacauuaaguagcauggcugcccagga

SEQ ID NO: 243020 - RNA, 32 nt, Homo Sapiens
cugagcacauaguggaaagaguuaagagcaag

SEQ ID NO: 243021 - RNA, 32 nt, Homo Sapiens
acucagaccugccuacagguaccuggacagcu

SEQ ID NO: 243022 - RNA, 32 nt, Homo Sapiens
uggugugcaccuguagucccagcuacucggga

SEQ ID NO: 243023 - RNA, 31 nt, Homo Sapiens
aaaggagaaggagccagaguacacgcuccuc

SEQ ID NO: 243024 - RNA, 32 nt, Homo Sapiens
acagugaacaggagcucugugucucugugguc

SEQ ID NO: 243025 - RNA, 32 nt, Homo Sapiens
cucuauaaaaauuuuuaaaauuagccagguau

SEQ ID NO: 243026 - RNA, 32 nt, Homo Sapiens
guuccagggggugcuuuuggccugcuccagca

SEQ ID NO: 243027 - RNA, 32 nt, Homo Sapiens
aauauacaaaaauuagccaggugugguggcag

SEQ ID NO: 243028 - RNA, 31 nt, Homo Sapiens
aaacccaaauaaaaacaguauauguaaccaa

SEQ ID NO: 243029 - RNA, 32 nt, Homo Sapiens
uuggccaucucgcuccuccuccucuguuccaa

SEQ ID NO: 243030 - RNA, 32 nt, Homo Sapiens
agcgcgacaccgacugcuccggaccgcgccuc

SEQ ID NO: 243031 - RNA, 32 nt, Homo Sapiens
auuugaagaugugugucuuaaggucuguugga

SEQ ID NO: 243032 - RNA, 32 nt, Homo Sapiens
aaaauauuaaauuuauauuaaauagguaauau

SEQ ID NO: 243033 - RNA, 32 nt, Homo Sapiens
ugggagcugcuggguggcaggggggcuguggg

SEQ ID NO: 243034 - RNA, 30 nt, Homo Sapiens
ccgucgucuccucugccgccgugccgcagc

SEQ ID NO: 243035 - RNA, 32 nt, Homo Sapiens
agaagggagaucugggaggggucaggagccac

SEQ ID NO: 243036 - RNA, 32 nt, Homo Sapiens
ugauugcucccucaccucuaaaguguuuccaa

SEQ ID NO: 243037 - RNA, 32 nt, Homo Sapiens
gugacuuuuagaaaaacacagggacucguggg

SEQ ID NO: 243038 - RNA, 32 nt, Homo Sapiens
acuacaggugcaugccacgacgcccagcugau

SEQ ID NO: 243039 - RNA, 28 nt, Homo Sapiens
gccauguucgcgcgugggucccggaggc

SEQ ID NO: 243040 - RNA, 32 nt, Homo Sapiens
ucaaagaaagacuguaagcuccaugauuagca

SEQ ID NO: 243041 - RNA, 32 nt, Homo Sapiens
cacauggaaugaccaacucuuaaaagccugau

SEQ ID NO: 243042 - RNA, 32 nt, Homo Sapiens
cgcacccgcggcccgcgcagcugccuaggaug

SEQ ID NO: 243043 - RNA, 32 nt, Homo Sapiens
ggcaauaaugugcaugagaggucuccuuccau

SEQ ID NO: 243044 - RNA, 32 nt, Homo Sapiens
auuuaaaaacgguuauacuauaaaaucugcuu

SEQ ID NO: 243045 - RNA, 32 nt, Homo Sapiens
gaggaagauggcaguggccaccggaggacugg

SEQ ID NO: 243046 - RNA, 32 nt, Homo Sapiens
cggcgguagcagcuguggguggcuaauuaaga

SEQ ID NO: 243047 - RNA, 32 nt, Homo Sapiens
gagaccucccuuuccaagccugccuggacggc

SEQ ID NO: 243048 - RNA, 32 nt, Homo Sapiens
agccuuaaauguuuaaguaaacucugucucag

SEQ ID NO: 243049 - RNA, 32 nt, Homo Sapiens
uuggaaauucuuauuuucuuuauuuucugugu

SEQ ID NO: 243050 - RNA, 32 nt, Homo Sapiens
auaaaugaagauuguuuuuauuugccugauaa

SEQ ID NO: 243051 - RNA, 32 nt, Homo Sapiens
augcggucggagcgccagugacccugaggaag

SEQ ID NO: 243052 - RNA, 32 nt, Homo Sapiens
cgccgcugccccccagccaaacgugacagcgc

SEQ ID NO: 243053 - RNA, 32 nt, Homo Sapiens
ccaucuacuugggcuuccuggugagccaggug

SEQ ID NO: 243054 - RNA, 32 nt, Homo Sapiens
auaaaacuuaggaugcuccaucuuugaacuuu

SEQ ID NO: 243055 - RNA, 32 nt, Homo Sapiens
ccuuuucccacgcaucgucucgugucuucucc

SEQ ID NO: 243056 - RNA, 32 nt, Homo Sapiens
ccauucuuaaauaugcacacuucuacaggagu

SEQ ID NO: 243057 - RNA, 29 nt, Homo Sapiens
gcccgaugcugguggggggagggcagagc

SEQ ID NO: 243058 - RNA, 32 nt, Homo Sapiens
acucauuuaaccucaccacaacgccacaacgc

SEQ ID NO: 243059 - RNA, 32 nt, Homo Sapiens
cucucuuggugauucuuuucucauuucuauga

SEQ ID NO: 243060 - RNA, 32 nt, Homo Sapiens
uuaaaauguaaaauaaacuuuuaaaaagcagg

SEQ ID NO: 243061 - RNA, 32 nt, Homo Sapiens
gggcuaggucugaccccaggugucccucugga

SEQ ID NO: 243062 - RNA, 32 nt, Homo Sapiens
cgagggacggagaaggccagugcccagguuag

SEQ ID NO: 243063 - RNA, 32 nt, Homo Sapiens
uucaagaaucaaagucaggccuggcguggugg

SEQ ID NO: 243064 - RNA, 32 nt, Homo Sapiens
gcaccaggcagagccguaccugucacccuccc

SEQ ID NO: 243065 - RNA, 32 nt, Homo Sapiens
cccuccucauuucuaaaugaaagguauuagau

SEQ ID NO: 243066 - RNA, 32 nt, Homo Sapiens
gugcaagcucugucauaaucugcaucuuccca

SEQ ID NO: 243067 - RNA, 32 nt, Homo Sapiens
uacguauuggaaucaccuaaaaaguuaaaaca

SEQ ID NO: 243068 - RNA, 32 nt, Homo Sapiens
uacucaugaagauggaagucuacauggagaau

SEQ ID NO: 243069 - RNA, 32 nt, Homo Sapiens
aucuaaaagaaaugucuauuaaggugauauau

SEQ ID NO: 243070 - RNA, 32 nt, Homo Sapiens
guugaggagagccagauggcuggaguggguau

SEQ ID NO: 243071 - RNA, 32 nt, Homo Sapiens
ggauuccggcggucaucauuuauucuuggcgc

SEQ ID NO: 243072 - RNA, 32 nt, Homo Sapiens
ggcauguaagggugcugguaugccugcugucu

SEQ ID NO: 243073 - RNA, 32 nt, Homo Sapiens
aaaauaccaaaaugagccaggcaugguggcac

SEQ ID NO: 243074 - RNA, 31 nt, Homo Sapiens
ugaaucagguggagaaaguaaucuccuugca

SEQ ID NO: 243075 - RNA, 32 nt, Homo Sapiens
ccucagcccucccccacccacaggcccagccu

SEQ ID NO: 243076 - RNA, 32 nt, Homo Sapiens
gcuggcaguagcccuccucucuggcugcccca

SEQ ID NO: 243077 - RNA, 32 nt, Homo Sapiens
acguggcgcguggucagcccccugcucaugcu

SEQ ID NO: 243078 - RNA, 32 nt, Homo Sapiens
ccuauagaaauguauuuugaaaacacuuauuu

SEQ ID NO: 243079 - RNA, 32 nt, Homo Sapiens
uuuguuucauuggaguugaaauuaacauuuca

SEQ ID NO: 243080 - RNA, 29 nt, Homo Sapiens
ccugcuuuguaucagagaggcaaggucag

SEQ ID NO: 243081 - RNA, 32 nt, Homo Sapiens
uauuuuugagacggaguuucgcucuugucgcc

SEQ ID NO: 243082 - RNA, 30 nt, Homo Sapiens
gccagcccugucccugccuaccuuuagccc

SEQ ID NO: 243083 - RNA, 32 nt, Homo Sapiens
aacaccuugauccugggcuugcggcugccaga

SEQ ID NO: 243084 - RNA, 32 nt, Homo Sapiens
ccuagcuccccgcccuaaaaggaggcagugag

SEQ ID NO: 243085 - RNA, 32 nt, Homo Sapiens
cccgucgccaccgcggggccgacgacucuucc

SEQ ID NO: 243086 - RNA, 32 nt, Homo Sapiens
aggaucucagagcuacugcaaaaguuccuucu

SEQ ID NO: 243087 - RNA, 32 nt, Homo Sapiens
ugcagcggcagaguggauaaggaucaggaccc

SEQ ID NO: 243088 - RNA, 31 nt, Homo Sapiens
guggcgaggcagauccugccccguggccgcg

SEQ ID NO: 243089 - RNA, 32 nt, Homo Sapiens
uuggaauuggaaacagaaaauucgccaggcca

SEQ ID NO: 243090 - RNA, 32 nt, Homo Sapiens
gcgaggcgaggguggcggucgccugagcagcu

SEQ ID NO: 243091 - RNA, 32 nt, Homo Sapiens
ugaguugcuuccuuucugggguaauaacacuc

SEQ ID NO: 243092 - RNA, 32 nt, Homo Sapiens
caaaaacccaaguuuacagcuuguacuuuacu

SEQ ID NO: 243093 - RNA, 32 nt, Homo Sapiens
auuuucucugcggccaagcaguguugggauug

SEQ ID NO: 243094 - RNA, 32 nt, Homo Sapiens
agggggcuucugaugccugguccaaggcucuu

SEQ ID NO: 243095 - RNA, 32 nt, Homo Sapiens
auuuguuuuguuuuguaaccguuaaaaagaag

SEQ ID NO: 243096 - RNA, 32 nt, Homo Sapiens
uauuuuuuaaaagaaacagauuugagccuccu

SEQ ID NO: 243097 - RNA, 32 nt, Homo Sapiens
agaagacacucuauguccugcauucugugacc

SEQ ID NO: 243098 - RNA, 32 nt, Homo Sapiens
aauccauuucugcugcagaugagccacuugua

SEQ ID NO: 243099 - RNA, 32 nt, Homo Sapiens
caggugaacaggaauugcugcugcugcuggag

SEQ ID NO: 243100 - RNA, 32 nt, Homo Sapiens
aauguuuauaauuuauauuuuggguuuaugua

SEQ ID NO: 243101 - RNA, 32 nt, Homo Sapiens
aaaauuuuuugugagcacuuugagauuuuugc

SEQ ID NO: 243102 - RNA, 31 nt, Homo Sapiens
uauagucauuugaccccuuccaaauacuugu

SEQ ID NO: 243103 - RNA, 32 nt, Homo Sapiens
uuuacuuguuuaucuuuaaugacaaaaguuuu

SEQ ID NO: 243104 - RNA, 32 nt, Homo Sapiens
gguagaugggagggaggcucaggucccugggg

SEQ ID NO: 243105 - RNA, 32 nt, Homo Sapiens
uguaaauaugcaggacaaaaaauacagaacac

SEQ ID NO: 243106 - RNA, 32 nt, Homo Sapiens
ccccuuauaacucuauuggucaguaaugguca

SEQ ID NO: 243107 - RNA, 32 nt, Homo Sapiens
auucucuggacucaagucugacauaugagaua

SEQ ID NO: 243108 - RNA, 32 nt, Homo Sapiens
agaagaaggaggaggaggcaccugggagcuga

SEQ ID NO: 243109 - RNA, 32 nt, Homo Sapiens
cgauuuugaagagcuucuacauaucgguuaug

SEQ ID NO: 243110 - RNA, 32 nt, Homo Sapiens
cagcucccaggggcuccagggguuccuuggcu

SEQ ID NO: 243111 - RNA, 32 nt, Homo Sapiens
ggggagagaaauuuauuuuuaauuuacccugu

SEQ ID NO: 243112 - RNA, 32 nt, Homo Sapiens
uaagccauugcaacuucuuuuucuucagagau

SEQ ID NO: 243113 - RNA, 32 nt, Homo Sapiens
cuacccucgaggaggaggcagcggcagccgcc

SEQ ID NO: 243114 - RNA, 32 nt, Homo Sapiens
uucacuuuacuuucuguuuaggcauggaaaaa

SEQ ID NO: 243115 - RNA, 32 nt, Homo Sapiens
aacuacgaagauggcgguugcgcgcuuggcag

SEQ ID NO: 243116 - RNA, 32 nt, Homo Sapiens
gagccggguggggccucgggaugcagccgccg

SEQ ID NO: 243117 - RNA, 29 nt, Homo Sapiens
uucucuucuauccaaguagaauguaugcc

SEQ ID NO: 243118 - RNA, 32 nt, Homo Sapiens
gcccugccccuagguuccugugccagcaagau

SEQ ID NO: 243119 - RNA, 32 nt, Homo Sapiens
ggcuccaucgcacuccucccuggggccgugug

SEQ ID NO: 243120 - RNA, 32 nt, Homo Sapiens
acggcgaggagcuuaacaagcugcugggcgaa

SEQ ID NO: 243121 - RNA, 32 nt, Homo Sapiens
accgagcuauaaauuuuuuguuuuuguucuaa

SEQ ID NO: 243122 - RNA, 32 nt, Homo Sapiens
gccuaagaagcaugcacugccugaguguauau

SEQ ID NO: 243123 - RNA, 32 nt, Homo Sapiens
ggcucuggguggcggcggcugugagcggcggc

SEQ ID NO: 243124 - RNA, 32 nt, Homo Sapiens
uccuuuauucaauauuuuguauggaaaauuug

SEQ ID NO: 243125 - RNA, 32 nt, Homo Sapiens
ugguuggacagcuggaggaugaacagagaagc

SEQ ID NO: 243126 - RNA, 32 nt, Homo Sapiens
acggcccacagaccagaacuuccacuauacua

SEQ ID NO: 243127 - RNA, 32 nt, Homo Sapiens
ggggauuuuuaaaaaacuguuaucuucuuggc

SEQ ID NO: 243128 - RNA, 30 nt, Homo Sapiens
aagguaugaugaugcuguguaucaggaagg

SEQ ID NO: 243129 - RNA, 32 nt, Homo Sapiens
cgucucccugcuugguucuccccucccuuccc

SEQ ID NO: 243130 - RNA, 32 nt, Homo Sapiens
cugagucugaccaacuuccucccuguccuccg

SEQ ID NO: 243131 - RNA, 32 nt, Homo Sapiens
ucucccuguuauucugacuuccugcuugauga

SEQ ID NO: 243132 - RNA, 32 nt, Homo Sapiens
aacuuguaauaaauuggaauuucaaauaaacc

SEQ ID NO: 243133 - RNA, 32 nt, Homo Sapiens
ggagacggggccagcucggcggccugcugguc

SEQ ID NO: 243134 - RNA, 32 nt, Homo Sapiens
cacccaaggggucaucaucucuggccaccacu

SEQ ID NO: 243135 - RNA, 32 nt, Homo Sapiens
aaacagagcuuguaugguuugcugggucaaac

SEQ ID NO: 243136 - RNA, 32 nt, Homo Sapiens
gacccgauccugcagcucuuucuggaccuuca

SEQ ID NO: 243137 - RNA, 32 nt, Homo Sapiens
gauagcggcggugcugggagggguaggugagg

SEQ ID NO: 243138 - RNA, 29 nt, Homo Sapiens
aauggggaauaaaaagauuuugugucaac

SEQ ID NO: 243139 - RNA, 32 nt, Homo Sapiens
gcggcugucgccgcggccccagcacccagagc

SEQ ID NO: 243140 - RNA, 30 nt, Homo Sapiens
cucugggucugugcugguggaacauugcca

SEQ ID NO: 243141 - RNA, 32 nt, Homo Sapiens
uuuggucugaagauguuuuacuuuaaauaaau

SEQ ID NO: 243142 - RNA, 32 nt, Homo Sapiens
cuaaaugaaaauuuacaucaaacuaguguuuu

SEQ ID NO: 243143 - RNA, 32 nt, Homo Sapiens
agaguuugccagcagcgagcucggaugcaucu

SEQ ID NO: 243144 - RNA, 32 nt, Homo Sapiens
cacacacacacacacacaaacacacacacaca

SEQ ID NO: 243145 - RNA, 32 nt, Homo Sapiens
caaacacacacacacacacacacacacacaca

SEQ ID NO: 243146 - RNA, 32 nt, Homo Sapiens
uauaaauauauaaauacaaacacacacacaca

SEQ ID NO: 243147 - RNA, 32 nt, Homo Sapiens
aaaccuuaaaaccaccugugacgaccccaaau

SEQ ID NO: 243148 - RNA, 32 nt, Homo Sapiens
agcugcgacuugguauuuuuuggaauaaauag

SEQ ID NO: 243149 - RNA, 32 nt, Homo Sapiens
ccuuggggccccaggagccucucaggagucua

SEQ ID NO: 243150 - RNA, 32 nt, Homo Sapiens
ucucuucauuuucuuucaucuacauggcugac

SEQ ID NO: 243151 - RNA, 31 nt, Homo Sapiens
ggcucggcgggcgucuucuccacuccucugc

SEQ ID NO: 243152 - RNA, 32 nt, Homo Sapiens
ugcugccacugagguguugugcaugauguuug

SEQ ID NO: 243153 - RNA, 32 nt, Homo Sapiens
ccuggcccugcccuggccgccacgcuggcugg

SEQ ID NO: 243154 - RNA, 32 nt, Homo Sapiens
uguggucuuuuuaaaaaauuguaacccucuag

SEQ ID NO: 243155 - RNA, 32 nt, Homo Sapiens
ucauucguuuaaaugauauuuuaauguaaaag

SEQ ID NO: 243156 - RNA, 32 nt, Homo Sapiens
agaauguagaaaguauucuguguccuugguua

SEQ ID NO: 243157 - RNA, 32 nt, Homo Sapiens
uauauagucaucuauuuuaauuaagcauauua

SEQ ID NO: 243158 - RNA, 32 nt, Homo Sapiens
gggggcucaggagccaucaaggcuguggggag

SEQ ID NO: 243159 - RNA, 32 nt, Homo Sapiens
guuucuccuucccuuucacacuccauguauau

SEQ ID NO: 243160 - RNA, 32 nt, Homo Sapiens
guguuuucccccucuuuggagacaagaaaauu

SEQ ID NO: 243161 - RNA, 32 nt, Homo Sapiens
gagagaauagcaugaacacaaaauguuuuccu

SEQ ID NO: 243162 - RNA, 32 nt, Homo Sapiens
gccauuguacuccagccugggcgacaaaagug

SEQ ID NO: 243163 - RNA, 32 nt, Homo Sapiens
cagaaggcaagaaauaacuaagaucagagcag

SEQ ID NO: 243164 - RNA, 32 nt, Homo Sapiens
acaauaugccggaauugggguucgugccuccu

SEQ ID NO: 243165 - RNA, 32 nt, Homo Sapiens
gcacagagcagagaagcagagauguuccuuga

SEQ ID NO: 243166 - RNA, 32 nt, Homo Sapiens
aacuggauggcuggcuggcccggggcugcccc

SEQ ID NO: 243167 - RNA, 32 nt, Homo Sapiens
cggcccggggaguuucgcccccugcccggcuc

SEQ ID NO: 243168 - RNA, 32 nt, Homo Sapiens
uaaaagcugaucugguuugacuccgcuggagg

SEQ ID NO: 243169 - RNA, 32 nt, Homo Sapiens
uugugugaacucucggcuguuuucguugucug

SEQ ID NO: 243170 - RNA, 32 nt, Homo Sapiens
acgacuauuucuucuuuuuaauacacuuaacu

SEQ ID NO: 243171 - RNA, 32 nt, Homo Sapiens
caccacuucacucaggcugcagcccucuuggg

SEQ ID NO: 243172 - RNA, 32 nt, Homo Sapiens
ggccaccacuccccugccccagcucgagccag

SEQ ID NO: 243173 - RNA, 32 nt, Homo Sapiens
aauugaaaaaucaagguuuuuuaauacuuuaa

SEQ ID NO: 243174 - RNA, 32 nt, Homo Sapiens
ugaacugacaaugaagggaaauuguuuaugug

SEQ ID NO: 243175 - RNA, 32 nt, Homo Sapiens
gagcuguuuccguuccucugcccgccaugccg

SEQ ID NO: 243176 - RNA, 29 nt, Homo Sapiens
aacugucauguacagugaaaguacacguc

SEQ ID NO: 243177 - RNA, 32 nt, Homo Sapiens
uaucuccuuuuaucuggugccuccucaaaccc

SEQ ID NO: 243178 - RNA, 32 nt, Homo Sapiens
ccuucuggagcuggccagguccucugcagcag

SEQ ID NO: 243179 - RNA, 32 nt, Homo Sapiens
uuauuuuccuucccuuucuugaagaacaaaaa

SEQ ID NO: 243180 - RNA, 32 nt, Homo Sapiens
gaccauaugcugucaugaaaguagcaccccga

SEQ ID NO: 243181 - RNA, 32 nt, Homo Sapiens
ggcgacagccauggccggcgcgcuggcagguc

SEQ ID NO: 243182 - RNA, 32 nt, Homo Sapiens
uugccuagaucccccaucuccuccuuccagcc

SEQ ID NO: 243183 - RNA, 30 nt, Homo Sapiens
ccggcaugcucugcggccgcccgcggucca

SEQ ID NO: 243184 - RNA, 32 nt, Homo Sapiens
ugcccuauggcccaccaaguuugaggagggug

SEQ ID NO: 243185 - RNA, 32 nt, Homo Sapiens
ugugagcgucucuggcacacacacuuggacau

SEQ ID NO: 243186 - RNA, 32 nt, Homo Sapiens
uaucauuuucuuuagucuuuuauuuucugcug

SEQ ID NO: 243187 - RNA, 32 nt, Homo Sapiens
caguuaagguuaggaagaacaagaugccauaa

SEQ ID NO: 243188 - RNA, 29 nt, Homo Sapiens
ucgcgggccgaggacgccucuggggcggc

SEQ ID NO: 243189 - RNA, 32 nt, Homo Sapiens
gacccuccuccacuccaccuccacccacuguc

SEQ ID NO: 243190 - RNA, 32 nt, Homo Sapiens
auaaacugacauaauauuaucuguaaaagcau

SEQ ID NO: 243191 - RNA, 32 nt, Homo Sapiens
aggggaggccgagcaggcugcagacccagcca

SEQ ID NO: 243192 - RNA, 30 nt, Homo Sapiens
uagggagccgcggccgcgggucacccggcg

SEQ ID NO: 243193 - RNA, 32 nt, Homo Sapiens
aacaaauagucuuuuuuuuuuuuuuuuuuuuu

SEQ ID NO: 243194 - RNA, 32 nt, Homo Sapiens
cccagaccuccacacuccauggagacucaguu

SEQ ID NO: 243195 - RNA, 32 nt, Homo Sapiens
acuucacagggccaguauucuuuuuaccaugu

SEQ ID NO: 243196 - RNA, 32 nt, Homo Sapiens
aggggggauggggggaugcugcuggaggucuc

SEQ ID NO: 243197 - RNA, 32 nt, Homo Sapiens
gcggagaacaagucggcuguggagaugcggaa

SEQ ID NO: 243198 - RNA, 32 nt, Homo Sapiens
uucacaagugaacaguggaguuuuacagaagc

SEQ ID NO: 243199 - RNA, 32 nt, Homo Sapiens
cgccucagucgccagcgccgggcgcaguccgc

SEQ ID NO: 243200 - RNA, 30 nt, Homo Sapiens
aagggugccugaacgccgccggucaccucc

SEQ ID NO: 243201 - RNA, 32 nt, Homo Sapiens
cgugcaccuuccucgggcacugaccccugccc

SEQ ID NO: 243202 - RNA, 32 nt, Homo Sapiens
uuuuagucaacacauaauggaaacuucuuucu

SEQ ID NO: 243203 - RNA, 32 nt, Homo Sapiens
gagcagugucuuccauaauguauaaagaacaa

SEQ ID NO: 243204 - RNA, 30 nt, Homo Sapiens
ucacuggauaaaaugagaauuguauauuug

SEQ ID NO: 243205 - RNA, 32 nt, Homo Sapiens
ucaaggaaacacacuggauacugccuacugac

SEQ ID NO: 243206 - RNA, 32 nt, Homo Sapiens
aaguggcacugaggcucuggaacuucugccca

SEQ ID NO: 243207 - RNA, 32 nt, Homo Sapiens
cuguuuacuaaggagcuaaaccacugagaaaa

SEQ ID NO: 243208 - RNA, 32 nt, Homo Sapiens
uaacugcuaugacuuugaaaugucucuuucua

SEQ ID NO: 243209 - RNA, 32 nt, Homo Sapiens
aggcggugcuccuggggugccgggaccgggca

SEQ ID NO: 243210 - RNA, 32 nt, Homo Sapiens
cuuuugggagaaacuuuuugucuccauuccuu

SEQ ID NO: 243211 - RNA, 32 nt, Homo Sapiens
agaucacacauauaaacuuauuucuaaaauua

SEQ ID NO: 243212 - RNA, 32 nt, Homo Sapiens
ugucaaccucgccgcuuuucgccuccuuaaug

SEQ ID NO: 243213 - RNA, 32 nt, Homo Sapiens
cuuucucgcacacacacacacacacacacaca

SEQ ID NO: 243214 - RNA, 32 nt, Homo Sapiens
ugaaauguuuuaaauuugugaacucguaauua

SEQ ID NO: 243215 - RNA, 32 nt, Homo Sapiens
ugcuguaagcaguuuuucuacuuuuaaagacc

SEQ ID NO: 243216 - RNA, 32 nt, Homo Sapiens
cuuaggucuugccacaaaaaucugcaaauuug

SEQ ID NO: 243217 - RNA, 32 nt, Homo Sapiens
cuaauuuauaauuuaaauuuauuuguaaaaag

SEQ ID NO: 243218 - RNA, 32 nt, Homo Sapiens
ucgcaccugcagcagagccggcucccggagca

SEQ ID NO: 243219 - RNA, 32 nt, Homo Sapiens
ccuaggcaacugucugccccgccccgcgcccc

SEQ ID NO: 243220 - RNA, 32 nt, Homo Sapiens
cugagaugcugacccagcauggagcccaagag

SEQ ID NO: 243221 - RNA, 32 nt, Homo Sapiens
uuaggucuaaaaugagaaaaaagagagaaaac

SEQ ID NO: 243222 - RNA, 31 nt, Homo Sapiens
cacgcacggcacugccccaccuccgcccgga

SEQ ID NO: 243223 - RNA, 32 nt, Homo Sapiens
cuccuuuuguuucucccaaacaucugucccug

SEQ ID NO: 243224 - RNA, 32 nt, Homo Sapiens
gcaaccucugcgggcucacgcaauccuccugc

SEQ ID NO: 243225 - RNA, 29 nt, Homo Sapiens
agacgccggggacagaggccugcccgggc

SEQ ID NO: 243226 - RNA, 31 nt, Homo Sapiens
ccaggaagaaccgcucucagauaguccuguu

SEQ ID NO: 243227 - RNA, 32 nt, Homo Sapiens
gugggugguggaggguggcccguaaguuugag

SEQ ID NO: 243228 - RNA, 32 nt, Homo Sapiens
gcaugggguaggugugaaccguuacaacauug

SEQ ID NO: 243229 - RNA, 32 nt, Homo Sapiens
gcugcccagcgcccagcgugcacgggacggcc

SEQ ID NO: 243230 - RNA, 32 nt, Homo Sapiens
aggcggguggaccaccugaggucaggaguuca

SEQ ID NO: 243231 - RNA, 32 nt, Homo Sapiens
ugugcuucaaccaaucuaaauuggauucuuua

SEQ ID NO: 243232 - RNA, 32 nt, Homo Sapiens
guuauugaucuugccaucuuuauuuaaaacca

SEQ ID NO: 243233 - RNA, 32 nt, Homo Sapiens
guugaagacgagcagagauauuaaauuauaac

SEQ ID NO: 243234 - RNA, 30 nt, Homo Sapiens
ccgcaugucugcauggcagaagcgucuccc

SEQ ID NO: 243235 - RNA, 32 nt, Homo Sapiens
gccaucaaugaccccuucauugaccugaacua

SEQ ID NO: 243236 - RNA, 32 nt, Homo Sapiens
aaacauuuuuaaagggcugguuauucuuccug

SEQ ID NO: 243237 - RNA, 32 nt, Homo Sapiens
ucuuauacuaauuuauacaaagauauuaaggc

SEQ ID NO: 243238 - RNA, 32 nt, Homo Sapiens
uaugacuguccuguuucccccaggccacuuuu

SEQ ID NO: 243239 - RNA, 32 nt, Homo Sapiens
ccauggguguaaaccccucuagugacauuugc

SEQ ID NO: 243240 - RNA, 31 nt, Homo Sapiens
uaauggaaauaaaacaggauauugacauaau

SEQ ID NO: 243241 - RNA, 32 nt, Homo Sapiens
cugcugcccuaugguucuggcuccuacccccu

SEQ ID NO: 243242 - RNA, 32 nt, Homo Sapiens
cuggagguuugugcaauuugagaccggucggc

SEQ ID NO: 243243 - RNA, 32 nt, Homo Sapiens
ccuuuucagcagaaggcacagaacaguagcgg

SEQ ID NO: 243244 - RNA, 32 nt, Homo Sapiens
ugccuggcugguuuuuguauuuuuaguagagg

SEQ ID NO: 243245 - RNA, 32 nt, Homo Sapiens
ugauaaaaucauaaguauuuggaauuagaacc

SEQ ID NO: 243246 - RNA, 32 nt, Homo Sapiens
ggcucaguauguuagaggggccaggcagcggg

SEQ ID NO: 243247 - RNA, 32 nt, Homo Sapiens
gccaagugggcccggagaccccggcccgaggc

SEQ ID NO: 243248 - RNA, 32 nt, Homo Sapiens
aaaauaaaggucagcaauuauuuuauaauuuc

SEQ ID NO: 243249 - RNA, 32 nt, Homo Sapiens
cagccgucgucuccgcgcucccggggauccag

SEQ ID NO: 243250 - RNA, 32 nt, Homo Sapiens
gcgcgucuucgcgacccucggcugggcccgcc

SEQ ID NO: 243251 - RNA, 32 nt, Homo Sapiens
gcccguuccuuggcugccccggcuucugcacu

SEQ ID NO: 243252 - RNA, 32 nt, Homo Sapiens
ugugaaaggauccacauuaauucuucagaggc

SEQ ID NO: 243253 - RNA, 32 nt, Homo Sapiens
cucccgauuugcaaauuuucgaaacaacaaag

SEQ ID NO: 243254 - RNA, 32 nt, Homo Sapiens
uugccugguaucauugagcccacacauggagg

SEQ ID NO: 243255 - RNA, 32 nt, Homo Sapiens
ggcuagcugcgcauagcucuugacacucccgg

SEQ ID NO: 243256 - RNA, 32 nt, Homo Sapiens
aagaaggaacaaaaauauuauuucuauguaau

SEQ ID NO: 243257 - RNA, 32 nt, Homo Sapiens
uugguugaugcuuuuuuaaaagaaucaauuau

SEQ ID NO: 243258 - RNA, 32 nt, Homo Sapiens
acuccugggcuccagugauccucccccuucag

SEQ ID NO: 243259 - RNA, 32 nt, Homo Sapiens
cgaaaacccuuaugacuccccccuuccaaauc

SEQ ID NO: 243260 - RNA, 30 nt, Homo Sapiens
auaacacgggaagugggggaaaaggaggug

SEQ ID NO: 243261 - RNA, 32 nt, Homo Sapiens
gguagccacgccugcuggcuggcgugcgugaa

SEQ ID NO: 243262 - RNA, 32 nt, Homo Sapiens
auguaugucuuuauuacccauccaagcauuag

SEQ ID NO: 243263 - RNA, 32 nt, Homo Sapiens
uaacuccuuugauugaaggagcucuuuugucc

SEQ ID NO: 243264 - RNA, 32 nt, Homo Sapiens
cuuucucuuuuggacaauaguuaaauuagcag

SEQ ID NO: 243265 - RNA, 32 nt, Homo Sapiens
aaauguguauuaucagaaagaauaauggcuuu

SEQ ID NO: 243266 - RNA, 32 nt, Homo Sapiens
caaaagagaacaucuuuuuuuuaaucguaguu

SEQ ID NO: 243267 - RNA, 32 nt, Homo Sapiens
gguauuaaaaacagggguuggggggagugcuu

SEQ ID NO: 243268 - RNA, 32 nt, Homo Sapiens
gccccucucugcagccucuccugccacucggg

SEQ ID NO: 243269 - RNA, 32 nt, Homo Sapiens
acucuggaauuucccuaccaauaaaagcaaau

SEQ ID NO: 243270 - RNA, 32 nt, Homo Sapiens
augcucuucccuccccucgaguguggguaggg

SEQ ID NO: 243271 - RNA, 31 nt, Homo Sapiens
uggaacggagccgugcggccccgcgcgcucg

SEQ ID NO: 243272 - RNA, 30 nt, Homo Sapiens
ggcccccaugcucaugggccgcggagugug

SEQ ID NO: 243273 - RNA, 32 nt, Homo Sapiens
agauggaggaagaccuggggugggggugguac

SEQ ID NO: 243274 - RNA, 32 nt, Homo Sapiens
uggguacaggacucguucuacugccuggaagg

SEQ ID NO: 243275 - RNA, 32 nt, Homo Sapiens
uagguagcauguaucuggucuuaacucugauu

SEQ ID NO: 243276 - RNA, 32 nt, Homo Sapiens
gccaacuccgcuccccgcgcacucggcugccc

SEQ ID NO: 243277 - RNA, 32 nt, Homo Sapiens
cuuguuaagaaaguacaguauuggaaauuaaa

SEQ ID NO: 243278 - RNA, 32 nt, Homo Sapiens
uguuuuuuaaaccagcucuucauuucauugau

SEQ ID NO: 243279 - RNA, 28 nt, Homo Sapiens
cugaggcaggagaaucauuugaacccgg

SEQ ID NO: 243280 - RNA, 32 nt, Homo Sapiens
aagaauccagacccacuucuccaggcguaugc

SEQ ID NO: 243281 - RNA, 32 nt, Homo Sapiens
cggcggcagcagcggcagcagcgacuucagcg

SEQ ID NO: 243282 - RNA, 32 nt, Homo Sapiens
gaguggaccccguggguguccuggacccgcug

SEQ ID NO: 243283 - RNA, 32 nt, Homo Sapiens
gaaaaguagagaaauggauucaguauaaggau

SEQ ID NO: 243284 - RNA, 32 nt, Homo Sapiens
gggagcccugggagaccccuucccccacccuc

SEQ ID NO: 243285 - RNA, 32 nt, Homo Sapiens
cccgcccuuccagcugaggacaggcuggcgcc

SEQ ID NO: 243286 - RNA, 32 nt, Homo Sapiens
ugaauaggguggcagucccuggcugcugaggg

SEQ ID NO: 243287 - RNA, 32 nt, Homo Sapiens
gauacuuauuguacucuguguacaguaaguau

SEQ ID NO: 243288 - RNA, 32 nt, Homo Sapiens
cucuuuguggggaagaggggcuggggcauggc

SEQ ID NO: 243289 - RNA, 32 nt, Homo Sapiens
ugaugggaaauuauuugucaagcaaauguuua

SEQ ID NO: 243290 - RNA, 32 nt, Homo Sapiens
cugacaaaaccucagcagcagaagucccuauu

SEQ ID NO: 243291 - RNA, 32 nt, Homo Sapiens
agcagugaacaaacccccacuccguuguauuu

SEQ ID NO: 243292 - RNA, 32 nt, Homo Sapiens
guucugaccuuuuuuguccaguuucuuugggg

SEQ ID NO: 243293 - RNA, 32 nt, Homo Sapiens
ccauacuuggcugcuuccugugacagugaaau

SEQ ID NO: 243294 - RNA, 32 nt, Homo Sapiens
ccaaagagucaucuuuucugcuguguuuagga

SEQ ID NO: 243295 - RNA, 32 nt, Homo Sapiens
uuuuggauaauuggaaaccuucaucacugagg

SEQ ID NO: 243296 - RNA, 32 nt, Homo Sapiens
ccacuuacacuguguguccccauccccagcag

SEQ ID NO: 243297 - RNA, 32 nt, Homo Sapiens
gauaucuguauauauugcauuuuguugauuuu

SEQ ID NO: 243298 - RNA, 32 nt, Homo Sapiens
gcuaacugguuuuaccgguuaggguagacuag

SEQ ID NO: 243299 - RNA, 32 nt, Homo Sapiens
aguggaggaagcuaagugcugcuguuucuuua

SEQ ID NO: 243300 - RNA, 32 nt, Homo Sapiens
ugaaaccguguauacuaacaagcguacaauuu

SEQ ID NO: 243301 - RNA, 32 nt, Homo Sapiens
cuccauuggcccggcagccagcucugcagagc

SEQ ID NO: 243302 - RNA, 32 nt, Homo Sapiens
uuucagccgcgcuucagcgaugacuccagucu

SEQ ID NO: 243303 - RNA, 32 nt, Homo Sapiens
ggagggguggaggcugcggggagccggggucg

SEQ ID NO: 243304 - RNA, 32 nt, Homo Sapiens
uguguuucugccaggacucugcucuuucccuc

SEQ ID NO: 243305 - RNA, 32 nt, Homo Sapiens
gaagauguuuaguagcaauuaaaggcuguuug

SEQ ID NO: 243306 - RNA, 32 nt, Homo Sapiens
cugcuguccuucccaccuucccugagcagcac

SEQ ID NO: 243307 - RNA, 32 nt, Homo Sapiens
uuuccauguccccucccagagcugguggaccc

SEQ ID NO: 243308 - RNA, 32 nt, Homo Sapiens
ucaccacccagcugcagcccaggaggcacacg

SEQ ID NO: 243309 - RNA, 32 nt, Homo Sapiens
ccacucacucccuagcuguguucccgccgccg

SEQ ID NO: 243310 - RNA, 30 nt, Homo Sapiens
agucuagagaagcauuugguaagcuuuaug

SEQ ID NO: 243311 - RNA, 32 nt, Homo Sapiens
agagcccgcaugcccuagacucacuccagagg

SEQ ID NO: 243312 - RNA, 32 nt, Homo Sapiens
aagguaggggguagggggagccugggucuugg

SEQ ID NO: 243313 - RNA, 32 nt, Homo Sapiens
uggagggcagaggcccuuuggucugcuggcug

SEQ ID NO: 243314 - RNA, 32 nt, Homo Sapiens
agcagugaaaaugaauauaaaaaaggugacau

SEQ ID NO: 243315 - RNA, 32 nt, Homo Sapiens
gguccugucugcuuccucaccuugagaguaaa

SEQ ID NO: 243316 - RNA, 32 nt, Homo Sapiens
caggcaggagcuuguggccaugcuaucaacuu

SEQ ID NO: 243317 - RNA, 32 nt, Homo Sapiens
gaggggcgugucugggggcgggggcaggaggg

SEQ ID NO: 243318 - RNA, 32 nt, Homo Sapiens
uucuuuuguauauaauucuuagaaugcucauu

SEQ ID NO: 243319 - RNA, 32 nt, Homo Sapiens
caggcgcgaugauggacuccccguuccuggag

SEQ ID NO: 243320 - RNA, 32 nt, Homo Sapiens
cuccuaagccgcccucccucugauggaugcau

SEQ ID NO: 243321 - RNA, 32 nt, Homo Sapiens
auuugcacagugauguuaacugaccuggcacu

SEQ ID NO: 243322 - RNA, 32 nt, Homo Sapiens
cauuugaauuuguuuuaagucaucugcauggg

SEQ ID NO: 243323 - RNA, 32 nt, Homo Sapiens
aauaagugcccucucccacccucuuccuacug

SEQ ID NO: 243324 - RNA, 32 nt, Homo Sapiens
guggugagaaauuguaaacaaaaacugacauu

SEQ ID NO: 243325 - RNA, 32 nt, Homo Sapiens
ucugggggccccaguccccggcagcucuuguc

SEQ ID NO: 243326 - RNA, 32 nt, Homo Sapiens
uccgauacuaaaaugucugaugaugcugguga

SEQ ID NO: 243327 - RNA, 32 nt, Homo Sapiens
auucccuaguuacuaucucuaagcacugaagu

SEQ ID NO: 243328 - RNA, 27 nt, Homo Sapiens
aguuuuagucucuucagcacccucagc

SEQ ID NO: 243329 - RNA, 30 nt, Homo Sapiens
ucugcaguagccuuuugugagucugcuaag

SEQ ID NO: 243330 - RNA, 32 nt, Homo Sapiens
cggcugaggguggggaagcgcagggccaagcg

SEQ ID NO: 243331 - RNA, 32 nt, Homo Sapiens
gggaccugggccgcgcugccaggaccucugcu

SEQ ID NO: 243332 - RNA, 32 nt, Homo Sapiens
cagccaaauuugggcggccacccccgccucca

SEQ ID NO: 243333 - RNA, 32 nt, Homo Sapiens
guuauuuccagcuuuaaaggugagauuguaga

SEQ ID NO: 243334 - RNA, 32 nt, Homo Sapiens
cauucucgugucucugcgcccgcgggggccgc

SEQ ID NO: 243335 - RNA, 32 nt, Homo Sapiens
auuggccgggugcgguggcgcgugccuguggu

SEQ ID NO: 243336 - RNA, 32 nt, Homo Sapiens
ggccccagcaaggcccaugagugacugcccug

SEQ ID NO: 243337 - RNA, 32 nt, Homo Sapiens
acgccaccaucuaccaguggggacgcccaggg

SEQ ID NO: 243338 - RNA, 32 nt, Homo Sapiens
aacacggugcugggcuuucggguucacaggau

SEQ ID NO: 243339 - RNA, 32 nt, Homo Sapiens
uacccacacccuccccacggaagggcauaaag

SEQ ID NO: 243340 - RNA, 32 nt, Homo Sapiens
ggcugagggcccuccccuccccucugccuguc

SEQ ID NO: 243341 - RNA, 32 nt, Homo Sapiens
cugagggaccgagccggagagccccggagccc

SEQ ID NO: 243342 - RNA, 32 nt, Homo Sapiens
uauaugguauauaaaacuuuguuuucaucaga

SEQ ID NO: 243343 - RNA, 29 nt, Homo Sapiens
ggaaaugcacggaauccugggggcaugug

SEQ ID NO: 243344 - RNA, 32 nt, Homo Sapiens
aacggggugaguuguuucuuuuagugcauuuc

SEQ ID NO: 243345 - RNA, 32 nt, Homo Sapiens
ucuguagcuauuuuccucccuuucucuguacc

SEQ ID NO: 243346 - RNA, 32 nt, Homo Sapiens
ccaucucccaccagccuccccucccccagggc

SEQ ID NO: 243347 - RNA, 32 nt, Homo Sapiens
cuccaacaagggcugcaguucuagugauaaau

SEQ ID NO: 243348 - RNA, 32 nt, Homo Sapiens
aggccuguuucauaaucuguguuuuucuccgg

SEQ ID NO: 243349 - RNA, 29 nt, Homo Sapiens
ggcaacauagugagacugucucuaacuua

SEQ ID NO: 243350 - RNA, 32 nt, Homo Sapiens
uuauuuauuuucuuuacaguggcacucaggcu

SEQ ID NO: 243351 - RNA, 32 nt, Homo Sapiens
aauuuuguuuuaaagaaaucaccagagaaacc

SEQ ID NO: 243352 - RNA, 32 nt, Homo Sapiens
uguguuuuaagugcccagugaacacaguucca

SEQ ID NO: 243353 - RNA, 32 nt, Homo Sapiens
aaaaaauauguugaaucagauuuuuuaaaagg

SEQ ID NO: 243354 - RNA, 32 nt, Homo Sapiens
caaggcugggcaguguccgagagagcaccccu

SEQ ID NO: 243355 - RNA, 32 nt, Homo Sapiens
ugugggauggaaagauucugugggaugcaaaa

SEQ ID NO: 243356 - RNA, 32 nt, Homo Sapiens
aggccggcagcgcccacccggucgcaauggag

SEQ ID NO: 243357 - RNA, 32 nt, Homo Sapiens
auggcgacgggauggagcgcgaggggagcggc

SEQ ID NO: 243358 - RNA, 32 nt, Homo Sapiens
gcagcaguggcagcugcaguagcggcagcagc

SEQ ID NO: 243359 - RNA, 32 nt, Homo Sapiens
cacccgcggacucagggcuggcggcgggacuc

SEQ ID NO: 243360 - RNA, 32 nt, Homo Sapiens
acauuaucuaauuaaguggcucugccacuuga

SEQ ID NO: 243361 - RNA, 32 nt, Homo Sapiens
uggucaucuccccucccgccccgccccugcgc

SEQ ID NO: 243362 - RNA, 32 nt, Homo Sapiens
cccugcuggugcccaagaccaccguggaagga

SEQ ID NO: 243363 - RNA, 32 nt, Homo Sapiens
ccacagcggcgcccggcacugagcuggacagu

SEQ ID NO: 243364 - RNA, 32 nt, Homo Sapiens
gugguggaaggggggaggugcuagcagggcca

SEQ ID NO: 243365 - RNA, 32 nt, Homo Sapiens
cucaccuucuucugcccccacgccuguccuuc

SEQ ID NO: 243366 - RNA, 32 nt, Homo Sapiens
aaaguaagaagacaccaauugagaaaucugau

SEQ ID NO: 243367 - RNA, 32 nt, Homo Sapiens
cugcccugccccaccagggcccugcauguugg

SEQ ID NO: 243368 - RNA, 32 nt, Homo Sapiens
cggugaagaacaagcacaagauuaaggaguaa

SEQ ID NO: 243369 - RNA, 32 nt, Homo Sapiens
uggggcagcagguggcucuucugcuggggcug

SEQ ID NO: 243370 - RNA, 32 nt, Homo Sapiens
cgcuggggccuggccucgcccacgguggaucc

SEQ ID NO: 243371 - RNA, 31 nt, Homo Sapiens
accgggcagcagccaaggacacuuaccugug

SEQ ID NO: 243372 - RNA, 31 nt, Homo Sapiens
cuuggugaaacugaaaaaguauaucauaugg

SEQ ID NO: 243373 - RNA, 32 nt, Homo Sapiens
ucuuuucuuuuuucuuuuuuuguucuuccuuc

SEQ ID NO: 243374 - RNA, 32 nt, Homo Sapiens
uucuguauguauauacuagugaaacauauuua

SEQ ID NO: 243375 - RNA, 32 nt, Homo Sapiens
gcaacaaggguccguggaccaggaggauugcc

SEQ ID NO: 243376 - RNA, 32 nt, Homo Sapiens
aggcagaaaaggaagaggggcugcagacagag

SEQ ID NO: 243377 - RNA, 32 nt, Homo Sapiens
guggcccaucuggaagagcagcuccgagagaa

SEQ ID NO: 243378 - RNA, 32 nt, Homo Sapiens
acuauuuauaugcccugaccaccauaggaugc

SEQ ID NO: 243379 - RNA, 32 nt, Homo Sapiens
agcuacuguuugguggggaucuggguucaucu

SEQ ID NO: 243380 - RNA, 32 nt, Homo Sapiens
aaagcaccagugcccagagucugcucgguaau

SEQ ID NO: 243381 - RNA, 30 nt, Homo Sapiens
guuucauggggcgauugcagcgauuccccc

SEQ ID NO: 243382 - RNA, 32 nt, Homo Sapiens
caaggagucaguacucagucccugaguguggc

SEQ ID NO: 243383 - RNA, 32 nt, Homo Sapiens
acagaaucacacaacuagaaagugucaccuau

SEQ ID NO: 243384 - RNA, 32 nt, Homo Sapiens
cagcuugccccggccccggccccagccagagu

SEQ ID NO: 243385 - RNA, 32 nt, Homo Sapiens
cacugugguguccagcagcauccggcuucaug

SEQ ID NO: 243386 - RNA, 32 nt, Homo Sapiens
gcggcgccucccgcccugcgacgaguucgugg

SEQ ID NO: 243387 - RNA, 32 nt, Homo Sapiens
auucucacccaguuccucucuccuucccugac

SEQ ID NO: 243388 - RNA, 32 nt, Homo Sapiens
ugcggcccgagaccgggcagaguggaccucac

SEQ ID NO: 243389 - RNA, 32 nt, Homo Sapiens
uuucucauuauguuacuucuaguguucaccuc

SEQ ID NO: 243390 - RNA, 28 nt, Homo Sapiens
uauucaagagagcuacauuugaagccug

SEQ ID NO: 243391 - RNA, 32 nt, Homo Sapiens
uagaagaaaaaauuauuaucaccagauauucu

SEQ ID NO: 243392 - RNA, 32 nt, Homo Sapiens
ucagaaagaugaaaacuaagaaguaaucaaug

SEQ ID NO: 243393 - RNA, 31 nt, Homo Sapiens
gauggcaauaucuaaaaccaggcaccagcau

SEQ ID NO: 243394 - RNA, 32 nt, Homo Sapiens
ggggagguggcagccacagaagccuagggcag

SEQ ID NO: 243395 - RNA, 32 nt, Homo Sapiens
caaaauuugcugucaccuuaaauaagacauuu

SEQ ID NO: 243396 - RNA, 32 nt, Homo Sapiens
gcaccgcggcgguggugcccagagcggagcgc

SEQ ID NO: 243397 - RNA, 32 nt, Homo Sapiens
ccucacaaccucagccuggccuucaugacuuc

SEQ ID NO: 243398 - RNA, 32 nt, Homo Sapiens
ggggugaaagagaggggaggcuugccuuugag

SEQ ID NO: 243399 - RNA, 32 nt, Homo Sapiens
uaaaguuaaacaaauugauuuacuucagagca

SEQ ID NO: 243400 - RNA, 32 nt, Homo Sapiens
auagcacuacuacugucagauuuuaaauugua

SEQ ID NO: 243401 - RNA, 32 nt, Homo Sapiens
aagcuccaagcaugucugggccaggcagaggu

SEQ ID NO: 243402 - RNA, 32 nt, Homo Sapiens
gggcaccccuauaauauagacacuugcaugcc

SEQ ID NO: 243403 - RNA, 32 nt, Homo Sapiens
ccucccccaagccccuuuaccuaugcugcugc

SEQ ID NO: 243404 - RNA, 32 nt, Homo Sapiens
uggcugcuaggaccggcgggcuggguguucac

SEQ ID NO: 243405 - RNA, 32 nt, Homo Sapiens
ucuacccuaccccucccaucggggcugugcug

SEQ ID NO: 243406 - RNA, 30 nt, Homo Sapiens
ugcauaggcaggcugaggaggucacuaagg

SEQ ID NO: 243407 - RNA, 32 nt, Homo Sapiens
caaaaacauacuuuuccaaacccaggcuauuc

SEQ ID NO: 243408 - RNA, 32 nt, Homo Sapiens
cacaaucauggcguauauaguuucaccgagcc

SEQ ID NO: 243409 - RNA, 32 nt, Homo Sapiens
aaaaacuuguauuuugcuuuuaucuaauaaau

SEQ ID NO: 243410 - RNA, 29 nt, Homo Sapiens
cuaaacaugacgauugcuauaaaaauaaa

SEQ ID NO: 243411 - RNA, 31 nt, Homo Sapiens
gccgugcaauaaauaucugccgugaacagug

SEQ ID NO: 243412 - RNA, 32 nt, Homo Sapiens
agugggagguugguggugccuccagcccauca

SEQ ID NO: 243413 - RNA, 32 nt, Homo Sapiens
cucugcucaacccaagcuucuccagauggaga

SEQ ID NO: 243414 - RNA, 32 nt, Homo Sapiens
auauguacgaauauauacuaauaauuaguaua

SEQ ID NO: 243415 - RNA, 32 nt, Homo Sapiens
gaacacuuguacaaaauagauuuuaaggcuaa

SEQ ID NO: 243416 - RNA, 32 nt, Homo Sapiens
ugaugggcacuaggagaccucaggguacugcc

SEQ ID NO: 243417 - RNA, 32 nt, Homo Sapiens
uuugaaaaaaauuuuuauuguaugguuaugug

SEQ ID NO: 243418 - RNA, 32 nt, Homo Sapiens
auuagcuggguguuugugugggauaaauacua

SEQ ID NO: 243419 - RNA, 32 nt, Homo Sapiens
cuagccgauggaaaauaccuaauuguggauga

SEQ ID NO: 243420 - RNA, 32 nt, Homo Sapiens
uguuuaauuacaucuguaaauauuaugugugu

SEQ ID NO: 243421 - RNA, 32 nt, Homo Sapiens
uguugaaagcaacuagcacuccuccuuccuga

SEQ ID NO: 243422 - RNA, 32 nt, Homo Sapiens
auaugccuguuacagauaacuacauuaggaau

SEQ ID NO: 243423 - RNA, 32 nt, Homo Sapiens
uccaugaauucuucuuuucucagcacguguuc

SEQ ID NO: 243424 - RNA, 32 nt, Homo Sapiens
caaggugcugaugugaugucacaaccuccgcu

SEQ ID NO: 243425 - RNA, 32 nt, Homo Sapiens
ugcacagaguuaccuugagccaaauacaaguu

SEQ ID NO: 243426 - RNA, 32 nt, Homo Sapiens
gagguggugaccugaggccagugugauguggu

SEQ ID NO: 243427 - RNA, 32 nt, Homo Sapiens
uggacuuaccaguaaaaucaaaugagaggacc

SEQ ID NO: 243428 - RNA, 32 nt, Homo Sapiens
gcguggauguugcauuugugucaucuuaucca

SEQ ID NO: 243429 - RNA, 32 nt, Homo Sapiens
gaaugacauaucuuuaguauuuacguagcuua

SEQ ID NO: 243430 - RNA, 32 nt, Homo Sapiens
uauuggagaagcuuugagcacgaguuaaaucu

SEQ ID NO: 243431 - RNA, 32 nt, Homo Sapiens
uugagugugaugcugaugucagggcugcccac

SEQ ID NO: 243432 - RNA, 32 nt, Homo Sapiens
uucucagccccucccuccauggagggacccau

SEQ ID NO: 243433 - RNA, 32 nt, Homo Sapiens
aucccuaauugcuccuucucaccuccucucag

SEQ ID NO: 243434 - RNA, 32 nt, Homo Sapiens
guacagcagccucggcggugccacccacugca

SEQ ID NO: 243435 - RNA, 32 nt, Homo Sapiens
uuuucagauuguggccuuuuauuauuggcugc

SEQ ID NO: 243436 - RNA, 32 nt, Homo Sapiens
ccaucugugcugugcgccccacaguagacgug

SEQ ID NO: 243437 - RNA, 32 nt, Homo Sapiens
gcagggagggagcaagcggggcugggagggcu

SEQ ID NO: 243438 - RNA, 32 nt, Homo Sapiens
uugaagcaaucuucauuaaugcagauaaaaca

SEQ ID NO: 243439 - RNA, 32 nt, Homo Sapiens
ggcguggaggaggaggcgggcuggguugcgcu

SEQ ID NO: 243440 - RNA, 32 nt, Homo Sapiens
gauaguguuaagguuuuaauucuuuccaacug

SEQ ID NO: 243441 - RNA, 32 nt, Homo Sapiens
uauuugauguaguuuucuuuuuuaaauuaauc

SEQ ID NO: 243442 - RNA, 32 nt, Homo Sapiens
ccagcccugcuugccuggcccuguccuggacc

SEQ ID NO: 243443 - RNA, 32 nt, Homo Sapiens
gaaagaagaauugguugucauaaagaaaacag

SEQ ID NO: 243444 - RNA, 32 nt, Homo Sapiens
cuuucaagaacgaguuauuuucagcugcugac

SEQ ID NO: 243445 - RNA, 32 nt, Homo Sapiens
gaaggucuaagggcauccugugccagggaaac

SEQ ID NO: 243446 - RNA, 32 nt, Homo Sapiens
ugaauccucccccaagcuguuccaggccagag

SEQ ID NO: 243447 - RNA, 32 nt, Homo Sapiens
aggggccucacagauuucacaaacaggagggc

SEQ ID NO: 243448 - RNA, 32 nt, Homo Sapiens
ugcccgcagcggcaggaugaaugauuucggaa

SEQ ID NO: 243449 - RNA, 32 nt, Homo Sapiens
agccccaugcccagcccugccuugguccccca

SEQ ID NO: 243450 - RNA, 32 nt, Homo Sapiens
ggcccuucccugggucucugcacugacucccc

SEQ ID NO: 243451 - RNA, 32 nt, Homo Sapiens
ugaaggguucuuccucccuacuguuaaccauu

SEQ ID NO: 243452 - RNA, 32 nt, Homo Sapiens
ucugccucuuuucucuccccagccugcccugu

SEQ ID NO: 243453 - RNA, 32 nt, Homo Sapiens
aagccgcgggguggagcaggggcagguaggug

SEQ ID NO: 243454 - RNA, 32 nt, Homo Sapiens
acacucccuucccaugacccaggcugggcaag

SEQ ID NO: 243455 - RNA, 32 nt, Homo Sapiens
gggcagcauccacuguuauuucggggcacugg

SEQ ID NO: 243456 - RNA, 32 nt, Homo Sapiens
uaccccuuucuuuuaguaccuaaauauguugu

SEQ ID NO: 243457 - RNA, 32 nt, Homo Sapiens
cuccgugacccccgcggcccgggccgcucuuu

SEQ ID NO: 243458 - RNA, 32 nt, Homo Sapiens
uucccugugccuuuuuugcauuuggcuuuauu

SEQ ID NO: 243459 - RNA, 32 nt, Homo Sapiens
aaacuuuucaaugaucaaaaaaugcugcagau

SEQ ID NO: 243460 - RNA, 32 nt, Homo Sapiens
ggagggggucccuccguccaaugggccuggcc

SEQ ID NO: 243461 - RNA, 32 nt, Homo Sapiens
acccgagcucacgccccgcggccgcuuuguug

SEQ ID NO: 243462 - RNA, 32 nt, Homo Sapiens
uagaaucccagccccagcaucuccaagcauag

SEQ ID NO: 243463 - RNA, 32 nt, Homo Sapiens
cuccgucccaggggagaaggagaggcgucugc

SEQ ID NO: 243464 - RNA, 30 nt, Homo Sapiens
accacacacgcgcagcccggagcgagucgg

SEQ ID NO: 243465 - RNA, 32 nt, Homo Sapiens
augcacucuggccugcuucuccaguuacuugc

SEQ ID NO: 243466 - RNA, 32 nt, Homo Sapiens
acccauuucuuaccaugcauuucucguucuuu

SEQ ID NO: 243467 - RNA, 32 nt, Homo Sapiens
ugaauuuccagagagggccacuucuacccccc

SEQ ID NO: 243468 - RNA, 32 nt, Homo Sapiens
agaugcucccaggguggacccacacauugucu

SEQ ID NO: 243469 - RNA, 32 nt, Homo Sapiens
gaagaaccgcggcaggggccaagccuccucaa

SEQ ID NO: 243470 - RNA, 32 nt, Homo Sapiens
gccuggagugggcgguacgcagacgcgcgcgg

SEQ ID NO: 243471 - RNA, 32 nt, Homo Sapiens
uaugggaggaacaaagacaaccacugggauca

SEQ ID NO: 243472 - RNA, 32 nt, Homo Sapiens
accaggcggaggggcugcuuuucugcccuucc

SEQ ID NO: 243473 - RNA, 32 nt, Homo Sapiens
cuggauuaucuacuacagaguguuauaacacc

SEQ ID NO: 243474 - RNA, 32 nt, Homo Sapiens
cuucuauccacuuuuaucuuuuaauaaauauc

SEQ ID NO: 243475 - RNA, 32 nt, Homo Sapiens
uucuugagauacauuucuuugaaaagcaauuc

SEQ ID NO: 243476 - RNA, 32 nt, Homo Sapiens
ggacccggggucgggcggcugggaggaggccc

SEQ ID NO: 243477 - RNA, 32 nt, Homo Sapiens
cccuccccacccauggugguacuggggaugca

SEQ ID NO: 243478 - RNA, 32 nt, Homo Sapiens
agcugguucuaccucuuccuggcuccuuuguu

SEQ ID NO: 243479 - RNA, 32 nt, Homo Sapiens
uucgccgccuggguugucaccggcgccgccgc

SEQ ID NO: 243480 - RNA, 32 nt, Homo Sapiens
ucucaugauaacacugaggcaguuuacuuaca

SEQ ID NO: 243481 - RNA, 32 nt, Homo Sapiens
gauggacuauuuuaccugccucucuuccugga

SEQ ID NO: 243482 - RNA, 32 nt, Homo Sapiens
ucccuggccaagccgccuccugugggagcucu

SEQ ID NO: 243483 - RNA, 31 nt, Homo Sapiens
ucuccauauuucaaaggaaaguuuuuaaaau

SEQ ID NO: 243484 - RNA, 32 nt, Homo Sapiens
aauaaacacacagaucugcaucugauagaacu

SEQ ID NO: 243485 - RNA, 32 nt, Homo Sapiens
aggugccggaagcugcgaaggugacacauggc

SEQ ID NO: 243486 - RNA, 32 nt, Homo Sapiens
ggaugcauguguuuugagucuauaaauauaga

SEQ ID NO: 243487 - RNA, 32 nt, Homo Sapiens
ucgacugcaauaaaacaagaugaccuuugcau

SEQ ID NO: 243488 - RNA, 32 nt, Homo Sapiens
uguggaggauggucggugguggugauggaggu

SEQ ID NO: 243489 - RNA, 32 nt, Homo Sapiens
ugcuuuuuucuuuuccaaaacaaaaaggcaag

SEQ ID NO: 243490 - RNA, 32 nt, Homo Sapiens
auaugcauaugccugagguguauaaagacauu

SEQ ID NO: 243491 - RNA, 32 nt, Homo Sapiens
caguguccuugacaagcauucauauuaacaua

SEQ ID NO: 243492 - RNA, 32 nt, Homo Sapiens
uguuaggagguaguagaccccagccucaaggc

SEQ ID NO: 243493 - RNA, 32 nt, Homo Sapiens
ggaugagcacaccuggcucaucacacuugcag

SEQ ID NO: 243494 - RNA, 32 nt, Homo Sapiens
gccgggcauaauggaauugcagaggacgucua

SEQ ID NO: 243495 - RNA, 32 nt, Homo Sapiens
auucaucuaccuguguguauguguguguuugu

SEQ ID NO: 243496 - RNA, 32 nt, Homo Sapiens
uauauucaucuuaaaaauuauguucuuuagac

SEQ ID NO: 243497 - RNA, 32 nt, Homo Sapiens
cacaagaccugccucccauccuggcagcccag

SEQ ID NO: 243498 - RNA, 32 nt, Homo Sapiens
agcagcuguggcggccggcgggacgacaaucc

SEQ ID NO: 243499 - RNA, 32 nt, Homo Sapiens
aaaagaagaaaauuauucaaauuuggacauuu

SEQ ID NO: 243500 - RNA, 32 nt, Homo Sapiens
ugagaaucagagacagaacauaaaaggccugg

SEQ ID NO: 243501 - RNA, 32 nt, Homo Sapiens
guugagauuucccggcgggucccggccucugc

SEQ ID NO: 243502 - RNA, 32 nt, Homo Sapiens
uguccuuaaccuuguuauguaugaaauauacg

SEQ ID NO: 243503 - RNA, 32 nt, Homo Sapiens
uuugaaaaucagugugauuccuuaauggccaa

SEQ ID NO: 243504 - RNA, 32 nt, Homo Sapiens
ucugggcgccgcgucgacggcggcuccgcagg

SEQ ID NO: 243505 - RNA, 32 nt, Homo Sapiens
ugcuguuuucuucaucuucucuaagccaagca

SEQ ID NO: 243506 - RNA, 30 nt, Homo Sapiens
ucauuguuguuuuugggggaagggguaugu

SEQ ID NO: 243507 - RNA, 32 nt, Homo Sapiens
aacugaaggcaaacagagccaaguauccuuca

SEQ ID NO: 243508 - RNA, 32 nt, Homo Sapiens
ugucaccugccccaagccucgcaccuccgcuc

SEQ ID NO: 243509 - RNA, 32 nt, Homo Sapiens
ccauaguuauauaaaaauaaaggucauucuga

SEQ ID NO: 243510 - RNA, 32 nt, Homo Sapiens
ggccagccaguaaaauggcccaaugugccagc

SEQ ID NO: 243511 - RNA, 32 nt, Homo Sapiens
guuuagcauuuuagccaaugucuuccuaggug

SEQ ID NO: 243512 - RNA, 32 nt, Homo Sapiens
augccuccccccaccccacaucucucagguug

SEQ ID NO: 243513 - RNA, 32 nt, Homo Sapiens
aaagggcuccaguguuaucuggaccaguuccu

SEQ ID NO: 243514 - RNA, 32 nt, Homo Sapiens
uccccaguccauaaaggucuugccccaacacu

SEQ ID NO: 243515 - RNA, 32 nt, Homo Sapiens
gccaucaaagcacgguugggucucccuuguau

SEQ ID NO: 243516 - RNA, 32 nt, Homo Sapiens
aggacuugacauuugcuaguuagaauaucccu

SEQ ID NO: 243517 - RNA, 32 nt, Homo Sapiens
aacuggaauguaaauuuuuaaucuuuauuagg

SEQ ID NO: 243518 - RNA, 32 nt, Homo Sapiens
uccugaucuccgaguuacucuuuccaaauugu

SEQ ID NO: 243519 - RNA, 32 nt, Homo Sapiens
aaaguugagagaagacuagaaauggaacugau

SEQ ID NO: 243520 - RNA, 32 nt, Homo Sapiens
aaguuauuuuuggcugggugugguggcucaca

SEQ ID NO: 243521 - RNA, 32 nt, Homo Sapiens
cuuacuaggaggagauggaguguauuuuaugg

SEQ ID NO: 243522 - RNA, 32 nt, Homo Sapiens
uccugagacaccuguagauugaguuuggaaua

SEQ ID NO: 243523 - RNA, 32 nt, Homo Sapiens
ugagccucccuugcugucuuggaccugucugu

SEQ ID NO: 243524 - RNA, 32 nt, Homo Sapiens
caggcguggugggcaccuguauucccagcuac

SEQ ID NO: 243525 - RNA, 32 nt, Homo Sapiens
ugggugggagacggcaggucccucugucccaa

SEQ ID NO: 243526 - RNA, 32 nt, Homo Sapiens
uauggcaauuuugcaauauuuucaguagugcu

SEQ ID NO: 243527 - RNA, 30 nt, Homo Sapiens
augggagccaagcuugaggacugcugguga

SEQ ID NO: 243528 - RNA, 32 nt, Homo Sapiens
ccaagucucuaacgugacauagggaaagcuug

SEQ ID NO: 243529 - RNA, 32 nt, Homo Sapiens
cagcccgugugcacguggcgccggcgcugccu

SEQ ID NO: 243530 - RNA, 32 nt, Homo Sapiens
cggucccuccauccccgcagcagugagaagcc

SEQ ID NO: 243531 - RNA, 32 nt, Homo Sapiens
caaaguccggugccgcugcccagacacagacu

SEQ ID NO: 243532 - RNA, 32 nt, Homo Sapiens
aaguugccuuuucagcugggagcuguccguuc

SEQ ID NO: 243533 - RNA, 32 nt, Homo Sapiens
gaagaaaggugucaagaaccucguguccagga

SEQ ID NO: 243534 - RNA, 32 nt, Homo Sapiens
uucucgggguccacgcacgcccugcgccgcca

SEQ ID NO: 243535 - RNA, 32 nt, Homo Sapiens
cuuccuguuccuggggacccgcugggccuuug

SEQ ID NO: 243536 - RNA, 32 nt, Homo Sapiens
caccccucccagauuucuuuuacauuaacuaa

SEQ ID NO: 243537 - RNA, 32 nt, Homo Sapiens
ucuguccaacuccuaucccagccccuggggag

SEQ ID NO: 243538 - RNA, 32 nt, Homo Sapiens
ccuccccaguacaggggugcugcagguggcag

SEQ ID NO: 243539 - RNA, 32 nt, Homo Sapiens
aaaaauucugucauguucccaagguagaauug

SEQ ID NO: 243540 - RNA, 32 nt, Homo Sapiens
ccucgcuguuaccagaagacguuuuucucugc

SEQ ID NO: 243541 - RNA, 32 nt, Homo Sapiens
ucuuuuuaaagucuugauagauuugucaaagu

SEQ ID NO: 243542 - RNA, 32 nt, Homo Sapiens
cauauuguauauauauucauauacaaacaugu

SEQ ID NO: 243543 - RNA, 32 nt, Homo Sapiens
gugagauacaaagagaaauauuauauuguaag

SEQ ID NO: 243544 - RNA, 32 nt, Homo Sapiens
uggugccuggccugggaggucaguggauagag

SEQ ID NO: 243545 - RNA, 32 nt, Homo Sapiens
ucauguaucuucugaauucuauccgugaaucc

SEQ ID NO: 243546 - RNA, 32 nt, Homo Sapiens
uaaugagaagcuuuuacccaucuuagucugaa

SEQ ID NO: 243547 - RNA, 32 nt, Homo Sapiens
ugccugguccuggccuggggcagagccugugu

SEQ ID NO: 243548 - RNA, 32 nt, Homo Sapiens
caaggugguggccugggccgcuccaccucacc

SEQ ID NO: 243549 - RNA, 32 nt, Homo Sapiens
auguugauucuuaaaugggaauggugaguuag

SEQ ID NO: 243550 - RNA, 32 nt, Homo Sapiens
ggucuggagcagcugccucucuggggagaugc

SEQ ID NO: 243551 - RNA, 32 nt, Homo Sapiens
gcguuaagguaacaccagaauauuuggcaaag

SEQ ID NO: 243552 - RNA, 32 nt, Homo Sapiens
gucgaguguucuauuuuuuguuuuguuuccuc

SEQ ID NO: 243553 - RNA, 32 nt, Homo Sapiens
guaaugcaugaaauaauuuaauuuuugacaug

SEQ ID NO: 243554 - RNA, 32 nt, Homo Sapiens
auugccuaaggguggcccacucuugugauugc

SEQ ID NO: 243555 - RNA, 32 nt, Homo Sapiens
uuuucgcaaaaggagaaaaaacaguggccuuu

SEQ ID NO: 243556 - RNA, 32 nt, Homo Sapiens
aauacucagaaaugauggauuccuccaaggag

SEQ ID NO: 243557 - RNA, 31 nt, Homo Sapiens
uuuuaagaaaauaaaaagauuauccuuccaa

SEQ ID NO: 243558 - RNA, 32 nt, Homo Sapiens
cuggcccaucugguggcugugccaugggagga

SEQ ID NO: 243559 - RNA, 30 nt, Homo Sapiens
aggugcuucauacaacucaagaguaaauug

SEQ ID NO: 243560 - RNA, 30 nt, Homo Sapiens
ugauucugaaaauugggggaaaaaacuuuu

SEQ ID NO: 243561 - RNA, 32 nt, Homo Sapiens
agagagagcaguuaaggcaagcaccaggggaa

SEQ ID NO: 243562 - RNA, 32 nt, Homo Sapiens
aucgagaacaacauaucaagucagggcccuca

SEQ ID NO: 243563 - RNA, 32 nt, Homo Sapiens
ucugacuucacacuucccuuuucuagaaccuu

SEQ ID NO: 243564 - RNA, 31 nt, Homo Sapiens
auaccccugaauuaagaggugcuguuauaca

SEQ ID NO: 243565 - RNA, 32 nt, Homo Sapiens
cacccucccugccuaagcagggugggggcaga

SEQ ID NO: 243566 - RNA, 32 nt, Homo Sapiens
uuauuaugcaguuaaaucuguaucaguggacu

SEQ ID NO: 243567 - RNA, 32 nt, Homo Sapiens
cgaaagacgccccagcagcaacuggcaucaag

SEQ ID NO: 243568 - RNA, 32 nt, Homo Sapiens
cuggucaucgugccacuggagucaacacagac

SEQ ID NO: 243569 - RNA, 32 nt, Homo Sapiens
gcauggccgaggggcaggggcuggagcugcga

SEQ ID NO: 243570 - RNA, 32 nt, Homo Sapiens
ugacccagggaaccuuccagaauggaugaaau

SEQ ID NO: 243571 - RNA, 32 nt, Homo Sapiens
ggacaacuuauuuaaaaauauuucagauauca

SEQ ID NO: 243572 - RNA, 32 nt, Homo Sapiens
uggaaagccagagggaaccugagaaucaucca

SEQ ID NO: 243573 - RNA, 32 nt, Homo Sapiens
ccacugaaggauuaaugaaaaccuuuacuagc

SEQ ID NO: 243574 - RNA, 32 nt, Homo Sapiens
uguuuguaaaaugagacugaaguuauccucuc

SEQ ID NO: 243575 - RNA, 32 nt, Homo Sapiens
agugcucaugagccagugggccugccacagag

SEQ ID NO: 243576 - RNA, 32 nt, Homo Sapiens
cggacauggcucccagcgugccagcggcagaa

SEQ ID NO: 243577 - RNA, 31 nt, Homo Sapiens
uggaucauuuuguggaugccaaaugaauauc

SEQ ID NO: 243578 - RNA, 32 nt, Homo Sapiens
gagccguugacggcugccccucaacgcugcgc

SEQ ID NO: 243579 - RNA, 32 nt, Homo Sapiens
uuugcaagaauauuuuauuuuaauuuuuugga

SEQ ID NO: 243580 - RNA, 32 nt, Homo Sapiens
gcuggaugaucaaucccuucuagcucugaacc

SEQ ID NO: 243581 - RNA, 32 nt, Homo Sapiens
agacaccucacagaguggggaggacggaggcu

SEQ ID NO: 243582 - RNA, 32 nt, Homo Sapiens
gcaccugcguccuccccuccccggcccuccca

SEQ ID NO: 243583 - RNA, 31 nt, Homo Sapiens
uugguguauacaacuuucagagccucuugua

SEQ ID NO: 243584 - RNA, 29 nt, Homo Sapiens
ccuggguaacaagagcgaaacuccgccuc

SEQ ID NO: 243585 - RNA, 32 nt, Homo Sapiens
accuaccagggccaaguucccacggcagccua

SEQ ID NO: 243586 - RNA, 32 nt, Homo Sapiens
ccuuuugccuucucugcuuaugggauauucug

SEQ ID NO: 243587 - RNA, 32 nt, Homo Sapiens
uggggucuggggcagggaacgaacaugguggc

SEQ ID NO: 243588 - RNA, 32 nt, Homo Sapiens
uuucaauaauuuccuccggugcugcugaggag

SEQ ID NO: 243589 - RNA, 32 nt, Homo Sapiens
aaagaagaaaauaaacucaucucuaaugugac

SEQ ID NO: 243590 - RNA, 32 nt, Homo Sapiens
cugcuuauugaguacuuacugugcuaggcacu

SEQ ID NO: 243591 - RNA, 32 nt, Homo Sapiens
gagauagaguaaauaugguccaauuaaaaggu

SEQ ID NO: 243592 - RNA, 32 nt, Homo Sapiens
gggugcgcucagagacacgggcaagcaugccu

SEQ ID NO: 243593 - RNA, 32 nt, Homo Sapiens
acgcugaccuacgagacgccacagggauugag

SEQ ID NO: 243594 - RNA, 32 nt, Homo Sapiens
acguccgaggucggggcucggccgggagcccc

SEQ ID NO: 243595 - RNA, 29 nt, Homo Sapiens
aaaauuaaauuaagaugcauguuaaaaac

SEQ ID NO: 243596 - RNA, 32 nt, Homo Sapiens
caucucucacucuccuucuuauaucccuggga

SEQ ID NO: 243597 - RNA, 32 nt, Homo Sapiens
guauguagaagaaucggauuauuguuaauuuu

SEQ ID NO: 243598 - RNA, 31 nt, Homo Sapiens
caaacacauagcaguguuccauagacuuggc

SEQ ID NO: 243599 - RNA, 32 nt, Homo Sapiens
uugguuucccucaaaacaacgcugcagauuua

SEQ ID NO: 243600 - RNA, 32 nt, Homo Sapiens
caacaccugccuccacuucuccccucaagaaa

SEQ ID NO: 243601 - RNA, 30 nt, Homo Sapiens
ucuggccaccccugcucccaucuuaguauu

SEQ ID NO: 243602 - RNA, 32 nt, Homo Sapiens
cgccgccucugcccgcccggcgccgcagcccc

SEQ ID NO: 243603 - RNA, 32 nt, Homo Sapiens
cucccaaaagcaacaaacaaaaauauuaguuu

SEQ ID NO: 243604 - RNA, 32 nt, Homo Sapiens
gcaguuucccuaccuguuuccuccucccgguc

SEQ ID NO: 243605 - RNA, 32 nt, Homo Sapiens
ucuccuuaggcacucucuaauuagauguccua

SEQ ID NO: 243606 - RNA, 32 nt, Homo Sapiens
aaaugggcggggguggugugggugaugggacu

SEQ ID NO: 243607 - RNA, 29 nt, Homo Sapiens
cagcaagugucuuuccugcggcaccgggu

SEQ ID NO: 243608 - RNA, 32 nt, Homo Sapiens
uuacucuggaggcacaagcuggcugccaugcu

SEQ ID NO: 243609 - RNA, 30 nt, Homo Sapiens
agaucuucggcucagaggaagacugcagac

SEQ ID NO: 243610 - RNA, 32 nt, Homo Sapiens
cccggugaccucggggaccguucucugaucau

SEQ ID NO: 243611 - RNA, 29 nt, Homo Sapiens
acacuggaagugaugucauaagguuguga

SEQ ID NO: 243612 - RNA, 32 nt, Homo Sapiens
aggcguuugcagccaaugaagcuggcugcuca

SEQ ID NO: 243613 - RNA, 32 nt, Homo Sapiens
uaugcaguguguauauucaaauaugagauaag

SEQ ID NO: 243614 - RNA, 32 nt, Homo Sapiens
ugggaggaagcagaauaaagcaauuuuccuug

SEQ ID NO: 243615 - RNA, 32 nt, Homo Sapiens
ugccucugacuucaacucaagaaaacacuuuu

SEQ ID NO: 243616 - RNA, 32 nt, Homo Sapiens
aaaccaagauaaaguaacuguguguugaauac

SEQ ID NO: 243617 - RNA, 32 nt, Homo Sapiens
auugggucuuccgggagcuuuuucaaacacaa

SEQ ID NO: 243618 - RNA, 32 nt, Homo Sapiens
ugauguacugaauuccauaauacauaacauuc

SEQ ID NO: 243619 - RNA, 31 nt, Homo Sapiens
cgugucauguuaaaauugccaaauaaaguac

SEQ ID NO: 243620 - RNA, 32 nt, Homo Sapiens
aaggggaugcuaaaggagauaaagccaaggug

SEQ ID NO: 243621 - RNA, 32 nt, Homo Sapiens
gggagaggaacagggcccuggagcaccugguu

SEQ ID NO: 243622 - RNA, 32 nt, Homo Sapiens
acaagagaacuaagggaggucugugcauuuua

SEQ ID NO: 243623 - RNA, 32 nt, Homo Sapiens
uaaacuaaauucaaauuagggagcucaaaugg

SEQ ID NO: 243624 - RNA, 32 nt, Homo Sapiens
aaaggcaaagggaagccggaagagacuggaac

SEQ ID NO: 243625 - RNA, 32 nt, Homo Sapiens
ucugcaggaugagggguagcgguguguaggca

SEQ ID NO: 243626 - RNA, 32 nt, Homo Sapiens
cugaccuuaagugauccacccaccucggccuc

SEQ ID NO: 243627 - RNA, 32 nt, Homo Sapiens
ucuucaugucaucaaaaucugcacagucacug

SEQ ID NO: 243628 - RNA, 32 nt, Homo Sapiens
cuccuaaucccucuccuuucuggcauccuggc

SEQ ID NO: 243629 - RNA, 32 nt, Homo Sapiens
uucccuaaaucgauccauguuaccacauagua

SEQ ID NO: 243630 - RNA, 32 nt, Homo Sapiens
uuggauggggauguuacccuugcguucaacca

SEQ ID NO: 243631 - RNA, 32 nt, Homo Sapiens
uaucuuauuauuagugauuuuuaagaguuauu

SEQ ID NO: 243632 - RNA, 32 nt, Homo Sapiens
ggacagagcggcccggucgccggcaugguuuc

SEQ ID NO: 243633 - RNA, 32 nt, Homo Sapiens
caccccucauccgggcccccagccccgccaga

SEQ ID NO: 243634 - RNA, 32 nt, Homo Sapiens
uucagucagggugaugaucuucugaagcucuu

SEQ ID NO: 243635 - RNA, 32 nt, Homo Sapiens
ggagccucaaacaagcauuauaccuucuguga

SEQ ID NO: 243636 - RNA, 32 nt, Homo Sapiens
aaaauacaaaaauuagcugggugugguggcau

SEQ ID NO: 243637 - RNA, 32 nt, Homo Sapiens
ggcaccaacacuuugguauucaauuugauucu

SEQ ID NO: 243638 - RNA, 32 nt, Homo Sapiens
auuucugcuauuauuuuuaaagcaguauuauu

SEQ ID NO: 243639 - RNA, 32 nt, Homo Sapiens
gggaggaagccgggcucugugcucuugcucca

SEQ ID NO: 243640 - RNA, 32 nt, Homo Sapiens
cuccgucucggugucccggccccuacagcgcc

SEQ ID NO: 243641 - RNA, 32 nt, Homo Sapiens
cuggaggccggcuuggcggccaggcgcaaguu

SEQ ID NO: 243642 - RNA, 32 nt, Homo Sapiens
gaaaacaaaaaacaagacuacugcagucauag

SEQ ID NO: 243643 - RNA, 32 nt, Homo Sapiens
ccacgucaguuauuaguggcuauggacuugcu

SEQ ID NO: 243644 - RNA, 32 nt, Homo Sapiens
agcaggaggaggagcccgguggcggcgguggc

SEQ ID NO: 243645 - RNA, 32 nt, Homo Sapiens
cagcuggccucacccggucccggcgccgccuu

SEQ ID NO: 243646 - RNA, 32 nt, Homo Sapiens
ccugacugcuuucuccuuccucagcccugccc

SEQ ID NO: 243647 - RNA, 32 nt, Homo Sapiens
ugugcuguuugcuuuuucugucaguggagacg

SEQ ID NO: 243648 - RNA, 32 nt, Homo Sapiens
ggccgccgcgcgcccacgcgccucgcuugcug

SEQ ID NO: 243649 - RNA, 32 nt, Homo Sapiens
cucuuugccauuuccuuggaaagagacgucgc

SEQ ID NO: 243650 - RNA, 32 nt, Homo Sapiens
aucucugcacccccaucuuccuccucccgaca

SEQ ID NO: 243651 - RNA, 32 nt, Homo Sapiens
guucagcccacagaccccggggcugcccuuug

SEQ ID NO: 243652 - RNA, 32 nt, Homo Sapiens
aggaaagacauuauacgugggcuuggcccagc

SEQ ID NO: 243653 - RNA, 32 nt, Homo Sapiens
cucuguuauccagaagauuaaaaugccuacau

SEQ ID NO: 243654 - RNA, 32 nt, Homo Sapiens
ugaguuugcauguuucucugcacuauggauuu

SEQ ID NO: 243655 - RNA, 32 nt, Homo Sapiens
caguccugguccucccuccccagccgccccua

SEQ ID NO: 243656 - RNA, 32 nt, Homo Sapiens
aaauaucaaaaauuuguguuauuucagcagua

SEQ ID NO: 243657 - RNA, 32 nt, Homo Sapiens
ugugcucuacuuugauggaaacauggcaagga

SEQ ID NO: 243658 - RNA, 32 nt, Homo Sapiens
aauuauaaauauuuauacuuaaccaaguugcc

SEQ ID NO: 243659 - RNA, 31 nt, Homo Sapiens
ucguacgcuuccggccugccccgcgcccgcc

SEQ ID NO: 243660 - RNA, 32 nt, Homo Sapiens
uccguguagccauuuuauuuuuuaagaaacug

SEQ ID NO: 243661 - RNA, 32 nt, Homo Sapiens
gccgccuuggggagaggacggguggggaccgc

SEQ ID NO: 243662 - RNA, 32 nt, Homo Sapiens
gcgggugugaauguguacauguacacgaaugu

SEQ ID NO: 243663 - RNA, 31 nt, Homo Sapiens
uaaauauguaggaaaaaacauauugaguuca

SEQ ID NO: 243664 - RNA, 32 nt, Homo Sapiens
caggcacuaauauauauuucuuccagccuuug

SEQ ID NO: 243665 - RNA, 32 nt, Homo Sapiens
uaaauuggacauuuucaucaaugcagucuaau

SEQ ID NO: 243666 - RNA, 32 nt, Homo Sapiens
cgcuggagagagggagagagaggcccgcccgc

SEQ ID NO: 243667 - RNA, 32 nt, Homo Sapiens
ggcugccgccccgagaccccagcccguaccug

SEQ ID NO: 243668 - RNA, 32 nt, Homo Sapiens
ggcugacaaugguuuuuaaaucuugcuaaucu

SEQ ID NO: 243669 - RNA, 32 nt, Homo Sapiens
gugcugggcugggccacagccaggguuaugua

SEQ ID NO: 243670 - RNA, 32 nt, Homo Sapiens
ucauguuguuuuacuuauaacuucuauauucu

SEQ ID NO: 243671 - RNA, 32 nt, Homo Sapiens
auccaccuuucugaaucagacacaagcugcag

SEQ ID NO: 243672 - RNA, 32 nt, Homo Sapiens
aacguauuuuccuacauucucuaauaaaucug

SEQ ID NO: 243673 - RNA, 32 nt, Homo Sapiens
cuugaucugaaauccacaauuagaccacaaug

SEQ ID NO: 243674 - RNA, 27 nt, Homo Sapiens
ggugauuccuacuucagccccuuggug

SEQ ID NO: 243675 - RNA, 32 nt, Homo Sapiens
acugacaaccucauccaggcuaccauccgcac

SEQ ID NO: 243676 - RNA, 32 nt, Homo Sapiens
ugccuucacagcacccaucucgcuuuuuggca

SEQ ID NO: 243677 - RNA, 32 nt, Homo Sapiens
ugggaucguggcggagcgccaggcgcccaaag

SEQ ID NO: 243678 - RNA, 32 nt, Homo Sapiens
ccucgcccgagccccgggagggugaaacgcuu

SEQ ID NO: 243679 - RNA, 32 nt, Homo Sapiens
guaaucagaaaacaacuuagaacccuuuuguu

SEQ ID NO: 243680 - RNA, 32 nt, Homo Sapiens
gccagggaagcagggcccagaggagacccauc

SEQ ID NO: 243681 - RNA, 30 nt, Homo Sapiens
gugucccuggacugcaaguguggaaggagg

SEQ ID NO: 243682 - RNA, 30 nt, Homo Sapiens
ggagaaccccuugccaccugugugauuggu

SEQ ID NO: 243683 - RNA, 32 nt, Homo Sapiens
agaggacauacuuuuccagccucauggguaug

SEQ ID NO: 243684 - RNA, 32 nt, Homo Sapiens
auaauggggauauguggaauuuuuacaacagu

SEQ ID NO: 243685 - RNA, 32 nt, Homo Sapiens
guucacucauccucccucccccaccgucccuc

SEQ ID NO: 243686 - RNA, 32 nt, Homo Sapiens
uuugaggucacauuuuucccccguggggaaau

SEQ ID NO: 243687 - RNA, 32 nt, Homo Sapiens
acaccgcccgcaccuggcugcccacccagccg

SEQ ID NO: 243688 - RNA, 32 nt, Homo Sapiens
uggcccccauggggcgggaaggcgugaccgcc

SEQ ID NO: 243689 - RNA, 32 nt, Homo Sapiens
uauuuuauuauuauacuuuaaguuuuagggua

SEQ ID NO: 243690 - RNA, 32 nt, Homo Sapiens
uucccaccgggcggggccucuggcgcggcagg

SEQ ID NO: 243691 - RNA, 32 nt, Homo Sapiens
gggacggugagggcgagggcgagggcgaggcg

SEQ ID NO: 243692 - RNA, 32 nt, Homo Sapiens
auccugccuguucccccacaccugccaggaua

SEQ ID NO: 243693 - RNA, 32 nt, Homo Sapiens
uccuaacuguuggcuuucccccagccgcacgg

SEQ ID NO: 243694 - RNA, 32 nt, Homo Sapiens
cuccuggaggucgucuccuggcauccucgggg

SEQ ID NO: 243695 - RNA, 32 nt, Homo Sapiens
uucuguagacugccaucauugaugaucacugu

SEQ ID NO: 243696 - RNA, 32 nt, Homo Sapiens
gccggggugcgguggcucacacuguaauccca

SEQ ID NO: 243697 - RNA, 32 nt, Homo Sapiens
uaaguuuugaaauaagaaagugcgaguccucc

SEQ ID NO: 243698 - RNA, 32 nt, Homo Sapiens
ggcgccuccaagacccugagccgugccaaacu

SEQ ID NO: 243699 - RNA, 32 nt, Homo Sapiens
agaccuugucucaaaacaaaacaaagugcugg

SEQ ID NO: 243700 - RNA, 32 nt, Homo Sapiens
ccccccaacacacacuuacaaacaagcccaca

SEQ ID NO: 243701 - RNA, 32 nt, Homo Sapiens
agaaaaagaaaauuauuuuggacuaugacuuu

SEQ ID NO: 243702 - RNA, 32 nt, Homo Sapiens
cacuaaaaauggaugugcaucuucuuucacau

SEQ ID NO: 243703 - RNA, 32 nt, Homo Sapiens
acgcugaggcaggaggaucauuugagccuggg

SEQ ID NO: 243704 - RNA, 32 nt, Homo Sapiens
ccauuggccaccccaugcugcugcugccuggg

SEQ ID NO: 243705 - RNA, 32 nt, Homo Sapiens
cggaagacuuguuggaggcauaccuuccaguu

SEQ ID NO: 243706 - RNA, 32 nt, Homo Sapiens
aaguucugccugaccuaugaggccucaaugac

SEQ ID NO: 243707 - RNA, 32 nt, Homo Sapiens
cuaguuucuuugcuuuuuguguuguuccguau

SEQ ID NO: 243708 - RNA, 32 nt, Homo Sapiens
cagccuauuccacuccuccccaucuccaggcg

SEQ ID NO: 243709 - RNA, 32 nt, Homo Sapiens
uuugagaaggacgagacacagauggaagugga

SEQ ID NO: 243710 - RNA, 32 nt, Homo Sapiens
cagcuguguacuugagucuuuuuuaguuuacu

SEQ ID NO: 243711 - RNA, 32 nt, Homo Sapiens
aguaaagucugauguuuugauaucuugauguu

SEQ ID NO: 243712 - RNA, 32 nt, Homo Sapiens
uuuuaauuuuucccauagcacuuaaaagagau

SEQ ID NO: 243713 - RNA, 32 nt, Homo Sapiens
gugagcucuggaugaagcucuggccaaccaaa

SEQ ID NO: 243714 - RNA, 32 nt, Homo Sapiens
ucaggaauuauuuauguagaaacuacugaaac

SEQ ID NO: 243715 - RNA, 32 nt, Homo Sapiens
uaacauugaaaccugugaaauguccuuagguu

SEQ ID NO: 243716 - RNA, 32 nt, Homo Sapiens
auauaucuacuuaccauagauaccuuucauaa

SEQ ID NO: 243717 - RNA, 32 nt, Homo Sapiens
gaggcgucucuuccgugcaggcaggcucuccu

SEQ ID NO: 243718 - RNA, 32 nt, Homo Sapiens
gaguccaugcuaaagagaaaucauauacaccu

SEQ ID NO: 243719 - RNA, 32 nt, Homo Sapiens
cucauucacuaaauauuuuuggagcacuuagu

SEQ ID NO: 243720 - RNA, 32 nt, Homo Sapiens
cuuucacuuuugcugcuucacugccuugugcu

SEQ ID NO: 243721 - RNA, 32 nt, Homo Sapiens
cccuuuuuaaacaaauggcuuguucagucacu

SEQ ID NO: 243722 - RNA, 32 nt, Homo Sapiens
gugacaacuucucaacuguagaauagacuaau

SEQ ID NO: 243723 - RNA, 32 nt, Homo Sapiens
uguacccgugacugacaucuggacuggauuua

SEQ ID NO: 243724 - RNA, 32 nt, Homo Sapiens
gacucuaauauuaaauaagauauuugaacaag

SEQ ID NO: 243725 - RNA, 32 nt, Homo Sapiens
ucuucccuggcugugcuggcggaggcugcgcc

SEQ ID NO: 243726 - RNA, 32 nt, Homo Sapiens
cuccuccccccuccaggccaugaggauucugc

SEQ ID NO: 243727 - RNA, 32 nt, Homo Sapiens
ccagucugucuccggcgccgcccgucgcggac

SEQ ID NO: 243728 - RNA, 32 nt, Homo Sapiens
ggacaacugaaguuuaaauauccacaggguuu

SEQ ID NO: 243729 - RNA, 32 nt, Homo Sapiens
acacaugccagggccaugucagacacagauug

SEQ ID NO: 243730 - RNA, 32 nt, Homo Sapiens
caggucccuggccccagggauggcuggccucc

SEQ ID NO: 243731 - RNA, 32 nt, Homo Sapiens
uuuugcacgaacaaugucuuuuaaauuaaaau

SEQ ID NO: 243732 - RNA, 32 nt, Homo Sapiens
accugccuuuauaucuaggaguuucuuuauuu

SEQ ID NO: 243733 - RNA, 32 nt, Homo Sapiens
ggcggccgcggcuuuggguccaggcgggacua

SEQ ID NO: 243734 - RNA, 32 nt, Homo Sapiens
gagauccgcagagcugagcgccaggcgggcag

SEQ ID NO: 243735 - RNA, 30 nt, Homo Sapiens
uucacugucuuaucugcagaaauuugcugu

SEQ ID NO: 243736 - RNA, 32 nt, Homo Sapiens
ggagcuucccuccccacccccauauguaucag

SEQ ID NO: 243737 - RNA, 32 nt, Homo Sapiens
cagaagacugguuuacauucaguacucauccu

SEQ ID NO: 243738 - RNA, 32 nt, Homo Sapiens
uaacgaaaaaucaauaaauaaauguggauuug

SEQ ID NO: 243739 - RNA, 32 nt, Homo Sapiens
cagaaacuagacauuccauugaacuaagaaga

SEQ ID NO: 243740 - RNA, 32 nt, Homo Sapiens
cuagauuguaaaaaauuauauuagaaugcaua

SEQ ID NO: 243741 - RNA, 32 nt, Homo Sapiens
uauuuuuggguuucuuuuuguuucacuggaaa

SEQ ID NO: 243742 - RNA, 32 nt, Homo Sapiens
uucucucucucucuuuuuuuuaauuuuauuau

SEQ ID NO: 243743 - RNA, 32 nt, Homo Sapiens
gugaaaugguuuuaauuauacuccauguguau

SEQ ID NO: 243744 - RNA, 32 nt, Homo Sapiens
gaugccaaaaauauucguuauaacacuucuca

SEQ ID NO: 243745 - RNA, 32 nt, Homo Sapiens
guguuggaaaacucaaguccgguggaaguggc

SEQ ID NO: 243746 - RNA, 32 nt, Homo Sapiens
caguacuguggaaaugaacuauauuagcuauu

SEQ ID NO: 243747 - RNA, 32 nt, Homo Sapiens
cuuauuuuuuaagaauuauucuuauuuucccc

SEQ ID NO: 243748 - RNA, 32 nt, Homo Sapiens
cuaugccuaccuucucuuucuucguucccugc

SEQ ID NO: 243749 - RNA, 32 nt, Homo Sapiens
gaaaaguuaagugacuuauuuaauaaauguau

SEQ ID NO: 243750 - RNA, 32 nt, Homo Sapiens
aagagccaagcacuuugugaauucugguuugu

SEQ ID NO: 243751 - RNA, 32 nt, Homo Sapiens
gagccggaccccgauuccgacugggagccgga

SEQ ID NO: 243752 - RNA, 32 nt, Homo Sapiens
auuuauuaagugaaaaucauggaguugggaua

SEQ ID NO: 243753 - RNA, 32 nt, Homo Sapiens
ucaaugaggagcuuuuuuccccucuuggaaca

SEQ ID NO: 243754 - RNA, 32 nt, Homo Sapiens
cuuccugucgccaucuuuguuuucuucccauu

SEQ ID NO: 243755 - RNA, 32 nt, Homo Sapiens
cccggggcucugcugucagccgcccuggcucc

SEQ ID NO: 243756 - RNA, 27 nt, Homo Sapiens
ugagguucugccugcagcccccaggag

SEQ ID NO: 243757 - RNA, 32 nt, Homo Sapiens
auauuuacugguuuuuaguagguuuuaauaaa

SEQ ID NO: 243758 - RNA, 32 nt, Homo Sapiens
cacagcccccgcaucacccaaccaaccagcag

SEQ ID NO: 243759 - RNA, 32 nt, Homo Sapiens
uuugucuucauuuuccucucccacuuagcaca

SEQ ID NO: 243760 - RNA, 31 nt, Homo Sapiens
gggagcaacauaucagucgugucaccagcug

SEQ ID NO: 243761 - RNA, 32 nt, Homo Sapiens
ugagccccacucccggccccacucacaacauc

SEQ ID NO: 243762 - RNA, 32 nt, Homo Sapiens
uuguucucagcucccccuguccccucagcucc

SEQ ID NO: 243763 - RNA, 32 nt, Homo Sapiens
ccaaccccuggcccugcuuuuccucgugccua

SEQ ID NO: 243764 - RNA, 32 nt, Homo Sapiens
ucuggauucuuggcccgcacagagcuggggcu

SEQ ID NO: 243765 - RNA, 32 nt, Homo Sapiens
uccucucggcauuugucacuuccaucucagcu

SEQ ID NO: 243766 - RNA, 32 nt, Homo Sapiens
uugagaucgaccucagaagaacaaagugagga

SEQ ID NO: 243767 - RNA, 32 nt, Homo Sapiens
ggguucaauacuagcuuggacaaacuuuguag

SEQ ID NO: 243768 - RNA, 32 nt, Homo Sapiens
aguuugcagaacugucugaauaaaggauacaa

SEQ ID NO: 243769 - RNA, 32 nt, Homo Sapiens
accaugaaugagagaugaagcuaaagaauaga

SEQ ID NO: 243770 - RNA, 32 nt, Homo Sapiens
uguagaagcuggaagcugcugaguuuuuagca

SEQ ID NO: 243771 - RNA, 32 nt, Homo Sapiens
caccuccuggguucaagcaguucucgugccgc

SEQ ID NO: 243772 - RNA, 32 nt, Homo Sapiens
ccgagggcugcccuuccaaacucuaucggcug

SEQ ID NO: 243773 - RNA, 32 nt, Homo Sapiens
aaaacuaugagcauuuguguaaaaguauguau

SEQ ID NO: 243774 - RNA, 32 nt, Homo Sapiens
ggcuugagggguggggaauggggagggaaggg

SEQ ID NO: 243775 - RNA, 32 nt, Homo Sapiens
cuauuuuccagaaauuucucaaaaugucugcu

SEQ ID NO: 243776 - RNA, 32 nt, Homo Sapiens
agaggaggaggcccguuggcgucggaccaaug

SEQ ID NO: 243777 - RNA, 32 nt, Homo Sapiens
augagcccaagcacacaugcauggcauuuguu

SEQ ID NO: 243778 - RNA, 32 nt, Homo Sapiens
auuugcuuucccucaccucucacuuccuucua

SEQ ID NO: 243779 - RNA, 32 nt, Homo Sapiens
uuguuuaaugaaaugucauggcucuguucaua

SEQ ID NO: 243780 - RNA, 32 nt, Homo Sapiens
cugguggggggcccugcucugugcgguccuga

SEQ ID NO: 243781 - RNA, 32 nt, Homo Sapiens
uugucucauggcaaccuucccuggccaaguuu

SEQ ID NO: 243782 - RNA, 32 nt, Homo Sapiens
cuuuacuuccuguuccuccccagccuuaaccc

SEQ ID NO: 243783 - RNA, 32 nt, Homo Sapiens
ggaaaggaaagcaagucugcaguuccuugcua

SEQ ID NO: 243784 - RNA, 32 nt, Homo Sapiens
ugagaccuagcccccacccccacagagcucaa

SEQ ID NO: 243785 - RNA, 32 nt, Homo Sapiens
uguaauauuuaagaguugcuuaaaagcauaca

SEQ ID NO: 243786 - RNA, 32 nt, Homo Sapiens
gacacuagugauugcguuuuguuucgcuccaa

SEQ ID NO: 243787 - RNA, 32 nt, Homo Sapiens
uuuuagaauauuaaauuaaaggagugcuguua

SEQ ID NO: 243788 - RNA, 32 nt, Homo Sapiens
gcugcugccaaugggaucuuucagguaccccc

SEQ ID NO: 243789 - RNA, 32 nt, Homo Sapiens
uagaaauaucuuugcucccaguuucuugagau

SEQ ID NO: 243790 - RNA, 32 nt, Homo Sapiens
uggccggcgcccgggugggccuggacacagau

SEQ ID NO: 243791 - RNA, 32 nt, Homo Sapiens
auauagcccaacuuauauguuuuaaucucccu

SEQ ID NO: 243792 - RNA, 30 nt, Homo Sapiens
ccucgaagcgggcgcgcgacgucgcggucc

SEQ ID NO: 243793 - RNA, 32 nt, Homo Sapiens
uagaauuaaaauuuauucuacuuuuaaauaaa

SEQ ID NO: 243794 - RNA, 32 nt, Homo Sapiens
ugucagaggagcaaggacaucuguggaaagau

SEQ ID NO: 243795 - RNA, 32 nt, Homo Sapiens
guucagacacuggcagggugggauuugcugcc

SEQ ID NO: 243796 - RNA, 32 nt, Homo Sapiens
gagggcgcacgcggccggccgaguuccgggcu

SEQ ID NO: 243797 - RNA, 32 nt, Homo Sapiens
gaucugaaggaucuuccgggcuggguacaaua

SEQ ID NO: 243798 - RNA, 32 nt, Homo Sapiens
cacuggcuccaacuuccuccucauggggcauu

SEQ ID NO: 243799 - RNA, 32 nt, Homo Sapiens
cauguuuucuucccuuaucuuacugucauugu

SEQ ID NO: 243800 - RNA, 32 nt, Homo Sapiens
uuguuauuacuuuguguaacuuugauguaaug

SEQ ID NO: 243801 - RNA, 32 nt, Homo Sapiens
agagcagagcagcccuucucccacaagcccuc

SEQ ID NO: 243802 - RNA, 32 nt, Homo Sapiens
ugaagaagaaccagaugaggccaggcacggug

SEQ ID NO: 243803 - RNA, 30 nt, Homo Sapiens
gggcgagucggcggcggcgagggcaagcuc

SEQ ID NO: 243804 - RNA, 32 nt, Homo Sapiens
caugagcccccugaggccccagaacuaucuuu

SEQ ID NO: 243805 - RNA, 32 nt, Homo Sapiens
gagucuauguaggugauguuuccagcugccaa

SEQ ID NO: 243806 - RNA, 32 nt, Homo Sapiens
aacaagaaguggaugagaauauuuuguugacc

SEQ ID NO: 243807 - RNA, 32 nt, Homo Sapiens
uaggacuguggcaaacaaaaccaauucaugaa

SEQ ID NO: 243808 - RNA, 32 nt, Homo Sapiens
cccagcuuucuuuucuacuagcaaaugacccu

SEQ ID NO: 243809 - RNA, 32 nt, Homo Sapiens
ggacaaauuuugaguuuuaacaaggacaaaaa

SEQ ID NO: 243810 - RNA, 32 nt, Homo Sapiens
ugccccugguggcagucccuccagguggggcu

SEQ ID NO: 243811 - RNA, 32 nt, Homo Sapiens
uagugaagcauauggaauaaaacuaaagauca

SEQ ID NO: 243812 - RNA, 32 nt, Homo Sapiens
cagcuuuuagaccucuuacuuccacugcuagu

SEQ ID NO: 243813 - RNA, 31 nt, Homo Sapiens
cuuuagaaauaaaaauacugggaucaaacug

SEQ ID NO: 243814 - RNA, 32 nt, Homo Sapiens
uaucuaaaacacuuaaaauguuagaacguuug

SEQ ID NO: 243815 - RNA, 31 nt, Homo Sapiens
ccgggccaagccaucgccuacaguucgguga

SEQ ID NO: 243816 - RNA, 32 nt, Homo Sapiens
caggguaaugaaaguagaaauuugacugaagc

SEQ ID NO: 243817 - RNA, 32 nt, Homo Sapiens
uccucuccucucagauggaacucugguuauua

SEQ ID NO: 243818 - RNA, 32 nt, Homo Sapiens
ucagcugugccccugaccacacugccacuaag

SEQ ID NO: 243819 - RNA, 32 nt, Homo Sapiens
ucacuucccagacaggguggccaggcagaggu

SEQ ID NO: 243820 - RNA, 32 nt, Homo Sapiens
caggcgugcaggguagccagugccccggccag

SEQ ID NO: 243821 - RNA, 32 nt, Homo Sapiens
aucaggcuuaggauucuuugaacuuauuucca

SEQ ID NO: 243822 - RNA, 32 nt, Homo Sapiens
auagagccgauuuaucaagacggggauuacaa

SEQ ID NO: 243823 - RNA, 32 nt, Homo Sapiens
ucugcuccuugucuacuucucuacucuccuau

SEQ ID NO: 243824 - RNA, 32 nt, Homo Sapiens
uguguacagaauuuuucuucauuaauuuugug

SEQ ID NO: 243825 - RNA, 32 nt, Homo Sapiens
ggggggugcugcguccugccaguguccaccac

SEQ ID NO: 243826 - RNA, 32 nt, Homo Sapiens
ugauuguuuccuuuauagagugucucagggug

SEQ ID NO: 243827 - RNA, 32 nt, Homo Sapiens
ucaaggacucuauuuucuuagucuccagaaga

SEQ ID NO: 243828 - RNA, 32 nt, Homo Sapiens
guugccugaguccuuugaaaucuccuucugac

SEQ ID NO: 243829 - RNA, 31 nt, Homo Sapiens
ugugcacuggccaccaccaggguugggggcg

SEQ ID NO: 243830 - RNA, 32 nt, Homo Sapiens
uguucaagugaaaauaaauaauguacccugca

SEQ ID NO: 243831 - RNA, 32 nt, Homo Sapiens
acuccagcccaccguggccacuggagaccuca

SEQ ID NO: 243832 - RNA, 32 nt, Homo Sapiens
cccaacagccagcagcaguggcccucaucaca

SEQ ID NO: 243833 - RNA, 32 nt, Homo Sapiens
aaaggguggggggcggggguagggggagccaa

SEQ ID NO: 243834 - RNA, 32 nt, Homo Sapiens
uagaaagcuguuuauagcuuuggaccuuuuua

SEQ ID NO: 243835 - RNA, 32 nt, Homo Sapiens
ggaucgagggcggccuagcgccccucugccgg

SEQ ID NO: 243836 - RNA, 32 nt, Homo Sapiens
acuccaccaugucugagaauguguguauucua

SEQ ID NO: 243837 - RNA, 32 nt, Homo Sapiens
cugucucucaaauaaacccaaugcugcgugug

SEQ ID NO: 243838 - RNA, 32 nt, Homo Sapiens
cagagccacccacgccgccgcggccccacgcu

SEQ ID NO: 243839 - RNA, 32 nt, Homo Sapiens
acccucgcugugucuuccuguguguugcguga

SEQ ID NO: 243840 - RNA, 32 nt, Homo Sapiens
uagguuugauucaacacuuaagucucagacug

SEQ ID NO: 243841 - RNA, 32 nt, Homo Sapiens
gcuauuccaucccacauggcggcgcuccugag

SEQ ID NO: 243842 - RNA, 32 nt, Homo Sapiens
guucgcgggcgcggugcccccgcggggauuug

SEQ ID NO: 243843 - RNA, 32 nt, Homo Sapiens
gcauaaccaaaauaaacaaagcaagacaaauu

SEQ ID NO: 243844 - RNA, 32 nt, Homo Sapiens
accagugcccuucuccugcucccagauacucu

SEQ ID NO: 243845 - RNA, 32 nt, Homo Sapiens
gaggccagccggcggcagcacagccugucccc

SEQ ID NO: 243846 - RNA, 32 nt, Homo Sapiens
agaauucaggcaugaggacacucuguacagga

SEQ ID NO: 243847 - RNA, 32 nt, Homo Sapiens
cucucaaaugcuuuaugcucauccgcacaaag

SEQ ID NO: 243848 - RNA, 32 nt, Homo Sapiens
uugcauguuucccaugggcacaaauuucagug

SEQ ID NO: 243849 - RNA, 32 nt, Homo Sapiens
ugccuguaaucccagcacuuuggggaggacaa

SEQ ID NO: 243850 - RNA, 32 nt, Homo Sapiens
guaugcacuguuuuucuguugcugauggaggc

SEQ ID NO: 243851 - RNA, 32 nt, Homo Sapiens
cccugccauugcccagacagucuaaggcccca

SEQ ID NO: 243852 - RNA, 32 nt, Homo Sapiens
cucugugugcuuguuaauaaaacuauauaaaa

SEQ ID NO: 243853 - RNA, 32 nt, Homo Sapiens
agcaacaggaagaugucuuuucuucauucagc

SEQ ID NO: 243854 - RNA, 32 nt, Homo Sapiens
ugacaauauugcuuuauacaguucuuguauuu

SEQ ID NO: 243855 - RNA, 32 nt, Homo Sapiens
gagcuacagugaugaauugacacaguggaguu

SEQ ID NO: 243856 - RNA, 32 nt, Homo Sapiens
uaguuaccgccgccgcgcgugacgucauagug

SEQ ID NO: 243857 - RNA, 32 nt, Homo Sapiens
uggugucagggugaggggcgccugcggucuug

SEQ ID NO: 243858 - RNA, 32 nt, Homo Sapiens
ucacucccugucaugacguccgcccucaccag

SEQ ID NO: 243859 - RNA, 32 nt, Homo Sapiens
gauauagaauuggcagaguggcagauguucac

SEQ ID NO: 243860 - RNA, 32 nt, Homo Sapiens
guagaucugcggccuggcggagaagucgggag

SEQ ID NO: 243861 - RNA, 32 nt, Homo Sapiens
ccacagaaaucaauggugauauuugagaaaga

SEQ ID NO: 243862 - RNA, 32 nt, Homo Sapiens
acagcacaaguaggaucagagcccaggugagc

SEQ ID NO: 243863 - RNA, 32 nt, Homo Sapiens
gugguggaaaauuucuaaauaaauucaacuau

SEQ ID NO: 243864 - RNA, 32 nt, Homo Sapiens
agauaggaccucugagaggggacuggcauggg

SEQ ID NO: 243865 - RNA, 32 nt, Homo Sapiens
cgcagcgcagcgcagccgcgggcgcucuccgg

SEQ ID NO: 243866 - RNA, 32 nt, Homo Sapiens
cauggauaccacacauuucucaucucauuggc

SEQ ID NO: 243867 - RNA, 32 nt, Homo Sapiens
gggauuuuuuaaaaguagcaaauaguuuaagg

SEQ ID NO: 243868 - RNA, 32 nt, Homo Sapiens
gguauuggcauacuccacacaucuguaccauu

SEQ ID NO: 243869 - RNA, 32 nt, Homo Sapiens
uauuguaacugguuuauauuauuuuccacaac

SEQ ID NO: 243870 - RNA, 32 nt, Homo Sapiens
guagggccacgcaggcaggggcgucaaggggu

SEQ ID NO: 243871 - RNA, 32 nt, Homo Sapiens
ggagcguccaggccugggucacgcucaaggaa

SEQ ID NO: 243872 - RNA, 32 nt, Homo Sapiens
cuggccagaugacggggugggaccccgguuag

SEQ ID NO: 243873 - RNA, 32 nt, Homo Sapiens
ccagucugaaugguccugggggcuggggcugg

SEQ ID NO: 243874 - RNA, 32 nt, Homo Sapiens
gcucggaugccccaggcagcccgggcacagug

SEQ ID NO: 243875 - RNA, 32 nt, Homo Sapiens
ucuuccuggaccugagucggccccacauggga

SEQ ID NO: 243876 - RNA, 32 nt, Homo Sapiens
uuauccaccagauaacaguguuuacccaugcg

SEQ ID NO: 243877 - RNA, 32 nt, Homo Sapiens
aggaaagcucacgauuggauuggaacuucuag

SEQ ID NO: 243878 - RNA, 32 nt, Homo Sapiens
uuacgggcugggcgcaguggcucacgccugua

SEQ ID NO: 243879 - RNA, 32 nt, Homo Sapiens
auuaaaucauaucuuuuguuuuucccccuccc

SEQ ID NO: 243880 - RNA, 32 nt, Homo Sapiens
cauggcuccacguucccggcgacgaaggcaca

SEQ ID NO: 243881 - RNA, 32 nt, Homo Sapiens
aaaauugugaucaaaagggcuaugggaagggc

SEQ ID NO: 243882 - RNA, 32 nt, Homo Sapiens
cacauccccccgccuucucccucaaccuuuuc

SEQ ID NO: 243883 - RNA, 32 nt, Homo Sapiens
acugaaaacugggggugggaguagggagcuag

SEQ ID NO: 243884 - RNA, 30 nt, Homo Sapiens
aacccgggagguggagguugcagugagcug

SEQ ID NO: 243885 - RNA, 30 nt, Homo Sapiens
aaccugggagguggagguugcagugagccg

SEQ ID NO: 243886 - RNA, 32 nt, Homo Sapiens
gguggaguccaugugugaaauggcaucuacca

SEQ ID NO: 243887 - RNA, 32 nt, Homo Sapiens
ggaccaggacccagccccguggcuccuugauu

SEQ ID NO: 243888 - RNA, 32 nt, Homo Sapiens
accauccccauccugagugacuacuaagcagc

SEQ ID NO: 243889 - RNA, 31 nt, Homo Sapiens
augucagugggacccauucagaguuuacaga

SEQ ID NO: 243890 - RNA, 32 nt, Homo Sapiens
uuuggauaauuuccucugauuauucaagucgu

SEQ ID NO: 243891 - RNA, 32 nt, Homo Sapiens
aaacuuccaccgaugaggcagguaggagauaa

SEQ ID NO: 243892 - RNA, 32 nt, Homo Sapiens
cuaggugcuggguacauaggucaucuauacac

SEQ ID NO: 243893 - RNA, 32 nt, Homo Sapiens
ccuuagaaacaccugauguggcuucaugaggu

SEQ ID NO: 243894 - RNA, 32 nt, Homo Sapiens
uagaauugauucaaaacuccauugaucgccug

SEQ ID NO: 243895 - RNA, 27 nt, Homo Sapiens
guucaauaaaguuuguguguuucauuu

SEQ ID NO: 243896 - RNA, 32 nt, Homo Sapiens
gguaggaccacucauggcccucuuccuuuggc

SEQ ID NO: 243897 - RNA, 32 nt, Homo Sapiens
gaaauauauuauuauuccuguuugaugugggu
